United States Patent Application Publication US 2005/0244851 A1 - sequence listing, part 90

SEQ ID NO: 3506390 - DNA, 25 bp, Homo sapien
tgtcactgtcaaaagcagcgtggca

SEQ ID NO: 3506391 - DNA, 25 bp, Homo sapien
gaagcattggcaccagcatcacgat

SEQ ID NO: 3506392 - DNA, 25 bp, Homo sapien
ggtcattgacatcgcgcaccgtgat

SEQ ID NO: 3506393 - DNA, 25 bp, Homo sapien
caaaggttggtgcatggtcattctc

SEQ ID NO: 3506394 - DNA, 25 bp, Homo sapien
catgcgttaactgaggaggtgagcc

SEQ ID NO: 3506395 - DNA, 25 bp, Homo sapien
ctaggatgcggtactgcaactgccc

SEQ ID NO: 3506396 - DNA, 25 bp, Homo sapien
gatcagaggcccgaagcatggtaag

SEQ ID NO: 3506397 - DNA, 25 bp, Homo sapien
tgttcctctcgatccagggcccgaa

SEQ ID NO: 3506398 - DNA, 25 bp, Homo sapien
tagagacgcctccataagtcacttg

SEQ ID NO: 3506399 - DNA, 25 bp, Homo sapien
gagaaaagctttcgctagagacgcc

SEQ ID NO: 3506400 - DNA, 25 bp, Homo sapien
cgaagagtcgtgagaacaccagtgt

SEQ ID NO: 3506401 - DNA, 25 bp, Homo sapien
gaaagtaggcgcctcgtcgttgacg

SEQ ID NO: 3506402 - DNA, 25 bp, Homo sapien
gctcagctcgttgttcgcggtccaa

SEQ ID NO: 3506403 - DNA, 25 bp, Homo sapien
tgttctcacgcaagaggacgctgta

SEQ ID NO: 3506404 - DNA, 25 bp, Homo sapien
gacgctgtactcctgctgctggaaa

SEQ ID NO: 3506405 - DNA, 25 bp, Homo sapien
ttctcatccgtgacgaagacgcgcg

SEQ ID NO: 3506406 - DNA, 25 bp, Homo sapien
tccgacgcgcggaaagtgtacagcg

SEQ ID NO: 3506407 - DNA, 25 bp, Homo sapien
agatgccagccgataggacacgcgt

SEQ ID NO: 3506408 - DNA, 25 bp, Homo sapien
tgctgtcaccgtcagcacgacaggc

SEQ ID NO: 3506409 - DNA, 25 bp, Homo sapien
tgtcagcacatagtggggccgctct

SEQ ID NO: 3506410 - DNA, 25 bp, Homo sapien
tggtcatgagcactcagtgtcagca

SEQ ID NO: 3506411 - DNA, 25 bp, Homo sapien
gctgccttggtcatgagcactcagt

SEQ ID NO: 3506412 - DNA, 25 bp, Homo sapien
ctggcacttcgaggagggctgcctt

SEQ ID NO: 3506413 - DNA, 25 bp, Homo sapien
cagttagcgtgtacaagatggtccc

SEQ ID NO: 3506414 - DNA, 25 bp, Homo sapien
tcatctggatccttcgcctgcagag

SEQ ID NO: 3506415 - DNA, 25 bp, Homo sapien
ttcccggaggcacgcggtctggtac

SEQ ID NO: 3506416 - DNA, 25 bp, Homo sapien
gcagagtcgtcaccagtgttcccgg

SEQ ID NO: 3506417 - DNA, 25 bp, Homo sapien
ggaggcagtctcttacctacaccta

SEQ ID NO: 3506418 - DNA, 25 bp, Homo sapien
ggacaaagtcctgccacttcacata

SEQ ID NO: 3506419 - DNA, 25 bp, Homo sapien
ctacagctctatggggagatcccca

SEQ ID NO: 3506420 - DNA, 25 bp, Homo sapien
ttctcaggacaaagtcctgccactt

SEQ ID NO: 3506421 - DNA, 25 bp, Homo sapien
caacatgcacagtgcctgtggtgct

SEQ ID NO: 3506422 - DNA, 25 bp, Homo sapien
ccagggtttggagtgtggtcacttc

SEQ ID NO: 3506423 - DNA, 25 bp, Homo sapien
tgcaacatgcacagtgcctgtggtg

SEQ ID NO: 3506424 - DNA, 25 bp, Homo sapien
ctgcaacatgcacagtgcctgtggt

SEQ ID NO: 3506425 - DNA, 25 bp, Homo sapien
caataccgtgtcttcaggtgcagga

SEQ ID NO: 3506426 - DNA, 25 bp, Homo sapien
tccagagggcgaagtgtttgcaaca

SEQ ID NO: 3506427 - DNA, 25 bp, Homo sapien
caagcagggtaaaggtgactcgact

SEQ ID NO: 3506428 - DNA, 25 bp, Homo sapien
tgtaggtcagacgtccattgggtcc

SEQ ID NO: 3506429 - DNA, 25 bp, Homo sapien
tgatagggaaagggtcacaggtgcc

SEQ ID NO: 3506430 - DNA, 25 bp, Homo sapien
ctgatagggaaagggtcacaggtgc

SEQ ID NO: 3506431 - DNA, 25 bp, Homo sapien
tctgacaccaagtgggtataaagct

SEQ ID NO: 3506432 - DNA, 25 bp, Homo sapien
caccaagtgggtataaagctaaatg

SEQ ID NO: 3506433 - DNA, 25 bp, Homo sapien
gacaccaagtgggtataaagctaaa

SEQ ID NO: 3506434 - DNA, 25 bp, Homo sapien
ggtctgacaccaagtgggtataaag

SEQ ID NO: 3506435 - DNA, 25 bp, Homo sapien
ggttgtgtgcctggactatgcccac

SEQ ID NO: 3506436 - DNA, 25 bp, Homo sapien
cactcgggcactgggttctgcctgt

SEQ ID NO: 3506437 - DNA, 25 bp, Homo sapien
gcaccacagaattggcccgtctggc

SEQ ID NO: 3506438 - DNA, 25 bp, Homo sapien
ggcacaatgctgatgtccactcggg

SEQ ID NO: 3506439 - DNA, 25 bp, Homo sapien
catactcccgtggataaaactgagg

SEQ ID NO: 3506440 - DNA, 25 bp, Homo sapien
gagagtcgcccatgggatccctggt

SEQ ID NO: 3506441 - DNA, 25 bp, Homo sapien
ccagccaggatatggtaggagagtc

SEQ ID NO: 3506442 - DNA, 25 bp, Homo sapien
tggactctgggcacttatactggca

SEQ ID NO: 3506443 - DNA, 25 bp, Homo sapien
aagtccagcacccaaggaataggag

SEQ ID NO: 3506444 - DNA, 25 bp, Homo sapien
tgaagtcaaagcttgagggcccctg

SEQ ID NO: 3506445 - DNA, 25 bp, Homo sapien
aaatgggccactatccgcgtctgtg

SEQ ID NO: 3506446 - DNA, 25 bp, Homo sapien
catcaccgctgtgggcatcaatgcg

SEQ ID NO: 3506447 - DNA, 25 bp, Homo sapien
gacatcagtgacgtgcagcacaaag

SEQ ID NO: 3506448 - DNA, 25 bp, Homo sapien
tgccttggtcaggatcccgagcagt

SEQ ID NO: 3506449 - DNA, 25 bp, Homo sapien
gcagccgtagtgataatgcctgagg

SEQ ID NO: 3506450 - DNA, 25 bp, Homo sapien
tataagtgacctgaccattggtgcc

SEQ ID NO: 3506451 - DNA, 25 bp, Homo sapien
cagagatgcgagcaacgagctgtcc

SEQ ID NO: 3506452 - DNA, 25 bp, Homo sapien
agatagcgcatagccctgggttccc

SEQ ID NO: 3506453 - DNA, 25 bp, Homo sapien
tgtcgccaatcagtgtacccgctgg

SEQ ID NO: 3506454 - DNA, 25 bp, Homo sapien
tagcgggtgccaaaagctgtatgct

SEQ ID NO: 3506455 - DNA, 25 bp, Homo sapien
cagcagcagcaatggtagcaggagg

SEQ ID NO: 3506456 - DNA, 25 bp, Homo sapien
agcagcaatggtagcaggaggtggg

SEQ ID NO: 3506457 - DNA, 25 bp, Homo sapien
agcagcagcagcaatggtagcagga

SEQ ID NO: 3506458 - DNA, 25 bp, Homo sapien
gcagcagcaatggtagcaggaggtg

SEQ ID NO: 3506459 - DNA, 25 bp, Homo sapien
ccagggcaggaaggcacaatgccca

SEQ ID NO: 3506460 - DNA, 25 bp, Homo sapien
aggaaggcacaatgcccagctcctt

SEQ ID NO: 3506461 - DNA, 25 bp, Homo sapien
gggcaggaaggcacaatgcccagct

SEQ ID NO: 3506462 - DNA, 25 bp, Homo sapien
ggaaggcacaatgcccagctccttc

SEQ ID NO: 3506463 - DNA, 25 bp, Homo sapien
cagactttgggtcaggtcccactgg

SEQ ID NO: 3506464 - DNA, 25 bp, Homo sapien
tcagactttgggtcaggtcccactg

SEQ ID NO: 3506465 - DNA, 25 bp, Homo sapien
gttccaaactcgaactccagactct

SEQ ID NO: 3506466 - DNA, 25 bp, Homo sapien
ggcactcgtggtcagctctgcggct

SEQ ID NO: 3506467 - DNA, 25 bp, Homo sapien
cgagaccgtctcatgctcgctccag

SEQ ID NO: 3506468 - DNA, 25 bp, Homo sapien
gcatgctctcgcacatgctgccggg

SEQ ID NO: 3506469 - DNA, 25 bp, Homo sapien
gaggaggggcgccacaaaaggtaga

SEQ ID NO: 3506470 - DNA, 25 bp, Homo sapien
aggaggggcgccacaaaaggtagat

SEQ ID NO: 3506471 - DNA, 25 bp, Homo sapien
ggaggggcgccacaaaaggtagatg

SEQ ID NO: 3506472 - DNA, 25 bp, Homo sapien
ggtgctggggcgccgtccggccgcg

SEQ ID NO: 3506473 - DNA, 25 bp, Homo sapien
tggggcgccgtccggccgcggtcag

SEQ ID NO: 3506474 - DNA, 25 bp, Homo sapien
tgaggccgcgcatcgtccgcagtcg

SEQ ID NO: 3506475 - DNA, 25 bp, Homo sapien
ggcctgaggccgcgcatcgtccgca

SEQ ID NO: 3506476 - DNA, 25 bp, Homo sapien
gaggcccgcgatcccctccgggcag

SEQ ID NO: 3506477 - DNA, 25 bp, Homo sapien
ggccgtcgatcggtccgtccgctga

SEQ ID NO: 3506478 - DNA, 25 bp, Homo sapien
gcgcccttggccgtcgatcggtccg

SEQ ID NO: 3506479 - DNA, 25 bp, Homo sapien
agccgccccgccgaggatgcgagct

SEQ ID NO: 3506480 - DNA, 25 bp, Homo sapien
tactccaccgtagagagacaggaag

SEQ ID NO: 3506481 - DNA, 25 bp, Homo sapien
tgtcagaagctaacacctagtgtcc

SEQ ID NO: 3506482 - DNA, 25 bp, Homo sapien
tcaggagcccactgatgcagtgaga

SEQ ID NO: 3506483 - DNA, 25 bp, Homo sapien
tgaccttggcaagtgcttctcagct

SEQ ID NO: 3506484 - DNA, 25 bp, Homo sapien
gcatgtacaacttaaacatagacac

SEQ ID NO: 3506485 - DNA, 25 bp, Homo sapien
tcctaaaattagtacaggacaacaa

SEQ ID NO: 3506486 - DNA, 25 bp, Homo sapien
tatggtcatgtggtcaactgatctt

SEQ ID NO: 3506487 - DNA, 25 bp, Homo sapien
caaactacattcaaagttacagtaa

SEQ ID NO: 3506488 - DNA, 25 bp, Homo sapien
ggcctgagcccatttggacggtgat

SEQ ID NO: 3506489 - DNA, 25 bp, Homo sapien
gcaactagttaggtgtatgcccaca

SEQ ID NO: 3506490 - DNA, 25 bp, Homo sapien
tcaagaatgagtcccaatctctggc

SEQ ID NO: 3506491 - DNA, 25 bp, Homo sapien
gaagggatcagttaagtagacaggc

SEQ ID NO: 3506492 - DNA, 25 bp, Homo sapien
tcttactagggagcaagttgactgc

SEQ ID NO: 3506493 - DNA, 25 bp, Homo sapien
tgatgagtagatgcctgaacaagga

SEQ ID NO: 3506494 - DNA, 25 bp, Homo sapien
gaaacatagagcacctcagctgacg

SEQ ID NO: 3506495 - DNA, 25 bp, Homo sapien
gatcagattcccgtcagtacagcca

SEQ ID NO: 3506496 - DNA, 25 bp, Homo sapien
ggagcagtccactagttgaagaagt

SEQ ID NO: 3506497 - DNA, 25 bp, Homo sapien
ccgcacccggcagtaaaattcttga

SEQ ID NO: 3506498 - DNA, 25 bp, Homo sapien
gtttggaacgcattaaagaggtgcc

SEQ ID NO: 3506499 - DNA, 25 bp, Homo sapien
ccaagacggtgggaacctttgagag

SEQ ID NO: 3506500 - DNA, 25 bp, Homo sapien
gctgggaactagcagatgctcaaaa

SEQ ID NO: 3506501 - DNA, 25 bp, Homo sapien
ggagcccagccacaatccatctatt

SEQ ID NO: 3506502 - DNA, 25 bp, Homo sapien
acctagctagggtggatattcatgc

SEQ ID NO: 3506503 - DNA, 25 bp, Homo sapien
tctgcctaaattgatgctgggaact

SEQ ID NO: 3506504 - DNA, 25 bp, Homo sapien
tgctatcaagtgtttggaccaagac

SEQ ID NO: 3506505 - DNA, 25 bp, Homo sapien
gatatggcaattatcaggcactgct

SEQ ID NO: 3506506 - DNA, 25 bp, Homo sapien
tactaaagcctctgaacccaaggga

SEQ ID NO: 3506507 - DNA, 25 bp, Homo sapien
tgggccaaatacactcagaagatag

SEQ ID NO: 3506508 - DNA, 25 bp, Homo sapien
ggaaggagcttatcctggagcccaa

SEQ ID NO: 3506509 - DNA, 25 bp, Homo sapien
ttcctaatccttctctcgcatagac

SEQ ID NO: 3506510 - DNA, 25 bp, Homo sapien
gaggccagatttgacaacaataaaa

SEQ ID NO: 3506511 - DNA, 25 bp, Homo sapien
ctgaagccggatttcccttttctgg

SEQ ID NO: 3506512 - DNA, 25 bp, Homo sapien
tcatgggtactgattaagggctgca

SEQ ID NO: 3506513 - DNA, 25 bp, Homo sapien
gactgattgcagtatcccctgaagg

SEQ ID NO: 3506514 - DNA, 25 bp, Homo sapien
tgaaggttcgcagggtactagattg

SEQ ID NO: 3506515 - DNA, 25 bp, Homo sapien
tctattgtgcaaagagagggtcatc

SEQ ID NO: 3506516 - DNA, 25 bp, Homo sapien
tgtgggagctgtggttgcttgcttc

SEQ ID NO: 3506517 - DNA, 25 bp, Homo sapien
gtgggagctgtggttgcttgcttcc

SEQ ID NO: 3506518 - DNA, 25 bp, Homo sapien
gtgtgggagctgtggttgcttgctt

SEQ ID NO: 3506519 - DNA, 25 bp, Homo sapien
ctgcagcagctggtttaggagtgta

SEQ ID NO: 3506520 - DNA, 25 bp, Homo sapien
tttaggagtgtaaggtggctgtctc

SEQ ID NO: 3506521 - DNA, 25 bp, Homo sapien
ggctgtctctgcgaggcagaggcag

SEQ ID NO: 3506522 - DNA, 25 bp, Homo sapien
tgaggtcctgccgcaaaccctgcag

SEQ ID NO: 3506523 - DNA, 25 bp, Homo sapien
tcttggcccgatccaaactccgatt

SEQ ID NO: 3506524 - DNA, 25 bp, Homo sapien
cagtttgatctttgtaccgaggggc

SEQ ID NO: 3506525 - DNA, 25 bp, Homo sapien
ccgaggggccagtacttgaaacagc

SEQ ID NO: 3506526 - DNA, 25 bp, Homo sapien
ctgcagcattcttgtgtagccccca

SEQ ID NO: 3506527 - DNA, 25 bp, Homo sapien
gattttgaaggcagataggtcgcac

SEQ ID NO: 3506528 - DNA, 25 bp, Homo sapien
cattcccaaaggtaaggtccatcca

SEQ ID NO: 3506529 - DNA, 25 bp, Homo sapien
taatttagttagcagcactggccca

SEQ ID NO: 3506530 - DNA, 25 bp, Homo sapien
cagaggtatattcacatcgacttca

SEQ ID NO: 3506531 - DNA, 25 bp, Homo sapien
ccatgcgcatggctcgttcgttagt

SEQ ID NO: 3506532 - DNA, 25 bp, Homo sapien
catggctcgttcgttagtgtctccc

SEQ ID NO: 3506533 - DNA, 25 bp, Homo sapien
ctcgttcgttagtgtctcccagctt

SEQ ID NO: 3506534 - DNA, 25 bp, Homo sapien
tcagccatgcgcatggctcgttcgt

SEQ ID NO: 3506535 - DNA, 25 bp, Homo sapien
gaccagacccgcagagtggacaaga

SEQ ID NO: 3506536 - DNA, 25 bp, Homo sapien
tgaggacataacatcacggatccaa

SEQ ID NO: 3506537 - DNA, 25 bp, Homo sapien
gcaatccattctttccactagccaa

SEQ ID NO: 3506538 - DNA, 25 bp, Homo sapien
taatttctctaatgccggaaggcaa

SEQ ID NO: 3506539 - DNA, 25 bp, Homo sapien
catggtgcctcgatgcgttcgtgcc

SEQ ID NO: 3506540 - DNA, 25 bp, Homo sapien
tacggcgaaatacgcggccatggga

SEQ ID NO: 3506541 - DNA, 25 bp, Homo sapien
catgggagatcgctgcagcgaccga

SEQ ID NO: 3506542 - DNA, 25 bp, Homo sapien
tgtgagcaagttccgcaacagatgg

SEQ ID NO: 3506543 - DNA, 25 bp, Homo sapien
ttctgcccgccccttggaggccgga

SEQ ID NO: 3506544 - DNA, 25 bp, Homo sapien
tctgcccgccccttggaggccggaa

SEQ ID NO: 3506545 - DNA, 25 bp, Homo sapien
ccaacttctgcccgccccttggagg

SEQ ID NO: 3506546 - DNA, 25 bp, Homo sapien
acttctgcccgccccttggaggccg

SEQ ID NO: 3506547 - DNA, 25 bp, Homo sapien
cagtagctctggctcctctccattg

SEQ ID NO: 3506548 - DNA, 25 bp, Homo sapien
tccagtagctctggctcctctccat

SEQ ID NO: 3506549 - DNA, 25 bp, Homo sapien
ccagtagctctggctcctctccatt

SEQ ID NO: 3506550 - DNA, 25 bp, Homo sapien
ttccagtagctctggctcctctcca

SEQ ID NO: 3506551 - DNA, 25 bp, Homo sapien
ggctggcctgtcagctgaatccagg

SEQ ID NO: 3506552 - DNA, 25 bp, Homo sapien
ggcctgtcagctgaatccaggtacc

SEQ ID NO: 3506553 - DNA, 25 bp, Homo sapien
agcaggctggcctgtcagctgaatc

SEQ ID NO: 3506554 - DNA, 25 bp, Homo sapien
caagtgtgcttctcttggtgcagca

SEQ ID NO: 3506555 - DNA, 25 bp, Homo sapien
ctcttccagtttttgccatggtaac

SEQ ID NO: 3506556 - DNA, 25 bp, Homo sapien
aacattatagactcttccagttttt

SEQ ID NO: 3506557 - DNA, 25 bp, Homo sapien
gcatgctgagtaacattatagactc

SEQ ID NO: 3506558 - DNA, 25 bp, Homo sapien
cttccagtttttgccatggtaacac

SEQ ID NO: 3506559 - DNA, 25 bp, Homo sapien
cagccaaaaggaagttaaagcaaca

SEQ ID NO: 3506560 - DNA, 25 bp, Homo sapien
tatgttgttcaaggcttattgtggc

SEQ ID NO: 3506561 - DNA, 25 bp, Homo sapien
tgtgtttgattagccttctttgaaa

SEQ ID NO: 3506562 - DNA, 25 bp, Homo sapien
tatagactcccatgcatgtggccaa

SEQ ID NO: 3506563 - DNA, 25 bp, Homo sapien
gatagtttggaagggatactcttgg

SEQ ID NO: 3506564 - DNA, 25 bp, Homo sapien
tactcttggagttcttggttaggga

SEQ ID NO: 3506565 - DNA, 25 bp, Homo sapien
catttgagattctcggttggctctc

SEQ ID NO: 3506566 - DNA, 25 bp, Homo sapien
gagtcttggtttgggagacttctca

SEQ ID NO: 3506567 - DNA, 25 bp, Homo sapien
aatctcttacttgtcgggcttttca

SEQ ID NO: 3506568 - DNA, 25 bp, Homo sapien
cgtaattaaaatctcttacttgtcg

SEQ ID NO: 3506569 - DNA, 25 bp, Homo sapien
catgtgattgagactactggagaaa

SEQ ID NO: 3506570 - DNA, 25 bp, Homo sapien
cattgtaacatgtgattgagactac

SEQ ID NO: 3506571 - DNA, 25 bp, Homo sapien
tcagtatgcgcctgagatcccaggg

SEQ ID NO: 3506572 - DNA, 25 bp, Homo sapien
tgctgataccactgcagagaacccc

SEQ ID NO: 3506573 - DNA, 25 bp, Homo sapien
gatctgagtattctgcctgagacag

SEQ ID NO: 3506574 - DNA, 25 bp, Homo sapien
tctagaaatagcctaggaactggct

SEQ ID NO: 3506575 - DNA, 25 bp, Homo sapien
ttttatgtttgcttctaccacttta

SEQ ID NO: 3506576 - DNA, 25 bp, Homo sapien
agaaattttatgtttgcttctacca

SEQ ID NO: 3506577 - DNA, 25 bp, Homo sapien
tatttacttagagacagaatctggc

SEQ ID NO: 3506578 - DNA, 25 bp, Homo sapien
ttatttacttagagacagaatctgg

SEQ ID NO: 3506579 - DNA, 25 bp, Homo sapien
tagggcttctccttagtctgtcgga

SEQ ID NO: 3506580 - DNA, 25 bp, Homo sapien
tgctggaccaatttgcaggctggag

SEQ ID NO: 3506581 - DNA, 25 bp, Homo sapien
gaaacccagtggattgtcataggcc

SEQ ID NO: 3506582 - DNA, 25 bp, Homo sapien
tcaacaataaggtagcgtagactgc

SEQ ID NO: 3506583 - DNA, 25 bp, Homo sapien
gacatctaatcagttatctctcaat

SEQ ID NO: 3506584 - DNA, 25 bp, Homo sapien
tgcatttccatgtcacgaattatat

SEQ ID NO: 3506585 - DNA, 25 bp, Homo sapien
caactggctgagactaacatttata

SEQ ID NO: 3506586 - DNA, 25 bp, Homo sapien
cccatgtctgtgaagatatccctga

SEQ ID NO: 3506587 - DNA, 25 bp, Homo sapien
tctggatgacaggattttgggtgtc

SEQ ID NO: 3506588 - DNA, 25 bp, Homo sapien
agtggttctccaccggggcaatgca

SEQ ID NO: 3506589 - DNA, 25 bp, Homo sapien
ccaccggggcaatgcaaatgtttca

SEQ ID NO: 3506590 - DNA, 25 bp, Homo sapien
tcacagtggttctccaccggggcaa

SEQ ID NO: 3506591 - DNA, 25 bp, Homo sapien
gaccaacaaagcatcctgtgtcagg

SEQ ID NO: 3506592 - DNA, 25 bp, Homo sapien
ttccctgaacctggtggagagctct

SEQ ID NO: 3506593 - DNA, 25 bp, Homo sapien
tgatttccccaagagcagacggtag

SEQ ID NO: 3506594 - DNA, 25 bp, Homo sapien
gagctctgtagagtgaagaccaaca

SEQ ID NO: 3506595 - DNA, 25 bp, Homo sapien
gacaactgcaggctggcattctcta

SEQ ID NO: 3506596 - DNA, 25 bp, Homo sapien
caacatttggcttatacctgcttct

SEQ ID NO: 3506597 - DNA, 25 bp, Homo sapien
actctcaacatttggcttatacctg

SEQ ID NO: 3506598 - DNA, 25 bp, Homo sapien
ggtactaagcctgggtgatgacaac

SEQ ID NO: 3506599 - DNA, 25 bp, Homo sapien
actatagtcaccctccagaactata

SEQ ID NO: 3506600 - DNA, 25 bp, Homo sapien
tagtcaccctccagaactatagaac

SEQ ID NO: 3506601 - DNA, 25 bp, Homo sapien
ccagaactatagaaccctagaactt

SEQ ID NO: 3506602 - DNA, 25 bp, Homo sapien
accctccagaactatagaaccctag

SEQ ID NO: 3506603 - DNA, 25 bp, Homo sapien
taattgaacagtgagcagtttgtgg

SEQ ID NO: 3506604 - DNA, 25 bp, Homo sapien
atggtaattgaacagtgagcagttt

SEQ ID NO: 3506605 - DNA, 25 bp, Homo sapien
ggtaattgaacagtgagcagtttgt

SEQ ID NO: 3506606 - DNA, 25 bp, Homo sapien
tggtaattgaacagtgagcagtttg

SEQ ID NO: 3506607 - DNA, 25 bp, Homo sapien
tcacgctcctagtccgttttcatgt

SEQ ID NO: 3506608 - DNA, 25 bp, Homo sapien
ttagataacagtagcaaaattagtg

SEQ ID NO: 3506609 - DNA, 25 bp, Homo sapien
gaaataatggtgtcagctgtctctc

SEQ ID NO: 3506610 - DNA, 25 bp, Homo sapien
tgccttttagataacagtagcaaaa

SEQ ID NO: 3506611 - DNA, 25 bp, Homo sapien
tcatttgacctgacattgagaatag

SEQ ID NO: 3506612 - DNA, 25 bp, Homo sapien
tgacattgagaataggcttgaagcc

SEQ ID NO: 3506613 - DNA, 25 bp, Homo sapien
tttgacctgacattgagaataggct

SEQ ID NO: 3506614 - DNA, 25 bp, Homo sapien
gacctgacattgagaataggcttga

SEQ ID NO: 3506615 - DNA, 25 bp, Homo sapien
taattgaaccttgtccacagacttc

SEQ ID NO: 3506616 - DNA, 25 bp, Homo sapien
taaatattgctatgcttgggactca

SEQ ID NO: 3506617 - DNA, 25 bp, Homo sapien
tcttagcatgcgcagggaattgcca

SEQ ID NO: 3506618 - DNA, 25 bp, Homo sapien
tggattgttcaggtacactgcctct

SEQ ID NO: 3506619 - DNA, 25 bp, Homo sapien
gtcttcaagcacatcttgctttgtg

SEQ ID NO: 3506620 - DNA, 25 bp, Homo sapien
agtcttcaagcacatcttgctttgt

SEQ ID NO: 3506621 - DNA, 25 bp, Homo sapien
ggcataatcccctcctgcttgtcga

SEQ ID NO: 3506622 - DNA, 25 bp, Homo sapien
cccttcgtggaaagatcaagttgca

SEQ ID NO: 3506623 - DNA, 25 bp, Homo sapien
tcccatatagtagtggagactgcag

SEQ ID NO: 3506624 - DNA, 25 bp, Homo sapien
gactgcaggagtgagcttataccac

SEQ ID NO: 3506625 - DNA, 25 bp, Homo sapien
tcttgaaacaatgtagtcagtagtc

SEQ ID NO: 3506626 - DNA, 25 bp, Homo sapien
tcttctgagtagaggcagatttcac

SEQ ID NO: 3506627 - DNA, 25 bp, Homo sapien
tgtctttagaatctcatggaaataa

SEQ ID NO: 3506628 - DNA, 25 bp, Homo sapien
aataatttggattgtaaccacactg

SEQ ID NO: 3506629 - DNA, 25 bp, Homo sapien
caatgtcaggctctgtaacttgcgg

SEQ ID NO: 3506630 - DNA, 25 bp, Homo sapien
gaatcagtattttgctacatgggcc

SEQ ID NO: 3506631 - DNA, 25 bp, Homo sapien
tgtcagtagacccacgacattcgtc

SEQ ID NO: 3506632 - DNA, 25 bp, Homo sapien
cttgcgggagagttgtggatacatc

SEQ ID NO: 3506633 - DNA, 25 bp, Homo sapien
aaaataaagttctcgttcatcaggc

SEQ ID NO: 3506634 - DNA, 25 bp, Homo sapien
gccatgacttcttgggtgttcctga

SEQ ID NO: 3506635 - DNA, 25 bp, Homo sapien
ctggttctgcaagcccagcacgtga

SEQ ID NO: 3506636 - DNA, 25 bp, Homo sapien
agctcccaggtccagtggttataca

SEQ ID NO: 3506637 - DNA, 25 bp, Homo sapien
tcatcgagcaagcagatcaatggcc

SEQ ID NO: 3506638 - DNA, 25 bp, Homo sapien
cacaattgaggtagagacacagcac

SEQ ID NO: 3506639 - DNA, 25 bp, Homo sapien
tcactgaagcaggttacgtctaagc

SEQ ID NO: 3506640 - DNA, 25 bp, Homo sapien
ctttgcaggcatatcagggagtgac

SEQ ID NO: 3506641 - DNA, 25 bp, Homo sapien
tgtaatttgacggagagaccagaga

SEQ ID NO: 3506642 - DNA, 25 bp, Homo sapien
gaagtacagggattaggcaccaaaa

SEQ ID NO: 3506643 - DNA, 25 bp, Homo sapien
cctgatctgaagcatttggatgtac

SEQ ID NO: 3506644 - DNA, 25 bp, Homo sapien
gttttcatatgggtcaaaagcctca

SEQ ID NO: 3506645 - DNA, 25 bp, Homo sapien
gctgggctgggtgttatacacagac

SEQ ID NO: 3506646 - DNA, 25 bp, Homo sapien
gatgagatggaaattagctttgctc

SEQ ID NO: 3506647 - DNA, 25 bp, Homo sapien
aatgttctagacctagatgctggag

SEQ ID NO: 3506648 - DNA, 25 bp, Homo sapien
cacagacgtcttatagatgagatgg

SEQ ID NO: 3506649 - DNA, 25 bp, Homo sapien
ctttccatagaagagactttgcttg

SEQ ID NO: 3506650 - DNA, 25 bp, Homo sapien
caatgattgtcccatgtgatgtctc

SEQ ID NO: 3506651 - DNA, 25 bp, Homo sapien
gagccaagctgacctcataagtgga

SEQ ID NO: 3506652 - DNA, 25 bp, Homo sapien
caggaatgcctgagccctatagctg

SEQ ID NO: 3506653 - DNA, 25 bp, Homo sapien
tccaactgtggctgtcagacctgtg

SEQ ID NO: 3506654 - DNA, 25 bp, Homo sapien
gggactcagatttgacctttacttc

SEQ ID NO: 3506655 - DNA, 25 bp, Homo sapien
ctcaattaattgagaaaattgggaa

SEQ ID NO: 3506656 - DNA, 25 bp, Homo sapien
tgctctgaatctgactggaagatcc

SEQ ID NO: 3506657 - DNA, 25 bp, Homo sapien
tttacttccatgaggttattctggg

SEQ ID NO: 3506658 - DNA, 25 bp, Homo sapien
tctgtagatgtgaggatccagaagg

SEQ ID NO: 3506659 - DNA, 25 bp, Homo sapien
tgaggaaagtttgtcactctgtaga

SEQ ID NO: 3506660 - DNA, 25 bp, Homo sapien
gatgaagtgagcctgaggaaagttt

SEQ ID NO: 3506661 - DNA, 25 bp, Homo sapien
ggaaagtttgtcactctgtagatgt

SEQ ID NO: 3506662 - DNA, 25 bp, Homo sapien
caaaagttgatggtgtttactagaa

SEQ ID NO: 3506663 - DNA, 25 bp, Homo sapien
tgcaaaagttgatggtgtttactag

SEQ ID NO: 3506664 - DNA, 25 bp, Homo sapien
tttgcaaaagttgatggtgtttact

SEQ ID NO: 3506665 - DNA, 25 bp, Homo sapien
aagttgatggtgtttactagaaaat

SEQ ID NO: 3506666 - DNA, 25 bp, Homo sapien
aatctgtgagacatatattaatcca

SEQ ID NO: 3506667 - DNA, 25 bp, Homo sapien
tattaatccaagtgtcataactttt

SEQ ID NO: 3506668 - DNA, 25 bp, Homo sapien
gacatatattaatccaagtgtcata

SEQ ID NO: 3506669 - DNA, 25 bp, Homo sapien
ctaatctgtgagacatatattaatc

SEQ ID NO: 3506670 - DNA, 25 bp, Homo sapien
ttacatcctctagaaaaaccctggc

SEQ ID NO: 3506671 - DNA, 25 bp, Homo sapien
tagtcagagcagtgtagctgtcttt

SEQ ID NO: 3506672 - DNA, 25 bp, Homo sapien
tacatcctctagaaaaaccctggcc

SEQ ID NO: 3506673 - DNA, 25 bp, Homo sapien
tgtagctgtctttcaggaagttagc

SEQ ID NO: 3506674 - DNA, 25 bp, Homo sapien
ctgtggctagagaggataatgtccc

SEQ ID NO: 3506675 - DNA, 25 bp, Homo sapien
gcaccaactgaagcccgcggtcaat

SEQ ID NO: 3506676 - DNA, 25 bp, Homo sapien
ctgaagcccgcggtcaatgacacac

SEQ ID NO: 3506677 - DNA, 25 bp, Homo sapien
gctagagaggataatgtcccaaact

SEQ ID NO: 3506678 - DNA, 25 bp, Homo sapien
ggtttgattgctggcaatgaggcca

SEQ ID NO: 3506679 - DNA, 25 bp, Homo sapien
aggtttgattgctggcaatgaggcc

SEQ ID NO: 3506680 - DNA, 25 bp, Homo sapien
caggtttgattgctggcaatgaggc

SEQ ID NO: 3506681 - DNA, 25 bp, Homo sapien
catgagagccaaacctgtggaagaa

SEQ ID NO: 3506682 - DNA, 25 bp, Homo sapien
tccgtgcaataaccctctgaaatgg

SEQ ID NO: 3506683 - DNA, 25 bp, Homo sapien
taactggagctgatcaatgggaaag

SEQ ID NO: 3506684 - DNA, 25 bp, Homo sapien
gacagcaggcttggataactggagc

SEQ ID NO: 3506685 - DNA, 25 bp, Homo sapien
caatttccgtccttggctgaagtag

SEQ ID NO: 3506686 - DNA, 25 bp, Homo sapien
tgctgaggacccaaaagtaagaact

SEQ ID NO: 3506687 - DNA, 25 bp, Homo sapien
tgaagtagttaaacgaaagcccagc

SEQ ID NO: 3506688 - DNA, 25 bp, Homo sapien
tccaaaccagcttctagactaaacc

SEQ ID NO: 3506689 - DNA, 25 bp, Homo sapien
taaattccctggagggccagccctc

SEQ ID NO: 3506690 - DNA, 25 bp, Homo sapien
tctcttctctgtcaggcccctttgg

SEQ ID NO: 3506691 - DNA, 25 bp, Homo sapien
tggtggctggctttgtaaattccct

SEQ ID NO: 3506692 - DNA, 25 bp, Homo sapien
tctctgtcaggcccctttggtggct

SEQ ID NO: 3506693 - DNA, 25 bp, Homo sapien
catgaggttgagttgtctctgcagg

SEQ ID NO: 3506694 - DNA, 25 bp, Homo sapien
ggttttgcctgtggcacagtgtcca

SEQ ID NO: 3506695 - DNA, 25 bp, Homo sapien
ttctgtcagcaagtccctcagctcc

SEQ ID NO: 3506696 - DNA, 25 bp, Homo sapien
tcccttagaggctcttcaggggatg

SEQ ID NO: 3506697 - DNA, 25 bp, Homo sapien
aaagactttttgagtgtgacagatt

SEQ ID NO: 3506698 - DNA, 25 bp, Homo sapien
agactttttgagtgtgacagattaa

SEQ ID NO: 3506699 - DNA, 25 bp, Homo sapien
ccatggatgttgtgtctgggatttc

SEQ ID NO: 3506700 - DNA, 25 bp, Homo sapien
ttaagcagctttctcccatggatgt

SEQ ID NO: 3506701 - DNA, 25 bp, Homo sapien
gggtaaccagtactcaacatccagg

SEQ ID NO: 3506702 - DNA, 25 bp, Homo sapien
ctcagcatctcttggaggtcttgcc

SEQ ID NO: 3506703 - DNA, 25 bp, Homo sapien
tgcagcttgggtaaccagtactcaa

SEQ ID NO: 3506704 - DNA, 25 bp, Homo sapien
catcaggggtgtgctctcctgtggc

SEQ ID NO: 3506705 - DNA, 25 bp, Homo sapien
caaccccataaacaagtgggagaag

SEQ ID NO: 3506706 - DNA, 25 bp, Homo sapien
cagaatctacaaagaactcaaacaa

SEQ ID NO: 3506707 - DNA, 25 bp, Homo sapien
ctcatctgacaaaggtttactatcc

SEQ ID NO: 3506708 - DNA, 25 bp, Homo sapien
ccataaacaagtgggagaaggatat

SEQ ID NO: 3506709 - DNA, 25 bp, Homo sapien
catcaaaggtttgagcggtgctatg

SEQ ID NO: 3506710 - DNA, 25 bp, Homo sapien
ttggaggatgttgcaagaaggccat

SEQ ID NO: 3506711 - DNA, 25 bp, Homo sapien
cagaagtccaggcatagtgtagtta

SEQ ID NO: 3506712 - DNA, 25 bp, Homo sapien
gccttcctatgtgggattaatgctc

SEQ ID NO: 3506713 - DNA, 25 bp, Homo sapien
cgttaagacccctcataatgtggca

SEQ ID NO: 3506714 - DNA, 25 bp, Homo sapien
cccagggtggcatgatgtcgatctt

SEQ ID NO: 3506715 - DNA, 25 bp, Homo sapien
gaaaacatactcgaggcttcccata

SEQ ID NO: 3506716 - DNA, 25 bp, Homo sapien
taatgtggcagcaattaacctctgt

SEQ ID NO: 3506717 - DNA, 25 bp, Homo sapien
tccagagagacgtgcatggagagta

SEQ ID NO: 3506718 - DNA, 25 bp, Homo sapien
tgtcctgaggccaagatcctgtctt

SEQ ID NO: 3506719 - DNA, 25 bp, Homo sapien
cctgtcttcaggttgctccagagag

SEQ ID NO: 3506720 - DNA, 25 bp, Homo sapien
catggagagtaggttccttttctgg

SEQ ID NO: 3506721 - DNA, 25 bp, Homo sapien
acagctttgtgactgcctttgcaga

SEQ ID NO: 3506722 - DNA, 25 bp, Homo sapien
cctagtggtgagtcttttgggatgc

SEQ ID NO: 3506723 - DNA, 25 bp, Homo sapien
tattttttcaatggtgagccggtgg

SEQ ID NO: 3506724 - DNA, 25 bp, Homo sapien
gatagcaacgtgttacaaaagtgga

SEQ ID NO: 3506725 - DNA, 25 bp, Homo sapien
gatggcatacgaagcacagtgaata

SEQ ID NO: 3506726 - DNA, 25 bp, Homo sapien
gagttccggagctccatgatgtgtt

SEQ ID NO: 3506727 - DNA, 25 bp, Homo sapien
gatgtggccaccatgatccagcaga

SEQ ID NO: 3506728 - DNA, 25 bp, Homo sapien
tcctatagcaatcagggatgccagg

SEQ ID NO: 3506729 - DNA, 25 bp, Homo sapien
cactctagctttggattgttctagg

SEQ ID NO: 3506730 - DNA, 25 bp, Homo sapien
ttttctaaaggtgttcactctagct

SEQ ID NO: 3506731 - DNA, 25 bp, Homo sapien
aaggtgttcactctagctttggatt

SEQ ID NO: 3506732 - DNA, 25 bp, Homo sapien
tgttcactctagctttggattgttc

SEQ ID NO: 3506733 - DNA, 25 bp, Homo sapien
gatgacaaatgagtataaaagggct

SEQ ID NO: 3506734 - DNA, 25 bp, Homo sapien
gaattgtacctccttctttattggc

SEQ ID NO: 3506735 - DNA, 25 bp, Homo sapien
tgactcacgtgtctgacaaagaaaa

SEQ ID NO: 3506736 - DNA, 25 bp, Homo sapien
tattggcatgaataatcctgtttcc

SEQ ID NO: 3506737 - DNA, 25 bp, Homo sapien
tcgggtgacagtagggagctaaatt

SEQ ID NO: 3506738 - DNA, 25 bp, Homo sapien
gcaacagttggatccatatctggag

SEQ ID NO: 3506739 - DNA, 25 bp, Homo sapien
gcaataaagttagatcccacatctt

SEQ ID NO: 3506740 - DNA, 25 bp, Homo sapien
tactgacataccctgtatccatctc

SEQ ID NO: 3506741 - DNA, 25 bp, Homo sapien
tttaggccctaagaactccactgga

SEQ ID NO: 3506742 - DNA, 25 bp, Homo sapien
ctcctcttggactagttaaagaaag

SEQ ID NO: 3506743 - DNA, 25 bp, Homo sapien
cattttctagcttgcaacctattcc

SEQ ID NO: 3506744 - DNA, 25 bp, Homo sapien
tagaacacattgatcccaagtttaa

SEQ ID NO: 3506745 - DNA, 25 bp, Homo sapien
caaaagctgagagtgcctttggccg

SEQ ID NO: 3506746 - DNA, 25 bp, Homo sapien
gaaaaggccttatagcgtccagcag

SEQ ID NO: 3506747 - DNA, 25 bp, Homo sapien
gacctcttgattgcgcaggcagtaa

SEQ ID NO: 3506748 - DNA, 25 bp, Homo sapien
cagcagccgaaggaatgtgcatcac

SEQ ID NO: 3506749 - DNA, 25 bp, Homo sapien
actctcccactatggttccgccact

SEQ ID NO: 3506750 - DNA, 25 bp, Homo sapien
actcactctcccactatggttccgc

SEQ ID NO: 3506751 - DNA, 25 bp, Homo sapien
tcactctcccactatggttccgcca

SEQ ID NO: 3506752 - DNA, 25 bp, Homo sapien
tcccactatggttccgccactccat

SEQ ID NO: 3506753 - DNA, 25 bp, Homo sapien
taatgggcttatattggtcgaatac

SEQ ID NO: 3506754 - DNA, 25 bp, Homo sapien
tctggaaatgagctaaggcaaacat

SEQ ID NO: 3506755 - DNA, 25 bp, Homo sapien
cttcagtaggccacaacaagaaccc

SEQ ID NO: 3506756 - DNA, 25 bp, Homo sapien
ccacgtaaggagttcatgtaattaa

SEQ ID NO: 3506757 - DNA, 25 bp, Homo sapien
gaatctttgagatcagttacagaaa

SEQ ID NO: 3506758 - DNA, 25 bp, Homo sapien
tatttaggtgatgtaaaggagggac

SEQ ID NO: 3506759 - DNA, 25 bp, Homo sapien
gatcagttacagaaacagttccttc

SEQ ID NO: 3506760 - DNA, 25 bp, Homo sapien
gggagagagaatctttgagatcagt

SEQ ID NO: 3506761 - DNA, 25 bp, Homo sapien
aatgaggatagagtatcttccttta

SEQ ID NO: 3506762 - DNA, 25 bp, Homo sapien
gatgctggaagttgtactaagtatc

SEQ ID NO: 3506763 - DNA, 25 bp, Homo sapien
aatggatgctggatggcagaaagac

SEQ ID NO: 3506764 - DNA, 25 bp, Homo sapien
gactaagaattacaagatgctggaa

SEQ ID NO: 3506765 - DNA, 25 bp, Homo sapien
cagcctgtaccctcatcaatataac

SEQ ID NO: 3506766 - DNA, 25 bp, Homo sapien
cctccagcctgtaccctcatcaata

SEQ ID NO: 3506767 - DNA, 25 bp, Homo sapien
catcaatataactcccacttgtttt

SEQ ID NO: 3506768 - DNA, 25 bp, Homo sapien
tcatcaatataactcccacttgttt

SEQ ID NO: 3506769 - DNA, 25 bp, Homo sapien
tagcaacactacacaaggatggact

SEQ ID NO: 3506770 - DNA, 25 bp, Homo sapien
gctcatagatggcatggtgtccctg

SEQ ID NO: 3506771 - DNA, 25 bp, Homo sapien
tgtaagcttgctgaggacctcggca

SEQ ID NO: 3506772 - DNA, 25 bp, Homo sapien
gatctggttcctcaaaatagtgcgg

SEQ ID NO: 3506773 - DNA, 25 bp, Homo sapien
gaaggctgcaggctctaaggagcca

SEQ ID NO: 3506774 - DNA, 25 bp, Homo sapien
tccaagctgaccaggtggaagccct

SEQ ID NO: 3506775 - DNA, 25 bp, Homo sapien
gctcaatacaataaaggccctactg

SEQ ID NO: 3506776 - DNA, 25 bp, Homo sapien
agctgctgcaaagatgccagaagca

SEQ ID NO: 3506777 - DNA, 25 bp, Homo sapien
ttaaagccaaagcataatttactgc

SEQ ID NO: 3506778 - DNA, 25 bp, Homo sapien
taaagccaaagcataatttactgca

SEQ ID NO: 3506779 - DNA, 25 bp, Homo sapien
ttaataatatgttatagtgacctgg

SEQ ID NO: 3506780 - DNA, 25 bp, Homo sapien
gtgacctggacaaaactgattatta

SEQ ID NO: 3506781 - DNA, 25 bp, Homo sapien
ggcttcctcgacatccagcttggct

SEQ ID NO: 3506782 - DNA, 25 bp, Homo sapien
gaaatcccagcaagtgtttctgccc

SEQ ID NO: 3506783 - DNA, 25 bp, Homo sapien
tctagaggaactggcaagaacgctg

SEQ ID NO: 3506784 - DNA, 25 bp, Homo sapien
tagtgcattttacgcgtgaccaaga

SEQ ID NO: 3506785 - DNA, 25 bp, Homo sapien
catgaggcttctagttaaagtgcgg

SEQ ID NO: 3506786 - DNA, 25 bp, Homo sapien
acaaaggtctgctctattactcagg

SEQ ID NO: 3506787 - DNA, 25 bp, Homo sapien
gggttagggctagactcaaaataca

SEQ ID NO: 3506788 - DNA, 25 bp, Homo sapien
tttaatatgacgtaggcattcctga

SEQ ID NO: 3506789 - DNA, 25 bp, Homo sapien
tacatgcaactttaaagacaaggca

SEQ ID NO: 3506790 - DNA, 25 bp, Homo sapien
tactgggcatctacctttctaggca

SEQ ID NO: 3506791 - DNA, 25 bp, Homo sapien
tgttcttactaccaccctgtactgg

SEQ ID NO: 3506792 - DNA, 25 bp, Homo sapien
cctgtactggatactggcttgtcct

SEQ ID NO: 3506793 - DNA, 25 bp, Homo sapien
caatttctatttcaaggagcatgtc

SEQ ID NO: 3506794 - DNA, 25 bp, Homo sapien
tactgcctcggtagggtagcctcag

SEQ ID NO: 3506795 - DNA, 25 bp, Homo sapien
cctcagtatgaaggtggtgtctacc

SEQ ID NO: 3506796 - DNA, 25 bp, Homo sapien
ccaggtcatgatgttagggtaacgc

SEQ ID NO: 3506797 - DNA, 25 bp, Homo sapien
tacggccataggataccagaatcag

SEQ ID NO: 3506798 - DNA, 25 bp, Homo sapien
gaaaaagagaagtcgagctgcgcaa

SEQ ID NO: 3506799 - DNA, 25 bp, Homo sapien
cacagtgaccaggtagacacccaat

SEQ ID NO: 3506800 - DNA, 25 bp, Homo sapien
agctgctcggtgtgtggcccatcag

SEQ ID NO: 3506801 - DNA, 25 bp, Homo sapien
caataatacgataaatagcagctgc

SEQ ID NO: 3506802 - DNA, 25 bp, Homo sapien
gtaacattttactccaagttgcaga

SEQ ID NO: 3506803 - DNA, 25 bp, Homo sapien
taattactactgctgacaaagtcat

SEQ ID NO: 3506804 - DNA, 25 bp, Homo sapien
ggtgtgggttggttacttgcattca

SEQ ID NO: 3506805 - DNA, 25 bp, Homo sapien
ggtgggtctaataaccatcttcatt

SEQ ID NO: 3506806 - DNA, 25 bp, Homo sapien
ttgggttacaggaatccccaggaga

SEQ ID NO: 3506807 - DNA, 25 bp, Homo sapien
tgggttacaggaatccccaggagat

SEQ ID NO: 3506808 - DNA, 25 bp, Homo sapien
aaaaagacataattacaccctacat

SEQ ID NO: 3506809 - DNA, 25 bp, Homo sapien
ccctacataatctagtaacagagtc

SEQ ID NO: 3506810 - DNA, 25 bp, Homo sapien
caattcctaattggtcttcagacta

SEQ ID NO: 3506811 - DNA, 25 bp, Homo sapien
ctggattggtctgtgagtcaaagaa

SEQ ID NO: 3506812 - DNA, 25 bp, Homo sapien
cattgaatctgctcccagggtcaag

SEQ ID NO: 3506813 - DNA, 25 bp, Homo sapien
attgaatctgctcccagggtcaaga

SEQ ID NO: 3506814 - DNA, 25 bp, Homo sapien
tgttggttcacttcttggtaaagag

SEQ ID NO: 3506815 - DNA, 25 bp, Homo sapien
gcattgtccctcaagtgttggttca

SEQ ID NO: 3506816 - DNA, 25 bp, Homo sapien
gcagtgatgtcctatgaccggtatg

SEQ ID NO: 3506817 - DNA, 25 bp, Homo sapien
catttatctgctgaccgtgcttgga

SEQ ID NO: 3506818 - DNA, 25 bp, Homo sapien
tagttaattcagctgccatggcatg

SEQ ID NO: 3506819 - DNA, 25 bp, Homo sapien
gtgttctatacagcggtgactccaa

SEQ ID NO: 3506820 - DNA, 25 bp, Homo sapien
agtgcttctctcataggcagtgacc

SEQ ID NO: 3506821 - DNA, 25 bp, Homo sapien
tctgacttttagagctatggcaaca

SEQ ID NO: 3506822 - DNA, 25 bp, Homo sapien
gaaactgaatattgctgcatccatt

SEQ ID NO: 3506823 - DNA, 25 bp, Homo sapien
aaactgaatattgctgcatccattg

SEQ ID NO: 3506824 - DNA, 25 bp, Homo sapien
aggcagcgccggaagtatgacgctc

SEQ ID NO: 3506825 - DNA, 25 bp, Homo sapien
tagtttccccggacgggatgaggca

SEQ ID NO: 3506826 - DNA, 25 bp, Homo sapien
cagaaaggcgatttggactagtttc

SEQ ID NO: 3506827 - DNA, 25 bp, Homo sapien
gacgctcatttctttaagccactag

SEQ ID NO: 3506828 - DNA, 25 bp, Homo sapien
agttccaagtgtgcggcgtgggcgg

SEQ ID NO: 3506829 - DNA, 25 bp, Homo sapien
ggccagagttccaagtgtgcggcgt

SEQ ID NO: 3506830 - DNA, 25 bp, Homo sapien
ccagagttccaagtgtgcggcgtgg

SEQ ID NO: 3506831 - DNA, 25 bp, Homo sapien
cagagttccaagtgtgcggcgtggg

SEQ ID NO: 3506832 - DNA, 25 bp, Homo sapien
caatttatgaaactcggagccggca

SEQ ID NO: 3506833 - DNA, 25 bp, Homo sapien
tgcagcgtgattaccaacgccagct

SEQ ID NO: 3506834 - DNA, 25 bp, Homo sapien
ttcggcgaggtcagggattcctagt

SEQ ID NO: 3506835 - DNA, 25 bp, Homo sapien
caagagtgcgtcgaggttgttccgc

SEQ ID NO: 3506836 - DNA, 25 bp, Homo sapien
tgagaactggcgcttgtgagtgact

SEQ ID NO: 3506837 - DNA, 25 bp, Homo sapien
acgggtatcgttctcgtcagcgggc

SEQ ID NO: 3506838 - DNA, 25 bp, Homo sapien
gtccaagacagcgattccgcggctc

SEQ ID NO: 3506839 - DNA, 25 bp, Homo sapien
tgggaatcacgcttgagggcgtcca

SEQ ID NO: 3506840 - DNA, 25 bp, Homo sapien
tacctcagcttgcttgcagttaccc

SEQ ID NO: 3506841 - DNA, 25 bp, Homo sapien
ttgcagttacccagtttccacgctg

SEQ ID NO: 3506842 - DNA, 25 bp, Homo sapien
cgtgcagcttacctcagcttgcttg

SEQ ID NO: 3506843 - DNA, 25 bp, Homo sapien
tcagcttgcttgcagttacccagtt

SEQ ID NO: 3506844 - DNA, 25 bp, Homo sapien
ctgacgggagggatggaaacgtggg

SEQ ID NO: 3506845 - DNA, 25 bp, Homo sapien
cactgccttatgagtattaatttaa

SEQ ID NO: 3506846 - DNA, 25 bp, Homo sapien
gaaattcctatgcagagcccatact

SEQ ID NO: 3506847 - DNA, 25 bp, Homo sapien
tgtacctcgtgaatggctgagaatt

SEQ ID NO: 3506848 - DNA, 25 bp, Homo sapien
tccagatttggccataaggagctct

SEQ ID NO: 3506849 - DNA, 25 bp, Homo sapien
gcatctggacttggagaactgtaaa

SEQ ID NO: 3506850 - DNA, 25 bp, Homo sapien
gctttgacttcctagaggccaggta

SEQ ID NO: 3506851 - DNA, 25 bp, Homo sapien
tagaaagttgtatctggacatccct

SEQ ID NO: 3506852 - DNA, 25 bp, Homo sapien
ggccaggtacaatctctagctgtaa

SEQ ID NO: 3506853 - DNA, 25 bp, Homo sapien
gaattagatctcacagattgggtag

SEQ ID NO: 3506854 - DNA, 25 bp, Homo sapien
tttaccgacatctcctgtaaaggag

SEQ ID NO: 3506855 - DNA, 25 bp, Homo sapien
tacttgtagcagagactgtactgtc

SEQ ID NO: 3506856 - DNA, 25 bp, Homo sapien
gattgcttttgtgctatgaccagag

SEQ ID NO: 3506857 - DNA, 25 bp, Homo sapien
gattgtgtctggcaagtgtggaaat

SEQ ID NO: 3506858 - DNA, 25 bp, Homo sapien
caaaggtcgatatctaagctgaaac

SEQ ID NO: 3506859 - DNA, 25 bp, Homo sapien
tgtggaaatgttaggagagatgata

SEQ ID NO: 3506860 - DNA, 25 bp, Homo sapien
gagtgtagattaaccagattgtgtc

SEQ ID NO: 3506861 - DNA, 25 bp, Homo sapien
gcctctctgattgttcattacattc

SEQ ID NO: 3506862 - DNA, 25 bp, Homo sapien
aaatcaaatttaagcctgggcacag

SEQ ID NO: 3506863 - DNA, 25 bp, Homo sapien
tatgccatgtgctgattcttcctaa

SEQ ID NO: 3506864 - DNA, 25 bp, Homo sapien
ttggtgttgaatcactggatttgat

SEQ ID NO: 3506865 - DNA, 25 bp, Homo sapien
caaaattatatcctccttttcaaag

SEQ ID NO: 3506866 - DNA, 25 bp, Homo sapien
ccttttcaaagctttccagcctcat

SEQ ID NO: 3506867 - DNA, 25 bp, Homo sapien
ctccttttcaaagctttccagcctc

SEQ ID NO: 3506868 - DNA, 25 bp, Homo sapien
aattatatcctccttttcaaagctt

SEQ ID NO: 3506869 - DNA, 25 bp, Homo sapien
ttgtgtagtccccttcctgtgaatc

SEQ ID NO: 3506870 - DNA, 25 bp, Homo sapien
tggctctactggcatctccccgtga

SEQ ID NO: 3506871 - DNA, 25 bp, Homo sapien
tgtcaatttgtcagaacaccactgg

SEQ ID NO: 3506872 - DNA, 25 bp, Homo sapien
gaaccgcctcttggtgttcataacg

SEQ ID NO: 3506873 - DNA, 25 bp, Homo sapien
actgtactctgcaactcgccttgaa

SEQ ID NO: 3506874 - DNA, 25 bp, Homo sapien
gataagactcctatacaagaacagt

SEQ ID NO: 3506875 - DNA, 25 bp, Homo sapien
gaggacaccctactctgtatctggg

SEQ ID NO: 3506876 - DNA, 25 bp, Homo sapien
tgtcccggtatcacataacaatgta

SEQ ID NO: 3506877 - DNA, 25 bp, Homo sapien
aattatctttgctcttctccaatgt

SEQ ID NO: 3506878 - DNA, 25 bp, Homo sapien
catttggctttaatcatcttgatcc

SEQ ID NO: 3506879 - DNA, 25 bp, Homo sapien
tcacctggtctcacatttaagcaat

SEQ ID NO: 3506880 - DNA, 25 bp, Homo sapien
aaatgaagcattgaacgtgttttga

SEQ ID NO: 3506881 - DNA, 25 bp, Homo sapien
tgtatttttgcccaacttaatgagt

SEQ ID NO: 3506882 - DNA, 25 bp, Homo sapien
gattctctgttatgccactaaggac

SEQ ID NO: 3506883 - DNA, 25 bp, Homo sapien
tttcagggcaataagtttccaggtc

SEQ ID NO: 3506884 - DNA, 25 bp, Homo sapien
cagggttcatcgttgcacagagttc

SEQ ID NO: 3506885 - DNA, 25 bp, Homo sapien
tacagtatttcagagctccctgaag

SEQ ID NO: 3506886 - DNA, 25 bp, Homo sapien
tgtcgtttaacagttggccaaccag

SEQ ID NO: 3506887 - DNA, 25 bp, Homo sapien
tattaggtggcttttgtccataaac

SEQ ID NO: 3506888 - DNA, 25 bp, Homo sapien
gagttttaagttctatgtgtttcca

SEQ ID NO: 3506889 - DNA, 25 bp, Homo sapien
aattgaattctaccggccaaaactg

SEQ ID NO: 3506890 - DNA, 25 bp, Homo sapien
gaagcaaataattcttagtgggaga

SEQ ID NO: 3506891 - DNA, 25 bp, Homo sapien
cagcaggatttatagggtttaaagg

SEQ ID NO: 3506892 - DNA, 25 bp, Homo sapien
ctataaatgttgcttgggattactt

SEQ ID NO: 3506893 - DNA, 25 bp, Homo sapien
gatttccttaacagcaggatttata

SEQ ID NO: 3506894 - DNA, 25 bp, Homo sapien
ccaacatactgtggaagggcttcct

SEQ ID NO: 3506895 - DNA, 25 bp, Homo sapien
tcctgacactgggaacgatcttgct

SEQ ID NO: 3506896 - DNA, 25 bp, Homo sapien
cataccctggtacttgtgtggagag

SEQ ID NO: 3506897 - DNA, 25 bp, Homo sapien
tgatgaaagtgaactccggagctct

SEQ ID NO: 3506898 - DNA, 25 bp, Homo sapien
tattccctatgagacgggataactt

SEQ ID NO: 3506899 - DNA, 25 bp, Homo sapien
ctattccctatgagacgggataact

SEQ ID NO: 3506900 - DNA, 25 bp, Homo sapien
tcccacatgacctccctgtagagtc

SEQ ID NO: 3506901 - DNA, 25 bp, Homo sapien
catgacctccctgtagagtcttttt

SEQ ID NO: 3506902 - DNA, 25 bp, Homo sapien
gttctcccacatgacctccctgtag

SEQ ID NO: 3506903 - DNA, 25 bp, Homo sapien
gtagttctcccacatgacctccctg

SEQ ID NO: 3506904 - DNA, 25 bp, Homo sapien
catgagacaccttgagacagcttag

SEQ ID NO: 3506905 - DNA, 25 bp, Homo sapien
tctctgggatcactagctctgggaa

SEQ ID NO: 3506906 - DNA, 25 bp, Homo sapien
tcatgagaaaacctaggcagccctg

SEQ ID NO: 3506907 - DNA, 25 bp, Homo sapien
tagaagtggatcctccaaccacggt

SEQ ID NO: 3506908 - DNA, 25 bp, Homo sapien
ccccagtggagcaataaaagcaaga

SEQ ID NO: 3506909 - DNA, 25 bp, Homo sapien
agtgaaattgtcaggcatctgtatt

SEQ ID NO: 3506910 - DNA, 25 bp, Homo sapien
ttcccccagtggagcaataaaagca

SEQ ID NO: 3506911 - DNA, 25 bp, Homo sapien
cccagtggagcaataaaagcaagac

SEQ ID NO: 3506912 - DNA, 25 bp, Homo sapien
gaaatggacacaagtacaacagtgc

SEQ ID NO: 3506913 - DNA, 25 bp, Homo sapien
ggactctgcaattcataacatggct

SEQ ID NO: 3506914 - DNA, 25 bp, Homo sapien
gagaagatcaatggaaacgggtaca

SEQ ID NO: 3506915 - DNA, 25 bp, Homo sapien
gaaagacggcttattcaatcaatga

SEQ ID NO: 3506916 - DNA, 25 bp, Homo sapien
taaagcatactatatacctagaatg

SEQ ID NO: 3506917 - DNA, 25 bp, Homo sapien
cattaaaactcatgctaccaaaaca

SEQ ID NO: 3506918 - DNA, 25 bp, Homo sapien
atatacctagaatggaacactatac

SEQ ID NO: 3506919 - DNA, 25 bp, Homo sapien
tacagtcattaaaactcatgctacc

SEQ ID NO: 3506920 - DNA, 25 bp, Homo sapien
cacttccctgtcactagcctggttt

SEQ ID NO: 3506921 - DNA, 25 bp, Homo sapien
tctggcactgtttaatgtcgataac

SEQ ID NO: 3506922 - DNA, 25 bp, Homo sapien
tgttccctcaaattgtacctgagag

SEQ ID NO: 3506923 - DNA, 25 bp, Homo sapien
tgttttaagtgccactcattctggc

SEQ ID NO: 3506924 - DNA, 25 bp, Homo sapien
ccaagaacagcatgaattatacact

SEQ ID NO: 3506925 - DNA, 25 bp, Homo sapien
tacactagacttgagtgactgaatg

SEQ ID NO: 3506926 - DNA, 25 bp, Homo sapien
ccgcgcctggcgatgacattcttat

SEQ ID NO: 3506927 - DNA, 25 bp, Homo sapien
taattctttatctcagaacaccaag

SEQ ID NO: 3506928 - DNA, 25 bp, Homo sapien
tcaacgaccagaaaggagagctatg

SEQ ID NO: 3506929 - DNA, 25 bp, Homo sapien
cacatctcctagcaagaggtccaaa

SEQ ID NO: 3506930 - DNA, 25 bp, Homo sapien
gagagctatgaacactggcaccttg

SEQ ID NO: 3506931 - DNA, 25 bp, Homo sapien
taactgggtatgacgcacacatctc

SEQ ID NO: 3506932 - DNA, 25 bp, Homo sapien
gtaaaatgggggcatgagcctttgc

SEQ ID NO: 3506933 - DNA, 25 bp, Homo sapien
aatgggggcatgagcctttgccacc

SEQ ID NO: 3506934 - DNA, 25 bp, Homo sapien
aaaatgggggcatgagcctttgcca

SEQ ID NO: 3506935 - DNA, 25 bp, Homo sapien
ttccttgctgatcaaaggtaggttc

SEQ ID NO: 3506936 - DNA, 25 bp, Homo sapien
taaaccggagtagcttctcagtccc

SEQ ID NO: 3506937 - DNA, 25 bp, Homo sapien
gtggaccgggatggccaaaacactc

SEQ ID NO: 3506938 - DNA, 25 bp, Homo sapien
tcttaacgtgggagagaagccgtga

SEQ ID NO: 3506939 - DNA, 25 bp, Homo sapien
ttcatgtcacttaacggagcctgtg

SEQ ID NO: 3506940 - DNA, 25 bp, Homo sapien
gagctgcgggcgctcgggggataag

SEQ ID NO: 3506941 - DNA, 25 bp, Homo sapien
ggataaggcgaggacgcaccagcat

SEQ ID NO: 3506942 - DNA, 25 bp, Homo sapien
gccgctggcattcctgcgcgggcgg

SEQ ID NO: 3506943 - DNA, 25 bp, Homo sapien
attcctgcgcgggcgggagctgcgg

SEQ ID NO: 3506944 - DNA, 25 bp, Homo sapien
ggcttttggcgcttataccctttgc

SEQ ID NO: 3506945 - DNA, 25 bp, Homo sapien
tttctggtggaacagcaaatgcctg

SEQ ID NO: 3506946 - DNA, 25 bp, Homo sapien
ttctgtgcgagtccatccagcgtcc

SEQ ID NO: 3506947 - DNA, 25 bp, Homo sapien
ccgacgcctggtgagaccgaggtat

SEQ ID NO: 3506948 - DNA, 25 bp, Homo sapien
ccaactgttttgctgtatgacgagg

SEQ ID NO: 3506949 - DNA, 25 bp, Homo sapien
ctgccaactgttttgctgtatgacg

SEQ ID NO: 3506950 - DNA, 25 bp, Homo sapien
aactgttttgctgtatgacgaggtc

SEQ ID NO: 3506951 - DNA, 25 bp, Homo sapien
ctgttttgctgtatgacgaggtcat

SEQ ID NO: 3506952 - DNA, 25 bp, Homo sapien
atgtggtctgtcttactgtggtccc

SEQ ID NO: 3506953 - DNA, 25 bp, Homo sapien
cctttcttagaatgggagggttgca

SEQ ID NO: 3506954 - DNA, 25 bp, Homo sapien
cagtctgtgccaccttaatgtggtc

SEQ ID NO: 3506955 - DNA, 25 bp, Homo sapien
tcaatccggatcttcacaatagcca

SEQ ID NO: 3506956 - DNA, 25 bp, Homo sapien
caggatatctctacttctttgattc

SEQ ID NO: 3506957 - DNA, 25 bp, Homo sapien
tgaaggttgaaatttatcactttcc

SEQ ID NO: 3506958 - DNA, 25 bp, Homo sapien
ttgattcataacaagaatctgatgc

SEQ ID NO: 3506959 - DNA, 25 bp, Homo sapien
tgatggttgtcaggatatctctact

SEQ ID NO: 3506960 - DNA, 25 bp, Homo sapien
ttgagaggctacagcgaccgagacg

SEQ ID NO: 3506961 - DNA, 25 bp, Homo sapien
gatgagggctactcgtccagagacg

SEQ ID NO: 3506962 - DNA, 25 bp, Homo sapien
attacggccactccagtgtccggga

SEQ ID NO: 3506963 - DNA, 25 bp, Homo sapien
gaggctcccatcgagagccctttga

SEQ ID NO: 3506964 - DNA, 25 bp, Homo sapien
gaacctgttgtatggtaactaccca

SEQ ID NO: 3506965 - DNA, 25 bp, Homo sapien
agcgtgattcttacagccggtcagg

SEQ ID NO: 3506966 - DNA, 25 bp, Homo sapien
tgggcagaccagatcgtgggctctc

SEQ ID NO: 3506967 - DNA, 25 bp, Homo sapien
aggaggccggagcagatactaagca

SEQ ID NO: 3506968 - DNA, 25 bp, Homo sapien
tgcactcgacctcctgttgtttcag

SEQ ID NO: 3506969 - DNA, 25 bp, Homo sapien
actcgacctcctgttgtttcagcag

SEQ ID NO: 3506970 - DNA, 25 bp, Homo sapien
actgcactcgacctcctgttgtttc

SEQ ID NO: 3506971 - DNA, 25 bp, Homo sapien
cactcgacctcctgttgtttcagca

SEQ ID NO: 3506972 - DNA, 25 bp, Homo sapien
tttgataaagaaagcccaccacaga

SEQ ID NO: 3506973 - DNA, 25 bp, Homo sapien
ctttgataaagaaagcccaccacag

SEQ ID NO: 3506974 - DNA, 25 bp, Homo sapien
tgatggaaccagcaacgacaaagcc

SEQ ID NO: 3506975 - DNA, 25 bp, Homo sapien
ccaaagtcctttgatggaaccagca

SEQ ID NO: 3506976 - DNA, 25 bp, Homo sapien
gaaccagcaacgacaaagccttcct

SEQ ID NO: 3506977 - DNA, 25 bp, Homo sapien
cctttgatggaaccagcaacgacaa

SEQ ID NO: 3506978 - DNA, 25 bp, Homo sapien
ccttcgtgacatcataaaactttcc

SEQ ID NO: 3506979 - DNA, 25 bp, Homo sapien
ttcgtgacatcataaaactttccaa

SEQ ID NO: 3506980 - DNA, 25 bp, Homo sapien
atggcagcatttgatggtgttcaca

SEQ ID NO: 3506981 - DNA, 25 bp, Homo sapien
ttcacagtgatctgcttatgctctg

SEQ ID NO: 3506982 - DNA, 25 bp, Homo sapien
tagccaggatctataaccaggggtg

SEQ ID NO: 3506983 - DNA, 25 bp, Homo sapien
cagagtccagggaggcacgcaagag

SEQ ID NO: 3506984 - DNA, 25 bp, Homo sapien
ggtgtctggatgtcgaaagaagaat

SEQ ID NO: 3506985 - DNA, 25 bp, Homo sapien
ataataggacggatccaagatcagg

SEQ ID NO: 3506986 - DNA, 25 bp, Homo sapien
attctctttcagttgtttctggaag

SEQ ID NO: 3506987 - DNA, 25 bp, Homo sapien
taaggtatttcccattctgcaaatt

SEQ ID NO: 3506988 - DNA, 25 bp, Homo sapien
gcaaattctctttcagttgtttctg

SEQ ID NO: 3506989 - DNA, 25 bp, Homo sapien
ttctgcaaattctctttcagttgtt

SEQ ID NO: 3506990 - DNA, 25 bp, Homo sapien
tctgtctgcttatctaaggagagtg

SEQ ID NO: 3506991 - DNA, 25 bp, Homo sapien
ggctttctcctgcataggtgacttg

SEQ ID NO: 3506992 - DNA, 25 bp, Homo sapien
tatctaaggagagtgggtgatcgac

SEQ ID NO: 3506993 - DNA, 25 bp, Homo sapien
cagtttgcaggagcccggaaagact

SEQ ID NO: 3506994 - DNA, 25 bp, Homo sapien
ttctgatttccaatgggagaataaa

SEQ ID NO: 3506995 - DNA, 25 bp, Homo sapien
tctgatttccaatgggagaataaat

SEQ ID NO: 3506996 - DNA, 25 bp, Homo sapien
gatttccaatgggagaataaattga

SEQ ID NO: 3506997 - DNA, 25 bp, Homo sapien
ctgatttccaatgggagaataaatt

SEQ ID NO: 3506998 - DNA, 25 bp, Homo sapien
ctctgagacgatcacctggagcttt

SEQ ID NO: 3506999 - DNA, 25 bp, Homo sapien
gccttaagatgtctttgctctgaga

SEQ ID NO: 3507000 - DNA, 25 bp, Homo sapien
tctttgctctgagacgatcacctgg

SEQ ID NO: 3507001 - DNA, 25 bp, Homo sapien
tttcacgtatgccttaagatgtctt

SEQ ID NO: 3507002 - DNA, 25 bp, Homo sapien
aggctcgcaccgtttctcggcaggt

SEQ ID NO: 3507003 - DNA, 25 bp, Homo sapien
tcggcaggtccctggcggtgagcgc

SEQ ID NO: 3507004 - DNA, 25 bp, Homo sapien
caccgccgcctggagggacctaagg

SEQ ID NO: 3507005 - DNA, 25 bp, Homo sapien
tcatttaccacctgcgggaccgtgc

SEQ ID NO: 3507006 - DNA, 25 bp, Homo sapien
catcctttctcccaagcgtctagtt

SEQ ID NO: 3507007 - DNA, 25 bp, Homo sapien
tagactcgtcggtcctggcttgtgc

SEQ ID NO: 3507008 - DNA, 25 bp, Homo sapien
tagttactcctagtgaaagttgcaa

SEQ ID NO: 3507009 - DNA, 25 bp, Homo sapien
tgggcgctaggctcgaccagcgact

SEQ ID NO: 3507010 - DNA, 25 bp, Homo sapien
tcccactagtgatgcagcctcaatt

SEQ ID NO: 3507011 - DNA, 25 bp, Homo sapien
ctcccactagtgatgcagcctcaat

SEQ ID NO: 3507012 - DNA, 25 bp, Homo sapien
ccactagtgatgcagcctcaatttc

SEQ ID NO: 3507013 - DNA, 25 bp, Homo sapien
cactagtgatgcagcctcaatttct

SEQ ID NO: 3507014 - DNA, 25 bp, Homo sapien
tcagaaataacgccacatacctaca

SEQ ID NO: 3507015 - DNA, 25 bp, Homo sapien
aacgccacatacctacaactatctg

SEQ ID NO: 3507016 - DNA, 25 bp, Homo sapien
ataacgccacatacctacaactatc

SEQ ID NO: 3507017 - DNA, 25 bp, Homo sapien
gaaataacgccacatacctacaact

SEQ ID NO: 3507018 - DNA, 25 bp, Homo sapien
tccacagctcaaagaagataacagg

SEQ ID NO: 3507019 - DNA, 25 bp, Homo sapien
gatgctcaggaaccttttattgaat

SEQ ID NO: 3507020 - DNA, 25 bp, Homo sapien
gaaccttttattgaatctgagtctg

SEQ ID NO: 3507021 - DNA, 25 bp, Homo sapien
cagctctgttgggattcctgtgaac

SEQ ID NO: 3507022 - DNA, 25 bp, Homo sapien
cctgtcatcattgattttatgggga

SEQ ID NO: 3507023 - DNA, 25 bp, Homo sapien
catcttcaataagatgatgcaatgg

SEQ ID NO: 3507024 - DNA, 25 bp, Homo sapien
ccacaccagcatcttcaataagatg

SEQ ID NO: 3507025 - DNA, 25 bp, Homo sapien
catcattgattttatggggaaagaa

SEQ ID NO: 3507026 - DNA, 25 bp, Homo sapien
gaaatgcggacattcagcatccaca

SEQ ID NO: 3507027 - DNA, 25 bp, Homo sapien
ctttgaaatgcggacattcagcatc

SEQ ID NO: 3507028 - DNA, 25 bp, Homo sapien
tgaaatgcggacattcagcatccac

SEQ ID NO: 3507029 - DNA, 25 bp, Homo sapien
cttctttgaaatgcggacattcagc

SEQ ID NO: 3507030 - DNA, 25 bp, Homo sapien
tggtcttcaaaaccagtgtgggtat

SEQ ID NO: 3507031 - DNA, 25 bp, Homo sapien
ggtattactaaatgtctcctcaaag

SEQ ID NO: 3507032 - DNA, 25 bp, Homo sapien
tcaaagatggtaatgcagatgaacc

SEQ ID NO: 3507033 - DNA, 25 bp, Homo sapien
gaaccgatagtaattgggccccagc

SEQ ID NO: 3507034 - DNA, 25 bp, Homo sapien
tcactaggactaaaatagaatttgg

SEQ ID NO: 3507035 - DNA, 25 bp, Homo sapien
aaagcatcactaggactaaaataga

SEQ ID NO: 3507036 - DNA, 25 bp, Homo sapien
cactaggactaaaatagaatttggg

SEQ ID NO: 3507037 - DNA, 25 bp, Homo sapien
gcatcactaggactaaaatagaatt

SEQ ID NO: 3507038 - DNA, 25 bp, Homo sapien
tacgtggtggatatgagataggagc

SEQ ID NO: 3507039 - DNA, 25 bp, Homo sapien
tggtggatatgagataggagccttc

SEQ ID NO: 3507040 - DNA, 25 bp, Homo sapien
gatatgagataggagccttccagcc

SEQ ID NO: 3507041 - DNA, 25 bp, Homo sapien
tggatatgagataggagccttccag

SEQ ID NO: 3507042 - DNA, 25 bp, Homo sapien
gcccagactgggaagcccagactca

SEQ ID NO: 3507043 - DNA, 25 bp, Homo sapien
ctgtgtgtcagtgcatcagcccaga

SEQ ID NO: 3507044 - DNA, 25 bp, Homo sapien
ctgggaagcccagactcagagtcat

SEQ ID NO: 3507045 - DNA, 25 bp, Homo sapien
tgtgtcagtgcatcagcccagactg

SEQ ID NO: 3507046 - DNA, 25 bp, Homo sapien
aaatgtgtggtggttgggttcacaa

SEQ ID NO: 3507047 - DNA, 25 bp, Homo sapien
gacatcagctttggtctccgggtga

SEQ ID NO: 3507048 - DNA, 25 bp, Homo sapien
cagctttggtctccgggtgaaaatg

SEQ ID NO: 3507049 - DNA, 25 bp, Homo sapien
tcatgacatcagctttggtctccgg

SEQ ID NO: 3507050 - DNA, 25 bp, Homo sapien
tttctctccctgatatgctgagctg

SEQ ID NO: 3507051 - DNA, 25 bp, Homo sapien
catataggagtcagagcaatgcatg

SEQ ID NO: 3507052 - DNA, 25 bp, Homo sapien
tacaccctggcttacatcctctgaa

SEQ ID NO: 3507053 - DNA, 25 bp, Homo sapien
cagaagagccctatctggagcagag

SEQ ID NO: 3507054 - DNA, 25 bp, Homo sapien
tatagggaagtacaaaggctacctc

SEQ ID NO: 3507055 - DNA, 25 bp, Homo sapien
tgatgagaccccacatcagctgttg

SEQ ID NO: 3507056 - DNA, 25 bp, Homo sapien
tacagagtcattccccacttggtgg

SEQ ID NO: 3507057 - DNA, 25 bp, Homo sapien
aggctacctcgtggcattggctgga

SEQ ID NO: 3507058 - DNA, 25 bp, Homo sapien
gcagactgctgtgccctaagtgaaa

SEQ ID NO: 3507059 - DNA, 25 bp, Homo sapien
actgaggccccttagtgaatcatga

SEQ ID NO: 3507060 - DNA, 25 bp, Homo sapien
tgtaggcagccaagtcctagagcgc

SEQ ID NO: 3507061 - DNA, 25 bp, Homo sapien
tcaggaggtgacaaggactttagcc

SEQ ID NO: 3507062 - DNA, 25 bp, Homo sapien
acgcataaacacctgcagggccgct

SEQ ID NO: 3507063 - DNA, 25 bp, Homo sapien
aatctactacaagtttaggatctga

SEQ ID NO: 3507064 - DNA, 25 bp, Homo sapien
tgcagggccgctgaagcaaaactga

SEQ ID NO: 3507065 - DNA, 25 bp, Homo sapien
tttgaatggtgagatttagcatgcc

SEQ ID NO: 3507066 - DNA, 25 bp, Homo sapien
ccagctggtagaggttatggttaac

SEQ ID NO: 3507067 - DNA, 25 bp, Homo sapien
gtgtcaattgctgtaagtggccaga

SEQ ID NO: 3507068 - DNA, 25 bp, Homo sapien
ttaacaaacaaagctagggccattc

SEQ ID NO: 3507069 - DNA, 25 bp, Homo sapien
tagtggggcattgtgtttccagctg

SEQ ID NO: 3507070 - DNA, 25 bp, Homo sapien
gcaaatcttctttcttgtattgaat

SEQ ID NO: 3507071 - DNA, 25 bp, Homo sapien
aagcaaatcttctttcttgtattga

SEQ ID NO: 3507072 - DNA, 25 bp, Homo sapien
cccaagcaaatcttctttcttgtat

SEQ ID NO: 3507073 - DNA, 25 bp, Homo sapien
cttcccaagcaaatcttctttcttg

SEQ ID NO: 3507074 - DNA, 25 bp, Homo sapien
gcctagtatggaaccaatatatcac

SEQ ID NO: 3507075 - DNA, 25 bp, Homo sapien
tctcctgctccttacagataatgtg

SEQ ID NO: 3507076 - DNA, 25 bp, Homo sapien
gataatgtggcacttccattgccta

SEQ ID NO: 3507077 - DNA, 25 bp, Homo sapien
ttgcactttatcctagcctccgtgg

SEQ ID NO: 3507078 - DNA, 25 bp, Homo sapien
tcttatatcaggaatgaggatccag

SEQ ID NO: 3507079 - DNA, 25 bp, Homo sapien
tagaactagtcttatatcaggaatg

SEQ ID NO: 3507080 - DNA, 25 bp, Homo sapien
tagtcttatatcaggaatgaggatc

SEQ ID NO: 3507081 - DNA, 25 bp, Homo sapien
tatatcaggaatgaggatccaggga

SEQ ID NO: 3507082 - DNA, 25 bp, Homo sapien
ataataattcagagaaaccctacac

SEQ ID NO: 3507083 - DNA, 25 bp, Homo sapien
gggaaaatcaaggttcccgccatca

SEQ ID NO: 3507084 - DNA, 25 bp, Homo sapien
ccgccatcaaccaaatggtttgagt

SEQ ID NO: 3507085 - DNA, 25 bp, Homo sapien
taattcagagaaaccctacactctc

SEQ ID NO: 3507086 - DNA, 25 bp, Homo sapien
taactggaaatacagtgctgagccc

SEQ ID NO: 3507087 - DNA, 25 bp, Homo sapien
tcttttgcaggtcagcaggcatgaa

SEQ ID NO: 3507088 - DNA, 25 bp, Homo sapien
tgagccctgtgctatagctgaggtg

SEQ ID NO: 3507089 - DNA, 25 bp, Homo sapien
gagagtcttcgaggactactcagcc

SEQ ID NO: 3507090 - DNA, 25 bp, Homo sapien
caagatcagcccgactaacatagtg

SEQ ID NO: 3507091 - DNA, 25 bp, Homo sapien
aggctgcggggagtggatcacttga

SEQ ID NO: 3507092 - DNA, 25 bp, Homo sapien
agatcagcccgactaacatagtgaa

SEQ ID NO: 3507093 - DNA, 25 bp, Homo sapien
gttcaagatcagcccgactaacata

SEQ ID NO: 3507094 - DNA, 25 bp, Homo sapien
gattctgggaaactgtaactctacc

SEQ ID NO: 3507095 - DNA, 25 bp, Homo sapien
ggaacctaattacagctcagccact

SEQ ID NO: 3507096 - DNA, 25 bp, Homo sapien
tcaacttcctggtggacgacctcag

SEQ ID NO: 3507097 - DNA, 25 bp, Homo sapien
caagagctactgtgatcgaagcaga

SEQ ID NO: 3507098 - DNA, 25 bp, Homo sapien
tcttgttggaggtatgtgtcactgc

SEQ ID NO: 3507099 - DNA, 25 bp, Homo sapien
tgatatgcactttgaaaacgaccac

SEQ ID NO: 3507100 - DNA, 25 bp, Homo sapien
tagcctaaacagcatagagagacca

SEQ ID NO: 3507101 - DNA, 25 bp, Homo sapien
taagaaggaatatggactcatcacc

SEQ ID NO: 3507102 - DNA, 25 bp, Homo sapien
cacggactctttcattcctgctagg

SEQ ID NO: 3507103 - DNA, 25 bp, Homo sapien
gaggtgcttgactccacacggactc

SEQ ID NO: 3507104 - DNA, 25 bp, Homo sapien
caaggggttccctgaggtgcttgac

SEQ ID NO: 3507105 - DNA, 25 bp, Homo sapien
tcattcctgctaggttgcgaatact

SEQ ID NO: 3507106 - DNA, 25 bp, Homo sapien
gataactgctgtgcgggctttgacc

SEQ ID NO: 3507107 - DNA, 25 bp, Homo sapien
tgaagcaccggcctgtaaagagtct

SEQ ID NO: 3507108 - DNA, 25 bp, Homo sapien
gaagcatttcatgggagtggacccc

SEQ ID NO: 3507109 - DNA, 25 bp, Homo sapien
gaagcaaatgttactccatgggcag

SEQ ID NO: 3507110 - DNA, 25 bp, Homo sapien
cacatagtttcccacagtttagaag

SEQ ID NO: 3507111 - DNA, 25 bp, Homo sapien
gaacacgtatggacttgcagctgtc

SEQ ID NO: 3507112 - DNA, 25 bp, Homo sapien
gatgagaccttaaaagagttggaac

SEQ ID NO: 3507113 - DNA, 25 bp, Homo sapien
tttagaagtgctgaagatgagacct

SEQ ID NO: 3507114 - DNA, 25 bp, Homo sapien
gagaagcacaaatgaggaggacccc

SEQ ID NO: 3507115 - DNA, 25 bp, Homo sapien
gaggaagtcacccttacaagaagag

SEQ ID NO: 3507116 - DNA, 25 bp, Homo sapien
cacagttagtgacttttcccagagg

SEQ ID NO: 3507117 - DNA, 25 bp, Homo sapien
gcatgagattcatcctactgggagg

SEQ ID NO: 3507118 - DNA, 25 bp, Homo sapien
gacataaacgttccaccagaagtga

SEQ ID NO: 3507119 - DNA, 25 bp, Homo sapien
caggaggtttccagtgattcacagg

SEQ ID NO: 3507120 - DNA, 25 bp, Homo sapien
gagtaaggcgccatagtctgccaaa

SEQ ID NO: 3507121 - DNA, 25 bp, Homo sapien
taaaatagacaacccacaagaccag

SEQ ID NO: 3507122 - DNA, 25 bp, Homo sapien
ccatggccttgggtgtcctaatgca

SEQ ID NO: 3507123 - DNA, 25 bp, Homo sapien
ctagatgtaagtgatggccatggcc

SEQ ID NO: 3507124 - DNA, 25 bp, Homo sapien
gatgtaagtgatggccatggccttg

SEQ ID NO: 3507125 - DNA, 25 bp, Homo sapien
atggccttgggtgtcctaatgcatc

SEQ ID NO: 3507126 - DNA, 25 bp, Homo sapien
tcaggttggtcgcaagatggatgca

SEQ ID NO: 3507127 - DNA, 25 bp, Homo sapien
gcctgaagagctgtgtacctaacgt

SEQ ID NO: 3507128 - DNA, 25 bp, Homo sapien
tgtgggcattagcagaaatgagcct

SEQ ID NO: 3507129 - DNA, 25 bp, Homo sapien
tgtagcatctggacaaagggtctag

SEQ ID NO: 3507130 - DNA, 25 bp, Homo sapien
gggaataacatgcgctggaagacgg

SEQ ID NO: 3507131 - DNA, 25 bp, Homo sapien
tgggaataacatgcgctggaagacg

SEQ ID NO: 3507132 - DNA, 25 bp, Homo sapien
atgggaataacatgcgctggaagac

SEQ ID NO: 3507133 - DNA, 25 bp, Homo sapien
tcatgggaataacatgcgctggaag

SEQ ID NO: 3507134 - DNA, 25 bp, Homo sapien
agaagacgcagaagtagatttctac

SEQ ID NO: 3507135 - DNA, 25 bp, Homo sapien
ctcatgaccgacaacaacaaatctg

SEQ ID NO: 3507136 - DNA, 25 bp, Homo sapien
aacaacaaatctgacattgctgctg

SEQ ID NO: 3507137 - DNA, 25 bp, Homo sapien
gacaacaacaaatctgacattgctg

SEQ ID NO: 3507138 - DNA, 25 bp, Homo sapien
gaccgacaacaacaaatctgacatt

SEQ ID NO: 3507139 - DNA, 25 bp, Homo sapien
gagcaatcaagggtcactaagtaag

SEQ ID NO: 3507140 - DNA, 25 bp, Homo sapien
tgcttgttgccacattggcctcaag

SEQ ID NO: 3507141 - DNA, 25 bp, Homo sapien
gaggccttctcactcctgattctgt

SEQ ID NO: 3507142 - DNA, 25 bp, Homo sapien
gaaaattagtctgcacacacaaaag

SEQ ID NO: 3507143 - DNA, 25 bp, Homo sapien
catttccgctctctgctgcactcca

SEQ ID NO: 3507144 - DNA, 25 bp, Homo sapien
gcactccaggcttctctacagccat

SEQ ID NO: 3507145 - DNA, 25 bp, Homo sapien
tgctgcactccaggcttctctacag

SEQ ID NO: 3507146 - DNA, 25 bp, Homo sapien
ctgcactccaggcttctctacagcc

SEQ ID NO: 3507147 - DNA, 25 bp, Homo sapien
ccagcaggtgcccaagaaggaagtc

SEQ ID NO: 3507148 - DNA, 25 bp, Homo sapien
tgtgacctgtgtaaattctgggcaa

SEQ ID NO: 3507149 - DNA, 25 bp, Homo sapien
aataggctatgcattctacagctgc

SEQ ID NO: 3507150 - DNA, 25 bp, Homo sapien
aaagcaagtatcaccatccagtcag

SEQ ID NO: 3507151 - DNA, 25 bp, Homo sapien
gaaggtcccagtcatcatctcagat

SEQ ID NO: 3507152 - DNA, 25 bp, Homo sapien
tataacaagcacctggcaaaatgcc

SEQ ID NO: 3507153 - DNA, 25 bp, Homo sapien
gagccaggcaacacccatgagaatg

SEQ ID NO: 3507154 - DNA, 25 bp, Homo sapien
tgcaccaaagcaactgagagctagc

SEQ ID NO: 3507155 - DNA, 25 bp, Homo sapien
cagcttatcccagcaatctttcaag

SEQ ID NO: 3507156 - DNA, 25 bp, Homo sapien
caaggtgcttcactgtatggcatca

SEQ ID NO: 3507157 - DNA, 25 bp, Homo sapien
agaattcctgcaagcctggggtcac

SEQ ID NO: 3507158 - DNA, 25 bp, Homo sapien
ggcaggttgggaaacccatgaccat

SEQ ID NO: 3507159 - DNA, 25 bp, Homo sapien
gatgaccagagatttgagtcccaaa

SEQ ID NO: 3507160 - DNA, 25 bp, Homo sapien
taccagagctatgaattaataaggc

SEQ ID NO: 3507161 - DNA, 25 bp, Homo sapien
tagaataaccgtgcacagacatggg

SEQ ID NO: 3507162 - DNA, 25 bp, Homo sapien
cacaatgatcagtttaggagctctt

SEQ ID NO: 3507163 - DNA, 25 bp, Homo sapien
tagtcttcttttgaccacactgagc

SEQ ID NO: 3507164 - DNA, 25 bp, Homo sapien
tcatccttgattctatagtcttctt

SEQ ID NO: 3507165 - DNA, 25 bp, Homo sapien
tgctgagacgtccttttattctgtg

SEQ ID NO: 3507166 - DNA, 25 bp, Homo sapien
catagtagtcacagagcttcctgct

SEQ ID NO: 3507167 - DNA, 25 bp, Homo sapien
tgcagggaagcatgtctctcatgcc

SEQ ID NO: 3507168 - DNA, 25 bp, Homo sapien
acagcactaactggccttctttcca

SEQ ID NO: 3507169 - DNA, 25 bp, Homo sapien
ttccagattgggtttggtgaacctg

SEQ ID NO: 3507170 - DNA, 25 bp, Homo sapien
catccagacgatttcagtgaccaaa

SEQ ID NO: 3507171 - DNA, 25 bp, Homo sapien
gagaatcgcctgagtccaagagctt

SEQ ID NO: 3507172 - DNA, 25 bp, Homo sapien
agagcttgaggctacagcgagccaa

SEQ ID NO: 3507173 - DNA, 25 bp, Homo sapien
agataggagaatcgcctgagtccaa

SEQ ID NO: 3507174 - DNA, 25 bp, Homo sapien
tccaagagcttgaggctacagcgag

SEQ ID NO: 3507175 - DNA, 25 bp, Homo sapien
tttcaaagaggccatcaggtaatac

SEQ ID NO: 3507176 - DNA, 25 bp, Homo sapien
ctttcaaagaggccatcaggtaata

SEQ ID NO: 3507177 - DNA, 25 bp, Homo sapien
caagcaccaatgcccagattagcct

SEQ ID NO: 3507178 - DNA, 25 bp, Homo sapien
ccaatgcccagattagccttcccct

SEQ ID NO: 3507179 - DNA, 25 bp, Homo sapien
caccaatgcccagattagccttccc

SEQ ID NO: 3507180 - DNA, 25 bp, Homo sapien
agcaccaatgcccagattagccttc

SEQ ID NO: 3507181 - DNA, 25 bp, Homo sapien
gaaagaaccagacatgagctaagct

SEQ ID NO: 3507182 - DNA, 25 bp, Homo sapien
tactgaatgcgtattatgtaccaca

SEQ ID NO: 3507183 - DNA, 25 bp, Homo sapien
tgtggagcaagttgttcaatggagc

SEQ ID NO: 3507184 - DNA, 25 bp, Homo sapien
cacacttgcaagctgtagggaatca

SEQ ID NO: 3507185 - DNA, 25 bp, Homo sapien
tattaacttctctagcccttgtgct

SEQ ID NO: 3507186 - DNA, 25 bp, Homo sapien
ggcttcacaagagacaggttaggct

SEQ ID NO: 3507187 - DNA, 25 bp, Homo sapien
aagtgcctagcccagtatgaagcat

SEQ ID NO: 3507188 - DNA, 25 bp, Homo sapien
aaagtcctctatggtcactcacagg

SEQ ID NO: 3507189 - DNA, 25 bp, Homo sapien
cttcctcctgtccagtcttctttcc

SEQ ID NO: 3507190 - DNA, 25 bp, Homo sapien
ggaacccatctcactatgcatctct

SEQ ID NO: 3507191 - DNA, 25 bp, Homo sapien
gtttcttgtcctctgactccagttg

SEQ ID NO: 3507192 - DNA, 25 bp, Homo sapien
gaacctctggaacccatctcactat

SEQ ID NO: 3507193 - DNA, 25 bp, Homo sapien
cggagaccccttatgtgtagtggca

SEQ ID NO: 3507194 - DNA, 25 bp, Homo sapien
tgtttgaactcatcctaggccaggg

SEQ ID NO: 3507195 - DNA, 25 bp, Homo sapien
tcaaggaagtctagaagaagccagg

SEQ ID NO: 3507196 - DNA, 25 bp, Homo sapien
tcaactccgggacaaggcagatgtt

SEQ ID NO: 3507197 - DNA, 25 bp, Homo sapien
gactgactgataacttaaacatcaa

SEQ ID NO: 3507198 - DNA, 25 bp, Homo sapien
ttactgatagtctgctgttgaccag

SEQ ID NO: 3507199 - DNA, 25 bp, Homo sapien
ttgaccagaagactgactgataact

SEQ ID NO: 3507200 - DNA, 25 bp, Homo sapien
caaaacttaattactgatagtctgc

SEQ ID NO: 3507201 - DNA, 25 bp, Homo sapien
caattttgcctggattgcacgcggg

SEQ ID NO: 3507202 - DNA, 25 bp, Homo sapien
agcttaacagcagccagtccttgga

SEQ ID NO: 3507203 - DNA, 25 bp, Homo sapien
ctttccgacctgcttagggagggcg

SEQ ID NO: 3507204 - DNA, 25 bp, Homo sapien
tactggtcatttcagaccgcgaggg

SEQ ID NO: 3507205 - DNA, 25 bp, Homo sapien
gagggctacagctgtccgatgagga

SEQ ID NO: 3507206 - DNA, 25 bp, Homo sapien
ctacagctgtccgatgaggagtgag

SEQ ID NO: 3507207 - DNA, 25 bp, Homo sapien
tccaagcagggtccggtgtagagtc

SEQ ID NO: 3507208 - DNA, 25 bp, Homo sapien
gtgaggatcttatctggaatctgca

SEQ ID NO: 3507209 - DNA, 25 bp, Homo sapien
tgatgtggtttaaggtctgaggatg

SEQ ID NO: 3507210 - DNA, 25 bp, Homo sapien
atgtggtttaaggtctgaggatgtg

SEQ ID NO: 3507211 - DNA, 25 bp, Homo sapien
gatgtggtttaaggtctgaggatgt

SEQ ID NO: 3507212 - DNA, 25 bp, Homo sapien
cagtagtttctgtgcagtgtcttca

SEQ ID NO: 3507213 - DNA, 25 bp, Homo sapien
acacagagctgctaataccctccag

SEQ ID NO: 3507214 - DNA, 25 bp, Homo sapien
ggctctctggcagcagtagtttctg

SEQ ID NO: 3507215 - DNA, 25 bp, Homo sapien
tggccctcggaactccagtgaacac

SEQ ID NO: 3507216 - DNA, 25 bp, Homo sapien
catgagaacaggacattttcgggcc

SEQ ID NO: 3507217 - DNA, 25 bp, Homo sapien
ttcgggccggctccaatttggatgc

SEQ ID NO: 3507218 - DNA, 25 bp, Homo sapien
caatttggatgccagctcatgcgtt

SEQ ID NO: 3507219 - DNA, 25 bp, Homo sapien
gatgccagctcatgcgttcagactg

SEQ ID NO: 3507220 - DNA, 25 bp, Homo sapien
ctgagactgtgggacagctaggctc

SEQ ID NO: 3507221 - DNA, 25 bp, Homo sapien
agcttgccatttccagtaggaggag

SEQ ID NO: 3507222 - DNA, 25 bp, Homo sapien
taggctcagagggagtctgacttcg

SEQ ID NO: 3507223 - DNA, 25 bp, Homo sapien
tttccagtaggaggaggatgtcgct

SEQ ID NO: 3507224 - DNA, 25 bp, Homo sapien
aagggctcgagctttttgggaatgc

SEQ ID NO: 3507225 - DNA, 25 bp, Homo sapien
ggtcatggagccttgcttaaagggc

SEQ ID NO: 3507226 - DNA, 25 bp, Homo sapien
atgccctgctgttgtgatatgttgc

SEQ ID NO: 3507227 - DNA, 25 bp, Homo sapien
tgtgcagctttctgactgaatgccc

SEQ ID NO: 3507228 - DNA, 25 bp, Homo sapien
aaaaagatgatcagggagatcccat

SEQ ID NO: 3507229 - DNA, 25 bp, Homo sapien
gacacgtggcacagttttcagggag

SEQ ID NO: 3507230 - DNA, 25 bp, Homo sapien
taaacacttatccagtgcttacaga

SEQ ID NO: 3507231 - DNA, 25 bp, Homo sapien
gggacccagacacgtggcacagttt

SEQ ID NO: 3507232 - DNA, 25 bp, Homo sapien
aagagctggcttgatgggaatttag

SEQ ID NO: 3507233 - DNA, 25 bp, Homo sapien
atttagcagggacagctgtaggcat

SEQ ID NO: 3507234 - DNA, 25 bp, Homo sapien
ctggaagagctggcttgatgggaat

SEQ ID NO: 3507235 - DNA, 25 bp, Homo sapien
aatttagcagggacagctgtaggca

SEQ ID NO: 3507236 - DNA, 25 bp, Homo sapien
gccgtgaccaagtaggttgagtcca

SEQ ID NO: 3507237 - DNA, 25 bp, Homo sapien
gatagaccatgatttctactgtgtg

SEQ ID NO: 3507238 - DNA, 25 bp, Homo sapien
tgtatggtaaaagttaaagccgtga

SEQ ID NO: 3507239 - DNA, 25 bp, Homo sapien
gcagaggtctgccaaaaggtatgta

SEQ ID NO: 3507240 - DNA, 25 bp, Homo sapien
gaggctgggcctcttgcttgattag

SEQ ID NO: 3507241 - DNA, 25 bp, Homo sapien
cagcaaagtttgaggaccacgagat

SEQ ID NO: 3507242 - DNA, 25 bp, Homo sapien
gtgaatcttcagtgcagagtgaatg

SEQ ID NO: 3507243 - DNA, 25 bp, Homo sapien
cagggtggttctgattaacagcaaa

SEQ ID NO: 3507244 - DNA, 25 bp, Homo sapien
agcatttggtgcacctgactgcgcc

SEQ ID NO: 3507245 - DNA, 25 bp, Homo sapien
caccagtagcgtgagtttggagaga

SEQ ID NO: 3507246 - DNA, 25 bp, Homo sapien
gagaagtgctctggtcttattcagc

SEQ ID NO: 3507247 - DNA, 25 bp, Homo sapien
cctttggttcgcttatgggtgccac

SEQ ID NO: 3507248 - DNA, 25 bp, Homo sapien
gctttgtccccaaggtatatcagga

SEQ ID NO: 3507249 - DNA, 25 bp, Homo sapien
tcagggcaaaaaccgtgtaggcaca

SEQ ID NO: 3507250 - DNA, 25 bp, Homo sapien
cacattctctaggtactcagggcaa

SEQ ID NO: 3507251 - DNA, 25 bp, Homo sapien
tctaattcattacggtctgagtcac

SEQ ID NO: 3507252 - DNA, 25 bp, Homo sapien
aatgaccttttattagccgtttgct

SEQ ID NO: 3507253 - DNA, 25 bp, Homo sapien
taacgtttaggtgctttctgagaca

SEQ ID NO: 3507254 - DNA, 25 bp, Homo sapien
tctagtctattcgtagtctatgctg

SEQ ID NO: 3507255 - DNA, 25 bp, Homo sapien
cagaaatcaccttgagcctcttgga

SEQ ID NO: 3507256 - DNA, 25 bp, Homo sapien
caaggtctgcagtaatgcccgatac

SEQ ID NO: 3507257 - DNA, 25 bp, Homo sapien
cctgcttgacagatacgcccttcag

SEQ ID NO: 3507258 - DNA, 25 bp, Homo sapien
ttcagcctagggtccaaaagattcc

SEQ ID NO: 3507259 - DNA, 25 bp, Homo sapien
tgcccgatacccagtagaattcaac

SEQ ID NO: 3507260 - DNA, 25 bp, Homo sapien
gactgagagctcatttcattggaag

SEQ ID NO: 3507261 - DNA, 25 bp, Homo sapien
tctgcagcatccctaactgtagtgt

SEQ ID NO: 3507262 - DNA, 25 bp, Homo sapien
tagctacacaggtgcagaaccgctc

SEQ ID NO: 3507263 - DNA, 25 bp, Homo sapien
tgtctggcccttgcttaaactggct

SEQ ID NO: 3507264 - DNA, 25 bp, Homo sapien
attcaggtccaccaatcagacatag

SEQ ID NO: 3507265 - DNA, 25 bp, Homo sapien
gttctgttgttggtgaggagctgca

SEQ ID NO: 3507266 - DNA, 25 bp, Homo sapien
tttcttttatttcatcttccatcac

SEQ ID NO: 3507267 - DNA, 25 bp, Homo sapien
cacattcaggtccaccaatcagaca

SEQ ID NO: 3507268 - DNA, 25 bp, Homo sapien
gataaagtcggcaggagcaaaccaa

SEQ ID NO: 3507269 - DNA, 25 bp, Homo sapien
tgaaagcagtgaaggatccccaagg

SEQ ID NO: 3507270 - DNA, 25 bp, Homo sapien
aaatactctgtgatggaggctctcc

SEQ ID NO: 3507271 - DNA, 25 bp, Homo sapien
gatgcaccccttctgtagctgacaa

SEQ ID NO: 3507272 - DNA, 25 bp, Homo sapien
gcgaaggtacatggcaaggcacttt

SEQ ID NO: 3507273 - DNA, 25 bp, Homo sapien
acatcccagtttaccgtggtgaaat

SEQ ID NO: 3507274 - DNA, 25 bp, Homo sapien
aaaagaggagaaccagtgtgtgcgc

SEQ ID NO: 3507275 - DNA, 25 bp, Homo sapien
ggtgaaattgaacttactctgaaac

SEQ ID NO: 3507276 - DNA, 25 bp, Homo sapien
gaaggtgctccttgatcatgtcggc

SEQ ID NO: 3507277 - DNA, 25 bp, Homo sapien
gaaaatcatgtcctgggtataaccc

SEQ ID NO: 3507278 - DNA, 25 bp, Homo sapien
ttctccaggttagggtgagccgccg

SEQ ID NO: 3507279 - DNA, 25 bp, Homo sapien
tcatgtcggcagtaacgaagcctga

SEQ ID NO: 3507280 - DNA, 25 bp, Homo sapien
gagttgtccggcagggtgtggcctg

SEQ ID NO: 3507281 - DNA, 25 bp, Homo sapien
acagccagctggagttgtccggcag

SEQ ID NO: 3507282 - DNA, 25 bp, Homo sapien
ggagttgtccggcagggtgtggcct

SEQ ID NO: 3507283 - DNA, 25 bp, Homo sapien
agtacagccagctggagttgtccgg

SEQ ID NO: 3507284 - DNA, 25 bp, Homo sapien
gaattgctcagtagggtagcgccct

SEQ ID NO: 3507285 - DNA, 25 bp, Homo sapien
ctgcgcagaattgctcagtagggta

SEQ ID NO: 3507286 - DNA, 25 bp, Homo sapien
tagggtagcgccctctgccgaccag

SEQ ID NO: 3507287 - DNA, 25 bp, Homo sapien
ctcagtagggtagcgccctctgccg

SEQ ID NO: 3507288 - DNA, 25 bp, Homo sapien
gtgcccatattagatgtgtatgtga

SEQ ID NO: 3507289 - DNA, 25 bp, Homo sapien
gagcagtgtgagaggcgcgcctgtg

SEQ ID NO: 3507290 - DNA, 25 bp, Homo sapien
tggtggccgtaagcagaagggtgag

SEQ ID NO: 3507291 - DNA, 25 bp, Homo sapien
gcatgtccaggtgaggtgggcggta

SEQ ID NO: 3507292 - DNA, 25 bp, Homo sapien
cctgtccagggtgtaccacaggttg

SEQ ID NO: 3507293 - DNA, 25 bp, Homo sapien
ccagggtgtaccacaggttgaactg

SEQ ID NO: 3507294 - DNA, 25 bp, Homo sapien
ttcttcaagctcttttctgaccaag

SEQ ID NO: 3507295 - DNA, 25 bp, Homo sapien
cttcaagctcttttctgaccaagat

SEQ ID NO: 3507296 - DNA, 25 bp, Homo sapien
tgactacaccggtcagcatactcct

SEQ ID NO: 3507297 - DNA, 25 bp, Homo sapien
actacaccggtcagcatactcctgg

SEQ ID NO: 3507298 - DNA, 25 bp, Homo sapien
tggactgactacaccggtcagcata

SEQ ID NO: 3507299 - DNA, 25 bp, Homo sapien
ttccctggactgactacaccggtca

SEQ ID NO: 3507300 - DNA, 25 bp, Homo sapien
taaaagtaatcaagcgtaggcacaa

SEQ ID NO: 3507301 - DNA, 25 bp, Homo sapien
tcagaaagtcctgtgatagaacagc

SEQ ID NO: 3507302 - DNA, 25 bp, Homo sapien
ggaaaacagtctggagccccatttg

SEQ ID NO: 3507303 - DNA, 25 bp, Homo sapien
gataactgcacagaagacctggatc

SEQ ID NO: 3507304 - DNA, 25 bp, Homo sapien
atcctaccactgcaagctcagcagg

SEQ ID NO: 3507305 - DNA, 25 bp, Homo sapien
tgcaggcacccaagcagcatgagct

SEQ ID NO: 3507306 - DNA, 25 bp, Homo sapien
agccctgttgatcccactaagccct

SEQ ID NO: 3507307 - DNA, 25 bp, Homo sapien
taccactgcaagctcagcaggaact

SEQ ID NO: 3507308 - DNA, 25 bp, Homo sapien
gagggacatcctggtcctgtcactg

SEQ ID NO: 3507309 - DNA, 25 bp, Homo sapien
agatgagggacatcctggtcctgtc

SEQ ID NO: 3507310 - DNA, 25 bp, Homo sapien
gatgtggcgaatgagctgcaacatg

SEQ ID NO: 3507311 - DNA, 25 bp, Homo sapien
gggtccttggtgatgtggcgaatga

SEQ ID NO: 3507312 - DNA, 25 bp, Homo sapien
tggtctggtctgattccaagattcc

SEQ ID NO: 3507313 - DNA, 25 bp, Homo sapien
aatcattcccaggtgatcggccagt

SEQ ID NO: 3507314 - DNA, 25 bp, Homo sapien
tgtttttttaggctcactcgtctgg

SEQ ID NO: 3507315 - DNA, 25 bp, Homo sapien
cccagcaatcattcccaggtgatcg

SEQ ID NO: 3507316 - DNA, 25 bp, Homo sapien
ccttcaggatattgggggtgtacat

SEQ ID NO: 3507317 - DNA, 25 bp, Homo sapien
catggtaaaacaagcgtccccttgg

SEQ ID NO: 3507318 - DNA, 25 bp, Homo sapien
ccgattttcatgttctccaaatact

SEQ ID NO: 3507319 - DNA, 25 bp, Homo sapien
cttggccctcgaaaaaagatggtct

SEQ ID NO: 3507320 - DNA, 25 bp, Homo sapien
aattaggtccacaaagcctctgtca

SEQ ID NO: 3507321 - DNA, 25 bp, Homo sapien
tcattatcgatttttgccaagagct

SEQ ID NO: 3507322 - DNA, 25 bp, Homo sapien
gagacaggggtgtaagccctgacca

SEQ ID NO: 3507323 - DNA, 25 bp, Homo sapien
gccctgaccaccaattcattatcga

SEQ ID NO: 3507324 - DNA, 25 bp, Homo sapien
gctcacagatactacagggccctag

SEQ ID NO: 3507325 - DNA, 25 bp, Homo sapien
tgtatcctggtactaggcacagagc

SEQ ID NO: 3507326 - DNA, 25 bp, Homo sapien
gccctaggatttgggtacccatgga

SEQ ID NO: 3507327 - DNA, 25 bp, Homo sapien
gaacccaaatatgggatgcccggat

SEQ ID NO: 3507328 - DNA, 25 bp, Homo sapien
caggaagccctaagacatggtccgg

SEQ ID NO: 3507329 - DNA, 25 bp, Homo sapien
cctaagacatggtccggcgaaggca

SEQ ID NO: 3507330 - DNA, 25 bp, Homo sapien
atggtccggcgaaggcagtccaaag

SEQ ID NO: 3507331 - DNA, 25 bp, Homo sapien
aggcagtccaaagcggaacctccgg

SEQ ID NO: 3507332 - DNA, 25 bp, Homo sapien
tctgtcagctttctagaagccttgc

SEQ ID NO: 3507333 - DNA, 25 bp, Homo sapien
tttctagaagccttgctgggcagct

SEQ ID NO: 3507334 - DNA, 25 bp, Homo sapien
aaacaaaacataggcaggttctgtc

SEQ ID NO: 3507335 - DNA, 25 bp, Homo sapien
aaaacataggcaggttctgtcagct

SEQ ID NO: 3507336 - DNA, 25 bp, Homo sapien
cttccacccacagggctgacccatt

SEQ ID NO: 3507337 - DNA, 25 bp, Homo sapien
tccacccacagggctgacccattac

SEQ ID NO: 3507338 - DNA, 25 bp, Homo sapien
tgccttccacccacagggctgaccc

SEQ ID NO: 3507339 - DNA, 25 bp, Homo sapien
ccttccacccacagggctgacccat

SEQ ID NO: 3507340 - DNA, 25 bp, Homo sapien
tttctcaatcaagggcagcgggtac

SEQ ID NO: 3507341 - DNA, 25 bp, Homo sapien
ctctttctcaatcaagggcagcggg

SEQ ID NO: 3507342 - DNA, 25 bp, Homo sapien
caagggcagcgggtacttggcttca

SEQ ID NO: 3507343 - DNA, 25 bp, Homo sapien
caatcaagggcagcgggtacttggc

SEQ ID NO: 3507344 - DNA, 25 bp, Homo sapien
tgtaaggtgattggctctctcctcc

SEQ ID NO: 3507345 - DNA, 25 bp, Homo sapien
tgattggctctctcctcctggagtt

SEQ ID NO: 3507346 - DNA, 25 bp, Homo sapien
ttggctctctcctcctggagttcat

SEQ ID NO: 3507347 - DNA, 25 bp, Homo sapien
ctgtaaggtgattggctctctcctc

SEQ ID NO: 3507348 - DNA, 25 bp, Homo sapien
gcacagtgaccccagtgacggtgat

SEQ ID NO: 3507349 - DNA, 25 bp, Homo sapien
tcttcaggaccaacacgagcacagt

SEQ ID NO: 3507350 - DNA, 25 bp, Homo sapien
caacacgagcacagtgaccccagtg

SEQ ID NO: 3507351 - DNA, 25 bp, Homo sapien
tcaggaccaacacgagcacagtgac

SEQ ID NO: 3507352 - DNA, 25 bp, Homo sapien
gtgaacagagcacctcaggtcttgc

SEQ ID NO: 3507353 - DNA, 25 bp, Homo sapien
aacagagcacctcaggtcttgcccg

SEQ ID NO: 3507354 - DNA, 25 bp, Homo sapien
cagagcacctcaggtcttgcccgcc

SEQ ID NO: 3507355 - DNA, 25 bp, Homo sapien
ctggcagacacaatgtgaacagagc

SEQ ID NO: 3507356 - DNA, 25 bp, Homo sapien
ggacagggcagctctcaggcgcaga

SEQ ID NO: 3507357 - DNA, 25 bp, Homo sapien
acagggcagctctcaggcgcagaac

SEQ ID NO: 3507358 - DNA, 25 bp, Homo sapien
agggcagctctcaggcgcagaacac

SEQ ID NO: 3507359 - DNA, 25 bp, Homo sapien
ctggacagggcagctctcaggcgca

SEQ ID NO: 3507360 - DNA, 25 bp, Homo sapien
agagaacagtagtgacacagaaggc

SEQ ID NO: 3507361 - DNA, 25 bp, Homo sapien
agaacagtagtgacacagaaggcgg

SEQ ID NO: 3507362 - DNA, 25 bp, Homo sapien
aagagaacagtagtgacacagaagg

SEQ ID NO: 3507363 - DNA, 25 bp, Homo sapien
gagaacagtagtgacacagaaggcg

SEQ ID NO: 3507364 - DNA, 25 bp, Homo sapien
ctgtcgtggaccagagggtagggag

SEQ ID NO: 3507365 - DNA, 25 bp, Homo sapien
gtcacacaggaaggatgtttcaggc

SEQ ID NO: 3507366 - DNA, 25 bp, Homo sapien
tgtcgtggaccagagggtagggagg

SEQ ID NO: 3507367 - DNA, 25 bp, Homo sapien
caggtcacacaggaaggatgtttca

SEQ ID NO: 3507368 - DNA, 25 bp, Homo sapien
tcccgccgggtcactggagtctcag

SEQ ID NO: 3507369 - DNA, 25 bp, Homo sapien
cactggagtctcagccttccggaat

SEQ ID NO: 3507370 - DNA, 25 bp, Homo sapien
caactcaagcccgacagggaaagtt

SEQ ID NO: 3507371 - DNA, 25 bp, Homo sapien
tcaagcccgacagggaaagttgcct

SEQ ID NO: 3507372 - DNA, 25 bp, Homo sapien
cgctccccgagaagggccgtggtcg

SEQ ID NO: 3507373 - DNA, 25 bp, Homo sapien
gacgcccaacacgtcgtcgaactgg

SEQ ID NO: 3507374 - DNA, 25 bp, Homo sapien
gcgggcccgcagactcgtggcgtcg

SEQ ID NO: 3507375 - DNA, 25 bp, Homo sapien
acgcacgcccgggaggacaaaagcg

SEQ ID NO: 3507376 - DNA, 25 bp, Homo sapien
ggggcgctgagccgtggcgtcctcg

SEQ ID NO: 3507377 - DNA, 25 bp, Homo sapien
cagcgctccatcatgaggctggcgg

SEQ ID NO: 3507378 - DNA, 25 bp, Homo sapien
gggcagcgctccatcatgaggctgg

SEQ ID NO: 3507379 - DNA, 25 bp, Homo sapien
gggcgctgagccgtggcgtcctcgc

SEQ ID NO: 3507380 - DNA, 25 bp, Homo sapien
gtgaccgggcggagggggatgctgg

SEQ ID NO: 3507381 - DNA, 25 bp, Homo sapien
gaaggaagaattcaggcagctgcaa

SEQ ID NO: 3507382 - DNA, 25 bp, Homo sapien
aggccgtctgggtgaccgggcggag

SEQ ID NO: 3507383 - DNA, 25 bp, Homo sapien
taagctcggcaaggctggagaaggc

SEQ ID NO: 3507384 - DNA, 25 bp, Homo sapien
gtactccgagcgctcctgcgttcat

SEQ ID NO: 3507385 - DNA, 25 bp, Homo sapien
ccgagcgctcctgcgttcattcatt

SEQ ID NO: 3507386 - DNA, 25 bp, Homo sapien
gcgtcgccgagttgaagacgtgtac

SEQ ID NO: 3507387 - DNA, 25 bp, Homo sapien
ttgaagacgtgtactccgagcgctc

SEQ ID NO: 3507388 - DNA, 25 bp, Homo sapien
tagagggtcttcacggtgcgtttcg

SEQ ID NO: 3507389 - DNA, 25 bp, Homo sapien
ttagagggtcttcacggtgcgtttc

SEQ ID NO: 3507390 - DNA, 25 bp, Homo sapien
cttcacggtgcgtttcggaaccttg

SEQ ID NO: 3507391 - DNA, 25 bp, Homo sapien
ggtgcgtttcggaaccttggctgcc

SEQ ID NO: 3507392 - DNA, 25 bp, Homo sapien
tacattatctagctgcccaaccttg

SEQ ID NO: 3507393 - DNA, 25 bp, Homo sapien
tgaattgctcacatctggccactga

SEQ ID NO: 3507394 - DNA, 25 bp, Homo sapien
taggtgtgtgagtctagctccggcc

SEQ ID NO: 3507395 - DNA, 25 bp, Homo sapien
caaccttgtcgcaatactacactgt

SEQ ID NO: 3507396 - DNA, 25 bp, Homo sapien
aaaatcatggcgaaaggggaagtga

SEQ ID NO: 3507397 - DNA, 25 bp, Homo sapien
aaacttataaaatcatggcgaaagg

SEQ ID NO: 3507398 - DNA, 25 bp, Homo sapien
ttataaaatcatggcgaaaggggaa

SEQ ID NO: 3507399 - DNA, 25 bp, Homo sapien
aacttataaaatcatggcgaaaggg

SEQ ID NO: 3507400 - DNA, 25 bp, Homo sapien
gccaaaccgtatcgtaagcttcatg

SEQ ID NO: 3507401 - DNA, 25 bp, Homo sapien
acagtgtctggcaattggtagatgc

SEQ ID NO: 3507402 - DNA, 25 bp, Homo sapien
aactactgctatatccctagaacag

SEQ ID NO: 3507403 - DNA, 25 bp, Homo sapien
tagctttgaaatccggaggcacctc

SEQ ID NO: 3507404 - DNA, 25 bp, Homo sapien
cctgttccctctgtgttattagaga

SEQ ID NO: 3507405 - DNA, 25 bp, Homo sapien
ctgcctgttccctctgtgttattag

SEQ ID NO: 3507406 - DNA, 25 bp, Homo sapien
gttccctctgtgttattagagaggc

SEQ ID NO: 3507407 - DNA, 25 bp, Homo sapien
ctctgtgttattagagaggcagata

SEQ ID NO: 3507408 - DNA, 25 bp, Homo sapien
ccatatggaaaaatgctccacatca

SEQ ID NO: 3507409 - DNA, 25 bp, Homo sapien
gaggctgtggataaaagagaacgct

SEQ ID NO: 3507410 - DNA, 25 bp, Homo sapien
taccgtcttgcaccaatcagaatgg

SEQ ID NO: 3507411 - DNA, 25 bp, Homo sapien
aatgagataccgtcttgcaccaatc

SEQ ID NO: 3507412 - DNA, 25 bp, Homo sapien
tacagcagttgcttcaactctttat

SEQ ID NO: 3507413 - DNA, 25 bp, Homo sapien
attgcttgtgagttcacagcttggg

SEQ ID NO: 3507414 - DNA, 25 bp, Homo sapien
gcctccagaaggaattgcttgtgag

SEQ ID NO: 3507415 - DNA, 25 bp, Homo sapien
tataaacggcatctgttgtggtagg

SEQ ID NO: 3507416 - DNA, 25 bp, Homo sapien
catgagagtcttgacacccctgggt

SEQ ID NO: 3507417 - DNA, 25 bp, Homo sapien
gagagtcttgacacccctgggtttc

SEQ ID NO: 3507418 - DNA, 25 bp, Homo sapien
cttgacacccctgggtttccagtga

SEQ ID NO: 3507419 - DNA, 25 bp, Homo sapien
tcttgacacccctgggtttccagtg

SEQ ID NO: 3507420 - DNA, 25 bp, Homo sapien
atgtgctactgctatgatattctct

SEQ ID NO: 3507421 - DNA, 25 bp, Homo sapien
tttggaaatattgtgcttggcaatg

SEQ ID NO: 3507422 - DNA, 25 bp, Homo sapien
caaatgtgctactgctatgatattc

SEQ ID NO: 3507423 - DNA, 25 bp, Homo sapien
ctcaaatgtgctactgctatgatat

SEQ ID NO: 3507424 - DNA, 25 bp, Homo sapien
agataatgtattgccccaacctctg

SEQ ID NO: 3507425 - DNA, 25 bp, Homo sapien
tagggcccaggctaataacctcatt

SEQ ID NO: 3507426 - DNA, 25 bp, Homo sapien
ggctgtgacgaggagtctgccccaa

SEQ ID NO: 3507427 - DNA, 25 bp, Homo sapien
tgccccttggcctgtagataatgta

SEQ ID NO: 3507428 - DNA, 25 bp, Homo sapien
catcctctgatatggagatgtttaa

SEQ ID NO: 3507429 - DNA, 25 bp, Homo sapien
gatatggagatgtttaaatctgggt

SEQ ID NO: 3507430 - DNA, 25 bp, Homo sapien
ctgatatggagatgtttaaatctgg

SEQ ID NO: 3507431 - DNA, 25 bp, Homo sapien
cctctgatatggagatgtttaaatc

SEQ ID NO: 3507432 - DNA, 25 bp, Homo sapien
gctttgccatctgcagctgcttaat

SEQ ID NO: 3507433 - DNA, 25 bp, Homo sapien
tttgccatctgcagctgcttaatac

SEQ ID NO: 3507434 - DNA, 25 bp, Homo sapien
ctggctttgccatctgcagctgctt

SEQ ID NO: 3507435 - DNA, 25 bp, Homo sapien
ggctttgccatctgcagctgcttaa

SEQ ID NO: 3507436 - DNA, 25 bp, Homo sapien
gaaccaaagagttggtaactctatc

SEQ ID NO: 3507437 - DNA, 25 bp, Homo sapien
caaagagttggtaactctatcttct

SEQ ID NO: 3507438 - DNA, 25 bp, Homo sapien
ccaaagagttggtaactctatcttc

SEQ ID NO: 3507439 - DNA, 25 bp, Homo sapien
agagttggtaactctatcttcttac

SEQ ID NO: 3507440 - DNA, 25 bp, Homo sapien
cccgttttcatctgattggaagctg

SEQ ID NO: 3507441 - DNA, 25 bp, Homo sapien
gcaggtcccgttttcatctgattgg

SEQ ID NO: 3507442 - DNA, 25 bp, Homo sapien
caggtcccgttttcatctgattgga

SEQ ID NO: 3507443 - DNA, 25 bp, Homo sapien
ggtcccgttttcatctgattggaag

SEQ ID NO: 3507444 - DNA, 25 bp, Homo sapien
gggacatcatagccacacagccgag

SEQ ID NO: 3507445 - DNA, 25 bp, Homo sapien
ttcctttctacatcgctgtgcactg

SEQ ID NO: 3507446 - DNA, 25 bp, Homo sapien
tcacatagtcggaagtgcagtctcc

SEQ ID NO: 3507447 - DNA, 25 bp, Homo sapien
ctgtgcactgtcacatagtcggaag

SEQ ID NO: 3507448 - DNA, 25 bp, Homo sapien
ccttcttcctttctacatcgctgtg

SEQ ID NO: 3507449 - DNA, 25 bp, Homo sapien
ctacgtaaggacagccaaagtcaat

SEQ ID NO: 3507450 - DNA, 25 bp, Homo sapien
acgtaaggacagccaaagtcaatac

SEQ ID NO: 3507451 - DNA, 25 bp, Homo sapien
tacgtaaggacagccaaagtcaata

SEQ ID NO: 3507452 - DNA, 25 bp, Homo sapien
gcttgaaaaatccagtcacagttag

SEQ ID NO: 3507453 - DNA, 25 bp, Homo sapien
cttaattaggtgatgtttggaggct

SEQ ID NO: 3507454 - DNA, 25 bp, Homo sapien
gatagtttagactctgtatgagacc

SEQ ID NO: 3507455 - DNA, 25 bp, Homo sapien
tcacagttagccttgtcactgtagt

SEQ ID NO: 3507456 - DNA, 25 bp, Homo sapien
ataggtaagattaaacccagctgca

SEQ ID NO: 3507457 - DNA, 25 bp, Homo sapien
tataggtaagattaaacccagctgc

SEQ ID NO: 3507458 - DNA, 25 bp, Homo sapien
atttcagccttagagaattagagcc

SEQ ID NO: 3507459 - DNA, 25 bp, Homo sapien
gagacgaatttcagccttagagaat

SEQ ID NO: 3507460 - DNA, 25 bp, Homo sapien
tcagccttagagaattagagccaat

SEQ ID NO: 3507461 - DNA, 25 bp, Homo sapien
tgtggcatcagagacgaatttcagc

SEQ ID NO: 3507462 - DNA, 25 bp, Homo sapien
tgaggccgggcgcggtggctcacgc

SEQ ID NO: 3507463 - DNA, 25 bp, Homo sapien
aagaatggatgaggccgggcgcggt

SEQ ID NO: 3507464 - DNA, 25 bp, Homo sapien
gatgaggccgggcgcggtggctcac

SEQ ID NO: 3507465 - DNA, 25 bp, Homo sapien
tggatgaggccgggcgcggtggctc

SEQ ID NO: 3507466 - DNA, 25 bp, Homo sapien
tgaagggaggctttctccacaaaat

SEQ ID NO: 3507467 - DNA, 25 bp, Homo sapien
gatgaagggaggctttctccacaaa

SEQ ID NO: 3507468 - DNA, 25 bp, Homo sapien
tggatgaagggaggctttctccaca

SEQ ID NO: 3507469 - DNA, 25 bp, Homo sapien
aatggatgaagggaggctttctcca

SEQ ID NO: 3507470 - DNA, 25 bp, Homo sapien
caggtaactgtggtgacaagactca

SEQ ID NO: 3507471 - DNA, 25 bp, Homo sapien
acatctaggtgggaaaaactgagca

SEQ ID NO: 3507472 - DNA, 25 bp, Homo sapien
tctaaagaatacattgacaggtaac

SEQ ID NO: 3507473 - DNA, 25 bp, Homo sapien
tgacaagactcaacatctaggtggg

SEQ ID NO: 3507474 - DNA, 25 bp, Homo sapien
tgtaggcagatcatggagagggcgt

SEQ ID NO: 3507475 - DNA, 25 bp, Homo sapien
gcagatcatggagagggcgttattt

SEQ ID NO: 3507476 - DNA, 25 bp, Homo sapien
taggcagatcatggagagggcgtta

SEQ ID NO: 3507477 - DNA, 25 bp, Homo sapien
ctgtaggcagatcatggagagggcg

SEQ ID NO: 3507478 - DNA, 25 bp, Homo sapien
tcagccccgctgactatgacatcct

SEQ ID NO: 3507479 - DNA, 25 bp, Homo sapien
aatataggtggaggctttctgggaa

SEQ ID NO: 3507480 - DNA, 25 bp, Homo sapien
cgctgactatgacatcctgctcact

SEQ ID NO: 3507481 - DNA, 25 bp, Homo sapien
tgcttgctctcataatataggtgga

SEQ ID NO: 3507482 - DNA, 25 bp, Homo sapien
gagagtcagggttagttatgccagt

SEQ ID NO: 3507483 - DNA, 25 bp, Homo sapien
tccagaagctgcaaacaccatagcc

SEQ ID NO: 3507484 - DNA, 25 bp, Homo sapien
ttgatgtactcttcgttcttcatga

SEQ ID NO: 3507485 - DNA, 25 bp, Homo sapien
ttatgccagttaaccacagcagccc

SEQ ID NO: 3507486 - DNA, 25 bp, Homo sapien
ttttagacctactgagcagggagcg

SEQ ID NO: 3507487 - DNA, 25 bp, Homo sapien
ccagagttaggaaaaggctcgccca

SEQ ID NO: 3507488 - DNA, 25 bp, Homo sapien
tagcttactgaccacatcggcactg

SEQ ID NO: 3507489 - DNA, 25 bp, Homo sapien
cagagtgaattcatcgcaggatcgc

SEQ ID NO: 3507490 - DNA, 25 bp, Homo sapien
tgaaagcctgtggtatcctgaacaa

SEQ ID NO: 3507491 - DNA, 25 bp, Homo sapien
gaaggatgcaattgaaagcctgtgg

SEQ ID NO: 3507492 - DNA, 25 bp, Homo sapien
aagaaggatgcaattgaaagcctgt

SEQ ID NO: 3507493 - DNA, 25 bp, Homo sapien
aagcctgtggtatcctgaacaacgc

SEQ ID NO: 3507494 - DNA, 25 bp, Homo sapien
gagctctctagtcagtttatcacaa

SEQ ID NO: 3507495 - DNA, 25 bp, Homo sapien
ggtcaaactttaactgagggctcag

SEQ ID NO: 3507496 - DNA, 25 bp, Homo sapien
tatcacaagggtgtacactcatccc

SEQ ID NO: 3507497 - DNA, 25 bp, Homo sapien
gcctttttgaggttggaagccacca

SEQ ID NO: 3507498 - DNA, 25 bp, Homo sapien
catcgtgtaatggtgagcactctgg

SEQ ID NO: 3507499 - DNA, 25 bp, Homo sapien
gaacttgcagatacggaggcctggc

SEQ ID NO: 3507500 - DNA, 25 bp, Homo sapien
ggatctacgccagggattctcattg

SEQ ID NO: 3507501 - DNA, 25 bp, Homo sapien
tgcccctggttgataactactgatc

SEQ ID NO: 3507502 - DNA, 25 bp, Homo sapien
ttattccggcacatgagtgaacctc

SEQ ID NO: 3507503 - DNA, 25 bp, Homo sapien
gatcccaggggatccttgatcactt

SEQ ID NO: 3507504 - DNA, 25 bp, Homo sapien
gtttctccagcctcgaccacagccc

SEQ ID NO: 3507505 - DNA, 25 bp, Homo sapien
tgttcgtggatccagggaagcactt

SEQ ID NO: 3507506 - DNA, 25 bp, Homo sapien
tcacttcctgcaagacttgtgagag

SEQ ID NO: 3507507 - DNA, 25 bp, Homo sapien
tcccaggtcaaaataggcagattca

SEQ ID NO: 3507508 - DNA, 25 bp, Homo sapien
gatgggcctctttagtgttaacaga

SEQ ID NO: 3507509 - DNA, 25 bp, Homo sapien
ttagtgttaacagagctgccacaca

SEQ ID NO: 3507510 - DNA, 25 bp, Homo sapien
ccccagcctgcagttgtacaaataa

SEQ ID NO: 3507511 - DNA, 25 bp, Homo sapien
tggaagacatatgggccccacaaag

SEQ ID NO: 3507512 - DNA, 25 bp, Homo sapien
agcctcaaattgctcccgcagctct

SEQ ID NO: 3507513 - DNA, 25 bp, Homo sapien
ctctggaagacatatgggccccaca

SEQ ID NO: 3507514 - DNA, 25 bp, Homo sapien
gatgacagtttcaatagtgagagtt

SEQ ID NO: 3507515 - DNA, 25 bp, Homo sapien
tcttcaaaagggcaatatcatagtc

SEQ ID NO: 3507516 - DNA, 25 bp, Homo sapien
ggtctgtctggcttaagtcatactc

SEQ ID NO: 3507517 - DNA, 25 bp, Homo sapien
tactctccagcagtaacattcaaag

SEQ ID NO: 3507518 - DNA, 25 bp, Homo sapien
ggtgagacgatgcttcctccacaaa

SEQ ID NO: 3507519 - DNA, 25 bp, Homo sapien
gcaatgcagtgagccgccgtgatca

SEQ ID NO: 3507520 - DNA, 25 bp, Homo sapien
agccgccgtgatcacccactgtggt

SEQ ID NO: 3507521 - DNA, 25 bp, Homo sapien
tcacccactgtggtgagacgatgct

SEQ ID NO: 3507522 - DNA, 25 bp, Homo sapien
ctgccagggataggaacccttctcc

SEQ ID NO: 3507523 - DNA, 25 bp, Homo sapien
ggctgtaccttaaccagactctgcc

SEQ ID NO: 3507524 - DNA, 25 bp, Homo sapien
attccaaggctgtaccttaaccaga

SEQ ID NO: 3507525 - DNA, 25 bp, Homo sapien
taaccagactctgcccacaactggg

SEQ ID NO: 3507526 - DNA, 25 bp, Homo sapien
taattccaaggctgtaccttaacca

SEQ ID NO: 3507527 - DNA, 25 bp, Homo sapien
ctggtaactcaaggatggcacatct

SEQ ID NO: 3507528 - DNA, 25 bp, Homo sapien
atcttctgtccctcctggaggtcat

SEQ ID NO: 3507529 - DNA, 25 bp, Homo sapien
actcaaggatggcacatcttctgtc

SEQ ID NO: 3507530 - DNA, 25 bp, Homo sapien
ggatggcacatcttctgtccctcct

SEQ ID NO: 3507531 - DNA, 25 bp, Homo sapien
tatttcccaaattcagtaaagcaaa

SEQ ID NO: 3507532 - DNA, 25 bp, Homo sapien
cccaaattcagtaaagcaaagtcag

SEQ ID NO: 3507533 - DNA, 25 bp, Homo sapien
ttcccaaattcagtaaagcaaagtc

SEQ ID NO: 3507534 - DNA, 25 bp, Homo sapien
tcagtaaagcaaagtcagaaaacat

SEQ ID NO: 3507535 - DNA, 25 bp, Homo sapien
aaaatcagcttgttcctgcttataa

SEQ ID NO: 3507536 - DNA, 25 bp, Homo sapien
ctagtagtaaaatcagcttgttcct

SEQ ID NO: 3507537 - DNA, 25 bp, Homo sapien
gagttgcagatttacctcgttcaaa

SEQ ID NO: 3507538 - DNA, 25 bp, Homo sapien
gggagcgaaagagttgcagatttac

SEQ ID NO: 3507539 - DNA, 25 bp, Homo sapien
tgatttaactagcaaggtgggcagt

SEQ ID NO: 3507540 - DNA, 25 bp, Homo sapien
ggatgagaggtagctaaagatatgc

SEQ ID NO: 3507541 - DNA, 25 bp, Homo sapien
tccaggctagtttaatgatgtgatc

SEQ ID NO: 3507542 - DNA, 25 bp, Homo sapien
cacccggccggtaatttcctgatga

SEQ ID NO: 3507543 - DNA, 25 bp, Homo sapien
tactggaatgaatgaggtaccaaat

SEQ ID NO: 3507544 - DNA, 25 bp, Homo sapien
ttttcagtcaacttgtggatctcca

SEQ ID NO: 3507545 - DNA, 25 bp, Homo sapien
taaaagtaaagaccttcacctgcag

SEQ ID NO: 3507546 - DNA, 25 bp, Homo sapien
gcatatggtgactttgggtctcagt

SEQ ID NO: 3507547 - DNA, 25 bp, Homo sapien
gcaaatatcattgaaaagctcctat

SEQ ID NO: 3507548 - DNA, 25 bp, Homo sapien
caaaggcatcctctactttctaagg

SEQ ID NO: 3507549 - DNA, 25 bp, Homo sapien
tactgttattcagaagaacaggagc

SEQ ID NO: 3507550 - DNA, 25 bp, Homo sapien
ttgtgcaggaagtaaaatacgccca

SEQ ID NO: 3507551 - DNA, 25 bp, Homo sapien
tattgaagaaactatgagcacagac

SEQ ID NO: 3507552 - DNA, 25 bp, Homo sapien
tcaagtatctgtgggtgtttatagc

SEQ ID NO: 3507553 - DNA, 25 bp, Homo sapien
gatggcaaactcaaggcaaaagcca

SEQ ID NO: 3507554 - DNA, 25 bp, Homo sapien
cagaaaggctgacacaatgttaggg

SEQ ID NO: 3507555 - DNA, 25 bp, Homo sapien
tgctgacggccatgatatatacaat

SEQ ID NO: 3507556 - DNA, 25 bp, Homo sapien
aagaacagcaactccttcgatgaag

SEQ ID NO: 3507557 - DNA, 25 bp, Homo sapien
gctttgtctatttgaggcccaagaa

SEQ ID NO: 3507558 - DNA, 25 bp, Homo sapien
tgcctctgcttaaccccatcgtgta

SEQ ID NO: 3507559 - DNA, 25 bp, Homo sapien
tgcatctgtccttatcagcacgctg

SEQ ID NO: 3507560 - DNA, 25 bp, Homo sapien
ccttctgcggtccaaataaaatcaa

SEQ ID NO: 3507561 - DNA, 25 bp, Homo sapien
tacattgctgaaatatcccctgcca

SEQ ID NO: 3507562 - DNA, 25 bp, Homo sapien
tgggtggatgcctgaacgcttcgtc

SEQ ID NO: 3507563 - DNA, 25 bp, Homo sapien
tataggcagtaaagaccaggcttgg

SEQ ID NO: 3507564 - DNA, 25 bp, Homo sapien
cagactgcatcatatgcaaggtgca

SEQ ID NO: 3507565 - DNA, 25 bp, Homo sapien
cagaggatcaggtaaatcagcaggt

SEQ ID NO: 3507566 - DNA, 25 bp, Homo sapien
tatgttcctctcaggccagaggatc

SEQ ID NO: 3507567 - DNA, 25 bp, Homo sapien
ttttcttttgtatcagcttcctcca

SEQ ID NO: 3507568 - DNA, 25 bp, Homo sapien
ctggttttcttttgtatcagcttcc

SEQ ID NO: 3507569 - DNA, 25 bp, Homo sapien
caagagtctggaattgtttttatat

SEQ ID NO: 3507570 - DNA, 25 bp, Homo sapien
ggttttcttttgtatcagcttcctc

SEQ ID NO: 3507571 - DNA, 25 bp, Homo sapien
tgatctcttggcaggaacactacaa

SEQ ID NO: 3507572 - DNA, 25 bp, Homo sapien
tggcaggaacactacaagccagcag

SEQ ID NO: 3507573 - DNA, 25 bp, Homo sapien
caggaacactacaagccagcagaga

SEQ ID NO: 3507574 - DNA, 25 bp, Homo sapien
cttggcaggaacactacaagccagc

SEQ ID NO: 3507575 - DNA, 25 bp, Homo sapien
ctccattacactgaggtaaaaagga

SEQ ID NO: 3507576 - DNA, 25 bp, Homo sapien
tttgaattggtagtttctgtattcc

SEQ ID NO: 3507577 - DNA, 25 bp, Homo sapien
agttttctcgatatttgctttgaat

SEQ ID NO: 3507578 - DNA, 25 bp, Homo sapien
tccattacactgaggtaaaaaggac

SEQ ID NO: 3507579 - DNA, 25 bp, Homo sapien
gcctttcttagtgcctcctttacat

SEQ ID NO: 3507580 - DNA, 25 bp, Homo sapien
tatattctgacagttgcctttctta

SEQ ID NO: 3507581 - DNA, 25 bp, Homo sapien
aatatattctgacagttgcctttct

SEQ ID NO: 3507582 - DNA, 25 bp, Homo sapien
gttgcctttcttagtgcctccttta

SEQ ID NO: 3507583 - DNA, 25 bp, Homo sapien
ctgtgtaggacagcgatatcaatct

SEQ ID NO: 3507584 - DNA, 25 bp, Homo sapien
tccatagtagagagtaaccgcagcg

SEQ ID NO: 3507585 - DNA, 25 bp, Homo sapien
agaaggccttgtggcgcccctcggc

SEQ ID NO: 3507586 - DNA, 25 bp, Homo sapien
ggcatcacataaatgaaggtaatcg

SEQ ID NO: 3507587 - DNA, 25 bp, Homo sapien
aaacccccactaagagtatgcagat

SEQ ID NO: 3507588 - DNA, 25 bp, Homo sapien
tcaggaatggagatatttgagcagg

SEQ ID NO: 3507589 - DNA, 25 bp, Homo sapien
aacaactagtaaatgttgaggcatt

SEQ ID NO: 3507590 - DNA, 25 bp, Homo sapien
tatgggggacaagtgggtggagttc

SEQ ID NO: 3507591 - DNA, 25 bp, Homo sapien
ggtcgccagtaggaagcattcagac

SEQ ID NO: 3507592 - DNA, 25 bp, Homo sapien
gccagtaggaagcattcagacgtcc

SEQ ID NO: 3507593 - DNA, 25 bp, Homo sapien
gtaggaagcattcagacgtcccaaa

SEQ ID NO: 3507594 - DNA, 25 bp, Homo sapien
ggaagcattcagacgtcccaaacat

SEQ ID NO: 3507595 - DNA, 25 bp, Homo sapien
ctacagaacagagctgggcttcaca

SEQ ID NO: 3507596 - DNA, 25 bp, Homo sapien
tacagaacagagctgggcttcacag

SEQ ID NO: 3507597 - DNA, 25 bp, Homo sapien
actacagaacagagctgggcttcac

SEQ ID NO: 3507598 - DNA, 25 bp, Homo sapien
gactacagaacagagctgggcttca

SEQ ID NO: 3507599 - DNA, 25 bp, Homo sapien
ctagtgacagggagggctgttccac

SEQ ID NO: 3507600 - DNA, 25 bp, Homo sapien
tcttaggaatcccataagcattata

SEQ ID NO: 3507601 - DNA, 25 bp, Homo sapien
ggtgtgactactgtggcaagcccta

SEQ ID NO: 3507602 - DNA, 25 bp, Homo sapien
actactgtggcaagccctatgtcca

SEQ ID NO: 3507603 - DNA, 25 bp, Homo sapien
agccctatgtccacaaaagccaagt

SEQ ID NO: 3507604 - DNA, 25 bp, Homo sapien
gaaatatcacaaagaagatgtcaca

SEQ ID NO: 3507605 - DNA, 25 bp, Homo sapien
ctattaaggtgacaatgtagattcc

SEQ ID NO: 3507606 - DNA, 25 bp, Homo sapien
tctgtcactgtggtatggtttccaa

SEQ ID NO: 3507607 - DNA, 25 bp, Homo sapien
tgtcacaaagtgtaggatcctcagt

SEQ ID NO: 3507608 - DNA, 25 bp, Homo sapien
aagacctgcaccactgtcgccttca

SEQ ID NO: 3507609 - DNA, 25 bp, Homo sapien
acaggaagacctgcaccactgtcgc

SEQ ID NO: 3507610 - DNA, 25 bp, Homo sapien
ggaagacctgcaccactgtcgcctt

SEQ ID NO: 3507611 - DNA, 25 bp, Homo sapien
acctgcaccactgtcgccttcacac

SEQ ID NO: 3507612 - DNA, 25 bp, Homo sapien
acttggaagacaaaggagctttggc

SEQ ID NO: 3507613 - DNA, 25 bp, Homo sapien
ttggaagacaaaggagctttggcta

SEQ ID NO: 3507614 - DNA, 25 bp, Homo sapien
taacttggaagacaaaggagctttg

SEQ ID NO: 3507615 - DNA, 25 bp, Homo sapien
ggaagacaaaggagctttggctaag

SEQ ID NO: 3507616 - DNA, 25 bp, Homo sapien
tcaatggggaagtaatgtcctgggt

SEQ ID NO: 3507617 - DNA, 25 bp, Homo sapien
caatggggaagtaatgtcctgggtc

SEQ ID NO: 3507618 - DNA, 25 bp, Homo sapien
tctgccatcaatggggaagtaatgt

SEQ ID NO: 3507619 - DNA, 25 bp, Homo sapien
aaaataacaagcatcatgagaaagt

SEQ ID NO: 3507620 - DNA, 25 bp, Homo sapien
taacaagcatcatgagaaagtattt

SEQ ID NO: 3507621 - DNA, 25 bp, Homo sapien
tatcattatttgaagttctactaaa

SEQ ID NO: 3507622 - DNA, 25 bp, Homo sapien
aataacaagcatcatgagaaagtat

SEQ ID NO: 3507623 - DNA, 25 bp, Homo sapien
cccccttaatctccttgttcctgag

SEQ ID NO: 3507624 - DNA, 25 bp, Homo sapien
agcccccttaatctccttgttcctg

SEQ ID NO: 3507625 - DNA, 25 bp, Homo sapien
gcccccttaatctccttgttcctga

SEQ ID NO: 3507626 - DNA, 25 bp, Homo sapien
cttgttctggtcagttgagtagcta

SEQ ID NO: 3507627 - DNA, 25 bp, Homo sapien
tgatgaggatatagatgtagcagac

SEQ ID NO: 3507628 - DNA, 25 bp, Homo sapien
tcagttgagtagctaaaattgggca

SEQ ID NO: 3507629 - DNA, 25 bp, Homo sapien
catagaacagggtaaccacagtgag

SEQ ID NO: 3507630 - DNA, 25 bp, Homo sapien
tcaagtaagggagcgaaatcacaga

SEQ ID NO: 3507631 - DNA, 25 bp, Homo sapien
ctactaagagtagctggacactgac

SEQ ID NO: 3507632 - DNA, 25 bp, Homo sapien
tgagagaacaactgtggagacactg

SEQ ID NO: 3507633 - DNA, 25 bp, Homo sapien
ggaagtagtataggagacagcaatg

SEQ ID NO: 3507634 - DNA, 25 bp, Homo sapien
gagactgtatttctctccaccagga

SEQ ID NO: 3507635 - DNA, 25 bp, Homo sapien
gatggcacatccaaggtaggagact

SEQ ID NO: 3507636 - DNA, 25 bp, Homo sapien
tggactgcaaattgccacaaagcgg

SEQ ID NO: 3507637 - DNA, 25 bp, Homo sapien
tcgactgttgcaaagaaagccgctg

SEQ ID NO: 3507638 - DNA, 25 bp, Homo sapien
ggtgtgacagaagatgaataggcca

SEQ ID NO: 3507639 - DNA, 25 bp, Homo sapien
gttgggtgtgacagaagatgaatag

SEQ ID NO: 3507640 - DNA, 25 bp, Homo sapien
gtgtgacagaagatgaataggccat

SEQ ID NO: 3507641 - DNA, 25 bp, Homo sapien
tgggtgtgacagaagatgaataggc

SEQ ID NO: 3507642 - DNA, 25 bp, Homo sapien
gcaaaagccaagtggctcagaaaga

SEQ ID NO: 3507643 - DNA, 25 bp, Homo sapien
gaaagaaatacataggatgatggag

SEQ ID NO: 3507644 - DNA, 25 bp, Homo sapien
gtcagcaaaagccaagtggctcaga

SEQ ID NO: 3507645 - DNA, 25 bp, Homo sapien
gccaagtggctcagaaagaaataca

SEQ ID NO: 3507646 - DNA, 25 bp, Homo sapien
cgaaggattggatcatctgttaagc

SEQ ID NO: 3507647 - DNA, 25 bp, Homo sapien
gctgagattaccagataggatgatc

SEQ ID NO: 3507648 - DNA, 25 bp, Homo sapien
taagcccaataggatgaaccccgtc

SEQ ID NO: 3507649 - DNA, 25 bp, Homo sapien
ggtgtgattcccgtccttcagggaa

SEQ ID NO: 3507650 - DNA, 25 bp, Homo sapien
gacgaagtagctgctgactaaatga

SEQ ID NO: 3507651 - DNA, 25 bp, Homo sapien
gaagtagctgctgactaaatgaacc

SEQ ID NO: 3507652 - DNA, 25 bp, Homo sapien
cgaagtagctgctgactaaatgaac

SEQ ID NO: 3507653 - DNA, 25 bp, Homo sapien
gagacgaagtagctgctgactaaat

SEQ ID NO: 3507654 - DNA, 25 bp, Homo sapien
cccccttaatctccttgttcctgag

SEQ ID NO: 3507655 - DNA, 25 bp, Homo sapien
agcccccttaatctccttgttcctg

SEQ ID NO: 3507656 - DNA, 25 bp, Homo sapien
gcccccttaatctccttgttcctga

SEQ ID NO: 3507657 - DNA, 25 bp, Homo sapien
caccaccttgttctggtcagttgag

SEQ ID NO: 3507658 - DNA, 25 bp, Homo sapien
tgggcatcacataaatgaaggtaat

SEQ ID NO: 3507659 - DNA, 25 bp, Homo sapien
cacataaatgaaggtaatggtccca

SEQ ID NO: 3507660 - DNA, 25 bp, Homo sapien
ccttgttctggtcagttgagtagct

SEQ ID NO: 3507661 - DNA, 25 bp, Homo sapien
gatatggctatgacacacacagtgg

SEQ ID NO: 3507662 - DNA, 25 bp, Homo sapien
tatttggcccacagaaggacagtct

SEQ ID NO: 3507663 - DNA, 25 bp, Homo sapien
taggacatgcccactaagatgatgc

SEQ ID NO: 3507664 - DNA, 25 bp, Homo sapien
taaaatcatgggaacaagcaagctt

SEQ ID NO: 3507665 - DNA, 25 bp, Homo sapien
aggaagcactcggccgtaccaaacg

SEQ ID NO: 3507666 - DNA, 25 bp, Homo sapien
tcggccgtaccaaacgtcactacag

SEQ ID NO: 3507667 - DNA, 25 bp, Homo sapien
aagcactcggccgtaccaaacgtca

SEQ ID NO: 3507668 - DNA, 25 bp, Homo sapien
gtaccaaacgtcactacagaacaga

SEQ ID NO: 3507669 - DNA, 25 bp, Homo sapien
tccttaggaagctcatgagcatgac

SEQ ID NO: 3507670 - DNA, 25 bp, Homo sapien
gccacacaaccagcaacagggagag

SEQ ID NO: 3507671 - DNA, 25 bp, Homo sapien
ggagtacccaatgtctacaaaggcc

SEQ ID NO: 3507672 - DNA, 25 bp, Homo sapien
caggtgtgactgatgaggagtaccc

SEQ ID NO: 3507673 - DNA, 25 bp, Homo sapien
tcctcagataaccccaaaagagtaa

SEQ ID NO: 3507674 - DNA, 25 bp, Homo sapien
cacaaactgtagtatcctcagataa

SEQ ID NO: 3507675 - DNA, 25 bp, Homo sapien
caaactgtagtatcctcagataacc

SEQ ID NO: 3507676 - DNA, 25 bp, Homo sapien
aaactgtagtatcctcagataaccc

SEQ ID NO: 3507677 - DNA, 25 bp, Homo sapien
gataacgacaattctttgaggcagg

SEQ ID NO: 3507678 - DNA, 25 bp, Homo sapien
taagctaggcaaagatgaagtgagt

SEQ ID NO: 3507679 - DNA, 25 bp, Homo sapien
ccagcacctagggaattgatatgct

SEQ ID NO: 3507680 - DNA, 25 bp, Homo sapien
aagatgcggctgagagataacgaca

SEQ ID NO: 3507681 - DNA, 25 bp, Homo sapien
tagagacagacacctcgatcactgc

SEQ ID NO: 3507682 - DNA, 25 bp, Homo sapien
ttgtgcatagtctggagctcctctg

SEQ ID NO: 3507683 - DNA, 25 bp, Homo sapien
gaactgcccactgattcttacatgg

SEQ ID NO: 3507684 - DNA, 25 bp, Homo sapien
gaacagctaggaaaggtacctcagc

SEQ ID NO: 3507685 - DNA, 25 bp, Homo sapien
catcaccacacccagctaatttttg

SEQ ID NO: 3507686 - DNA, 25 bp, Homo sapien
ccgagtaacaaggattacaggtgcc

SEQ ID NO: 3507687 - DNA, 25 bp, Homo sapien
cgaattgccttttccatttttccat

SEQ ID NO: 3507688 - DNA, 25 bp, Homo sapien
tatataactccactggccaaaggca

SEQ ID NO: 3507689 - DNA, 25 bp, Homo sapien
tcctataccctaaaagtggccacga

SEQ ID NO: 3507690 - DNA, 25 bp, Homo sapien
cattcatggacatacataggccctg

SEQ ID NO: 3507691 - DNA, 25 bp, Homo sapien
ggcagtttcagaggcttccactcag

SEQ ID NO: 3507692 - DNA, 25 bp, Homo sapien
ccacacacatgcttagacatatgag

SEQ ID NO: 3507693 - DNA, 25 bp, Homo sapien
gagcgcaagctttatttgagataga

SEQ ID NO: 3507694 - DNA, 25 bp, Homo sapien
ccatgcctgacctagtggtttatct

SEQ ID NO: 3507695 - DNA, 25 bp, Homo sapien
catggatttctatgaactactttgg

SEQ ID NO: 3507696 - DNA, 25 bp, Homo sapien
tgttgtccccaaattaactctgcag

SEQ ID NO: 3507697 - DNA, 25 bp, Homo sapien
tttattcctaactctcatgggtggg

SEQ ID NO: 3507698 - DNA, 25 bp, Homo sapien
gacatggtgcccagcaatggtcctg

SEQ ID NO: 3507699 - DNA, 25 bp, Homo sapien
gaaactaacatccatgaggtgggaa

SEQ ID NO: 3507700 - DNA, 25 bp, Homo sapien
aaggcagtcttgtttgccagccacg

SEQ ID NO: 3507701 - DNA, 25 bp, Homo sapien
cttgggcgtgttggccactcaggca

SEQ ID NO: 3507702 - DNA, 25 bp, Homo sapien
gccagccacgttggatgtggcatga

SEQ ID NO: 3507703 - DNA, 25 bp, Homo sapien
gacacctacgaacctgcagcttctg

SEQ ID NO: 3507704 - DNA, 25 bp, Homo sapien
tggcttgacccgtctagccttaact

SEQ ID NO: 3507705 - DNA, 25 bp, Homo sapien
tctgacctgtggtatcagtcaagtg

SEQ ID NO: 3507706 - DNA, 25 bp, Homo sapien
tctgatcttgagtcctttgtatgct

SEQ ID NO: 3507707 - DNA, 25 bp, Homo sapien
tatcagtcaagtggcttgacccgtc

SEQ ID NO: 3507708 - DNA, 25 bp, Homo sapien
gcagttctgaaaggcagcatttgtc

SEQ ID NO: 3507709 - DNA, 25 bp, Homo sapien
tgcagttctgaaaggcagcatttgt

SEQ ID NO: 3507710 - DNA, 25 bp, Homo sapien
catagcggacactagaaacgttttt

SEQ ID NO: 3507711 - DNA, 25 bp, Homo sapien
acacatttccatagcggacactaga

SEQ ID NO: 3507712 - DNA, 25 bp, Homo sapien
aaaacttcaccaatctgcctccatg

SEQ ID NO: 3507713 - DNA, 25 bp, Homo sapien
tctattatggcttctgattcacagt

SEQ ID NO: 3507714 - DNA, 25 bp, Homo sapien
cagaggccgtatttaagtgagacta

SEQ ID NO: 3507715 - DNA, 25 bp, Homo sapien
cacataaattgctggctcataaaca

SEQ ID NO: 3507716 - DNA, 25 bp, Homo sapien
tgcttgtcttctggagaggccccag

SEQ ID NO: 3507717 - DNA, 25 bp, Homo sapien
agcatagcggcatctgcttgtcttc

SEQ ID NO: 3507718 - DNA, 25 bp, Homo sapien
gggctgttcaggaagcatagcggca

SEQ ID NO: 3507719 - DNA, 25 bp, Homo sapien
ttctgtgggctgttcaggaagcata

SEQ ID NO: 3507720 - DNA, 25 bp, Homo sapien
tcctcgaggcatttctgtccaggta

SEQ ID NO: 3507721 - DNA, 25 bp, Homo sapien
gtgagaggggccttcagtacatcct

SEQ ID NO: 3507722 - DNA, 25 bp, Homo sapien
tcagtacatcctcgaggcatttctg

SEQ ID NO: 3507723 - DNA, 25 bp, Homo sapien
gggccttcagtacatcctcgaggca

SEQ ID NO: 3507724 - DNA, 25 bp, Homo sapien
actacaaatgtctatcactgtgaaa

SEQ ID NO: 3507725 - DNA, 25 bp, Homo sapien
gcactacaaatgtctatcactgtga

SEQ ID NO: 3507726 - DNA, 25 bp, Homo sapien
aaaagcactacaaatgtctatcact

SEQ ID NO: 3507727 - DNA, 25 bp, Homo sapien
agcactacaaatgtctatcactgtg

SEQ ID NO: 3507728 - DNA, 25 bp, Homo sapien
tgcagatgacaccaagaacacgatt

SEQ ID NO: 3507729 - DNA, 25 bp, Homo sapien
ggatatctagcttataccacagcca

SEQ ID NO: 3507730 - DNA, 25 bp, Homo sapien
ttcaaaagtggtgtaagactagact

SEQ ID NO: 3507731 - DNA, 25 bp, Homo sapien
cagaccaaagtatatctaggagcta

SEQ ID NO: 3507732 - DNA, 25 bp, Homo sapien
tcatacatagtaggagtaaaatgtt

SEQ ID NO: 3507733 - DNA, 25 bp, Homo sapien
cctatcaggttagccaagatttaaa

SEQ ID NO: 3507734 - DNA, 25 bp, Homo sapien
tgcaaacaaaataatagcgatatat

SEQ ID NO: 3507735 - DNA, 25 bp, Homo sapien
caaggatattcatttgcgtattctg

SEQ ID NO: 3507736 - DNA, 25 bp, Homo sapien
caaaggaggatgtgtaagtaaatcc

SEQ ID NO: 3507737 - DNA, 25 bp, Homo sapien
ccaaaggaggatgtgtaagtaaatc

SEQ ID NO: 3507738 - DNA, 25 bp, Homo sapien
ggaggatgtgtaagtaaatccagga

SEQ ID NO: 3507739 - DNA, 25 bp, Homo sapien
gatgtgtaagtaaatccaggaccat

SEQ ID NO: 3507740 - DNA, 25 bp, Homo sapien
gcatagaaaaaatgcccatggtcgt

SEQ ID NO: 3507741 - DNA, 25 bp, Homo sapien
ctgtagttgcatagaaaaaatgccc

SEQ ID NO: 3507742 - DNA, 25 bp, Homo sapien
tgtagttgcatagaaaaaatgccca

SEQ ID NO: 3507743 - DNA, 25 bp, Homo sapien
gttgcatagaaaaaatgcccatggt

SEQ ID NO: 3507744 - DNA, 25 bp, Homo sapien
aggctgtggtacgaagatcagttga

SEQ ID NO: 3507745 - DNA, 25 bp, Homo sapien
gctgtggtacgaagatcagttgagc

SEQ ID NO: 3507746 - DNA, 25 bp, Homo sapien
ggctgtggtacgaagatcagttgag

SEQ ID NO: 3507747 - DNA, 25 bp, Homo sapien
gaggctgtggtacgaagatcagttg

SEQ ID NO: 3507748 - DNA, 25 bp, Homo sapien
ggtaaacagcctcttcattaaattc

SEQ ID NO: 3507749 - DNA, 25 bp, Homo sapien
atctccacgagttcaccttcatttc

SEQ ID NO: 3507750 - DNA, 25 bp, Homo sapien
tctccaaaatctccacgagttcacc

SEQ ID NO: 3507751 - DNA, 25 bp, Homo sapien
ttggtaaacagcctcttcattaaat

SEQ ID NO: 3507752 - DNA, 25 bp, Homo sapien
gaaagtggatgaacgcaatgctatc

SEQ ID NO: 3507753 - DNA, 25 bp, Homo sapien
agaaagtggatgaacgcaatgctat

SEQ ID NO: 3507754 - DNA, 25 bp, Homo sapien
gagaaagtggatgaacgcaatgcta

SEQ ID NO: 3507755 - DNA, 25 bp, Homo sapien
agaaatggatcactatcatcaaagg

SEQ ID NO: 3507756 - DNA, 25 bp, Homo sapien
caaagatagaagtcatatagagtac

SEQ ID NO: 3507757 - DNA, 25 bp, Homo sapien
gggctagaaaaataccactaatcat

SEQ ID NO: 3507758 - DNA, 25 bp, Homo sapien
tcataatgcaaaaagtggtggaaat

SEQ ID NO: 3507759 - DNA, 25 bp, Homo sapien
catgctgatcttctctgtatccaat

SEQ ID NO: 3507760 - DNA, 25 bp, Homo sapien
aatccttgcacatgggccatgctga

SEQ ID NO: 3507761 - DNA, 25 bp, Homo sapien
agtacatgtgctcccgaagtgagca

SEQ ID NO: 3507762 - DNA, 25 bp, Homo sapien
tttagtacatgtgctcccgaagtga

SEQ ID NO: 3507763 - DNA, 25 bp, Homo sapien
gggacctcactgtaacccacatgga

SEQ ID NO: 3507764 - DNA, 25 bp, Homo sapien
aatgggacctcactgtaacccacat

SEQ ID NO: 3507765 - DNA, 25 bp, Homo sapien
tgggacctcactgtaacccacatgg

SEQ ID NO: 3507766 - DNA, 25 bp, Homo sapien
ggaatgggacctcactgtaacccac

SEQ ID NO: 3507767 - DNA, 25 bp, Homo sapien
ttgccacccacataataagcataga

SEQ ID NO: 3507768 - DNA, 25 bp, Homo sapien
tctatcctcaagcacgccccagtgt

SEQ ID NO: 3507769 - DNA, 25 bp, Homo sapien
ggttcggtgaacatatgtaggtttg

SEQ ID NO: 3507770 - DNA, 25 bp, Homo sapien
taagcatagaaactgataggtaatt

SEQ ID NO: 3507771 - DNA, 25 bp, Homo sapien
agtcccgtgttcagacgccacttgt

SEQ ID NO: 3507772 - DNA, 25 bp, Homo sapien
tgttctgagtcaccacttgttgaga

SEQ ID NO: 3507773 - DNA, 25 bp, Homo sapien
tgttcacatcgtcgaagtcccgtgt

SEQ ID NO: 3507774 - DNA, 25 bp, Homo sapien
gttgagaacccaattgtgtcactgt

SEQ ID NO: 3507775 - DNA, 25 bp, Homo sapien
aaatcttacatggcttctcaacaca

SEQ ID NO: 3507776 - DNA, 25 bp, Homo sapien
aatcttacatggcttctcaacacag

SEQ ID NO: 3507777 - DNA, 25 bp, Homo sapien
agtcatgcagtgactaaatcttaca

SEQ ID NO: 3507778 - DNA, 25 bp, Homo sapien
gattgtgtgtaaaaccactcgcctt

SEQ ID NO: 3507779 - DNA, 25 bp, Homo sapien
cagattgtgtgtaaaaccactcgcc

SEQ ID NO: 3507780 - DNA, 25 bp, Homo sapien
attgtgtgtaaaaccactcgccttc

SEQ ID NO: 3507781 - DNA, 25 bp, Homo sapien
tcagattgtgtgtaaaaccactcgc

SEQ ID NO: 3507782 - DNA, 25 bp, Homo sapien
tttcatcaaagccctcttcatctca

SEQ ID NO: 3507783 - DNA, 25 bp, Homo sapien
taatttcatcaaagccctcttcatc

SEQ ID NO: 3507784 - DNA, 25 bp, Homo sapien
ccataatttcatcaaagccctcttc

SEQ ID NO: 3507785 - DNA, 25 bp, Homo sapien
cataatttcatcaaagccctcttca

SEQ ID NO: 3507786 - DNA, 25 bp, Homo sapien
gccttttgtctcccagtggttgatg

SEQ ID NO: 3507787 - DNA, 25 bp, Homo sapien
ctatttcgcaaactgtagataagca

SEQ ID NO: 3507788 - DNA, 25 bp, Homo sapien
tgtcagaagtgagtaagacaatgac

SEQ ID NO: 3507789 - DNA, 25 bp, Homo sapien
aactgtagataagcagattcagcag

SEQ ID NO: 3507790 - DNA, 25 bp, Homo sapien
gatacccatgatgtttgaacagtac

SEQ ID NO: 3507791 - DNA, 25 bp, Homo sapien
acatgcaagttctaacactgctggg

SEQ ID NO: 3507792 - DNA, 25 bp, Homo sapien
caaaaacgtgtctgcacatgcaagt

SEQ ID NO: 3507793 - DNA, 25 bp, Homo sapien
caaaagggaaaactagatacccatg

SEQ ID NO: 3507794 - DNA, 25 bp, Homo sapien
caggtccaccacagataagttcagg

SEQ ID NO: 3507795 - DNA, 25 bp, Homo sapien
gtccaccacagataagttcaggaga

SEQ ID NO: 3507796 - DNA, 25 bp, Homo sapien
cgatgactataataatggcatttcc

SEQ ID NO: 3507797 - DNA, 25 bp, Homo sapien
tatcagggtcaccagataaataacc

SEQ ID NO: 3507798 - DNA, 25 bp, Homo sapien
ctagggagacgatgactataataat

SEQ ID NO: 3507799 - DNA, 25 bp, Homo sapien
caccagataaataaccaggaaagcc

SEQ ID NO: 3507800 - DNA, 25 bp, Homo sapien
ctccaaggtctatccttctgaccat

SEQ ID NO: 3507801 - DNA, 25 bp, Homo sapien
tctccaaggtctatccttctgacca

SEQ ID NO: 3507802 - DNA, 25 bp, Homo sapien
gatctccaaggtctatccttctgac

SEQ ID NO: 3507803 - DNA, 25 bp, Homo sapien
agatctccaaggtctatccttctga

SEQ ID NO: 3507804 - DNA, 25 bp, Homo sapien
tcttcgccatagttttatcaaagtc

SEQ ID NO: 3507805 - DNA, 25 bp, Homo sapien
ttttcttcgccatagttttatcaaa

SEQ ID NO: 3507806 - DNA, 25 bp, Homo sapien
ttcgccatagttttatcaaagtcct

SEQ ID NO: 3507807 - DNA, 25 bp, Homo sapien
cgccatagttttatcaaagtcctct

SEQ ID NO: 3507808 - DNA, 25 bp, Homo sapien
gatttcaaataagaaggtgtctgca

SEQ ID NO: 3507809 - DNA, 25 bp, Homo sapien
taagcaacgtgtaagccaatgagat

SEQ ID NO: 3507810 - DNA, 25 bp, Homo sapien
taagctatagatgagcggattgagc

SEQ ID NO: 3507811 - DNA, 25 bp, Homo sapien
cagaactcgaatgtaagacaagagg

SEQ ID NO: 3507812 - DNA, 25 bp, Homo sapien
ataaaaacccctctgttcataatca

SEQ ID NO: 3507813 - DNA, 25 bp, Homo sapien
acagtagccaccatgatccctgaga

SEQ ID NO: 3507814 - DNA, 25 bp, Homo sapien
tagccaccatgatccctgagatcca

SEQ ID NO: 3507815 - DNA, 25 bp, Homo sapien
agtagccaccatgatccctgagatc

SEQ ID NO: 3507816 - DNA, 25 bp, Homo sapien
caccaccagcatttcaggcgtaatg

SEQ ID NO: 3507817 - DNA, 25 bp, Homo sapien
gcccacaaaagaaatcatagttttc

SEQ ID NO: 3507818 - DNA, 25 bp, Homo sapien
agcccacaaaagaaatcatagtttt

SEQ ID NO: 3507819 - DNA, 25 bp, Homo sapien
ttaaggagatgatgactgtaatgat

SEQ ID NO: 3507820 - DNA, 25 bp, Homo sapien
taaggagatgatgactgtaatgatg

SEQ ID NO: 3507821 - DNA, 25 bp, Homo sapien
accccaaagagctgcacctggagct

SEQ ID NO: 3507822 - DNA, 25 bp, Homo sapien
caggaggatgaattcaaccacacag

SEQ ID NO: 3507823 - DNA, 25 bp, Homo sapien
ctaggaaaaccccaaagagctgcac

SEQ ID NO: 3507824 - DNA, 25 bp, Homo sapien
caggaaagttagaaaagcccaggag

SEQ ID NO: 3507825 - DNA, 25 bp, Homo sapien
attgtttttatggacctggtatatc

SEQ ID NO: 3507826 - DNA, 25 bp, Homo sapien
tttttatggacctggtatatcgagt

SEQ ID NO: 3507827 - DNA, 25 bp, Homo sapien
tgtttttatggacctggtatatcga

SEQ ID NO: 3507828 - DNA, 25 bp, Homo sapien
tatattgtttttatggacctggtat

SEQ ID NO: 3507829 - DNA, 25 bp, Homo sapien
agtatctccaattatcagtgaggat

SEQ ID NO: 3507830 - DNA, 25 bp, Homo sapien
ctgagcattgagttatcacttgata

SEQ ID NO: 3507831 - DNA, 25 bp, Homo sapien
aagtatctccaattatcagtgagga

SEQ ID NO: 3507832 - DNA, 25 bp, Homo sapien
gagttatcacttgataagtatctcc

SEQ ID NO: 3507833 - DNA, 25 bp, Homo sapien
ctttcctcagatttgcctttcagga

SEQ ID NO: 3507834 - DNA, 25 bp, Homo sapien
ctagggcagagtttctttcattctt

SEQ ID NO: 3507835 - DNA, 25 bp, Homo sapien
tagggcagagtttctttcattcttt

SEQ ID NO: 3507836 - DNA, 25 bp, Homo sapien
cattctttcctcagatttgcctttc

SEQ ID NO: 3507837 - DNA, 25 bp, Homo sapien
ctaagcttggttcacctttgtattc

SEQ ID NO: 3507838 - DNA, 25 bp, Homo sapien
actgacagctgctagagctgataaa

SEQ ID NO: 3507839 - DNA, 25 bp, Homo sapien
ttcacctttgtattcagaccagtct

SEQ ID NO: 3507840 - DNA, 25 bp, Homo sapien
agctgctagagctgataaattcaga

SEQ ID NO: 3507841 - DNA, 25 bp, Homo sapien
agatcttgtacatatttaattaggt

SEQ ID NO: 3507842 - DNA, 25 bp, Homo sapien
gctcctccttaggtccatgactcaa

SEQ ID NO: 3507843 - DNA, 25 bp, Homo sapien
atttttgctcctccttaggtccatg

SEQ ID NO: 3507844 - DNA, 25 bp, Homo sapien
tatcttgaatgatacattgttcatc

SEQ ID NO: 3507845 - DNA, 25 bp, Homo sapien
tcctgctatattatctttgccctcc

SEQ ID NO: 3507846 - DNA, 25 bp, Homo sapien
ttactactcaggaaagcggcaagcc

SEQ ID NO: 3507847 - DNA, 25 bp, Homo sapien
aaagacataatcaaaccggcctggg

SEQ ID NO: 3507848 - DNA, 25 bp, Homo sapien
tctgtacaatgtcgaaggcacggtc

SEQ ID NO: 3507849 - DNA, 25 bp, Homo sapien
ccatccaggatgaacaggagccgct

SEQ ID NO: 3507850 - DNA, 25 bp, Homo sapien
tcaaatagagcctccaccgtgacag

SEQ ID NO: 3507851 - DNA, 25 bp, Homo sapien
ttcctctaggcagcgcacatgctct

SEQ ID NO: 3507852 - DNA, 25 bp, Homo sapien
gcaggcaagtgattctgggctctct

SEQ ID NO: 3507853 - DNA, 25 bp, Homo sapien
caggagcacctggttgtatctgcca

SEQ ID NO: 3507854 - DNA, 25 bp, Homo sapien
tcagacagggtcatatcccgtaagt

SEQ ID NO: 3507855 - DNA, 25 bp, Homo sapien
cagtaattctgccaggtccaccgga

SEQ ID NO: 3507856 - DNA, 25 bp, Homo sapien
caagcccttgaggacaactttcaca

SEQ ID NO: 3507857 - DNA, 25 bp, Homo sapien
gtccacaagttccaacaggttcatg

SEQ ID NO: 3507858 - DNA, 25 bp, Homo sapien
atctgggggaaggatcaagtccaga

SEQ ID NO: 3507859 - DNA, 25 bp, Homo sapien
gagaggtccactgctgagaggccca

SEQ ID NO: 3507860 - DNA, 25 bp, Homo sapien
caagtccagaccagaagaccagtga

SEQ ID NO: 3507861 - DNA, 25 bp, Homo sapien
gccaagttatagagcggaggccagg

SEQ ID NO: 3507862 - DNA, 25 bp, Homo sapien
tcgaatacatctcggtgttcaggct

SEQ ID NO: 3507863 - DNA, 25 bp, Homo sapien
ggtgaaagataaggcctaggccctc

SEQ ID NO: 3507864 - DNA, 25 bp, Homo sapien
catagccagtgctagcaagatggca

SEQ ID NO: 3507865 - DNA, 25 bp, Homo sapien
ggcaggctggcaaagcacatgataa

SEQ ID NO: 3507866 - DNA, 25 bp, Homo sapien
cagcagttgacagcatggtcaggtt

SEQ ID NO: 3507867 - DNA, 25 bp, Homo sapien
tatcaacaaatttaagcaagccaca

SEQ ID NO: 3507868 - DNA, 25 bp, Homo sapien
gccacaggcttattggattagggcc

SEQ ID NO: 3507869 - DNA, 25 bp, Homo sapien
cccaggtgcccaagaatacatatat

SEQ ID NO: 3507870 - DNA, 25 bp, Homo sapien
ctgggtgcagcctgaccacgcggcc

SEQ ID NO: 3507871 - DNA, 25 bp, Homo sapien
ctgctgccgcagggtctgaggatga

SEQ ID NO: 3507872 - DNA, 25 bp, Homo sapien
tgggtgcagcctgaccacgcggccg

SEQ ID NO: 3507873 - DNA, 25 bp, Homo sapien
gtctggccaggagccgcagttgcag

SEQ ID NO: 3507874 - DNA, 25 bp, Homo sapien
tctggccaggagccgcagttgcagc

SEQ ID NO: 3507875 - DNA, 25 bp, Homo sapien
cgccgccgggactggggttggcgtg

SEQ ID NO: 3507876 - DNA, 25 bp, Homo sapien
gttgcgtctctcgtagctgtccaca

SEQ ID NO: 3507877 - DNA, 25 bp, Homo sapien
tgtggacagctacgagagacgcaac

SEQ ID NO: 3507878 - DNA, 25 bp, Homo sapien
cggccgcgtggtcaggctgcaccca

SEQ ID NO: 3507879 - DNA, 25 bp, Homo sapien
ggccgcgtggtcaggctgcacccag

SEQ ID NO: 3507880 - DNA, 25 bp, Homo sapien
tcatcctcagaccctgcggcagcag

SEQ ID NO: 3507881 - DNA, 25 bp, Homo sapien
cacgccaaccccagtcccggcggcg

SEQ ID NO: 3507882 - DNA, 25 bp, Homo sapien
ctgcaactgcggctcctggccagac

SEQ ID NO: 3507883 - DNA, 25 bp, Homo sapien
gctgcaactgcggctcctggccaga

SEQ ID NO: 3507884 - DNA, 25 bp, Homo sapien
aggagccgcagttgcagccgctgct

SEQ ID NO: 3507885 - DNA, 25 bp, Homo sapien
tctcgtagctgtccacaatggaggc

SEQ ID NO: 3507886 - DNA, 25 bp, Homo sapien
agcaccctcgttgcgtctctcgtag

SEQ ID NO: 3507887 - DNA, 25 bp, Homo sapien
aatggaggccaaaatgactgggtgc

SEQ ID NO: 3507888 - DNA, 25 bp, Homo sapien
aaaatgactgggtgcagcctgacca

SEQ ID NO: 3507889 - DNA, 25 bp, Homo sapien
ccctggaagagcaggaccaggcaga

SEQ ID NO: 3507890 - DNA, 25 bp, Homo sapien
agcagcggctgcaactgcggctcct

SEQ ID NO: 3507891 - DNA, 25 bp, Homo sapien
agtcattttggcctccattgtggac

SEQ ID NO: 3507892 - DNA, 25 bp, Homo sapien
tctgcctggtcctgctcttccaggg

SEQ ID NO: 3507893 - DNA, 25 bp, Homo sapien
ctacgagagacgcaacgagggtgct

SEQ ID NO: 3507894 - DNA, 25 bp, Homo sapien
ggtcaggctgcacccagtcattttg

SEQ ID NO: 3507895 - DNA, 25 bp, Homo sapien
cattgtggacagctacgagagacgc

SEQ ID NO: 3507896 - DNA, 25 bp, Homo sapien
tcttctgactcattgtgcggcactg

SEQ ID NO: 3507897 - DNA, 25 bp, Homo sapien
atcttctgactcattgtgcggcact

SEQ ID NO: 3507898 - DNA, 25 bp, Homo sapien
cttctgactcattgtgcggcactga

SEQ ID NO: 3507899 - DNA, 25 bp, Homo sapien
ttctgactcattgtgcggcactgaa

SEQ ID NO: 3507900 - DNA, 25 bp, Homo sapien
cattgtgcggcactgaaaagcaatt

SEQ ID NO: 3507901 - DNA, 25 bp, Homo sapien
ttcagtgccgcacaatgagtcagaa

SEQ ID NO: 3507902 - DNA, 25 bp, Homo sapien
agtgccgcacaatgagtcagaagat

SEQ ID NO: 3507903 - DNA, 25 bp, Homo sapien
tcagtgccgcacaatgagtcagaag

SEQ ID NO: 3507904 - DNA, 25 bp, Homo sapien
aattgcttttcagtgccgcacaatg

SEQ ID NO: 3507905 - DNA, 25 bp, Homo sapien
cagtgccgcacaatgagtcagaaga

SEQ ID NO: 3507906 - DNA, 25 bp, Homo sapien
agaaacttttttatgcagttcatac

SEQ ID NO: 3507907 - DNA, 25 bp, Homo sapien
gtatgaactgcataaaaaagtttct

SEQ ID NO: 3507908 - DNA, 25 bp, Homo sapien
agaaacttttttatgcagttcatac

SEQ ID NO: 3507909 - DNA, 25 bp, Homo sapien
cttagcaaattccatgtcaacagcc

SEQ ID NO: 3507910 - DNA, 25 bp, Homo sapien
gcagttcatacatattcttagcaaa

SEQ ID NO: 3507911 - DNA, 25 bp, Homo sapien
ttggagaaacttttttatgcagttc

SEQ ID NO: 3507912 - DNA, 25 bp, Homo sapien
tattcttagcaaattccatgtcaac

SEQ ID NO: 3507913 - DNA, 25 bp, Homo sapien
ccaggatgagctcatttggagaaac

SEQ ID NO: 3507914 - DNA, 25 bp, Homo sapien
gaatatgtatgaactgcataaaaaa

SEQ ID NO: 3507915 - DNA, 25 bp, Homo sapien
gctgttgacatggaatttgctaaga

SEQ ID NO: 3507916 - DNA, 25 bp, Homo sapien
gtatgaactgcataaaaaagtttct

SEQ ID NO: 3507917 - DNA, 25 bp, Homo sapien
gtttctccaaatgagctcatcctgg

SEQ ID NO: 3507918 - DNA, 25 bp, Homo sapien
gaactgcataaaaaagtttctccaa

SEQ ID NO: 3507919 - DNA, 25 bp, Homo sapien
tttgctaagaatatgtatgaactgc

SEQ ID NO: 3507920 - DNA, 25 bp, Homo sapien
ctgtgatgtcatggcccgtagcgta

SEQ ID NO: 3507921 - DNA, 25 bp, Homo sapien
tctgtgatgtcatggcccgtagcgt

SEQ ID NO: 3507922 - DNA, 25 bp, Homo sapien
ctctgtgatgtcatggcccgtagcg

SEQ ID NO: 3507923 - DNA, 25 bp, Homo sapien
tgatgtcatggcccgtagcgtacct

SEQ ID NO: 3507924 - DNA, 25 bp, Homo sapien
ggatcagcacagagtgctctgtgat

SEQ ID NO: 3507925 - DNA, 25 bp, Homo sapien
gctctgtgatgtcatggcccgtagc

SEQ ID NO: 3507926 - DNA, 25 bp, Homo sapien
catcacagagcactctgtgctgatc

SEQ ID NO: 3507927 - DNA, 25 bp, Homo sapien
gctacgggccatgacatcacagagc

SEQ ID NO: 3507928 - DNA, 25 bp, Homo sapien
acgctacgggccatgacatcacaga

SEQ ID NO: 3507929 - DNA, 25 bp, Homo sapien
tacgctacgggccatgacatcacag

SEQ ID NO: 3507930 - DNA, 25 bp, Homo sapien
aggtacgctacgggccatgacatca

SEQ ID NO: 3507931 - DNA, 25 bp, Homo sapien
cgctacgggccatgacatcacagag

SEQ ID NO: 3507932 - DNA, 25 bp, Homo sapien
catcctggatgcgagctgatgcccc

SEQ ID NO: 3507933 - DNA, 25 bp, Homo sapien
tactcagggcatcctggatgcgagc

SEQ ID NO: 3507934 - DNA, 25 bp, Homo sapien
atgcgagctgatgcccctcctactt

SEQ ID NO: 3507935 - DNA, 25 bp, Homo sapien
tacatcctctgcatattgcaacact

SEQ ID NO: 3507936 - DNA, 25 bp, Homo sapien
tggatgcgagctgatgcccctccta

SEQ ID NO: 3507937 - DNA, 25 bp, Homo sapien
tcctctgcatattgcaacactgtac

SEQ ID NO: 3507938 - DNA, 25 bp, Homo sapien
gtaggaggggcatcagctcgcatcc

SEQ ID NO: 3507939 - DNA, 25 bp, Homo sapien
tacagtgttgcaatatgcagaggat

SEQ ID NO: 3507940 - DNA, 25 bp, Homo sapien
gtacagtgttgcaatatgcagagga

SEQ ID NO: 3507941 - DNA, 25 bp, Homo sapien
agtgttgcaatatgcagaggatgta

SEQ ID NO: 3507942 - DNA, 25 bp, Homo sapien
gctcgcatccaggatgccctgagta

SEQ ID NO: 3507943 - DNA, 25 bp, Homo sapien
tcagctcgcatccaggatgccctga

SEQ ID NO: 3507944 - DNA, 25 bp, Homo sapien
aaggaagtctccaaccacgcataac

SEQ ID NO: 3507945 - DNA, 25 bp, Homo sapien
gaagtctccaaccacgcataacaca

SEQ ID NO: 3507946 - DNA, 25 bp, Homo sapien
tatcagcagtaaatgagacaatgga

SEQ ID NO: 3507947 - DNA, 25 bp, Homo sapien
gaagggcactcacattgatgttgct

SEQ ID NO: 3507948 - DNA, 25 bp, Homo sapien
gtaagtcacagtagtatcagcagta

SEQ ID NO: 3507949 - DNA, 25 bp, Homo sapien
catttgagtgtatgtgctgaggtgg

SEQ ID NO: 3507950 - DNA, 25 bp, Homo sapien
ggtctcaaagtcatcgggaactatt

SEQ ID NO: 3507951 - DNA, 25 bp, Homo sapien
caaagtcatcgggaactattttcgg

SEQ ID NO: 3507952 - DNA, 25 bp, Homo sapien
tgctgttgagcatggtctcaaagtc

SEQ ID NO: 3507953 - DNA, 25 bp, Homo sapien
gatgttgctgttgagcatggtctca

SEQ ID NO: 3507954 - DNA, 25 bp, Homo sapien
gaagcggcccacagtattgtcagct

SEQ ID NO: 3507955 - DNA, 25 bp, Homo sapien
aggctcatcaggaagcggcccacag

SEQ ID NO: 3507956 - DNA, 25 bp, Homo sapien
aatagttcccgatgactttgagacc

SEQ ID NO: 3507957 - DNA, 25 bp, Homo sapien
agctgacaatactgtgggccgcttc

SEQ ID NO: 3507958 - DNA, 25 bp, Homo sapien
tactgtgggccgcttcctgatgagc

SEQ ID NO: 3507959 - DNA, 25 bp, Homo sapien
tgagaccatgctcaacagcaacatc

SEQ ID NO: 3507960 - DNA, 25 bp, Homo sapien
gactttgagaccatgctcaacagca

SEQ ID NO: 3507961 - DNA, 25 bp, Homo sapien
ccgaaaatagttcccgatgactttg

SEQ ID NO: 3507962 - DNA, 25 bp, Homo sapien
tactgctgatactactgtgacttac

SEQ ID NO: 3507963 - DNA, 25 bp, Homo sapien
cagcaacatcaatgtgagtgccctt

SEQ ID NO: 3507964 - DNA, 25 bp, Homo sapien
tgttatgcgtggttggagacttcct

SEQ ID NO: 3507965 - DNA, 25 bp, Homo sapien
tccattgtctcatttactgctgata

SEQ ID NO: 3507966 - DNA, 25 bp, Homo sapien
gaaaagagttgggtgaggtgacctg

SEQ ID NO: 3507967 - DNA, 25 bp, Homo sapien
ggcttcacctatagccccactgaag

SEQ ID NO: 3507968 - DNA, 25 bp, Homo sapien
gattggagtcgtccaaatgagcagt

SEQ ID NO: 3507969 - DNA, 25 bp, Homo sapien
gaaagatggattggagtcgtccaaa

SEQ ID NO: 3507970 - DNA, 25 bp, Homo sapien
gagtcgtccaaatgagcagtaaagg

SEQ ID NO: 3507971 - DNA, 25 bp, Homo sapien
gcagtctgaaagatggattggagtc

SEQ ID NO: 3507972 - DNA, 25 bp, Homo sapien
tggactctttacgagtatgcaagct

SEQ ID NO: 3507973 - DNA, 25 bp, Homo sapien
tcaggcaaagtctcatagaggtcag

SEQ ID NO: 3507974 - DNA, 25 bp, Homo sapien
tcactgaatgctgctagggagacca

SEQ ID NO: 3507975 - DNA, 25 bp, Homo sapien
acctgtcaggcttaggcaagggcca

SEQ ID NO: 3507976 - DNA, 25 bp, Homo sapien
tgtctacacacaaggcaaggttgct

SEQ ID NO: 3507977 - DNA, 25 bp, Homo sapien
ggtcctcgttggcatgccatatacc

SEQ ID NO: 3507978 - DNA, 25 bp, Homo sapien
gtcctcgttggcatgccatatacct

SEQ ID NO: 3507979 - DNA, 25 bp, Homo sapien
tcctcgttggcatgccatatacctc

SEQ ID NO: 3507980 - DNA, 25 bp, Homo sapien
tggtcctcgttggcatgccatatac

SEQ ID NO: 3507981 - DNA, 25 bp, Homo sapien
ctcacccaaacattgaagcccattt

SEQ ID NO: 3507982 - DNA, 25 bp, Homo sapien
ccaaacattgaagcccatttgggtc

SEQ ID NO: 3507983 - DNA, 25 bp, Homo sapien
aacattgaagcccatttgggtccat

SEQ ID NO: 3507984 - DNA, 25 bp, Homo sapien
atcttcctcacccaaacattgaagc

SEQ ID NO: 3507985 - DNA, 25 bp, Homo sapien
tcattggtcattcacaagttcaggg

SEQ ID NO: 3507986 - DNA, 25 bp, Homo sapien
aagttcagggatgccagaaatggca

SEQ ID NO: 3507987 - DNA, 25 bp, Homo sapien
gatagtaactcacatgatcatatga

SEQ ID NO: 3507988 - DNA, 25 bp, Homo sapien
cagttgtacacaggttagagatgat

SEQ ID NO: 3507989 - DNA, 25 bp, Homo sapien
tcgaggtaatagagcagcaccaagg

SEQ ID NO: 3507990 - DNA, 25 bp, Homo sapien
ttcctgccataaccaaagggccatg

SEQ ID NO: 3507991 - DNA, 25 bp, Homo sapien
gaattcctatcgctcctctgtgcag

SEQ ID NO: 3507992 - DNA, 25 bp, Homo sapien
tttagctacaagaagacaactcctg

SEQ ID NO: 3507993 - DNA, 25 bp, Homo sapien
ggctcaaaaggtcctacctctacag

SEQ ID NO: 3507994 - DNA, 25 bp, Homo sapien
tctacagcttcgttgggcttctcca

SEQ ID NO: 3507995 - DNA, 25 bp, Homo sapien
tcctacctctacagcttcgttgggc

SEQ ID NO: 3507996 - DNA, 25 bp, Homo sapien
tggcattgataaggctcaaaaggtc

SEQ ID NO: 3507997 - DNA, 25 bp, Homo sapien
taatagaccagatagcagggccgag

SEQ ID NO: 3507998 - DNA, 25 bp, Homo sapien
ggatttccattctcagtaaggaggg

SEQ ID NO: 3507999 - DNA, 25 bp, Homo sapien
ggaggttggctgaagactcccacgc

SEQ ID NO: 3508000 - DNA, 25 bp, Homo sapien
tacagagcttggtcttcggaaccca

SEQ ID NO: 3508001 - DNA, 25 bp, Homo sapien
gtagatgtgtcccagttgtgtgtgc

SEQ ID NO: 3508002 - DNA, 25 bp, Homo sapien
agtgttcagacaacagaggcaatga

SEQ ID NO: 3508003 - DNA, 25 bp, Homo sapien
ctgagagaaggcgtctgtgtgcaca

SEQ ID NO: 3508004 - DNA, 25 bp, Homo sapien
tgtgtgcatcagtaagagtgtatct

SEQ ID NO: 3508005 - DNA, 25 bp, Homo sapien
aggtcgctgagccaaagagaccctg

SEQ ID NO: 3508006 - DNA, 25 bp, Homo sapien
gctccgcttaggtcgctgagccaaa

SEQ ID NO: 3508007 - DNA, 25 bp, Homo sapien
tgtgcctagagctccgcttaggtcg

SEQ ID NO: 3508008 - DNA, 25 bp, Homo sapien
ccaacccatgggagttgagagcggg

SEQ ID NO: 3508009 - DNA, 25 bp, Homo sapien
cacttttagtgtaactggagagccc

SEQ ID NO: 3508010 - DNA, 25 bp, Homo sapien
catgcgcgatctgctggcagtggcc

SEQ ID NO: 3508011 - DNA, 25 bp, Homo sapien
ccagtccgagctggccatgcgcgat

SEQ ID NO: 3508012 - DNA, 25 bp, Homo sapien
catcaatgttggatgagcctgcacc

SEQ ID NO: 3508013 - DNA, 25 bp, Homo sapien
gggatgaagttattactgcactgtg

SEQ ID NO: 3508014 - DNA, 25 bp, Homo sapien
tacttgttggcagatgttgggatga

SEQ ID NO: 3508015 - DNA, 25 bp, Homo sapien
agttattactgcactgtggcctcca

SEQ ID NO: 3508016 - DNA, 25 bp, Homo sapien
tgttgggatgaagttattactgcac

SEQ ID NO: 3508017 - DNA, 25 bp, Homo sapien
gctacaggagcaaggcgagttaact

SEQ ID NO: 3508018 - DNA, 25 bp, Homo sapien
cccgagagactaagcaggccagttc

SEQ ID NO: 3508019 - DNA, 25 bp, Homo sapien
acagtgctgaggtcccgatagagtg

SEQ ID NO: 3508020 - DNA, 25 bp, Homo sapien
aaatctgttttgtcacccgagagac

SEQ ID NO: 3508021 - DNA, 25 bp, Homo sapien
ccacaagatggcactctctaggtgt

SEQ ID NO: 3508022 - DNA, 25 bp, Homo sapien
gttcccttttgtacgtctgagttca

SEQ ID NO: 3508023 - DNA, 25 bp, Homo sapien
ccccaagcctttgcaaacagaacaa

SEQ ID NO: 3508024 - DNA, 25 bp, Homo sapien
actccggcgcccgaagacagagctg

SEQ ID NO: 3508025 - DNA, 25 bp, Homo sapien
gcactcctgagagcgggaccgtctt

SEQ ID NO: 3508026 - DNA, 25 bp, Homo sapien
ccaccaggcactcctgagagcggga

SEQ ID NO: 3508027 - DNA, 25 bp, Homo sapien
agcgggaccgtcttattctcctcgg

SEQ ID NO: 3508028 - DNA, 25 bp, Homo sapien
tcctgagagcgggaccgtcttattc

SEQ ID NO: 3508029 - DNA, 25 bp, Homo sapien
gtctggactctgcttgaagattgac

SEQ ID NO: 3508030 - DNA, 25 bp, Homo sapien
ctctgacagcatgggatgatgtcaa

SEQ ID NO: 3508031 - DNA, 25 bp, Homo sapien
attgacaatgatgggtgggagtccc

SEQ ID NO: 3508032 - DNA, 25 bp, Homo sapien
gatgatgtcaacaagggacttccat

SEQ ID NO: 3508033 - DNA, 25 bp, Homo sapien
gcattcctgttgatactgtggccca

SEQ ID NO: 3508034 - DNA, 25 bp, Homo sapien
tggcccattgtgttggcagagtcca

SEQ ID NO: 3508035 - DNA, 25 bp, Homo sapien
tgtgctcttggtgtgaccccaggag

SEQ ID NO: 3508036 - DNA, 25 bp, Homo sapien
tggatcatctacctcatgggctggt

SEQ ID NO: 3508037 - DNA, 25 bp, Homo sapien
gatgagtgcaagcaggcacgcctga

SEQ ID NO: 3508038 - DNA, 25 bp, Homo sapien
gatacaacactggatttgcgggcct

SEQ ID NO: 3508039 - DNA, 25 bp, Homo sapien
tctttaaattctgcgcctcaggcga

SEQ ID NO: 3508040 - DNA, 25 bp, Homo sapien
catgcatggaggtggagaacattcc

SEQ ID NO: 3508041 - DNA, 25 bp, Homo sapien
caactacaaagatggagggaccgct

SEQ ID NO: 3508042 - DNA, 25 bp, Homo sapien
tgttatgtcgaggtccaggcctagg

SEQ ID NO: 3508043 - DNA, 25 bp, Homo sapien
tggcacaagtctcagtagcacgggc

SEQ ID NO: 3508044 - DNA, 25 bp, Homo sapien
caaagcactgtgaccgactgaagag

SEQ ID NO: 3508045 - DNA, 25 bp, Homo sapien
taaccctgtgaccaaacctgagagc

SEQ ID NO: 3508046 - DNA, 25 bp, Homo sapien
ccacctgtagcaagactaaagacac

SEQ ID NO: 3508047 - DNA, 25 bp, Homo sapien
tgactggagggtctcattccacctg

SEQ ID NO: 3508048 - DNA, 25 bp, Homo sapien
gagatgtccttttactctgactgga

SEQ ID NO: 3508049 - DNA, 25 bp, Homo sapien
gatgaggtctccagttgcaggtgca

SEQ ID NO: 3508050 - DNA, 25 bp, Homo sapien
tgcaggatgtctgtgcgtgtgcccc

SEQ ID NO: 3508051 - DNA, 25 bp, Homo sapien
gatgagatgcgcttctcagctgatg

SEQ ID NO: 3508052 - DNA, 25 bp, Homo sapien
tggaggccatgagtgttaacagaat

SEQ ID NO: 3508053 - DNA, 25 bp, Homo sapien
gcttagcagatgaggggtctgggtc

SEQ ID NO: 3508054 - DNA, 25 bp, Homo sapien
tgcttagcagatgaggggtctgggt

SEQ ID NO: 3508055 - DNA, 25 bp, Homo sapien
gaaagctacgatggtgcctcaaggg

SEQ ID NO: 3508056 - DNA, 25 bp, Homo sapien
caggaaggccctagctcagaagtgg

SEQ ID NO: 3508057 - DNA, 25 bp, Homo sapien
tatgcagcctgaagtgggaccatcc

SEQ ID NO: 3508058 - DNA, 25 bp, Homo sapien
tcattaggagttaaagccagggcct

SEQ ID NO: 3508059 - DNA, 25 bp, Homo sapien
aggaaggaagggagatcgctcggtg

SEQ ID NO: 3508060 - DNA, 25 bp, Homo sapien
aaggaagggagatcgctcggtgagc

SEQ ID NO: 3508061 - DNA, 25 bp, Homo sapien
ctactgaggcagctgagaccagggc

SEQ ID NO: 3508062 - DNA, 25 bp, Homo sapien
gaaggaagggagatcgctcggtgag

SEQ ID NO: 3508063 - DNA, 25 bp, Homo sapien
taatggcaaagttaatggtccagcc

SEQ ID NO: 3508064 - DNA, 25 bp, Homo sapien
gacttatagggctgacttatctccg

SEQ ID NO: 3508065 - DNA, 25 bp, Homo sapien
tcttccctgttgaaaggctctgcca

SEQ ID NO: 3508066 - DNA, 25 bp, Homo sapien
gagccaggcatctttggaattgagg

SEQ ID NO: 3508067 - DNA, 25 bp, Homo sapien
ttctgcaaggaccaggatgtagagt

SEQ ID NO: 3508068 - DNA, 25 bp, Homo sapien
ccatggaaatctgaaggcagcatct

SEQ ID NO: 3508069 - DNA, 25 bp, Homo sapien
gcatcttctgcaaggaccaggatgt

SEQ ID NO: 3508070 - DNA, 25 bp, Homo sapien
tgtaactcatcagtcagggcagctg

SEQ ID NO: 3508071 - DNA, 25 bp, Homo sapien
cagggcatgggctcagagggctggc

SEQ ID NO: 3508072 - DNA, 25 bp, Homo sapien
tctcctgtcctggaatgtgcggcca

SEQ ID NO: 3508073 - DNA, 25 bp, Homo sapien
actctccttaatccagggcatgggc

SEQ ID NO: 3508074 - DNA, 25 bp, Homo sapien
tcgtgctaccaggatgcccctcact

SEQ ID NO: 3508075 - DNA, 25 bp, Homo sapien
tggaggtggtgttgctgatcgacac

SEQ ID NO: 3508076 - DNA, 25 bp, Homo sapien
tcgacactagccagcgaggcaacat

SEQ ID NO: 3508077 - DNA, 25 bp, Homo sapien
atcacagagcccacgttcacaaacc

SEQ ID NO: 3508078 - DNA, 25 bp, Homo sapien
ttgctgatcgacactagccagcgag

SEQ ID NO: 3508079 - DNA, 25 bp, Homo sapien
ctttaaatttattctatagggctgt

SEQ ID NO: 3508080 - DNA, 25 bp, Homo sapien
tttcaggtaaccagaggttgtcttg

SEQ ID NO: 3508081 - DNA, 25 bp, Homo sapien
tagggtaagtcccatgacttttctg

SEQ ID NO: 3508082 - DNA, 25 bp, Homo sapien
aggttgtcttgtcagtaattaatgc

SEQ ID NO: 3508083 - DNA, 25 bp, Homo sapien
gggaccttgcacatgacagtcctga

SEQ ID NO: 3508084 - DNA, 25 bp, Homo sapien
aaggtcttcaacgactgtactctga

SEQ ID NO: 3508085 - DNA, 25 bp, Homo sapien
tttcccagcacggtctgctgtaggc

SEQ ID NO: 3508086 - DNA, 25 bp, Homo sapien
tgatgagttgctgtcccgttgttct

SEQ ID NO: 3508087 - DNA, 25 bp, Homo sapien
ggtgatactttctccccgtagccga

SEQ ID NO: 3508088 - DNA, 25 bp, Homo sapien
catttatttgggatcactggacccc

SEQ ID NO: 3508089 - DNA, 25 bp, Homo sapien
ggtatctgttcatttggagccccaa

SEQ ID NO: 3508090 - DNA, 25 bp, Homo sapien
ggataattgcaaacgccctagcttg

SEQ ID NO: 3508091 - DNA, 25 bp, Homo sapien
tcaaagcttctgatctctaggcaag

SEQ ID NO: 3508092 - DNA, 25 bp, Homo sapien
ctgcggtctccagggtagggaccaa

SEQ ID NO: 3508093 - DNA, 25 bp, Homo sapien
gcctctggggcaatgctttgctgct

SEQ ID NO: 3508094 - DNA, 25 bp, Homo sapien
tccagggtagggaccaatctctgct

SEQ ID NO: 3508095 - DNA, 25 bp, Homo sapien
cagaaaggcactcaagaatccaggc

SEQ ID NO: 3508096 - DNA, 25 bp, Homo sapien
gggcccctcacaggtgcaggtcttt

SEQ ID NO: 3508097 - DNA, 25 bp, Homo sapien
tgaataatctacttgctagcaggtc

SEQ ID NO: 3508098 - DNA, 25 bp, Homo sapien
tagaactgccctcacatgcagaaag

SEQ ID NO: 3508099 - DNA, 25 bp, Homo sapien
taaggcccactgtgttattgtcgac

SEQ ID NO: 3508100 - DNA, 25 bp, Homo sapien
tattgtcgacccaggtgcacgtgct

SEQ ID NO: 3508101 - DNA, 25 bp, Homo sapien
tgttagagcctcataccagtcactg

SEQ ID NO: 3508102 - DNA, 25 bp, Homo sapien
tctgtccagacagcgtcccaaatgg

SEQ ID NO: 3508103 - DNA, 25 bp, Homo sapien
tgcgcacatacaggtcacccacagg

SEQ ID NO: 3508104 - DNA, 25 bp, Homo sapien
gcaacaccctcacacgtgcgcacat

SEQ ID NO: 3508105 - DNA, 25 bp, Homo sapien
agcaacaccctcacacgtgcgcaca

SEQ ID NO: 3508106 - DNA, 25 bp, Homo sapien
acacgtgcgcacatacaggtcaccc

SEQ ID NO: 3508107 - DNA, 25 bp, Homo sapien
ttcagtctcacatggattagggagc

SEQ ID NO: 3508108 - DNA, 25 bp, Homo sapien
gtgcagccccatggagcgtcatcaa

SEQ ID NO: 3508109 - DNA, 25 bp, Homo sapien
tcatcaaccttttctagccacgcgg

SEQ ID NO: 3508110 - DNA, 25 bp, Homo sapien
cacatgtagtcacacttcagtctca

SEQ ID NO: 3508111 - DNA, 25 bp, Homo sapien
cctggcccttgttaggatcctccca

SEQ ID NO: 3508112 - DNA, 25 bp, Homo sapien
tgaacctaagcaagtctccgggttc

SEQ ID NO: 3508113 - DNA, 25 bp, Homo sapien
cttccttaggttgaacctaagcaag

SEQ ID NO: 3508114 - DNA, 25 bp, Homo sapien
aggttgaacctaagcaagtctccgg

SEQ ID NO: 3508115 - DNA, 25 bp, Homo sapien
tttgtagggagtagtgggactcctg

SEQ ID NO: 3508116 - DNA, 25 bp, Homo sapien
tgtagggagtagtgggactcctgac

SEQ ID NO: 3508117 - DNA, 25 bp, Homo sapien
tgttttgtagggagtagtgggactc

SEQ ID NO: 3508118 - DNA, 25 bp, Homo sapien
ttgtagggagtagtgggactcctga

SEQ ID NO: 3508119 - DNA, 25 bp, Homo sapien
gccttccgttctgctgctaggttcg

SEQ ID NO: 3508120 - DNA, 25 bp, Homo sapien
gttctgctgctaggttcggcctccg

SEQ ID NO: 3508121 - DNA, 25 bp, Homo sapien
ttcggcctccgaggtgccctgggca

SEQ ID NO: 3508122 - DNA, 25 bp, Homo sapien
tgctgctaggttcggcctccgaggt

SEQ ID NO: 3508123 - DNA, 25 bp, Homo sapien
ttctttagagatcaccagctgtggc

SEQ ID NO: 3508124 - DNA, 25 bp, Homo sapien
tgtgtcccagtaagctgccaggcga

SEQ ID NO: 3508125 - DNA, 25 bp, Homo sapien
aagccacagatctggacttgccggg

SEQ ID NO: 3508126 - DNA, 25 bp, Homo sapien
tagtcccgccagcagtttgaatgca

SEQ ID NO: 3508127 - DNA, 25 bp, Homo sapien
actgctaggtaatcgtggtcccatc

SEQ ID NO: 3508128 - DNA, 25 bp, Homo sapien
ggtaatcgtggtcccatctcgtccc

SEQ ID NO: 3508129 - DNA, 25 bp, Homo sapien
tcgtccccttgcagctcttctagaa

SEQ ID NO: 3508130 - DNA, 25 bp, Homo sapien
tggtacaagcttgtcactgctaggt

SEQ ID NO: 3508131 - DNA, 25 bp, Homo sapien
ccccattttagtagatttagtgtag

SEQ ID NO: 3508132 - DNA, 25 bp, Homo sapien
tagtgtagaccctcctagctgggtc

SEQ ID NO: 3508133 - DNA, 25 bp, Homo sapien
accctcctagctgggtcttgctcag

SEQ ID NO: 3508134 - DNA, 25 bp, Homo sapien
ttagtagatttagtgtagaccctcc

SEQ ID NO: 3508135 - DNA, 25 bp, Homo sapien
gttgacttgattacactgggctggg

SEQ ID NO: 3508136 - DNA, 25 bp, Homo sapien
tagaggctgtaggtcccaagtgagc

SEQ ID NO: 3508137 - DNA, 25 bp, Homo sapien
gagcagttcaagaggccgactcact

SEQ ID NO: 3508138 - DNA, 25 bp, Homo sapien
aacacctgctctgacgagggaggca

SEQ ID NO: 3508139 - DNA, 25 bp, Homo sapien
ggccatcagtaagtaatccacagct

SEQ ID NO: 3508140 - DNA, 25 bp, Homo sapien
ggcagcctgagtcttcaagttctta

SEQ ID NO: 3508141 - DNA, 25 bp, Homo sapien
tactttgtatgatcctgtggtgcca

SEQ ID NO: 3508142 - DNA, 25 bp, Homo sapien
tatgggacttaaagccctagcaggg

SEQ ID NO: 3508143 - DNA, 25 bp, Homo sapien
cagtaagcaggccttagtacggctg

SEQ ID NO: 3508144 - DNA, 25 bp, Homo sapien
gctttttgcacgtgagtatgatcca

SEQ ID NO: 3508145 - DNA, 25 bp, Homo sapien
gtacggctgctgcacacttctcggt

SEQ ID NO: 3508146 - DNA, 25 bp, Homo sapien
cgcgagggctactcagcagtaagca

SEQ ID NO: 3508147 - DNA, 25 bp, Homo sapien
ctagcaggatctgcccacacctcgg

SEQ ID NO: 3508148 - DNA, 25 bp, Homo sapien
acacctcggccgtacatctctgtga

SEQ ID NO: 3508149 - DNA, 25 bp, Homo sapien
tccaacgattagcttttgcaacatg

SEQ ID NO: 3508150 - DNA, 25 bp, Homo sapien
tgtgccagcgctggcgagataccat

SEQ ID NO: 3508151 - DNA, 25 bp, Homo sapien
tgttaactcaggatgccaagtggcc

SEQ ID NO: 3508152 - DNA, 25 bp, Homo sapien
tgtccagatctatggcgaacacagg

SEQ ID NO: 3508153 - DNA, 25 bp, Homo sapien
tcatctcatgatacaggcgggaggg

SEQ ID NO: 3508154 - DNA, 25 bp, Homo sapien
tagtagccaccggtaataagccaag

SEQ ID NO: 3508155 - DNA, 25 bp, Homo sapien
gtgcttttattgactttttgaataa

SEQ ID NO: 3508156 - DNA, 25 bp, Homo sapien
ctgtgcttttattgactttttgaat

SEQ ID NO: 3508157 - DNA, 25 bp, Homo sapien
tgcttttattgactttttgaataaa

SEQ ID NO: 3508158 - DNA, 25 bp, Homo sapien
tgtgcttttattgactttttgaata

SEQ ID NO: 3508159 - DNA, 25 bp, Homo sapien
ggttcctcagtatcccctgtgggcc

SEQ ID NO: 3508160 - DNA, 25 bp, Homo sapien
cataacctcaccaatgacatgtggg

SEQ ID NO: 3508161 - DNA, 25 bp, Homo sapien
tgggcctggccttaggaagagaaca

SEQ ID NO: 3508162 - DNA, 25 bp, Homo sapien
tcctaggagcctcaggtgggtaagt

SEQ ID NO: 3508163 - DNA, 25 bp, Homo sapien
acttgacagagtggtgacagggatc

SEQ ID NO: 3508164 - DNA, 25 bp, Homo sapien
taaacaggacctcgagatgcttagg

SEQ ID NO: 3508165 - DNA, 25 bp, Homo sapien
aaagtcaatggtcaaggcaaagtca

SEQ ID NO: 3508166 - DNA, 25 bp, Homo sapien
tataactaaaggcacccggagactg

SEQ ID NO: 3508167 - DNA, 25 bp, Homo sapien
agatctagagttctgatgtgaccaa

SEQ ID NO: 3508168 - DNA, 25 bp, Homo sapien
tattcccccagatctagagttctga

SEQ ID NO: 3508169 - DNA, 25 bp, Homo sapien
tgatgtgaccaagagcatttcctac

SEQ ID NO: 3508170 - DNA, 25 bp, Homo sapien
tctgatgtgaccaagagcatttcct

SEQ ID NO: 3508171 - DNA, 25 bp, Homo sapien
ctctggtgggaaatagcgcatacag

SEQ ID NO: 3508172 - DNA, 25 bp, Homo sapien
tgggaaatagcgcatacaggatatt

SEQ ID NO: 3508173 - DNA, 25 bp, Homo sapien
tctggtgggaaatagcgcatacagg

SEQ ID NO: 3508174 - DNA, 25 bp, Homo sapien
tggtgggaaatagcgcatacaggat

SEQ ID NO: 3508175 - DNA, 25 bp, Homo sapien
caccctcgtgagaaatgaagaccgc

SEQ ID NO: 3508176 - DNA, 25 bp, Homo sapien
tgaagaccgcaagaaaagagacagc

SEQ ID NO: 3508177 - DNA, 25 bp, Homo sapien
taccaagagtgatcccagattatgc

SEQ ID NO: 3508178 - DNA, 25 bp, Homo sapien
catataactgtcatccccgaaggat

SEQ ID NO: 3508179 - DNA, 25 bp, Homo sapien
ggaacacatggtctctacccctggg

SEQ ID NO: 3508180 - DNA, 25 bp, Homo sapien
cagggcagggtctaaagtctctatc

SEQ ID NO: 3508181 - DNA, 25 bp, Homo sapien
ggcaggaagaaccaccataagggct

SEQ ID NO: 3508182 - DNA, 25 bp, Homo sapien
taagggcttagtacttctggcagga

SEQ ID NO: 3508183 - DNA, 25 bp, Homo sapien
gggatcttggagtctgaaatcttca

SEQ ID NO: 3508184 - DNA, 25 bp, Homo sapien
taagctgatgttcgttcacaggtga

SEQ ID NO: 3508185 - DNA, 25 bp, Homo sapien
tcattcttgcaaccttaagtcctca

SEQ ID NO: 3508186 - DNA, 25 bp, Homo sapien
gaactatctgttacacctaccagga

SEQ ID NO: 3508187 - DNA, 25 bp, Homo sapien
tagaccaaacataattacttaatgg

SEQ ID NO: 3508188 - DNA, 25 bp, Homo sapien
aattacttaatggatcaacttctct

SEQ ID NO: 3508189 - DNA, 25 bp, Homo sapien
attacttaatggatcaacttctctg

SEQ ID NO: 3508190 - DNA, 25 bp, Homo sapien
ctgtaattacaatagaccaaacata

SEQ ID NO: 3508191 - DNA, 25 bp, Homo sapien
ggcctgatagctatgacacttgaac

SEQ ID NO: 3508192 - DNA, 25 bp, Homo sapien
catgatatccatgatagtggcctga

SEQ ID NO: 3508193 - DNA, 25 bp, Homo sapien
gagaaagagcgaagctgtcctgtgt

SEQ ID NO: 3508194 - DNA, 25 bp, Homo sapien
taatgtccgtgttttacaaggtgac

SEQ ID NO: 3508195 - DNA, 25 bp, Homo sapien
gacttgagtaatggatacttcagac

SEQ ID NO: 3508196 - DNA, 25 bp, Homo sapien
taatggatacttcagactggctgtt

SEQ ID NO: 3508197 - DNA, 25 bp, Homo sapien
cttgggacttgagtaatggatactt

SEQ ID NO: 3508198 - DNA, 25 bp, Homo sapien
tgagtaatggatacttcagactggc

SEQ ID NO: 3508199 - DNA, 25 bp, Homo sapien
tatgctttatcggtgctgatgccca

SEQ ID NO: 3508200 - DNA, 25 bp, Homo sapien
tcctcttgctcagggtagctatctg

SEQ ID NO: 3508201 - DNA, 25 bp, Homo sapien
tctggctttggatcacacgaggtaa

SEQ ID NO: 3508202 - DNA, 25 bp, Homo sapien
cagcaggatcctcgtcttcatgaaa

SEQ ID NO: 3508203 - DNA, 25 bp, Homo sapien
gtagcaaccgtttctcttggtcaga

SEQ ID NO: 3508204 - DNA, 25 bp, Homo sapien
tttctcggagctgatgtagcaaccg

SEQ ID NO: 3508205 - DNA, 25 bp, Homo sapien
ccttctttcatgaccctggtgattt

SEQ ID NO: 3508206 - DNA, 25 bp, Homo sapien
aaaatctgtcaatgaattttccttc

SEQ ID NO: 3508207 - DNA, 25 bp, Homo sapien
cagacaatccaaccatttagtggta

SEQ ID NO: 3508208 - DNA, 25 bp, Homo sapien
ggcaatggacgtaaacatcactatg

SEQ ID NO: 3508209 - DNA, 25 bp, Homo sapien
taggcaatggacgtaaacatcacta

SEQ ID NO: 3508210 - DNA, 25 bp, Homo sapien
ctaggcaatggacgtaaacatcact

SEQ ID NO: 3508211 - DNA, 25 bp, Homo sapien
aacatcactatggtctgtctgggta

SEQ ID NO: 3508212 - DNA, 25 bp, Homo sapien
aggaattgatcctccaactgcatag

SEQ ID NO: 3508213 - DNA, 25 bp, Homo sapien
tggaatagaaagtgcaattgcagca

SEQ ID NO: 3508214 - DNA, 25 bp, Homo sapien
ctaggaattgatcctccaactgcat

SEQ ID NO: 3508215 - DNA, 25 bp, Homo sapien
gaaagtgcaattgcagcagataatt

SEQ ID NO: 3508216 - DNA, 25 bp, Homo sapien
caaggataacagtttgattgttttc

SEQ ID NO: 3508217 - DNA, 25 bp, Homo sapien
gttttcttctagaggaaagcactgc

SEQ ID NO: 3508218 - DNA, 25 bp, Homo sapien
actcaaggataacagtttgattgtt

SEQ ID NO: 3508219 - DNA, 25 bp, Homo sapien
attgttttcttctagaggaaagcac

SEQ ID NO: 3508220 - DNA, 25 bp, Homo sapien
tacttttccagactgtacgcagggc

SEQ ID NO: 3508221 - DNA, 25 bp, Homo sapien
cagactgtacgcagggcattctgat

SEQ ID NO: 3508222 - DNA, 25 bp, Homo sapien
ttcaggcggcacatgttacttttcc

SEQ ID NO: 3508223 - DNA, 25 bp, Homo sapien
cttgtctcttcaggcggcacatgtt

SEQ ID NO: 3508224 - DNA, 25 bp, Homo sapien
ctaagtcatgggaaatcagaagccc

SEQ ID NO: 3508225 - DNA, 25 bp, Homo sapien
agtcatgggaaatcagaagccctta

SEQ ID NO: 3508226 - DNA, 25 bp, Homo sapien
tcatgggaaatcagaagcccttatc

SEQ ID NO: 3508227 - DNA, 25 bp, Homo sapien
taagtcatgggaaatcagaagccct

SEQ ID NO: 3508228 - DNA, 25 bp, Homo sapien
gatttgtaatcctttctgtatatac

SEQ ID NO: 3508229 - DNA, 25 bp, Homo sapien
catgatttgtaatcctttctgtata

SEQ ID NO: 3508230 - DNA, 25 bp, Homo sapien
tttgtaatcctttctgtatataccc

SEQ ID NO: 3508231 - DNA, 25 bp, Homo sapien
agcatgatttgtaatcctttctgta

SEQ ID NO: 3508232 - DNA, 25 bp, Homo sapien
gacataactgtctataatagcctgg

SEQ ID NO: 3508233 - DNA, 25 bp, Homo sapien
tcatgacccttaggtgtggcctggg

SEQ ID NO: 3508234 - DNA, 25 bp, Homo sapien
tggcccaggtgagtgtaaagatatt

SEQ ID NO: 3508235 - DNA, 25 bp, Homo sapien
ggtagttctccacccagactgtagg

SEQ ID NO: 3508236 - DNA, 25 bp, Homo sapien
gacgttgcagggaaatgccaggtca

SEQ ID NO: 3508237 - DNA, 25 bp, Homo sapien
taaggtagagcaacgatttcctggg

SEQ ID NO: 3508238 - DNA, 25 bp, Homo sapien
gaacaaagggcacagcgtactagta

SEQ ID NO: 3508239 - DNA, 25 bp, Homo sapien
gaggctgcaatctgaggatacccac

SEQ ID NO: 3508240 - DNA, 25 bp, Homo sapien
cacgttttcttggttgttgtccact

SEQ ID NO: 3508241 - DNA, 25 bp, Homo sapien
atatccacgttttcttggttgttgt

SEQ ID NO: 3508242 - DNA, 25 bp, Homo sapien
tgaagccaccctttcagatcctcag

SEQ ID NO: 3508243 - DNA, 25 bp, Homo sapien
tccacgttttcttggttgttgtcca

SEQ ID NO: 3508244 - DNA, 25 bp, Homo sapien
ggccagtttggctcttaacatctaa

SEQ ID NO: 3508245 - DNA, 25 bp, Homo sapien
tgggacattctaaacggccagtttg

SEQ ID NO: 3508246 - DNA, 25 bp, Homo sapien
cagtcgacacaaacatgaatgccta

SEQ ID NO: 3508247 - DNA, 25 bp, Homo sapien
tacatgtaattctgtgctggcacag

SEQ ID NO: 3508248 - DNA, 25 bp, Homo sapien
ttttcttgcagttgagcaagctcaa

SEQ ID NO: 3508249 - DNA, 25 bp, Homo sapien
cttgcagttgagcaagctcaaaact

SEQ ID NO: 3508250 - DNA, 25 bp, Homo sapien
tgcagttgagcaagctcaaaactgg

SEQ ID NO: 3508251 - DNA, 25 bp, Homo sapien
ttcttgcagttgagcaagctcaaaa

SEQ ID NO: 3508252 - DNA, 25 bp, Homo sapien
ggtgtttccaggcatggcagtatag

SEQ ID NO: 3508253 - DNA, 25 bp, Homo sapien
gtttccaggcatggcagtatagcat

SEQ ID NO: 3508254 - DNA, 25 bp, Homo sapien
tgtgggtgtttccaggcatggcagt

SEQ ID NO: 3508255 - DNA, 25 bp, Homo sapien
tatagcatttcccatcctctgcagt

SEQ ID NO: 3508256 - DNA, 25 bp, Homo sapien
tattcaagaacctgtgctaacatgc

SEQ ID NO: 3508257 - DNA, 25 bp, Homo sapien
gaattgaaggaggtatagcacatca

SEQ ID NO: 3508258 - DNA, 25 bp, Homo sapien
agcaacactagagaaatagctcaaa

SEQ ID NO: 3508259 - DNA, 25 bp, Homo sapien
tcagtcacggaacccctcatatcaa

SEQ ID NO: 3508260 - DNA, 25 bp, Homo sapien
aagcttactctagacaggagggcaa

SEQ ID NO: 3508261 - DNA, 25 bp, Homo sapien
tctgcctctaattcacagtacaggg

SEQ ID NO: 3508262 - DNA, 25 bp, Homo sapien
tatcaggcttaatttcaggagggac

SEQ ID NO: 3508263 - DNA, 25 bp, Homo sapien
gctatcctaagtacctcatgaagag

SEQ ID NO: 3508264 - DNA, 25 bp, Homo sapien
atatgattaggatgattctacttac

SEQ ID NO: 3508265 - DNA, 25 bp, Homo sapien
tcattgatgtaatatgattaggatg

SEQ ID NO: 3508266 - DNA, 25 bp, Homo sapien
cattgatgtaatatgattaggatga

SEQ ID NO: 3508267 - DNA, 25 bp, Homo sapien
gtaatatgattaggatgattctact

SEQ ID NO: 3508268 - DNA, 25 bp, Homo sapien
caaatgcctcggcaaggtgagacct

SEQ ID NO: 3508269 - DNA, 25 bp, Homo sapien
tagattggaataatctgccccatca

SEQ ID NO: 3508270 - DNA, 25 bp, Homo sapien
ccaaaaccgtagattggaataatct

SEQ ID NO: 3508271 - DNA, 25 bp, Homo sapien
tggcctttgcaaatgcctcggcaag

SEQ ID NO: 3508272 - DNA, 25 bp, Homo sapien
ggaaacgagccccaggagtctggcc

SEQ ID NO: 3508273 - DNA, 25 bp, Homo sapien
caggagtctggccatctgagggtgc

SEQ ID NO: 3508274 - DNA, 25 bp, Homo sapien
gccccaggagtctggccatctgagg

SEQ ID NO: 3508275 - DNA, 25 bp, Homo sapien
ctggaaacgagccccaggagtctgg

SEQ ID NO: 3508276 - DNA, 25 bp, Homo sapien
tgcatcataggtggaaatcggccca

SEQ ID NO: 3508277 - DNA, 25 bp, Homo sapien
catcataggtggaaatcggcccaat

SEQ ID NO: 3508278 - DNA, 25 bp, Homo sapien
cataggtggaaatcggcccaatttt

SEQ ID NO: 3508279 - DNA, 25 bp, Homo sapien
gatgcatcataggtggaaatcggcc

SEQ ID NO: 3508280 - DNA, 25 bp, Homo sapien
cttaaccgtcaaatccaatggcttt

SEQ ID NO: 3508281 - DNA, 25 bp, Homo sapien
aaccgtcaaatccaatggctttttg

SEQ ID NO: 3508282 - DNA, 25 bp, Homo sapien
tgtaaaagggaacatgactaaatcc

SEQ ID NO: 3508283 - DNA, 25 bp, Homo sapien
ccatgttgacatgtatagctctagt

SEQ ID NO: 3508284 - DNA, 25 bp, Homo sapien
taaaaacagctaaagagatcagaat

SEQ ID NO: 3508285 - DNA, 25 bp, Homo sapien
gctatgtgactatctctataggtac

SEQ ID NO: 3508286 - DNA, 25 bp, Homo sapien
ttgcttctgagcctatgcttatcct

SEQ ID NO: 3508287 - DNA, 25 bp, Homo sapien
tatgcttatcctccagtggctttgc

SEQ ID NO: 3508288 - DNA, 25 bp, Homo sapien
tccaactccacatatctaaatccag

SEQ ID NO: 3508289 - DNA, 25 bp, Homo sapien
tctaaatccagccaatcctccaagg

SEQ ID NO: 3508290 - DNA, 25 bp, Homo sapien
gaagcattttctcatgctattcccc

SEQ ID NO: 3508291 - DNA, 25 bp, Homo sapien
gcccccgaagcattttctcatgcta

SEQ ID NO: 3508292 - DNA, 25 bp, Homo sapien
agcattttctcatgctattccccat

SEQ ID NO: 3508293 - DNA, 25 bp, Homo sapien
ccccgaagcattttctcatgctatt

SEQ ID NO: 3508294 - DNA, 25 bp, Homo sapien
gagttctcaagggaacaacccatgt

SEQ ID NO: 3508295 - DNA, 25 bp, Homo sapien
tgagaacactgaataccaacacttg

SEQ ID NO: 3508296 - DNA, 25 bp, Homo sapien
aaaggccccagtgcagctaagagga

SEQ ID NO: 3508297 - DNA, 25 bp, Homo sapien
ttagaagtccgtcccaagtggatag

SEQ ID NO: 3508298 - DNA, 25 bp, Homo sapien
cgcttcccgcgggacaggaaggcct

SEQ ID NO: 3508299 - DNA, 25 bp, Homo sapien
cggcggctcctgccgcttcccgcgg

SEQ ID NO: 3508300 - DNA, 25 bp, Homo sapien
gcggcggctcctgccgcttcccgcg

SEQ ID NO: 3508301 - DNA, 25 bp, Homo sapien
gccagagcgactctctgcactgtgg

SEQ ID NO: 3508302 - DNA, 25 bp, Homo sapien
actgctcacggtggtcgcaggtgca

SEQ ID NO: 3508303 - DNA, 25 bp, Homo sapien
gactgctcacggtggtcgcaggtgc

SEQ ID NO: 3508304 - DNA, 25 bp, Homo sapien
gctcacggtggtcgcaggtgcagac

SEQ ID NO: 3508305 - DNA, 25 bp, Homo sapien
acggtggtcgcaggtgcagacgcca

SEQ ID NO: 3508306 - DNA, 25 bp, Homo sapien
cctccaggtcagagtccggataata

SEQ ID NO: 3508307 - DNA, 25 bp, Homo sapien
taaggctcatagcagggatcctaaa

SEQ ID NO: 3508308 - DNA, 25 bp, Homo sapien
ggatcctaaagtcacaggttctctg

SEQ ID NO: 3508309 - DNA, 25 bp, Homo sapien
ttatgaccctcatttaagccccttc

SEQ ID NO: 3508310 - DNA, 25 bp, Homo sapien
cctggattttcccggaggaaatgag

SEQ ID NO: 3508311 - DNA, 25 bp, Homo sapien
attttcccggaggaaatgaggatgt

SEQ ID NO: 3508312 - DNA, 25 bp, Homo sapien
tcataggtagggtgagtccaggttt

SEQ ID NO: 3508313 - DNA, 25 bp, Homo sapien
cataggtagggtgagtccaggtttt

SEQ ID NO: 3508314 - DNA, 25 bp, Homo sapien
ccacactgaacactgtaacggtaat

SEQ ID NO: 3508315 - DNA, 25 bp, Homo sapien
ccatggtgataggagtatacaggag

SEQ ID NO: 3508316 - DNA, 25 bp, Homo sapien
taacggtaatagcagtccatggtga

SEQ ID NO: 3508317 - DNA, 25 bp, Homo sapien
tagtgaagttggagactgcagattc

SEQ ID NO: 3508318 - DNA, 25 bp, Homo sapien
gacaacagtggctcatggcatgacg

SEQ ID NO: 3508319 - DNA, 25 bp, Homo sapien
tggctcatggcatgacggttctgct

SEQ ID NO: 3508320 - DNA, 25 bp, Homo sapien
catggcatgacggttctgctctcca

SEQ ID NO: 3508321 - DNA, 25 bp, Homo sapien
ggcatgacggttctgctctccatcc

SEQ ID NO: 3508322 - DNA, 25 bp, Homo sapien
tcagacaaagctgcgccgtgtatca

SEQ ID NO: 3508323 - DNA, 25 bp, Homo sapien
tatcaattaccgagaggctgcgtgc

SEQ ID NO: 3508324 - DNA, 25 bp, Homo sapien
cccagctgataagggcccgcattgt

SEQ ID NO: 3508325 - DNA, 25 bp, Homo sapien
ggacagctggcagcccgataagggc

SEQ ID NO: 3508326 - DNA, 25 bp, Homo sapien
ctcgcggcagtttagaatttcttgg

SEQ ID NO: 3508327 - DNA, 25 bp, Homo sapien
gtgggcaggcgcctcgcggcagttt

SEQ ID NO: 3508328 - DNA, 25 bp, Homo sapien
tgctcgcccgagataatggcagtgg

SEQ ID NO: 3508329 - DNA, 25 bp, Homo sapien
tcgcccgagataatggcagtgggca

SEQ ID NO: 3508330 - DNA, 25 bp, Homo sapien
cccacccttgcctttcctagctgga

SEQ ID NO: 3508331 - DNA, 25 bp, Homo sapien
cttgcctttcctagctggagcccac

SEQ ID NO: 3508332 - DNA, 25 bp, Homo sapien
tatcccacccttgcctttcctagct

SEQ ID NO: 3508333 - DNA, 25 bp, Homo sapien
cacccttgcctttcctagctggagc

SEQ ID NO: 3508334 - DNA, 25 bp, Homo sapien
ttgcttgactccctggcgctggcat

SEQ ID NO: 3508335 - DNA, 25 bp, Homo sapien
gacggtcccacaggcaaatggctga

SEQ ID NO: 3508336 - DNA, 25 bp, Homo sapien
aaattccgcaccagggttgcttgac

SEQ ID NO: 3508337 - DNA, 25 bp, Homo sapien
caataagttgaaccagacggtccca

SEQ ID NO: 3508338 - DNA, 25 bp, Homo sapien
tgagtgagaacagacgcatgtgaac

SEQ ID NO: 3508339 - DNA, 25 bp, Homo sapien
aaatcgctggtgcacaatgtcaggg

SEQ ID NO: 3508340 - DNA, 25 bp, Homo sapien
tgagactcacatatgaaatcgctgg

SEQ ID NO: 3508341 - DNA, 25 bp, Homo sapien
tgggacccttcagagaaaaactgtg

SEQ ID NO: 3508342 - DNA, 25 bp, Homo sapien
ggaattattatgccaaagtaagtgt

SEQ ID NO: 3508343 - DNA, 25 bp, Homo sapien
attattatgccaaagtaagtgttta

SEQ ID NO: 3508344 - DNA, 25 bp, Homo sapien
ttattatgccaaagtaagtgtttac

SEQ ID NO: 3508345 - DNA, 25 bp, Homo sapien
gaattattatgccaaagtaagtgtt

SEQ ID NO: 3508346 - DNA, 25 bp, Homo sapien
tattgtagagggaccttccactaac

SEQ ID NO: 3508347 - DNA, 25 bp, Homo sapien
tgagccccaaataccctggtggtgg

SEQ ID NO: 3508348 - DNA, 25 bp, Homo sapien
cagaaaatgccccatatgagccatt

SEQ ID NO: 3508349 - DNA, 25 bp, Homo sapien
catttctcaacctgtttttattgta

SEQ ID NO: 3508350 - DNA, 25 bp, Homo sapien
gttgcctccagggtaaaggtctatc

SEQ ID NO: 3508351 - DNA, 25 bp, Homo sapien
ttgcctccagggtaaaggtctatct

SEQ ID NO: 3508352 - DNA, 25 bp, Homo sapien
tgcctccagggtaaaggtctatctc

SEQ ID NO: 3508353 - DNA, 25 bp, Homo sapien
tggttgcctccagggtaaaggtcta

SEQ ID NO: 3508354 - DNA, 25 bp, Homo sapien
tgagtgcttggtcaccctccaacta

SEQ ID NO: 3508355 - DNA, 25 bp, Homo sapien
gagtgcttggtcaccctccaactaa

SEQ ID NO: 3508356 - DNA, 25 bp, Homo sapien
ctccaactaagccccactgtctccc

SEQ ID NO: 3508357 - DNA, 25 bp, Homo sapien
tctcccacttctgtgcctttacctg

SEQ ID NO: 3508358 - DNA, 25 bp, Homo sapien
agaagacaattaaggataatgtcag

SEQ ID NO: 3508359 - DNA, 25 bp, Homo sapien
gacaattaaggataatgtcagcatc

SEQ ID NO: 3508360 - DNA, 25 bp, Homo sapien
caattaaggataatgtcagcatcat

SEQ ID NO: 3508361 - DNA, 25 bp, Homo sapien
aagacaattaaggataatgtcagca

SEQ ID NO: 3508362 - DNA, 25 bp, Homo sapien
cacaaagagctccaatgagtcctga

SEQ ID NO: 3508363 - DNA, 25 bp, Homo sapien
aaggccacgccgtatttgttgggcg

SEQ ID NO: 3508364 - DNA, 25 bp, Homo sapien
gacatgctcacgttttggacttggt

SEQ ID NO: 3508365 - DNA, 25 bp, Homo sapien
actctgtgtatctgctgatgagccc

SEQ ID NO: 3508366 - DNA, 25 bp, Homo sapien
tgcagcaggcagacccgttagaaca

SEQ ID NO: 3508367 - DNA, 25 bp, Homo sapien
aggagagcccttcagttcccccagt

SEQ ID NO: 3508368 - DNA, 25 bp, Homo sapien
tagaacaacaaacgtggcccaggaa

SEQ ID NO: 3508369 - DNA, 25 bp, Homo sapien
caggaaccgcctcagttccctagca

SEQ ID NO: 3508370 - DNA, 25 bp, Homo sapien
tttcttggcaaaggcaataagctct

SEQ ID NO: 3508371 - DNA, 25 bp, Homo sapien
ggcagcacccactggaagtcttgag

SEQ ID NO: 3508372 - DNA, 25 bp, Homo sapien
gcaagagtctgcaaagaaagcccca

SEQ ID NO: 3508373 - DNA, 25 bp, Homo sapien
cagtgggctctggaacctctgacgg

SEQ ID NO: 3508374 - DNA, 25 bp, Homo sapien
tgttcccatttatatacagaagaca

SEQ ID NO: 3508375 - DNA, 25 bp, Homo sapien
agaagacagactgtacaggcccggc

SEQ ID NO: 3508376 - DNA, 25 bp, Homo sapien
ccatcgaggacggagaagttctaat

SEQ ID NO: 3508377 - DNA, 25 bp, Homo sapien
tcataagtttaatccacgccagtaa

SEQ ID NO: 3508378 - DNA, 25 bp, Homo sapien
tccatctgacacaagatcatgttgt

SEQ ID NO: 3508379 - DNA, 25 bp, Homo sapien
cttcctcatagtccatctgacacaa

SEQ ID NO: 3508380 - DNA, 25 bp, Homo sapien
tcatagtccatctgacacaagatca

SEQ ID NO: 3508381 - DNA, 25 bp, Homo sapien
attcaaaggtgccattgagctgccc

SEQ ID NO: 3508382 - DNA, 25 bp, Homo sapien
ctctggctccttaggtccccaggga

SEQ ID NO: 3508383 - DNA, 25 bp, Homo sapien
tggctccttaggtccccagggactc

SEQ ID NO: 3508384 - DNA, 25 bp, Homo sapien
gggctctggctccttaggtccccag

SEQ ID NO: 3508385 - DNA, 25 bp, Homo sapien
tgagaagagcgcctgccttctggtg

SEQ ID NO: 3508386 - DNA, 25 bp, Homo sapien
ttgcgtgcacgcctccgccgtgctc

SEQ ID NO: 3508387 - DNA, 25 bp, Homo sapien
acccgcatttgcgtgcacgcctccg

SEQ ID NO: 3508388 - DNA, 25 bp, Homo sapien
catttgcgtgcacgcctccgccgtg

SEQ ID NO: 3508389 - DNA, 25 bp, Homo sapien
gcaacccgcatttgcgtgcacgcct

SEQ ID NO: 3508390 - DNA, 25 bp, Homo sapien
ggagtgtgttgggtcggccagtcca

SEQ ID NO: 3508391 - DNA, 25 bp, Homo sapien
tgtgttgggtcggccagtccagcac

SEQ ID NO: 3508392 - DNA, 25 bp, Homo sapien
gttgggtcggccagtccagcactga

SEQ ID NO: 3508393 - DNA, 25 bp, Homo sapien
cgtctggggagtgtgttgggtcggc

SEQ ID NO: 3508394 - DNA, 25 bp, Homo sapien
gagctggcaggcgaagcagtcgagg

SEQ ID NO: 3508395 - DNA, 25 bp, Homo sapien
caggcgaagcagtcgaggtgataca

SEQ ID NO: 3508396 - DNA, 25 bp, Homo sapien
gaggtgatacacgttgtcccgggcc

SEQ ID NO: 3508397 - DNA, 25 bp, Homo sapien
gggcccgcatcaccatctcgaaggc

SEQ ID NO: 3508398 - DNA, 25 bp, Homo sapien
gagggaagggcgcagaggactcagc

SEQ ID NO: 3508399 - DNA, 25 bp, Homo sapien
cagaggactcagcagcattctggga

SEQ ID NO: 3508400 - DNA, 25 bp, Homo sapien
gaggactcagcagcattctgggaag

SEQ ID NO: 3508401 - DNA, 25 bp, Homo sapien
ctgccgagggaagggcgcagaggac

SEQ ID NO: 3508402 - DNA, 25 bp, Homo sapien
cagatggtctgccacatcgtcctaa

SEQ ID NO: 3508403 - DNA, 25 bp, Homo sapien
tgataagcccatcctacactgtggg

SEQ ID NO: 3508404 - DNA, 25 bp, Homo sapien
gctggcagggccctatatgcttgag

SEQ ID NO: 3508405 - DNA, 25 bp, Homo sapien
tctccaagtcctgtgaacccatcag

SEQ ID NO: 3508406 - DNA, 25 bp, Homo sapien
gggcagagggagccccatgaagccc

SEQ ID NO: 3508407 - DNA, 25 bp, Homo sapien
gagggagccccatgaagcccttgcc

SEQ ID NO: 3508408 - DNA, 25 bp, Homo sapien
agagggagccccatgaagcccttgc

SEQ ID NO: 3508409 - DNA, 25 bp, Homo sapien
gcagagggagccccatgaagccctt

SEQ ID NO: 3508410 - DNA, 25 bp, Homo sapien
gttaattaatgcgatgagccctcct

SEQ ID NO: 3508411 - DNA, 25 bp, Homo sapien
taattaatgcgatgagccctccttc

SEQ ID NO: 3508412 - DNA, 25 bp, Homo sapien
ttaattaatgcgatgagccctcctt

SEQ ID NO: 3508413 - DNA, 25 bp, Homo sapien
ctgttaattaatgcgatgagccctc

SEQ ID NO: 3508414 - DNA, 25 bp, Homo sapien
ccagtacttgtccaatgccttcagc

SEQ ID NO: 3508415 - DNA, 25 bp, Homo sapien
gatcttgcggttacagcccgcacag

SEQ ID NO: 3508416 - DNA, 25 bp, Homo sapien
ccttcagcagatagcggtccttgat

SEQ ID NO: 3508417 - DNA, 25 bp, Homo sapien
tcaggtagtcgcgtcggcacaggat

SEQ ID NO: 3508418 - DNA, 25 bp, Homo sapien
ctccagctgaagtgctacagcctct

SEQ ID NO: 3508419 - DNA, 25 bp, Homo sapien
gatctttgtgccaactcgtctttct

SEQ ID NO: 3508420 - DNA, 25 bp, Homo sapien
agatctttgtgccaactcgtctttc

SEQ ID NO: 3508421 - DNA, 25 bp, Homo sapien
cagcctcttggtctatccatgtaga

SEQ ID NO: 3508422 - DNA, 25 bp, Homo sapien
caccaagtacaaagggcccaatgtg

SEQ ID NO: 3508423 - DNA, 25 bp, Homo sapien
gtacaaagggcccaatgtgatgttc

SEQ ID NO: 3508424 - DNA, 25 bp, Homo sapien
agggcagagcctcccgtcgcggcag

SEQ ID NO: 3508425 - DNA, 25 bp, Homo sapien
aagtacaaagggcccaatgtgatgt

SEQ ID NO: 3508426 - DNA, 25 bp, Homo sapien
gagatggggacatatgtcgtccagt

SEQ ID NO: 3508427 - DNA, 25 bp, Homo sapien
gacatatgtcgtccagtagcctgga

SEQ ID NO: 3508428 - DNA, 25 bp, Homo sapien
gaaccacagggaccgttgaggagga

SEQ ID NO: 3508429 - DNA, 25 bp, Homo sapien
cacgacgtgcaggtgtgggcatgaa

SEQ ID NO: 3508430 - DNA, 25 bp, Homo sapien
cagcccggaggagaaatgccctcat

SEQ ID NO: 3508431 - DNA, 25 bp, Homo sapien
acagtccaggtgacggggacgcact

SEQ ID NO: 3508432 - DNA, 25 bp, Homo sapien
tccctccagcccggaggagaaatgc

SEQ ID NO: 3508433 - DNA, 25 bp, Homo sapien
actgccagaggtcatcccgcccctc

SEQ ID NO: 3508434 - DNA, 25 bp, Homo sapien
gaggaatgactgtccatgcagggca

SEQ ID NO: 3508435 - DNA, 25 bp, Homo sapien
ccagcaagggggcatggaccagaaa

SEQ ID NO: 3508436 - DNA, 25 bp, Homo sapien
ggcactgtctctgggtggaccacag

SEQ ID NO: 3508437 - DNA, 25 bp, Homo sapien
ggttcttcaaatgctatgactgctg

SEQ ID NO: 3508438 - DNA, 25 bp, Homo sapien
gccaccagtggccaaagcgaggctg

SEQ ID NO: 3508439 - DNA, 25 bp, Homo sapien
caagggtaaagccaccagtggccaa

SEQ ID NO: 3508440 - DNA, 25 bp, Homo sapien
tggccaaagcgaggctgcagatcca

SEQ ID NO: 3508441 - DNA, 25 bp, Homo sapien
ttgcccaagggtaaagccaccagtg

SEQ ID NO: 3508442 - DNA, 25 bp, Homo sapien
ggaaagtgaacttggacccaatctg

SEQ ID NO: 3508443 - DNA, 25 bp, Homo sapien
agtgaacttggacccaatctggacc

SEQ ID NO: 3508444 - DNA, 25 bp, Homo sapien
gaaagtgaacttggacccaatctgg

SEQ ID NO: 3508445 - DNA, 25 bp, Homo sapien
aaagtgaacttggacccaatctgga

SEQ ID NO: 3508446 - DNA, 25 bp, Homo sapien
gcttccttcttgaagccgccagagc

SEQ ID NO: 3508447 - DNA, 25 bp, Homo sapien
ttccttcttgaagccgccagagccc

SEQ ID NO: 3508448 - DNA, 25 bp, Homo sapien
cttcttgaagccgccagagcccatc

SEQ ID NO: 3508449 - DNA, 25 bp, Homo sapien
tcttgaagccgccagagcccatctg

SEQ ID NO: 3508450 - DNA, 25 bp, Homo sapien
tcttccctagtggttaataaattca

SEQ ID NO: 3508451 - DNA, 25 bp, Homo sapien
cagatcaatttgttcacgatagagc

SEQ ID NO: 3508452 - DNA, 25 bp, Homo sapien
tccagatcaatttgttcacgataga

SEQ ID NO: 3508453 - DNA, 25 bp, Homo sapien
agatcaatttgttcacgatagagcc

SEQ ID NO: 3508454 - DNA, 25 bp, Homo sapien
aagagtgagtccgaagcctttgcca

SEQ ID NO: 3508455 - DNA, 25 bp, Homo sapien
gccgctgccgtcaatttcaaagaat

SEQ ID NO: 3508456 - DNA, 25 bp, Homo sapien
gatttcacatctgcatgtatctgag

SEQ ID NO: 3508457 - DNA, 25 bp, Homo sapien
agaattctaaagatttcacatctgc

SEQ ID NO: 3508458 - DNA, 25 bp, Homo sapien
gaccacagggagaagagtgtgtgcc

SEQ ID NO: 3508459 - DNA, 25 bp, Homo sapien
ctggtagtatggaccacagggagaa

SEQ ID NO: 3508460 - DNA, 25 bp, Homo sapien
tatggaccacagggagaagagtgtg

SEQ ID NO: 3508461 - DNA, 25 bp, Homo sapien
tggaccacagggagaagagtgtgtg

SEQ ID NO: 3508462 - DNA, 25 bp, Homo sapien
cctcaccctgcacagacccagactg

SEQ ID NO: 3508463 - DNA, 25 bp, Homo sapien
cccagactgcgagctctggacgaaa

SEQ ID NO: 3508464 - DNA, 25 bp, Homo sapien
tgcacagacccagactgcgagctct

SEQ ID NO: 3508465 - DNA, 25 bp, Homo sapien
cagacccagactgcgagctctggac

SEQ ID NO: 3508466 - DNA, 25 bp, Homo sapien
cagcttggaaccaggtgcctgaggg

SEQ ID NO: 3508467 - DNA, 25 bp, Homo sapien
gcttctggctcgggggagagcagct

SEQ ID NO: 3508468 - DNA, 25 bp, Homo sapien
tccaggctttgaacctgctccaggg

SEQ ID NO: 3508469 - DNA, 25 bp, Homo sapien
ggtcccctctacctcctaattgaga

SEQ ID NO: 3508470 - DNA, 25 bp, Homo sapien
ctctacctcctaattgagactctac

SEQ ID NO: 3508471 - DNA, 25 bp, Homo sapien
ggcctccaggctttgaacctgctcc

SEQ ID NO: 3508472 - DNA, 25 bp, Homo sapien
gggccttccacctggattcgagtgt

SEQ ID NO: 3508473 - DNA, 25 bp, Homo sapien
ttccacctggattcgagtgtgacaa

SEQ ID NO: 3508474 - DNA, 25 bp, Homo sapien
tcgagtgtgacaagaccaagtgtgg

SEQ ID NO: 3508475 - DNA, 25 bp, Homo sapien
acctggattcgagtgtgacaagacc

SEQ ID NO: 3508476 - DNA, 25 bp, Homo sapien
tccctgcggactgagaagagaggcc

SEQ ID NO: 3508477 - DNA, 25 bp, Homo sapien
catccctgcggactgagaagagagg

SEQ ID NO: 3508478 - DNA, 25 bp, Homo sapien
tcctctgcgggtatcatccctgcgg

SEQ ID NO: 3508479 - DNA, 25 bp, Homo sapien
tctgcgggtatcatccctgcggact

SEQ ID NO: 3508480 - DNA, 25 bp, Homo sapien
tttgtagggccctcccagccttgga

SEQ ID NO: 3508481 - DNA, 25 bp, Homo sapien
ggtggctttgtagggccctcccagc

SEQ ID NO: 3508482 - DNA, 25 bp, Homo sapien
agaccccactggggtggctttgtag

SEQ ID NO: 3508483 - DNA, 25 bp, Homo sapien
ggccctcccagccttggaaaactga

SEQ ID NO: 3508484 - DNA, 25 bp, Homo sapien
ttgaactctgagtgtctttctctcc

SEQ ID NO: 3508485 - DNA, 25 bp, Homo sapien
tcatcttctcacaggttcgtcaccc

SEQ ID NO: 3508486 - DNA, 25 bp, Homo sapien
cacaggttcgtcacccttccttgaa

SEQ ID NO: 3508487 - DNA, 25 bp, Homo sapien
tccttgaactctgagtgtctttctc

SEQ ID NO: 3508488 - DNA, 25 bp, Homo sapien
ctcaagaaagcccagttgacctcca

SEQ ID NO: 3508489 - DNA, 25 bp, Homo sapien
caagaaagcccagttgacctccagg

SEQ ID NO: 3508490 - DNA, 25 bp, Homo sapien
tgtagacaggaggccactcaagaaa

SEQ ID NO: 3508491 - DNA, 25 bp, Homo sapien
tagacaggaggccactcaagaaagc

SEQ ID NO: 3508492 - DNA, 25 bp, Homo sapien
tgcctctgcgacctggaccaatctg

SEQ ID NO: 3508493 - DNA, 25 bp, Homo sapien
tgctaggtttggtggatgtgtctct

SEQ ID NO: 3508494 - DNA, 25 bp, Homo sapien
ctcccaccagtagcgaacaagcttg

SEQ ID NO: 3508495 - DNA, 25 bp, Homo sapien
gtatcagctactgtgaactcctgcc

SEQ ID NO: 3508496 - DNA, 25 bp, Homo sapien
gccaagtgagtggtcatgccagcac

SEQ ID NO: 3508497 - DNA, 25 bp, Homo sapien
tgagccccggcatccaaagggtgaa

SEQ ID NO: 3508498 - DNA, 25 bp, Homo sapien
tttaggcgagcagcggccagtgatc

SEQ ID NO: 3508499 - DNA, 25 bp, Homo sapien
aaagggtgaagcttttaggcgagca

SEQ ID NO: 3508500 - DNA, 25 bp, Homo sapien
ttccatttcgctgacaggcagaccc

SEQ ID NO: 3508501 - DNA, 25 bp, Homo sapien
ctgtttctccgggaaagttggagct

SEQ ID NO: 3508502 - DNA, 25 bp, Homo sapien
cagcagcatgtagaaagcccggacc

SEQ ID NO: 3508503 - DNA, 25 bp, Homo sapien
ctggtgccagcccaagccgcaggtg

SEQ ID NO: 3508504 - DNA, 25 bp, Homo sapien
ctgagttccagtaaagtggagatgg

SEQ ID NO: 3508505 - DNA, 25 bp, Homo sapien
tgtcaggtggagaaaaggcgttggg

SEQ ID NO: 3508506 - DNA, 25 bp, Homo sapien
cctctccagacaagatgctgtcagg

SEQ ID NO: 3508507 - DNA, 25 bp, Homo sapien
agcctctccagacaagatgctgtca

SEQ ID NO: 3508508 - DNA, 25 bp, Homo sapien
cagacaaaaggtgccgtatgcaggg

SEQ ID NO: 3508509 - DNA, 25 bp, Homo sapien
gacagtatctccaggtaccaaggaa

SEQ ID NO: 3508510 - DNA, 25 bp, Homo sapien
gaagttctccgatggcctacatggg

SEQ ID NO: 3508511 - DNA, 25 bp, Homo sapien
tgcatgctccccatagtgacagtat

SEQ ID NO: 3508512 - DNA, 25 bp, Homo sapien
cacacatactgagagccacaggtcc

SEQ ID NO: 3508513 - DNA, 25 bp, Homo sapien
gcaccaacagtcacatacaaatgcc

SEQ ID NO: 3508514 - DNA, 25 bp, Homo sapien
tggcagaacgccggcggcagcgtgg

SEQ ID NO: 3508515 - DNA, 25 bp, Homo sapien
gggcaccaacagtcacatacaaatg

SEQ ID NO: 3508516 - DNA, 25 bp, Homo sapien
caatggcagaacgccggcggcagcg

SEQ ID NO: 3508517 - DNA, 25 bp, Homo sapien
ccagcagccatgggctcctctgttc

SEQ ID NO: 3508518 - DNA, 25 bp, Homo sapien
cagccatgggctcctctgttccgac

SEQ ID NO: 3508519 - DNA, 25 bp, Homo sapien
agcagccatgggctcctctgttccg

SEQ ID NO: 3508520 - DNA, 25 bp, Homo sapien
ctagtggcttccagcagccatgggc

SEQ ID NO: 3508521 - DNA, 25 bp, Homo sapien
cacaagaggcggctctctttctcac

SEQ ID NO: 3508522 - DNA, 25 bp, Homo sapien
ttttctagggcgcactgaggctcga

SEQ ID NO: 3508523 - DNA, 25 bp, Homo sapien
tgaggctcgaccacggaaggtccgt

SEQ ID NO: 3508524 - DNA, 25 bp, Homo sapien
gagacagggagctagcgggccggca

SEQ ID NO: 3508525 - DNA, 25 bp, Homo sapien
gctcagcgcctctcgggttacgcgg

SEQ ID NO: 3508526 - DNA, 25 bp, Homo sapien
gagtcacgctcatgcagatgtcccc

SEQ ID NO: 3508527 - DNA, 25 bp, Homo sapien
gttacgcggcggctggcgcgagggt

SEQ ID NO: 3508528 - DNA, 25 bp, Homo sapien
gattctccccgaagccgctgatttg

SEQ ID NO: 3508529 - DNA, 25 bp, Homo sapien
cgtcctccttgtccagcaccatcat

SEQ ID NO: 3508530 - DNA, 25 bp, Homo sapien
gagaagggcgccgactcggggcgcg

SEQ ID NO: 3508531 - DNA, 25 bp, Homo sapien
gtgtccagccgcagctaggctcggc

SEQ ID NO: 3508532 - DNA, 25 bp, Homo sapien
ctcgggcgctccgtgtccagccgca

SEQ ID NO: 3508533 - DNA, 25 bp, Homo sapien
cgcagctaggctcggccgggagaag

SEQ ID NO: 3508534 - DNA, 25 bp, Homo sapien
ccggtcttcgggcagctagcgggct

SEQ ID NO: 3508535 - DNA, 25 bp, Homo sapien
gggcggccggtcttcgggcagctag

SEQ ID NO: 3508536 - DNA, 25 bp, Homo sapien
tcttcgggcagctagcgggctctaa

SEQ ID NO: 3508537 - DNA, 25 bp, Homo sapien
gcggccggtcttcgggcagctagcg

SEQ ID NO: 3508538 - DNA, 25 bp, Homo sapien
tgatagctcataaccctgtctctgg

SEQ ID NO: 3508539 - DNA, 25 bp, Homo sapien
gtctctggcaacgacacagctttca

SEQ ID NO: 3508540 - DNA, 25 bp, Homo sapien
tacattcaggagtgaagcacttcgc

SEQ ID NO: 3508541 - DNA, 25 bp, Homo sapien
cacttcgcagatacaaaagcagtct

SEQ ID NO: 3508542 - DNA, 25 bp, Homo sapien
gactgcgagcttgatctctcccctg

SEQ ID NO: 3508543 - DNA, 25 bp, Homo sapien
gcaccgctgccaccggcatatttgg

SEQ ID NO: 3508544 - DNA, 25 bp, Homo sapien
tagacagtgtagcaagcacagggcc

SEQ ID NO: 3508545 - DNA, 25 bp, Homo sapien
tctgtgctactggaggcgttcactc

SEQ ID NO: 3508546 - DNA, 25 bp, Homo sapien
ctccaggggcagattctcctcactt

SEQ ID NO: 3508547 - DNA, 25 bp, Homo sapien
agattctcctcactttcaggggctg

SEQ ID NO: 3508548 - DNA, 25 bp, Homo sapien
gggcagattctcctcactttcaggg

SEQ ID NO: 3508549 - DNA, 25 bp, Homo sapien
tccaggggcagattctcctcacttt

SEQ ID NO: 3508550 - DNA, 25 bp, Homo sapien
aactgatctggagaggaaccttcac

SEQ ID NO: 3508551 - DNA, 25 bp, Homo sapien
caggactgggctagctgtggccact

SEQ ID NO: 3508552 - DNA, 25 bp, Homo sapien
tgacagaggcagatagaaacatcac

SEQ ID NO: 3508553 - DNA, 25 bp, Homo sapien
caaggtacctaattggcagccacat

SEQ ID NO: 3508554 - DNA, 25 bp, Homo sapien
gagtggaatcctcagatcccctggg

SEQ ID NO: 3508555 - DNA, 25 bp, Homo sapien
ccagagtggaatcctcagatcccct

SEQ ID NO: 3508556 - DNA, 25 bp, Homo sapien
gatgagcatgtactctcacttcgac

SEQ ID NO: 3508557 - DNA, 25 bp, Homo sapien
ccaacacattccacaggtgatgagc

SEQ ID NO: 3508558 - DNA, 25 bp, Homo sapien
ccgctgggatccgttccgcagtagg

SEQ ID NO: 3508559 - DNA, 25 bp, Homo sapien
tccggatgcccgcaaggcggcaaga

SEQ ID NO: 3508560 - DNA, 25 bp, Homo sapien
tgagaaagttcccagccggagcgcg

SEQ ID NO: 3508561 - DNA, 25 bp, Homo sapien
atccgttccgcagtagggtgcggaa

SEQ ID NO: 3508562 - DNA, 25 bp, Homo sapien
cgccgccgaagcccgggcgctgagc

SEQ ID NO: 3508563 - DNA, 25 bp, Homo sapien
gccgccgccgaagcccgggcgctga

SEQ ID NO: 3508564 - DNA, 25 bp, Homo sapien
ctaatcccgccgccgccgaagcccg

SEQ ID NO: 3508565 - DNA, 25 bp, Homo sapien
ccgccgccgccgaagcccgggcgct

SEQ ID NO: 3508566 - DNA, 25 bp, Homo sapien
agacggaccggagtccggagcgcag

SEQ ID NO: 3508567 - DNA, 25 bp, Homo sapien
ggtcccgacggctccagccggacta

SEQ ID NO: 3508568 - DNA, 25 bp, Homo sapien
gcgggcgccgagtccggagagccgc

SEQ ID NO: 3508569 - DNA, 25 bp, Homo sapien
ggactagcgccgaggatacggaggg

SEQ ID NO: 3508570 - DNA, 25 bp, Homo sapien
cgcagggcacgggaacttttctcat

SEQ ID NO: 3508571 - DNA, 25 bp, Homo sapien
cagggcacgggaacttttctcatta

SEQ ID NO: 3508572 - DNA, 25 bp, Homo sapien
ccgcagggcacgggaacttttctca

SEQ ID NO: 3508573 - DNA, 25 bp, Homo sapien
gcagggcacgggaacttttctcatt

SEQ ID NO: 3508574 - DNA, 25 bp, Homo sapien
tctccacattttacctcccaggaaa

SEQ ID NO: 3508575 - DNA, 25 bp, Homo sapien
ctcaaggctgtaccgagggtgtgcc

SEQ ID NO: 3508576 - DNA, 25 bp, Homo sapien
cctcctgtctcaaggctgtaccgag

SEQ ID NO: 3508577 - DNA, 25 bp, Homo sapien
agggtgtgcctgtggttgatcaact

SEQ ID NO: 3508578 - DNA, 25 bp, Homo sapien
ctgtccactgatgactggagacctg

SEQ ID NO: 3508579 - DNA, 25 bp, Homo sapien
tgatgactggagacctggagtgatc

SEQ ID NO: 3508580 - DNA, 25 bp, Homo sapien
tgtccactgatgactggagacctgg

SEQ ID NO: 3508581 - DNA, 25 bp, Homo sapien
ccactgatgactggagacctggagt

SEQ ID NO: 3508582 - DNA, 25 bp, Homo sapien
tctaaggggccagctgtgccacgtg

SEQ ID NO: 3508583 - DNA, 25 bp, Homo sapien
gctggtgctggtccgtgagcttcat

SEQ ID NO: 3508584 - DNA, 25 bp, Homo sapien
ggtccgtgagcttcatggacgccaa

SEQ ID NO: 3508585 - DNA, 25 bp, Homo sapien
catggacgccaaccgactgggccat

SEQ ID NO: 3508586 - DNA, 25 bp, Homo sapien
gacatgaagaagcatccgaagttct

SEQ ID NO: 3508587 - DNA, 25 bp, Homo sapien
tagactctgctttgccaggctcctt

SEQ ID NO: 3508588 - DNA, 25 bp, Homo sapien
agttccctgatgctcacgaaaggcc

SEQ ID NO: 3508589 - DNA, 25 bp, Homo sapien
gccattgtaacttaggacctctttg

SEQ ID NO: 3508590 - DNA, 25 bp, Homo sapien
caggcctgcgttcagcttcccaagc

SEQ ID NO: 3508591 - DNA, 25 bp, Homo sapien
gcagcattaggaagaccccagcggg

SEQ ID NO: 3508592 - DNA, 25 bp, Homo sapien
agcattaggaagaccccagcgggag

SEQ ID NO: 3508593 - DNA, 25 bp, Homo sapien
cattaggaagaccccagcgggagga

SEQ ID NO: 3508594 - DNA, 25 bp, Homo sapien
ccacagcagagcccagggccccttc

SEQ ID NO: 3508595 - DNA, 25 bp, Homo sapien
tgatccacagcagagcccagggccc

SEQ ID NO: 3508596 - DNA, 25 bp, Homo sapien
attcttctgatccacagcagagccc

SEQ ID NO: 3508597 - DNA, 25 bp, Homo sapien
atccacagcagagcccagggcccct

SEQ ID NO: 3508598 - DNA, 25 bp, Homo sapien
agtgcctagagttcctccaccaaca

SEQ ID NO: 3508599 - DNA, 25 bp, Homo sapien
cctgaaggcgtcatagaggaagact

SEQ ID NO: 3508600 - DNA, 25 bp, Homo sapien
aactgggaatcggtgtcctttcctg

SEQ ID NO: 3508601 - DNA, 25 bp, Homo sapien
catgtcttcttaactgggaatcggt

SEQ ID NO: 3508602 - DNA, 25 bp, Homo sapien
ccaggatgcagccaccaaggacacg

SEQ ID NO: 3508603 - DNA, 25 bp, Homo sapien
gatgcagccaccaaggacacggtga

SEQ ID NO: 3508604 - DNA, 25 bp, Homo sapien
aggatgcagccaccaaggacacggt

SEQ ID NO: 3508605 - DNA, 25 bp, Homo sapien
atgcagccaccaaggacacggtgac

SEQ ID NO: 3508606 - DNA, 25 bp, Homo sapien
ggcaggaatgccaacgaatccctgc

SEQ ID NO: 3508607 - DNA, 25 bp, Homo sapien
atcacacgtggggaagaaccggcca

SEQ ID NO: 3508608 - DNA, 25 bp, Homo sapien
gggttttggccgccgagacacatcc

SEQ ID NO: 3508609 - DNA, 25 bp, Homo sapien
agacacatccccacattgctgccaa

SEQ ID NO: 3508610 - DNA, 25 bp, Homo sapien
ctgtagagggtcctccgggcagggg

SEQ ID NO: 3508611 - DNA, 25 bp, Homo sapien
tgtagagggtcctccgggcagggga

SEQ ID NO: 3508612 - DNA, 25 bp, Homo sapien
gcaggggaaggaaggacctgcctga

SEQ ID NO: 3508613 - DNA, 25 bp, Homo sapien
ggcaggggaaggaaggacctgcctg

SEQ ID NO: 3508614 - DNA, 25 bp, Homo sapien
tctccccatgcactgtgatccctgc

SEQ ID NO: 3508615 - DNA, 25 bp, Homo sapien
caggtaggtgctccattcaatgctt

SEQ ID NO: 3508616 - DNA, 25 bp, Homo sapien
tgcatttgactcatcaccagtcgag

SEQ ID NO: 3508617 - DNA, 25 bp, Homo sapien
ttgactcatcaccagtcgagatggg

SEQ ID NO: 3508618 - DNA, 25 bp, Homo sapien
tccttgggcaatgtctccgttgaga

SEQ ID NO: 3508619 - DNA, 25 bp, Homo sapien
tgtctccgttgagacagcagcaagg

SEQ ID NO: 3508620 - DNA, 25 bp, Homo sapien
tgttccactggtgtcagaatttacc

SEQ ID NO: 3508621 - DNA, 25 bp, Homo sapien
gctgcatacaacctcactgaattgt

SEQ ID NO: 3508622 - DNA, 25 bp, Homo sapien
gtgtccatcacccgagcctctacca

SEQ ID NO: 3508623 - DNA, 25 bp, Homo sapien
ctgtgtccatcacccgagcctctac

SEQ ID NO: 3508624 - DNA, 25 bp, Homo sapien
tgtgtccatcacccgagcctctacc

SEQ ID NO: 3508625 - DNA, 25 bp, Homo sapien
tgtccatcacccgagcctctaccat

SEQ ID NO: 3508626 - DNA, 25 bp, Homo sapien
tgtcccgtgactcacatatgtgcag

SEQ ID NO: 3508627 - DNA, 25 bp, Homo sapien
tgactcacatatgtgcagccaacag

SEQ ID NO: 3508628 - DNA, 25 bp, Homo sapien
ccagagcagcacgtgtcccgtgact

SEQ ID NO: 3508629 - DNA, 25 bp, Homo sapien
gcacgtgtcccgtgactcacatatg

SEQ ID NO: 3508630 - DNA, 25 bp, Homo sapien
catattcagggcatacgtgtggtaa

SEQ ID NO: 3508631 - DNA, 25 bp, Homo sapien
gcgtgtgtgcctggatatccacaaa

SEQ ID NO: 3508632 - DNA, 25 bp, Homo sapien
taagtataggtagatatgtgggtgc

SEQ ID NO: 3508633 - DNA, 25 bp, Homo sapien
cacatgtggatgtacaatcgctcag

SEQ ID NO: 3508634 - DNA, 25 bp, Homo sapien
ctgcagaagcaccacacggaagagc

SEQ ID NO: 3508635 - DNA, 25 bp, Homo sapien
gggatgggcctcgtggtcagggtcc

SEQ ID NO: 3508636 - DNA, 25 bp, Homo sapien
gaaatactctccagtggggacccca

SEQ ID NO: 3508637 - DNA, 25 bp, Homo sapien
cctgggacattgtcggcagggaaat

SEQ ID NO: 3508638 - DNA, 25 bp, Homo sapien
ctggagggagagagttccccaccac

SEQ ID NO: 3508639 - DNA, 25 bp, Homo sapien
agagagttccccaccacagggagca

SEQ ID NO: 3508640 - DNA, 25 bp, Homo sapien
ttccccaccacagggagcatgtgag

SEQ ID NO: 3508641 - DNA, 25 bp, Homo sapien
agggagagagttccccaccacaggg

SEQ ID NO: 3508642 - DNA, 25 bp, Homo sapien
tgagaaatacatcgtggcagatggt

SEQ ID NO: 3508643 - DNA, 25 bp, Homo sapien
ccaccatgaggctcaagacctgaga

SEQ ID NO: 3508644 - DNA, 25 bp, Homo sapien
cctgagaaatacatcgtggcagatg

SEQ ID NO: 3508645 - DNA, 25 bp, Homo sapien
gaaatacatcgtggcagatggtgat

SEQ ID NO: 3508646 - DNA, 25 bp, Homo sapien
gccggcactggttacaatgacaatt

SEQ ID NO: 3508647 - DNA, 25 bp, Homo sapien
tatatcactgcagttaaatcctccc

SEQ ID NO: 3508648 - DNA, 25 bp, Homo sapien
gttaaatcctcccataagccggcac

SEQ ID NO: 3508649 - DNA, 25 bp, Homo sapien
acaatgacaattacggccgggccaa

SEQ ID NO: 3508650 - DNA, 25 bp, Homo sapien
caaaataggttcgtgtgggcccata

SEQ ID NO: 3508651 - DNA, 25 bp, Homo sapien
acaacacggctgtgttcctctcgtc

SEQ ID NO: 3508652 - DNA, 25 bp, Homo sapien
cccataggccagagtgtacagaatg

SEQ ID NO: 3508653 - DNA, 25 bp, Homo sapien
ctctcgtcttcaaaataggttcgtg

SEQ ID NO: 3508654 - DNA, 25 bp, Homo sapien
ctggggtgaggagccacttgaaaga

SEQ ID NO: 3508655 - DNA, 25 bp, Homo sapien
tggggtgaggagccacttgaaagaa

SEQ ID NO: 3508656 - DNA, 25 bp, Homo sapien
tcctgcctgattctcagttgagttg

SEQ ID NO: 3508657 - DNA, 25 bp, Homo sapien
aagtaagatcagagccttttgcttc

SEQ ID NO: 3508658 - DNA, 25 bp, Homo sapien
gagcatgggaactgtccgcaaagta

SEQ ID NO: 3508659 - DNA, 25 bp, Homo sapien
tgtccgcaaagtaagatcagagcct

SEQ ID NO: 3508660 - DNA, 25 bp, Homo sapien
tggtccattcgccctggagggccca

SEQ ID NO: 3508661 - DNA, 25 bp, Homo sapien
gccttgtgtgtccactccacagggc

SEQ ID NO: 3508662 - DNA, 25 bp, Homo sapien
caacctagcctccacaagttctgca

SEQ ID NO: 3508663 - DNA, 25 bp, Homo sapien
agttctgcaaagcaccttgccctct

SEQ ID NO: 3508664 - DNA, 25 bp, Homo sapien
aaaggcctgcgtggaaaatggccct

SEQ ID NO: 3508665 - DNA, 25 bp, Homo sapien
acctcaaaggcctgcgtggaaaatg

SEQ ID NO: 3508666 - DNA, 25 bp, Homo sapien
ttctttcacggtcgccggaagggca

SEQ ID NO: 3508667 - DNA, 25 bp, Homo sapien
tcaaaggcctgcgtggaaaatggcc

SEQ ID NO: 3508668 - DNA, 25 bp, Homo sapien
gcccgggatcatgttagaaaggtca

SEQ ID NO: 3508669 - DNA, 25 bp, Homo sapien
ggcagcccggctttaccagtgggaa

SEQ ID NO: 3508670 - DNA, 25 bp, Homo sapien
taagcccattgcaagcagcaagtgg

SEQ ID NO: 3508671 - DNA, 25 bp, Homo sapien
tcacttcttgggaacatgggcctgg

SEQ ID NO: 3508672 - DNA, 25 bp, Homo sapien
gggcaaaagacctgcatgcaggctc

SEQ ID NO: 3508673 - DNA, 25 bp, Homo sapien
tctgtggtatgattcaggggcaaaa

SEQ ID NO: 3508674 - DNA, 25 bp, Homo sapien
gattcaggggcaaaagacctgcatg

SEQ ID NO: 3508675 - DNA, 25 bp, Homo sapien
tggtatgattcaggggcaaaagacc

SEQ ID NO: 3508676 - DNA, 25 bp, Homo sapien
gacaaccaggtttggcctgctccag

SEQ ID NO: 3508677 - DNA, 25 bp, Homo sapien
gataatgtcattcatcagcccagca

SEQ ID NO: 3508678 - DNA, 25 bp, Homo sapien
ctacagcaatcggacctgggacggg

SEQ ID NO: 3508679 - DNA, 25 bp, Homo sapien
gatagggagcctacatcctcctggg

SEQ ID NO: 3508680 - DNA, 25 bp, Homo sapien
gagagcctgccctgtgatggcacag

SEQ ID NO: 3508681 - DNA, 25 bp, Homo sapien
gggaattgtcccctagaggtctagc

SEQ ID NO: 3508682 - DNA, 25 bp, Homo sapien
gacagagtggattctctatggcaag

SEQ ID NO: 3508683 - DNA, 25 bp, Homo sapien
tggtccccaccgtaattgtatagta

SEQ ID NO: 3508684 - DNA, 25 bp, Homo sapien
cctgagaaggactttgttgctttgg

SEQ ID NO: 3508685 - DNA, 25 bp, Homo sapien
caagatgtaaagacaaggacccagg

SEQ ID NO: 3508686 - DNA, 25 bp, Homo sapien
gaaggactttgttgctttggtccca

SEQ ID NO: 3508687 - DNA, 25 bp, Homo sapien
ctggaccctggtcggatcccaagat

SEQ ID NO: 3508688 - DNA, 25 bp, Homo sapien
tctccctgtcagaggcactgctgca

SEQ ID NO: 3508689 - DNA, 25 bp, Homo sapien
cggcctctccctgtcagaggcactg

SEQ ID NO: 3508690 - DNA, 25 bp, Homo sapien
cactgctgcagctgagccgctgcag

SEQ ID NO: 3508691 - DNA, 25 bp, Homo sapien
ctgcagctgagccgctgcagagaac

SEQ ID NO: 3508692 - DNA, 25 bp, Homo sapien
cagcctgaccttattgggagtggga

SEQ ID NO: 3508693 - DNA, 25 bp, Homo sapien
tctgctggaccaccagaacgctctg

SEQ ID NO: 3508694 - DNA, 25 bp, Homo sapien
tataggtctaggacatctgctggac

SEQ ID NO: 3508695 - DNA, 25 bp, Homo sapien
ggatgctgggcactagtagccacta

SEQ ID NO: 3508696 - DNA, 25 bp, Homo sapien
ggggccttcccatgatgcagctctg

SEQ ID NO: 3508697 - DNA, 25 bp, Homo sapien
gccaggggccttctgaggtacctgg

SEQ ID NO: 3508698 - DNA, 25 bp, Homo sapien
gggccttcccatgatgcagctctgg

SEQ ID NO: 3508699 - DNA, 25 bp, Homo sapien
ctgaggtacctggtggggcagatcc

SEQ ID NO: 3508700 - DNA, 25 bp, Homo sapien
cagctggctggtgtgggccctaaat

SEQ ID NO: 3508701 - DNA, 25 bp, Homo sapien
agctggctggtgtgggccctaaatt

SEQ ID NO: 3508702 - DNA, 25 bp, Homo sapien
ggagcaaaggcctgcgttttgggga

SEQ ID NO: 3508703 - DNA, 25 bp, Homo sapien
ctgtggagcaaaggcctgcgttttg

SEQ ID NO: 3508704 - DNA, 25 bp, Homo sapien
ctgcttccagccaagtgggagacac

SEQ ID NO: 3508705 - DNA, 25 bp, Homo sapien
acacaggctgtagatctctgacaga

SEQ ID NO: 3508706 - DNA, 25 bp, Homo sapien
cagccaagtgggagacacaagcagg

SEQ ID NO: 3508707 - DNA, 25 bp, Homo sapien
ggagtgctgggccatcgcagtacac

SEQ ID NO: 3508708 - DNA, 25 bp, Homo sapien
gccctcgtatgaccttggggcccca

SEQ ID NO: 3508709 - DNA, 25 bp, Homo sapien
tgccctcgtatgaccttggggcccc

SEQ ID NO: 3508710 - DNA, 25 bp, Homo sapien
ctgccctcgtatgaccttggggccc

SEQ ID NO: 3508711 - DNA, 25 bp, Homo sapien
agggtatttgccattcacggggaga

SEQ ID NO: 3508712 - DNA, 25 bp, Homo sapien
gaaaagctgatacttgagctgggtc

SEQ ID NO: 3508713 - DNA, 25 bp, Homo sapien
tgagtgaggaatcagaggacaccgt

SEQ ID NO: 3508714 - DNA, 25 bp, Homo sapien
tggcagcacaactaataaagccttg

SEQ ID NO: 3508715 - DNA, 25 bp, Homo sapien
tctgtgatccaggcaccagcctcca

SEQ ID NO: 3508716 - DNA, 25 bp, Homo sapien
ttctgtgatccaggcaccagcctcc

SEQ ID NO: 3508717 - DNA, 25 bp, Homo sapien
cagatggcttctatgtccaggacga

SEQ ID NO: 3508718 - DNA, 25 bp, Homo sapien
cctagctttggcctcagaacagatg

SEQ ID NO: 3508719 - DNA, 25 bp, Homo sapien
agaaaaaggatccagacattccccg

SEQ ID NO: 3508720 - DNA, 25 bp, Homo sapien
gcactgactgccctagctttggcct

SEQ ID NO: 3508721 - DNA, 25 bp, Homo sapien
ggtcacagctgaaaatccccatgca

SEQ ID NO: 3508722 - DNA, 25 bp, Homo sapien
ctgaaaatccccatgcatcggcttg

SEQ ID NO: 3508723 - DNA, 25 bp, Homo sapien
ttaggccccggcatcactttgctgg

SEQ ID NO: 3508724 - DNA, 25 bp, Homo sapien
tgcaagtgtgcaggcccataaagaa

SEQ ID NO: 3508725 - DNA, 25 bp, Homo sapien
gagaggactaaagcttccgcagcca

SEQ ID NO: 3508726 - DNA, 25 bp, Homo sapien
cagcccagacgttctctacagcggg

SEQ ID NO: 3508727 - DNA, 25 bp, Homo sapien
gctgcaagagctagggcaagggtgg

SEQ ID NO: 3508728 - DNA, 25 bp, Homo sapien
aggttgtcacctggccgtggtcgcc

SEQ ID NO: 3508729 - DNA, 25 bp, Homo sapien
cgcaccgcgcgaccagcaccttgtt

SEQ ID NO: 3508730 - DNA, 25 bp, Homo sapien
ggcacagcgtcttttgcgcagaagg

SEQ ID NO: 3508731 - DNA, 25 bp, Homo sapien
tcttttgcgcagaaggcgcaccgcg

SEQ ID NO: 3508732 - DNA, 25 bp, Homo sapien
tgagcttgtgcagaacccgagggca

SEQ ID NO: 3508733 - DNA, 25 bp, Homo sapien
gaaggacttgaacttaaaccacata

SEQ ID NO: 3508734 - DNA, 25 bp, Homo sapien
tgggagcgtgggtcatggccaatga

SEQ ID NO: 3508735 - DNA, 25 bp, Homo sapien
gaagccatcacagactgagtcacaa

SEQ ID NO: 3508736 - DNA, 25 bp, Homo sapien
gatcgtttcctatagggctccaggg

SEQ ID NO: 3508737 - DNA, 25 bp, Homo sapien
agcgtgggtcatggccaatgagcat

SEQ ID NO: 3508738 - DNA, 25 bp, Homo sapien
aattcctggcacgatgagttctgag

SEQ ID NO: 3508739 - DNA, 25 bp, Homo sapien
caactgtgggtgctctaactggaaa

SEQ ID NO: 3508740 - DNA, 25 bp, Homo sapien
gaagggtctcccttgccatatgact

SEQ ID NO: 3508741 - DNA, 25 bp, Homo sapien
taactggaaaggagcaccgctcgct

SEQ ID NO: 3508742 - DNA, 25 bp, Homo sapien
accttccctctatgcttggccccag

SEQ ID NO: 3508743 - DNA, 25 bp, Homo sapien
tccccaaggctctaagcatctccag

SEQ ID NO: 3508744 - DNA, 25 bp, Homo sapien
ttccccactcgcaccttccctctat

SEQ ID NO: 3508745 - DNA, 25 bp, Homo sapien
ccctctatgcttggccccagagaag

SEQ ID NO: 3508746 - DNA, 25 bp, Homo sapien
tggatggtgcatcctgcctaacacc

SEQ ID NO: 3508747 - DNA, 25 bp, Homo sapien
tgcctggatggtgcatcctgcctaa

SEQ ID NO: 3508748 - DNA, 25 bp, Homo sapien
gctttgttaaggagctggtcttgtt

SEQ ID NO: 3508749 - DNA, 25 bp, Homo sapien
tgtagacccagagctttgttaagga

SEQ ID NO: 3508750 - DNA, 25 bp, Homo sapien
tgtctccactaagcctgattcttga

SEQ ID NO: 3508751 - DNA, 25 bp, Homo sapien
agccctgttttggaagtctgcacgt

SEQ ID NO: 3508752 - DNA, 25 bp, Homo sapien
ttgatgtgtctgttccactgtggac

SEQ ID NO: 3508753 - DNA, 25 bp, Homo sapien
gcttcaataaccctgagcatccctg

SEQ ID NO: 3508754 - DNA, 25 bp, Homo sapien
catgccactcttctggtgccagcca

SEQ ID NO: 3508755 - DNA, 25 bp, Homo sapien
ccccatgccactcttctggtgccag

SEQ ID NO: 3508756 - DNA, 25 bp, Homo sapien
tcttgcactagaaggctctgaaaat

SEQ ID NO: 3508757 - DNA, 25 bp, Homo sapien
agggactttggtctcccccatgcca

SEQ ID NO: 3508758 - DNA, 25 bp, Homo sapien
tgctgcagaaaacggttgggataga

SEQ ID NO: 3508759 - DNA, 25 bp, Homo sapien
tgcagaaaacggttgggatagaaga

SEQ ID NO: 3508760 - DNA, 25 bp, Homo sapien
ctgcagaaaacggttgggatagaag

SEQ ID NO: 3508761 - DNA, 25 bp, Homo sapien
cttgctgcagaaaacggttgggata

SEQ ID NO: 3508762 - DNA, 25 bp, Homo sapien
gccacaggggaccccttagggcagc

SEQ ID NO: 3508763 - DNA, 25 bp, Homo sapien
tcatcaggacccggtggccatcagc

SEQ ID NO: 3508764 - DNA, 25 bp, Homo sapien
tggcttcatcaggacccggtggcca

SEQ ID NO: 3508765 - DNA, 25 bp, Homo sapien
gcttcatcaggacccggtggccatc

SEQ ID NO: 3508766 - DNA, 25 bp, Homo sapien
tgagacctggataccaccacgagct

SEQ ID NO: 3508767 - DNA, 25 bp, Homo sapien
gagacctggataccaccacgagctc

SEQ ID NO: 3508768 - DNA, 25 bp, Homo sapien
gacctggataccaccacgagctcct

SEQ ID NO: 3508769 - DNA, 25 bp, Homo sapien
ctggataccaccacgagctcctcca

SEQ ID NO: 3508770 - DNA, 25 bp, Homo sapien
tgagatcttcccataccagcaggag

SEQ ID NO: 3508771 - DNA, 25 bp, Homo sapien
agaaataccagcagggcctgacgtg

SEQ ID NO: 3508772 - DNA, 25 bp, Homo sapien
gactgagatcttcccataccagcag

SEQ ID NO: 3508773 - DNA, 25 bp, Homo sapien
ggagaaataccagcagggcctgacg

SEQ ID NO: 3508774 - DNA, 25 bp, Homo sapien
aataagcacgagctgcctctactgc

SEQ ID NO: 3508775 - DNA, 25 bp, Homo sapien
gcctctactgccgtcaaagcatccc

SEQ ID NO: 3508776 - DNA, 25 bp, Homo sapien
acaaataagcacgagctgcctctac

SEQ ID NO: 3508777 - DNA, 25 bp, Homo sapien
cccaacaaataagcacgagctgcct

SEQ ID NO: 3508778 - DNA, 25 bp, Homo sapien
actgtggtattgtctgggggtggca

SEQ ID NO: 3508779 - DNA, 25 bp, Homo sapien
aggtccacagcctcaggacaggctc

SEQ ID NO: 3508780 - DNA, 25 bp, Homo sapien
tttcccaggactgtggtattgtctg

SEQ ID NO: 3508781 - DNA, 25 bp, Homo sapien
tcccaggactgtggtattgtctggg

SEQ ID NO: 3508782 - DNA, 25 bp, Homo sapien
tgagcacccgtgctgtgtgaatgcc

SEQ ID NO: 3508783 - DNA, 25 bp, Homo sapien
gagcccaggctcatgagcacccgtg

SEQ ID NO: 3508784 - DNA, 25 bp, Homo sapien
ggctcatgagcacccgtgctgtgtg

SEQ ID NO: 3508785 - DNA, 25 bp, Homo sapien
tgctgtgtgaatgcccacggccctg

SEQ ID NO: 3508786 - DNA, 25 bp, Homo sapien
aatttctgttggcagccatgggcca

SEQ ID NO: 3508787 - DNA, 25 bp, Homo sapien
ctctagcagtggcattcccagggtg

SEQ ID NO: 3508788 - DNA, 25 bp, Homo sapien
cagatccaggccatttggaaccaaa

SEQ ID NO: 3508789 - DNA, 25 bp, Homo sapien
gaaccaaatgtgaccactctagcag

SEQ ID NO: 3508790 - DNA, 25 bp, Homo sapien
ccacctttgactgtgagcctggagc

SEQ ID NO: 3508791 - DNA, 25 bp, Homo sapien
aacagagacagggaaatccacccag

SEQ ID NO: 3508792 - DNA, 25 bp, Homo sapien
cagagacagggaaatccacccagga

SEQ ID NO: 3508793 - DNA, 25 bp, Homo sapien
atccacgtccacctttgactgtgag

SEQ ID NO: 3508794 - DNA, 25 bp, Homo sapien
tagactcccttagccaacagctcag

SEQ ID NO: 3508795 - DNA, 25 bp, Homo sapien
agctcagtccgcctccaatgcattg

SEQ ID NO: 3508796 - DNA, 25 bp, Homo sapien
tccgcctccaatgcattggtgagtg

SEQ ID NO: 3508797 - DNA, 25 bp, Homo sapien
gaggaagctgcatagactcccttag

SEQ ID NO: 3508798 - DNA, 25 bp, Homo sapien
gagtagtcttaaaggcactgctaca

SEQ ID NO: 3508799 - DNA, 25 bp, Homo sapien
ttccacccgaggaatggccaggaac

SEQ ID NO: 3508800 - DNA, 25 bp, Homo sapien
gaaatgagcgctcaagatgccggcc

SEQ ID NO: 3508801 - DNA, 25 bp, Homo sapien
gatgccggcctgaaagagtagtctt

SEQ ID NO: 3508802 - DNA, 25 bp, Homo sapien
ggcagataccaccttcctcacgtga

SEQ ID NO: 3508803 - DNA, 25 bp, Homo sapien
cagcctgcgttgacccttgagaaac

SEQ ID NO: 3508804 - DNA, 25 bp, Homo sapien
caataccggcctgtcatcacaaagg

SEQ ID NO: 3508805 - DNA, 25 bp, Homo sapien
aacccagattgagggacagcctgtc

SEQ ID NO: 3508806 - DNA, 25 bp, Homo sapien
ctaaccatcaaaggagcacgagagg

SEQ ID NO: 3508807 - DNA, 25 bp, Homo sapien
ggctgggtgactccacttcaggatg

SEQ ID NO: 3508808 - DNA, 25 bp, Homo sapien
gttcaggccggttcctctggcccag

SEQ ID NO: 3508809 - DNA, 25 bp, Homo sapien
ttagagcaacattgatttgcctgtt

SEQ ID NO: 3508810 - DNA, 25 bp, Homo sapien
tcttatctgtacgtggagctggtgg

SEQ ID NO: 3508811 - DNA, 25 bp, Homo sapien
ctgtcttatctgtacgtggagctgg

SEQ ID NO: 3508812 - DNA, 25 bp, Homo sapien
cttgggctctgtcttatctgtacgt

SEQ ID NO: 3508813 - DNA, 25 bp, Homo sapien
tatctgtacgtggagctggtggaac

SEQ ID NO: 3508814 - DNA, 25 bp, Homo sapien
ctgcaagggtcaggacaggatggca

SEQ ID NO: 3508815 - DNA, 25 bp, Homo sapien
agggtcaggacaggatggcaggatc

SEQ ID NO: 3508816 - DNA, 25 bp, Homo sapien
caagggtcaggacaggatggcagga

SEQ ID NO: 3508817 - DNA, 25 bp, Homo sapien
gggtcaggacaggatggcaggatcc

SEQ ID NO: 3508818 - DNA, 25 bp, Homo sapien
caggtgatgaccgaagtgggagaaa

SEQ ID NO: 3508819 - DNA, 25 bp, Homo sapien
aagtgaagattagcgctgagaagtc

SEQ ID NO: 3508820 - DNA, 25 bp, Homo sapien
aggtgccccttgggcgggaccagag

SEQ ID NO: 3508821 - DNA, 25 bp, Homo sapien
agcagcaggtgatgaccgaagtggg

SEQ ID NO: 3508822 - DNA, 25 bp, Homo sapien
ctgaggagtagccagagagagggaa

SEQ ID NO: 3508823 - DNA, 25 bp, Homo sapien
cagagagagggaagggcaaccagga

SEQ ID NO: 3508824 - DNA, 25 bp, Homo sapien
gagagggaagggcaaccaggagggc

SEQ ID NO: 3508825 - DNA, 25 bp, Homo sapien
agagagagggaagggcaaccaggag

SEQ ID NO: 3508826 - DNA, 25 bp, Homo sapien
tgggcaagtggcttatctcccctgg

SEQ ID NO: 3508827 - DNA, 25 bp, Homo sapien
cagtgtggccaccaaagatcaaggc

SEQ ID NO: 3508828 - DNA, 25 bp, Homo sapien
gaccacagtctgtgtgcaggaacag

SEQ ID NO: 3508829 - DNA, 25 bp, Homo sapien
tctgtgctctgcgaggaatccagca

SEQ ID NO: 3508830 - DNA, 25 bp, Homo sapien
gtcccatgcacgatgttgcctcttg

SEQ ID NO: 3508831 - DNA, 25 bp, Homo sapien
atgcacgatgttgcctcttgcccaa

SEQ ID NO: 3508832 - DNA, 25 bp, Homo sapien
gggtccctgagagcgatgctgtcct

SEQ ID NO: 3508833 - DNA, 25 bp, Homo sapien
gcctgtcccatgcacgatgttgcct

SEQ ID NO: 3508834 - DNA, 25 bp, Homo sapien
cagagagagctactgggcagccatg

SEQ ID NO: 3508835 - DNA, 25 bp, Homo sapien
tcagcgtctgcgtccatctgtatgg

SEQ ID NO: 3508836 - DNA, 25 bp, Homo sapien
ccatctgtatggaatgccggttagg

SEQ ID NO: 3508837 - DNA, 25 bp, Homo sapien
gccatggaagggtcgcgatacacat

SEQ ID NO: 3508838 - DNA, 25 bp, Homo sapien
gggatttgggcctggcgctcatcac

SEQ ID NO: 3508839 - DNA, 25 bp, Homo sapien
cctggcgctcatcacactggacatg

SEQ ID NO: 3508840 - DNA, 25 bp, Homo sapien
gctcatcacactggacatgtggcat

SEQ ID NO: 3508841 - DNA, 25 bp, Homo sapien
agaggctgcacagtcgctgatggta

SEQ ID NO: 3508842 - DNA, 25 bp, Homo sapien
caggagacgtcttgtcttcaggtct

SEQ ID NO: 3508843 - DNA, 25 bp, Homo sapien
cccaggttctgttggctgtcacagt

SEQ ID NO: 3508844 - DNA, 25 bp, Homo sapien
tagagatgaagcgaacacgaagccc

SEQ ID NO: 3508845 - DNA, 25 bp, Homo sapien
tggtctctcattggcagcaagcagc

SEQ ID NO: 3508846 - DNA, 25 bp, Homo sapien
cagcgcggctggaatttaaaaagct

SEQ ID NO: 3508847 - DNA, 25 bp, Homo sapien
tattctctgttccaacagcgcggct

SEQ ID NO: 3508848 - DNA, 25 bp, Homo sapien
gggctaactttacctcagactggcc

SEQ ID NO: 3508849 - DNA, 25 bp, Homo sapien
caaatattctatgagcagtgcttcc

SEQ ID NO: 3508850 - DNA, 25 bp, Homo sapien
gcaagcagttacaaaatctcctatt

SEQ ID NO: 3508851 - DNA, 25 bp, Homo sapien
taaacaatctatagcaacctaaaat

SEQ ID NO: 3508852 - DNA, 25 bp, Homo sapien
tcaatacattgggaatttagcagca

SEQ ID NO: 3508853 - DNA, 25 bp, Homo sapien
aatctcacgaacacatgtgaatgac

SEQ ID NO: 3508854 - DNA, 25 bp, Homo sapien
caaagtcttctagtgcaaagtgcac

SEQ ID NO: 3508855 - DNA, 25 bp, Homo sapien
ggctctgtggagctaaaaggctaca

SEQ ID NO: 3508856 - DNA, 25 bp, Homo sapien
taagctggtgcaaacacatggcggg

SEQ ID NO: 3508857 - DNA, 25 bp, Homo sapien
aaaggctacaagctcagcatagggc

SEQ ID NO: 3508858 - DNA, 25 bp, Homo sapien
ctggaaggagtttgctagatgtgaa

SEQ ID NO: 3508859 - DNA, 25 bp, Homo sapien
cacatatcaaagttgtccttactgg

SEQ ID NO: 3508860 - DNA, 25 bp, Homo sapien
ttagcagggtacttggttgctgttc

SEQ ID NO: 3508861 - DNA, 25 bp, Homo sapien
ttctcccttgatttcagctggaagg

SEQ ID NO: 3508862 - DNA, 25 bp, Homo sapien
tctaattcattgatgcggtttggct

SEQ ID NO: 3508863 - DNA, 25 bp, Homo sapien
catcttcaagcaaatattaggtgga

SEQ ID NO: 3508864 - DNA, 25 bp, Homo sapien
tgctgccacctaaggcgtatctttg

SEQ ID NO: 3508865 - DNA, 25 bp, Homo sapien
catttccattggttgcaggtcaaaa

SEQ ID NO: 3508866 - DNA, 25 bp, Homo sapien
tttttacgtctataatttatgagag

SEQ ID NO: 3508867 - DNA, 25 bp, Homo sapien
ctgcaaacacttaattatgatatgc

SEQ ID NO: 3508868 - DNA, 25 bp, Homo sapien
tcattgagataattatatagctttc

SEQ ID NO: 3508869 - DNA, 25 bp, Homo sapien
tatagctttctcctttatctataca

SEQ ID NO: 3508870 - DNA, 25 bp, Homo sapien
aacttttcttcagtggacggcttat

SEQ ID NO: 3508871 - DNA, 25 bp, Homo sapien
tggacggcttattcttctcttctgt

SEQ ID NO: 3508872 - DNA, 25 bp, Homo sapien
ttcagtggacggcttattcttctct

SEQ ID NO: 3508873 - DNA, 25 bp, Homo sapien
ttttcttcagtggacggcttattct

SEQ ID NO: 3508874 - DNA, 25 bp, Homo sapien
cattggttggtctcaccgaagaaag

SEQ ID NO: 3508875 - DNA, 25 bp, Homo sapien
ctctaatacattggttggtctcacc

SEQ ID NO: 3508876 - DNA, 25 bp, Homo sapien
gtctcaccgaagaaagtttattgcc

SEQ ID NO: 3508877 - DNA, 25 bp, Homo sapien
ctaatacattggttggtctcaccga

SEQ ID NO: 3508878 - DNA, 25 bp, Homo sapien
tgccctagtttcagtcttcgttatc

SEQ ID NO: 3508879 - DNA, 25 bp, Homo sapien
ccagcacttctagactttaattttg

SEQ ID NO: 3508880 - DNA, 25 bp, Homo sapien
tctcttacctcacacttctacttag

SEQ ID NO: 3508881 - DNA, 25 bp, Homo sapien
gttttgattgctcttactctcttac

SEQ ID NO: 3508882 - DNA, 25 bp, Homo sapien
cacactgttgccagataactcttac

SEQ ID NO: 3508883 - DNA, 25 bp, Homo sapien
gttctccggtttctgcttgccacca

SEQ ID NO: 3508884 - DNA, 25 bp, Homo sapien
cacgacaaccatatcacacactgtt

SEQ ID NO: 3508885 - DNA, 25 bp, Homo sapien
aactcttactgaagttccgtctgtc

SEQ ID NO: 3508886 - DNA, 25 bp, Homo sapien
cacataacgctccaagggtgagagg

SEQ ID NO: 3508887 - DNA, 25 bp, Homo sapien
gagattcagactatctcaggcaaga

SEQ ID NO: 3508888 - DNA, 25 bp, Homo sapien
gggctcttcctagattcaactgaga

SEQ ID NO: 3508889 - DNA, 25 bp, Homo sapien
caggcaagatactacattcgagttc

SEQ ID NO: 3508890 - DNA, 25 bp, Homo sapien
aggtaagctctggttgtaaagcagc

SEQ ID NO: 3508891 - DNA, 25 bp, Homo sapien
gaggctcaaaaatggagactactag

SEQ ID NO: 3508892 - DNA, 25 bp, Homo sapien
gcagggcgctgagagaactacatat

SEQ ID NO: 3508893 - DNA, 25 bp, Homo sapien
gcacagtacataggctaaaccatag

SEQ ID NO: 3508894 - DNA, 25 bp, Homo sapien
gttatctagtagttccttagctgtg

SEQ ID NO: 3508895 - DNA, 25 bp, Homo sapien
gattctgtgagcaggatctactttc

SEQ ID NO: 3508896 - DNA, 25 bp, Homo sapien
ttaaccactggttatctagtagttc

SEQ ID NO: 3508897 - DNA, 25 bp, Homo sapien
ttctgtgagcaggatctactttcat

SEQ ID NO: 3508898 - DNA, 25 bp, Homo sapien
ttctgagcttgccaaaaagggtggt

SEQ ID NO: 3508899 - DNA, 25 bp, Homo sapien
gagcttgccaaaaagggtggttctc

SEQ ID NO: 3508900 - DNA, 25 bp, Homo sapien
ttctcttctgagcttgccaaaaagg

SEQ ID NO: 3508901 - DNA, 25 bp, Homo sapien
tcttattaactcaaaaagcttctct

SEQ ID NO: 3508902 - DNA, 25 bp, Homo sapien
tgtcacactgctggctatagtcgtg

SEQ ID NO: 3508903 - DNA, 25 bp, Homo sapien
tagtcgtgggcactgataacttcag

SEQ ID NO: 3508904 - DNA, 25 bp, Homo sapien
attacgacgcctatgctccaaatgt

SEQ ID NO: 3508905 - DNA, 25 bp, Homo sapien
acatgtacattacgacgcctatgct

SEQ ID NO: 3508906 - DNA, 25 bp, Homo sapien
tactttgcttcttcaccgctaagcc

SEQ ID NO: 3508907 - DNA, 25 bp, Homo sapien
atatagataggagtcccacatgtgg

SEQ ID NO: 3508908 - DNA, 25 bp, Homo sapien
tcttcaccgctaagccaaaatcagt

SEQ ID NO: 3508909 - DNA, 25 bp, Homo sapien
ccatatagataggagtcccacatgt

SEQ ID NO: 3508910 - DNA, 25 bp, Homo sapien
tgttatcatcaataagactgctttt

SEQ ID NO: 3508911 - DNA, 25 bp, Homo sapien
tccagtttcagatctctatgtacaa

SEQ ID NO: 3508912 - DNA, 25 bp, Homo sapien
cattgttatcatcaataagactgct

SEQ ID NO: 3508913 - DNA, 25 bp, Homo sapien
ttaaccattatattttccagtttca

SEQ ID NO: 3508914 - DNA, 25 bp, Homo sapien
tggctgctcctcatgatgagtggcc

SEQ ID NO: 3508915 - DNA, 25 bp, Homo sapien
gagtgtgaaggaggatcctacccat

SEQ ID NO: 3508916 - DNA, 25 bp, Homo sapien
ggctgctcctcatgatgagtggcct

SEQ ID NO: 3508917 - DNA, 25 bp, Homo sapien
gagaaatgccctttcctatccagaa

SEQ ID NO: 3508918 - DNA, 25 bp, Homo sapien
cgagactttgaatgatccaccttgt

SEQ ID NO: 3508919 - DNA, 25 bp, Homo sapien
cattattgtgaagatatgctatagc

SEQ ID NO: 3508920 - DNA, 25 bp, Homo sapien
tcctcacaaagctccatcacaaggt

SEQ ID NO: 3508921 - DNA, 25 bp, Homo sapien
ttttcagaatgttcacctctcgttc

SEQ ID NO: 3508922 - DNA, 25 bp, Homo sapien
tcacctctcgttcaagtaacttcac

SEQ ID NO: 3508923 - DNA, 25 bp, Homo sapien
gttccagatgtatgatgtgttcatg

SEQ ID NO: 3508924 - DNA, 25 bp, Homo sapien
tggcgtttcaaatacttgttccaga

SEQ ID NO: 3508925 - DNA, 25 bp, Homo sapien
tgtttccttgtctgtcgcttcaatg

SEQ ID NO: 3508926 - DNA, 25 bp, Homo sapien
taattgcccacttcgtttctgtttc

SEQ ID NO: 3508927 - DNA, 25 bp, Homo sapien
tgcccacttcgtttctgtttccttg

SEQ ID NO: 3508928 - DNA, 25 bp, Homo sapien
ttcaatgactattccaaagctccct

SEQ ID NO: 3508929 - DNA, 25 bp, Homo sapien
tactgacagatactcacccaaggga

SEQ ID NO: 3508930 - DNA, 25 bp, Homo sapien
taatgccactaggtaatgccctggt

SEQ ID NO: 3508931 - DNA, 25 bp, Homo sapien
caagagtttctggacccatcgtgca

SEQ ID NO: 3508932 - DNA, 25 bp, Homo sapien
tcgtgcataggaaccagaacatggg

SEQ ID NO: 3508933 - DNA, 25 bp, Homo sapien
cagagatattgtgtattcagttcca

SEQ ID NO: 3508934 - DNA, 25 bp, Homo sapien
tgtatacagagatacctcagagata

SEQ ID NO: 3508935 - DNA, 25 bp, Homo sapien
cctgcctccatgtagatgactgatg

SEQ ID NO: 3508936 - DNA, 25 bp, Homo sapien
gcgaacaaacataacaatgcaattg

SEQ ID NO: 3508937 - DNA, 25 bp, Homo sapien
aagttgccccgaccccattgttgct

SEQ ID NO: 3508938 - DNA, 25 bp, Homo sapien
caatccttatgtgaggaacttttcc

SEQ ID NO: 3508939 - DNA, 25 bp, Homo sapien
tagcagctccattctcaatccttat

SEQ ID NO: 3508940 - DNA, 25 bp, Homo sapien
ttgccccgaccccattgttgctgag

SEQ ID NO: 3508941 - DNA, 25 bp, Homo sapien
gtcaacttgtgcttagatgtggaat

SEQ ID NO: 3508942 - DNA, 25 bp, Homo sapien
gggaacgggatgtcaacttgtgctt

SEQ ID NO: 3508943 - DNA, 25 bp, Homo sapien
tagatgtggaatctttgatatttac

SEQ ID NO: 3508944 - DNA, 25 bp, Homo sapien
cgggatgtcaacttgtgcttagatg

SEQ ID NO: 3508945 - DNA, 25 bp, Homo sapien
tctttcctggaggttatatctctgt

SEQ ID NO: 3508946 - DNA, 25 bp, Homo sapien
gatgtctgtgacatttccaccacca

SEQ ID NO: 3508947 - DNA, 25 bp, Homo sapien
aatctttcctggaggttatatctct

SEQ ID NO: 3508948 - DNA, 25 bp, Homo sapien
ctgcactaccaatgcttgatgtctg

SEQ ID NO: 3508949 - DNA, 25 bp, Homo sapien
tgagaagcagatgaacagtcggggc

SEQ ID NO: 3508950 - DNA, 25 bp, Homo sapien
aagcagatgaacagtcggggcattt

SEQ ID NO: 3508951 - DNA, 25 bp, Homo sapien
cagatgaacagtcggggcattttgt

SEQ ID NO: 3508952 - DNA, 25 bp, Homo sapien
agaagcagatgaacagtcggggcat

SEQ ID NO: 3508953 - DNA, 25 bp, Homo sapien
aaggatgcactagacacatattcac

SEQ ID NO: 3508954 - DNA, 25 bp, Homo sapien
gtaatttcgaactggtgaagtcctc

SEQ ID NO: 3508955 - DNA, 25 bp, Homo sapien
ggataaggtagttgatggtgaaaac

SEQ ID NO: 3508956 - DNA, 25 bp, Homo sapien
tgaagtcctcaggttaaggatgcac

SEQ ID NO: 3508957 - DNA, 25 bp, Homo sapien
ttaactaggaccattggcagctgca

SEQ ID NO: 3508958 - DNA, 25 bp, Homo sapien
catcttatcaaactgcgtagtgggt

SEQ ID NO: 3508959 - DNA, 25 bp, Homo sapien
caactagcactagaagcatcctgta

SEQ ID NO: 3508960 - DNA, 25 bp, Homo sapien
ggtgaaaagcatggtctaaaacagc

SEQ ID NO: 3508961 - DNA, 25 bp, Homo sapien
tatgacctttcatcaaagtggtggg

SEQ ID NO: 3508962 - DNA, 25 bp, Homo sapien
caggtacattaaaagtgccctccag

SEQ ID NO: 3508963 - DNA, 25 bp, Homo sapien
taaatggtttcagagcatgcaaagc

SEQ ID NO: 3508964 - DNA, 25 bp, Homo sapien
tttcactcaggaagtttcatagcag

SEQ ID NO: 3508965 - DNA, 25 bp, Homo sapien
tttccaaaatgatttaacttcaggc

SEQ ID NO: 3508966 - DNA, 25 bp, Homo sapien
ctgtatcactttccaaaatgattta

SEQ ID NO: 3508967 - DNA, 25 bp, Homo sapien
tcactttccaaaatgatttaacttc

SEQ ID NO: 3508968 - DNA, 25 bp, Homo sapien
ctttccaaaatgatttaacttcagg

SEQ ID NO: 3508969 - DNA, 25 bp, Homo sapien
attctgcagaccaagccaaatgact

SEQ ID NO: 3508970 - DNA, 25 bp, Homo sapien
acattctgcagaccaagccaaatga

SEQ ID NO: 3508971 - DNA, 25 bp, Homo sapien
ttctgcagaccaagccaaatgactg

SEQ ID NO: 3508972 - DNA, 25 bp, Homo sapien
gacattctgcagaccaagccaaatg

SEQ ID NO: 3508973 - DNA, 25 bp, Homo sapien
ggaggggcgtagtgagatgcaggga

SEQ ID NO: 3508974 - DNA, 25 bp, Homo sapien
ccggatgtgctgagaagtagtggcc

SEQ ID NO: 3508975 - DNA, 25 bp, Homo sapien
atgtgctgagaagtagtggccctgc

SEQ ID NO: 3508976 - DNA, 25 bp, Homo sapien
gatgagccagaaggccggatgtgct

SEQ ID NO: 3508977 - DNA, 25 bp, Homo sapien
tggaggcaggaggtcaaaatgttca

SEQ ID NO: 3508978 - DNA, 25 bp, Homo sapien
taacagctatggtcctaaggcaaga

SEQ ID NO: 3508979 - DNA, 25 bp, Homo sapien
tcacttaaaattggcagaagctgga

SEQ ID NO: 3508980 - DNA, 25 bp, Homo sapien
ggagagatgatctccagcaaggtaa

SEQ ID NO: 3508981 - DNA, 25 bp, Homo sapien
ttctcgcctgtactgtgctgactca

SEQ ID NO: 3508982 - DNA, 25 bp, Homo sapien
aggttctcgcctgtactgtgctgac

SEQ ID NO: 3508983 - DNA, 25 bp, Homo sapien
ttcttcttgcacaagcttgttcccc

SEQ ID NO: 3508984 - DNA, 25 bp, Homo sapien
tcttgcacaagcttgttccccatct

SEQ ID NO: 3508985 - DNA, 25 bp, Homo sapien
tacctacagggagagaatctactag

SEQ ID NO: 3508986 - DNA, 25 bp, Homo sapien
caagtaagctgttcccatggcaaga

SEQ ID NO: 3508987 - DNA, 25 bp, Homo sapien
tttccagaggaaacagcccatttac

SEQ ID NO: 3508988 - DNA, 25 bp, Homo sapien
tcctctgacaaggtaatccctatgg

SEQ ID NO: 3508989 - DNA, 25 bp, Homo sapien
gagacaaagattctaggaacatggc

SEQ ID NO: 3508990 - DNA, 25 bp, Homo sapien
tgccaggtagtgtactgaacacttg

SEQ ID NO: 3508991 - DNA, 25 bp, Homo sapien
aactaagtcagtatggctatatggc

SEQ ID NO: 3508992 - DNA, 25 bp, Homo sapien
cccaaggtcacatacgtagtaaaca

SEQ ID NO: 3508993 - DNA, 25 bp, Homo sapien
ccagtgtgcgtaagcaacagttaaa

SEQ ID NO: 3508994 - DNA, 25 bp, Homo sapien
ggcaccagagaactaaccccagagg

SEQ ID NO: 3508995 - DNA, 25 bp, Homo sapien
ccagagaactaaccccagaggaagg

SEQ ID NO: 3508996 - DNA, 25 bp, Homo sapien
aactgcaggtgaaaatttccagtgt

SEQ ID NO: 3508997 - DNA, 25 bp, Homo sapien
ctttgggcagtatgaacacttcaac

SEQ ID NO: 3508998 - DNA, 25 bp, Homo sapien
gtcaaaaagtgtgatgccctcaact

SEQ ID NO: 3508999 - DNA, 25 bp, Homo sapien
cccagtatcgtgtattaaagaggct

SEQ ID NO: 3509000 - DNA, 25 bp, Homo sapien
ttctcccaatacatgatcatgggac

SEQ ID NO: 3509001 - DNA, 25 bp, Homo sapien
catggttcaattctgataggttatg

SEQ ID NO: 3509002 - DNA, 25 bp, Homo sapien
cagttgtaacgttttcatctctgat

SEQ ID NO: 3509003 - DNA, 25 bp, Homo sapien
tagaacgagtttggagtattccctc

SEQ ID NO: 3509004 - DNA, 25 bp, Homo sapien
tgtgagagtgatgctagccttgtag

SEQ ID NO: 3509005 - DNA, 25 bp, Homo sapien
tccacctgccgtggccttccaaaat

SEQ ID NO: 3509006 - DNA, 25 bp, Homo sapien
catgcaccaccaagctctgccaatt

SEQ ID NO: 3509007 - DNA, 25 bp, Homo sapien
atgcaccaccaagctctgccaattt

SEQ ID NO: 3509008 - DNA, 25 bp, Homo sapien
gccactgcacccagcattttttttt

SEQ ID NO: 3509009 - DNA, 25 bp, Homo sapien
tatatctgcatatccatcactgtct

SEQ ID NO: 3509010 - DNA, 25 bp, Homo sapien
tccatcactgtctaaaggcacgggc

SEQ ID NO: 3509011 - DNA, 25 bp, Homo sapien
tgcatatccatcactgtctaaaggc

SEQ ID NO: 3509012 - DNA, 25 bp, Homo sapien
taaatgcgcgatatatctgcatatc

SEQ ID NO: 3509013 - DNA, 25 bp, Homo sapien
gggcagacagagaccaccccaaata

SEQ ID NO: 3509014 - DNA, 25 bp, Homo sapien
caaaaagtttcacgtcccaagatgg

SEQ ID NO: 3509015 - DNA, 25 bp, Homo sapien
tttttccaccgcgttgccatagcaa

SEQ ID NO: 3509016 - DNA, 25 bp, Homo sapien
agcgagatacccagaggcccgtttt

SEQ ID NO: 3509017 - DNA, 25 bp, Homo sapien
gagaaacttttcagcccgcagagca

SEQ ID NO: 3509018 - DNA, 25 bp, Homo sapien
gcagctcgccttagagaaggaccta

SEQ ID NO: 3509019 - DNA, 25 bp, Homo sapien
gagcagccacgtgttacgtaaaata

SEQ ID NO: 3509020 - DNA, 25 bp, Homo sapien
gaggtgattgatgctcaggccactc

SEQ ID NO: 3509021 - DNA, 25 bp, Homo sapien
ccagccagttggagcaagggctgca

SEQ ID NO: 3509022 - DNA, 25 bp, Homo sapien
cagttggagcaagggctgcaagcct

SEQ ID NO: 3509023 - DNA, 25 bp, Homo sapien
agcaagggctgcaagccttgaactg

SEQ ID NO: 3509024 - DNA, 25 bp, Homo sapien
gcaagggctgcaagccttgaactgc

SEQ ID NO: 3509025 - DNA, 25 bp, Homo sapien
ttaatgcaaagtagatcacaggaag

SEQ ID NO: 3509026 - DNA, 25 bp, Homo sapien
cctgaagtttcgtggtgtctggcat

SEQ ID NO: 3509027 - DNA, 25 bp, Homo sapien
gggcaaacgttctaccgccctgtca

SEQ ID NO: 3509028 - DNA, 25 bp, Homo sapien
tcacaggaagattggaaggactcct

SEQ ID NO: 3509029 - DNA, 25 bp, Homo sapien
gaaactggcaatgacatcgagcccc

SEQ ID NO: 3509030 - DNA, 25 bp, Homo sapien
tgtaacctgacttcaacggatgcca

SEQ ID NO: 3509031 - DNA, 25 bp, Homo sapien
cactgtcaccggaaaggaggctctg

SEQ ID NO: 3509032 - DNA, 25 bp, Homo sapien
cacagaattgtcaggaaggctagag

SEQ ID NO: 3509033 - DNA, 25 bp, Homo sapien
gccccaaccgcttagaatccaatag

SEQ ID NO: 3509034 - DNA, 25 bp, Homo sapien
tccttatgtggcctgatcttgagag

SEQ ID NO: 3509035 - DNA, 25 bp, Homo sapien
gctggagagctgagagatcactgtt

SEQ ID NO: 3509036 - DNA, 25 bp, Homo sapien
taacaagggcctaggaggaactcat

SEQ ID NO: 3509037 - DNA, 25 bp, Homo sapien
ccgaatgttatcagcagcaggcacc

SEQ ID NO: 3509038 - DNA, 25 bp, Homo sapien
tagtctccctccatccgaatgttat

SEQ ID NO: 3509039 - DNA, 25 bp, Homo sapien
cagcactgacatgcacggaaacaca

SEQ ID NO: 3509040 - DNA, 25 bp, Homo sapien
ttctcctcctggttagcagcactga

SEQ ID NO: 3509041 - DNA, 25 bp, Homo sapien
tccagtttagccagactgcggcctg

SEQ ID NO: 3509042 - DNA, 25 bp, Homo sapien
cagtttagccagactgcggcctgga

SEQ ID NO: 3509043 - DNA, 25 bp, Homo sapien
taatccagtttagccagactgcggc

SEQ ID NO: 3509044 - DNA, 25 bp, Homo sapien
ctggtaatccagtttagccagactg

SEQ ID NO: 3509045 - DNA, 25 bp, Homo sapien
caggagctcataaacatggttggca

SEQ ID NO: 3509046 - DNA, 25 bp, Homo sapien
tttgcaggctgtgtggaggtaacca

SEQ ID NO: 3509047 - DNA, 25 bp, Homo sapien
cagtcttggaggacatacaacagga

SEQ ID NO: 3509048 - DNA, 25 bp, Homo sapien
tctaggtttcaaggacagctcagcc

SEQ ID NO: 3509049 - DNA, 25 bp, Homo sapien
ggatgctgacaaaaacatcagtgtg

SEQ ID NO: 3509050 - DNA, 25 bp, Homo sapien
gatgctgacaaaaacatcagtgtgt

SEQ ID NO: 3509051 - DNA, 25 bp, Homo sapien
gaaggtatggttgccactcaggtag

SEQ ID NO: 3509052 - DNA, 25 bp, Homo sapien
tgctagaagtcaggcagggctaacc

SEQ ID NO: 3509053 - DNA, 25 bp, Homo sapien
cagggactgccatggaacagagcat

SEQ ID NO: 3509054 - DNA, 25 bp, Homo sapien
gagcaaaggctcaattctggcgttc

SEQ ID NO: 3509055 - DNA, 25 bp, Homo sapien
caatttttcctctagggctgcatgc

SEQ ID NO: 3509056 - DNA, 25 bp, Homo sapien
taagtcaaaagcaggatcagcccaa

SEQ ID NO: 3509057 - DNA, 25 bp, Homo sapien
taaaatccccttgcatcaactgaag

SEQ ID NO: 3509058 - DNA, 25 bp, Homo sapien
gacttggctgacttcaaaactgggc

SEQ ID NO: 3509059 - DNA, 25 bp, Homo sapien
cagcaagctgatccgtgagcccagg

SEQ ID NO: 3509060 - DNA, 25 bp, Homo sapien
aaacactggtggctaggtctaaagg

SEQ ID NO: 3509061 - DNA, 25 bp, Homo sapien
catgcaggctctctacgatgagaag

SEQ ID NO: 3509062 - DNA, 25 bp, Homo sapien
gctgggagcctcactcatataagga

SEQ ID NO: 3509063 - DNA, 25 bp, Homo sapien
caaagttcacaggatggtgggaatg

SEQ ID NO: 3509064 - DNA, 25 bp, Homo sapien
cagttgcccaacaccaagtacaaca

SEQ ID NO: 3509065 - DNA, 25 bp, Homo sapien
gaatgtgggctgcacaaaggaaaga

SEQ ID NO: 3509066 - DNA, 25 bp, Homo sapien
tgcccaacaccaagtacaacaaagt

SEQ ID NO: 3509067 - DNA, 25 bp, Homo sapien
catgagaacagagggtactttgcca

SEQ ID NO: 3509068 - DNA, 25 bp, Homo sapien
tagaaaacgggatcacggaagccca

SEQ ID NO: 3509069 - DNA, 25 bp, Homo sapien
gaagcctaagtccaaagattgccgg

SEQ ID NO: 3509070 - DNA, 25 bp, Homo sapien
gattgccggactagtaaagcattca

SEQ ID NO: 3509071 - DNA, 25 bp, Homo sapien
ctcacaaacaccctgcgagggccat

SEQ ID NO: 3509072 - DNA, 25 bp, Homo sapien
caaacaccctgcgagggccatgcag

SEQ ID NO: 3509073 - DNA, 25 bp, Homo sapien
aacaccctgcgagggccatgcagat

SEQ ID NO: 3509074 - DNA, 25 bp, Homo sapien
ccctgcgagggccatgcagatgcat

SEQ ID NO: 3509075 - DNA, 25 bp, Homo sapien
catggcttccagaatgcttctctct

SEQ ID NO: 3509076 - DNA, 25 bp, Homo sapien
agcctcgagctcctgttcccatggc

SEQ ID NO: 3509077 - DNA, 25 bp, Homo sapien
atggcttccagaatgcttctctctg

SEQ ID NO: 3509078 - DNA, 25 bp, Homo sapien
cgagctcctgttcccatggcttcca

SEQ ID NO: 3509079 - DNA, 25 bp, Homo sapien
gaatgtctagatctggcccctgttg

SEQ ID NO: 3509080 - DNA, 25 bp, Homo sapien
ttttttggggctgtagacagcctgg

SEQ ID NO: 3509081 - DNA, 25 bp, Homo sapien
cttagacaaacttcccccaggaatg

SEQ ID NO: 3509082 - DNA, 25 bp, Homo sapien
cctggaggcgggctggtcagaagac

SEQ ID NO: 3509083 - DNA, 25 bp, Homo sapien
gatctttggctcatgaacttggaga

SEQ ID NO: 3509084 - DNA, 25 bp, Homo sapien
acttggagaggttgagaactagaat

SEQ ID NO: 3509085 - DNA, 25 bp, Homo sapien
tctgatctttggctcatgaacttgg

SEQ ID NO: 3509086 - DNA, 25 bp, Homo sapien
gctcatgaacttggagaggttgaga

SEQ ID NO: 3509087 - DNA, 25 bp, Homo sapien
aggagtgagctggttgtgggttact

SEQ ID NO: 3509088 - DNA, 25 bp, Homo sapien
gaggagtgagctggttgtgggttac

SEQ ID NO: 3509089 - DNA, 25 bp, Homo sapien
agctggttgtgggttactctctcca

SEQ ID NO: 3509090 - DNA, 25 bp, Homo sapien
ggagtgagctggttgtgggttactc

SEQ ID NO: 3509091 - DNA, 25 bp, Homo sapien
caagcagaactcacgatccatacct

SEQ ID NO: 3509092 - DNA, 25 bp, Homo sapien
cagtattcacaagcagaactcacga

SEQ ID NO: 3509093 - DNA, 25 bp, Homo sapien
cagacagcagctgtctcacagtatt

SEQ ID NO: 3509094 - DNA, 25 bp, Homo sapien
tgtctcacagtattcacaagcagaa

SEQ ID NO: 3509095 - DNA, 25 bp, Homo sapien
tggcaggtgcctctatccagacagg

SEQ ID NO: 3509096 - DNA, 25 bp, Homo sapien
gaagcctccactagtctgcacatgg

SEQ ID NO: 3509097 - DNA, 25 bp, Homo sapien
gaagggtatggccactgacaagcac

SEQ ID NO: 3509098 - DNA, 25 bp, Homo sapien
gaaggcaggttctcaccctaaagaa

SEQ ID NO: 3509099 - DNA, 25 bp, Homo sapien
tgtactacggctcccaaataaatgc

SEQ ID NO: 3509100 - DNA, 25 bp, Homo sapien
cactctgaagaggataagctgcaag

SEQ ID NO: 3509101 - DNA, 25 bp, Homo sapien
taaatgctgtagatgcaaatggcaa

SEQ ID NO: 3509102 - DNA, 25 bp, Homo sapien
tggtcgacagtatgggacaacagct

SEQ ID NO: 3509103 - DNA, 25 bp, Homo sapien
gttggccaggcgaaatgacattctt

SEQ ID NO: 3509104 - DNA, 25 bp, Homo sapien
atgctgttggccaggcgaaatgaca

SEQ ID NO: 3509105 - DNA, 25 bp, Homo sapien
ggccaggcgaaatgacattcttttt

SEQ ID NO: 3509106 - DNA, 25 bp, Homo sapien
ggcgaaatgacattctttttgctct

SEQ ID NO: 3509107 - DNA, 25 bp, Homo sapien
tgctgctggctggcagtaactcttt

SEQ ID NO: 3509108 - DNA, 25 bp, Homo sapien
ctgctggctggcagtaactctttac

SEQ ID NO: 3509109 - DNA, 25 bp, Homo sapien
gctgctggctggcagtaactcttta

SEQ ID NO: 3509110 - DNA, 25 bp, Homo sapien
cttggctgggcaaaccgtttctccg

SEQ ID NO: 3509111 - DNA, 25 bp, Homo sapien
aaagaacacttccaggcagcggcca

SEQ ID NO: 3509112 - DNA, 25 bp, Homo sapien
tgtcgtcgccgcctcttgggttgga

SEQ ID NO: 3509113 - DNA, 25 bp, Homo sapien
cgtttctccgggtagatctccttca

SEQ ID NO: 3509114 - DNA, 25 bp, Homo sapien
tccggatgattgacaggtccatggg

SEQ ID NO: 3509115 - DNA, 25 bp, Homo sapien
aacatgaggcgcacatctgatacca

SEQ ID NO: 3509116 - DNA, 25 bp, Homo sapien
tagcacagttccagaacatgaggcg

SEQ ID NO: 3509117 - DNA, 25 bp, Homo sapien
tggtatagtgagctgggtccttctt

SEQ ID NO: 3509118 - DNA, 25 bp, Homo sapien
ggttattgcagcacaaggacaatac

SEQ ID NO: 3509119 - DNA, 25 bp, Homo sapien
gctgaggttattgcagcacaaggac

SEQ ID NO: 3509120 - DNA, 25 bp, Homo sapien
tgacaggttcatggaagggcaggct

SEQ ID NO: 3509121 - DNA, 25 bp, Homo sapien
caggctgaggttattgcagcacaag

SEQ ID NO: 3509122 - DNA, 25 bp, Homo sapien
caggttcccaagccagaggaaaact

SEQ ID NO: 3509123 - DNA, 25 bp, Homo sapien
tcaggttcccaagccagaggaaaac

SEQ ID NO: 3509124 - DNA, 25 bp, Homo sapien
aggttcccaagccagaggaaaactg

SEQ ID NO: 3509125 - DNA, 25 bp, Homo sapien
tggtcatacatgcttaggccaggag

SEQ ID NO: 3509126 - DNA, 25 bp, Homo sapien
gatgcccgcattccaggctggttat

SEQ ID NO: 3509127 - DNA, 25 bp, Homo sapien
cgtactccatctcgggctgggtcag

SEQ ID NO: 3509128 - DNA, 25 bp, Homo sapien
ggctggttatagcaggcattctcac

SEQ ID NO: 3509129 - DNA, 25 bp, Homo sapien
tctccgccattgaggcaaacagcac

SEQ ID NO: 3509130 - DNA, 25 bp, Homo sapien
acagaagtcctcattctctattggg

SEQ ID NO: 3509131 - DNA, 25 bp, Homo sapien
cagcggtcacagcacagtaactctc

SEQ ID NO: 3509132 - DNA, 25 bp, Homo sapien
ggttcgaggaatgagtctgtgttct

SEQ ID NO: 3509133 - DNA, 25 bp, Homo sapien
cccagccaaagaagtgacagtgacc

SEQ ID NO: 3509134 - DNA, 25 bp, Homo sapien
ctgggtggcctcagacagtctgtcc

SEQ ID NO: 3509135 - DNA, 25 bp, Homo sapien
cagtgacctttcttccctccagacc

SEQ ID NO: 3509136 - DNA, 25 bp, Homo sapien
agaagtgacagtgacctttcttccc

SEQ ID NO: 3509137 - DNA, 25 bp, Homo sapien
agtgccacactcgatgatcagcagg

SEQ ID NO: 3509138 - DNA, 25 bp, Homo sapien
gaatcttatgctcactattgaaggc

SEQ ID NO: 3509139 - DNA, 25 bp, Homo sapien
ggaagctcccatcctgatcattctt

SEQ ID NO: 3509140 - DNA, 25 bp, Homo sapien
gagtcgctccagtcgcacataggga

SEQ ID NO: 3509141 - DNA, 25 bp, Homo sapien
agctctagggctccttgttcaaaat

SEQ ID NO: 3509142 - DNA, 25 bp, Homo sapien
ctcttttgcatccagctctagggct

SEQ ID NO: 3509143 - DNA, 25 bp, Homo sapien
cagctctagggctccttgttcaaaa

SEQ ID NO: 3509144 - DNA, 25 bp, Homo sapien
gctgtagacgtgctgaccactggcg

SEQ ID NO: 3509145 - DNA, 25 bp, Homo sapien
agacgtgctgaccactggcgccagt

SEQ ID NO: 3509146 - DNA, 25 bp, Homo sapien
cgtgctgaccactggcgccagtgga

SEQ ID NO: 3509147 - DNA, 25 bp, Homo sapien
ccactggcgccagtggaggtttctt

SEQ ID NO: 3509148 - DNA, 25 bp, Homo sapien
tgaagcgagtggaatcctcactttc

SEQ ID NO: 3509149 - DNA, 25 bp, Homo sapien
gtcccagtaagtcagtgaagcgagt

SEQ ID NO: 3509150 - DNA, 25 bp, Homo sapien
ttgggagcatccagaccggggacta

SEQ ID NO: 3509151 - DNA, 25 bp, Homo sapien
gactatgggaccttgtcccagtaag

SEQ ID NO: 3509152 - DNA, 25 bp, Homo sapien
caatcttttgcccaatgatgaacaa

SEQ ID NO: 3509153 - DNA, 25 bp, Homo sapien
taaggtcagaataagggtcccagtg

SEQ ID NO: 3509154 - DNA, 25 bp, Homo sapien
tctcagaactgttaagctaaggtca

SEQ ID NO: 3509155 - DNA, 25 bp, Homo sapien
catggttgtcattagtggtctcaga

SEQ ID NO: 3509156 - DNA, 25 bp, Homo sapien
tccctgaagttcggccagaactgga

SEQ ID NO: 3509157 - DNA, 25 bp, Homo sapien
cctgaagttcggccagaactggagc

SEQ ID NO: 3509158 - DNA, 25 bp, Homo sapien
ggctccctgaagttcggccagaact

SEQ ID NO: 3509159 - DNA, 25 bp, Homo sapien
gctccctgaagttcggccagaactg

SEQ ID NO: 3509160 - DNA, 25 bp, Homo sapien
ggcaccagctgtcaggttgctcaca

SEQ ID NO: 3509161 - DNA, 25 bp, Homo sapien
gagggtgatcacttgccaggcttgc

SEQ ID NO: 3509162 - DNA, 25 bp, Homo sapien
tccaacctggtagatgacaactcca

SEQ ID NO: 3509163 - DNA, 25 bp, Homo sapien
tcacttatcaggttgggcatggact

SEQ ID NO: 3509164 - DNA, 25 bp, Homo sapien
tcagagtctggtagctgctggtagc

SEQ ID NO: 3509165 - DNA, 25 bp, Homo sapien
ggaactcaggcaatgcatgaagccc

SEQ ID NO: 3509166 - DNA, 25 bp, Homo sapien
atgctccaattccactctggcttca

SEQ ID NO: 3509167 - DNA, 25 bp, Homo sapien
cccatgctccaattccactctggct

SEQ ID NO: 3509168 - DNA, 25 bp, Homo sapien
tcagtgaatgacctcataccgtggc

SEQ ID NO: 3509169 - DNA, 25 bp, Homo sapien
gctttcgggaacttctaagaatgca

SEQ ID NO: 3509170 - DNA, 25 bp, Homo sapien
aatgcagatagggtggtgttccaca

SEQ ID NO: 3509171 - DNA, 25 bp, Homo sapien
gaccatttcttagtgatatcaagga

SEQ ID NO: 3509172 - DNA, 25 bp, Homo sapien
tgaccactgtgtaaatatgcaatag

SEQ ID NO: 3509173 - DNA, 25 bp, Homo sapien
tcaaaatatgtgaatgcgccgggca

SEQ ID NO: 3509174 - DNA, 25 bp, Homo sapien
tatgcaatagaaaaagggaccacag

SEQ ID NO: 3509175 - DNA, 25 bp, Homo sapien
tgggagttgtgtctaggaaacacac

SEQ ID NO: 3509176 - DNA, 25 bp, Homo sapien
agtgaaagcctgatgagtggaaccc

SEQ ID NO: 3509177 - DNA, 25 bp, Homo sapien
ttggagactcaggagaatttggtca

SEQ ID NO: 3509178 - DNA, 25 bp, Homo sapien
atgagtggaaccctcaaaccccaag

SEQ ID NO: 3509179 - DNA, 25 bp, Homo sapien
taagtggattctagtaagtctgaag

SEQ ID NO: 3509180 - DNA, 25 bp, Homo sapien
tgcagtagttttgtggacaaccagt

SEQ ID NO: 3509181 - DNA, 25 bp, Homo sapien
gttttgtggacaaccagtggctctc

SEQ ID NO: 3509182 - DNA, 25 bp, Homo sapien
gtagttttgtggacaaccagtggct

SEQ ID NO: 3509183 - DNA, 25 bp, Homo sapien
tcattgcagtagttttgtggacaac

SEQ ID NO: 3509184 - DNA, 25 bp, Homo sapien
tcctttttctgggagttcaagccat

SEQ ID NO: 3509185 - DNA, 25 bp, Homo sapien
ttttctgggagttcaagccatcaaa

SEQ ID NO: 3509186 - DNA, 25 bp, Homo sapien
tcctctaagccaggatgacaaactt

SEQ ID NO: 3509187 - DNA, 25 bp, Homo sapien
gccaggatgacaaacttgagggtcc

SEQ ID NO: 3509188 - DNA, 25 bp, Homo sapien
cagtgggtcccatgtagttagggaa

SEQ ID NO: 3509189 - DNA, 25 bp, Homo sapien
aagagggagagccggctttgagccc

SEQ ID NO: 3509190 - DNA, 25 bp, Homo sapien
aggcagcagcagtattcttgtcaag

SEQ ID NO: 3509191 - DNA, 25 bp, Homo sapien
gtttcttccccagacgcctggggca

SEQ ID NO: 3509192 - DNA, 25 bp, Homo sapien
gtgctgtccactggggggacactga

SEQ ID NO: 3509193 - DNA, 25 bp, Homo sapien
agctccaagtccttctgcatttcct

SEQ ID NO: 3509194 - DNA, 25 bp, Homo sapien
tgtagttgatctgccccacaatggt

SEQ ID NO: 3509195 - DNA, 25 bp, Homo sapien
tgctggctgcctcacgatgtagttg

SEQ ID NO: 3509196 - DNA, 25 bp, Homo sapien
ttggtctgactcagttgcaggctgg

SEQ ID NO: 3509197 - DNA, 25 bp, Homo sapien
tctcgtgctgactagaagccagatg

SEQ ID NO: 3509198 - DNA, 25 bp, Homo sapien
gagggctctcgtgctgactagaagc

SEQ ID NO: 3509199 - DNA, 25 bp, Homo sapien
gccaggagggctctcgtgctgacta

SEQ ID NO: 3509200 - DNA, 25 bp, Homo sapien
gctctcgtgctgactagaagccaga

SEQ ID NO: 3509201 - DNA, 25 bp, Homo sapien
atggaggaagaggtgggtgtggctg

SEQ ID NO: 3509202 - DNA, 25 bp, Homo sapien
ggatggaggaagaggtgggtgtggc

SEQ ID NO: 3509203 - DNA, 25 bp, Homo sapien
ctgggatggaggaagaggtgggtgt

SEQ ID NO: 3509204 - DNA, 25 bp, Homo sapien
tgggatggaggaagaggtgggtgtg

SEQ ID NO: 3509205 - DNA, 25 bp, Homo sapien
tgctgctgaaagtgactgagcttca

SEQ ID NO: 3509206 - DNA, 25 bp, Homo sapien
gcttctggtggtggccaaactggac

SEQ ID NO: 3509207 - DNA, 25 bp, Homo sapien
ttcagcttctggtggtggccaaact

SEQ ID NO: 3509208 - DNA, 25 bp, Homo sapien
ctgaaagtgactgagcttcagcttc

SEQ ID NO: 3509209 - DNA, 25 bp, Homo sapien
ttggatagagggtgtctgtaaggtg

SEQ ID NO: 3509210 - DNA, 25 bp, Homo sapien
cagccgctgggatgtgctctcctgc

SEQ ID NO: 3509211 - DNA, 25 bp, Homo sapien
gcctccataagcaggagcatctgcc

SEQ ID NO: 3509212 - DNA, 25 bp, Homo sapien
cactggagactggtggctttgataa

SEQ ID NO: 3509213 - DNA, 25 bp, Homo sapien
taaaagggtgatgacccctgtaagc

SEQ ID NO: 3509214 - DNA, 25 bp, Homo sapien
caacttgtctccagcaatcgctgca

SEQ ID NO: 3509215 - DNA, 25 bp, Homo sapien
aagagaagctagctgcttggtccag

SEQ ID NO: 3509216 - DNA, 25 bp, Homo sapien
tacaacttgtctccagcaatcgctg

SEQ ID NO: 3509217 - DNA, 25 bp, Homo sapien
caagagaagctagctgcttggtcca

SEQ ID NO: 3509218 - DNA, 25 bp, Homo sapien
tccgctttctctcattagtaatccc

SEQ ID NO: 3509219 - DNA, 25 bp, Homo sapien
tcaaactgacggttgagaaccatga

SEQ ID NO: 3509220 - DNA, 25 bp, Homo sapien
aaccatgatgctctgtaactgctgt

SEQ ID NO: 3509221 - DNA, 25 bp, Homo sapien
gatgctctgtaactgctgttccagc

SEQ ID NO: 3509222 - DNA, 25 bp, Homo sapien
tttccaccttcctatgctgatgctt

SEQ ID NO: 3509223 - DNA, 25 bp, Homo sapien
tgttcagctcattcatcagaaccat

SEQ ID NO: 3509224 - DNA, 25 bp, Homo sapien
taattcctctattagcccattggcc

SEQ ID NO: 3509225 - DNA, 25 bp, Homo sapien
ggccattttgatctggttttccacc

SEQ ID NO: 3509226 - DNA, 25 bp, Homo sapien
aaccatggtaagctttcctcatgga

SEQ ID NO: 3509227 - DNA, 25 bp, Homo sapien
tgggacaaaccatggtaagctttcc

SEQ ID NO: 3509228 - DNA, 25 bp, Homo sapien
tgtaaacacaatgggacaaaccatg

SEQ ID NO: 3509229 - DNA, 25 bp, Homo sapien
ctgtaaacacaatgggacaaaccat

SEQ ID NO: 3509230 - DNA, 25 bp, Homo sapien
ctggatttcttatgtgccacctgtg

SEQ ID NO: 3509231 - DNA, 25 bp, Homo sapien
tttgcagatgtctgtagactggatt

SEQ ID NO: 3509232 - DNA, 25 bp, Homo sapien
gactggatttcttatgtgccacctg

SEQ ID NO: 3509233 - DNA, 25 bp, Homo sapien
cagatgtctgtagactggatttctt

SEQ ID NO: 3509234 - DNA, 25 bp, Homo sapien
ggttttgcaaaacttcttcaacatg

SEQ ID NO: 3509235 - DNA, 25 bp, Homo sapien
cagaagcatcctctggttttgcaaa

SEQ ID NO: 3509236 - DNA, 25 bp, Homo sapien
tccagaagcatcctctggttttgca

SEQ ID NO: 3509237 - DNA, 25 bp, Homo sapien
gaagcatcctctggttttgcaaaac

SEQ ID NO: 3509238 - DNA, 25 bp, Homo sapien
tggcaagtgagcatatcacatgtct

SEQ ID NO: 3509239 - DNA, 25 bp, Homo sapien
tacaaggtgaagtctccgggaccac

SEQ ID NO: 3509240 - DNA, 25 bp, Homo sapien
cacatgtctcacagaatagcttgag

SEQ ID NO: 3509241 - DNA, 25 bp, Homo sapien
tgtgttccaccactaggcagctatg

SEQ ID NO: 3509242 - DNA, 25 bp, Homo sapien
tcggtgttcctctgtgcaagagctg

SEQ ID NO: 3509243 - DNA, 25 bp, Homo sapien
ctgtgtcggtgttcctctgtgcaag

SEQ ID NO: 3509244 - DNA, 25 bp, Homo sapien
ggtgttcctctgtgcaagagctgca

SEQ ID NO: 3509245 - DNA, 25 bp, Homo sapien
tgtcggtgttcctctgtgcaagagc

SEQ ID NO: 3509246 - DNA, 25 bp, Homo sapien
gcagaggatatgtgctgccctcttc

SEQ ID NO: 3509247 - DNA, 25 bp, Homo sapien
agccagcgattgcagtaggtgcaga

SEQ ID NO: 3509248 - DNA, 25 bp, Homo sapien
ggtgcagaggatatgtgctgccctc

SEQ ID NO: 3509249 - DNA, 25 bp, Homo sapien
taggtgcagaggatatgtgctgccc

SEQ ID NO: 3509250 - DNA, 25 bp, Homo sapien
caccagtttggagtgtaacctattc

SEQ ID NO: 3509251 - DNA, 25 bp, Homo sapien
agagctgtctgggagtaacatgccg

SEQ ID NO: 3509252 - DNA, 25 bp, Homo sapien
tatcctcatttgtgtctgcctccac

SEQ ID NO: 3509253 - DNA, 25 bp, Homo sapien
tgcctccacaagtggtaaatgctct

SEQ ID NO: 3509254 - DNA, 25 bp, Homo sapien
atactcgttcacacccaggacagga

SEQ ID NO: 3509255 - DNA, 25 bp, Homo sapien
gttgctcagtaggaacacaatgcag

SEQ ID NO: 3509256 - DNA, 25 bp, Homo sapien
gggttgctcagtaggaacacaatgc

SEQ ID NO: 3509257 - DNA, 25 bp, Homo sapien
aatgttcagttacatccctggtaag

SEQ ID NO: 3509258 - DNA, 25 bp, Homo sapien
tccctgccccataaaccatgctact

SEQ ID NO: 3509259 - DNA, 25 bp, Homo sapien
accatgctactacaggcccaacgct

SEQ ID NO: 3509260 - DNA, 25 bp, Homo sapien
tactacaggcccaacgctgctttgg

SEQ ID NO: 3509261 - DNA, 25 bp, Homo sapien
aacgctgctttggttctgacaatca

SEQ ID NO: 3509262 - DNA, 25 bp, Homo sapien
aatacatcagtctctaacatattct

SEQ ID NO: 3509263 - DNA, 25 bp, Homo sapien
tacatcagtctctaacatattcttc

SEQ ID NO: 3509264 - DNA, 25 bp, Homo sapien
ctatgaacagcttgacctacaatct

SEQ ID NO: 3509265 - DNA, 25 bp, Homo sapien
gaacagcttgacctacaatctctcc

SEQ ID NO: 3509266 - DNA, 25 bp, Homo sapien
cctgaggtgacctcctcatctacag

SEQ ID NO: 3509267 - DNA, 25 bp, Homo sapien
gttgaaaacgacttccacaagacat

SEQ ID NO: 3509268 - DNA, 25 bp, Homo sapien
tctaattgttgaaaacgacttccac

SEQ ID NO: 3509269 - DNA, 25 bp, Homo sapien
tgaggtgacctcctcatctacagca

SEQ ID NO: 3509270 - DNA, 25 bp, Homo sapien
cccagggtggactgcagcggcacaa

SEQ ID NO: 3509271 - DNA, 25 bp, Homo sapien
caagcaattatcccgcctcagcctc

SEQ ID NO: 3509272 - DNA, 25 bp, Homo sapien
gggtggactgcagcggcacaatctc

SEQ ID NO: 3509273 - DNA, 25 bp, Homo sapien
tcaagcaattatcccgcctcagcct

SEQ ID NO: 3509274 - DNA, 25 bp, Homo sapien
cagctgtgatgtagctcccctctgg

SEQ ID NO: 3509275 - DNA, 25 bp, Homo sapien
tctaagaagttaggaaagactctga

SEQ ID NO: 3509276 - DNA, 25 bp, Homo sapien
gatgtagctcccctctggcagagaa

SEQ ID NO: 3509277 - DNA, 25 bp, Homo sapien
tcccaacagacaggtagtgacctga

SEQ ID NO: 3509278 - DNA, 25 bp, Homo sapien
gaaagacaaatttttgtccaagtca

SEQ ID NO: 3509279 - DNA, 25 bp, Homo sapien
ctagaaagacaaatttttgtccaag

SEQ ID NO: 3509280 - DNA, 25 bp, Homo sapien
ccctgctgccgtgattagggcaaca

SEQ ID NO: 3509281 - DNA, 25 bp, Homo sapien
tgtggccctgctgccgtgattaggg

SEQ ID NO: 3509282 - DNA, 25 bp, Homo sapien
gccctgctgccgtgattagggcaac

SEQ ID NO: 3509283 - DNA, 25 bp, Homo sapien
gtggccctgctgccgtgattagggc

SEQ ID NO: 3509284 - DNA, 25 bp, Homo sapien
gaaagagcttggttgactcctcctg

SEQ ID NO: 3509285 - DNA, 25 bp, Homo sapien
tcctgtttctgtttatctcgaaggc

SEQ ID NO: 3509286 - DNA, 25 bp, Homo sapien
tctgtttatctcgaaggctctgcag

SEQ ID NO: 3509287 - DNA, 25 bp, Homo sapien
tgagatactcctgcaagaaagagct

SEQ ID NO: 3509288 - DNA, 25 bp, Homo sapien
tatacgtaggaagaatgatgcaatc

SEQ ID NO: 3509289 - DNA, 25 bp, Homo sapien
atccagaatggaataacaggctcac

SEQ ID NO: 3509290 - DNA, 25 bp, Homo sapien
cccgatccggcagctcatttaaata

SEQ ID NO: 3509291 - DNA, 25 bp, Homo sapien
tagagctcatcacaacaacagtgtt

SEQ ID NO: 3509292 - DNA, 25 bp, Homo sapien
agcaggagcccaagatatccctcca

SEQ ID NO: 3509293 - DNA, 25 bp, Homo sapien
tgggggggccttcaacagacattga

SEQ ID NO: 3509294 - DNA, 25 bp, Homo sapien
catgcccccggcactgaaggagggt

SEQ ID NO: 3509295 - DNA, 25 bp, Homo sapien
ccccggcactgaaggagggtgtggg

SEQ ID NO: 3509296 - DNA, 25 bp, Homo sapien
ttgccatagtgaccaattgtccgtc

SEQ ID NO: 3509297 - DNA, 25 bp, Homo sapien
cagaggattaggacttcggatggag

SEQ ID NO: 3509298 - DNA, 25 bp, Homo sapien
gacgtcacagtcagttgccatagtg

SEQ ID NO: 3509299 - DNA, 25 bp, Homo sapien
gaagtccttatcctgtgacgtcaca

SEQ ID NO: 3509300 - DNA, 25 bp, Homo sapien
ttgccctcttaatatcaggcctcat

SEQ ID NO: 3509301 - DNA, 25 bp, Homo sapien
cttgccctcttaatatcaggcctca

SEQ ID NO: 3509302 - DNA, 25 bp, Homo sapien
catccttgccctcttaatatcaggc

SEQ ID NO: 3509303 - DNA, 25 bp, Homo sapien
tccttgccctcttaatatcaggcct

SEQ ID NO: 3509304 - DNA, 25 bp, Homo sapien
atgagtctgggctcatttcatctga

SEQ ID NO: 3509305 - DNA, 25 bp, Homo sapien
tcagagcccatgctcctaggaacca

SEQ ID NO: 3509306 - DNA, 25 bp, Homo sapien
ctgggctcatttcatctgacagacc

SEQ ID NO: 3509307 - DNA, 25 bp, Homo sapien
gctcatttcatctgacagaccctca

SEQ ID NO: 3509308 - DNA, 25 bp, Homo sapien
tgaccgaggtagcacctctgtctct

SEQ ID NO: 3509309 - DNA, 25 bp, Homo sapien
cactgacacactccatgcaaaacca

SEQ ID NO: 3509310 - DNA, 25 bp, Homo sapien
ggtagcacctctgtctcttttcatc

SEQ ID NO: 3509311 - DNA, 25 bp, Homo sapien
tccaaaaactgatgcactgacacac

SEQ ID NO: 3509312 - DNA, 25 bp, Homo sapien
gacagagagtcatttggggaaccaa

SEQ ID NO: 3509313 - DNA, 25 bp, Homo sapien
gctctgcaagtgaccgattatgtgg

SEQ ID NO: 3509314 - DNA, 25 bp, Homo sapien
aagggcagcatcctattctgggtct

SEQ ID NO: 3509315 - DNA, 25 bp, Homo sapien
tgtagtttctactggccctcaagcc

SEQ ID NO: 3509316 - DNA, 25 bp, Homo sapien
cccagctggtctcctcagtacctga

SEQ ID NO: 3509317 - DNA, 25 bp, Homo sapien
ctctggtccccatcattagcttttg

SEQ ID NO: 3509318 - DNA, 25 bp, Homo sapien
agtacctgagaggtgacgcagaccc

SEQ ID NO: 3509319 - DNA, 25 bp, Homo sapien
tggtccccatcattagcttttgaag

SEQ ID NO: 3509320 - DNA, 25 bp, Homo sapien
atgagtgtcccttgggcatttaaat

SEQ ID NO: 3509321 - DNA, 25 bp, Homo sapien
cctgttatgtagtgggaggtgaact

SEQ ID NO: 3509322 - DNA, 25 bp, Homo sapien
acctgttatgtagtgggaggtgaac

SEQ ID NO: 3509323 - DNA, 25 bp, Homo sapien
agagacctgttatgtagtgggaggt

SEQ ID NO: 3509324 - DNA, 25 bp, Homo sapien
agacctgttatgtagtgggaggtga

SEQ ID NO: 3509325 - DNA, 25 bp, Homo sapien
gatgagagcccatacctggcaggtc

SEQ ID NO: 3509326 - DNA, 25 bp, Homo sapien
cctggaagcagtccttacggagcaa

SEQ ID NO: 3509327 - DNA, 25 bp, Homo sapien
tagctcctgtatcaagccctggaag

SEQ ID NO: 3509328 - DNA, 25 bp, Homo sapien
tctgcaacagtctcatgagccttgg

SEQ ID NO: 3509329 - DNA, 25 bp, Homo sapien
tgatggcacaatgagcaggtcatta

SEQ ID NO: 3509330 - DNA, 25 bp, Homo sapien
ctgatggcacaatgagcaggtcatt

SEQ ID NO: 3509331 - DNA, 25 bp, Homo sapien
gatggcacaatgagcaggtcattac

SEQ ID NO: 3509332 - DNA, 25 bp, Homo sapien
cgtgtagagcgagccagctccactc

SEQ ID NO: 3509333 - DNA, 25 bp, Homo sapien
aggtgagaagcagcgtgtagagcga

SEQ ID NO: 3509334 - DNA, 25 bp, Homo sapien
agccccataaagctcatgcccatgt

SEQ ID NO: 3509335 - DNA, 25 bp, Homo sapien
aagcagcgtgtagagcgagccagct

SEQ ID NO: 3509336 - DNA, 25 bp, Homo sapien
gggaccaaaaagagagtctagccat

SEQ ID NO: 3509337 - DNA, 25 bp, Homo sapien
tgggaccaaaaagagagtctagcca

SEQ ID NO: 3509338 - DNA, 25 bp, Homo sapien
ctgggaccaaaaagagagtctagcc

SEQ ID NO: 3509339 - DNA, 25 bp, Homo sapien
ctctgccgtggaaaacaaagcgtgg

SEQ ID NO: 3509340 - DNA, 25 bp, Homo sapien
ccttcaaaagtgtcccgtacctgtg

SEQ ID NO: 3509341 - DNA, 25 bp, Homo sapien
aaaagtgtcccgtacctgtgcctct

SEQ ID NO: 3509342 - DNA, 25 bp, Homo sapien
ttgtctgaaggcgaacaaacccttc

SEQ ID NO: 3509343 - DNA, 25 bp, Homo sapien
tatgaggaaaatccagtctcacaca

SEQ ID NO: 3509344 - DNA, 25 bp, Homo sapien
gaaaatccagtctcacacagacata

SEQ ID NO: 3509345 - DNA, 25 bp, Homo sapien
tctgcagtcaatctgttatatgttg

SEQ ID NO: 3509346 - DNA, 25 bp, Homo sapien
gttgttttgttcacagtatatgagg

SEQ ID NO: 3509347 - DNA, 25 bp, Homo sapien
gcaagactgtacttaagccaaggta

SEQ ID NO: 3509348 - DNA, 25 bp, Homo sapien
caaagattgtttgcatgaagggtac

SEQ ID NO: 3509349 - DNA, 25 bp, Homo sapien
ccagcaagtactacacagggtaaga

SEQ ID NO: 3509350 - DNA, 25 bp, Homo sapien
gtttggtgcccaaaacatcagcagt

SEQ ID NO: 3509351 - DNA, 25 bp, Homo sapien
gcagtctcacttctgggaatttatc

SEQ ID NO: 3509352 - DNA, 25 bp, Homo sapien
catataatccagcagtctcacttct

SEQ ID NO: 3509353 - DNA, 25 bp, Homo sapien
cagcagtctcacttctgggaattta

SEQ ID NO: 3509354 - DNA, 25 bp, Homo sapien
tccagcagtctcacttctgggaatt

SEQ ID NO: 3509355 - DNA, 25 bp, Homo sapien
catcttgattaacagtgctctactt

SEQ ID NO: 3509356 - DNA, 25 bp, Homo sapien
gactgatgtcgaattcaggaaccca

SEQ ID NO: 3509357 - DNA, 25 bp, Homo sapien
aatgtccacatctaaagatggagag

SEQ ID NO: 3509358 - DNA, 25 bp, Homo sapien
aaaacagagctggattcattcagga

SEQ ID NO: 3509359 - DNA, 25 bp, Homo sapien
tgctgtctggtatcatctcttccgt

SEQ ID NO: 3509360 - DNA, 25 bp, Homo sapien
gctgtctggtatcatctcttccgtt

SEQ ID NO: 3509361 - DNA, 25 bp, Homo sapien
gtctggtatcatctcttccgttcat

SEQ ID NO: 3509362 - DNA, 25 bp, Homo sapien
aggctgctgtctggtatcatctctt

SEQ ID NO: 3509363 - DNA, 25 bp, Homo sapien
catcttcccaaggttaggttccagg

SEQ ID NO: 3509364 - DNA, 25 bp, Homo sapien
catttcttgtgcacttactggccag

SEQ ID NO: 3509365 - DNA, 25 bp, Homo sapien
catgcagtatgtgattaaggttgat

SEQ ID NO: 3509366 - DNA, 25 bp, Homo sapien
ttgatgtcaaatagacgacgatgtc

SEQ ID NO: 3509367 - DNA, 25 bp, Homo sapien
ttttcacacacgtaaaatgaggctg

SEQ ID NO: 3509368 - DNA, 25 bp, Homo sapien
tagtgctgtaccttcaggcagatgt

SEQ ID NO: 3509369 - DNA, 25 bp, Homo sapien
gaccacctatgcagcgtctgacaag

SEQ ID NO: 3509370 - DNA, 25 bp, Homo sapien
tgacaagtcacccaattcttctgtg

SEQ ID NO: 3509371 - DNA, 25 bp, Homo sapien
aatatattttagctgaagggggcaa

SEQ ID NO: 3509372 - DNA, 25 bp, Homo sapien
aaatatattttagctgaagggggca

SEQ ID NO: 3509373 - DNA, 25 bp, Homo sapien
aataaatacacgctcacacatacac

SEQ ID NO: 3509374 - DNA, 25 bp, Homo sapien
tagtagggaagacaaacgtaggtca

SEQ ID NO: 3509375 - DNA, 25 bp, Homo sapien
tgaacactggttgaaggaaccgact

SEQ ID NO: 3509376 - DNA, 25 bp, Homo sapien
cgacttaagagcgaagacatgctgc

SEQ ID NO: 3509377 - DNA, 25 bp, Homo sapien
catgctgctattagcgaagacaggg

SEQ ID NO: 3509378 - DNA, 25 bp, Homo sapien
gctcagacaacgaggcccttagggt

SEQ ID NO: 3509379 - DNA, 25 bp, Homo sapien
taaaaggaccataaagcaaccaggc

SEQ ID NO: 3509380 - DNA, 25 bp, Homo sapien
gctgcagtgcccactcagaagtgtg

SEQ ID NO: 3509381 - DNA, 25 bp, Homo sapien
tgaccaaggcgccagaaaagggcct

SEQ ID NO: 3509382 - DNA, 25 bp, Homo sapien
accgtacaccgccaccaggacactc

SEQ ID NO: 3509383 - DNA, 25 bp, Homo sapien
cagaaagaggaagcgactagcaggc

SEQ ID NO: 3509384 - DNA, 25 bp, Homo sapien
cgccaccaggacactccgtgatggg

SEQ ID NO: 3509385 - DNA, 25 bp, Homo sapien
tgggggatcaccaccctcagaaaga

SEQ ID NO: 3509386 - DNA, 25 bp, Homo sapien
tggtcggggcttccaggctgcgcat

SEQ ID NO: 3509387 - DNA, 25 bp, Homo sapien
catggtcggggcttccaggctgcgc

SEQ ID NO: 3509388 - DNA, 25 bp, Homo sapien
atggtcggggcttccaggctgcgca

SEQ ID NO: 3509389 - DNA, 25 bp, Homo sapien
ggaaacttaggggccacgtgagcca

SEQ ID NO: 3509390 - DNA, 25 bp, Homo sapien
gaaacttaggggccacgtgagccac

SEQ ID NO: 3509391 - DNA, 25 bp, Homo sapien
tgctggtggtctgcatcaccaccgg

SEQ ID NO: 3509392 - DNA, 25 bp, Homo sapien
cggcggccgcggtaatgctggtggt

SEQ ID NO: 3509393 - DNA, 25 bp, Homo sapien
ggtctgcatcaccaccggatcaact

SEQ ID NO: 3509394 - DNA, 25 bp, Homo sapien
accaccggatcaacttcgacaaata

SEQ ID NO: 3509395 - DNA, 25 bp, Homo sapien
cttgaattttagtctcggccctgcc

SEQ ID NO: 3509396 - DNA, 25 bp, Homo sapien
caccaggttagagacatgcttcaca

SEQ ID NO: 3509397 - DNA, 25 bp, Homo sapien
tcacgcttgggtatcggctattgcc

SEQ ID NO: 3509398 - DNA, 25 bp, Homo sapien
gcctgagtgtgctagagtcctcgaa

SEQ ID NO: 3509399 - DNA, 25 bp, Homo sapien
gaaagttggtatgaagcattaccac

SEQ ID NO: 3509400 - DNA, 25 bp, Homo sapien
gacacgggtgaatgctgctaaaaac

SEQ ID NO: 3509401 - DNA, 25 bp, Homo sapien
tggactttggtcagtgaacagacac

SEQ ID NO: 3509402 - DNA, 25 bp, Homo sapien
tgggaaagttggtatgaagcattac

SEQ ID NO: 3509403 - DNA, 25 bp, Homo sapien
ccaaagcagcctgtcatcgtgaagg

SEQ ID NO: 3509404 - DNA, 25 bp, Homo sapien
ccctcaaatatatggtaaacgtaag

SEQ ID NO: 3509405 - DNA, 25 bp, Homo sapien
ccaggttctagtacttagggtatga

SEQ ID NO: 3509406 - DNA, 25 bp, Homo sapien
aacacagacgttggccagttaaaca

SEQ ID NO: 3509407 - DNA, 25 bp, Homo sapien
tctagtctgaaatgtatcgggaaaa

SEQ ID NO: 3509408 - DNA, 25 bp, Homo sapien
tgatgaatcaaaatctcgagatggg

SEQ ID NO: 3509409 - DNA, 25 bp, Homo sapien
cccggccatggctccttaatcttga

SEQ ID NO: 3509410 - DNA, 25 bp, Homo sapien
tgatggtgaccaattcatgtttaca

SEQ ID NO: 3509411 - DNA, 25 bp, Homo sapien
gctctggtattcacggaagggcata

SEQ ID NO: 3509412 - DNA, 25 bp, Homo sapien
gcagccacagtagcggggagacata

SEQ ID NO: 3509413 - DNA, 25 bp, Homo sapien
ggagacataccgctctggtattcac

SEQ ID NO: 3509414 - DNA, 25 bp, Homo sapien
cattatatgccagtactgattttct

SEQ ID NO: 3509415 - DNA, 25 bp, Homo sapien
tgtgatcggatcacatgtctaaagt

SEQ ID NO: 3509416 - DNA, 25 bp, Homo sapien
cttgtgatcggatcacatgtctaaa

SEQ ID NO: 3509417 - DNA, 25 bp, Homo sapien
acatcttgtgatcggatcacatgtc

SEQ ID NO: 3509418 - DNA, 25 bp, Homo sapien
atcttgtgatcggatcacatgtcta

SEQ ID NO: 3509419 - DNA, 25 bp, Homo sapien
cggccccttgggaatatacaaatat

SEQ ID NO: 3509420 - DNA, 25 bp, Homo sapien
gaatgagaggactaggcctaagacc

SEQ ID NO: 3509421 - DNA, 25 bp, Homo sapien
gacacactgaccatctcggagggtg

SEQ ID NO: 3509422 - DNA, 25 bp, Homo sapien
tttattgagaacacccgtagatggg

SEQ ID NO: 3509423 - DNA, 25 bp, Homo sapien
gcagattatttacaaacagtatcct

SEQ ID NO: 3509424 - DNA, 25 bp, Homo sapien
cagattatttacaaacagtatcctg

SEQ ID NO: 3509425 - DNA, 25 bp, Homo sapien
gctctgcaaggcactggactctgct

SEQ ID NO: 3509426 - DNA, 25 bp, Homo sapien
ggctctgcaaggcactggactctgc

SEQ ID NO: 3509427 - DNA, 25 bp, Homo sapien
ctggactctgctactgagaaggagg

SEQ ID NO: 3509428 - DNA, 25 bp, Homo sapien
tccccaggcttcaggctctgcaagg

SEQ ID NO: 3509429 - DNA, 25 bp, Homo sapien
ttaattcttcttgtggagaaacttc

SEQ ID NO: 3509430 - DNA, 25 bp, Homo sapien
ttcttcttgtggagaaacttcattt

SEQ ID NO: 3509431 - DNA, 25 bp, Homo sapien
ttgtggagaaacttcattttgttgc

SEQ ID NO: 3509432 - DNA, 25 bp, Homo sapien
aattcttcttgtggagaaacttcat

SEQ ID NO: 3509433 - DNA, 25 bp, Homo sapien
gaatgttcagtgttatcccttccaa

SEQ ID NO: 3509434 - DNA, 25 bp, Homo sapien
ctgtgggccagagaggacaagagag

SEQ ID NO: 3509435 - DNA, 25 bp, Homo sapien
atgttcagtgttatcccttccaacc

SEQ ID NO: 3509436 - DNA, 25 bp, Homo sapien
agaggacaagagagaatgttcagtg

SEQ ID NO: 3509437 - DNA, 25 bp, Homo sapien
cattttgcaggaagggcactcgcac

SEQ ID NO: 3509438 - DNA, 25 bp, Homo sapien
aatcactgtgtggttttacgcaagc

SEQ ID NO: 3509439 - DNA, 25 bp, Homo sapien
cacgtgagagctctaattagggcac

SEQ ID NO: 3509440 - DNA, 25 bp, Homo sapien
tggtctagaggaaagctcactggct

SEQ ID NO: 3509441 - DNA, 25 bp, Homo sapien
gatgtatgtgggaacctgggattcc

SEQ ID NO: 3509442 - DNA, 25 bp, Homo sapien
tataatatctatttacagctgggca

SEQ ID NO: 3509443 - DNA, 25 bp, Homo sapien
tgcaatatggtaaatacagcctgtc

SEQ ID NO: 3509444 - DNA, 25 bp, Homo sapien
gagttctgcgtccatgggttccatg

SEQ ID NO: 3509445 - DNA, 25 bp, Homo sapien
ccaaacctcggagaaacttattcat

SEQ ID NO: 3509446 - DNA, 25 bp, Homo sapien
tattcattccactctgctcagtgtc

SEQ ID NO: 3509447 - DNA, 25 bp, Homo sapien
cagtgtctgggagttcttctaagta

SEQ ID NO: 3509448 - DNA, 25 bp, Homo sapien
tgctccactcgctgctcaaaaaggc

SEQ ID NO: 3509449 - DNA, 25 bp, Homo sapien
cataaaaacctcaagaaagcggcgg

SEQ ID NO: 3509450 - DNA, 25 bp, Homo sapien
ccctgtcttggatgaagccagcaaa

SEQ ID NO: 3509451 - DNA, 25 bp, Homo sapien
agatttgcggaaggcctctcgctga

SEQ ID NO: 3509452 - DNA, 25 bp, Homo sapien
tcagaaagagggagtagtgcccaac

SEQ ID NO: 3509453 - DNA, 25 bp, Homo sapien
tgaccgtgcccgggcactattctca

SEQ ID NO: 3509454 - DNA, 25 bp, Homo sapien
ggagcagagctgaccgtgcccgggc

SEQ ID NO: 3509455 - DNA, 25 bp, Homo sapien
gcagagctgaccgtgcccgggcact

SEQ ID NO: 3509456 - DNA, 25 bp, Homo sapien
agagctgaccgtgcccgggcactat

SEQ ID NO: 3509457 - DNA, 25 bp, Homo sapien
tgcctgtaacttcctaggtaacaac

SEQ ID NO: 3509458 - DNA, 25 bp, Homo sapien
taggtaacaacgtgtcttcgtcgtc

SEQ ID NO: 3509459 - DNA, 25 bp, Homo sapien
gtaacaacgtgtcttcgtcgtccat

SEQ ID NO: 3509460 - DNA, 25 bp, Homo sapien
ctaggtaacaacgtgtcttcgtcgt

SEQ ID NO: 3509461 - DNA, 25 bp, Homo sapien
ctgtcggatgaatcggtcagatccc

SEQ ID NO: 3509462 - DNA, 25 bp, Homo sapien
cagatcccagattcaccatcagcgc

SEQ ID NO: 3509463 - DNA, 25 bp, Homo sapien
tcggatgaatcggtcagatcccaga

SEQ ID NO: 3509464 - DNA, 25 bp, Homo sapien
gatgaatcggtcagatcccagattc

SEQ ID NO: 3509465 - DNA, 25 bp, Homo sapien
cagcagacgatgtcaatcatggagg

SEQ ID NO: 3509466 - DNA, 25 bp, Homo sapien
ggtgggacagcagacgatgtcaatc

SEQ ID NO: 3509467 - DNA, 25 bp, Homo sapien
acgatgtcaatcatggaggccggga

SEQ ID NO: 3509468 - DNA, 25 bp, Homo sapien
gggacagcagacgatgtcaatcatg

SEQ ID NO: 3509469 - DNA, 25 bp, Homo sapien
agcaaggccaccaccgcgtgggagc

SEQ ID NO: 3509470 - DNA, 25 bp, Homo sapien
aaggccaccaccgcgtgggagcagc

SEQ ID NO: 3509471 - DNA, 25 bp, Homo sapien
gcaaggccaccaccgcgtgggagca

SEQ ID NO: 3509472 - DNA, 25 bp, Homo sapien
agagcaaggccaccaccgcgtggga

SEQ ID NO: 3509473 - DNA, 25 bp, Homo sapien
gatgggcagacagagagacagagta

SEQ ID NO: 3509474 - DNA, 25 bp, Homo sapien
atgggcagacagagagacagagtac

SEQ ID NO: 3509475 - DNA, 25 bp, Homo sapien
tgatgggcagacagagagacagagt

SEQ ID NO: 3509476 - DNA, 25 bp, Homo sapien
ctgatgggcagacagagagacagag

SEQ ID NO: 3509477 - DNA, 25 bp, Homo sapien
gcgcctcaaggacaacaatgctact

SEQ ID NO: 3509478 - DNA, 25 bp, Homo sapien
caggaacttagagctcgctggaggc

SEQ ID NO: 3509479 - DNA, 25 bp, Homo sapien
tcaggacagcctttgatcgtaaacc

SEQ ID NO: 3509480 - DNA, 25 bp, Homo sapien
tcagggaccctgcagactggtaaag

SEQ ID NO: 3509481 - DNA, 25 bp, Homo sapien
aagaccttgggatcgtccctcccag

SEQ ID NO: 3509482 - DNA, 25 bp, Homo sapien
gaaggacatcttttccaagacccca

SEQ ID NO: 3509483 - DNA, 25 bp, Homo sapien
tttccaagaccccagattggcagaa

SEQ ID NO: 3509484 - DNA, 25 bp, Homo sapien
ggcagaacttgaatacccggccagg

SEQ ID NO: 3509485 - DNA, 25 bp, Homo sapien
gctgttgggctagatttcttcacaa

SEQ ID NO: 3509486 - DNA, 25 bp, Homo sapien
tgtgagacacagaagcattgaggct

SEQ ID NO: 3509487 - DNA, 25 bp, Homo sapien
ctgatgggcccacagaacacctaga

SEQ ID NO: 3509488 - DNA, 25 bp, Homo sapien
agctcattccagctgttgggctaga

SEQ ID NO: 3509489 - DNA, 25 bp, Homo sapien
tagagccaggcaggcaacctttgat

SEQ ID NO: 3509490 - DNA, 25 bp, Homo sapien
tacaggcccagctaatacagggttt

SEQ ID NO: 3509491 - DNA, 25 bp, Homo sapien
aacatggcaattcccaccgttgtcc

SEQ ID NO: 3509492 - DNA, 25 bp, Homo sapien
ttgtctggaaagaaagccccggctc

SEQ ID NO: 3509493 - DNA, 25 bp, Homo sapien
tgagcttatctgccacaaaaatgac

SEQ ID NO: 3509494 - DNA, 25 bp, Homo sapien
ctgagcttatctgccacaaaaatga

SEQ ID NO: 3509495 - DNA, 25 bp, Homo sapien
cagtgaggcaaagattcggatgagc

SEQ ID NO: 3509496 - DNA, 25 bp, Homo sapien
ccagccttgagtccatgggccgccg

SEQ ID NO: 3509497 - DNA, 25 bp, Homo sapien
cactgaggcaggtaaaaaggcactc

SEQ ID NO: 3509498 - DNA, 25 bp, Homo sapien
attcggatgagctggcgcacactga

SEQ ID NO: 3509499 - DNA, 25 bp, Homo sapien
tcttttccaggtctctcgtctaccc

SEQ ID NO: 3509500 - DNA, 25 bp, Homo sapien
tccatccctcggactacagctctgc

SEQ ID NO: 3509501 - DNA, 25 bp, Homo sapien
gtctaccctgctatgcagtaaaccc

SEQ ID NO: 3509502 - DNA, 25 bp, Homo sapien
tgctctcgtagcactcgaacaccca

SEQ ID NO: 3509503 - DNA, 25 bp, Homo sapien
aacataagcaaagggctggccattc

SEQ ID NO: 3509504 - DNA, 25 bp, Homo sapien
agcatagatgtgcaggcctcctgaa

SEQ ID NO: 3509505 - DNA, 25 bp, Homo sapien
tgctcccaaggtgagtgccacagct

SEQ ID NO: 3509506 - DNA, 25 bp, Homo sapien
caggactgtcttatcagggccaggc

SEQ ID NO: 3509507 - DNA, 25 bp, Homo sapien
gatgtctacacaggctgtttccact

SEQ ID NO: 3509508 - DNA, 25 bp, Homo sapien
aagatcttgccacgcctcatcctga

SEQ ID NO: 3509509 - DNA, 25 bp, Homo sapien
ttctgggcccctgcacttgtcaaga

SEQ ID NO: 3509510 - DNA, 25 bp, Homo sapien
cggatcacggcttcctttttgaggt

SEQ ID NO: 3509511 - DNA, 25 bp, Homo sapien
atgaaaggatagaccaatgcagcgg

SEQ ID NO: 3509512 - DNA, 25 bp, Homo sapien
ctgggaagggcgactccatgagact

SEQ ID NO: 3509513 - DNA, 25 bp, Homo sapien
atgcagcggagatcccacgccggcg

SEQ ID NO: 3509514 - DNA, 25 bp, Homo sapien
aagggcgactccatgagacttctca

SEQ ID NO: 3509515 - DNA, 25 bp, Homo sapien
tcccgctcgctcacagtcacaggtg

SEQ ID NO: 3509516 - DNA, 25 bp, Homo sapien
gtctcccgctcgctcacagtcacag

SEQ ID NO: 3509517 - DNA, 25 bp, Homo sapien
gctcgctcacagtcacaggtggttt

SEQ ID NO: 3509518 - DNA, 25 bp, Homo sapien
ttctgtctcccgctcgctcacagtc

SEQ ID NO: 3509519 - DNA, 25 bp, Homo sapien
ggctgatgacacagtacacctctgg

SEQ ID NO: 3509520 - DNA, 25 bp, Homo sapien
cagccaaggcggctgatgacacagt

SEQ ID NO: 3509521 - DNA, 25 bp, Homo sapien
caaggcggctgatgacacagtacac

SEQ ID NO: 3509522 - DNA, 25 bp, Homo sapien
gatgacacagtacacctctggcaac

SEQ ID NO: 3509523 - DNA, 25 bp, Homo sapien
agtagccaaagcgtctgctgccatc

SEQ ID NO: 3509524 - DNA, 25 bp, Homo sapien
cagtaagcgcctgcagtagccaaag

SEQ ID NO: 3509525 - DNA, 25 bp, Homo sapien
gcctgcagtagccaaagcgtctgct

SEQ ID NO: 3509526 - DNA, 25 bp, Homo sapien
taagcgcctgcagtagccaaagcgt

SEQ ID NO: 3509527 - DNA, 25 bp, Homo sapien
tcgcatctgcttggtgggtcggtcc

SEQ ID NO: 3509528 - DNA, 25 bp, Homo sapien
gaagccagtccttggcatcagggaa

SEQ ID NO: 3509529 - DNA, 25 bp, Homo sapien
tccttggcatcagggaagcaaaact

SEQ ID NO: 3509530 - DNA, 25 bp, Homo sapien
tactctgacacaggaagccagtcct

SEQ ID NO: 3509531 - DNA, 25 bp, Homo sapien
ggaagaaggaaccaggagatgacat

SEQ ID NO: 3509532 - DNA, 25 bp, Homo sapien
aagaaggaaccaggagatgacatgg

SEQ ID NO: 3509533 - DNA, 25 bp, Homo sapien
aaggaaccaggagatgacatggaac

SEQ ID NO: 3509534 - DNA, 25 bp, Homo sapien
gaaggaaccaggagatgacatggaa

SEQ ID NO: 3509535 - DNA, 25 bp, Homo sapien
caaagtactcaaaaagctcccgctc

SEQ ID NO: 3509536 - DNA, 25 bp, Homo sapien
tccagctccagcgtgcgatagctgg

SEQ ID NO: 3509537 - DNA, 25 bp, Homo sapien
gggcgcgcttcagcatcgactggat

SEQ ID NO: 3509538 - DNA, 25 bp, Homo sapien
cgatggcttcttcttgagggacacc

SEQ ID NO: 3509539 - DNA, 25 bp, Homo sapien
gcacaaggtgctgacccctgcacaa

SEQ ID NO: 3509540 - DNA, 25 bp, Homo sapien
cacaaggtgctgacccctgcacaaa

SEQ ID NO: 3509541 - DNA, 25 bp, Homo sapien
aggaggaccggcaggcacaaggtgc

SEQ ID NO: 3509542 - DNA, 25 bp, Homo sapien
aggcacaaggtgctgacccctgcac

SEQ ID NO: 3509543 - DNA, 25 bp, Homo sapien
acccactctgtccctgtaccaaaag

SEQ ID NO: 3509544 - DNA, 25 bp, Homo sapien
ggcaaacccagggatgtatcttggc

SEQ ID NO: 3509545 - DNA, 25 bp, Homo sapien
aacccagggatgtatcttggcaccc

SEQ ID NO: 3509546 - DNA, 25 bp, Homo sapien
gactgccgaggccaggcaaacccag

SEQ ID NO: 3509547 - DNA, 25 bp, Homo sapien
acctgtcatcagagtcgctctcgct

SEQ ID NO: 3509548 - DNA, 25 bp, Homo sapien
ctgtcatcagagtcgctctcgctct

SEQ ID NO: 3509549 - DNA, 25 bp, Homo sapien
tcgctctcgctctcactgttttcat

SEQ ID NO: 3509550 - DNA, 25 bp, Homo sapien
agtcgctctcgctctcactgttttc

SEQ ID NO: 3509551 - DNA, 25 bp, Homo sapien
gctgtttcaatgctggacatagaca

SEQ ID NO: 3509552 - DNA, 25 bp, Homo sapien
gtttcaatgctggacatagacaact

SEQ ID NO: 3509553 - DNA, 25 bp, Homo sapien
tgtttcaatgctggacatagacaac

SEQ ID NO: 3509554 - DNA, 25 bp, Homo sapien
tcaatgctggacatagacaactttt

SEQ ID NO: 3509555 - DNA, 25 bp, Homo sapien
atctgagcaccaaggtcagttaatg

SEQ ID NO: 3509556 - DNA, 25 bp, Homo sapien
ctttccttcctctaacatctgagca

SEQ ID NO: 3509557 - DNA, 25 bp, Homo sapien
cttcctctaacatctgagcaccaag

SEQ ID NO: 3509558 - DNA, 25 bp, Homo sapien
tgagcaccaaggtcagttaatgcat

SEQ ID NO: 3509559 - DNA, 25 bp, Homo sapien
aagggaatcgaggaagcagtccaga

SEQ ID NO: 3509560 - DNA, 25 bp, Homo sapien
tttattcaaagggaatcgaggaagc

SEQ ID NO: 3509561 - DNA, 25 bp, Homo sapien
cacggacccagaatttattcaaagg

SEQ ID NO: 3509562 - DNA, 25 bp, Homo sapien
cgaggaagcagtccagattagggaa

SEQ ID NO: 3509563 - DNA, 25 bp, Homo sapien
ctgcccggctccagtgggctgcctc

SEQ ID NO: 3509564 - DNA, 25 bp, Homo sapien
cagcagcatgtcgtcatggctgtgc

SEQ ID NO: 3509565 - DNA, 25 bp, Homo sapien
tgctgaggctgtcttcattgaggct

SEQ ID NO: 3509566 - DNA, 25 bp, Homo sapien
ctcttgggtaatcgtggcagccggt

SEQ ID NO: 3509567 - DNA, 25 bp, Homo sapien
gttcccactgcgcagggactggctg

SEQ ID NO: 3509568 - DNA, 25 bp, Homo sapien
cagctatggggtaaatcttttataa

SEQ ID NO: 3509569 - DNA, 25 bp, Homo sapien
ccactcccagctatggggtaaatct

SEQ ID NO: 3509570 - DNA, 25 bp, Homo sapien
aacaccttattccaaaggcagaaga

SEQ ID NO: 3509571 - DNA, 25 bp, Homo sapien
acaaacaccttattccaaaggcaga

SEQ ID NO: 3509572 - DNA, 25 bp, Homo sapien
ctgtgtgggcgggctgttgtacttc

SEQ ID NO: 3509573 - DNA, 25 bp, Homo sapien
gtgtgggcgggctgttgtacttcct

SEQ ID NO: 3509574 - DNA, 25 bp, Homo sapien
tgtgtgggcgggctgttgtacttcc

SEQ ID NO: 3509575 - DNA, 25 bp, Homo sapien
tgtgggcgggctgttgtacttcctg

SEQ ID NO: 3509576 - DNA, 25 bp, Homo sapien
gagttctcagacagttgctgggatt

SEQ ID NO: 3509577 - DNA, 25 bp, Homo sapien
ggattttcgtcctgctcttcggctc

SEQ ID NO: 3509578 - DNA, 25 bp, Homo sapien
caaagagtccaaggagttctcagac

SEQ ID NO: 3509579 - DNA, 25 bp, Homo sapien
cctcatatggattctccttgggcag

SEQ ID NO: 3509580 - DNA, 25 bp, Homo sapien
aataaacaagcagaattcctgtgaa

SEQ ID NO: 3509581 - DNA, 25 bp, Homo sapien
aaacaagcagaattcctgtgaacca

SEQ ID NO: 3509582 - DNA, 25 bp, Homo sapien
ggaactcacagaaccgtagggagca

SEQ ID NO: 3509583 - DNA, 25 bp, Homo sapien
gaactcacagaaccgtagggagcag

SEQ ID NO: 3509584 - DNA, 25 bp, Homo sapien
cctcggaacggaacagtgattagca

SEQ ID NO: 3509585 - DNA, 25 bp, Homo sapien
gaagtgttcagtaatgatctgttcg

SEQ ID NO: 3509586 - DNA, 25 bp, Homo sapien
gatgccgttcaacaagtcttttagg

SEQ ID NO: 3509587 - DNA, 25 bp, Homo sapien
tgttcactgaggcaacctcggaacg

SEQ ID NO: 3509588 - DNA, 25 bp, Homo sapien
gagaaccatcaacactccccttttg

SEQ ID NO: 3509589 - DNA, 25 bp, Homo sapien
ggaacaaactctcctgctgtgacac

SEQ ID NO: 3509590 - DNA, 25 bp, Homo sapien
gaggggagttcttgcttctcaggac

SEQ ID NO: 3509591 - DNA, 25 bp, Homo sapien
tcaggactagttctaaaatctctgg

SEQ ID NO: 3509592 - DNA, 25 bp, Homo sapien
agtcctagctcaatcctggtggcag

SEQ ID NO: 3509593 - DNA, 25 bp, Homo sapien
cagcaggattgagcctgggtgccac

SEQ ID NO: 3509594 - DNA, 25 bp, Homo sapien
gagtcccacacttgttctacagatg

SEQ ID NO: 3509595 - DNA, 25 bp, Homo sapien
aaaatagagtaacaccatgggccgg

SEQ ID NO: 3509596 - DNA, 25 bp, Homo sapien
cctgtggggatacgttcttggatca

SEQ ID NO: 3509597 - DNA, 25 bp, Homo sapien
gggatacgttcttggatcatctgaa

SEQ ID NO: 3509598 - DNA, 25 bp, Homo sapien
ggctgtgtttttctgatgtcccttg

SEQ ID NO: 3509599 - DNA, 25 bp, Homo sapien
gatgtcccttgactatgctgggtgc

SEQ ID NO: 3509600 - DNA, 25 bp, Homo sapien
gatttcagttcattcaagagccagg

SEQ ID NO: 3509601 - DNA, 25 bp, Homo sapien
taagtgatttgccttaagggcacac

SEQ ID NO: 3509602 - DNA, 25 bp, Homo sapien
gaagagggcctgttggacttcaaag

SEQ ID NO: 3509603 - DNA, 25 bp, Homo sapien
catgcccggctcgaaatattattac

SEQ ID NO: 3509604 - DNA, 25 bp, Homo sapien
tctaagctaaggtgcttcccctgat

SEQ ID NO: 3509605 - DNA, 25 bp, Homo sapien
tcacaaagccactctgtctaagcta

SEQ ID NO: 3509606 - DNA, 25 bp, Homo sapien
tctgtctaagctaaggtgcttcccc

SEQ ID NO: 3509607 - DNA, 25 bp, Homo sapien
ccaggaggagttccagaaggtggga

SEQ ID NO: 3509608 - DNA, 25 bp, Homo sapien
ttctcagtaccattctcagtgggag

SEQ ID NO: 3509609 - DNA, 25 bp, Homo sapien
tgcttttggatccaaacttgggttg

SEQ ID NO: 3509610 - DNA, 25 bp, Homo sapien
tctaaagtgcttttggatccaaact

SEQ ID NO: 3509611 - DNA, 25 bp, Homo sapien
tgggttggttctcagtaccattctc

SEQ ID NO: 3509612 - DNA, 25 bp, Homo sapien
cctgctgaatcagatctctgctgcc

SEQ ID NO: 3509613 - DNA, 25 bp, Homo sapien
ggataacaagagcaagagtcattcc

SEQ ID NO: 3509614 - DNA, 25 bp, Homo sapien
caagagtcattcctgctgaatcaga

SEQ ID NO: 3509615 - DNA, 25 bp, Homo sapien
cattcctgctgaatcagatctctgc

SEQ ID NO: 3509616 - DNA, 25 bp, Homo sapien
ctggggaatgtccatggcaacagca

SEQ ID NO: 3509617 - DNA, 25 bp, Homo sapien
agaccataggccctccttacaaagg

SEQ ID NO: 3509618 - DNA, 25 bp, Homo sapien
ggggaatgtccatggcaacagcaaa

SEQ ID NO: 3509619 - DNA, 25 bp, Homo sapien
taggccctccttacaaaggcagctt

SEQ ID NO: 3509620 - DNA, 25 bp, Homo sapien
agccagtgagcattctggggtggac

SEQ ID NO: 3509621 - DNA, 25 bp, Homo sapien
ccagtgagcattctggggtggactc

SEQ ID NO: 3509622 - DNA, 25 bp, Homo sapien
agtgagcattctggggtggactcaa

SEQ ID NO: 3509623 - DNA, 25 bp, Homo sapien
agagccagtgagcattctggggtgg

SEQ ID NO: 3509624 - DNA, 25 bp, Homo sapien
cttagccacgggctgttccggctcg

SEQ ID NO: 3509625 - DNA, 25 bp, Homo sapien
gctcgggggtctgaatctttgaaat

SEQ ID NO: 3509626 - DNA, 25 bp, Homo sapien
ttagccacgggctgttccggctcgg

SEQ ID NO: 3509627 - DNA, 25 bp, Homo sapien
tccggctcgggggtctgaatctttg

SEQ ID NO: 3509628 - DNA, 25 bp, Homo sapien
caggaaaccaacgtgagcctcggaa

SEQ ID NO: 3509629 - DNA, 25 bp, Homo sapien
tcttcccaataatcccctcttgata

SEQ ID NO: 3509630 - DNA, 25 bp, Homo sapien
gcccagggttcgtatatggccagga

SEQ ID NO: 3509631 - DNA, 25 bp, Homo sapien
gagcctcggaacaggctcattcctg

SEQ ID NO: 3509632 - DNA, 25 bp, Homo sapien
ctgggacttgcggtgaccacgcatg

SEQ ID NO: 3509633 - DNA, 25 bp, Homo sapien
cctcgtattcaaaggtgcgcttggg

SEQ ID NO: 3509634 - DNA, 25 bp, Homo sapien
tgtccttcttgggtctccgggtgac

SEQ ID NO: 3509635 - DNA, 25 bp, Homo sapien
tgaaggaggtagaccattactgggc

SEQ ID NO: 3509636 - DNA, 25 bp, Homo sapien
gaacactcggagaaggtcctgctca

SEQ ID NO: 3509637 - DNA, 25 bp, Homo sapien
tcacagcgggatcgagggaactctt

SEQ ID NO: 3509638 - DNA, 25 bp, Homo sapien
tctgtccaaataaccgaagctggcg

SEQ ID NO: 3509639 - DNA, 25 bp, Homo sapien
tcagtctctgggtaggaacactcgg

SEQ ID NO: 3509640 - DNA, 25 bp, Homo sapien
cactatcactgagcgggtagatggg

SEQ ID NO: 3509641 - DNA, 25 bp, Homo sapien
ctgcaggctgaggtttcactatcac

SEQ ID NO: 3509642 - DNA, 25 bp, Homo sapien
gtgccggtccttgaggagcacccgg

SEQ ID NO: 3509643 - DNA, 25 bp, Homo sapien
tgaggtttcactatcactgagcggg

SEQ ID NO: 3509644 - DNA, 25 bp, Homo sapien
tcctgttttattcttacagaactca

SEQ ID NO: 3509645 - DNA, 25 bp, Homo sapien
tgttttattcttacagaactcagca

SEQ ID NO: 3509646 - DNA, 25 bp, Homo sapien
caaccagtggcatcctgttttattc

SEQ ID NO: 3509647 - DNA, 25 bp, Homo sapien
gttttattcttacagaactcagcat

SEQ ID NO: 3509648 - DNA, 25 bp, Homo sapien
tggccccatccttagaatgctagac

SEQ ID NO: 3509649 - DNA, 25 bp, Homo sapien
ggttacaagccagaagaacatcagc

SEQ ID NO: 3509650 - DNA, 25 bp, Homo sapien
tgtgcatctgtgagttctggaagct

SEQ ID NO: 3509651 - DNA, 25 bp, Homo sapien
ttatagggcacagggaaacgttctg

SEQ ID NO: 3509652 - DNA, 25 bp, Homo sapien
gctccgtgggtgatgctggaattct

SEQ ID NO: 3509653 - DNA, 25 bp, Homo sapien
gggctttagtgccaccagctccgtg

SEQ ID NO: 3509654 - DNA, 25 bp, Homo sapien
cagagtcccccgaggggctttagtg

SEQ ID NO: 3509655 - DNA, 25 bp, Homo sapien
ggaattcttgttggcagtcatggtc

SEQ ID NO: 3509656 - DNA, 25 bp, Homo sapien
ttcggctctctgcaaacccagagcc

SEQ ID NO: 3509657 - DNA, 25 bp, Homo sapien
ccggtaagccaagtttctataggca

SEQ ID NO: 3509658 - DNA, 25 bp, Homo sapien
caaagacgacaatgccggtaagcca

SEQ ID NO: 3509659 - DNA, 25 bp, Homo sapien
ctgcaaagacgacaatgccggtaag

SEQ ID NO: 3509660 - DNA, 25 bp, Homo sapien
tttctataggcagccaaaagcacct

SEQ ID NO: 3509661 - DNA, 25 bp, Homo sapien
agggttaggaggcacggcattggca

SEQ ID NO: 3509662 - DNA, 25 bp, Homo sapien
aggtaagtgtcgcagctctctagcc

SEQ ID NO: 3509663 - DNA, 25 bp, Homo sapien
tggtccactcggctctaacctgacc

SEQ ID NO: 3509664 - DNA, 25 bp, Homo sapien
tgacctcccaaccagcaggtaagtg

SEQ ID NO: 3509665 - DNA, 25 bp, Homo sapien
ttcctgcacctctcctcatccatgg

SEQ ID NO: 3509666 - DNA, 25 bp, Homo sapien
aactccttcctgcacctctcctcat

SEQ ID NO: 3509667 - DNA, 25 bp, Homo sapien
ctgcacctctcctcatccatgggcc

SEQ ID NO: 3509668 - DNA, 25 bp, Homo sapien
cttcttgccaactccttcctgcacc

SEQ ID NO: 3509669 - DNA, 25 bp, Homo sapien
tgccagatggtccttctccacttca

SEQ ID NO: 3509670 - DNA, 25 bp, Homo sapien
ttcaacctcaaccatttttcaatcc

SEQ ID NO: 3509671 - DNA, 25 bp, Homo sapien
aagtctgctttttcaacctcaacca

SEQ ID NO: 3509672 - DNA, 25 bp, Homo sapien
tcaatcccttttcctgccagatggt

SEQ ID NO: 3509673 - DNA, 25 bp, Homo sapien
agaaaaggacattccacgctatggg

SEQ ID NO: 3509674 - DNA, 25 bp, Homo sapien
gagcaactagagtgctctcagcaga

SEQ ID NO: 3509675 - DNA, 25 bp, Homo sapien
aatctcacactaccagcatgcaggg

SEQ ID NO: 3509676 - DNA, 25 bp, Homo sapien
cagcacaaaagatttcagaggaggc

SEQ ID NO: 3509677 - DNA, 25 bp, Homo sapien
gcaaacgatgcaagtgtgggacaca

SEQ ID NO: 3509678 - DNA, 25 bp, Homo sapien
gggagctcacagacgaatgtagggc

SEQ ID NO: 3509679 - DNA, 25 bp, Homo sapien
caacagcaaacgatgcaagtgtggg

SEQ ID NO: 3509680 - DNA, 25 bp, Homo sapien
tgtggggagctcacagacgaatgta

SEQ ID NO: 3509681 - DNA, 25 bp, Homo sapien
cctctcccttgcatgtcatggaatg

SEQ ID NO: 3509682 - DNA, 25 bp, Homo sapien
tttctgtgctactccaaaatcctct

SEQ ID NO: 3509683 - DNA, 25 bp, Homo sapien
tccaaaatcctctcccttgcatgtc

SEQ ID NO: 3509684 - DNA, 25 bp, Homo sapien
tcccttgcatgtcatggaatgcagc

SEQ ID NO: 3509685 - DNA, 25 bp, Homo sapien
tcacagcaatcacgttaatgaacag

SEQ ID NO: 3509686 - DNA, 25 bp, Homo sapien
tatgttgactgccaaggagaaggcc

SEQ ID NO: 3509687 - DNA, 25 bp, Homo sapien
aaggaggagccacaattcaaaccag

SEQ ID NO: 3509688 - DNA, 25 bp, Homo sapien
taatgaacaggattaggaaggccag

SEQ ID NO: 3509689 - DNA, 25 bp, Homo sapien
ggaagtgaactctaaacatagccta

SEQ ID NO: 3509690 - DNA, 25 bp, Homo sapien
cgtaagcaagtgtgtcggtcagtca

SEQ ID NO: 3509691 - DNA, 25 bp, Homo sapien
cacgtctaacgtccatgggcacaga

SEQ ID NO: 3509692 - DNA, 25 bp, Homo sapien
cacaccagtaaactcagcaggaagt

SEQ ID NO: 3509693 - DNA, 25 bp, Homo sapien
gcagcaatgtccaacagagcacaat

SEQ ID NO: 3509694 - DNA, 25 bp, Homo sapien
gcatttcctctcaagggctcctgct

SEQ ID NO: 3509695 - DNA, 25 bp, Homo sapien
ggttactatgcaaagggatccctca

SEQ ID NO: 3509696 - DNA, 25 bp, Homo sapien
gctaagctttcaaccgattccacag

SEQ ID NO: 3509697 - DNA, 25 bp, Homo sapien
cctgcaaggccatgtagacatctgg

SEQ ID NO: 3509698 - DNA, 25 bp, Homo sapien
tgaaaacccatctgggcacataagc

SEQ ID NO: 3509699 - DNA, 25 bp, Homo sapien
cacataagcagaataggcacctaca

SEQ ID NO: 3509700 - DNA, 25 bp, Homo sapien
tgacagtagaagatggaatcccagg

SEQ ID NO: 3509701 - DNA, 25 bp, Homo sapien
ttaccaaacagttgtgggtcctgca

SEQ ID NO: 3509702 - DNA, 25 bp, Homo sapien
tttaccaaacagttgtgggtcctgc

SEQ ID NO: 3509703 - DNA, 25 bp, Homo sapien
aatgagtacaaagttccacgtgtag

SEQ ID NO: 3509704 - DNA, 25 bp, Homo sapien
acaggtgtgatcattgcgcaggaca

SEQ ID NO: 3509705 - DNA, 25 bp, Homo sapien
caagtcagacctttttgtcctaagg

SEQ ID NO: 3509706 - DNA, 25 bp, Homo sapien
ggcattcctttttgctaagtggcaa

SEQ ID NO: 3509707 - DNA, 25 bp, Homo sapien
ctatatgctgactgggggacgctta

SEQ ID NO: 3509708 - DNA, 25 bp, Homo sapien
gactgggggacgcttatcactgctc

SEQ ID NO: 3509709 - DNA, 25 bp, Homo sapien
gggggacgcttatcactgctctgct

SEQ ID NO: 3509710 - DNA, 25 bp, Homo sapien
tgctgactgggggacgcttatcact

SEQ ID NO: 3509711 - DNA, 25 bp, Homo sapien
tacctggctgggactttctaccgct

SEQ ID NO: 3509712 - DNA, 25 bp, Homo sapien
tgaggcctccttgtactgccctacg

SEQ ID NO: 3509713 - DNA, 25 bp, Homo sapien
cctacgcattggagaacaagcttcc

SEQ ID NO: 3509714 - DNA, 25 bp, Homo sapien
ttacttactaaaggctgaggcctcc

SEQ ID NO: 3509715 - DNA, 25 bp, Homo sapien
cctcttaaaggacactctcaagtac

SEQ ID NO: 3509716 - DNA, 25 bp, Homo sapien
ccttcctcttaaaggacactctcaa

SEQ ID NO: 3509717 - DNA, 25 bp, Homo sapien
ctactccttcctcttaaaggacact

SEQ ID NO: 3509718 - DNA, 25 bp, Homo sapien
tactccttcctcttaaaggacactc

SEQ ID NO: 3509719 - DNA, 25 bp, Homo sapien
ttccaaagcaattgtctttctctcc

SEQ ID NO: 3509720 - DNA, 25 bp, Homo sapien
tgaaagggcagtcctccttggctgc

SEQ ID NO: 3509721 - DNA, 25 bp, Homo sapien
cttcctaacgtgtaggccaggtctg

SEQ ID NO: 3509722 - DNA, 25 bp, Homo sapien
gccaggtctgaaagggcagtcctcc

SEQ ID NO: 3509723 - DNA, 25 bp, Homo sapien
gagctgtctgtcaagtggcaggaac

SEQ ID NO: 3509724 - DNA, 25 bp, Homo sapien
aacacaagcagctttgagaggtggg

SEQ ID NO: 3509725 - DNA, 25 bp, Homo sapien
tctttgatcattctgcctgatgcag

SEQ ID NO: 3509726 - DNA, 25 bp, Homo sapien
cctgatgcagcagccataagacatg

SEQ ID NO: 3509727 - DNA, 25 bp, Homo sapien
tcttccttcattcgaatcgtgcttg

SEQ ID NO: 3509728 - DNA, 25 bp, Homo sapien
cttccagtccttcagttggctctct

SEQ ID NO: 3509729 - DNA, 25 bp, Homo sapien
cagtccttcagttggctctcttcct

SEQ ID NO: 3509730 - DNA, 25 bp, Homo sapien
cttgaaatcagtctgttggaccctc

SEQ ID NO: 3509731 - DNA, 25 bp, Homo sapien
catggtccctccaactcaaagaact

SEQ ID NO: 3509732 - DNA, 25 bp, Homo sapien
tttttcgctctatgccctcctggcc

SEQ ID NO: 3509733 - DNA, 25 bp, Homo sapien
aagaactcaattatctgcctgcaga

SEQ ID NO: 3509734 - DNA, 25 bp, Homo sapien
tcctcgcagcctgccctaaacacac

SEQ ID NO: 3509735 - DNA, 25 bp, Homo sapien
ttggctgcctcggccgactctctta

SEQ ID NO: 3509736 - DNA, 25 bp, Homo sapien
cagcctcaactatgtgttccccggg

SEQ ID NO: 3509737 - DNA, 25 bp, Homo sapien
tcaactatgtgttccccgggcttgg

SEQ ID NO: 3509738 - DNA, 25 bp, Homo sapien
tctcttaggcccaacgatggaaatg

SEQ ID NO: 3509739 - DNA, 25 bp, Homo sapien
ctcttaggtctaggctaccagtggg

SEQ ID NO: 3509740 - DNA, 25 bp, Homo sapien
catgatacttggattgccctcctga

SEQ ID NO: 3509741 - DNA, 25 bp, Homo sapien
cagttcttagaatcagatgcggtgg

SEQ ID NO: 3509742 - DNA, 25 bp, Homo sapien
ggacctcccgtaatgcagttcttag

SEQ ID NO: 3509743 - DNA, 25 bp, Homo sapien
tactatgggtctgctcaagggcttc

SEQ ID NO: 3509744 - DNA, 25 bp, Homo sapien
tagttaagatacttgcccgtggccg

SEQ ID NO: 3509745 - DNA, 25 bp, Homo sapien
ttcactaggacgaacaagcggctca

SEQ ID NO: 3509746 - DNA, 25 bp, Homo sapien
tttcaactaagcaaaggatccctgg

SEQ ID NO: 3509747 - DNA, 25 bp, Homo sapien
taagctccgatacctgctgcgagct

SEQ ID NO: 3509748 - DNA, 25 bp, Homo sapien
tggcgctcctcgcagccaagtgagc

SEQ ID NO: 3509749 - DNA, 25 bp, Homo sapien
caaatccactggcttaagctccgat

SEQ ID NO: 3509750 - DNA, 25 bp, Homo sapien
attctcacaccgcagccggctaggg

SEQ ID NO: 3509751 - DNA, 25 bp, Homo sapien
ccggttgtcatggagaccctgtcct

SEQ ID NO: 3509752 - DNA, 25 bp, Homo sapien
ggccggttgtcatggagaccctgtc

SEQ ID NO: 3509753 - DNA, 25 bp, Homo sapien
ggttgtcatggagaccctgtcctcg

SEQ ID NO: 3509754 - DNA, 25 bp, Homo sapien
ctagccggccaggccggttgtcatg

SEQ ID NO: 3509755 - DNA, 25 bp, Homo sapien
tgatcagctcggtttttgcatgcat

SEQ ID NO: 3509756 - DNA, 25 bp, Homo sapien
ttctgggaggcttccatgaaacagc

SEQ ID NO: 3509757 - DNA, 25 bp, Homo sapien
gaaacagcactgtcttttgatcagc

SEQ ID NO: 3509758 - DNA, 25 bp, Homo sapien
tagcgcgtgcacaagggcgctctct

SEQ ID NO: 3509759 - DNA, 25 bp, Homo sapien
tccagtccaacaggggctctgaact

SEQ ID NO: 3509760 - DNA, 25 bp, Homo sapien
gaagacagtgagtggacttgttttc

SEQ ID NO: 3509761 - DNA, 25 bp, Homo sapien
gacagtgagtggacttgttttcttc

SEQ ID NO: 3509762 - DNA, 25 bp, Homo sapien
tgggaacttgcttgaacagctcaga

SEQ ID NO: 3509763 - DNA, 25 bp, Homo sapien
gaccctgatgcgctgccttgacttg

SEQ ID NO: 3509764 - DNA, 25 bp, Homo sapien
ccttgacttgtttgtgcacttggga

SEQ ID NO: 3509765 - DNA, 25 bp, Homo sapien
cacttgggatttttccgggcagcag

SEQ ID NO: 3509766 - DNA, 25 bp, Homo sapien
gggcggaaatgcactcacatcccag

SEQ ID NO: 3509767 - DNA, 25 bp, Homo sapien
gactcatggtactagtggtggcgcc

SEQ ID NO: 3509768 - DNA, 25 bp, Homo sapien
ctgtccaggttgtggcgatggcttt

SEQ ID NO: 3509769 - DNA, 25 bp, Homo sapien
tggcgcctaagcagtctctcatctt

SEQ ID NO: 3509770 - DNA, 25 bp, Homo sapien
gctttaaccagtgcagggactcatg

SEQ ID NO: 3509771 - DNA, 25 bp, Homo sapien
gatctgcagctaaggtgcaggctta

SEQ ID NO: 3509772 - DNA, 25 bp, Homo sapien
gggagctgctgtcacagtcggtaat

SEQ ID NO: 3509773 - DNA, 25 bp, Homo sapien
caaatacagccttgtctctctgccc

SEQ ID NO: 3509774 - DNA, 25 bp, Homo sapien
tattgctcctgtcagaaaatgagca

SEQ ID NO: 3509775 - DNA, 25 bp, Homo sapien
tccagatactcacaacataggtact

SEQ ID NO: 3509776 - DNA, 25 bp, Homo sapien
agccctagttcacctccgctcagct

SEQ ID NO: 3509777 - DNA, 25 bp, Homo sapien
ctccgtataaagctcaatgtccaga

SEQ ID NO: 3509778 - DNA, 25 bp, Homo sapien
cacaacataggtactcacagcttgc

SEQ ID NO: 3509779 - DNA, 25 bp, Homo sapien
caggctgccactccaatgccagcca

SEQ ID NO: 3509780 - DNA, 25 bp, Homo sapien
agaacaggctgccactccaatgcca

SEQ ID NO: 3509781 - DNA, 25 bp, Homo sapien
ccccagtactcctcagaacaggctg

SEQ ID NO: 3509782 - DNA, 25 bp, Homo sapien
cagtactcctcagaacaggctgcca

SEQ ID NO: 3509783 - DNA, 25 bp, Homo sapien
cacccagcatcttataatcaaatca

SEQ ID NO: 3509784 - DNA, 25 bp, Homo sapien
acaaccttaccagcacctatacttt

SEQ ID NO: 3509785 - DNA, 25 bp, Homo sapien
taccagcacctatacttttttggct

SEQ ID NO: 3509786 - DNA, 25 bp, Homo sapien
ccttaccagcacctatacttttttg

SEQ ID NO: 3509787 - DNA, 25 bp, Homo sapien
cccgagcagataaaggaagtcaacg

SEQ ID NO: 3509788 - DNA, 25 bp, Homo sapien
gatgaggcttgactctctctgcgtg

SEQ ID NO: 3509789 - DNA, 25 bp, Homo sapien
tgcgtgctcccaagacagttaccaa

SEQ ID NO: 3509790 - DNA, 25 bp, Homo sapien
gatgctagctcatctcaaacccgag

SEQ ID NO: 3509791 - DNA, 25 bp, Homo sapien
tgatccgcccgtgtgatagcaacag

SEQ ID NO: 3509792 - DNA, 25 bp, Homo sapien
tatttgcatcacaatgtcagtggag

SEQ ID NO: 3509793 - DNA, 25 bp, Homo sapien
cattgccttactgcctgatggtgga

SEQ ID NO: 3509794 - DNA, 25 bp, Homo sapien
aaaattcagcgagggctgcattgcc

SEQ ID NO: 3509795 - DNA, 25 bp, Homo sapien
agtggggtggcttgctcccgtaatc

SEQ ID NO: 3509796 - DNA, 25 bp, Homo sapien
gctgcacacagtggggtggcttgct

SEQ ID NO: 3509797 - DNA, 25 bp, Homo sapien
tggggtggcttgctcccgtaatccc

SEQ ID NO: 3509798 - DNA, 25 bp, Homo sapien
acagtggggtggcttgctcccgtaa

SEQ ID NO: 3509799 - DNA, 25 bp, Homo sapien
cctttttcaggcagtcgccctttat

SEQ ID NO: 3509800 - DNA, 25 bp, Homo sapien
cgccctttataggttgaagacagtt

SEQ ID NO: 3509801 - DNA, 25 bp, Homo sapien
tctcttctagagcaacttcaccagc

SEQ ID NO: 3509802 - DNA, 25 bp, Homo sapien
cagagggtgaacagactgtgttttc

SEQ ID NO: 3509803 - DNA, 25 bp, Homo sapien
gaattatccaagaaagaaactctcc

SEQ ID NO: 3509804 - DNA, 25 bp, Homo sapien
tatccaagaaagaaactctccaaag

SEQ ID NO: 3509805 - DNA, 25 bp, Homo sapien
gaaagaaactctccaaagggtgtga

SEQ ID NO: 3509806 - DNA, 25 bp, Homo sapien
caagaaagaaactctccaaagggtg

SEQ ID NO: 3509807 - DNA, 25 bp, Homo sapien
tggtgacattggaaggaagatcccc

SEQ ID NO: 3509808 - DNA, 25 bp, Homo sapien
ctgggcagacactccaagagaaggc

SEQ ID NO: 3509809 - DNA, 25 bp, Homo sapien
agtatcatccgaaccaaagcagcgc

SEQ ID NO: 3509810 - DNA, 25 bp, Homo sapien
cagggcgctatctatccttggaaga

SEQ ID NO: 3509811 - DNA, 25 bp, Homo sapien
agaaaataacgctgacccaccagga

SEQ ID NO: 3509812 - DNA, 25 bp, Homo sapien
gcaatctcaacctcgggtgatcacc

SEQ ID NO: 3509813 - DNA, 25 bp, Homo sapien
gtttccacagaactatctggtcttc

SEQ ID NO: 3509814 - DNA, 25 bp, Homo sapien
tcccacacgcctagcctgggtgata

SEQ ID NO: 3509815 - DNA, 25 bp, Homo sapien
caaaactaggttcaagagcattctc

SEQ ID NO: 3509816 - DNA, 25 bp, Homo sapien
tctggaggaatgaccacataaccta

SEQ ID NO: 3509817 - DNA, 25 bp, Homo sapien
taacctataaccagaggctacagag

SEQ ID NO: 3509818 - DNA, 25 bp, Homo sapien
tcccgggaagacataccaaatgatc

SEQ ID NO: 3509819 - DNA, 25 bp, Homo sapien
cccatgtagaggtcctggtgataat

SEQ ID NO: 3509820 - DNA, 25 bp, Homo sapien
ggtcacattcctcagaggtccaaaa

SEQ ID NO: 3509821 - DNA, 25 bp, Homo sapien
aaaacccaaactgagtcatatcctg

SEQ ID NO: 3509822 - DNA, 25 bp, Homo sapien
gataatttcacctatcaaaacccca

SEQ ID NO: 3509823 - DNA, 25 bp, Homo sapien
tccagagcactagcaagttcagagg

SEQ ID NO: 3509824 - DNA, 25 bp, Homo sapien
gaaacggcgtacaggttgcacaaga

SEQ ID NO: 3509825 - DNA, 25 bp, Homo sapien
ccagattgtattcaaagcggcagac

SEQ ID NO: 3509826 - DNA, 25 bp, Homo sapien
tatttgacaaaaaaccatgggtgac

SEQ ID NO: 3509827 - DNA, 25 bp, Homo sapien
tacaacattgatctacctctcaggg

SEQ ID NO: 3509828 - DNA, 25 bp, Homo sapien
tgaaccaagctactcgctgcagggt

SEQ ID NO: 3509829 - DNA, 25 bp, Homo sapien
gacaggaattgaaacacccagatat

SEQ ID NO: 3509830 - DNA, 25 bp, Homo sapien
cagcgtatgcctggtaagattcagc

SEQ ID NO: 3509831 - DNA, 25 bp, Homo sapien
atacctatgtcacaacactgaagga

SEQ ID NO: 3509832 - DNA, 25 bp, Homo sapien
atcccaagccagttacgtatctttt

SEQ ID NO: 3509833 - DNA, 25 bp, Homo sapien
ccagttacgtatctttttgatcttg

SEQ ID NO: 3509834 - DNA, 25 bp, Homo sapien
tatgtcacaacactgaaggatgaaa

SEQ ID NO: 3509835 - DNA, 25 bp, Homo sapien
ttttctctctaggtccagtccaaat

SEQ ID NO: 3509836 - DNA, 25 bp, Homo sapien
tcttctatgaaaccgccctgcctca

SEQ ID NO: 3509837 - DNA, 25 bp, Homo sapien
tctctaggtccagtccaaatggtct

SEQ ID NO: 3509838 - DNA, 25 bp, Homo sapien
gcttcaaggctctcccctcttctat

SEQ ID NO: 3509839 - DNA, 25 bp, Homo sapien
gattggacattcctgttctaagcca

SEQ ID NO: 3509840 - DNA, 25 bp, Homo sapien
gtgtattttacatgcggccccaggc

SEQ ID NO: 3509841 - DNA, 25 bp, Homo sapien
caaactcaagaccaaggatttccct

SEQ ID NO: 3509842 - DNA, 25 bp, Homo sapien
aggacggctctgagtgtggcccaac

SEQ ID NO: 3509843 - DNA, 25 bp, Homo sapien
ggcgcggcgcctggatggggtctcg

SEQ ID NO: 3509844 - DNA, 25 bp, Homo sapien
gggcgcggcgcctggatggggtctc

SEQ ID NO: 3509845 - DNA, 25 bp, Homo sapien
gggtctcgccgggagccgcgcggcc

SEQ ID NO: 3509846 - DNA, 25 bp, Homo sapien
gatggggtctcgccgggagccgcgc

SEQ ID NO: 3509847 - DNA, 25 bp, Homo sapien
gccgcgccgagagtgtgcgagggag

SEQ ID NO: 3509848 - DNA, 25 bp, Homo sapien
gagggagcgcagatttgagtggagg

SEQ ID NO: 3509849 - DNA, 25 bp, Homo sapien
cggaggcagcgagaaagccgcgccg

SEQ ID NO: 3509850 - DNA, 25 bp, Homo sapien
cgcctccacccaagacagagagggt

SEQ ID NO: 3509851 - DNA, 25 bp, Homo sapien
tcctcaccatccgaccaagagttgt

SEQ ID NO: 3509852 - DNA, 25 bp, Homo sapien
ctcctcaccatccgaccaagagttg

SEQ ID NO: 3509853 - DNA, 25 bp, Homo sapien
cctcaccatccgaccaagagttgtc

SEQ ID NO: 3509854 - DNA, 25 bp, Homo sapien
ctctctgagctctgtaaggaggttc

SEQ ID NO: 3509855 - DNA, 25 bp, Homo sapien
agtctcccactttcaaaactattag

SEQ ID NO: 3509856 - DNA, 25 bp, Homo sapien
caaaactattagaacctctactact

SEQ ID NO: 3509857 - DNA, 25 bp, Homo sapien
tgtaaggaggttcttaagtctccca

SEQ ID NO: 3509858 - DNA, 25 bp, Homo sapien
aaacatcactgcacttgaaccagcc

SEQ ID NO: 3509859 - DNA, 25 bp, Homo sapien
aaatgaagcagtgggagcagagaag

SEQ ID NO: 3509860 - DNA, 25 bp, Homo sapien
gtaaacatcactgcacttgaaccag

SEQ ID NO: 3509861 - DNA, 25 bp, Homo sapien
taaacactagtcaaatgaagcagtg

SEQ ID NO: 3509862 - DNA, 25 bp, Homo sapien
tcatttttgtgagtatctcctccag

SEQ ID NO: 3509863 - DNA, 25 bp, Homo sapien
tgtttccttcatctcatgtcttcct

SEQ ID NO: 3509864 - DNA, 25 bp, Homo sapien
atttttgtgagtatctcctccagtg

SEQ ID NO: 3509865 - DNA, 25 bp, Homo sapien
tccttcatctcatgtcttcctgttt

SEQ ID NO: 3509866 - DNA, 25 bp, Homo sapien
taaatcagtggtctgtccgtcactt

SEQ ID NO: 3509867 - DNA, 25 bp, Homo sapien
caattaaatcagtggtctgtccgtc

SEQ ID NO: 3509868 - DNA, 25 bp, Homo sapien
ttatgacaattaaatcagtggtctg

SEQ ID NO: 3509869 - DNA, 25 bp, Homo sapien
ggtctgtccgtcacttttaacatac

SEQ ID NO: 3509870 - DNA, 25 bp, Homo sapien
tttcatttggcgtgggctatatttg

SEQ ID NO: 3509871 - DNA, 25 bp, Homo sapien
gtgggctatatttgatccacaaggg

SEQ ID NO: 3509872 - DNA, 25 bp, Homo sapien
tgttctatcattattcccagccaat

SEQ ID NO: 3509873 - DNA, 25 bp, Homo sapien
gggcctgatggtaggtcatgttcta

SEQ ID NO: 3509874 - DNA, 25 bp, Homo sapien
ctgacagcgtggacagatgccctgg

SEQ ID NO: 3509875 - DNA, 25 bp, Homo sapien
agttaagcagcgcagtagccctcta

SEQ ID NO: 3509876 - DNA, 25 bp, Homo sapien
agcgcagtagccctctaagggccag

SEQ ID NO: 3509877 - DNA, 25 bp, Homo sapien
gcccagaggctcctctgacagcgtg

SEQ ID NO: 3509878 - DNA, 25 bp, Homo sapien
aggagggcggtggactggcatgccc

SEQ ID NO: 3509879 - DNA, 25 bp, Homo sapien
ctggagcgtcccaaaggctgcatgg

SEQ ID NO: 3509880 - DNA, 25 bp, Homo sapien
ggagaggtgagggtcgctgtgccgg

SEQ ID NO: 3509881 - DNA, 25 bp, Homo sapien
acctagagaaacagccggcagccgg

SEQ ID NO: 3509882 - DNA, 25 bp, Homo sapien
tatttgactgttacctgtggcctgt

SEQ ID NO: 3509883 - DNA, 25 bp, Homo sapien
catgtacaactaggctttatgggaa

SEQ ID NO: 3509884 - DNA, 25 bp, Homo sapien
ttcctatagccctcacaacaggtgc

SEQ ID NO: 3509885 - DNA, 25 bp, Homo sapien
gccactctgtataactctcctcgaa

SEQ ID NO: 3509886 - DNA, 25 bp, Homo sapien
catacattgttatgctgactgcaat

SEQ ID NO: 3509887 - DNA, 25 bp, Homo sapien
tacattgttatgctgactgcaattt

SEQ ID NO: 3509888 - DNA, 25 bp, Homo sapien
tccatacattgttatgctgactgca

SEQ ID NO: 3509889 - DNA, 25 bp, Homo sapien
attccatacattgttatgctgactg

SEQ ID NO: 3509890 - DNA, 25 bp, Homo sapien
tgtgggttgctttcgagaccagctc

SEQ ID NO: 3509891 - DNA, 25 bp, Homo sapien
tagtccccactactgcagtttgtgc

SEQ ID NO: 3509892 - DNA, 25 bp, Homo sapien
tattgcaaggctctgactccgcttt

SEQ ID NO: 3509893 - DNA, 25 bp, Homo sapien
ctaacgggaattcttgttccactga

SEQ ID NO: 3509894 - DNA, 25 bp, Homo sapien
ggatctaattggaacctctcactgc

SEQ ID NO: 3509895 - DNA, 25 bp, Homo sapien
caatacaaagtttcctcctggagag

SEQ ID NO: 3509896 - DNA, 25 bp, Homo sapien
gtgtagtggcttaccctgcctccca

SEQ ID NO: 3509897 - DNA, 25 bp, Homo sapien
tgccattgcaagattggagtaaccc

SEQ ID NO: 3509898 - DNA, 25 bp, Homo sapien
cagcgaaatcgccacttctgagtgg

SEQ ID NO: 3509899 - DNA, 25 bp, Homo sapien
caagggccagacttttccaggccac

SEQ ID NO: 3509900 - DNA, 25 bp, Homo sapien
tcaagggccagacttttccaggcca

SEQ ID NO: 3509901 - DNA, 25 bp, Homo sapien
ttctcagctggaggcgatgcagtgt

SEQ ID NO: 3509902 - DNA, 25 bp, Homo sapien
agaagcacatcgcagtgcccgggtc

SEQ ID NO: 3509903 - DNA, 25 bp, Homo sapien
tggccatgagggataagaagcacat

SEQ ID NO: 3509904 - DNA, 25 bp, Homo sapien
gaatttagataggatgggctccccg

SEQ ID NO: 3509905 - DNA, 25 bp, Homo sapien
gcatggctcaggcccgtttctcttc

SEQ ID NO: 3509906 - DNA, 25 bp, Homo sapien
ctggcttcccaaggcatggctcagg

SEQ ID NO: 3509907 - DNA, 25 bp, Homo sapien
caaggcatggctcaggcccgtttct

SEQ ID NO: 3509908 - DNA, 25 bp, Homo sapien
gctcaggcccgtttctcttccaata

SEQ ID NO: 3509909 - DNA, 25 bp, Homo sapien
cagtgattggccctagcagagagca

SEQ ID NO: 3509910 - DNA, 25 bp, Homo sapien
tctgaggtcctggttagaggccacc

SEQ ID NO: 3509911 - DNA, 25 bp, Homo sapien
ggtgctccctggtgaaagacttgtg

SEQ ID NO: 3509912 - DNA, 25 bp, Homo sapien
gaagctcattagtgatgcgcccagt

SEQ ID NO: 3509913 - DNA, 25 bp, Homo sapien
tctggctgcgtggctcctcacatgc

SEQ ID NO: 3509914 - DNA, 25 bp, Homo sapien
tcttgtcaaaaccaaaatgcattct

SEQ ID NO: 3509915 - DNA, 25 bp, Homo sapien
tccgaagtagcttccacgtcctaat

SEQ ID NO: 3509916 - DNA, 25 bp, Homo sapien
taatcatgggataaagcctctccta

SEQ ID NO: 3509917 - DNA, 25 bp, Homo sapien
agtgccagggccatactgctgttgg

SEQ ID NO: 3509918 - DNA, 25 bp, Homo sapien
tcttctaagaccactctctgctgct

SEQ ID NO: 3509919 - DNA, 25 bp, Homo sapien
caccttatcccctggtctcagtgag

SEQ ID NO: 3509920 - DNA, 25 bp, Homo sapien
tcagtgagtatcctacagatggtga

SEQ ID NO: 3509921 - DNA, 25 bp, Homo sapien
gaggagcctcgaattccacaagcag

SEQ ID NO: 3509922 - DNA, 25 bp, Homo sapien
gacaagaggagcctcgaattccaca

SEQ ID NO: 3509923 - DNA, 25 bp, Homo sapien
aagaggagcctcgaattccacaagc

SEQ ID NO: 3509924 - DNA, 25 bp, Homo sapien
ctgcgacaagaggagcctcgaattc

SEQ ID NO: 3509925 - DNA, 25 bp, Homo sapien
gtcctccctggaccttttctcaatg

SEQ ID NO: 3509926 - DNA, 25 bp, Homo sapien
cctccctggaccttttctcaatgca

SEQ ID NO: 3509927 - DNA, 25 bp, Homo sapien
tcctccctggaccttttctcaatgc

SEQ ID NO: 3509928 - DNA, 25 bp, Homo sapien
tgcttatgcaagaaaccagcctgct

SEQ ID NO: 3509929 - DNA, 25 bp, Homo sapien
catggccatgggagagctgtgctta

SEQ ID NO: 3509930 - DNA, 25 bp, Homo sapien
tgccagcaagccatgagaagccaga

SEQ ID NO: 3509931 - DNA, 25 bp, Homo sapien
tgttgcactttgttagggagcccta

SEQ ID NO: 3509932 - DNA, 25 bp, Homo sapien
ccctgccatgctgggtcggcaacgt

SEQ ID NO: 3509933 - DNA, 25 bp, Homo sapien
tgggtcggcaacgtggagacatggg

SEQ ID NO: 3509934 - DNA, 25 bp, Homo sapien
gtcggcaacgtggagacatgggcaa

SEQ ID NO: 3509935 - DNA, 25 bp, Homo sapien
atgctgggtcggcaacgtggagaca

SEQ ID NO: 3509936 - DNA, 25 bp, Homo sapien
caaggggcttgtgcccggtgagcca

SEQ ID NO: 3509937 - DNA, 25 bp, Homo sapien
cggtgagccagggtgcttggagggc

SEQ ID NO: 3509938 - DNA, 25 bp, Homo sapien
ggcttgtgcccggtgagccagggtg

SEQ ID NO: 3509939 - DNA, 25 bp, Homo sapien
tgcccggtgagccagggtgcttgga

SEQ ID NO: 3509940 - DNA, 25 bp, Homo sapien
gggccttcaggcttgtggccacgct

SEQ ID NO: 3509941 - DNA, 25 bp, Homo sapien
tacaaggctagttctggcctcaggc

SEQ ID NO: 3509942 - DNA, 25 bp, Homo sapien
tgtgagtttagagcagcccagcttt

SEQ ID NO: 3509943 - DNA, 25 bp, Homo sapien
tggaaagcacctggcgtattcagca

SEQ ID NO: 3509944 - DNA, 25 bp, Homo sapien
tgggaacctccactcaggaaacagg

SEQ ID NO: 3509945 - DNA, 25 bp, Homo sapien
tccttctgacagttggggctcaggg

SEQ ID NO: 3509946 - DNA, 25 bp, Homo sapien
ccttctgacagttggggctcagggt

SEQ ID NO: 3509947 - DNA, 25 bp, Homo sapien
cttctgacagttggggctcagggtc

SEQ ID NO: 3509948 - DNA, 25 bp, Homo sapien
ttctgacagttggggctcagggtct

SEQ ID NO: 3509949 - DNA, 25 bp, Homo sapien
cgtctgtggccagtgagtgcaccga

SEQ ID NO: 3509950 - DNA, 25 bp, Homo sapien
ccagtgagtgcaccgagcatgcgga

SEQ ID NO: 3509951 - DNA, 25 bp, Homo sapien
gtcgtctgtggccagtgagtgcacc

SEQ ID NO: 3509952 - DNA, 25 bp, Homo sapien
tgtggccagtgagtgcaccgagcat

SEQ ID NO: 3509953 - DNA, 25 bp, Homo sapien
gaggcatcatcgctaatcccatcag

SEQ ID NO: 3509954 - DNA, 25 bp, Homo sapien
tgttgagaacgcatcccaagaggcc

SEQ ID NO: 3509955 - DNA, 25 bp, Homo sapien
catataggaaaaggccaaaactcgg

SEQ ID NO: 3509956 - DNA, 25 bp, Homo sapien
tttctgaagagcgaaagagctgcct

SEQ ID NO: 3509957 - DNA, 25 bp, Homo sapien
ggaaaaactattgaatgatgccgta

SEQ ID NO: 3509958 - DNA, 25 bp, Homo sapien
tcctgcccacatggaaattacattt

SEQ ID NO: 3509959 - DNA, 25 bp, Homo sapien
ttgaatgatgccgtaagagacccca

SEQ ID NO: 3509960 - DNA, 25 bp, Homo sapien
gatgccgtaagagaccccattttgt

SEQ ID NO: 3509961 - DNA, 25 bp, Homo sapien
gttgctatcatggaggaaacttttc

SEQ ID NO: 3509962 - DNA, 25 bp, Homo sapien
ggttgctatcatggaggaaactttt

SEQ ID NO: 3509963 - DNA, 25 bp, Homo sapien
ggtggttgctatcatggaggaaact

SEQ ID NO: 3509964 - DNA, 25 bp, Homo sapien
tggttgctatcatggaggaaacttt

SEQ ID NO: 3509965 - DNA, 25 bp, Homo sapien
agaagagactgcaggtagttaatgt

SEQ ID NO: 3509966 - DNA, 25 bp, Homo sapien
gaagagactgcaggtagttaatgta

SEQ ID NO: 3509967 - DNA, 25 bp, Homo sapien
aagagactgcaggtagttaatgtac

SEQ ID NO: 3509968 - DNA, 25 bp, Homo sapien
cacgtggaaagtgaccatgggctcc

SEQ ID NO: 3509969 - DNA, 25 bp, Homo sapien
gatcgcagctctgagggtttccact

SEQ ID NO: 3509970 - DNA, 25 bp, Homo sapien
gagctgggcgtagccttcattgaca

SEQ ID NO: 3509971 - DNA, 25 bp, Homo sapien
caagcgggcagaatcagggaagata

SEQ ID NO: 3509972 - DNA, 25 bp, Homo sapien
tgagttttgtcgtcaggatgctgta

SEQ ID NO: 3509973 - DNA, 25 bp, Homo sapien
agttttgtcgtcaggatgctgtatt

SEQ ID NO: 3509974 - DNA, 25 bp, Homo sapien
ctgagttttgtcgtcaggatgctgt

SEQ ID NO: 3509975 - DNA, 25 bp, Homo sapien
gagttttgtcgtcaggatgctgtat

SEQ ID NO: 3509976 - DNA, 25 bp, Homo sapien
cattatacagcaaaagagggaggag

SEQ ID NO: 3509977 - DNA, 25 bp, Homo sapien
tatcttcaatctcattatacagcaa

SEQ ID NO: 3509978 - DNA, 25 bp, Homo sapien
taggagacatagatagatacactga

SEQ ID NO: 3509979 - DNA, 25 bp, Homo sapien
tcaccacgaccggaaatgctgacaa

SEQ ID NO: 3509980 - DNA, 25 bp, Homo sapien
tgcacacattggagctcaaacagct

SEQ ID NO: 3509981 - DNA, 25 bp, Homo sapien
caataatggttagacctttcagaag

SEQ ID NO: 3509982 - DNA, 25 bp, Homo sapien
agccctagttcaaagctgcacacat

SEQ ID NO: 3509983 - DNA, 25 bp, Homo sapien
gaagatgagtaagaccacacacacc

SEQ ID NO: 3509984 - DNA, 25 bp, Homo sapien
tgaagtgcagacacagcagataccc

SEQ ID NO: 3509985 - DNA, 25 bp, Homo sapien
ttagatcccgtttaccatgaagtgc

SEQ ID NO: 3509986 - DNA, 25 bp, Homo sapien
tattgcaagtgtccaagtccttagg

SEQ ID NO: 3509987 - DNA, 25 bp, Homo sapien
agcaacagttggtgaaatcaacaag

SEQ ID NO: 3509988 - DNA, 25 bp, Homo sapien
tgtctctattattacgttaacaaga

SEQ ID NO: 3509989 - DNA, 25 bp, Homo sapien
gcaaaacccagtcagttctttccag

SEQ ID NO: 3509990 - DNA, 25 bp, Homo sapien
gtttctttctagtcaccttgaattc

SEQ ID NO: 3509991 - DNA, 25 bp, Homo sapien
gacttgaagcttccagcgctgctgt

SEQ ID NO: 3509992 - DNA, 25 bp, Homo sapien
gacagactttcgctgctcttggact

SEQ ID NO: 3509993 - DNA, 25 bp, Homo sapien
tagctgaggacaacatgccggtcaa

SEQ ID NO: 3509994 - DNA, 25 bp, Homo sapien
tccagcgctgctgtgcatattctac

SEQ ID NO: 3509995 - DNA, 25 bp, Homo sapien
gagcgggctagcacatcgtgtgcat

SEQ ID NO: 3509996 - DNA, 25 bp, Homo sapien
cttgttcagcacgttggctcgactg

SEQ ID NO: 3509997 - DNA, 25 bp, Homo sapien
tcgactgcgggagcgggctagcaca

SEQ ID NO: 3509998 - DNA, 25 bp, Homo sapien
agcacatcgtgtgcatttgcaaaag

SEQ ID NO: 3509999 - DNA, 25 bp, Homo sapien
tcttgaaccccgtgttagcaaagct

SEQ ID NO: 3510000 - DNA, 25 bp, Homo sapien
tagcctgcctaaccctgacttggtg

SEQ ID NO: 3510001 - DNA, 25 bp, Homo sapien
gctctattatatatccagggcagga

SEQ ID NO: 3510002 - DNA, 25 bp, Homo sapien
tccaacagaagatccaagtcacaag

SEQ ID NO: 3510003 - DNA, 25 bp, Homo sapien
gcagaactcacatcttggataagca

SEQ ID NO: 3510004 - DNA, 25 bp, Homo sapien
ctttggtaataacgatgatgtgtca

SEQ ID NO: 3510005 - DNA, 25 bp, Homo sapien
gcagtgagcttaactatttgtactc

SEQ ID NO: 3510006 - DNA, 25 bp, Homo sapien
tccatcagaacgagattgaactagc

SEQ ID NO: 3510007 - DNA, 25 bp, Homo sapien
tataataatccacgagaaaaagtaa

SEQ ID NO: 3510008 - DNA, 25 bp, Homo sapien
cattttaaggaacatagtccaatat

SEQ ID NO: 3510009 - DNA, 25 bp, Homo sapien
ttcagaaacaatttcatacagggta

SEQ ID NO: 3510010 - DNA, 25 bp, Homo sapien
catacagggtaatgatgaaacaaaa

SEQ ID NO: 3510011 - DNA, 25 bp, Homo sapien
catcagcaggttatcaagttgtact

SEQ ID NO: 3510012 - DNA, 25 bp, Homo sapien
tgcttaggctggagtcctatggtgt

SEQ ID NO: 3510013 - DNA, 25 bp, Homo sapien
cctttggtactgaaagcaaggccct

SEQ ID NO: 3510014 - DNA, 25 bp, Homo sapien
tctcaatgtaaacagggaatggcaa

SEQ ID NO: 3510015 - DNA, 25 bp, Homo sapien
ccagagtaagatataccatgtacag

SEQ ID NO: 3510016 - DNA, 25 bp, Homo sapien
tgtatcaactgtgcatgtccaaaga

SEQ ID NO: 3510017 - DNA, 25 bp, Homo sapien
tcagtatgggctcaaccagagtaag

SEQ ID NO: 3510018 - DNA, 25 bp, Homo sapien
ccaaagaggcgcctcttcagtatgg

SEQ ID NO: 3510019 - DNA, 25 bp, Homo sapien
atttgcattcacagcgtagacagta

SEQ ID NO: 3510020 - DNA, 25 bp, Homo sapien
acagcgtagacagtatgcttctaca

SEQ ID NO: 3510021 - DNA, 25 bp, Homo sapien
tagacagtatgcttctacatcaggc

SEQ ID NO: 3510022 - DNA, 25 bp, Homo sapien
tgcattcacagcgtagacagtatgc

SEQ ID NO: 3510023 - DNA, 25 bp, Homo sapien
gggctccacaacatgaaggcaatca

SEQ ID NO: 3510024 - DNA, 25 bp, Homo sapien
tattataaatatgcccagaattttc

SEQ ID NO: 3510025 - DNA, 25 bp, Homo sapien
tagggagggcagatacatttacatc

SEQ ID NO: 3510026 - DNA, 25 bp, Homo sapien
ttctttatagggagggcagatacat

SEQ ID NO: 3510027 - DNA, 25 bp, Homo sapien
tgttcttattataaatatgcccaga

SEQ ID NO: 3510028 - DNA, 25 bp, Homo sapien
ctgacattgataaaacgggttgggc

SEQ ID NO: 3510029 - DNA, 25 bp, Homo sapien
ttgggccagagtcccgtagaaggga

SEQ ID NO: 3510030 - DNA, 25 bp, Homo sapien
gggatgaaatgttagaggcacccac

SEQ ID NO: 3510031 - DNA, 25 bp, Homo sapien
tgataaaacgggttgggccagagtc

SEQ ID NO: 3510032 - DNA, 25 bp, Homo sapien
tctaattcctggttgacagacagaa

SEQ ID NO: 3510033 - DNA, 25 bp, Homo sapien
ctaattcctggttgacagacagaac

SEQ ID NO: 3510034 - DNA, 25 bp, Homo sapien
aggaagtagcctgactctgagatca

SEQ ID NO: 3510035 - DNA, 25 bp, Homo sapien
agtagcctgactctgagatcagttt

SEQ ID NO: 3510036 - DNA, 25 bp, Homo sapien
gggctgagggcgagagtgccgccgg

SEQ ID NO: 3510037 - DNA, 25 bp, Homo sapien
tcaggaatgggccaaggagcaggtt

SEQ ID NO: 3510038 - DNA, 25 bp, Homo sapien
gttggcagacccagtttccgcaagg

SEQ ID NO: 3510039 - DNA, 25 bp, Homo sapien
ccaggcgtatggctgtcaggaatgg

SEQ ID NO: 3510040 - DNA, 25 bp, Homo sapien
tcaggagcgaggctgggcgggactc

SEQ ID NO: 3510041 - DNA, 25 bp, Homo sapien
aggagcgaggctgggcgggactcac

SEQ ID NO: 3510042 - DNA, 25 bp, Homo sapien
caggagcgaggctgggcgggactca

SEQ ID NO: 3510043 - DNA, 25 bp, Homo sapien
cacggaaagcgccaggcacgacagg

SEQ ID NO: 3510044 - DNA, 25 bp, Homo sapien
ggagccaagccgaagaaggcctccc

SEQ ID NO: 3510045 - DNA, 25 bp, Homo sapien
agccaagccgaagaaggcctcccca

SEQ ID NO: 3510046 - DNA, 25 bp, Homo sapien
ccaagccgaagaaggcctccccaca

SEQ ID NO: 3510047 - DNA, 25 bp, Homo sapien
gagccaagccgaagaaggcctcccc

SEQ ID NO: 3510048 - DNA, 25 bp, Homo sapien
cagatgcaaaaagcatccgccccgg

SEQ ID NO: 3510049 - DNA, 25 bp, Homo sapien
ccgcacttccgtctggacgcgaagg

SEQ ID NO: 3510050 - DNA, 25 bp, Homo sapien
cgcgccgggtcagatgcaaaaagca

SEQ ID NO: 3510051 - DNA, 25 bp, Homo sapien
ttaccagtgcgaagggccgggaggc

SEQ ID NO: 3510052 - DNA, 25 bp, Homo sapien
tgtggaattggcgaaacaactgccc

SEQ ID NO: 3510053 - DNA, 25 bp, Homo sapien
tctaattctgtgagctgccctcgtg

SEQ ID NO: 3510054 - DNA, 25 bp, Homo sapien
cagcctgcagctaggaagtgggtca

SEQ ID NO: 3510055 - DNA, 25 bp, Homo sapien
cctaggactccaagaggtggcgaat

SEQ ID NO: 3510056 - DNA, 25 bp, Homo sapien
gtgattcttagattcatgtgaatct

SEQ ID NO: 3510057 - DNA, 25 bp, Homo sapien
gggctagatgtcctctcaccagact

SEQ ID NO: 3510058 - DNA, 25 bp, Homo sapien
caacgtatctgatactgttcccaac

SEQ ID NO: 3510059 - DNA, 25 bp, Homo sapien
attatcaaggctttgtagtgggtct

SEQ ID NO: 3510060 - DNA, 25 bp, Homo sapien
aagagtgatgtaggtccacgtgtac

SEQ ID NO: 3510061 - DNA, 25 bp, Homo sapien
tgtaggtccacgtgtaccctcccaa

SEQ ID NO: 3510062 - DNA, 25 bp, Homo sapien
tctcccttctttgtaaggcctgaaa

SEQ ID NO: 3510063 - DNA, 25 bp, Homo sapien
cctctcccttctttgtaaggcctga

SEQ ID NO: 3510064 - DNA, 25 bp, Homo sapien
cagccctgtttagtgggatttttca

SEQ ID NO: 3510065 - DNA, 25 bp, Homo sapien
tgctgcctgtaaagccacctaagtg

SEQ ID NO: 3510066 - DNA, 25 bp, Homo sapien
caccatgataacaacaatttatggg

SEQ ID NO: 3510067 - DNA, 25 bp, Homo sapien
aatatgtttctagagctgctggtgc

SEQ ID NO: 3510068 - DNA, 25 bp, Homo sapien
gaaacttcgtactctaaccaacatc

SEQ ID NO: 3510069 - DNA, 25 bp, Homo sapien
aatagcagtctgttccatttggtgg

SEQ ID NO: 3510070 - DNA, 25 bp, Homo sapien
ttcagcataacgtcctccagggaag

SEQ ID NO: 3510071 - DNA, 25 bp, Homo sapien
taggaatcatgtgactttgtctgtc

SEQ ID NO: 3510072 - DNA, 25 bp, Homo sapien
tacaacttaggataatcaaagagat

SEQ ID NO: 3510073 - DNA, 25 bp, Homo sapien
caaagagatctccaactgtcaggac

SEQ ID NO: 3510074 - DNA, 25 bp, Homo sapien
gagaggttaagttccggcccagtgc

SEQ ID NO: 3510075 - DNA, 25 bp, Homo sapien
tgtcaggacaggtaggtcttttctc

SEQ ID NO: 3510076 - DNA, 25 bp, Homo sapien
tgtgtatgtcaacaacatcggagta

SEQ ID NO: 3510077 - DNA, 25 bp, Homo sapien
ggcagtgtttgtgtatgtcaacaac

SEQ ID NO: 3510078 - DNA, 25 bp, Homo sapien
tgtcaacaacatcggagtatctggg

SEQ ID NO: 3510079 - DNA, 25 bp, Homo sapien
tctactagaataaccatactccctc

SEQ ID NO: 3510080 - DNA, 25 bp, Homo sapien
gagacaggtctggtgcttcatgcta

SEQ ID NO: 3510081 - DNA, 25 bp, Homo sapien
tgttattttcccgagtcaggcatgg

SEQ ID NO: 3510082 - DNA, 25 bp, Homo sapien
ccaaaaattagacccagtgctccct

SEQ ID NO: 3510083 - DNA, 25 bp, Homo sapien
tgagggcagctgacataccaggcaa

SEQ ID NO: 3510084 - DNA, 25 bp, Homo sapien
tacaaatccccgctaggtaagagaa

SEQ ID NO: 3510085 - DNA, 25 bp, Homo sapien
cactgtggctaagagtcaaggctca

SEQ ID NO: 3510086 - DNA, 25 bp, Homo sapien
gggaatgaccccatgacaactgact

SEQ ID NO: 3510087 - DNA, 25 bp, Homo sapien
tttagatatagcctcccaaccatgg

SEQ ID NO: 3510088 - DNA, 25 bp, Homo sapien
catgggagtcttggcttggaaatca

SEQ ID NO: 3510089 - DNA, 25 bp, Homo sapien
gaaatcaggtctgcgttcttggtcc

SEQ ID NO: 3510090 - DNA, 25 bp, Homo sapien
ttcctccaagaggttcacagtgaga

SEQ ID NO: 3510091 - DNA, 25 bp, Homo sapien
cgtttttaggcaccaagatgagggc

SEQ ID NO: 3510092 - DNA, 25 bp, Homo sapien
tccatacttgagaaatcaatgaatc

SEQ ID NO: 3510093 - DNA, 25 bp, Homo sapien
ctctttcacataatccatacttgag

SEQ ID NO: 3510094 - DNA, 25 bp, Homo sapien
tctaagacataggtatcctggcacc

SEQ ID NO: 3510095 - DNA, 25 bp, Homo sapien
tgtaatggataatgtccctgggctc

SEQ ID NO: 3510096 - DNA, 25 bp, Homo sapien
tctattagatggaaggacttggtcc

SEQ ID NO: 3510097 - DNA, 25 bp, Homo sapien
ggtccacagcaagtcactacggcat

SEQ ID NO: 3510098 - DNA, 25 bp, Homo sapien
tctctatctgtcaacccggtgtgta

SEQ ID NO: 3510099 - DNA, 25 bp, Homo sapien
gaagcagagaaataggccacaagtg

SEQ ID NO: 3510100 - DNA, 25 bp, Homo sapien
ttttgctttcaaagctagtcatttc

SEQ ID NO: 3510101 - DNA, 25 bp, Homo sapien
aaattttgctttcaaagctagtcat

SEQ ID NO: 3510102 - DNA, 25 bp, Homo sapien
ttgctttcaaagctagtcatttccc

SEQ ID NO: 3510103 - DNA, 25 bp, Homo sapien
taaaattttgctttcaaagctagtc

SEQ ID NO: 3510104 - DNA, 25 bp, Homo sapien
caaatggatgtgacttgatctgacc

SEQ ID NO: 3510105 - DNA, 25 bp, Homo sapien
gccaaagacaggatacaaccccatg

SEQ ID NO: 3510106 - DNA, 25 bp, Homo sapien
ctgctcgcagctgatgacaaatgga

SEQ ID NO: 3510107 - DNA, 25 bp, Homo sapien
gacttgatctgacccatttgggcac

SEQ ID NO: 3510108 - DNA, 25 bp, Homo sapien
cagccggtgcttatccaagtttatg

SEQ ID NO: 3510109 - DNA, 25 bp, Homo sapien
gatcagccggtgcttatccaagttt

SEQ ID NO: 3510110 - DNA, 25 bp, Homo sapien
ggtgcttatccaagtttatgatgca

SEQ ID NO: 3510111 - DNA, 25 bp, Homo sapien
catgatcagccggtgcttatccaag

SEQ ID NO: 3510112 - DNA, 25 bp, Homo sapien
atacctgcctcagagaggaagtatc

SEQ ID NO: 3510113 - DNA, 25 bp, Homo sapien
actatgagttcctgtgtaagaggat

SEQ ID NO: 3510114 - DNA, 25 bp, Homo sapien
tatgagttcctgtgtaagaggatac

SEQ ID NO: 3510115 - DNA, 25 bp, Homo sapien
tgagttcctgtgtaagaggatacct

SEQ ID NO: 3510116 - DNA, 25 bp, Homo sapien
agatcggagagtctgtagaccaagg

SEQ ID NO: 3510117 - DNA, 25 bp, Homo sapien
tcggagagtctgtagaccaagggac

SEQ ID NO: 3510118 - DNA, 25 bp, Homo sapien
cagagatcggagagtctgtagacca

SEQ ID NO: 3510119 - DNA, 25 bp, Homo sapien
cttcagagatcggagagtctgtaga

SEQ ID NO: 3510120 - DNA, 25 bp, Homo sapien
gcttgtgggatttgacatgctcctt

SEQ ID NO: 3510121 - DNA, 25 bp, Homo sapien
agggagcccagtgtgatcactaggt

SEQ ID NO: 3510122 - DNA, 25 bp, Homo sapien
tggcccactactttgagatgccggg

SEQ ID NO: 3510123 - DNA, 25 bp, Homo sapien
gatcactaggtgctcaatctggccc

SEQ ID NO: 3510124 - DNA, 25 bp, Homo sapien
tataggcagcctgtgtcaaccaagg

SEQ ID NO: 3510125 - DNA, 25 bp, Homo sapien
gagatgagattatataggcagcctg

SEQ ID NO: 3510126 - DNA, 25 bp, Homo sapien
gattatataggcagcctgtgtcaac

SEQ ID NO: 3510127 - DNA, 25 bp, Homo sapien
gcctgtgtcaaccaaggctttcaca

SEQ ID NO: 3510128 - DNA, 25 bp, Homo sapien
gacttagcctgattgagtttgttcg

SEQ ID NO: 3510129 - DNA, 25 bp, Homo sapien
tcagacttctttagcccctcagact

SEQ ID NO: 3510130 - DNA, 25 bp, Homo sapien
gttcgtcttagaggcccaagggaca

SEQ ID NO: 3510131 - DNA, 25 bp, Homo sapien
gacaggttggtttccatgaggcgcc

SEQ ID NO: 3510132 - DNA, 25 bp, Homo sapien
cttgagggatagaaagcagagactt

SEQ ID NO: 3510133 - DNA, 25 bp, Homo sapien
ctgctgtcgcagtgacgccgcctcc

SEQ ID NO: 3510134 - DNA, 25 bp, Homo sapien
gcaggtcggcggagtccttgtggat

SEQ ID NO: 3510135 - DNA, 25 bp, Homo sapien
gaactgcaccgcctgcttcatccgg

SEQ ID NO: 3510136 - DNA, 25 bp, Homo sapien
atgtcggtctccttgcggccgccct

SEQ ID NO: 3510137 - DNA, 25 bp, Homo sapien
gccggcggcccggtagcccacagcc

SEQ ID NO: 3510138 - DNA, 25 bp, Homo sapien
ggcgccggcggcccggtagcccaca

SEQ ID NO: 3510139 - DNA, 25 bp, Homo sapien
cgccggcggcccggtagcccacagc

SEQ ID NO: 3510140 - DNA, 25 bp, Homo sapien
gcgccggcggcccggtagcccacag

SEQ ID NO: 3510141 - DNA, 25 bp, Homo sapien
tccctccgaggttgggagcgctccg

SEQ ID NO: 3510142 - DNA, 25 bp, Homo sapien
tgctcggcttctcagaaacgcacct

SEQ ID NO: 3510143 - DNA, 25 bp, Homo sapien
agcgctccggatttctccaacttca

SEQ ID NO: 3510144 - DNA, 25 bp, Homo sapien
cggaggactggcgactccctccgag

SEQ ID NO: 3510145 - DNA, 25 bp, Homo sapien
gtgtggaggaggctttcgggacctc

SEQ ID NO: 3510146 - DNA, 25 bp, Homo sapien
tggaggaggctttcgggacctcctc

SEQ ID NO: 3510147 - DNA, 25 bp, Homo sapien
gcagccggtgcaggcgtgtggagga

SEQ ID NO: 3510148 - DNA, 25 bp, Homo sapien
agggggcagccggtgcaggcgtgtg

SEQ ID NO: 3510149 - DNA, 25 bp, Homo sapien
aacaagattccctcaacttggtgag

SEQ ID NO: 3510150 - DNA, 25 bp, Homo sapien
ctagctagagggccgtatgcaacaa

SEQ ID NO: 3510151 - DNA, 25 bp, Homo sapien
agagggccgtatgcaacaagattcc

SEQ ID NO: 3510152 - DNA, 25 bp, Homo sapien
gctagagggccgtatgcaacaagat

SEQ ID NO: 3510153 - DNA, 25 bp, Homo sapien
cttgagtaaggctccaagacgtatc

SEQ ID NO: 3510154 - DNA, 25 bp, Homo sapien
gctagtccatttgcctcccaaatgc

SEQ ID NO: 3510155 - DNA, 25 bp, Homo sapien
gagtaaggctccaagacgtatcctg

SEQ ID NO: 3510156 - DNA, 25 bp, Homo sapien
tcagctagtccatttgcctcccaaa

SEQ ID NO: 3510157 - DNA, 25 bp, Homo sapien
tcttcagggctaagaagattacagc

SEQ ID NO: 3510158 - DNA, 25 bp, Homo sapien
gctgacagtaagaggcatctcttca

SEQ ID NO: 3510159 - DNA, 25 bp, Homo sapien
ttcagggctaagaagattacagctg

SEQ ID NO: 3510160 - DNA, 25 bp, Homo sapien
cagggctaagaagattacagctggg

SEQ ID NO: 3510161 - DNA, 25 bp, Homo sapien
ctgggttttccagcacataggccca

SEQ ID NO: 3510162 - DNA, 25 bp, Homo sapien
ccctgggttttccagcacataggcc

SEQ ID NO: 3510163 - DNA, 25 bp, Homo sapien
tgggttttccagcacataggcccac

SEQ ID NO: 3510164 - DNA, 25 bp, Homo sapien
cctgggttttccagcacataggccc

SEQ ID NO: 3510165 - DNA, 25 bp, Homo sapien
tgccttttccaggttgccacatgac

SEQ ID NO: 3510166 - DNA, 25 bp, Homo sapien
gcaggcaacagctccggtgcatctt

SEQ ID NO: 3510167 - DNA, 25 bp, Homo sapien
actgccttttccaggttgccacatg

SEQ ID NO: 3510168 - DNA, 25 bp, Homo sapien
cctgcaaagatctgccggagggtaa

SEQ ID NO: 3510169 - DNA, 25 bp, Homo sapien
catagtgaccgggtttatgcagcct

SEQ ID NO: 3510170 - DNA, 25 bp, Homo sapien
caacacagctctggtgcatggggct

SEQ ID NO: 3510171 - DNA, 25 bp, Homo sapien
ctcctgtgcgtcagtggtttgtgcg

SEQ ID NO: 3510172 - DNA, 25 bp, Homo sapien
ttgtgcgtgtaccagcaacacagct

SEQ ID NO: 3510173 - DNA, 25 bp, Homo sapien
caagaaatgatcgtgaggccctgct

SEQ ID NO: 3510174 - DNA, 25 bp, Homo sapien
aatgaatatttagggcccatccaaa

SEQ ID NO: 3510175 - DNA, 25 bp, Homo sapien
ctttggtatggagaattggctgtgc

SEQ ID NO: 3510176 - DNA, 25 bp, Homo sapien
tgtaggtagtccatccattagggaa

SEQ ID NO: 3510177 - DNA, 25 bp, Homo sapien
aatgagaccacccttcaaggggctg

SEQ ID NO: 3510178 - DNA, 25 bp, Homo sapien
ctggcagtgctgttactgttagaga

SEQ ID NO: 3510179 - DNA, 25 bp, Homo sapien
cacggagcagagtccgtctctcaca

SEQ ID NO: 3510180 - DNA, 25 bp, Homo sapien
ccaaagtgagatgatcgtgtggcat

SEQ ID NO: 3510181 - DNA, 25 bp, Homo sapien
ggaaggcatacatgacaggctgggc

SEQ ID NO: 3510182 - DNA, 25 bp, Homo sapien
gaaggaaggcatacatgacaggctg

SEQ ID NO: 3510183 - DNA, 25 bp, Homo sapien
aaggaaggcatacatgacaggctgg

SEQ ID NO: 3510184 - DNA, 25 bp, Homo sapien
gggaaggaaggcatacatgacaggc

SEQ ID NO: 3510185 - DNA, 25 bp, Homo sapien
tcagatcccttgtgatgggaagccc

SEQ ID NO: 3510186 - DNA, 25 bp, Homo sapien
gcaataccgactcagggttggtgaa

SEQ ID NO: 3510187 - DNA, 25 bp, Homo sapien
ggtgaaatcgccttttcatgacaat

SEQ ID NO: 3510188 - DNA, 25 bp, Homo sapien
ggagtagaacccttggcaataccga

SEQ ID NO: 3510189 - DNA, 25 bp, Homo sapien
taagaccccagaaggacaggtgagt

SEQ ID NO: 3510190 - DNA, 25 bp, Homo sapien
cagccagcccgtgatctatccaaga

SEQ ID NO: 3510191 - DNA, 25 bp, Homo sapien
taatgagtcactgatacgggaggca

SEQ ID NO: 3510192 - DNA, 25 bp, Homo sapien
cagaacatttgtattgagtggcacg

SEQ ID NO: 3510193 - DNA, 25 bp, Homo sapien
tcggatgaacgatcttggaaacatc

SEQ ID NO: 3510194 - DNA, 25 bp, Homo sapien
tcaaacagagccttgataagtttct

SEQ ID NO: 3510195 - DNA, 25 bp, Homo sapien
tttggaacgtagcaatcggatgaac

SEQ ID NO: 3510196 - DNA, 25 bp, Homo sapien
tggaaacatctctcgggactcctgg

SEQ ID NO: 3510197 - DNA, 25 bp, Homo sapien
tctccaacagtactcgggaagctct

SEQ ID NO: 3510198 - DNA, 25 bp, Homo sapien
aggctccgtgtctgaaaggtggcaa

SEQ ID NO: 3510199 - DNA, 25 bp, Homo sapien
tctgtggataactgccatgtccacc

SEQ ID NO: 3510200 - DNA, 25 bp, Homo sapien
ataactgccatgtccacctgagcca

SEQ ID NO: 3510201 - DNA, 25 bp, Homo sapien
ttcctgatggttctcagatgcatag

SEQ ID NO: 3510202 - DNA, 25 bp, Homo sapien
catctcgaactatgtcttcaatgag

SEQ ID NO: 3510203 - DNA, 25 bp, Homo sapien
gatgcatagagcctgccatctcgaa

SEQ ID NO: 3510204 - DNA, 25 bp, Homo sapien
tgtcttcaatgagttcctggtagtc

SEQ ID NO: 3510205 - DNA, 25 bp, Homo sapien
cattcttatgatttagttgcttcca

SEQ ID NO: 3510206 - DNA, 25 bp, Homo sapien
gaacatgttttgcattcttatgatt

SEQ ID NO: 3510207 - DNA, 25 bp, Homo sapien
gcattcttatgatttagttgcttcc

SEQ ID NO: 3510208 - DNA, 25 bp, Homo sapien
gttggaataaagaacatgttttgca

SEQ ID NO: 3510209 - DNA, 25 bp, Homo sapien
catgttgttaaatcccaacggccag

SEQ ID NO: 3510210 - DNA, 25 bp, Homo sapien
catcagtagcttttgacctggctgg

SEQ ID NO: 3510211 - DNA, 25 bp, Homo sapien
ttaccggttacttctctgaggcttc

SEQ ID NO: 3510212 - DNA, 25 bp, Homo sapien
tccaaaactgcttggtgagaccagc

SEQ ID NO: 3510213 - DNA, 25 bp, Homo sapien
tcccagggcttagtccttggtcttc

SEQ ID NO: 3510214 - DNA, 25 bp, Homo sapien
ccagggcttagtccttggtcttctc

SEQ ID NO: 3510215 - DNA, 25 bp, Homo sapien
gggcttagtccttggtcttctcttc

SEQ ID NO: 3510216 - DNA, 25 bp, Homo sapien
cttctcttctctgtctatactcact

SEQ ID NO: 3510217 - DNA, 25 bp, Homo sapien
taagaatgtcggttgctgtgctgcg

SEQ ID NO: 3510218 - DNA, 25 bp, Homo sapien
ttaagaatgtcggttgctgtgctgc

SEQ ID NO: 3510219 - DNA, 25 bp, Homo sapien
agaatgtcggttgctgtgctgcgtt

SEQ ID NO: 3510220 - DNA, 25 bp, Homo sapien
cattaagaatgtcggttgctgtgct

SEQ ID NO: 3510221 - DNA, 25 bp, Homo sapien
atactaaaactccttgtcttgggtg

SEQ ID NO: 3510222 - DNA, 25 bp, Homo sapien
cctgattccagataggagaggttgc

SEQ ID NO: 3510223 - DNA, 25 bp, Homo sapien
catttgggtccaccccaagagatac

SEQ ID NO: 3510224 - DNA, 25 bp, Homo sapien
ttccagataggagaggttgccagtt

SEQ ID NO: 3510225 - DNA, 25 bp, Homo sapien
ttgtcagcagtttgccagctggctc

SEQ ID NO: 3510226 - DNA, 25 bp, Homo sapien
gagcatgtgtgcttgtcagcagttt

SEQ ID NO: 3510227 - DNA, 25 bp, Homo sapien
gcagagacgctctttccatgtgctg

SEQ ID NO: 3510228 - DNA, 25 bp, Homo sapien
taaaatttggcacttgtgagtcagc

SEQ ID NO: 3510229 - DNA, 25 bp, Homo sapien
tctttgacctggaggtgaaggcgat

SEQ ID NO: 3510230 - DNA, 25 bp, Homo sapien
gcgctgttcccttcattggacttga

SEQ ID NO: 3510231 - DNA, 25 bp, Homo sapien
catatgtcacgtatgggacctggaa

SEQ ID NO: 3510232 - DNA, 25 bp, Homo sapien
ggacctggaaccctctagcgctgtt

SEQ ID NO: 3510233 - DNA, 25 bp, Homo sapien
caggctgtaccgttcactgtaggag

SEQ ID NO: 3510234 - DNA, 25 bp, Homo sapien
taaggtagcaactgttactagcccc

SEQ ID NO: 3510235 - DNA, 25 bp, Homo sapien
gattcagctggtaattgtggacccc

SEQ ID NO: 3510236 - DNA, 25 bp, Homo sapien
tgtgcccgagatcatagaactagta

SEQ ID NO: 3510237 - DNA, 25 bp, Homo sapien
caggtcatcaggcttcccagctggc

SEQ ID NO: 3510238 - DNA, 25 bp, Homo sapien
attgaaagcctgaggagcaggtcat

SEQ ID NO: 3510239 - DNA, 25 bp, Homo sapien
ttgaaagcctgaggagcaggtcatc

SEQ ID NO: 3510240 - DNA, 25 bp, Homo sapien
gagcaggtcatcaggcttcccagct

SEQ ID NO: 3510241 - DNA, 25 bp, Homo sapien
tgggttgatggtccacgtacactcg

SEQ ID NO: 3510242 - DNA, 25 bp, Homo sapien
aatgtacccagtgaaatctcccagc

SEQ ID NO: 3510243 - DNA, 25 bp, Homo sapien
accacgatcaggatgcggcgcttgg

SEQ ID NO: 3510244 - DNA, 25 bp, Homo sapien
cacagtcgtcctctatgggcaggaa

SEQ ID NO: 3510245 - DNA, 25 bp, Homo sapien
cactgggcaacgaatacatcggtga

SEQ ID NO: 3510246 - DNA, 25 bp, Homo sapien
tacactgggttatgtttgtggagcc

SEQ ID NO: 3510247 - DNA, 25 bp, Homo sapien
aggctggtatgttcccactgggcaa

SEQ ID NO: 3510248 - DNA, 25 bp, Homo sapien
tgtggagccatcaaagtcagtcgta

SEQ ID NO: 3510249 - DNA, 25 bp, Homo sapien
ggaagttcgaccagcttcaggctgg

SEQ ID NO: 3510250 - DNA, 25 bp, Homo sapien
tctgcagaatattcaccaggttgac

SEQ ID NO: 3510251 - DNA, 25 bp, Homo sapien
aagtagctccctgatgtttggtggc

SEQ ID NO: 3510252 - DNA, 25 bp, Homo sapien
cacagagatggcaaggtgcaaagcc

SEQ ID NO: 3510253 - DNA, 25 bp, Homo sapien
tcattttggaaggttccatttggac

SEQ ID NO: 3510254 - DNA, 25 bp, Homo sapien
ggcatggttcacaagtcatttgtcc

SEQ ID NO: 3510255 - DNA, 25 bp, Homo sapien
ttggacataaaatgcagcgttctcg

SEQ ID NO: 3510256 - DNA, 25 bp, Homo sapien
cgtgctccatcataataggtcccag

SEQ ID NO: 3510257 - DNA, 25 bp, Homo sapien
gctcagccatttctatctgaagaag

SEQ ID NO: 3510258 - DNA, 25 bp, Homo sapien
tcatccacggaagggaaagtgccga

SEQ ID NO: 3510259 - DNA, 25 bp, Homo sapien
taaaaccaaggctgtccagagcccc

SEQ ID NO: 3510260 - DNA, 25 bp, Homo sapien
ccgatatggtgacaatgattccaac

SEQ ID NO: 3510261 - DNA, 25 bp, Homo sapien
caaccccctggcgttttctcagtgc

SEQ ID NO: 3510262 - DNA, 25 bp, Homo sapien
ttcatcattcaaccaaccccctggc

SEQ ID NO: 3510263 - DNA, 25 bp, Homo sapien
ccccctggcgttttctcagtgcctc

SEQ ID NO: 3510264 - DNA, 25 bp, Homo sapien
atcattcaaccaaccccctggcgtt

SEQ ID NO: 3510265 - DNA, 25 bp, Homo sapien
tacggagccgcttctcggttcgctt

SEQ ID NO: 3510266 - DNA, 25 bp, Homo sapien
ggttcgctttacgatgcagctcagg

SEQ ID NO: 3510267 - DNA, 25 bp, Homo sapien
ttttagccacgtcgaggttcatgcc

SEQ ID NO: 3510268 - DNA, 25 bp, Homo sapien
tgctccctgtggacggcctttctga

SEQ ID NO: 3510269 - DNA, 25 bp, Homo sapien
ttccttaggggtgcttggtcggcca

SEQ ID NO: 3510270 - DNA, 25 bp, Homo sapien
taaggtttacgtagcggaagctctc

SEQ ID NO: 3510271 - DNA, 25 bp, Homo sapien
tgcttgccagagctgcatgtaaggt

SEQ ID NO: 3510272 - DNA, 25 bp, Homo sapien
tgtcacctccttttggttagtttca

SEQ ID NO: 3510273 - DNA, 25 bp, Homo sapien
tcaaactacacttgccttcatttag

SEQ ID NO: 3510274 - DNA, 25 bp, Homo sapien
tggtagtgctggtcgcagaccctcg

SEQ ID NO: 3510275 - DNA, 25 bp, Homo sapien
gcagaccctcgggaaacagctcagc

SEQ ID NO: 3510276 - DNA, 25 bp, Homo sapien
aaggttacacttgtcctgatggtgg

SEQ ID NO: 3510277 - DNA, 25 bp, Homo sapien
cttcagaaagaaacaagtgagagat

SEQ ID NO: 3510278 - DNA, 25 bp, Homo sapien
tcagaaagaaacaagtgagagatgt

SEQ ID NO: 3510279 - DNA, 25 bp, Homo sapien
cagaaagaaacaagtgagagatgtt

SEQ ID NO: 3510280 - DNA, 25 bp, Homo sapien
gaaagaaacaagtgagagatgttac

SEQ ID NO: 3510281 - DNA, 25 bp, Homo sapien
ggaagagccacaggtgacagagtag

SEQ ID NO: 3510282 - DNA, 25 bp, Homo sapien
gaagagccacaggtgacagagtagg

SEQ ID NO: 3510283 - DNA, 25 bp, Homo sapien
aggaagagccacaggtgacagagta

SEQ ID NO: 3510284 - DNA, 25 bp, Homo sapien
gaggaagcacccgtctcctccacca

SEQ ID NO: 3510285 - DNA, 25 bp, Homo sapien
catctgaggaagcacccgtctcctc

SEQ ID NO: 3510286 - DNA, 25 bp, Homo sapien
tctgaggaagcacccgtctcctcca

SEQ ID NO: 3510287 - DNA, 25 bp, Homo sapien
ctgaggaagcacccgtctcctccac

SEQ ID NO: 3510288 - DNA, 25 bp, Homo sapien
cgcagtgcagggacacacggggtga

SEQ ID NO: 3510289 - DNA, 25 bp, Homo sapien
gggacacacggggtgacacacttgt

SEQ ID NO: 3510290 - DNA, 25 bp, Homo sapien
acacggggtgacacacttgtgggca

SEQ ID NO: 3510291 - DNA, 25 bp, Homo sapien
tgcagggacacacggggtgacacac

SEQ ID NO: 3510292 - DNA, 25 bp, Homo sapien
ttttattccagtggagcttgtaccc

SEQ ID NO: 3510293 - DNA, 25 bp, Homo sapien
gacctgctgacagcctccgttgttg

SEQ ID NO: 3510294 - DNA, 25 bp, Homo sapien
cttgtacccagggtggcactggcat

SEQ ID NO: 3510295 - DNA, 25 bp, Homo sapien
cgttgttgatgctgcactcattggt

SEQ ID NO: 3510296 - DNA, 25 bp, Homo sapien
gtcatagcagcctgtcactgaatgg

SEQ ID NO: 3510297 - DNA, 25 bp, Homo sapien
ctgtggaacaaaatactctcctgtc

SEQ ID NO: 3510298 - DNA, 25 bp, Homo sapien
atagcagcctgtcactgaatgggct

SEQ ID NO: 3510299 - DNA, 25 bp, Homo sapien
ctgtcactgaatgggctgacatggt

SEQ ID NO: 3510300 - DNA, 25 bp, Homo sapien
ccctcccaacttgacaggggcagtc

SEQ ID NO: 3510301 - DNA, 25 bp, Homo sapien
aacttgacaggggcagtctgctcac

SEQ ID NO: 3510302 - DNA, 25 bp, Homo sapien
ctcccaacttgacaggggcagtctg

SEQ ID NO: 3510303 - DNA, 25 bp, Homo sapien
cccaacttgacaggggcagtctgct

SEQ ID NO: 3510304 - DNA, 25 bp, Homo sapien
tcggttgcaagcacaagcaaatgtg

SEQ ID NO: 3510305 - DNA, 25 bp, Homo sapien
agggtgtaccctcggttgcaagcac

SEQ ID NO: 3510306 - DNA, 25 bp, Homo sapien
gcacaagcaaatgtgccagggtggt

SEQ ID NO: 3510307 - DNA, 25 bp, Homo sapien
ggtgaagccatacagggtgtaccct

SEQ ID NO: 3510308 - DNA, 25 bp, Homo sapien
tgcgtacttgcagggctaatttaaa

SEQ ID NO: 3510309 - DNA, 25 bp, Homo sapien
ttccctcaaaactcagttggtctct

SEQ ID NO: 3510310 - DNA, 25 bp, Homo sapien
aaactcagttggtctctttcaccca

SEQ ID NO: 3510311 - DNA, 25 bp, Homo sapien
gtctctttcacccatgcgtacttgc

SEQ ID NO: 3510312 - DNA, 25 bp, Homo sapien
tttctcagaattagtcttctggccc

SEQ ID NO: 3510313 - DNA, 25 bp, Homo sapien
ccaagaggccagttaatcctaggtt

SEQ ID NO: 3510314 - DNA, 25 bp, Homo sapien
taatttattaactacggcaaattga

SEQ ID NO: 3510315 - DNA, 25 bp, Homo sapien
ggtgctagctatgcatttttattgt

SEQ ID NO: 3510316 - DNA, 25 bp, Homo sapien
ctatgagtctgctagcctcctggtt

SEQ ID NO: 3510317 - DNA, 25 bp, Homo sapien
tcccctatgtgccagtcctatgagt

SEQ ID NO: 3510318 - DNA, 25 bp, Homo sapien
cacattggatgcttttggccgatgc

SEQ ID NO: 3510319 - DNA, 25 bp, Homo sapien
ccctgaaatgtggtagttcagctcc

SEQ ID NO: 3510320 - DNA, 25 bp, Homo sapien
gagtgcttcactccctgaactctgg

SEQ ID NO: 3510321 - DNA, 25 bp, Homo sapien
taacatagttacgacttgtgtctcc

SEQ ID NO: 3510322 - DNA, 25 bp, Homo sapien
cactcagtcgaagccaactagacca

SEQ ID NO: 3510323 - DNA, 25 bp, Homo sapien
tcaacctctttcttgtaggctggaa

SEQ ID NO: 3510324 - DNA, 25 bp, Homo sapien
tcctttcttgcagccgcagtcaaaa

SEQ ID NO: 3510325 - DNA, 25 bp, Homo sapien
actgcccacgatgtttttgcagaaa

SEQ ID NO: 3510326 - DNA, 25 bp, Homo sapien
tgatcacaacctccattgcgggtct

SEQ ID NO: 3510327 - DNA, 25 bp, Homo sapien
cctccattgcgggtctggcactcat

SEQ ID NO: 3510328 - DNA, 25 bp, Homo sapien
gaagtatccttacaggtgcggtcac

SEQ ID NO: 3510329 - DNA, 25 bp, Homo sapien
tgcagtggacacctgtcgaagtatc

SEQ ID NO: 3510330 - DNA, 25 bp, Homo sapien
gcctccattgttgacagcacacgtt

SEQ ID NO: 3510331 - DNA, 25 bp, Homo sapien
catccaactggagagtgaatccaac

SEQ ID NO: 3510332 - DNA, 25 bp, Homo sapien
ctgcttggtaaccaatggctgtatg

SEQ ID NO: 3510333 - DNA, 25 bp, Homo sapien
gcttggtaaccaatggctgtatgat

SEQ ID NO: 3510334 - DNA, 25 bp, Homo sapien
gttgcctgactgttaaatccagaaa

SEQ ID NO: 3510335 - DNA, 25 bp, Homo sapien
gctgtatgatatgttgcctgactgt

SEQ ID NO: 3510336 - DNA, 25 bp, Homo sapien
gctcatctccagcttgaccgctgga

SEQ ID NO: 3510337 - DNA, 25 bp, Homo sapien
acagccaagtgttgcccctctccat

SEQ ID NO: 3510338 - DNA, 25 bp, Homo sapien
tatttctgctcatctccagcttgac

SEQ ID NO: 3510339 - DNA, 25 bp, Homo sapien
tctccattcatctcttctactatta

SEQ ID NO: 3510340 - DNA, 25 bp, Homo sapien
tgatgtggtgttgctctctgtcacc

SEQ ID NO: 3510341 - DNA, 25 bp, Homo sapien
ttcacccgtttatccccatccacca

SEQ ID NO: 3510342 - DNA, 25 bp, Homo sapien
caggcatcccgccagaaatatacgg

SEQ ID NO: 3510343 - DNA, 25 bp, Homo sapien
gcctcctgggaggtgttgtgccagt

SEQ ID NO: 3510344 - DNA, 25 bp, Homo sapien
agctctaacttcgtgctgccctggc

SEQ ID NO: 3510345 - DNA, 25 bp, Homo sapien
gaagtgccgcatcattataaacagc

SEQ ID NO: 3510346 - DNA, 25 bp, Homo sapien
gaataccagcgttaggagcagccta

SEQ ID NO: 3510347 - DNA, 25 bp, Homo sapien
ttccccacaggcctagaccactccc

SEQ ID NO: 3510348 - DNA, 25 bp, Homo sapien
ccagcgttaggagcagcctagtcca

SEQ ID NO: 3510349 - DNA, 25 bp, Homo sapien
tggaataccagcgttaggagcagcc

SEQ ID NO: 3510350 - DNA, 25 bp, Homo sapien
tgtagcatgcgaagcagcacagggc

SEQ ID NO: 3510351 - DNA, 25 bp, Homo sapien
tagcatgcgaagcagcacagggcct

SEQ ID NO: 3510352 - DNA, 25 bp, Homo sapien
gtagcatgcgaagcagcacagggcc

SEQ ID NO: 3510353 - DNA, 25 bp, Homo sapien
tcggctgtatcgtcacaggagtgct

SEQ ID NO: 3510354 - DNA, 25 bp, Homo sapien
ctgggccatcggctgtatcgtcaca

SEQ ID NO: 3510355 - DNA, 25 bp, Homo sapien
ccaccgttcccatggttacaggtca

SEQ ID NO: 3510356 - DNA, 25 bp, Homo sapien
atcgtcacaggagtgctggcaccca

SEQ ID NO: 3510357 - DNA, 25 bp, Homo sapien
ccacccttctgcagtgaacaagtac

SEQ ID NO: 3510358 - DNA, 25 bp, Homo sapien
ccgtgccatgaggtggtgcttctga

SEQ ID NO: 3510359 - DNA, 25 bp, Homo sapien
cagccgtgccatgaggtggtgcttc

SEQ ID NO: 3510360 - DNA, 25 bp, Homo sapien
tcggtatcccgtgctaactgccttc

SEQ ID NO: 3510361 - DNA, 25 bp, Homo sapien
tggtagaggtcggtatcccgtgcta

SEQ ID NO: 3510362 - DNA, 25 bp, Homo sapien
gaatacgacggttcccatggcaggt

SEQ ID NO: 3510363 - DNA, 25 bp, Homo sapien
ctgtggaatacgacggttcccatgg

SEQ ID NO: 3510364 - DNA, 25 bp, Homo sapien
aatacgacggttcccatggcaggtg

SEQ ID NO: 3510365 - DNA, 25 bp, Homo sapien
tggaatacgacggttcccatggcag

SEQ ID NO: 3510366 - DNA, 25 bp, Homo sapien
tacagccgtgatccttattcatgca

SEQ ID NO: 3510367 - DNA, 25 bp, Homo sapien
tccttgcagatgtgactacagccgt

SEQ ID NO: 3510368 - DNA, 25 bp, Homo sapien
aaaaccaggcctgcactcacaggcg

SEQ ID NO: 3510369 - DNA, 25 bp, Homo sapien
aggcctgcactcacaggcgacgctg

SEQ ID NO: 3510370 - DNA, 25 bp, Homo sapien
aggaaaaacccctccttgcagcagc

SEQ ID NO: 3510371 - DNA, 25 bp, Homo sapien
ttccgagcggtgaatgcaggtgtgc

SEQ ID NO: 3510372 - DNA, 25 bp, Homo sapien
cgttgacacaggtatgctggcagcc

SEQ ID NO: 3510373 - DNA, 25 bp, Homo sapien
gcactcatagctccccatgacgttg

SEQ ID NO: 3510374 - DNA, 25 bp, Homo sapien
aaggagagagggattagcctttgct

SEQ ID NO: 3510375 - DNA, 25 bp, Homo sapien
gaaggagagagggattagcctttgc

SEQ ID NO: 3510376 - DNA, 25 bp, Homo sapien
tgctaagcaaagatgaggttcctct

SEQ ID NO: 3510377 - DNA, 25 bp, Homo sapien
gctaagcaaagatgaggttcctctt

SEQ ID NO: 3510378 - DNA, 25 bp, Homo sapien
ctgctaagcaaagatgaggttcctc

SEQ ID NO: 3510379 - DNA, 25 bp, Homo sapien
taagcaaagatgaggttcctcttca

SEQ ID NO: 3510380 - DNA, 25 bp, Homo sapien
gggatgctgggaaccaagccagaga

SEQ ID NO: 3510381 - DNA, 25 bp, Homo sapien
cagcactgcggctgccagggatgct

SEQ ID NO: 3510382 - DNA, 25 bp, Homo sapien
ccacagctagcgctagtggcgacag

SEQ ID NO: 3510383 - DNA, 25 bp, Homo sapien
gagaagaagactgggcggacaaggt

SEQ ID NO: 3510384 - DNA, 25 bp, Homo sapien
ggaagggacacatggaaggccagtg

SEQ ID NO: 3510385 - DNA, 25 bp, Homo sapien
tggaagggacacatggaaggccagt

SEQ ID NO: 3510386 - DNA, 25 bp, Homo sapien
ctggaagggacacatggaaggccag

SEQ ID NO: 3510387 - DNA, 25 bp, Homo sapien
aacgataattgcctggaatattcaa

SEQ ID NO: 3510388 - DNA, 25 bp, Homo sapien
agcctccattgagctcatttccaca

SEQ ID NO: 3510389 - DNA, 25 bp, Homo sapien
gaagccatcaaaacaagtgcaacga

SEQ ID NO: 3510390 - DNA, 25 bp, Homo sapien
tgaccgtcatgagccaacatgaagc

SEQ ID NO: 3510391 - DNA, 25 bp, Homo sapien
gtatattctgtatctagatatttca

SEQ ID NO: 3510392 - DNA, 25 bp, Homo sapien
ctgtatattctgtatctagatattt

SEQ ID NO: 3510393 - DNA, 25 bp, Homo sapien
tgtatattctgtatctagatatttc

SEQ ID NO: 3510394 - DNA, 25 bp, Homo sapien
ttctgacacagggcgtcggcatggc

SEQ ID NO: 3510395 - DNA, 25 bp, Homo sapien
gcacttgtaggaggtgggtgtgttc

SEQ ID NO: 3510396 - DNA, 25 bp, Homo sapien
gccttccccttggtagccaggcttg

SEQ ID NO: 3510397 - DNA, 25 bp, Homo sapien
ggcagtcatctagcccttgggcaca

SEQ ID NO: 3510398 - DNA, 25 bp, Homo sapien
tgcggccccgcggcacggccccgac

SEQ ID NO: 3510399 - DNA, 25 bp, Homo sapien
agcagcaccgcccaggccgccccgg

SEQ ID NO: 3510400 - DNA, 25 bp, Homo sapien
cctgcggccccgcggcacggccccg

SEQ ID NO: 3510401 - DNA, 25 bp, Homo sapien
ctgcggccccgcggcacggccccga

SEQ ID NO: 3510402 - DNA, 25 bp, Homo sapien
aggcggcggagtgcgggcggtggcg

SEQ ID NO: 3510403 - DNA, 25 bp, Homo sapien
cagaggcggcggagtgcgggcggtg

SEQ ID NO: 3510404 - DNA, 25 bp, Homo sapien
ggatggctcagcggttgcgggcaga

SEQ ID NO: 3510405 - DNA, 25 bp, Homo sapien
tggactacttctccctggtggaaac

SEQ ID NO: 3510406 - DNA, 25 bp, Homo sapien
gcctctgacatgtggactacttctc

SEQ ID NO: 3510407 - DNA, 25 bp, Homo sapien
tctgacatgtggactacttctccct

SEQ ID NO: 3510408 - DNA, 25 bp, Homo sapien
cccagcagcctctgacatgtggact

SEQ ID NO: 3510409 - DNA, 25 bp, Homo sapien
cataaaaaatagtgagtacctttgg

SEQ ID NO: 3510410 - DNA, 25 bp, Homo sapien
tctacccaggaaacaataagacatt

SEQ ID NO: 3510411 - DNA, 25 bp, Homo sapien
gactcaatattatgaagatgccaac

SEQ ID NO: 3510412 - DNA, 25 bp, Homo sapien
aatatgtgaaagacctctacccagg

SEQ ID NO: 3510413 - DNA, 25 bp, Homo sapien
tgttctgacgtgtcctggctgaccc

SEQ ID NO: 3510414 - DNA, 25 bp, Homo sapien
gggagattttcactggacgctcacc

SEQ ID NO: 3510415 - DNA, 25 bp, Homo sapien
tgaacatctctgttctgacgtgtcc

SEQ ID NO: 3510416 - DNA, 25 bp, Homo sapien
ctggctgaccctgcttctgggagat

SEQ ID NO: 3510417 - DNA, 25 bp, Homo sapien
caaccatgaagattgaggagcagca

SEQ ID NO: 3510418 - DNA, 25 bp, Homo sapien
accatgaagattgaggagcagcagc

SEQ ID NO: 3510419 - DNA, 25 bp, Homo sapien
gctacacaaccatgaagattgagga

SEQ ID NO: 3510420 - DNA, 25 bp, Homo sapien
gcagaaaagctacacaaccatgaag

SEQ ID NO: 3510421 - DNA, 25 bp, Homo sapien
gcttcttgctgttctagttgccctg

SEQ ID NO: 3510422 - DNA, 25 bp, Homo sapien
ggccttgagtacagccctctgatca

SEQ ID NO: 3510423 - DNA, 25 bp, Homo sapien
gttgccctggccttgagtacagccc

SEQ ID NO: 3510424 - DNA, 25 bp, Homo sapien
tgctgttctagttgccctggccttg

SEQ ID NO: 3510425 - DNA, 25 bp, Homo sapien
gcccatgccaggtagtggccacgtg

SEQ ID NO: 3510426 - DNA, 25 bp, Homo sapien
tggccacgtggctctctgtaccagt

SEQ ID NO: 3510427 - DNA, 25 bp, Homo sapien
aagaaacacatcaggtgaggccaga

SEQ ID NO: 3510428 - DNA, 25 bp, Homo sapien
gaggacagagatgactggcccatgc

SEQ ID NO: 3510429 - DNA, 25 bp, Homo sapien
gcaagtaatgtacagtttggtccag

SEQ ID NO: 3510430 - DNA, 25 bp, Homo sapien
caaggacaagaagatcaggaaccaa

SEQ ID NO: 3510431 - DNA, 25 bp, Homo sapien
acagtttggtccagtgatgcccttg

SEQ ID NO: 3510432 - DNA, 25 bp, Homo sapien
gatcaggaaccaagatggcaagtaa

SEQ ID NO: 3510433 - DNA, 25 bp, Homo sapien
aaggagtatattgaactgcaccacg

SEQ ID NO: 3510434 - DNA, 25 bp, Homo sapien
aattgtctagatctagctgctgatc

SEQ ID NO: 3510435 - DNA, 25 bp, Homo sapien
tgcaccacgggcatgaaatgagcaa

SEQ ID NO: 3510436 - DNA, 25 bp, Homo sapien
aacccaggctgtgaaaatctacaga

SEQ ID NO: 3510437 - DNA, 25 bp, Homo sapien
cttctccgagagaactaaagctctg

SEQ ID NO: 3510438 - DNA, 25 bp, Homo sapien
ctaaagctctgtccgtgggctccag

SEQ ID NO: 3510439 - DNA, 25 bp, Homo sapien
cctcggccttctccgagagaactaa

SEQ ID NO: 3510440 - DNA, 25 bp, Homo sapien
acgctgcgctgcagctctctgggcc

SEQ ID NO: 3510441 - DNA, 25 bp, Homo sapien
taagtgggccatactgtagctggtt

SEQ ID NO: 3510442 - DNA, 25 bp, Homo sapien
gttagattgtgacaagcttttcctt

SEQ ID NO: 3510443 - DNA, 25 bp, Homo sapien
taataataacatagccagttagatt

SEQ ID NO: 3510444 - DNA, 25 bp, Homo sapien
cacacaatggcgggttaaataaata

SEQ ID NO: 3510445 - DNA, 25 bp, Homo sapien
catagccagttagattgtgacaagc

SEQ ID NO: 3510446 - DNA, 25 bp, Homo sapien
tggaagggcctcattaatgcgacgg

SEQ ID NO: 3510447 - DNA, 25 bp, Homo sapien
tttggcacgatgacacatcccggca

SEQ ID NO: 3510448 - DNA, 25 bp, Homo sapien
gaaacataactgtcccgcacgcagt

SEQ ID NO: 3510449 - DNA, 25 bp, Homo sapien
gaaaatacgtgggactgactcatcg

SEQ ID NO: 3510450 - DNA, 25 bp, Homo sapien
ttttacagtgagtgtacattttgtc

SEQ ID NO: 3510451 - DNA, 25 bp, Homo sapien
cctgcacaatcgcttaagtcccttt

SEQ ID NO: 3510452 - DNA, 25 bp, Homo sapien
tacagtgagtgtacattttgtctcc

SEQ ID NO: 3510453 - DNA, 25 bp, Homo sapien
cacaatcgcttaagtccctttggga

SEQ ID NO: 3510454 - DNA, 25 bp, Homo sapien
tctgcagcacacgaatcaaggaatt

SEQ ID NO: 3510455 - DNA, 25 bp, Homo sapien
tggtctttgatcagtgccacatcct

SEQ ID NO: 3510456 - DNA, 25 bp, Homo sapien
cctcatacatgtgtgcagtgatggg

SEQ ID NO: 3510457 - DNA, 25 bp, Homo sapien
gggacgtctccagcgtgatgttgaa

SEQ ID NO: 3510458 - DNA, 25 bp, Homo sapien
ggcactgacataagagatttaatct

SEQ ID NO: 3510459 - DNA, 25 bp, Homo sapien
gcactgacataagagatttaatctt

SEQ ID NO: 3510460 - DNA, 25 bp, Homo sapien
aggctaaccgctgtgcactctgggc

SEQ ID NO: 3510461 - DNA, 25 bp, Homo sapien
caccaccaaggctaaccgctgtgca

SEQ ID NO: 3510462 - DNA, 25 bp, Homo sapien
caaggctaaccgctgtgcactctgg

SEQ ID NO: 3510463 - DNA, 25 bp, Homo sapien
accaaggctaaccgctgtgcactct

SEQ ID NO: 3510464 - DNA, 25 bp, Homo sapien
caagcacaccagcatctgaaacttg

SEQ ID NO: 3510465 - DNA, 25 bp, Homo sapien
aagcacaccagcatctgaaacttgc

SEQ ID NO: 3510466 - DNA, 25 bp, Homo sapien
ctggctcccaagcacaccagcatct

SEQ ID NO: 3510467 - DNA, 25 bp, Homo sapien
gctcccaagcacaccagcatctgaa

SEQ ID NO: 3510468 - DNA, 25 bp, Homo sapien
gattgcagtgacaaatcggcagaag

SEQ ID NO: 3510469 - DNA, 25 bp, Homo sapien
tccttgccgatgttccggggagtat

SEQ ID NO: 3510470 - DNA, 25 bp, Homo sapien
gaagttccgggctcttgtatgccag

SEQ ID NO: 3510471 - DNA, 25 bp, Homo sapien
tgtctcataataggtttgtgctttt

SEQ ID NO: 3510472 - DNA, 25 bp, Homo sapien
agccggggcgatttaaatccatgct

SEQ ID NO: 3510473 - DNA, 25 bp, Homo sapien
gagacaaggccacactctccacaga

SEQ ID NO: 3510474 - DNA, 25 bp, Homo sapien
ccaggaaatcccaaatgaagacatt

SEQ ID NO: 3510475 - DNA, 25 bp, Homo sapien
atccatgctggaaagcctgttccaa

SEQ ID NO: 3510476 - DNA, 25 bp, Homo sapien
tagctgaggcacacactctacaaga

SEQ ID NO: 3510477 - DNA, 25 bp, Homo sapien
gatggatctgggtcacacacaagga

SEQ ID NO: 3510478 - DNA, 25 bp, Homo sapien
tacaagactctagggtgtccacagc

SEQ ID NO: 3510479 - DNA, 25 bp, Homo sapien
cagtgtggccactattcaaggagac

SEQ ID NO: 3510480 - DNA, 25 bp, Homo sapien
cattgactgcctccccgatggactc

SEQ ID NO: 3510481 - DNA, 25 bp, Homo sapien
gtgcttcacaatgccattgactgcc

SEQ ID NO: 3510482 - DNA, 25 bp, Homo sapien
gcttcacaatgccattgactgcctc

SEQ ID NO: 3510483 - DNA, 25 bp, Homo sapien
aagtgcttcacaatgccattgactg

SEQ ID NO: 3510484 - DNA, 25 bp, Homo sapien
aggatccgctccaggcttccatcat

SEQ ID NO: 3510485 - DNA, 25 bp, Homo sapien
ggtaacaagcctccggatgacactg

SEQ ID NO: 3510486 - DNA, 25 bp, Homo sapien
tgggtgagatggtaacaagcctccg

SEQ ID NO: 3510487 - DNA, 25 bp, Homo sapien
cacctcaggctgggatgtgagcagc

SEQ ID NO: 3510488 - DNA, 25 bp, Homo sapien
aagatcagacaatggactgtcagag

SEQ ID NO: 3510489 - DNA, 25 bp, Homo sapien
caaagccaatccctggagataggct

SEQ ID NO: 3510490 - DNA, 25 bp, Homo sapien
gatcagacaatggactgtcagagca

SEQ ID NO: 3510491 - DNA, 25 bp, Homo sapien
cagacaatggactgtcagagcagcc

SEQ ID NO: 3510492 - DNA, 25 bp, Homo sapien
catacagcccagagttatcatggcc

SEQ ID NO: 3510493 - DNA, 25 bp, Homo sapien
gatctcattcctgaccatcacatac

SEQ ID NO: 3510494 - DNA, 25 bp, Homo sapien
tggacagtagtaagcttccccaagt

SEQ ID NO: 3510495 - DNA, 25 bp, Homo sapien
tatcatggccaatctggacagtagt

SEQ ID NO: 3510496 - DNA, 25 bp, Homo sapien
ttctcggaggcacagatctgactgg

SEQ ID NO: 3510497 - DNA, 25 bp, Homo sapien
cactctacctagaagaacagggtca

SEQ ID NO: 3510498 - DNA, 25 bp, Homo sapien
caggcttagaggtcatggctctaca

SEQ ID NO: 3510499 - DNA, 25 bp, Homo sapien
tgggctgagtagctgaaagaactcc

SEQ ID NO: 3510500 - DNA, 25 bp, Homo sapien
tacgatcagaatgtggtacgggatc

SEQ ID NO: 3510501 - DNA, 25 bp, Homo sapien
tctgcatgatctgtgtctcacccaa

SEQ ID NO: 3510502 - DNA, 25 bp, Homo sapien
gatatacagatccatgggttggcag

SEQ ID NO: 3510503 - DNA, 25 bp, Homo sapien
agcttcttgcttggtacgatcagaa

SEQ ID NO: 3510504 - DNA, 25 bp, Homo sapien
tagttgtgaagacattggtgaagca

SEQ ID NO: 3510505 - DNA, 25 bp, Homo sapien
tggtgaagcaaaagtaatcgacggc

SEQ ID NO: 3510506 - DNA, 25 bp, Homo sapien
ttctcgtcatcacagcgcaggaagg

SEQ ID NO: 3510507 - DNA, 25 bp, Homo sapien
cattgaaagacaggaggtgatagag

SEQ ID NO: 3510508 - DNA, 25 bp, Homo sapien
tggcctttcccacatcagtcttgat

SEQ ID NO: 3510509 - DNA, 25 bp, Homo sapien
tcatggtctgagaggagctgcttca

SEQ ID NO: 3510510 - DNA, 25 bp, Homo sapien
atggacagtcgcacccatgctctgg

SEQ ID NO: 3510511 - DNA, 25 bp, Homo sapien
gatttccccgatgttctggatgtgc

SEQ ID NO: 3510512 - DNA, 25 bp, Homo sapien
ggcatcagacttcctacgttctgaa

SEQ ID NO: 3510513 - DNA, 25 bp, Homo sapien
gacttcctacgttctgaatcaagaa

SEQ ID NO: 3510514 - DNA, 25 bp, Homo sapien
ggaggcatgagtgagctggcatcag

SEQ ID NO: 3510515 - DNA, 25 bp, Homo sapien
ctacgttctgaatcaagaagtattc

SEQ ID NO: 3510516 - DNA, 25 bp, Homo sapien
ggtcatgtccaaagagatctgaata

SEQ ID NO: 3510517 - DNA, 25 bp, Homo sapien
tgaatatccaaatagctgactgccc

SEQ ID NO: 3510518 - DNA, 25 bp, Homo sapien
gagatctgaatatccaaatagctga

SEQ ID NO: 3510519 - DNA, 25 bp, Homo sapien
tagaataaacaagttggtcatgtcc

SEQ ID NO: 3510520 - DNA, 25 bp, Homo sapien
tcctgatgtgagttttctctgccgg

SEQ ID NO: 3510521 - DNA, 25 bp, Homo sapien
ctgaggtactgaggcttcctgatgt

SEQ ID NO: 3510522 - DNA, 25 bp, Homo sapien
cttcctgatgtgagttttctctgcc

SEQ ID NO: 3510523 - DNA, 25 bp, Homo sapien
tgatgtgagttttctctgccggttg

SEQ ID NO: 3510524 - DNA, 25 bp, Homo sapien
ctgataatgtaacaggtgggaccat

SEQ ID NO: 3510525 - DNA, 25 bp, Homo sapien
ctggaaccaatgcaagggagaaaca

SEQ ID NO: 3510526 - DNA, 25 bp, Homo sapien
tggaaccaatgcaagggagaaacac

SEQ ID NO: 3510527 - DNA, 25 bp, Homo sapien
tgatgttcacctccccatgccctag

SEQ ID NO: 3510528 - DNA, 25 bp, Homo sapien
tcttccacccctgtgatgttcacct

SEQ ID NO: 3510529 - DNA, 25 bp, Homo sapien
tccacagcttctcggcccatctttt

SEQ ID NO: 3510530 - DNA, 25 bp, Homo sapien
cctttccaggagatcacaaaggctg

SEQ ID NO: 3510531 - DNA, 25 bp, Homo sapien
ggtgtgtgctgatactcctggcttc

SEQ ID NO: 3510532 - DNA, 25 bp, Homo sapien
gcctcacgtgcaagccaatactttg

SEQ ID NO: 3510533 - DNA, 25 bp, Homo sapien
tgttgtatagcattccaccacatga

SEQ ID NO: 3510534 - DNA, 25 bp, Homo sapien
tcatcattggctaggaataggaagt

SEQ ID NO: 3510535 - DNA, 25 bp, Homo sapien
tagcacacatacagagatgtccaca

SEQ ID NO: 3510536 - DNA, 25 bp, Homo sapien
aatagcacacatacagagatgtcca

SEQ ID NO: 3510537 - DNA, 25 bp, Homo sapien
tggctgctaacagaaatagcacaca

SEQ ID NO: 3510538 - DNA, 25 bp, Homo sapien
cttggctgctaacagaaatagcaca

SEQ ID NO: 3510539 - DNA, 25 bp, Homo sapien
ttggtctgggcaatcactgatggag

SEQ ID NO: 3510540 - DNA, 25 bp, Homo sapien
tctacaaacttccaattggtctggg

SEQ ID NO: 3510541 - DNA, 25 bp, Homo sapien
gctggcggatagtgctgcccatagt

SEQ ID NO: 3510542 - DNA, 25 bp, Homo sapien
tattgcggcattccttcagcaggcc

SEQ ID NO: 3510543 - DNA, 25 bp, Homo sapien
taacaatcccatcattctctaaggc

SEQ ID NO: 3510544 - DNA, 25 bp, Homo sapien
gattttgctcccttatatcaactgg

SEQ ID NO: 3510545 - DNA, 25 bp, Homo sapien
tgatgaccccaagtagaagtaacct

SEQ ID NO: 3510546 - DNA, 25 bp, Homo sapien
tattccctgaggacaagactaacct

SEQ ID NO: 3510547 - DNA, 25 bp, Homo sapien
gaagattcaggaggtaaattcaaga

SEQ ID NO: 3510548 - DNA, 25 bp, Homo sapien
caggaggtaaattcaagaatcttgg

SEQ ID NO: 3510549 - DNA, 25 bp, Homo sapien
aagcaatgaagattcaggaggtaaa

SEQ ID NO: 3510550 - DNA, 25 bp, Homo sapien
attcaggaggtaaattcaagaatct

SEQ ID NO: 3510551 - DNA, 25 bp, Homo sapien
ctgataataatgttcctctccttta

SEQ ID NO: 3510552 - DNA, 25 bp, Homo sapien
tgataataatgttcctctcctttag

SEQ ID NO: 3510553 - DNA, 25 bp, Homo sapien
gataataatgttcctctcctttagt

SEQ ID NO: 3510554 - DNA, 25 bp, Homo sapien
tatctaaacgcaggtgttctgtgtg

SEQ ID NO: 3510555 - DNA, 25 bp, Homo sapien
ctccctctggtcattatctaaacgc

SEQ ID NO: 3510556 - DNA, 25 bp, Homo sapien
tctggtcattatctaaacgcaggtg

SEQ ID NO: 3510557 - DNA, 25 bp, Homo sapien
tcattatctaaacgcaggtgttctg

SEQ ID NO: 3510558 - DNA, 25 bp, Homo sapien
tggcccagtggaaagtacatcagac

SEQ ID NO: 3510559 - DNA, 25 bp, Homo sapien
gaagaagcccggctcatatttccct

SEQ ID NO: 3510560 - DNA, 25 bp, Homo sapien
tacatcagactgcagcttagggaag

SEQ ID NO: 3510561 - DNA, 25 bp, Homo sapien
tatggtcaatttttgccagacgcag

SEQ ID NO: 3510562 - DNA, 25 bp, Homo sapien
tcagcagggtaatgggtcagttcac

SEQ ID NO: 3510563 - DNA, 25 bp, Homo sapien
tcaaggctggagaaagaatcaccgg

SEQ ID NO: 3510564 - DNA, 25 bp, Homo sapien
ctaatcaaagattaccagggcctga

SEQ ID NO: 3510565 - DNA, 25 bp, Homo sapien
tgtaactgcagtccctaaggtaggg

SEQ ID NO: 3510566 - DNA, 25 bp, Homo sapien
aaagctattaacctatactcaggga

SEQ ID NO: 3510567 - DNA, 25 bp, Homo sapien
aaatagatgacaatagcacgtcggc

SEQ ID NO: 3510568 - DNA, 25 bp, Homo sapien
ccagatggaagtatggatctacaga

SEQ ID NO: 3510569 - DNA, 25 bp, Homo sapien
tctcatcatgtgatccaagttggac

SEQ ID NO: 3510570 - DNA, 25 bp, Homo sapien
cagagaatccagaagtagacgaaca

SEQ ID NO: 3510571 - DNA, 25 bp, Homo sapien
gacttcgtactagaggttcaagcca

SEQ ID NO: 3510572 - DNA, 25 bp, Homo sapien
tgagaagctaagacgagaggatccc

SEQ ID NO: 3510573 - DNA, 25 bp, Homo sapien
gatcagaagactcggtactgttagg

SEQ ID NO: 3510574 - DNA, 25 bp, Homo sapien
caaaggcttgaggacaagttgtcca

SEQ ID NO: 3510575 - DNA, 25 bp, Homo sapien
gaacatcctgcaggaagtgaacaca

SEQ ID NO: 3510576 - DNA, 25 bp, Homo sapien
tcaaaaagacaattaggcacacaca

SEQ ID NO: 3510577 - DNA, 25 bp, Homo sapien
tcttgaagacttgccatacatttgg

SEQ ID NO: 3510578 - DNA, 25 bp, Homo sapien
tcgggaatcaaatacccggagtaca

SEQ ID NO: 3510579 - DNA, 25 bp, Homo sapien
ccggagtacagggtctttatcatca

SEQ ID NO: 3510580 - DNA, 25 bp, Homo sapien
tacggagagtaggtgtccgaacatt

SEQ ID NO: 3510581 - DNA, 25 bp, Homo sapien
gcctgatcttgtcaactcgggaatc

SEQ ID NO: 3510582 - DNA, 25 bp, Homo sapien
agaggaagggcaggtagggctcagg

SEQ ID NO: 3510583 - DNA, 25 bp, Homo sapien
caggctgatctgacagaaaagatgc

SEQ ID NO: 3510584 - DNA, 25 bp, Homo sapien
caggtagggctcaggctgatctgac

SEQ ID NO: 3510585 - DNA, 25 bp, Homo sapien
tagggctcaggctgatctgacagaa

SEQ ID NO: 3510586 - DNA, 25 bp, Homo sapien
acctcccaagcaggattacactcac

SEQ ID NO: 3510587 - DNA, 25 bp, Homo sapien
cacctcccaagcaggattacactca

SEQ ID NO: 3510588 - DNA, 25 bp, Homo sapien
aacttcccggatctgaatgtttagc

SEQ ID NO: 3510589 - DNA, 25 bp, Homo sapien
acatctgagtgaaacgatttgcaaa

SEQ ID NO: 3510590 - DNA, 25 bp, Homo sapien
tcctggctgggttggatgacaaaca

SEQ ID NO: 3510591 - DNA, 25 bp, Homo sapien
caaacacctcataatctgcaaacat

SEQ ID NO: 3510592 - DNA, 25 bp, Homo sapien
tgcagccgggcaatagtttcattct

SEQ ID NO: 3510593 - DNA, 25 bp, Homo sapien
cttgaccaaggcttgcagccgggca

SEQ ID NO: 3510594 - DNA, 25 bp, Homo sapien
ctcttgtccgagacaagctcagagg

SEQ ID NO: 3510595 - DNA, 25 bp, Homo sapien
taagaagctcgtaggaatgcaaagg

SEQ ID NO: 3510596 - DNA, 25 bp, Homo sapien
tgcaatgaagattcccttcaggggg

SEQ ID NO: 3510597 - DNA, 25 bp, Homo sapien
tggcaactcaatgaagtggttgtca

SEQ ID NO: 3510598 - DNA, 25 bp, Homo sapien
tcccttcagggggaattccaaatgc

SEQ ID NO: 3510599 - DNA, 25 bp, Homo sapien
tcctctggcaactcaatgaagtggt

SEQ ID NO: 3510600 - DNA, 25 bp, Homo sapien
cataagcagtcttttggtagtaact

SEQ ID NO: 3510601 - DNA, 25 bp, Homo sapien
attttgttgtgtgtagccatacttc

SEQ ID NO: 3510602 - DNA, 25 bp, Homo sapien
cattaggttgagattcaaccatttt

SEQ ID NO: 3510603 - DNA, 25 bp, Homo sapien
agtaacttcaatcaacattaggttg

SEQ ID NO: 3510604 - DNA, 25 bp, Homo sapien
atccaggccattggaatgcaaaccc

SEQ ID NO: 3510605 - DNA, 25 bp, Homo sapien
ctccagctttgaccggtcatccagg

SEQ ID NO: 3510606 - DNA, 25 bp, Homo sapien
tgcaaacccatcaggtatggaacag

SEQ ID NO: 3510607 - DNA, 25 bp, Homo sapien
agctccagctttgaccggtcatcca

SEQ ID NO: 3510608 - DNA, 25 bp, Homo sapien
catgagagctgtaatcgtctccgcc

SEQ ID NO: 3510609 - DNA, 25 bp, Homo sapien
gctgtaatcgtctccgccacagtca

SEQ ID NO: 3510610 - DNA, 25 bp, Homo sapien
gagagctgtaatcgtctccgccaca

SEQ ID NO: 3510611 - DNA, 25 bp, Homo sapien
aatcgtctccgccacagtcatcagt

SEQ ID NO: 3510612 - DNA, 25 bp, Homo sapien
cagccaataaaattgactagttaaa

SEQ ID NO: 3510613 - DNA, 25 bp, Homo sapien
acagccaataaaattgactagttaa

SEQ ID NO: 3510614 - DNA, 25 bp, Homo sapien
cccaaacctgtgctagctgaactta

SEQ ID NO: 3510615 - DNA, 25 bp, Homo sapien
aaacctgtgctagctgaacttacta

SEQ ID NO: 3510616 - DNA, 25 bp, Homo sapien
ttaccgattgattttccccactctg

SEQ ID NO: 3510617 - DNA, 25 bp, Homo sapien
gtaaagcatacattgctcccactca

SEQ ID NO: 3510618 - DNA, 25 bp, Homo sapien
gagtcctttgaatacccctcgcgaa

SEQ ID NO: 3510619 - DNA, 25 bp, Homo sapien
cagatattaacaggtcactcaggga

SEQ ID NO: 3510620 - DNA, 25 bp, Homo sapien
tggaatgcccagcaaaaggccatga

SEQ ID NO: 3510621 - DNA, 25 bp, Homo sapien
gaatttcatgttactagcctggctc

SEQ ID NO: 3510622 - DNA, 25 bp, Homo sapien
aaggctctagtaagcactgacttac

SEQ ID NO: 3510623 - DNA, 25 bp, Homo sapien
cagaaggctctagtaagcactgact

SEQ ID NO: 3510624 - DNA, 25 bp, Homo sapien
gaaggctctagtaagcactgactta

SEQ ID NO: 3510625 - DNA, 25 bp, Homo sapien
ttagagacgtagagagtgtcccggc

SEQ ID NO: 3510626 - DNA, 25 bp, Homo sapien
gaagcgctgcagtttggtcacagga

SEQ ID NO: 3510627 - DNA, 25 bp, Homo sapien
caggatttgaaactccagaagggca

SEQ ID NO: 3510628 - DNA, 25 bp, Homo sapien
gagggcaaacccaaatgtccgagag

SEQ ID NO: 3510629 - DNA, 25 bp, Homo sapien
cttggtcaaagggattccattctac

SEQ ID NO: 3510630 - DNA, 25 bp, Homo sapien
gcaaggaccttagatttgaatgttc

SEQ ID NO: 3510631 - DNA, 25 bp, Homo sapien
tacgttctcaggatatcgtgcaagg

SEQ ID NO: 3510632 - DNA, 25 bp, Homo sapien
agggattccattctacgttctcagg

SEQ ID NO: 3510633 - DNA, 25 bp, Homo sapien
ttcagaataaactatgcatttcaat

SEQ ID NO: 3510634 - DNA, 25 bp, Homo sapien
cagtcgtacttgaaatgaaagggct

SEQ ID NO: 3510635 - DNA, 25 bp, Homo sapien
gctttagaagcctgtatgtactggc

SEQ ID NO: 3510636 - DNA, 25 bp, Homo sapien
cttcagtcgtacttgaaatgaaagg

SEQ ID NO: 3510637 - DNA, 25 bp, Homo sapien
tttagaagcctgtatgtactggcat

SEQ ID NO: 3510638 - DNA, 25 bp, Homo sapien
gctgacataatgatctcgtctacag

SEQ ID NO: 3510639 - DNA, 25 bp, Homo sapien
caaagtaattaagcagcaagccgct

SEQ ID NO: 3510640 - DNA, 25 bp, Homo sapien
cagcaagccgctgacataatgatct

SEQ ID NO: 3510641 - DNA, 25 bp, Homo sapien
taatgatctcgtctacagtctgaaa

SEQ ID NO: 3510642 - DNA, 25 bp, Homo sapien
aaaacgacttacatatgggatggag

SEQ ID NO: 3510643 - DNA, 25 bp, Homo sapien
actggagccatcacgagaaagtgac

SEQ ID NO: 3510644 - DNA, 25 bp, Homo sapien
gaagcatatgctctgccaaaacgag

SEQ ID NO: 3510645 - DNA, 25 bp, Homo sapien
gggacatcccaagattttagtgcaa

SEQ ID NO: 3510646 - DNA, 25 bp, Homo sapien
gatacagccttgactgaggaaaagc

SEQ ID NO: 3510647 - DNA, 25 bp, Homo sapien
tgcctgcagtggagcaataagctgc

SEQ ID NO: 3510648 - DNA, 25 bp, Homo sapien
gcaaagaggcctcaagaacgtgctt

SEQ ID NO: 3510649 - DNA, 25 bp, Homo sapien
catataggctagatatcaaccctgg

SEQ ID NO: 3510650 - DNA, 25 bp, Homo sapien
agaatacaagctgcttgtctctgaa

SEQ ID NO: 3510651 - DNA, 25 bp, Homo sapien
aagttaaaactgtaatagccggctg

SEQ ID NO: 3510652 - DNA, 25 bp, Homo sapien
tagaatgatctagaatacaagctgc

SEQ ID NO: 3510653 - DNA, 25 bp, Homo sapien
aaaactgtaatagccggctgggcgc

SEQ ID NO: 3510654 - DNA, 25 bp, Homo sapien
tgcccttactgtagaaacactaagg

SEQ ID NO: 3510655 - DNA, 25 bp, Homo sapien
cacacccagcctcttatgctttctt

SEQ ID NO: 3510656 - DNA, 25 bp, Homo sapien
gtcagccattgaaccttaagatggg

SEQ ID NO: 3510657 - DNA, 25 bp, Homo sapien
cttaagatgggtgaggaaaggtatc

SEQ ID NO: 3510658 - DNA, 25 bp, Homo sapien
aattctgtagcaaactcaccagctt

SEQ ID NO: 3510659 - DNA, 25 bp, Homo sapien
cccaattctgtagcaaactcaccag

SEQ ID NO: 3510660 - DNA, 25 bp, Homo sapien
caattctgtagcaaactcaccagct

SEQ ID NO: 3510661 - DNA, 25 bp, Homo sapien
ttctgtagcaaactcaccagctttc

SEQ ID NO: 3510662 - DNA, 25 bp, Homo sapien
cagggatggaatgttaccagcctca

SEQ ID NO: 3510663 - DNA, 25 bp, Homo sapien
tatgacccacagtgtactagtgagc

SEQ ID NO: 3510664 - DNA, 25 bp, Homo sapien
ggataataccatctaatacctggca

SEQ ID NO: 3510665 - DNA, 25 bp, Homo sapien
caattcttgctttatagtctcgggc

SEQ ID NO: 3510666 - DNA, 25 bp, Homo sapien
ccccaacttggttcaagagtcaagt

SEQ ID NO: 3510667 - DNA, 25 bp, Homo sapien
aaggtttccagtcagcagtaggctg

SEQ ID NO: 3510668 - DNA, 25 bp, Homo sapien
cacagagaattagtgcccctaaccc

SEQ ID NO: 3510669 - DNA, 25 bp, Homo sapien
tatttggacatacagaacctcagag

SEQ ID NO: 3510670 - DNA, 25 bp, Homo sapien
ccagcctggccaacatggtgaaacc

SEQ ID NO: 3510671 - DNA, 25 bp, Homo sapien
gcatggtggtgcataccagtaatcc

SEQ ID NO: 3510672 - DNA, 25 bp, Homo sapien
aggtcaaggcaggaggattacctga

SEQ ID NO: 3510673 - DNA, 25 bp, Homo sapien
attacctgaggtcagcagtccgaga

SEQ ID NO: 3510674 - DNA, 25 bp, Homo sapien
caaagaggtcgcactacagctctgc

SEQ ID NO: 3510675 - DNA, 25 bp, Homo sapien
agctcctctactgcaatgtgggctg

SEQ ID NO: 3510676 - DNA, 25 bp, Homo sapien
agaacaatggttgttgttaaccaca

SEQ ID NO: 3510677 - DNA, 25 bp, Homo sapien
acagctctgcatttcaacgattatg

SEQ ID NO: 3510678 - DNA, 25 bp, Homo sapien
gagtagctgggattataggtgtgtg

SEQ ID NO: 3510679 - DNA, 25 bp, Homo sapien
ccaggccagagtgcagtgacgccat

SEQ ID NO: 3510680 - DNA, 25 bp, Homo sapien
agtagctgggattataggtgtgtgc

SEQ ID NO: 3510681 - DNA, 25 bp, Homo sapien
ggccagagtgcagtgacgccatctt

SEQ ID NO: 3510682 - DNA, 25 bp, Homo sapien
tatccctagccacttctcttcaatt

SEQ ID NO: 3510683 - DNA, 25 bp, Homo sapien
tttcccatctatccttatccctagc

SEQ ID NO: 3510684 - DNA, 25 bp, Homo sapien
ttctagtaagttcatacagcacact

SEQ ID NO: 3510685 - DNA, 25 bp, Homo sapien
tctagtaagttcatacagcacactg

SEQ ID NO: 3510686 - DNA, 25 bp, Homo sapien
caggccaatgagatgcagtttaatg

SEQ ID NO: 3510687 - DNA, 25 bp, Homo sapien
taactagtgtatacaggccccactg

SEQ ID NO: 3510688 - DNA, 25 bp, Homo sapien
ggagagcaggaatattaccctaaac

SEQ ID NO: 3510689 - DNA, 25 bp, Homo sapien
caaagatagtcaataggagagcagg

SEQ ID NO: 3510690 - DNA, 25 bp, Homo sapien
tgacaaagtagtcggcgaagcgact

SEQ ID NO: 3510691 - DNA, 25 bp, Homo sapien
cggtctccgtgtccagtccgcagat

SEQ ID NO: 3510692 - DNA, 25 bp, Homo sapien
tccgcagatgacaaagtagtcggcg

SEQ ID NO: 3510693 - DNA, 25 bp, Homo sapien
tccagtccgcagatgacaaagtagt

SEQ ID NO: 3510694 - DNA, 25 bp, Homo sapien
gccgagaccggccgggcagtgcgga

SEQ ID NO: 3510695 - DNA, 25 bp, Homo sapien
gggccgagaccggccgggcagtgcg

SEQ ID NO: 3510696 - DNA, 25 bp, Homo sapien
ggccgagaccggccgggcagtgcgg

SEQ ID NO: 3510697 - DNA, 25 bp, Homo sapien
cggggccgagaccggccgggcagtg

SEQ ID NO: 3510698 - DNA, 25 bp, Homo sapien
cgggcgcccgcccgtccgccctcag

SEQ ID NO: 3510699 - DNA, 25 bp, Homo sapien
gccctcaggccgcccctcccgccgc

SEQ ID NO: 3510700 - DNA, 25 bp, Homo sapien
gcccgcccgtccgccctcaggccgc

SEQ ID NO: 3510701 - DNA, 25 bp, Homo sapien
tccgccctcaggccgcccctcccgc

SEQ ID NO: 3510702 - DNA, 25 bp, Homo sapien
ccgccgcggctgccgtgacggggcg

SEQ ID NO: 3510703 - DNA, 25 bp, Homo sapien
ggcaccgggccgccccgcaccgcat

SEQ ID NO: 3510704 - DNA, 25 bp, Homo sapien
gggcaccgggccgccccgcaccgca

SEQ ID NO: 3510705 - DNA, 25 bp, Homo sapien
ctgcagctagccgagagcgccgcgg

SEQ ID NO: 3510706 - DNA, 25 bp, Homo sapien
tctgccaacgctggaatactatgca

SEQ ID NO: 3510707 - DNA, 25 bp, Homo sapien
gaaaatcgcttaaaactgggtggca

SEQ ID NO: 3510708 - DNA, 25 bp, Homo sapien
cattgttaaaattgattgcttcagg

SEQ ID NO: 3510709 - DNA, 25 bp, Homo sapien
caatccaaatgcctagctatagaag

SEQ ID NO: 3510710 - DNA, 25 bp, Homo sapien
ctcccagcttcaagtaactcttgtg

SEQ ID NO: 3510711 - DNA, 25 bp, Homo sapien
cagcttcaagtaactcttgtgcctc

SEQ ID NO: 3510712 - DNA, 25 bp, Homo sapien
ttacttatttagacagtttctctct

SEQ ID NO: 3510713 - DNA, 25 bp, Homo sapien
atttacttatttagacagtttctct

SEQ ID NO: 3510714 - DNA, 25 bp, Homo sapien
tcaactcctagttagcctgcttgcc

SEQ ID NO: 3510715 - DNA, 25 bp, Homo sapien
gcttgtcttcttgtggttgttacca

SEQ ID NO: 3510716 - DNA, 25 bp, Homo sapien
ttgcctccgcaccacagatgcttgt

SEQ ID NO: 3510717 - DNA, 25 bp, Homo sapien
tcactttcttagcttgtcaactcct

SEQ ID NO: 3510718 - DNA, 25 bp, Homo sapien
tgtaaatccgtgaagacaggccatc

SEQ ID NO: 3510719 - DNA, 25 bp, Homo sapien
ggccaagtctgtaaatccgtgaaga

SEQ ID NO: 3510720 - DNA, 25 bp, Homo sapien
tcaactgcattgagggtacagcctt

SEQ ID NO: 3510721 - DNA, 25 bp, Homo sapien
ttacatgggcatcaggccaagtctg

SEQ ID NO: 3510722 - DNA, 25 bp, Homo sapien
gaaagaatcaatggtaaggacagta

SEQ ID NO: 3510723 - DNA, 25 bp, Homo sapien
tacacacgctggagtaaatagtgaa

SEQ ID NO: 3510724 - DNA, 25 bp, Homo sapien
taaggacagtaaatatactctgaga

SEQ ID NO: 3510725 - DNA, 25 bp, Homo sapien
gtacaatttacacacgctggagtaa

SEQ ID NO: 3510726 - DNA, 25 bp, Homo sapien
tcaaggaatcaagggcattacccat

SEQ ID NO: 3510727 - DNA, 25 bp, Homo sapien
ccccttgtgggatattaaagagcca

SEQ ID NO: 3510728 - DNA, 25 bp, Homo sapien
taaattatcaataccaggctgggca

SEQ ID NO: 3510729 - DNA, 25 bp, Homo sapien
gatgaaagaaaaccgactggccaga

SEQ ID NO: 3510730 - DNA, 25 bp, Homo sapien
taattactgaagaggtgattttaaa

SEQ ID NO: 3510731 - DNA, 25 bp, Homo sapien
ccttgtttaattactgaagaggtga

SEQ ID NO: 3510732 - DNA, 25 bp, Homo sapien
tgtttaattactgaagaggtgattt

SEQ ID NO: 3510733 - DNA, 25 bp, Homo sapien
tacaaattccttgtttaattactga

SEQ ID NO: 3510734 - DNA, 25 bp, Homo sapien
ctgttaatcctgagatggtgatgac

SEQ ID NO: 3510735 - DNA, 25 bp, Homo sapien
acagcaaaactaaaaatcagatgat

SEQ ID NO: 3510736 - DNA, 25 bp, Homo sapien
gatgacagcaaaactaaaaatcaga

SEQ ID NO: 3510737 - DNA, 25 bp, Homo sapien
ggtgatgacagcaaaactaaaaatc

SEQ ID NO: 3510738 - DNA, 25 bp, Homo sapien
ccttaatggctacaaaagaaggagg

SEQ ID NO: 3510739 - DNA, 25 bp, Homo sapien
gctgttgtaagttgatacagtgttg

SEQ ID NO: 3510740 - DNA, 25 bp, Homo sapien
cagtgttgttcctgccttaatggct

SEQ ID NO: 3510741 - DNA, 25 bp, Homo sapien
aagttgatacagtgttgttcctgcc

SEQ ID NO: 3510742 - DNA, 25 bp, Homo sapien
caatggcacgtttatcacaggagat

SEQ ID NO: 3510743 - DNA, 25 bp, Homo sapien
tgagatgttctctatgacgttcaac

SEQ ID NO: 3510744 - DNA, 25 bp, Homo sapien
gatattaataaaccaattaggcaga

SEQ ID NO: 3510745 - DNA, 25 bp, Homo sapien
aaaactttcaatggcacgtttatca

SEQ ID NO: 3510746 - DNA, 25 bp, Homo sapien
ctgctttctctgttaggtatttgta

SEQ ID NO: 3510747 - DNA, 25 bp, Homo sapien
ctaaataggaaagcatataacagaa

SEQ ID NO: 3510748 - DNA, 25 bp, Homo sapien
taacagaaagaggcaccaagtccag

SEQ ID NO: 3510749 - DNA, 25 bp, Homo sapien
ctggtctcccaactaaataggaaag

SEQ ID NO: 3510750 - DNA, 25 bp, Homo sapien
cacttgtgattacacctagtgacta

SEQ ID NO: 3510751 - DNA, 25 bp, Homo sapien
gtactctgcatgacatctcttgtgc

SEQ ID NO: 3510752 - DNA, 25 bp, Homo sapien
aaaatgtacctcaaatgagatcagc

SEQ ID NO: 3510753 - DNA, 25 bp, Homo sapien
gatgatctagtactttctcagacca

SEQ ID NO: 3510754 - DNA, 25 bp, Homo sapien
gaaaccctgagagtatactgagaaa

SEQ ID NO: 3510755 - DNA, 25 bp, Homo sapien
gggataaagaaaccctgagagtata

SEQ ID NO: 3510756 - DNA, 25 bp, Homo sapien
tactgagaaatatagagcctggaat

SEQ ID NO: 3510757 - DNA, 25 bp, Homo sapien
caagaaataaggctagtggaaaggg

SEQ ID NO: 3510758 - DNA, 25 bp, Homo sapien
cagtgatccctgcataggattagac

SEQ ID NO: 3510759 - DNA, 25 bp, Homo sapien
tgttctctttcacaggatgcctcct

SEQ ID NO: 3510760 - DNA, 25 bp, Homo sapien
taagattgtactatatggaccgggt

SEQ ID NO: 3510761 - DNA, 25 bp, Homo sapien
tcaaccagggtatcctatccagcta

SEQ ID NO: 3510762 - DNA, 25 bp, Homo sapien
caagtagttggaatcacagacgcct

SEQ ID NO: 3510763 - DNA, 25 bp, Homo sapien
agtagttggaatcacagacgcctgc

SEQ ID NO: 3510764 - DNA, 25 bp, Homo sapien
agttggaatcacagacgcctgccac

SEQ ID NO: 3510765 - DNA, 25 bp, Homo sapien
tagttggaatcacagacgcctgcca

SEQ ID NO: 3510766 - DNA, 25 bp, Homo sapien
tttgcctattggatacttagggtag

SEQ ID NO: 3510767 - DNA, 25 bp, Homo sapien
ccttttaaatgggaatgtgacttga

SEQ ID NO: 3510768 - DNA, 25 bp, Homo sapien
tcttgataacaccaacatagttgcc

SEQ ID NO: 3510769 - DNA, 25 bp, Homo sapien
gcccaagagttccagttcgagacca

SEQ ID NO: 3510770 - DNA, 25 bp, Homo sapien
atttctcgtagaaactgggtctagc

SEQ ID NO: 3510771 - DNA, 25 bp, Homo sapien
caagtcaaacctacgctaagaaaag

SEQ ID NO: 3510772 - DNA, 25 bp, Homo sapien
cagaggctaaatgcttcgctgtagc

SEQ ID NO: 3510773 - DNA, 25 bp, Homo sapien
tgggtctagctacattgcccaagcc

SEQ ID NO: 3510774 - DNA, 25 bp, Homo sapien
gaaaatagttatgtataaatgaaga

SEQ ID NO: 3510775 - DNA, 25 bp, Homo sapien
agagcagaccttttacactttttct

SEQ ID NO: 3510776 - DNA, 25 bp, Homo sapien
aaatagttatgtataaatgaagagc

SEQ ID NO: 3510777 - DNA, 25 bp, Homo sapien
tatgtagcaaaataagctacaagta

SEQ ID NO: 3510778 - DNA, 25 bp, Homo sapien
tatatgtagcaaaataagctacaag

SEQ ID NO: 3510779 - DNA, 25 bp, Homo sapien
atgtagcaaaataagctacaagtac

SEQ ID NO: 3510780 - DNA, 25 bp, Homo sapien
aaatatatgtagcaaaataagctac

SEQ ID NO: 3510781 - DNA, 25 bp, Homo sapien
tggcatcatccatatctctgggaac

SEQ ID NO: 3510782 - DNA, 25 bp, Homo sapien
aacttttcctagagccttggcatca

SEQ ID NO: 3510783 - DNA, 25 bp, Homo sapien
tgaacataaaaggtgtccttgtatt

SEQ ID NO: 3510784 - DNA, 25 bp, Homo sapien
tcatccatatctctgggaaccttca

SEQ ID NO: 3510785 - DNA, 25 bp, Homo sapien
taaggagtgacattcttgctgatcc

SEQ ID NO: 3510786 - DNA, 25 bp, Homo sapien
tcactaagctgaggaaaatttttat

SEQ ID NO: 3510787 - DNA, 25 bp, Homo sapien
aacataacaaaagctgcagataaga

SEQ ID NO: 3510788 - DNA, 25 bp, Homo sapien
gctgatccagcttctacccaggatt

SEQ ID NO: 3510789 - DNA, 25 bp, Homo sapien
taggacctgagatagcatactgggc

SEQ ID NO: 3510790 - DNA, 25 bp, Homo sapien
gctcatcgaccaaacagactctact

SEQ ID NO: 3510791 - DNA, 25 bp, Homo sapien
cccaatcatgagtattataagcaga

SEQ ID NO: 3510792 - DNA, 25 bp, Homo sapien
gagagctggagaacaagaataggac

SEQ ID NO: 3510793 - DNA, 25 bp, Homo sapien
aatgcttgctatgcttgtgcatctt

SEQ ID NO: 3510794 - DNA, 25 bp, Homo sapien
ggaatgcttgctatgcttgtgcatc

SEQ ID NO: 3510795 - DNA, 25 bp, Homo sapien
gaatgcttgctatgcttgtgcatct

SEQ ID NO: 3510796 - DNA, 25 bp, Homo sapien
gacccgaggattggcatcctggata

SEQ ID NO: 3510797 - DNA, 25 bp, Homo sapien
ggacccgaggattggcatcctggat

SEQ ID NO: 3510798 - DNA, 25 bp, Homo sapien
gggacccgaggattggcatcctgga

SEQ ID NO: 3510799 - DNA, 25 bp, Homo sapien
ctccagggcacccaatgttgggtgg

SEQ ID NO: 3510800 - DNA, 25 bp, Homo sapien
gaacctccagggcacccaatgttgg

SEQ ID NO: 3510801 - DNA, 25 bp, Homo sapien
cagggcacccaatgttgggtggata

SEQ ID NO: 3510802 - DNA, 25 bp, Homo sapien
gaaagggtgggttgataggtggtga

SEQ ID NO: 3510803 - DNA, 25 bp, Homo sapien
gatgataactacttatttgtcaaag

SEQ ID NO: 3510804 - DNA, 25 bp, Homo sapien
caggaacattctgacacatcctgaa

SEQ ID NO: 3510805 - DNA, 25 bp, Homo sapien
atatatgtgtcacttaatagaatac

SEQ ID NO: 3510806 - DNA, 25 bp, Homo sapien
gtatcatggaatttacaggaacatt

SEQ ID NO: 3510807 - DNA, 25 bp, Homo sapien
ttatctggcaaagcacaatggctca

SEQ ID NO: 3510808 - DNA, 25 bp, Homo sapien
cttatccaaaccttacttatctggc

SEQ ID NO: 3510809 - DNA, 25 bp, Homo sapien
cataaaagtttcacactaaccttca

SEQ ID NO: 3510810 - DNA, 25 bp, Homo sapien
ctttctcctagcctggaataccctt

SEQ ID NO: 3510811 - DNA, 25 bp, Homo sapien
cttgtgctgcgcgagcgcccaagcc

SEQ ID NO: 3510812 - DNA, 25 bp, Homo sapien
ctctccgagaatagcgggggtcctt

SEQ ID NO: 3510813 - DNA, 25 bp, Homo sapien
tcggcgtccggccttgtgctgcgcg

SEQ ID NO: 3510814 - DNA, 25 bp, Homo sapien
tttccccgcgactctccgagaatag

SEQ ID NO: 3510815 - DNA, 25 bp, Homo sapien
tgagcgcccaactgcgatcgttcgg

SEQ ID NO: 3510816 - DNA, 25 bp, Homo sapien
gggtcgtgtggtgagcgcccaactg

SEQ ID NO: 3510817 - DNA, 25 bp, Homo sapien
ggcgactctgcctttcgccatggct

SEQ ID NO: 3510818 - DNA, 25 bp, Homo sapien
ttcggcgactctgcctttcgccatg

SEQ ID NO: 3510819 - DNA, 25 bp, Homo sapien
acggctagagccacttccggcgcga

SEQ ID NO: 3510820 - DNA, 25 bp, Homo sapien
tgttgcaggctccttactacgccga

SEQ ID NO: 3510821 - DNA, 25 bp, Homo sapien
gtgaagggagcggtgcggtgccgcg

SEQ ID NO: 3510822 - DNA, 25 bp, Homo sapien
ttactacgccgaagcgccacggcta

SEQ ID NO: 3510823 - DNA, 25 bp, Homo sapien
tcagcccagcgagtactgcaacctc

SEQ ID NO: 3510824 - DNA, 25 bp, Homo sapien
ctcagcccagcgagtactgcaacct

SEQ ID NO: 3510825 - DNA, 25 bp, Homo sapien
taaccgcgagacaagtcagggtcct

SEQ ID NO: 3510826 - DNA, 25 bp, Homo sapien
cccagtaaccgcgagacaagtcagg

SEQ ID NO: 3510827 - DNA, 25 bp, Homo sapien
agacaagtcagggtcctggaccgcc

SEQ ID NO: 3510828 - DNA, 25 bp, Homo sapien
gccggcccagtaaccgcgagacaag

SEQ ID NO: 3510829 - DNA, 25 bp, Homo sapien
cagagagccagagaaggaggatgtt

SEQ ID NO: 3510830 - DNA, 25 bp, Homo sapien
gagagccagagaaggaggatgttgt

SEQ ID NO: 3510831 - DNA, 25 bp, Homo sapien
tcagagagccagagaaggaggatgt

SEQ ID NO: 3510832 - DNA, 25 bp, Homo sapien
agagccagagaaggaggatgttgtc

SEQ ID NO: 3510833 - DNA, 25 bp, Homo sapien
gctgtcagacaaggcagaccaaaag

SEQ ID NO: 3510834 - DNA, 25 bp, Homo sapien
aaagaagaagccgactatggttgca

SEQ ID NO: 3510835 - DNA, 25 bp, Homo sapien
ccgactatggttgcagggtagccag

SEQ ID NO: 3510836 - DNA, 25 bp, Homo sapien
ggaagctgtcagacaaggcagacca

SEQ ID NO: 3510837 - DNA, 25 bp, Homo sapien
gggaaaggcctaggctcctgtcaag

SEQ ID NO: 3510838 - DNA, 25 bp, Homo sapien
ttggggaaaggcctaggctcctgtc

SEQ ID NO: 3510839 - DNA, 25 bp, Homo sapien
ctaggctcctgtcaagggcaatcat

SEQ ID NO: 3510840 - DNA, 25 bp, Homo sapien
aaggcctaggctcctgtcaagggca

SEQ ID NO: 3510841 - DNA, 25 bp, Homo sapien
ccggaagacacggacactcatactc

SEQ ID NO: 3510842 - DNA, 25 bp, Homo sapien
caggccggaagacacggacactcat

SEQ ID NO: 3510843 - DNA, 25 bp, Homo sapien
cacggacactcatactcatgtccag

SEQ ID NO: 3510844 - DNA, 25 bp, Homo sapien
agacacggacactcatactcatgtc

SEQ ID NO: 3510845 - DNA, 25 bp, Homo sapien
tgcccagttagaacctctaagagac

SEQ ID NO: 3510846 - DNA, 25 bp, Homo sapien
gggcttcgtctgagagctagcttct

SEQ ID NO: 3510847 - DNA, 25 bp, Homo sapien
tcaaagccggatgtgagcaactcag

SEQ ID NO: 3510848 - DNA, 25 bp, Homo sapien
ctctttgtgagggtgttgattcgct

SEQ ID NO: 3510849 - DNA, 25 bp, Homo sapien
gaaaatacaatgttgaagcaccaac

SEQ ID NO: 3510850 - DNA, 25 bp, Homo sapien
ctgaaaatacaatgttgaagcacca

SEQ ID NO: 3510851 - DNA, 25 bp, Homo sapien
tgaaaatacaatgttgaagcaccaa

SEQ ID NO: 3510852 - DNA, 25 bp, Homo sapien
ctaaaccagaagccgcctcagagtg

SEQ ID NO: 3510853 - DNA, 25 bp, Homo sapien
aggctgctgcggcttagatttactg

SEQ ID NO: 3510854 - DNA, 25 bp, Homo sapien
agaagccgcctcagagtgagtgtca

SEQ ID NO: 3510855 - DNA, 25 bp, Homo sapien
tttactgggcctcttaagttgctgc

SEQ ID NO: 3510856 - DNA, 25 bp, Homo sapien
cctttgaactttagccaagtggcta

SEQ ID NO: 3510857 - DNA, 25 bp, Homo sapien
cccggccaaatgaacgtctttcctg

SEQ ID NO: 3510858 - DNA, 25 bp, Homo sapien
aagtggctagagttctactacttga

SEQ ID NO: 3510859 - DNA, 25 bp, Homo sapien
gattatcagacttatctgtctgaaa

SEQ ID NO: 3510860 - DNA, 25 bp, Homo sapien
ccacactgcctttgataatgtctct

SEQ ID NO: 3510861 - DNA, 25 bp, Homo sapien
actgcctttgataatgtctctccat

SEQ ID NO: 3510862 - DNA, 25 bp, Homo sapien
ctctcccacactgcctttgataatg

SEQ ID NO: 3510863 - DNA, 25 bp, Homo sapien
tcccacactgcctttgataatgtct

SEQ ID NO: 3510864 - DNA, 25 bp, Homo sapien
tcaggggcttggaaggacacctaag

SEQ ID NO: 3510865 - DNA, 25 bp, Homo sapien
atgcagcgcatttggagaaggcccg

SEQ ID NO: 3510866 - DNA, 25 bp, Homo sapien
agcggaagccgctgagtcatggtgg

SEQ ID NO: 3510867 - DNA, 25 bp, Homo sapien
ccggcggctccagcattactgagca

SEQ ID NO: 3510868 - DNA, 25 bp, Homo sapien
aaataaatcttgaaagctggctggg

SEQ ID NO: 3510869 - DNA, 25 bp, Homo sapien
gaaaataaatcttgaaagctggctg

SEQ ID NO: 3510870 - DNA, 25 bp, Homo sapien
taaatcttgaaagctggctgggcac

SEQ ID NO: 3510871 - DNA, 25 bp, Homo sapien
aataaatcttgaaagctggctgggc

SEQ ID NO: 3510872 - DNA, 25 bp, Homo sapien
actgtaccagccctccatgatgtga

SEQ ID NO: 3510873 - DNA, 25 bp, Homo sapien
tgggttgctgcctacttctccctgc

SEQ ID NO: 3510874 - DNA, 25 bp, Homo sapien
tccattgacctagtgataggtatct

SEQ ID NO: 3510875 - DNA, 25 bp, Homo sapien
tctgaaatataaacctagaactggg

SEQ ID NO: 3510876 - DNA, 25 bp, Homo sapien
ctttcgcgccggttgccgctgcgga

SEQ ID NO: 3510877 - DNA, 25 bp, Homo sapien
tctgtaggaacgacagctcaggcag

SEQ ID NO: 3510878 - DNA, 25 bp, Homo sapien
cacgccgaggcgaagaggttctatc

SEQ ID NO: 3510879 - DNA, 25 bp, Homo sapien
aggaagtcgccggagcatctcccgc

SEQ ID NO: 3510880 - DNA, 25 bp, Homo sapien
cagtataaaactcaaaggtagatgt

SEQ ID NO: 3510881 - DNA, 25 bp, Homo sapien
ggcatgggctacaggactatttaaa

SEQ ID NO: 3510882 - DNA, 25 bp, Homo sapien
cacctatgagtatttgtccaatttc

SEQ ID NO: 3510883 - DNA, 25 bp, Homo sapien
tcatattgaaacaagcctgctagcc

SEQ ID NO: 3510884 - DNA, 25 bp, Homo sapien
tgtagagaggttggcttgcttccct

SEQ ID NO: 3510885 - DNA, 25 bp, Homo sapien
gaaggcacatggttccctccaaaaa

SEQ ID NO: 3510886 - DNA, 25 bp, Homo sapien
cctagaaggagtacaaaatgcacac

SEQ ID NO: 3510887 - DNA, 25 bp, Homo sapien
tctaacgtgtgtgggtgaaaactgt

SEQ ID NO: 3510888 - DNA, 25 bp, Homo sapien
tatagagcatgagtggcaaaaccac

SEQ ID NO: 3510889 - DNA, 25 bp, Homo sapien
gatgtagcccctgaagcaagcataa

SEQ ID NO: 3510890 - DNA, 25 bp, Homo sapien
tatcagtttctagatgaggctgcag

SEQ ID NO: 3510891 - DNA, 25 bp, Homo sapien
tagtgactgctatactcaactctgg

SEQ ID NO: 3510892 - DNA, 25 bp, Homo sapien
tatttactatccacacttagagggc

SEQ ID NO: 3510893 - DNA, 25 bp, Homo sapien
catcagtggtgtctccccgaggaat

SEQ ID NO: 3510894 - DNA, 25 bp, Homo sapien
aactatccgttggttagggcctgca

SEQ ID NO: 3510895 - DNA, 25 bp, Homo sapien
tacaagaagcattaaccgcaacggc

SEQ ID NO: 3510896 - DNA, 25 bp, Homo sapien
tctcggaggttcgtatataaatgtg

SEQ ID NO: 3510897 - DNA, 25 bp, Homo sapien
tcagacacactatgcgggttgcggg

SEQ ID NO: 3510898 - DNA, 25 bp, Homo sapien
tgtgtttttacccagtgtgcattat

SEQ ID NO: 3510899 - DNA, 25 bp, Homo sapien
gtgtgcattattctccgcctggccg

SEQ ID NO: 3510900 - DNA, 25 bp, Homo sapien
cgtatcgtgggcagattgtttcccc

SEQ ID NO: 3510901 - DNA, 25 bp, Homo sapien
gaaacgtattattgtggaacgcgaa

SEQ ID NO: 3510902 - DNA, 25 bp, Homo sapien
aaggttactgaggtctaacatcgga

SEQ ID NO: 3510903 - DNA, 25 bp, Homo sapien
cgcttgcttcccatgcgtatcgtgg

SEQ ID NO: 3510904 - DNA, 25 bp, Homo sapien
cattgatggaagtgaaagtgtagca

SEQ ID NO: 3510905 - DNA, 25 bp, Homo sapien
tagcaggtactggaatgattggaga

SEQ ID NO: 3510906 - DNA, 25 bp, Homo sapien
tgcaggtatgtaaagctacttttta

SEQ ID NO: 3510907 - DNA, 25 bp, Homo sapien
tgtacttaaccagcctaaaccatta

SEQ ID NO: 3510908 - DNA, 25 bp, Homo sapien
aatggtgcagtgttggttcaagtta

SEQ ID NO: 3510909 - DNA, 25 bp, Homo sapien
gtgcagtgttggttcaagttatcct

SEQ ID NO: 3510910 - DNA, 25 bp, Homo sapien
tggtgcagtgttggttcaagttatc

SEQ ID NO: 3510911 - DNA, 25 bp, Homo sapien
ggtgcagtgttggttcaagttatcc

SEQ ID NO: 3510912 - DNA, 25 bp, Homo sapien
gaacacctactatttcctgacacag

SEQ ID NO: 3510913 - DNA, 25 bp, Homo sapien
tattaggcattatcttgttgaacat

SEQ ID NO: 3510914 - DNA, 25 bp, Homo sapien
cctgacacagttaatattaggcatt

SEQ ID NO: 3510915 - DNA, 25 bp, Homo sapien
tagtagtagtatgtccagcaggtat

SEQ ID NO: 3510916 - DNA, 25 bp, Homo sapien
aggcatgctccaccaggcccgccta

SEQ ID NO: 3510917 - DNA, 25 bp, Homo sapien
caccaggcccgcctaattttgtgtt

SEQ ID NO: 3510918 - DNA, 25 bp, Homo sapien
gcatgctccaccaggcccgcctaat

SEQ ID NO: 3510919 - DNA, 25 bp, Homo sapien
atgctccaccaggcccgcctaattt

SEQ ID NO: 3510920 - DNA, 25 bp, Homo sapien
ctgttgggcggggtagaagaccaga

SEQ ID NO: 3510921 - DNA, 25 bp, Homo sapien
caaccaccgatcgagtcttcattct

SEQ ID NO: 3510922 - DNA, 25 bp, Homo sapien
cgagtcttcattcttgacagagaca

SEQ ID NO: 3510923 - DNA, 25 bp, Homo sapien
tagtcaaccaccgatcgagtcttca

SEQ ID NO: 3510924 - DNA, 25 bp, Homo sapien
tttgtctccttgcacaatctggcag

SEQ ID NO: 3510925 - DNA, 25 bp, Homo sapien
ctggcagcctcttttggttttatag

SEQ ID NO: 3510926 - DNA, 25 bp, Homo sapien
gatacttccaggagtagctcagatt

SEQ ID NO: 3510927 - DNA, 25 bp, Homo sapien
tttatagccagtgttgaccaagatg

SEQ ID NO: 3510928 - DNA, 25 bp, Homo sapien
gacaataggctgtcaatagattcta

SEQ ID NO: 3510929 - DNA, 25 bp, Homo sapien
caatagattctatcccaagttcttg

SEQ ID NO: 3510930 - DNA, 25 bp, Homo sapien
ggaaagtcacttgctcatccacagg

SEQ ID NO: 3510931 - DNA, 25 bp, Homo sapien
tcaaccatgactggagacaataggc

SEQ ID NO: 3510932 - DNA, 25 bp, Homo sapien
gaattagacttgtatatcccactgg

SEQ ID NO: 3510933 - DNA, 25 bp, Homo sapien
gaaaagggacatgctaaaagactca

SEQ ID NO: 3510934 - DNA, 25 bp, Homo sapien
tcccactgggagcactttgtaggca

SEQ ID NO: 3510935 - DNA, 25 bp, Homo sapien
tgtcactgttggatgttacaccagc

SEQ ID NO: 3510936 - DNA, 25 bp, Homo sapien
tatttatcatctacgtgctaagtgt

SEQ ID NO: 3510937 - DNA, 25 bp, Homo sapien
tttcaagtagctggcgacacaagtg

SEQ ID NO: 3510938 - DNA, 25 bp, Homo sapien
caattacaaagctacagcatcagga

SEQ ID NO: 3510939 - DNA, 25 bp, Homo sapien
gaactctgtgacaaaatccccattt

SEQ ID NO: 3510940 - DNA, 25 bp, Homo sapien
gcccaatgaccaggtctgtactata

SEQ ID NO: 3510941 - DNA, 25 bp, Homo sapien
gggtgagtgcccaatgaccaggtct

SEQ ID NO: 3510942 - DNA, 25 bp, Homo sapien
tccttgttacatagggtgagtgccc

SEQ ID NO: 3510943 - DNA, 25 bp, Homo sapien
gaaattgtccttgttacatagggtg

SEQ ID NO: 3510944 - DNA, 25 bp, Homo sapien
gaaggctttaaaggccaagaaggca

SEQ ID NO: 3510945 - DNA, 25 bp, Homo sapien
cacaaaaaaaagatccacacgtcac

SEQ ID NO: 3510946 - DNA, 25 bp, Homo sapien
gacagcccgaatatcctcggaagag

SEQ ID NO: 3510947 - DNA, 25 bp, Homo sapien
cagtgttgaacggtgtccacagcca

SEQ ID NO: 3510948 - DNA, 25 bp, Homo sapien
gtttcctggggcctcgagcttcctg

SEQ ID NO: 3510949 - DNA, 25 bp, Homo sapien
ggcccgcggttctggcagtcagcgc

SEQ ID NO: 3510950 - DNA, 25 bp, Homo sapien
ttctggcagtcagcgcggaatgcca

SEQ ID NO: 3510951 - DNA, 25 bp, Homo sapien
gggcattcgccccaccacgttgccg

SEQ ID NO: 3510952 - DNA, 25 bp, Homo sapien
cctctccgaccccagggcattcgcc

SEQ ID NO: 3510953 - DNA, 25 bp, Homo sapien
cttgtcccgcttccctcgcagtata

SEQ ID NO: 3510954 - DNA, 25 bp, Homo sapien
gattttccaggtcactcggaagctg

SEQ ID NO: 3510955 - DNA, 25 bp, Homo sapien
ctagatgagttctgggcgctgattt

SEQ ID NO: 3510956 - DNA, 25 bp, Homo sapien
caggtcactcggaagctgctctctg

SEQ ID NO: 3510957 - DNA, 25 bp, Homo sapien
ctagaaccgcgtttacgtgccgaag

SEQ ID NO: 3510958 - DNA, 25 bp, Homo sapien
cgtgccgaagtctcaatcagattaa

SEQ ID NO: 3510959 - DNA, 25 bp, Homo sapien
ctattgtgtgttagatacgggtaag

SEQ ID NO: 3510960 - DNA, 25 bp, Homo sapien
taagtcgtgcactgagccagtccgg

SEQ ID NO: 3510961 - DNA, 25 bp, Homo sapien
cggcagctgaacatttccgtgagaa

SEQ ID NO: 3510962 - DNA, 25 bp, Homo sapien
cagagtctctggagcgaggctctct

SEQ ID NO: 3510963 - DNA, 25 bp, Homo sapien
tagaatccctttcgggctttgttgc

SEQ ID NO: 3510964 - DNA, 25 bp, Homo sapien
gagcaactgtcccagtagaatccct

SEQ ID NO: 3510965 - DNA, 25 bp, Homo sapien
aatgctggtctaaggtcaatgctca

SEQ ID NO: 3510966 - DNA, 25 bp, Homo sapien
gctcagcaggtttatggattcagaa

SEQ ID NO: 3510967 - DNA, 25 bp, Homo sapien
aactcattgcactagcactgaagcc

SEQ ID NO: 3510968 - DNA, 25 bp, Homo sapien
ctgaagcccccttgagggcccgaag

SEQ ID NO: 3510969 - DNA, 25 bp, Homo sapien
cagaagcgtgatgcttcagactaat

SEQ ID NO: 3510970 - DNA, 25 bp, Homo sapien
tcattatcatcagaagcgtgatgct

SEQ ID NO: 3510971 - DNA, 25 bp, Homo sapien
tcctaatctcattatcatcagaagc

SEQ ID NO: 3510972 - DNA, 25 bp, Homo sapien
gatgcttcagactaatcataatcat

SEQ ID NO: 3510973 - DNA, 25 bp, Homo sapien
gctggagctcttgaaaactcttcag

SEQ ID NO: 3510974 - DNA, 25 bp, Homo sapien
gtcagctttaggatacttaatgcaa

SEQ ID NO: 3510975 - DNA, 25 bp, Homo sapien
ggacatcaccggagaagagcaaaga

SEQ ID NO: 3510976 - DNA, 25 bp, Homo sapien
aatgcaatagtctctcatcagttca

SEQ ID NO: 3510977 - DNA, 25 bp, Homo sapien
tcaagacgcggtcatttgtgtgagg

SEQ ID NO: 3510978 - DNA, 25 bp, Homo sapien
agcacccaaaatggcccgaactggt

SEQ ID NO: 3510979 - DNA, 25 bp, Homo sapien
catttgtgtgaggtgttgtactcga

SEQ ID NO: 3510980 - DNA, 25 bp, Homo sapien
ttgtactcgagcacccaaaatggcc

SEQ ID NO: 3510981 - DNA, 25 bp, Homo sapien
aagcattcttgccaccaggcgtggc

SEQ ID NO: 3510982 - DNA, 25 bp, Homo sapien
cgtggcttgactcgcagaacccaca

SEQ ID NO: 3510983 - DNA, 25 bp, Homo sapien
cagaacccacactctggcggctgtg

SEQ ID NO: 3510984 - DNA, 25 bp, Homo sapien
tgtgggcgcggcactggaccggcgc

SEQ ID NO: 3510985 - DNA, 25 bp, Homo sapien
ggtcaggtgactgcgcggcgggctg

SEQ ID NO: 3510986 - DNA, 25 bp, Homo sapien
gggtcaggtgactgcgcggcgggct

SEQ ID NO: 3510987 - DNA, 25 bp, Homo sapien
caggtgactgcgcggcgggctgtgg

SEQ ID NO: 3510988 - DNA, 25 bp, Homo sapien
gtcaggtgactgcgcggcgggctgt

SEQ ID NO: 3510989 - DNA, 25 bp, Homo sapien
cgaccctccccggcgcgctctgtac

SEQ ID NO: 3510990 - DNA, 25 bp, Homo sapien
ccgaccctccccggcgcgctctgta

SEQ ID NO: 3510991 - DNA, 25 bp, Homo sapien
tctgagaccgggatttggtgtttac

SEQ ID NO: 3510992 - DNA, 25 bp, Homo sapien
tgggaagctcccttacacagccttc

SEQ ID NO: 3510993 - DNA, 25 bp, Homo sapien
tgcccaaggtcgctgggcagaacct

SEQ ID NO: 3510994 - DNA, 25 bp, Homo sapien
tcgggccatgccctcggttggatgt

SEQ ID NO: 3510995 - DNA, 25 bp, Homo sapien
gctttttcagagtcgttattgtgac

SEQ ID NO: 3510996 - DNA, 25 bp, Homo sapien
ggcaccctgcaaaagcgactgcttt

SEQ ID NO: 3510997 - DNA, 25 bp, Homo sapien
gtcgttattgtgactgccggagacc

SEQ ID NO: 3510998 - DNA, 25 bp, Homo sapien
tgaggagcgctgatctttctggcac

SEQ ID NO: 3510999 - DNA, 25 bp, Homo sapien
tgagagtacgtaggcctttatctct

SEQ ID NO: 3511000 - DNA, 25 bp, Homo sapien
gactggctccccacctgagttgaga

SEQ ID NO: 3511001 - DNA, 25 bp, Homo sapien
ggcaatctgtgcaccttctaccggg

SEQ ID NO: 3511002 - DNA, 25 bp, Homo sapien
cagttgtaacttgactggctcccca

SEQ ID NO: 3511003 - DNA, 25 bp, Homo sapien
cacgttcatagaagtcatcagctct

SEQ ID NO: 3511004 - DNA, 25 bp, Homo sapien
tgcacgttcatagaagtcatcagct

SEQ ID NO: 3511005 - DNA, 25 bp, Homo sapien
cgttcatagaagtcatcagctctgt

SEQ ID NO: 3511006 - DNA, 25 bp, Homo sapien
ctgtgcacgttcatagaagtcatca

SEQ ID NO: 3511007 - DNA, 25 bp, Homo sapien
cttgatttgcaattggattgttaaa

SEQ ID NO: 3511008 - DNA, 25 bp, Homo sapien
ttgatttgcaattggattgttaaat

SEQ ID NO: 3511009 - DNA, 25 bp, Homo sapien
tgatttgcaattggattgttaaata

SEQ ID NO: 3511010 - DNA, 25 bp, Homo sapien
agttgctacctgctttagatgcttc

SEQ ID NO: 3511011 - DNA, 25 bp, Homo sapien
tgctttggagttgctacctgcttta

SEQ ID NO: 3511012 - DNA, 25 bp, Homo sapien
tcaatgctttggagttgctacctgc

SEQ ID NO: 3511013 - DNA, 25 bp, Homo sapien
tggagttgctacctgctttagatgc

SEQ ID NO: 3511014 - DNA, 25 bp, Homo sapien
ctggtgatctgtatacattgatcag

SEQ ID NO: 3511015 - DNA, 25 bp, Homo sapien
cacaaatggttgatctgtatacact

SEQ ID NO: 3511016 - DNA, 25 bp, Homo sapien
ttgtacacaaatggttgatctgtat

SEQ ID NO: 3511017 - DNA, 25 bp, Homo sapien
tgtatacattgatcagcacttgttt

SEQ ID NO: 3511018 - DNA, 25 bp, Homo sapien
aagcaacagtaactccgtggacagc

SEQ ID NO: 3511019 - DNA, 25 bp, Homo sapien
acctcaggtgttcttatgctagtgc

SEQ ID NO: 3511020 - DNA, 25 bp, Homo sapien
gtgtattagaccaacgagacttagg

SEQ ID NO: 3511021 - DNA, 25 bp, Homo sapien
tgctagtgcttgctgagtgcatact

SEQ ID NO: 3511022 - DNA, 25 bp, Homo sapien
gattgtgcacccacaggaatgcagg

SEQ ID NO: 3511023 - DNA, 25 bp, Homo sapien
gaactttctgggatgctgtcaatgg

SEQ ID NO: 3511024 - DNA, 25 bp, Homo sapien
tctgtaccggacttctaggatgctg

SEQ ID NO: 3511025 - DNA, 25 bp, Homo sapien
taggagagcagcgttactgtccaac

SEQ ID NO: 3511026 - DNA, 25 bp, Homo sapien
cccaatcaggcctttagggcactaa

SEQ ID NO: 3511027 - DNA, 25 bp, Homo sapien
tttctagagctgttgccctcccagc

SEQ ID NO: 3511028 - DNA, 25 bp, Homo sapien
cctgggctacaaacaatcagtgctt

SEQ ID NO: 3511029 - DNA, 25 bp, Homo sapien
gatactgtacaggtgatgtgtcctc

SEQ ID NO: 3511030 - DNA, 25 bp, Homo sapien
caggtgactgcggttggtcagccat

SEQ ID NO: 3511031 - DNA, 25 bp, Homo sapien
tcaaggctactactggagagtccgg

SEQ ID NO: 3511032 - DNA, 25 bp, Homo sapien
cggttggtcagccattcaaggctac

SEQ ID NO: 3511033 - DNA, 25 bp, Homo sapien
ctgggccaggccacttaatgggcct

SEQ ID NO: 3511034 - DNA, 25 bp, Homo sapien
atttccacaggcaagtctgtaactt

SEQ ID NO: 3511035 - DNA, 25 bp, Homo sapien
tttccacaggcaagtctgtaacttc

SEQ ID NO: 3511036 - DNA, 25 bp, Homo sapien
tccacaggcaagtctgtaacttctg

SEQ ID NO: 3511037 - DNA, 25 bp, Homo sapien
ttccacaggcaagtctgtaacttct

SEQ ID NO: 3511038 - DNA, 25 bp, Homo sapien
tcgccataatctcactctgcagaca

SEQ ID NO: 3511039 - DNA, 25 bp, Homo sapien
aagaataaaatgcttcgccataatc

SEQ ID NO: 3511040 - DNA, 25 bp, Homo sapien
gcttcgccataatctcactctgcag

SEQ ID NO: 3511041 - DNA, 25 bp, Homo sapien
aaaatgcttcgccataatctcactc

SEQ ID NO: 3511042 - DNA, 25 bp, Homo sapien
aggaaacgaccctgtggcgcaggtc

SEQ ID NO: 3511043 - DNA, 25 bp, Homo sapien
gaaacaggaacatgcggttcaaccg

SEQ ID NO: 3511044 - DNA, 25 bp, Homo sapien
cttgggaggtcctgaaatgacccca

SEQ ID NO: 3511045 - DNA, 25 bp, Homo sapien
aatgcatacgctttcgagggaagga

SEQ ID NO: 3511046 - DNA, 25 bp, Homo sapien
ggcgtgcgccacgcccgcaggttcc

SEQ ID NO: 3511047 - DNA, 25 bp, Homo sapien
aggcgtgcgccacgcccgcaggttc

SEQ ID NO: 3511048 - DNA, 25 bp, Homo sapien
gcgtgcgccacgcccgcaggttcca

SEQ ID NO: 3511049 - DNA, 25 bp, Homo sapien
cagtgtgcggtggtcgctccgctcc

SEQ ID NO: 3511050 - DNA, 25 bp, Homo sapien
gccgactagggtcgggtccagtgtg

SEQ ID NO: 3511051 - DNA, 25 bp, Homo sapien
ctgtccaccggggaggaaagccacg

SEQ ID NO: 3511052 - DNA, 25 bp, Homo sapien
gaggaaagccacgagcactgagcgc

SEQ ID NO: 3511053 - DNA, 25 bp, Homo sapien
gaagagacaaagatagacttgggac

SEQ ID NO: 3511054 - DNA, 25 bp, Homo sapien
cctggagcgggcttgccgagcctac

SEQ ID NO: 3511055 - DNA, 25 bp, Homo sapien
tgggacagataaggacagagacagc

SEQ ID NO: 3511056 - DNA, 25 bp, Homo sapien
tctgcggccgccgagatgggaagtg

SEQ ID NO: 3511057 - DNA, 25 bp, Homo sapien
tgttggaggaagacgcggtcatgag

SEQ ID NO: 3511058 - DNA, 25 bp, Homo sapien
ttggaggaagacgcggtcatgaggg

SEQ ID NO: 3511059 - DNA, 25 bp, Homo sapien
gttggaggaagacgcggtcatgagg

SEQ ID NO: 3511060 - DNA, 25 bp, Homo sapien
atgttggaggaagacgcggtcatga

SEQ ID NO: 3511061 - DNA, 25 bp, Homo sapien
tttggtatggtagaaaaatggattg

SEQ ID NO: 3511062 - DNA, 25 bp, Homo sapien
tctgggcctggtctcgtgtgtgcac

SEQ ID NO: 3511063 - DNA, 25 bp, Homo sapien
ctctgggcctggtctcgtgtgtgca

SEQ ID NO: 3511064 - DNA, 25 bp, Homo sapien
atgtagagtcaatgagggacgagct

SEQ ID NO: 3511065 - DNA, 25 bp, Homo sapien
tagagtcaatgagggacgagctcgc

SEQ ID NO: 3511066 - DNA, 25 bp, Homo sapien
caatgagggacgagctcgctgagtc

SEQ ID NO: 3511067 - DNA, 25 bp, Homo sapien
gagggacgagctcgctgagtctcca

SEQ ID NO: 3511068 - DNA, 25 bp, Homo sapien
gccgcgtgccactgagtcatagcta

SEQ ID NO: 3511069 - DNA, 25 bp, Homo sapien
cagatgccatatacacctgagtgtg

SEQ ID NO: 3511070 - DNA, 25 bp, Homo sapien
gcaagcgcctatgctcatgcctgca

SEQ ID NO: 3511071 - DNA, 25 bp, Homo sapien
cctcagagagcacgtgcctgcatgt

SEQ ID NO: 3511072 - DNA, 25 bp, Homo sapien
tcagagacctgagatgcaggacaga

SEQ ID NO: 3511073 - DNA, 25 bp, Homo sapien
ttcttgggaactctgccccaaatgt

SEQ ID NO: 3511074 - DNA, 25 bp, Homo sapien
cccagagaggactggttctggattg

SEQ ID NO: 3511075 - DNA, 25 bp, Homo sapien
aggaggcctggttccacttgagatc

SEQ ID NO: 3511076 - DNA, 25 bp, Homo sapien
caggcatcctgtcactggcaatggg

SEQ ID NO: 3511077 - DNA, 25 bp, Homo sapien
cttgtttaggacatcatggcccacc

SEQ ID NO: 3511078 - DNA, 25 bp, Homo sapien
caataggcctagaggcccatggctc

SEQ ID NO: 3511079 - DNA, 25 bp, Homo sapien
tgtagcacccttgtttaggacatca

SEQ ID NO: 3511080 - DNA, 25 bp, Homo sapien
gaagtatacattgatttggcctgga

SEQ ID NO: 3511081 - DNA, 25 bp, Homo sapien
gaaaggcagaagcttacaggtcaca

SEQ ID NO: 3511082 - DNA, 25 bp, Homo sapien
gacatcaaccgacacatgtgaagta

SEQ ID NO: 3511083 - DNA, 25 bp, Homo sapien
ggtcctgagaatacaagcccaaggt

SEQ ID NO: 3511084 - DNA, 25 bp, Homo sapien
ggctagatcagcatgctcttgagac

SEQ ID NO: 3511085 - DNA, 25 bp, Homo sapien
taaccaaggaagtactgtctagaac

SEQ ID NO: 3511086 - DNA, 25 bp, Homo sapien
tgagactgaggagaaccgaaagctc

SEQ ID NO: 3511087 - DNA, 25 bp, Homo sapien
ggctctgccctagatgaaaacttgc

SEQ ID NO: 3511088 - DNA, 25 bp, Homo sapien
tggcagcacatatgagaatcttggc

SEQ ID NO: 3511089 - DNA, 25 bp, Homo sapien
cagcttattagagacagtggtagga

SEQ ID NO: 3511090 - DNA, 25 bp, Homo sapien
tctggaacccagaagctcatgctaa

SEQ ID NO: 3511091 - DNA, 25 bp, Homo sapien
ctagttacttcttgagcaaagggca

SEQ ID NO: 3511092 - DNA, 25 bp, Homo sapien
aacctttagtcccatgtatgaatcc

SEQ ID NO: 3511093 - DNA, 25 bp, Homo sapien
tagtcccatgtatgaatcctgagtg

SEQ ID NO: 3511094 - DNA, 25 bp, Homo sapien
gcactacagaatgaactttagttca

SEQ ID NO: 3511095 - DNA, 25 bp, Homo sapien
atgctgtgcactacagaatgaactt

SEQ ID NO: 3511096 - DNA, 25 bp, Homo sapien
caaaagaagcactgtgtatagtctc

SEQ ID NO: 3511097 - DNA, 25 bp, Homo sapien
tagtgaatgtgaggcaatgtaatgc

SEQ ID NO: 3511098 - DNA, 25 bp, Homo sapien
cttcacgaaagttaaagtaatccag

SEQ ID NO: 3511099 - DNA, 25 bp, Homo sapien
tagctgaaggtacaatgggctccat

SEQ ID NO: 3511100 - DNA, 25 bp, Homo sapien
agatacataagaacacaaggccctg

SEQ ID NO: 3511101 - DNA, 25 bp, Homo sapien
tggtcctaaatagctggcctctgtc

SEQ ID NO: 3511102 - DNA, 25 bp, Homo sapien
tgatctagctacctatgacgccagc

SEQ ID NO: 3511103 - DNA, 25 bp, Homo sapien
tgtcacaggtgcgtatggtcctaaa

SEQ ID NO: 3511104 - DNA, 25 bp, Homo sapien
tgcctgctactgaacaatgacgtct

SEQ ID NO: 3511105 - DNA, 25 bp, Homo sapien
aatgacgtctcttgttgtgaacccc

SEQ ID NO: 3511106 - DNA, 25 bp, Homo sapien
ggtcattgttgtaccattccctgga

SEQ ID NO: 3511107 - DNA, 25 bp, Homo sapien
tcagaataatgctgtgtgctccctc

SEQ ID NO: 3511108 - DNA, 25 bp, Homo sapien
gagcatctcaaaggtcaggcattac

SEQ ID NO: 3511109 - DNA, 25 bp, Homo sapien
gcttgttaaacaggtctccgaggaa

SEQ ID NO: 3511110 - DNA, 25 bp, Homo sapien
caggccctgggataacttgttgtca

SEQ ID NO: 3511111 - DNA, 25 bp, Homo sapien
tagatatagcaacccctgcaagagg

SEQ ID NO: 3511112 - DNA, 25 bp, Homo sapien
tgggcgcagaagttatacacacgtt

SEQ ID NO: 3511113 - DNA, 25 bp, Homo sapien
gagatacaactctggatcttgtcca

SEQ ID NO: 3511114 - DNA, 25 bp, Homo sapien
tatacacacgtttgctggtcttgag

SEQ ID NO: 3511115 - DNA, 25 bp, Homo sapien
catcctgggcgcagaagttatacac

SEQ ID NO: 3511116 - DNA, 25 bp, Homo sapien
taccatactgttattgcctttactt

SEQ ID NO: 3511117 - DNA, 25 bp, Homo sapien
tgtggtctctagagtcataggggat

SEQ ID NO: 3511118 - DNA, 25 bp, Homo sapien
cataggggatgttgatagaagggta

SEQ ID NO: 3511119 - DNA, 25 bp, Homo sapien
tttcttcctcaactaccatactgtt

SEQ ID NO: 3511120 - DNA, 25 bp, Homo sapien
agacacactgggagcgccttatttt

SEQ ID NO: 3511121 - DNA, 25 bp, Homo sapien
cactgggagcgccttattttgcatt

SEQ ID NO: 3511122 - DNA, 25 bp, Homo sapien
cacactgggagcgccttattttgca

SEQ ID NO: 3511123 - DNA, 25 bp, Homo sapien
tgcattttcttagtgtcgtctttga

SEQ ID NO: 3511124 - DNA, 25 bp, Homo sapien
gggatgcctgagattcatgcatacc

SEQ ID NO: 3511125 - DNA, 25 bp, Homo sapien
aatgcactgaaggtgagggagctcc

SEQ ID NO: 3511126 - DNA, 25 bp, Homo sapien
tagttggagccatattggaagccca

SEQ ID NO: 3511127 - DNA, 25 bp, Homo sapien
catgcataccataaagttggccttc

SEQ ID NO: 3511128 - DNA, 25 bp, Homo sapien
cctcacctgagtcatagtagcgcag

SEQ ID NO: 3511129 - DNA, 25 bp, Homo sapien
ggcctttacagcttgtgtcctcacc

SEQ ID NO: 3511130 - DNA, 25 bp, Homo sapien
gatgaccatttctacttcagccaga

SEQ ID NO: 3511131 - DNA, 25 bp, Homo sapien
cagccagatcaatgtggcctttaca

SEQ ID NO: 3511132 - DNA, 25 bp, Homo sapien
ctggaaccaaaaggatacaagtgag

SEQ ID NO: 3511133 - DNA, 25 bp, Homo sapien
tatatatgctgaactatgcctcgaa

SEQ ID NO: 3511134 - DNA, 25 bp, Homo sapien
tcctctgtaccttggttatatatgc

SEQ ID NO: 3511135 - DNA, 25 bp, Homo sapien
ttgcttctaggaagaactaggtggc

SEQ ID NO: 3511136 - DNA, 25 bp, Homo sapien
cagtctagtacttgcccacggtgaa

SEQ ID NO: 3511137 - DNA, 25 bp, Homo sapien
taccaggccgagctacttgggaaac

SEQ ID NO: 3511138 - DNA, 25 bp, Homo sapien
gaatggatgctttctgctgcgagga

SEQ ID NO: 3511139 - DNA, 25 bp, Homo sapien
tagagccacataatagccagggact

SEQ ID NO: 3511140 - DNA, 25 bp, Homo sapien
ctgatgttttgttacatccaaaaca

SEQ ID NO: 3511141 - DNA, 25 bp, Homo sapien
gatgttttgttacatccaaaacaaa

SEQ ID NO: 3511142 - DNA, 25 bp, Homo sapien
gggcttccaacctttcagcaaagcc

SEQ ID NO: 3511143 - DNA, 25 bp, Homo sapien
caacggggcttccaacctttcagca

SEQ ID NO: 3511144 - DNA, 25 bp, Homo sapien
gaaatgatgacaggagagttaattt

SEQ ID NO: 3511145 - DNA, 25 bp, Homo sapien
gatgacaggagagttaattttgatt

SEQ ID NO: 3511146 - DNA, 25 bp, Homo sapien
ttcaaaaatggcctataagagttct

SEQ ID NO: 3511147 - DNA, 25 bp, Homo sapien
aatggcctataagagttctccctgg

SEQ ID NO: 3511148 - DNA, 25 bp, Homo sapien
ctgtggtttagcctcaggtgctgtg

SEQ ID NO: 3511149 - DNA, 25 bp, Homo sapien
cctagcttattgagggacctgtggt

SEQ ID NO: 3511150 - DNA, 25 bp, Homo sapien
tataaaaggctgtactgcacaggcc

SEQ ID NO: 3511151 - DNA, 25 bp, Homo sapien
gcacagcgagcagggttcagcatgt

SEQ ID NO: 3511152 - DNA, 25 bp, Homo sapien
gatgtatactggctatagagcgtgg

SEQ ID NO: 3511153 - DNA, 25 bp, Homo sapien
tcttcgctccactccattggatggg

SEQ ID NO: 3511154 - DNA, 25 bp, Homo sapien
atcattcttggatgtatactggcta

SEQ ID NO: 3511155 - DNA, 25 bp, Homo sapien
tactggctatagagcgtggctgctc

SEQ ID NO: 3511156 - DNA, 25 bp, Homo sapien
gggatctcgacaggtgtctttggga

SEQ ID NO: 3511157 - DNA, 25 bp, Homo sapien
taggttggtagacacaattcctggg

SEQ ID NO: 3511158 - DNA, 25 bp, Homo sapien
caattcctggggatctcgacaggtg

SEQ ID NO: 3511159 - DNA, 25 bp, Homo sapien
gaaggtaggttggtagacacaattc

SEQ ID NO: 3511160 - DNA, 25 bp, Homo sapien
ctgccacttctcaggggcttggttc

SEQ ID NO: 3511161 - DNA, 25 bp, Homo sapien
tcaggggcttggttcaatttgtgct

SEQ ID NO: 3511162 - DNA, 25 bp, Homo sapien
ccacggttaccctttcccacagctg

SEQ ID NO: 3511163 - DNA, 25 bp, Homo sapien
acttctcaggggcttggttcaattt

SEQ ID NO: 3511164 - DNA, 25 bp, Homo sapien
gttgaggaaagtggtggacatgggc

SEQ ID NO: 3511165 - DNA, 25 bp, Homo sapien
tgagagctctagttggtgtgccgta

SEQ ID NO: 3511166 - DNA, 25 bp, Homo sapien
aaagtggtggacatgggcctgtgag

SEQ ID NO: 3511167 - DNA, 25 bp, Homo sapien
ccaggaatagtggtgagagctctag

SEQ ID NO: 3511168 - DNA, 25 bp, Homo sapien
agatggtttattaggacctataact

SEQ ID NO: 3511169 - DNA, 25 bp, Homo sapien
atggtttattaggacctataactag

SEQ ID NO: 3511170 - DNA, 25 bp, Homo sapien
gatggtttattaggacctataacta

SEQ ID NO: 3511171 - DNA, 25 bp, Homo sapien
ggacagggtctcttctatgtagtaa

SEQ ID NO: 3511172 - DNA, 25 bp, Homo sapien
ctggtgagagcatcaggctgagtac

SEQ ID NO: 3511173 - DNA, 25 bp, Homo sapien
tagtaatcccacttcttgaggctag

SEQ ID NO: 3511174 - DNA, 25 bp, Homo sapien
tgaggctagagacgtttacattggg

SEQ ID NO: 3511175 - DNA, 25 bp, Homo sapien
gactccttttttggcatgcttttct

SEQ ID NO: 3511176 - DNA, 25 bp, Homo sapien
tttccaatggtgaatataaataatt

SEQ ID NO: 3511177 - DNA, 25 bp, Homo sapien
cctcttgtgcattctgtcaatacat

SEQ ID NO: 3511178 - DNA, 25 bp, Homo sapien
tctgtcaatacattcccaaatacag

SEQ ID NO: 3511179 - DNA, 25 bp, Homo sapien
ccacttcgtcattttggcagataga

SEQ ID NO: 3511180 - DNA, 25 bp, Homo sapien
ctccacttcgtcattttggcagata

SEQ ID NO: 3511181 - DNA, 25 bp, Homo sapien
tccacttcgtcattttggcagatag

SEQ ID NO: 3511182 - DNA, 25 bp, Homo sapien
tctccacttcgtcattttggcagat

SEQ ID NO: 3511183 - DNA, 25 bp, Homo sapien
actgtaggcctgataacgagtgcat

SEQ ID NO: 3511184 - DNA, 25 bp, Homo sapien
tcactgtaggcctgataacgagtgc

SEQ ID NO: 3511185 - DNA, 25 bp, Homo sapien
cactgtaggcctgataacgagtgca

SEQ ID NO: 3511186 - DNA, 25 bp, Homo sapien
tagacaatttcaataggatgccctg

SEQ ID NO: 3511187 - DNA, 25 bp, Homo sapien
tataaacagggtggaaaatggtctc

SEQ ID NO: 3511188 - DNA, 25 bp, Homo sapien
taacaattccatgagccaacaaagg

SEQ ID NO: 3511189 - DNA, 25 bp, Homo sapien
caacaaaggtctggaagtataaaca

SEQ ID NO: 3511190 - DNA, 25 bp, Homo sapien
tcagggttggaaaaactaggagtca

SEQ ID NO: 3511191 - DNA, 25 bp, Homo sapien
actcagttggatactggttgtgaac

SEQ ID NO: 3511192 - DNA, 25 bp, Homo sapien
gtgctctaatctttcatagtctgaa

SEQ ID NO: 3511193 - DNA, 25 bp, Homo sapien
taatagagattgaattcaaactcag

SEQ ID NO: 3511194 - DNA, 25 bp, Homo sapien
tttaaagcgattagacacatagtgg

SEQ ID NO: 3511195 - DNA, 25 bp, Homo sapien
tgtccagtggaccaatgggaattta

SEQ ID NO: 3511196 - DNA, 25 bp, Homo sapien
taggcaagctgtctaaaagtcagcg

SEQ ID NO: 3511197 - DNA, 25 bp, Homo sapien
taatttggcaatacggacctgtact

SEQ ID NO: 3511198 - DNA, 25 bp, Homo sapien
tgtacttgctcaaaagctggttcaa

SEQ ID NO: 3511199 - DNA, 25 bp, Homo sapien
tattagttttggtcactgtacacag

SEQ ID NO: 3511200 - DNA, 25 bp, Homo sapien
gattgatcccctcccttggtcactg

SEQ ID NO: 3511201 - DNA, 25 bp, Homo sapien
tacagaacagtttcctgacgctgaa

SEQ ID NO: 3511202 - DNA, 25 bp, Homo sapien
gacgctgaaaagtttgcttatgccc

SEQ ID NO: 3511203 - DNA, 25 bp, Homo sapien
ctggtgtacacagtctaagaactgt

SEQ ID NO: 3511204 - DNA, 25 bp, Homo sapien
ttgtgaccaaaagagagccactctt

SEQ ID NO: 3511205 - DNA, 25 bp, Homo sapien
cacagtctaagaactgtaagaagac

SEQ ID NO: 3511206 - DNA, 25 bp, Homo sapien
tcccctgacagttgagggtcaagct

SEQ ID NO: 3511207 - DNA, 25 bp, Homo sapien
ataaaagggatcactgagtaactga

SEQ ID NO: 3511208 - DNA, 25 bp, Homo sapien
aaagggatcactgagtaactgaacc

SEQ ID NO: 3511209 - DNA, 25 bp, Homo sapien
aaaagggatcactgagtaactgaac

SEQ ID NO: 3511210 - DNA, 25 bp, Homo sapien
aagggatcactgagtaactgaacca

SEQ ID NO: 3511211 - DNA, 25 bp, Homo sapien
tccgcaagcctgcatggtacatctg

SEQ ID NO: 3511212 - DNA, 25 bp, Homo sapien
taagagctcatggtacggagttttc

SEQ ID NO: 3511213 - DNA, 25 bp, Homo sapien
caaaacccaggaaggatggtccacg

SEQ ID NO: 3511214 - DNA, 25 bp, Homo sapien
tcacactgctggtcaagggctccat

SEQ ID NO: 3511215 - DNA, 25 bp, Homo sapien
tgatgtcccagccttcctccaaaca

SEQ ID NO: 3511216 - DNA, 25 bp, Homo sapien
agtgatgtcccagccttcctccaaa

SEQ ID NO: 3511217 - DNA, 25 bp, Homo sapien
tgtcccagccttcctccaaacagac

SEQ ID NO: 3511218 - DNA, 25 bp, Homo sapien
ttgtgcagtgatgtcccagccttcc

SEQ ID NO: 3511219 - DNA, 25 bp, Homo sapien
aaactgaggaaccattctcaagtac

SEQ ID NO: 3511220 - DNA, 25 bp, Homo sapien
caaaactgaggaaccattctcaagt

SEQ ID NO: 3511221 - DNA, 25 bp, Homo sapien
ccacagccagctgcattatcctgtg

SEQ ID NO: 3511222 - DNA, 25 bp, Homo sapien
cagccagctgcattatcctgtgaag

SEQ ID NO: 3511223 - DNA, 25 bp, Homo sapien
caatgacacttttgactggatgcaa

SEQ ID NO: 3511224 - DNA, 25 bp, Homo sapien
gacttagggataaagcgcttgcaca

SEQ ID NO: 3511225 - DNA, 25 bp, Homo sapien
cctggataatcaaacgacttaggga

SEQ ID NO: 3511226 - DNA, 25 bp, Homo sapien
gaccaagcgctttctgagtgcagaa

SEQ ID NO: 3511227 - DNA, 25 bp, Homo sapien
caattggctcaaagtccttaataaa

SEQ ID NO: 3511228 - DNA, 25 bp, Homo sapien
taaagccacatcaattggctcaaag

SEQ ID NO: 3511229 - DNA, 25 bp, Homo sapien
aagatactcctatttgtctatactg

SEQ ID NO: 3511230 - DNA, 25 bp, Homo sapien
tatttgtgctaagtttttaaagcca

SEQ ID NO: 3511231 - DNA, 25 bp, Homo sapien
tgtgggaaccactcagaatctccca

SEQ ID NO: 3511232 - DNA, 25 bp, Homo sapien
ggtgcttgggatacaagccctcatc

SEQ ID NO: 3511233 - DNA, 25 bp, Homo sapien
ttctgagtcagtagggatggtgctt

SEQ ID NO: 3511234 - DNA, 25 bp, Homo sapien
tctcccagcgctttcaggaaggtca

SEQ ID NO: 3511235 - DNA, 25 bp, Homo sapien
gaagattcagagaattaggcagatg

SEQ ID NO: 3511236 - DNA, 25 bp, Homo sapien
cggatgaagattcagagaattaggc

SEQ ID NO: 3511237 - DNA, 25 bp, Homo sapien
ttcagagaattaggcagatgaagtg

SEQ ID NO: 3511238 - DNA, 25 bp, Homo sapien
ctgcggatgaagattcagagaatta

SEQ ID NO: 3511239 - DNA, 25 bp, Homo sapien
gccgggcgccaacatcaatgaagga

SEQ ID NO: 3511240 - DNA, 25 bp, Homo sapien
gcgagtgctagagcgaagacttgcc

SEQ ID NO: 3511241 - DNA, 25 bp, Homo sapien
taaagggctgcttgccgtttcaaga

SEQ ID NO: 3511242 - DNA, 25 bp, Homo sapien
ttggagagctgatcaagcgagtgct

SEQ ID NO: 3511243 - DNA, 25 bp, Homo sapien
tacagttttagaggtcatagcaagc

SEQ ID NO: 3511244 - DNA, 25 bp, Homo sapien
taaagtctaggaaggcaaatgctga

SEQ ID NO: 3511245 - DNA, 25 bp, Homo sapien
aatcttagcctcagaatgacctagc

SEQ ID NO: 3511246 - DNA, 25 bp, Homo sapien
taagtttagtaatgggcacagtgcc

SEQ ID NO: 3511247 - DNA, 25 bp, Homo sapien
tgtatcaccttcaaatcaagaggcc

SEQ ID NO: 3511248 - DNA, 25 bp, Homo sapien
caaatttgactagcactgtatcacc

SEQ ID NO: 3511249 - DNA, 25 bp, Homo sapien
tcacagggatacaggactttcctac

SEQ ID NO: 3511250 - DNA, 25 bp, Homo sapien
taaagtcatgtttctaggtgaccag

SEQ ID NO: 3511251 - DNA, 25 bp, Homo sapien
tgtgactgcaagatggaacgaaggc

SEQ ID NO: 3511252 - DNA, 25 bp, Homo sapien
gaaaatgaagggcactgatggctct

SEQ ID NO: 3511253 - DNA, 25 bp, Homo sapien
caggatcctccttagtggcttggga

SEQ ID NO: 3511254 - DNA, 25 bp, Homo sapien
ggtgagacataacaagacgctgctt

SEQ ID NO: 3511255 - DNA, 25 bp, Homo sapien
tggatgggtttacatccaaatgtcc

SEQ ID NO: 3511256 - DNA, 25 bp, Homo sapien
gcaaagctattggatgggtttacat

SEQ ID NO: 3511257 - DNA, 25 bp, Homo sapien
caaagctattggatgggtttacatc

SEQ ID NO: 3511258 - DNA, 25 bp, Homo sapien
gggtttacatccaaatgtcctggca

SEQ ID NO: 3511259 - DNA, 25 bp, Homo sapien
ttccatcacatgataactgaaacag

SEQ ID NO: 3511260 - DNA, 25 bp, Homo sapien
aaattgtactgaaaatcataatagg

SEQ ID NO: 3511261 - DNA, 25 bp, Homo sapien
aaccctttggggttccatcacatga

SEQ ID NO: 3511262 - DNA, 25 bp, Homo sapien
tattagtacaagtcttaatggcttc

SEQ ID NO: 3511263 - DNA, 25 bp, Homo sapien
tctcttgttctatgctactggaaga

SEQ ID NO: 3511264 - DNA, 25 bp, Homo sapien
aacagcattcagtaaggcttgcaag

SEQ ID NO: 3511265 - DNA, 25 bp, Homo sapien
ggcctgacagtaagagtgctgttgc

SEQ ID NO: 3511266 - DNA, 25 bp, Homo sapien
gcctctgagtttctgatggacagaa

SEQ ID NO: 3511267 - DNA, 25 bp, Homo sapien
cgattgtgtcgatagcagcgagcta

SEQ ID NO: 3511268 - DNA, 25 bp, Homo sapien
gatcggaggagcagagtaccacttc

SEQ ID NO: 3511269 - DNA, 25 bp, Homo sapien
tcttccaacatacaacaggcaggcg

SEQ ID NO: 3511270 - DNA, 25 bp, Homo sapien
tgaggtacgactaaaaggccaggat

SEQ ID NO: 3511271 - DNA, 25 bp, Homo sapien
tcttcagggattgagaagaaaatcc

SEQ ID NO: 3511272 - DNA, 25 bp, Homo sapien
agctaactcatccactgatctgtag

SEQ ID NO: 3511273 - DNA, 25 bp, Homo sapien
cgtaagattaccagattaatgtcaa

SEQ ID NO: 3511274 - DNA, 25 bp, Homo sapien
taaaaggcctctgttgaactatttc

SEQ ID NO: 3511275 - DNA, 25 bp, Homo sapien
tctctgaggccttcagggcgctact

SEQ ID NO: 3511276 - DNA, 25 bp, Homo sapien
tccttgtcaggatttcagagaaaaa

SEQ ID NO: 3511277 - DNA, 25 bp, Homo sapien
tactcatgggagctcattcttactc

SEQ ID NO: 3511278 - DNA, 25 bp, Homo sapien
gacagaagattaaggagctacccac

SEQ ID NO: 3511279 - DNA, 25 bp, Homo sapien
gatcttaatgaattgctgtgtgtaa

SEQ ID NO: 3511280 - DNA, 25 bp, Homo sapien
tgtcattatcaaccatcctttctta

SEQ ID NO: 3511281 - DNA, 25 bp, Homo sapien
cagatgtgaaaccagtactctattc

SEQ ID NO: 3511282 - DNA, 25 bp, Homo sapien
tattcatatagtgacaacaactttt

SEQ ID NO: 3511283 - DNA, 25 bp, Homo sapien
ttagaccgcataagaaagccttgcc

SEQ ID NO: 3511284 - DNA, 25 bp, Homo sapien
gagatgcttgctcgtatcctggaga

SEQ ID NO: 3511285 - DNA, 25 bp, Homo sapien
tgttccgagaatgccaatgagatgc

SEQ ID NO: 3511286 - DNA, 25 bp, Homo sapien
tctcagggctatggatgcaaatggc

SEQ ID NO: 3511287 - DNA, 25 bp, Homo sapien
tctcggaggccttcagggtggtact

SEQ ID NO: 3511288 - DNA, 25 bp, Homo sapien
gaatacatcctgttggaggcagtaa

SEQ ID NO: 3511289 - DNA, 25 bp, Homo sapien
tactcgggtcttgaacgggaagagc

SEQ ID NO: 3511290 - DNA, 25 bp, Homo sapien
gaagagctgccacttatggttccta

SEQ ID NO: 3511291 - DNA, 25 bp, Homo sapien
ccccaaaggcaagcttgtatgtaca

SEQ ID NO: 3511292 - DNA, 25 bp, Homo sapien
taatggtgggtattttcattgcccc

SEQ ID NO: 3511293 - DNA, 25 bp, Homo sapien
gactgtgaaaagatcagggttccaa

SEQ ID NO: 3511294 - DNA, 25 bp, Homo sapien
tcacccagggcatgcatacatacat

SEQ ID NO: 3511295 - DNA, 25 bp, Homo sapien
gcccttttggcacctttcacaattg

SEQ ID NO: 3511296 - DNA, 25 bp, Homo sapien
ccatccaggacgatttactctttct

SEQ ID NO: 3511297 - DNA, 25 bp, Homo sapien
tcagtaaatattgccgcccaattgt

SEQ ID NO: 3511298 - DNA, 25 bp, Homo sapien
cttcattccatccaggacgatttac

SEQ ID NO: 3511299 - DNA, 25 bp, Homo sapien
taacggaacttcatcagctgtttct

SEQ ID NO: 3511300 - DNA, 25 bp, Homo sapien
tcttaaagatctctactacttctgg

SEQ ID NO: 3511301 - DNA, 25 bp, Homo sapien
tggactgacttcttcatcaaatgct

SEQ ID NO: 3511302 - DNA, 25 bp, Homo sapien
tggactgaggataacggaacttcat

SEQ ID NO: 3511303 - DNA, 25 bp, Homo sapien
atctgcagtccttcttgcatgttct

SEQ ID NO: 3511304 - DNA, 25 bp, Homo sapien
tagctggttctgcattgtaatcttc

SEQ ID NO: 3511305 - DNA, 25 bp, Homo sapien
ggaaagctccgcacaactgtctgct

SEQ ID NO: 3511306 - DNA, 25 bp, Homo sapien
catgttctgctgtagctggttctgc

SEQ ID NO: 3511307 - DNA, 25 bp, Homo sapien
tcatggggtgttcctctgaagagaa

SEQ ID NO: 3511308 - DNA, 25 bp, Homo sapien
tgagggcctccaagaagacctccag

SEQ ID NO: 3511309 - DNA, 25 bp, Homo sapien
agcaagactcgaagaccctcacaga

SEQ ID NO: 3511310 - DNA, 25 bp, Homo sapien
tctcttccatcaggatccagcaaga

SEQ ID NO: 3511311 - DNA, 25 bp, Homo sapien
ctggcagcagagcaggtctaagaat

SEQ ID NO: 3511312 - DNA, 25 bp, Homo sapien
gggtctcaatgtgcatagctacaat

SEQ ID NO: 3511313 - DNA, 25 bp, Homo sapien
gcttctagggtctcaatgtgcatag

SEQ ID NO: 3511314 - DNA, 25 bp, Homo sapien
gctttctcgatgtactgcttctagg

SEQ ID NO: 3511315 - DNA, 25 bp, Homo sapien
tctgaataggcggaagtcttctgct

SEQ ID NO: 3511316 - DNA, 25 bp, Homo sapien
ggatgagtcagagtattcaaaatga

SEQ ID NO: 3511317 - DNA, 25 bp, Homo sapien
aagggagggagaagtaactcaaatg

SEQ ID NO: 3511318 - DNA, 25 bp, Homo sapien
tctaagtccacttatgtgaaatatc

SEQ ID NO: 3511319 - DNA, 25 bp, Homo sapien
taaataaatagcatggctgaactat

SEQ ID NO: 3511320 - DNA, 25 bp, Homo sapien
gagtaactccactctctgtacaaac

SEQ ID NO: 3511321 - DNA, 25 bp, Homo sapien
taatgaaccgcacaacagaattggc

SEQ ID NO: 3511322 - DNA, 25 bp, Homo sapien
ggtatcatgcaatgaaggctcttga

SEQ ID NO: 3511323 - DNA, 25 bp, Homo sapien
ccactctctgtatcatagctctcag

SEQ ID NO: 3511324 - DNA, 25 bp, Homo sapien
taagacagtcaaggaaagaaatcat

SEQ ID NO: 3511325 - DNA, 25 bp, Homo sapien
ctaagacagtcaaggaaagaaatca

SEQ ID NO: 3511326 - DNA, 25 bp, Homo sapien
cacctggcgctgatgttcttaggag

SEQ ID NO: 3511327 - DNA, 25 bp, Homo sapien
ttgctcagggtaggccaaaggcgta

SEQ ID NO: 3511328 - DNA, 25 bp, Homo sapien
tgaatggcctgactaaagacagtgc

SEQ ID NO: 3511329 - DNA, 25 bp, Homo sapien
tacttgtgtcgagtggaactagcag

SEQ ID NO: 3511330 - DNA, 25 bp, Homo sapien
ctgataatggtcatcaggaagctta

SEQ ID NO: 3511331 - DNA, 25 bp, Homo sapien
gataatggtcatcaggaagcttatc

SEQ ID NO: 3511332 - DNA, 25 bp, Homo sapien
tgataatggtcatcaggaagcttat

SEQ ID NO: 3511333 - DNA, 25 bp, Homo sapien
gaggaaagatatcacagggctccct

SEQ ID NO: 3511334 - DNA, 25 bp, Homo sapien
aagaagacctagatttattactggc

SEQ ID NO: 3511335 - DNA, 25 bp, Homo sapien
tttaccagtgaagatataaggcaca

SEQ ID NO: 3511336 - DNA, 25 bp, Homo sapien
caatcctagtgctgaagaactgtat

SEQ ID NO: 3511337 - DNA, 25 bp, Homo sapien
gcgaacctgttcctgcactgcattg

SEQ ID NO: 3511338 - DNA, 25 bp, Homo sapien
aaaaggttgtctcccaaaattgctg

SEQ ID NO: 3511339 - DNA, 25 bp, Homo sapien
gctgagagataaagggagcgaacct

SEQ ID NO: 3511340 - DNA, 25 bp, Homo sapien
caaatggggtggtcttgtacacacg

SEQ ID NO: 3511341 - DNA, 25 bp, Homo sapien
tgtatcccacagttgaacgagttga

SEQ ID NO: 3511342 - DNA, 25 bp, Homo sapien
catgggaacgccaagataaacggaa

SEQ ID NO: 3511343 - DNA, 25 bp, Homo sapien
tcatacagctagacggagcagtgct

SEQ ID NO: 3511344 - DNA, 25 bp, Homo sapien
taaggtattaaacgatctggtcaca

SEQ ID NO: 3511345 - DNA, 25 bp, Homo sapien
acaccaggctttgacatgaaaaaca

SEQ ID NO: 3511346 - DNA, 25 bp, Homo sapien
atgagaaacaccaggctttgacatg

SEQ ID NO: 3511347 - DNA, 25 bp, Homo sapien
gagaaacaccaggctttgacatgaa

SEQ ID NO: 3511348 - DNA, 25 bp, Homo sapien
gaaacaccaggctttgacatgaaaa

SEQ ID NO: 3511349 - DNA, 25 bp, Homo sapien
aagcactggtcaaagggagtaatgc

SEQ ID NO: 3511350 - DNA, 25 bp, Homo sapien
cctatagaaagcactggtcaaaggg

SEQ ID NO: 3511351 - DNA, 25 bp, Homo sapien
tagaaagcactggtcaaagggagta

SEQ ID NO: 3511352 - DNA, 25 bp, Homo sapien
gtaatgctgcggcaatgttgtattc

SEQ ID NO: 3511353 - DNA, 25 bp, Homo sapien
taggactttatttatacgctggccc

SEQ ID NO: 3511354 - DNA, 25 bp, Homo sapien
ttaggctgggctactcataagtgca

SEQ ID NO: 3511355 - DNA, 25 bp, Homo sapien
gaagttgtatgcacgcccatctgtg

SEQ ID NO: 3511356 - DNA, 25 bp, Homo sapien
tgcccctgggaggtcatactctgcc

SEQ ID NO: 3511357 - DNA, 25 bp, Homo sapien
ggcaataaagttcaacagacttgag

SEQ ID NO: 3511358 - DNA, 25 bp, Homo sapien
tgtcatgaggcccaaggcaataaag

SEQ ID NO: 3511359 - DNA, 25 bp, Homo sapien
acttgagctgtaatcttctcccaag

SEQ ID NO: 3511360 - DNA, 25 bp, Homo sapien
tgagctgtaatcttctcccaaggaa

SEQ ID NO: 3511361 - DNA, 25 bp, Homo sapien
tccatgctttggtttgtcatttaca

SEQ ID NO: 3511362 - DNA, 25 bp, Homo sapien
atatctaatacggttgaggaagccc

SEQ ID NO: 3511363 - DNA, 25 bp, Homo sapien
ctaatacggttgaggaagcccatcc

SEQ ID NO: 3511364 - DNA, 25 bp, Homo sapien
ccatccatgctttggtttgtcattt

SEQ ID NO: 3511365 - DNA, 25 bp, Homo sapien
cagaagtaaatgtatggaggtaaat

SEQ ID NO: 3511366 - DNA, 25 bp, Homo sapien
taccaggatcccagaattaggtcat

SEQ ID NO: 3511367 - DNA, 25 bp, Homo sapien
tcagttcgtaattcctagacatttc

SEQ ID NO: 3511368 - DNA, 25 bp, Homo sapien
cctcacattctctagctgattttcc

SEQ ID NO: 3511369 - DNA, 25 bp, Homo sapien
tggcttgtagtaggacgagccacag

SEQ ID NO: 3511370 - DNA, 25 bp, Homo sapien
tcttggcttgtagtaggacgagcca

SEQ ID NO: 3511371 - DNA, 25 bp, Homo sapien
ggcttgtagtaggacgagccacaga

SEQ ID NO: 3511372 - DNA, 25 bp, Homo sapien
tgcaccggtaattaggtcgtaacaa

SEQ ID NO: 3511373 - DNA, 25 bp, Homo sapien
gaaaaacctctgaaagatccacgca

SEQ ID NO: 3511374 - DNA, 25 bp, Homo sapien
ttcaagtgcataaggaatagctgcc

SEQ ID NO: 3511375 - DNA, 25 bp, Homo sapien
tatactggaccataaaacatctccc

SEQ ID NO: 3511376 - DNA, 25 bp, Homo sapien
gatccacgcaaagagtataatataa

SEQ ID NO: 3511377 - DNA, 25 bp, Homo sapien
tctcataaagaaagatctaggcctg

SEQ ID NO: 3511378 - DNA, 25 bp, Homo sapien
ggagtatgcacttcccaactgattt

SEQ ID NO: 3511379 - DNA, 25 bp, Homo sapien
tccttttaagataccaattgctaaa

SEQ ID NO: 3511380 - DNA, 25 bp, Homo sapien
caaactctactggaaaattgagccg

SEQ ID NO: 3511381 - DNA, 25 bp, Homo sapien
gcattacggaaaagagctgatgcat

SEQ ID NO: 3511382 - DNA, 25 bp, Homo sapien
gagttcgttgaatcttgaagcacag

SEQ ID NO: 3511383 - DNA, 25 bp, Homo sapien
tgttcagctcccatggacacaggta

SEQ ID NO: 3511384 - DNA, 25 bp, Homo sapien
gattgtaacggttcctattctgatt

SEQ ID NO: 3511385 - DNA, 25 bp, Homo sapien
ggagagcatttcaccccaagctagg

SEQ ID NO: 3511386 - DNA, 25 bp, Homo sapien
tcaactccggtttgagaagacacgg

SEQ ID NO: 3511387 - DNA, 25 bp, Homo sapien
ggcacaccccgttaaatggaagcag

SEQ ID NO: 3511388 - DNA, 25 bp, Homo sapien
aaaatgggtcacagtcggcagagag

SEQ ID NO: 3511389 - DNA, 25 bp, Homo sapien
ctataagagcagaaaagtcgttgat

SEQ ID NO: 3511390 - DNA, 25 bp, Homo sapien
aatgtggatgtggtactgctgttgc

SEQ ID NO: 3511391 - DNA, 25 bp, Homo sapien
tgtggtactgctgttgcttgcttag

SEQ ID NO: 3511392 - DNA, 25 bp, Homo sapien
aaagtcgttgatgttagaagtttca

SEQ ID NO: 3511393 - DNA, 25 bp, Homo sapien
catacacgatgtaagatgaaacagg

SEQ ID NO: 3511394 - DNA, 25 bp, Homo sapien
tccgaagtcttcacatacacgatgt

SEQ ID NO: 3511395 - DNA, 25 bp, Homo sapien
gaagtcttcacatacacgatgtaag

SEQ ID NO: 3511396 - DNA, 25 bp, Homo sapien
ttcacagggtccgatttggaatttc

SEQ ID NO: 3511397 - DNA, 25 bp, Homo sapien
ggcatgacctcagcattagtccctg

SEQ ID NO: 3511398 - DNA, 25 bp, Homo sapien
gcccggtaatgagcctccacaatgt

SEQ ID NO: 3511399 - DNA, 25 bp, Homo sapien
tagtccctgcaatcttgactccaga

SEQ ID NO: 3511400 - DNA, 25 bp, Homo sapien
actccagaatacaagcaggcccggt

SEQ ID NO: 3511401 - DNA, 25 bp, Homo sapien
tactacagttaagatggaccctggg

SEQ ID NO: 3511402 - DNA, 25 bp, Homo sapien
ggtgcccgtctgtccccatgagatt

SEQ ID NO: 3511403 - DNA, 25 bp, Homo sapien
tttgtctgctcacatactacagtta

SEQ ID NO: 3511404 - DNA, 25 bp, Homo sapien
ccgtctgtccccatgagattatata

SEQ ID NO: 3511405 - DNA, 25 bp, Homo sapien
catgtcactgttggaaccttcaaag

SEQ ID NO: 3511406 - DNA, 25 bp, Homo sapien
aacaccagcttgtggaggtccttgt

SEQ ID NO: 3511407 - DNA, 25 bp, Homo sapien
catggcagcaggcatgagatacatg

SEQ ID NO: 3511408 - DNA, 25 bp, Homo sapien
tctgcaggctttcgattgcacttga

SEQ ID NO: 3511409 - DNA, 25 bp, Homo sapien
gcttgacgcctctgtttaagtggga

SEQ ID NO: 3511410 - DNA, 25 bp, Homo sapien
gcttgagtaccatcgattcagatat

SEQ ID NO: 3511411 - DNA, 25 bp, Homo sapien
ggttcacttgcagcgcagtcttgct

SEQ ID NO: 3511412 - DNA, 25 bp, Homo sapien
tcttccacacgcttgggttcacttg

SEQ ID NO: 3511413 - DNA, 25 bp, Homo sapien
tatttactttgtctggagtcccacg

SEQ ID NO: 3511414 - DNA, 25 bp, Homo sapien
actgactgaaaagggctgatgtgac

SEQ ID NO: 3511415 - DNA, 25 bp, Homo sapien
ggaggccactgtgcgctcagaaact

SEQ ID NO: 3511416 - DNA, 25 bp, Homo sapien
tcatagactctctaacaagggaggc

SEQ ID NO: 3511417 - DNA, 25 bp, Homo sapien
tattgcccggttttgctggacatgc

SEQ ID NO: 3511418 - DNA, 25 bp, Homo sapien
gacatgcaaacccaattcatcagtg

SEQ ID NO: 3511419 - DNA, 25 bp, Homo sapien
tgttgatggtctaatattgcccggt

SEQ ID NO: 3511420 - DNA, 25 bp, Homo sapien
ttcatcatccttattatgtagtcaa

SEQ ID NO: 3511421 - DNA, 25 bp, Homo sapien
ttaagggctctgagtgcagcaggaa

SEQ ID NO: 3511422 - DNA, 25 bp, Homo sapien
aagggctctgagtgcagcaggaagg

SEQ ID NO: 3511423 - DNA, 25 bp, Homo sapien
gggctctgagtgcagcaggaagggt

SEQ ID NO: 3511424 - DNA, 25 bp, Homo sapien
ctttaagggctctgagtgcagcagg

SEQ ID NO: 3511425 - DNA, 25 bp, Homo sapien
gtcgtcaccttgtccattatcgaaa

SEQ ID NO: 3511426 - DNA, 25 bp, Homo sapien
tgcactgttgaaaactgtcgtcacc

SEQ ID NO: 3511427 - DNA, 25 bp, Homo sapien
ttgtgcactgttgaaaactgtcgtc

SEQ ID NO: 3511428 - DNA, 25 bp, Homo sapien
aaactgtcgtcaccttgtccattat

SEQ ID NO: 3511429 - DNA, 25 bp, Homo sapien
tttggagaatccaacctaattcaca

SEQ ID NO: 3511430 - DNA, 25 bp, Homo sapien
tggagaatccaacctaattcacatt

SEQ ID NO: 3511431 - DNA, 25 bp, Homo sapien
ggagaatccaacctaattcacattt

SEQ ID NO: 3511432 - DNA, 25 bp, Homo sapien
tcctttggagaatccaacctaattc

SEQ ID NO: 3511433 - DNA, 25 bp, Homo sapien
tattcgtgtggcaggaggtgcattc

SEQ ID NO: 3511434 - DNA, 25 bp, Homo sapien
gaactcgcaaatgggatccttctgt

SEQ ID NO: 3511435 - DNA, 25 bp, Homo sapien
tattaattcctgaacccgggcttca

SEQ ID NO: 3511436 - DNA, 25 bp, Homo sapien
ttctgttggccgtggaactttctgg

SEQ ID NO: 3511437 - DNA, 25 bp, Homo sapien
aaaagcaggatgcattggccaggca

SEQ ID NO: 3511438 - DNA, 25 bp, Homo sapien
tgggagttcggagtgggcagatcac

SEQ ID NO: 3511439 - DNA, 25 bp, Homo sapien
ggtttagaaaaagcaggatgcattg

SEQ ID NO: 3511440 - DNA, 25 bp, Homo sapien
actttgggagttcggagtgggcaga

SEQ ID NO: 3511441 - DNA, 25 bp, Homo sapien
tgtccatcaccacatgtaatttttt

SEQ ID NO: 3511442 - DNA, 25 bp, Homo sapien
gcaggactataggtgtccatcacca

SEQ ID NO: 3511443 - DNA, 25 bp, Homo sapien
caccatacccagcctcttgtaatta

SEQ ID NO: 3511444 - DNA, 25 bp, Homo sapien
ccatacccagcctcttgtaattaaa

SEQ ID NO: 3511445 - DNA, 25 bp, Homo sapien
atgaaacctctgaactttactttgt

SEQ ID NO: 3511446 - DNA, 25 bp, Homo sapien
tatgaaacctctgaactttactttg

SEQ ID NO: 3511447 - DNA, 25 bp, Homo sapien
gcaagttccctgacatgctttatca

SEQ ID NO: 3511448 - DNA, 25 bp, Homo sapien
catcttcactgggttattttcttca

SEQ ID NO: 3511449 - DNA, 25 bp, Homo sapien
tttcttcaactttaattctctctac

SEQ ID NO: 3511450 - DNA, 25 bp, Homo sapien
atttttgaatagttgctcagcaagt

SEQ ID NO: 3511451 - DNA, 25 bp, Homo sapien
aacaaaacctgcaaatgccattcca

SEQ ID NO: 3511452 - DNA, 25 bp, Homo sapien
tcacaagatctataaggaggacctc

SEQ ID NO: 3511453 - DNA, 25 bp, Homo sapien
aatcattctcgaccaaaccacgctg

SEQ ID NO: 3511454 - DNA, 25 bp, Homo sapien
tccactgagtactttagtgaggaaa

SEQ ID NO: 3511455 - DNA, 25 bp, Homo sapien
gaactgatatctaaccacacagaga

SEQ ID NO: 3511456 - DNA, 25 bp, Homo sapien
aataatcacatttgataaatcaagg

SEQ ID NO: 3511457 - DNA, 25 bp, Homo sapien
cacatttgataaatcaaggtcaaaa

SEQ ID NO: 3511458 - DNA, 25 bp, Homo sapien
tttggacagatacaatatagtactc

SEQ ID NO: 3511459 - DNA, 25 bp, Homo sapien
gaaatgtattactggctctgcatga

SEQ ID NO: 3511460 - DNA, 25 bp, Homo sapien
tgcaggcaggatctatatccttgga

SEQ ID NO: 3511461 - DNA, 25 bp, Homo sapien
tcttataagttgcaggcaggatcta

SEQ ID NO: 3511462 - DNA, 25 bp, Homo sapien
taatctaaggaaaacggctcgcacc

SEQ ID NO: 3511463 - DNA, 25 bp, Homo sapien
gctacttccaaatctgggtgtaaaa

SEQ ID NO: 3511464 - DNA, 25 bp, Homo sapien
tttgagtgggataaagctgttcgtg

SEQ ID NO: 3511465 - DNA, 25 bp, Homo sapien
aaaagcatgatctgctacttccaaa

SEQ ID NO: 3511466 - DNA, 25 bp, Homo sapien
gcatttttgagtgggataaagctgt

SEQ ID NO: 3511467 - DNA, 25 bp, Homo sapien
tccatccaaatctgctatgattaca

SEQ ID NO: 3511468 - DNA, 25 bp, Homo sapien
tgagtctgatgtagaagtggttctg

SEQ ID NO: 3511469 - DNA, 25 bp, Homo sapien
gggaattttaatagtgcctccatcc

SEQ ID NO: 3511470 - DNA, 25 bp, Homo sapien
gaagagaggtgaatacattcgggaa

SEQ ID NO: 3511471 - DNA, 25 bp, Homo sapien
caataatgaaaggcgttggggaact

SEQ ID NO: 3511472 - DNA, 25 bp, Homo sapien
tactccaataatgaaaggcgttggg

SEQ ID NO: 3511473 - DNA, 25 bp, Homo sapien
ctccaataatgaaaggcgttgggga

SEQ ID NO: 3511474 - DNA, 25 bp, Homo sapien
atgtactccaataatgaaaggcgtt

SEQ ID NO: 3511475 - DNA, 25 bp, Homo sapien
ctgagccgggagaatagggatataa

SEQ ID NO: 3511476 - DNA, 25 bp, Homo sapien
tgagccgggagaatagggatataag

SEQ ID NO: 3511477 - DNA, 25 bp, Homo sapien
gcagtctctttaggtcttctagtac

SEQ ID NO: 3511478 - DNA, 25 bp, Homo sapien
tcttctaggcaagcagtctctttag

SEQ ID NO: 3511479 - DNA, 25 bp, Homo sapien
ctttgtttcttctaggcaagcagtc

SEQ ID NO: 3511480 - DNA, 25 bp, Homo sapien
ggtcttctagtactgtttgaaagca

SEQ ID NO: 3511481 - DNA, 25 bp, Homo sapien
caagcatcactaagtctctggaaac

SEQ ID NO: 3511482 - DNA, 25 bp, Homo sapien
ctgcacaaaagaggctgaggacatt

SEQ ID NO: 3511483 - DNA, 25 bp, Homo sapien
ttccagggctctacaagcatcacta

SEQ ID NO: 3511484 - DNA, 25 bp, Homo sapien
tcactaagtctctggaaacttgcag

SEQ ID NO: 3511485 - DNA, 25 bp, Homo sapien
caaatgtgctgttaagctcagctag

SEQ ID NO: 3511486 - DNA, 25 bp, Homo sapien
tcttcaaatacgtttttctaatcac

SEQ ID NO: 3511487 - DNA, 25 bp, Homo sapien
tgcatccaatggagatgctctgtac

SEQ ID NO: 3511488 - DNA, 25 bp, Homo sapien
ggagatgctctgtacctaaaaggta

SEQ ID NO: 3511489 - DNA, 25 bp, Homo sapien
taatacaagaagatacacttaggga

SEQ ID NO: 3511490 - DNA, 25 bp, Homo sapien
agctacttgggtggacgctgacgta

SEQ ID NO: 3511491 - DNA, 25 bp, Homo sapien
aagtgtcattccctccctcaattaa

SEQ ID NO: 3511492 - DNA, 25 bp, Homo sapien
atatgctaccagaagtcaaaataat

SEQ ID NO: 3511493 - DNA, 25 bp, Homo sapien
tttttattcctatgtagcagtgttt

SEQ ID NO: 3511494 - DNA, 25 bp, Homo sapien
tatgtagcagtgtttgttgctgtgt

SEQ ID NO: 3511495 - DNA, 25 bp, Homo sapien
tattcctatgtagcagtgtttgttg

SEQ ID NO: 3511496 - DNA, 25 bp, Homo sapien
tgtctcaccttctgtagcccaacat

SEQ ID NO: 3511497 - DNA, 25 bp, Homo sapien
cagtatagttctggtcacagcttaa

SEQ ID NO: 3511498 - DNA, 25 bp, Homo sapien
gaatatagttcaaaaagccctgcac

SEQ ID NO: 3511499 - DNA, 25 bp, Homo sapien
cagtggaactgaagaccatgtttca

SEQ ID NO: 3511500 - DNA, 25 bp, Homo sapien
taagtcatgaaaaaggaggtttctc

SEQ ID NO: 3511501 - DNA, 25 bp, Homo sapien
tcacgcaggtgcagtaagaggcaaa

SEQ ID NO: 3511502 - DNA, 25 bp, Homo sapien
ctcacgcaggtgcagtaagaggcaa

SEQ ID NO: 3511503 - DNA, 25 bp, Homo sapien
cacgcaggtgcagtaagaggcaaaa

SEQ ID NO: 3511504 - DNA, 25 bp, Homo sapien
acgcaggtgcagtaagaggcaaaat

SEQ ID NO: 3511505 - DNA, 25 bp, Homo sapien
attcccgagggagccagtctacttc

SEQ ID NO: 3511506 - DNA, 25 bp, Homo sapien
tagacagtagcatcaagaattacct

SEQ ID NO: 3511507 - DNA, 25 bp, Homo sapien
tacttctgatttacccactcccagg

SEQ ID NO: 3511508 - DNA, 25 bp, Homo sapien
tccccataagatatcgatagtactg

SEQ ID NO: 3511509 - DNA, 25 bp, Homo sapien
caaggtacagtggacactttctaga

SEQ ID NO: 3511510 - DNA, 25 bp, Homo sapien
agataaagtcctcagatagatggtg

SEQ ID NO: 3511511 - DNA, 25 bp, Homo sapien
taaatgggaatctttgggcagccct

SEQ ID NO: 3511512 - DNA, 25 bp, Homo sapien
taaccattgccgaaaaattggagat

SEQ ID NO: 3511513 - DNA, 25 bp, Homo sapien
gtaggtaagatcaggacccacaaaa

SEQ ID NO: 3511514 - DNA, 25 bp, Homo sapien
atgaacagtaggtaagatcaggacc

SEQ ID NO: 3511515 - DNA, 25 bp, Homo sapien
cagtaggtaagatcaggacccacaa

SEQ ID NO: 3511516 - DNA, 25 bp, Homo sapien
gaatgaacagtaggtaagatcagga

SEQ ID NO: 3511517 - DNA, 25 bp, Homo sapien
tgtctatctcctgcacccaaagaaa

SEQ ID NO: 3511518 - DNA, 25 bp, Homo sapien
cactagtgcccgtgataggaagact

SEQ ID NO: 3511519 - DNA, 25 bp, Homo sapien
taggaagactatcatgtaaaggagt

SEQ ID NO: 3511520 - DNA, 25 bp, Homo sapien
gagtctggatcaactgtctatctcc

SEQ ID NO: 3511521 - DNA, 25 bp, Homo sapien
attcaggctgtccacatacacggta

SEQ ID NO: 3511522 - DNA, 25 bp, Homo sapien
gtttgcaattagactttccaaggag

SEQ ID NO: 3511523 - DNA, 25 bp, Homo sapien
cggtatagatcaaacccaggcaagc

SEQ ID NO: 3511524 - DNA, 25 bp, Homo sapien
gcacaaaggtttgcaattagacttt

SEQ ID NO: 3511525 - DNA, 25 bp, Homo sapien
taatctggataccaacaccaggctt

SEQ ID NO: 3511526 - DNA, 25 bp, Homo sapien
tgcaggctgaattaaaccagacact

SEQ ID NO: 3511527 - DNA, 25 bp, Homo sapien
aaacacttctgcaggctgaattaaa

SEQ ID NO: 3511528 - DNA, 25 bp, Homo sapien
gataccaacaccaggcttttgggag

SEQ ID NO: 3511529 - DNA, 25 bp, Homo sapien
cgactgtactttagctagtaaaggt

SEQ ID NO: 3511530 - DNA, 25 bp, Homo sapien
cttcgactgtactttagctagtaaa

SEQ ID NO: 3511531 - DNA, 25 bp, Homo sapien
tcgactgtactttagctagtaaagg

SEQ ID NO: 3511532 - DNA, 25 bp, Homo sapien
ttcgactgtactttagctagtaaag

SEQ ID NO: 3511533 - DNA, 25 bp, Homo sapien
catagaaggttaggcatgagcagta

SEQ ID NO: 3511534 - DNA, 25 bp, Homo sapien
catgagcagtaatgtcgatctgagt

SEQ ID NO: 3511535 - DNA, 25 bp, Homo sapien
ggttaggcatgagcagtaatgtcga

SEQ ID NO: 3511536 - DNA, 25 bp, Homo sapien
tctgcctcatagaaggttaggcatg

SEQ ID NO: 3511537 - DNA, 25 bp, Homo sapien
tcaggacaaccacaaagaacgttgg

SEQ ID NO: 3511538 - DNA, 25 bp, Homo sapien
ctgtcaggacaaccacaaagaacgt

SEQ ID NO: 3511539 - DNA, 25 bp, Homo sapien
ggacaaccacaaagaacgttggctg

SEQ ID NO: 3511540 - DNA, 25 bp, Homo sapien
acaaagaacgttggctgcttcctct

SEQ ID NO: 3511541 - DNA, 25 bp, Homo sapien
tctgggctccagagttggacactgc

SEQ ID NO: 3511542 - DNA, 25 bp, Homo sapien
caacagtctgggctccagagttgga

SEQ ID NO: 3511543 - DNA, 25 bp, Homo sapien
gggctccagagttggacactgcact

SEQ ID NO: 3511544 - DNA, 25 bp, Homo sapien
agtctgggctccagagttggacact

SEQ ID NO: 3511545 - DNA, 25 bp, Homo sapien
tgcagatatgaaaaactggcccttg

SEQ ID NO: 3511546 - DNA, 25 bp, Homo sapien
tctgcagataatcaagtcccacagt

SEQ ID NO: 3511547 - DNA, 25 bp, Homo sapien
aaaactgcttgtgtcttaataggaa

SEQ ID NO: 3511548 - DNA, 25 bp, Homo sapien
gaatagcagctatcaaaagagtccc

SEQ ID NO: 3511549 - DNA, 25 bp, Homo sapien
aggtctagccctctggctaagggtc

SEQ ID NO: 3511550 - DNA, 25 bp, Homo sapien
gggtcctacataccactgacctgac

SEQ ID NO: 3511551 - DNA, 25 bp, Homo sapien
gtttgaatccaaggtctagccctct

SEQ ID NO: 3511552 - DNA, 25 bp, Homo sapien
cagtttgagaaacaaggtgcttttc

SEQ ID NO: 3511553 - DNA, 25 bp, Homo sapien
tcctgatgtaagaccagagggctaa

SEQ ID NO: 3511554 - DNA, 25 bp, Homo sapien
tacacagttgagcaaaatgtcccaa

SEQ ID NO: 3511555 - DNA, 25 bp, Homo sapien
tgaaccaggagccacaaccagtgaa

SEQ ID NO: 3511556 - DNA, 25 bp, Homo sapien
cagccatatagagtctcagagcggg

SEQ ID NO: 3511557 - DNA, 25 bp, Homo sapien
tctggcaatctctctactggcaggg

SEQ ID NO: 3511558 - DNA, 25 bp, Homo sapien
tcaaaacaactagggcacagaacgc

SEQ ID NO: 3511559 - DNA, 25 bp, Homo sapien
gatttcccggccttgagaactgtga

SEQ ID NO: 3511560 - DNA, 25 bp, Homo sapien
tgtgggagcccaaaagtccagcaga

SEQ ID NO: 3511561 - DNA, 25 bp, Homo sapien
caagattctgcaaacccatgagtac

SEQ ID NO: 3511562 - DNA, 25 bp, Homo sapien
gagtaaagagggcacttaccacctg

SEQ ID NO: 3511563 - DNA, 25 bp, Homo sapien
gctgctttatgctaccctagggact

SEQ ID NO: 3511564 - DNA, 25 bp, Homo sapien
tacatggtgcagactaaaggaggag

SEQ ID NO: 3511565 - DNA, 25 bp, Homo sapien
gatgtgtggtaaatgtcactcagaa

SEQ ID NO: 3511566 - DNA, 25 bp, Homo sapien
tataaagactaaagatgtagatggc

SEQ ID NO: 3511567 - DNA, 25 bp, Homo sapien
cgcctggctgggactattttctaat

SEQ ID NO: 3511568 - DNA, 25 bp, Homo sapien
tgatccgtgcccttataaaggttac

SEQ ID NO: 3511569 - DNA, 25 bp, Homo sapien
catttctaagtattgtctgaccgct

SEQ ID NO: 3511570 - DNA, 25 bp, Homo sapien
ggcacatagaactcaaaagtttgct

SEQ ID NO: 3511571 - DNA, 25 bp, Homo sapien
tatagtaagaactacacagtggcac

SEQ ID NO: 3511572 - DNA, 25 bp, Homo sapien
tgctgaatgaaaaccgatgacattt

SEQ ID NO: 3511573 - DNA, 25 bp, Homo sapien
tactaagtctgccactttgtccaag

SEQ ID NO: 3511574 - DNA, 25 bp, Homo sapien
ctttatatgacaaagcttgtcttag

SEQ ID NO: 3511575 - DNA, 25 bp, Homo sapien
gtcttagtacttcctgttccgcttg

SEQ ID NO: 3511576 - DNA, 25 bp, Homo sapien
tcccatggactatatttaccattta

SEQ ID NO: 3511577 - DNA, 25 bp, Homo sapien
agggtctaatttaatccacatcctc

SEQ ID NO: 3511578 - DNA, 25 bp, Homo sapien
gcaaaagggtctaatttaatccaca

SEQ ID NO: 3511579 - DNA, 25 bp, Homo sapien
taaggacccttcatactgtttccca

SEQ ID NO: 3511580 - DNA, 25 bp, Homo sapien
tctggaagtacacccaaaagtggaa

SEQ ID NO: 3511581 - DNA, 25 bp, Homo sapien
agtgctgggagctagcaggcgtgag

SEQ ID NO: 3511582 - DNA, 25 bp, Homo sapien
accgtgcccagccatgcccggctaa

SEQ ID NO: 3511583 - DNA, 25 bp, Homo sapien
ctgggagctagcaggcgtgagctac

SEQ ID NO: 3511584 - DNA, 25 bp, Homo sapien
gacgaggttccaccacgttggcaag

SEQ ID NO: 3511585 - DNA, 25 bp, Homo sapien
gcatttacttgggaacctgtagaat

SEQ ID NO: 3511586 - DNA, 25 bp, Homo sapien
tacatatgactagcagctgatcccc

SEQ ID NO: 3511587 - DNA, 25 bp, Homo sapien
tgggataaagccttaagacttagct

SEQ ID NO: 3511588 - DNA, 25 bp, Homo sapien
tgcagggctagtattctcgaaacca

SEQ ID NO: 3511589 - DNA, 25 bp, Homo sapien
gggaacaagccagatgactacagca

SEQ ID NO: 3511590 - DNA, 25 bp, Homo sapien
gatacttgctataccatggatgacc

SEQ ID NO: 3511591 - DNA, 25 bp, Homo sapien
gacatacaagggaacagagattacc

SEQ ID NO: 3511592 - DNA, 25 bp, Homo sapien
taagcaagcaacattaaacaggtgg

SEQ ID NO: 3511593 - DNA, 25 bp, Homo sapien
catagccatgtgctgtgcttaggaa

SEQ ID NO: 3511594 - DNA, 25 bp, Homo sapien
taaaaaggcagtaatcgtagcagtt

SEQ ID NO: 3511595 - DNA, 25 bp, Homo sapien
aattataagtaaggcaggtgctctc

SEQ ID NO: 3511596 - DNA, 25 bp, Homo sapien
cctacggacagcgtctttaatcaaa

SEQ ID NO: 3511597 - DNA, 25 bp, Homo sapien
aaaggattgtggttggtccagactc

SEQ ID NO: 3511598 - DNA, 25 bp, Homo sapien
gactgctaatttgcccatcaactgg

SEQ ID NO: 3511599 - DNA, 25 bp, Homo sapien
ccaggcatattgtagagtctccagc

SEQ ID NO: 3511600 - DNA, 25 bp, Homo sapien
gaaagtcttcatgcatcccaggata

SEQ ID NO: 3511601 - DNA, 25 bp, Homo sapien
gatgcagatgctatccggagactca

SEQ ID NO: 3511602 - DNA, 25 bp, Homo sapien
caatccttaggtgtggtttccatga

SEQ ID NO: 3511603 - DNA, 25 bp, Homo sapien
aggcctttggacatataaatatagg

SEQ ID NO: 3511604 - DNA, 25 bp, Homo sapien
tacccactgggtgcggattagcaga

SEQ ID NO: 3511605 - DNA, 25 bp, Homo sapien
atttggtctgtgactagaaacacag

SEQ ID NO: 3511606 - DNA, 25 bp, Homo sapien
ttggtctgtgactagaaacacagct

SEQ ID NO: 3511607 - DNA, 25 bp, Homo sapien
tggtctgtgactagaaacacagctc

SEQ ID NO: 3511608 - DNA, 25 bp, Homo sapien
tttggtctgtgactagaaacacagc

SEQ ID NO: 3511609 - DNA, 25 bp, Homo sapien
tgcatatatccttactgtgtggcaa

SEQ ID NO: 3511610 - DNA, 25 bp, Homo sapien
taaaaatgcttgatctcctcttacc

SEQ ID NO: 3511611 - DNA, 25 bp, Homo sapien
gaaaatgactcggtccagagatgca

SEQ ID NO: 3511612 - DNA, 25 bp, Homo sapien
gcttgatctcctcttaccaaaaaca

SEQ ID NO: 3511613 - DNA, 25 bp, Homo sapien
cttgatgggaatagctaaagaaaca

SEQ ID NO: 3511614 - DNA, 25 bp, Homo sapien
tataacagtgtttctcgggacccag

SEQ ID NO: 3511615 - DNA, 25 bp, Homo sapien
agcatagaacccatgtaatagctac

SEQ ID NO: 3511616 - DNA, 25 bp, Homo sapien
ttatctccagctgaatgtaaactgt

SEQ ID NO: 3511617 - DNA, 25 bp, Homo sapien
catcaaaattatagcttccctcaag

SEQ ID NO: 3511618 - DNA, 25 bp, Homo sapien
tattatccatcaaactaaatcatca

SEQ ID NO: 3511619 - DNA, 25 bp, Homo sapien
aaagaggcttgattcccttagctaa

SEQ ID NO: 3511620 - DNA, 25 bp, Homo sapien
tctgtatgaacgctagaaatcattt

SEQ ID NO: 3511621 - DNA, 25 bp, Homo sapien
caaagaaaggtacagcagggagaaa

SEQ ID NO: 3511622 - DNA, 25 bp, Homo sapien
aatcaaagaaaggtacagcagggag

SEQ ID NO: 3511623 - DNA, 25 bp, Homo sapien
atgaaatcaaagaaaggtacagcag

SEQ ID NO: 3511624 - DNA, 25 bp, Homo sapien
gaaatcaaagaaaggtacagcaggg

SEQ ID NO: 3511625 - DNA, 25 bp, Homo sapien
gggactacaggcactcgctaccgcg

SEQ ID NO: 3511626 - DNA, 25 bp, Homo sapien
aggcactcgctaccgcgcccggcta

SEQ ID NO: 3511627 - DNA, 25 bp, Homo sapien
ctacaggcactcgctaccgcgcccg

SEQ ID NO: 3511628 - DNA, 25 bp, Homo sapien
gactacaggcactcgctaccgcgcc

SEQ ID NO: 3511629 - DNA, 25 bp, Homo sapien
gggccagaataaccaaggcaaatct

SEQ ID NO: 3511630 - DNA, 25 bp, Homo sapien
tcatccaatcttgaacaaagccgac

SEQ ID NO: 3511631 - DNA, 25 bp, Homo sapien
ccagaagtaaggctgcataactaca

SEQ ID NO: 3511632 - DNA, 25 bp, Homo sapien
tattcctatcagactatcaatgacg

SEQ ID NO: 3511633 - DNA, 25 bp, Homo sapien
gctctccactaggaagattaccaaa

SEQ ID NO: 3511634 - DNA, 25 bp, Homo sapien
tccccacaacatacgccttaaagag

SEQ ID NO: 3511635 - DNA, 25 bp, Homo sapien
ggtcccagccaggacaaaatctagg

SEQ ID NO: 3511636 - DNA, 25 bp, Homo sapien
cagagaaaggatcaccgcatttaga

SEQ ID NO: 3511637 - DNA, 25 bp, Homo sapien
tagtttgagcattctgttacaggca

SEQ ID NO: 3511638 - DNA, 25 bp, Homo sapien
gttgtctgagcttcattgcaggcca

SEQ ID NO: 3511639 - DNA, 25 bp, Homo sapien
gaacgcagggtttcatgttgtctga

SEQ ID NO: 3511640 - DNA, 25 bp, Homo sapien
gacaaactctaatgctgagcaccca

SEQ ID NO: 3511641 - DNA, 25 bp, Homo sapien
ggatgccctagacttccttctctta

SEQ ID NO: 3511642 - DNA, 25 bp, Homo sapien
tgagtcgaaattgcattagttcttc

SEQ ID NO: 3511643 - DNA, 25 bp, Homo sapien
taaacagtttgtatcataaagggat

SEQ ID NO: 3511644 - DNA, 25 bp, Homo sapien
caccttctagatattagaggaaagg

SEQ ID NO: 3511645 - DNA, 25 bp, Homo sapien
tatctaatgctagatgaggagttag

SEQ ID NO: 3511646 - DNA, 25 bp, Homo sapien
tatatctaatgctagatgaggagtt

SEQ ID NO: 3511647 - DNA, 25 bp, Homo sapien
ctgttgtatggtggggggaggcggg

SEQ ID NO: 3511648 - DNA, 25 bp, Homo sapien
agatatatctaatgctagatgagga

SEQ ID NO: 3511649 - DNA, 25 bp, Homo sapien
gcctggccagtttttctatgctttg

SEQ ID NO: 3511650 - DNA, 25 bp, Homo sapien
cagtttttctatgctttgtggagac

SEQ ID NO: 3511651 - DNA, 25 bp, Homo sapien
ctggccagtttttctatgctttgtg

SEQ ID NO: 3511652 - DNA, 25 bp, Homo sapien
ggccagtttttctatgctttgtgga

SEQ ID NO: 3511653 - DNA, 25 bp, Homo sapien
tcctcctcctttccaatggtaaata

SEQ ID NO: 3511654 - DNA, 25 bp, Homo sapien
aaagcgctgcttaaagcgtcccaca

SEQ ID NO: 3511655 - DNA, 25 bp, Homo sapien
tcctcctttccaatggtaaatagta

SEQ ID NO: 3511656 - DNA, 25 bp, Homo sapien
taggtgaaagcgctgcttaaagcgt

SEQ ID NO: 3511657 - DNA, 25 bp, Homo sapien
gaaattaggcatgaacgagctgtga

SEQ ID NO: 3511658 - DNA, 25 bp, Homo sapien
tgtggtaccgctaattcaacgagtc

SEQ ID NO: 3511659 - DNA, 25 bp, Homo sapien
aaatcagttggttctagatagctcc

SEQ ID NO: 3511660 - DNA, 25 bp, Homo sapien
cattagtgtgttcattgggcaagca

SEQ ID NO: 3511661 - DNA, 25 bp, Homo sapien
cttaaaaaggagctaaggtcggctg

SEQ ID NO: 3511662 - DNA, 25 bp, Homo sapien
aaattcactcctaaaacagggcatc

SEQ ID NO: 3511663 - DNA, 25 bp, Homo sapien
tagggcaggtagtcaaattgctagt

SEQ ID NO: 3511664 - DNA, 25 bp, Homo sapien
caggcatgccctactgagattgtgg

SEQ ID NO: 3511665 - DNA, 25 bp, Homo sapien
agatgaccgtacttgagggactagg

SEQ ID NO: 3511666 - DNA, 25 bp, Homo sapien
tcaaagatgaccgtacttgagggac

SEQ ID NO: 3511667 - DNA, 25 bp, Homo sapien
tatttctagtactgtaatatcttac

SEQ ID NO: 3511668 - DNA, 25 bp, Homo sapien
gactaggagggaagataactatttc

SEQ ID NO: 3511669 - DNA, 25 bp, Homo sapien
gtggaaatctctggattattttccc

SEQ ID NO: 3511670 - DNA, 25 bp, Homo sapien
tggaaaaggtgtatcatcccagtcc

SEQ ID NO: 3511671 - DNA, 25 bp, Homo sapien
tggaaatctctggattattttcccc

SEQ ID NO: 3511672 - DNA, 25 bp, Homo sapien
aaaggtgtatcatcccagtccttct

SEQ ID NO: 3511673 - DNA, 25 bp, Homo sapien
gcatctgtcagcaaatgtctgaggc

SEQ ID NO: 3511674 - DNA, 25 bp, Homo sapien
catctgtcagcaaatgtctgaggca

SEQ ID NO: 3511675 - DNA, 25 bp, Homo sapien
cttcttccaatacagcctgtttcgt

SEQ ID NO: 3511676 - DNA, 25 bp, Homo sapien
ttgaaatcaccagcaacattagctg

SEQ ID NO: 3511677 - DNA, 25 bp, Homo sapien
gcctgtttcgtctacactgttactg

SEQ ID NO: 3511678 - DNA, 25 bp, Homo sapien
gttactgtagtgtggctgccctcat

SEQ ID NO: 3511679 - DNA, 25 bp, Homo sapien
ctaacttcctatctgcaactcaaag

SEQ ID NO: 3511680 - DNA, 25 bp, Homo sapien
cagcacagataatccaagccgtgtg

SEQ ID NO: 3511681 - DNA, 25 bp, Homo sapien
ctggagcatcgcatctacagcacag

SEQ ID NO: 3511682 - DNA, 25 bp, Homo sapien
tcttctctcaaacgcaaacttccta

SEQ ID NO: 3511683 - DNA, 25 bp, Homo sapien
tcaccctggagcatcgcatctacag

SEQ ID NO: 3511684 - DNA, 25 bp, Homo sapien
tatctcagagaatggcacgttatcc

SEQ ID NO: 3511685 - DNA, 25 bp, Homo sapien
ggttataatatactttactaccagc

SEQ ID NO: 3511686 - DNA, 25 bp, Homo sapien
ccttaacgtttcactctcctgaaga

SEQ ID NO: 3511687 - DNA, 25 bp, Homo sapien
tgtccaaacaagttatgaggctggt

SEQ ID NO: 3511688 - DNA, 25 bp, Homo sapien
cacagtttaataacttgttggatca

SEQ ID NO: 3511689 - DNA, 25 bp, Homo sapien
gactctgaacccgatttagactatg

SEQ ID NO: 3511690 - DNA, 25 bp, Homo sapien
gaagctctgagttcactctgcactg

SEQ ID NO: 3511691 - DNA, 25 bp, Homo sapien
taacttgttggatcagactctgaac

SEQ ID NO: 3511692 - DNA, 25 bp, Homo sapien
aaatggttggcaactaaagctgcag

SEQ ID NO: 3511693 - DNA, 25 bp, Homo sapien
tattttaagcagatactcgcaagac

SEQ ID NO: 3511694 - DNA, 25 bp, Homo sapien
tactggagagataaactgttcactt

SEQ ID NO: 3511695 - DNA, 25 bp, Homo sapien
tagctactgagagcctactgctgac

SEQ ID NO: 3511696 - DNA, 25 bp, Homo sapien
tggtacgttgtgtcttcgttcttgt

SEQ ID NO: 3511697 - DNA, 25 bp, Homo sapien
tctggtacgttgtgtcttcgttctt

SEQ ID NO: 3511698 - DNA, 25 bp, Homo sapien
tacgttgtgtcttcgttcttgttgg

SEQ ID NO: 3511699 - DNA, 25 bp, Homo sapien
cgttgtgtcttcgttcttgttggtt

SEQ ID NO: 3511700 - DNA, 25 bp, Homo sapien
gaaaaccaagagtacaaatttgcca

SEQ ID NO: 3511701 - DNA, 25 bp, Homo sapien
ctgatagggagtgataaatttgtgc

SEQ ID NO: 3511702 - DNA, 25 bp, Homo sapien
tctgcataaccccagttgccagagg

SEQ ID NO: 3511703 - DNA, 25 bp, Homo sapien
tagaagttgttatctctgataggga

SEQ ID NO: 3511704 - DNA, 25 bp, Homo sapien
taaagctactacgaacatccttata

SEQ ID NO: 3511705 - DNA, 25 bp, Homo sapien
ccttatataagtctatgtatgggca

SEQ ID NO: 3511706 - DNA, 25 bp, Homo sapien
tcctatcagattctaaagtacaaga

SEQ ID NO: 3511707 - DNA, 25 bp, Homo sapien
gaagcctgtttctgataacactcct

SEQ ID NO: 3511708 - DNA, 25 bp, Homo sapien
tattaaagttcgcaatacgtgttta

SEQ ID NO: 3511709 - DNA, 25 bp, Homo sapien
taaggaatataagaatacttagagg

SEQ ID NO: 3511710 - DNA, 25 bp, Homo sapien
aatttatagcttgaaatgcatatac

SEQ ID NO: 3511711 - DNA, 25 bp, Homo sapien
tacaagagagaaagtggccaggagc

SEQ ID NO: 3511712 - DNA, 25 bp, Homo sapien
catcactttgtgcttgaaggcattc

SEQ ID NO: 3511713 - DNA, 25 bp, Homo sapien
tcttgagacttgaaggcagtcattc

SEQ ID NO: 3511714 - DNA, 25 bp, Homo sapien
catttacaatgttctgtgggtcaca

SEQ ID NO: 3511715 - DNA, 25 bp, Homo sapien
gaatctgctcccataattagtgtta

SEQ ID NO: 3511716 - DNA, 25 bp, Homo sapien
aagcacaggatctaggctcccggaa

SEQ ID NO: 3511717 - DNA, 25 bp, Homo sapien
gcacaggatctaggctcccggaagg

SEQ ID NO: 3511718 - DNA, 25 bp, Homo sapien
taaagcacaggatctaggctcccgg

SEQ ID NO: 3511719 - DNA, 25 bp, Homo sapien
aaagcacaggatctaggctcccgga

SEQ ID NO: 3511720 - DNA, 25 bp, Homo sapien
gcagggcatccttgcaggcattctg

SEQ ID NO: 3511721 - DNA, 25 bp, Homo sapien
aggcattctgcatacagtactgttg

SEQ ID NO: 3511722 - DNA, 25 bp, Homo sapien
agctgcctgagagaccttgatcctc

SEQ ID NO: 3511723 - DNA, 25 bp, Homo sapien
acagtactgttgaagctctgcagct

SEQ ID NO: 3511724 - DNA, 25 bp, Homo sapien
tccaacttgagctgctctaccaaga

SEQ ID NO: 3511725 - DNA, 25 bp, Homo sapien
cttgagctgctctaccaagagctgc

SEQ ID NO: 3511726 - DNA, 25 bp, Homo sapien
caacttgagctgctctaccaagagc

SEQ ID NO: 3511727 - DNA, 25 bp, Homo sapien
gggcgctcgcgctagccccggagga

SEQ ID NO: 3511728 - DNA, 25 bp, Homo sapien
catcgtgacaaaatctgaagagata

SEQ ID NO: 3511729 - DNA, 25 bp, Homo sapien
caagagtcagcaggtttctgtagtg

SEQ ID NO: 3511730 - DNA, 25 bp, Homo sapien
taaagtttcagccagagtagtcgct

SEQ ID NO: 3511731 - DNA, 25 bp, Homo sapien
gtttctgttcaggtacctagaacta

SEQ ID NO: 3511732 - DNA, 25 bp, Homo sapien
agctggtcatcccaacaggtgttca

SEQ ID NO: 3511733 - DNA, 25 bp, Homo sapien
tcttctctgtagcaagggtatcctg

SEQ ID NO: 3511734 - DNA, 25 bp, Homo sapien
cctagactagaatgggtggctcctc

SEQ ID NO: 3511735 - DNA, 25 bp, Homo sapien
gctggaccagttgcaccacaaacag

SEQ ID NO: 3511736 - DNA, 25 bp, Homo sapien
tggggtggagcttgtcatattgtca

SEQ ID NO: 3511737 - DNA, 25 bp, Homo sapien
aagagcagttgtcatggtacccctg

SEQ ID NO: 3511738 - DNA, 25 bp, Homo sapien
gaagagcagttgtcatggtacccct

SEQ ID NO: 3511739 - DNA, 25 bp, Homo sapien
agagcagttgtcatggtacccctgg

SEQ ID NO: 3511740 - DNA, 25 bp, Homo sapien
gaagtgaccgtcacatttgtcctga

SEQ ID NO: 3511741 - DNA, 25 bp, Homo sapien
tgtgaagtgaccgtcacatttgtcc

SEQ ID NO: 3511742 - DNA, 25 bp, Homo sapien
tcactgtgaagtgaccgtcacattt

SEQ ID NO: 3511743 - DNA, 25 bp, Homo sapien
gtgaccgtcacatttgtcctgaaag

SEQ ID NO: 3511744 - DNA, 25 bp, Homo sapien
ctggcttctcgtggtcatagcctac

SEQ ID NO: 3511745 - DNA, 25 bp, Homo sapien
cctaccacgatgaagtagtcagcca

SEQ ID NO: 3511746 - DNA, 25 bp, Homo sapien
tagcctaccacgatgaagtagtcag

SEQ ID NO: 3511747 - DNA, 25 bp, Homo sapien
gtggtcatagcctaccacgatgaag

SEQ ID NO: 3511748 - DNA, 25 bp, Homo sapien
attttccctgcagcggcagtagcgg

SEQ ID NO: 3511749 - DNA, 25 bp, Homo sapien
gcagcggcagcgcttcagccatgtt

SEQ ID NO: 3511750 - DNA, 25 bp, Homo sapien
cccggcccgggagggctcagcattt

SEQ ID NO: 3511751 - DNA, 25 bp, Homo sapien
ccatgtttgacaaccgaggcgcgct

SEQ ID NO: 3511752 - DNA, 25 bp, Homo sapien
tatgcagaactctcctttataccat

SEQ ID NO: 3511753 - DNA, 25 bp, Homo sapien
gtttatctggaacaacccatatgga

SEQ ID NO: 3511754 - DNA, 25 bp, Homo sapien
ttcactatcaccacaacagcaggag

SEQ ID NO: 3511755 - DNA, 25 bp, Homo sapien
gggatatattcttgggattggaatt

SEQ ID NO: 3511756 - DNA, 25 bp, Homo sapien
gagatgttgtatcatgatgttgccc

SEQ ID NO: 3511757 - DNA, 25 bp, Homo sapien
tagctctttagtactttgacccatt

SEQ ID NO: 3511758 - DNA, 25 bp, Homo sapien
agagatgttgtatcatgatgttgcc

SEQ ID NO: 3511759 - DNA, 25 bp, Homo sapien
caatcactgccacttgaatggatgc

SEQ ID NO: 3511760 - DNA, 25 bp, Homo sapien
cttgtactgtccttgctcaacgtga

SEQ ID NO: 3511761 - DNA, 25 bp, Homo sapien
tgaagaagttgaaacaccattacgc

SEQ ID NO: 3511762 - DNA, 25 bp, Homo sapien
taataaattgccaggatcagaactc

SEQ ID NO: 3511763 - DNA, 25 bp, Homo sapien
tcttgctgttcttcgccaggaggct

SEQ ID NO: 3511764 - DNA, 25 bp, Homo sapien
gcgcggtccacttgaggccacagct

SEQ ID NO: 3511765 - DNA, 25 bp, Homo sapien
ttcgctccggcgtactgtctgaacc

SEQ ID NO: 3511766 - DNA, 25 bp, Homo sapien
agaggttgtagtggcgccccttcgc

SEQ ID NO: 3511767 - DNA, 25 bp, Homo sapien
gctgtggcagttcctgcaccaaccg

SEQ ID NO: 3511768 - DNA, 25 bp, Homo sapien
gcagttcctgcaccaaccgcctgga

SEQ ID NO: 3511769 - DNA, 25 bp, Homo sapien
agagggctgtggcagttcctgcacc

SEQ ID NO: 3511770 - DNA, 25 bp, Homo sapien
agttcctgcaccaaccgcctggagc

SEQ ID NO: 3511771 - DNA, 25 bp, Homo sapien
cagctgggcttggacttcggagttt

SEQ ID NO: 3511772 - DNA, 25 bp, Homo sapien
acagctcaagccttgccacttcggg

SEQ ID NO: 3511773 - DNA, 25 bp, Homo sapien
ttggtgacactggatagaacagctc

SEQ ID NO: 3511774 - DNA, 25 bp, Homo sapien
tgcgcttataaagcacaggaaccag

SEQ ID NO: 3511775 - DNA, 25 bp, Homo sapien
ttcatcatatgcaccagaggttttt

SEQ ID NO: 3511776 - DNA, 25 bp, Homo sapien
tcatatgcaccagaggtttttaaac

SEQ ID NO: 3511777 - DNA, 25 bp, Homo sapien
ctgagggtcttccttcatcatatgc

SEQ ID NO: 3511778 - DNA, 25 bp, Homo sapien
atattttctgtaggacctgagggtc

SEQ ID NO: 3511779 - DNA, 25 bp, Homo sapien
gactgaatggtcaaacttatcaccc

SEQ ID NO: 3511780 - DNA, 25 bp, Homo sapien
tctggcattatagctggcacattta

SEQ ID NO: 3511781 - DNA, 25 bp, Homo sapien
tgatggcttatcactgtgtctggca

SEQ ID NO: 3511782 - DNA, 25 bp, Homo sapien
ttatcacccgttgttcttcccagaa

SEQ ID NO: 3511783 - DNA, 25 bp, Homo sapien
agtttacaaatagttgctgagctag

SEQ ID NO: 3511784 - DNA, 25 bp, Homo sapien
tacaaatagttgctgagctaggcat

SEQ ID NO: 3511785 - DNA, 25 bp, Homo sapien
tttacaaatagttgctgagctaggc

SEQ ID NO: 3511786 - DNA, 25 bp, Homo sapien
ttacaaatagttgctgagctaggca

SEQ ID NO: 3511787 - DNA, 25 bp, Homo sapien
attttttcgcactcccagttctcat

SEQ ID NO: 3511788 - DNA, 25 bp, Homo sapien
ttttcgcactcccagttctcattag

SEQ ID NO: 3511789 - DNA, 25 bp, Homo sapien
ttttttcgcactcccagttctcatt

SEQ ID NO: 3511790 - DNA, 25 bp, Homo sapien
ttcgcactcccagttctcattaggg

SEQ ID NO: 3511791 - DNA, 25 bp, Homo sapien
gccatgtggtctgaccacagagacc

SEQ ID NO: 3511792 - DNA, 25 bp, Homo sapien
atggccatcaggtaggccatgtggt

SEQ ID NO: 3511793 - DNA, 25 bp, Homo sapien
tgggtgagggtccactgccccttcc

SEQ ID NO: 3511794 - DNA, 25 bp, Homo sapien
caggtaggccatgtggtctgaccac

SEQ ID NO: 3511795 - DNA, 25 bp, Homo sapien
gggcaggcgcctctaactgattcat

SEQ ID NO: 3511796 - DNA, 25 bp, Homo sapien
gattgggcacgaatgttctcagagc

SEQ ID NO: 3511797 - DNA, 25 bp, Homo sapien
cacaaaggactcacttggcgaaagt

SEQ ID NO: 3511798 - DNA, 25 bp, Homo sapien
aatgaatgcggtgtcttcctcggag

SEQ ID NO: 3511799 - DNA, 25 bp, Homo sapien
tgttcgtccggcttgtaatcccaaa

SEQ ID NO: 3511800 - DNA, 25 bp, Homo sapien
ttgttgtatgcttggctggtcttca

SEQ ID NO: 3511801 - DNA, 25 bp, Homo sapien
ttctcatcctggaaacggaagttta

SEQ ID NO: 3511802 - DNA, 25 bp, Homo sapien
tattttgaagcctgctctattgttc

SEQ ID NO: 3511803 - DNA, 25 bp, Homo sapien
cgaaatagacacattaattctcagg

SEQ ID NO: 3511804 - DNA, 25 bp, Homo sapien
tccacgaaatagacacattaattct

SEQ ID NO: 3511805 - DNA, 25 bp, Homo sapien
tagacacattaattctcaggcctcc

SEQ ID NO: 3511806 - DNA, 25 bp, Homo sapien
gacacattaattctcaggcctcctg

SEQ ID NO: 3511807 - DNA, 25 bp, Homo sapien
ggttgcttaggctctccctttcctg

SEQ ID NO: 3511808 - DNA, 25 bp, Homo sapien
cagctggtgcagttgaggttgctta

SEQ ID NO: 3511809 - DNA, 25 bp, Homo sapien
gacagaagtatcaagatgatatcgg

SEQ ID NO: 3511810 - DNA, 25 bp, Homo sapien
gatatcggggcaactggatcagctg

SEQ ID NO: 3511811 - DNA, 25 bp, Homo sapien
caagcctgtctatggaatgggctag

SEQ ID NO: 3511812 - DNA, 25 bp, Homo sapien
ggtaccaagcctgtctatggaatgg

SEQ ID NO: 3511813 - DNA, 25 bp, Homo sapien
ctatggaatgggctagattgctaat

SEQ ID NO: 3511814 - DNA, 25 bp, Homo sapien
aatgggctagattgctaataccaga

SEQ ID NO: 3511815 - DNA, 25 bp, Homo sapien
tcagattagggctagaggtataccc

SEQ ID NO: 3511816 - DNA, 25 bp, Homo sapien
gtatacccatctctgggaagtgagt

SEQ ID NO: 3511817 - DNA, 25 bp, Homo sapien
gacctggtgtctgggcatcctcccg

SEQ ID NO: 3511818 - DNA, 25 bp, Homo sapien
catgacttgggccttactttgaaac

SEQ ID NO: 3511819 - DNA, 25 bp, Homo sapien
cttgggtgccagtgctactttgcca

SEQ ID NO: 3511820 - DNA, 25 bp, Homo sapien
gctactttgccattgcttagttcta

SEQ ID NO: 3511821 - DNA, 25 bp, Homo sapien
tttccaggttcttgtcttttacaca

SEQ ID NO: 3511822 - DNA, 25 bp, Homo sapien
ggttcttgtcttttacacacatatc

SEQ ID NO: 3511823 - DNA, 25 bp, Homo sapien
gggctcctttcaggcaagattgtag

SEQ ID NO: 3511824 - DNA, 25 bp, Homo sapien
ggctcctttcaggcaagattgtaga

SEQ ID NO: 3511825 - DNA, 25 bp, Homo sapien
tgggctcctttcaggcaagattgta

SEQ ID NO: 3511826 - DNA, 25 bp, Homo sapien
aaacagtccaactcttgtgttgtga

SEQ ID NO: 3511827 - DNA, 25 bp, Homo sapien
ttgagaccgattccctggaagggag

SEQ ID NO: 3511828 - DNA, 25 bp, Homo sapien
ggtgtccccatctgacgcaaacagt

SEQ ID NO: 3511829 - DNA, 25 bp, Homo sapien
taaaggcacagtcgtctggtgtccc

SEQ ID NO: 3511830 - DNA, 25 bp, Homo sapien
tgcttttatccatggagtcagcaaa

SEQ ID NO: 3511831 - DNA, 25 bp, Homo sapien
tttatccatggagtcagcaaaatgt

SEQ ID NO: 3511832 - DNA, 25 bp, Homo sapien
tatccatggagtcagcaaaatgtga

SEQ ID NO: 3511833 - DNA, 25 bp, Homo sapien
ccatggagtcagcaaaatgtgaaga

SEQ ID NO: 3511834 - DNA, 25 bp, Homo sapien
gcatttgaggtcaagtatgaacctc

SEQ ID NO: 3511835 - DNA, 25 bp, Homo sapien
tcctgcacttcagctctacacagat

SEQ ID NO: 3511836 - DNA, 25 bp, Homo sapien
caagtatgaacctcctgcacttcag

SEQ ID NO: 3511837 - DNA, 25 bp, Homo sapien
ttgaggtcaagtatgaacctcctgc

SEQ ID NO: 3511838 - DNA, 25 bp, Homo sapien
gacctggtccaaaggagtggagaca

SEQ ID NO: 3511839 - DNA, 25 bp, Homo sapien
gcaggttggtagctcagccagccaa

SEQ ID NO: 3511840 - DNA, 25 bp, Homo sapien
ccttgtaaatgaatagcgtctcgct

SEQ ID NO: 3511841 - DNA, 25 bp, Homo sapien
gagaacctgagaaaagagacctggt

SEQ ID NO: 3511842 - DNA, 25 bp, Homo sapien
tgtttttctcatcagcggaggctga

SEQ ID NO: 3511843 - DNA, 25 bp, Homo sapien
gcccactccatctaattgtcttctg

SEQ ID NO: 3511844 - DNA, 25 bp, Homo sapien
cctgaacacgaacttggttaagtgt

SEQ ID NO: 3511845 - DNA, 25 bp, Homo sapien
tgttcgtggccatcggaattccctg

SEQ ID NO: 3511846 - DNA, 25 bp, Homo sapien
aattctttgcaaggaggctgtggat

SEQ ID NO: 3511847 - DNA, 25 bp, Homo sapien
ctgataccctaatacccatgattgt

SEQ ID NO: 3511848 - DNA, 25 bp, Homo sapien
cttgagtggtggaaattctttgcaa

SEQ ID NO: 3511849 - DNA, 25 bp, Homo sapien
ttttgcttccagagctcgggggtcc

SEQ ID NO: 3511850 - DNA, 25 bp, Homo sapien
cagaggacagtgagacagcaaaagg

SEQ ID NO: 3511851 - DNA, 25 bp, Homo sapien
ttctcatcttacgtaggaggagagc

SEQ ID NO: 3511852 - DNA, 25 bp, Homo sapien
gacagcaaaagggttgcgagtccag

SEQ ID NO: 3511853 - DNA, 25 bp, Homo sapien
gggttgcgagtccaggcatttctca

SEQ ID NO: 3511854 - DNA, 25 bp, Homo sapien
gagtggcttgtttagagtcagcagc

SEQ ID NO: 3511855 - DNA, 25 bp, Homo sapien
gcggaagagtggcttgtttagagtc

SEQ ID NO: 3511856 - DNA, 25 bp, Homo sapien
cggaagagtggcttgtttagagtca

SEQ ID NO: 3511857 - DNA, 25 bp, Homo sapien
gaagagtggcttgtttagagtcagc

SEQ ID NO: 3511858 - DNA, 25 bp, Homo sapien
gcaactgaattcctctctgggatct

SEQ ID NO: 3511859 - DNA, 25 bp, Homo sapien
atccaccacccttcagtaaccgagg

SEQ ID NO: 3511860 - DNA, 25 bp, Homo sapien
gatctgactgtcctcagcagagaga

SEQ ID NO: 3511861 - DNA, 25 bp, Homo sapien
caggaaagcgggcagcaactgaatt

SEQ ID NO: 3511862 - DNA, 25 bp, Homo sapien
ccaacattaagaactatgttcactg

SEQ ID NO: 3511863 - DNA, 25 bp, Homo sapien
ttaagaactatgttcactgactgtg

SEQ ID NO: 3511864 - DNA, 25 bp, Homo sapien
tggggtcgacacagggcacggtggg

SEQ ID NO: 3511865 - DNA, 25 bp, Homo sapien
tgtcttccgctgctaggatggggtc

SEQ ID NO: 3511866 - DNA, 25 bp, Homo sapien
atccagacacggcaattgggaaaag

SEQ ID NO: 3511867 - DNA, 25 bp, Homo sapien
ctggatccagacacggcaattggga

SEQ ID NO: 3511868 - DNA, 25 bp, Homo sapien
tggatccagacacggcaattgggaa

SEQ ID NO: 3511869 - DNA, 25 bp, Homo sapien
cagacacggcaattgggaaaagctt

SEQ ID NO: 3511870 - DNA, 25 bp, Homo sapien
attgcaatgtgtttatctaggaaac

SEQ ID NO: 3511871 - DNA, 25 bp, Homo sapien
tccaattttccagttgggttaatga

SEQ ID NO: 3511872 - DNA, 25 bp, Homo sapien
ggtagatgcgtattattgcaatgtg

SEQ ID NO: 3511873 - DNA, 25 bp, Homo sapien
cctgagtgaagtccaattttccagt

SEQ ID NO: 3511874 - DNA, 25 bp, Homo sapien
atccgggagcctgagccaatactga

SEQ ID NO: 3511875 - DNA, 25 bp, Homo sapien
gagcctgagccaatactgaaaacag

SEQ ID NO: 3511876 - DNA, 25 bp, Homo sapien
gcctgagcccatccgggagcctgag

SEQ ID NO: 3511877 - DNA, 25 bp, Homo sapien
cagcacctcatgcctggagtcactg

SEQ ID NO: 3511878 - DNA, 25 bp, Homo sapien
tggaacctgtggctcagggttagtg

SEQ ID NO: 3511879 - DNA, 25 bp, Homo sapien
ggaacctgtggctcagggttagtga

SEQ ID NO: 3511880 - DNA, 25 bp, Homo sapien
gaacctgtggctcagggttagtgag

SEQ ID NO: 3511881 - DNA, 25 bp, Homo sapien
cttggctttagaggacacacttgag

SEQ ID NO: 3511882 - DNA, 25 bp, Homo sapien
ccttcaggggtgaagtgtctcagca

SEQ ID NO: 3511883 - DNA, 25 bp, Homo sapien
ttgaggaagcagagtcttttctgat

SEQ ID NO: 3511884 - DNA, 25 bp, Homo sapien
tgcttaccagatgtagtgattcctg

SEQ ID NO: 3511885 - DNA, 25 bp, Homo sapien
gcaagggtgcttctaagtgctctgt

SEQ ID NO: 3511886 - DNA, 25 bp, Homo sapien
tggccagagctgtagaatgctgatg

SEQ ID NO: 3511887 - DNA, 25 bp, Homo sapien
tgaggatcaacactccagagggcca

SEQ ID NO: 3511888 - DNA, 25 bp, Homo sapien
ctcccacagtggaatgaagcaccgt

SEQ ID NO: 3511889 - DNA, 25 bp, Homo sapien
gaggggtagcttgttggccagagaa

SEQ ID NO: 3511890 - DNA, 25 bp, Homo sapien
aggggtagcttgttggccagagaag

SEQ ID NO: 3511891 - DNA, 25 bp, Homo sapien
ccttgtgggcaaatgatttgggatc

SEQ ID NO: 3511892 - DNA, 25 bp, Homo sapien
ggaagacactctcctgaagtccttg

SEQ ID NO: 3511893 - DNA, 25 bp, Homo sapien
gcttctcttggaagacactctcctg

SEQ ID NO: 3511894 - DNA, 25 bp, Homo sapien
ggaagatggacagcctgactctgca

SEQ ID NO: 3511895 - DNA, 25 bp, Homo sapien
gcagggtctcttccgtcattgtcaa

SEQ ID NO: 3511896 - DNA, 25 bp, Homo sapien
aggatggttagttgccttgaagtag

SEQ ID NO: 3511897 - DNA, 25 bp, Homo sapien
ttgccttgaagtaggtggcgatgcc

SEQ ID NO: 3511898 - DNA, 25 bp, Homo sapien
ggcgatgccttaactgcatgcatgc

SEQ ID NO: 3511899 - DNA, 25 bp, Homo sapien
tgcctctaccataggagatctggga

SEQ ID NO: 3511900 - DNA, 25 bp, Homo sapien
taagctggaccagcctttagtgggc

SEQ ID NO: 3511901 - DNA, 25 bp, Homo sapien
tctccgcagtacgtttaagctggac

SEQ ID NO: 3511902 - DNA, 25 bp, Homo sapien
gatagttgcaagttcctgggatgtc

SEQ ID NO: 3511903 - DNA, 25 bp, Homo sapien
tgcctggtgctaacagacagggttt

SEQ ID NO: 3511904 - DNA, 25 bp, Homo sapien
ttcaggcctaaacttggaggtggaa

SEQ ID NO: 3511905 - DNA, 25 bp, Homo sapien
gagagggcaccgaggagtaggttat

SEQ ID NO: 3511906 - DNA, 25 bp, Homo sapien
aacagacagggttttgaaagacgat

SEQ ID NO: 3511907 - DNA, 25 bp, Homo sapien
cttccctcttgtgtgaccacttgct

SEQ ID NO: 3511908 - DNA, 25 bp, Homo sapien
cctcttgtgtgaccacttgctaagt

SEQ ID NO: 3511909 - DNA, 25 bp, Homo sapien
tgtgtgaccacttgctaagtgctgc

SEQ ID NO: 3511910 - DNA, 25 bp, Homo sapien
tcttgtgtgaccacttgctaagtgc

SEQ ID NO: 3511911 - DNA, 25 bp, Homo sapien
tatgcagcaagctgccaaaggacgt

SEQ ID NO: 3511912 - DNA, 25 bp, Homo sapien
aggacgtgtcctcgccgcttgggat

SEQ ID NO: 3511913 - DNA, 25 bp, Homo sapien
tgggatgagatcactgtccttgctg

SEQ ID NO: 3511914 - DNA, 25 bp, Homo sapien
tgtgggagtggcacactatgcagca

SEQ ID NO: 3511915 - DNA, 25 bp, Homo sapien
ggtacccagcctgtgcactttggct

SEQ ID NO: 3511916 - DNA, 25 bp, Homo sapien
cttagaggtacccagcctgtgcact

SEQ ID NO: 3511917 - DNA, 25 bp, Homo sapien
gtgaggttctccttagaggtaccca

SEQ ID NO: 3511918 - DNA, 25 bp, Homo sapien
gaggtacccagcctgtgcactttgg

SEQ ID NO: 3511919 - DNA, 25 bp, Homo sapien
tggcccatctgaagcacttccacgg

SEQ ID NO: 3511920 - DNA, 25 bp, Homo sapien
ctagggaaggtacctgtgcctgtcc

SEQ ID NO: 3511921 - DNA, 25 bp, Homo sapien
tggcctagggaaggtacctgtgcct

SEQ ID NO: 3511922 - DNA, 25 bp, Homo sapien
acttccacggggaagctctggccta

SEQ ID NO: 3511923 - DNA, 25 bp, Homo sapien
agccaccgaggatgcctgcctgttg

SEQ ID NO: 3511924 - DNA, 25 bp, Homo sapien
catgtttactaacaaggaatccgag

SEQ ID NO: 3511925 - DNA, 25 bp, Homo sapien
cctggctagaaactgggagctgtag

SEQ ID NO: 3511926 - DNA, 25 bp, Homo sapien
gttgctacgctggagaacattttgt

SEQ ID NO: 3511927 - DNA, 25 bp, Homo sapien
tccaagtcgtctttgggcacagccc

SEQ ID NO: 3511928 - DNA, 25 bp, Homo sapien
ctgtccaagtcgtctttgggcacag

SEQ ID NO: 3511929 - DNA, 25 bp, Homo sapien
caagtcgtctttgggcacagcccca

SEQ ID NO: 3511930 - DNA, 25 bp, Homo sapien
tgtccaagtcgtctttgggcacagc

SEQ ID NO: 3511931 - DNA, 25 bp, Homo sapien
taacaaataccgagagcactgcaag

SEQ ID NO: 3511932 - DNA, 25 bp, Homo sapien
gttggccacctctgcataacaaata

SEQ ID NO: 3511933 - DNA, 25 bp, Homo sapien
agagcactgcaagtggagcttggac

SEQ ID NO: 3511934 - DNA, 25 bp, Homo sapien
ttggacaaggtctggaaaatcagcc

SEQ ID NO: 3511935 - DNA, 25 bp, Homo sapien
tgtgttctggcttgttcctaatcct

SEQ ID NO: 3511936 - DNA, 25 bp, Homo sapien
gtgttctggcttgttcctaatcctg

SEQ ID NO: 3511937 - DNA, 25 bp, Homo sapien
tcagtaatagtgacgcacggggaca

SEQ ID NO: 3511938 - DNA, 25 bp, Homo sapien
gatagtgggagggatctctcccctt

SEQ ID NO: 3511939 - DNA, 25 bp, Homo sapien
ggatctctccccttcatagtaaaaa

SEQ ID NO: 3511940 - DNA, 25 bp, Homo sapien
ttcatagtaaaaaccctgggacaca

SEQ ID NO: 3511941 - DNA, 25 bp, Homo sapien
aagccataaggcctgattgagtaca

SEQ ID NO: 3511942 - DNA, 25 bp, Homo sapien
ggccataagccataaggcctgattg

SEQ ID NO: 3511943 - DNA, 25 bp, Homo sapien
gccataagccataaggcctgattga

SEQ ID NO: 3511944 - DNA, 25 bp, Homo sapien
cataagccataaggcctgattgagt

SEQ ID NO: 3511945 - DNA, 25 bp, Homo sapien
tacagggacaggtgggcttggccag

SEQ ID NO: 3511946 - DNA, 25 bp, Homo sapien
gaggaaagaaaagctacagggacag

SEQ ID NO: 3511947 - DNA, 25 bp, Homo sapien
agaaaagctacagggacaggtgggc

SEQ ID NO: 3511948 - DNA, 25 bp, Homo sapien
aaaagctacagggacaggtgggctt

SEQ ID NO: 3511949 - DNA, 25 bp, Homo sapien
ggccttgtgagatcttgcgagggat

SEQ ID NO: 3511950 - DNA, 25 bp, Homo sapien
gaagatcctgtgctgaagagtaaaa

SEQ ID NO: 3511951 - DNA, 25 bp, Homo sapien
aggggccttgtgagatcttgcgagg

SEQ ID NO: 3511952 - DNA, 25 bp, Homo sapien
agatcctgtgctgaagagtaaaact

SEQ ID NO: 3511953 - DNA, 25 bp, Homo sapien
gaccttcagaatatgctcacgtgga

SEQ ID NO: 3511954 - DNA, 25 bp, Homo sapien
ctggcactagagtgtctgcacaggg

SEQ ID NO: 3511955 - DNA, 25 bp, Homo sapien
gagtgggcacctctacaactttgat

SEQ ID NO: 3511956 - DNA, 25 bp, Homo sapien
acgtggaaggaatgcgtgagacaca

SEQ ID NO: 3511957 - DNA, 25 bp, Homo sapien
caagatttctgaggacctggctcga

SEQ ID NO: 3511958 - DNA, 25 bp, Homo sapien
gaacacggctaaaccgctttgcctg

SEQ ID NO: 3511959 - DNA, 25 bp, Homo sapien
gctcgagcttctgtgtcagagtcct

SEQ ID NO: 3511960 - DNA, 25 bp, Homo sapien
cctcattctgactatggggcctcag

SEQ ID NO: 3511961 - DNA, 25 bp, Homo sapien
ctggatggtggatagagacccacat

SEQ ID NO: 3511962 - DNA, 25 bp, Homo sapien
ccaggcgggaatcagcagcgccctg

SEQ ID NO: 3511963 - DNA, 25 bp, Homo sapien
cggtggcgctgactccggtccgatc

SEQ ID NO: 3511964 - DNA, 25 bp, Homo sapien
ttccctgctcgcagaggcggtggcg

SEQ ID NO: 3511965 - DNA, 25 bp, Homo sapien
gggcagcatcccgattccctggcgg

SEQ ID NO: 3511966 - DNA, 25 bp, Homo sapien
tcccggcaagggaggtgtacagcct

SEQ ID NO: 3511967 - DNA, 25 bp, Homo sapien
gcccttgatcttctggtagctgctt

SEQ ID NO: 3511968 - DNA, 25 bp, Homo sapien
agagctgctaatggctgttgtaggc

SEQ ID NO: 3511969 - DNA, 25 bp, Homo sapien
ctaatggctgttgtaggctggcaga

SEQ ID NO: 3511970 - DNA, 25 bp, Homo sapien
tctaggagtgttgacagcaggtctg

SEQ ID NO: 3511971 - DNA, 25 bp, Homo sapien
ctctaggagtgttgacagcaggtct

SEQ ID NO: 3511972 - DNA, 25 bp, Homo sapien
ctaggagtgttgacagcaggtctgg

SEQ ID NO: 3511973 - DNA, 25 bp, Homo sapien
tgaaagggagggataccagttccga

SEQ ID NO: 3511974 - DNA, 25 bp, Homo sapien
caccatgattgtgcttgccgggagg

SEQ ID NO: 3511975 - DNA, 25 bp, Homo sapien
tcatgcggcctcagagaataacagg

SEQ ID NO: 3511976 - DNA, 25 bp, Homo sapien
ggccgcctgcatgaaccaaaagcat

SEQ ID NO: 3511977 - DNA, 25 bp, Homo sapien
ctaaatgatggtgtaactgctatgg

SEQ ID NO: 3511978 - DNA, 25 bp, Homo sapien
aacactaaatgatggtgtaactgct

SEQ ID NO: 3511979 - DNA, 25 bp, Homo sapien
actaaatgatggtgtaactgctatg

SEQ ID NO: 3511980 - DNA, 25 bp, Homo sapien
cactaaatgatggtgtaactgctat

SEQ ID NO: 3511981 - DNA, 25 bp, Homo sapien
ctttggccctggtttgctcaattgt

SEQ ID NO: 3511982 - DNA, 25 bp, Homo sapien
tttggccctggtttgctcaattgta

SEQ ID NO: 3511983 - DNA, 25 bp, Homo sapien
gtctggccaaacctggtttcttgag

SEQ ID NO: 3511984 - DNA, 25 bp, Homo sapien
ctggccaaacctggtttcttgagca

SEQ ID NO: 3511985 - DNA, 25 bp, Homo sapien
ctcctaagtgtaagttgggtgcttt

SEQ ID NO: 3511986 - DNA, 25 bp, Homo sapien
tttgcggccttcgtcagggtttgct

SEQ ID NO: 3511987 - DNA, 25 bp, Homo sapien
cttgcgcttactttgcggccttcgt

SEQ ID NO: 3511988 - DNA, 25 bp, Homo sapien
aatttcatcagggttatcgtagttt

SEQ ID NO: 3511989 - DNA, 25 bp, Homo sapien
ggttatcgtagttttctgaagtaga

SEQ ID NO: 3511990 - DNA, 25 bp, Homo sapien
gagcccgtcgaaacattttcagtgt

SEQ ID NO: 3511991 - DNA, 25 bp, Homo sapien
tgctttggggaagtaagctacataa

SEQ ID NO: 3511992 - DNA, 25 bp, Homo sapien
tttatggggtgatatgagcccgtcg

SEQ ID NO: 3511993 - DNA, 25 bp, Homo sapien
tgatatgagcccgtcgaaacatttt

SEQ ID NO: 3511994 - DNA, 25 bp, Homo sapien
acaagcccccagcgcacaatataaa

SEQ ID NO: 3511995 - DNA, 25 bp, Homo sapien
tagatataaggaaatcgagtccaat

SEQ ID NO: 3511996 - DNA, 25 bp, Homo sapien
cccagcgcacaatataaaatagttc

SEQ ID NO: 3511997 - DNA, 25 bp, Homo sapien
gcccccagcgcacaatataaaatag

SEQ ID NO: 3511998 - DNA, 25 bp, Homo sapien
aactaaggttctatacataatcgga

SEQ ID NO: 3511999 - DNA, 25 bp, Homo sapien
ttactgagttaggatagggaaaaca

SEQ ID NO: 3512000 - DNA, 25 bp, Homo sapien
cataatcggagtaaaccctctgtta

SEQ ID NO: 3512001 - DNA, 25 bp, Homo sapien
tattgcacaatttatcagtgggtac

SEQ ID NO: 3512002 - DNA, 25 bp, Homo sapien
gaacccctggtactctgcttgcata

SEQ ID NO: 3512003 - DNA, 25 bp, Homo sapien
ggtttgggccctattgagtcactgg

SEQ ID NO: 3512004 - DNA, 25 bp, Homo sapien
aaaatcattggctatccctggaaag

SEQ ID NO: 3512005 - DNA, 25 bp, Homo sapien
tgccaggttgatatgatggaacccc

SEQ ID NO: 3512006 - DNA, 25 bp, Homo sapien
gggacaaatgatcagaatagcaaaa

SEQ ID NO: 3512007 - DNA, 25 bp, Homo sapien
tgtctgtgccagtgccacaacccta

SEQ ID NO: 3512008 - DNA, 25 bp, Homo sapien
tgaccaaatatttgagcccacaata

SEQ ID NO: 3512009 - DNA, 25 bp, Homo sapien
gagcccacaatagcaacagaagact

SEQ ID NO: 3512010 - DNA, 25 bp, Homo sapien
catatcatcttcagtgggtgcatct

SEQ ID NO: 3512011 - DNA, 25 bp, Homo sapien
cccaagattcatttgctccagtcat

SEQ ID NO: 3512012 - DNA, 25 bp, Homo sapien
tgcctcatcagccatgttaagaata

SEQ ID NO: 3512013 - DNA, 25 bp, Homo sapien
ggtgcatctgataccacccaagatt

SEQ ID NO: 3512014 - DNA, 25 bp, Homo sapien
ctgtaggcgacaaatagggcaattc

SEQ ID NO: 3512015 - DNA, 25 bp, Homo sapien
taggcgacaaatagggcaattcctg

SEQ ID NO: 3512016 - DNA, 25 bp, Homo sapien
aatagggcaattcctgtgtcgatca

SEQ ID NO: 3512017 - DNA, 25 bp, Homo sapien
gacaaatagggcaattcctgtgtcg

SEQ ID NO: 3512018 - DNA, 25 bp, Homo sapien
gggatagtcccctaaagctcactgg

SEQ ID NO: 3512019 - DNA, 25 bp, Homo sapien
tttctagcccctgatcaagaagcgg

SEQ ID NO: 3512020 - DNA, 25 bp, Homo sapien
tgtttaactagtctcctgcagaagg

SEQ ID NO: 3512021 - DNA, 25 bp, Homo sapien
tgcatgtgaagacactaccgaggct

SEQ ID NO: 3512022 - DNA, 25 bp, Homo sapien
tagttttaaccagtagaaggcatgc

SEQ ID NO: 3512023 - DNA, 25 bp, Homo sapien
gctgatctctaaagttccctgaggt

SEQ ID NO: 3512024 - DNA, 25 bp, Homo sapien
tccctgaggtccagtattcaagaat

SEQ ID NO: 3512025 - DNA, 25 bp, Homo sapien
ggcccagcccatgaatgcagtaggt

SEQ ID NO: 3512026 - DNA, 25 bp, Homo sapien
catttatcaatacacttctgacaaa

SEQ ID NO: 3512027 - DNA, 25 bp, Homo sapien
atttatcaatacacttctgacaaaa

SEQ ID NO: 3512028 - DNA, 25 bp, Homo sapien
tttatcaatacacttctgacaaaag

SEQ ID NO: 3512029 - DNA, 25 bp, Homo sapien
agatacaacactcctcctcatcggt

SEQ ID NO: 3512030 - DNA, 25 bp, Homo sapien
caggatgaggtcagcccgcccatcc

SEQ ID NO: 3512031 - DNA, 25 bp, Homo sapien
aggatgaggtcagcccgcccatcca

SEQ ID NO: 3512032 - DNA, 25 bp, Homo sapien
cgcccatccatacagatacaacact

SEQ ID NO: 3512033 - DNA, 25 bp, Homo sapien
tatgactcatgtgcaaaatcagact

SEQ ID NO: 3512034 - DNA, 25 bp, Homo sapien
catctatatgcccacagtataaagc

SEQ ID NO: 3512035 - DNA, 25 bp, Homo sapien
taagagggctacatttcataaagaa

SEQ ID NO: 3512036 - DNA, 25 bp, Homo sapien
cattaaagacagagatacggtctga

SEQ ID NO: 3512037 - DNA, 25 bp, Homo sapien
catgcgggcctggaagttgctctag

SEQ ID NO: 3512038 - DNA, 25 bp, Homo sapien
gagcatgcgggcctggaagttgctc

SEQ ID NO: 3512039 - DNA, 25 bp, Homo sapien
tggagcatgcgggcctggaagttgc

SEQ ID NO: 3512040 - DNA, 25 bp, Homo sapien
gcatgcgggcctggaagttgctcta

SEQ ID NO: 3512041 - DNA, 25 bp, Homo sapien
acagtagtgtacagactttatgaac

SEQ ID NO: 3512042 - DNA, 25 bp, Homo sapien
ggacattactgtatagcacttgtac

SEQ ID NO: 3512043 - DNA, 25 bp, Homo sapien
ccgtgggccgtgagttgaacaagct

SEQ ID NO: 3512044 - DNA, 25 bp, Homo sapien
tgttgggccacattaaagcaatcct

SEQ ID NO: 3512045 - DNA, 25 bp, Homo sapien
taactcagctcaaaacatcatcatc

SEQ ID NO: 3512046 - DNA, 25 bp, Homo sapien
gaaactgcccttgtgagtttagtaa

SEQ ID NO: 3512047 - DNA, 25 bp, Homo sapien
gagagcccctgaatgagccatatac

SEQ ID NO: 3512048 - DNA, 25 bp, Homo sapien
tagtaagctccaaccttggtaactc

SEQ ID NO: 3512049 - DNA, 25 bp, Homo sapien
ctggtataaattcatgatccgtgat

SEQ ID NO: 3512050 - DNA, 25 bp, Homo sapien
ttcatgatccgtgatgcctccacaa

SEQ ID NO: 3512051 - DNA, 25 bp, Homo sapien
tataaattcatgatccgtgatgcct

SEQ ID NO: 3512052 - DNA, 25 bp, Homo sapien
taaattcatgatccgtgatgcctcc

SEQ ID NO: 3512053 - DNA, 25 bp, Homo sapien
tctaatgtagaagatacttggggca

SEQ ID NO: 3512054 - DNA, 25 bp, Homo sapien
gagccatggagtgaggcataatgaa

SEQ ID NO: 3512055 - DNA, 25 bp, Homo sapien
ccgaggccagtaaggtgaaggtata

SEQ ID NO: 3512056 - DNA, 25 bp, Homo sapien
tttcacaagctttggggagccatgg

SEQ ID NO: 3512057 - DNA, 25 bp, Homo sapien
catataaggtcagtacagaaatagc

SEQ ID NO: 3512058 - DNA, 25 bp, Homo sapien
ctatctggagatgcaaatatacaag

SEQ ID NO: 3512059 - DNA, 25 bp, Homo sapien
tactaaaagactgtacatgaggtag

SEQ ID NO: 3512060 - DNA, 25 bp, Homo sapien
cagaaatagcaaagtgtatcacact

SEQ ID NO: 3512061 - DNA, 25 bp, Homo sapien
ccaggttgtacctcaaagagaagat

SEQ ID NO: 3512062 - DNA, 25 bp, Homo sapien
tttccaaaaagcagaggaatcagac

SEQ ID NO: 3512063 - DNA, 25 bp, Homo sapien
ttggtacagaccacccgtacaacca

SEQ ID NO: 3512064 - DNA, 25 bp, Homo sapien
aggttgtacctcaaagagaagatgt

SEQ ID NO: 3512065 - DNA, 25 bp, Homo sapien
tgaaatgccaattctgacccatgga

SEQ ID NO: 3512066 - DNA, 25 bp, Homo sapien
ggagatcactgcacgtctgaaatgc

SEQ ID NO: 3512067 - DNA, 25 bp, Homo sapien
taattctacagttctcggagatcac

SEQ ID NO: 3512068 - DNA, 25 bp, Homo sapien
tgttttctagctgccaagcttcgtc

SEQ ID NO: 3512069 - DNA, 25 bp, Homo sapien
tctctcgaaccaacgtaacatgttt

SEQ ID NO: 3512070 - DNA, 25 bp, Homo sapien
cataagttaaggagccactctctcg

SEQ ID NO: 3512071 - DNA, 25 bp, Homo sapien
taagctcagctactctcccaagaaa

SEQ ID NO: 3512072 - DNA, 25 bp, Homo sapien
cttgttaataaccaactgtgtctga

SEQ ID NO: 3512073 - DNA, 25 bp, Homo sapien
caaaatccagagtgttgcttcacat

SEQ ID NO: 3512074 - DNA, 25 bp, Homo sapien
ctttcaaaatccagagtgttgcttc

SEQ ID NO: 3512075 - DNA, 25 bp, Homo sapien
tccagagtgttgcttcacatagttt

SEQ ID NO: 3512076 - DNA, 25 bp, Homo sapien
tgtctttcaaaatccagagtgttgc

SEQ ID NO: 3512077 - DNA, 25 bp, Homo sapien
ttaaccaacagctaagtccggcggc

SEQ ID NO: 3512078 - DNA, 25 bp, Homo sapien
agtccggcggccgaatgactgagcc

SEQ ID NO: 3512079 - DNA, 25 bp, Homo sapien
agccggcggcaatattcaaacaacc

SEQ ID NO: 3512080 - DNA, 25 bp, Homo sapien
tcaaacaaccgttttgggatagaga

SEQ ID NO: 3512081 - DNA, 25 bp, Homo sapien
caggttcaaggcatcgcgcaccctg

SEQ ID NO: 3512082 - DNA, 25 bp, Homo sapien
gactcaggccgggacccggtcgcac

SEQ ID NO: 3512083 - DNA, 25 bp, Homo sapien
gcgggtggccgcgactcaggccggg

SEQ ID NO: 3512084 - DNA, 25 bp, Homo sapien
ggttcaaggcatcgcgcaccctgcg

SEQ ID NO: 3512085 - DNA, 25 bp, Homo sapien
agactctcagttgcctaaaggtagg

SEQ ID NO: 3512086 - DNA, 25 bp, Homo sapien
ggtccatgggcagtagaaaaagtgc

SEQ ID NO: 3512087 - DNA, 25 bp, Homo sapien
caggttgtccggttgtctgcccagc

SEQ ID NO: 3512088 - DNA, 25 bp, Homo sapien
gctcctacacgcaggcaggttgtcc

SEQ ID NO: 3512089 - DNA, 25 bp, Homo sapien
tcaggcttggggcaagatctcttgc

SEQ ID NO: 3512090 - DNA, 25 bp, Homo sapien
gcccagataccagtcaataccaagg

SEQ ID NO: 3512091 - DNA, 25 bp, Homo sapien
tcaggatcaaatttgcctcttgcct

SEQ ID NO: 3512092 - DNA, 25 bp, Homo sapien
tctgatgcctactaatggtatgtgc

SEQ ID NO: 3512093 - DNA, 25 bp, Homo sapien
tagctgaaggtctagaggcaataca

SEQ ID NO: 3512094 - DNA, 25 bp, Homo sapien
tagactccagttgtgtgcaagccct

SEQ ID NO: 3512095 - DNA, 25 bp, Homo sapien
tggtggcctggcctttataaaagca

SEQ ID NO: 3512096 - DNA, 25 bp, Homo sapien
tgcaccagctgaaaatgccatcacg

SEQ ID NO: 3512097 - DNA, 25 bp, Homo sapien
gaaaactagagaagcagggcggtca

SEQ ID NO: 3512098 - DNA, 25 bp, Homo sapien
caaaagtgagacgaatgagccatcc

SEQ ID NO: 3512099 - DNA, 25 bp, Homo sapien
taagattatactccgtgggccaacc

SEQ ID NO: 3512100 - DNA, 25 bp, Homo sapien
tacaaagttcataggaaagggcacc

SEQ ID NO: 3512101 - DNA, 25 bp, Homo sapien
taataccttgcacagcacttgacat

SEQ ID NO: 3512102 - DNA, 25 bp, Homo sapien
ccagatagcgttctactatgtgcaa

SEQ ID NO: 3512103 - DNA, 25 bp, Homo sapien
taaaatgtgctttggtatatagagg

SEQ ID NO: 3512104 - DNA, 25 bp, Homo sapien
gaaaatgaataagattagtctcagc

SEQ ID NO: 3512105 - DNA, 25 bp, Homo sapien
ttaaacaaattactgagtaatcttc

SEQ ID NO: 3512106 - DNA, 25 bp, Homo sapien
aaacaaattactgagtaatcttcct

SEQ ID NO: 3512107 - DNA, 25 bp, Homo sapien
agtaatcatttctgtaactcagata

SEQ ID NO: 3512108 - DNA, 25 bp, Homo sapien
gagtaatcttccttagtaatcattt

SEQ ID NO: 3512109 - DNA, 25 bp, Homo sapien
catagccaggctagaaaggccgtgg

SEQ ID NO: 3512110 - DNA, 25 bp, Homo sapien
tagtccaatggcagtcctgagctga

SEQ ID NO: 3512111 - DNA, 25 bp, Homo sapien
gctcttaccgggctcagaaggacat

SEQ ID NO: 3512112 - DNA, 25 bp, Homo sapien
tgcggaatcagtagagaaagccttg

SEQ ID NO: 3512113 - DNA, 25 bp, Homo sapien
tgtaaaagggaaggccttcacatac

SEQ ID NO: 3512114 - DNA, 25 bp, Homo sapien
tccaggcatcgcacggtagttttgc

SEQ ID NO: 3512115 - DNA, 25 bp, Homo sapien
gtagttttgcttggactcttggact

SEQ ID NO: 3512116 - DNA, 25 bp, Homo sapien
tcattagggttgctatcattggcct

SEQ ID NO: 3512117 - DNA, 25 bp, Homo sapien
tgactgatggctggacgacatgcat

SEQ ID NO: 3512118 - DNA, 25 bp, Homo sapien
gagagactctcacacataacgatag

SEQ ID NO: 3512119 - DNA, 25 bp, Homo sapien
gattacaagactagcagtgcaccaa

SEQ ID NO: 3512120 - DNA, 25 bp, Homo sapien
caggccagactttaggctgaccaca

SEQ ID NO: 3512121 - DNA, 25 bp, Homo sapien
ttgacatagcaaaatccaagaccag

SEQ ID NO: 3512122 - DNA, 25 bp, Homo sapien
ttttgacatagcaaaatccaagacc

SEQ ID NO: 3512123 - DNA, 25 bp, Homo sapien
tttgacatagcaaaatccaagacca

SEQ ID NO: 3512124 - DNA, 25 bp, Homo sapien
gagagcaagcactagcagagccgtg

SEQ ID NO: 3512125 - DNA, 25 bp, Homo sapien
agagcaagcactagcagagccgtgg

SEQ ID NO: 3512126 - DNA, 25 bp, Homo sapien
aagcactagcagagccgtggggaca

SEQ ID NO: 3512127 - DNA, 25 bp, Homo sapien
gaggagagcaagcactagcagagcc

SEQ ID NO: 3512128 - DNA, 25 bp, Homo sapien
ttctgtagacatggtgctagtttcc

SEQ ID NO: 3512129 - DNA, 25 bp, Homo sapien
tctgtagacatggtgctagtttcca

SEQ ID NO: 3512130 - DNA, 25 bp, Homo sapien
gggatgccaccgagtaggtactgtc

SEQ ID NO: 3512131 - DNA, 25 bp, Homo sapien
cagtttgagtgttgaatatgggatc

SEQ ID NO: 3512132 - DNA, 25 bp, Homo sapien
ctttggtggtgataatttctggaat

SEQ ID NO: 3512133 - DNA, 25 bp, Homo sapien
ggaatgcacgagttagtccaagtat

SEQ ID NO: 3512134 - DNA, 25 bp, Homo sapien
cacacttggggtttgggctaatcct

SEQ ID NO: 3512135 - DNA, 25 bp, Homo sapien
caaatcaggacacccaccccatttt

SEQ ID NO: 3512136 - DNA, 25 bp, Homo sapien
gatgagttgtaacaataggctgcaa

SEQ ID NO: 3512137 - DNA, 25 bp, Homo sapien
taatcctagagatgaccacgaatcc

SEQ ID NO: 3512138 - DNA, 25 bp, Homo sapien
gtttcaacttggtccttgccggcca

SEQ ID NO: 3512139 - DNA, 25 bp, Homo sapien
gaaattcagctgctggttcgccttt

SEQ ID NO: 3512140 - DNA, 25 bp, Homo sapien
tgccggccaaacttagtcccagcag

SEQ ID NO: 3512141 - DNA, 25 bp, Homo sapien
gcctttttgctcacaagggtgatcc

SEQ ID NO: 3512142 - DNA, 25 bp, Homo sapien
ctgcatgacacctggatggaaagct

SEQ ID NO: 3512143 - DNA, 25 bp, Homo sapien
tgtttccagcccttagactctcctt

SEQ ID NO: 3512144 - DNA, 25 bp, Homo sapien
atcacataggtcctcagtttgctgc

SEQ ID NO: 3512145 - DNA, 25 bp, Homo sapien
ttgtttccagcccttagactctcct

SEQ ID NO: 3512146 - DNA, 25 bp, Homo sapien
ctgcaaaggaatcacataggtcctc

SEQ ID NO: 3512147 - DNA, 25 bp, Homo sapien
gggaggtctatctggctgggactgg

SEQ ID NO: 3512148 - DNA, 25 bp, Homo sapien
gactggggtttagaataacaggaca

SEQ ID NO: 3512149 - DNA, 25 bp, Homo sapien
ctgggactggggtttagaataacag

SEQ ID NO: 3512150 - DNA, 25 bp, Homo sapien
ctgatgcgcagggaggtctatctgg

SEQ ID NO: 3512151 - DNA, 25 bp, Homo sapien
tacttggccctcaaatatagttccc

SEQ ID NO: 3512152 - DNA, 25 bp, Homo sapien
taccttcatcaactactttattctg

SEQ ID NO: 3512153 - DNA, 25 bp, Homo sapien
ttattctgcagtcatggttatgctg

SEQ ID NO: 3512154 - DNA, 25 bp, Homo sapien
cacctagctctggatcactatatac

SEQ ID NO: 3512155 - DNA, 25 bp, Homo sapien
gatacaaacgtaaatgtcaatcatt

SEQ ID NO: 3512156 - DNA, 25 bp, Homo sapien
gtaaaagtccagatgatacaaacgt

SEQ ID NO: 3512157 - DNA, 25 bp, Homo sapien
cagagcagtaccaccaattagacct

SEQ ID NO: 3512158 - DNA, 25 bp, Homo sapien
tatggtggtacatttttggcagagc

SEQ ID NO: 3512159 - DNA, 25 bp, Homo sapien
cttctgcacgcaaagagccttggac

SEQ ID NO: 3512160 - DNA, 25 bp, Homo sapien
gccttggaccaggagcctcgtggtc

SEQ ID NO: 3512161 - DNA, 25 bp, Homo sapien
ccaggagcctcgtggtccagatgga

SEQ ID NO: 3512162 - DNA, 25 bp, Homo sapien
tgcacgcaaagagccttggaccagg

SEQ ID NO: 3512163 - DNA, 25 bp, Homo sapien
gatgctcaataactagtccggatgg

SEQ ID NO: 3512164 - DNA, 25 bp, Homo sapien
taaccgagacatccggatttccctg

SEQ ID NO: 3512165 - DNA, 25 bp, Homo sapien
tctggaactatgttgaggctcacac

SEQ ID NO: 3512166 - DNA, 25 bp, Homo sapien
cactggtgatatgagaggcagatgc

SEQ ID NO: 3512167 - DNA, 25 bp, Homo sapien
gagactgagcataggttgtgcctct

SEQ ID NO: 3512168 - DNA, 25 bp, Homo sapien
gaaatgaatgacgtcccttgaacgc

SEQ ID NO: 3512169 - DNA, 25 bp, Homo sapien
ggaaggcagatagcacagtgtgaac

SEQ ID NO: 3512170 - DNA, 25 bp, Homo sapien
tttccacccagctgttcggccttgt

SEQ ID NO: 3512171 - DNA, 25 bp, Homo sapien
gagtgtattctatgtttttccagcc

SEQ ID NO: 3512172 - DNA, 25 bp, Homo sapien
ctatgtttttccagccggattttca

SEQ ID NO: 3512173 - DNA, 25 bp, Homo sapien
tattctatgtttttccagccggatt

SEQ ID NO: 3512174 - DNA, 25 bp, Homo sapien
cagcagagtgtattctatgtttttc

SEQ ID NO: 3512175 - DNA, 25 bp, Homo sapien
ctcatgatctgggtgagcacaagcc

SEQ ID NO: 3512176 - DNA, 25 bp, Homo sapien
acatctccaataccgacctcatgat

SEQ ID NO: 3512177 - DNA, 25 bp, Homo sapien
atctccaataccgacctcatgatct

SEQ ID NO: 3512178 - DNA, 25 bp, Homo sapien
gggtgagcacaagccccagtttctc

SEQ ID NO: 3512179 - DNA, 25 bp, Homo sapien
cctctgggagattcatttgcatata

SEQ ID NO: 3512180 - DNA, 25 bp, Homo sapien
atcttgcttgtccacatttgaagtg

SEQ ID NO: 3512181 - DNA, 25 bp, Homo sapien
catccctctgggagattcatttgca

SEQ ID NO: 3512182 - DNA, 25 bp, Homo sapien
tattagggagtatgccttccttggg

SEQ ID NO: 3512183 - DNA, 25 bp, Homo sapien
tagcttccatgaattagaacatgtg

SEQ ID NO: 3512184 - DNA, 25 bp, Homo sapien
gtcatcctatagtgccataaaacac

SEQ ID NO: 3512185 - DNA, 25 bp, Homo sapien
taataccatatcttggcgattgtga

SEQ ID NO: 3512186 - DNA, 25 bp, Homo sapien
tactattccgttgtgtatgtacacc

SEQ ID NO: 3512187 - DNA, 25 bp, Homo sapien
tagtggtgaatacactaagttcatt

SEQ ID NO: 3512188 - DNA, 25 bp, Homo sapien
aattccctcacaaagttagatttct

SEQ ID NO: 3512189 - DNA, 25 bp, Homo sapien
gtttctcagcaccatacccctcaaa

SEQ ID NO: 3512190 - DNA, 25 bp, Homo sapien
aaagggccacatccttaatctagcc

SEQ ID NO: 3512191 - DNA, 25 bp, Homo sapien
tctgagggcctcatgtagctaaagc

SEQ ID NO: 3512192 - DNA, 25 bp, Homo sapien
cacttgggcctgacgttatacttgg

SEQ ID NO: 3512193 - DNA, 25 bp, Homo sapien
atgaatagctcccacagaagtgccg

SEQ ID NO: 3512194 - DNA, 25 bp, Homo sapien
gaaccagactcctagggctaagcag

SEQ ID NO: 3512195 - DNA, 25 bp, Homo sapien
tataggaattgtagagccccagcac

SEQ ID NO: 3512196 - DNA, 25 bp, Homo sapien
gacacagtttgggatacatgacttg

SEQ ID NO: 3512197 - DNA, 25 bp, Homo sapien
tctgggctgccgagcaagtggatct

SEQ ID NO: 3512198 - DNA, 25 bp, Homo sapien
cctgctctgcacaagagttatagga

SEQ ID NO: 3512199 - DNA, 25 bp, Homo sapien
ttcaggtcttgaagttctttggtct

SEQ ID NO: 3512200 - DNA, 25 bp, Homo sapien
cttcaggtcttgaagttctttggtc

SEQ ID NO: 3512201 - DNA, 25 bp, Homo sapien
aggtcttgaagttctttggtcttct

SEQ ID NO: 3512202 - DNA, 25 bp, Homo sapien
tggtctcctgactaagctcctccag

SEQ ID NO: 3512203 - DNA, 25 bp, Homo sapien
gccttggtctcctgactaagctcct

SEQ ID NO: 3512204 - DNA, 25 bp, Homo sapien
gcttcacaatctgggtccccatttg

SEQ ID NO: 3512205 - DNA, 25 bp, Homo sapien
cttggtctcctgactaagctcctcc

SEQ ID NO: 3512206 - DNA, 25 bp, Homo sapien
taagttctacagagttcaggccctc

SEQ ID NO: 3512207 - DNA, 25 bp, Homo sapien
ctgtcatgattaagagtctgttgaa

SEQ ID NO: 3512208 - DNA, 25 bp, Homo sapien
actggcctggcataagttctacaga

SEQ ID NO: 3512209 - DNA, 25 bp, Homo sapien
atccccactgccttggacagaagtg

SEQ ID NO: 3512210 - DNA, 25 bp, Homo sapien
gaagtgacaggtaggctgcctttcc

SEQ ID NO: 3512211 - DNA, 25 bp, Homo sapien
aagtgacaggtaggctgcctttccc

SEQ ID NO: 3512212 - DNA, 25 bp, Homo sapien
tgcaggcagtgctgaagtgacaggt

SEQ ID NO: 3512213 - DNA, 25 bp, Homo sapien
ctgaagtgacaggtaggctgccttt

SEQ ID NO: 3512214 - DNA, 25 bp, Homo sapien
cagaagacagagaattgaggatgcg

SEQ ID NO: 3512215 - DNA, 25 bp, Homo sapien
aaaacagaagacagagaattgagga

SEQ ID NO: 3512216 - DNA, 25 bp, Homo sapien
aaaaacagaagacagagaattgagg

SEQ ID NO: 3512217 - DNA, 25 bp, Homo sapien
aacagaagacagagaattgaggatg

SEQ ID NO: 3512218 - DNA, 25 bp, Homo sapien
tttccaatcttcatctgagcccagg

SEQ ID NO: 3512219 - DNA, 25 bp, Homo sapien
tcagctacttaagcccactgcagag

SEQ ID NO: 3512220 - DNA, 25 bp, Homo sapien
aactcaggctgtggaatcagagaac

SEQ ID NO: 3512221 - DNA, 25 bp, Homo sapien
tgctgggaggcagacatcgtcatac

SEQ ID NO: 3512222 - DNA, 25 bp, Homo sapien
gtagtagaatacatgcagcctggtg

SEQ ID NO: 3512223 - DNA, 25 bp, Homo sapien
tgggagtttggccaggcagattcag

SEQ ID NO: 3512224 - DNA, 25 bp, Homo sapien
aacgctgaccctccggcgaggcata

SEQ ID NO: 3512225 - DNA, 25 bp, Homo sapien
cattaaacttaggaaccacagcaac

SEQ ID NO: 3512226 - DNA, 25 bp, Homo sapien
acttaggaaccacagcaacgctgac

SEQ ID NO: 3512227 - DNA, 25 bp, Homo sapien
taatgctgtaatggcattcactgga

SEQ ID NO: 3512228 - DNA, 25 bp, Homo sapien
gcaggaagagaagtgaccaggctca

SEQ ID NO: 3512229 - DNA, 25 bp, Homo sapien
gagagagtggccaaagttgacccaa

SEQ ID NO: 3512230 - DNA, 25 bp, Homo sapien
gtcttggaggtagcaatagccatag

SEQ ID NO: 3512231 - DNA, 25 bp, Homo sapien
gaccgtgccgtgcgagggaccccat

SEQ ID NO: 3512232 - DNA, 25 bp, Homo sapien
tgagggacatggaccgtgccgtgcg

SEQ ID NO: 3512233 - DNA, 25 bp, Homo sapien
gacatggaccgtgccgtgcgaggga

SEQ ID NO: 3512234 - DNA, 25 bp, Homo sapien
ccagcgtgagggacatggaccgtgc

SEQ ID NO: 3512235 - DNA, 25 bp, Homo sapien
atggggcaggagcctaggtccttac

SEQ ID NO: 3512236 - DNA, 25 bp, Homo sapien
tagccaagagctcttggaagtccac

SEQ ID NO: 3512237 - DNA, 25 bp, Homo sapien
cttggaagtccaccttgtagggcca

SEQ ID NO: 3512238 - DNA, 25 bp, Homo sapien
gtccaccttgtagggccaagatggg

SEQ ID NO: 3512239 - DNA, 25 bp, Homo sapien
ccacagctgcggcttgaattctgat

SEQ ID NO: 3512240 - DNA, 25 bp, Homo sapien
ttttaaactccatgagctccgcatg

SEQ ID NO: 3512241 - DNA, 25 bp, Homo sapien
gctccgcatggtccttctcatacgt

SEQ ID NO: 3512242 - DNA, 25 bp, Homo sapien
cacttccgttgctttcgacatgcgc

SEQ ID NO: 3512243 - DNA, 25 bp, Homo sapien
agccaggcggtgcaggacagcgatg

SEQ ID NO: 3512244 - DNA, 25 bp, Homo sapien
cagcaacttctggtaggtttcccgg

SEQ ID NO: 3512245 - DNA, 25 bp, Homo sapien
cttctggtaggtttcccggtgctca

SEQ ID NO: 3512246 - DNA, 25 bp, Homo sapien
ctcagctcggctggagaggcgggca

SEQ ID NO: 3512247 - DNA, 25 bp, Homo sapien
ccctgtatggcccttggggacagtc

SEQ ID NO: 3512248 - DNA, 25 bp, Homo sapien
tgtatggcccttggggacagtctct

SEQ ID NO: 3512249 - DNA, 25 bp, Homo sapien
ggcccttggggacagtctctgctcc

SEQ ID NO: 3512250 - DNA, 25 bp, Homo sapien
tgagagaagcatgacaccctgtatg

SEQ ID NO: 3512251 - DNA, 25 bp, Homo sapien
tgtcaggttgcgttccctttcagcc

SEQ ID NO: 3512252 - DNA, 25 bp, Homo sapien
ctcctctgtcaggttgcgttccctt

SEQ ID NO: 3512253 - DNA, 25 bp, Homo sapien
ttctagattccagagtgtagctgtc

SEQ ID NO: 3512254 - DNA, 25 bp, Homo sapien
cctttcagcctggttaattctagat

SEQ ID NO: 3512255 - DNA, 25 bp, Homo sapien
ctgttgggaacaagggtgtgagaga

SEQ ID NO: 3512256 - DNA, 25 bp, Homo sapien
tgttgggaacaagggtgtgagagag

SEQ ID NO: 3512257 - DNA, 25 bp, Homo sapien
ttgggaacaagggtgtgagagaggt

SEQ ID NO: 3512258 - DNA, 25 bp, Homo sapien
tgggaacaagggtgtgagagaggtg

SEQ ID NO: 3512259 - DNA, 25 bp, Homo sapien
ggaggagttactgcagaggacaagg

SEQ ID NO: 3512260 - DNA, 25 bp, Homo sapien
ctgggaggagttactgcagaggaca

SEQ ID NO: 3512261 - DNA, 25 bp, Homo sapien
aggagttactgcagaggacaaggct

SEQ ID NO: 3512262 - DNA, 25 bp, Homo sapien
tgggaggagttactgcagaggacaa

SEQ ID NO: 3512263 - DNA, 25 bp, Homo sapien
ccagaaccggaggtccaaatgtatt

SEQ ID NO: 3512264 - DNA, 25 bp, Homo sapien
gaccaaggtccacgctaggcccttc

SEQ ID NO: 3512265 - DNA, 25 bp, Homo sapien
cttcccagaaccggaggtccaaatg

SEQ ID NO: 3512266 - DNA, 25 bp, Homo sapien
caaggtccacgctaggcccttccca

SEQ ID NO: 3512267 - DNA, 25 bp, Homo sapien
ctcaacttccttttcagtgagtgga

SEQ ID NO: 3512268 - DNA, 25 bp, Homo sapien
aacttccttttcagtgagtggaggg

SEQ ID NO: 3512269 - DNA, 25 bp, Homo sapien
caacttccttttcagtgagtggagg

SEQ ID NO: 3512270 - DNA, 25 bp, Homo sapien
ttccttttcagtgagtggaggggca

SEQ ID NO: 3512271 - DNA, 25 bp, Homo sapien
aaaggtgcatgcgggccagagaata

SEQ ID NO: 3512272 - DNA, 25 bp, Homo sapien
aggtgcatgcgggccagagaataaa

SEQ ID NO: 3512273 - DNA, 25 bp, Homo sapien
acaaaggtgcatgcgggccagagaa

SEQ ID NO: 3512274 - DNA, 25 bp, Homo sapien
gacaaaggtgcatgcgggccagaga

SEQ ID NO: 3512275 - DNA, 25 bp, Homo sapien
gatggctagaatcacagagtggcaa

SEQ ID NO: 3512276 - DNA, 25 bp, Homo sapien
ggctctccagctataggcagtccct

SEQ ID NO: 3512277 - DNA, 25 bp, Homo sapien
tcttgctggtaactaaagctggccc

SEQ ID NO: 3512278 - DNA, 25 bp, Homo sapien
tgcatgtccactcgatgctgctgtg

SEQ ID NO: 3512279 - DNA, 25 bp, Homo sapien
ggtcctaccagcgtcacagaacttg

SEQ ID NO: 3512280 - DNA, 25 bp, Homo sapien
tcctctcttgaacgggtgtgaaggg

SEQ ID NO: 3512281 - DNA, 25 bp, Homo sapien
ggctggttctcacccctagggaatg

SEQ ID NO: 3512282 - DNA, 25 bp, Homo sapien
catggccatgaagtcagcggagtcc

SEQ ID NO: 3512283 - DNA, 25 bp, Homo sapien
ttccagggagactcctgtggacccg

SEQ ID NO: 3512284 - DNA, 25 bp, Homo sapien
cgcagtttgcgcagcagcacatcag

SEQ ID NO: 3512285 - DNA, 25 bp, Homo sapien
gaaatattaggcatgacatctaagc

SEQ ID NO: 3512286 - DNA, 25 bp, Homo sapien
gcatgacatctaagccactctttga

SEQ ID NO: 3512287 - DNA, 25 bp, Homo sapien
cagcatttcgaagagagaaaaaact

SEQ ID NO: 3512288 - DNA, 25 bp, Homo sapien
agcatttcgaagagagaaaaaactg

SEQ ID NO: 3512289 - DNA, 25 bp, Homo sapien
aagagagaaaaaactgcctgggctg

SEQ ID NO: 3512290 - DNA, 25 bp, Homo sapien
tcgaagagagaaaaaactgcctggg

SEQ ID NO: 3512291 - DNA, 25 bp, Homo sapien
gctcagctgcttcactaaggtctgg

SEQ ID NO: 3512292 - DNA, 25 bp, Homo sapien
gtctggaagcttgagccccactaag

SEQ ID NO: 3512293 - DNA, 25 bp, Homo sapien
ttcactaaggtctggaagcttgagc

SEQ ID NO: 3512294 - DNA, 25 bp, Homo sapien
tcagctgcttcactaaggtctggaa

SEQ ID NO: 3512295 - DNA, 25 bp, Homo sapien
agtggttagtgacatggggcctcca

SEQ ID NO: 3512296 - DNA, 25 bp, Homo sapien
gggcactcaggtgccagggtagtgg

SEQ ID NO: 3512297 - DNA, 25 bp, Homo sapien
ccagggtagtggttagtgacatggg

SEQ ID NO: 3512298 - DNA, 25 bp, Homo sapien
cttcagcacactggagtcgggtagg

SEQ ID NO: 3512299 - DNA, 25 bp, Homo sapien
tttctgcatccgcacgggctgcact

SEQ ID NO: 3512300 - DNA, 25 bp, Homo sapien
gcttcctgtcagctagccctttggg

SEQ ID NO: 3512301 - DNA, 25 bp, Homo sapien
gccgcatcctgggttggacttctcg

SEQ ID NO: 3512302 - DNA, 25 bp, Homo sapien
ttggcaagcactttctgcagccggg

SEQ ID NO: 3512303 - DNA, 25 bp, Homo sapien
tatgagtggacgatgtggaaggaga

SEQ ID NO: 3512304 - DNA, 25 bp, Homo sapien
cagccaagaatttcccaagggatag

SEQ ID NO: 3512305 - DNA, 25 bp, Homo sapien
ggaacctgcaatccaaaaccagcca

SEQ ID NO: 3512306 - DNA, 25 bp, Homo sapien
ggcccatttgtataagtgtgtatgg

SEQ ID NO: 3512307 - DNA, 25 bp, Homo sapien
gtgaagagacgtcggcctcatcccc

SEQ ID NO: 3512308 - DNA, 25 bp, Homo sapien
aggtgaagagacgtcggcctcatcc

SEQ ID NO: 3512309 - DNA, 25 bp, Homo sapien
ggtgaggtgaagagacgtcggcctc

SEQ ID NO: 3512310 - DNA, 25 bp, Homo sapien
aggctcgccagggtgaggtgaagag

SEQ ID NO: 3512311 - DNA, 25 bp, Homo sapien
gaccgtgtttcctcttgaaatatcc

SEQ ID NO: 3512312 - DNA, 25 bp, Homo sapien
tagcagtggtgttcatgccctccac

SEQ ID NO: 3512313 - DNA, 25 bp, Homo sapien
tcagtcagcaatgggaagagaccgt

SEQ ID NO: 3512314 - DNA, 25 bp, Homo sapien
cctagcagtggtgttcatgccctcc

SEQ ID NO: 3512315 - DNA, 25 bp, Homo sapien
gtaaggggagagacccattggcata

SEQ ID NO: 3512316 - DNA, 25 bp, Homo sapien
agacccattggcatagaaacagcac

SEQ ID NO: 3512317 - DNA, 25 bp, Homo sapien
catctccagtgggtcacgaagggcc

SEQ ID NO: 3512318 - DNA, 25 bp, Homo sapien
atctccagtgggtcacgaagggcct

SEQ ID NO: 3512319 - DNA, 25 bp, Homo sapien
ggcagaggggatggcgggccactgc

SEQ ID NO: 3512320 - DNA, 25 bp, Homo sapien
gggatggcgggccactgcacacatc

SEQ ID NO: 3512321 - DNA, 25 bp, Homo sapien
tggcgggccactgcacacatccaaa

SEQ ID NO: 3512322 - DNA, 25 bp, Homo sapien
gaggggatggcgggccactgcacac

SEQ ID NO: 3512323 - DNA, 25 bp, Homo sapien
ggactgtaagtgagttgctccgaga

SEQ ID NO: 3512324 - DNA, 25 bp, Homo sapien
gactgtaagtgagttgctccgagag

SEQ ID NO: 3512325 - DNA, 25 bp, Homo sapien
aagtgagttgctccgagaggatgta

SEQ ID NO: 3512326 - DNA, 25 bp, Homo sapien
tgtaagtgagttgctccgagaggat

SEQ ID NO: 3512327 - DNA, 25 bp, Homo sapien
ttcctcccacggcgggtcaggaatc

SEQ ID NO: 3512328 - DNA, 25 bp, Homo sapien
tcccacggcgggtcaggaatcgctc

SEQ ID NO: 3512329 - DNA, 25 bp, Homo sapien
tggacttcctcccacggcgggtcag

SEQ ID NO: 3512330 - DNA, 25 bp, Homo sapien
gacttcctcccacggcgggtcagga

SEQ ID NO: 3512331 - DNA, 25 bp, Homo sapien
accaggtcaatgatgtgccccgcgg

SEQ ID NO: 3512332 - DNA, 25 bp, Homo sapien
ccaggtcaatgatgtgccccgcggg

SEQ ID NO: 3512333 - DNA, 25 bp, Homo sapien
aggtcaatgatgtgccccgcggggt

SEQ ID NO: 3512334 - DNA, 25 bp, Homo sapien
caggtcaatgatgtgccccgcgggg

SEQ ID NO: 3512335 - DNA, 25 bp, Homo sapien
catcgggttccattcgtctttgggc

SEQ ID NO: 3512336 - DNA, 25 bp, Homo sapien
tgcagtgaacagctcccatttcacc

SEQ ID NO: 3512337 - DNA, 25 bp, Homo sapien
tccattcgtctttgggcagcagatc

SEQ ID NO: 3512338 - DNA, 25 bp, Homo sapien
ccatttcacctccatcgggttccat

SEQ ID NO: 3512339 - DNA, 25 bp, Homo sapien
cttcaagtgtcggtgagaaagcctc

SEQ ID NO: 3512340 - DNA, 25 bp, Homo sapien
gcagtggacaccttcaagtgtcggt

SEQ ID NO: 3512341 - DNA, 25 bp, Homo sapien
gaaagcctcttgtggggactgtgaa

SEQ ID NO: 3512342 - DNA, 25 bp, Homo sapien
gtcagggaggcagtggacaccttca

SEQ ID NO: 3512343 - DNA, 25 bp, Homo sapien
ttctggtgaagtggcatccccagtc

SEQ ID NO: 3512344 - DNA, 25 bp, Homo sapien
cttctggtgaagtggcatccccagt

SEQ ID NO: 3512345 - DNA, 25 bp, Homo sapien
taggtccttccatcaacttaagagg

SEQ ID NO: 3512346 - DNA, 25 bp, Homo sapien
ttccatcaacttaagagggtgcctg

SEQ ID NO: 3512347 - DNA, 25 bp, Homo sapien
cagtgatcgtaatttgttagaagac

SEQ ID NO: 3512348 - DNA, 25 bp, Homo sapien
tttctcttaggtccttccatcaact

SEQ ID NO: 3512349 - DNA, 25 bp, Homo sapien
ccccttgactggcatgtgctgccac

SEQ ID NO: 3512350 - DNA, 25 bp, Homo sapien
gtgggtgcccactgtctctattgcc

SEQ ID NO: 3512351 - DNA, 25 bp, Homo sapien
gcctcctagcgtcccagagcatgtt

SEQ ID NO: 3512352 - DNA, 25 bp, Homo sapien
gggccaaatccttctagagcccctg

SEQ ID NO: 3512353 - DNA, 25 bp, Homo sapien
cgcagcttcaaagcagtgggtgccc

SEQ ID NO: 3512354 - DNA, 25 bp, Homo sapien
gattcagtgcagaaagctacagtgg

SEQ ID NO: 3512355 - DNA, 25 bp, Homo sapien
tgggctctgtgttcttatccgggag

SEQ ID NO: 3512356 - DNA, 25 bp, Homo sapien
gctgcttctcttgtggaaaggatgc

SEQ ID NO: 3512357 - DNA, 25 bp, Homo sapien
ccttgaggagatgttcattgggctc

SEQ ID NO: 3512358 - DNA, 25 bp, Homo sapien
tttctctgcttgctggctaatggtt

SEQ ID NO: 3512359 - DNA, 25 bp, Homo sapien
aagcaaagctctcctgactgtaggc

SEQ ID NO: 3512360 - DNA, 25 bp, Homo sapien
caggtaaatgggtacaaggcacggg

SEQ ID NO: 3512361 - DNA, 25 bp, Homo sapien
tggctaatggttacctgaagcaaag

SEQ ID NO: 3512362 - DNA, 25 bp, Homo sapien
tcaaaccagcacaaggctgaacaca

SEQ ID NO: 3512363 - DNA, 25 bp, Homo sapien
caaaccagcacaaggctgaacacac

SEQ ID NO: 3512364 - DNA, 25 bp, Homo sapien
tgctggcctctgacactcttattct

SEQ ID NO: 3512365 - DNA, 25 bp, Homo sapien
tataatgatggagcatcaagcacct

SEQ ID NO: 3512366 - DNA, 25 bp, Homo sapien
tggagcatcaagcacctgtttccca

SEQ ID NO: 3512367 - DNA, 25 bp, Homo sapien
accagaaccactagaggccagcctg

SEQ ID NO: 3512368 - DNA, 25 bp, Homo sapien
gaccagaaccactagaggccagcct

SEQ ID NO: 3512369 - DNA, 25 bp, Homo sapien
ggaggtacaggcagaacctctctgt

SEQ ID NO: 3512370 - DNA, 25 bp, Homo sapien
cagataattgatcctttgggtcaca

SEQ ID NO: 3512371 - DNA, 25 bp, Homo sapien
cacacggttcccaaggagtttccag

SEQ ID NO: 3512372 - DNA, 25 bp, Homo sapien
cctctctgttggccagtgaggacag

SEQ ID NO: 3512373 - DNA, 25 bp, Homo sapien
tggtagtaaatctaccaggaagtga

SEQ ID NO: 3512374 - DNA, 25 bp, Homo sapien
caaattggatctgacagaactggca

SEQ ID NO: 3512375 - DNA, 25 bp, Homo sapien
gagtaaatgtacttcaattcctcga

SEQ ID NO: 3512376 - DNA, 25 bp, Homo sapien
gagcaggaccttagttagttaatgc

SEQ ID NO: 3512377 - DNA, 25 bp, Homo sapien
gacaacgtactgttggcccaggtcc

SEQ ID NO: 3512378 - DNA, 25 bp, Homo sapien
cctgacagcgagctctgaagttggc

SEQ ID NO: 3512379 - DNA, 25 bp, Homo sapien
tggtgctttggcattcccctgacag

SEQ ID NO: 3512380 - DNA, 25 bp, Homo sapien
gttgctggccccacgagcttgtgct

SEQ ID NO: 3512381 - DNA, 25 bp, Homo sapien
tctgaaaagctttgaaatgtccagg

SEQ ID NO: 3512382 - DNA, 25 bp, Homo sapien
ccctcaggctatagaaggcacttga

SEQ ID NO: 3512383 - DNA, 25 bp, Homo sapien
tgcctggttgccttctgaaaagctt

SEQ ID NO: 3512384 - DNA, 25 bp, Homo sapien
ccagcttcatggtccctcaggctat

SEQ ID NO: 3512385 - DNA, 25 bp, Homo sapien
gggctcctcgtcctcgggaatgtgg

SEQ ID NO: 3512386 - DNA, 25 bp, Homo sapien
gctgcctgtggctctccggggggct

SEQ ID NO: 3512387 - DNA, 25 bp, Homo sapien
ctgcctgtggctctccggggggctc

SEQ ID NO: 3512388 - DNA, 25 bp, Homo sapien
cctcgtcctcgggaatgtggggcat

SEQ ID NO: 3512389 - DNA, 25 bp, Homo sapien
ctgctgggagtggccacgtgtgccc

SEQ ID NO: 3512390 - DNA, 25 bp, Homo sapien
cctccgctgcgtcagccccaaagat

SEQ ID NO: 3512391 - DNA, 25 bp, Homo sapien
tgggagtggccacgtgtgcccggaa

SEQ ID NO: 3512392 - DNA, 25 bp, Homo sapien
ccggaacctccgctgcgtcagcccc

SEQ ID NO: 3512393 - DNA, 25 bp, Homo sapien
tgccaaaaggacaagtcaaatccat

SEQ ID NO: 3512394 - DNA, 25 bp, Homo sapien
aaggacaagtcaaatccattcccat

SEQ ID NO: 3512395 - DNA, 25 bp, Homo sapien
gggagatgccaaaaggacaagtcaa

SEQ ID NO: 3512396 - DNA, 25 bp, Homo sapien
ctggggagatgccaaaaggacaagt

SEQ ID NO: 3512397 - DNA, 25 bp, Homo sapien
gccacagtgagagccggcttgagtt

SEQ ID NO: 3512398 - DNA, 25 bp, Homo sapien
catcaacaccggaggtcaaaccagg

SEQ ID NO: 3512399 - DNA, 25 bp, Homo sapien
gtttgcatcaacaccggaggtcaaa

SEQ ID NO: 3512400 - DNA, 25 bp, Homo sapien
gagccggcttgagtttgcatcaaca

SEQ ID NO: 3512401 - DNA, 25 bp, Homo sapien
gaatttcatttcctccggctctctg

SEQ ID NO: 3512402 - DNA, 25 bp, Homo sapien
gcatttggaatttcatttcctccgg

SEQ ID NO: 3512403 - DNA, 25 bp, Homo sapien
ccggctctctggctttgtttacaaa

SEQ ID NO: 3512404 - DNA, 25 bp, Homo sapien
cctccggctctctggctttgtttac

SEQ ID NO: 3512405 - DNA, 25 bp, Homo sapien
gcagcaaagtatctgagcctcccat

SEQ ID NO: 3512406 - DNA, 25 bp, Homo sapien
gaccaatgacaggaaataagcctaa

SEQ ID NO: 3512407 - DNA, 25 bp, Homo sapien
tatgtacaattgctcaatcggaggc

SEQ ID NO: 3512408 - DNA, 25 bp, Homo sapien
tcaaaggcaccgagaatagcagcaa

SEQ ID NO: 3512409 - DNA, 25 bp, Homo sapien
caactggttgatgctggcatggacc

SEQ ID NO: 3512410 - DNA, 25 bp, Homo sapien
gacctctgcaaacactctaccagtt

SEQ ID NO: 3512411 - DNA, 25 bp, Homo sapien
tagaaatgccctcttggtaggcaac

SEQ ID NO: 3512412 - DNA, 25 bp, Homo sapien
cagttggcacctcatttgtaatcga

SEQ ID NO: 3512413 - DNA, 25 bp, Homo sapien
ccagcttcatcagtcatacgggtga

SEQ ID NO: 3512414 - DNA, 25 bp, Homo sapien
taaagcttcagtgaaggaaagaggt

SEQ ID NO: 3512415 - DNA, 25 bp, Homo sapien
tgatccaaacactttccaacaccag

SEQ ID NO: 3512416 - DNA, 25 bp, Homo sapien
tctgaattcccaacaagccttaaag

SEQ ID NO: 3512417 - DNA, 25 bp, Homo sapien
atggtcagagcctcaaacccagtgc

SEQ ID NO: 3512418 - DNA, 25 bp, Homo sapien
acagatgcccaatcctcttgagagg

SEQ ID NO: 3512419 - DNA, 25 bp, Homo sapien
ttgagaataggacccaggactgtgg

SEQ ID NO: 3512420 - DNA, 25 bp, Homo sapien
tattgggcctccttaaagacttcac

SEQ ID NO: 3512421 - DNA, 25 bp, Homo sapien
ccgatttccaccaagccgtggtgga

SEQ ID NO: 3512422 - DNA, 25 bp, Homo sapien
ttcatacaacccgatttccaccaag

SEQ ID NO: 3512423 - DNA, 25 bp, Homo sapien
agttcatacaacccgatttccacca

SEQ ID NO: 3512424 - DNA, 25 bp, Homo sapien
caacccgatttccaccaagccgtgg

SEQ ID NO: 3512425 - DNA, 25 bp, Homo sapien
tcggtcaacctacctcaaatagagg

SEQ ID NO: 3512426 - DNA, 25 bp, Homo sapien
tcattcccggctgaccctggacagt

SEQ ID NO: 3512427 - DNA, 25 bp, Homo sapien
caggacctgtcccaattttagcact

SEQ ID NO: 3512428 - DNA, 25 bp, Homo sapien
gtcctgcagcaattctcattcccgg

SEQ ID NO: 3512429 - DNA, 25 bp, Homo sapien
cagcctgggtgacagtgcgagaccc

SEQ ID NO: 3512430 - DNA, 25 bp, Homo sapien
cctgggtgacagtgcgagaccctgt

SEQ ID NO: 3512431 - DNA, 25 bp, Homo sapien
cactccagcctgggtgacagtgcga

SEQ ID NO: 3512432 - DNA, 25 bp, Homo sapien
cccgggaggtggggttgcaccactg

SEQ ID NO: 3512433 - DNA, 25 bp, Homo sapien
ctccgcttcccagccgaagaggcag

SEQ ID NO: 3512434 - DNA, 25 bp, Homo sapien
agaggcaggttattctaggatatag

SEQ ID NO: 3512435 - DNA, 25 bp, Homo sapien
gttccctccgcttcccagccgaaga

SEQ ID NO: 3512436 - DNA, 25 bp, Homo sapien
attctaggatataggggaggcttac

SEQ ID NO: 3512437 - DNA, 25 bp, Homo sapien
tcaatgttacatctggctccggagc

SEQ ID NO: 3512438 - DNA, 25 bp, Homo sapien
tccggagctcagagccgagaagcct

SEQ ID NO: 3512439 - DNA, 25 bp, Homo sapien
gctgggacttagagccgagagctcc

SEQ ID NO: 3512440 - DNA, 25 bp, Homo sapien
aatggcagggaaagccgaccagctg

SEQ ID NO: 3512441 - DNA, 25 bp, Homo sapien
ctgggcccctccgatgggtatccac

SEQ ID NO: 3512442 - DNA, 25 bp, Homo sapien
gggcccctccgatgggtatccacac

SEQ ID NO: 3512443 - DNA, 25 bp, Homo sapien
cctgggcccctccgatgggtatcca

SEQ ID NO: 3512444 - DNA, 25 bp, Homo sapien
tgggcccctccgatgggtatccaca

SEQ ID NO: 3512445 - DNA, 25 bp, Homo sapien
ctgtcctggccggacgggaacaaag

SEQ ID NO: 3512446 - DNA, 25 bp, Homo sapien
ggcaactcgtgccactggacactgt

SEQ ID NO: 3512447 - DNA, 25 bp, Homo sapien
gacactgtcctggccggacgggaac

SEQ ID NO: 3512448 - DNA, 25 bp, Homo sapien
cactgtcctggccggacgggaacaa

SEQ ID NO: 3512449 - DNA, 25 bp, Homo sapien
ttattccattcaatcagtaaagcca

SEQ ID NO: 3512450 - DNA, 25 bp, Homo sapien
tattccattcaatcagtaaagccat

SEQ ID NO: 3512451 - DNA, 25 bp, Homo sapien
tttattccattcaatcagtaaagcc

SEQ ID NO: 3512452 - DNA, 25 bp, Homo sapien
aaaggctgcttatcagctgctgggc

SEQ ID NO: 3512453 - DNA, 25 bp, Homo sapien
tgctgggcgctgcttctgtgggaat

SEQ ID NO: 3512454 - DNA, 25 bp, Homo sapien
ttatcagctgctgggcgctgcttct

SEQ ID NO: 3512455 - DNA, 25 bp, Homo sapien
acggaagctcttctgttccacctgc

SEQ ID NO: 3512456 - DNA, 25 bp, Homo sapien
gccaaaagatgggttgcgaaacgaa

SEQ ID NO: 3512457 - DNA, 25 bp, Homo sapien
aagaaaacaggattggccaggccca

SEQ ID NO: 3512458 - DNA, 25 bp, Homo sapien
aactagtcacaaaggtatcacaggt

SEQ ID NO: 3512459 - DNA, 25 bp, Homo sapien
acaggtatgacttacacctaacggg

SEQ ID NO: 3512460 - DNA, 25 bp, Homo sapien
gacacgccaacaaaagcttcggagc

SEQ ID NO: 3512461 - DNA, 25 bp, Homo sapien
tcagacgccagatggttccgaaggt

SEQ ID NO: 3512462 - DNA, 25 bp, Homo sapien
cgccgtccgctgctcgttgtttaag

SEQ ID NO: 3512463 - DNA, 25 bp, Homo sapien
ccacaagctgagctcgcgtagggca

SEQ ID NO: 3512464 - DNA, 25 bp, Homo sapien
tcctacaaaggtttgactgaaactg

SEQ ID NO: 3512465 - DNA, 25 bp, Homo sapien
tcaatagtgtaatactgcagcgatg

SEQ ID NO: 3512466 - DNA, 25 bp, Homo sapien
tactaagccccaagagacatttcct

SEQ ID NO: 3512467 - DNA, 25 bp, Homo sapien
tgtgctagagtccaatatttgagtc

SEQ ID NO: 3512468 - DNA, 25 bp, Homo sapien
tggtgtggctggtaggtccttgtcc

SEQ ID NO: 3512469 - DNA, 25 bp, Homo sapien
tgagctgacggtgtgctccccttga

SEQ ID NO: 3512470 - DNA, 25 bp, Homo sapien
caaacagctgatcttgttctaaacc

SEQ ID NO: 3512471 - DNA, 25 bp, Homo sapien
taaacccctattcaaggcagctcgg

SEQ ID NO: 3512472 - DNA, 25 bp, Homo sapien
cttgtgaagagtgggcaggtgagca

SEQ ID NO: 3512473 - DNA, 25 bp, Homo sapien
ctcagggaggagacgatgtgaaaca

SEQ ID NO: 3512474 - DNA, 25 bp, Homo sapien
ggcttaaaagcctgacaaagcaatt

SEQ ID NO: 3512475 - DNA, 25 bp, Homo sapien
tgtggagaagcggatattaccaggg

SEQ ID NO: 3512476 - DNA, 25 bp, Homo sapien
tggtgaggtccgacggcacaaattt

SEQ ID NO: 3512477 - DNA, 25 bp, Homo sapien
tgaggtccgacggcacaaattttaa

SEQ ID NO: 3512478 - DNA, 25 bp, Homo sapien
gtggtgaggtccgacggcacaaatt

SEQ ID NO: 3512479 - DNA, 25 bp, Homo sapien
aggtggtgaggtccgacggcacaaa

SEQ ID NO: 3512480 - DNA, 25 bp, Homo sapien
tcccagcatcccggcagagggcgct

SEQ ID NO: 3512481 - DNA, 25 bp, Homo sapien
gcgctgtgggacagcgttgctgatc

SEQ ID NO: 3512482 - DNA, 25 bp, Homo sapien
tgtgggacagcgttgctgatcggtc

SEQ ID NO: 3512483 - DNA, 25 bp, Homo sapien
gggacagcgttgctgatcggtcggg

SEQ ID NO: 3512484 - DNA, 25 bp, Homo sapien
ctgggtcaggacgggcaagggcagg

SEQ ID NO: 3512485 - DNA, 25 bp, Homo sapien
tgggtcaggacgggcaagggcaggg

SEQ ID NO: 3512486 - DNA, 25 bp, Homo sapien
gtaactgcatttgacctaaccactg

SEQ ID NO: 3512487 - DNA, 25 bp, Homo sapien
gattttaatatccttgagcctgggc

SEQ ID NO: 3512488 - DNA, 25 bp, Homo sapien
tacatcataagttctcaagcagagg

SEQ ID NO: 3512489 - DNA, 25 bp, Homo sapien
taaagcagaagcacgtcagttagga

SEQ ID NO: 3512490 - DNA, 25 bp, Homo sapien
gcagaggcagtctattgcaaggacc

SEQ ID NO: 3512491 - DNA, 25 bp, Homo sapien
tgagagatcgttaatgcccttgaag

SEQ ID NO: 3512492 - DNA, 25 bp, Homo sapien
cacttcaagggcattaacgatctct

SEQ ID NO: 3512493 - DNA, 25 bp, Homo sapien
tgcccaggctcaaggatattaaaat

SEQ ID NO: 3512494 - DNA, 25 bp, Homo sapien
cagtggttaggtcaaatgcagttac

SEQ ID NO: 3512495 - DNA, 25 bp, Homo sapien
ggaaatcctaactgacgtgcttctg

SEQ ID NO: 3512496 - DNA, 25 bp, Homo sapien
taaaacagcctatgataactggcag

SEQ ID NO: 3512497 - DNA, 25 bp, Homo sapien
ggtccttgcaatagactgcctctgc

SEQ ID NO: 3512498 - DNA, 25 bp, Homo sapien
tgaatcagtggctaacctggttaga

SEQ ID NO: 3512499 - DNA, 25 bp, Homo sapien
agtggctaacctggttagaaactgc

SEQ ID NO: 3512500 - DNA, 25 bp, Homo sapien
gaatcagtggctaacctggttagaa

SEQ ID NO: 3512501 - DNA, 25 bp, Homo sapien
aatcagtggctaacctggttagaaa

SEQ ID NO: 3512502 - DNA, 25 bp, Homo sapien
tcagtggctaacctggttagaaact

SEQ ID NO: 3512503 - DNA, 25 bp, Homo sapien
gtgaatcagtggctaacctggttag

SEQ ID NO: 3512504 - DNA, 25 bp, Homo sapien
gtttctaaccaggttagccactgat

SEQ ID NO: 3512505 - DNA, 25 bp, Homo sapien
agtttctaaccaggttagccactga

SEQ ID NO: 3512506 - DNA, 25 bp, Homo sapien
ctaaccaggttagccactgattcac

SEQ ID NO: 3512507 - DNA, 25 bp, Homo sapien
ttctaaccaggttagccactgattc

SEQ ID NO: 3512508 - DNA, 25 bp, Homo sapien
tctaaccaggttagccactgattca

SEQ ID NO: 3512509 - DNA, 25 bp, Homo sapien
gcagtttctaaccaggttagccact

SEQ ID NO: 3512510 - DNA, 25 bp, Homo sapien
aagaggaaattgtagctgggcacgt

SEQ ID NO: 3512511 - DNA, 25 bp, Homo sapien
taaacaagattcacgaggatcatcc

SEQ ID NO: 3512512 - DNA, 25 bp, Homo sapien
tattgaatgaacttgtagccctagg

SEQ ID NO: 3512513 - DNA, 25 bp, Homo sapien
tagaggtagctaacttttcaaggag

SEQ ID NO: 3512514 - DNA, 25 bp, Homo sapien
tacaggcaaggtagtcctagttagt

SEQ ID NO: 3512515 - DNA, 25 bp, Homo sapien
ggttccaggcctattcctagagatt

SEQ ID NO: 3512516 - DNA, 25 bp, Homo sapien
tgtaccacagacctactaaaccaga

SEQ ID NO: 3512517 - DNA, 25 bp, Homo sapien
cccctggaaaactagtagcatgaga

SEQ ID NO: 3512518 - DNA, 25 bp, Homo sapien
aatctctaggaataggcctggaacc

SEQ ID NO: 3512519 - DNA, 25 bp, Homo sapien
taccaagcaaactgaagtaagcaga

SEQ ID NO: 3512520 - DNA, 25 bp, Homo sapien
tactaactaggactaccttgcctgt

SEQ ID NO: 3512521 - DNA, 25 bp, Homo sapien
gatgttcttcccctagggctacaag

SEQ ID NO: 3512522 - DNA, 25 bp, Homo sapien
tttttgtgcacttctatgacatgga

SEQ ID NO: 3512523 - DNA, 25 bp, Homo sapien
tccatgtcatagaagtgcacaaaaa

SEQ ID NO: 3512524 - DNA, 25 bp, Homo sapien
ttggcttggaaagaagatataaccc

SEQ ID NO: 3512525 - DNA, 25 bp, Homo sapien
tttttgtgcacttctatgacatgga

SEQ ID NO: 3512526 - DNA, 25 bp, Homo sapien
aagaagaagctttcttggcttggaa

SEQ ID NO: 3512527 - DNA, 25 bp, Homo sapien
catgttacttcgcttttttgtgcac

SEQ ID NO: 3512528 - DNA, 25 bp, Homo sapien
catggaaattattgaagaagaagct

SEQ ID NO: 3512529 - DNA, 25 bp, Homo sapien
tggaaagaagatataacccaagagt

SEQ ID NO: 3512530 - DNA, 25 bp, Homo sapien
tttccaagccaagaaagcttcttct

SEQ ID NO: 3512531 - DNA, 25 bp, Homo sapien
taatttccatgtcatagaagtgcac

SEQ ID NO: 3512532 - DNA, 25 bp, Homo sapien
gtgcacaaaaaagcgaagtaacatg

SEQ ID NO: 3512533 - DNA, 25 bp, Homo sapien
tccatgtcatagaagtgcacaaaaa

SEQ ID NO: 3512534 - DNA, 25 bp, Homo sapien
gcttcttcttcaataatttccatgt

SEQ ID NO: 3512535 - DNA, 25 bp, Homo sapien
ggttatatcttctttccaagccaag

SEQ ID NO: 3512536 - DNA, 25 bp, Homo sapien
gccctgtatgctctccaggtgcact

SEQ ID NO: 3512537 - DNA, 25 bp, Homo sapien
aatttcttcatgatcacgttgatct

SEQ ID NO: 3512538 - DNA, 25 bp, Homo sapien
actatctttcaagccagtaatgcag

SEQ ID NO: 3512539 - DNA, 25 bp, Homo sapien
caactactactatctttcaagccag

SEQ ID NO: 3512540 - DNA, 25 bp, Homo sapien
tcatgatcacgttgatctacaagtc

SEQ ID NO: 3512541 - DNA, 25 bp, Homo sapien
atgatcacgttgatctacaagtcag

SEQ ID NO: 3512542 - DNA, 25 bp, Homo sapien
ctggcttgaaagatagtagtagttg

SEQ ID NO: 3512543 - DNA, 25 bp, Homo sapien
agtgcacctggagagcatacagggc

SEQ ID NO: 3512544 - DNA, 25 bp, Homo sapien
ctgacttgtagatcaacgtgatcat

SEQ ID NO: 3512545 - DNA, 25 bp, Homo sapien
gacttgtagatcaacgtgatcatga

SEQ ID NO: 3512546 - DNA, 25 bp, Homo sapien
ctgcattactggcttgaaagatagt

SEQ ID NO: 3512547 - DNA, 25 bp, Homo sapien
tagatcaacgtgatcatgaagaaat

SEQ ID NO: 3512548 - DNA, 25 bp, Homo sapien
gaaaagaagcgtaggagactaagag

SEQ ID NO: 3512549 - DNA, 25 bp, Homo sapien
tcatgtactggaaaagaagcgtagg

SEQ ID NO: 3512550 - DNA, 25 bp, Homo sapien
gaaaactcactgttgggttctaaca

SEQ ID NO: 3512551 - DNA, 25 bp, Homo sapien
cactgttgggttctaacaagacctc

SEQ ID NO: 3512552 - DNA, 25 bp, Homo sapien
tctaacaagacctctttctgtccag

SEQ ID NO: 3512553 - DNA, 25 bp, Homo sapien
tgggttctaacaagacctctttctg

SEQ ID NO: 3512554 - DNA, 25 bp, Homo sapien
gaggtcttgttagaacccaacagtg

SEQ ID NO: 3512555 - DNA, 25 bp, Homo sapien
aactcttagtctcctacgcttcttt

SEQ ID NO: 3512556 - DNA, 25 bp, Homo sapien
ctggacagaaagaggtcttgttaga

SEQ ID NO: 3512557 - DNA, 25 bp, Homo sapien
tgttagaacccaacagtgagttttc

SEQ ID NO: 3512558 - DNA, 25 bp, Homo sapien
cagaaagaggtcttgttagaaccca

SEQ ID NO: 3512559 - DNA, 25 bp, Homo sapien
tacgcttcttttccagtacatgaaa

SEQ ID NO: 3512560 - DNA, 25 bp, Homo sapien
ccaaacttcatgtagataaaggatt

SEQ ID NO: 3512561 - DNA, 25 bp, Homo sapien
aacttcatgtagataaaggatttgt

SEQ ID NO: 3512562 - DNA, 25 bp, Homo sapien
cccaaacttcatgtagataaaggat

SEQ ID NO: 3512563 - DNA, 25 bp, Homo sapien
tctcccaaacttcatgtagataaag

SEQ ID NO: 3512564 - DNA, 25 bp, Homo sapien
ctcccaaacttcatgtagataaagg

SEQ ID NO: 3512565 - DNA, 25 bp, Homo sapien
tcccaaacttcatgtagataaagga

SEQ ID NO: 3512566 - DNA, 25 bp, Homo sapien
tcctttatctacatgaagtttggga

SEQ ID NO: 3512567 - DNA, 25 bp, Homo sapien
acaaatcctttatctacatgaagtt

SEQ ID NO: 3512568 - DNA, 25 bp, Homo sapien
atcctttatctacatgaagtttggg

SEQ ID NO: 3512569 - DNA, 25 bp, Homo sapien
tttatctacatgaagtttgggagag

SEQ ID NO: 3512570 - DNA, 25 bp, Homo sapien
aatcctttatctacatgaagtttgg

SEQ ID NO: 3512571 - DNA, 25 bp, Homo sapien
cctttatctacatgaagtttgggag

SEQ ID NO: 3512572 - DNA, 25 bp, Homo sapien
gcaaataaagttggatccatcccct

SEQ ID NO: 3512573 - DNA, 25 bp, Homo sapien
gagtttcttattcccactcctcaaa

SEQ ID NO: 3512574 - DNA, 25 bp, Homo sapien
tcagaataaggaccgcatgttggag

SEQ ID NO: 3512575 - DNA, 25 bp, Homo sapien
ccgcatgttggagattttggaagga

SEQ ID NO: 3512576 - DNA, 25 bp, Homo sapien
taaagttggatccatcccctcaaac

SEQ ID NO: 3512577 - DNA, 25 bp, Homo sapien
tattcccactcctcaaattggagaa

SEQ ID NO: 3512578 - DNA, 25 bp, Homo sapien
ctccaacatgcggtccttattctga

SEQ ID NO: 3512579 - DNA, 25 bp, Homo sapien
tttgaggagtgggaataagaaactc

SEQ ID NO: 3512580 - DNA, 25 bp, Homo sapien
ttccaaaatctccaacatgcggtcc

SEQ ID NO: 3512581 - DNA, 25 bp, Homo sapien
tccttccaaaatctccaacatgcgg

SEQ ID NO: 3512582 - DNA, 25 bp, Homo sapien
gggatggatccaactttatttgctt

SEQ ID NO: 3512583 - DNA, 25 bp, Homo sapien
cttctccaatttgaggagtgggaat

SEQ ID NO: 3512584 - DNA, 25 bp, Homo sapien
tatatctagagatttcaggtacctt

SEQ ID NO: 3512585 - DNA, 25 bp, Homo sapien
gctacatggatcttacatacttggg

SEQ ID NO: 3512586 - DNA, 25 bp, Homo sapien
gatttatgtaggtcagacagtctga

SEQ ID NO: 3512587 - DNA, 25 bp, Homo sapien
tcagacagtctgattgtcctgctca

SEQ ID NO: 3512588 - DNA, 25 bp, Homo sapien
gataaacattaccacagatctcacc

SEQ ID NO: 3512589 - DNA, 25 bp, Homo sapien
ctctggacaggacaacttggtaaaa

SEQ ID NO: 3512590 - DNA, 25 bp, Homo sapien
gactgtctgacctacataaatccac

SEQ ID NO: 3512591 - DNA, 25 bp, Homo sapien
ttttaccaagttgtcctgtccagag

SEQ ID NO: 3512592 - DNA, 25 bp, Homo sapien
tgagcaggacaatcagactgtctga

SEQ ID NO: 3512593 - DNA, 25 bp, Homo sapien
ctttataggtgagatctgtggtaat

SEQ ID NO: 3512594 - DNA, 25 bp, Homo sapien
caacatacggatcaaatgaaagtag

SEQ ID NO: 3512595 - DNA, 25 bp, Homo sapien
tgtccccaagtatgtaagatccatg

SEQ ID NO: 3512596 - DNA, 25 bp, Homo sapien
gatcgagaatggttaacagaacttt

SEQ ID NO: 3512597 - DNA, 25 bp, Homo sapien
gctaaattacaagatcgagaatggt

SEQ ID NO: 3512598 - DNA, 25 bp, Homo sapien
caagatcgagaatggttaacagaac

SEQ ID NO: 3512599 - DNA, 25 bp, Homo sapien
aattacaagatcgagaatggttaac

SEQ ID NO: 3512600 - DNA, 25 bp, Homo sapien
agctaaattacaagatcgagaatgg

SEQ ID NO: 3512601 - DNA, 25 bp, Homo sapien
tacaagatcgagaatggttaacaga

SEQ ID NO: 3512602 - DNA, 25 bp, Homo sapien
aaagttctgttaaccattctcgatc

SEQ ID NO: 3512603 - DNA, 25 bp, Homo sapien
tgttaaccattctcgatcttgtaat

SEQ ID NO: 3512604 - DNA, 25 bp, Homo sapien
tctgttaaccattctcgatcttgta

SEQ ID NO: 3512605 - DNA, 25 bp, Homo sapien
aaccattctcgatcttgtaatttag

SEQ ID NO: 3512606 - DNA, 25 bp, Homo sapien
gttctgttaaccattctcgatcttg

SEQ ID NO: 3512607 - DNA, 25 bp, Homo sapien
ccattctcgatcttgtaatttagct

SEQ ID NO: 3512608 - DNA, 25 bp, Homo sapien
ttcagaactagctcaaccactagaa

SEQ ID NO: 3512609 - DNA, 25 bp, Homo sapien
tcagaactagctcaaccactagaaa

SEQ ID NO: 3512610 - DNA, 25 bp, Homo sapien
cagaactagctcaaccactagaaag

SEQ ID NO: 3512611 - DNA, 25 bp, Homo sapien
gaactagctcaaccactagaaagtg

SEQ ID NO: 3512612 - DNA, 25 bp, Homo sapien
agaactagctcaaccactagaaagt

SEQ ID NO: 3512613 - DNA, 25 bp, Homo sapien
actttctagtggttgagctagttct

SEQ ID NO: 3512614 - DNA, 25 bp, Homo sapien
ttctagtggttgagctagttctgaa

SEQ ID NO: 3512615 - DNA, 25 bp, Homo sapien
cactttctagtggttgagctagttc

SEQ ID NO: 3512616 - DNA, 25 bp, Homo sapien
ctttctagtggttgagctagttctg

SEQ ID NO: 3512617 - DNA, 25 bp, Homo sapien
tttctagtggttgagctagttctga

SEQ ID NO: 3512618 - DNA, 25 bp, Homo sapien
tcctctcttcctactttgtcttcag

SEQ ID NO: 3512619 - DNA, 25 bp, Homo sapien
tagaaagtggcacccattttcctct

SEQ ID NO: 3512620 - DNA, 25 bp, Homo sapien
tagctcaaccactagaaagtggcac

SEQ ID NO: 3512621 - DNA, 25 bp, Homo sapien
gagcatttcagaactagctcaacca

SEQ ID NO: 3512622 - DNA, 25 bp, Homo sapien
cagaactagctcaaccactagaaag

SEQ ID NO: 3512623 - DNA, 25 bp, Homo sapien
gaactagctcaaccactagaaagtg

SEQ ID NO: 3512624 - DNA, 25 bp, Homo sapien
gaggaaaatgggtgccactttctag

SEQ ID NO: 3512625 - DNA, 25 bp, Homo sapien
gaagagaggaaaatgggtgccactt

SEQ ID NO: 3512626 - DNA, 25 bp, Homo sapien
ttctagtggttgagctagttctgaa

SEQ ID NO: 3512627 - DNA, 25 bp, Homo sapien
cactttctagtggttgagctagttc

SEQ ID NO: 3512628 - DNA, 25 bp, Homo sapien
ctgaagacaaagtaggaagagagga

SEQ ID NO: 3512629 - DNA, 25 bp, Homo sapien
gttgagctagttctgaaatgctcac

SEQ ID NO: 3512630 - DNA, 25 bp, Homo sapien
actggaggttgacatccctttggtg

SEQ ID NO: 3512631 - DNA, 25 bp, Homo sapien
tcccaaactggaggttgacatccct

SEQ ID NO: 3512632 - DNA, 25 bp, Homo sapien
gtttgcagctcgtgccatcatttca

SEQ ID NO: 3512633 - DNA, 25 bp, Homo sapien
ttggaccagtgtcccaaactggagg

SEQ ID NO: 3512634 - DNA, 25 bp, Homo sapien
tcctgaatgtattggaccagtgtcc

SEQ ID NO: 3512635 - DNA, 25 bp, Homo sapien
tatttagcacagtttgcagctcgtg

SEQ ID NO: 3512636 - DNA, 25 bp, Homo sapien
tgaaatgatggcacgagctgcaaac

SEQ ID NO: 3512637 - DNA, 25 bp, Homo sapien
gggatgtcaacctccagtttgggac

SEQ ID NO: 3512638 - DNA, 25 bp, Homo sapien
caccaaagggatgtcaacctccagt

SEQ ID NO: 3512639 - DNA, 25 bp, Homo sapien
gagctgcaaactgtgctaaatagga

SEQ ID NO: 3512640 - DNA, 25 bp, Homo sapien
gacactggtccaatacattcaggaa

SEQ ID NO: 3512641 - DNA, 25 bp, Homo sapien
cctccagtttgggacactggtccaa

SEQ ID NO: 3512642 - DNA, 25 bp, Homo sapien
gaaactgttgtgactgaatatctaa

SEQ ID NO: 3512643 - DNA, 25 bp, Homo sapien
cactagatagaagcgatgaagataa

SEQ ID NO: 3512644 - DNA, 25 bp, Homo sapien
tgtgactgaatatctaaatagtgga

SEQ ID NO: 3512645 - DNA, 25 bp, Homo sapien
tgttaagcaaagtaatcatcctgtc

SEQ ID NO: 3512646 - DNA, 25 bp, Homo sapien
acaggaagggatagccacaagtgac

SEQ ID NO: 3512647 - DNA, 25 bp, Homo sapien
tcatcctgtcactagatagaagcga

SEQ ID NO: 3512648 - DNA, 25 bp, Homo sapien
ttagatattcagtcacaacagtttc

SEQ ID NO: 3512649 - DNA, 25 bp, Homo sapien
ttatcttcatcgcttctatctagtg

SEQ ID NO: 3512650 - DNA, 25 bp, Homo sapien
tcgcttctatctagtgacaggatga

SEQ ID NO: 3512651 - DNA, 25 bp, Homo sapien
gacaggatgattactttgcttaaca

SEQ ID NO: 3512652 - DNA, 25 bp, Homo sapien
tccactatttagatattcagtcaca

SEQ ID NO: 3512653 - DNA, 25 bp, Homo sapien
gtcacttgtggctatcccttcctgt

SEQ ID NO: 3512654 - DNA, 25 bp, Homo sapien
tgtaattagcctgtatttgagatag

SEQ ID NO: 3512655 - DNA, 25 bp, Homo sapien
gaatacattaaagatacttgtgttc

SEQ ID NO: 3512656 - DNA, 25 bp, Homo sapien
aatacattaaagatacttgtgttct

SEQ ID NO: 3512657 - DNA, 25 bp, Homo sapien
agtgtaattagcctgtatttgagat

SEQ ID NO: 3512658 - DNA, 25 bp, Homo sapien
ttagtgtaattagcctgtatttgag

SEQ ID NO: 3512659 - DNA, 25 bp, Homo sapien
ttaaagatacttgtgttcttcacag

SEQ ID NO: 3512660 - DNA, 25 bp, Homo sapien
tatctcaaatacaggctaattacac

SEQ ID NO: 3512661 - DNA, 25 bp, Homo sapien
ctgtgaagaacacaagtatctttaa

SEQ ID NO: 3512662 - DNA, 25 bp, Homo sapien
tcaaatacaggctaattacactaaa

SEQ ID NO: 3512663 - DNA, 25 bp, Homo sapien
ctcaaatacaggctaattacactaa

SEQ ID NO: 3512664 - DNA, 25 bp, Homo sapien
ctatctcaaatacaggctaattaca

SEQ ID NO: 3512665 - DNA, 25 bp, Homo sapien
gaacacaagtatctttaatgtattc

SEQ ID NO: 3512666 - DNA, 25 bp, Homo sapien
agccaccaccgtcaaaggaagaact

SEQ ID NO: 3512667 - DNA, 25 bp, Homo sapien
aagaccagcaaaaagccaccaccgt

SEQ ID NO: 3512668 - DNA, 25 bp, Homo sapien
gcaaaaagccaccaccgtcaaagga

SEQ ID NO: 3512669 - DNA, 25 bp, Homo sapien
ttggtctcaaaactaatccaccgct

SEQ ID NO: 3512670 - DNA, 25 bp, Homo sapien
aaaactaatccaccgcttatccagg

SEQ ID NO: 3512671 - DNA, 25 bp, Homo sapien
cacctcagcttggtctcaaaactaa

SEQ ID NO: 3512672 - DNA, 25 bp, Homo sapien
cctggataagcggtggattagtttt

SEQ ID NO: 3512673 - DNA, 25 bp, Homo sapien
tagttttgagaccaagctgaggtgt

SEQ ID NO: 3512674 - DNA, 25 bp, Homo sapien
tcctttgacggtggtggctttttgc

SEQ ID NO: 3512675 - DNA, 25 bp, Homo sapien
agttcttcctttgacggtggtggct

SEQ ID NO: 3512676 - DNA, 25 bp, Homo sapien
taagcggtggattagttttgagacc

SEQ ID NO: 3512677 - DNA, 25 bp, Homo sapien
acggtggtggctttttgctggtctt

SEQ ID NO: 3512678 - DNA, 25 bp, Homo sapien
aactatgattcctcctagtgcacaa

SEQ ID NO: 3512679 - DNA, 25 bp, Homo sapien
ggcctgctcagtcgttcctaatgaa

SEQ ID NO: 3512680 - DNA, 25 bp, Homo sapien
cagccccagataactatgattcctc

SEQ ID NO: 3512681 - DNA, 25 bp, Homo sapien
tgaggcctgctcagtcgttcctaat

SEQ ID NO: 3512682 - DNA, 25 bp, Homo sapien
gataactatgattcctcctagtgca

SEQ ID NO: 3512683 - DNA, 25 bp, Homo sapien
ctgctcagtcgttcctaatgaataa

SEQ ID NO: 3512684 - DNA, 25 bp, Homo sapien
ttcattaggaacgactgagcaggcc

SEQ ID NO: 3512685 - DNA, 25 bp, Homo sapien
ctaggaggaatcatagttatctggg

SEQ ID NO: 3512686 - DNA, 25 bp, Homo sapien
ttattcattaggaacgactgagcag

SEQ ID NO: 3512687 - DNA, 25 bp, Homo sapien
ttgtgcactaggaggaatcatagtt

SEQ ID NO: 3512688 - DNA, 25 bp, Homo sapien
cattaggaacgactgagcaggcctc

SEQ ID NO: 3512689 - DNA, 25 bp, Homo sapien
tgcactaggaggaatcatagttatc

SEQ ID NO: 3512690 - DNA, 25 bp, Homo sapien
tctgtcactgtataggattttagaa

SEQ ID NO: 3512691 - DNA, 25 bp, Homo sapien
taatatgttcgccaactgcatgttg

SEQ ID NO: 3512692 - DNA, 25 bp, Homo sapien
aatgtttccctagattctgtcactg

SEQ ID NO: 3512693 - DNA, 25 bp, Homo sapien
aacctgttaatgtggagtaccttct

SEQ ID NO: 3512694 - DNA, 25 bp, Homo sapien
gtatcttactactgtatgcatcaga

SEQ ID NO: 3512695 - DNA, 25 bp, Homo sapien
tctgttagagcaagaaaactggttg

SEQ ID NO: 3512696 - DNA, 25 bp, Homo sapien
caaccagttttcttgctctaacaga

SEQ ID NO: 3512697 - DNA, 25 bp, Homo sapien
tctgatgcatacagtagtaagatac

SEQ ID NO: 3512698 - DNA, 25 bp, Homo sapien
gcagttggcgaacatattaaataca

SEQ ID NO: 3512699 - DNA, 25 bp, Homo sapien
tacagtgacagaatctagggaaaca

SEQ ID NO: 3512700 - DNA, 25 bp, Homo sapien
ctaaattaacaacatgcagttggcg

SEQ ID NO: 3512701 - DNA, 25 bp, Homo sapien
agaaggtactccacattaacaggtt

SEQ ID NO: 3512702 - DNA, 25 bp, Homo sapien
ggactttatgctggagttcttgacg

SEQ ID NO: 3512703 - DNA, 25 bp, Homo sapien
tgcccgatgattataaaaagacgcg

SEQ ID NO: 3512704 - DNA, 25 bp, Homo sapien
gacgcgttattaagaggactttatg

SEQ ID NO: 3512705 - DNA, 25 bp, Homo sapien
tcctgtgagcgaagattatgagata

SEQ ID NO: 3512706 - DNA, 25 bp, Homo sapien
cgaagattatgagatatgagggcaa

SEQ ID NO: 3512707 - DNA, 25 bp, Homo sapien
tttgaatgtccagcgtcctgtgagc

SEQ ID NO: 3512708 - DNA, 25 bp, Homo sapien
gaaaaacgtcaagaactccagcata

SEQ ID NO: 3512709 - DNA, 25 bp, Homo sapien
cgcgtctttttataatcatcgggca

SEQ ID NO: 3512710 - DNA, 25 bp, Homo sapien
cataaagtcctcttaataacgcgtc

SEQ ID NO: 3512711 - DNA, 25 bp, Homo sapien
tcaagaactccagcataaagtcctc

SEQ ID NO: 3512712 - DNA, 25 bp, Homo sapien
tatctcataatcttcgctcacagga

SEQ ID NO: 3512713 - DNA, 25 bp, Homo sapien
cacaggacgctggacattcaaagaa

SEQ ID NO: 3512714 - DNA, 25 bp, Homo sapien
gaaaggacagcttaatgcagatgag

SEQ ID NO: 3512715 - DNA, 25 bp, Homo sapien
ttctaagaaaggacagcttaatgca

SEQ ID NO: 3512716 - DNA, 25 bp, Homo sapien
caaggacagtcgaaggatatgccac

SEQ ID NO: 3512717 - DNA, 25 bp, Homo sapien
tctaccataaccagagtcagggact

SEQ ID NO: 3512718 - DNA, 25 bp, Homo sapien
gctaagccagctctaccataaccag

SEQ ID NO: 3512719 - DNA, 25 bp, Homo sapien
gtcgaaggatatgccacctcggttt

SEQ ID NO: 3512720 - DNA, 25 bp, Homo sapien
gcatatccttcgactgtccttgcag

SEQ ID NO: 3512721 - DNA, 25 bp, Homo sapien
aaaccgaggtggcatatccttcgac

SEQ ID NO: 3512722 - DNA, 25 bp, Homo sapien
agtccctgactctggttatggtaga

SEQ ID NO: 3512723 - DNA, 25 bp, Homo sapien
ctcatctgcattaagctgtcctttc

SEQ ID NO: 3512724 - DNA, 25 bp, Homo sapien
ggttatggtagagctggcttagccc

SEQ ID NO: 3512725 - DNA, 25 bp, Homo sapien
tgcattaagctgtcctttcttagaa

SEQ ID NO: 3512726 - DNA, 25 bp, Homo sapien
tctaaaccttatctgcaacatttat

SEQ ID NO: 3512727 - DNA, 25 bp, Homo sapien
ggcttggctcatccctttggtactt

SEQ ID NO: 3512728 - DNA, 25 bp, Homo sapien
tattagtaaaatcacatcactttat

SEQ ID NO: 3512729 - DNA, 25 bp, Homo sapien
tcatcttttactttctctgggcaaa

SEQ ID NO: 3512730 - DNA, 25 bp, Homo sapien
tttgagtgtgcatgttttctaaacc

SEQ ID NO: 3512731 - DNA, 25 bp, Homo sapien
tcatccctttggtacttgattacca

SEQ ID NO: 3512732 - DNA, 25 bp, Homo sapien
taaatgttgcagataaggtttagaa

SEQ ID NO: 3512733 - DNA, 25 bp, Homo sapien
ggtttagaaaacatgcacactcaaa

SEQ ID NO: 3512734 - DNA, 25 bp, Homo sapien
tttgcccagagaaagtaaaagatga

SEQ ID NO: 3512735 - DNA, 25 bp, Homo sapien
aagtaccaaagggatgagccaagcc

SEQ ID NO: 3512736 - DNA, 25 bp, Homo sapien
tggtaatcaagtaccaaagggatga

SEQ ID NO: 3512737 - DNA, 25 bp, Homo sapien
taatactttactaatcttaaggata

SEQ ID NO: 3512738 - DNA, 25 bp, Homo sapien
ccaggatagattttcacccaccatg

SEQ ID NO: 3512739 - DNA, 25 bp, Homo sapien
gagatgggaggcaagtttatgaaaa

SEQ ID NO: 3512740 - DNA, 25 bp, Homo sapien
cgtcatcgttcaaatcaactcttca

SEQ ID NO: 3512741 - DNA, 25 bp, Homo sapien
tgcctcccacacaatcgcagtttgg

SEQ ID NO: 3512742 - DNA, 25 bp, Homo sapien
tatccaggatagattttcacccacc

SEQ ID NO: 3512743 - DNA, 25 bp, Homo sapien
ccaccatgggacgtcatcgttcaaa

SEQ ID NO: 3512744 - DNA, 25 bp, Homo sapien
catggtgggtgaaaatctatcctgg

SEQ ID NO: 3512745 - DNA, 25 bp, Homo sapien
caaactgcgattgtgtgggaggcat

SEQ ID NO: 3512746 - DNA, 25 bp, Homo sapien
tgaagagttgatttgaacgatgacg

SEQ ID NO: 3512747 - DNA, 25 bp, Homo sapien
tttcataaacttgcctcccatctct

SEQ ID NO: 3512748 - DNA, 25 bp, Homo sapien
tgaacgatgacgtcccatggtgggt

SEQ ID NO: 3512749 - DNA, 25 bp, Homo sapien
tgatttgaacgatgacgtcccatgg

SEQ ID NO: 3512750 - DNA, 25 bp, Homo sapien
ttctggagggaccgttcatgccacc

SEQ ID NO: 3512751 - DNA, 25 bp, Homo sapien
tttctggagggaccgttcatgccac

SEQ ID NO: 3512752 - DNA, 25 bp, Homo sapien
gacccacttggaggacttgctgata

SEQ ID NO: 3512753 - DNA, 25 bp, Homo sapien
ctttctggagggaccgttcatgcca

SEQ ID NO: 3512754 - DNA, 25 bp, Homo sapien
acccacttggaggacttgctgatat

SEQ ID NO: 3512755 - DNA, 25 bp, Homo sapien
tggcatgaacggtccctccagaaag

SEQ ID NO: 3512756 - DNA, 25 bp, Homo sapien
gtggcatgaacggtccctccagaaa

SEQ ID NO: 3512757 - DNA, 25 bp, Homo sapien
ggtggcatgaacggtccctccagaa

SEQ ID NO: 3512758 - DNA, 25 bp, Homo sapien
tatcagcaagtcctccaagtgggtc

SEQ ID NO: 3512759 - DNA, 25 bp, Homo sapien
atatcagcaagtcctccaagtgggt

SEQ ID NO: 3512760 - DNA, 25 bp, Homo sapien
catcttagtggtggagcttaatgtt

SEQ ID NO: 3512761 - DNA, 25 bp, Homo sapien
gtttgtcacatagactctgtgtgtg

SEQ ID NO: 3512762 - DNA, 25 bp, Homo sapien
gaatagaatgggtttcctcctcacc

SEQ ID NO: 3512763 - DNA, 25 bp, Homo sapien
tgtgtagaatagaatgggtttcctc

SEQ ID NO: 3512764 - DNA, 25 bp, Homo sapien
atgtttttagtgtctcgtcttccac

SEQ ID NO: 3512765 - DNA, 25 bp, Homo sapien
tctgtctcatcttagtggtggagct

SEQ ID NO: 3512766 - DNA, 25 bp, Homo sapien
gagacagacccctcaagcgtttggg

SEQ ID NO: 3512767 - DNA, 25 bp, Homo sapien
cacacacagagtctatgtgacaaac

SEQ ID NO: 3512768 - DNA, 25 bp, Homo sapien
agctccaccactaagatgagacaga

SEQ ID NO: 3512769 - DNA, 25 bp, Homo sapien
gtggaagacgagacactaaaaacat

SEQ ID NO: 3512770 - DNA, 25 bp, Homo sapien
ggtgaggaggaaacccattctattc

SEQ ID NO: 3512771 - DNA, 25 bp, Homo sapien
actaaaaacattaagctccaccact

SEQ ID NO: 3512772 - DNA, 25 bp, Homo sapien
gaccaaagacgatcaatcaaattcg

SEQ ID NO: 3512773 - DNA, 25 bp, Homo sapien
tgcgagaacaccattgggttcctcg

SEQ ID NO: 3512774 - DNA, 25 bp, Homo sapien
aaggcttttcttgacaatggaccaa

SEQ ID NO: 3512775 - DNA, 25 bp, Homo sapien
tcttgacaatggaccaaagacgatc

SEQ ID NO: 3512776 - DNA, 25 bp, Homo sapien
caatcaaattcgtcaagatgcagta

SEQ ID NO: 3512777 - DNA, 25 bp, Homo sapien
cattgggttcctcgcaaggcttttc

SEQ ID NO: 3512778 - DNA, 25 bp, Homo sapien
gatcgtctttggtccattgtcaaga

SEQ ID NO: 3512779 - DNA, 25 bp, Homo sapien
tactgcatcttgacgaatttgattg

SEQ ID NO: 3512780 - DNA, 25 bp, Homo sapien
gaggaacccaatggtgttctcgcaa

SEQ ID NO: 3512781 - DNA, 25 bp, Homo sapien
gaaaagccttgcgaggaacccaatg

SEQ ID NO: 3512782 - DNA, 25 bp, Homo sapien
gaatttgattgatcgtctttggtcc

SEQ ID NO: 3512783 - DNA, 25 bp, Homo sapien
ttggtccattgtcaagaaaagcctt

SEQ ID NO: 3512784 - DNA, 25 bp, Homo sapien
agctgagtttttggtttaggaatat

SEQ ID NO: 3512785 - DNA, 25 bp, Homo sapien
atattcctaaaccaaaaactcagct

SEQ ID NO: 3512786 - DNA, 25 bp, Homo sapien
ttgccagcaaggattcgtttcctgc

SEQ ID NO: 3512787 - DNA, 25 bp, Homo sapien
aattgccagcaaggattcgtttcct

SEQ ID NO: 3512788 - DNA, 25 bp, Homo sapien
gaattgccagcaaggattcgtttcc

SEQ ID NO: 3512789 - DNA, 25 bp, Homo sapien
aaggaattgccagcaaggattcgtt

SEQ ID NO: 3512790 - DNA, 25 bp, Homo sapien
taaggaattgccagcaaggattcgt

SEQ ID NO: 3512791 - DNA, 25 bp, Homo sapien
gtaaggaattgccagcaaggattcg

SEQ ID NO: 3512792 - DNA, 25 bp, Homo sapien
gaaacgaatccttgctggcaattcc

SEQ ID NO: 3512793 - DNA, 25 bp, Homo sapien
gcaggaaacgaatccttgctggcaa

SEQ ID NO: 3512794 - DNA, 25 bp, Homo sapien
caggaaacgaatccttgctggcaat

SEQ ID NO: 3512795 - DNA, 25 bp, Homo sapien
ggaaacgaatccttgctggcaattc

SEQ ID NO: 3512796 - DNA, 25 bp, Homo sapien
cgaatccttgctggcaattccttac

SEQ ID NO: 3512797 - DNA, 25 bp, Homo sapien
acgaatccttgctggcaattcctta

SEQ ID NO: 3512798 - DNA, 25 bp, Homo sapien
agtactttgcccgaatgtgctcctt

SEQ ID NO: 3512799 - DNA, 25 bp, Homo sapien
gtactttgcccgaatgtgctccttg

SEQ ID NO: 3512800 - DNA, 25 bp, Homo sapien
tttgcccgaatgtgctccttgatgt

SEQ ID NO: 3512801 - DNA, 25 bp, Homo sapien
tactttgcccgaatgtgctccttga

SEQ ID NO: 3512802 - DNA, 25 bp, Homo sapien
ctttgcccgaatgtgctccttgatg

SEQ ID NO: 3512803 - DNA, 25 bp, Homo sapien
actttgcccgaatgtgctccttgat

SEQ ID NO: 3512804 - DNA, 25 bp, Homo sapien
catcaaggagcacattcgggcaaag

SEQ ID NO: 3512805 - DNA, 25 bp, Homo sapien
acatcaaggagcacattcgggcaaa

SEQ ID NO: 3512806 - DNA, 25 bp, Homo sapien
aaggagcacattcgggcaaagtact

SEQ ID NO: 3512807 - DNA, 25 bp, Homo sapien
tcaaggagcacattcgggcaaagta

SEQ ID NO: 3512808 - DNA, 25 bp, Homo sapien
caaggagcacattcgggcaaagtac

SEQ ID NO: 3512809 - DNA, 25 bp, Homo sapien
atcaaggagcacattcgggcaaagt

SEQ ID NO: 3512810 - DNA, 25 bp, Homo sapien
tgtgacatcataagggattgccata

SEQ ID NO: 3512811 - DNA, 25 bp, Homo sapien
agtagtttgtctttaaatcaagcta

SEQ ID NO: 3512812 - DNA, 25 bp, Homo sapien
tatttagccattaactgggttataa

SEQ ID NO: 3512813 - DNA, 25 bp, Homo sapien
tgtagctgatgaaagtagtacaagt

SEQ ID NO: 3512814 - DNA, 25 bp, Homo sapien
tcataagggattgccatatttagcc

SEQ ID NO: 3512815 - DNA, 25 bp, Homo sapien
taagggattgccatatttagccatt

SEQ ID NO: 3512816 - DNA, 25 bp, Homo sapien
tagcttgatttaaagacaaactact

SEQ ID NO: 3512817 - DNA, 25 bp, Homo sapien
tatggcaatcccttatgatgtcaca

SEQ ID NO: 3512818 - DNA, 25 bp, Homo sapien
ggctaaatatggcaatcccttatga

SEQ ID NO: 3512819 - DNA, 25 bp, Homo sapien
aatggctaaatatggcaatccctta

SEQ ID NO: 3512820 - DNA, 25 bp, Homo sapien
acttgtactactttcatcagctaca

SEQ ID NO: 3512821 - DNA, 25 bp, Homo sapien
tataacccagttaatggctaaatat

SEQ ID NO: 3512822 - DNA, 25 bp, Homo sapien
ccaactcaaagatatgggagaggat

SEQ ID NO: 3512823 - DNA, 25 bp, Homo sapien
ttggagtgcctctgtcagataatga

SEQ ID NO: 3512824 - DNA, 25 bp, Homo sapien
tagattagaccatgaacgagccaag

SEQ ID NO: 3512825 - DNA, 25 bp, Homo sapien
gagagtccaactcaaagatatggga

SEQ ID NO: 3512826 - DNA, 25 bp, Homo sapien
gagtgcctctgtcagataatgagga

SEQ ID NO: 3512827 - DNA, 25 bp, Homo sapien
tgggacctagattagaccatgaacg

SEQ ID NO: 3512828 - DNA, 25 bp, Homo sapien
cccatatctttgagttggactctct

SEQ ID NO: 3512829 - DNA, 25 bp, Homo sapien
tcattatctgacagaggcactccaa

SEQ ID NO: 3512830 - DNA, 25 bp, Homo sapien
cgttcatggtctaatctaggtccca

SEQ ID NO: 3512831 - DNA, 25 bp, Homo sapien
tcctcattatctgacagaggcactc

SEQ ID NO: 3512832 - DNA, 25 bp, Homo sapien
caaatcctctcccatatctttgagt

SEQ ID NO: 3512833 - DNA, 25 bp, Homo sapien
cttggctcgttcatggtctaatcta

SEQ ID NO: 3512834 - DNA, 25 bp, Homo sapien
ggaagttaggcgaatgtagtcagtc

SEQ ID NO: 3512835 - DNA, 25 bp, Homo sapien
gagttagaactgatcaaccagactg

SEQ ID NO: 3512836 - DNA, 25 bp, Homo sapien
taactaaaactttgtcaccatggcc

SEQ ID NO: 3512837 - DNA, 25 bp, Homo sapien
tactacgcctaaaccagagtaacta

SEQ ID NO: 3512838 - DNA, 25 bp, Homo sapien
gaaagccctatactagattctgtag

SEQ ID NO: 3512839 - DNA, 25 bp, Homo sapien
tcaattattcatctaagagggaggt

SEQ ID NO: 3512840 - DNA, 25 bp, Homo sapien
cagtctggttgatcagttctaactc

SEQ ID NO: 3512841 - DNA, 25 bp, Homo sapien
gactgactacattcgcctaacttcc

SEQ ID NO: 3512842 - DNA, 25 bp, Homo sapien
gccatggtgacaaagttttagttac

SEQ ID NO: 3512843 - DNA, 25 bp, Homo sapien
tatgtttgcactgactcattcacag

SEQ ID NO: 3512844 - DNA, 25 bp, Homo sapien
tgtatttaactagtcaacctccctc

SEQ ID NO: 3512845 - DNA, 25 bp, Homo sapien
gaatctagtatagggctttctacca

SEQ ID NO: 3512846 - DNA, 25 bp, Homo sapien
gcttgatcttattcacgaatctatc

SEQ ID NO: 3512847 - DNA, 25 bp, Homo sapien
ggagagcttggcaagcttgatctta

SEQ ID NO: 3512848 - DNA, 25 bp, Homo sapien
taagatcaagatgttgggaaacatc

SEQ ID NO: 3512849 - DNA, 25 bp, Homo sapien
cacgaatctatccttcataagtgca

SEQ ID NO: 3512850 - DNA, 25 bp, Homo sapien
attcattggagagcttggcaagctt

SEQ ID NO: 3512851 - DNA, 25 bp, Homo sapien
gaatctatccttcataagtgcatca

SEQ ID NO: 3512852 - DNA, 25 bp, Homo sapien
gcacttatgaaggatagattcgtga

SEQ ID NO: 3512853 - DNA, 25 bp, Homo sapien
tttgatgcacttatgaaggatagat

SEQ ID NO: 3512854 - DNA, 25 bp, Homo sapien
caagcttgccaagctctccaatgaa

SEQ ID NO: 3512855 - DNA, 25 bp, Homo sapien
gatagattcgtgaataagatcaagc

SEQ ID NO: 3512856 - DNA, 25 bp, Homo sapien
aataagatcaagcttgccaagctct

SEQ ID NO: 3512857 - DNA, 25 bp, Homo sapien
gatgtttcccaacatcttgatctta

SEQ ID NO: 3512858 - DNA, 25 bp, Homo sapien
ttgaaaaccgaactagaaatgttga

SEQ ID NO: 3512859 - DNA, 25 bp, Homo sapien
atttccaaattacaagatgaatttg

SEQ ID NO: 3512860 - DNA, 25 bp, Homo sapien
aatttccaaattacaagatgaattt

SEQ ID NO: 3512861 - DNA, 25 bp, Homo sapien
caaattcatcttgtaatttggaaat

SEQ ID NO: 3512862 - DNA, 25 bp, Homo sapien
tcaacatttctagttcggttttcaa

SEQ ID NO: 3512863 - DNA, 25 bp, Homo sapien
aaattcatcttgtaatttggaaatt

SEQ ID NO: 3512864 - DNA, 25 bp, Homo sapien
gaaaaccgaactagaaatgttgatg

SEQ ID NO: 3512865 - DNA, 25 bp, Homo sapien
gatgaatttgaaaaccgaactagaa

SEQ ID NO: 3512866 - DNA, 25 bp, Homo sapien
ttgaaaaccgaactagaaatgttga

SEQ ID NO: 3512867 - DNA, 25 bp, Homo sapien
atttccaaattacaagatgaatttg

SEQ ID NO: 3512868 - DNA, 25 bp, Homo sapien
gcctcctaatttccaaattacaaga

SEQ ID NO: 3512869 - DNA, 25 bp, Homo sapien
tgaaaaccgaactagaaatgttgat

SEQ ID NO: 3512870 - DNA, 25 bp, Homo sapien
tcttgtaatttggaaattaggaggc

SEQ ID NO: 3512871 - DNA, 25 bp, Homo sapien
caaattcatcttgtaatttggaaat

SEQ ID NO: 3512872 - DNA, 25 bp, Homo sapien
ttctagttcggttttcaaattcatc

SEQ ID NO: 3512873 - DNA, 25 bp, Homo sapien
cttgtaatttggaaattaggaggcg

SEQ ID NO: 3512874 - DNA, 25 bp, Homo sapien
tcaacatttctagttcggttttcaa

SEQ ID NO: 3512875 - DNA, 25 bp, Homo sapien
catcaacatttctagttcggttttc

SEQ ID NO: 3512876 - DNA, 25 bp, Homo sapien
aagtatagctcactgtatgctcagc

SEQ ID NO: 3512877 - DNA, 25 bp, Homo sapien
gacaaagccctagaagagccaaagt

SEQ ID NO: 3512878 - DNA, 25 bp, Homo sapien
ctgcgattggcagaagatgcaccaa

SEQ ID NO: 3512879 - DNA, 25 bp, Homo sapien
gctcagctatgtctgcgattggcag

SEQ ID NO: 3512880 - DNA, 25 bp, Homo sapien
attgtggacaaagccctagaagagc

SEQ ID NO: 3512881 - DNA, 25 bp, Homo sapien
gaagagccaaagtatagctcactgt

SEQ ID NO: 3512882 - DNA, 25 bp, Homo sapien
gctcttctagggctttgtccacaat

SEQ ID NO: 3512883 - DNA, 25 bp, Homo sapien
gcatacagtgagctatactttggct

SEQ ID NO: 3512884 - DNA, 25 bp, Homo sapien
tactttggctcttctagggctttgt

SEQ ID NO: 3512885 - DNA, 25 bp, Homo sapien
gacatagctgagcatacagtgagct

SEQ ID NO: 3512886 - DNA, 25 bp, Homo sapien
ctgccaatcgcagacatagctgagc

SEQ ID NO: 3512887 - DNA, 25 bp, Homo sapien
ttggtgcatcttctgccaatcgcag

SEQ ID NO: 3512888 - DNA, 25 bp, Homo sapien
taggtcttggaaatgcattgtatga

SEQ ID NO: 3512889 - DNA, 25 bp, Homo sapien
aaacccttaggtgtgagttagatag

SEQ ID NO: 3512890 - DNA, 25 bp, Homo sapien
aatgggagtgcttagcaagctgttc

SEQ ID NO: 3512891 - DNA, 25 bp, Homo sapien
gaaagttttgatatccatggcattt

SEQ ID NO: 3512892 - DNA, 25 bp, Homo sapien
gatgaaatctgtataactggacatt

SEQ ID NO: 3512893 - DNA, 25 bp, Homo sapien
gacatttttggtagactgtaatagc

SEQ ID NO: 3512894 - DNA, 25 bp, Homo sapien
aaaagaacagcttgctaagcactcc

SEQ ID NO: 3512895 - DNA, 25 bp, Homo sapien
tacagatttcatctagtcacatcca

SEQ ID NO: 3512896 - DNA, 25 bp, Homo sapien
tacctatctaactcacacctaaggg

SEQ ID NO: 3512897 - DNA, 25 bp, Homo sapien
caatctaatgctactaaagtcagtg

SEQ ID NO: 3512898 - DNA, 25 bp, Homo sapien
gctattacagtctaccaaaaatgtc

SEQ ID NO: 3512899 - DNA, 25 bp, Homo sapien
catacaatgcatttccaagacctaa

SEQ ID NO: 3512900 - DNA, 25 bp, Homo sapien
tgagctcctcaatgtgggtgtagag

SEQ ID NO: 3512901 - DNA, 25 bp, Homo sapien
gacaagctatgccttgagctcctca

SEQ ID NO: 3512902 - DNA, 25 bp, Homo sapien
ataagcttactcctgaaaagtttga

SEQ ID NO: 3512903 - DNA, 25 bp, Homo sapien
aaagtttgacaagctatgccttgag

SEQ ID NO: 3512904 - DNA, 25 bp, Homo sapien
tgggtgtagagtctaaactcatcct

SEQ ID NO: 3512905 - DNA, 25 bp, Homo sapien
catactaaataagcttactcctgaa

SEQ ID NO: 3512906 - DNA, 25 bp, Homo sapien
gctcaaggcatagcttgtcaaactt

SEQ ID NO: 3512907 - DNA, 25 bp, Homo sapien
gactctacacccacattgaggagct

SEQ ID NO: 3512908 - DNA, 25 bp, Homo sapien
ttgaggagctcaaggcatagcttgt

SEQ ID NO: 3512909 - DNA, 25 bp, Homo sapien
tttagactctacacccacattgagg

SEQ ID NO: 3512910 - DNA, 25 bp, Homo sapien
taaggatgagtttagactctacacc

SEQ ID NO: 3512911 - DNA, 25 bp, Homo sapien
tcaaacttttcaggagtaagcttat

SEQ ID NO: 3512912 - DNA, 25 bp, Homo sapien
gagatctttgcgctctaaccttgag

SEQ ID NO: 3512913 - DNA, 25 bp, Homo sapien
gaagaacagcacgtcatattttggg

SEQ ID NO: 3512914 - DNA, 25 bp, Homo sapien
ggcaaggttcatgcccagagtatgt

SEQ ID NO: 3512915 - DNA, 25 bp, Homo sapien
aatggtcttagttcatggtctagcc

SEQ ID NO: 3512916 - DNA, 25 bp, Homo sapien
tgttatttaagccagtgaggcaggg

SEQ ID NO: 3512917 - DNA, 25 bp, Homo sapien
aatcacttgaataccccacaggtgg

SEQ ID NO: 3512918 - DNA, 25 bp, Homo sapien
tactcatctaaaaccaaagggatgc

SEQ ID NO: 3512919 - DNA, 25 bp, Homo sapien
gcaaagatctcattatcaaggctag

SEQ ID NO: 3512920 - DNA, 25 bp, Homo sapien
tctcaaggttagagcgcaaagatct

SEQ ID NO: 3512921 - DNA, 25 bp, Homo sapien
catacatactctgggcatgaacctt

SEQ ID NO: 3512922 - DNA, 25 bp, Homo sapien
cgggaagccccaaaatatgacgtgc

SEQ ID NO: 3512923 - DNA, 25 bp, Homo sapien
tcaaggctagaccatgaactaagac

SEQ ID NO: 3512924 - DNA, 25 bp, Homo sapien
gattcctgcacgaagcactagacga

SEQ ID NO: 3512925 - DNA, 25 bp, Homo sapien
gcagcaaacaactccgcaaacgaaa

SEQ ID NO: 3512926 - DNA, 25 bp, Homo sapien
cagggcaaaacgctcagaaatggat

SEQ ID NO: 3512927 - DNA, 25 bp, Homo sapien
tagacgagatgacaactccgcagca

SEQ ID NO: 3512928 - DNA, 25 bp, Homo sapien
gaacgacatgatgcaatcttcagga

SEQ ID NO: 3512929 - DNA, 25 bp, Homo sapien
tccgcaaacgaaaaagaacgacatg

SEQ ID NO: 3512930 - DNA, 25 bp, Homo sapien
gaatccatttctgagcgttttgccc

SEQ ID NO: 3512931 - DNA, 25 bp, Homo sapien
tcctgaagattgcatcatgtcgttc

SEQ ID NO: 3512932 - DNA, 25 bp, Homo sapien
ttcgtttgcggagttgtttgctgcg

SEQ ID NO: 3512933 - DNA, 25 bp, Homo sapien
tctcgtctagtgcttcgtgcaggaa

SEQ ID NO: 3512934 - DNA, 25 bp, Homo sapien
tgtttgctgcggagttgtcatctcg

SEQ ID NO: 3512935 - DNA, 25 bp, Homo sapien
catgtcgttctttttcgtttgcgga

SEQ ID NO: 3512936 - DNA, 25 bp, Homo sapien
gcgtggtttctgttgggtatcctaa

SEQ ID NO: 3512937 - DNA, 25 bp, Homo sapien
taaggcaatagccatcaagactcct

SEQ ID NO: 3512938 - DNA, 25 bp, Homo sapien
gaaagtgtttattggcagccggtac

SEQ ID NO: 3512939 - DNA, 25 bp, Homo sapien
cccatgtgacggtataattaaggca

SEQ ID NO: 3512940 - DNA, 25 bp, Homo sapien
gatgcacactactgttccagaagca

SEQ ID NO: 3512941 - DNA, 25 bp, Homo sapien
taaagtagtacgcactcaacatggt

SEQ ID NO: 3512942 - DNA, 25 bp, Homo sapien
tgaccatgttgagtgcgtactactt

SEQ ID NO: 3512943 - DNA, 25 bp, Homo sapien
gcttctggaacagtagtgtgcatca

SEQ ID NO: 3512944 - DNA, 25 bp, Homo sapien
gccttaattataccgtcacatggga

SEQ ID NO: 3512945 - DNA, 25 bp, Homo sapien
taccggctgccaataaacactttct

SEQ ID NO: 3512946 - DNA, 25 bp, Homo sapien
ttaggatacccaacagaaaccacgc

SEQ ID NO: 3512947 - DNA, 25 bp, Homo sapien
aatattcccagtatcaacgctgtgg

SEQ ID NO: 3512948 - DNA, 25 bp, Homo sapien
aggaagtaggggtgcacctcagcac

SEQ ID NO: 3512949 - DNA, 25 bp, Homo sapien
gaagtaggggtgcacctcagcacta

SEQ ID NO: 3512950 - DNA, 25 bp, Homo sapien
ggggtgcacctcagcactatcccaa

SEQ ID NO: 3512951 - DNA, 25 bp, Homo sapien
gtaggggtgcacctcagcactatcc

SEQ ID NO: 3512952 - DNA, 25 bp, Homo sapien
taggggtgcacctcagcactatccc

SEQ ID NO: 3512953 - DNA, 25 bp, Homo sapien
agtaggggtgcacctcagcactatc

SEQ ID NO: 3512954 - DNA, 25 bp, Homo sapien
ttgggatagtgctgaggtgcacccc

SEQ ID NO: 3512955 - DNA, 25 bp, Homo sapien
gggatagtgctgaggtgcaccccta

SEQ ID NO: 3512956 - DNA, 25 bp, Homo sapien
tagtgctgaggtgcacccctacttc

SEQ ID NO: 3512957 - DNA, 25 bp, Homo sapien
gatagtgctgaggtgcacccctact

SEQ ID NO: 3512958 - DNA, 25 bp, Homo sapien
ggatagtgctgaggtgcacccctac

SEQ ID NO: 3512959 - DNA, 25 bp, Homo sapien
gtgctgaggtgcacccctacttcct

SEQ ID NO: 3512960 - DNA, 25 bp, Homo sapien
agcactatcccaagactgctggcaa

SEQ ID NO: 3512961 - DNA, 25 bp, Homo sapien
ggtgcacctcagcactatcccaaga

SEQ ID NO: 3512962 - DNA, 25 bp, Homo sapien
actatcccaagactgctggcaacag

SEQ ID NO: 3512963 - DNA, 25 bp, Homo sapien
cttcttcgggcggaggaggaagtag

SEQ ID NO: 3512964 - DNA, 25 bp, Homo sapien
gggtgcacctcagcactatcccaag

SEQ ID NO: 3512965 - DNA, 25 bp, Homo sapien
gaagtaggggtgcacctcagcacta

SEQ ID NO: 3512966 - DNA, 25 bp, Homo sapien
tgagtgagacatagttgggatacag

SEQ ID NO: 3512967 - DNA, 25 bp, Homo sapien
gacatagttgggatacagtaaacaa

SEQ ID NO: 3512968 - DNA, 25 bp, Homo sapien
tcctttgggtccgagttcagtcttc

SEQ ID NO: 3512969 - DNA, 25 bp, Homo sapien
ctttgggtccgagttcagtcttcat

SEQ ID NO: 3512970 - DNA, 25 bp, Homo sapien
catagttgggatacagtaaacaatt

SEQ ID NO: 3512971 - DNA, 25 bp, Homo sapien
tgagacatagttgggatacagtaaa

SEQ ID NO: 3512972 - DNA, 25 bp, Homo sapien
atgaagactgaactcggacccaaag

SEQ ID NO: 3512973 - DNA, 25 bp, Homo sapien
tactgtatcccaactatgtctcact

SEQ ID NO: 3512974 - DNA, 25 bp, Homo sapien
tgtttactgtatcccaactatgtct

SEQ ID NO: 3512975 - DNA, 25 bp, Homo sapien
ctgtatcccaactatgtctcactca

SEQ ID NO: 3512976 - DNA, 25 bp, Homo sapien
aattgtttactgtatcccaactatg

SEQ ID NO: 3512977 - DNA, 25 bp, Homo sapien
gaagactgaactcggacccaaagga

SEQ ID NO: 3512978 - DNA, 25 bp, Homo sapien
acagccttctaagaactgccatctg

SEQ ID NO: 3512979 - DNA, 25 bp, Homo sapien
tcaaaaagtagttaacacagcaaat

SEQ ID NO: 3512980 - DNA, 25 bp, Homo sapien
taagtccgacttaatgggctgcaat

SEQ ID NO: 3512981 - DNA, 25 bp, Homo sapien
aacacagcaaataagtccgacttaa

SEQ ID NO: 3512982 - DNA, 25 bp, Homo sapien
tccttttgaaaaggccagtctcaaa

SEQ ID NO: 3512983 - DNA, 25 bp, Homo sapien
tcattgacagccttctaagaactgc

SEQ ID NO: 3512984 - DNA, 25 bp, Homo sapien
tatttgctgtgttaactactttttg

SEQ ID NO: 3512985 - DNA, 25 bp, Homo sapien
ttaagtcggacttatttgctgtgtt

SEQ ID NO: 3512986 - DNA, 25 bp, Homo sapien
cagatggcagttcttagaaggctgt

SEQ ID NO: 3512987 - DNA, 25 bp, Homo sapien
aaattgcagcccattaagtcggact

SEQ ID NO: 3512988 - DNA, 25 bp, Homo sapien
tttgagactggccttttcaaaagga

SEQ ID NO: 3512989 - DNA, 25 bp, Homo sapien
gcagttcttagaaggctgtcaatga

SEQ ID NO: 3512990 - DNA, 25 bp, Homo sapien
ggagagtgcgattgcagaagggggt

SEQ ID NO: 3512991 - DNA, 25 bp, Homo sapien
gagagtgcgattgcagaagggggtg

SEQ ID NO: 3512992 - DNA, 25 bp, Homo sapien
agagtgcgattgcagaagggggtgc

SEQ ID NO: 3512993 - DNA, 25 bp, Homo sapien
tggagagtgcgattgcagaaggggg

SEQ ID NO: 3512994 - DNA, 25 bp, Homo sapien
cagaagggggtgcttctcgtttcag

SEQ ID NO: 3512995 - DNA, 25 bp, Homo sapien
gtggagagtgcgattgcagaagggg

SEQ ID NO: 3512996 - DNA, 25 bp, Homo sapien
acccccttctgcaatcgcactctcc

SEQ ID NO: 3512997 - DNA, 25 bp, Homo sapien
ctgaaacgagaagcacccccttctg

SEQ ID NO: 3512998 - DNA, 25 bp, Homo sapien
cacccccttctgcaatcgcactctc

SEQ ID NO: 3512999 - DNA, 25 bp, Homo sapien
cccccttctgcaatcgcactctcca

SEQ ID NO: 3513000 - DNA, 25 bp, Homo sapien
gcacccccttctgcaatcgcactct

SEQ ID NO: 3513001 - DNA, 25 bp, Homo sapien
ccccttctgcaatcgcactctccac

SEQ ID NO: 3513002 - DNA, 25 bp, Homo sapien
tatttcatttctcctgtcccctccc

SEQ ID NO: 3513003 - DNA, 25 bp, Homo sapien
gtatttcatttctcctgtcccctcc

SEQ ID NO: 3513004 - DNA, 25 bp, Homo sapien
caccccatctattaatattattctt

SEQ ID NO: 3513005 - DNA, 25 bp, Homo sapien
ccaccccatctattaatattattct

SEQ ID NO: 3513006 - DNA, 25 bp, Homo sapien
tccccaccccatctattaatattat

SEQ ID NO: 3513007 - DNA, 25 bp, Homo sapien
cccaccccatctattaatattattc

SEQ ID NO: 3513008 - DNA, 25 bp, Homo sapien
caaaagaataatattaatagatggg

SEQ ID NO: 3513009 - DNA, 25 bp, Homo sapien
ataatattaatagatggggtgggga

SEQ ID NO: 3513010 - DNA, 25 bp, Homo sapien
gaataatattaatagatggggtggg

SEQ ID NO: 3513011 - DNA, 25 bp, Homo sapien
ggaggggaggggacaggagaaatga

SEQ ID NO: 3513012 - DNA, 25 bp, Homo sapien
tcaaaagaataatattaatagatgg

SEQ ID NO: 3513013 - DNA, 25 bp, Homo sapien
ggaggggacaggagaaatgaaatac

SEQ ID NO: 3513014 - DNA, 25 bp, Homo sapien
gatctgtatgttagcagtgtctaat

SEQ ID NO: 3513015 - DNA, 25 bp, Homo sapien
gaaggcttatagatctgtatgttag

SEQ ID NO: 3513016 - DNA, 25 bp, Homo sapien
tgccaggatctgaaatacgttgtaa

SEQ ID NO: 3513017 - DNA, 25 bp, Homo sapien
ttacagatctgcaatgcagtgacag

SEQ ID NO: 3513018 - DNA, 25 bp, Homo sapien
tttaggttagtcttacagatctgca

SEQ ID NO: 3513019 - DNA, 25 bp, Homo sapien
tacgttgtaattgaatgaaggctta

SEQ ID NO: 3513020 - DNA, 25 bp, Homo sapien
gcagatctgtaagactaacctaaaa

SEQ ID NO: 3513021 - DNA, 25 bp, Homo sapien
ctaacatacagatctataagccttc

SEQ ID NO: 3513022 - DNA, 25 bp, Homo sapien
aaaattagacactgctaacatacag

SEQ ID NO: 3513023 - DNA, 25 bp, Homo sapien
tataagccttcattcaattacaacg

SEQ ID NO: 3513024 - DNA, 25 bp, Homo sapien
ttacaacgtatttcagatcctggca

SEQ ID NO: 3513025 - DNA, 25 bp, Homo sapien
cactgcattgcagatctgtaagact

SEQ ID NO: 3513026 - DNA, 25 bp, Homo sapien
aatgctccgctcttttgttcccagg

SEQ ID NO: 3513027 - DNA, 25 bp, Homo sapien
gcctcgtcaaggcagtaaaaattcc

SEQ ID NO: 3513028 - DNA, 25 bp, Homo sapien
caaaagattcgttctgagccgttta

SEQ ID NO: 3513029 - DNA, 25 bp, Homo sapien
tgctgaagagctttcggagagacct

SEQ ID NO: 3513030 - DNA, 25 bp, Homo sapien
gcaagtgctagtcctgtacacccgg

SEQ ID NO: 3513031 - DNA, 25 bp, Homo sapien
gacattttccacgtgatgttgctcg

SEQ ID NO: 3513032 - DNA, 25 bp, Homo sapien
ggaatttttactgccttgacgaggc

SEQ ID NO: 3513033 - DNA, 25 bp, Homo sapien
tgtacaggactagcacttgcaggcg

SEQ ID NO: 3513034 - DNA, 25 bp, Homo sapien
caaggatgcaaagagacttcgtaga

SEQ ID NO: 3513035 - DNA, 25 bp, Homo sapien
cctgggaacaaaagagcggagcatt

SEQ ID NO: 3513036 - DNA, 25 bp, Homo sapien
tagatgaggtctctccgaaagctct

SEQ ID NO: 3513037 - DNA, 25 bp, Homo sapien
tccccgtggagagctcgtggaaaga

SEQ ID NO: 3513038 - DNA, 25 bp, Homo sapien
tgctcctccccgtcgagcgacccgg

SEQ ID NO: 3513039 - DNA, 25 bp, Homo sapien
cgtcgagcgacccgggcctcgcggg

SEQ ID NO: 3513040 - DNA, 25 bp, Homo sapien
gaggttgtcggaagcacttccctaa

SEQ ID NO: 3513041 - DNA, 25 bp, Homo sapien
cccgtcgagcgacccgggcctcgcg

SEQ ID NO: 3513042 - DNA, 25 bp, Homo sapien
ggaggttgtcggaagcacttcccta

SEQ ID NO: 3513043 - DNA, 25 bp, Homo sapien
ccgtcgagcgacccgggcctcgcgg

SEQ ID NO: 3513044 - DNA, 25 bp, Homo sapien
tagggaagtgcttccgacaacctcc

SEQ ID NO: 3513045 - DNA, 25 bp, Homo sapien
ccgggtcgctcgacggggaggagca

SEQ ID NO: 3513046 - DNA, 25 bp, Homo sapien
ttagggaagtgcttccgacaacctc

SEQ ID NO: 3513047 - DNA, 25 bp, Homo sapien
tgcttccgacaacctccccgcgagg

SEQ ID NO: 3513048 - DNA, 25 bp, Homo sapien
cgcgaggcccgggtcgctcgacggg

SEQ ID NO: 3513049 - DNA, 25 bp, Homo sapien
gcttccgacaacctccccgcgaggc

SEQ ID NO: 3513050 - DNA, 25 bp, Homo sapien
tgctcctccccgtcgagcgacccgg

SEQ ID NO: 3513051 - DNA, 25 bp, Homo sapien
ggaggttgtcggaagcacttcccta

SEQ ID NO: 3513052 - DNA, 25 bp, Homo sapien
gaggccgccttcctgcttggagaac

SEQ ID NO: 3513053 - DNA, 25 bp, Homo sapien
cttggagaacaaagagctgggcgcc

SEQ ID NO: 3513054 - DNA, 25 bp, Homo sapien
aagcacttccctaacttgcgcctgg

SEQ ID NO: 3513055 - DNA, 25 bp, Homo sapien
gccttcctgcttggagaacaaagag

SEQ ID NO: 3513056 - DNA, 25 bp, Homo sapien
tagggaagtgcttccgacaacctcc

SEQ ID NO: 3513057 - DNA, 25 bp, Homo sapien
ggcgcccagctctttgttctccaag

SEQ ID NO: 3513058 - DNA, 25 bp, Homo sapien
tgttctccaagcaggaaggcggcct

SEQ ID NO: 3513059 - DNA, 25 bp, Homo sapien
tctttgttctccaagcaggaaggcg

SEQ ID NO: 3513060 - DNA, 25 bp, Homo sapien
cgcgaggcccgggtcgctcgacggg

SEQ ID NO: 3513061 - DNA, 25 bp, Homo sapien
ccaggcgcaagttagggaagtgctt

SEQ ID NO: 3513062 - DNA, 25 bp, Homo sapien
gtgtgtaggacctggagtcggcagg

SEQ ID NO: 3513063 - DNA, 25 bp, Homo sapien
taggacctggagtcggcaggggctg

SEQ ID NO: 3513064 - DNA, 25 bp, Homo sapien
cctggagtcggcaggggctgccctt

SEQ ID NO: 3513065 - DNA, 25 bp, Homo sapien
gctgcccttcgtcggggaggaaaga

SEQ ID NO: 3513066 - DNA, 25 bp, Homo sapien
tcggcaggggctgcccttcgtcggg

SEQ ID NO: 3513067 - DNA, 25 bp, Homo sapien
tgtgtaggacctggagtcggcaggg

SEQ ID NO: 3513068 - DNA, 25 bp, Homo sapien
agggcagcccctgccgactccaggt

SEQ ID NO: 3513069 - DNA, 25 bp, Homo sapien
gaagggcagcccctgccgactccag

SEQ ID NO: 3513070 - DNA, 25 bp, Homo sapien
cctgccgactccaggtcctacacac

SEQ ID NO: 3513071 - DNA, 25 bp, Homo sapien
cgacgaagggcagcccctgccgact

SEQ ID NO: 3513072 - DNA, 25 bp, Homo sapien
tctttcctccccgacgaagggcagc

SEQ ID NO: 3513073 - DNA, 25 bp, Homo sapien
gcccctgccgactccaggtcctaca

SEQ ID NO: 3513074 - DNA, 25 bp, Homo sapien
ccttttgtcagcagaggaggccgtg

SEQ ID NO: 3513075 - DNA, 25 bp, Homo sapien
gagtgatgatttctgccccttttgt

SEQ ID NO: 3513076 - DNA, 25 bp, Homo sapien
cagaggaggccgtggcgaggcggtt

SEQ ID NO: 3513077 - DNA, 25 bp, Homo sapien
aagagagagtgatgatttctgcccc

SEQ ID NO: 3513078 - DNA, 25 bp, Homo sapien
tgtgtaggacctggagtcggcaggg

SEQ ID NO: 3513079 - DNA, 25 bp, Homo sapien
tctgccccttttgtcagcagaggag

SEQ ID NO: 3513080 - DNA, 25 bp, Homo sapien
agggcagcccctgccgactccaggt

SEQ ID NO: 3513081 - DNA, 25 bp, Homo sapien
cctgccgactccaggtcctacacac

SEQ ID NO: 3513082 - DNA, 25 bp, Homo sapien
acggcctcctctgctgacaaaaggg

SEQ ID NO: 3513083 - DNA, 25 bp, Homo sapien
caaaaggggcagaaatcatcactct

SEQ ID NO: 3513084 - DNA, 25 bp, Homo sapien
gggcagaaatcatcactctctcttt

SEQ ID NO: 3513085 - DNA, 25 bp, Homo sapien
tctttcctccccgacgaagggcagc

SEQ ID NO: 3513086 - DNA, 25 bp, Homo sapien
ccgtggcggaccgaggcacggctgt

SEQ ID NO: 3513087 - DNA, 25 bp, Homo sapien
cagggaaccgcaggcgtcccggagc

SEQ ID NO: 3513088 - DNA, 25 bp, Homo sapien
gaaggccaggccgttggcgcgggac

SEQ ID NO: 3513089 - DNA, 25 bp, Homo sapien
cacgcgggccggcagggaaggccag

SEQ ID NO: 3513090 - DNA, 25 bp, Homo sapien
agggagcgtggctcggaccgctagc

SEQ ID NO: 3513091 - DNA, 25 bp, Homo sapien
gcacggctgtgctcggacggcgagg

SEQ ID NO: 3513092 - DNA, 25 bp, Homo sapien
cgtccgagcacagccgtgcctcggt

SEQ ID NO: 3513093 - DNA, 25 bp, Homo sapien
tggtcccgcgccaacggcctggcct

SEQ ID NO: 3513094 - DNA, 25 bp, Homo sapien
gccgtgcctcggtccgccacggcct

SEQ ID NO: 3513095 - DNA, 25 bp, Homo sapien
ggcgctagcggtccgagccacgctc

SEQ ID NO: 3513096 - DNA, 25 bp, Homo sapien
gctccgggacgcctgcggttccctg

SEQ ID NO: 3513097 - DNA, 25 bp, Homo sapien
ctggccttccctgccggcccgcgtg

SEQ ID NO: 3513098 - DNA, 25 bp, Homo sapien
cagtgttggccaggccgccgtgcgg

SEQ ID NO: 3513099 - DNA, 25 bp, Homo sapien
tgttggccaggccgccgtgcggtca

SEQ ID NO: 3513100 - DNA, 25 bp, Homo sapien
caggccgccgtgcggtcatggccgg

SEQ ID NO: 3513101 - DNA, 25 bp, Homo sapien
ggccaggccgccgtgcggtcatggc

SEQ ID NO: 3513102 - DNA, 25 bp, Homo sapien
gtgttggccaggccgccgtgcggtc

SEQ ID NO: 3513103 - DNA, 25 bp, Homo sapien
agtgttggccaggccgccgtgcggt

SEQ ID NO: 3513104 - DNA, 25 bp, Homo sapien
tgaccgcacggcggcctggccaaca

SEQ ID NO: 3513105 - DNA, 25 bp, Homo sapien
ggccatgaccgcacggcggcctggc

SEQ ID NO: 3513106 - DNA, 25 bp, Homo sapien
ccgcacggcggcctggccaacactg

SEQ ID NO: 3513107 - DNA, 25 bp, Homo sapien
ccggccatgaccgcacggcggcctg

SEQ ID NO: 3513108 - DNA, 25 bp, Homo sapien
cggccatgaccgcacggcggcctgg

SEQ ID NO: 3513109 - DNA, 25 bp, Homo sapien
gccatgaccgcacggcggcctggcc

SEQ ID NO: 3513110 - DNA, 25 bp, Homo sapien
aaggaaaacgtcagtgttggccagg

SEQ ID NO: 3513111 - DNA, 25 bp, Homo sapien
aaaacgtcagtgttggccaggccgc

SEQ ID NO: 3513112 - DNA, 25 bp, Homo sapien
aacgtcagtgttggccaggccgccg

SEQ ID NO: 3513113 - DNA, 25 bp, Homo sapien
cagtgttggccaggccgccgtgcgg

SEQ ID NO: 3513114 - DNA, 25 bp, Homo sapien
ggaaaacgtcagtgttggccaggcc

SEQ ID NO: 3513115 - DNA, 25 bp, Homo sapien
ggccaggccgccgtgcggtcatggc

SEQ ID NO: 3513116 - DNA, 25 bp, Homo sapien
ccgcacggcggcctggccaacactg

SEQ ID NO: 3513117 - DNA, 25 bp, Homo sapien
gcggcctggccaacactgacgtttt

SEQ ID NO: 3513118 - DNA, 25 bp, Homo sapien
cctggccaacactgacgttttcctt

SEQ ID NO: 3513119 - DNA, 25 bp, Homo sapien
ggcctggccaacactgacgttttcc

SEQ ID NO: 3513120 - DNA, 25 bp, Homo sapien
cggcggcctggccaacactgacgtt

SEQ ID NO: 3513121 - DNA, 25 bp, Homo sapien
gccatgaccgcacggcggcctggcc

SEQ ID NO: 3513122 - DNA, 25 bp, Homo sapien
ctggaaagtcttggcttttgttctc

SEQ ID NO: 3513123 - DNA, 25 bp, Homo sapien
tctcttcctgttgctgacggagtag

SEQ ID NO: 3513124 - DNA, 25 bp, Homo sapien
cctggaaagtcttggcttttgttct

SEQ ID NO: 3513125 - DNA, 25 bp, Homo sapien
tctctcttcctgttgctgacggagt

SEQ ID NO: 3513126 - DNA, 25 bp, Homo sapien
atacctggaaagtcttggcttttgt

SEQ ID NO: 3513127 - DNA, 25 bp, Homo sapien
gaaagtcttggcttttgttctctct

SEQ ID NO: 3513128 - DNA, 25 bp, Homo sapien
ctactccgtcagcaacaggaagaga

SEQ ID NO: 3513129 - DNA, 25 bp, Homo sapien
actccgtcagcaacaggaagagaga

SEQ ID NO: 3513130 - DNA, 25 bp, Homo sapien
gagaacaaaagccaagactttccag

SEQ ID NO: 3513131 - DNA, 25 bp, Homo sapien
ggaagagagaacaaaagccaagact

SEQ ID NO: 3513132 - DNA, 25 bp, Homo sapien
agaacaaaagccaagactttccagg

SEQ ID NO: 3513133 - DNA, 25 bp, Homo sapien
acaaaagccaagactttccaggtat

SEQ ID NO: 3513134 - DNA, 25 bp, Homo sapien
gcttcttctcgagtggtacaaaatg

SEQ ID NO: 3513135 - DNA, 25 bp, Homo sapien
tggagcgctctaaaatggccgccgt

SEQ ID NO: 3513136 - DNA, 25 bp, Homo sapien
gtggtacaaaatggcggccgcaggc

SEQ ID NO: 3513137 - DNA, 25 bp, Homo sapien
cctggtcgcttcttctcgagtggta

SEQ ID NO: 3513138 - DNA, 25 bp, Homo sapien
aaaatggccgccgtccctggtcgct

SEQ ID NO: 3513139 - DNA, 25 bp, Homo sapien
gccgccgagtggagcgctctaaaat

SEQ ID NO: 3513140 - DNA, 25 bp, Homo sapien
attttagagcgctccactcggcggc

SEQ ID NO: 3513141 - DNA, 25 bp, Homo sapien
agcgaccagggacggcggccatttt

SEQ ID NO: 3513142 - DNA, 25 bp, Homo sapien
gacggcggccattttagagcgctcc

SEQ ID NO: 3513143 - DNA, 25 bp, Homo sapien
gcctgcggccgccattttgtaccac

SEQ ID NO: 3513144 - DNA, 25 bp, Homo sapien
cattttgtaccactcgagaagaagc

SEQ ID NO: 3513145 - DNA, 25 bp, Homo sapien
taccactcgagaagaagcgaccagg

SEQ ID NO: 3513146 - DNA, 25 bp, Homo sapien
atccccgacgaccggatcctgagga

SEQ ID NO: 3513147 - DNA, 25 bp, Homo sapien
tatccccgacgaccggatcctgagg

SEQ ID NO: 3513148 - DNA, 25 bp, Homo sapien
cccgacgaccggatcctgaggaggc

SEQ ID NO: 3513149 - DNA, 25 bp, Homo sapien
cctatccccgacgaccggatcctga

SEQ ID NO: 3513150 - DNA, 25 bp, Homo sapien
tccccgacgaccggatcctgaggag

SEQ ID NO: 3513151 - DNA, 25 bp, Homo sapien
ccccgacgaccggatcctgaggagg

SEQ ID NO: 3513152 - DNA, 25 bp, Homo sapien
tcctcaggatccggtcgtcggggat

SEQ ID NO: 3513153 - DNA, 25 bp, Homo sapien
tcaggatccggtcgtcggggatagg

SEQ ID NO: 3513154 - DNA, 25 bp, Homo sapien
ctcctcaggatccggtcgtcgggga

SEQ ID NO: 3513155 - DNA, 25 bp, Homo sapien
cctcaggatccggtcgtcggggata

SEQ ID NO: 3513156 - DNA, 25 bp, Homo sapien
gcctcctcaggatccggtcgtcggg

SEQ ID NO: 3513157 - DNA, 25 bp, Homo sapien
ctcaggatccggtcgtcggggatag

SEQ ID NO: 3513158 - DNA, 25 bp, Homo sapien
acgaccggatcctgaggaggcagct

SEQ ID NO: 3513159 - DNA, 25 bp, Homo sapien
tatccccgacgaccggatcctgagg

SEQ ID NO: 3513160 - DNA, 25 bp, Homo sapien
cccgacgaccggatcctgaggaggc

SEQ ID NO: 3513161 - DNA, 25 bp, Homo sapien
cagctgcggtggcagctgctgagtt

SEQ ID NO: 3513162 - DNA, 25 bp, Homo sapien
ccgacgaccggatcctgaggaggca

SEQ ID NO: 3513163 - DNA, 25 bp, Homo sapien
ccccgacgaccggatcctgaggagg

SEQ ID NO: 3513164 - DNA, 25 bp, Homo sapien
tgcctcctcaggatccggtcgtcgg

SEQ ID NO: 3513165 - DNA, 25 bp, Homo sapien
cgcagctgcctcctcaggatccggt

SEQ ID NO: 3513166 - DNA, 25 bp, Homo sapien
gaggaaggagtcggggacggcctca

SEQ ID NO: 3513167 - DNA, 25 bp, Homo sapien
agctgcctcctcaggatccggtcgt

SEQ ID NO: 3513168 - DNA, 25 bp, Homo sapien
aactcagcagctgccaccgcagctg

SEQ ID NO: 3513169 - DNA, 25 bp, Homo sapien
gcctcctcaggatccggtcgtcggg

SEQ ID NO: 3513170 - DNA, 25 bp, Homo sapien
gccagcagtgagtcggagctctatg

SEQ ID NO: 3513171 - DNA, 25 bp, Homo sapien
cgccagcagtgagtcggagctctat

SEQ ID NO: 3513172 - DNA, 25 bp, Homo sapien
aggtggcagcgggtaccgagtggcg

SEQ ID NO: 3513173 - DNA, 25 bp, Homo sapien
ccagcagtgagtcggagctctatgg

SEQ ID NO: 3513174 - DNA, 25 bp, Homo sapien
tgagtcggagctctatggaggtggc

SEQ ID NO: 3513175 - DNA, 25 bp, Homo sapien
cagcgggtaccgagtggcggctgca

SEQ ID NO: 3513176 - DNA, 25 bp, Homo sapien
tgcagccgccactcggtacccgctg

SEQ ID NO: 3513177 - DNA, 25 bp, Homo sapien
gccacctccatagagctccgactca

SEQ ID NO: 3513178 - DNA, 25 bp, Homo sapien
catagagctccgactcactgctggc

SEQ ID NO: 3513179 - DNA, 25 bp, Homo sapien
atagagctccgactcactgctggcg

SEQ ID NO: 3513180 - DNA, 25 bp, Homo sapien
ccatagagctccgactcactgctgg

SEQ ID NO: 3513181 - DNA, 25 bp, Homo sapien
acctccatagagctccgactcactg

SEQ ID NO: 3513182 - DNA, 25 bp, Homo sapien
ccaagagtgataagttcggcttcag

SEQ ID NO: 3513183 - DNA, 25 bp, Homo sapien
tgccccaagagtgataagttcggct

SEQ ID NO: 3513184 - DNA, 25 bp, Homo sapien
tcggctgccccaagagtgataagtt

SEQ ID NO: 3513185 - DNA, 25 bp, Homo sapien
gctgccccaagagtgataagttcgg

SEQ ID NO: 3513186 - DNA, 25 bp, Homo sapien
gttcggctgccccaagagtgataag

SEQ ID NO: 3513187 - DNA, 25 bp, Homo sapien
ccccaagagtgataagttcggcttc

SEQ ID NO: 3513188 - DNA, 25 bp, Homo sapien
cttatcactcttggggcagccgaac

SEQ ID NO: 3513189 - DNA, 25 bp, Homo sapien
tgaagccgaacttatcactcttggg

SEQ ID NO: 3513190 - DNA, 25 bp, Homo sapien
gaacttatcactcttggggcagccg

SEQ ID NO: 3513191 - DNA, 25 bp, Homo sapien
ctgaagccgaacttatcactcttgg

SEQ ID NO: 3513192 - DNA, 25 bp, Homo sapien
acttatcactcttggggcagccgaa

SEQ ID NO: 3513193 - DNA, 25 bp, Homo sapien
aacttatcactcttggggcagccga

SEQ ID NO: 3513194 - DNA, 25 bp, Homo sapien
tcagcctcagagacttcgcgaatat

SEQ ID NO: 3513195 - DNA, 25 bp, Homo sapien
tgattgggcggcgaaggagccattc

SEQ ID NO: 3513196 - DNA, 25 bp, Homo sapien
attggtggcagacggcaaccgggcc

SEQ ID NO: 3513197 - DNA, 25 bp, Homo sapien
tcctcgctgccctgcgcggattggt

SEQ ID NO: 3513198 - DNA, 25 bp, Homo sapien
gagacttcgcgaatatggctttgcg

SEQ ID NO: 3513199 - DNA, 25 bp, Homo sapien
cgaatatggctttgcgcactgcggc

SEQ ID NO: 3513200 - DNA, 25 bp, Homo sapien
aatcagcggcccggttgccgtctgc

SEQ ID NO: 3513201 - DNA, 25 bp, Homo sapien
catattcgcgaagtctctgaggctg

SEQ ID NO: 3513202 - DNA, 25 bp, Homo sapien
gccgcagtgcgcaaagccatattcg

SEQ ID NO: 3513203 - DNA, 25 bp, Homo sapien
gcaaagccatattcgcgaagtctct

SEQ ID NO: 3513204 - DNA, 25 bp, Homo sapien
gggctgagctcggttgcggcgcagc

SEQ ID NO: 3513205 - DNA, 25 bp, Homo sapien
accaatccgcgcagggcagcgagga

SEQ ID NO: 3513206 - DNA, 25 bp, Homo sapien
tctccggctttacgcacgcaaccct

SEQ ID NO: 3513207 - DNA, 25 bp, Homo sapien
atggactcagtgaacaaagggactg

SEQ ID NO: 3513208 - DNA, 25 bp, Homo sapien
ggcatatggactcagtgaacaaagg

SEQ ID NO: 3513209 - DNA, 25 bp, Homo sapien
tatggactcagtgaacaaagggact

SEQ ID NO: 3513210 - DNA, 25 bp, Homo sapien
cacgccaacgcagactcaaaagggc

SEQ ID NO: 3513211 - DNA, 25 bp, Homo sapien
tttacgcacgcaaccctcatctcga

SEQ ID NO: 3513212 - DNA, 25 bp, Homo sapien
ctgtcgagatgagggttgcgtgcgt

SEQ ID NO: 3513213 - DNA, 25 bp, Homo sapien
cctttgttcactgagtccatatgcc

SEQ ID NO: 3513214 - DNA, 25 bp, Homo sapien
ccttttgagtctgcgttggcgtggc

SEQ ID NO: 3513215 - DNA, 25 bp, Homo sapien
agggttgcgtgcgtaaagccggaga

SEQ ID NO: 3513216 - DNA, 25 bp, Homo sapien
cagtccctttgttcactgagtccat

SEQ ID NO: 3513217 - DNA, 25 bp, Homo sapien
gcccttttgagtctgcgttggcgtg

SEQ ID NO: 3513218 - DNA, 25 bp, Homo sapien
gaaaaggggatgatacaactggagc

SEQ ID NO: 3513219 - DNA, 25 bp, Homo sapien
tcttcccatattcccggtgagaaaa

SEQ ID NO: 3513220 - DNA, 25 bp, Homo sapien
catattcccggtgagaaaacgaggt

SEQ ID NO: 3513221 - DNA, 25 bp, Homo sapien
gggaaaaggggatgatacaactgga

SEQ ID NO: 3513222 - DNA, 25 bp, Homo sapien
cccatattcccggtgagaaaacgag

SEQ ID NO: 3513223 - DNA, 25 bp, Homo sapien
ccatattcccggtgagaaaacgagg

SEQ ID NO: 3513224 - DNA, 25 bp, Homo sapien
ttttctcaccgggaatatgggaaga

SEQ ID NO: 3513225 - DNA, 25 bp, Homo sapien
ctcgttttctcaccgggaatatggg

SEQ ID NO: 3513226 - DNA, 25 bp, Homo sapien
tccagttgtatcatccccttttccc

SEQ ID NO: 3513227 - DNA, 25 bp, Homo sapien
acctcgttttctcaccgggaatatg

SEQ ID NO: 3513228 - DNA, 25 bp, Homo sapien
gctccagttgtatcatccccttttc

SEQ ID NO: 3513229 - DNA, 25 bp, Homo sapien
cctcgttttctcaccgggaatatgg

SEQ ID NO: 3513230 - DNA, 25 bp, Homo sapien
actcgccacgcacagggttcggggg

SEQ ID NO: 3513231 - DNA, 25 bp, Homo sapien
tgctcactcgccacgcacagggttc

SEQ ID NO: 3513232 - DNA, 25 bp, Homo sapien
cactcgccacgcacagggttcgggg

SEQ ID NO: 3513233 - DNA, 25 bp, Homo sapien
tcactcgccacgcacagggttcggg

SEQ ID NO: 3513234 - DNA, 25 bp, Homo sapien
atgctcactcgccacgcacagggtt

SEQ ID NO: 3513235 - DNA, 25 bp, Homo sapien
tcgccacgcacagggttcgggggag

SEQ ID NO: 3513236 - DNA, 25 bp, Homo sapien
gaaccctgtgcgtggcgagtgagca

SEQ ID NO: 3513237 - DNA, 25 bp, Homo sapien
ctcccccgaaccctgtgcgtggcga

SEQ ID NO: 3513238 - DNA, 25 bp, Homo sapien
ccccgaaccctgtgcgtggcgagtg

SEQ ID NO: 3513239 - DNA, 25 bp, Homo sapien
cccgaaccctgtgcgtggcgagtga

SEQ ID NO: 3513240 - DNA, 25 bp, Homo sapien
aaccctgtgcgtggcgagtgagcat

SEQ ID NO: 3513241 - DNA, 25 bp, Homo sapien
cgaaccctgtgcgtggcgagtgagc

SEQ ID NO: 3513242 - DNA, 25 bp, Homo sapien
agaggccaggcacgcgagggcagcc

SEQ ID NO: 3513243 - DNA, 25 bp, Homo sapien
cagctccaaggggcgccaagaaaag

SEQ ID NO: 3513244 - DNA, 25 bp, Homo sapien
aggcctcaacccgaagggctcagcc

SEQ ID NO: 3513245 - DNA, 25 bp, Homo sapien
gccaggcacgcgagggcagccacag

SEQ ID NO: 3513246 - DNA, 25 bp, Homo sapien
gctccaggcctcaacccgaagggct

SEQ ID NO: 3513247 - DNA, 25 bp, Homo sapien
agccgggtagtgtcccggcgctgcg

SEQ ID NO: 3513248 - DNA, 25 bp, Homo sapien
gcccttcgggttgaggcctggagcc

SEQ ID NO: 3513249 - DNA, 25 bp, Homo sapien
tgagcccttcgggttgaggcctgga

SEQ ID NO: 3513250 - DNA, 25 bp, Homo sapien
ctgtggctgccctcgcgtgcctggc

SEQ ID NO: 3513251 - DNA, 25 bp, Homo sapien
cgcagcgccgggacactacccggct

SEQ ID NO: 3513252 - DNA, 25 bp, Homo sapien
cttttcttggcgccccttggagctg

SEQ ID NO: 3513253 - DNA, 25 bp, Homo sapien
gggctgagcccttcgggttgaggcc

SEQ ID NO: 3513254 - DNA, 25 bp, Homo sapien
ccgaagggctcagccccgggagagg

SEQ ID NO: 3513255 - DNA, 25 bp, Homo sapien
agaggccaggcacgcgagggcagcc

SEQ ID NO: 3513256 - DNA, 25 bp, Homo sapien
cgcgagggcagccacagctccaagg

SEQ ID NO: 3513257 - DNA, 25 bp, Homo sapien
ctgccgaagccgaggacctggagcc

SEQ ID NO: 3513258 - DNA, 25 bp, Homo sapien
gctccaggcctcaacccgaagggct

SEQ ID NO: 3513259 - DNA, 25 bp, Homo sapien
agccgggtagtgtcccggcgctgcg

SEQ ID NO: 3513260 - DNA, 25 bp, Homo sapien
ctttggcatccgggcgcacgtctcg

SEQ ID NO: 3513261 - DNA, 25 bp, Homo sapien
tttggcatccgggcgcacgtctcgc

SEQ ID NO: 3513262 - DNA, 25 bp, Homo sapien
tcccctttggcatccgggcgcacgt

SEQ ID NO: 3513263 - DNA, 25 bp, Homo sapien
catccgggcgcacgtctcgcctcct

SEQ ID NO: 3513264 - DNA, 25 bp, Homo sapien
ggcatccgggcgcacgtctcgcctc

SEQ ID NO: 3513265 - DNA, 25 bp, Homo sapien
gctcccctttggcatccgggcgcac

SEQ ID NO: 3513266 - DNA, 25 bp, Homo sapien
gaggcgagacgtgcgcccggatgcc

SEQ ID NO: 3513267 - DNA, 25 bp, Homo sapien
gtgcgcccggatgccaaaggggagc

SEQ ID NO: 3513268 - DNA, 25 bp, Homo sapien
ggaggcgagacgtgcgcccggatgc

SEQ ID NO: 3513269 - DNA, 25 bp, Homo sapien
cgagacgtgcgcccggatgccaaag

SEQ ID NO: 3513270 - DNA, 25 bp, Homo sapien
gcgagacgtgcgcccggatgccaaa

SEQ ID NO: 3513271 - DNA, 25 bp, Homo sapien
aggaggcgagacgtgcgcccggatg

SEQ ID NO: 3513272 - DNA, 25 bp, Homo sapien
atgaagctcccctttggcatccggg

SEQ ID NO: 3513273 - DNA, 25 bp, Homo sapien
tttggcatccgggcgcacgtctcgc

SEQ ID NO: 3513274 - DNA, 25 bp, Homo sapien
tcccctttggcatccgggcgcacgt

SEQ ID NO: 3513275 - DNA, 25 bp, Homo sapien
gaagctcccctttggcatccgggcg

SEQ ID NO: 3513276 - DNA, 25 bp, Homo sapien
catccgggcgcacgtctcgcctcct

SEQ ID NO: 3513277 - DNA, 25 bp, Homo sapien
tcgcctcctccccactactttctgg

SEQ ID NO: 3513278 - DNA, 25 bp, Homo sapien
gaggcgagacgtgcgcccggatgcc

SEQ ID NO: 3513279 - DNA, 25 bp, Homo sapien
ccagaaagtagtggggaggaggcga

SEQ ID NO: 3513280 - DNA, 25 bp, Homo sapien
ggaggaggcgagacgtgcgcccgga

SEQ ID NO: 3513281 - DNA, 25 bp, Homo sapien
gcgagacgtgcgcccggatgccaaa

SEQ ID NO: 3513282 - DNA, 25 bp, Homo sapien
cccggatgccaaaggggagcttcat

SEQ ID NO: 3513283 - DNA, 25 bp, Homo sapien
aggaggcgagacgtgcgcccggatg

SEQ ID NO: 3513284 - DNA, 25 bp, Homo sapien
tacagtgtatagtcaaaggcaagaa

SEQ ID NO: 3513285 - DNA, 25 bp, Homo sapien
tcttggtattagagcacctggtcct

SEQ ID NO: 3513286 - DNA, 25 bp, Homo sapien
gatgtgtcaaaacagctcttggtat

SEQ ID NO: 3513287 - DNA, 25 bp, Homo sapien
gagtaccttattccatcgtttgcga

SEQ ID NO: 3513288 - DNA, 25 bp, Homo sapien
tccaggctgcacctaagaccagata

SEQ ID NO: 3513289 - DNA, 25 bp, Homo sapien
cagttattagaacccaggcatccca

SEQ ID NO: 3513290 - DNA, 25 bp, Homo sapien
ccagttaggctggtattgctgtccc

SEQ ID NO: 3513291 - DNA, 25 bp, Homo sapien
tagattttggccttaagcaactggc

SEQ ID NO: 3513292 - DNA, 25 bp, Homo sapien
aggcattggcaagggtgcactttct

SEQ ID NO: 3513293 - DNA, 25 bp, Homo sapien
caattcgttaatatgtggcagcatc

SEQ ID NO: 3513294 - DNA, 25 bp, Homo sapien
gaggctcactacaaactatttggag

SEQ ID NO: 3513295 - DNA, 25 bp, Homo sapien
tactttcccaggtacatcaagctcc

SEQ ID NO: 3513296 - DNA, 25 bp, Homo sapien
tacattgggatagctgacataaacc

SEQ ID NO: 3513297 - DNA, 25 bp, Homo sapien
tgctgtgcactgctagaaatagggt

SEQ ID NO: 3513298 - DNA, 25 bp, Homo sapien
caggactataccaggcaaaccaggt

SEQ ID NO: 3513299 - DNA, 25 bp, Homo sapien
taatgaactagaccaagaccttgcc

SEQ ID NO: 3513300 - DNA, 25 bp, Homo sapien
ggcccattccagagcaaaattttct

SEQ ID NO: 3513301 - DNA, 25 bp, Homo sapien
ttctatactagataggctagagaca

SEQ ID NO: 3513302 - DNA, 25 bp, Homo sapien
aaattttctatactagataggctag

SEQ ID NO: 3513303 - DNA, 25 bp, Homo sapien
gcccattccagagcaaaattttcta

SEQ ID NO: 3513304 - DNA, 25 bp, Homo sapien
aagaggacaatctttggggggctga

SEQ ID NO: 3513305 - DNA, 25 bp, Homo sapien
acctgtgactggtgtctagcagtgt

SEQ ID NO: 3513306 - DNA, 25 bp, Homo sapien
cagacctgtgactggtgtctagcag

SEQ ID NO: 3513307 - DNA, 25 bp, Homo sapien
gagagggaaagaggacaatctttgg

SEQ ID NO: 3513308 - DNA, 25 bp, Homo sapien
tctgtgctgattgatggttcttgtg

SEQ ID NO: 3513309 - DNA, 25 bp, Homo sapien
cttctgtgctgattgatggttcttg

SEQ ID NO: 3513310 - DNA, 25 bp, Homo sapien
attgcttgcttgttgctagggagaa

SEQ ID NO: 3513311 - DNA, 25 bp, Homo sapien
agtcttctgtgctgattgatggttc

SEQ ID NO: 3513312 - DNA, 25 bp, Homo sapien
aatgtcacccaatgctgtctcggag

SEQ ID NO: 3513313 - DNA, 25 bp, Homo sapien
gctggatctggctaacaactgttga

SEQ ID NO: 3513314 - DNA, 25 bp, Homo sapien
tttctacagtggagcctagggcctc

SEQ ID NO: 3513315 - DNA, 25 bp, Homo sapien
aatcttggccctagagcactgcaca

SEQ ID NO: 3513316 - DNA, 25 bp, Homo sapien
ttctgagtagccagggccacaggta

SEQ ID NO: 3513317 - DNA, 25 bp, Homo sapien
caccacacccaaactgagaatatgc

SEQ ID NO: 3513318 - DNA, 25 bp, Homo sapien
cgccaccacacccaaactgagaata

SEQ ID NO: 3513319 - DNA, 25 bp, Homo sapien
tctgagtagccagggccacaggtac

SEQ ID NO: 3513320 - DNA, 25 bp, Homo sapien
caatttatgtatcagaacaagggcc

SEQ ID NO: 3513321 - DNA, 25 bp, Homo sapien
catgtgagggtacatcaagaaggca

SEQ ID NO: 3513322 - DNA, 25 bp, Homo sapien
aattatctcatgaaagaggcccgag

SEQ ID NO: 3513323 - DNA, 25 bp, Homo sapien
gaggcccgaggtgcttgtttgctcc

SEQ ID NO: 3513324 - DNA, 25 bp, Homo sapien
tctctgttatgcaactgaacacgga

SEQ ID NO: 3513325 - DNA, 25 bp, Homo sapien
caccgtgctagtccagtgggagctt

SEQ ID NO: 3513326 - DNA, 25 bp, Homo sapien
tgttccaaggagttggacctacagc

SEQ ID NO: 3513327 - DNA, 25 bp, Homo sapien
tgcttaaacttgaccagattctctg

SEQ ID NO: 3513328 - DNA, 25 bp, Homo sapien
ctgaatgtcccatgcctacagaagc

SEQ ID NO: 3513329 - DNA, 25 bp, Homo sapien
taaaaatggtatcctgtgctcccga

SEQ ID NO: 3513330 - DNA, 25 bp, Homo sapien
cagcgactgaaaaagagtagggcta

SEQ ID NO: 3513331 - DNA, 25 bp, Homo sapien
gatctctgattgtggaagttagggc

SEQ ID NO: 3513332 - DNA, 25 bp, Homo sapien
atgattcaattatctccacctggtc

SEQ ID NO: 3513333 - DNA, 25 bp, Homo sapien
caagaacagcatgtaggaaactgcc

SEQ ID NO: 3513334 - DNA, 25 bp, Homo sapien
cacaagaacagcatgtaggaaactg

SEQ ID NO: 3513335 - DNA, 25 bp, Homo sapien
gattcaattatctccacctggtccc

SEQ ID NO: 3513336 - DNA, 25 bp, Homo sapien
ctgttcctgcatgagtttactaaga

SEQ ID NO: 3513337 - DNA, 25 bp, Homo sapien
atggccaccagctccatctacgttc

SEQ ID NO: 3513338 - DNA, 25 bp, Homo sapien
ctgtaagtgggaacgtgcagtattt

SEQ ID NO: 3513339 - DNA, 25 bp, Homo sapien
atgagtttactaagaataatggcca

SEQ ID NO: 3513340 - DNA, 25 bp, Homo sapien
atgggctttccactttcagtgatgg

SEQ ID NO: 3513341 - DNA, 25 bp, Homo sapien
ccactttcagtgatggtgagggatc

SEQ ID NO: 3513342 - DNA, 25 bp, Homo sapien
tgttggcactgaaatggccttcccc

SEQ ID NO: 3513343 - DNA, 25 bp, Homo sapien
ctctggggataaaggttgcatatgt

SEQ ID NO: 3513344 - DNA, 25 bp, Homo sapien
tccagctgttccattttgtgactca

SEQ ID NO: 3513345 - DNA, 25 bp, Homo sapien
tcttcagaactcttgaacagctttt

SEQ ID NO: 3513346 - DNA, 25 bp, Homo sapien
ccagctgttccattttgtgactcag

SEQ ID NO: 3513347 - DNA, 25 bp, Homo sapien
ttcagaactcttgaacagctttttg

SEQ ID NO: 3513348 - DNA, 25 bp, Homo sapien
gacagcagggtctcagataatggac

SEQ ID NO: 3513349 - DNA, 25 bp, Homo sapien
tacggtcagcattaaaaaggtctag

SEQ ID NO: 3513350 - DNA, 25 bp, Homo sapien
taaaagtccattctcactagctgtg

SEQ ID NO: 3513351 - DNA, 25 bp, Homo sapien
ctctttgggattcagtcacggtaac

SEQ ID NO: 3513352 - DNA, 25 bp, Homo sapien
gacattcctcgatgacctctgcata

SEQ ID NO: 3513353 - DNA, 25 bp, Homo sapien
cctctgcataatggccacactgaac

SEQ ID NO: 3513354 - DNA, 25 bp, Homo sapien
gggtagcagtgtgtacacctgctac

SEQ ID NO: 3513355 - DNA, 25 bp, Homo sapien
tccctcaatagttcagcctgaatca

SEQ ID NO: 3513356 - DNA, 25 bp, Homo sapien
tagccttcttaaaatctaaatagta

SEQ ID NO: 3513357 - DNA, 25 bp, Homo sapien
aaatagtataaaaaaatggaatcat

SEQ ID NO: 3513358 - DNA, 25 bp, Homo sapien
atagtataaaaaaatggaatcattt

SEQ ID NO: 3513359 - DNA, 25 bp, Homo sapien
taaatagtataaaaaaatggaatca

SEQ ID NO: 3513360 - DNA, 25 bp, Homo sapien
ttggttatcatgagacatgcaaact

SEQ ID NO: 3513361 - DNA, 25 bp, Homo sapien
tacatttggttatcatgagacatgc

SEQ ID NO: 3513362 - DNA, 25 bp, Homo sapien
tcttacatttggttatcatgagaca

SEQ ID NO: 3513363 - DNA, 25 bp, Homo sapien
tcatcttacatttggttatcatgag

SEQ ID NO: 3513364 - DNA, 25 bp, Homo sapien
tcggattcgcatatgaggtgcagca

SEQ ID NO: 3513365 - DNA, 25 bp, Homo sapien
ttttaacagagtagcgcgcaaaccc

SEQ ID NO: 3513366 - DNA, 25 bp, Homo sapien
tgcagcgtaatatgaaaaccccgtt

SEQ ID NO: 3513367 - DNA, 25 bp, Homo sapien
tcaatcaggctctcatagtcccgtg

SEQ ID NO: 3513368 - DNA, 25 bp, Homo sapien
gactactggtgctttcgggagccac

SEQ ID NO: 3513369 - DNA, 25 bp, Homo sapien
tttgcaaagattcacacaggagtag

SEQ ID NO: 3513370 - DNA, 25 bp, Homo sapien
tcttcaccggtagcattactttgca

SEQ ID NO: 3513371 - DNA, 25 bp, Homo sapien
gatgatttgtactgcctggtctagc

SEQ ID NO: 3513372 - DNA, 25 bp, Homo sapien
taatacacactgagcatgaggtgca

SEQ ID NO: 3513373 - DNA, 25 bp, Homo sapien
ttaattcgacgtgcaacagtactgt

SEQ ID NO: 3513374 - DNA, 25 bp, Homo sapien
tctagttgcagtgaaaacccatcgc

SEQ ID NO: 3513375 - DNA, 25 bp, Homo sapien
tgtcagcagctagatccttaattcg

SEQ ID NO: 3513376 - DNA, 25 bp, Homo sapien
gattcagacacaatctgataacaga

SEQ ID NO: 3513377 - DNA, 25 bp, Homo sapien
tgtttcagcaacagatccatgggca

SEQ ID NO: 3513378 - DNA, 25 bp, Homo sapien
catgggcaatgagtttgtggtacaa

SEQ ID NO: 3513379 - DNA, 25 bp, Homo sapien
tttagaaactgaaggttgcaactgc

SEQ ID NO: 3513380 - DNA, 25 bp, Homo sapien
gaatagacattgagtatcgcaaatg

SEQ ID NO: 3513381 - DNA, 25 bp, Homo sapien
cattgagtatcgcaaatgtgttgaa

SEQ ID NO: 3513382 - DNA, 25 bp, Homo sapien
tttagaatagacattgagtatcgca

SEQ ID NO: 3513383 - DNA, 25 bp, Homo sapien
tcgcaaatgtgttgaaattataaga

SEQ ID NO: 3513384 - DNA, 25 bp, Homo sapien
taaatgctgcctattcatcaatgcg

SEQ ID NO: 3513385 - DNA, 25 bp, Homo sapien
cgttcatgtatcaggtgatctctca

SEQ ID NO: 3513386 - DNA, 25 bp, Homo sapien
gcagatggaacatcatacgttcatg

SEQ ID NO: 3513387 - DNA, 25 bp, Homo sapien
tctctcatgcgacttcctggtgctc

SEQ ID NO: 3513388 - DNA, 25 bp, Homo sapien
aaaggtagattatcacataaaaata

SEQ ID NO: 3513389 - DNA, 25 bp, Homo sapien
ttaaaggtagattatcacataaaaa

SEQ ID NO: 3513390 - DNA, 25 bp, Homo sapien
ggtagattatcacataaaaataaaa

SEQ ID NO: 3513391 - DNA, 25 bp, Homo sapien
cttaaaggtagattatcacataaaa

SEQ ID NO: 3513392 - DNA, 25 bp, Homo sapien
tacaacaggtgacgacttaaccagg

SEQ ID NO: 3513393 - DNA, 25 bp, Homo sapien
ccttcagggctagcaacaattctga

SEQ ID NO: 3513394 - DNA, 25 bp, Homo sapien
tgtagttgtaacatgacagcagcca

SEQ ID NO: 3513395 - DNA, 25 bp, Homo sapien
ttatcagccctgtctcatggtatgt

SEQ ID NO: 3513396 - DNA, 25 bp, Homo sapien
caaggcatacaaattatgtctgtcc

SEQ ID NO: 3513397 - DNA, 25 bp, Homo sapien
agtcaaaatggttctcctattaagg

SEQ ID NO: 3513398 - DNA, 25 bp, Homo sapien
tactattaactctataaatcaaggc

SEQ ID NO: 3513399 - DNA, 25 bp, Homo sapien
taaactttataacctggctatagag

SEQ ID NO: 3513400 - DNA, 25 bp, Homo sapien
ctgaaataaggtgttctcctttctg

SEQ ID NO: 3513401 - DNA, 25 bp, Homo sapien
gaaataaggtgttctcctttctgta

SEQ ID NO: 3513402 - DNA, 25 bp, Homo sapien
ccaccttggcagcttgaaatgcact

SEQ ID NO: 3513403 - DNA, 25 bp, Homo sapien
tctctccaccttggcagcttgaaat

SEQ ID NO: 3513404 - DNA, 25 bp, Homo sapien
tggattttgcaacggagaactctgt

SEQ ID NO: 3513405 - DNA, 25 bp, Homo sapien
tggactgaaagagaagacgcctagc

SEQ ID NO: 3513406 - DNA, 25 bp, Homo sapien
gatcaggatccctctcgttgccaga

SEQ ID NO: 3513407 - DNA, 25 bp, Homo sapien
tataactgccagaaagtcgagggtc

SEQ ID NO: 3513408 - DNA, 25 bp, Homo sapien
tcgaggacaaagaatctggactcct

SEQ ID NO: 3513409 - DNA, 25 bp, Homo sapien
tccccgaatttctcgaggacaaaga

SEQ ID NO: 3513410 - DNA, 25 bp, Homo sapien
tgtttccccgaatttctcgaggaca

SEQ ID NO: 3513411 - DNA, 25 bp, Homo sapien
tggactcctttgagagtaaagtttc

SEQ ID NO: 3513412 - DNA, 25 bp, Homo sapien
ccaaaaaggtgggaacagatgctcc

SEQ ID NO: 3513413 - DNA, 25 bp, Homo sapien
ttccggctgggaacaataccctcag

SEQ ID NO: 3513414 - DNA, 25 bp, Homo sapien
gatctgagtgcaggccagccaaaaa

SEQ ID NO: 3513415 - DNA, 25 bp, Homo sapien
gcctgcgctaacgaccacatgaaaa

SEQ ID NO: 3513416 - DNA, 25 bp, Homo sapien
tctccatcagcgatggagagaacgg

SEQ ID NO: 3513417 - DNA, 25 bp, Homo sapien
catcagcgatggagagaacggattt

SEQ ID NO: 3513418 - DNA, 25 bp, Homo sapien
tccatcagcgatggagagaacggat

SEQ ID NO: 3513419 - DNA, 25 bp, Homo sapien
ccacagcagagcccgcgaccgccat

SEQ ID NO: 3513420 - DNA, 25 bp, Homo sapien
aggaagcggccatttcagagcgcac

SEQ ID NO: 3513421 - DNA, 25 bp, Homo sapien
cgcttagccgcggcggcggctctgc

SEQ ID NO: 3513422 - DNA, 25 bp, Homo sapien
tagccgcggcggcggctctgcttct

SEQ ID NO: 3513423 - DNA, 25 bp, Homo sapien
ccgcggcggcggctctgcttctcac

SEQ ID NO: 3513424 - DNA, 25 bp, Homo sapien
cttagccgcggcggcggctctgctt

SEQ ID NO: 3513425 - DNA, 25 bp, Homo sapien
agggtcaacagccagtcgtcgtgga

SEQ ID NO: 3513426 - DNA, 25 bp, Homo sapien
cttcaccgaggcctgaacagggtca

SEQ ID NO: 3513427 - DNA, 25 bp, Homo sapien
caccgaggcctgaacagggtcaaca

SEQ ID NO: 3513428 - DNA, 25 bp, Homo sapien
cgaggcctgaacagggtcaacagcc

SEQ ID NO: 3513429 - DNA, 25 bp, Homo sapien
catagagatccgattcgcggctggc

SEQ ID NO: 3513430 - DNA, 25 bp, Homo sapien
tggaatctaggaagaaaactcgccc

SEQ ID NO: 3513431 - DNA, 25 bp, Homo sapien
cagcggccgtgctacctaggtgata

SEQ ID NO: 3513432 - DNA, 25 bp, Homo sapien
gcgcggtcgccggtctgaagataaa

SEQ ID NO: 3513433 - DNA, 25 bp, Homo sapien
gcaccgaacgtttgcctgcagggaa

SEQ ID NO: 3513434 - DNA, 25 bp, Homo sapien
tgaaatactctttttgtgggctgca

SEQ ID NO: 3513435 - DNA, 25 bp, Homo sapien
caaaggctgcgggttgtgtgctttc

SEQ ID NO: 3513436 - DNA, 25 bp, Homo sapien
actggatagggaaagcggcaccgca

SEQ ID NO: 3513437 - DNA, 25 bp, Homo sapien
gatgtaatccacagtaatgtctccc

SEQ ID NO: 3513438 - DNA, 25 bp, Homo sapien
tatttgtaattgagacttgccagag

SEQ ID NO: 3513439 - DNA, 25 bp, Homo sapien
agacacttagcctgccaacttgatg

SEQ ID NO: 3513440 - DNA, 25 bp, Homo sapien
cgttcttagaataaatcctactggg

SEQ ID NO: 3513441 - DNA, 25 bp, Homo sapien
gccagaaggtgctttaacaccaaat

SEQ ID NO: 3513442 - DNA, 25 bp, Homo sapien
gactccgcctctcgaagtgatggga

SEQ ID NO: 3513443 - DNA, 25 bp, Homo sapien
attgagcatgaacaccatctgtgcg

SEQ ID NO: 3513444 - DNA, 25 bp, Homo sapien
ctagttgtcctcaaactgtttctca

SEQ ID NO: 3513445 - DNA, 25 bp, Homo sapien
tctgccaataggggtcactagagag

SEQ ID NO: 3513446 - DNA, 25 bp, Homo sapien
tgccaataggggtcactagagagag

SEQ ID NO: 3513447 - DNA, 25 bp, Homo sapien
gttctgccaataggggtcactagag

SEQ ID NO: 3513448 - DNA, 25 bp, Homo sapien
gccaataggggtcactagagagaga

SEQ ID NO: 3513449 - DNA, 25 bp, Homo sapien
tattatttctagatgacttttggtt

SEQ ID NO: 3513450 - DNA, 25 bp, Homo sapien
gcttttcagccctctaatgcctgta

SEQ ID NO: 3513451 - DNA, 25 bp, Homo sapien
cttctaagttctggttacttcatat

SEQ ID NO: 3513452 - DNA, 25 bp, Homo sapien
tgtacccgctcagagattatccaca

SEQ ID NO: 3513453 - DNA, 25 bp, Homo sapien
ggccttatgattatctcttttgttc

SEQ ID NO: 3513454 - DNA, 25 bp, Homo sapien
tggtctctccattcggggtgcctgg

SEQ ID NO: 3513455 - DNA, 25 bp, Homo sapien
gcagtcaggccttatgattatctct

SEQ ID NO: 3513456 - DNA, 25 bp, Homo sapien
tcaggccttatgattatctcttttg

SEQ ID NO: 3513457 - DNA, 25 bp, Homo sapien
tcgaagcctgtaggacgatgcctgg

SEQ ID NO: 3513458 - DNA, 25 bp, Homo sapien
gatgcctggcgctcaatagcaaatg

SEQ ID NO: 3513459 - DNA, 25 bp, Homo sapien
aagtcctgctgggtgaacgtcttca

SEQ ID NO: 3513460 - DNA, 25 bp, Homo sapien
gagtgaaaatccctatctgcgtgca

SEQ ID NO: 3513461 - DNA, 25 bp, Homo sapien
ggaaccggagccagaaatctgagaa

SEQ ID NO: 3513462 - DNA, 25 bp, Homo sapien
tatggcagctgggaaccggagccag

SEQ ID NO: 3513463 - DNA, 25 bp, Homo sapien
gaagcctaaagggtcaccaaagtga

SEQ ID NO: 3513464 - DNA, 25 bp, Homo sapien
tggcagaagcaagttgagtcagaaa

SEQ ID NO: 3513465 - DNA, 25 bp, Homo sapien
caatgtgtcagaagcatggcatgct

SEQ ID NO: 3513466 - DNA, 25 bp, Homo sapien
caaagcagcgaggttacttgagttc

SEQ ID NO: 3513467 - DNA, 25 bp, Homo sapien
gctgagcagcaactctagagagaag

SEQ ID NO: 3513468 - DNA, 25 bp, Homo sapien
gagtatttagagagcagtcactgga

SEQ ID NO: 3513469 - DNA, 25 bp, Homo sapien
cgccgctcctccgtcagaagggcgg

SEQ ID NO: 3513470 - DNA, 25 bp, Homo sapien
gcagcgggttttgcccgccgctcct

SEQ ID NO: 3513471 - DNA, 25 bp, Homo sapien
aatgaattccctgcgggtccggcat

SEQ ID NO: 3513472 - DNA, 25 bp, Homo sapien
gctcctccgtcagaagggcggccag

SEQ ID NO: 3513473 - DNA, 25 bp, Homo sapien
ctcggtctccgctcggggacgcggt

SEQ ID NO: 3513474 - DNA, 25 bp, Homo sapien
agtgcctcggtctccgctcggggac

SEQ ID NO: 3513475 - DNA, 25 bp, Homo sapien
tctccgctcggggacgcggtgattt

SEQ ID NO: 3513476 - DNA, 25 bp, Homo sapien
tccgctcggggacgcggtgattttc

SEQ ID NO: 3513477 - DNA, 25 bp, Homo sapien
ggcaggttgggaaaggggctcatgc

SEQ ID NO: 3513478 - DNA, 25 bp, Homo sapien
caggttgggaaaggggctcatgccc

SEQ ID NO: 3513479 - DNA, 25 bp, Homo sapien
tgggcaggttgggaaaggggctcat

SEQ ID NO: 3513480 - DNA, 25 bp, Homo sapien
gtgggcaggttgggaaaggggctca

SEQ ID NO: 3513481 - DNA, 25 bp, Homo sapien
aggcctctgagcagcacgttcctgg

SEQ ID NO: 3513482 - DNA, 25 bp, Homo sapien
ctttcctcagtcaataaggaggcca

SEQ ID NO: 3513483 - DNA, 25 bp, Homo sapien
tggatgctggttgaggagctctggc

SEQ ID NO: 3513484 - DNA, 25 bp, Homo sapien
cgttcctggagcagtccaagctctg

SEQ ID NO: 3513485 - DNA, 25 bp, Homo sapien
ctacactcaagctgggtagagagca

SEQ ID NO: 3513486 - DNA, 25 bp, Homo sapien
gcacatgcacagtgctacactcaag

SEQ ID NO: 3513487 - DNA, 25 bp, Homo sapien
tggtttaggacttggtatttcacag

SEQ ID NO: 3513488 - DNA, 25 bp, Homo sapien
gctgaagacatactgtccaggtatg

SEQ ID NO: 3513489 - DNA, 25 bp, Homo sapien
gaaatgagctccataaaacctttgt

SEQ ID NO: 3513490 - DNA, 25 bp, Homo sapien
atggcatcctccggtcccacagagg

SEQ ID NO: 3513491 - DNA, 25 bp, Homo sapien
gaggaaatgagctccataaaacctt

SEQ ID NO: 3513492 - DNA, 25 bp, Homo sapien
ggcatcctccggtcccacagaggaa

SEQ ID NO: 3513493 - DNA, 25 bp, Homo sapien
gacagctcaatagcaaggaaacaac

SEQ ID NO: 3513494 - DNA, 25 bp, Homo sapien
atatataagggattcagacagctca

SEQ ID NO: 3513495 - DNA, 25 bp, Homo sapien
ctttgtgatatagcccacgtccttc

SEQ ID NO: 3513496 - DNA, 25 bp, Homo sapien
caaatatatgctcctatgggatggg

SEQ ID NO: 3513497 - DNA, 25 bp, Homo sapien
agcctcctgagaccctcacactcac

SEQ ID NO: 3513498 - DNA, 25 bp, Homo sapien
cagcctcctgagaccctcacactca

SEQ ID NO: 3513499 - DNA, 25 bp, Homo sapien
ttgccgtggaggtagtgttcgtctt

SEQ ID NO: 3513500 - DNA, 25 bp, Homo sapien
ggtagtgttcgtcttggcctttgac

SEQ ID NO: 3513501 - DNA, 25 bp, Homo sapien
tggaggtagtgttcgtcttggcctt

SEQ ID NO: 3513502 - DNA, 25 bp, Homo sapien
tggagccttgccgtggaggtagtgt

SEQ ID NO: 3513503 - DNA, 25 bp, Homo sapien
actgagaaatctggccgaggtacat

SEQ ID NO: 3513504 - DNA, 25 bp, Homo sapien
catttcaactgagaaatctggccga

SEQ ID NO: 3513505 - DNA, 25 bp, Homo sapien
tctggccgaggtacataatttgctt

SEQ ID NO: 3513506 - DNA, 25 bp, Homo sapien
tgtacacatcagctatctccatttc

SEQ ID NO: 3513507 - DNA, 25 bp, Homo sapien
ccaaaactgaatcctcattgacaga

SEQ ID NO: 3513508 - DNA, 25 bp, Homo sapien
gcactgatgttcaaacaggggtaag

SEQ ID NO: 3513509 - DNA, 25 bp, Homo sapien
aagttcaaagtgtcggcttttctgc

SEQ ID NO: 3513510 - DNA, 25 bp, Homo sapien
ttctagaagataggctgaagccatc

SEQ ID NO: 3513511 - DNA, 25 bp, Homo sapien
ctcagttgctcgcagagaggactgt

SEQ ID NO: 3513512 - DNA, 25 bp, Homo sapien
gccaagtcattctcccggtcttctg

SEQ ID NO: 3513513 - DNA, 25 bp, Homo sapien
agtctggctcagttgctcgcagaga

SEQ ID NO: 3513514 - DNA, 25 bp, Homo sapien
gggtagatcggccttcatgacctgt

SEQ ID NO: 3513515 - DNA, 25 bp, Homo sapien
gctcgttcttactcaggtcatccat

SEQ ID NO: 3513516 - DNA, 25 bp, Homo sapien
tgagctcgttcttactcaggtcatc

SEQ ID NO: 3513517 - DNA, 25 bp, Homo sapien
acaggtgctgagctcgttcttactc

SEQ ID NO: 3513518 - DNA, 25 bp, Homo sapien
ggtgctgagctcgttcttactcagg

SEQ ID NO: 3513519 - DNA, 25 bp, Homo sapien
ctgatgatccagactagacctgacc

SEQ ID NO: 3513520 - DNA, 25 bp, Homo sapien
gctttattattactgcctctgggat

SEQ ID NO: 3513521 - DNA, 25 bp, Homo sapien
tgaccctgttcgctcttcccaaagc

SEQ ID NO: 3513522 - DNA, 25 bp, Homo sapien
tttattattactgcctctgggatgg

SEQ ID NO: 3513523 - DNA, 25 bp, Homo sapien
tgttgtctgtatttgccttgcccgg

SEQ ID NO: 3513524 - DNA, 25 bp, Homo sapien
cacctggctcattggaacagaggga

SEQ ID NO: 3513525 - DNA, 25 bp, Homo sapien
acacagccactgggatttggttggg

SEQ ID NO: 3513526 - DNA, 25 bp, Homo sapien
atttggttgggttggtatcttcagg

SEQ ID NO: 3513527 - DNA, 25 bp, Homo sapien
ttctgcatattctgctgaatcattt

SEQ ID NO: 3513528 - DNA, 25 bp, Homo sapien
tattctgctgaatcatttctgcttc

SEQ ID NO: 3513529 - DNA, 25 bp, Homo sapien
ccctgccatctgctttgtcctgatt

SEQ ID NO: 3513530 - DNA, 25 bp, Homo sapien
tttgtcctgattctgcatattctgc

SEQ ID NO: 3513531 - DNA, 25 bp, Homo sapien
cagtaccagtgggagtcaagctgct

SEQ ID NO: 3513532 - DNA, 25 bp, Homo sapien
gaagacagtgccatgagtagatggc

SEQ ID NO: 3513533 - DNA, 25 bp, Homo sapien
cagtacatgggattgaactgcccag

SEQ ID NO: 3513534 - DNA, 25 bp, Homo sapien
tctagcagggcccactgaagagggc

SEQ ID NO: 3513535 - DNA, 25 bp, Homo sapien
gctggtgcatagggtagagcctccc

SEQ ID NO: 3513536 - DNA, 25 bp, Homo sapien
ggtgcatagggtagagcctcccggt

SEQ ID NO: 3513537 - DNA, 25 bp, Homo sapien
gctggtgcatagggtagagcctcct

SEQ ID NO: 3513538 - DNA, 25 bp, Homo sapien
gcatagggtagagcctcccggtgta

SEQ ID NO: 3513539 - DNA, 25 bp, Homo sapien
tagtgcatgggatagagctgcccag

SEQ ID NO: 3513540 - DNA, 25 bp, Homo sapien
ctagtgcatgggatagagctgccca

SEQ ID NO: 3513541 - DNA, 25 bp, Homo sapien
tagagcttcccggtgcatggggtag

SEQ ID NO: 3513542 - DNA, 25 bp, Homo sapien
ccggtgcatggggtagagctgccca

SEQ ID NO: 3513543 - DNA, 25 bp, Homo sapien
ggggtagagcttcccggtgcatggg

SEQ ID NO: 3513544 - DNA, 25 bp, Homo sapien
gcttcccggtgcatggggtagagct

SEQ ID NO: 3513545 - DNA, 25 bp, Homo sapien
taacgaccaggaaatagtgtgggac

SEQ ID NO: 3513546 - DNA, 25 bp, Homo sapien
tatcgggcaagcacgaagtgttttg

SEQ ID NO: 3513547 - DNA, 25 bp, Homo sapien
cagcaaatctttgttagagtcacct

SEQ ID NO: 3513548 - DNA, 25 bp, Homo sapien
gatagactctgaaccgaaaacttga

SEQ ID NO: 3513549 - DNA, 25 bp, Homo sapien
atgatcacattgtttgtgttgaagt

SEQ ID NO: 3513550 - DNA, 25 bp, Homo sapien
caatgatcacattgtttgtgttgaa

SEQ ID NO: 3513551 - DNA, 25 bp, Homo sapien
atcacattgtttgtgttgaagtcca

SEQ ID NO: 3513552 - DNA, 25 bp, Homo sapien
gatcacattgtttgtgttgaagtcc

SEQ ID NO: 3513553 - DNA, 25 bp, Homo sapien
attgatgaaatgctgccaaaaggag

SEQ ID NO: 3513554 - DNA, 25 bp, Homo sapien
gaaagattaattgatgaaatgctgc

SEQ ID NO: 3513555 - DNA, 25 bp, Homo sapien
gattaattgatgaaatgctgccaaa

SEQ ID NO: 3513556 - DNA, 25 bp, Homo sapien
gatgaaagattaattgatgaaatgc

SEQ ID NO: 3513557 - DNA, 25 bp, Homo sapien
cccggagaggatcagaatggccctt

SEQ ID NO: 3513558 - DNA, 25 bp, Homo sapien
taccccaatgaaataagcctggtgc

SEQ ID NO: 3513559 - DNA, 25 bp, Homo sapien
ggactgatcagactggagcttggca

SEQ ID NO: 3513560 - DNA, 25 bp, Homo sapien
acagcagagcacaggaggcatatcc

SEQ ID NO: 3513561 - DNA, 25 bp, Homo sapien
gcacagccagttccggcagataatt

SEQ ID NO: 3513562 - DNA, 25 bp, Homo sapien
ccagttccggcagataattgacatg

SEQ ID NO: 3513563 - DNA, 25 bp, Homo sapien
cagggcacagccagttccggcagat

SEQ ID NO: 3513564 - DNA, 25 bp, Homo sapien
agccagttccggcagataattgaca

SEQ ID NO: 3513565 - DNA, 25 bp, Homo sapien
gctgaggtggcagagggatggagct

SEQ ID NO: 3513566 - DNA, 25 bp, Homo sapien
gaggtggcagagggatggagctctc

SEQ ID NO: 3513567 - DNA, 25 bp, Homo sapien
aagctgaggtggcagagggatggag

SEQ ID NO: 3513568 - DNA, 25 bp, Homo sapien
ctgaggtggcagagggatggagctc

SEQ ID NO: 3513569 - DNA, 25 bp, Homo sapien
aggaagaagcatgcacatgactccg

SEQ ID NO: 3513570 - DNA, 25 bp, Homo sapien
agcatgcacatgactccgacctcta

SEQ ID NO: 3513571 - DNA, 25 bp, Homo sapien
gaagaagcatgcacatgactccgac

SEQ ID NO: 3513572 - DNA, 25 bp, Homo sapien
gaagcatgcacatgactccgacctc

SEQ ID NO: 3513573 - DNA, 25 bp, Homo sapien
catggattctggcttcctaataggc

SEQ ID NO: 3513574 - DNA, 25 bp, Homo sapien
tggattctggcttcctaataggcct

SEQ ID NO: 3513575 - DNA, 25 bp, Homo sapien
agcatggattctggcttcctaatag

SEQ ID NO: 3513576 - DNA, 25 bp, Homo sapien
gattctggcttcctaataggcctca

SEQ ID NO: 3513577 - DNA, 25 bp, Homo sapien
ctacaacatttagtccttggaggag

SEQ ID NO: 3513578 - DNA, 25 bp, Homo sapien
cacctctacaacatttagtccttgg

SEQ ID NO: 3513579 - DNA, 25 bp, Homo sapien
gtaggatcagatcacctctacaaca

SEQ ID NO: 3513580 - DNA, 25 bp, Homo sapien
ctgtgtaggatcagatcacctctac

SEQ ID NO: 3513581 - DNA, 25 bp, Homo sapien
cagggtaagctctcttctaggctgc

SEQ ID NO: 3513582 - DNA, 25 bp, Homo sapien
tatcatttactgttgccttagtggg

SEQ ID NO: 3513583 - DNA, 25 bp, Homo sapien
tccatcatcttgaactggaaatcct

SEQ ID NO: 3513584 - DNA, 25 bp, Homo sapien
tgagaggaaggttgtgtctgcctct

SEQ ID NO: 3513585 - DNA, 25 bp, Homo sapien
tgtaaatgcctctcgtggtccatgc

SEQ ID NO: 3513586 - DNA, 25 bp, Homo sapien
taggccaagaaatccctagcaatgg

SEQ ID NO: 3513587 - DNA, 25 bp, Homo sapien
cagtgaagggaatcattggaagcat

SEQ ID NO: 3513588 - DNA, 25 bp, Homo sapien
gaagcatagttccaacccaggtagg

SEQ ID NO: 3513589 - DNA, 25 bp, Homo sapien
gagaacatttgaacacgcagcagct

SEQ ID NO: 3513590 - DNA, 25 bp, Homo sapien
tggtacgcaccactttagcaggagg

SEQ ID NO: 3513591 - DNA, 25 bp, Homo sapien
caagtggactgcatcctcggacgtc

SEQ ID NO: 3513592 - DNA, 25 bp, Homo sapien
tctgagctcataggatccacgtgga

SEQ ID NO: 3513593 - DNA, 25 bp, Homo sapien
tggccacagatgtttctgtaacccg

SEQ ID NO: 3513594 - DNA, 25 bp, Homo sapien
tgtgggtggttcaccgactctttca

SEQ ID NO: 3513595 - DNA, 25 bp, Homo sapien
atgtttctgtaacccgggccactgg

SEQ ID NO: 3513596 - DNA, 25 bp, Homo sapien
ggttcaccgactctttcaccttagc

SEQ ID NO: 3513597 - DNA, 25 bp, Homo sapien
ggtgcttctgataatattagtgaag

SEQ ID NO: 3513598 - DNA, 25 bp, Homo sapien
ctgataatattagtgaagtcagaag

SEQ ID NO: 3513599 - DNA, 25 bp, Homo sapien
gtttgagctaggcagaggctatgga

SEQ ID NO: 3513600 - DNA, 25 bp, Homo sapien
atctggttttgcagacaagttggtg

SEQ ID NO: 3513601 - DNA, 25 bp, Homo sapien
tcaggggcctggtaaaacactattc

SEQ ID NO: 3513602 - DNA, 25 bp, Homo sapien
aacactattcctgaatgaaggattg

SEQ ID NO: 3513603 - DNA, 25 bp, Homo sapien
ggattgaatgtagggttgttctttc

SEQ ID NO: 3513604 - DNA, 25 bp, Homo sapien
tttccagcaagcaatacggttcttc

SEQ ID NO: 3513605 - DNA, 25 bp, Homo sapien
tagggtcagtgtgcagaaataatcc

SEQ ID NO: 3513606 - DNA, 25 bp, Homo sapien
gaaataatccagtgtcttttcttat

SEQ ID NO: 3513607 - DNA, 25 bp, Homo sapien
caaggcaggaatctgccctcccatc

SEQ ID NO: 3513608 - DNA, 25 bp, Homo sapien
ccctaggacatgctgcttcagagcc

SEQ ID NO: 3513609 - DNA, 25 bp, Homo sapien
cagttttgggctcatggaccactgg

SEQ ID NO: 3513610 - DNA, 25 bp, Homo sapien
tccagttttgggctcatggaccact

SEQ ID NO: 3513611 - DNA, 25 bp, Homo sapien
gctccagttttgggctcatggacca

SEQ ID NO: 3513612 - DNA, 25 bp, Homo sapien
ttttgggctcatggaccactgggca

SEQ ID NO: 3513613 - DNA, 25 bp, Homo sapien
ctccaaggggtggatggaaggtgga

SEQ ID NO: 3513614 - DNA, 25 bp, Homo sapien
aggtggaagggacaggaccacacct

SEQ ID NO: 3513615 - DNA, 25 bp, Homo sapien
tggtttccaggccaaaatcttgcag

SEQ ID NO: 3513616 - DNA, 25 bp, Homo sapien
gacaggaccacacctggtttccagg

SEQ ID NO: 3513617 - DNA, 25 bp, Homo sapien
taccaagtctttgaacagccagtcc

SEQ ID NO: 3513618 - DNA, 25 bp, Homo sapien
taatgcatgacgaatgggagctgcc

SEQ ID NO: 3513619 - DNA, 25 bp, Homo sapien
tgtatgcaatgcagagacccagagt

SEQ ID NO: 3513620 - DNA, 25 bp, Homo sapien
cattggctcacactttgacaggtgc

SEQ ID NO: 3513621 - DNA, 25 bp, Homo sapien
tgtgtcccgagacagatgctccctg

SEQ ID NO: 3513622 - DNA, 25 bp, Homo sapien
caagagcagttaacacatagcccac

SEQ ID NO: 3513623 - DNA, 25 bp, Homo sapien
gcctctctgcatgggtctgccatat

SEQ ID NO: 3513624 - DNA, 25 bp, Homo sapien
tagcccacagacaggtgtgtcccga

SEQ ID NO: 3513625 - DNA, 25 bp, Homo sapien
cccttccatgctccaatgaccaccc

SEQ ID NO: 3513626 - DNA, 25 bp, Homo sapien
cccaagcaaccacccctggaactgc

SEQ ID NO: 3513627 - DNA, 25 bp, Homo sapien
ccccaagcaaccacccctggaactg

SEQ ID NO: 3513628 - DNA, 25 bp, Homo sapien
tccatgctccaatgaccaccccaag

SEQ ID NO: 3513629 - DNA, 25 bp, Homo sapien
tggccactgacacccatggtgtctt

SEQ ID NO: 3513630 - DNA, 25 bp, Homo sapien
gccactgacacccatggtgtctttg

SEQ ID NO: 3513631 - DNA, 25 bp, Homo sapien
agctccttcaaccttccaacttttg

SEQ ID NO: 3513632 - DNA, 25 bp, Homo sapien
tggctgtagtcaatagctccttcaa

SEQ ID NO: 3513633 - DNA, 25 bp, Homo sapien
cagtagctggctcatagtgagtgct

SEQ ID NO: 3513634 - DNA, 25 bp, Homo sapien
tagagctctcttaagtaccacagtc

SEQ ID NO: 3513635 - DNA, 25 bp, Homo sapien
tgagggacaaaatctctaagctgtg

SEQ ID NO: 3513636 - DNA, 25 bp, Homo sapien
gaacttattctctcccgggctgtga

SEQ ID NO: 3513637 - DNA, 25 bp, Homo sapien
tgctctatgagatgtctggtaaagc

SEQ ID NO: 3513638 - DNA, 25 bp, Homo sapien
gctctatgagatgtctggtaaagcc

SEQ ID NO: 3513639 - DNA, 25 bp, Homo sapien
gtgctctatgagatgtctggtaaag

SEQ ID NO: 3513640 - DNA, 25 bp, Homo sapien
agatcacagcagcgcctcctaggca

SEQ ID NO: 3513641 - DNA, 25 bp, Homo sapien
gcagcgcctcctaggcagagacaca

SEQ ID NO: 3513642 - DNA, 25 bp, Homo sapien
ctacgaggacgtctccagatcacag

SEQ ID NO: 3513643 - DNA, 25 bp, Homo sapien
tacgaggacgtctccagatcacagc

SEQ ID NO: 3513644 - DNA, 25 bp, Homo sapien
tggaacgagtctgtcgggcagacct

SEQ ID NO: 3513645 - DNA, 25 bp, Homo sapien
cagcccacctgctggaacgagtctg

SEQ ID NO: 3513646 - DNA, 25 bp, Homo sapien
cctcttcaacacagtgccttggaca

SEQ ID NO: 3513647 - DNA, 25 bp, Homo sapien
acctcttcaacacagtgccttggac

SEQ ID NO: 3513648 - DNA, 25 bp, Homo sapien
gatgccttgtgtacggtcctcccta

SEQ ID NO: 3513649 - DNA, 25 bp, Homo sapien
tcctgaacgccagacaggtgtacgg

SEQ ID NO: 3513650 - DNA, 25 bp, Homo sapien
gttctcaaagaagggaatgtgttcc

SEQ ID NO: 3513651 - DNA, 25 bp, Homo sapien
tcctaaggaagctagagatgatgcc

SEQ ID NO: 3513652 - DNA, 25 bp, Homo sapien
actggttgacgccacggccgcagat

SEQ ID NO: 3513653 - DNA, 25 bp, Homo sapien
tgtgcgctgccttctcactagggcc

SEQ ID NO: 3513654 - DNA, 25 bp, Homo sapien
tgctgactacgatgtctgcaggcag

SEQ ID NO: 3513655 - DNA, 25 bp, Homo sapien
acccagctaggtgggtccgccttgc

SEQ ID NO: 3513656 - DNA, 25 bp, Homo sapien
tctacagcatgaagctcccggagcc

SEQ ID NO: 3513657 - DNA, 25 bp, Homo sapien
ggaaggtgcataaaggcaactttcc

SEQ ID NO: 3513658 - DNA, 25 bp, Homo sapien
acagcatgaagctcccggagccccc

SEQ ID NO: 3513659 - DNA, 25 bp, Homo sapien
gaaggtgcataaaggcaactttcct

SEQ ID NO: 3513660 - DNA, 25 bp, Homo sapien
ctctcggtgccacggaaatcttgga

SEQ ID NO: 3513661 - DNA, 25 bp, Homo sapien
ttggatgagggtctggatgccttct

SEQ ID NO: 3513662 - DNA, 25 bp, Homo sapien
aagccttgcgtgctggactggatgc

SEQ ID NO: 3513663 - DNA, 25 bp, Homo sapien
ttagcgcccctccattctttcgatt

SEQ ID NO: 3513664 - DNA, 25 bp, Homo sapien
taagtcactcacactctggaatctt

SEQ ID NO: 3513665 - DNA, 25 bp, Homo sapien
ttcccaatggaccttgagcatcatg

SEQ ID NO: 3513666 - DNA, 25 bp, Homo sapien
cttgagcatcatgaggaggccagac

SEQ ID NO: 3513667 - DNA, 25 bp, Homo sapien
tttctgttctcccctaagtcactca

SEQ ID NO: 3513668 - DNA, 25 bp, Homo sapien
tccaaaatgtcagaagaccaatgaa

SEQ ID NO: 3513669 - DNA, 25 bp, Homo sapien
aagagaaggtgggatagttcccctg

SEQ ID NO: 3513670 - DNA, 25 bp, Homo sapien
gaactactgaaactctaagggcaga

SEQ ID NO: 3513671 - DNA, 25 bp, Homo sapien
tcatttcccacagctagaactactg

SEQ ID NO: 3513672 - DNA, 25 bp, Homo sapien
tcttgttccccaccagtagctatga

SEQ ID NO: 3513673 - DNA, 25 bp, Homo sapien
ccagtagctatgagtgtgaactcca

SEQ ID NO: 3513674 - DNA, 25 bp, Homo sapien
tggacattgtgacttgcacctctca

SEQ ID NO: 3513675 - DNA, 25 bp, Homo sapien
aggctcctcactatcatgcccctgt

SEQ ID NO: 3513676 - DNA, 25 bp, Homo sapien
ccagggaatgcaggtgtatgagctc

SEQ ID NO: 3513677 - DNA, 25 bp, Homo sapien
tatgagcggttgtccagggaatgca

SEQ ID NO: 3513678 - DNA, 25 bp, Homo sapien
tgtcttgtggtacagggtcactgag

SEQ ID NO: 3513679 - DNA, 25 bp, Homo sapien
tcaacttggctgcaacatatgagcg

SEQ ID NO: 3513680 - DNA, 25 bp, Homo sapien
gtggttctacgtgcctgagggccat

SEQ ID NO: 3513681 - DNA, 25 bp, Homo sapien
ccagagggtggttctacgtgcctga

SEQ ID NO: 3513682 - DNA, 25 bp, Homo sapien
gggtggttctacgtgcctgagggcc

SEQ ID NO: 3513683 - DNA, 25 bp, Homo sapien
ccccagagggtggttctacgtgcct

SEQ ID NO: 3513684 - DNA, 25 bp, Homo sapien
aatatacagtcttgagctgtgagtc

SEQ ID NO: 3513685 - DNA, 25 bp, Homo sapien
attattgtgagactgggctctagcc

SEQ ID NO: 3513686 - DNA, 25 bp, Homo sapien
tcatttatctatgtcaaaactgtaa

SEQ ID NO: 3513687 - DNA, 25 bp, Homo sapien
ttattatgtgtgctgagtgtctcag

SEQ ID NO: 3513688 - DNA, 25 bp, Homo sapien
ttcttctgtcattgaggcgttcagc

SEQ ID NO: 3513689 - DNA, 25 bp, Homo sapien
tgtcattgaggcgttcagcatggca

SEQ ID NO: 3513690 - DNA, 25 bp, Homo sapien
cattgaggcgttcagcatggcagga

SEQ ID NO: 3513691 - DNA, 25 bp, Homo sapien
ttctgtcattgaggcgttcagcatg

SEQ ID NO: 3513692 - DNA, 25 bp, Homo sapien
tgggagatgccaaaggagttgttat

SEQ ID NO: 3513693 - DNA, 25 bp, Homo sapien
agatgccaaaggagttgttatccat

SEQ ID NO: 3513694 - DNA, 25 bp, Homo sapien
ctgtctgggagatgccaaaggagtt

SEQ ID NO: 3513695 - DNA, 25 bp, Homo sapien
ggagatgccaaaggagttgttatcc

SEQ ID NO: 3513696 - DNA, 25 bp, Homo sapien
tgtctggggtcatcgagtgagcaca

SEQ ID NO: 3513697 - DNA, 25 bp, Homo sapien
gctggtatggctttactggtgagta

SEQ ID NO: 3513698 - DNA, 25 bp, Homo sapien
tgagcaaggaggttggctggtgcat

SEQ ID NO: 3513699 - DNA, 25 bp, Homo sapien
tatggctttactggtgagtactggc

SEQ ID NO: 3513700 - DNA, 25 bp, Homo sapien
aagggctttgcatgccaagttgaga

SEQ ID NO: 3513701 - DNA, 25 bp, Homo sapien
gctttgcatgccaagttgagaaagt

SEQ ID NO: 3513702 - DNA, 25 bp, Homo sapien
accaggttttaaagggctttgcatg

SEQ ID NO: 3513703 - DNA, 25 bp, Homo sapien
ggttttaaagggctttgcatgccaa

SEQ ID NO: 3513704 - DNA, 25 bp, Homo sapien
agcactgtgtgttccgctgcgtcct

SEQ ID NO: 3513705 - DNA, 25 bp, Homo sapien
gcactgtgtgttccgctgcgtcctt

SEQ ID NO: 3513706 - DNA, 25 bp, Homo sapien
tgtgtgttccgctgcgtccttcccc

SEQ ID NO: 3513707 - DNA, 25 bp, Homo sapien
tgttccgctgcgtccttccccttgt

SEQ ID NO: 3513708 - DNA, 25 bp, Homo sapien
cctcctgcagagaagctcggaagtg

SEQ ID NO: 3513709 - DNA, 25 bp, Homo sapien
catcagattagtcctcgccaggagc

SEQ ID NO: 3513710 - DNA, 25 bp, Homo sapien
gatgcatacagctctgactccgaag

SEQ ID NO: 3513711 - DNA, 25 bp, Homo sapien
gaaatcctttccgtgtctgatgcat

SEQ ID NO: 3513712 - DNA, 25 bp, Homo sapien
cccagagccagtttctccacacaca

SEQ ID NO: 3513713 - DNA, 25 bp, Homo sapien
tcactgctaggttgcatgaaagcga

SEQ ID NO: 3513714 - DNA, 25 bp, Homo sapien
tgctaggttgcatgaaagcgagtcc

SEQ ID NO: 3513715 - DNA, 25 bp, Homo sapien
ggttgcatgaaagcgagtcccagag

SEQ ID NO: 3513716 - DNA, 25 bp, Homo sapien
tggtccaatagtgaagctcaggtcc

SEQ ID NO: 3513717 - DNA, 25 bp, Homo sapien
tccgagaggctcatctggtccaata

SEQ ID NO: 3513718 - DNA, 25 bp, Homo sapien
tgaacatctcagcagcctgcgttgg

SEQ ID NO: 3513719 - DNA, 25 bp, Homo sapien
ttgggcaagcggtttaatcagaggc

SEQ ID NO: 3513720 - DNA, 25 bp, Homo sapien
gcacctgctggtgatgtcatcttat

SEQ ID NO: 3513721 - DNA, 25 bp, Homo sapien
gaaagagtccagaacgtgagggtca

SEQ ID NO: 3513722 - DNA, 25 bp, Homo sapien
tggtaggccccgtctgcacctgctg

SEQ ID NO: 3513723 - DNA, 25 bp, Homo sapien
gagtgcctgcggcagctggtgtgct

SEQ ID NO: 3513724 - DNA, 25 bp, Homo sapien
tcctctggctgtccatccagcatag

SEQ ID NO: 3513725 - DNA, 25 bp, Homo sapien
agccacaggactcctctggctgtcc

SEQ ID NO: 3513726 - DNA, 25 bp, Homo sapien
cctctggctgtccatccagcatagc

SEQ ID NO: 3513727 - DNA, 25 bp, Homo sapien
ctggttcaggccctttatctcagaa

SEQ ID NO: 3513728 - DNA, 25 bp, Homo sapien
tcaaagcgctcccaaactcaatagg

SEQ ID NO: 3513729 - DNA, 25 bp, Homo sapien
tgccatgagcctagtccaagctacc

SEQ ID NO: 3513730 - DNA, 25 bp, Homo sapien
caagctcctgctatgatctatctac

SEQ ID NO: 3513731 - DNA, 25 bp, Homo sapien
tgttctctagaccagtgaatgtgcc

SEQ ID NO: 3513732 - DNA, 25 bp, Homo sapien
catctgtcccctatttacaactgca

SEQ ID NO: 3513733 - DNA, 25 bp, Homo sapien
aatagtttgatatcataccatcacc

SEQ ID NO: 3513734 - DNA, 25 bp, Homo sapien
caggtgctacacagtagcaaagagg

SEQ ID NO: 3513735 - DNA, 25 bp, Homo sapien
caggcaacgttgcagcaggtgctac

SEQ ID NO: 3513736 - DNA, 25 bp, Homo sapien
gacttgcggttctggatgggtcctc

SEQ ID NO: 3513737 - DNA, 25 bp, Homo sapien
gaagccgaactccaggtcgctattc

SEQ ID NO: 3513738 - DNA, 25 bp, Homo sapien
tgctggcccgagcacttctgcaaca

SEQ ID NO: 3513739 - DNA, 25 bp, Homo sapien
tcctcaggacgttggtgatgctcca

SEQ ID NO: 3513740 - DNA, 25 bp, Homo sapien
gcatccaagtaagcctcaagtcctg

SEQ ID NO: 3513741 - DNA, 25 bp, Homo sapien
tggaccccttgtagcttaatggcac

SEQ ID NO: 3513742 - DNA, 25 bp, Homo sapien
catgcagaaattcgggagcctcagg

SEQ ID NO: 3513743 - DNA, 25 bp, Homo sapien
caactgtgtcagctccctaatggat

SEQ ID NO: 3513744 - DNA, 25 bp, Homo sapien
cctgattcctggaaggatgagccag

SEQ ID NO: 3513745 - DNA, 25 bp, Homo sapien
gtctgcaggcccaaatggtcatttc

SEQ ID NO: 3513746 - DNA, 25 bp, Homo sapien
ccagaggactgataggaatccgttt

SEQ ID NO: 3513747 - DNA, 25 bp, Homo sapien
gaatccgtttatcagctataaaccg

SEQ ID NO: 3513748 - DNA, 25 bp, Homo sapien
aggccttgccaacagcgaggtgctg

SEQ ID NO: 3513749 - DNA, 25 bp, Homo sapien
aacgggcccggaccaagtgccgctg

SEQ ID NO: 3513750 - DNA, 25 bp, Homo sapien
gtgaccaaagcgcacaacaaacggg

SEQ ID NO: 3513751 - DNA, 25 bp, Homo sapien
gaccccagacaaccaactcttggag

SEQ ID NO: 3513752 - DNA, 25 bp, Homo sapien
gagaggtggccttgttactaccgag

SEQ ID NO: 3513753 - DNA, 25 bp, Homo sapien
gagatctgcaggtagaacactgacc

SEQ ID NO: 3513754 - DNA, 25 bp, Homo sapien
ggctacataggacaaccctgctggg

SEQ ID NO: 3513755 - DNA, 25 bp, Homo sapien
gcttgacaagtatcctgccacaaag

SEQ ID NO: 3513756 - DNA, 25 bp, Homo sapien
tctgctgactgctcgtgtagtacac

SEQ ID NO: 3513757 - DNA, 25 bp, Homo sapien
tcctcttggctttggcgtagctgca

SEQ ID NO: 3513758 - DNA, 25 bp, Homo sapien
tgttgacgtccaccaggcatcggtt

SEQ ID NO: 3513759 - DNA, 25 bp, Homo sapien
gctcagaatgcccacatggatctgc

SEQ ID NO: 3513760 - DNA, 25 bp, Homo sapien
gccccattgtgtatcttttatccct

SEQ ID NO: 3513761 - DNA, 25 bp, Homo sapien
ctcatagcatagcttgcactttaac

SEQ ID NO: 3513762 - DNA, 25 bp, Homo sapien
taactgagagcataggatgtttggt

SEQ ID NO: 3513763 - DNA, 25 bp, Homo sapien
gcatagcttgcactttaactgagag

SEQ ID NO: 3513764 - DNA, 25 bp, Homo sapien
tgacaggccacctttcagtgcagca

SEQ ID NO: 3513765 - DNA, 25 bp, Homo sapien
tggggactccacatctgacaggcca

SEQ ID NO: 3513766 - DNA, 25 bp, Homo sapien
acaggccacctttcagtgcagcagc

SEQ ID NO: 3513767 - DNA, 25 bp, Homo sapien
ttctggggactccacatctgacagg

SEQ ID NO: 3513768 - DNA, 25 bp, Homo sapien
agggcttggcccaaatggtctatgc

SEQ ID NO: 3513769 - DNA, 25 bp, Homo sapien
aagagccaagtagacttctcccagg

SEQ ID NO: 3513770 - DNA, 25 bp, Homo sapien
caaatggtctatgctctgggactct

SEQ ID NO: 3513771 - DNA, 25 bp, Homo sapien
tcagtgagaatggagctgttacaaa

SEQ ID NO: 3513772 - DNA, 25 bp, Homo sapien
agacagaatagcacgttcctgagct

SEQ ID NO: 3513773 - DNA, 25 bp, Homo sapien
aatcaattagcatggttctcagcag

SEQ ID NO: 3513774 - DNA, 25 bp, Homo sapien
ttaatcaattagcatggttctcagc

SEQ ID NO: 3513775 - DNA, 25 bp, Homo sapien
taatcaattagcatggttctcagca

SEQ ID NO: 3513776 - DNA, 25 bp, Homo sapien
tcaattagcatggttctcagcagct

SEQ ID NO: 3513777 - DNA, 25 bp, Homo sapien
ctcactaatttgattagttaccctc

SEQ ID NO: 3513778 - DNA, 25 bp, Homo sapien
tgctttctcctatccaaggccttct

SEQ ID NO: 3513779 - DNA, 25 bp, Homo sapien
tgattagttaccctctgctttctcc

SEQ ID NO: 3513780 - DNA, 25 bp, Homo sapien
ttctcctatccaaggccttctctga

SEQ ID NO: 3513781 - DNA, 25 bp, Homo sapien
gaggaacgtgttgccatactgggtt

SEQ ID NO: 3513782 - DNA, 25 bp, Homo sapien
gtgacgggtgtactaaaatttcagc

SEQ ID NO: 3513783 - DNA, 25 bp, Homo sapien
gatctgggtgtattcactctggaaa

SEQ ID NO: 3513784 - DNA, 25 bp, Homo sapien
tctggaaattgattaagctgtacac

SEQ ID NO: 3513785 - DNA, 25 bp, Homo sapien
ggtcagcctatgacattcttggtca

SEQ ID NO: 3513786 - DNA, 25 bp, Homo sapien
tctgctgtactttgttcaacgaacc

SEQ ID NO: 3513787 - DNA, 25 bp, Homo sapien
cttggtcaagggttgtctgctgtac

SEQ ID NO: 3513788 - DNA, 25 bp, Homo sapien
ggccccagctatgatctactaaagg

SEQ ID NO: 3513789 - DNA, 25 bp, Homo sapien
tcatcccatggcagatgtacatgat

SEQ ID NO: 3513790 - DNA, 25 bp, Homo sapien
catgatggggacattctctgtatct

SEQ ID NO: 3513791 - DNA, 25 bp, Homo sapien
tcccatggcagatgtacatgatggg

SEQ ID NO: 3513792 - DNA, 25 bp, Homo sapien
acatgatggggacattctctgtatc

SEQ ID NO: 3513793 - DNA, 25 bp, Homo sapien
tggtcaagacacaaatcagtcttca

SEQ ID NO: 3513794 - DNA, 25 bp, Homo sapien
gtcaagacacaaatcagtcttcaga

SEQ ID NO: 3513795 - DNA, 25 bp, Homo sapien
ctggtcaagacacaaatcagtcttc

SEQ ID NO: 3513796 - DNA, 25 bp, Homo sapien
ggtcaagacacaaatcagtcttcag

SEQ ID NO: 3513797 - DNA, 25 bp, Homo sapien
taggcaggtagtccactgaaggagc

SEQ ID NO: 3513798 - DNA, 25 bp, Homo sapien
tattgcatgaatgtgtgtctcaggc

SEQ ID NO: 3513799 - DNA, 25 bp, Homo sapien
tgttcttgtcctacagcccatgaag

SEQ ID NO: 3513800 - DNA, 25 bp, Homo sapien
gccaagcactgtaacccactaggaa

SEQ ID NO: 3513801 - DNA, 25 bp, Homo sapien
gatctggagactcaggtactacctg

SEQ ID NO: 3513802 - DNA, 25 bp, Homo sapien
gactcaggtactacctgagcagcac

SEQ ID NO: 3513803 - DNA, 25 bp, Homo sapien
caggatctggagactcaggtactac

SEQ ID NO: 3513804 - DNA, 25 bp, Homo sapien
tggagactcaggtactacctgagca

SEQ ID NO: 3513805 - DNA, 25 bp, Homo sapien
accggaaggtcttgcactgcagctg

SEQ ID NO: 3513806 - DNA, 25 bp, Homo sapien
ccataggcaatgatgtcggagtaca

SEQ ID NO: 3513807 - DNA, 25 bp, Homo sapien
atgtcggagtacatcctcatctctg

SEQ ID NO: 3513808 - DNA, 25 bp, Homo sapien
cttgcagtgatgtccccaatgtcaa

SEQ ID NO: 3513809 - DNA, 25 bp, Homo sapien
tggttcaaacatcaactccagggat

SEQ ID NO: 3513810 - DNA, 25 bp, Homo sapien
tgagttactgaggttgggcagattt

SEQ ID NO: 3513811 - DNA, 25 bp, Homo sapien
ctccagggattgagttactgaggtt

SEQ ID NO: 3513812 - DNA, 25 bp, Homo sapien
gacactgtggtccatatgctctctt

SEQ ID NO: 3513813 - DNA, 25 bp, Homo sapien
tctgcacttaggaacagggcaaagt

SEQ ID NO: 3513814 - DNA, 25 bp, Homo sapien
aagtttgcctccctccatacgatcg

SEQ ID NO: 3513815 - DNA, 25 bp, Homo sapien
tatagggagccagtagaagaacctg

SEQ ID NO: 3513816 - DNA, 25 bp, Homo sapien
gaacctgtctcacaaaggcctctgt

SEQ ID NO: 3513817 - DNA, 25 bp, Homo sapien
gttctctaccattcattgggttgct

SEQ ID NO: 3513818 - DNA, 25 bp, Homo sapien
agttctctaccattcattgggttgc

SEQ ID NO: 3513819 - DNA, 25 bp, Homo sapien
cagttctctaccattcattgggttg

SEQ ID NO: 3513820 - DNA, 25 bp, Homo sapien
gttgctgggcatttcaacacctgtc

SEQ ID NO: 3513821 - DNA, 25 bp, Homo sapien
catgccatgtagacgtggcttttaa

SEQ ID NO: 3513822 - DNA, 25 bp, Homo sapien
accctgagagcgttcctgcggacat

SEQ ID NO: 3513823 - DNA, 25 bp, Homo sapien
tcctgcggtatgttccatgccatgt

SEQ ID NO: 3513824 - DNA, 25 bp, Homo sapien
tgtagggcttgtgggctcgctcaat

SEQ ID NO: 3513825 - DNA, 25 bp, Homo sapien
ttctgactgaatctgagggagagcg

SEQ ID NO: 3513826 - DNA, 25 bp, Homo sapien
tagtgcatctttccgaggctctggg

SEQ ID NO: 3513827 - DNA, 25 bp, Homo sapien
ctgggttctgactgaatctgaggga

SEQ ID NO: 3513828 - DNA, 25 bp, Homo sapien
gggttctgactgaatctgagggaga

SEQ ID NO: 3513829 - DNA, 25 bp, Homo sapien
caatgttcctgaacttgcactcttt

SEQ ID NO: 3513830 - DNA, 25 bp, Homo sapien
gttcctgaacttgcactcttttgtg

SEQ ID NO: 3513831 - DNA, 25 bp, Homo sapien
ttcaatgttcctgaacttgcactct

SEQ ID NO: 3513832 - DNA, 25 bp, Homo sapien
atgttcctgaacttgcactcttttg

SEQ ID NO: 3513833 - DNA, 25 bp, Homo sapien
gccttgttccctgaactaacaccat

SEQ ID NO: 3513834 - DNA, 25 bp, Homo sapien
gtgctgtgtggtcctgccttgttcc

SEQ ID NO: 3513835 - DNA, 25 bp, Homo sapien
tgctgtgtggtcctgccttgttccc

SEQ ID NO: 3513836 - DNA, 25 bp, Homo sapien
cccaagagagaatttcaaaagtcat

SEQ ID NO: 3513837 - DNA, 25 bp, Homo sapien
tgacccaagagagaatttcaaaagt

SEQ ID NO: 3513838 - DNA, 25 bp, Homo sapien
agtggcttgacccaagagagaattt

SEQ ID NO: 3513839 - DNA, 25 bp, Homo sapien
cagtggcttgacccaagagagaatt

SEQ ID NO: 3513840 - DNA, 25 bp, Homo sapien
aactcaagtggtttttcagcaaagc

SEQ ID NO: 3513841 - DNA, 25 bp, Homo sapien
taaattgcacgaatgaaggaaccag

SEQ ID NO: 3513842 - DNA, 25 bp, Homo sapien
tatgtgcccacaataccgaactctg

SEQ ID NO: 3513843 - DNA, 25 bp, Homo sapien
gaacgcgcttgtatgtgtctcctgg

SEQ ID NO: 3513844 - DNA, 25 bp, Homo sapien
tattacggatggtgctcctcggaac

SEQ ID NO: 3513845 - DNA, 25 bp, Homo sapien
agtgctctgcctataatgactgggc

SEQ ID NO: 3513846 - DNA, 25 bp, Homo sapien
tcaaatctcatatcagccaacaggc

SEQ ID NO: 3513847 - DNA, 25 bp, Homo sapien
gaagggcttattcgtggttacctca

SEQ ID NO: 3513848 - DNA, 25 bp, Homo sapien
caggccagatgggactcaagacaag

SEQ ID NO: 3513849 - DNA, 25 bp, Homo sapien
ttttttatgactgaactactataaa

SEQ ID NO: 3513850 - DNA, 25 bp, Homo sapien
cccgccaggcgcaagctgcatcaag

SEQ ID NO: 3513851 - DNA, 25 bp, Homo sapien
atccacaagcaacggttcagacacg

SEQ ID NO: 3513852 - DNA, 25 bp, Homo sapien
tttatgactgaactactataaatcc

SEQ ID NO: 3513853 - DNA, 25 bp, Homo sapien
tgccccctggcatgctagatgaacc

SEQ ID NO: 3513854 - DNA, 25 bp, Homo sapien
ttggcgctgctgacgggcgtactgc

SEQ ID NO: 3513855 - DNA, 25 bp, Homo sapien
aacaggcatcccaagggggttggca

SEQ ID NO: 3513856 - DNA, 25 bp, Homo sapien
tagatgaacccattcgagcctggtc

SEQ ID NO: 3513857 - DNA, 25 bp, Homo sapien
cttcacaacagtgtagaaatagggg

SEQ ID NO: 3513858 - DNA, 25 bp, Homo sapien
ggcctaattttcgaaccagctggta

SEQ ID NO: 3513859 - DNA, 25 bp, Homo sapien
gaagtatcgggaagcaactcggaca

SEQ ID NO: 3513860 - DNA, 25 bp, Homo sapien
gaaaaatggctccttccgaaagatc

SEQ ID NO: 3513861 - DNA, 25 bp, Homo sapien
gatgatgttgggacctcctctcaaa

SEQ ID NO: 3513862 - DNA, 25 bp, Homo sapien
tcacacagacaatatggcggcgatg

SEQ ID NO: 3513863 - DNA, 25 bp, Homo sapien
cacagacaatatggcggcgatggag

SEQ ID NO: 3513864 - DNA, 25 bp, Homo sapien
gctcacacagacaatatggcggcga

SEQ ID NO: 3513865 - DNA, 25 bp, Homo sapien
tgctcacacagacaatatggcggcg

SEQ ID NO: 3513866 - DNA, 25 bp, Homo sapien
caatgtaatggtggccaagaagcta

SEQ ID NO: 3513867 - DNA, 25 bp, Homo sapien
aacaatgtaatggtggccaagaagc

SEQ ID NO: 3513868 - DNA, 25 bp, Homo sapien
ctagaataacaatgtaatggtggcc

SEQ ID NO: 3513869 - DNA, 25 bp, Homo sapien
gaataacaatgtaatggtggccaag

SEQ ID NO: 3513870 - DNA, 25 bp, Homo sapien
tgataccgaccagcatgcagactca

SEQ ID NO: 3513871 - DNA, 25 bp, Homo sapien
ccagggtctgataccgaccagcatg

SEQ ID NO: 3513872 - DNA, 25 bp, Homo sapien
gggtctgataccgaccagcatgcag

SEQ ID NO: 3513873 - DNA, 25 bp, Homo sapien
tctgataccgaccagcatgcagact

SEQ ID NO: 3513874 - DNA, 25 bp, Homo sapien
gatcaattctgaatgaatcggagac

SEQ ID NO: 3513875 - DNA, 25 bp, Homo sapien
ggtgttacgataactggttgaccat

SEQ ID NO: 3513876 - DNA, 25 bp, Homo sapien
gagagaagactaacaaccctatagg

SEQ ID NO: 3513877 - DNA, 25 bp, Homo sapien
tgggccaaagatacgaacagcttac

SEQ ID NO: 3513878 - DNA, 25 bp, Homo sapien
ggtgtccaatctcccctttaggtca

SEQ ID NO: 3513879 - DNA, 25 bp, Homo sapien
aagggccgtccagggccagttgcct

SEQ ID NO: 3513880 - DNA, 25 bp, Homo sapien
tgagatgctcactgtgggtgtccaa

SEQ ID NO: 3513881 - DNA, 25 bp, Homo sapien
tcaggtcattgcaggcattgtgaga

SEQ ID NO: 3513882 - DNA, 25 bp, Homo sapien
gacatcctgcagctctaatactggg

SEQ ID NO: 3513883 - DNA, 25 bp, Homo sapien
ggtctgccaaggatactccctggtc

SEQ ID NO: 3513884 - DNA, 25 bp, Homo sapien
taggcacagggttctctccaagcat

SEQ ID NO: 3513885 - DNA, 25 bp, Homo sapien
tccaagcatcggcaagcctgtagag

SEQ ID NO: 3513886 - DNA, 25 bp, Homo sapien
ctgccggtccacaatgaagcagcca

SEQ ID NO: 3513887 - DNA, 25 bp, Homo sapien
aggccgatctcctggaagtactgcc

SEQ ID NO: 3513888 - DNA, 25 bp, Homo sapien
atgccttcgtccagcaggccgatct

SEQ ID NO: 3513889 - DNA, 25 bp, Homo sapien
gacttccatgccttcgtccagcagg

SEQ ID NO: 3513890 - DNA, 25 bp, Homo sapien
tgcatgtgcagaaccaaggtcctct

SEQ ID NO: 3513891 - DNA, 25 bp, Homo sapien
gaacagcgatcacaaagacatccct

SEQ ID NO: 3513892 - DNA, 25 bp, Homo sapien
tcacctggcgacttagggaacagcg

SEQ ID NO: 3513893 - DNA, 25 bp, Homo sapien
gacatccctttagaatacaccagaa

SEQ ID NO: 3513894 - DNA, 25 bp, Homo sapien
ttatcaaaggatggcgagatgatcc

SEQ ID NO: 3513895 - DNA, 25 bp, Homo sapien
tgattggcgctgtggagttctccag

SEQ ID NO: 3513896 - DNA, 25 bp, Homo sapien
ggcagccagcgggtactcttctatc

SEQ ID NO: 3513897 - DNA, 25 bp, Homo sapien
cggttctccttgatgcgggtgagta

SEQ ID NO: 3513898 - DNA, 25 bp, Homo sapien
cacgactttgatgaagcctggcttc

SEQ ID NO: 3513899 - DNA, 25 bp, Homo sapien
cacattgaactccacgtgggcatca

SEQ ID NO: 3513900 - DNA, 25 bp, Homo sapien
tggagcggatgaggccttcctgctt

SEQ ID NO: 3513901 - DNA, 25 bp, Homo sapien
tgtccacatattcggtcagcttctc

SEQ ID NO: 3513902 - DNA, 25 bp, Homo sapien
catagcagctaaggcaagagcccat

SEQ ID NO: 3513903 - DNA, 25 bp, Homo sapien
tttcatagcagctaaggcaagagcc

SEQ ID NO: 3513904 - DNA, 25 bp, Homo sapien
ctttttcatagcagctaaggcaaga

SEQ ID NO: 3513905 - DNA, 25 bp, Homo sapien
tcatagcagctaaggcaagagccca

SEQ ID NO: 3513906 - DNA, 25 bp, Homo sapien
ctgccctcagttgccggtccttccc

SEQ ID NO: 3513907 - DNA, 25 bp, Homo sapien
ttccaaacccactggccccatcttg

SEQ ID NO: 3513908 - DNA, 25 bp, Homo sapien
catcttgctgccctcagttgccggt

SEQ ID NO: 3513909 - DNA, 25 bp, Homo sapien
ttccagctgcttttcgtttctctac

SEQ ID NO: 3513910 - DNA, 25 bp, Homo sapien
ttctgcagaggccacggctttttgt

SEQ ID NO: 3513911 - DNA, 25 bp, Homo sapien
ttgcagctgcgggtaagaacagcgt

SEQ ID NO: 3513912 - DNA, 25 bp, Homo sapien
tgccttgcagctgcgggtaagaaca

SEQ ID NO: 3513913 - DNA, 25 bp, Homo sapien
ccttgcagctgcgggtaagaacagc

SEQ ID NO: 3513914 - DNA, 25 bp, Homo sapien
ctgccttgcagctgcgggtaagaac

SEQ ID NO: 3513915 - DNA, 25 bp, Homo sapien
tctttggagttagcacagctctaga

SEQ ID NO: 3513916 - DNA, 25 bp, Homo sapien
gtttctctttggagttagcacagct

SEQ ID NO: 3513917 - DNA, 25 bp, Homo sapien
ccggagatggtgtaatgcttgtttc

SEQ ID NO: 3513918 - DNA, 25 bp, Homo sapien
gggccccggagatggtgtaatgctt

SEQ ID NO: 3513919 - DNA, 25 bp, Homo sapien
tgaggaccccggtgggaagctcttc

SEQ ID NO: 3513920 - DNA, 25 bp, Homo sapien
gacaagccctgcaccgtgtagctca

SEQ ID NO: 3513921 - DNA, 25 bp, Homo sapien
aagctgggacaagccctgcaccgtg

SEQ ID NO: 3513922 - DNA, 25 bp, Homo sapien
ctgaggaccccggtgggaagctctt

SEQ ID NO: 3513923 - DNA, 25 bp, Homo sapien
attctctcaagcttctaactttcgg

SEQ ID NO: 3513924 - DNA, 25 bp, Homo sapien
cagtttgctggcttatgtgcttgcc

SEQ ID NO: 3513925 - DNA, 25 bp, Homo sapien
cgcgtgagactccaaatccgtattc

SEQ ID NO: 3513926 - DNA, 25 bp, Homo sapien
ggctttaattactccacgcgtgaga

SEQ ID NO: 3513927 - DNA, 25 bp, Homo sapien
ctccttacaatgtaagacgtgagga

SEQ ID NO: 3513928 - DNA, 25 bp, Homo sapien
ccatcctgtgcctccttacaatgta

SEQ ID NO: 3513929 - DNA, 25 bp, Homo sapien
aatgtaagacgtgaggaggatcagc

SEQ ID NO: 3513930 - DNA, 25 bp, Homo sapien
tccatcctgtgcctccttacaatgt

SEQ ID NO: 3513931 - DNA, 25 bp, Homo sapien
ggcgtgcgttccatggccgagtgga

SEQ ID NO: 3513932 - DNA, 25 bp, Homo sapien
gcttcattgacgaagatgaacacga

SEQ ID NO: 3513933 - DNA, 25 bp, Homo sapien
gccgagtggatggagcgcagcagca

SEQ ID NO: 3513934 - DNA, 25 bp, Homo sapien
gcactgaaagcgcttcattgacgaa

SEQ ID NO: 3513935 - DNA, 25 bp, Homo sapien
gtcaggaaatgagaggttacggcac

SEQ ID NO: 3513936 - DNA, 25 bp, Homo sapien
tgtcaggaaatgagaggttacggca

SEQ ID NO: 3513937 - DNA, 25 bp, Homo sapien
ctgtcaggaaatgagaggttacggc

SEQ ID NO: 3513938 - DNA, 25 bp, Homo sapien
gctcagtttctttacactgtaatcc

SEQ ID NO: 3513939 - DNA, 25 bp, Homo sapien
tccagaagtgctcagtttctttaca

SEQ ID NO: 3513940 - DNA, 25 bp, Homo sapien
tctttacactgtaatcccttcaggc

SEQ ID NO: 3513941 - DNA, 25 bp, Homo sapien
actgtaatcccttcaggccaaacgc

SEQ ID NO: 3513942 - DNA, 25 bp, Homo sapien
actgctggggcctcctggcgacagc

SEQ ID NO: 3513943 - DNA, 25 bp, Homo sapien
ttctcttctctcctgggactgctgg

SEQ ID NO: 3513944 - DNA, 25 bp, Homo sapien
gctggggcctcctggcgacagccat

SEQ ID NO: 3513945 - DNA, 25 bp, Homo sapien
tgggactgctggggcctcctggcga

SEQ ID NO: 3513946 - DNA, 25 bp, Homo sapien
tctccacacctgacctaatgtggcc

SEQ ID NO: 3513947 - DNA, 25 bp, Homo sapien
tgtggcctctctctcggcatcagga

SEQ ID NO: 3513948 - DNA, 25 bp, Homo sapien
cagtttctccacacctgacctaatg

SEQ ID NO: 3513949 - DNA, 25 bp, Homo sapien
ctcggcatcaggagacacctttcct

SEQ ID NO: 3513950 - DNA, 25 bp, Homo sapien
ccccaggatcggcactgtcttcttg

SEQ ID NO: 3513951 - DNA, 25 bp, Homo sapien
tggccccaggatcggcactgtcttc

SEQ ID NO: 3513952 - DNA, 25 bp, Homo sapien
ccaggatcggcactgtcttcttggc

SEQ ID NO: 3513953 - DNA, 25 bp, Homo sapien
ggtctggccccaggatcggcactgt

SEQ ID NO: 3513954 - DNA, 25 bp, Homo sapien
cggtcgctgaggtaggcgttgtagc

SEQ ID NO: 3513955 - DNA, 25 bp, Homo sapien
tagccgtagtactggaattgcttca

SEQ ID NO: 3513956 - DNA, 25 bp, Homo sapien
cccagtgtgcaaacagagaggagtc

SEQ ID NO: 3513957 - DNA, 25 bp, Homo sapien
tggaattgcttcagggccacgcgcc

SEQ ID NO: 3513958 - DNA, 25 bp, Homo sapien
ctgcagatccccttctgctgaagct

SEQ ID NO: 3513959 - DNA, 25 bp, Homo sapien
tccctgcagatccccttctgctgaa

SEQ ID NO: 3513960 - DNA, 25 bp, Homo sapien
ttctaggaccagatccctgcagatc

SEQ ID NO: 3513961 - DNA, 25 bp, Homo sapien
cttctaggaccagatccctgcagat

SEQ ID NO: 3513962 - DNA, 25 bp, Homo sapien
aatcaaatgaaagcactccaggccc

SEQ ID NO: 3513963 - DNA, 25 bp, Homo sapien
gattccagaaggctcgttttgggcc

SEQ ID NO: 3513964 - DNA, 25 bp, Homo sapien
agcatttagaaagcctgaggattcc

SEQ ID NO: 3513965 - DNA, 25 bp, Homo sapien
tattcaatagagatgcaagatccga

SEQ ID NO: 3513966 - DNA, 25 bp, Homo sapien
agaaaactgcggagatgcccctaga

SEQ ID NO: 3513967 - DNA, 25 bp, Homo sapien
gctaagtgcttacggtacccaacaa

SEQ ID NO: 3513968 - DNA, 25 bp, Homo sapien
gggagccacggttttcttgacgcat

SEQ ID NO: 3513969 - DNA, 25 bp, Homo sapien
aatactgctagccagccctgggagg

SEQ ID NO: 3513970 - DNA, 25 bp, Homo sapien
gtgagatggctcatgacgatagaaa

SEQ ID NO: 3513971 - DNA, 25 bp, Homo sapien
catggcgaacgtgaaattgcccttc

SEQ ID NO: 3513972 - DNA, 25 bp, Homo sapien
tggtcccctgaaggctgtgatctct

SEQ ID NO: 3513973 - DNA, 25 bp, Homo sapien
tagaaatatggacatggcgaacgtg

SEQ ID NO: 3513974 - DNA, 25 bp, Homo sapien
gctgacttatcagggcctggaactg

SEQ ID NO: 3513975 - DNA, 25 bp, Homo sapien
tgaacagagctagttggacacattc

SEQ ID NO: 3513976 - DNA, 25 bp, Homo sapien
ttgcaatagctgacttatcagggcc

SEQ ID NO: 3513977 - DNA, 25 bp, Homo sapien
tggttattcagggatacccagagct

SEQ ID NO: 3513978 - DNA, 25 bp, Homo sapien
gaatccttctcgcattgaatcactg

SEQ ID NO: 3513979 - DNA, 25 bp, Homo sapien
tcagcccaggtggatcgaatccttc

SEQ ID NO: 3513980 - DNA, 25 bp, Homo sapien
cacatagggttgtttggagagtcaa

SEQ ID NO: 3513981 - DNA, 25 bp, Homo sapien
gactcttgtggacgatccaggataa

SEQ ID NO: 3513982 - DNA, 25 bp, Homo sapien
ctctattgggtggatctttttgggc

SEQ ID NO: 3513983 - DNA, 25 bp, Homo sapien
cagcttttcctctattgggtggatc

SEQ ID NO: 3513984 - DNA, 25 bp, Homo sapien
tattgggtggatctttttgggcagc

SEQ ID NO: 3513985 - DNA, 25 bp, Homo sapien
tcagtagggcagcttttcctctatt

SEQ ID NO: 3513986 - DNA, 25 bp, Homo sapien
ccggcccatcgtgctattattcaaa

SEQ ID NO: 3513987 - DNA, 25 bp, Homo sapien
caaatcagagagatgaatccggccc

SEQ ID NO: 3513988 - DNA, 25 bp, Homo sapien
caaagctggtgtaagactaatgttc

SEQ ID NO: 3513989 - DNA, 25 bp, Homo sapien
ccatgatcatctgggagtgttgcaa

SEQ ID NO: 3513990 - DNA, 25 bp, Homo sapien
aagcggtagcagaggctctcagaag

SEQ ID NO: 3513991 - DNA, 25 bp, Homo sapien
caggaacaagccagaaagcccttgt

SEQ ID NO: 3513992 - DNA, 25 bp, Homo sapien
tgagttggggcaatcctcattatag

SEQ ID NO: 3513993 - DNA, 25 bp, Homo sapien
tcagaagtcccctggtactgggaac

SEQ ID NO: 3513994 - DNA, 25 bp, Homo sapien
tctgtagaagagtcgagaaaactca

SEQ ID NO: 3513995 - DNA, 25 bp, Homo sapien
ttacagtcagagaagattaaatgga

SEQ ID NO: 3513996 - DNA, 25 bp, Homo sapien
gctgtggacttcagtcagtggcttc

SEQ ID NO: 3513997 - DNA, 25 bp, Homo sapien
gagagattctatgatggtagcaatg

SEQ ID NO: 3513998 - DNA, 25 bp, Homo sapien
ctccaagaagtacaacccacagcat

SEQ ID NO: 3513999 - DNA, 25 bp, Homo sapien
gccctccaagaagtacaacccacag

SEQ ID NO: 3514000 - DNA, 25 bp, Homo sapien
ccctccaagaagtacaacccacagc

SEQ ID NO: 3514001 - DNA, 25 bp, Homo sapien
cctccaagaagtacaacccacagca

SEQ ID NO: 3514002 - DNA, 25 bp, Homo sapien
ttccaattatcaaagagaaagatgc

SEQ ID NO: 3514003 - DNA, 25 bp, Homo sapien
tggttccaattatcaaagagaaaga

SEQ ID NO: 3514004 - DNA, 25 bp, Homo sapien
ccaattatcaaagagaaagatgcag

SEQ ID NO: 3514005 - DNA, 25 bp, Homo sapien
ggttccaattatcaaagagaaagat

SEQ ID NO: 3514006 - DNA, 25 bp, Homo sapien
tccagctgcagataagttgtgacat

SEQ ID NO: 3514007 - DNA, 25 bp, Homo sapien
tggcagccgcagactttgctaaatt

SEQ ID NO: 3514008 - DNA, 25 bp, Homo sapien
gacatttgtaacaacttgccagtca

SEQ ID NO: 3514009 - DNA, 25 bp, Homo sapien
tttgctaaattatccttccagctgc

SEQ ID NO: 3514010 - DNA, 25 bp, Homo sapien
tccttgcagggatgctacagcctgc

SEQ ID NO: 3514011 - DNA, 25 bp, Homo sapien
ctacagcctgcaggtgttcatccat

SEQ ID NO: 3514012 - DNA, 25 bp, Homo sapien
cttgcagggatgctacagcctgcag

SEQ ID NO: 3514013 - DNA, 25 bp, Homo sapien
gaatccttgcagggatgctacagcc

SEQ ID NO: 3514014 - DNA, 25 bp, Homo sapien
tacactggcttagtctcccagccta

SEQ ID NO: 3514015 - DNA, 25 bp, Homo sapien
ccagtgtggtcagaataaaagcagc

SEQ ID NO: 3514016 - DNA, 25 bp, Homo sapien
gcagcagaagaacctggaaagacta

SEQ ID NO: 3514017 - DNA, 25 bp, Homo sapien
tgtggtcagaataaaagcagcagaa

SEQ ID NO: 3514018 - DNA, 25 bp, Homo sapien
atctgagctcaagcattgcatttgc

SEQ ID NO: 3514019 - DNA, 25 bp, Homo sapien
cataagtgatgttgtgctcatccca

SEQ ID NO: 3514020 - DNA, 25 bp, Homo sapien
gccacataatgtcagtttgccccat

SEQ ID NO: 3514021 - DNA, 25 bp, Homo sapien
tcattgacatttttagaggatacgc

SEQ ID NO: 3514022 - DNA, 25 bp, Homo sapien
gcccattctgaatcctctgtcttga

SEQ ID NO: 3514023 - DNA, 25 bp, Homo sapien
gaatcctctgtcttgaatgccctga

SEQ ID NO: 3514024 - DNA, 25 bp, Homo sapien
ctctcggaccaaactgaacttttct

SEQ ID NO: 3514025 - DNA, 25 bp, Homo sapien
gattctcatctttcacaagtgtttg

SEQ ID NO: 3514026 - DNA, 25 bp, Homo sapien
aaaggtagagctgtcatcctccagc

SEQ ID NO: 3514027 - DNA, 25 bp, Homo sapien
catcctccagcagtctccaaggtgg

SEQ ID NO: 3514028 - DNA, 25 bp, Homo sapien
aacgttctgtcccaaaggtagagct

SEQ ID NO: 3514029 - DNA, 25 bp, Homo sapien
ccagcagtctccaaggtggcagagc

SEQ ID NO: 3514030 - DNA, 25 bp, Homo sapien
cctgcaataggcctttgccggctgc

SEQ ID NO: 3514031 - DNA, 25 bp, Homo sapien
gcctttgccggctgccttcactgta

SEQ ID NO: 3514032 - DNA, 25 bp, Homo sapien
gacaacactgtgacgccatgccttg

SEQ ID NO: 3514033 - DNA, 25 bp, Homo sapien
aggacaacactgtgacgccatgcct

SEQ ID NO: 3514034 - DNA, 25 bp, Homo sapien
gctatcttcgagcattcatctctga

SEQ ID NO: 3514035 - DNA, 25 bp, Homo sapien
tcatctctgaatccaagtgccccat

SEQ ID NO: 3514036 - DNA, 25 bp, Homo sapien
tgaacatatgcataggatacacctt

SEQ ID NO: 3514037 - DNA, 25 bp, Homo sapien
gctgacagcaagaaagctatcttcg

SEQ ID NO: 3514038 - DNA, 25 bp, Homo sapien
tgctcagatcatcttgaacaacata

SEQ ID NO: 3514039 - DNA, 25 bp, Homo sapien
caacataatggaatatgtctatggc

SEQ ID NO: 3514040 - DNA, 25 bp, Homo sapien
gctggtcaatgcctgtgctcagatc

SEQ ID NO: 3514041 - DNA, 25 bp, Homo sapien
agtcatgaagagagccaagctggtc

SEQ ID NO: 3514042 - DNA, 25 bp, Homo sapien
tccaatgccacagtgctctttatcc

SEQ ID NO: 3514043 - DNA, 25 bp, Homo sapien
agtgctctttatccacatacgtctc

SEQ ID NO: 3514044 - DNA, 25 bp, Homo sapien
ctactgatgctaacgccctccaagc

SEQ ID NO: 3514045 - DNA, 25 bp, Homo sapien
gatgctaacgccctccaagcctgtt

SEQ ID NO: 3514046 - DNA, 25 bp, Homo sapien
ttttcttcgtcgttgccatggaaac

SEQ ID NO: 3514047 - DNA, 25 bp, Homo sapien
tgtaactttgttgaagggccctgga

SEQ ID NO: 3514048 - DNA, 25 bp, Homo sapien
ggaaggtgcaggataaatgtttttc

SEQ ID NO: 3514049 - DNA, 25 bp, Homo sapien
acttgtgactcctacatccctgatg

SEQ ID NO: 3514050 - DNA, 25 bp, Homo sapien
cacattcagataagcgcgtgcacag

SEQ ID NO: 3514051 - DNA, 25 bp, Homo sapien
gataagcgcgtgcacagtgtatcca

SEQ ID NO: 3514052 - DNA, 25 bp, Homo sapien
tatccaagccacactccttgaaatc

SEQ ID NO: 3514053 - DNA, 25 bp, Homo sapien
cagtgtatccaagccacactccttg

SEQ ID NO: 3514054 - DNA, 25 bp, Homo sapien
aactgcgaggcgcctttttcaggga

SEQ ID NO: 3514055 - DNA, 25 bp, Homo sapien
actgcgaggcgcctttttcagggag

SEQ ID NO: 3514056 - DNA, 25 bp, Homo sapien
cagaaactgcgaggcgcctttttca

SEQ ID NO: 3514057 - DNA, 25 bp, Homo sapien
gcagcagaaactgcgaggcgccttt

SEQ ID NO: 3514058 - DNA, 25 bp, Homo sapien
gcttccttttgacattcgggcctca

SEQ ID NO: 3514059 - DNA, 25 bp, Homo sapien
cttccttttgacattcgggcctcag

SEQ ID NO: 3514060 - DNA, 25 bp, Homo sapien
ccttttgacattcgggcctcagaag

SEQ ID NO: 3514061 - DNA, 25 bp, Homo sapien
tccttttgacattcgggcctcagaa

SEQ ID NO: 3514062 - DNA, 25 bp, Homo sapien
aagcagccagccagtatggaatttc

SEQ ID NO: 3514063 - DNA, 25 bp, Homo sapien
agaacaagcagccagccagtatgga

SEQ ID NO: 3514064 - DNA, 25 bp, Homo sapien
gaagaacaagcagccagccagtatg

SEQ ID NO: 3514065 - DNA, 25 bp, Homo sapien
ctatggaagaacaagcagccagcca

SEQ ID NO: 3514066 - DNA, 25 bp, Homo sapien
aagcatagtcttaaagcattgttcg

SEQ ID NO: 3514067 - DNA, 25 bp, Homo sapien
cattgttcgtcagcggtgcttcttg

SEQ ID NO: 3514068 - DNA, 25 bp, Homo sapien
taaagcattgttcgtcagcggtgct

SEQ ID NO: 3514069 - DNA, 25 bp, Homo sapien
tagtcttaaagcattgttcgtcagc

SEQ ID NO: 3514070 - DNA, 25 bp, Homo sapien
gtctttggggtagccataggagaaa

SEQ ID NO: 3514071 - DNA, 25 bp, Homo sapien
tgagacatggagatcacaaaacagg

SEQ ID NO: 3514072 - DNA, 25 bp, Homo sapien
caagcagtgaagagatgagacatgg

SEQ ID NO: 3514073 - DNA, 25 bp, Homo sapien
caaaacagggcatgaggtctttggg

SEQ ID NO: 3514074 - DNA, 25 bp, Homo sapien
ttgagtgaagaacggacccacatca

SEQ ID NO: 3514075 - DNA, 25 bp, Homo sapien
ctagttgttgagtgaagaacggacc

SEQ ID NO: 3514076 - DNA, 25 bp, Homo sapien
agtgaagaacggacccacatcagct

SEQ ID NO: 3514077 - DNA, 25 bp, Homo sapien
gttgttgagtgaagaacggacccac

SEQ ID NO: 3514078 - DNA, 25 bp, Homo sapien
cacacacaaaagaagtcacatgcta

SEQ ID NO: 3514079 - DNA, 25 bp, Homo sapien
catgttaggatggaacaagaacgtg

SEQ ID NO: 3514080 - DNA, 25 bp, Homo sapien
tgtatccttacgaaagagagcccag

SEQ ID NO: 3514081 - DNA, 25 bp, Homo sapien
aacgtggtggtctgtgaacccggca

SEQ ID NO: 3514082 - DNA, 25 bp, Homo sapien
tcacagacctgatcctgagttggct

SEQ ID NO: 3514083 - DNA, 25 bp, Homo sapien
gaaagagagtccacataggcaatca

SEQ ID NO: 3514084 - DNA, 25 bp, Homo sapien
ggccctgcaaagaatccagatctga

SEQ ID NO: 3514085 - DNA, 25 bp, Homo sapien
gaaattaggtgctccatgcgagtcc

SEQ ID NO: 3514086 - DNA, 25 bp, Homo sapien
taaagatatctgaagtattgccatc

SEQ ID NO: 3514087 - DNA, 25 bp, Homo sapien
cagatcgcccactgatagtgataga

SEQ ID NO: 3514088 - DNA, 25 bp, Homo sapien
aagcctgtcaatttctgtgtaaaag

SEQ ID NO: 3514089 - DNA, 25 bp, Homo sapien
gttttcagagtatgagtttctgcac

SEQ ID NO: 3514090 - DNA, 25 bp, Homo sapien
cacgtggccagagaatgtactttgt

SEQ ID NO: 3514091 - DNA, 25 bp, Homo sapien
agatttcctgctgttattggttcaa

SEQ ID NO: 3514092 - DNA, 25 bp, Homo sapien
cctagtgtatggtgtattctggata

SEQ ID NO: 3514093 - DNA, 25 bp, Homo sapien
ggttcaattacatttcacgtggcca

SEQ ID NO: 3514094 - DNA, 25 bp, Homo sapien
tggtctgaagcttacaatatacctc

SEQ ID NO: 3514095 - DNA, 25 bp, Homo sapien
taagctcagcagtacaataatttgc

SEQ ID NO: 3514096 - DNA, 25 bp, Homo sapien
tcctatatgaaccttgttgagcttc

SEQ ID NO: 3514097 - DNA, 25 bp, Homo sapien
taagatggacctgataacaacaaat

SEQ ID NO: 3514098 - DNA, 25 bp, Homo sapien
gcataattagtttcccggcccatag

SEQ ID NO: 3514099 - DNA, 25 bp, Homo sapien
tctcctcggttgacccactggctat

SEQ ID NO: 3514100 - DNA, 25 bp, Homo sapien
ccccaaaggctacacaatctgtttg

SEQ ID NO: 3514101 - DNA, 25 bp, Homo sapien
cactggctattgctcctggccgtga

SEQ ID NO: 3514102 - DNA, 25 bp, Homo sapien
ctctttgtcccataagcacctggtt

SEQ ID NO: 3514103 - DNA, 25 bp, Homo sapien
caagctgttcgaagtccagcatctg

SEQ ID NO: 3514104 - DNA, 25 bp, Homo sapien
ggtaacagggaagcaggtatgtcac

SEQ ID NO: 3514105 - DNA, 25 bp, Homo sapien
caggtatgtcacatagtgagagagg

SEQ ID NO: 3514106 - DNA, 25 bp, Homo sapien
tctgcaagctgttcgaagtccagca

SEQ ID NO: 3514107 - DNA, 25 bp, Homo sapien
gacagggattacatttactcggaaa

SEQ ID NO: 3514108 - DNA, 25 bp, Homo sapien
gagtcagtactaatcccacttctgg

SEQ ID NO: 3514109 - DNA, 25 bp, Homo sapien
tgaatgataacacccaatgctggcc

SEQ ID NO: 3514110 - DNA, 25 bp, Homo sapien
ctttggtacaataagacactgttgg

SEQ ID NO: 3514111 - DNA, 25 bp, Homo sapien
tgttctcaaacgtgtttacactatt

SEQ ID NO: 3514112 - DNA, 25 bp, Homo sapien
ttaactaactcaagccctgaccacg

SEQ ID NO: 3514113 - DNA, 25 bp, Homo sapien
tgaccacgttgactaaaagggattc

SEQ ID NO: 3514114 - DNA, 25 bp, Homo sapien
ggcacacattaggtctccaacagat

SEQ ID NO: 3514115 - DNA, 25 bp, Homo sapien
cctttgaaaacaagtccgctatgac

SEQ ID NO: 3514116 - DNA, 25 bp, Homo sapien
gcctggtgggcctgctaggtttaca

SEQ ID NO: 3514117 - DNA, 25 bp, Homo sapien
caattcgattttgccaaggtctgcc

SEQ ID NO: 3514118 - DNA, 25 bp, Homo sapien
ccaagctcggccctgcccttaagaa

SEQ ID NO: 3514119 - DNA, 25 bp, Homo sapien
tacaggggaaccaagctcggccctg

SEQ ID NO: 3514120 - DNA, 25 bp, Homo sapien
ctacttcccggcgttgacacctgct

SEQ ID NO: 3514121 - DNA, 25 bp, Homo sapien
tacttcccggcgttgacacctgctc

SEQ ID NO: 3514122 - DNA, 25 bp, Homo sapien
cttcccggcgttgacacctgctcct

SEQ ID NO: 3514123 - DNA, 25 bp, Homo sapien
ttcccggcgttgacacctgctcctg

SEQ ID NO: 3514124 - DNA, 25 bp, Homo sapien
agcaaccagcccagagtcacacgca

SEQ ID NO: 3514125 - DNA, 25 bp, Homo sapien
tctgagccggacttgtgtgcgatcc

SEQ ID NO: 3514126 - DNA, 25 bp, Homo sapien
ggacttgtgtgcgatcccgagagcc

SEQ ID NO: 3514127 - DNA, 25 bp, Homo sapien
tgcgatcccgagagcccgcgagcaa

SEQ ID NO: 3514128 - DNA, 25 bp, Homo sapien
ggacacgtgcgcagcgcgcccccat

SEQ ID NO: 3514129 - DNA, 25 bp, Homo sapien
atttggacacgtgcgcagcgcgccc

SEQ ID NO: 3514130 - DNA, 25 bp, Homo sapien
tttggacacgtgcgcagcgcgcccc

SEQ ID NO: 3514131 - DNA, 25 bp, Homo sapien
tggacacgtgcgcagcgcgccccca

SEQ ID NO: 3514132 - DNA, 25 bp, Homo sapien
agctagctgcacacatccgctcgtg

SEQ ID NO: 3514133 - DNA, 25 bp, Homo sapien
cgccagctagctgcacacatccgct

SEQ ID NO: 3514134 - DNA, 25 bp, Homo sapien
accgccagctagctgcacacatccg

SEQ ID NO: 3514135 - DNA, 25 bp, Homo sapien
tagctgcacacatccgctcgtgcag

SEQ ID NO: 3514136 - DNA, 25 bp, Homo sapien
cccgcacatacacgctggcgatgta

SEQ ID NO: 3514137 - DNA, 25 bp, Homo sapien
ggtccagccgctcaataatcttcag

SEQ ID NO: 3514138 - DNA, 25 bp, Homo sapien
tccagcttcttgtcgggcgccggct

SEQ ID NO: 3514139 - DNA, 25 bp, Homo sapien
gcgatgtagttggtgacccagccca

SEQ ID NO: 3514140 - DNA, 25 bp, Homo sapien
gccgctcaggatcacgcaagtggac

SEQ ID NO: 3514141 - DNA, 25 bp, Homo sapien
tcaggatcacgcaagtggacaccaa

SEQ ID NO: 3514142 - DNA, 25 bp, Homo sapien
gcaagtggacaccaaagttttggtc

SEQ ID NO: 3514143 - DNA, 25 bp, Homo sapien
ggatcacgcaagtggacaccaaagt

SEQ ID NO: 3514144 - DNA, 25 bp, Homo sapien
tcagcacctgagtcccgaggttctc

SEQ ID NO: 3514145 - DNA, 25 bp, Homo sapien
aagcccggtccgctgccggtgtagc

SEQ ID NO: 3514146 - DNA, 25 bp, Homo sapien
agccgccgtgcccaagtttgcagct

SEQ ID NO: 3514147 - DNA, 25 bp, Homo sapien
tagcacgtccggagccgctgggcac

SEQ ID NO: 3514148 - DNA, 25 bp, Homo sapien
cttgacaaaggaaaccaggtggatt

SEQ ID NO: 3514149 - DNA, 25 bp, Homo sapien
agcgccggctgccttggcggtccga

SEQ ID NO: 3514150 - DNA, 25 bp, Homo sapien
tttgccactgcctgtgtcggcggcc

SEQ ID NO: 3514151 - DNA, 25 bp, Homo sapien
gatgtgtacgtctgggaaactttgc

SEQ ID NO: 3514152 - DNA, 25 bp, Homo sapien
gcagccgcgcgtccagatgtgtacg

SEQ ID NO: 3514153 - DNA, 25 bp, Homo sapien
ggcccaattcctgatcacacttgta

SEQ ID NO: 3514154 - DNA, 25 bp, Homo sapien
agttgcacgggcgtcttccattggc

SEQ ID NO: 3514155 - DNA, 25 bp, Homo sapien
cacttgtaaccatcccaatcagata

SEQ ID NO: 3514156 - DNA, 25 bp, Homo sapien
ataaggcccctgaaatagaagaagt

SEQ ID NO: 3514157 - DNA, 25 bp, Homo sapien
gcccccagctgtgaaggatcgagga

SEQ ID NO: 3514158 - DNA, 25 bp, Homo sapien
tgaggggggctggttcgtgcctgca

SEQ ID NO: 3514159 - DNA, 25 bp, Homo sapien
atcgaggatgtctctgaggggggct

SEQ ID NO: 3514160 - DNA, 25 bp, Homo sapien
ccccagctgtgaaggatcgaggatg

SEQ ID NO: 3514161 - DNA, 25 bp, Homo sapien
tgtgaggattttcagcctccatgat

SEQ ID NO: 3514162 - DNA, 25 bp, Homo sapien
cagaatgaaaggtgtgaggattttc

SEQ ID NO: 3514163 - DNA, 25 bp, Homo sapien
gttgacggctccactctgacaaggt

SEQ ID NO: 3514164 - DNA, 25 bp, Homo sapien
caaagttgacggctccactctgaca

SEQ ID NO: 3514165 - DNA, 25 bp, Homo sapien
ctgccaaagttgacggctccactct

SEQ ID NO: 3514166 - DNA, 25 bp, Homo sapien
aagttgacggctccactctgacaag

SEQ ID NO: 3514167 - DNA, 25 bp, Homo sapien
taatagatagaccccaaagtataaa

SEQ ID NO: 3514168 - DNA, 25 bp, Homo sapien
taaaacaacttgaatattactcagt

SEQ ID NO: 3514169 - DNA, 25 bp, Homo sapien
tgaaagcagactcagatgtctgggt

SEQ ID NO: 3514170 - DNA, 25 bp, Homo sapien
cacaaattaagcaaccagtggatgt

SEQ ID NO: 3514171 - DNA, 25 bp, Homo sapien
agtaagttccgtttgtgtctctagc

SEQ ID NO: 3514172 - DNA, 25 bp, Homo sapien
cagctctggccaggtccccagacat

SEQ ID NO: 3514173 - DNA, 25 bp, Homo sapien
gtgtctctagcttctcatagggtgc

SEQ ID NO: 3514174 - DNA, 25 bp, Homo sapien
cttctcatagggtgcagctctggcc

SEQ ID NO: 3514175 - DNA, 25 bp, Homo sapien
tggattactggaggaagccatattt

SEQ ID NO: 3514176 - DNA, 25 bp, Homo sapien
ccaccacgttccactactttttatg

SEQ ID NO: 3514177 - DNA, 25 bp, Homo sapien
tactttttatgatggattactggag

SEQ ID NO: 3514178 - DNA, 25 bp, Homo sapien
cacgttccactactttttatgatgg

SEQ ID NO: 3514179 - DNA, 25 bp, Homo sapien
gacgtgccatctctcacaagacggg

SEQ ID NO: 3514180 - DNA, 25 bp, Homo sapien
tcagaatgacaggtaggtgcaagca

SEQ ID NO: 3514181 - DNA, 25 bp, Homo sapien
tcacaggcggagtggtctgcatgcc

SEQ ID NO: 3514182 - DNA, 25 bp, Homo sapien
gatttaaatgccctgacccatggtc

SEQ ID NO: 3514183 - DNA, 25 bp, Homo sapien
taaaagagtaagctgtaaggaagtg

SEQ ID NO: 3514184 - DNA, 25 bp, Homo sapien
gacagccagggcattaagtcatcac

SEQ ID NO: 3514185 - DNA, 25 bp, Homo sapien
aaggctccctctgcaaatctgtcaa

SEQ ID NO: 3514186 - DNA, 25 bp, Homo sapien
ggactctcattcagacccaagatgg

SEQ ID NO: 3514187 - DNA, 25 bp, Homo sapien
gctggaggctttatgaggtcccaaa

SEQ ID NO: 3514188 - DNA, 25 bp, Homo sapien
caggctgtccaggttatgggcacca

SEQ ID NO: 3514189 - DNA, 25 bp, Homo sapien
tgttgtaagctatgtcctgatcagg

SEQ ID NO: 3514190 - DNA, 25 bp, Homo sapien
caagtctgggagtgtgacttcactc

SEQ ID NO: 3514191 - DNA, 25 bp, Homo sapien
cttcttcctttcaaactagtgtctt

SEQ ID NO: 3514192 - DNA, 25 bp, Homo sapien
ttgggtttgccagaatcaaagtaac

SEQ ID NO: 3514193 - DNA, 25 bp, Homo sapien
tgaatcctggcttagcgaataggct

SEQ ID NO: 3514194 - DNA, 25 bp, Homo sapien
cattagcacgatttgtttggattag

SEQ ID NO: 3514195 - DNA, 25 bp, Homo sapien
cagctcccggtgaatgcttgatgaa

SEQ ID NO: 3514196 - DNA, 25 bp, Homo sapien
ccaggcttcacccacatggaaccag

SEQ ID NO: 3514197 - DNA, 25 bp, Homo sapien
aaccaggcttcacccacatggaacc

SEQ ID NO: 3514198 - DNA, 25 bp, Homo sapien
ggaaccaggcttcacccacatggaa

SEQ ID NO: 3514199 - DNA, 25 bp, Homo sapien
cattcacatggtaatcaggcttcat

SEQ ID NO: 3514200 - DNA, 25 bp, Homo sapien
cagtcatctctaagcttgtctgcat

SEQ ID NO: 3514201 - DNA, 25 bp, Homo sapien
aactccagtcatctctaagcttgtc

SEQ ID NO: 3514202 - DNA, 25 bp, Homo sapien
tccttcaactccagtcatctctaag

SEQ ID NO: 3514203 - DNA, 25 bp, Homo sapien
tcaactccagtcatctctaagcttg

SEQ ID NO: 3514204 - DNA, 25 bp, Homo sapien
tcagccatgacctacttcttccagg

SEQ ID NO: 3514205 - DNA, 25 bp, Homo sapien
cagccatgacctacttcttccaggc

SEQ ID NO: 3514206 - DNA, 25 bp, Homo sapien
tcagggttggcaacaaataaagtgt

SEQ ID NO: 3514207 - DNA, 25 bp, Homo sapien
cactccaactcatcagggttggcaa

SEQ ID NO: 3514208 - DNA, 25 bp, Homo sapien
tcggccactccaactcatcagggtt

SEQ ID NO: 3514209 - DNA, 25 bp, Homo sapien
caactcatcagggttggcaacaaat

SEQ ID NO: 3514210 - DNA, 25 bp, Homo sapien
ccacttaggtacagcagatcttccc

SEQ ID NO: 3514211 - DNA, 25 bp, Homo sapien
catatggaaaagctggcctcaccac

SEQ ID NO: 3514212 - DNA, 25 bp, Homo sapien
ggaaaagctggcctcaccacatcct

SEQ ID NO: 3514213 - DNA, 25 bp, Homo sapien
aaatgaaatgcccaccccacttagg

SEQ ID NO: 3514214 - DNA, 25 bp, Homo sapien
ctggtgcatcgtagttgcaggataa

SEQ ID NO: 3514215 - DNA, 25 bp, Homo sapien
caggataacgacttgctgaatgcaa

SEQ ID NO: 3514216 - DNA, 25 bp, Homo sapien
tagttgcaggataacgacttgctga

SEQ ID NO: 3514217 - DNA, 25 bp, Homo sapien
tgcatcgtagttgcaggataacgac

SEQ ID NO: 3514218 - DNA, 25 bp, Homo sapien
gacaaatgaaaacagggtagacggc

SEQ ID NO: 3514219 - DNA, 25 bp, Homo sapien
aggaccacgttagttactgggatgg

SEQ ID NO: 3514220 - DNA, 25 bp, Homo sapien
gcaacaattccactaataaggacca

SEQ ID NO: 3514221 - DNA, 25 bp, Homo sapien
acaaatgaaaacagggtagacggca

SEQ ID NO: 3514222 - DNA, 25 bp, Homo sapien
cccgccaatgctgtgatagtgataa

SEQ ID NO: 3514223 - DNA, 25 bp, Homo sapien
tacatcccgagagaaagacttcttt

SEQ ID NO: 3514224 - DNA, 25 bp, Homo sapien
gaaaaagcgtgattgagcagaactc

SEQ ID NO: 3514225 - DNA, 25 bp, Homo sapien
tatgacaaggcctgactacatcccg

SEQ ID NO: 3514226 - DNA, 25 bp, Homo sapien
gtaaaatactccatacagagcctgg

SEQ ID NO: 3514227 - DNA, 25 bp, Homo sapien
tatatactgagcatctataatgtgt

SEQ ID NO: 3514228 - DNA, 25 bp, Homo sapien
agaacacagtatgatttaatgtgaa

SEQ ID NO: 3514229 - DNA, 25 bp, Homo sapien
cattatgttaaccagttttcataca

SEQ ID NO: 3514230 - DNA, 25 bp, Homo sapien
cttatcaggctctcctgcaatagtc

SEQ ID NO: 3514231 - DNA, 25 bp, Homo sapien
ctcctgcaatagtcaagccagtggc

SEQ ID NO: 3514232 - DNA, 25 bp, Homo sapien
gggaggtggcccgcggtggtgtctc

SEQ ID NO: 3514233 - DNA, 25 bp, Homo sapien
cgggaggtggcccgcggtggtgtct

SEQ ID NO: 3514234 - DNA, 25 bp, Homo sapien
ggaggtggcccgcggtggtgtctct

SEQ ID NO: 3514235 - DNA, 25 bp, Homo sapien
agatggggctttcggctcgagtctt

SEQ ID NO: 3514236 - DNA, 25 bp, Homo sapien
gggatgacgtccaggcgctttgcta

SEQ ID NO: 3514237 - DNA, 25 bp, Homo sapien
caggcgctttgctaaagggaagcca

SEQ ID NO: 3514238 - DNA, 25 bp, Homo sapien
aagccagaagggtatgagttgctag

SEQ ID NO: 3514239 - DNA, 25 bp, Homo sapien
caggcgccgggcttggagcccgacg

SEQ ID NO: 3514240 - DNA, 25 bp, Homo sapien
gcccgacgggccgaattctcgcgag

SEQ ID NO: 3514241 - DNA, 25 bp, Homo sapien
gcttggagcccgacgggccgaattc

SEQ ID NO: 3514242 - DNA, 25 bp, Homo sapien
cgacgggccgaattctcgcgagagc

SEQ ID NO: 3514243 - DNA, 25 bp, Homo sapien
gcactggccagcgaatttcaacgta

SEQ ID NO: 3514244 - DNA, 25 bp, Homo sapien
tttagggtagaatccagcactggcc

SEQ ID NO: 3514245 - DNA, 25 bp, Homo sapien
gatacgagaagccttgactacttgg

SEQ ID NO: 3514246 - DNA, 25 bp, Homo sapien
ctgatcatcaggctaatgctttgga

SEQ ID NO: 3514247 - DNA, 25 bp, Homo sapien
gcaaggacgatttttgtaaaaggca

SEQ ID NO: 3514248 - DNA, 25 bp, Homo sapien
gaagggcagtgatagttgttttgca

SEQ ID NO: 3514249 - DNA, 25 bp, Homo sapien
gcagagagttatgtgtcagtatttg

SEQ ID NO: 3514250 - DNA, 25 bp, Homo sapien
tatttgttcatcaagcgtcaccaac

SEQ ID NO: 3514251 - DNA, 25 bp, Homo sapien
ttttatagctagccaactagctttt

SEQ ID NO: 3514252 - DNA, 25 bp, Homo sapien
cttttatagctagccaactagcttt

SEQ ID NO: 3514253 - DNA, 25 bp, Homo sapien
gggctgcaaatcatcatgaagacca

SEQ ID NO: 3514254 - DNA, 25 bp, Homo sapien
gttgcacgttcttaggagtaccctc

SEQ ID NO: 3514255 - DNA, 25 bp, Homo sapien
cagcttcaaggttttaaacaggcag

SEQ ID NO: 3514256 - DNA, 25 bp, Homo sapien
agtctctaggaaggagaggttgaaa

SEQ ID NO: 3514257 - DNA, 25 bp, Homo sapien
gaaccaagatattcacgtgatatag

SEQ ID NO: 3514258 - DNA, 25 bp, Homo sapien
gatattcacgtgatatagtcaagat

SEQ ID NO: 3514259 - DNA, 25 bp, Homo sapien
tggactataatacactatcagaacc

SEQ ID NO: 3514260 - DNA, 25 bp, Homo sapien
gttgcccttagtaaccacactcact

SEQ ID NO: 3514261 - DNA, 25 bp, Homo sapien
cacttactgaggtaaaacccctgtg

SEQ ID NO: 3514262 - DNA, 25 bp, Homo sapien
cctgcttactgcgtagtgctgaatg

SEQ ID NO: 3514263 - DNA, 25 bp, Homo sapien
tgatctgatcatgtcccaccagtga

SEQ ID NO: 3514264 - DNA, 25 bp, Homo sapien
caccagtgactttaaggaacccagc

SEQ ID NO: 3514265 - DNA, 25 bp, Homo sapien
gccaggaaaatagccagctagcatc

SEQ ID NO: 3514266 - DNA, 25 bp, Homo sapien
agccaggaaaatagccagctagcat

SEQ ID NO: 3514267 - DNA, 25 bp, Homo sapien
aaaaatatgatccttttcagacgag

SEQ ID NO: 3514268 - DNA, 25 bp, Homo sapien
aatatgatccttttcagacgagcaa

SEQ ID NO: 3514269 - DNA, 25 bp, Homo sapien
tataagccggagaccaatacacaca

SEQ ID NO: 3514270 - DNA, 25 bp, Homo sapien
gggatcagatgggtttagacacctt

SEQ ID NO: 3514271 - DNA, 25 bp, Homo sapien
tattttgcaactacgaccattaagc

SEQ ID NO: 3514272 - DNA, 25 bp, Homo sapien
cagtagttttctaagctttgccaga

SEQ ID NO: 3514273 - DNA, 25 bp, Homo sapien
tttatgatatggagcggcactaacc

SEQ ID NO: 3514274 - DNA, 25 bp, Homo sapien
tgatcattacatgtcatcagtataa

SEQ ID NO: 3514275 - DNA, 25 bp, Homo sapien
agtgacagccaaacatgattataat

SEQ ID NO: 3514276 - DNA, 25 bp, Homo sapien
actaaccggtagaaatacagtgaca

SEQ ID NO: 3514277 - DNA, 25 bp, Homo sapien
tcagaagtaaatccaacgtgtgttg

SEQ ID NO: 3514278 - DNA, 25 bp, Homo sapien
cctcattgacaattcagaagtaaat

SEQ ID NO: 3514279 - DNA, 25 bp, Homo sapien
caacgtgtgttgactcttggaaagc

SEQ ID NO: 3514280 - DNA, 25 bp, Homo sapien
tgatgcacacattacctcattgaca

SEQ ID NO: 3514281 - DNA, 25 bp, Homo sapien
taggtcccataggattgtcgttgcc

SEQ ID NO: 3514282 - DNA, 25 bp, Homo sapien
gaggttcctcagtgctaggtcccat

SEQ ID NO: 3514283 - DNA, 25 bp, Homo sapien
tcaggtcatggtacagactgatgca

SEQ ID NO: 3514284 - DNA, 25 bp, Homo sapien
catcagaacgtttcccttagaccga

SEQ ID NO: 3514285 - DNA, 25 bp, Homo sapien
tgagcatccataacctaacaggcag

SEQ ID NO: 3514286 - DNA, 25 bp, Homo sapien
tactgttagcaaatgtggctctgcc

SEQ ID NO: 3514287 - DNA, 25 bp, Homo sapien
ttctaaggcgggcactcaaggtgag

SEQ ID NO: 3514288 - DNA, 25 bp, Homo sapien
catgccgtgtgtagctgatctgtac

SEQ ID NO: 3514289 - DNA, 25 bp, Homo sapien
gtattgtgatacatctagaggccaa

SEQ ID NO: 3514290 - DNA, 25 bp, Homo sapien
ggtttaagctaaatgaccgcacagc

SEQ ID NO: 3514291 - DNA, 25 bp, Homo sapien
gaaataagcattggttgccaggcca

SEQ ID NO: 3514292 - DNA, 25 bp, Homo sapien
gcaggagagagctaccaacttacac

SEQ ID NO: 3514293 - DNA, 25 bp, Homo sapien
cattacgtggactagaggatactct

SEQ ID NO: 3514294 - DNA, 25 bp, Homo sapien
ttattttgttcagcgtcaaggccct

SEQ ID NO: 3514295 - DNA, 25 bp, Homo sapien
ggtttcaaaggagttcatggcccaa

SEQ ID NO: 3514296 - DNA, 25 bp, Homo sapien
caaatgaagcttgtggccacctagg

SEQ ID NO: 3514297 - DNA, 25 bp, Homo sapien
caagtgctcagtgcaatcctgtgac

SEQ ID NO: 3514298 - DNA, 25 bp, Homo sapien
gttactgtccccttgtgcctggtca

SEQ ID NO: 3514299 - DNA, 25 bp, Homo sapien
tagtgcctccaagatgtgctgtccc

SEQ ID NO: 3514300 - DNA, 25 bp, Homo sapien
tcaaatgcagttacccactgggcag

SEQ ID NO: 3514301 - DNA, 25 bp, Homo sapien
gaatgccagtgacctatagaggcta

SEQ ID NO: 3514302 - DNA, 25 bp, Homo sapien
tctaggtgggcgcaatttgatcaca

SEQ ID NO: 3514303 - DNA, 25 bp, Homo sapien
ggaccttgacgtgggaagattattc

SEQ ID NO: 3514304 - DNA, 25 bp, Homo sapien
taaggaccttgacgtgggaagattg

SEQ ID NO: 3514305 - DNA, 25 bp, Homo sapien
tataggtagactgcctaatctggca

SEQ ID NO: 3514306 - DNA, 25 bp, Homo sapien
taatcactataacctggacatactg

SEQ ID NO: 3514307 - DNA, 25 bp, Homo sapien
catttgattaaagaaggctccccta

SEQ ID NO: 3514308 - DNA, 25 bp, Homo sapien
cagaaggccgtgaagcatttacact

SEQ ID NO: 3514309 - DNA, 25 bp, Homo sapien
tagagttcagtgttcgcagtcgcat

SEQ ID NO: 3514310 - DNA, 25 bp, Homo sapien
tatgcccatggaaagaactgcgtgg

SEQ ID NO: 3514311 - DNA, 25 bp, Homo sapien
tcttcattagaaggacggctgcccc

SEQ ID NO: 3514312 - DNA, 25 bp, Homo sapien
gaacaaacggctgtctgccaactgg

SEQ ID NO: 3514313 - DNA, 25 bp, Homo sapien
gcaggctccctcagcgccatctctt

SEQ ID NO: 3514314 - DNA, 25 bp, Homo sapien
ttcccctcccagcagtgcagcggcg

SEQ ID NO: 3514315 - DNA, 25 bp, Homo sapien
ggctccctcagcgccatctcttcag

SEQ ID NO: 3514316 - DNA, 25 bp, Homo sapien
ctcttcccctcccagcagtgcagcg

SEQ ID NO: 3514317 - DNA, 25 bp, Homo sapien
gaagctgccaacttcatactcatcg

SEQ ID NO: 3514318 - DNA, 25 bp, Homo sapien
agctgccaacttcatactcatcggg

SEQ ID NO: 3514319 - DNA, 25 bp, Homo sapien
ccatgaagctgccaacttcatactc

SEQ ID NO: 3514320 - DNA, 25 bp, Homo sapien
cttcatactcatcggggacctctct

SEQ ID NO: 3514321 - DNA, 25 bp, Homo sapien
cacgaaggtcggcttgcacacatac

SEQ ID NO: 3514322 - DNA, 25 bp, Homo sapien
acgaaggtcggcttgcacacataca

SEQ ID NO: 3514323 - DNA, 25 bp, Homo sapien
ctggcacaagggcatcggtccaagg

SEQ ID NO: 3514324 - DNA, 25 bp, Homo sapien
tgatgaggtccagaagccggctggc

SEQ ID NO: 3514325 - DNA, 25 bp, Homo sapien
gggtcatggcaaagctcgccctcca

SEQ ID NO: 3514326 - DNA, 25 bp, Homo sapien
tccaaggctccatcaggctctagct

SEQ ID NO: 3514327 - DNA, 25 bp, Homo sapien
agcactcactgtcccgggtgcagag

SEQ ID NO: 3514328 - DNA, 25 bp, Homo sapien
cccggctggcagtccctctggttgt

SEQ ID NO: 3514329 - DNA, 25 bp, Homo sapien
cacagatggtcccattgctgcccct

SEQ ID NO: 3514330 - DNA, 25 bp, Homo sapien
ggcagtccctctggttgtcacagat

SEQ ID NO: 3514331 - DNA, 25 bp, Homo sapien
ggcaggtgtactggaagctggcaaa

SEQ ID NO: 3514332 - DNA, 25 bp, Homo sapien
tggcaggtgtactggaagctggcaa

SEQ ID NO: 3514333 - DNA, 25 bp, Homo sapien
ctggcaggtgtactggaagctggca

SEQ ID NO: 3514334 - DNA, 25 bp, Homo sapien
gcccacagtcctcgtcgatgatgca

SEQ ID NO: 3514335 - DNA, 25 bp, Homo sapien
gggcccacagtcctcgtcgatgatg

SEQ ID NO: 3514336 - DNA, 25 bp, Homo sapien
cacagtcctcgtcgatgatgcactc

SEQ ID NO: 3514337 - DNA, 25 bp, Homo sapien
gctgggcccacagtcctcgtcgatg

SEQ ID NO: 3514338 - DNA, 25 bp, Homo sapien
cacagggagcagatgtgtcaatgga

SEQ ID NO: 3514339 - DNA, 25 bp, Homo sapien
ggagcagatgtgtcaatggagagca

SEQ ID NO: 3514340 - DNA, 25 bp, Homo sapien
agatgtgtcaatggagagcagagca

SEQ ID NO: 3514341 - DNA, 25 bp, Homo sapien
agcagatgtgtcaatggagagcaga

SEQ ID NO: 3514342 - DNA, 25 bp, Homo sapien
agtcgctcctgatccctgcctggct

SEQ ID NO: 3514343 - DNA, 25 bp, Homo sapien
cctggaggatcccacaccaaattca

SEQ ID NO: 3514344 - DNA, 25 bp, Homo sapien
gaaaggcctccagactctagtcgct

SEQ ID NO: 3514345 - DNA, 25 bp, Homo sapien
tctccatgcctaggaggcttggcag

SEQ ID NO: 3514346 - DNA, 25 bp, Homo sapien
tggccgggcaggcctggacctccgg

SEQ ID NO: 3514347 - DNA, 25 bp, Homo sapien
gggcaggcctggacctccggcagct

SEQ ID NO: 3514348 - DNA, 25 bp, Homo sapien
gccgggcaggcctggacctccggca

SEQ ID NO: 3514349 - DNA, 25 bp, Homo sapien
caggcctggacctccggcagctgcc

SEQ ID NO: 3514350 - DNA, 25 bp, Homo sapien
gaataataccacactcatgcctgtg

SEQ ID NO: 3514351 - DNA, 25 bp, Homo sapien
catcatgggcgcacaataaatatgt

SEQ ID NO: 3514352 - DNA, 25 bp, Homo sapien
cagggaaattttgaaaccataagct

SEQ ID NO: 3514353 - DNA, 25 bp, Homo sapien
ttgtaaagcccttctgtaaagcaga

SEQ ID NO: 3514354 - DNA, 25 bp, Homo sapien
taaggcatccaccaaagcttgacat

SEQ ID NO: 3514355 - DNA, 25 bp, Homo sapien
tatctacatcctgagggtgtcaaac

SEQ ID NO: 3514356 - DNA, 25 bp, Homo sapien
gggatcaaacatctagtcctgactt

SEQ ID NO: 3514357 - DNA, 25 bp, Homo sapien
cctggtcagcactcggggatcaaac

SEQ ID NO: 3514358 - DNA, 25 bp, Homo sapien
tacctcttagccctgggaccagaag

SEQ ID NO: 3514359 - DNA, 25 bp, Homo sapien
taaggaatgagtaccttgcagggcc

SEQ ID NO: 3514360 - DNA, 25 bp, Homo sapien
tgagacttaaggatagaatctgccc

SEQ ID NO: 3514361 - DNA, 25 bp, Homo sapien
acaacttagtagcacctgcccggga

SEQ ID NO: 3514362 - DNA, 25 bp, Homo sapien
tagccactgagcgtctgggcccaaa

SEQ ID NO: 3514363 - DNA, 25 bp, Homo sapien
agtcctggccactcctgtttgcccc

SEQ ID NO: 3514364 - DNA, 25 bp, Homo sapien
ggtcaaggccatagccactgagcgt

SEQ ID NO: 3514365 - DNA, 25 bp, Homo sapien
tgctgggggaatctgacaaacagcc

SEQ ID NO: 3514366 - DNA, 25 bp, Homo sapien
catggggaatgcagtcattcagagg

SEQ ID NO: 3514367 - DNA, 25 bp, Homo sapien
tggggaatgcagtcattcagaggat

SEQ ID NO: 3514368 - DNA, 25 bp, Homo sapien
gggaatgcagtcattcagaggatgg

SEQ ID NO: 3514369 - DNA, 25 bp, Homo sapien
ggccatggggaatgcagtcattcag

SEQ ID NO: 3514370 - DNA, 25 bp, Homo sapien
cacactgtgcaggaggagaggacaa

SEQ ID NO: 3514371 - DNA, 25 bp, Homo sapien
gccaccctttgaggtcagtcaccat

SEQ ID NO: 3514372 - DNA, 25 bp, Homo sapien
taagtatagtatgcctctcggatcc

SEQ ID NO: 3514373 - DNA, 25 bp, Homo sapien
tttagaaagcgccaaccagttgcct

SEQ ID NO: 3514374 - DNA, 25 bp, Homo sapien
gccttctctctttgtcggtccctgg

SEQ ID NO: 3514375 - DNA, 25 bp, Homo sapien
cacacagagcctcccaacattcttt

SEQ ID NO: 3514376 - DNA, 25 bp, Homo sapien
cacagagcctcccaacattctttca

SEQ ID NO: 3514377 - DNA, 25 bp, Homo sapien
cttctctctttgtcggtccctggaa

SEQ ID NO: 3514378 - DNA, 25 bp, Homo sapien
tgtgccaatccgatcaatgtgaaga

SEQ ID NO: 3514379 - DNA, 25 bp, Homo sapien
tgcccagccatagttgaatctcaga

SEQ ID NO: 3514380 - DNA, 25 bp, Homo sapien
aataaaattataggatgcccagcca

SEQ ID NO: 3514381 - DNA, 25 bp, Homo sapien
tcaattattacatgggacacactca

SEQ ID NO: 3514382 - DNA, 25 bp, Homo sapien
ggtccgggatccaaaaagatggcca

SEQ ID NO: 3514383 - DNA, 25 bp, Homo sapien
gaaacaatcatagccataatggccg

SEQ ID NO: 3514384 - DNA, 25 bp, Homo sapien
gagtatcccacggtaacaagagcag

SEQ ID NO: 3514385 - DNA, 25 bp, Homo sapien
cactccactgagagagggctgttac

SEQ ID NO: 3514386 - DNA, 25 bp, Homo sapien
cctacccttgtgtcaggaaatggag

SEQ ID NO: 3514387 - DNA, 25 bp, Homo sapien
ggaacaggttcaccgacgcaaggaa

SEQ ID NO: 3514388 - DNA, 25 bp, Homo sapien
tcaccgacgcaaggaaaggcatgaa

SEQ ID NO: 3514389 - DNA, 25 bp, Homo sapien
aggcatgaatcacaacagcgagaac

SEQ ID NO: 3514390 - DNA, 25 bp, Homo sapien
ctcatcctatgcacaatgtggcagc

SEQ ID NO: 3514391 - DNA, 25 bp, Homo sapien
ggccagcgtccagccaccagcctgc

SEQ ID NO: 3514392 - DNA, 25 bp, Homo sapien
tgcacaatgtggcagcaaggaggcc

SEQ ID NO: 3514393 - DNA, 25 bp, Homo sapien
atcctatgcacaatgtggcagcaag

SEQ ID NO: 3514394 - DNA, 25 bp, Homo sapien
ggccacaagtgaggacgatgtcccg

SEQ ID NO: 3514395 - DNA, 25 bp, Homo sapien
taatagtgttcagccgtggagggta

SEQ ID NO: 3514396 - DNA, 25 bp, Homo sapien
agttctgggccttcccgcttccatg

SEQ ID NO: 3514397 - DNA, 25 bp, Homo sapien
ccgccacaaccatggtgagcagggt

SEQ ID NO: 3514398 - DNA, 25 bp, Homo sapien
tactgaataatgcaagtgggcctta

SEQ ID NO: 3514399 - DNA, 25 bp, Homo sapien
ggaacttatcagtacccaaccatcg

SEQ ID NO: 3514400 - DNA, 25 bp, Homo sapien
ctagacatataggacaggcacggtt

SEQ ID NO: 3514401 - DNA, 25 bp, Homo sapien
caacagcgggatgagtcagccttgt

SEQ ID NO: 3514402 - DNA, 25 bp, Homo sapien
gcgtgtgcatccgaagccagcacat

SEQ ID NO: 3514403 - DNA, 25 bp, Homo sapien
aaaggcacactttccctactggcca

SEQ ID NO: 3514404 - DNA, 25 bp, Homo sapien
tggcttcctgcggtcttcataaaaa

SEQ ID NO: 3514405 - DNA, 25 bp, Homo sapien
agacgtggggaaaatcctcagtgcc

SEQ ID NO: 3514406 - DNA, 25 bp, Homo sapien
catttgtccagtctggttgttggtt

SEQ ID NO: 3514407 - DNA, 25 bp, Homo sapien
ccacagatgtgataactgtctctga

SEQ ID NO: 3514408 - DNA, 25 bp, Homo sapien
tgccttcttcgtctcccacagatgt

SEQ ID NO: 3514409 - DNA, 25 bp, Homo sapien
cagatgtgataactgtctctgaaaa

SEQ ID NO: 3514410 - DNA, 25 bp, Homo sapien
tactttatagtcaaggcaacggcac

SEQ ID NO: 3514411 - DNA, 25 bp, Homo sapien
tcttcagtcgcagatgagcaatgcc

SEQ ID NO: 3514412 - DNA, 25 bp, Homo sapien
taactgagcccattacgatgcagtg

SEQ ID NO: 3514413 - DNA, 25 bp, Homo sapien
tggtaggactcacactcaggtattc

SEQ ID NO: 3514414 - DNA, 25 bp, Homo sapien
gccgctgtgcccttgcatacaggag

SEQ ID NO: 3514415 - DNA, 25 bp, Homo sapien
tattcacaacgggatgctcacaacg

SEQ ID NO: 3514416 - DNA, 25 bp, Homo sapien
cacacagtcttaggcagtttgctct

SEQ ID NO: 3514417 - DNA, 25 bp, Homo sapien
gaggctcttttgtgaagccgctgtg

SEQ ID NO: 3514418 - DNA, 25 bp, Homo sapien
tgtcagagacattgcacaccagggg

SEQ ID NO: 3514419 - DNA, 25 bp, Homo sapien
ccaggggcaagctagtgctatgttc

SEQ ID NO: 3514420 - DNA, 25 bp, Homo sapien
tcatgtcagagacattgcacaccag

SEQ ID NO: 3514421 - DNA, 25 bp, Homo sapien
atgtcagagacattgcacaccaggg

SEQ ID NO: 3514422 - DNA, 25 bp, Homo sapien
catgcatgatgttagaccaagaggc

SEQ ID NO: 3514423 - DNA, 25 bp, Homo sapien
tgagggtcaattcaccataacgtgg

SEQ ID NO: 3514424 - DNA, 25 bp, Homo sapien
gagaattttgaacgcacaaccagca

SEQ ID NO: 3514425 - DNA, 25 bp, Homo sapien
gacattcctttgcaactggactggc

SEQ ID NO: 3514426 - DNA, 25 bp, Homo sapien
tgatagctgggaggtaagtttgcca

SEQ ID NO: 3514427 - DNA, 25 bp, Homo sapien
tgaatttctcggtgcacatggatgg

SEQ ID NO: 3514428 - DNA, 25 bp, Homo sapien
agtttgccaggttcacttctgatga

SEQ ID NO: 3514429 - DNA, 25 bp, Homo sapien
cgtgtctgtgttggtctcattgtga

SEQ ID NO: 3514430 - DNA, 25 bp, Homo sapien
gtgacctcatatctgcacccaactt

SEQ ID NO: 3514431 - DNA, 25 bp, Homo sapien
ctataccagatatgtcagtgacctc

SEQ ID NO: 3514432 - DNA, 25 bp, Homo sapien
tccaggctcatgatcctccataaca

SEQ ID NO: 3514433 - DNA, 25 bp, Homo sapien
gatcctccataacatctataccaga

SEQ ID NO: 3514434 - DNA, 25 bp, Homo sapien
caaaaggagctgtttcgtagaggag

SEQ ID NO: 3514435 - DNA, 25 bp, Homo sapien
tgccaaacctagaatttgctctggg

SEQ ID NO: 3514436 - DNA, 25 bp, Homo sapien
cccatcgggatcagtttggctttca

SEQ ID NO: 3514437 - DNA, 25 bp, Homo sapien
gagctaacggttcttaaatggcacc

SEQ ID NO: 3514438 - DNA, 25 bp, Homo sapien
tcttccaccgcgctgcgcaatttgt

SEQ ID NO: 3514439 - DNA, 25 bp, Homo sapien
aatttgtgctgcgtgtcctccatca

SEQ ID NO: 3514440 - DNA, 25 bp, Homo sapien
gctgcgcaatttgtgctgcgtgtcc

SEQ ID NO: 3514441 - DNA, 25 bp, Homo sapien
caccgcgctgcgcaatttgtgctgc

SEQ ID NO: 3514442 - DNA, 25 bp, Homo sapien
cggaacatctcattgagggtggcct

SEQ ID NO: 3514443 - DNA, 25 bp, Homo sapien
atctcattgagggtggcctcctcct

SEQ ID NO: 3514444 - DNA, 25 bp, Homo sapien
aacatctcattgagggtggcctcct

SEQ ID NO: 3514445 - DNA, 25 bp, Homo sapien
gaacatctcattgagggtggcctcc

SEQ ID NO: 3514446 - DNA, 25 bp, Homo sapien
cttgactggagccgaggtcgccgtc

SEQ ID NO: 3514447 - DNA, 25 bp, Homo sapien
cgggccgggcttgactggagccgag

SEQ ID NO: 3514448 - DNA, 25 bp, Homo sapien
ccgggcttgactggagccgaggtcg

SEQ ID NO: 3514449 - DNA, 25 bp, Homo sapien
tgagagccgggccgggcttgactgg

SEQ ID NO: 3514450 - DNA, 25 bp, Homo sapien
ctccgctctgcgcccgcagccgccg

SEQ ID NO: 3514451 - DNA, 25 bp, Homo sapien
tccgctctgcgcccgcagccgccgc

SEQ ID NO: 3514452 - DNA, 25 bp, Homo sapien
agagcaaccgaacccggatcctcta

SEQ ID NO: 3514453 - DNA, 25 bp, Homo sapien
tcacctagactctgtccccggttca

SEQ ID NO: 3514454 - DNA, 25 bp, Homo sapien
gatcctctacgctaatagctcccaa

SEQ ID NO: 3514455 - DNA, 25 bp, Homo sapien
tcctcgaccaggtcagagtgcccga

SEQ ID NO: 3514456 - DNA, 25 bp, Homo sapien
gctgagctcagcagagtcgtcccct

SEQ ID NO: 3514457 - DNA, 25 bp, Homo sapien
gggtggaccaagcacaggtcagccc

SEQ ID NO: 3514458 - DNA, 25 bp, Homo sapien
tggcgtcgggtcctactcgagcgcc

SEQ ID NO: 3514459 - DNA, 25 bp, Homo sapien
ccttggcgtcgggtcctactcgagc

SEQ ID NO: 3514460 - DNA, 25 bp, Homo sapien
ggcagcgccggtacccgagggagcc

SEQ ID NO: 3514461 - DNA, 25 bp, Homo sapien
ctgcgggtgcagatgcgggagcggc

SEQ ID NO: 3514462 - DNA, 25 bp, Homo sapien
ggcggggtgcggcagcgccggtacc

SEQ ID NO: 3514463 - DNA, 25 bp, Homo sapien
tgcgggccggactggatctgctcgc

SEQ ID NO: 3514464 - DNA, 25 bp, Homo sapien
ctgcctcagcgaccagctctaccga

SEQ ID NO: 3514465 - DNA, 25 bp, Homo sapien
cgcagcccggccattggccagccgg

SEQ ID NO: 3514466 - DNA, 25 bp, Homo sapien
ttctgcctcagcgaccagctctacc

SEQ ID NO: 3514467 - DNA, 25 bp, Homo sapien
ggccgcagcccggccattggccagc

SEQ ID NO: 3514468 - DNA, 25 bp, Homo sapien
tgtgaaatcctcaggaaaaatccca

SEQ ID NO: 3514469 - DNA, 25 bp, Homo sapien
tgaaatcctcaggaaaaatcccagc

SEQ ID NO: 3514470 - DNA, 25 bp, Homo sapien
cttggtctttccaagccaacctctg

SEQ ID NO: 3514471 - DNA, 25 bp, Homo sapien
tcctgtgaaatcctcaggaaaaatc

SEQ ID NO: 3514472 - DNA, 25 bp, Homo sapien
caagtcttgtcactttcaaatgagc

SEQ ID NO: 3514473 - DNA, 25 bp, Homo sapien
tccttacatctcttagagacacacg

SEQ ID NO: 3514474 - DNA, 25 bp, Homo sapien
aaatatccaaatctgaatctgctct

SEQ ID NO: 3514475 - DNA, 25 bp, Homo sapien
cctgccacttctgggtcaaggtggc

SEQ ID NO: 3514476 - DNA, 25 bp, Homo sapien
ctggaggagagcaggcagccccaag

SEQ ID NO: 3514477 - DNA, 25 bp, Homo sapien
tggaggagagcaggcagccccaagt

SEQ ID NO: 3514478 - DNA, 25 bp, Homo sapien
ctggcaggcaaaagggagacagatg

SEQ ID NO: 3514479 - DNA, 25 bp, Homo sapien
tggtaggaggacatagcccagcagt

SEQ ID NO: 3514480 - DNA, 25 bp, Homo sapien
agatggtaggaggacatagcccagc

SEQ ID NO: 3514481 - DNA, 25 bp, Homo sapien
taggaggacatagcccagcagtggc

SEQ ID NO: 3514482 - DNA, 25 bp, Homo sapien
ttcaaaggcagcaccgggcttgatt

SEQ ID NO: 3514483 - DNA, 25 bp, Homo sapien
acatctcgttcaaaggcagcaccgg

SEQ ID NO: 3514484 - DNA, 25 bp, Homo sapien
cttgattcttgcaccgggcttgatt

SEQ ID NO: 3514485 - DNA, 25 bp, Homo sapien
tgtgtcgggttccacatctcgttca

SEQ ID NO: 3514486 - DNA, 25 bp, Homo sapien
gagggtggcactcagtgtgtgtgtg

SEQ ID NO: 3514487 - DNA, 25 bp, Homo sapien
gggagggtggcactcagtgtgtgtg

SEQ ID NO: 3514488 - DNA, 25 bp, Homo sapien
gtggggagggtggcactcagtgtgt

SEQ ID NO: 3514489 - DNA, 25 bp, Homo sapien
tggggagggtggcactcagtgtgtg

SEQ ID NO: 3514490 - DNA, 25 bp, Homo sapien
ggctctgcaacagaatttccatgcc

SEQ ID NO: 3514491 - DNA, 25 bp, Homo sapien
tggctctgcaacagaatttccatgc

SEQ ID NO: 3514492 - DNA, 25 bp, Homo sapien
ccagctgccgtctgattgggcgaag

SEQ ID NO: 3514493 - DNA, 25 bp, Homo sapien
agtccagctgccgtctgattgggcg

SEQ ID NO: 3514494 - DNA, 25 bp, Homo sapien
ctcagtccagctgccgtctgattgg

SEQ ID NO: 3514495 - DNA, 25 bp, Homo sapien
agctcagtccagctgccgtctgatt

SEQ ID NO: 3514496 - DNA, 25 bp, Homo sapien
aggtccttgcttttggatcccagag

SEQ ID NO: 3514497 - DNA, 25 bp, Homo sapien
tcaggtccttgcttttggatcccag

SEQ ID NO: 3514498 - DNA, 25 bp, Homo sapien
catcaggtccttgcttttggatccc

SEQ ID NO: 3514499 - DNA, 25 bp, Homo sapien
ccatcaggtccttgcttttggatcc

SEQ ID NO: 3514500 - DNA, 25 bp, Homo sapien
catatgccatcttatttgatctatg

SEQ ID NO: 3514501 - DNA, 25 bp, Homo sapien
atatgccatcttatttgatctatgc

SEQ ID NO: 3514502 - DNA, 25 bp, Homo sapien
tacatatgccatcttatttgatcta

SEQ ID NO: 3514503 - DNA, 25 bp, Homo sapien
ctttacatatgccatcttatttgat

SEQ ID NO: 3514504 - DNA, 25 bp, Homo sapien
acacagggttattatctccacctac

SEQ ID NO: 3514505 - DNA, 25 bp, Homo sapien
aaacacagggttattatctccacct

SEQ ID NO: 3514506 - DNA, 25 bp, Homo sapien
aacacagggttattatctccaccta

SEQ ID NO: 3514507 - DNA, 25 bp, Homo sapien
ccattagggagcacacatgttggaa

SEQ ID NO: 3514508 - DNA, 25 bp, Homo sapien
caagggaatttgaccagtgaagctg

SEQ ID NO: 3514509 - DNA, 25 bp, Homo sapien
ggcttgctccaattcacaccattag

SEQ ID NO: 3514510 - DNA, 25 bp, Homo sapien
aatgcttggaatgcccctgtggacc

SEQ ID NO: 3514511 - DNA, 25 bp, Homo sapien
cacactggtcttaacgaattctgct

SEQ ID NO: 3514512 - DNA, 25 bp, Homo sapien
ctacacactggtcttaacgaattct

SEQ ID NO: 3514513 - DNA, 25 bp, Homo sapien
ctggtcttaacgaattctgcttgga

SEQ ID NO: 3514514 - DNA, 25 bp, Homo sapien
caggcgcttggctgttggactgttc

SEQ ID NO: 3514515 - DNA, 25 bp, Homo sapien
tgctggcaacgtgcacacattcacc

SEQ ID NO: 3514516 - DNA, 25 bp, Homo sapien
attgctggcaacgtgcacacattca

SEQ ID NO: 3514517 - DNA, 25 bp, Homo sapien
tgctggggtgcctccgagggcatta

SEQ ID NO: 3514518 - DNA, 25 bp, Homo sapien
tgcctccgagggcattactgacttc

SEQ ID NO: 3514519 - DNA, 25 bp, Homo sapien
gatccagttggtatgccgcattagg

SEQ ID NO: 3514520 - DNA, 25 bp, Homo sapien
tgcgagctatgtccatgagggtatc

SEQ ID NO: 3514521 - DNA, 25 bp, Homo sapien
tatctaccaggatgtattgcagtcc

SEQ ID NO: 3514522 - DNA, 25 bp, Homo sapien
catagggagccccttaagacgagcc

SEQ ID NO: 3514523 - DNA, 25 bp, Homo sapien
ctaaggtcttgacgcacacagcctg

SEQ ID NO: 3514524 - DNA, 25 bp, Homo sapien
tgggacatctccagacctaaggtct

SEQ ID NO: 3514525 - DNA, 25 bp, Homo sapien
cagaagaaccggagctgtgcttcct

SEQ ID NO: 3514526 - DNA, 25 bp, Homo sapien
cacgagtgggagtctaagaacaccc

SEQ ID NO: 3514527 - DNA, 25 bp, Homo sapien
ggctgaacaccgagacagagtatgg

SEQ ID NO: 3514528 - DNA, 25 bp, Homo sapien
ccgagacagagtatggaatgtccac

SEQ ID NO: 3514529 - DNA, 25 bp, Homo sapien
gaacaccgagacagagtatggaatg

SEQ ID NO: 3514530 - DNA, 25 bp, Homo sapien
caccgagacagagtatggaatgtcc

SEQ ID NO: 3514531 - DNA, 25 bp, Homo sapien
ctccgttcacgggaggtgcacactg

SEQ ID NO: 3514532 - DNA, 25 bp, Homo sapien
cagggcactgccctccgttcacggg

SEQ ID NO: 3514533 - DNA, 25 bp, Homo sapien
ctgccattcccctggactgaggagg

SEQ ID NO: 3514534 - DNA, 25 bp, Homo sapien
ttcacgggaggtgcacactgccaga

SEQ ID NO: 3514535 - DNA, 25 bp, Homo sapien
ttaaagagccccgtgtccctgctgc

SEQ ID NO: 3514536 - DNA, 25 bp, Homo sapien
aaactctggttggaccaatgatgga

SEQ ID NO: 3514537 - DNA, 25 bp, Homo sapien
tcctgagatctagagagcatggcgg

SEQ ID NO: 3514538 - DNA, 25 bp, Homo sapien
tggtctccgtaatgccctagggtgg

SEQ ID NO: 3514539 - DNA, 25 bp, Homo sapien
aagtcaaggcctctagccgctttga

SEQ ID NO: 3514540 - DNA, 25 bp, Homo sapien
ggcctctagccgctttgacttctgg

SEQ ID NO: 3514541 - DNA, 25 bp, Homo sapien
cagggggcagacaagtcaaggcctc

SEQ ID NO: 3514542 - DNA, 25 bp, Homo sapien
gcagacaagtcaaggcctctagccg

SEQ ID NO: 3514543 - DNA, 25 bp, Homo sapien
tgaacttttccatatgttgtggcaa

SEQ ID NO: 3514544 - DNA, 25 bp, Homo sapien
acttttccatatgttgtggcaaggg

SEQ ID NO: 3514545 - DNA, 25 bp, Homo sapien
tctgaacttttccatatgttgtggc

SEQ ID NO: 3514546 - DNA, 25 bp, Homo sapien
gaacttttccatatgttgtggcaag

SEQ ID NO: 3514547 - DNA, 25 bp, Homo sapien
tggggcttctggatgttggagtttg

SEQ ID NO: 3514548 - DNA, 25 bp, Homo sapien
ggagtttggggctggtgagggacat

SEQ ID NO: 3514549 - DNA, 25 bp, Homo sapien
gggcttctggatgttggagtttggg

SEQ ID NO: 3514550 - DNA, 25 bp, Homo sapien
tctggggcttctggatgttggagtt

SEQ ID NO: 3514551 - DNA, 25 bp, Homo sapien
cagcagctcttaccaataactgtta

SEQ ID NO: 3514552 - DNA, 25 bp, Homo sapien
gggcacagcttgtagtaggtgttca

SEQ ID NO: 3514553 - DNA, 25 bp, Homo sapien
gattccctgaatagactgtgaagct

SEQ ID NO: 3514554 - DNA, 25 bp, Homo sapien
tagtaggtgttcagtcagcaccatg

SEQ ID NO: 3514555 - DNA, 25 bp, Homo sapien
gacctgaccctcctaggaaggatgg

SEQ ID NO: 3514556 - DNA, 25 bp, Homo sapien
tctggcaacagtttgaggactaggc

SEQ ID NO: 3514557 - DNA, 25 bp, Homo sapien
gcaatggaacctgactaagtgcaca

SEQ ID NO: 3514558 - DNA, 25 bp, Homo sapien
ttttacgagattttgagagttccag

SEQ ID NO: 3514559 - DNA, 25 bp, Homo sapien
gggtaagatgtacgttactttgtca

SEQ ID NO: 3514560 - DNA, 25 bp, Homo sapien
tcaaccaggtacacaggtttccttc

SEQ ID NO: 3514561 - DNA, 25 bp, Homo sapien
agatttgggttggaggcaatgcctt

SEQ ID NO: 3514562 - DNA, 25 bp, Homo sapien
cttcttggggacttcaccagcaggg

SEQ ID NO: 3514563 - DNA, 25 bp, Homo sapien
cacaagggcccaggtgctgagttcc

SEQ ID NO: 3514564 - DNA, 25 bp, Homo sapien
accaagacctgagcgcttgttaggc

SEQ ID NO: 3514565 - DNA, 25 bp, Homo sapien
caccaagacctgagcgcttgttagg

SEQ ID NO: 3514566 - DNA, 25 bp, Homo sapien
ctagtgctgtgtagccacacaaggg

SEQ ID NO: 3514567 - DNA, 25 bp, Homo sapien
gatgtttcttgatgccaggacggga

SEQ ID NO: 3514568 - DNA, 25 bp, Homo sapien
caagcactgtgactggtcagcatac

SEQ ID NO: 3514569 - DNA, 25 bp, Homo sapien
tcccggcgcctggtactgttgagtg

SEQ ID NO: 3514570 - DNA, 25 bp, Homo sapien
cacatagacgtgttttgaggattcc

SEQ ID NO: 3514571 - DNA, 25 bp, Homo sapien
tgggaagatggggtctgtaggcccc

SEQ ID NO: 3514572 - DNA, 25 bp, Homo sapien
ccaggtgggaagatggggtctgtag

SEQ ID NO: 3514573 - DNA, 25 bp, Homo sapien
ggaagatggggtctgtaggccccac

SEQ ID NO: 3514574 - DNA, 25 bp, Homo sapien
ggccaggtgggaagatggggtctgt

SEQ ID NO: 3514575 - DNA, 25 bp, Homo sapien
ccaggtgttcctgcccatggtgggc

SEQ ID NO: 3514576 - DNA, 25 bp, Homo sapien
gttcctgcccatggtgggctctgtg

SEQ ID NO: 3514577 - DNA, 25 bp, Homo sapien
tgtggggatgcaccaggtgtggaag

SEQ ID NO: 3514578 - DNA, 25 bp, Homo sapien
gggatgcaccaggtgtggaaggcat

SEQ ID NO: 3514579 - DNA, 25 bp, Homo sapien
ctcgcactgctgagcccctggctgg

SEQ ID NO: 3514580 - DNA, 25 bp, Homo sapien
gctgagcccctggctggctcctgcc

SEQ ID NO: 3514581 - DNA, 25 bp, Homo sapien
tgagcccctggctggctcctgcctc

SEQ ID NO: 3514582 - DNA, 25 bp, Homo sapien
agcccctggctggctcctgcctcat

SEQ ID NO: 3514583 - DNA, 25 bp, Homo sapien
ggcatttgtctagctatgtaatagc

SEQ ID NO: 3514584 - DNA, 25 bp, Homo sapien
gagtagctacttcatggagttacca

SEQ ID NO: 3514585 - DNA, 25 bp, Homo sapien
gaggtatgtacactggtctgcagga

SEQ ID NO: 3514586 - DNA, 25 bp, Homo sapien
ggtagtctgggaacgcttcctggaa

SEQ ID NO: 3514587 - DNA, 25 bp, Homo sapien
gaaggacatctggatacgcccagga

SEQ ID NO: 3514588 - DNA, 25 bp, Homo sapien
caggattccttctgggacaagagag

SEQ ID NO: 3514589 - DNA, 25 bp, Homo sapien
tataaaccatcctaaggcaggtggc

SEQ ID NO: 3514590 - DNA, 25 bp, Homo sapien
gaacataacctgtactggcaccagt

SEQ ID NO: 3514591 - DNA, 25 bp, Homo sapien
tggaagagaattcggaaagaaagct

SEQ ID NO: 3514592 - DNA, 25 bp, Homo sapien
tgtcctaacctatgcaaaatgcctg

SEQ ID NO: 3514593 - DNA, 25 bp, Homo sapien
gcaactactcttgagggtaactgga

SEQ ID NO: 3514594 - DNA, 25 bp, Homo sapien
tacctaaaatgcatgttgatccctc

SEQ ID NO: 3514595 - DNA, 25 bp, Homo sapien
ctattgctgggaagcgtggcctgcc

SEQ ID NO: 3514596 - DNA, 25 bp, Homo sapien
tcaacttacagaagcacggagcagt

SEQ ID NO: 3514597 - DNA, 25 bp, Homo sapien
gaaaatgagtgtgccatctcctgac

SEQ ID NO: 3514598 - DNA, 25 bp, Homo sapien
cagatgccacttgtcagcagcagga

SEQ ID NO: 3514599 - DNA, 25 bp, Homo sapien
cctcagctctccctactccacgctg

SEQ ID NO: 3514600 - DNA, 25 bp, Homo sapien
tcctcagctctccctactccacgct

SEQ ID NO: 3514601 - DNA, 25 bp, Homo sapien
ctcagctctccctactccacgctgc

SEQ ID NO: 3514602 - DNA, 25 bp, Homo sapien
gatgccagagcttcaattagagcca

SEQ ID NO: 3514603 - DNA, 25 bp, Homo sapien
tcttgggagggtcgaccttgatcat

SEQ ID NO: 3514604 - DNA, 25 bp, Homo sapien
gacacatgctctgtaggttgaacac

SEQ ID NO: 3514605 - DNA, 25 bp, Homo sapien
catgcttctccagttgcgtctgcga

SEQ ID NO: 3514606 - DNA, 25 bp, Homo sapien
tatagaatgtcaaccaaagagtgcc

SEQ ID NO: 3514607 - DNA, 25 bp, Homo sapien
cacggaaccctgtattttgcacaca

SEQ ID NO: 3514608 - DNA, 25 bp, Homo sapien
tcctggccagtacaaagtcgttgct

SEQ ID NO: 3514609 - DNA, 25 bp, Homo sapien
catctcatcacaacgcatgtctgtg

SEQ ID NO: 3514610 - DNA, 25 bp, Homo sapien
gagccagaggccgaagattgcccat

SEQ ID NO: 3514611 - DNA, 25 bp, Homo sapien
tcctggaaggagtacagcaaggcag

SEQ ID NO: 3514612 - DNA, 25 bp, Homo sapien
tgcacaaaggctactgctagggcca

SEQ ID NO: 3514613 - DNA, 25 bp, Homo sapien
taatttattggtccctgcacaaagg

SEQ ID NO: 3514614 - DNA, 25 bp, Homo sapien
ccctgaggggtcactctcagaagcc

SEQ ID NO: 3514615 - DNA, 25 bp, Homo sapien
ctgaggggtcactctcagaagcccc

SEQ ID NO: 3514616 - DNA, 25 bp, Homo sapien
caccctgaggggtcactctcagaag

SEQ ID NO: 3514617 - DNA, 25 bp, Homo sapien
gcaccctgaggggtcactctcagaa

SEQ ID NO: 3514618 - DNA, 25 bp, Homo sapien
ctaggagacaaggtcacgggacgca

SEQ ID NO: 3514619 - DNA, 25 bp, Homo sapien
ggtgacgttccaccaaggacttgaa

SEQ ID NO: 3514620 - DNA, 25 bp, Homo sapien
ggataacaccttccaggcagaagca

SEQ ID NO: 3514621 - DNA, 25 bp, Homo sapien
gattcccgacgtgttttgaaggcag

SEQ ID NO: 3514622 - DNA, 25 bp, Homo sapien
taactagtgcgaagcctgtttcaca

SEQ ID NO: 3514623 - DNA, 25 bp, Homo sapien
tggtctcccgaagtctcagccagtg

SEQ ID NO: 3514624 - DNA, 25 bp, Homo sapien
tgcccaagctctggcttactaagag

SEQ ID NO: 3514625 - DNA, 25 bp, Homo sapien
ttcccatacgtgtggtcatcccagg

SEQ ID NO: 3514626 - DNA, 25 bp, Homo sapien
ggtggaccacattgtacagttaagc

SEQ ID NO: 3514627 - DNA, 25 bp, Homo sapien
taccaaataatgcagggttgaccct

SEQ ID NO: 3514628 - DNA, 25 bp, Homo sapien
tgacagtccagtttaacgccagaat

SEQ ID NO: 3514629 - DNA, 25 bp, Homo sapien
taagtgggtagaatgcgtgactctc

SEQ ID NO: 3514630 - DNA, 25 bp, Homo sapien
gaacacactagggtacaagagaagg

SEQ ID NO: 3514631 - DNA, 25 bp, Homo sapien
aaggaatgcttctcgctggtggtct

SEQ ID NO: 3514632 - DNA, 25 bp, Homo sapien
gaagcagccgcagtttaaagattag

SEQ ID NO: 3514633 - DNA, 25 bp, Homo sapien
ttggtgccgctactgaaactgaaca

SEQ ID NO: 3514634 - DNA, 25 bp, Homo sapien
tcacctcaggtgtattccttcaaca

SEQ ID NO: 3514635 - DNA, 25 bp, Homo sapien
tctttggccaatactccttcaagta

SEQ ID NO: 3514636 - DNA, 25 bp, Homo sapien
cagacaacatctggccttggtgatt

SEQ ID NO: 3514637 - DNA, 25 bp, Homo sapien
tagagtgctcgtggaatctctttgg

SEQ ID NO: 3514638 - DNA, 25 bp, Homo sapien
tcaagtataccctttagtgtttcca

SEQ ID NO: 3514639 - DNA, 25 bp, Homo sapien
ctctgggctggcaggaccagattac

SEQ ID NO: 3514640 - DNA, 25 bp, Homo sapien
tgctctgggctggcaggaccagatt

SEQ ID NO: 3514641 - DNA, 25 bp, Homo sapien
ctatttgctctgggctggcaggacc

SEQ ID NO: 3514642 - DNA, 25 bp, Homo sapien
atttgctctgggctggcaggaccag

SEQ ID NO: 3514643 - DNA, 25 bp, Homo sapien
tcttggtgacataaacccaggtgga

SEQ ID NO: 3514644 - DNA, 25 bp, Homo sapien
gccgtgcgatgtgttgagagcccct

SEQ ID NO: 3514645 - DNA, 25 bp, Homo sapien
gaattagaactcctggccctgcaaa

SEQ ID NO: 3514646 - DNA, 25 bp, Homo sapien
gaatgtagcaggcaggttacgaccc

SEQ ID NO: 3514647 - DNA, 25 bp, Homo sapien
ctctgtttgggagccattggtcagc

SEQ ID NO: 3514648 - DNA, 25 bp, Homo sapien
actcctggaggtagtggtcagtgcc

SEQ ID NO: 3514649 - DNA, 25 bp, Homo sapien
tcgggctgctgaagatgagcgccgg

SEQ ID NO: 3514650 - DNA, 25 bp, Homo sapien
aacagctttacacaggtcttcaggg

SEQ ID NO: 3514651 - DNA, 25 bp, Homo sapien
tagatcactccctgagaacaacacc

SEQ ID NO: 3514652 - DNA, 25 bp, Homo sapien
tgcatcctcccgttacattccaaga

SEQ ID NO: 3514653 - DNA, 25 bp, Homo sapien
tgccctccttgggacttagatcact

SEQ ID NO: 3514654 - DNA, 25 bp, Homo sapien
tcctcccgttacattccaagagctg

SEQ ID NO: 3514655 - DNA, 25 bp, Homo sapien
gggagtacttttatatgaccttgat

SEQ ID NO: 3514656 - DNA, 25 bp, Homo sapien
ctctgctcttggaattggggagtac

SEQ ID NO: 3514657 - DNA, 25 bp, Homo sapien
tatctccactgtctagatccttctc

SEQ ID NO: 3514658 - DNA, 25 bp, Homo sapien
aaaaatgcacttgaattccaaccaa

SEQ ID NO: 3514659 - DNA, 25 bp, Homo sapien
tctgcagcacacacagacaatggag

SEQ ID NO: 3514660 - DNA, 25 bp, Homo sapien
ggtcatgaatcttacgaagttgaag

SEQ ID NO: 3514661 - DNA, 25 bp, Homo sapien
tctgtggcattgatgtttaccttgg

SEQ ID NO: 3514662 - DNA, 25 bp, Homo sapien
tcttgcacagtaccattctgcagca

SEQ ID NO: 3514663 - DNA, 25 bp, Homo sapien
caaggtctgcctttccccccggcag

SEQ ID NO: 3514664 - DNA, 25 bp, Homo sapien
aggccacaggaagcattccctccaa

SEQ ID NO: 3514665 - DNA, 25 bp, Homo sapien
ccccggcagggactccgggccagct

SEQ ID NO: 3514666 - DNA, 25 bp, Homo sapien
gaagcattccctccaaggtctgcct

SEQ ID NO: 3514667 - DNA, 25 bp, Homo sapien
catggtggtatcacagctgtccagg

SEQ ID NO: 3514668 - DNA, 25 bp, Homo sapien
cttcacatggtcttaagatagccag

SEQ ID NO: 3514669 - DNA, 25 bp, Homo sapien
ctttgaagtgattgcagagtacagt

SEQ ID NO: 3514670 - DNA, 25 bp, Homo sapien
ttttgctgaagtggacttcacatgg

SEQ ID NO: 3514671 - DNA, 25 bp, Homo sapien
gatttctaggtaacacaactgcttc

SEQ ID NO: 3514672 - DNA, 25 bp, Homo sapien
gatgaggaagcctgttcccgatttc

SEQ ID NO: 3514673 - DNA, 25 bp, Homo sapien
ccaggcgtgtgtccccgaagcttgt

SEQ ID NO: 3514674 - DNA, 25 bp, Homo sapien
ctggtccaggcgtgtgtccccgaag

SEQ ID NO: 3514675 - DNA, 25 bp, Homo sapien
acctggagggcagctgacattgccc

SEQ ID NO: 3514676 - DNA, 25 bp, Homo sapien
cagcagaacctggagggcagctgac

SEQ ID NO: 3514677 - DNA, 25 bp, Homo sapien
cagggcggaaaagggcagcagaacc

SEQ ID NO: 3514678 - DNA, 25 bp, Homo sapien
gcagaacctggagggcagctgacat

SEQ ID NO: 3514679 - DNA, 25 bp, Homo sapien
cctggtggtctatctggagtgtagc

SEQ ID NO: 3514680 - DNA, 25 bp, Homo sapien
tgagagggcttgtcgtataaagaag

SEQ ID NO: 3514681 - DNA, 25 bp, Homo sapien
gtagcaattctgctgtccataggtg

SEQ ID NO: 3514682 - DNA, 25 bp, Homo sapien
gagttgagagggcttgtcgtataaa

SEQ ID NO: 3514683 - DNA, 25 bp, Homo sapien
gtcgtgttgcagcatggccagttac

SEQ ID NO: 3514684 - DNA, 25 bp, Homo sapien
cagagattttggtcgtgttgcagca

SEQ ID NO: 3514685 - DNA, 25 bp, Homo sapien
gataaccaaaactcagagattttgg

SEQ ID NO: 3514686 - DNA, 25 bp, Homo sapien
caaaactcagagattttggtcgtgt

SEQ ID NO: 3514687 - DNA, 25 bp, Homo sapien
cagagaccctttgtgagctgccagc

SEQ ID NO: 3514688 - DNA, 25 bp, Homo sapien
aaccgcggccagaaggtactttgct

SEQ ID NO: 3514689 - DNA, 25 bp, Homo sapien
tgtgcaatggtacatgctgtctgca

SEQ ID NO: 3514690 - DNA, 25 bp, Homo sapien
tctttcctgggtttgtgacaacaga

SEQ ID NO: 3514691 - DNA, 25 bp, Homo sapien
gagcacgtgcacatgtacacctgag

SEQ ID NO: 3514692 - DNA, 25 bp, Homo sapien
gaagtagggctcttcaacagggacc

SEQ ID NO: 3514693 - DNA, 25 bp, Homo sapien
caactgactgagaccttgggctaaa

SEQ ID NO: 3514694 - DNA, 25 bp, Homo sapien
tgtacaatatgctcaggcaccgcag

SEQ ID NO: 3514695 - DNA, 25 bp, Homo sapien
tgtacaagtatccttactaagagtg

SEQ ID NO: 3514696 - DNA, 25 bp, Homo sapien
aaaaattcctggtagcaaatcaaga

SEQ ID NO: 3514697 - DNA, 25 bp, Homo sapien
ttttcttgagcaatactgaagcagg

SEQ ID NO: 3514698 - DNA, 25 bp, Homo sapien
tgaaaatacattggaacactaggaa

SEQ ID NO: 3514699 - DNA, 25 bp, Homo sapien
aaaactaatttgagatccgctgcct

SEQ ID NO: 3514700 - DNA, 25 bp, Homo sapien
cagttttgccgtgcctaagtggagg

SEQ ID NO: 3514701 - DNA, 25 bp, Homo sapien
ctagataggcaagagggatatgtcc

SEQ ID NO: 3514702 - DNA, 25 bp, Homo sapien
ggaatcatccatagtccagtgctag

SEQ ID NO: 3514703 - DNA, 25 bp, Homo sapien
tgggcactggctttgatactggcat

SEQ ID NO: 3514704 - DNA, 25 bp, Homo sapien
cagtccagtgggtgactggcccaga

SEQ ID NO: 3514705 - DNA, 25 bp, Homo sapien
ctgaactttctacacacatgtgggc

SEQ ID NO: 3514706 - DNA, 25 bp, Homo sapien
gaaatccccgcttgaaatctccttg

SEQ ID NO: 3514707 - DNA, 25 bp, Homo sapien
cgtttggtcatccccattggcaggc

SEQ ID NO: 3514708 - DNA, 25 bp, Homo sapien
tttggtcatccccattggcaggcat

SEQ ID NO: 3514709 - DNA, 25 bp, Homo sapien
gtttggtcatccccattggcaggca

SEQ ID NO: 3514710 - DNA, 25 bp, Homo sapien
tggatgagtattcgtggacagacac

SEQ ID NO: 3514711 - DNA, 25 bp, Homo sapien
cagacagtggatgagtattcgtgga

SEQ ID NO: 3514712 - DNA, 25 bp, Homo sapien
tttctcccctgctggcgaaggccag

SEQ ID NO: 3514713 - DNA, 25 bp, Homo sapien
tgatttctcccctgctggcgaaggc

SEQ ID NO: 3514714 - DNA, 25 bp, Homo sapien
cagactgctggatgttgctgaggtg

SEQ ID NO: 3514715 - DNA, 25 bp, Homo sapien
ggttaaagatgctttattctctaga

SEQ ID NO: 3514716 - DNA, 25 bp, Homo sapien
tctgggttaaagatgctttattctc

SEQ ID NO: 3514717 - DNA, 25 bp, Homo sapien
gggttaaagatgctttattctctag

SEQ ID NO: 3514718 - DNA, 25 bp, Homo sapien
tccagtgacattgccaggagctgcc

SEQ ID NO: 3514719 - DNA, 25 bp, Homo sapien
tcaaagctaagcacaagaatgggct

SEQ ID NO: 3514720 - DNA, 25 bp, Homo sapien
ttcaagcagtcacccaattccagtg

SEQ ID NO: 3514721 - DNA, 25 bp, Homo sapien
gagctgccttaagaagcctgttgta

SEQ ID NO: 3514722 - DNA, 25 bp, Homo sapien
tgtcctttaaaatgccctctaggga

SEQ ID NO: 3514723 - DNA, 25 bp, Homo sapien
tgtccttccccatgaaagagggctt

SEQ ID NO: 3514724 - DNA, 25 bp, Homo sapien
tcttcaactatttcccttgtgtcct

SEQ ID NO: 3514725 - DNA, 25 bp, Homo sapien
cctctagggaccaggtgagctcact

SEQ ID NO: 3514726 - DNA, 25 bp, Homo sapien
tgaaaagatgtaatctggcagccat

SEQ ID NO: 3514727 - DNA, 25 bp, Homo sapien
gaaaagatgtaatctggcagccatg

SEQ ID NO: 3514728 - DNA, 25 bp, Homo sapien
accttctgtcctgtggagaaagagt

SEQ ID NO: 3514729 - DNA, 25 bp, Homo sapien
ccaccttctgtcctgtggagaaaga

SEQ ID NO: 3514730 - DNA, 25 bp, Homo sapien
gtactgggtgcttctccgcagcggc

SEQ ID NO: 3514731 - DNA, 25 bp, Homo sapien
tagtaaatacaaatggcggccacca

SEQ ID NO: 3514732 - DNA, 25 bp, Homo sapien
tccctggcccagttggtactgggtg

SEQ ID NO: 3514733 - DNA, 25 bp, Homo sapien
ttagtaaatacaaatggcggccacc

SEQ ID NO: 3514734 - DNA, 25 bp, Homo sapien
ttcagaacttcccagttccacaatg

SEQ ID NO: 3514735 - DNA, 25 bp, Homo sapien
agaacttcccagttccacaatgtgg

SEQ ID NO: 3514736 - DNA, 25 bp, Homo sapien
tcagaacttcccagttccacaatgt

SEQ ID NO: 3514737 - DNA, 25 bp, Homo sapien
cagaacttcccagttccacaatgtg

SEQ ID NO: 3514738 - DNA, 25 bp, Homo sapien
gtgatctggatctgaatttcagctg

SEQ ID NO: 3514739 - DNA, 25 bp, Homo sapien
agtgatctggatctgaatttcagct

SEQ ID NO: 3514740 - DNA, 25 bp, Homo sapien
gagtgatctggatctgaatttcagc

SEQ ID NO: 3514741 - DNA, 25 bp, Homo sapien
cagagtgatctggatctgaatttca

SEQ ID NO: 3514742 - DNA, 25 bp, Homo sapien
tttccctgaacacttgccaatccca

SEQ ID NO: 3514743 - DNA, 25 bp, Homo sapien
ccctgaacacttgccaatcccagcc

SEQ ID NO: 3514744 - DNA, 25 bp, Homo sapien
gtttccctgaacacttgccaatccc

SEQ ID NO: 3514745 - DNA, 25 bp, Homo sapien
ttccctgaacacttgccaatcccag

SEQ ID NO: 3514746 - DNA, 25 bp, Homo sapien
ctttctggcactagtggacattgca

SEQ ID NO: 3514747 - DNA, 25 bp, Homo sapien
tttaaggattcacccatgtcattgc

SEQ ID NO: 3514748 - DNA, 25 bp, Homo sapien
gtgtcctggtgcatatgcatctgag

SEQ ID NO: 3514749 - DNA, 25 bp, Homo sapien
tattaagagtgggacttctgccggg

SEQ ID NO: 3514750 - DNA, 25 bp, Homo sapien
aacattcttagcatcgctcgcgccg

SEQ ID NO: 3514751 - DNA, 25 bp, Homo sapien
tcctgtcctcattccgaacattctt

SEQ ID NO: 3514752 - DNA, 25 bp, Homo sapien
cattccgaacattcttagcatcgct

SEQ ID NO: 3514753 - DNA, 25 bp, Homo sapien
cctccggagcgagttcggtcctggc

SEQ ID NO: 3514754 - DNA, 25 bp, Homo sapien
ccggcccgggtctgcgcagacttgt

SEQ ID NO: 3514755 - DNA, 25 bp, Homo sapien
aaagggcacggtcgtctttgccgct

SEQ ID NO: 3514756 - DNA, 25 bp, Homo sapien
tctgcgcagacttgtgccgctggcg

SEQ ID NO: 3514757 - DNA, 25 bp, Homo sapien
gcggggggttcgctccttcttctca

SEQ ID NO: 3514758 - DNA, 25 bp, Homo sapien
tgaagggagtcgtctttgacggctt

SEQ ID NO: 3514759 - DNA, 25 bp, Homo sapien
caaccaagcctttagaaggtaattg

SEQ ID NO: 3514760 - DNA, 25 bp, Homo sapien
tcatcccagtgtctgtatcccttaa

SEQ ID NO: 3514761 - DNA, 25 bp, Homo sapien
ttttgtgaagggagtcgtctttgac

SEQ ID NO: 3514762 - DNA, 25 bp, Homo sapien
ttcggtgatcgagtgattaaaaact

SEQ ID NO: 3514763 - DNA, 25 bp, Homo sapien
tttcggtgatcgagtgattaaaaac

SEQ ID NO: 3514764 - DNA, 25 bp, Homo sapien
catgtttttcggtgatcgagtgatt

SEQ ID NO: 3514765 - DNA, 25 bp, Homo sapien
ggctgtcatgtttttcggtgatcga

SEQ ID NO: 3514766 - DNA, 25 bp, Homo sapien
aactaagtcataaaggataaagtgg

SEQ ID NO: 3514767 - DNA, 25 bp, Homo sapien
ttaaacaatccagtaactaagtcat

SEQ ID NO: 3514768 - DNA, 25 bp, Homo sapien
taacccatccttatggattgtactt

SEQ ID NO: 3514769 - DNA, 25 bp, Homo sapien
caatccagtaactaagtcataaagg

SEQ ID NO: 3514770 - DNA, 25 bp, Homo sapien
tgagggagactgtgtaatgatgtcc

SEQ ID NO: 3514771 - DNA, 25 bp, Homo sapien
ttgttctgagggagactgtgtaatg

SEQ ID NO: 3514772 - DNA, 25 bp, Homo sapien
ctttgttctgagggagactgtgtaa

SEQ ID NO: 3514773 - DNA, 25 bp, Homo sapien
gagactgtgtaatgatgtcctatga

SEQ ID NO: 3514774 - DNA, 25 bp, Homo sapien
ttgataccgtgatcacaccagcact

SEQ ID NO: 3514775 - DNA, 25 bp, Homo sapien
tattgataccgtgatcacaccagca

SEQ ID NO: 3514776 - DNA, 25 bp, Homo sapien
caactattgataccgtgatcacacc

SEQ ID NO: 3514777 - DNA, 25 bp, Homo sapien
gataccgtgatcacaccagcactgt

SEQ ID NO: 3514778 - DNA, 25 bp, Homo sapien
ttttatggagaaggtttctcttagc

SEQ ID NO: 3514779 - DNA, 25 bp, Homo sapien
gcaactatatggttaacctagcata

SEQ ID NO: 3514780 - DNA, 25 bp, Homo sapien
gaaggtttctcttagcaactatatg

SEQ ID NO: 3514781 - DNA, 25 bp, Homo sapien
tatggttaacctagcatatagtttg

SEQ ID NO: 3514782 - DNA, 25 bp, Homo sapien
gccatgtcaactctaatcgtggtaa

SEQ ID NO: 3514783 - DNA, 25 bp, Homo sapien
ccatgtcaactctaatcgtggtaaa

SEQ ID NO: 3514784 - DNA, 25 bp, Homo sapien
ctgccatgtcaactctaatcgtggt

SEQ ID NO: 3514785 - DNA, 25 bp, Homo sapien
tgccatgtcaactctaatcgtggta

SEQ ID NO: 3514786 - DNA, 25 bp, Homo sapien
agctcatgttaatgtaggcttcaca

SEQ ID NO: 3514787 - DNA, 25 bp, Homo sapien
cagaagtctttagtcattgccttca

SEQ ID NO: 3514788 - DNA, 25 bp, Homo sapien
cctcctgaaggccaaagctcatgtt

SEQ ID NO: 3514789 - DNA, 25 bp, Homo sapien
tggtttgtggtttgacttgcctcct

SEQ ID NO: 3514790 - DNA, 25 bp, Homo sapien
tcccagtcctggctatagccgcgtt

SEQ ID NO: 3514791 - DNA, 25 bp, Homo sapien
tatagccgcgttggtggttaggttc

SEQ ID NO: 3514792 - DNA, 25 bp, Homo sapien
gaaatccaggcttcaataacttcct

SEQ ID NO: 3514793 - DNA, 25 bp, Homo sapien
gctgcctgcctttgtaagcggtagg

SEQ ID NO: 3514794 - DNA, 25 bp, Homo sapien
cattgtttgcgagtgtctgtgttgg

SEQ ID NO: 3514795 - DNA, 25 bp, Homo sapien
ggtcatgccggtgggttttcactgt

SEQ ID NO: 3514796 - DNA, 25 bp, Homo sapien
tccaaaagatgctatgaaatttcag

SEQ ID NO: 3514797 - DNA, 25 bp, Homo sapien
ttgagtaatcggaagggtcatgccg

SEQ ID NO: 3514798 - DNA, 25 bp, Homo sapien
ggttatagccgaaggcaaactgatg

SEQ ID NO: 3514799 - DNA, 25 bp, Homo sapien
gaaggcaaactgatgcagagctgcc

SEQ ID NO: 3514800 - DNA, 25 bp, Homo sapien
tagccgaaggcaaactgatgcagag

SEQ ID NO: 3514801 - DNA, 25 bp, Homo sapien
tgtcatttggttatagccgaaggca

SEQ ID NO: 3514802 - DNA, 25 bp, Homo sapien
gcaggcttccgtgaaacatttccct

SEQ ID NO: 3514803 - DNA, 25 bp, Homo sapien
ctgcaggcttccgtgaaacatttcc

SEQ ID NO: 3514804 - DNA, 25 bp, Homo sapien
tgcaggcttccgtgaaacatttccc

SEQ ID NO: 3514805 - DNA, 25 bp, Homo sapien
caggcttccgtgaaacatttccctt

SEQ ID NO: 3514806 - DNA, 25 bp, Homo sapien
gctatctgtgtgctgctgtcggtgc

SEQ ID NO: 3514807 - DNA, 25 bp, Homo sapien
tatctgtgtgctgctgtcggtgcat

SEQ ID NO: 3514808 - DNA, 25 bp, Homo sapien
ctgctatctgtgtgctgctgtcggt

SEQ ID NO: 3514809 - DNA, 25 bp, Homo sapien
ctatctgtgtgctgctgtcggtgca

SEQ ID NO: 3514810 - DNA, 25 bp, Homo sapien
gatgagccataaacagtcaagtctg

SEQ ID NO: 3514811 - DNA, 25 bp, Homo sapien
agtttgctgtacagagaaaggttcc

SEQ ID NO: 3514812 - DNA, 25 bp, Homo sapien
gaatgtagttatactgatcatagac

SEQ ID NO: 3514813 - DNA, 25 bp, Homo sapien
agtctggccatggaatgtaatgaat

SEQ ID NO: 3514814 - DNA, 25 bp, Homo sapien
cgtaatgctgccccactatgcgcat

SEQ ID NO: 3514815 - DNA, 25 bp, Homo sapien
gtgggctctccgtaatgctgcccca

SEQ ID NO: 3514816 - DNA, 25 bp, Homo sapien
acgtagtttattgagctcgtgggct

SEQ ID NO: 3514817 - DNA, 25 bp, Homo sapien
gagctcgtgggctctccgtaatgct

SEQ ID NO: 3514818 - DNA, 25 bp, Homo sapien
ctttaagccagattcatggtatgaa

SEQ ID NO: 3514819 - DNA, 25 bp, Homo sapien
agccagattcatggtatgaaggcag

SEQ ID NO: 3514820 - DNA, 25 bp, Homo sapien
taagccagattcatggtatgaaggc

SEQ ID NO: 3514821 - DNA, 25 bp, Homo sapien
tttaagccagattcatggtatgaag

SEQ ID NO: 3514822 - DNA, 25 bp, Homo sapien
tcagagtctgattatagagacctct

SEQ ID NO: 3514823 - DNA, 25 bp, Homo sapien
gctgggcagtgctgtaatacgtcca

SEQ ID NO: 3514824 - DNA, 25 bp, Homo sapien
gagggtattgtctttgagctgattc

SEQ ID NO: 3514825 - DNA, 25 bp, Homo sapien
cagcctccagctcttataagtggcc

SEQ ID NO: 3514826 - DNA, 25 bp, Homo sapien
ttaggcaggcccactgttatttttg

SEQ ID NO: 3514827 - DNA, 25 bp, Homo sapien
aggcaggcccactgttatttttgtg

SEQ ID NO: 3514828 - DNA, 25 bp, Homo sapien
taggcaggcccactgttatttttgt

SEQ ID NO: 3514829 - DNA, 25 bp, Homo sapien
ggcaggcccactgttatttttgtgg

SEQ ID NO: 3514830 - DNA, 25 bp, Homo sapien
cctggctcttgtgggaggtgaactg

SEQ ID NO: 3514831 - DNA, 25 bp, Homo sapien
gggctgggatgccacagaccaggcg

SEQ ID NO: 3514832 - DNA, 25 bp, Homo sapien
gctgggggttcaccagtgaagacct

SEQ ID NO: 3514833 - DNA, 25 bp, Homo sapien
tgaagacctcagactgtgcggctca

SEQ ID NO: 3514834 - DNA, 25 bp, Homo sapien
ttgatggtgtcagggcccactgtgc

SEQ ID NO: 3514835 - DNA, 25 bp, Homo sapien
ttcatggggacttttacagatagat

SEQ ID NO: 3514836 - DNA, 25 bp, Homo sapien
tttacagatagatccttaatcagca

SEQ ID NO: 3514837 - DNA, 25 bp, Homo sapien
gaggatttgcgctggtttgttttgc

SEQ ID NO: 3514838 - DNA, 25 bp, Homo sapien
tcatttgtactggctggcaaaggtg

SEQ ID NO: 3514839 - DNA, 25 bp, Homo sapien
tttgtactggctggcaaaggtgcta

SEQ ID NO: 3514840 - DNA, 25 bp, Homo sapien
catttgtactggctggcaaaggtgc

SEQ ID NO: 3514841 - DNA, 25 bp, Homo sapien
ttgtactggctggcaaaggtgctac

SEQ ID NO: 3514842 - DNA, 25 bp, Homo sapien
gataggatagattgcctgaaactgg

SEQ ID NO: 3514843 - DNA, 25 bp, Homo sapien
cttggtatcaggtctttgctttgga

SEQ ID NO: 3514844 - DNA, 25 bp, Homo sapien
tttgggcatgcactgtcttggtatc

SEQ ID NO: 3514845 - DNA, 25 bp, Homo sapien
tggtcagataggatagattgcctga

SEQ ID NO: 3514846 - DNA, 25 bp, Homo sapien
ggctgctgctgtcgttgtggcacat

SEQ ID NO: 3514847 - DNA, 25 bp, Homo sapien
tggctgctgctgtcgttgtggcaca

SEQ ID NO: 3514848 - DNA, 25 bp, Homo sapien
tattcttggctaccaaggtcgaggg

SEQ ID NO: 3514849 - DNA, 25 bp, Homo sapien
tagccttttgaagcctattcttggc

SEQ ID NO: 3514850 - DNA, 25 bp, Homo sapien
tggctaccaaggtcgagggcacctg

SEQ ID NO: 3514851 - DNA, 25 bp, Homo sapien
caccttccacttagccttttgaagc

SEQ ID NO: 3514852 - DNA, 25 bp, Homo sapien
gcagatcgtgtgagtctaggagtta

SEQ ID NO: 3514853 - DNA, 25 bp, Homo sapien
ggtgggtttataaagatggcataac

SEQ ID NO: 3514854 - DNA, 25 bp, Homo sapien
cactttatatctcttaggatggcta

SEQ ID NO: 3514855 - DNA, 25 bp, Homo sapien
tgggaaccctcacaggtcactggtg

SEQ ID NO: 3514856 - DNA, 25 bp, Homo sapien
gcactgggcaattcagcattctgga

SEQ ID NO: 3514857 - DNA, 25 bp, Homo sapien
agagggctctgtagggttttctgat

SEQ ID NO: 3514858 - DNA, 25 bp, Homo sapien
gagaccctggaagtggataagcttg

SEQ ID NO: 3514859 - DNA, 25 bp, Homo sapien
gagttttgagttgtatggagtttgc

SEQ ID NO: 3514860 - DNA, 25 bp, Homo sapien
tcacgtatgtttactaagtgtgctg

SEQ ID NO: 3514861 - DNA, 25 bp, Homo sapien
ttttcttgcaagttccaggggtgct

SEQ ID NO: 3514862 - DNA, 25 bp, Homo sapien
ttccaggggtgctgatgtcttggca

SEQ ID NO: 3514863 - DNA, 25 bp, Homo sapien
tggtgtgttgatggaagcagatgat

SEQ ID NO: 3514864 - DNA, 25 bp, Homo sapien
tttcttcctcatttaagggatacat

SEQ ID NO: 3514865 - DNA, 25 bp, Homo sapien
aggatctttgatttctttttgcctt

SEQ ID NO: 3514866 - DNA, 25 bp, Homo sapien
ttttcttcctcatttaagggataca

SEQ ID NO: 3514867 - DNA, 25 bp, Homo sapien
cttgcaggatctttgatttcttttt

SEQ ID NO: 3514868 - DNA, 25 bp, Homo sapien
gaagataattcggtaaaaatacatc

SEQ ID NO: 3514869 - DNA, 25 bp, Homo sapien
agaagataattcggtaaaaatacat

SEQ ID NO: 3514870 - DNA, 25 bp, Homo sapien
gagaagataattcggtaaaaataca

SEQ ID NO: 3514871 - DNA, 25 bp, Homo sapien
tgacagctttctgcttaagcagtgg

SEQ ID NO: 3514872 - DNA, 25 bp, Homo sapien
agctttctgcttaagcagtggcagc

SEQ ID NO: 3514873 - DNA, 25 bp, Homo sapien
agtggcagcatgtatgctacaggtt

SEQ ID NO: 3514874 - DNA, 25 bp, Homo sapien
tacaggtttcagctcattacctctg

SEQ ID NO: 3514875 - DNA, 25 bp, Homo sapien
ttaccctgtagggactgatcagtcc

SEQ ID NO: 3514876 - DNA, 25 bp, Homo sapien
gagtctctagctatgctttccatcc

SEQ ID NO: 3514877 - DNA, 25 bp, Homo sapien
gcctgatacctggatgagtctctag

SEQ ID NO: 3514878 - DNA, 25 bp, Homo sapien
ggttgtcccttcatcaccaaaacat

SEQ ID NO: 3514879 - DNA, 25 bp, Homo sapien
tcagtccacgaattggtttgccttt

SEQ ID NO: 3514880 - DNA, 25 bp, Homo sapien
cagtccacgaattggtttgcctttt

SEQ ID NO: 3514881 - DNA, 25 bp, Homo sapien
ctgaagggcttttcactgctctgag

SEQ ID NO: 3514882 - DNA, 25 bp, Homo sapien
tgagtctcatttgagttggcggcat

SEQ ID NO: 3514883 - DNA, 25 bp, Homo sapien
aagggcttttcactgctctgagtct

SEQ ID NO: 3514884 - DNA, 25 bp, Homo sapien
ctctgagtctcatttgagttggcgg

SEQ ID NO: 3514885 - DNA, 25 bp, Homo sapien
acctggacaggtactgagagttgca

SEQ ID NO: 3514886 - DNA, 25 bp, Homo sapien
ctgttaaggtgaagtaggtcgtgct

SEQ ID NO: 3514887 - DNA, 25 bp, Homo sapien
ctttgaagtgcttggcagtggccag

SEQ ID NO: 3514888 - DNA, 25 bp, Homo sapien
cttggcagtggccagacctggacag

SEQ ID NO: 3514889 - DNA, 25 bp, Homo sapien
ccaaggtctgtgtgagggttcggca

SEQ ID NO: 3514890 - DNA, 25 bp, Homo sapien
cggcattagcatctgggaagccagg

SEQ ID NO: 3514891 - DNA, 25 bp, Homo sapien
agggttcggcattagcatctgggaa

SEQ ID NO: 3514892 - DNA, 25 bp, Homo sapien
tctgtgtgagggttcggcattagca

SEQ ID NO: 3514893 - DNA, 25 bp, Homo sapien
tcagtgaatgctgcctccacgtggg

SEQ ID NO: 3514894 - DNA, 25 bp, Homo sapien
tgggcaaggcatatgcgtttttctt

SEQ ID NO: 3514895 - DNA, 25 bp, Homo sapien
caaggcatatgcgtttttctttcat

SEQ ID NO: 3514896 - DNA, 25 bp, Homo sapien
ccatcagtgaatgctgcctccacgt

SEQ ID NO: 3514897 - DNA, 25 bp, Homo sapien
catgtagctggagaggtccagtgct

SEQ ID NO: 3514898 - DNA, 25 bp, Homo sapien
gaggtgtcctcatgcactcctataa

SEQ ID NO: 3514899 - DNA, 25 bp, Homo sapien
ccagggcgagggctcacataattta

SEQ ID NO: 3514900 - DNA, 25 bp, Homo sapien
tcagcttctgcgcaggagtacaatg

SEQ ID NO: 3514901 - DNA, 25 bp, Homo sapien
tttctagttgggacatgcaggagga

SEQ ID NO: 3514902 - DNA, 25 bp, Homo sapien
gaaggcgtttggaagtcatttccca

SEQ ID NO: 3514903 - DNA, 25 bp, Homo sapien
gcaggtcagatactgaggcttccca

SEQ ID NO: 3514904 - DNA, 25 bp, Homo sapien
tgtgagaagtgcctagtccctgaag

SEQ ID NO: 3514905 - DNA, 25 bp, Homo sapien
gctaaatgagagttatcccatgttc

SEQ ID NO: 3514906 - DNA, 25 bp, Homo sapien
cagtgcaatccttatacaattttag

SEQ ID NO: 3514907 - DNA, 25 bp, Homo sapien
caagactagtttattgctaaatgag

SEQ ID NO: 3514908 - DNA, 25 bp, Homo sapien
ctcaatattgttaaatcttcctaaa

SEQ ID NO: 3514909 - DNA, 25 bp, Homo sapien
cattgagagtaattatcagcagtgg

SEQ ID NO: 3514910 - DNA, 25 bp, Homo sapien
cagcagtggactatgcctgagtttt

SEQ ID NO: 3514911 - DNA, 25 bp, Homo sapien
cagtggattttcctgagtagtgaag

SEQ ID NO: 3514912 - DNA, 25 bp, Homo sapien
gttagccctgaacttacatatcctg

SEQ ID NO: 3514913 - DNA, 25 bp, Homo sapien
attgctgattgaggtagtggtggtg

SEQ ID NO: 3514914 - DNA, 25 bp, Homo sapien
ccagcggattttgacccagtagacc

SEQ ID NO: 3514915 - DNA, 25 bp, Homo sapien
caggatttttatccagcggattttg

SEQ ID NO: 3514916 - DNA, 25 bp, Homo sapien
gagaaactccccaagacggaagtgc

SEQ ID NO: 3514917 - DNA, 25 bp, Homo sapien
gagcagttgctgtatcctgaagact

SEQ ID NO: 3514918 - DNA, 25 bp, Homo sapien
tgaactcagtcaggtgtttataaga

SEQ ID NO: 3514919 - DNA, 25 bp, Homo sapien
ccagttgtagagagtaggcccagtg

SEQ ID NO: 3514920 - DNA, 25 bp, Homo sapien
gaagactgtatctggtgctttactc

SEQ ID NO: 3514921 - DNA, 25 bp, Homo sapien
cttccatgaattctttcctatagag

SEQ ID NO: 3514922 - DNA, 25 bp, Homo sapien
gaattctttcctatagagcttgtcc

SEQ ID NO: 3514923 - DNA, 25 bp, Homo sapien
ccctgagctgatcttagatctgcct

SEQ ID NO: 3514924 - DNA, 25 bp, Homo sapien
gagctgatcttagatctgccttgtt

SEQ ID NO: 3514925 - DNA, 25 bp, Homo sapien
ggctgtgccccgctcatgttcagag

SEQ ID NO: 3514926 - DNA, 25 bp, Homo sapien
gaattggtcgcctctctgggtgtcc

SEQ ID NO: 3514927 - DNA, 25 bp, Homo sapien
tagctttgatctgcgaatcaggcca

SEQ ID NO: 3514928 - DNA, 25 bp, Homo sapien
gagcatgcttacagctggccctttg

SEQ ID NO: 3514929 - DNA, 25 bp, Homo sapien
cacgcagaggcagcgcattgtctgt

SEQ ID NO: 3514930 - DNA, 25 bp, Homo sapien
tagtggccctcgtcaagtcagagaa

SEQ ID NO: 3514931 - DNA, 25 bp, Homo sapien
ctgtaatcagaccaaaaggctaact

SEQ ID NO: 3514932 - DNA, 25 bp, Homo sapien
caggaatgctacttgtgccacagcc

SEQ ID NO: 3514933 - DNA, 25 bp, Homo sapien
taaaaagggattcctattggcagat

SEQ ID NO: 3514934 - DNA, 25 bp, Homo sapien
tggtcccatgcagagttatttagat

SEQ ID NO: 3514935 - DNA, 25 bp, Homo sapien
cagagcaggaggtgtattactgtcc

SEQ ID NO: 3514936 - DNA, 25 bp, Homo sapien
tcagagagagggacgtttacaagct

SEQ ID NO: 3514937 - DNA, 25 bp, Homo sapien
cagtttgccatagagtgcagtgcat

SEQ ID NO: 3514938 - DNA, 25 bp, Homo sapien
tgccatagagtgcagtgcattataa

SEQ ID NO: 3514939 - DNA, 25 bp, Homo sapien
tgcattataatatcataaataccag

SEQ ID NO: 3514940 - DNA, 25 bp, Homo sapien
cactttagcagtttgccatagagtg

SEQ ID NO: 3514941 - DNA, 25 bp, Homo sapien
aggctagggttcatcactgctcaga

SEQ ID NO: 3514942 - DNA, 25 bp, Homo sapien
gacagagaagggcaccggtgtctct

SEQ ID NO: 3514943 - DNA, 25 bp, Homo sapien
catttgaccttgtagacaggctagg

SEQ ID NO: 3514944 - DNA, 25 bp, Homo sapien
tggcctgggcggaattttcacattg

SEQ ID NO: 3514945 - DNA, 25 bp, Homo sapien
caggtggctagtccatgcagctgca

SEQ ID NO: 3514946 - DNA, 25 bp, Homo sapien
gtcctgtttgcagtatcgtacatga

SEQ ID NO: 3514947 - DNA, 25 bp, Homo sapien
ggaatttacttgaggtcagggtcag

SEQ ID NO: 3514948 - DNA, 25 bp, Homo sapien
caaaacccaggaaaggcgtctcctg

SEQ ID NO: 3514949 - DNA, 25 bp, Homo sapien
atcgtacatgatcaccaaactgctg

SEQ ID NO: 3514950 - DNA, 25 bp, Homo sapien
tgggactggcttcaagggtcttagc

SEQ ID NO: 3514951 - DNA, 25 bp, Homo sapien
ggagctgtctcacggttggcccagc

SEQ ID NO: 3514952 - DNA, 25 bp, Homo sapien
tcaagggtcttagccagaaggcact

SEQ ID NO: 3514953 - DNA, 25 bp, Homo sapien
ctgaatgtcaatgggactggcttca

SEQ ID NO: 3514954 - DNA, 25 bp, Homo sapien
cgcctggaccagtgtcggactggat

SEQ ID NO: 3514955 - DNA, 25 bp, Homo sapien
aagcagcattcacagacgcctggac

SEQ ID NO: 3514956 - DNA, 25 bp, Homo sapien
agacgcctggaccagtgtcggactg

SEQ ID NO: 3514957 - DNA, 25 bp, Homo sapien
gactggatgggatgagtggaggact

SEQ ID NO: 3514958 - DNA, 25 bp, Homo sapien
aaaaaatgttgggctgcgccaggca

SEQ ID NO: 3514959 - DNA, 25 bp, Homo sapien
aaaatgttgggctgcgccaggcatg

SEQ ID NO: 3514960 - DNA, 25 bp, Homo sapien
aaatgttgggctgcgccaggcatgg

SEQ ID NO: 3514961 - DNA, 25 bp, Homo sapien
aaaaatgttgggctgcgccaggcat

SEQ ID NO: 3514962 - DNA, 25 bp, Homo sapien
agtgagcctcgcaccagtgattcca

SEQ ID NO: 3514963 - DNA, 25 bp, Homo sapien
ggtcttagtggttagtgcctgtcaa

SEQ ID NO: 3514964 - DNA, 25 bp, Homo sapien
ttgcctaaggagttggacattttcc

SEQ ID NO: 3514965 - DNA, 25 bp, Homo sapien
caaatctggagcaatacggtgcctc

SEQ ID NO: 3514966 - DNA, 25 bp, Homo sapien
tccatagggaaaacttgggcttgat

SEQ ID NO: 3514967 - DNA, 25 bp, Homo sapien
cgccgagggaactgaccaggttgtt

SEQ ID NO: 3514968 - DNA, 25 bp, Homo sapien
ggttcctagtggtcagtcagcagtt

SEQ ID NO: 3514969 - DNA, 25 bp, Homo sapien
atgctgccatgaggcttgacagaag

SEQ ID NO: 3514970 - DNA, 25 bp, Homo sapien
ggtgaacctgaacaacccaagtctc

SEQ ID NO: 3514971 - DNA, 25 bp, Homo sapien
tatcgaacgactgactgtaaacctc

SEQ ID NO: 3514972 - DNA, 25 bp, Homo sapien
gcccacaattcctcgggaaaggtga

SEQ ID NO: 3514973 - DNA, 25 bp, Homo sapien
tgagacagagcatttgccatgggac

SEQ ID NO: 3514974 - DNA, 25 bp, Homo sapien
ggtacttttcagtgcagccaggagg

SEQ ID NO: 3514975 - DNA, 25 bp, Homo sapien
atattctacccaggaatggtacttt

SEQ ID NO: 3514976 - DNA, 25 bp, Homo sapien
gctgtctggttcatattctacccag

SEQ ID NO: 3514977 - DNA, 25 bp, Homo sapien
ctacccaggaatggtacttttcagt

SEQ ID NO: 3514978 - DNA, 25 bp, Homo sapien
aagcaggtaggaaagctggcgagcc

SEQ ID NO: 3514979 - DNA, 25 bp, Homo sapien
tgctgcttcccacactgaagtgtcc

SEQ ID NO: 3514980 - DNA, 25 bp, Homo sapien
cactgaagtgtcctgtccgaccatt

SEQ ID NO: 3514981 - DNA, 25 bp, Homo sapien
gaccattgctatctgaggcatccac

SEQ ID NO: 3514982 - DNA, 25 bp, Homo sapien
ctgaggacaattccccagccacagg

SEQ ID NO: 3514983 - DNA, 25 bp, Homo sapien
cccagccacaggctctgagtcaaat

SEQ ID NO: 3514984 - DNA, 25 bp, Homo sapien
cagccacaggctctgagtcaaattt

SEQ ID NO: 3514985 - DNA, 25 bp, Homo sapien
tccccagccacaggctctgagtcaa

SEQ ID NO: 3514986 - DNA, 25 bp, Homo sapien
tttgtaggaagttttcaattcagag

SEQ ID NO: 3514987 - DNA, 25 bp, Homo sapien
agctgccaaagtgttcccgtaagca

SEQ ID NO: 3514988 - DNA, 25 bp, Homo sapien
tgccaaagtgttcccgtaagcagtg

SEQ ID NO: 3514989 - DNA, 25 bp, Homo sapien
taggaagttttcaattcagagctgc

SEQ ID NO: 3514990 - DNA, 25 bp, Homo sapien
ctgacagatctaggtgtcaatcaat

SEQ ID NO: 3514991 - DNA, 25 bp, Homo sapien
gtaaattagatatcaactgcacttc

SEQ ID NO: 3514992 - DNA, 25 bp, Homo sapien
actgtgtaaattagatatcaactgc

SEQ ID NO: 3514993 - DNA, 25 bp, Homo sapien
gatctaggtgtcaatcaattggaaa

SEQ ID NO: 3514994 - DNA, 25 bp, Homo sapien
gatttacttctgtaggcctttttca

SEQ ID NO: 3514995 - DNA, 25 bp, Homo sapien
ccttgaaagatttacttctgtaggc

SEQ ID NO: 3514996 - DNA, 25 bp, Homo sapien
ctccttgaaagatttacttctgtag

SEQ ID NO: 3514997 - DNA, 25 bp, Homo sapien
tgtaggcctttttcaataggctcat

SEQ ID NO: 3514998 - DNA, 25 bp, Homo sapien
cttaatgggattctcacggtctgtg

SEQ ID NO: 3514999 - DNA, 25 bp, Homo sapien
tgtggaacctgccttcgggtaactg

SEQ ID NO: 3515000 - DNA, 25 bp, Homo sapien
tgtaagcgtttcatctggtcagtgg

SEQ ID NO: 3515001 - DNA, 25 bp, Homo sapien
tgtaaatcggttttcgccacgtgtg

SEQ ID NO: 3515002 - DNA, 25 bp, Homo sapien
aataaacagcctaacgatgtacctc

SEQ ID NO: 3515003 - DNA, 25 bp, Homo sapien
tgaagacataagtacaggcagcaca

SEQ ID NO: 3515004 - DNA, 25 bp, Homo sapien
aatgaagacataagtacaggcagca

SEQ ID NO: 3515005 - DNA, 25 bp, Homo sapien
acagcctaacgatgtacctcaagga

SEQ ID NO: 3515006 - DNA, 25 bp, Homo sapien
gtaccacaatggatctattcaccag

SEQ ID NO: 3515007 - DNA, 25 bp, Homo sapien
gctgagtagtatcccacagtataga

SEQ ID NO: 3515008 - DNA, 25 bp, Homo sapien
tagcctcaggtatatgctgatctgc

SEQ ID NO: 3515009 - DNA, 25 bp, Homo sapien
cttcacctggcttagtagcctcagg

SEQ ID NO: 3515010 - DNA, 25 bp, Homo sapien
gcacttccttgaatgacttgtgatg

SEQ ID NO: 3515011 - DNA, 25 bp, Homo sapien
gaactatagatatgctccaggctaa

SEQ ID NO: 3515012 - DNA, 25 bp, Homo sapien
ctcaactcgttatctgaggaggaaa

SEQ ID NO: 3515013 - DNA, 25 bp, Homo sapien
gccactctagtggacatttaatagt

SEQ ID NO: 3515014 - DNA, 25 bp, Homo sapien
aataagagttgaggctatatacata

SEQ ID NO: 3515015 - DNA, 25 bp, Homo sapien
aaataagagttgaggctatatacat

SEQ ID NO: 3515016 - DNA, 25 bp, Homo sapien
taagagttgaggctatatacatata

SEQ ID NO: 3515017 - DNA, 25 bp, Homo sapien
gaaataagagttgaggctatataca

SEQ ID NO: 3515018 - DNA, 25 bp, Homo sapien
agagtattcttgctattctaggtcc

SEQ ID NO: 3515019 - DNA, 25 bp, Homo sapien
ccatccatgttgtcggaattttctt

SEQ ID NO: 3515020 - DNA, 25 bp, Homo sapien
gagtttgattactctaagtgcctca

SEQ ID NO: 3515021 - DNA, 25 bp, Homo sapien
atgtccaacttgagaccttgtaaag

SEQ ID NO: 3515022 - DNA, 25 bp, Homo sapien
gactgggaccttcgtacaaaattca

SEQ ID NO: 3515023 - DNA, 25 bp, Homo sapien
tggaggccctacattctgataagag

SEQ ID NO: 3515024 - DNA, 25 bp, Homo sapien
tggtttgggatcagccacagacagg

SEQ ID NO: 3515025 - DNA, 25 bp, Homo sapien
cacacctggtttgcacaatggctgc

SEQ ID NO: 3515026 - DNA, 25 bp, Homo sapien
catgggcttccctattctgctgtga

SEQ ID NO: 3515027 - DNA, 25 bp, Homo sapien
gcttggtaaagaagatctggactga

SEQ ID NO: 3515028 - DNA, 25 bp, Homo sapien
gaggaagcaaagctaagggcctaga

SEQ ID NO: 3515029 - DNA, 25 bp, Homo sapien
gcaggttttcagctccggcatgggc

SEQ ID NO: 3515030 - DNA, 25 bp, Homo sapien
catcaagggagtgccctggatcctc

SEQ ID NO: 3515031 - DNA, 25 bp, Homo sapien
tgtacaatgggcacggggcagccct

SEQ ID NO: 3515032 - DNA, 25 bp, Homo sapien
ggtggaatccacattctgtacaatg

SEQ ID NO: 3515033 - DNA, 25 bp, Homo sapien
gggcagcccttcgagggcatcacca

SEQ ID NO: 3515034 - DNA, 25 bp, Homo sapien
aactcagccctgttgccggtcttct

SEQ ID NO: 3515035 - DNA, 25 bp, Homo sapien
tcagctgcctttcgctgagtggcca

SEQ ID NO: 3515036 - DNA, 25 bp, Homo sapien
cctgttgccggtcttctccaggtgc

SEQ ID NO: 3515037 - DNA, 25 bp, Homo sapien
aatcagctgcctttcgctgagtggc

SEQ ID NO: 3515038 - DNA, 25 bp, Homo sapien
aggaggttgagccagcattgtgtca

SEQ ID NO: 3515039 - DNA, 25 bp, Homo sapien
aggttgagccagcattgtgtcactg

SEQ ID NO: 3515040 - DNA, 25 bp, Homo sapien
ggaggttgagccagcattgtgtcac

SEQ ID NO: 3515041 - DNA, 25 bp, Homo sapien
gaggttgagccagcattgtgtcact

SEQ ID NO: 3515042 - DNA, 25 bp, Homo sapien
cataccaccctggggcctgcatatt

SEQ ID NO: 3515043 - DNA, 25 bp, Homo sapien
taccaccctggggcctgcatatttt

SEQ ID NO: 3515044 - DNA, 25 bp, Homo sapien
gtcacatctcttccataccaccctg

SEQ ID NO: 3515045 - DNA, 25 bp, Homo sapien
cagtcacatctcttccataccaccc

SEQ ID NO: 3515046 - DNA, 25 bp, Homo sapien
ggctgaaaattcctcgcataaggac

SEQ ID NO: 3515047 - DNA, 25 bp, Homo sapien
gatctcacgttccagctcagatgtg

SEQ ID NO: 3515048 - DNA, 25 bp, Homo sapien
gttggcacagaaacggaacacctgc

SEQ ID NO: 3515049 - DNA, 25 bp, Homo sapien
ctgcaatcttgcactggatctcacg

SEQ ID NO: 3515050 - DNA, 25 bp, Homo sapien
tggcattccaaagtgggtaaaaata

SEQ ID NO: 3515051 - DNA, 25 bp, Homo sapien
ctggcattccaaagtgggtaaaaat

SEQ ID NO: 3515052 - DNA, 25 bp, Homo sapien
agaggctgttccgaactggcattcc

SEQ ID NO: 3515053 - DNA, 25 bp, Homo sapien
aggctgttccgaactggcattccaa

SEQ ID NO: 3515054 - DNA, 25 bp, Homo sapien
ctcttggaggatctacataggatgg

SEQ ID NO: 3515055 - DNA, 25 bp, Homo sapien
ggcctggaggtctttcttcatatac

SEQ ID NO: 3515056 - DNA, 25 bp, Homo sapien
agcctcttggaggatctacatagga

SEQ ID NO: 3515057 - DNA, 25 bp, Homo sapien
agagggcctggaggtctttcttcat

SEQ ID NO: 3515058 - DNA, 25 bp, Homo sapien
ctagtgcagaagaaaaaataattga

SEQ ID NO: 3515059 - DNA, 25 bp, Homo sapien
aaaaataattgaatgaaagaataag

SEQ ID NO: 3515060 - DNA, 25 bp, Homo sapien
gaaaaaataattgaatgaaagaata

SEQ ID NO: 3515061 - DNA, 25 bp, Homo sapien
agaagaaaaaataattgaatgaaag

SEQ ID NO: 3515062 - DNA, 25 bp, Homo sapien
tatggagccttgtactaggattgac

SEQ ID NO: 3515063 - DNA, 25 bp, Homo sapien
ccacatctgtggtacctgggaattg

SEQ ID NO: 3515064 - DNA, 25 bp, Homo sapien
tttacagaggcttgaaagcacccac

SEQ ID NO: 3515065 - DNA, 25 bp, Homo sapien
tgttggccacataggaaggttctag

SEQ ID NO: 3515066 - DNA, 25 bp, Homo sapien
caagaggtaagggtagacatttagc

SEQ ID NO: 3515067 - DNA, 25 bp, Homo sapien
tctgtactgcttgtctccaatgcct

SEQ ID NO: 3515068 - DNA, 25 bp, Homo sapien
tctaaatgaacaagtggcttctctc

SEQ ID NO: 3515069 - DNA, 25 bp, Homo sapien
tttatgcagatgactcccaaacttg

SEQ ID NO: 3515070 - DNA, 25 bp, Homo sapien
cagacccagtggcctgactggtgct

SEQ ID NO: 3515071 - DNA, 25 bp, Homo sapien
gggactcagacccagtggcctgact

SEQ ID NO: 3515072 - DNA, 25 bp, Homo sapien
cccagtggcctgactggtgctcagt

SEQ ID NO: 3515073 - DNA, 25 bp, Homo sapien
gacccagtggcctgactggtgctca

SEQ ID NO: 3515074 - DNA, 25 bp, Homo sapien
cattcactgagacaatatcttcaag

SEQ ID NO: 3515075 - DNA, 25 bp, Homo sapien
attcactgagacaatatcttcaagg

SEQ ID NO: 3515076 - DNA, 25 bp, Homo sapien
gaagagatactcttaacccaagctg

SEQ ID NO: 3515077 - DNA, 25 bp, Homo sapien
ggaggtcatccccaataattcaaca

SEQ ID NO: 3515078 - DNA, 25 bp, Homo sapien
tcaaggagcattcaatcagactggg

SEQ ID NO: 3515079 - DNA, 25 bp, Homo sapien
gcctgggatccacaaggtaattaga

SEQ ID NO: 3515080 - DNA, 25 bp, Homo sapien
gaacagccatttacccctcagagat

SEQ ID NO: 3515081 - DNA, 25 bp, Homo sapien
cagagcttgagcagtgatcgaggca

SEQ ID NO: 3515082 - DNA, 25 bp, Homo sapien
tagagagagcttaatctgcccagag

SEQ ID NO: 3515083 - DNA, 25 bp, Homo sapien
tcatgatggactaggactgaaaacc

SEQ ID NO: 3515084 - DNA, 25 bp, Homo sapien
ctcatagaatcttctgatgtgttaa

SEQ ID NO: 3515085 - DNA, 25 bp, Homo sapien
ctcccaaagcgctggaactacaggc

SEQ ID NO: 3515086 - DNA, 25 bp, Homo sapien
caaagcgctggaactacaggcctga

SEQ ID NO: 3515087 - DNA, 25 bp, Homo sapien
cccaaagcgctggaactacaggcct

SEQ ID NO: 3515088 - DNA, 25 bp, Homo sapien
acaggcctgagccactgtgcctggc

SEQ ID NO: 3515089 - DNA, 25 bp, Homo sapien
tacacccatgggatctgctatctta

SEQ ID NO: 3515090 - DNA, 25 bp, Homo sapien
gaatggaacagcctgctgaagacct

SEQ ID NO: 3515091 - DNA, 25 bp, Homo sapien
taatcttgtaagaagcagtgggcca

SEQ ID NO: 3515092 - DNA, 25 bp, Homo sapien
tcgtggcaccagctgagagacaaca

SEQ ID NO: 3515093 - DNA, 25 bp, Homo sapien
agtttgtctccctggtagtggtaat

SEQ ID NO: 3515094 - DNA, 25 bp, Homo sapien
tccctggtagtggtaattggttcca

SEQ ID NO: 3515095 - DNA, 25 bp, Homo sapien
caaggcagtttacgatatggaagca

SEQ ID NO: 3515096 - DNA, 25 bp, Homo sapien
agcatcctctaagcaatagtttgtc

SEQ ID NO: 3515097 - DNA, 25 bp, Homo sapien
aattcatttaatatcgggctttata

SEQ ID NO: 3515098 - DNA, 25 bp, Homo sapien
cgggctttataattcatgaagtttc

SEQ ID NO: 3515099 - DNA, 25 bp, Homo sapien
ccaacttatctaattacaattctag

SEQ ID NO: 3515100 - DNA, 25 bp, Homo sapien
tggctgccaacttatctaattacaa

SEQ ID NO: 3515101 - DNA, 25 bp, Homo sapien
ggcctcaggaaactgcagagggtga

SEQ ID NO: 3515102 - DNA, 25 bp, Homo sapien
agtttcttcacaatgcagcaggaga

SEQ ID NO: 3515103 - DNA, 25 bp, Homo sapien
agcagtttcttcacaatgcagcagg

SEQ ID NO: 3515104 - DNA, 25 bp, Homo sapien
ggtgagagggaagcaagcagtttct

SEQ ID NO: 3515105 - DNA, 25 bp, Homo sapien
gattacaacaattacaagcagatga

SEQ ID NO: 3515106 - DNA, 25 bp, Homo sapien
catgatggttggtagttgtgtgtac

SEQ ID NO: 3515107 - DNA, 25 bp, Homo sapien
tgcatatgcagtggcccaaaaaggc

SEQ ID NO: 3515108 - DNA, 25 bp, Homo sapien
ccagtcatccgaaatactgtgatgg

SEQ ID NO: 3515109 - DNA, 25 bp, Homo sapien
tattcgtccctgaaaaagctgggag

SEQ ID NO: 3515110 - DNA, 25 bp, Homo sapien
tttcagaggtggtaacgaagacact

SEQ ID NO: 3515111 - DNA, 25 bp, Homo sapien
gaagacactgtctcgttcacacact

SEQ ID NO: 3515112 - DNA, 25 bp, Homo sapien
tgctggaacaaagacgtggctcacg

SEQ ID NO: 3515113 - DNA, 25 bp, Homo sapien
gctctgccgccactgtgaaaactcc

SEQ ID NO: 3515114 - DNA, 25 bp, Homo sapien
tgggtcaaatgacatgccacctttg

SEQ ID NO: 3515115 - DNA, 25 bp, Homo sapien
tgtgaaaactcctatcttctaaaaa

SEQ ID NO: 3515116 - DNA, 25 bp, Homo sapien
ccacctttgacatctaatatgagga

SEQ ID NO: 3515117 - DNA, 25 bp, Homo sapien
taaagtcacgatgcgtccagctagc

SEQ ID NO: 3515118 - DNA, 25 bp, Homo sapien
caaaggagacgcacagctgatccgt

SEQ ID NO: 3515119 - DNA, 25 bp, Homo sapien
gaatctttccttgcgtaggcgcgcg

SEQ ID NO: 3515120 - DNA, 25 bp, Homo sapien
tgcgattacagcgtctccattggag

SEQ ID NO: 3515121 - DNA, 25 bp, Homo sapien
ttctgtatgggaaggactgatggca

SEQ ID NO: 3515122 - DNA, 25 bp, Homo sapien
tagccaaagaggacgcactggtgtc

SEQ ID NO: 3515123 - DNA, 25 bp, Homo sapien
tgaaaccaggctgttgcgagcccag

SEQ ID NO: 3515124 - DNA, 25 bp, Homo sapien
caaggaaattgacgtggtccgagcc

SEQ ID NO: 3515125 - DNA, 25 bp, Homo sapien
ggaggcctcagcgacatgacccatg

SEQ ID NO: 3515126 - DNA, 25 bp, Homo sapien
ggcctcagcgacatgacccatgctg

SEQ ID NO: 3515127 - DNA, 25 bp, Homo sapien
gtgaggaggcctcagcgacatgacc

SEQ ID NO: 3515128 - DNA, 25 bp, Homo sapien
gaggaggcctcagcgacatgaccca

SEQ ID NO: 3515129 - DNA, 25 bp, Homo sapien
tccatggaagttgcctggtgcccac

SEQ ID NO: 3515130 - DNA, 25 bp, Homo sapien
gctaccacttagagggcgggtctga

SEQ ID NO: 3515131 - DNA, 25 bp, Homo sapien
ccatgggcagactagctgagctacc

SEQ ID NO: 3515132 - DNA, 25 bp, Homo sapien
tgggcatatcccctctccatggaag

SEQ ID NO: 3515133 - DNA, 25 bp, Homo sapien
tggtgtgtccagatatacgtgtgag

SEQ ID NO: 3515134 - DNA, 25 bp, Homo sapien
ggtttctgcaacctcacgagggcca

SEQ ID NO: 3515135 - DNA, 25 bp, Homo sapien
ggaagatttagggtctttgtgcctg

SEQ ID NO: 3515136 - DNA, 25 bp, Homo sapien
atttagggtctttgtgcctgtgccc

SEQ ID NO: 3515137 - DNA, 25 bp, Homo sapien
tctggctgactcatcccgaccttgg

SEQ ID NO: 3515138 - DNA, 25 bp, Homo sapien
ctgaagaagtgtaacacatgatctg

SEQ ID NO: 3515139 - DNA, 25 bp, Homo sapien
gaagtgtaacacatgatctggcccc

SEQ ID NO: 3515140 - DNA, 25 bp, Homo sapien
tggctgactcatcccgaccttggct

SEQ ID NO: 3515141 - DNA, 25 bp, Homo sapien
ctccttctgctgtactggaatcagc

SEQ ID NO: 3515142 - DNA, 25 bp, Homo sapien
tccttctgctgtactggaatcagcc

SEQ ID NO: 3515143 - DNA, 25 bp, Homo sapien
ccttctgctgtactggaatcagcct

SEQ ID NO: 3515144 - DNA, 25 bp, Homo sapien
tggcctcctgaaggagtaacagctc

SEQ ID NO: 3515145 - DNA, 25 bp, Homo sapien
ttggcctcctgaaggagtaacagct

SEQ ID NO: 3515146 - DNA, 25 bp, Homo sapien
cttggcctcctgaaggagtaacagc

SEQ ID NO: 3515147 - DNA, 25 bp, Homo sapien
gaaatcaagagagtgtcctacagca

SEQ ID NO: 3515148 - DNA, 25 bp, Homo sapien
caggagtccagagcacaatcgtgag

SEQ ID NO: 3515149 - DNA, 25 bp, Homo sapien
gatttatctccatagacctctgcaa

SEQ ID NO: 3515150 - DNA, 25 bp, Homo sapien
tctggctgccaccagtggaaatcaa

SEQ ID NO: 3515151 - DNA, 25 bp, Homo sapien
ctgagttagagatacaaacattctc

SEQ ID NO: 3515152 - DNA, 25 bp, Homo sapien
gagttagagatacaaacattctcac

SEQ ID NO: 3515153 - DNA, 25 bp, Homo sapien
tgagttagagatacaaacattctca

SEQ ID NO: 3515154 - DNA, 25 bp, Homo sapien
accaatcagtgaaggggtgctgctg

SEQ ID NO: 3515155 - DNA, 25 bp, Homo sapien
gaactgaggggcaggaccaatcagt

SEQ ID NO: 3515156 - DNA, 25 bp, Homo sapien
aactgaggggcaggaccaatcagtg

SEQ ID NO: 3515157 - DNA, 25 bp, Homo sapien
tgctgctcaaatgagcattcttccc

SEQ ID NO: 3515158 - DNA, 25 bp, Homo sapien
gctgctcaaatgagcattcttccca

SEQ ID NO: 3515159 - DNA, 25 bp, Homo sapien
gagatgctgctcaaatgagcattct

SEQ ID NO: 3515160 - DNA, 25 bp, Homo sapien
cgagagtgacccatgatgccgcatg

SEQ ID NO: 3515161 - DNA, 25 bp, Homo sapien
tggtgggactttccatccctccctg

SEQ ID NO: 3515162 - DNA, 25 bp, Homo sapien
tcttctcgcctggtgatgtcactgg

SEQ ID NO: 3515163 - DNA, 25 bp, Homo sapien
gagctgctgcgcacatcaaagggca

SEQ ID NO: 3515164 - DNA, 25 bp, Homo sapien
taaagcaccattgaggcacgcaagc

SEQ ID NO: 3515165 - DNA, 25 bp, Homo sapien
atctcagacatgtgatatctaaagc

SEQ ID NO: 3515166 - DNA, 25 bp, Homo sapien
tgtgatatctaaagcaccattgagg

SEQ ID NO: 3515167 - DNA, 25 bp, Homo sapien
cattgaggcacgcaagcagccacac

SEQ ID NO: 3515168 - DNA, 25 bp, Homo sapien
tggaggttagggagttgtctgccct

SEQ ID NO: 3515169 - DNA, 25 bp, Homo sapien
agatggaggttagggagttgtctgc

SEQ ID NO: 3515170 - DNA, 25 bp, Homo sapien
ctggagatggaggttagggagttgt

SEQ ID NO: 3515171 - DNA, 25 bp, Homo sapien
tggagatggaggttagggagttgtc

SEQ ID NO: 3515172 - DNA, 25 bp, Homo sapien
ctcctgctgacccaacaatcaccca

SEQ ID NO: 3515173 - DNA, 25 bp, Homo sapien
tcctgctgacccaacaatcacccac

SEQ ID NO: 3515174 - DNA, 25 bp, Homo sapien
cctgctgacccaacaatcacccaca

SEQ ID NO: 3515175 - DNA, 25 bp, Homo sapien
ctgctgacccaacaatcacccacag

SEQ ID NO: 3515176 - DNA, 25 bp, Homo sapien
gaagtcaaaggccacaaacccatca

SEQ ID NO: 3515177 - DNA, 25 bp, Homo sapien
aagtcaaaggccacaaacccatcaa

SEQ ID NO: 3515178 - DNA, 25 bp, Homo sapien
caaaattcactggaacatgtcccaa

SEQ ID NO: 3515179 - DNA, 25 bp, Homo sapien
attcactggaacatgtcccaaaatg

SEQ ID NO: 3515180 - DNA, 25 bp, Homo sapien
cagtctggacttactccctttccgt

SEQ ID NO: 3515181 - DNA, 25 bp, Homo sapien
ggcatcccgtcccttgaatcacagt

SEQ ID NO: 3515182 - DNA, 25 bp, Homo sapien
gtacccttcagctttggcatcccgt

SEQ ID NO: 3515183 - DNA, 25 bp, Homo sapien
gaatcacagtcattgtctggctcta

SEQ ID NO: 3515184 - DNA, 25 bp, Homo sapien
cattgtctggctctaatgcaaacac

SEQ ID NO: 3515185 - DNA, 25 bp, Homo sapien
ggcagtcagccagaagagcctctat

SEQ ID NO: 3515186 - DNA, 25 bp, Homo sapien
ggtaaatccctttgccatcccatgg

SEQ ID NO: 3515187 - DNA, 25 bp, Homo sapien
tctgtgctgattgcacaacggctgc

SEQ ID NO: 3515188 - DNA, 25 bp, Homo sapien
tatcccattgagctgtgactcaggc

SEQ ID NO: 3515189 - DNA, 25 bp, Homo sapien
ttactatgagagtattagggttact

SEQ ID NO: 3515190 - DNA, 25 bp, Homo sapien
cattggtacaatccagagtttattt

SEQ ID NO: 3515191 - DNA, 25 bp, Homo sapien
tactatgagagtattagggttactt

SEQ ID NO: 3515192 - DNA, 25 bp, Homo sapien
ggtacaatccagagtttatttagat

SEQ ID NO: 3515193 - DNA, 25 bp, Homo sapien
gtcctttggagtcccgactgcccta

SEQ ID NO: 3515194 - DNA, 25 bp, Homo sapien
tcctgggttacttgaaacagcagct

SEQ ID NO: 3515195 - DNA, 25 bp, Homo sapien
tggagtcccgactgccctaaatact

SEQ ID NO: 3515196 - DNA, 25 bp, Homo sapien
ctaaatactttcacccaaagtcctg

SEQ ID NO: 3515197 - DNA, 25 bp, Homo sapien
cataggtcgcaggaaatgctatatt

SEQ ID NO: 3515198 - DNA, 25 bp, Homo sapien
gctgtcataggtcgcaggaaatgct

SEQ ID NO: 3515199 - DNA, 25 bp, Homo sapien
ttttgctgtcataggtcgcaggaaa

SEQ ID NO: 3515200 - DNA, 25 bp, Homo sapien
tgtcataggtcgcaggaaatgctat

SEQ ID NO: 3515201 - DNA, 25 bp, Homo sapien
tcaagggaactcatagactttgtgt

SEQ ID NO: 3515202 - DNA, 25 bp, Homo sapien
caagggaactcatagactttgtgtt

SEQ ID NO: 3515203 - DNA, 25 bp, Homo sapien
tggcagctggagataagcgataagc

SEQ ID NO: 3515204 - DNA, 25 bp, Homo sapien
gagtgcctgagtctgcttgtctgga

SEQ ID NO: 3515205 - DNA, 25 bp, Homo sapien
tctcaaatcccttggggctacctga

SEQ ID NO: 3515206 - DNA, 25 bp, Homo sapien
tgcttgtctggaggcctctcaaatc

SEQ ID NO: 3515207 - DNA, 25 bp, Homo sapien
gaggctgtgaacctgtctgaatcac

SEQ ID NO: 3515208 - DNA, 25 bp, Homo sapien
gagatttgctgtcgctcagagagac

SEQ ID NO: 3515209 - DNA, 25 bp, Homo sapien
aacaatggcgggaaatggaggctca

SEQ ID NO: 3515210 - DNA, 25 bp, Homo sapien
cactggcagccaaccaggacagttt

SEQ ID NO: 3515211 - DNA, 25 bp, Homo sapien
tcagggtgcacactctcgctgaact

SEQ ID NO: 3515212 - DNA, 25 bp, Homo sapien
gtcagggtgcacactctcgctgaac

SEQ ID NO: 3515213 - DNA, 25 bp, Homo sapien
ggtcagggtgcacactctcgctgaa

SEQ ID NO: 3515214 - DNA, 25 bp, Homo sapien
gaagcctaaggagggtgcactgcta

SEQ ID NO: 3515215 - DNA, 25 bp, Homo sapien
gttagtctcaaaagccctcagagga

SEQ ID NO: 3515216 - DNA, 25 bp, Homo sapien
ccgacttatgtggtgtgaagcctaa

SEQ ID NO: 3515217 - DNA, 25 bp, Homo sapien
gagataggcatagccactcctggag

SEQ ID NO: 3515218 - DNA, 25 bp, Homo sapien
ggatcacagtcctgtgcaattttca

SEQ ID NO: 3515219 - DNA, 25 bp, Homo sapien
tttatcttggttactggatcacagt

SEQ ID NO: 3515220 - DNA, 25 bp, Homo sapien
gtcctgtgcaattttcattacctga

SEQ ID NO: 3515221 - DNA, 25 bp, Homo sapien
tgggatgaacacaagaggcctttat

SEQ ID NO: 3515222 - DNA, 25 bp, Homo sapien
taaggcacatgtcacagcagctctc

SEQ ID NO: 3515223 - DNA, 25 bp, Homo sapien
agagctaaggcacatgtcacagcag

SEQ ID NO: 3515224 - DNA, 25 bp, Homo sapien
gagctggaagggtaagccattatgt

SEQ ID NO: 3515225 - DNA, 25 bp, Homo sapien
ccttcttcttctgatcaggagtcag

SEQ ID NO: 3515226 - DNA, 25 bp, Homo sapien
aacaaaacccctggcgacctgcctg

SEQ ID NO: 3515227 - DNA, 25 bp, Homo sapien
tgtcccatccacattctacaccacg

SEQ ID NO: 3515228 - DNA, 25 bp, Homo sapien
catccacattctacaccacgctggc

SEQ ID NO: 3515229 - DNA, 25 bp, Homo sapien
gggctatccttcacatcaacaaaac

SEQ ID NO: 3515230 - DNA, 25 bp, Homo sapien
ttcttgagaataacgtctgctccag

SEQ ID NO: 3515231 - DNA, 25 bp, Homo sapien
ttgaagtgttcttgagaataacgtc

SEQ ID NO: 3515232 - DNA, 25 bp, Homo sapien
cttgagaataacgtctgctccagac

SEQ ID NO: 3515233 - DNA, 25 bp, Homo sapien
gtgttcttgagaataacgtctgctc

SEQ ID NO: 3515234 - DNA, 25 bp, Homo sapien
catggccagctcctttacagatgac

SEQ ID NO: 3515235 - DNA, 25 bp, Homo sapien
agtggcgggtcatggccagctcctt

SEQ ID NO: 3515236 - DNA, 25 bp, Homo sapien
gggtcatggccagctcctttacaga

SEQ ID NO: 3515237 - DNA, 25 bp, Homo sapien
gggcagtggcgggtcatggccagct

SEQ ID NO: 3515238 - DNA, 25 bp, Homo sapien
ctgggatccgagggaagtgacccct

SEQ ID NO: 3515239 - DNA, 25 bp, Homo sapien
ctttattggccacaccacccaaatt

SEQ ID NO: 3515240 - DNA, 25 bp, Homo sapien
tgacccctttagaggaagaactgct

SEQ ID NO: 3515241 - DNA, 25 bp, Homo sapien
cgcagcatgtctgcctccgcgcggt

SEQ ID NO: 3515242 - DNA, 25 bp, Homo sapien
ctggcaggccgaaggctaaaactga

SEQ ID NO: 3515243 - DNA, 25 bp, Homo sapien
cctggcaggccgaaggctaaaactg

SEQ ID NO: 3515244 - DNA, 25 bp, Homo sapien
gtttggagtttcaggtgtgacagga

SEQ ID NO: 3515245 - DNA, 25 bp, Homo sapien
cctgtagcatcgaggatcattggaa

SEQ ID NO: 3515246 - DNA, 25 bp, Homo sapien
taagggtttggagtttcaggtgtga

SEQ ID NO: 3515247 - DNA, 25 bp, Homo sapien
tcattggaacatctttgcaagggat

SEQ ID NO: 3515248 - DNA, 25 bp, Homo sapien
actgtcgttgagggctgctggcctc

SEQ ID NO: 3515249 - DNA, 25 bp, Homo sapien
tgccactgtcgttgagggctgctgg

SEQ ID NO: 3515250 - DNA, 25 bp, Homo sapien
cactgtcgttgagggctgctggcct

SEQ ID NO: 3515251 - DNA, 25 bp, Homo sapien
ccactgtcgttgagggctgctggcc

SEQ ID NO: 3515252 - DNA, 25 bp, Homo sapien
agctcggactccaacactgtccagg

SEQ ID NO: 3515253 - DNA, 25 bp, Homo sapien
ccaagtacaagaagtagagatcagc

SEQ ID NO: 3515254 - DNA, 25 bp, Homo sapien
gatccagcccctctttagagtgaag

SEQ ID NO: 3515255 - DNA, 25 bp, Homo sapien
gatttaaaggcactcgtttgaggca

SEQ ID NO: 3515256 - DNA, 25 bp, Homo sapien
tggagatccacatccagtaagtcca

SEQ ID NO: 3515257 - DNA, 25 bp, Homo sapien
gtgtttcaggtacaaagagcaattc

SEQ ID NO: 3515258 - DNA, 25 bp, Homo sapien
taatactatggaggcttctgcaggt

SEQ ID NO: 3515259 - DNA, 25 bp, Homo sapien
taaccagtgcataatactatggagg

SEQ ID NO: 3515260 - DNA, 25 bp, Homo sapien
ctggtgtttcaggtacaaagagcaa

SEQ ID NO: 3515261 - DNA, 25 bp, Homo sapien
tcgtgtacccaaagcgcctttctca

SEQ ID NO: 3515262 - DNA, 25 bp, Homo sapien
ctcccactgggttgtaatgatctgt

SEQ ID NO: 3515263 - DNA, 25 bp, Homo sapien
tacccaaagcgcctttctcatggaa

SEQ ID NO: 3515264 - DNA, 25 bp, Homo sapien
tgatctgtagcccagatgtggctgg

SEQ ID NO: 3515265 - DNA, 25 bp, Homo sapien
agtttgttcccggtggaaagcagtg

SEQ ID NO: 3515266 - DNA, 25 bp, Homo sapien
tggcagcgatgcttgagaagaccct

SEQ ID NO: 3515267 - DNA, 25 bp, Homo sapien
caccttgagaaagtggcagcgatgc

SEQ ID NO: 3515268 - DNA, 25 bp, Homo sapien
aaagtggcagcgatgcttgagaaga

SEQ ID NO: 3515269 - DNA, 25 bp, Homo sapien
cgtgcaccctgaaactgttactctt

SEQ ID NO: 3515270 - DNA, 25 bp, Homo sapien
aaatgcagaaaacgtgcaccctgaa

SEQ ID NO: 3515271 - DNA, 25 bp, Homo sapien
ttttgaaactgaataccatcagtgt

SEQ ID NO: 3515272 - DNA, 25 bp, Homo sapien
aataccatcagtgttggtgcaagcc

SEQ ID NO: 3515273 - DNA, 25 bp, Homo sapien
gaaaaacaccagtcagcttccgctc

SEQ ID NO: 3515274 - DNA, 25 bp, Homo sapien
ctaatggcggatcgagaaaaacacc

SEQ ID NO: 3515275 - DNA, 25 bp, Homo sapien
tgtacacgaataggtctaatggcgg

SEQ ID NO: 3515276 - DNA, 25 bp, Homo sapien
tcggcacatccacactgcggttttc

SEQ ID NO: 3515277 - DNA, 25 bp, Homo sapien
caggagggaacccttcccatttgat

SEQ ID NO: 3515278 - DNA, 25 bp, Homo sapien
tgaaagctttcactccaaatgggtg

SEQ ID NO: 3515279 - DNA, 25 bp, Homo sapien
tgttcgtggatgaaggtaaactctc

SEQ ID NO: 3515280 - DNA, 25 bp, Homo sapien
tctttgtagccagaatggtttggcg

SEQ ID NO: 3515281 - DNA, 25 bp, Homo sapien
gcagtgatgtaaactcatgaaagct

SEQ ID NO: 3515282 - DNA, 25 bp, Homo sapien
tctgttcagggtcagtgaatgagaa

SEQ ID NO: 3515283 - DNA, 25 bp, Homo sapien
ttcagacagacaggagatggaagat

SEQ ID NO: 3515284 - DNA, 25 bp, Homo sapien
cattcagacagacaggagatggaag

SEQ ID NO: 3515285 - DNA, 25 bp, Homo sapien
ctgtctctgttcagggtcagtgaat

SEQ ID NO: 3515286 - DNA, 25 bp, Homo sapien
aaaattgtgaagtcaatggagtctt

SEQ ID NO: 3515287 - DNA, 25 bp, Homo sapien
aattaatgagcaggtgatggcgatg

SEQ ID NO: 3515288 - DNA, 25 bp, Homo sapien
gaagtcaatggagtctttctttccc

SEQ ID NO: 3515289 - DNA, 25 bp, Homo sapien
atgagcaggtgatggcgatgacacc

SEQ ID NO: 3515290 - DNA, 25 bp, Homo sapien
taagtggtcaaaacctggctactgg

SEQ ID NO: 3515291 - DNA, 25 bp, Homo sapien
gaactgctgcttttcgtcggaatgc

SEQ ID NO: 3515292 - DNA, 25 bp, Homo sapien
gaaatgcaatggaatcgctccgcgc

SEQ ID NO: 3515293 - DNA, 25 bp, Homo sapien
tctttggaactacgggaatgacagc

SEQ ID NO: 3515294 - DNA, 25 bp, Homo sapien
atatctctctttggtgtaagggtta

SEQ ID NO: 3515295 - DNA, 25 bp, Homo sapien
tggtgtaagggttataatgtatctg

SEQ ID NO: 3515296 - DNA, 25 bp, Homo sapien
tttggtgtaagggttataatgtatc

SEQ ID NO: 3515297 - DNA, 25 bp, Homo sapien
ctctctttggtgtaagggttataat

SEQ ID NO: 3515298 - DNA, 25 bp, Homo sapien
cattccatattgtgttgggctgtct

SEQ ID NO: 3515299 - DNA, 25 bp, Homo sapien
gcattccatattgtgttgggctgtc

SEQ ID NO: 3515300 - DNA, 25 bp, Homo sapien
ggagggaacaggatgcacactgcat

SEQ ID NO: 3515301 - DNA, 25 bp, Homo sapien
taggccatggttgtccaatgcacat

SEQ ID NO: 3515302 - DNA, 25 bp, Homo sapien
cgtaagtacttaggtctgcatggaa

SEQ ID NO: 3515303 - DNA, 25 bp, Homo sapien
cataagtggacatggccgtaagtac

SEQ ID NO: 3515304 - DNA, 25 bp, Homo sapien
gaaaaagttggccatcgagttcttg

SEQ ID NO: 3515305 - DNA, 25 bp, Homo sapien
tagatgataaaacacggagtttgtg

SEQ ID NO: 3515306 - DNA, 25 bp, Homo sapien
ggccatcgagttcttggtcaggaac

SEQ ID NO: 3515307 - DNA, 25 bp, Homo sapien
gacattagccttggcttgcatcatt

SEQ ID NO: 3515308 - DNA, 25 bp, Homo sapien
ggcttcttcccgcagtgttcttgta

SEQ ID NO: 3515309 - DNA, 25 bp, Homo sapien
gaagagagcacattgctgcccttgt

SEQ ID NO: 3515310 - DNA, 25 bp, Homo sapien
ttgctcaggtgagtggcctgagcag

SEQ ID NO: 3515311 - DNA, 25 bp, Homo sapien
tctcgggcccctgccgtttccagtg

SEQ ID NO: 3515312 - DNA, 25 bp, Homo sapien
ttggctgtggactacccagaggagc

SEQ ID NO: 3515313 - DNA, 25 bp, Homo sapien
tgtcaggcaaacttaggcgatttcc

SEQ ID NO: 3515314 - DNA, 25 bp, Homo sapien
ctttgtcaggtctagaggcttggcc

SEQ ID NO: 3515315 - DNA, 25 bp, Homo sapien
gaggcttggccgtttgtcctgctct

SEQ ID NO: 3515316 - DNA, 25 bp, Homo sapien
gctgtagggatgaaggagttgccca

SEQ ID NO: 3515317 - DNA, 25 bp, Homo sapien
gagaaggctgtagggatgaaggagt

SEQ ID NO: 3515318 - DNA, 25 bp, Homo sapien
aaggctgtagggatgaaggagttgc

SEQ ID NO: 3515319 - DNA, 25 bp, Homo sapien
ggctgtagggatgaaggagttgccc

SEQ ID NO: 3515320 - DNA, 25 bp, Homo sapien
cagtgatctcttcttaaggatattt

SEQ ID NO: 3515321 - DNA, 25 bp, Homo sapien
aaagagatctgtattcctgcatctg

SEQ ID NO: 3515322 - DNA, 25 bp, Homo sapien
aacagtgatctcttcttaaggatat

SEQ ID NO: 3515323 - DNA, 25 bp, Homo sapien
cctgcatctgatgaaaacataacaa

SEQ ID NO: 3515324 - DNA, 25 bp, Homo sapien
cattcatgactaggctttcagacat

SEQ ID NO: 3515325 - DNA, 25 bp, Homo sapien
tcactctgtgatacttttttcagca

SEQ ID NO: 3515326 - DNA, 25 bp, Homo sapien
tgtcctccataacctctttcactct

SEQ ID NO: 3515327 - DNA, 25 bp, Homo sapien
catggagagggcacttggagtccct

SEQ ID NO: 3515328 - DNA, 25 bp, Homo sapien
tacagattgtcagctgcgctgtcag

SEQ ID NO: 3515329 - DNA, 25 bp, Homo sapien
ctacagattgtcagctgcgctgtca

SEQ ID NO: 3515330 - DNA, 25 bp, Homo sapien
acagattgtcagctgcgctgtcagc

SEQ ID NO: 3515331 - DNA, 25 bp, Homo sapien
cagattgtcagctgcgctgtcagca

SEQ ID NO: 3515332 - DNA, 25 bp, Homo sapien
tgactgctccctgcagcgagaactc

SEQ ID NO: 3515333 - DNA, 25 bp, Homo sapien
tagcttctggtttggcttggtccct

SEQ ID NO: 3515334 - DNA, 25 bp, Homo sapien
tgctgagcgtgcctctcctgggtcg

SEQ ID NO: 3515335 - DNA, 25 bp, Homo sapien
tccttaacgtcctccctgggtgagc

SEQ ID NO: 3515336 - DNA, 25 bp, Homo sapien
tgtcttgaagacacccggatctcca

SEQ ID NO: 3515337 - DNA, 25 bp, Homo sapien
ctgtcttgaagacacccggatctcc

SEQ ID NO: 3515338 - DNA, 25 bp, Homo sapien
gtcttgaagacacccggatctccat

SEQ ID NO: 3515339 - DNA, 25 bp, Homo sapien
ttacagactgaactatcaatggaga

SEQ ID NO: 3515340 - DNA, 25 bp, Homo sapien
ctgttacagactgaactatcaatgg

SEQ ID NO: 3515341 - DNA, 25 bp, Homo sapien
gttacagactgaactatcaatggag

SEQ ID NO: 3515342 - DNA, 25 bp, Homo sapien
tgttacagactgaactatcaatgga

SEQ ID NO: 3515343 - DNA, 25 bp, Homo sapien
gcagagcagtaagccctacacctga

SEQ ID NO: 3515344 - DNA, 25 bp, Homo sapien
tctctcagcgagaatgtggcacact

SEQ ID NO: 3515345 - DNA, 25 bp, Homo sapien
cacactggcatttgaacggcagagc

SEQ ID NO: 3515346 - DNA, 25 bp, Homo sapien
cttgttgaggctgcgtggaagccca

SEQ ID NO: 3515347 - DNA, 25 bp, Homo sapien
ttccagagatttaagcagcaaagtg

SEQ ID NO: 3515348 - DNA, 25 bp, Homo sapien
gcattccggtcactattttccagag

SEQ ID NO: 3515349 - DNA, 25 bp, Homo sapien
gctttccagatagcacgcattccgg

SEQ ID NO: 3515350 - DNA, 25 bp, Homo sapien
catacactgacagggccagaagggc

SEQ ID NO: 3515351 - DNA, 25 bp, Homo sapien
gcctgagtcagactgactctgggag

SEQ ID NO: 3515352 - DNA, 25 bp, Homo sapien
tcggcctgagtcagactgactctgg

SEQ ID NO: 3515353 - DNA, 25 bp, Homo sapien
ctcggcctgagtcagactgactctg

SEQ ID NO: 3515354 - DNA, 25 bp, Homo sapien
gtcagactgactctgggagctgtgg

SEQ ID NO: 3515355 - DNA, 25 bp, Homo sapien
caaacacgaactgtgaatgtgccag

SEQ ID NO: 3515356 - DNA, 25 bp, Homo sapien
ggatagccaggcgttcagaactgaa

SEQ ID NO: 3515357 - DNA, 25 bp, Homo sapien
gagagagcaaccgtcactagggaat

SEQ ID NO: 3515358 - DNA, 25 bp, Homo sapien
tgagggctctccagttggaccacga

SEQ ID NO: 3515359 - DNA, 25 bp, Homo sapien
cgttgtgctactgtccatccagggc

SEQ ID NO: 3515360 - DNA, 25 bp, Homo sapien
aaattgacagtcatgggcacagaca

SEQ ID NO: 3515361 - DNA, 25 bp, Homo sapien
aaggaggagcctctatcccaggaaa

SEQ ID NO: 3515362 - DNA, 25 bp, Homo sapien
tggaacactgatccactctgccagg

SEQ ID NO: 3515363 - DNA, 25 bp, Homo sapien
ggtgactgggtggttgaaaggagcc

SEQ ID NO: 3515364 - DNA, 25 bp, Homo sapien
agccagggagagaggatacagctct

SEQ ID NO: 3515365 - DNA, 25 bp, Homo sapien
tccaggaggtgtgcccacgggcaca

SEQ ID NO: 3515366 - DNA, 25 bp, Homo sapien
caagcagagaatggtcacagggcgt

SEQ ID NO: 3515367 - DNA, 25 bp, Homo sapien
cactgtaggtttttggaagaagctg

SEQ ID NO: 3515368 - DNA, 25 bp, Homo sapien
ccactgtaggtttttggaagaagct

SEQ ID NO: 3515369 - DNA, 25 bp, Homo sapien
ctcaaagtgacctgtctgggttttc

SEQ ID NO: 3515370 - DNA, 25 bp, Homo sapien
gctccataaatcaccaagaccctga

SEQ ID NO: 3515371 - DNA, 25 bp, Homo sapien
ctcatgcggttgtttggctggtcaa

SEQ ID NO: 3515372 - DNA, 25 bp, Homo sapien
catgcggttgtttggctggtcaaaa

SEQ ID NO: 3515373 - DNA, 25 bp, Homo sapien
gggccagggctccataaatcaccaa

SEQ ID NO: 3515374 - DNA, 25 bp, Homo sapien
taaaccacaggttactgaagttggc

SEQ ID NO: 3515375 - DNA, 25 bp, Homo sapien
ccaagtttgtgcctggaactcaaga

SEQ ID NO: 3515376 - DNA, 25 bp, Homo sapien
aactcaagaggaggctacagctacc

SEQ ID NO: 3515377 - DNA, 25 bp, Homo sapien
gaaacgtctagctgggctcattgaa

SEQ ID NO: 3515378 - DNA, 25 bp, Homo sapien
cttctgaaaagacctagctgtgtga

SEQ ID NO: 3515379 - DNA, 25 bp, Homo sapien
tcaagggcagcaaactatacaaatt

SEQ ID NO: 3515380 - DNA, 25 bp, Homo sapien
aaactgaaagtaccccagctgccaa

SEQ ID NO: 3515381 - DNA, 25 bp, Homo sapien
tcactctaaagggtgaaatggctct

SEQ ID NO: 3515382 - DNA, 25 bp, Homo sapien
cgaggtcactgttgccagaaggggg

SEQ ID NO: 3515383 - DNA, 25 bp, Homo sapien
gaggtcactgttgccagaaggggga

SEQ ID NO: 3515384 - DNA, 25 bp, Homo sapien
gatcgaggtcactgttgccagaagg

SEQ ID NO: 3515385 - DNA, 25 bp, Homo sapien
caggatcgaggtcactgttgccaga

SEQ ID NO: 3515386 - DNA, 25 bp, Homo sapien
aactgaggagacacacacagacctc

SEQ ID NO: 3515387 - DNA, 25 bp, Homo sapien
tttaaaaactgaggagacacacaca

SEQ ID NO: 3515388 - DNA, 25 bp, Homo sapien
aaactgaggagacacacacagacct

SEQ ID NO: 3515389 - DNA, 25 bp, Homo sapien
agattttaaaaactgaggagacaca

SEQ ID NO: 3515390 - DNA, 25 bp, Homo sapien
caatttcgccttagaaagcttttct

SEQ ID NO: 3515391 - DNA, 25 bp, Homo sapien
aagaagtgaaaacaatattccatcc

SEQ ID NO: 3515392 - DNA, 25 bp, Homo sapien
gtatgttggagcagatcttggtctc

SEQ ID NO: 3515393 - DNA, 25 bp, Homo sapien
gcagatcttggtctctagctatgta

SEQ ID NO: 3515394 - DNA, 25 bp, Homo sapien
gttggagcagatcttggtctctagc

SEQ ID NO: 3515395 - DNA, 25 bp, Homo sapien
tgttggagcagatcttggtctctag

SEQ ID NO: 3515396 - DNA, 25 bp, Homo sapien
aaagctgtacagctgtccaggtggt

SEQ ID NO: 3515397 - DNA, 25 bp, Homo sapien
ttctgcatctagatcagcaaggcca

SEQ ID NO: 3515398 - DNA, 25 bp, Homo sapien
tattctcgtcacaggattacccggc

SEQ ID NO: 3515399 - DNA, 25 bp, Homo sapien
caggcctggaatttagccacattag

SEQ ID NO: 3515400 - DNA, 25 bp, Homo sapien
ctcttttggaacatagtcacttaaa

SEQ ID NO: 3515401 - DNA, 25 bp, Homo sapien
cctcttttggaacatagtcacttaa

SEQ ID NO: 3515402 - DNA, 25 bp, Homo sapien
tttggaacatagtcacttaaaagta

SEQ ID NO: 3515403 - DNA, 25 bp, Homo sapien
cttttggaacatagtcacttaaaag

SEQ ID NO: 3515404 - DNA, 25 bp, Homo sapien
ggtgaactttcagtgataagagcca

SEQ ID NO: 3515405 - DNA, 25 bp, Homo sapien
agttcaggacaaggactaatgatgg

SEQ ID NO: 3515406 - DNA, 25 bp, Homo sapien
tcagccaattactctgacagaagag

SEQ ID NO: 3515407 - DNA, 25 bp, Homo sapien
cccaggatgcagagggtagaataat

SEQ ID NO: 3515408 - DNA, 25 bp, Homo sapien
tgccattggattgaacttcctcctt

SEQ ID NO: 3515409 - DNA, 25 bp, Homo sapien
cttctttgccattggattgaacttc

SEQ ID NO: 3515410 - DNA, 25 bp, Homo sapien
ccattggattgaacttcctccttta

SEQ ID NO: 3515411 - DNA, 25 bp, Homo sapien
ctttgccattggattgaacttcctc

SEQ ID NO: 3515412 - DNA, 25 bp, Homo sapien
ctattcccaatctaatcttcttaag

SEQ ID NO: 3515413 - DNA, 25 bp, Homo sapien
atcttcttaagacccctctccttca

SEQ ID NO: 3515414 - DNA, 25 bp, Homo sapien
ctaatcttcttaagacccctctcct

SEQ ID NO: 3515415 - DNA, 25 bp, Homo sapien
tctattcccaatctaatcttcttaa

SEQ ID NO: 3515416 - DNA, 25 bp, Homo sapien
tgtaagttataagcttgttcactcc

SEQ ID NO: 3515417 - DNA, 25 bp, Homo sapien
tcggaagttaaaaagaatgccatct

SEQ ID NO: 3515418 - DNA, 25 bp, Homo sapien
aatcaggccgaaaggctatctctag

SEQ ID NO: 3515419 - DNA, 25 bp, Homo sapien
tattactacaactatccacaaagga

SEQ ID NO: 3515420 - DNA, 25 bp, Homo sapien
actatatgacattcccgttccccac

SEQ ID NO: 3515421 - DNA, 25 bp, Homo sapien
gcactagctaccatgagagggagga

SEQ ID NO: 3515422 - DNA, 25 bp, Homo sapien
aatcaaccacatcatcatctgtaag

SEQ ID NO: 3515423 - DNA, 25 bp, Homo sapien
tggtggatattcttcatcccaatca

SEQ ID NO: 3515424 - DNA, 25 bp, Homo sapien
caccatcatttgataactcatgcat

SEQ ID NO: 3515425 - DNA, 25 bp, Homo sapien
gcaccatcatttgataactcatgca

SEQ ID NO: 3515426 - DNA, 25 bp, Homo sapien
tgccatcaggacaacggattattcc

SEQ ID NO: 3515427 - DNA, 25 bp, Homo sapien
gagatacaaagatagtcacatgctt

SEQ ID NO: 3515428 - DNA, 25 bp, Homo sapien
gagatctctacatttaatagtgcta

SEQ ID NO: 3515429 - DNA, 25 bp, Homo sapien
cagttcaggaatagatatgccatca

SEQ ID NO: 3515430 - DNA, 25 bp, Homo sapien
cttcgcctcctggctcaaaagatct

SEQ ID NO: 3515431 - DNA, 25 bp, Homo sapien
ctcccaagtgttggaggccaaaaga

SEQ ID NO: 3515432 - DNA, 25 bp, Homo sapien
ttcgcctcctggctcaaaagatctt

SEQ ID NO: 3515433 - DNA, 25 bp, Homo sapien
aaacacagtggaaccaattccctct

SEQ ID NO: 3515434 - DNA, 25 bp, Homo sapien
acacagtggaaccaattccctctgc

SEQ ID NO: 3515435 - DNA, 25 bp, Homo sapien
aacacagtggaaccaattccctctg

SEQ ID NO: 3515436 - DNA, 25 bp, Homo sapien
gacaagtaatttagcctccaaagct

SEQ ID NO: 3515437 - DNA, 25 bp, Homo sapien
tatttgctatttctactggtactgc

SEQ ID NO: 3515438 - DNA, 25 bp, Homo sapien
tgggaacccaagtgcaggaaacata

SEQ ID NO: 3515439 - DNA, 25 bp, Homo sapien
tattttgtgattgaatgggaaccca

SEQ ID NO: 3515440 - DNA, 25 bp, Homo sapien
tatccactattagtgtcactcgttc

SEQ ID NO: 3515441 - DNA, 25 bp, Homo sapien
tgtcactcgttctgacgttcttata

SEQ ID NO: 3515442 - DNA, 25 bp, Homo sapien
caacaaatctagtgttatccactat

SEQ ID NO: 3515443 - DNA, 25 bp, Homo sapien
gacgttcttatattccgagctcctt

SEQ ID NO: 3515444 - DNA, 25 bp, Homo sapien
acagctaccatctgaacttgactga

SEQ ID NO: 3515445 - DNA, 25 bp, Homo sapien
gctgtcttacagctaccatctgaac

SEQ ID NO: 3515446 - DNA, 25 bp, Homo sapien
ccagctgtcttacagctaccatctg

SEQ ID NO: 3515447 - DNA, 25 bp, Homo sapien
gtcttacagctaccatctgaacttg

SEQ ID NO: 3515448 - DNA, 25 bp, Homo sapien
cactagcaccatgtagactcatttt

SEQ ID NO: 3515449 - DNA, 25 bp, Homo sapien
actagcaccatgtagactcattttg

SEQ ID NO: 3515450 - DNA, 25 bp, Homo sapien
gtagactcattttggtgtggtcaac

SEQ ID NO: 3515451 - DNA, 25 bp, Homo sapien
cccactagcaccatgtagactcatt

SEQ ID NO: 3515452 - DNA, 25 bp, Homo sapien
gcagaacataagattggaaacattt

SEQ ID NO: 3515453 - DNA, 25 bp, Homo sapien
taacgtgtctttgaagatcacatac

SEQ ID NO: 3515454 - DNA, 25 bp, Homo sapien
gatcactcagatatcttaaatgtta

SEQ ID NO: 3515455 - DNA, 25 bp, Homo sapien
gaagagaaggcaagagcttttggaa

SEQ ID NO: 3515456 - DNA, 25 bp, Homo sapien
gattaaaacagtccagcttacagaa

SEQ ID NO: 3515457 - DNA, 25 bp, Homo sapien
taaagccagacctaaggcaatttgg

SEQ ID NO: 3515458 - DNA, 25 bp, Homo sapien
tagagtagccactagtgtatcacta

SEQ ID NO: 3515459 - DNA, 25 bp, Homo sapien
ccagaagtgaataactcagaatgct

SEQ ID NO: 3515460 - DNA, 25 bp, Homo sapien
ggtacaagcacaacaacgagtaaga

SEQ ID NO: 3515461 - DNA, 25 bp, Homo sapien
tgttcagtttgagtaagggccaagc

SEQ ID NO: 3515462 - DNA, 25 bp, Homo sapien
tgtagctgaaagactagacactgct

SEQ ID NO: 3515463 - DNA, 25 bp, Homo sapien
gaggacagctgcatcaatagaacat

SEQ ID NO: 3515464 - DNA, 25 bp, Homo sapien
gctggtagctaacttattgttcccc

SEQ ID NO: 3515465 - DNA, 25 bp, Homo sapien
taattatcacaatcagctggtagct

SEQ ID NO: 3515466 - DNA, 25 bp, Homo sapien
taaacttagtacaacaactcagcct

SEQ ID NO: 3515467 - DNA, 25 bp, Homo sapien
gcgatgctaccttaatgtatcctgg

SEQ ID NO: 3515468 - DNA, 25 bp, Homo sapien
ttcaaaatcaagcccagaatctccc

SEQ ID NO: 3515469 - DNA, 25 bp, Homo sapien
aataataaacccctaacatcagcca

SEQ ID NO: 3515470 - DNA, 25 bp, Homo sapien
tgaaacaaaatcagccatgagttgg

SEQ ID NO: 3515471 - DNA, 25 bp, Homo sapien
ccttgtgataatgagaggaaagcca

SEQ ID NO: 3515472 - DNA, 25 bp, Homo sapien
cgccattgcctatctctggatttct

SEQ ID NO: 3515473 - DNA, 25 bp, Homo sapien
gatcactggagttaccatcataggg

SEQ ID NO: 3515474 - DNA, 25 bp, Homo sapien
tacgaggtctactatgcaatttccg

SEQ ID NO: 3515475 - DNA, 25 bp, Homo sapien
catcatagggatgaggccgtcctgc

SEQ ID NO: 3515476 - DNA, 25 bp, Homo sapien
gcaatttccgatcccaattctctgg

SEQ ID NO: 3515477 - DNA, 25 bp, Homo sapien
ctccaagcttcctcacactactgct

SEQ ID NO: 3515478 - DNA, 25 bp, Homo sapien
cactccaagcttcctcacactactg

SEQ ID NO: 3515479 - DNA, 25 bp, Homo sapien
cccactccaagcttcctcacactac

SEQ ID NO: 3515480 - DNA, 25 bp, Homo sapien
actccaagcttcctcacactactgc

SEQ ID NO: 3515481 - DNA, 25 bp, Homo sapien
ctgaaagcacacatgtagcacccat

SEQ ID NO: 3515482 - DNA, 25 bp, Homo sapien
aaagcacacatgtagcacccataac

SEQ ID NO: 3515483 - DNA, 25 bp, Homo sapien
gaaagcacacatgtagcacccataa

SEQ ID NO: 3515484 - DNA, 25 bp, Homo sapien
tgaaagcacacatgtagcacccata

SEQ ID NO: 3515485 - DNA, 25 bp, Homo sapien
tagaaatgaggaccaaacccttgca

SEQ ID NO: 3515486 - DNA, 25 bp, Homo sapien
tatcaggatttatacactacataga

SEQ ID NO: 3515487 - DNA, 25 bp, Homo sapien
tcaagttgtactgttgcctcatcct

SEQ ID NO: 3515488 - DNA, 25 bp, Homo sapien
tcttggtgtttattaggattccatc

SEQ ID NO: 3515489 - DNA, 25 bp, Homo sapien
taagcatttacaaagtacctacatt

SEQ ID NO: 3515490 - DNA, 25 bp, Homo sapien
gacactgtttagtttataggctacc

SEQ ID NO: 3515491 - DNA, 25 bp, Homo sapien
tacctacattacatgattagcattg

SEQ ID NO: 3515492 - DNA, 25 bp, Homo sapien
tagcattgttaagtaactagacact

SEQ ID NO: 3515493 - DNA, 25 bp, Homo sapien
ccagttagaactgtaggcattccat

SEQ ID NO: 3515494 - DNA, 25 bp, Homo sapien
agtattagtagtccagcctgctcag

SEQ ID NO: 3515495 - DNA, 25 bp, Homo sapien
tcatagtattagtagtccagcctgc

SEQ ID NO: 3515496 - DNA, 25 bp, Homo sapien
ctccctcatagtattagtagtccag

SEQ ID NO: 3515497 - DNA, 25 bp, Homo sapien
tactgctttccgctttatattcaaa

SEQ ID NO: 3515498 - DNA, 25 bp, Homo sapien
ggactgaacttcaatcctggacagg

SEQ ID NO: 3515499 - DNA, 25 bp, Homo sapien
tcttattccgatttccacagtctct

SEQ ID NO: 3515500 - DNA, 25 bp, Homo sapien
cagaaactcttttggccgttatggc

SEQ ID NO: 3515501 - DNA, 25 bp, Homo sapien
tatcccctattgtgatgcgccttcc

SEQ ID NO: 3515502 - DNA, 25 bp, Homo sapien
gctgcgttcgtctgagatgacagga

SEQ ID NO: 3515503 - DNA, 25 bp, Homo sapien
ggttacaacataaaaccacgcagca

SEQ ID NO: 3515504 - DNA, 25 bp, Homo sapien
taaaaccacgcagcacgttagtggg

SEQ ID NO: 3515505 - DNA, 25 bp, Homo sapien
tgaggcggctgcgcgtagcggagcc

SEQ ID NO: 3515506 - DNA, 25 bp, Homo sapien
gcaggttgcaggccggctcctcagc

SEQ ID NO: 3515507 - DNA, 25 bp, Homo sapien
gagccgccccggcaggttgcaggcc

SEQ ID NO: 3515508 - DNA, 25 bp, Homo sapien
cgaacctgtagtcccccttcagtgc

SEQ ID NO: 3515509 - DNA, 25 bp, Homo sapien
gactctgacatcttatgcttatcta

SEQ ID NO: 3515510 - DNA, 25 bp, Homo sapien
caagtacccacatggcaacgaggat

SEQ ID NO: 3515511 - DNA, 25 bp, Homo sapien
ctgggtcccaagtacccacatggca

SEQ ID NO: 3515512 - DNA, 25 bp, Homo sapien
tcccaagtacccacatggcaacgag

SEQ ID NO: 3515513 - DNA, 25 bp, Homo sapien
cttaggccgcatgtagacagaaacc

SEQ ID NO: 3515514 - DNA, 25 bp, Homo sapien
gatctaagtacattagggctctgta

SEQ ID NO: 3515515 - DNA, 25 bp, Homo sapien
cctaagacagtacacgacaaacaat

SEQ ID NO: 3515516 - DNA, 25 bp, Homo sapien
cattgtatgccagtgcctaagacag

SEQ ID NO: 3515517 - DNA, 25 bp, Homo sapien
atatcagaaatattggcacttggaa

SEQ ID NO: 3515518 - DNA, 25 bp, Homo sapien
ggctagtgatggattacatgtagtt

SEQ ID NO: 3515519 - DNA, 25 bp, Homo sapien
caattaaaattgcagttatcatggc

SEQ ID NO: 3515520 - DNA, 25 bp, Homo sapien
gttgccctacactgtctagagcaga

SEQ ID NO: 3515521 - DNA, 25 bp, Homo sapien
cactgggatttagctttagttaata

SEQ ID NO: 3515522 - DNA, 25 bp, Homo sapien
tcactgggatttagctttagttaat

SEQ ID NO: 3515523 - DNA, 25 bp, Homo sapien
gctagaggagctccaagggcaacaa

SEQ ID NO: 3515524 - DNA, 25 bp, Homo sapien
ccatcgagttcagatgttttcccag

SEQ ID NO: 3515525 - DNA, 25 bp, Homo sapien
tcatggctctcaaccaagacattgt

SEQ ID NO: 3515526 - DNA, 25 bp, Homo sapien
caaaattgtgcacatcctgcagctt

SEQ ID NO: 3515527 - DNA, 25 bp, Homo sapien
aacatgacaatcataactttagcca

SEQ ID NO: 3515528 - DNA, 25 bp, Homo sapien
acatgacaatcataactttagccat

SEQ ID NO: 3515529 - DNA, 25 bp, Homo sapien
gatttcccatccgattttgtaagaa

SEQ ID NO: 3515530 - DNA, 25 bp, Homo sapien
taacagatttcccatccgattttgt

SEQ ID NO: 3515531 - DNA, 25 bp, Homo sapien
atatgctagtattaatttcacaaac

SEQ ID NO: 3515532 - DNA, 25 bp, Homo sapien
tcaataacatcctgcctttttaaaa

SEQ ID NO: 3515533 - DNA, 25 bp, Homo sapien
caactatttagcacaatgactggcc

SEQ ID NO: 3515534 - DNA, 25 bp, Homo sapien
aacatttgttaaagatcatgcaaaa

SEQ ID NO: 3515535 - DNA, 25 bp, Homo sapien
actgatgaattggactgcagacccc

SEQ ID NO: 3515536 - DNA, 25 bp, Homo sapien
ttcgttcaggtatgttagtagctga

SEQ ID NO: 3515537 - DNA, 25 bp, Homo sapien
tgtcttagaacaagatcttcgttca

SEQ ID NO: 3515538 - DNA, 25 bp, Homo sapien
tgcagaccccttaaatggtgacttt

SEQ ID NO: 3515539 - DNA, 25 bp, Homo sapien
tacacacacccattgggcggtgcac

SEQ ID NO: 3515540 - DNA, 25 bp, Homo sapien
cccattgggcggtgcacactcttct

SEQ ID NO: 3515541 - DNA, 25 bp, Homo sapien
ctataggttcaaagcagcacataca

SEQ ID NO: 3515542 - DNA, 25 bp, Homo sapien
ctctggatctcaactataggttcaa

SEQ ID NO: 3515543 - DNA, 25 bp, Homo sapien
gccagagtgggatcagttctctcag

SEQ ID NO: 3515544 - DNA, 25 bp, Homo sapien
ccagagtgggatcagttctctcagc

SEQ ID NO: 3515545 - DNA, 25 bp, Homo sapien
gcagccaaggatggaatccaatcca

SEQ ID NO: 3515546 - DNA, 25 bp, Homo sapien
caaggatggaatccaatccagggct

SEQ ID NO: 3515547 - DNA, 25 bp, Homo sapien
tctgaaagtggcagccaaggatgga

SEQ ID NO: 3515548 - DNA, 25 bp, Homo sapien
aaagtggcagccaaggatggaatcc

SEQ ID NO: 3515549 - DNA, 25 bp, Homo sapien
tctgtgcgtggtctgttttggtctc

SEQ ID NO: 3515550 - DNA, 25 bp, Homo sapien
tgtgcgtggtctgttttggtctctc

SEQ ID NO: 3515551 - DNA, 25 bp, Homo sapien
ctgtgcgtggtctgttttggtctct

SEQ ID NO: 3515552 - DNA, 25 bp, Homo sapien
tgcgtggtctgttttggtctctcca

SEQ ID NO: 3515553 - DNA, 25 bp, Homo sapien
ggcatggtgtcggagattgtggtgg

SEQ ID NO: 3515554 - DNA, 25 bp, Homo sapien
gtgtcggagattgtggtgggtggta

SEQ ID NO: 3515555 - DNA, 25 bp, Homo sapien
tcttcttgggcatggtgtcggagat

SEQ ID NO: 3515556 - DNA, 25 bp, Homo sapien
cttcttgggcatggtgtcggagatt

SEQ ID NO: 3515557 - DNA, 25 bp, Homo sapien
catgtacaccaagttgggctgagag

SEQ ID NO: 3515558 - DNA, 25 bp, Homo sapien
caactcaggcctatggatcagaatc

SEQ ID NO: 3515559 - DNA, 25 bp, Homo sapien
tatgtgaatcaaacccatgtacacc

SEQ ID NO: 3515560 - DNA, 25 bp, Homo sapien
tggagatatcttgcctcaactcagg

SEQ ID NO: 3515561 - DNA, 25 bp, Homo sapien
cttcctaatacctgcctctggcact

SEQ ID NO: 3515562 - DNA, 25 bp, Homo sapien
ttcctaatacctgcctctggcactt

SEQ ID NO: 3515563 - DNA, 25 bp, Homo sapien
tagaagcagaaactccaaggaagaa

SEQ ID NO: 3515564 - DNA, 25 bp, Homo sapien
gaatttggcttgcttcttgcatcac

SEQ ID NO: 3515565 - DNA, 25 bp, Homo sapien
tacacagtatactcagtagaagcag

SEQ ID NO: 3515566 - DNA, 25 bp, Homo sapien
gacactggtcctttctccggcatat

SEQ ID NO: 3515567 - DNA, 25 bp, Homo sapien
caatcagttgtgataattcactatc

SEQ ID NO: 3515568 - DNA, 25 bp, Homo sapien
agttgtgataattcactatcttcgg

SEQ ID NO: 3515569 - DNA, 25 bp, Homo sapien
gttgtgataattcactatcttcgga

SEQ ID NO: 3515570 - DNA, 25 bp, Homo sapien
tcagttgtgataattcactatcttc

SEQ ID NO: 3515571 - DNA, 25 bp, Homo sapien
aacaagtcacctcaaacttagtgtc

SEQ ID NO: 3515572 - DNA, 25 bp, Homo sapien
tgtgtgtcacaatatctgtgggtca

SEQ ID NO: 3515573 - DNA, 25 bp, Homo sapien
tctagaagggttagcttgatggtaa

SEQ ID NO: 3515574 - DNA, 25 bp, Homo sapien
tggtaatggctcaggatctttcaaa

SEQ ID NO: 3515575 - DNA, 25 bp, Homo sapien
ggatggtgacaagcatcttatagca

SEQ ID NO: 3515576 - DNA, 25 bp, Homo sapien
gagaaaccctggactagataatcat

SEQ ID NO: 3515577 - DNA, 25 bp, Homo sapien
cacgaaagaatgatcagacccacaa

SEQ ID NO: 3515578 - DNA, 25 bp, Homo sapien
tcttatagcatgcaagatagccctc

SEQ ID NO: 3515579 - DNA, 25 bp, Homo sapien
gacttaatattttgagccctagaag

SEQ ID NO: 3515580 - DNA, 25 bp, Homo sapien
tataaccagcgtattttcacatcat

SEQ ID NO: 3515581 - DNA, 25 bp, Homo sapien
gacagtaatactagcaaagttggta

SEQ ID NO: 3515582 - DNA, 25 bp, Homo sapien
ggaacactgaccagtataactgtgc

SEQ ID NO: 3515583 - DNA, 25 bp, Homo sapien
tactacataaggtagcaaactgttg

SEQ ID NO: 3515584 - DNA, 25 bp, Homo sapien
gaaagaaatgcgttatagaaacaag

SEQ ID NO: 3515585 - DNA, 25 bp, Homo sapien
gagaacagttcgcaatacaaaaagt

SEQ ID NO: 3515586 - DNA, 25 bp, Homo sapien
aaaaatatactcgtgtgtaaacaca

SEQ ID NO: 3515587 - DNA, 25 bp, Homo sapien
tagattgttaatccccaccagctag

SEQ ID NO: 3515588 - DNA, 25 bp, Homo sapien
ttgacttggcaacattaacatgtcc

SEQ ID NO: 3515589 - DNA, 25 bp, Homo sapien
gaggccactcactgcattaattttg

SEQ ID NO: 3515590 - DNA, 25 bp, Homo sapien
gaagcttggcagtacgttctttgac

SEQ ID NO: 3515591 - DNA, 25 bp, Homo sapien
gacttgaaaccattagcgctaactt

SEQ ID NO: 3515592 - DNA, 25 bp, Homo sapien
ggtaagtgtaaatggccttctgagc

SEQ ID NO: 3515593 - DNA, 25 bp, Homo sapien
gcttaggattacaggaagcagtcct

SEQ ID NO: 3515594 - DNA, 25 bp, Homo sapien
gaaaaaggaatgtatgccacgtaac

SEQ ID NO: 3515595 - DNA, 25 bp, Homo sapien
aggtataaggaaccgagaggaaatg

SEQ ID NO: 3515596 - DNA, 25 bp, Homo sapien
tcagattggtgggatgctcgggtag

SEQ ID NO: 3515597 - DNA, 25 bp, Homo sapien
aggctgggaggtataaggaaccgag

SEQ ID NO: 3515598 - DNA, 25 bp, Homo sapien
tcgggtagggaagcatccaggtttc

SEQ ID NO: 3515599 - DNA, 25 bp, Homo sapien
gcagtggtcagtgtatgcatccgca

SEQ ID NO: 3515600 - DNA, 25 bp, Homo sapien
tggtcagtgtatgcatccgcacatc

SEQ ID NO: 3515601 - DNA, 25 bp, Homo sapien
tcagtgtatgcatccgcacatctac

SEQ ID NO: 3515602 - DNA, 25 bp, Homo sapien
ccagcagtggtcagtgtatgcatcc

SEQ ID NO: 3515603 - DNA, 25 bp, Homo sapien
gggctccatgggaatcttgctggtc

SEQ ID NO: 3515604 - DNA, 25 bp, Homo sapien
tccatgggaatcttgctggtcccaa

SEQ ID NO: 3515605 - DNA, 25 bp, Homo sapien
aggggtgacaatgatgtagggaaga

SEQ ID NO: 3515606 - DNA, 25 bp, Homo sapien
aatccagaaatgaggggtgacaatg

SEQ ID NO: 3515607 - DNA, 25 bp, Homo sapien
acaggtttaatgacaatatatttgt

SEQ ID NO: 3515608 - DNA, 25 bp, Homo sapien
taatgacaatatatttgttatcaaa

SEQ ID NO: 3515609 - DNA, 25 bp, Homo sapien
caggtttaatgacaatatatttgtt

SEQ ID NO: 3515610 - DNA, 25 bp, Homo sapien
caatatatttgttatcaaatctcac

SEQ ID NO: 3515611 - DNA, 25 bp, Homo sapien
taggtacttgtatagtacttccgtg

SEQ ID NO: 3515612 - DNA, 25 bp, Homo sapien
tacttccgtgattagtttatcagga

SEQ ID NO: 3515613 - DNA, 25 bp, Homo sapien
tgtccatagtgaattaggtacttgt

SEQ ID NO: 3515614 - DNA, 25 bp, Homo sapien
acataagtgtccatagtgaattagg

SEQ ID NO: 3515615 - DNA, 25 bp, Homo sapien
ctagttgatggtttatgaggattct

SEQ ID NO: 3515616 - DNA, 25 bp, Homo sapien
tatgaggattctgggtttcattgct

SEQ ID NO: 3515617 - DNA, 25 bp, Homo sapien
gtttatgaggattctgggtttcatt

SEQ ID NO: 3515618 - DNA, 25 bp, Homo sapien
tagttgatggtttatgaggattctg

SEQ ID NO: 3515619 - DNA, 25 bp, Homo sapien
gagctagtactttggcatatgctac

SEQ ID NO: 3515620 - DNA, 25 bp, Homo sapien
agccccgggtagtgggtctctgaga

SEQ ID NO: 3515621 - DNA, 25 bp, Homo sapien
gaaacccacgaaaagtattccatga

SEQ ID NO: 3515622 - DNA, 25 bp, Homo sapien
tgaaagaaagagctagtactttggc

SEQ ID NO: 3515623 - DNA, 25 bp, Homo sapien
tagtgcagatgttatatgagggctg

SEQ ID NO: 3515624 - DNA, 25 bp, Homo sapien
cagtagtgcagatgttatatgaggg

SEQ ID NO: 3515625 - DNA, 25 bp, Homo sapien
ctggggcaggcaagcactgaaattc

SEQ ID NO: 3515626 - DNA, 25 bp, Homo sapien
cagatgttatatgagggctggggca

SEQ ID NO: 3515627 - DNA, 25 bp, Homo sapien
ccaggatggcctagagtacacagct

SEQ ID NO: 3515628 - DNA, 25 bp, Homo sapien
tcaggattacattgtggcagccagg

SEQ ID NO: 3515629 - DNA, 25 bp, Homo sapien
tatggccagtgaaatgtggcaccac

SEQ ID NO: 3515630 - DNA, 25 bp, Homo sapien
gcctggccattttgggcttgccttg

SEQ ID NO: 3515631 - DNA, 25 bp, Homo sapien
ctgtgcacccacgcatggccttccc

SEQ ID NO: 3515632 - DNA, 25 bp, Homo sapien
tgtgcacccacgcatggccttccca

SEQ ID NO: 3515633 - DNA, 25 bp, Homo sapien
cttatggatctttccaaaagaagtc

SEQ ID NO: 3515634 - DNA, 25 bp, Homo sapien
tacagctccttggtagtacttgcct

SEQ ID NO: 3515635 - DNA, 25 bp, Homo sapien
cagctccttggtagtacttgcctgt

SEQ ID NO: 3515636 - DNA, 25 bp, Homo sapien
agctccttggtagtacttgcctgtg

SEQ ID NO: 3515637 - DNA, 25 bp, Homo sapien
ggtacagctccttggtagtacttgc

SEQ ID NO: 3515638 - DNA, 25 bp, Homo sapien
cagaggatcactcagcattagcgct

SEQ ID NO: 3515639 - DNA, 25 bp, Homo sapien
tagcgctacaaggacaaattcagca

SEQ ID NO: 3515640 - DNA, 25 bp, Homo sapien
ctttggacaggagatggcgctcttg

SEQ ID NO: 3515641 - DNA, 25 bp, Homo sapien
ggcgctcttgaatgtaatttggcag

SEQ ID NO: 3515642 - DNA, 25 bp, Homo sapien
gagtaggtgatgagaatcataactt

SEQ ID NO: 3515643 - DNA, 25 bp, Homo sapien
aggtgatgagaatcataacttggta

SEQ ID NO: 3515644 - DNA, 25 bp, Homo sapien
gtaggtgatgagaatcataacttgg

SEQ ID NO: 3515645 - DNA, 25 bp, Homo sapien
gtgagtaggtgatgagaatcataac

SEQ ID NO: 3515646 - DNA, 25 bp, Homo sapien
gatagcttccacagaacgtctagag

SEQ ID NO: 3515647 - DNA, 25 bp, Homo sapien
cttccacagaacgtctagagctggg

SEQ ID NO: 3515648 - DNA, 25 bp, Homo sapien
gcttccacagaacgtctagagctgg

SEQ ID NO: 3515649 - DNA, 25 bp, Homo sapien
tagcttccacagaacgtctagagct

SEQ ID NO: 3515650 - DNA, 25 bp, Homo sapien
agttcaatggaacgagggataatcc

SEQ ID NO: 3515651 - DNA, 25 bp, Homo sapien
tggaacgagggataatccacataac

SEQ ID NO: 3515652 - DNA, 25 bp, Homo sapien
atgagttcaatggaacgagggataa

SEQ ID NO: 3515653 - DNA, 25 bp, Homo sapien
tcaatggaacgagggataatccaca

SEQ ID NO: 3515654 - DNA, 25 bp, Homo sapien
tttgtccttaatgagctgccccgtg

SEQ ID NO: 3515655 - DNA, 25 bp, Homo sapien
ctctgcacatgggagatagccctgg

SEQ ID NO: 3515656 - DNA, 25 bp, Homo sapien
ttctgttctagccttgctccaggtg

SEQ ID NO: 3515657 - DNA, 25 bp, Homo sapien
gtgtctctttgcaatggcagccagg

SEQ ID NO: 3515658 - DNA, 25 bp, Homo sapien
ccccaatgagggaagtatgcttgaa

SEQ ID NO: 3515659 - DNA, 25 bp, Homo sapien
gactcatgctttctcagaggttcag

SEQ ID NO: 3515660 - DNA, 25 bp, Homo sapien
ccccagggaggtatgtgtaatagtc

SEQ ID NO: 3515661 - DNA, 25 bp, Homo sapien
tgtcatagttcaggtaacccagggc

SEQ ID NO: 3515662 - DNA, 25 bp, Homo sapien
ggaggcactgtctcatgacttggcc

SEQ ID NO: 3515663 - DNA, 25 bp, Homo sapien
tgggcagtttgcctctatggagtct

SEQ ID NO: 3515664 - DNA, 25 bp, Homo sapien
ccagattgggagtcactaaatttcc

SEQ ID NO: 3515665 - DNA, 25 bp, Homo sapien
tgacttggccccagtcctttcagac

SEQ ID NO: 3515666 - DNA, 25 bp, Homo sapien
tcattcggcatcagccacagccata

SEQ ID NO: 3515667 - DNA, 25 bp, Homo sapien
ccacagccatagagtaggagggaga

SEQ ID NO: 3515668 - DNA, 25 bp, Homo sapien
tggtgtagcttgaaaatcattcggc

SEQ ID NO: 3515669 - DNA, 25 bp, Homo sapien
caggtgattcttaggggaaagcaga

SEQ ID NO: 3515670 - DNA, 25 bp, Homo sapien
cttctagatatccatggcaactggt

SEQ ID NO: 3515671 - DNA, 25 bp, Homo sapien
caactggttggaaatgcctaatata

SEQ ID NO: 3515672 - DNA, 25 bp, Homo sapien
gactctagctgctccctggactggt

SEQ ID NO: 3515673 - DNA, 25 bp, Homo sapien
atatagaaatatcgactctagctgc

SEQ ID NO: 3515674 - DNA, 25 bp, Homo sapien
tctgctcctcagaactccagggctt

SEQ ID NO: 3515675 - DNA, 25 bp, Homo sapien
cagggcttctctgaggagcttcggg

SEQ ID NO: 3515676 - DNA, 25 bp, Homo sapien
gaactccagggcttctctgaggagc

SEQ ID NO: 3515677 - DNA, 25 bp, Homo sapien
cttctctgaggagcttcggggagtc

SEQ ID NO: 3515678 - DNA, 25 bp, Homo sapien
ttctggctaccttcccacataaaca

SEQ ID NO: 3515679 - DNA, 25 bp, Homo sapien
tggctaccttcccacataaacaaga

SEQ ID NO: 3515680 - DNA, 25 bp, Homo sapien
cttcctgttgctgcccgttgcaggc

SEQ ID NO: 3515681 - DNA, 25 bp, Homo sapien
tgttgctgcccgttgcaggcccttc

SEQ ID NO: 3515682 - DNA, 25 bp, Homo sapien
tttgaagttgacttctaggccccat

SEQ ID NO: 3515683 - DNA, 25 bp, Homo sapien
tgaagttgacttctaggccccatcc

SEQ ID NO: 3515684 - DNA, 25 bp, Homo sapien
taggattgaagatcaaagtttgaag

SEQ ID NO: 3515685 - DNA, 25 bp, Homo sapien
gagatgatcattctttgtaggattg

SEQ ID NO: 3515686 - DNA, 25 bp, Homo sapien
gaaactgaaggtcaaaatcaacgca

SEQ ID NO: 3515687 - DNA, 25 bp, Homo sapien
tatgaacacgaaggaaaacagcgag

SEQ ID NO: 3515688 - DNA, 25 bp, Homo sapien
tcaacgcagtggtgccgaacagaag

SEQ ID NO: 3515689 - DNA, 25 bp, Homo sapien
ggcccgaggtgcgatgagtataata

SEQ ID NO: 3515690 - DNA, 25 bp, Homo sapien
ggcttatcctcctctatggtctccc

SEQ ID NO: 3515691 - DNA, 25 bp, Homo sapien
tgtgcccaccttgccaatcagtttt

SEQ ID NO: 3515692 - DNA, 25 bp, Homo sapien
ctccctcaaatctcctgtgtcctca

SEQ ID NO: 3515693 - DNA, 25 bp, Homo sapien
tgaagaaagtgtagtaccatgaaca

SEQ ID NO: 3515694 - DNA, 25 bp, Homo sapien
tcaaactgcagctcacaagtaaagt

SEQ ID NO: 3515695 - DNA, 25 bp, Homo sapien
tgtcctaagtaattgtgccagacca

SEQ ID NO: 3515696 - DNA, 25 bp, Homo sapien
gaacaatttggacgccttctttggc

SEQ ID NO: 3515697 - DNA, 25 bp, Homo sapien
caagtaaagtccacttgtcctaagt

SEQ ID NO: 3515698 - DNA, 25 bp, Homo sapien
ctggctggtgcttagccttgcctct

SEQ ID NO: 3515699 - DNA, 25 bp, Homo sapien
ttagccttgcctctctgaaaatctt

SEQ ID NO: 3515700 - DNA, 25 bp, Homo sapien
tggtgcttagccttgcctctctgaa

SEQ ID NO: 3515701 - DNA, 25 bp, Homo sapien
gtgcttagccttgcctctctgaaaa

SEQ ID NO: 3515702 - DNA, 25 bp, Homo sapien
aatctccaaattcacggaagccctg

SEQ ID NO: 3515703 - DNA, 25 bp, Homo sapien
atctccaaattcacggaagccctgc

SEQ ID NO: 3515704 - DNA, 25 bp, Homo sapien
tctccaaattcacggaagccctgca

SEQ ID NO: 3515705 - DNA, 25 bp, Homo sapien
tgttccagatgttggagataacatg

SEQ ID NO: 3515706 - DNA, 25 bp, Homo sapien
ccagatgttggagataacatggcaa

SEQ ID NO: 3515707 - DNA, 25 bp, Homo sapien
ttccagatgttggagataacatggc

SEQ ID NO: 3515708 - DNA, 25 bp, Homo sapien
gccagactctgttccagatgttgga

SEQ ID NO: 3515709 - DNA, 25 bp, Homo sapien
gaaaagaagcgcctgagtcctctga

SEQ ID NO: 3515710 - DNA, 25 bp, Homo sapien
gagtcctctgagctgctacgtcctt

SEQ ID NO: 3515711 - DNA, 25 bp, Homo sapien
cattggccataggtctgtatcttcc

SEQ ID NO: 3515712 - DNA, 25 bp, Homo sapien
gaacgaattataactgctctctggg

SEQ ID NO: 3515713 - DNA, 25 bp, Homo sapien
gagcaaagtgaccagaacagataaa

SEQ ID NO: 3515714 - DNA, 25 bp, Homo sapien
aaagtgaccagaacagataaagagg

SEQ ID NO: 3515715 - DNA, 25 bp, Homo sapien
gcaaagtgaccagaacagataaaga

SEQ ID NO: 3515716 - DNA, 25 bp, Homo sapien
ctttgaacaaggagcaaagtgacca

SEQ ID NO: 3515717 - DNA, 25 bp, Homo sapien
aattaatgcgtgtcctcttgtcctt

SEQ ID NO: 3515718 - DNA, 25 bp, Homo sapien
tctctacctgtccatagtcttcatg

SEQ ID NO: 3515719 - DNA, 25 bp, Homo sapien
tgtccatagtcttcatgcaagccaa

SEQ ID NO: 3515720 - DNA, 25 bp, Homo sapien
ccaagatcccccaattaatgcgtgt

SEQ ID NO: 3515721 - DNA, 25 bp, Homo sapien
caattgctggctgtttcccatgttc

SEQ ID NO: 3515722 - DNA, 25 bp, Homo sapien
tgttccacaagaaaaggggcgtaca

SEQ ID NO: 3515723 - DNA, 25 bp, Homo sapien
cagtattgacctgctgacgggaagc

SEQ ID NO: 3515724 - DNA, 25 bp, Homo sapien
aggcctgtccgcgtgctccgaggac

SEQ ID NO: 3515725 - DNA, 25 bp, Homo sapien
gaagcaatgtagcttcctggtctcc

SEQ ID NO: 3515726 - DNA, 25 bp, Homo sapien
tgaagcaatgtagcttcctggtctc

SEQ ID NO: 3515727 - DNA, 25 bp, Homo sapien
gcatcaggccccatgacaacaggcc

SEQ ID NO: 3515728 - DNA, 25 bp, Homo sapien
tctgagccctaacccaaggagagga

SEQ ID NO: 3515729 - DNA, 25 bp, Homo sapien
ccttgaagggaagtctgagccctaa

SEQ ID NO: 3515730 - DNA, 25 bp, Homo sapien
caaggagaggacaaagcatcaggcc

SEQ ID NO: 3515731 - DNA, 25 bp, Homo sapien
tccggcggcagttctgccaggaaca

SEQ ID NO: 3515732 - DNA, 25 bp, Homo sapien
acagagctctactgaagggtctggg

SEQ ID NO: 3515733 - DNA, 25 bp, Homo sapien
ctgccaggaacagagctctactgaa

SEQ ID NO: 3515734 - DNA, 25 bp, Homo sapien
tgggcttccggcggcagttctgcca

SEQ ID NO: 3515735 - DNA, 25 bp, Homo sapien
tgtctccccgtctgattctttctct

SEQ ID NO: 3515736 - DNA, 25 bp, Homo sapien
tcactgccgaatgccttcctctgct

SEQ ID NO: 3515737 - DNA, 25 bp, Homo sapien
tcgatatggtcagaacgttggctca

SEQ ID NO: 3515738 - DNA, 25 bp, Homo sapien
tctgcttagtcacagattcgatatg

SEQ ID NO: 3515739 - DNA, 25 bp, Homo sapien
gatcatgactatccttgggcaagcg

SEQ ID NO: 3515740 - DNA, 25 bp, Homo sapien
tagctacgacccgaggacagatcat

SEQ ID NO: 3515741 - DNA, 25 bp, Homo sapien
tagatagaaatatggaccctcagac

SEQ ID NO: 3515742 - DNA, 25 bp, Homo sapien
tatctaggctagcttatgagtcagc

SEQ ID NO: 3515743 - DNA, 25 bp, Homo sapien
tgtaggtgaatgtcgacttccaggt

SEQ ID NO: 3515744 - DNA, 25 bp, Homo sapien
taatgtaggtgaatgtcgacttcca

SEQ ID NO: 3515745 - DNA, 25 bp, Homo sapien
agacagggtaatgtaggtgaatgtc

SEQ ID NO: 3515746 - DNA, 25 bp, Homo sapien
gaatgtcgacttccaggtttccagc

SEQ ID NO: 3515747 - DNA, 25 bp, Homo sapien
ggttacctgctcaaaccttcctgaa

SEQ ID NO: 3515748 - DNA, 25 bp, Homo sapien
tggagagccttgatgctgagctgtc

SEQ ID NO: 3515749 - DNA, 25 bp, Homo sapien
accaataatctagcccttggagagc

SEQ ID NO: 3515750 - DNA, 25 bp, Homo sapien
cagcccaaactcaagtgcctgtgta

SEQ ID NO: 3515751 - DNA, 25 bp, Homo sapien
tcccagagacttagtgttaagcaag

SEQ ID NO: 3515752 - DNA, 25 bp, Homo sapien
gaagatgaactggagactctgggtc

SEQ ID NO: 3515753 - DNA, 25 bp, Homo sapien
agaggacaaccccagtttgaccaga

SEQ ID NO: 3515754 - DNA, 25 bp, Homo sapien
gatacggtgattcccagctccttag

SEQ ID NO: 3515755 - DNA, 25 bp, Homo sapien
atttttgagtgtgagtacaaggtaa

SEQ ID NO: 3515756 - DNA, 25 bp, Homo sapien
tatttttgagtgtgagtacaaggta

SEQ ID NO: 3515757 - DNA, 25 bp, Homo sapien
ttatttttgagtgtgagtacaaggt

SEQ ID NO: 3515758 - DNA, 25 bp, Homo sapien
tgggcatcttgtggagaccatagaa

SEQ ID NO: 3515759 - DNA, 25 bp, Homo sapien
catgggactgtcctgtgggcatctt

SEQ ID NO: 3515760 - DNA, 25 bp, Homo sapien
ttgtggagaccatagaaataaatca

SEQ ID NO: 3515761 - DNA, 25 bp, Homo sapien
tccttgaaaatgcataacatgggac

SEQ ID NO: 3515762 - DNA, 25 bp, Homo sapien
tatctctggccataaggaggcagag

SEQ ID NO: 3515763 - DNA, 25 bp, Homo sapien
ggaggtctgaagaaatggtggtggt

SEQ ID NO: 3515764 - DNA, 25 bp, Homo sapien
tggtggacatgacctatctctggcc

SEQ ID NO: 3515765 - DNA, 25 bp, Homo sapien
gcagttgggcctagacgctgaggga

SEQ ID NO: 3515766 - DNA, 25 bp, Homo sapien
gtccattagccgtggcgagctgcca

SEQ ID NO: 3515767 - DNA, 25 bp, Homo sapien
ggttaggagtatagcccaggcaccc

SEQ ID NO: 3515768 - DNA, 25 bp, Homo sapien
ggcagtgtttgcagaaccaggcctc

SEQ ID NO: 3515769 - DNA, 25 bp, Homo sapien
taaaaaatactgatgtccgggcctc

SEQ ID NO: 3515770 - DNA, 25 bp, Homo sapien
gtggctgaaatccttaatccaagga

SEQ ID NO: 3515771 - DNA, 25 bp, Homo sapien
gcagtaattaaactttgttggcaaa

SEQ ID NO: 3515772 - DNA, 25 bp, Homo sapien
ttaatccaaggatgcaatcttaacc

SEQ ID NO: 3515773 - DNA, 25 bp, Homo sapien
gggaggcatgcaatctgaccctaaa

SEQ ID NO: 3515774 - DNA, 25 bp, Homo sapien
catgcctacgttcatgtgtaggaga

SEQ ID NO: 3515775 - DNA, 25 bp, Homo sapien
ctgggaaagcgggtagtcagcctct

SEQ ID NO: 3515776 - DNA, 25 bp, Homo sapien
ggcacgttaagttctctgggtagcc

SEQ ID NO: 3515777 - DNA, 25 bp, Homo sapien
tgtaggagaggcacgttaagttctc

SEQ ID NO: 3515778 - DNA, 25 bp, Homo sapien
gtcgctcctctctatgaacacatcg

SEQ ID NO: 3515779 - DNA, 25 bp, Homo sapien
ttggcttaaccctctctgtgtcgct

SEQ ID NO: 3515780 - DNA, 25 bp, Homo sapien
catcgtgctggatctgtgctctgtc

SEQ ID NO: 3515781 - DNA, 25 bp, Homo sapien
tgggagcatcctcattcatagcagg

SEQ ID NO: 3515782 - DNA, 25 bp, Homo sapien
caccaaaagacaggctcccatggcc

SEQ ID NO: 3515783 - DNA, 25 bp, Homo sapien
tcaccaaaagacaggctcccatggc

SEQ ID NO: 3515784 - DNA, 25 bp, Homo sapien
ttcaccaaaagacaggctcccatgg

SEQ ID NO: 3515785 - DNA, 25 bp, Homo sapien
cgagataggacactttcagggtggt

SEQ ID NO: 3515786 - DNA, 25 bp, Homo sapien
cagacgagataggacactttcaggg

SEQ ID NO: 3515787 - DNA, 25 bp, Homo sapien
atcagacgagataggacactttcag

SEQ ID NO: 3515788 - DNA, 25 bp, Homo sapien
agatcagacgagataggacactttc

SEQ ID NO: 3515789 - DNA, 25 bp, Homo sapien
gggcacagatgcacccaatgaggga

SEQ ID NO: 3515790 - DNA, 25 bp, Homo sapien
taatcagtgcaatgaggtgtcaaag

SEQ ID NO: 3515791 - DNA, 25 bp, Homo sapien
tacttcatcagaaccagggtagctg

SEQ ID NO: 3515792 - DNA, 25 bp, Homo sapien
tccaagaggtgagtgttagttaggc

SEQ ID NO: 3515793 - DNA, 25 bp, Homo sapien
cgcaggagtacaatcctgtcctgga

SEQ ID NO: 3515794 - DNA, 25 bp, Homo sapien
tcctggaaagggtagccagagctcg

SEQ ID NO: 3515795 - DNA, 25 bp, Homo sapien
gcctctggagactggtgtcgcagga

SEQ ID NO: 3515796 - DNA, 25 bp, Homo sapien
aatcctgtcctggaaagggtagcca

SEQ ID NO: 3515797 - DNA, 25 bp, Homo sapien
tctgagccccaggctagatcagatg

SEQ ID NO: 3515798 - DNA, 25 bp, Homo sapien
gagccccaggctagatcagatgccc

SEQ ID NO: 3515799 - DNA, 25 bp, Homo sapien
ctcctctactccttgttgccttgga

SEQ ID NO: 3515800 - DNA, 25 bp, Homo sapien
ccttggataactcctacacaacttt

SEQ ID NO: 3515801 - DNA, 25 bp, Homo sapien
tcagcagagctctaagaacagacat

SEQ ID NO: 3515802 - DNA, 25 bp, Homo sapien
tgctgccctgtcagcagagctctaa

SEQ ID NO: 3515803 - DNA, 25 bp, Homo sapien
cagaatggtcagcttttacatgctg

SEQ ID NO: 3515804 - DNA, 25 bp, Homo sapien
cagcttttacatgctgccctgtcag

SEQ ID NO: 3515805 - DNA, 25 bp, Homo sapien
tttgggtgggtttggaacatgacac

SEQ ID NO: 3515806 - DNA, 25 bp, Homo sapien
gcaagtgtctcttgtctcaccaaga

SEQ ID NO: 3515807 - DNA, 25 bp, Homo sapien
cagaggtgccaaccaggcaagatcc

SEQ ID NO: 3515808 - DNA, 25 bp, Homo sapien
ggcaagatccatccctctgcaggct

SEQ ID NO: 3515809 - DNA, 25 bp, Homo sapien
gaacagcaatgggaggttgatgctt

SEQ ID NO: 3515810 - DNA, 25 bp, Homo sapien
cattgtttgtgggtacaagatggga

SEQ ID NO: 3515811 - DNA, 25 bp, Homo sapien
ctgcaggtgacattgtttgtgggta

SEQ ID NO: 3515812 - DNA, 25 bp, Homo sapien
tgggaggttgatgcttagcaccaga

SEQ ID NO: 3515813 - DNA, 25 bp, Homo sapien
ccacagctctctgccaatgatttaa

SEQ ID NO: 3515814 - DNA, 25 bp, Homo sapien
gagcaaatgaattcctggtcatgac

SEQ ID NO: 3515815 - DNA, 25 bp, Homo sapien
gctctctgccaatgatttaattcca

SEQ ID NO: 3515816 - DNA, 25 bp, Homo sapien
agcctggaggtcctgagcaaatgaa

SEQ ID NO: 3515817 - DNA, 25 bp, Homo sapien
gacatggtcacctccactcttgatg

SEQ ID NO: 3515818 - DNA, 25 bp, Homo sapien
taagtactgttagctccgcctgggc

SEQ ID NO: 3515819 - DNA, 25 bp, Homo sapien
cctatagtcttcctggacatggtca

SEQ ID NO: 3515820 - DNA, 25 bp, Homo sapien
ggacagcacacttttaaatctaagt

SEQ ID NO: 3515821 - DNA, 25 bp, Homo sapien
gacttgcaagggtttgctcttggga

SEQ ID NO: 3515822 - DNA, 25 bp, Homo sapien
gacacagtgctctctttaatccgta

SEQ ID NO: 3515823 - DNA, 25 bp, Homo sapien
tgccatggtcatgtggtccaagcca

SEQ ID NO: 3515824 - DNA, 25 bp, Homo sapien
gcatgctgtgctgcatttagacaca

SEQ ID NO: 3515825 - DNA, 25 bp, Homo sapien
tgtgcagcagaactcagaagtcggg

SEQ ID NO: 3515826 - DNA, 25 bp, Homo sapien
cagaactcagaagtcggggagggtt

SEQ ID NO: 3515827 - DNA, 25 bp, Homo sapien
gttttgtgcagcagaactcagaagt

SEQ ID NO: 3515828 - DNA, 25 bp, Homo sapien
caggttttgtgcagcagaactcaga

SEQ ID NO: 3515829 - DNA, 25 bp, Homo sapien
tcagagggctactgcagccgtatcc

SEQ ID NO: 3515830 - DNA, 25 bp, Homo sapien
tccgacgagaccctggacaaagtgc

SEQ ID NO: 3515831 - DNA, 25 bp, Homo sapien
cgggaaccagctaccgcggtaagtg

SEQ ID NO: 3515832 - DNA, 25 bp, Homo sapien
ccgacttctacaagccgggaaccag

SEQ ID NO: 3515833 - DNA, 25 bp, Homo sapien
caaattattctctcgtggtcccaga

SEQ ID NO: 3515834 - DNA, 25 bp, Homo sapien
taaccaggaagggaagcgagcctgt

SEQ ID NO: 3515835 - DNA, 25 bp, Homo sapien
agtcagctctggtgctaagcaggga

SEQ ID NO: 3515836 - DNA, 25 bp, Homo sapien
tggtcccagacgagatagagtatct

SEQ ID NO: 3515837 - DNA, 25 bp, Homo sapien
tcttctggggtacatacaacttaaa

SEQ ID NO: 3515838 - DNA, 25 bp, Homo sapien
tgcctattgagtaggatcttctggg

SEQ ID NO: 3515839 - DNA, 25 bp, Homo sapien
gtgttgcctgcctattgagtaggat

SEQ ID NO: 3515840 - DNA, 25 bp, Homo sapien
ggctgcaattgcctgaagtcccatt

SEQ ID NO: 3515841 - DNA, 25 bp, Homo sapien
gacttctggctcctagatcttcatc

SEQ ID NO: 3515842 - DNA, 25 bp, Homo sapien
ttctggctcctagatcttcatcttg

SEQ ID NO: 3515843 - DNA, 25 bp, Homo sapien
agtgacttctggctcctagatcttc

SEQ ID NO: 3515844 - DNA, 25 bp, Homo sapien
gccagtgacttctggctcctagatc

SEQ ID NO: 3515845 - DNA, 25 bp, Homo sapien
atctgaccggctcatagcaggctgg

SEQ ID NO: 3515846 - DNA, 25 bp, Homo sapien
ctgccttatctgaccggctcatagc

SEQ ID NO: 3515847 - DNA, 25 bp, Homo sapien
ttatctgaccggctcatagcaggct

SEQ ID NO: 3515848 - DNA, 25 bp, Homo sapien
tcatagcaggctggggtaagttcat

SEQ ID NO: 3515849 - DNA, 25 bp, Homo sapien
gagattgctacggtgtaagggaaac

SEQ ID NO: 3515850 - DNA, 25 bp, Homo sapien
aagcagcctttagggcctcttttca

SEQ ID NO: 3515851 - DNA, 25 bp, Homo sapien
caaagcagcctttagggcctctttt

SEQ ID NO: 3515852 - DNA, 25 bp, Homo sapien
gtgcccagagattgctacggtgtaa

SEQ ID NO: 3515853 - DNA, 25 bp, Homo sapien
cctgggatgatctgggctgagtggg

SEQ ID NO: 3515854 - DNA, 25 bp, Homo sapien
catgggaaactgcatcccttgagga

SEQ ID NO: 3515855 - DNA, 25 bp, Homo sapien
gaggagactcgtctggacttctctc

SEQ ID NO: 3515856 - DNA, 25 bp, Homo sapien
cttgtgcctctgataaagcctgcag

SEQ ID NO: 3515857 - DNA, 25 bp, Homo sapien
attggatgccacatgcccggtgcca

SEQ ID NO: 3515858 - DNA, 25 bp, Homo sapien
catggaggattaatctgcttttggg

SEQ ID NO: 3515859 - DNA, 25 bp, Homo sapien
cagagggtccgccaatggtgctcgt

SEQ ID NO: 3515860 - DNA, 25 bp, Homo sapien
gtttctcaggactaaacttctgtgg

SEQ ID NO: 3515861 - DNA, 25 bp, Homo sapien
tcctagatgtctcactgccatggcc

SEQ ID NO: 3515862 - DNA, 25 bp, Homo sapien
gactttggaatcgtattctcctaga

SEQ ID NO: 3515863 - DNA, 25 bp, Homo sapien
ttagaacgcttgcaacttcctctgg

SEQ ID NO: 3515864 - DNA, 25 bp, Homo sapien
catggcccacccacgtgttagaacg

SEQ ID NO: 3515865 - DNA, 25 bp, Homo sapien
tcattgtctggcctccctttgccgc

SEQ ID NO: 3515866 - DNA, 25 bp, Homo sapien
attgtctggcctccctttgccgcca

SEQ ID NO: 3515867 - DNA, 25 bp, Homo sapien
ccgtcattgtctggcctccctttgc

SEQ ID NO: 3515868 - DNA, 25 bp, Homo sapien
gtcattgtctggcctccctttgccg

SEQ ID NO: 3515869 - DNA, 25 bp, Homo sapien
ttgtgaagttagtcacttcacctct

SEQ ID NO: 3515870 - DNA, 25 bp, Homo sapien
gccattgtgaagttagtcacttcac

SEQ ID NO: 3515871 - DNA, 25 bp, Homo sapien
aagccttgccattgtgaagttagtc

SEQ ID NO: 3515872 - DNA, 25 bp, Homo sapien
ttgaagccttgccattgtgaagtta

SEQ ID NO: 3515873 - DNA, 25 bp, Homo sapien
tgtccgtactccagcggacatggat

SEQ ID NO: 3515874 - DNA, 25 bp, Homo sapien
gatctgtacatctgtccggctgtcc

SEQ ID NO: 3515875 - DNA, 25 bp, Homo sapien
tctggttccatctttggtccgttga

SEQ ID NO: 3515876 - DNA, 25 bp, Homo sapien
ttcttgcattcagacctgagtggcc

SEQ ID NO: 3515877 - DNA, 25 bp, Homo sapien
gctgagattccaacctgactcctga

SEQ ID NO: 3515878 - DNA, 25 bp, Homo sapien
gatctcatgctgatatcttggataa

SEQ ID NO: 3515879 - DNA, 25 bp, Homo sapien
gcttccatcacctgatgagagtttg

SEQ ID NO: 3515880 - DNA, 25 bp, Homo sapien
tccatgtaccaagtggagagagggc

SEQ ID NO: 3515881 - DNA, 25 bp, Homo sapien
tttttccccagcaagacccatatag

SEQ ID NO: 3515882 - DNA, 25 bp, Homo sapien
ccaagcactagaattctgcctttta

SEQ ID NO: 3515883 - DNA, 25 bp, Homo sapien
tccagggatgaagtcccttccttgc

SEQ ID NO: 3515884 - DNA, 25 bp, Homo sapien
caagacccatataggagccctggct

SEQ ID NO: 3515885 - DNA, 25 bp, Homo sapien
tctagtctttaacctcagctgcctg

SEQ ID NO: 3515886 - DNA, 25 bp, Homo sapien
tgcccagtgtctctatcaccatctg

SEQ ID NO: 3515887 - DNA, 25 bp, Homo sapien
ccaataccgatctttctgtctagtc

SEQ ID NO: 3515888 - DNA, 25 bp, Homo sapien
tgatctcgcctaacaccaggggatt

SEQ ID NO: 3515889 - DNA, 25 bp, Homo sapien
ttgcctcttacaggctcactgatca

SEQ ID NO: 3515890 - DNA, 25 bp, Homo sapien
tacaggctcactgatcatcactgtc

SEQ ID NO: 3515891 - DNA, 25 bp, Homo sapien
ctttgcctcttacaggctcactgat

SEQ ID NO: 3515892 - DNA, 25 bp, Homo sapien
gcctcttacaggctcactgatcatc

SEQ ID NO: 3515893 - DNA, 25 bp, Homo sapien
tgagtctgtagatgggttaaccttg

SEQ ID NO: 3515894 - DNA, 25 bp, Homo sapien
tgaaaataacaagggcaagagggat

SEQ ID NO: 3515895 - DNA, 25 bp, Homo sapien
tttatgaatacaactggcaggtcca

SEQ ID NO: 3515896 - DNA, 25 bp, Homo sapien
gccacattgtgcatggatgagtctg

SEQ ID NO: 3515897 - DNA, 25 bp, Homo sapien
taaggccacaagctttaacctcgtc

SEQ ID NO: 3515898 - DNA, 25 bp, Homo sapien
tgccgcttccccctaggtctgagtt

SEQ ID NO: 3515899 - DNA, 25 bp, Homo sapien
ttcaccaaagactccagaggctctg

SEQ ID NO: 3515900 - DNA, 25 bp, Homo sapien
aaaaggatagtgatagtctgccgct

SEQ ID NO: 3515901 - DNA, 25 bp, Homo sapien
gtttttccataggtgcctgtcttgt

SEQ ID NO: 3515902 - DNA, 25 bp, Homo sapien
tcaataccctttgtaatgttgcaaa

SEQ ID NO: 3515903 - DNA, 25 bp, Homo sapien
ctgacatcaataccctttgtaatgt

SEQ ID NO: 3515904 - DNA, 25 bp, Homo sapien
tgtttttccataggtgcctgtcttg

SEQ ID NO: 3515905 - DNA, 25 bp, Homo sapien
aaagcttcttccaagcacatcacaa

SEQ ID NO: 3515906 - DNA, 25 bp, Homo sapien
caagcacatcacaaaacccggagat

SEQ ID NO: 3515907 - DNA, 25 bp, Homo sapien
acccggagatcataaaaggttaatg

SEQ ID NO: 3515908 - DNA, 25 bp, Homo sapien
cccggagatcataaaaggttaatga

SEQ ID NO: 3515909 - DNA, 25 bp, Homo sapien
caaaggttagcctttcattctccaa

SEQ ID NO: 3515910 - DNA, 25 bp, Homo sapien
gcccatagaagatgtcctccataga

SEQ ID NO: 3515911 - DNA, 25 bp, Homo sapien
gcaaacaagttcttgtagcccatag

SEQ ID NO: 3515912 - DNA, 25 bp, Homo sapien
tcttgtagcccatagaagatgtcct

SEQ ID NO: 3515913 - DNA, 25 bp, Homo sapien
agaatgaaaggtgcctaaagtggta

SEQ ID NO: 3515914 - DNA, 25 bp, Homo sapien
aatgaaaggtgcctaaagtggtagg

SEQ ID NO: 3515915 - DNA, 25 bp, Homo sapien
atgaaaggtgcctaaagtggtaggg

SEQ ID NO: 3515916 - DNA, 25 bp, Homo sapien
ctagaatgaaaggtgcctaaagtgg

SEQ ID NO: 3515917 - DNA, 25 bp, Homo sapien
tgccagaatacctttccaactcctt

SEQ ID NO: 3515918 - DNA, 25 bp, Homo sapien
cagaccatattgtaaccccatttgg

SEQ ID NO: 3515919 - DNA, 25 bp, Homo sapien
tgccttgtattatgggtgtctgctc

SEQ ID NO: 3515920 - DNA, 25 bp, Homo sapien
gcctccttggatcttccagaccata

SEQ ID NO: 3515921 - DNA, 25 bp, Homo sapien
ggatcttggccttcaagtcctggct

SEQ ID NO: 3515922 - DNA, 25 bp, Homo sapien
tctccaggatcttggccttcaagtc

SEQ ID NO: 3515923 - DNA, 25 bp, Homo sapien
ttctctccaggatcttggccttcaa

SEQ ID NO: 3515924 - DNA, 25 bp, Homo sapien
cttggccttcaagtcctggctgcat

SEQ ID NO: 3515925 - DNA, 25 bp, Homo sapien
tacattcttggattctggttcctga

SEQ ID NO: 3515926 - DNA, 25 bp, Homo sapien
ggattctggttcctgagctaccatt

SEQ ID NO: 3515927 - DNA, 25 bp, Homo sapien
tctggttcctgagctaccattcttc

SEQ ID NO: 3515928 - DNA, 25 bp, Homo sapien
tggttcctgagctaccattcttcat

SEQ ID NO: 3515929 - DNA, 25 bp, Homo sapien
tctgtgcaattagaggtatagaccc

SEQ ID NO: 3515930 - DNA, 25 bp, Homo sapien
tattaggcacctaccatctgccaag

SEQ ID NO: 3515931 - DNA, 25 bp, Homo sapien
tactttcttgtctaatgtgggagcc

SEQ ID NO: 3515932 - DNA, 25 bp, Homo sapien
ccgtaagtattgctagcagacacaa

SEQ ID NO: 3515933 - DNA, 25 bp, Homo sapien
gcatcaaatggttgagggggaataa

SEQ ID NO: 3515934 - DNA, 25 bp, Homo sapien
cagcctggtagagaaggtgaaagct

SEQ ID NO: 3515935 - DNA, 25 bp, Homo sapien
taagagtaaggctaagtggagtgtt

SEQ ID NO: 3515936 - DNA, 25 bp, Homo sapien
gggaataagagtaaggctaagtgga

SEQ ID NO: 3515937 - DNA, 25 bp, Homo sapien
ttcaacattagacatccagctctgg

SEQ ID NO: 3515938 - DNA, 25 bp, Homo sapien
gctgttccaacccattcctttgtct

SEQ ID NO: 3515939 - DNA, 25 bp, Homo sapien
tgacttggctttccccataactact

SEQ ID NO: 3515940 - DNA, 25 bp, Homo sapien
tgttatggcacaaaccaccgctgtt

SEQ ID NO: 3515941 - DNA, 25 bp, Homo sapien
tgagccctcagattccgtggaaccc

SEQ ID NO: 3515942 - DNA, 25 bp, Homo sapien
gaagaagggtacaccatgaagaacc

SEQ ID NO: 3515943 - DNA, 25 bp, Homo sapien
catggaagaccagagctcaaagtca

SEQ ID NO: 3515944 - DNA, 25 bp, Homo sapien
tgagagatcactcatccttgagccc

SEQ ID NO: 3515945 - DNA, 25 bp, Homo sapien
ttaagggcttctgagagtgggaaat

SEQ ID NO: 3515946 - DNA, 25 bp, Homo sapien
tttaagggcttctgagagtgggaaa

SEQ ID NO: 3515947 - DNA, 25 bp, Homo sapien
aatggagaacagtcctgctagcatg

SEQ ID NO: 3515948 - DNA, 25 bp, Homo sapien
cagaatggagaacagtcctgctagc

SEQ ID NO: 3515949 - DNA, 25 bp, Homo sapien
gaatggagaacagtcctgctagcat

SEQ ID NO: 3515950 - DNA, 25 bp, Homo sapien
tggagaacagtcctgctagcatggg

SEQ ID NO: 3515951 - DNA, 25 bp, Homo sapien
tgaggatatagaagggatgcaatgc

SEQ ID NO: 3515952 - DNA, 25 bp, Homo sapien
gcaatgcggcccctgctctaatgct

SEQ ID NO: 3515953 - DNA, 25 bp, Homo sapien
atattccctgcatacctctcacaag

SEQ ID NO: 3515954 - DNA, 25 bp, Homo sapien
ctaatgctggcttctgggacgggac

SEQ ID NO: 3515955 - DNA, 25 bp, Homo sapien
tctggccttggcactaaggtttttc

SEQ ID NO: 3515956 - DNA, 25 bp, Homo sapien
tggcactaaggtttttctgactgct

SEQ ID NO: 3515957 - DNA, 25 bp, Homo sapien
gatgttcgaataccttctgctgtgg

SEQ ID NO: 3515958 - DNA, 25 bp, Homo sapien
tgactgctgaaggtcaggtagaaga

SEQ ID NO: 3515959 - DNA, 25 bp, Homo sapien
accccagtgatcctgtgcctcaaag

SEQ ID NO: 3515960 - DNA, 25 bp, Homo sapien
cctgtgcctcaaagcaagggctcct

SEQ ID NO: 3515961 - DNA, 25 bp, Homo sapien
gggtctccacgcaagattccagaca

SEQ ID NO: 3515962 - DNA, 25 bp, Homo sapien
cacgcaagattccagacactgctct

SEQ ID NO: 3515963 - DNA, 25 bp, Homo sapien
gttttcccctgtttagtagcagaca

SEQ ID NO: 3515964 - DNA, 25 bp, Homo sapien
gaacatggtctgatattcttccacg

SEQ ID NO: 3515965 - DNA, 25 bp, Homo sapien
acagcagtaactttcagtgttgtga

SEQ ID NO: 3515966 - DNA, 25 bp, Homo sapien
caaaccggtcgtcagaacagcagta

SEQ ID NO: 3515967 - DNA, 25 bp, Homo sapien
tctgatcatggattgcatcccattt

SEQ ID NO: 3515968 - DNA, 25 bp, Homo sapien
ctctgatcatggattgcatcccatt

SEQ ID NO: 3515969 - DNA, 25 bp, Homo sapien
tcttcccatttggtaccagtaactg

SEQ ID NO: 3515970 - DNA, 25 bp, Homo sapien
tcagcccatggcctgttaggggata

SEQ ID NO: 3515971 - DNA, 25 bp, Homo sapien
ccatttggtaccagtaactgtgagg

SEQ ID NO: 3515972 - DNA, 25 bp, Homo sapien
catggcctgttaggggatatgctct

SEQ ID NO: 3515973 - DNA, 25 bp, Homo sapien
atgtgcatcgtagaagatctggaaa

SEQ ID NO: 3515974 - DNA, 25 bp, Homo sapien
gctgttgaagtagactgtgttcaac

SEQ ID NO: 3515975 - DNA, 25 bp, Homo sapien
ggcagggttgctgttgaagtagact

SEQ ID NO: 3515976 - DNA, 25 bp, Homo sapien
tgtgagtttctgtgatgctaaaatt

SEQ ID NO: 3515977 - DNA, 25 bp, Homo sapien
attgtgagtttctgtgatgctaaaa

SEQ ID NO: 3515978 - DNA, 25 bp, Homo sapien
tccaaagcaaaacagagccagagaa

SEQ ID NO: 3515979 - DNA, 25 bp, Homo sapien
ccaaagcaaaacagagccagagaac

SEQ ID NO: 3515980 - DNA, 25 bp, Homo sapien
catccaaagcaaaacagagccagag

SEQ ID NO: 3515981 - DNA, 25 bp, Homo sapien
atccaaagcaaaacagagccagaga

SEQ ID NO: 3515982 - DNA, 25 bp, Homo sapien
tcaccagcaggacaggcgttgaggg

SEQ ID NO: 3515983 - DNA, 25 bp, Homo sapien
tctgatccagcgcatgggtctcacc

SEQ ID NO: 3515984 - DNA, 25 bp, Homo sapien
tggcctcctcgtccaagggagtctg

SEQ ID NO: 3515985 - DNA, 25 bp, Homo sapien
gagcaggccccactcagttgctgga

SEQ ID NO: 3515986 - DNA, 25 bp, Homo sapien
tttgcaaggtcctgcccgttgaaac

SEQ ID NO: 3515987 - DNA, 25 bp, Homo sapien
tcctgcccgttgaaactgacttgtt

SEQ ID NO: 3515988 - DNA, 25 bp, Homo sapien
aaggtcctgcccgttgaaactgact

SEQ ID NO: 3515989 - DNA, 25 bp, Homo sapien
gaaactgacttgtttttcaatgatc

SEQ ID NO: 3515990 - DNA, 25 bp, Homo sapien
gcaacagtgtcttgagggctctgaa

SEQ ID NO: 3515991 - DNA, 25 bp, Homo sapien
gcaagaggatgcgacagcgcatgct

SEQ ID NO: 3515992 - DNA, 25 bp, Homo sapien
caggctcactgaagtcagtctggca

SEQ ID NO: 3515993 - DNA, 25 bp, Homo sapien
gggccagtggcagctcccataggtt

SEQ ID NO: 3515994 - DNA, 25 bp, Homo sapien
cctagctagtaaccttcagccgatg

SEQ ID NO: 3515995 - DNA, 25 bp, Homo sapien
tacatgggactaatctccaagcaga

SEQ ID NO: 3515996 - DNA, 25 bp, Homo sapien
tgtacttgcagtcgttcatcctccc

SEQ ID NO: 3515997 - DNA, 25 bp, Homo sapien
tcaatgactcctgcagactggtaag

SEQ ID NO: 3515998 - DNA, 25 bp, Homo sapien
ttcattaaagcctactatgtggcag

SEQ ID NO: 3515999 - DNA, 25 bp, Homo sapien
tgaaggtgcccatgtaaaaaagtga

SEQ ID NO: 3516000 - DNA, 25 bp, Homo sapien
tacatggtagtcagccagtcaacaa

SEQ ID NO: 3516001 - DNA, 25 bp, Homo sapien
catatcaaagtgctgtctgttctac

SEQ ID NO: 3516002 - DNA, 25 bp, Homo sapien
tgcggcaggtaggaaacattcacag

SEQ ID NO: 3516003 - DNA, 25 bp, Homo sapien
gagactttgacctactccacatgga

SEQ ID NO: 3516004 - DNA, 25 bp, Homo sapien
gaggagtagtgtcagccaccttgta

SEQ ID NO: 3516005 - DNA, 25 bp, Homo sapien
gaatacttcttgatgggtacaggct

SEQ ID NO: 3516006 - DNA, 25 bp, Homo sapien
taatcaaggacaagccaccctagtg

SEQ ID NO: 3516007 - DNA, 25 bp, Homo sapien
catgtagaagcacccacttttgcaa

SEQ ID NO: 3516008 - DNA, 25 bp, Homo sapien
tccttaagctggtgattcctaatca

SEQ ID NO: 3516009 - DNA, 25 bp, Homo sapien
ggctaagaatgggtaacatgactct

SEQ ID NO: 3516010 - DNA, 25 bp, Homo sapien
tattagaagggaatctgttgtagca

SEQ ID NO: 3516011 - DNA, 25 bp, Homo sapien
tggtcaccttgccagtgcattttat

SEQ ID NO: 3516012 - DNA, 25 bp, Homo sapien
gaatctgttgtagcaaatgggaata

SEQ ID NO: 3516013 - DNA, 25 bp, Homo sapien
tttcccaaccagacattgggtcact

SEQ ID NO: 3516014 - DNA, 25 bp, Homo sapien
agtgggatcattacgtatagcgtac

SEQ ID NO: 3516015 - DNA, 25 bp, Homo sapien
tgggatcattacgtatagcgtacag

SEQ ID NO: 3516016 - DNA, 25 bp, Homo sapien
taagtgggatcattacgtatagcgt

SEQ ID NO: 3516017 - DNA, 25 bp, Homo sapien
ctgttaagtgggatcattacgtata

SEQ ID NO: 3516018 - DNA, 25 bp, Homo sapien
tgtggtagaatgtgcctctgtagcc

SEQ ID NO: 3516019 - DNA, 25 bp, Homo sapien
gccctaatgccgtatctgttgtgtg

SEQ ID NO: 3516020 - DNA, 25 bp, Homo sapien
gatcgggtgtagtgcctcaagcctg

SEQ ID NO: 3516021 - DNA, 25 bp, Homo sapien
tccagatgcaaattgggccctaatg

SEQ ID NO: 3516022 - DNA, 25 bp, Homo sapien
cctttttacccttagcgtggctgtg

SEQ ID NO: 3516023 - DNA, 25 bp, Homo sapien
catctccaagagtaggagtagtaac

SEQ ID NO: 3516024 - DNA, 25 bp, Homo sapien
caagtacactgaaatatctaagtcc

SEQ ID NO: 3516025 - DNA, 25 bp, Homo sapien
tagcgtggctgtgaaaaagagttaa

SEQ ID NO: 3516026 - DNA, 25 bp, Homo sapien
cattgtattagcttcacagaaagga

SEQ ID NO: 3516027 - DNA, 25 bp, Homo sapien
tctatttagagtaacagtaggcagt

SEQ ID NO: 3516028 - DNA, 25 bp, Homo sapien
cagataatctttgaagcagccttag

SEQ ID NO: 3516029 - DNA, 25 bp, Homo sapien
ttatttcacaacctgtagcttcagc

SEQ ID NO: 3516030 - DNA, 25 bp, Homo sapien
cttcgtctaaggctaacatggtgat

SEQ ID NO: 3516031 - DNA, 25 bp, Homo sapien
taacatggtgatcatttgtctaagg

SEQ ID NO: 3516032 - DNA, 25 bp, Homo sapien
ctagccagcttcttcgtctaaggct

SEQ ID NO: 3516033 - DNA, 25 bp, Homo sapien
gcttcttcgtctaaggctaacatgg

SEQ ID NO: 3516034 - DNA, 25 bp, Homo sapien
ctagaaaggtaccaacaagatgtaa

SEQ ID NO: 3516035 - DNA, 25 bp, Homo sapien
tagaaaggtaccaacaagatgtaaa

SEQ ID NO: 3516036 - DNA, 25 bp, Homo sapien
tctttccgtgttggttctggtgaag

SEQ ID NO: 3516037 - DNA, 25 bp, Homo sapien
tttctttccgtgttggttctggtga

SEQ ID NO: 3516038 - DNA, 25 bp, Homo sapien
tagaaaatgacacaatggcagcctt

SEQ ID NO: 3516039 - DNA, 25 bp, Homo sapien
ctagaaaatgacacaatggcagcct

SEQ ID NO: 3516040 - DNA, 25 bp, Homo sapien
gaattactgatgggtaaggagagat

SEQ ID NO: 3516041 - DNA, 25 bp, Homo sapien
tgaattactgatgggtaaggagaga

SEQ ID NO: 3516042 - DNA, 25 bp, Homo sapien
aattactgatgggtaaggagagatc

SEQ ID NO: 3516043 - DNA, 25 bp, Homo sapien
ccttaagctgccgtgctaactgttg

SEQ ID NO: 3516044 - DNA, 25 bp, Homo sapien
taagctgccgtgctaactgttgtcc

SEQ ID NO: 3516045 - DNA, 25 bp, Homo sapien
ttaagctgccgtgctaactgttgtc

SEQ ID NO: 3516046 - DNA, 25 bp, Homo sapien
cttaagctgccgtgctaactgttgt

SEQ ID NO: 3516047 - DNA, 25 bp, Homo sapien
gaagataccgctctcaatcctgata

SEQ ID NO: 3516048 - DNA, 25 bp, Homo sapien
tatctgatcattccggcaagagtct

SEQ ID NO: 3516049 - DNA, 25 bp, Homo sapien
aacatctgaaggatctaaagtgaag

SEQ ID NO: 3516050 - DNA, 25 bp, Homo sapien
tgtgcctttcaagtaatatgtccat

SEQ ID NO: 3516051 - DNA, 25 bp, Homo sapien
aaaggtcattgaattgagacctttg

SEQ ID NO: 3516052 - DNA, 25 bp, Homo sapien
gtcattgaattgagacctttgttct

SEQ ID NO: 3516053 - DNA, 25 bp, Homo sapien
ctctatatatacttctttagtagca

SEQ ID NO: 3516054 - DNA, 25 bp, Homo sapien
ttttgatgttgtgttctaattttca

SEQ ID NO: 3516055 - DNA, 25 bp, Homo sapien
tacagggtaccagaacagcatttag

SEQ ID NO: 3516056 - DNA, 25 bp, Homo sapien
gatctgctgcggatgaattatctcg

SEQ ID NO: 3516057 - DNA, 25 bp, Homo sapien
gagatgcaatgatgactcctgccat

SEQ ID NO: 3516058 - DNA, 25 bp, Homo sapien
gaaggctgggacttttacgtatcag

SEQ ID NO: 3516059 - DNA, 25 bp, Homo sapien
gaattattcctagccctgtttgagc

SEQ ID NO: 3516060 - DNA, 25 bp, Homo sapien
tgtggcattccaacaggataacggg

SEQ ID NO: 3516061 - DNA, 25 bp, Homo sapien
caaaataacgtatgtgccacaaggc

SEQ ID NO: 3516062 - DNA, 25 bp, Homo sapien
ggataacgggcaggttctacatagc

SEQ ID NO: 3516063 - DNA, 25 bp, Homo sapien
taacttactgcaagctaacactacg

SEQ ID NO: 3516064 - DNA, 25 bp, Homo sapien
taaaagtgagagtagtcaacatgcc

SEQ ID NO: 3516065 - DNA, 25 bp, Homo sapien
taacactacgtatctttagggtgac

SEQ ID NO: 3516066 - DNA, 25 bp, Homo sapien
gagagtagacgccatataaatgagc

SEQ ID NO: 3516067 - DNA, 25 bp, Homo sapien
caattggtttcccaacagtgaaatt

SEQ ID NO: 3516068 - DNA, 25 bp, Homo sapien
tgattataaacaattggtttcccaa

SEQ ID NO: 3516069 - DNA, 25 bp, Homo sapien
ataaacaattggtttcccaacagtg

SEQ ID NO: 3516070 - DNA, 25 bp, Homo sapien
atgattataaacaattggtttccca

SEQ ID NO: 3516071 - DNA, 25 bp, Homo sapien
caattaaaatcattgggaactcatc

SEQ ID NO: 3516072 - DNA, 25 bp, Homo sapien
catcacgatcctttactctgagaat

SEQ ID NO: 3516073 - DNA, 25 bp, Homo sapien
ctttgatgatccagatctgctttat

SEQ ID NO: 3516074 - DNA, 25 bp, Homo sapien
cattgggaactcatcacgatccttt

SEQ ID NO: 3516075 - DNA, 25 bp, Homo sapien
tgactgaaaagaccaacaggaagcc

SEQ ID NO: 3516076 - DNA, 25 bp, Homo sapien
tcgccagtcctcatatactgttctc

SEQ ID NO: 3516077 - DNA, 25 bp, Homo sapien
tgcctctatctgtgactgaaaagac

SEQ ID NO: 3516078 - DNA, 25 bp, Homo sapien
tggttggatcataatccgttacaaa

SEQ ID NO: 3516079 - DNA, 25 bp, Homo sapien
ctctgtcatctatcacacactgctt

SEQ ID NO: 3516080 - DNA, 25 bp, Homo sapien
ggatcataatccgttacaaaatagg

SEQ ID NO: 3516081 - DNA, 25 bp, Homo sapien
ctgtcatctatcacacactgctttg

SEQ ID NO: 3516082 - DNA, 25 bp, Homo sapien
cagatgtggcagcaaagaagttgta

SEQ ID NO: 3516083 - DNA, 25 bp, Homo sapien
ttcagatgtggcagcaaagaagttg

SEQ ID NO: 3516084 - DNA, 25 bp, Homo sapien
tcagatgtggcagcaaagaagttgt

SEQ ID NO: 3516085 - DNA, 25 bp, Homo sapien
ttgcccctcgggatctaataagggc

SEQ ID NO: 3516086 - DNA, 25 bp, Homo sapien
ctaataagggccacaggtccccagt

SEQ ID NO: 3516087 - DNA, 25 bp, Homo sapien
cgggatctaataagggccacaggtc

SEQ ID NO: 3516088 - DNA, 25 bp, Homo sapien
aagggccacaggtccccagtgactg

SEQ ID NO: 3516089 - DNA, 25 bp, Homo sapien
taaagccttcctgccataagtgagt

SEQ ID NO: 3516090 - DNA, 25 bp, Homo sapien
cagaaatggctactcaaatcgttgc

SEQ ID NO: 3516091 - DNA, 25 bp, Homo sapien
tccctagtgggatgttgagtacctt

SEQ ID NO: 3516092 - DNA, 25 bp, Homo sapien
ggcgaagtcttattacccaccaaca

SEQ ID NO: 3516093 - DNA, 25 bp, Homo sapien
ctgtgggtttaactgggttgctagg

SEQ ID NO: 3516094 - DNA, 25 bp, Homo sapien
ctaggagatatggatggaaggaaaa

SEQ ID NO: 3516095 - DNA, 25 bp, Homo sapien
taactgggttgctaggagatatgga

SEQ ID NO: 3516096 - DNA, 25 bp, Homo sapien
ggaaaacaattcttgtagctttcaa

SEQ ID NO: 3516097 - DNA, 25 bp, Homo sapien
gtcatgtgctcagtaccaaaagcca

SEQ ID NO: 3516098 - DNA, 25 bp, Homo sapien
caaatagcagtatgcctagaatgac

SEQ ID NO: 3516099 - DNA, 25 bp, Homo sapien
gtaccaaaagccagatcaattgact

SEQ ID NO: 3516100 - DNA, 25 bp, Homo sapien
gactgcatgcttgtctagagtcatg

SEQ ID NO: 3516101 - DNA, 25 bp, Homo sapien
cttttctaatgtctaaaacttgcca

SEQ ID NO: 3516102 - DNA, 25 bp, Homo sapien
ttttctaatgtctaaaacttgccaa

SEQ ID NO: 3516103 - DNA, 25 bp, Homo sapien
aggagaaaaacagcagatttctcat

SEQ ID NO: 3516104 - DNA, 25 bp, Homo sapien
acaggagaaaaacagcagatttctc

SEQ ID NO: 3516105 - DNA, 25 bp, Homo sapien
ctacaggagaaaaacagcagatttc

SEQ ID NO: 3516106 - DNA, 25 bp, Homo sapien
gagaaaaacagcagatttctcatca

SEQ ID NO: 3516107 - DNA, 25 bp, Homo sapien
aaactgaagctctccaacgtcaact

SEQ ID NO: 3516108 - DNA, 25 bp, Homo sapien
actgaagctctccaacgtcaacttg

SEQ ID NO: 3516109 - DNA, 25 bp, Homo sapien
gaaactgaagctctccaacgtcaac

SEQ ID NO: 3516110 - DNA, 25 bp, Homo sapien
aagaaactgaagctctccaacgtca

SEQ ID NO: 3516111 - DNA, 25 bp, Homo sapien
gaacatactttgagactatattaac

SEQ ID NO: 3516112 - DNA, 25 bp, Homo sapien
gatccatttatggttcttacttaaa

SEQ ID NO: 3516113 - DNA, 25 bp, Homo sapien
tttatgggtaataaacaagtactgc

SEQ ID NO: 3516114 - DNA, 25 bp, Homo sapien
gtcagaattctacattaaggacttc

SEQ ID NO: 3516115 - DNA, 25 bp, Homo sapien
catcctctaggaaatcaatcttatc

SEQ ID NO: 3516116 - DNA, 25 bp, Homo sapien
acaaaaggtagtatacacacagtag

SEQ ID NO: 3516117 - DNA, 25 bp, Homo sapien
gcaaacccatgcctttatgacaaca

SEQ ID NO: 3516118 - DNA, 25 bp, Homo sapien
ggacagagttcaaatactaggatca

SEQ ID NO: 3516119 - DNA, 25 bp, Homo sapien
tccgcccactacaaccctccgactc

SEQ ID NO: 3516120 - DNA, 25 bp, Homo sapien
ctccgcccactacaaccctccgact

SEQ ID NO: 3516121 - DNA, 25 bp, Homo sapien
caactcaaaacggaatccacattca

SEQ ID NO: 3516122 - DNA, 25 bp, Homo sapien
tccaactcaaaacggaatccacatt

SEQ ID NO: 3516123 - DNA, 25 bp, Homo sapien
tttctccaactcaaaacggaatcca

SEQ ID NO: 3516124 - DNA, 25 bp, Homo sapien
tctccaactcaaaacggaatccaca

SEQ ID NO: 3516125 - DNA, 25 bp, Homo sapien
gggagtatagggttgagccaggaag

SEQ ID NO: 3516126 - DNA, 25 bp, Homo sapien
ctgaataccacacagaagtaaggag

SEQ ID NO: 3516127 - DNA, 25 bp, Homo sapien
gtatagggttgagccaggaaggaga

SEQ ID NO: 3516128 - DNA, 25 bp, Homo sapien
gaataccacacagaagtaaggaggg

SEQ ID NO: 3516129 - DNA, 25 bp, Homo sapien
tggcctcggccagagcaataaggtg

SEQ ID NO: 3516130 - DNA, 25 bp, Homo sapien
agtaaagcccggctcggtggcccag

SEQ ID NO: 3516131 - DNA, 25 bp, Homo sapien
ctatcgccccgacggtgaaggcgcg

SEQ ID NO: 3516132 - DNA, 25 bp, Homo sapien
cgcccggaccctcggagcagtaaag

SEQ ID NO: 3516133 - DNA, 25 bp, Homo sapien
gtacttctcctggccggagccgtcc

SEQ ID NO: 3516134 - DNA, 25 bp, Homo sapien
gccgaccaccacgagccggtacttc

SEQ ID NO: 3516135 - DNA, 25 bp, Homo sapien
ctggccggagccgtcccgccagccg

SEQ ID NO: 3516136 - DNA, 25 bp, Homo sapien
accacgagccggtacttctcctggc

SEQ ID NO: 3516137 - DNA, 25 bp, Homo sapien
gagcccagcctgactgcgccgagcc

SEQ ID NO: 3516138 - DNA, 25 bp, Homo sapien
agcctgactgcgccgagccgccgct

SEQ ID NO: 3516139 - DNA, 25 bp, Homo sapien
cccagcctgactgcgccgagccgcc

SEQ ID NO: 3516140 - DNA, 25 bp, Homo sapien
taggcccggctccggggacgtgtgc

SEQ ID NO: 3516141 - DNA, 25 bp, Homo sapien
ggccggtcagcgcggtagcgcggcg

SEQ ID NO: 3516142 - DNA, 25 bp, Homo sapien
agggccggtcagcgcggtagcgcgg

SEQ ID NO: 3516143 - DNA, 25 bp, Homo sapien
ggtcagcgcggtagcgcggcgctgg

SEQ ID NO: 3516144 - DNA, 25 bp, Homo sapien
ccggtcagcgcggtagcgcggcgct

SEQ ID NO: 3516145 - DNA, 25 bp, Homo sapien
tcctctacgcgtctccgcagcgcct

SEQ ID NO: 3516146 - DNA, 25 bp, Homo sapien
agcgcctgccgaacgcagcctccag

SEQ ID NO: 3516147 - DNA, 25 bp, Homo sapien
ggggggcgcgctcctctacgcgtct

SEQ ID NO: 3516148 - DNA, 25 bp, Homo sapien
ggagaagcggggtgacggcacgggc

SEQ ID NO: 3516149 - DNA, 25 bp, Homo sapien
cctctaacctcatctgtagctacaa

SEQ ID NO: 3516150 - DNA, 25 bp, Homo sapien
tcatctgtagctacaacagacagag

SEQ ID NO: 3516151 - DNA, 25 bp, Homo sapien
tagctacaacagacagagccaagac

SEQ ID NO: 3516152 - DNA, 25 bp, Homo sapien
taacctcatctgtagctacaacaga

SEQ ID NO: 3516153 - DNA, 25 bp, Homo sapien
ctgcagcggagccatcatgaagcgg

SEQ ID NO: 3516154 - DNA, 25 bp, Homo sapien
gctgtaagcctgtgaaaagccaagc

SEQ ID NO: 3516155 - DNA, 25 bp, Homo sapien
tctctgagagcaaagtgcgcaggtg

SEQ ID NO: 3516156 - DNA, 25 bp, Homo sapien
aagaaatgggttggaccgatccgag

SEQ ID NO: 3516157 - DNA, 25 bp, Homo sapien
tcttcccaagtaggtactgaatagg

SEQ ID NO: 3516158 - DNA, 25 bp, Homo sapien
gaattgtagaatttccagggctcag

SEQ ID NO: 3516159 - DNA, 25 bp, Homo sapien
acaaattgcacaggataaagagaag

SEQ ID NO: 3516160 - DNA, 25 bp, Homo sapien
tcagaactactatcaggccacagct

SEQ ID NO: 3516161 - DNA, 25 bp, Homo sapien
gattaggagccagaaggctagagtt

SEQ ID NO: 3516162 - DNA, 25 bp, Homo sapien
taggagccagaaggctagagttctc

SEQ ID NO: 3516163 - DNA, 25 bp, Homo sapien
ggagccagaaggctagagttctcac

SEQ ID NO: 3516164 - DNA, 25 bp, Homo sapien
ctggattaggagccagaaggctaga

SEQ ID NO: 3516165 - DNA, 25 bp, Homo sapien
ccatctcttggtggcataattgtaa

SEQ ID NO: 3516166 - DNA, 25 bp, Homo sapien
taaccagaagcaaatagtagagtat

SEQ ID NO: 3516167 - DNA, 25 bp, Homo sapien
gatgtgtaactcgaaggagatccag

SEQ ID NO: 3516168 - DNA, 25 bp, Homo sapien
tggacctcggtaagatcagggatgt

SEQ ID NO: 3516169 - DNA, 25 bp, Homo sapien
ctgtcaacacggcacagataccaac

SEQ ID NO: 3516170 - DNA, 25 bp, Homo sapien
tcaacacggcacagataccaacatg

SEQ ID NO: 3516171 - DNA, 25 bp, Homo sapien
gggacaggcagcccttacccacaga

SEQ ID NO: 3516172 - DNA, 25 bp, Homo sapien
ggcacagataccaacatgcagccct

SEQ ID NO: 3516173 - DNA, 25 bp, Homo sapien
acggtgtcggcagtagttgtcagca

SEQ ID NO: 3516174 - DNA, 25 bp, Homo sapien
tcacacatcggccatagaaaccaag

SEQ ID NO: 3516175 - DNA, 25 bp, Homo sapien
tcggccatagaaaccaagttctgtc

SEQ ID NO: 3516176 - DNA, 25 bp, Homo sapien
ctgtctacttgaaccccaaacggtg

SEQ ID NO: 3516177 - DNA, 25 bp, Homo sapien
atttgataaaccctagctgggccag

SEQ ID NO: 3516178 - DNA, 25 bp, Homo sapien
gccaaaattctgttccgatttgata

SEQ ID NO: 3516179 - DNA, 25 bp, Homo sapien
tctgttccgatttgataaaccctag

SEQ ID NO: 3516180 - DNA, 25 bp, Homo sapien
gttccgatttgataaaccctagctg

SEQ ID NO: 3516181 - DNA, 25 bp, Homo sapien
cagtttcttgtgcatgcttctatac

SEQ ID NO: 3516182 - DNA, 25 bp, Homo sapien
ctgccaatttcactccttagggata

SEQ ID NO: 3516183 - DNA, 25 bp, Homo sapien
cattttagaggcttcttctggcatt

SEQ ID NO: 3516184 - DNA, 25 bp, Homo sapien
tcctaaataatacactgctaatgct

SEQ ID NO: 3516185 - DNA, 25 bp, Homo sapien
tgtgaagagagaatcaaggtcacaa

SEQ ID NO: 3516186 - DNA, 25 bp, Homo sapien
gaagagagaatcaaggtcacaatac

SEQ ID NO: 3516187 - DNA, 25 bp, Homo sapien
tattgtgaagagagaatcaaggtca

SEQ ID NO: 3516188 - DNA, 25 bp, Homo sapien
ctattgtgaagagagaatcaaggtc

SEQ ID NO: 3516189 - DNA, 25 bp, Homo sapien
ggagaccgcttttcccaggcggctg

SEQ ID NO: 3516190 - DNA, 25 bp, Homo sapien
tatgagagcccaatcaagaatggag

SEQ ID NO: 3516191 - DNA, 25 bp, Homo sapien
tgtacactgcgacggcatcaacatt

SEQ ID NO: 3516192 - DNA, 25 bp, Homo sapien
tggtggttgtacactgcgacggcat

SEQ ID NO: 3516193 - DNA, 25 bp, Homo sapien
aagcgaggccatgccaccctggact

SEQ ID NO: 3516194 - DNA, 25 bp, Homo sapien
accaagcgaggccatgccaccctgg

SEQ ID NO: 3516195 - DNA, 25 bp, Homo sapien
caaggtgtttgacagcatcacacca

SEQ ID NO: 3516196 - DNA, 25 bp, Homo sapien
ctggccgaccctgcgaggcatgctg

SEQ ID NO: 3516197 - DNA, 25 bp, Homo sapien
tgctgtcaacaacttactgtcagtg

SEQ ID NO: 3516198 - DNA, 25 bp, Homo sapien
tgcagttaggtactgcttcccagtg

SEQ ID NO: 3516199 - DNA, 25 bp, Homo sapien
tgcttttgctaagggcctagctgcc

SEQ ID NO: 3516200 - DNA, 25 bp, Homo sapien
tgccatgggagcaccaccattcttg

SEQ ID NO: 3516201 - DNA, 25 bp, Homo sapien
ccagatatgcagcatcacacttcag

SEQ ID NO: 3516202 - DNA, 25 bp, Homo sapien
tatgcagcatcacacttcagtttct

SEQ ID NO: 3516203 - DNA, 25 bp, Homo sapien
ctccagatatgcagcatcacacttc

SEQ ID NO: 3516204 - DNA, 25 bp, Homo sapien
gatatgcagcatcacacttcagttt

SEQ ID NO: 3516205 - DNA, 25 bp, Homo sapien
tcttttgtcactgcatgactgactt

SEQ ID NO: 3516206 - DNA, 25 bp, Homo sapien
attcttttgtcactgcatgactgac

SEQ ID NO: 3516207 - DNA, 25 bp, Homo sapien
atatacagagcccagataaaagaca

SEQ ID NO: 3516208 - DNA, 25 bp, Homo sapien
agacacaaatcccacttgcattctt

SEQ ID NO: 3516209 - DNA, 25 bp, Homo sapien
ctagcagataggattccatactttc

SEQ ID NO: 3516210 - DNA, 25 bp, Homo sapien
tagcagataggattccatactttcc

SEQ ID NO: 3516211 - DNA, 25 bp, Homo sapien
agataggattccatactttcctaat

SEQ ID NO: 3516212 - DNA, 25 bp, Homo sapien
gcagataggattccatactttccta

SEQ ID NO: 3516213 - DNA, 25 bp, Homo sapien
ttctgtaggctcctgagatcctgga

SEQ ID NO: 3516214 - DNA, 25 bp, Homo sapien
ggttacttctgtaggctcctgagat

SEQ ID NO: 3516215 - DNA, 25 bp, Homo sapien
ctgtaggctcctgagatcctggagg

SEQ ID NO: 3516216 - DNA, 25 bp, Homo sapien
tacttctgtaggctcctgagatcct

SEQ ID NO: 3516217 - DNA, 25 bp, Homo sapien
agtaacagtgatggtgtactgagaa

SEQ ID NO: 3516218 - DNA, 25 bp, Homo sapien
cagtaacagtgatggtgtactgaga

SEQ ID NO: 3516219 - DNA, 25 bp, Homo sapien
gtaacagtgatggtgtactgagaat

SEQ ID NO: 3516220 - DNA, 25 bp, Homo sapien
taatccaaagttgcaccagctcctt

SEQ ID NO: 3516221 - DNA, 25 bp, Homo sapien
tgcacttccagtatatctttcccat

SEQ ID NO: 3516222 - DNA, 25 bp, Homo sapien
ctttcccatttgataagccctggct

SEQ ID NO: 3516223 - DNA, 25 bp, Homo sapien
tgcaaatctctacccttgaatcgac

SEQ ID NO: 3516224 - DNA, 25 bp, Homo sapien
gaaagcacaatcagacgctgggaaa

SEQ ID NO: 3516225 - DNA, 25 bp, Homo sapien
ttatctaaggactcacagggaatgc

SEQ ID NO: 3516226 - DNA, 25 bp, Homo sapien
gatggtacccagtcctagtgtgaag

SEQ ID NO: 3516227 - DNA, 25 bp, Homo sapien
taaatgtgagtaaggcacggaggca

SEQ ID NO: 3516228 - DNA, 25 bp, Homo sapien
aaccaagtgaatcaaggcctacctt

SEQ ID NO: 3516229 - DNA, 25 bp, Homo sapien
catttttagagatagcaatgttgga

SEQ ID NO: 3516230 - DNA, 25 bp, Homo sapien
tattttgatactttctccctggagc

SEQ ID NO: 3516231 - DNA, 25 bp, Homo sapien
ttctttaaactgcagagcgatctgt

SEQ ID NO: 3516232 - DNA, 25 bp, Homo sapien
ggacagcattcagaactgttaagac

SEQ ID NO: 3516233 - DNA, 25 bp, Homo sapien
gaactcagattctatataagcatga

SEQ ID NO: 3516234 - DNA, 25 bp, Homo sapien
gatgttggagtccagtaagcccata

SEQ ID NO: 3516235 - DNA, 25 bp, Homo sapien
gaaaagggtcttggtacatgaaaca

SEQ ID NO: 3516236 - DNA, 25 bp, Homo sapien
ctgtaaagcttcaaggactttttgt

SEQ ID NO: 3516237 - DNA, 25 bp, Homo sapien
actgtaaagcttcaaggactttttg

SEQ ID NO: 3516238 - DNA, 25 bp, Homo sapien
ctaaattaactgtaaagcttcaagg

SEQ ID NO: 3516239 - DNA, 25 bp, Homo sapien
attaactgtaaagcttcaaggactt

SEQ ID NO: 3516240 - DNA, 25 bp, Homo sapien
attttatctccaagacttaaggcca

SEQ ID NO: 3516241 - DNA, 25 bp, Homo sapien
tcttctgtgacaagttgattttatc

SEQ ID NO: 3516242 - DNA, 25 bp, Homo sapien
tctgtgacaagttgattttatctcc

SEQ ID NO: 3516243 - DNA, 25 bp, Homo sapien
ttcttctgtgacaagttgattttat

SEQ ID NO: 3516244 - DNA, 25 bp, Homo sapien
cccctttgtcagtccagagatactc

SEQ ID NO: 3516245 - DNA, 25 bp, Homo sapien
cctcccccctttgtcagtccagaga

SEQ ID NO: 3516246 - DNA, 25 bp, Homo sapien
tcccccctttgtcagtccagagata

SEQ ID NO: 3516247 - DNA, 25 bp, Homo sapien
attcctcccccctttgtcagtccag

SEQ ID NO: 3516248 - DNA, 25 bp, Homo sapien
ttatatggccggtaacagcagcatc

SEQ ID NO: 3516249 - DNA, 25 bp, Homo sapien
ttcaccaaatatggaacgagcataa

SEQ ID NO: 3516250 - DNA, 25 bp, Homo sapien
tctttgcacgaattcttatatggcc

SEQ ID NO: 3516251 - DNA, 25 bp, Homo sapien
gttggctgccataaagccacagtaa

SEQ ID NO: 3516252 - DNA, 25 bp, Homo sapien
tttaaccaacaatcagagcccacgg

SEQ ID NO: 3516253 - DNA, 25 bp, Homo sapien
aacaacgattctgtatttgagcaca

SEQ ID NO: 3516254 - DNA, 25 bp, Homo sapien
tctaatccagtattacaaataaacg

SEQ ID NO: 3516255 - DNA, 25 bp, Homo sapien
gcaaaaagtcacagtataacaacga

SEQ ID NO: 3516256 - DNA, 25 bp, Homo sapien
ggataacatcttttagatagcctag

SEQ ID NO: 3516257 - DNA, 25 bp, Homo sapien
gaggtaagcagattccaacattcta

SEQ ID NO: 3516258 - DNA, 25 bp, Homo sapien
caggaaggccaggaacctactctac

SEQ ID NO: 3516259 - DNA, 25 bp, Homo sapien
gaatggtactgcatattgaataaca

SEQ ID NO: 3516260 - DNA, 25 bp, Homo sapien
ggttgactttaatatgtgctgtaag

SEQ ID NO: 3516261 - DNA, 25 bp, Homo sapien
caaccatgttggtgttaactgtcac

SEQ ID NO: 3516262 - DNA, 25 bp, Homo sapien
gtcatttaaatcaaccatgttggtg

SEQ ID NO: 3516263 - DNA, 25 bp, Homo sapien
gactttaatatgtgctgtaagtagt

SEQ ID NO: 3516264 - DNA, 25 bp, Homo sapien
agagtgcagtgcgtcatttcagctc

SEQ ID NO: 3516265 - DNA, 25 bp, Homo sapien
gctagagtgcagtgcgtcatttcag

SEQ ID NO: 3516266 - DNA, 25 bp, Homo sapien
tgcagtgcgtcatttcagctcactg

SEQ ID NO: 3516267 - DNA, 25 bp, Homo sapien
tgtaaagcctttttcgggcactaga

SEQ ID NO: 3516268 - DNA, 25 bp, Homo sapien
taatgtctaaacctatcagattggc

SEQ ID NO: 3516269 - DNA, 25 bp, Homo sapien
taagctcttggtcatacatagaagg

SEQ ID NO: 3516270 - DNA, 25 bp, Homo sapien
tcaaggctcaaagggacaaagttcc

SEQ ID NO: 3516271 - DNA, 25 bp, Homo sapien
tcaaattcggcccacatctgacgga

SEQ ID NO: 3516272 - DNA, 25 bp, Homo sapien
tatcactgagaaccacacaatttct

SEQ ID NO: 3516273 - DNA, 25 bp, Homo sapien
caagttgcaggctggatatagtcca

SEQ ID NO: 3516274 - DNA, 25 bp, Homo sapien
ccatgatgtcgatgtgaatatcact

SEQ ID NO: 3516275 - DNA, 25 bp, Homo sapien
caaaggagacggcttttccacaagt

SEQ ID NO: 3516276 - DNA, 25 bp, Homo sapien
gacgttagctttaatatttgcgaag

SEQ ID NO: 3516277 - DNA, 25 bp, Homo sapien
tgcgaagtcatgaggagcaagagtc

SEQ ID NO: 3516278 - DNA, 25 bp, Homo sapien
tctgttgatgctactttgacgttag

SEQ ID NO: 3516279 - DNA, 25 bp, Homo sapien
atacaggatctgagaaacctgtcaa

SEQ ID NO: 3516280 - DNA, 25 bp, Homo sapien
catattggttgacatgaacgtaagc

SEQ ID NO: 3516281 - DNA, 25 bp, Homo sapien
tacatccaggacaatatcatattgg

SEQ ID NO: 3516282 - DNA, 25 bp, Homo sapien
ttggttcacaacaagtacatccagg

SEQ ID NO: 3516283 - DNA, 25 bp, Homo sapien
caaatcttttgcaactttaactata

SEQ ID NO: 3516284 - DNA, 25 bp, Homo sapien
taatggacatagtttcagctttgca

SEQ ID NO: 3516285 - DNA, 25 bp, Homo sapien
ggaagtaggaatgacgagttattgt

SEQ ID NO: 3516286 - DNA, 25 bp, Homo sapien
taggaatgacgagttattgtttaat

SEQ ID NO: 3516287 - DNA, 25 bp, Homo sapien
cagttagttgcatgaaggaaatggg

SEQ ID NO: 3516288 - DNA, 25 bp, Homo sapien
tagatgctaggggatctgctgcctc

SEQ ID NO: 3516289 - DNA, 25 bp, Homo sapien
gttcatttcattcttagcagttagt

SEQ ID NO: 3516290 - DNA, 25 bp, Homo sapien
aaggaaatggggtcatcaggctgta

SEQ ID NO: 3516291 - DNA, 25 bp, Homo sapien
tgtgttgagaatataacaaagtctc

SEQ ID NO: 3516292 - DNA, 25 bp, Homo sapien
ctgtgttgagaatataacaaagtct

SEQ ID NO: 3516293 - DNA, 25 bp, Homo sapien
gtgttgagaatataacaaagtctct

SEQ ID NO: 3516294 - DNA, 25 bp, Homo sapien
catcatcatcagtaattggcttctt

SEQ ID NO: 3516295 - DNA, 25 bp, Homo sapien
gatagtagccatgagcaacatagcc

SEQ ID NO: 3516296 - DNA, 25 bp, Homo sapien
gaccttgaggcacagggaaattcga

SEQ ID NO: 3516297 - DNA, 25 bp, Homo sapien
tgtctgcattccttattgaaaatgt

SEQ ID NO: 3516298 - DNA, 25 bp, Homo sapien
ttagtaagccatcccgtaaagagga

SEQ ID NO: 3516299 - DNA, 25 bp, Homo sapien
tagaaacctgctgtatagataacca

SEQ ID NO: 3516300 - DNA, 25 bp, Homo sapien
tacaggcccaatttgaatgtcagaa

SEQ ID NO: 3516301 - DNA, 25 bp, Homo sapien
tgtattagcccttaccaaaagagtc

SEQ ID NO: 3516302 - DNA, 25 bp, Homo sapien
catccagaaggaatcctctcaaggg

SEQ ID NO: 3516303 - DNA, 25 bp, Homo sapien
caatcttggtcagagttgtggcaag

SEQ ID NO: 3516304 - DNA, 25 bp, Homo sapien
gaaccaaagctacatagcgcaatgc

SEQ ID NO: 3516305 - DNA, 25 bp, Homo sapien
cagaaggaatcctctcaagggaggt

SEQ ID NO: 3516306 - DNA, 25 bp, Homo sapien
cctctttcttggtgggtctagaact

SEQ ID NO: 3516307 - DNA, 25 bp, Homo sapien
cagtaaccaatttctgaactggccc

SEQ ID NO: 3516308 - DNA, 25 bp, Homo sapien
cactctgagttgcataggtacccat

SEQ ID NO: 3516309 - DNA, 25 bp, Homo sapien
tagaactgctaagggcactctgagt

SEQ ID NO: 3516310 - DNA, 25 bp, Homo sapien
caatgactagaactaattgtcaggt

SEQ ID NO: 3516311 - DNA, 25 bp, Homo sapien
taccataaggttgttaggatgaaga

SEQ ID NO: 3516312 - DNA, 25 bp, Homo sapien
cttcagaatacaggctaaagcagaa

SEQ ID NO: 3516313 - DNA, 25 bp, Homo sapien
ggtctcctgataattagtccactgt

SEQ ID NO: 3516314 - DNA, 25 bp, Homo sapien
ggatccataatgctcctcggtaaat

SEQ ID NO: 3516315 - DNA, 25 bp, Homo sapien
ggacctgcggatctcagtcatcaca

SEQ ID NO: 3516316 - DNA, 25 bp, Homo sapien
ggtactacagtattctcccaggatc

SEQ ID NO: 3516317 - DNA, 25 bp, Homo sapien
gaatgtcttccttggtactacagta

SEQ ID NO: 3516318 - DNA, 25 bp, Homo sapien
acaagggccaggcactcacgcctgt

SEQ ID NO: 3516319 - DNA, 25 bp, Homo sapien
agatctgaaacatgaacttggcaga

SEQ ID NO: 3516320 - DNA, 25 bp, Homo sapien
gaaacatgaacttggcagacaaatc

SEQ ID NO: 3516321 - DNA, 25 bp, Homo sapien
tctgaaacatgaacttggcagacaa

SEQ ID NO: 3516322 - DNA, 25 bp, Homo sapien
ccaacaagattctgcagttctaaag

SEQ ID NO: 3516323 - DNA, 25 bp, Homo sapien
aaacctaggtttcagttctctccag

SEQ ID NO: 3516324 - DNA, 25 bp, Homo sapien
tgtattattttatggccagacactg

SEQ ID NO: 3516325 - DNA, 25 bp, Homo sapien
tgtccatttaggacacagtgaaggc

SEQ ID NO: 3516326 - DNA, 25 bp, Homo sapien
ttctcaacaataagcattctcaggt

SEQ ID NO: 3516327 - DNA, 25 bp, Homo sapien
cagctgctgcttcgttgttgtcact

SEQ ID NO: 3516328 - DNA, 25 bp, Homo sapien
gttatcaaagcgctgaatggcttca

SEQ ID NO: 3516329 - DNA, 25 bp, Homo sapien
aatggcttcacgaacaaactccaag

SEQ ID NO: 3516330 - DNA, 25 bp, Homo sapien
tcagtatcttcatgctcagacacat

SEQ ID NO: 3516331 - DNA, 25 bp, Homo sapien
ttgtcagtatcttcatgctcagaca

SEQ ID NO: 3516332 - DNA, 25 bp, Homo sapien
cactaggagttgtctgtatttgtca

SEQ ID NO: 3516333 - DNA, 25 bp, Homo sapien
agaacaggaatgcaatgttcgcact

SEQ ID NO: 3516334 - DNA, 25 bp, Homo sapien
gctcaatactcttaggatatccata

SEQ ID NO: 3516335 - DNA, 25 bp, Homo sapien
cgtacttctaagtctggtgtgctca

SEQ ID NO: 3516336 - DNA, 25 bp, Homo sapien
gcagagttttctttcgtacttctaa

SEQ ID NO: 3516337 - DNA, 25 bp, Homo sapien
agtgctaactgcagagttttctttc

SEQ ID NO: 3516338 - DNA, 25 bp, Homo sapien
tgacctcagatgatgtgcccgcctc

SEQ ID NO: 3516339 - DNA, 25 bp, Homo sapien
ctcagatgatgtgcccgcctctgcc

SEQ ID NO: 3516340 - DNA, 25 bp, Homo sapien
acctcagatgatgtgcccgcctctg

SEQ ID NO: 3516341 - DNA, 25 bp, Homo sapien
gacctcagatgatgtgcccgcctct

SEQ ID NO: 3516342 - DNA, 25 bp, Homo sapien
agttttacattgttgtcgctctcct

SEQ ID NO: 3516343 - DNA, 25 bp, Homo sapien
tcaagcgatccaaaactatgagttt

SEQ ID NO: 3516344 - DNA, 25 bp, Homo sapien
ttaattctatcaagcgatccaaaac

SEQ ID NO: 3516345 - DNA, 25 bp, Homo sapien
gttgtcgctctccttaataattaaa

SEQ ID NO: 3516346 - DNA, 25 bp, Homo sapien
tgtcactaatgtcccagcagcttca

SEQ ID NO: 3516347 - DNA, 25 bp, Homo sapien
ttgattgcagttggtgcactagaga

SEQ ID NO: 3516348 - DNA, 25 bp, Homo sapien
gtaataagttatagatgcagcgaat

SEQ ID NO: 3516349 - DNA, 25 bp, Homo sapien
tgcagcgaataaaacgagctctttc

SEQ ID NO: 3516350 - DNA, 25 bp, Homo sapien
caatgcaagtacttaagtaatccaa

SEQ ID NO: 3516351 - DNA, 25 bp, Homo sapien
ttcaacaataaccagctgcagaatg

SEQ ID NO: 3516352 - DNA, 25 bp, Homo sapien
tgcagaatgtctccaaatgtttgaa

SEQ ID NO: 3516353 - DNA, 25 bp, Homo sapien
gaacttgatcaatgcaagtacttaa

SEQ ID NO: 3516354 - DNA, 25 bp, Homo sapien
ccttttgcaacttgcatccttctca

SEQ ID NO: 3516355 - DNA, 25 bp, Homo sapien
tctcattcaccagaaaatcatgtat

SEQ ID NO: 3516356 - DNA, 25 bp, Homo sapien
gcatcataaatgcattccttttgca

SEQ ID NO: 3516357 - DNA, 25 bp, Homo sapien
agttcaggagcatcaggtataagat

SEQ ID NO: 3516358 - DNA, 25 bp, Homo sapien
caaagaaaacgaagagtagatcctc

SEQ ID NO: 3516359 - DNA, 25 bp, Homo sapien
ggtatagatggccaaaacagcattt

SEQ ID NO: 3516360 - DNA, 25 bp, Homo sapien
gtgtcgatgctccaaacatgcacga

SEQ ID NO: 3516361 - DNA, 25 bp, Homo sapien
ctggcattaaaggttctagcaattc

SEQ ID NO: 3516362 - DNA, 25 bp, Homo sapien
tgcatcacatacaaggatcatctca

SEQ ID NO: 3516363 - DNA, 25 bp, Homo sapien
tctgtatgcatcacatacaaggatc

SEQ ID NO: 3516364 - DNA, 25 bp, Homo sapien
aggatcatctcatgtaaaagtctcc

SEQ ID NO: 3516365 - DNA, 25 bp, Homo sapien
cacatacaaggatcatctcatgtaa

SEQ ID NO: 3516366 - DNA, 25 bp, Homo sapien
aatgatggtcatcagaagtccagga

SEQ ID NO: 3516367 - DNA, 25 bp, Homo sapien
ctgaagaggtagcacaaaacgaatg

SEQ ID NO: 3516368 - DNA, 25 bp, Homo sapien
gatggtcatcagaagtccaggaagt

SEQ ID NO: 3516369 - DNA, 25 bp, Homo sapien
tagcacaaaacgaatgatggtcatc

SEQ ID NO: 3516370 - DNA, 25 bp, Homo sapien
tttcttcaaagcttcagtctttgac

SEQ ID NO: 3516371 - DNA, 25 bp, Homo sapien
cagtctttgactttacatctccttt

SEQ ID NO: 3516372 - DNA, 25 bp, Homo sapien
ttcagtctttgactttacatctcct

SEQ ID NO: 3516373 - DNA, 25 bp, Homo sapien
cttcaaagcttcagtctttgacttt

SEQ ID NO: 3516374 - DNA, 25 bp, Homo sapien
tctaatgattagagctaagcggcta

SEQ ID NO: 3516375 - DNA, 25 bp, Homo sapien
ttctgagcgtcagatgcggtggttc

SEQ ID NO: 3516376 - DNA, 25 bp, Homo sapien
gagaagtatgtagtagcacactgta

SEQ ID NO: 3516377 - DNA, 25 bp, Homo sapien
taaccttagggccattatgaggaaa

SEQ ID NO: 3516378 - DNA, 25 bp, Homo sapien
tgacatcaaattatcctacatagct

SEQ ID NO: 3516379 - DNA, 25 bp, Homo sapien
aaagcaatctagagtcaatgcaatt

SEQ ID NO: 3516380 - DNA, 25 bp, Homo sapien
tatgataaatttagtaaagttccag

SEQ ID NO: 3516381 - DNA, 25 bp, Homo sapien
ggtgcttggaaaactatgtgcagaa

SEQ ID NO: 3516382 - DNA, 25 bp, Homo sapien
gtgtagcatacgttctcagccgccg

SEQ ID NO: 3516383 - DNA, 25 bp, Homo sapien
cgttaattaacgtgtagcatacgtt

SEQ ID NO: 3516384 - DNA, 25 bp, Homo sapien
gaatccattggcacgttaattaacg

SEQ ID NO: 3516385 - DNA, 25 bp, Homo sapien
tgaatccattggcacgttaattaac

SEQ ID NO: 3516386 - DNA, 25 bp, Homo sapien
gacacaagatttaaggatgccagaa

SEQ ID NO: 3516387 - DNA, 25 bp, Homo sapien
ttataaccaatccttgacacaagat

SEQ ID NO: 3516388 - DNA, 25 bp, Homo sapien
tgacacaagatttaaggatgccaga

SEQ ID NO: 3516389 - DNA, 25 bp, Homo sapien
ggttatattataaccaatccttgac

SEQ ID NO: 3516390 - DNA, 25 bp, Homo sapien
gctgtatagccgaatgaaggcccac

SEQ ID NO: 3516391 - DNA, 25 bp, Homo sapien
tactctgccaaaaccctaaagcgct

SEQ ID NO: 3516392 - DNA, 25 bp, Homo sapien
tcccggtccagtgtttgagaatgct

SEQ ID NO: 3516393 - DNA, 25 bp, Homo sapien
taaagcgctttatcgcggtccttgg

SEQ ID NO: 3516394 - DNA, 25 bp, Homo sapien
tgccaggcccagacgcaagcggcct

SEQ ID NO: 3516395 - DNA, 25 bp, Homo sapien
ttccgcatcttccagctagaaagcc

SEQ ID NO: 3516396 - DNA, 25 bp, Homo sapien
gcggcctagtcgctccccttccgca

SEQ ID NO: 3516397 - DNA, 25 bp, Homo sapien
ccttccgcatcttccagctagaaag

SEQ ID NO: 3516398 - DNA, 25 bp, Homo sapien
gcctctgggactgggggcttgtggc

SEQ ID NO: 3516399 - DNA, 25 bp, Homo sapien
ggactgggggcttgtggcccactac

SEQ ID NO: 3516400 - DNA, 25 bp, Homo sapien
tctgggactgggggcttgtggccca

SEQ ID NO: 3516401 - DNA, 25 bp, Homo sapien
tgggactgggggcttgtggcccact

SEQ ID NO: 3516402 - DNA, 25 bp, Homo sapien
ggatccgtctactgcggctccgtct

SEQ ID NO: 3516403 - DNA, 25 bp, Homo sapien
tccggctatgaaccgcagcagcggc

SEQ ID NO: 3516404 - DNA, 25 bp, Homo sapien
cagtggtttggtgcagccgcggatc

SEQ ID NO: 3516405 - DNA, 25 bp, Homo sapien
gcggctccgtctactccggctatga

SEQ ID NO: 3516406 - DNA, 25 bp, Homo sapien
cgcgcctggccggattatgggtttt

SEQ ID NO: 3516407 - DNA, 25 bp, Homo sapien
catgcagccagttcatacactggag

SEQ ID NO: 3516408 - DNA, 25 bp, Homo sapien
ggagaactgttataaggctatgaca

SEQ ID NO: 3516409 - DNA, 25 bp, Homo sapien
gactactatatagagttgaagctac

SEQ ID NO: 3516410 - DNA, 25 bp, Homo sapien
ggcaaatgaccagttgtaatcccag

SEQ ID NO: 3516411 - DNA, 25 bp, Homo sapien
aaaacattagtatagatacccatac

SEQ ID NO: 3516412 - DNA, 25 bp, Homo sapien
gaaaatgattatacagaccctttca

SEQ ID NO: 3516413 - DNA, 25 bp, Homo sapien
aatgattatacagaccctttcaaag

SEQ ID NO: 3516414 - DNA, 25 bp, Homo sapien
tccattatataggtttcagtgaggt

SEQ ID NO: 3516415 - DNA, 25 bp, Homo sapien
tattgtcatcagtatgtggtgcctg

SEQ ID NO: 3516416 - DNA, 25 bp, Homo sapien
aacatagcattccaccactctgcaa

SEQ ID NO: 3516417 - DNA, 25 bp, Homo sapien
taatacatatatagactggcttatc

SEQ ID NO: 3516418 - DNA, 25 bp, Homo sapien
caacttttggttcaaagtatagatt

SEQ ID NO: 3516419 - DNA, 25 bp, Homo sapien
ttttctgcaggttcatcagcaggtt

SEQ ID NO: 3516420 - DNA, 25 bp, Homo sapien
ccattggttcatcagccttttctgc

SEQ ID NO: 3516421 - DNA, 25 bp, Homo sapien
ttaatgttccattggttcatcagcc

SEQ ID NO: 3516422 - DNA, 25 bp, Homo sapien
ccttttctgcaggttcatcagcagg

SEQ ID NO: 3516423 - DNA, 25 bp, Homo sapien
cacactgttcgaggataactgtata

SEQ ID NO: 3516424 - DNA, 25 bp, Homo sapien
tatttggtcgggtgcagcagttcac

SEQ ID NO: 3516425 - DNA, 25 bp, Homo sapien
tataaactagcagaccaactgtgta

SEQ ID NO: 3516426 - DNA, 25 bp, Homo sapien
cactaaaccccacactgttcgagga

SEQ ID NO: 3516427 - DNA, 25 bp, Homo sapien
taaagcctcttgtgttatgattata

SEQ ID NO: 3516428 - DNA, 25 bp, Homo sapien
agcctcttgtgttatgattatatac

SEQ ID NO: 3516429 - DNA, 25 bp, Homo sapien
actaaagcctcttgtgttatgatta

SEQ ID NO: 3516430 - DNA, 25 bp, Homo sapien
gaactaaagcctcttgtgttatgat

SEQ ID NO: 3516431 - DNA, 25 bp, Homo sapien
tctttaccaacaattccaatggaaa

SEQ ID NO: 3516432 - DNA, 25 bp, Homo sapien
tttaccaacaattccaatggaaaca

SEQ ID NO: 3516433 - DNA, 25 bp, Homo sapien
ttaccaacaattccaatggaaacat

SEQ ID NO: 3516434 - DNA, 25 bp, Homo sapien
gcctcaatctgtcgttaaaatgcca

SEQ ID NO: 3516435 - DNA, 25 bp, Homo sapien
gatgattgacctcaacactactggc

SEQ ID NO: 3516436 - DNA, 25 bp, Homo sapien
gccttaaatactagggcctttgcat

SEQ ID NO: 3516437 - DNA, 25 bp, Homo sapien
taaaatgcagagtaaccacaatggc

SEQ ID NO: 3516438 - DNA, 25 bp, Homo sapien
ctgttctgcaggaagcgtctctctt

SEQ ID NO: 3516439 - DNA, 25 bp, Homo sapien
cgcagaccatgtttaactagttcat

SEQ ID NO: 3516440 - DNA, 25 bp, Homo sapien
gttctgcaggaagcgtctctcttaa

SEQ ID NO: 3516441 - DNA, 25 bp, Homo sapien
tctcttaaggcacgcagaccatgtt

SEQ ID NO: 3516442 - DNA, 25 bp, Homo sapien
cattgttatgctaggcttctgttat

SEQ ID NO: 3516443 - DNA, 25 bp, Homo sapien
aatttcattgttatgctaggcttct

SEQ ID NO: 3516444 - DNA, 25 bp, Homo sapien
tttcattgttatgctaggcttctgt

SEQ ID NO: 3516445 - DNA, 25 bp, Homo sapien
tcattgttatgctaggcttctgtta

SEQ ID NO: 3516446 - DNA, 25 bp, Homo sapien
agccacggcagttagaaaggagaaa

SEQ ID NO: 3516447 - DNA, 25 bp, Homo sapien
tacaaacggaacctggcaacacatt

SEQ ID NO: 3516448 - DNA, 25 bp, Homo sapien
gaagggagaaaacctgcataaccac

SEQ ID NO: 3516449 - DNA, 25 bp, Homo sapien
cattgtaccagaggttccagccacg

SEQ ID NO: 3516450 - DNA, 25 bp, Homo sapien
ggaggcccagttgggcggatcgcct

SEQ ID NO: 3516451 - DNA, 25 bp, Homo sapien
gaggtcgggagtttgagaccagcct

SEQ ID NO: 3516452 - DNA, 25 bp, Homo sapien
gaccaacatggagaaaccccgtctc

SEQ ID NO: 3516453 - DNA, 25 bp, Homo sapien
ctactaaaaatacaaaattagccag

SEQ ID NO: 3516454 - DNA, 25 bp, Homo sapien
ggagtacaactatatgctgtgcgct

SEQ ID NO: 3516455 - DNA, 25 bp, Homo sapien
ccaggttgaaatgtgctaggcagag

SEQ ID NO: 3516456 - DNA, 25 bp, Homo sapien
tattgctgcaagtgtactctgtgac

SEQ ID NO: 3516457 - DNA, 25 bp, Homo sapien
ccaagcttatttgtccaaggaatcc

SEQ ID NO: 3516458 - DNA, 25 bp, Homo sapien
tctccaagtaagtacgagctgattg

SEQ ID NO: 3516459 - DNA, 25 bp, Homo sapien
gagctgattgggaacgggctccaat

SEQ ID NO: 3516460 - DNA, 25 bp, Homo sapien
cataaattcagacatatgtctctcc

SEQ ID NO: 3516461 - DNA, 25 bp, Homo sapien
ggaacgggctccaatggacatggct

SEQ ID NO: 3516462 - DNA, 25 bp, Homo sapien
agcagatggacaggtttggaaaatg

SEQ ID NO: 3516463 - DNA, 25 bp, Homo sapien
gcagtcaaaatagttagcagatgga

SEQ ID NO: 3516464 - DNA, 25 bp, Homo sapien
tcaaaatagttagcagatggacagg

SEQ ID NO: 3516465 - DNA, 25 bp, Homo sapien
cagatggacaggtttggaaaatgtg

SEQ ID NO: 3516466 - DNA, 25 bp, Homo sapien
ggtctccggccatatcgttgtgttg

SEQ ID NO: 3516467 - DNA, 25 bp, Homo sapien
caacaccatatggtctccggccata

SEQ ID NO: 3516468 - DNA, 25 bp, Homo sapien
tatcgttgtgttggtatctgggtct

SEQ ID NO: 3516469 - DNA, 25 bp, Homo sapien
tcataaccagcaataaggagaccaa

SEQ ID NO: 3516470 - DNA, 25 bp, Homo sapien
aaaggctaatgaaagagcaatccaa

SEQ ID NO: 3516471 - DNA, 25 bp, Homo sapien
ttagatgattttcctgaagttgggc

SEQ ID NO: 3516472 - DNA, 25 bp, Homo sapien
taccgaacctaagaaagagtgccag

SEQ ID NO: 3516473 - DNA, 25 bp, Homo sapien
ggatttcttgggacatctagaacca

SEQ ID NO: 3516474 - DNA, 25 bp, Homo sapien
caaacactcctgacgcataaaatta

SEQ ID NO: 3516475 - DNA, 25 bp, Homo sapien
agacacaggcagtggtctatcgaat

SEQ ID NO: 3516476 - DNA, 25 bp, Homo sapien
tctggaatccaaacactcctgacgc

SEQ ID NO: 3516477 - DNA, 25 bp, Homo sapien
tctatcgaatacaaatctggaatcc

SEQ ID NO: 3516478 - DNA, 25 bp, Homo sapien
gagatactggacactagccgctgag

SEQ ID NO: 3516479 - DNA, 25 bp, Homo sapien
ggatctttacgtgtttctgccactg

SEQ ID NO: 3516480 - DNA, 25 bp, Homo sapien
tctagatctcgaaccagcaaaaaga

SEQ ID NO: 3516481 - DNA, 25 bp, Homo sapien
ctttgtatcagagcacttatggaac

SEQ ID NO: 3516482 - DNA, 25 bp, Homo sapien
gagtttatagataaacttgccttca

SEQ ID NO: 3516483 - DNA, 25 bp, Homo sapien
ctgtctcttctagactctcacagaa

SEQ ID NO: 3516484 - DNA, 25 bp, Homo sapien
taaccataaataatctgtctcttct

SEQ ID NO: 3516485 - DNA, 25 bp, Homo sapien
aaataatctgtctcttctagactct

SEQ ID NO: 3516486 - DNA, 25 bp, Homo sapien
atcagcagtaagccccgcaattgag

SEQ ID NO: 3516487 - DNA, 25 bp, Homo sapien
taagccccgcaattgagataccaat

SEQ ID NO: 3516488 - DNA, 25 bp, Homo sapien
caattgagataccaatatggttgtc

SEQ ID NO: 3516489 - DNA, 25 bp, Homo sapien
accaatatggttgtcaacatggaga

SEQ ID NO: 3516490 - DNA, 25 bp, Homo sapien
tttgatttcagaccaactgtggctg

SEQ ID NO: 3516491 - DNA, 25 bp, Homo sapien
gatttcagaccaactgtggctgaac

SEQ ID NO: 3516492 - DNA, 25 bp, Homo sapien
gtttttgatttcagaccaactgtgg

SEQ ID NO: 3516493 - DNA, 25 bp, Homo sapien
tttcagaccaactgtggctgaacct

SEQ ID NO: 3516494 - DNA, 25 bp, Homo sapien
gtgacatcattgtcatactgatttc

SEQ ID NO: 3516495 - DNA, 25 bp, Homo sapien
acatcattgtcatactgatttcgaa

SEQ ID NO: 3516496 - DNA, 25 bp, Homo sapien
catcattgtcatactgatttcgaaa

SEQ ID NO: 3516497 - DNA, 25 bp, Homo sapien
gacatcattgtcatactgatttcga

SEQ ID NO: 3516498 - DNA, 25 bp, Homo sapien
tgagtgctagaatggcagacagaac

SEQ ID NO: 3516499 - DNA, 25 bp, Homo sapien
ttataataatagtcatgggagtgag

SEQ ID NO: 3516500 - DNA, 25 bp, Homo sapien
ccagaaccctatattgtaaccctga

SEQ ID NO: 3516501 - DNA, 25 bp, Homo sapien
ccctatattgtaaccctgattccat

SEQ ID NO: 3516502 - DNA, 25 bp, Homo sapien
agggcctcttctaatcgaagtctag

SEQ ID NO: 3516503 - DNA, 25 bp, Homo sapien
tctaatcgaagtctaggcgagagat

SEQ ID NO: 3516504 - DNA, 25 bp, Homo sapien
ctaggcgagagataaatagacggac

SEQ ID NO: 3516505 - DNA, 25 bp, Homo sapien
cgaagtctaggcgagagataaatag

SEQ ID NO: 3516506 - DNA, 25 bp, Homo sapien
ggaaaacggacgctgtccaggaaca

SEQ ID NO: 3516507 - DNA, 25 bp, Homo sapien
caggaaaacggacgctgtccaggaa

SEQ ID NO: 3516508 - DNA, 25 bp, Homo sapien
gaaaacggacgctgtccaggaacac

SEQ ID NO: 3516509 - DNA, 25 bp, Homo sapien
tcaagtccgcactggtggtacaggt

SEQ ID NO: 3516510 - DNA, 25 bp, Homo sapien
tcatctagctgaccgaggaggaagt

SEQ ID NO: 3516511 - DNA, 25 bp, Homo sapien
gagatgctgaatcactgccggagcc

SEQ ID NO: 3516512 - DNA, 25 bp, Homo sapien
ggtaggcctccaagtcaagtctctg

SEQ ID NO: 3516513 - DNA, 25 bp, Homo sapien
taaaccttccagagatcgggattca

SEQ ID NO: 3516514 - DNA, 25 bp, Homo sapien
caccgggcgacgctaaggatgacag

SEQ ID NO: 3516515 - DNA, 25 bp, Homo sapien
gtcaccagagctctgccctaaacct

SEQ ID NO: 3516516 - DNA, 25 bp, Homo sapien
acaggagaggtggctcgtcatcccc

SEQ ID NO: 3516517 - DNA, 25 bp, Homo sapien
tgcggcctccagcaaaactgagaat

SEQ ID NO: 3516518 - DNA, 25 bp, Homo sapien
tcaaggaggtgctgccgaaagtatc

SEQ ID NO: 3516519 - DNA, 25 bp, Homo sapien
ccagagatatcgataggcttgcaac

SEQ ID NO: 3516520 - DNA, 25 bp, Homo sapien
cagggtagcgcagtctattccagag

SEQ ID NO: 3516521 - DNA, 25 bp, Homo sapien
gcgtgttgttgaactttggtgtaca

SEQ ID NO: 3516522 - DNA, 25 bp, Homo sapien
tagtacccaataggcccttcttcca

SEQ ID NO: 3516523 - DNA, 25 bp, Homo sapien
tattacatgggtagattgcgtgttg

SEQ ID NO: 3516524 - DNA, 25 bp, Homo sapien
tcatcatgcacatagtgagcatagt

SEQ ID NO: 3516525 - DNA, 25 bp, Homo sapien
atctctccacattgatttggtgctg

SEQ ID NO: 3516526 - DNA, 25 bp, Homo sapien
ttgatttggtgctgggattcccttt

SEQ ID NO: 3516527 - DNA, 25 bp, Homo sapien
tggtcatctctccacattgatttgg

SEQ ID NO: 3516528 - DNA, 25 bp, Homo sapien
tcatctctccacattgatttggtgc

SEQ ID NO: 3516529 - DNA, 25 bp, Homo sapien
tcccttaactcttgaatgtccaaga

SEQ ID NO: 3516530 - DNA, 25 bp, Homo sapien
ggatgacagccccatgctacgccag

SEQ ID NO: 3516531 - DNA, 25 bp, Homo sapien
tctggcattctaggccttccctgca

SEQ ID NO: 3516532 - DNA, 25 bp, Homo sapien
gggacttcccatgtgaatttggttg

SEQ ID NO: 3516533 - DNA, 25 bp, Homo sapien
tgatacctgatggattgcaattggg

SEQ ID NO: 3516534 - DNA, 25 bp, Homo sapien
tatggttcagcgcacacttccagaa

SEQ ID NO: 3516535 - DNA, 25 bp, Homo sapien
tcctcaggagagatacgatattgct

SEQ ID NO: 3516536 - DNA, 25 bp, Homo sapien
tgcagaaagatcaaaaaagcccttc

SEQ ID NO: 3516537 - DNA, 25 bp, Homo sapien
cccacattcttgataccttttggaa

SEQ ID NO: 3516538 - DNA, 25 bp, Homo sapien
actgcccacactcttttcccccaca

SEQ ID NO: 3516539 - DNA, 25 bp, Homo sapien
ggctctggagccttgactctgcttc

SEQ ID NO: 3516540 - DNA, 25 bp, Homo sapien
ctttaactaattggcagggctctgg

SEQ ID NO: 3516541 - DNA, 25 bp, Homo sapien
tttaaatagacaggtgctaatatac

SEQ ID NO: 3516542 - DNA, 25 bp, Homo sapien
taaatagacaggtgctaatatacac

SEQ ID NO: 3516543 - DNA, 25 bp, Homo sapien
ttaaatagacaggtgctaatataca

SEQ ID NO: 3516544 - DNA, 25 bp, Homo sapien
gggaccaggataggtagccaaacat

SEQ ID NO: 3516545 - DNA, 25 bp, Homo sapien
catcagtcagaaaccaatagacaag

SEQ ID NO: 3516546 - DNA, 25 bp, Homo sapien
ggaccaggataggtagccaaacatc

SEQ ID NO: 3516547 - DNA, 25 bp, Homo sapien
ctctgaacagggatcatcagtcaga

SEQ ID NO: 3516548 - DNA, 25 bp, Homo sapien
caaatgcctctgacgattgcagctc

SEQ ID NO: 3516549 - DNA, 25 bp, Homo sapien
tgaactattctaaagcctctggctc

SEQ ID NO: 3516550 - DNA, 25 bp, Homo sapien
ttcaccaagcaacagtctaaggagg

SEQ ID NO: 3516551 - DNA, 25 bp, Homo sapien
catagaaaaaagacggcctccagga

SEQ ID NO: 3516552 - DNA, 25 bp, Homo sapien
tctatgtgtctatctctccatcaat

SEQ ID NO: 3516553 - DNA, 25 bp, Homo sapien
aacattgttgaaaatcggttggcta

SEQ ID NO: 3516554 - DNA, 25 bp, Homo sapien
gctatacttgtgtgatatatttctc

SEQ ID NO: 3516555 - DNA, 25 bp, Homo sapien
aaatcggttggctatacttgtgtga

SEQ ID NO: 3516556 - DNA, 25 bp, Homo sapien
tcaggagcaaaacaaaagtttgaag

SEQ ID NO: 3516557 - DNA, 25 bp, Homo sapien
tctgaatcctgattcaggagcaaaa

SEQ ID NO: 3516558 - DNA, 25 bp, Homo sapien
tttgaagtcaaagccagagaaatgg

SEQ ID NO: 3516559 - DNA, 25 bp, Homo sapien
cgatagtcaaatacaaacgatgagc

SEQ ID NO: 3516560 - DNA, 25 bp, Homo sapien
tctggttactatgtccttcttgggc

SEQ ID NO: 3516561 - DNA, 25 bp, Homo sapien
tttatttcagccgttcttacaagta

SEQ ID NO: 3516562 - DNA, 25 bp, Homo sapien
cgttcttacaagtaagtgaatttct

SEQ ID NO: 3516563 - DNA, 25 bp, Homo sapien
tttcagccgttcttacaagtaagtg

SEQ ID NO: 3516564 - DNA, 25 bp, Homo sapien
caatgtatgagtgatttgtcttttc

SEQ ID NO: 3516565 - DNA, 25 bp, Homo sapien
acagcacccagcctatagggctctt

SEQ ID NO: 3516566 - DNA, 25 bp, Homo sapien
cacccagcctatagggctcttcaaa

SEQ ID NO: 3516567 - DNA, 25 bp, Homo sapien
gcacccagcctatagggctcttcaa

SEQ ID NO: 3516568 - DNA, 25 bp, Homo sapien
agcacccagcctatagggctcttca

SEQ ID NO: 3516569 - DNA, 25 bp, Homo sapien
tgaatgtatatccaagtaactctgc

SEQ ID NO: 3516570 - DNA, 25 bp, Homo sapien
agaatgggcaactgaatgtatatcc

SEQ ID NO: 3516571 - DNA, 25 bp, Homo sapien
cacttcttaatagcagattccttat

SEQ ID NO: 3516572 - DNA, 25 bp, Homo sapien
cccagcctcatacacttcttaatag

SEQ ID NO: 3516573 - DNA, 25 bp, Homo sapien
cccagctggatttttgctacactga

SEQ ID NO: 3516574 - DNA, 25 bp, Homo sapien
aaccctgggtcttggcagtacaaat

SEQ ID NO: 3516575 - DNA, 25 bp, Homo sapien
gattttaacagctctgcgctcacgt

SEQ ID NO: 3516576 - DNA, 25 bp, Homo sapien
ttttgtactttgtggcgacggccaa

SEQ ID NO: 3516577 - DNA, 25 bp, Homo sapien
tgttttatttggcactgatgctttc

SEQ ID NO: 3516578 - DNA, 25 bp, Homo sapien
ttatttggcactgatgctttcaaca

SEQ ID NO: 3516579 - DNA, 25 bp, Homo sapien
tttatttggcactgatgctttcaac

SEQ ID NO: 3516580 - DNA, 25 bp, Homo sapien
gccatgttttatttggcactgatgc

SEQ ID NO: 3516581 - DNA, 25 bp, Homo sapien
ttttggcatctctaagccgtgtaca

SEQ ID NO: 3516582 - DNA, 25 bp, Homo sapien
tttttggcatctctaagccgtgtac

SEQ ID NO: 3516583 - DNA, 25 bp, Homo sapien
atttttggcatctctaagccgtgta

SEQ ID NO: 3516584 - DNA, 25 bp, Homo sapien
gatggtggcgttcagatagactccc

SEQ ID NO: 3516585 - DNA, 25 bp, Homo sapien
caaacatactgtgacttatcagggc

SEQ ID NO: 3516586 - DNA, 25 bp, Homo sapien
tatatgctgcatttccacccaagtg

SEQ ID NO: 3516587 - DNA, 25 bp, Homo sapien
tctgggccagcgctcagaatgccat

SEQ ID NO: 3516588 - DNA, 25 bp, Homo sapien
tttccccagcaaaggagacacaaca

SEQ ID NO: 3516589 - DNA, 25 bp, Homo sapien
gagttaggcagcaattataaaagtt

SEQ ID NO: 3516590 - DNA, 25 bp, Homo sapien
tccccagcaaaggagacacaacatt

SEQ ID NO: 3516591 - DNA, 25 bp, Homo sapien
acaggagttaggcagcaattataaa

SEQ ID NO: 3516592 - DNA, 25 bp, Homo sapien
taagcacgtggctaatgccagtcca

SEQ ID NO: 3516593 - DNA, 25 bp, Homo sapien
aaatcactgtcataccagctgggag

SEQ ID NO: 3516594 - DNA, 25 bp, Homo sapien
ttttaaaccacgctattcgcaggct

SEQ ID NO: 3516595 - DNA, 25 bp, Homo sapien
gctaaaagttatcccttcagaggta

SEQ ID NO: 3516596 - DNA, 25 bp, Homo sapien
tttttaaagactgtcccaacctgca

SEQ ID NO: 3516597 - DNA, 25 bp, Homo sapien
tgagcttgaggtaccctggcctcat

SEQ ID NO: 3516598 - DNA, 25 bp, Homo sapien
gaatgagcttgaggtaccctggcct

SEQ ID NO: 3516599 - DNA, 25 bp, Homo sapien
accacagggcaagctctcaacaaga

SEQ ID NO: 3516600 - DNA, 25 bp, Homo sapien
ggcaagctctcaacaagaatgagct

SEQ ID NO: 3516601 - DNA, 25 bp, Homo sapien
ttctattcctgtctcatatccccct

SEQ ID NO: 3516602 - DNA, 25 bp, Homo sapien
ctgcttttagtcccgcagttttcct

SEQ ID NO: 3516603 - DNA, 25 bp, Homo sapien
cctgatatgttcttgcattcctctg

SEQ ID NO: 3516604 - DNA, 25 bp, Homo sapien
tatcccccttcctgatatgttcttg

SEQ ID NO: 3516605 - DNA, 25 bp, Homo sapien
tgacctttggttctcttcctcatat

SEQ ID NO: 3516606 - DNA, 25 bp, Homo sapien
gactgacctttggttctcttcctca

SEQ ID NO: 3516607 - DNA, 25 bp, Homo sapien
ctgtgacacagctgttctgtgactg

SEQ ID NO: 3516608 - DNA, 25 bp, Homo sapien
cagctgttctgtgactgacctttgg

SEQ ID NO: 3516609 - DNA, 25 bp, Homo sapien
tccagctggcaattgtagtaagaca

SEQ ID NO: 3516610 - DNA, 25 bp, Homo sapien
ttgcccttaggccctgttctgtctc

SEQ ID NO: 3516611 - DNA, 25 bp, Homo sapien
gtctccagctggcaattgtagtaag

SEQ ID NO: 3516612 - DNA, 25 bp, Homo sapien
tgttctgtctccagctggcaattgt

SEQ ID NO: 3516613 - DNA, 25 bp, Homo sapien
ggaatcatttactgtagagacaaac

SEQ ID NO: 3516614 - DNA, 25 bp, Homo sapien
ccttatacactacagtaaccctcag

SEQ ID NO: 3516615 - DNA, 25 bp, Homo sapien
cagtaaccctcagagtaagatttta

SEQ ID NO: 3516616 - DNA, 25 bp, Homo sapien
cacatggttaaagggactggaatca

SEQ ID NO: 3516617 - DNA, 25 bp, Homo sapien
tatgaacagtgccaataccatagtt

SEQ ID NO: 3516618 - DNA, 25 bp, Homo sapien
tatatactccctgacagcatagcca

SEQ ID NO: 3516619 - DNA, 25 bp, Homo sapien
tcactgggttgctatgagtgttaaa

SEQ ID NO: 3516620 - DNA, 25 bp, Homo sapien
tgtctcagtgctttacctaaaggtg

SEQ ID NO: 3516621 - DNA, 25 bp, Homo sapien
atacatttcttctaactactaaatg

SEQ ID NO: 3516622 - DNA, 25 bp, Homo sapien
tccatagatctggtgacagggatac

SEQ ID NO: 3516623 - DNA, 25 bp, Homo sapien
gagaggtagagtttgaagtaaatat

SEQ ID NO: 3516624 - DNA, 25 bp, Homo sapien
catttcttctaactactaaatgtcc

SEQ ID NO: 3516625 - DNA, 25 bp, Homo sapien
gggctcacatagtgagatgtgaaat

SEQ ID NO: 3516626 - DNA, 25 bp, Homo sapien
gctcacatagtgagatgtgaaatct

SEQ ID NO: 3516627 - DNA, 25 bp, Homo sapien
ggctcacatagtgagatgtgaaatc

SEQ ID NO: 3516628 - DNA, 25 bp, Homo sapien
gtcacctagtagaccaacatacaac

SEQ ID NO: 3516629 - DNA, 25 bp, Homo sapien
tagtagaccaacatacaacataggt

SEQ ID NO: 3516630 - DNA, 25 bp, Homo sapien
caacatacaacataggtctggattt

SEQ ID NO: 3516631 - DNA, 25 bp, Homo sapien
taggtctggatttgacttgtcattg

SEQ ID NO: 3516632 - DNA, 25 bp, Homo sapien
ccttgctgagagctgaccatgaata

SEQ ID NO: 3516633 - DNA, 25 bp, Homo sapien
gaccatgaatacatgctttttgcag

SEQ ID NO: 3516634 - DNA, 25 bp, Homo sapien
gagctgaccatgaatacatgctttt

SEQ ID NO: 3516635 - DNA, 25 bp, Homo sapien
tgctgagagctgaccatgaatacat

SEQ ID NO: 3516636 - DNA, 25 bp, Homo sapien
tagctggtcgtatgggaaccctttc

SEQ ID NO: 3516637 - DNA, 25 bp, Homo sapien
cactggaacagctatctaaaggcac

SEQ ID NO: 3516638 - DNA, 25 bp, Homo sapien
caacactctcaaaggaggcagtgcc

SEQ ID NO: 3516639 - DNA, 25 bp, Homo sapien
tgaccatgggagctctagctatatc

SEQ ID NO: 3516640 - DNA, 25 bp, Homo sapien
gtgcacggtgtgcacacccactgac

SEQ ID NO: 3516641 - DNA, 25 bp, Homo sapien
cacactgagagctgtagacccggag

SEQ ID NO: 3516642 - DNA, 25 bp, Homo sapien
ggctcgtgcacggtgtgcacaccca

SEQ ID NO: 3516643 - DNA, 25 bp, Homo sapien
cactgagagctgtagacccggagct

SEQ ID NO: 3516644 - DNA, 25 bp, Homo sapien
aagatattctagtcacctaggctag

SEQ ID NO: 3516645 - DNA, 25 bp, Homo sapien
tagtacttcttatcctgttcaatgg

SEQ ID NO: 3516646 - DNA, 25 bp, Homo sapien
caataccagcattgggttttgaaaa

SEQ ID NO: 3516647 - DNA, 25 bp, Homo sapien
caaactaaccttcattcaataccag

SEQ ID NO: 3516648 - DNA, 25 bp, Homo sapien
caccgtcgtggctgtgatccttcag

SEQ ID NO: 3516649 - DNA, 25 bp, Homo sapien
gaagaaactcctgcttgtctaggga

SEQ ID NO: 3516650 - DNA, 25 bp, Homo sapien
tcagtgtcaacggtaggctgccacc

SEQ ID NO: 3516651 - DNA, 25 bp, Homo sapien
gaggtggttttgtggcagaactcca

SEQ ID NO: 3516652 - DNA, 25 bp, Homo sapien
ggcacgctgggtcggcgtggtcccg

SEQ ID NO: 3516653 - DNA, 25 bp, Homo sapien
caaagagaacctgcacgcctggggt

SEQ ID NO: 3516654 - DNA, 25 bp, Homo sapien
ttgcccctcccgtccgaagatgacc

SEQ ID NO: 3516655 - DNA, 25 bp, Homo sapien
gctttcctcggcctgggcacgctgg

SEQ ID NO: 3516656 - DNA, 25 bp, Homo sapien
gagcggccgctacggtacgagcggg

SEQ ID NO: 3516657 - DNA, 25 bp, Homo sapien
agcgagacgccaaagccatgcggtc

SEQ ID NO: 3516658 - DNA, 25 bp, Homo sapien
ccccgagagtctgaggaacggctac

SEQ ID NO: 3516659 - DNA, 25 bp, Homo sapien
cagccctgacgggttgcgaaccagg

SEQ ID NO: 3516660 - DNA, 25 bp, Homo sapien
ctctgccgcttctgcaacgtggagc

SEQ ID NO: 3516661 - DNA, 25 bp, Homo sapien
gtgaagagctgcgtgagccccttgc

SEQ ID NO: 3516662 - DNA, 25 bp, Homo sapien
ttctgcaacgtggagctgcggccgc

SEQ ID NO: 3516663 - DNA, 25 bp, Homo sapien
agagctgcgtgagccccttgcggca

SEQ ID NO: 3516664 - DNA, 25 bp, Homo sapien
tctttcaaatcagggaagcgcctct

SEQ ID NO: 3516665 - DNA, 25 bp, Homo sapien
tccggcactgcgttctggtgctgct

SEQ ID NO: 3516666 - DNA, 25 bp, Homo sapien
tcctggccagcttcgtctggtgggt

SEQ ID NO: 3516667 - DNA, 25 bp, Homo sapien
tgagcgtgtgttcgcacagcttgag

SEQ ID NO: 3516668 - DNA, 25 bp, Homo sapien
cagtcaggtaagtcactatcctcct

SEQ ID NO: 3516669 - DNA, 25 bp, Homo sapien
agtcaggtaagtcactatcctcctt

SEQ ID NO: 3516670 - DNA, 25 bp, Homo sapien
agagaataacaagaaacgaacaaag

SEQ ID NO: 3516671 - DNA, 25 bp, Homo sapien
agagaaaagagaataacaagaaacg

SEQ ID NO: 3516672 - DNA, 25 bp, Homo sapien
cagaagccttaggagctgatgcgat

SEQ ID NO: 3516673 - DNA, 25 bp, Homo sapien
tgcagaagccttaggagctgatgcg

SEQ ID NO: 3516674 - DNA, 25 bp, Homo sapien
attaggcaggagaaggaaataaagg

SEQ ID NO: 3516675 - DNA, 25 bp, Homo sapien
agggcaattaggcaggagaaggaaa

SEQ ID NO: 3516676 - DNA, 25 bp, Homo sapien
ccacatactgttggaagttctagcc

SEQ ID NO: 3516677 - DNA, 25 bp, Homo sapien
attccacatactgttggaagttcta

SEQ ID NO: 3516678 - DNA, 25 bp, Homo sapien
gttggtcgagttttgtgccttagca

SEQ ID NO: 3516679 - DNA, 25 bp, Homo sapien
agcatagttatctgggtgatttaca

SEQ ID NO: 3516680 - DNA, 25 bp, Homo sapien
tagcggcttagtgcaaatagtacaa

SEQ ID NO: 3516681 - DNA, 25 bp, Homo sapien
gagaatcaatagtgccttcatcatt

SEQ ID NO: 3516682 - DNA, 25 bp, Homo sapien
agaaaacactagctacacaatgtat

SEQ ID NO: 3516683 - DNA, 25 bp, Homo sapien
tacactggtagtgactttgaaatta

SEQ ID NO: 3516684 - DNA, 25 bp, Homo sapien
ttgaatacactggtagtgactttga

SEQ ID NO: 3516685 - DNA, 25 bp, Homo sapien
aacactagctacacaatgtattgtg

SEQ ID NO: 3516686 - DNA, 25 bp, Homo sapien
tccaattcgtacaagtaatctcagg

SEQ ID NO: 3516687 - DNA, 25 bp, Homo sapien
ttcgtacaagtaatctcaggagatg

SEQ ID NO: 3516688 - DNA, 25 bp, Homo sapien
caattcgtacaagtaatctcaggag

SEQ ID NO: 3516689 - DNA, 25 bp, Homo sapien
tgctccaattcgtacaagtaatctc

SEQ ID NO: 3516690 - DNA, 25 bp, Homo sapien
tttgtagagtagttgggtgcccaac

SEQ ID NO: 3516691 - DNA, 25 bp, Homo sapien
ggacatgggtgccttggggtgatct

SEQ ID NO: 3516692 - DNA, 25 bp, Homo sapien
ctcaaatttgtagagtagttgggtg

SEQ ID NO: 3516693 - DNA, 25 bp, Homo sapien
gacatgggtgccttggggtgatctg

SEQ ID NO: 3516694 - DNA, 25 bp, Homo sapien
ctcaagaatggaatccacatttctt

SEQ ID NO: 3516695 - DNA, 25 bp, Homo sapien
tggcaggaagttaaaagagctgttt

SEQ ID NO: 3516696 - DNA, 25 bp, Homo sapien
cttggcaggaagttaaaagagctgt

SEQ ID NO: 3516697 - DNA, 25 bp, Homo sapien
caggaagttaaaagagctgttttcg

SEQ ID NO: 3516698 - DNA, 25 bp, Homo sapien
gcaggaagttaaaagagctgttttc

SEQ ID NO: 3516699 - DNA, 25 bp, Homo sapien
ccagtcatcaacaagccacagtttt

SEQ ID NO: 3516700 - DNA, 25 bp, Homo sapien
tcatcaacaagccacagttttagct

SEQ ID NO: 3516701 - DNA, 25 bp, Homo sapien
cagttttagctcttcaggaagcttt

SEQ ID NO: 3516702 - DNA, 25 bp, Homo sapien
atcaacaagccacagttttagctct

SEQ ID NO: 3516703 - DNA, 25 bp, Homo sapien
tcattttcaacagtaggatctaccc

SEQ ID NO: 3516704 - DNA, 25 bp, Homo sapien
aactctgttcatgaatgtttcctca

SEQ ID NO: 3516705 - DNA, 25 bp, Homo sapien
ttcttccgaggaggccaaggagtct

SEQ ID NO: 3516706 - DNA, 25 bp, Homo sapien
taacttcaactctgttcatgaatgt

SEQ ID NO: 3516707 - DNA, 25 bp, Homo sapien
tgccaccatctccatttccaggggt

SEQ ID NO: 3516708 - DNA, 25 bp, Homo sapien
ccatctccatttccaggggttttct

SEQ ID NO: 3516709 - DNA, 25 bp, Homo sapien
tggtactgccaccatctccatttcc

SEQ ID NO: 3516710 - DNA, 25 bp, Homo sapien
caccatctccatttccaggggtttt

SEQ ID NO: 3516711 - DNA, 25 bp, Homo sapien
ctgttggagaccagatgtcttcttt

SEQ ID NO: 3516712 - DNA, 25 bp, Homo sapien
tgttggagaccagatgtcttctttc

SEQ ID NO: 3516713 - DNA, 25 bp, Homo sapien
agcccctatcgtcttcccctctgca

SEQ ID NO: 3516714 - DNA, 25 bp, Homo sapien
gcagcccctatcgtcttcccctctg

SEQ ID NO: 3516715 - DNA, 25 bp, Homo sapien
gggcagcccctatcgtcttcccctc

SEQ ID NO: 3516716 - DNA, 25 bp, Homo sapien
ctggggcagcccctatcgtcttccc

SEQ ID NO: 3516717 - DNA, 25 bp, Homo sapien
tagtgtccttgtatttgagtactct

SEQ ID NO: 3516718 - DNA, 25 bp, Homo sapien
gaaagcacagcactcactcaacctc

SEQ ID NO: 3516719 - DNA, 25 bp, Homo sapien
ttgggtcctgttttgaagccattta

SEQ ID NO: 3516720 - DNA, 25 bp, Homo sapien
tattctttctgcaaattagtgtcct

SEQ ID NO: 3516721 - DNA, 25 bp, Homo sapien
tattgaacttctatgtagcacttac

SEQ ID NO: 3516722 - DNA, 25 bp, Homo sapien
aaaaatattgaacttctatgtagca

SEQ ID NO: 3516723 - DNA, 25 bp, Homo sapien
cctcataggaaaaatattgaacttc

SEQ ID NO: 3516724 - DNA, 25 bp, Homo sapien
aaatattgaacttctatgtagcact

SEQ ID NO: 3516725 - DNA, 25 bp, Homo sapien
cttgtagaaatggtgggctggttgc

SEQ ID NO: 3516726 - DNA, 25 bp, Homo sapien
tagaaatggtgggctggttgccctc

SEQ ID NO: 3516727 - DNA, 25 bp, Homo sapien
tgtagaaatggtgggctggttgccc

SEQ ID NO: 3516728 - DNA, 25 bp, Homo sapien
ggcttgtagaaatggtgggctggtt

SEQ ID NO: 3516729 - DNA, 25 bp, Homo sapien
ctggcctcatctttcgtgagttaag

SEQ ID NO: 3516730 - DNA, 25 bp, Homo sapien
tggcctcatctttcgtgagttaagt

SEQ ID NO: 3516731 - DNA, 25 bp, Homo sapien
gcctcatctttcgtgagttaagttt

SEQ ID NO: 3516732 - DNA, 25 bp, Homo sapien
ggcctcatctttcgtgagttaagtt

SEQ ID NO: 3516733 - DNA, 25 bp, Homo sapien
caggggaactttccaactgacccat

SEQ ID NO: 3516734 - DNA, 25 bp, Homo sapien
tcacagcatggccgtattcacttgg

SEQ ID NO: 3516735 - DNA, 25 bp, Homo sapien
gtttgcaatttgattaaggtttgag

SEQ ID NO: 3516736 - DNA, 25 bp, Homo sapien
cagcatggccgtattcacttggaag

SEQ ID NO: 3516737 - DNA, 25 bp, Homo sapien
aagtttgcaatttgattaaggtttg

SEQ ID NO: 3516738 - DNA, 25 bp, Homo sapien
gagtagctatagcaggtttacactt

SEQ ID NO: 3516739 - DNA, 25 bp, Homo sapien
cagagtagctatagcaggtttacac

SEQ ID NO: 3516740 - DNA, 25 bp, Homo sapien
gagtgtcagagtagctatagcaggt

SEQ ID NO: 3516741 - DNA, 25 bp, Homo sapien
tgtcagagtagctatagcaggttta

SEQ ID NO: 3516742 - DNA, 25 bp, Homo sapien
tgaacctgataacatctcctggttg

SEQ ID NO: 3516743 - DNA, 25 bp, Homo sapien
tccgtagagcgtgttagacttaaaa

SEQ ID NO: 3516744 - DNA, 25 bp, Homo sapien
gtggttttgtagagctccgtagagc

SEQ ID NO: 3516745 - DNA, 25 bp, Homo sapien
gcctcattgacgtaattgaacctga

SEQ ID NO: 3516746 - DNA, 25 bp, Homo sapien
tacccaaggccggatgattcatttc

SEQ ID NO: 3516747 - DNA, 25 bp, Homo sapien
tgcactccctatactttacccaagg

SEQ ID NO: 3516748 - DNA, 25 bp, Homo sapien
tcatttcatgctagaaccatgggaa

SEQ ID NO: 3516749 - DNA, 25 bp, Homo sapien
tagttctaaccattgcaatttaagc

SEQ ID NO: 3516750 - DNA, 25 bp, Homo sapien
gaaataacattaccatactaaccag

SEQ ID NO: 3516751 - DNA, 25 bp, Homo sapien
caagacagaatttgctcagttacca

SEQ ID NO: 3516752 - DNA, 25 bp, Homo sapien
tctagcacttctacaggcttaggca

SEQ ID NO: 3516753 - DNA, 25 bp, Homo sapien
ctcttattctagcttattaaaaggg

SEQ ID NO: 3516754 - DNA, 25 bp, Homo sapien
cactgaaaaccacaagatatggaag

SEQ ID NO: 3516755 - DNA, 25 bp, Homo sapien
aagctgatgggaataaactgcaggt

SEQ ID NO: 3516756 - DNA, 25 bp, Homo sapien
aaagcagacggcgaatattttgtca

SEQ ID NO: 3516757 - DNA, 25 bp, Homo sapien
cctcaagcagatgagattcaggtaa

SEQ ID NO: 3516758 - DNA, 25 bp, Homo sapien
tcagcacttgggggcaagttctaca

SEQ ID NO: 3516759 - DNA, 25 bp, Homo sapien
cagcacttgggggcaagttctacag

SEQ ID NO: 3516760 - DNA, 25 bp, Homo sapien
ctccatagctatcccgtgaagaatg

SEQ ID NO: 3516761 - DNA, 25 bp, Homo sapien
tatgtaccgattttctccatagcta

SEQ ID NO: 3516762 - DNA, 25 bp, Homo sapien
ttctctccttatgtaccgattttct

SEQ ID NO: 3516763 - DNA, 25 bp, Homo sapien
tagctatcccgtgaagaatgggctc

SEQ ID NO: 3516764 - DNA, 25 bp, Homo sapien
taactgctatgaagatggacactca

SEQ ID NO: 3516765 - DNA, 25 bp, Homo sapien
gatgctcagcttagggcgtccatga

SEQ ID NO: 3516766 - DNA, 25 bp, Homo sapien
caatacctgatcagaagggagctgg

SEQ ID NO: 3516767 - DNA, 25 bp, Homo sapien
tatgaaagcactggcaggctctaca

SEQ ID NO: 3516768 - DNA, 25 bp, Homo sapien
caagttcagggataaggcaaatata

SEQ ID NO: 3516769 - DNA, 25 bp, Homo sapien
gggataaggcaaatatacattcttg

SEQ ID NO: 3516770 - DNA, 25 bp, Homo sapien
tatacattcttgttcccgaaaacat

SEQ ID NO: 3516771 - DNA, 25 bp, Homo sapien
cttgttcccgaaaacatcccaggca

SEQ ID NO: 3516772 - DNA, 25 bp, Homo sapien
tcagcacagatgaggtagggttggg

SEQ ID NO: 3516773 - DNA, 25 bp, Homo sapien
gaactagttcatgtggaaaatgcaa

SEQ ID NO: 3516774 - DNA, 25 bp, Homo sapien
atgtcatgcctaacctgggcttcag

SEQ ID NO: 3516775 - DNA, 25 bp, Homo sapien
gggctgcaatgtcatgcctaacctg

SEQ ID NO: 3516776 - DNA, 25 bp, Homo sapien
ttccatccgagccaagtgttctcca

SEQ ID NO: 3516777 - DNA, 25 bp, Homo sapien
tccatccgagccaagtgttctccaa

SEQ ID NO: 3516778 - DNA, 25 bp, Homo sapien
ccatccgagccaagtgttctccaag

SEQ ID NO: 3516779 - DNA, 25 bp, Homo sapien
catccgagccaagtgttctccaaga

SEQ ID NO: 3516780 - DNA, 25 bp, Homo sapien
ccttcttggcaaaatatccactgct

SEQ ID NO: 3516781 - DNA, 25 bp, Homo sapien
actgctgtccagaaatcgctcagga

SEQ ID NO: 3516782 - DNA, 25 bp, Homo sapien
ggcaaaatatccactgctgtccaga

SEQ ID NO: 3516783 - DNA, 25 bp, Homo sapien
aaatcgctcaggatggaacacttct

SEQ ID NO: 3516784 - DNA, 25 bp, Homo sapien
tagggcccataattaaatcaatctc

SEQ ID NO: 3516785 - DNA, 25 bp, Homo sapien
tcttaaaacttcatgcaaaactgcc

SEQ ID NO: 3516786 - DNA, 25 bp, Homo sapien
tggaataaccacgtacaactgcatc

SEQ ID NO: 3516787 - DNA, 25 bp, Homo sapien
tttgcatttgtcgtcccaagaaggc

SEQ ID NO: 3516788 - DNA, 25 bp, Homo sapien
aaagtattcaagttattatgcagtt

SEQ ID NO: 3516789 - DNA, 25 bp, Homo sapien
gaaaaagtattcaagttattatgca

SEQ ID NO: 3516790 - DNA, 25 bp, Homo sapien
aaaaagtattcaagttattatgcag

SEQ ID NO: 3516791 - DNA, 25 bp, Homo sapien
gagaaaaagtattcaagttattatg

SEQ ID NO: 3516792 - DNA, 25 bp, Homo sapien
acagtagccagtgctctgataacct

SEQ ID NO: 3516793 - DNA, 25 bp, Homo sapien
ccagtgctctgataacctataacaa

SEQ ID NO: 3516794 - DNA, 25 bp, Homo sapien
cagtagccagtgctctgataaccta

SEQ ID NO: 3516795 - DNA, 25 bp, Homo sapien
tagccagtgctctgataacctataa

SEQ ID NO: 3516796 - DNA, 25 bp, Homo sapien
gcccaccgtagcacattggttgtag

SEQ ID NO: 3516797 - DNA, 25 bp, Homo sapien
gccatgaaaagaatcgcccaccgta

SEQ ID NO: 3516798 - DNA, 25 bp, Homo sapien
cttgaatattaggataaagggccat

SEQ ID NO: 3516799 - DNA, 25 bp, Homo sapien
ggttgtagtttcagttccagcaatg

SEQ ID NO: 3516800 - DNA, 25 bp, Homo sapien
aaaggcattatacaagaagactgag

SEQ ID NO: 3516801 - DNA, 25 bp, Homo sapien
gccaatccatggaaaggcattatac

SEQ ID NO: 3516802 - DNA, 25 bp, Homo sapien
gcattatacaagaagactgaggcac

SEQ ID NO: 3516803 - DNA, 25 bp, Homo sapien
ccaatccatggaaaggcattataca

SEQ ID NO: 3516804 - DNA, 25 bp, Homo sapien
gaaaatcggtgtcttcataagtgaa

SEQ ID NO: 3516805 - DNA, 25 bp, Homo sapien
cagctaatcgtctgtgatcaaccca

SEQ ID NO: 3516806 - DNA, 25 bp, Homo sapien
cactaaataactcaatcatgtgctg

SEQ ID NO: 3516807 - DNA, 25 bp, Homo sapien
tggttatgtttgaaacagcattcgt

SEQ ID NO: 3516808 - DNA, 25 bp, Homo sapien
tatagggtagtcagcaaaatgctca

SEQ ID NO: 3516809 - DNA, 25 bp, Homo sapien
tacacaagaaggtacagaggagcac

SEQ ID NO: 3516810 - DNA, 25 bp, Homo sapien
ggtgccaagatgaaaccagccctag

SEQ ID NO: 3516811 - DNA, 25 bp, Homo sapien
aaaaccctacactggccaagctgtg

SEQ ID NO: 3516812 - DNA, 25 bp, Homo sapien
agcaatggggaaaagattccctatt

SEQ ID NO: 3516813 - DNA, 25 bp, Homo sapien
gacgaacctgagaaaaataagcaat

SEQ ID NO: 3516814 - DNA, 25 bp, Homo sapien
tttgacgaacctgagaaaaataagc

SEQ ID NO: 3516815 - DNA, 25 bp, Homo sapien
ccccatcaacaagtgggcgaaggac

SEQ ID NO: 3516816 - DNA, 25 bp, Homo sapien
ttttgtcatcttcatgaataaagga

SEQ ID NO: 3516817 - DNA, 25 bp, Homo sapien
catcttcatgaataaaggaaggcat

SEQ ID NO: 3516818 - DNA, 25 bp, Homo sapien
gtcatcttcatgaataaaggaaggc

SEQ ID NO: 3516819 - DNA, 25 bp, Homo sapien
ctcccatttttgtcatcttcatgaa

SEQ ID NO: 3516820 - DNA, 25 bp, Homo sapien
ttcgctttgatgaacaaggcattcc

SEQ ID NO: 3516821 - DNA, 25 bp, Homo sapien
tctgtctgcaaaaatttcgctttga

SEQ ID NO: 3516822 - DNA, 25 bp, Homo sapien
catttagaaccacagttgatatgcc

SEQ ID NO: 3516823 - DNA, 25 bp, Homo sapien
aaggcattcctttactacatcatag

SEQ ID NO: 3516824 - DNA, 25 bp, Homo sapien
ccagtcagtgagagaacgatattcc

SEQ ID NO: 3516825 - DNA, 25 bp, Homo sapien
gagacaagccttatccctgtgcaaa

SEQ ID NO: 3516826 - DNA, 25 bp, Homo sapien
gggaaaagaacatggactgcctgcc

SEQ ID NO: 3516827 - DNA, 25 bp, Homo sapien
tagttaacccaatataagaggccag

SEQ ID NO: 3516828 - DNA, 25 bp, Homo sapien
taccaggataaagatcaaatgccgc

SEQ ID NO: 3516829 - DNA, 25 bp, Homo sapien
catggttccctcaaacagtggtacc

SEQ ID NO: 3516830 - DNA, 25 bp, Homo sapien
caaatgccgctgtagcctagagtta

SEQ ID NO: 3516831 - DNA, 25 bp, Homo sapien
cattgcagctagtaacagtttggcc

SEQ ID NO: 3516832 - DNA, 25 bp, Homo sapien
ctttattatctcgtccagcttccct

SEQ ID NO: 3516833 - DNA, 25 bp, Homo sapien
attatctcgtccagcttccctttaa

SEQ ID NO: 3516834 - DNA, 25 bp, Homo sapien
ttattatctcgtccagcttcccttt

SEQ ID NO: 3516835 - DNA, 25 bp, Homo sapien
tatctcgtccagcttccctttaaca

SEQ ID NO: 3516836 - DNA, 25 bp, Homo sapien
tgaaccatgaaaggaacgtaaacca

SEQ ID NO: 3516837 - DNA, 25 bp, Homo sapien
catgaaaggaacgtaaaccattagt

SEQ ID NO: 3516838 - DNA, 25 bp, Homo sapien
ttcgtgaaccatgaaaggaacgtaa

SEQ ID NO: 3516839 - DNA, 25 bp, Homo sapien
ccatgaaaggaacgtaaaccattag

SEQ ID NO: 3516840 - DNA, 25 bp, Homo sapien
accgcgcccgggcacctagaccaat

SEQ ID NO: 3516841 - DNA, 25 bp, Homo sapien
gcgcccgggcacctagaccaatcct

SEQ ID NO: 3516842 - DNA, 25 bp, Homo sapien
gggcacctagaccaatccttgtaaa

SEQ ID NO: 3516843 - DNA, 25 bp, Homo sapien
ccgggcacctagaccaatccttgta

SEQ ID NO: 3516844 - DNA, 25 bp, Homo sapien
agctctgtcccaggacccgtggaaa

SEQ ID NO: 3516845 - DNA, 25 bp, Homo sapien
cagcctgtggccgataatgagatta

SEQ ID NO: 3516846 - DNA, 25 bp, Homo sapien
gcgtcaggcctgtagttgcatataa

SEQ ID NO: 3516847 - DNA, 25 bp, Homo sapien
ttcttcaccgctagcgtcaggcctg

SEQ ID NO: 3516848 - DNA, 25 bp, Homo sapien
tcaccggctggttatgagttttaaa

SEQ ID NO: 3516849 - DNA, 25 bp, Homo sapien
ggtggtcgccttttccgctgccagt

SEQ ID NO: 3516850 - DNA, 25 bp, Homo sapien
tatctgctaaggtgccgttcccagc

SEQ ID NO: 3516851 - DNA, 25 bp, Homo sapien
gaaggcgccttttaagtatctgcta

SEQ ID NO: 3516852 - DNA, 25 bp, Homo sapien
cccccgcagcggattttagtcatca

SEQ ID NO: 3516853 - DNA, 25 bp, Homo sapien
gcgttcacaatcgtttcccagggcc

SEQ ID NO: 3516854 - DNA, 25 bp, Homo sapien
tcatcaattcattcacgcgttcaca

SEQ ID NO: 3516855 - DNA, 25 bp, Homo sapien
acagcaaacgcctacaccagtcgtt

SEQ ID NO: 3516856 - DNA, 25 bp, Homo sapien
tagaactcagaacgccttgattttc

SEQ ID NO: 3516857 - DNA, 25 bp, Homo sapien
gctgcgaggccgactcgcaagacgc

SEQ ID NO: 3516858 - DNA, 25 bp, Homo sapien
gccgcgtgcagcttccacagagctg

SEQ ID NO: 3516859 - DNA, 25 bp, Homo sapien
ttgattttccgacaagccgcgtgca

SEQ ID NO: 3516860 - DNA, 25 bp, Homo sapien
agctcgagcggtagcgggaaaatca

SEQ ID NO: 3516861 - DNA, 25 bp, Homo sapien
caggcgcaggagcaagagctcgagc

SEQ ID NO: 3516862 - DNA, 25 bp, Homo sapien
tcaggactggatcgcctcggagcct

SEQ ID NO: 3516863 - DNA, 25 bp, Homo sapien
ctgagggcatgcgtccaccctggac

SEQ ID NO: 3516864 - DNA, 25 bp, Homo sapien
agccggcacacggagaggtcccgac

SEQ ID NO: 3516865 - DNA, 25 bp, Homo sapien
gcggccataagtccaaccaggaagg

SEQ ID NO: 3516866 - DNA, 25 bp, Homo sapien
gagaggtcccgactagtcggcccag

SEQ ID NO: 3516867 - DNA, 25 bp, Homo sapien
gcgtcgaggacttctcccttccaga

SEQ ID NO: 3516868 - DNA, 25 bp, Homo sapien
cagggaatagatgttgccgataaat

SEQ ID NO: 3516869 - DNA, 25 bp, Homo sapien
ttgccgataaatggcagccccggcg

SEQ ID NO: 3516870 - DNA, 25 bp, Homo sapien
tcatgtagacatggggaagctcgga

SEQ ID NO: 3516871 - DNA, 25 bp, Homo sapien
tggcggacccctagcgcgaagagca

SEQ ID NO: 3516872 - DNA, 25 bp, Homo sapien
ggaggttgtccacctctcagagtga

SEQ ID NO: 3516873 - DNA, 25 bp, Homo sapien
aacaacctgggcctgtatctgggta

SEQ ID NO: 3516874 - DNA, 25 bp, Homo sapien
gtgtcatttgtggaggttgtccacc

SEQ ID NO: 3516875 - DNA, 25 bp, Homo sapien
tgtatcttgggtcatcacactcaga

SEQ ID NO: 3516876 - DNA, 25 bp, Homo sapien
agccttatccaaatgctctgggcca

SEQ ID NO: 3516877 - DNA, 25 bp, Homo sapien
gctccagaccgcctctgttgcagag

SEQ ID NO: 3516878 - DNA, 25 bp, Homo sapien
cctctgttgcagagccttatccaaa

SEQ ID NO: 3516879 - DNA, 25 bp, Homo sapien
aggcctgctccagaccgcctctgtt

SEQ ID NO: 3516880 - DNA, 25 bp, Homo sapien
caaagcaagttgtatggccacgctc

SEQ ID NO: 3516881 - DNA, 25 bp, Homo sapien
gaccatatgctactccaagaaaaag

SEQ ID NO: 3516882 - DNA, 25 bp, Homo sapien
gtttgtctgacctcagctgcgctga

SEQ ID NO: 3516883 - DNA, 25 bp, Homo sapien
gtttccattcctgtatccaggctga

SEQ ID NO: 3516884 - DNA, 25 bp, Homo sapien
cattttgatgttgtaagcctggagc

SEQ ID NO: 3516885 - DNA, 25 bp, Homo sapien
gatgttgtaagcctggagcctcaaa

SEQ ID NO: 3516886 - DNA, 25 bp, Homo sapien
aagaccattttgatgttgtaagcct

SEQ ID NO: 3516887 - DNA, 25 bp, Homo sapien
gcctggagcctcaaatcttgagtct

SEQ ID NO: 3516888 - DNA, 25 bp, Homo sapien
tcaattcggcaaatggccacaatac

SEQ ID NO: 3516889 - DNA, 25 bp, Homo sapien
tctctagccttgacaagagcagccc

SEQ ID NO: 3516890 - DNA, 25 bp, Homo sapien
catccatccaatgtgtttttggacc

SEQ ID NO: 3516891 - DNA, 25 bp, Homo sapien
tcccagaagtctccttcatacgtgc

SEQ ID NO: 3516892 - DNA, 25 bp, Homo sapien
cccaagaggcagtgatttcatgtcc

SEQ ID NO: 3516893 - DNA, 25 bp, Homo sapien
cagcattaccatgtgtccccagatg

SEQ ID NO: 3516894 - DNA, 25 bp, Homo sapien
gataagccaatgagacatgctgtca

SEQ ID NO: 3516895 - DNA, 25 bp, Homo sapien
accaatgtcaatagggtggctgacg

SEQ ID NO: 3516896 - DNA, 25 bp, Homo sapien
ctcagcaagcctgccagccgatgag

SEQ ID NO: 3516897 - DNA, 25 bp, Homo sapien
caaaggctttggaacccacattggt

SEQ ID NO: 3516898 - DNA, 25 bp, Homo sapien
ctttggaacccacattggtgggcac

SEQ ID NO: 3516899 - DNA, 25 bp, Homo sapien
ccgatgagtcacacaggtggcagtg

SEQ ID NO: 3516900 - DNA, 25 bp, Homo sapien
atttgcaggatggagaaagaagaga

SEQ ID NO: 3516901 - DNA, 25 bp, Homo sapien
tttgcaggatggagaaagaagagaa

SEQ ID NO: 3516902 - DNA, 25 bp, Homo sapien
gcaggatggagaaagaagagaagat

SEQ ID NO: 3516903 - DNA, 25 bp, Homo sapien
ctgatttgcaggatggagaaagaag

SEQ ID NO: 3516904 - DNA, 25 bp, Homo sapien
caaggtgactctggatgactggcta

SEQ ID NO: 3516905 - DNA, 25 bp, Homo sapien
tataaaatctacaccccagtcacgg

SEQ ID NO: 3516906 - DNA, 25 bp, Homo sapien
gtttgcagcatcaagtcctagaggt

SEQ ID NO: 3516907 - DNA, 25 bp, Homo sapien
tatggaatgtggagcagtaacagcc

SEQ ID NO: 3516908 - DNA, 25 bp, Homo sapien
gagacatcctctgccacaaggaaag

SEQ ID NO: 3516909 - DNA, 25 bp, Homo sapien
ccacatgcatcaagttataggaagg

SEQ ID NO: 3516910 - DNA, 25 bp, Homo sapien
caaagcggccctcattttctggtat

SEQ ID NO: 3516911 - DNA, 25 bp, Homo sapien
gaggagctctgatgacatctctggg

SEQ ID NO: 3516912 - DNA, 25 bp, Homo sapien
agttggcattctggggcatgctaac

SEQ ID NO: 3516913 - DNA, 25 bp, Homo sapien
ttagttggcattctggggcatgcta

SEQ ID NO: 3516914 - DNA, 25 bp, Homo sapien
tagttggcattctggggcatgctaa

SEQ ID NO: 3516915 - DNA, 25 bp, Homo sapien
tttccaggtgctccaaccccaattg

SEQ ID NO: 3516916 - DNA, 25 bp, Homo sapien
gcaagtactcagattaccgcaccgc

SEQ ID NO: 3516917 - DNA, 25 bp, Homo sapien
tcctgcgtgtatgtgcccagcatgc

SEQ ID NO: 3516918 - DNA, 25 bp, Homo sapien
tgagggcgatggtctctctccaagt

SEQ ID NO: 3516919 - DNA, 25 bp, Homo sapien
cagggaaaacacataccagacagta

SEQ ID NO: 3516920 - DNA, 25 bp, Homo sapien
gaaaacacataccagacagtaccat

SEQ ID NO: 3516921 - DNA, 25 bp, Homo sapien
gggaaaacacataccagacagtacc

SEQ ID NO: 3516922 - DNA, 25 bp, Homo sapien
tgcagggaaaacacataccagacag

SEQ ID NO: 3516923 - DNA, 25 bp, Homo sapien
ctcgggatccaccttcctgtgtatg

SEQ ID NO: 3516924 - DNA, 25 bp, Homo sapien
ctctcgggatccaccttcctgtgta

SEQ ID NO: 3516925 - DNA, 25 bp, Homo sapien
tctcgggatccaccttcctgtgtat

SEQ ID NO: 3516926 - DNA, 25 bp, Homo sapien
tctgcacatagttctgcaccagtgc

SEQ ID NO: 3516927 - DNA, 25 bp, Homo sapien
gcacatagttctgcaccagtgcagc

SEQ ID NO: 3516928 - DNA, 25 bp, Homo sapien
gcaggaggcgcgcttcgtcctcact

SEQ ID NO: 3516929 - DNA, 25 bp, Homo sapien
ctcactgagcgtggccgggtctgct

SEQ ID NO: 3516930 - DNA, 25 bp, Homo sapien
tgcctgcaacaggaccaagatgctg

SEQ ID NO: 3516931 - DNA, 25 bp, Homo sapien
ctgaatggtgctgcatggaggctgc

SEQ ID NO: 3516932 - DNA, 25 bp, Homo sapien
aggctgcctgcctgcaacaggacca

SEQ ID NO: 3516933 - DNA, 25 bp, Homo sapien
caacaggaccaagatgctgagagcc

SEQ ID NO: 3516934 - DNA, 25 bp, Homo sapien
tgagtgtcccgagactggcctaagc

SEQ ID NO: 3516935 - DNA, 25 bp, Homo sapien
tatttgccacccatccgctctgttc

SEQ ID NO: 3516936 - DNA, 25 bp, Homo sapien
gtccctgatcgcaccgtctgcggaa

SEQ ID NO: 3516937 - DNA, 25 bp, Homo sapien
ctcaggctctgtgcgcggtccctgg

SEQ ID NO: 3516938 - DNA, 25 bp, Homo sapien
ggaggtggcttggatcagaggcggt

SEQ ID NO: 3516939 - DNA, 25 bp, Homo sapien
ggcgggaggtggcttggatcagagg

SEQ ID NO: 3516940 - DNA, 25 bp, Homo sapien
cgggaggtggcttggatcagaggcg

SEQ ID NO: 3516941 - DNA, 25 bp, Homo sapien
tggcttggatcagaggcggtggcag

SEQ ID NO: 3516942 - DNA, 25 bp, Homo sapien
aggatccagcaggaccgtcccactt

SEQ ID NO: 3516943 - DNA, 25 bp, Homo sapien
cagcaggaccgtcccacttgtattt

SEQ ID NO: 3516944 - DNA, 25 bp, Homo sapien
tggtgggggcaccaacaagtaacgc

SEQ ID NO: 3516945 - DNA, 25 bp, Homo sapien
ccacttgtatttgcattgaggtcat

SEQ ID NO: 3516946 - DNA, 25 bp, Homo sapien
tttccgaatctccatctccccggac

SEQ ID NO: 3516947 - DNA, 25 bp, Homo sapien
tgtcccggggtactcttcagatcca

SEQ ID NO: 3516948 - DNA, 25 bp, Homo sapien
cggactgtcccggggtactcttcag

SEQ ID NO: 3516949 - DNA, 25 bp, Homo sapien
ggagggggccgatgacctgctgggc

SEQ ID NO: 3516950 - DNA, 25 bp, Homo sapien
caagaaagaagcttttcagcgtctc

SEQ ID NO: 3516951 - DNA, 25 bp, Homo sapien
gaaagaagcttttcagcgtctccac

SEQ ID NO: 3516952 - DNA, 25 bp, Homo sapien
gcaagaaagaagcttttcagcgtct

SEQ ID NO: 3516953 - DNA, 25 bp, Homo sapien
gcttgccgcccacagcgtccagagt

SEQ ID NO: 3516954 - DNA, 25 bp, Homo sapien
catctcccggtggaacgcgcagcgc

SEQ ID NO: 3516955 - DNA, 25 bp, Homo sapien
gaacgcgcagcgcgcgatctgctgc

SEQ ID NO: 3516956 - DNA, 25 bp, Homo sapien
acgcgcagcgcgcgatctgctgcag

SEQ ID NO: 3516957 - DNA, 25 bp, Homo sapien
cgctgcctgtgcggtgagcgcagca

SEQ ID NO: 3516958 - DNA, 25 bp, Homo sapien
cacggtgaccgcaaaatgaaagcca

SEQ ID NO: 3516959 - DNA, 25 bp, Homo sapien
ccagtagacgcagattttgtggcca

SEQ ID NO: 3516960 - DNA, 25 bp, Homo sapien
tgcttgaagagttgcgaaggccgca

SEQ ID NO: 3516961 - DNA, 25 bp, Homo sapien
gagttcatagctttcgcccgtgcca

SEQ ID NO: 3516962 - DNA, 25 bp, Homo sapien
ttagactttcctcctgcacagcctc

SEQ ID NO: 3516963 - DNA, 25 bp, Homo sapien
tccacagggcactttgaatgcccct

SEQ ID NO: 3516964 - DNA, 25 bp, Homo sapien
cctccacagggcactttgaatgccc

SEQ ID NO: 3516965 - DNA, 25 bp, Homo sapien
acagggcactttgaatgcccctgtt

SEQ ID NO: 3516966 - DNA, 25 bp, Homo sapien
aacactgatgccaccacaccattcc

SEQ ID NO: 3516967 - DNA, 25 bp, Homo sapien
aagcaaacaattgccaggtgagagc

SEQ ID NO: 3516968 - DNA, 25 bp, Homo sapien
aaaataagcaaacaattgccaggtg

SEQ ID NO: 3516969 - DNA, 25 bp, Homo sapien
aataagcaaacaattgccaggtgag

SEQ ID NO: 3516970 - DNA, 25 bp, Homo sapien
taaatgtatgaatatgttactgatg

SEQ ID NO: 3516971 - DNA, 25 bp, Homo sapien
aacaatccagttgtgcagctaggaa

SEQ ID NO: 3516972 - DNA, 25 bp, Homo sapien
cagttgtgcagctaggaatccaaca

SEQ ID NO: 3516973 - DNA, 25 bp, Homo sapien
tatgttactgatgacagtcagaaca

SEQ ID NO: 3516974 - DNA, 25 bp, Homo sapien
cacagtcaggagcatgtcatctata

SEQ ID NO: 3516975 - DNA, 25 bp, Homo sapien
ggccatcacagtcaggagcatgtca

SEQ ID NO: 3516976 - DNA, 25 bp, Homo sapien
gccatcacagtcaggagcatgtcat

SEQ ID NO: 3516977 - DNA, 25 bp, Homo sapien
catcacagtcaggagcatgtcatct

SEQ ID NO: 3516978 - DNA, 25 bp, Homo sapien
gaaaggtatctgtgtcagacagcct

SEQ ID NO: 3516979 - DNA, 25 bp, Homo sapien
aaagaaaggtatctgtgtcagacag

SEQ ID NO: 3516980 - DNA, 25 bp, Homo sapien
aggtatctgtgtcagacagcctgca

SEQ ID NO: 3516981 - DNA, 25 bp, Homo sapien
caaagaaaggtatctgtgtcagaca

SEQ ID NO: 3516982 - DNA, 25 bp, Homo sapien
aggaacagcccagcaaggagtggct

SEQ ID NO: 3516983 - DNA, 25 bp, Homo sapien
tggataggaacagcccagcaaggag

SEQ ID NO: 3516984 - DNA, 25 bp, Homo sapien
aacagcccagcaaggagtggctgca

SEQ ID NO: 3516985 - DNA, 25 bp, Homo sapien
cagcccagcaaggagtggctgcagt

SEQ ID NO: 3516986 - DNA, 25 bp, Homo sapien
ctgtggctctgtgtgacttggacac

SEQ ID NO: 3516987 - DNA, 25 bp, Homo sapien
gattctgtggctctgtgtgacttgg

SEQ ID NO: 3516988 - DNA, 25 bp, Homo sapien
ttctgtggctctgtgtgacttggac

SEQ ID NO: 3516989 - DNA, 25 bp, Homo sapien
agattctgtggctctgtgtgacttg

SEQ ID NO: 3516990 - DNA, 25 bp, Homo sapien
aaaaaccaggacttaatgttgtgtg

SEQ ID NO: 3516991 - DNA, 25 bp, Homo sapien
cttaatgttgtgtgtatatttcgga

SEQ ID NO: 3516992 - DNA, 25 bp, Homo sapien
ccaggacttaatgttgtgtgtatat

SEQ ID NO: 3516993 - DNA, 25 bp, Homo sapien
gacttaatgttgtgtgtatatttcg

SEQ ID NO: 3516994 - DNA, 25 bp, Homo sapien
aactatcctaaatatatatgcaccc

SEQ ID NO: 3516995 - DNA, 25 bp, Homo sapien
ggtaaagggatcaatgcatcaagaa

SEQ ID NO: 3516996 - DNA, 25 bp, Homo sapien
ctaactatcctaaatatatatgcac

SEQ ID NO: 3516997 - DNA, 25 bp, Homo sapien
agggatcaatgcatcaagaagagct

SEQ ID NO: 3516998 - DNA, 25 bp, Homo sapien
taaaggatgccaagggcaggttcat

SEQ ID NO: 3516999 - DNA, 25 bp, Homo sapien
aaacaatctcgggataaaggatgcc

SEQ ID NO: 3517000 - DNA, 25 bp, Homo sapien
caatctcgggataaaggatgccaag

SEQ ID NO: 3517001 - DNA, 25 bp, Homo sapien
ccaagggcaggttcatgatcttcct

SEQ ID NO: 3517002 - DNA, 25 bp, Homo sapien
gatgcactccagtccgttgagagtt

SEQ ID NO: 3517003 - DNA, 25 bp, Homo sapien
tccagtccgttgagagttttatagt

SEQ ID NO: 3517004 - DNA, 25 bp, Homo sapien
gcactccagtccgttgagagtttta

SEQ ID NO: 3517005 - DNA, 25 bp, Homo sapien
cactccagtccgttgagagttttat

SEQ ID NO: 3517006 - DNA, 25 bp, Homo sapien
tccttcccacagtaggaggaacgaa

SEQ ID NO: 3517007 - DNA, 25 bp, Homo sapien
taggaggaacgaattatctgctgga

SEQ ID NO: 3517008 - DNA, 25 bp, Homo sapien
gacagagatcctggacctttctctc

SEQ ID NO: 3517009 - DNA, 25 bp, Homo sapien
tggagacagagatcctggacctttc

SEQ ID NO: 3517010 - DNA, 25 bp, Homo sapien
gaacatagcagcagtcgtaacttta

SEQ ID NO: 3517011 - DNA, 25 bp, Homo sapien
ctttagtaggggcaggataatgaca

SEQ ID NO: 3517012 - DNA, 25 bp, Homo sapien
gataatgacaataaagagtgggctt

SEQ ID NO: 3517013 - DNA, 25 bp, Homo sapien
tagcagcagtcgtaactttagtagg

SEQ ID NO: 3517014 - DNA, 25 bp, Homo sapien
gaactactgggctaccagttctgcc

SEQ ID NO: 3517015 - DNA, 25 bp, Homo sapien
cactaggcagccatttatctgggct

SEQ ID NO: 3517016 - DNA, 25 bp, Homo sapien
gacacagaagtctcccctagaattg

SEQ ID NO: 3517017 - DNA, 25 bp, Homo sapien
gctcccaagtgaaggccgccttggt

SEQ ID NO: 3517018 - DNA, 25 bp, Homo sapien
ctggagtttccattgcacgggtgct

SEQ ID NO: 3517019 - DNA, 25 bp, Homo sapien
tctgacccgcagaaacagtgagcat

SEQ ID NO: 3517020 - DNA, 25 bp, Homo sapien
agttttcccgaatgctctccaggag

SEQ ID NO: 3517021 - DNA, 25 bp, Homo sapien
cagtctagacgtagagaaccttcgc

SEQ ID NO: 3517022 - DNA, 25 bp, Homo sapien
tcagaaaagatggataggccgagtt

SEQ ID NO: 3517023 - DNA, 25 bp, Homo sapien
gttagtttgggttcctgcgcacgct

SEQ ID NO: 3517024 - DNA, 25 bp, Homo sapien
tgagggcgcatctgttccagtgagt

SEQ ID NO: 3517025 - DNA, 25 bp, Homo sapien
tgcgcacgctcccttttcggagcag

SEQ ID NO: 3517026 - DNA, 25 bp, Homo sapien
gctctcaggcgcttcagcgaagtgg

SEQ ID NO: 3517027 - DNA, 25 bp, Homo sapien
gccatgtgagtgatgatgcgcgcac

SEQ ID NO: 3517028 - DNA, 25 bp, Homo sapien
gagagatagagacccgggcatagac

SEQ ID NO: 3517029 - DNA, 25 bp, Homo sapien
ctggtctgtagtcgcgagtggaact

SEQ ID NO: 3517030 - DNA, 25 bp, Homo sapien
tctagtcgccaggtgaggaacttcc

SEQ ID NO: 3517031 - DNA, 25 bp, Homo sapien
ggattcgggtccctcactggcgtga

SEQ ID NO: 3517032 - DNA, 25 bp, Homo sapien
gacttgccccgactcttagttgaaa

SEQ ID NO: 3517033 - DNA, 25 bp, Homo sapien
gcagctgtgtaagccaacttcggcg

SEQ ID NO: 3517034 - DNA, 25 bp, Homo sapien
agcggttagggttgtcctggcagtt

SEQ ID NO: 3517035 - DNA, 25 bp, Homo sapien
ttccaggccccgtagaaggcgagcg

SEQ ID NO: 3517036 - DNA, 25 bp, Homo sapien
tctcttccaggccccgtagaaggcg

SEQ ID NO: 3517037 - DNA, 25 bp, Homo sapien
aaggcgagcggttagggttgtcctg

SEQ ID NO: 3517038 - DNA, 25 bp, Homo sapien
gagcatgtttcgttcccgggaggtc

SEQ ID NO: 3517039 - DNA, 25 bp, Homo sapien
gaggtcggaaccctgagctttcctc

SEQ ID NO: 3517040 - DNA, 25 bp, Homo sapien
gccgtctttgtccttcgggagcatg

SEQ ID NO: 3517041 - DNA, 25 bp, Homo sapien
ctggtgagccttcccgggattccgg

SEQ ID NO: 3517042 - DNA, 25 bp, Homo sapien
taaggcagtgttgttagcggactag

SEQ ID NO: 3517043 - DNA, 25 bp, Homo sapien
gcagtgttgttagcggactagaacc

SEQ ID NO: 3517044 - DNA, 25 bp, Homo sapien
ctaaggcagtgttgttagcggacta

SEQ ID NO: 3517045 - DNA, 25 bp, Homo sapien
tgttgttagcggactagaaccctgg

SEQ ID NO: 3517046 - DNA, 25 bp, Homo sapien
gagacacccgtaactggcacgttaa

SEQ ID NO: 3517047 - DNA, 25 bp, Homo sapien
gctttgcgggcgagtcctgagacac

SEQ ID NO: 3517048 - DNA, 25 bp, Homo sapien
catctgctgctaaaacgcgctccgg

SEQ ID NO: 3517049 - DNA, 25 bp, Homo sapien
gagaaatgagcgctcctttccaatc

SEQ ID NO: 3517050 - DNA, 25 bp, Homo sapien
cgttggcgcgaagcccagcagagga

SEQ ID NO: 3517051 - DNA, 25 bp, Homo sapien
gggagagcaggtctacagcaaggtg

SEQ ID NO: 3517052 - DNA, 25 bp, Homo sapien
ggtctacagcaaggtgcgtccacgc

SEQ ID NO: 3517053 - DNA, 25 bp, Homo sapien
agagcaggtctacagcaaggtgcgt

SEQ ID NO: 3517054 - DNA, 25 bp, Homo sapien
tgcacgggcgcgtgtggcttctccc

SEQ ID NO: 3517055 - DNA, 25 bp, Homo sapien
cagaagtgtctgtttgtgtgcacgg

SEQ ID NO: 3517056 - DNA, 25 bp, Homo sapien
cagctgaagtaacgtgcctaaggtc

SEQ ID NO: 3517057 - DNA, 25 bp, Homo sapien
ggacacctttttccgctctatcaag

SEQ ID NO: 3517058 - DNA, 25 bp, Homo sapien
taatctgagtacctgcttgcagggc

SEQ ID NO: 3517059 - DNA, 25 bp, Homo sapien
cctagatttaagtagcgtatagtaa

SEQ ID NO: 3517060 - DNA, 25 bp, Homo sapien
agtgcatggtactgtctggcatgtc

SEQ ID NO: 3517061 - DNA, 25 bp, Homo sapien
ttcccttgcagcttgagcagtccta

SEQ ID NO: 3517062 - DNA, 25 bp, Homo sapien
tgaaaaactttcatatgttccctgg

SEQ ID NO: 3517063 - DNA, 25 bp, Homo sapien
tcctggcaagaatagggacatagtc

SEQ ID NO: 3517064 - DNA, 25 bp, Homo sapien
tcaacttcgggcctgaaattcctgg

SEQ ID NO: 3517065 - DNA, 25 bp, Homo sapien
tatgaacctgatgcatgtggattcc

SEQ ID NO: 3517066 - DNA, 25 bp, Homo sapien
ttagggctgggagctcctctgatga

SEQ ID NO: 3517067 - DNA, 25 bp, Homo sapien
gtggcttagggctgggagctcctct

SEQ ID NO: 3517068 - DNA, 25 bp, Homo sapien
ctgggagctcctctgatgagtagct

SEQ ID NO: 3517069 - DNA, 25 bp, Homo sapien
cttctgtggcttagggctgggagct

SEQ ID NO: 3517070 - DNA, 25 bp, Homo sapien
agagccaggaatggcccaccctgag

SEQ ID NO: 3517071 - DNA, 25 bp, Homo sapien
tgctgcttggacaagctggagctct

SEQ ID NO: 3517072 - DNA, 25 bp, Homo sapien
gctccttcgggggtgctgcttggac

SEQ ID NO: 3517073 - DNA, 25 bp, Homo sapien
ggtgaagacagccatggctttcctg

SEQ ID NO: 3517074 - DNA, 25 bp, Homo sapien
ggatgtgtattcatataaaccaggt

SEQ ID NO: 3517075 - DNA, 25 bp, Homo sapien
gaggatgtgtattcatataaaccag

SEQ ID NO: 3517076 - DNA, 25 bp, Homo sapien
gatgtgtattcatataaaccaggtg

SEQ ID NO: 3517077 - DNA, 25 bp, Homo sapien
ctagaggatgtgtattcatataaac

SEQ ID NO: 3517078 - DNA, 25 bp, Homo sapien
tttagtatagggtccaaaaatatga

SEQ ID NO: 3517079 - DNA, 25 bp, Homo sapien
ggattccactctcaggagtttctcc

SEQ ID NO: 3517080 - DNA, 25 bp, Homo sapien
cattgatctgaacatctcgttcctg

SEQ ID NO: 3517081 - DNA, 25 bp, Homo sapien
tgatgacctgctctctgagtgttcc

SEQ ID NO: 3517082 - DNA, 25 bp, Homo sapien
ttctaggactgttaccgtgaaaggc

SEQ ID NO: 3517083 - DNA, 25 bp, Homo sapien
tctaggactgttaccgtgaaaggca

SEQ ID NO: 3517084 - DNA, 25 bp, Homo sapien
atttctaggactgttaccgtgaaag

SEQ ID NO: 3517085 - DNA, 25 bp, Homo sapien
gctccctctgttgattgggtcctac

SEQ ID NO: 3517086 - DNA, 25 bp, Homo sapien
ctccttttaagccttcatatcagtt

SEQ ID NO: 3517087 - DNA, 25 bp, Homo sapien
gagaaggcacaagggcatatcatgg

SEQ ID NO: 3517088 - DNA, 25 bp, Homo sapien
ctcaattatgttggcatatttctcc

SEQ ID NO: 3517089 - DNA, 25 bp, Homo sapien
tgcccacagtctgcagttctgagac

SEQ ID NO: 3517090 - DNA, 25 bp, Homo sapien
ttggcgccagtagactgcccacagt

SEQ ID NO: 3517091 - DNA, 25 bp, Homo sapien
tcagatcccttcagaggttggcgcc

SEQ ID NO: 3517092 - DNA, 25 bp, Homo sapien
ccttcagaggttggcgccagtagac

SEQ ID NO: 3517093 - DNA, 25 bp, Homo sapien
ttaagcatctgttgtaagatctccc

SEQ ID NO: 3517094 - DNA, 25 bp, Homo sapien
ctctggaaccctgcatctacttgtt

SEQ ID NO: 3517095 - DNA, 25 bp, Homo sapien
acctctggaaccctgcatctacttg

SEQ ID NO: 3517096 - DNA, 25 bp, Homo sapien
tgtaagatctcccacctctggaacc

SEQ ID NO: 3517097 - DNA, 25 bp, Homo sapien
gtccaagatcaacccgcagttccat

SEQ ID NO: 3517098 - DNA, 25 bp, Homo sapien
tggatgtgtccaagatcaacccgca

SEQ ID NO: 3517099 - DNA, 25 bp, Homo sapien
gagctttctgagtctctcagaccct

SEQ ID NO: 3517100 - DNA, 25 bp, Homo sapien
agtcttgcctgccttagaggccagg

SEQ ID NO: 3517101 - DNA, 25 bp, Homo sapien
caaatccatcccacatggatgggtg

SEQ ID NO: 3517102 - DNA, 25 bp, Homo sapien
tatgagctctatgccaacgcataat

SEQ ID NO: 3517103 - DNA, 25 bp, Homo sapien
agcaggatggtgtaccccagactcc

SEQ ID NO: 3517104 - DNA, 25 bp, Homo sapien
taatcagtgcccctttatgagctct

SEQ ID NO: 3517105 - DNA, 25 bp, Homo sapien
caaccatcatctttggggcacccat

SEQ ID NO: 3517106 - DNA, 25 bp, Homo sapien
cattacagaagcctcgatgaacagt

SEQ ID NO: 3517107 - DNA, 25 bp, Homo sapien
gccttcatggatcttgcagtcaaca

SEQ ID NO: 3517108 - DNA, 25 bp, Homo sapien
ggcacccattctgtgtggcattaca

SEQ ID NO: 3517109 - DNA, 25 bp, Homo sapien
taccaagtgtgactgaagtgcaaga

SEQ ID NO: 3517110 - DNA, 25 bp, Homo sapien
cttttcaaatttgttaccaagtgtg

SEQ ID NO: 3517111 - DNA, 25 bp, Homo sapien
cagccttgagggcaaacgtttccct

SEQ ID NO: 3517112 - DNA, 25 bp, Homo sapien
tgaggcacgtgaggcaccctctttc

SEQ ID NO: 3517113 - DNA, 25 bp, Homo sapien
tgcaactttccttctgctgactttt

SEQ ID NO: 3517114 - DNA, 25 bp, Homo sapien
ctgcaactttccttctgctgacttt

SEQ ID NO: 3517115 - DNA, 25 bp, Homo sapien
gctccaggcaataacggcacacagt

SEQ ID NO: 3517116 - DNA, 25 bp, Homo sapien
ggaataaaatcttgtagtgagtgag

SEQ ID NO: 3517117 - DNA, 25 bp, Homo sapien
ccctgggtgtctgtagtactaggca

SEQ ID NO: 3517118 - DNA, 25 bp, Homo sapien
taatttgacatgtgtgctccaggca

SEQ ID NO: 3517119 - DNA, 25 bp, Homo sapien
cccatccaccccttcaggggggcag

SEQ ID NO: 3517120 - DNA, 25 bp, Homo sapien
ccatccaccccttcaggggggcagt

SEQ ID NO: 3517121 - DNA, 25 bp, Homo sapien
gcccatccaccccttcaggggggca

SEQ ID NO: 3517122 - DNA, 25 bp, Homo sapien
tctgtgttcctaacagcaatggatg

SEQ ID NO: 3517123 - DNA, 25 bp, Homo sapien
tatcagcaatttctgtgttcctaac

SEQ ID NO: 3517124 - DNA, 25 bp, Homo sapien
ttcaatatcagcaatttctgtgttc

SEQ ID NO: 3517125 - DNA, 25 bp, Homo sapien
tgttcctaacagcaatggatgtcat

SEQ ID NO: 3517126 - DNA, 25 bp, Homo sapien
tcggcttcaaatagagaaccagaga

SEQ ID NO: 3517127 - DNA, 25 bp, Homo sapien
tgtcactcatgcctatctgcaaggg

SEQ ID NO: 3517128 - DNA, 25 bp, Homo sapien
tgaggccatccccactgataagagt

SEQ ID NO: 3517129 - DNA, 25 bp, Homo sapien
tgcacattgaataggactcagaaga

SEQ ID NO: 3517130 - DNA, 25 bp, Homo sapien
ttccagggcttcaaagtagaatctc

SEQ ID NO: 3517131 - DNA, 25 bp, Homo sapien
ccgtgaatagctcatctttctgcct

SEQ ID NO: 3517132 - DNA, 25 bp, Homo sapien
tgcagagccccgtgaatagctcatc

SEQ ID NO: 3517133 - DNA, 25 bp, Homo sapien
tagaatctcacagccggcgcctctt

SEQ ID NO: 3517134 - DNA, 25 bp, Homo sapien
aatttggaatggcagtgattgactg

SEQ ID NO: 3517135 - DNA, 25 bp, Homo sapien
tactgtaaaaacttctagcgccctc

SEQ ID NO: 3517136 - DNA, 25 bp, Homo sapien
tctagcgccctctaatttggaatgg

SEQ ID NO: 3517137 - DNA, 25 bp, Homo sapien
ctgactcctatttctcctgctgagg

SEQ ID NO: 3517138 - DNA, 25 bp, Homo sapien
ggctgaacagaaagggtggccctcc

SEQ ID NO: 3517139 - DNA, 25 bp, Homo sapien
tatccaatcgagtgaaggctgaaca

SEQ ID NO: 3517140 - DNA, 25 bp, Homo sapien
cacaaattgactaggccacaggatg

SEQ ID NO: 3517141 - DNA, 25 bp, Homo sapien
caggatgcccagacagtaggtagaa

SEQ ID NO: 3517142 - DNA, 25 bp, Homo sapien
cattgagcatgacaggactgggctc

SEQ ID NO: 3517143 - DNA, 25 bp, Homo sapien
ctggacattgagcatgacaggactg

SEQ ID NO: 3517144 - DNA, 25 bp, Homo sapien
gacattgagcatgacaggactgggc

SEQ ID NO: 3517145 - DNA, 25 bp, Homo sapien
ttgagcatgacaggactgggctctg

SEQ ID NO: 3517146 - DNA, 25 bp, Homo sapien
tcctccaagcatttgctactaatga

SEQ ID NO: 3517147 - DNA, 25 bp, Homo sapien
ttcatcctccaagcatttgctacta

SEQ ID NO: 3517148 - DNA, 25 bp, Homo sapien
catcctccaagcatttgctactaat

SEQ ID NO: 3517149 - DNA, 25 bp, Homo sapien
gattcatcctccaagcatttgctac

SEQ ID NO: 3517150 - DNA, 25 bp, Homo sapien
taggagagacatgaattaatgagtt

SEQ ID NO: 3517151 - DNA, 25 bp, Homo sapien
tgagttcttcgtgtaacaagaaaaa

SEQ ID NO: 3517152 - DNA, 25 bp, Homo sapien
aattaatgagttcttcgtgtaacaa

SEQ ID NO: 3517153 - DNA, 25 bp, Homo sapien
taatgagttcttcgtgtaacaagaa

SEQ ID NO: 3517154 - DNA, 25 bp, Homo sapien
aatgcattagtgttgacatgttcaa

SEQ ID NO: 3517155 - DNA, 25 bp, Homo sapien
ctcctcgaaaaatgcattagtgttg

SEQ ID NO: 3517156 - DNA, 25 bp, Homo sapien
aaatgtgtctattactgcgtgtgca

SEQ ID NO: 3517157 - DNA, 25 bp, Homo sapien
cagaatataaataccctttaaccat

SEQ ID NO: 3517158 - DNA, 25 bp, Homo sapien
tggtgggcatccagaatgtcactcc

SEQ ID NO: 3517159 - DNA, 25 bp, Homo sapien
tttctccatggtaaacaagatcccg

SEQ ID NO: 3517160 - DNA, 25 bp, Homo sapien
ctggggactcagtttagaaatggtt

SEQ ID NO: 3517161 - DNA, 25 bp, Homo sapien
acaagatcccgctgttcatctgctg

SEQ ID NO: 3517162 - DNA, 25 bp, Homo sapien
tcaacacttccaaaataatcctcat

SEQ ID NO: 3517163 - DNA, 25 bp, Homo sapien
ttcaacacttccaaaataatcctca

SEQ ID NO: 3517164 - DNA, 25 bp, Homo sapien
tctgccttagaacatcgaactcctc

SEQ ID NO: 3517165 - DNA, 25 bp, Homo sapien
tctcaggaagtcctttgcaccccag

SEQ ID NO: 3517166 - DNA, 25 bp, Homo sapien
aaaactctggccgtagggctgggct

SEQ ID NO: 3517167 - DNA, 25 bp, Homo sapien
ggctgtgtgcaacaaccagtctttg

SEQ ID NO: 3517168 - DNA, 25 bp, Homo sapien
tctgtgcatgatggaacagtatgcc

SEQ ID NO: 3517169 - DNA, 25 bp, Homo sapien
ccctggtgtgggagcatgttcgtac

SEQ ID NO: 3517170 - DNA, 25 bp, Homo sapien
tatgtgactgcaaccgagagtgtgt

SEQ ID NO: 3517171 - DNA, 25 bp, Homo sapien
tcattctagcctgcagacaagtgct

SEQ ID NO: 3517172 - DNA, 25 bp, Homo sapien
ctacttagtaacaattgtccaattt

SEQ ID NO: 3517173 - DNA, 25 bp, Homo sapien
ttttatcatagaattgcctgagcag

SEQ ID NO: 3517174 - DNA, 25 bp, Homo sapien
tccttttatcatagaattgcctgag

SEQ ID NO: 3517175 - DNA, 25 bp, Homo sapien
ctcctcctcgcaggataatgccttc

SEQ ID NO: 3517176 - DNA, 25 bp, Homo sapien
tctttgccagccctcggatttctct

SEQ ID NO: 3517177 - DNA, 25 bp, Homo sapien
gggtgagagatagggcgaaatctgg

SEQ ID NO: 3517178 - DNA, 25 bp, Homo sapien
tgagagatagggcgaaatctggaat

SEQ ID NO: 3517179 - DNA, 25 bp, Homo sapien
tagggcgaaatctggaatggtttta

SEQ ID NO: 3517180 - DNA, 25 bp, Homo sapien
agatagggcgaaatctggaatggtt

SEQ ID NO: 3517181 - DNA, 25 bp, Homo sapien
ctgaagatatgcaaatccgtgcatt

SEQ ID NO: 3517182 - DNA, 25 bp, Homo sapien
caaaggctatgaatgtaataagagc

SEQ ID NO: 3517183 - DNA, 25 bp, Homo sapien
taataagagcactcaacccttctga

SEQ ID NO: 3517184 - DNA, 25 bp, Homo sapien
gagttcaatagccagtccttttggt

SEQ ID NO: 3517185 - DNA, 25 bp, Homo sapien
taagctgatggcctattatgttcga

SEQ ID NO: 3517186 - DNA, 25 bp, Homo sapien
tttggtgccacttgagttcttgagg

SEQ ID NO: 3517187 - DNA, 25 bp, Homo sapien
ttcgattgcaaatcaatatagtatc

SEQ ID NO: 3517188 - DNA, 25 bp, Homo sapien
cagctccagttatacaattgaattg

SEQ ID NO: 3517189 - DNA, 25 bp, Homo sapien
aaatggtccgtctactatgtctgcc

SEQ ID NO: 3517190 - DNA, 25 bp, Homo sapien
gccagactcgcttatgcaggtgacc

SEQ ID NO: 3517191 - DNA, 25 bp, Homo sapien
gtcatatggacacctttggctggaa

SEQ ID NO: 3517192 - DNA, 25 bp, Homo sapien
ttcatgtaagtgtgccaggagctct

SEQ ID NO: 3517193 - DNA, 25 bp, Homo sapien
tcagagccctcttttgattgtgagg

SEQ ID NO: 3517194 - DNA, 25 bp, Homo sapien
tagcaggcaactggctgtatcaccc

SEQ ID NO: 3517195 - DNA, 25 bp, Homo sapien
catcaggggctgcaacagcttcttt

SEQ ID NO: 3517196 - DNA, 25 bp, Homo sapien
tgaggctctaaggttcagagccctc

SEQ ID NO: 3517197 - DNA, 25 bp, Homo sapien
tggtgacagggacagtcagacaaga

SEQ ID NO: 3517198 - DNA, 25 bp, Homo sapien
gacagggacagtcagacaagatgga

SEQ ID NO: 3517199 - DNA, 25 bp, Homo sapien
acagtcagacaagatggagggcagc

SEQ ID NO: 3517200 - DNA, 25 bp, Homo sapien
agtcagacaagatggagggcagcaa

SEQ ID NO: 3517201 - DNA, 25 bp, Homo sapien
gctagtgggtctaaagattctgtaa

SEQ ID NO: 3517202 - DNA, 25 bp, Homo sapien
gactttagttcctgtaggaggaatg

SEQ ID NO: 3517203 - DNA, 25 bp, Homo sapien
ggcaagctctaggtgaagttcagga

SEQ ID NO: 3517204 - DNA, 25 bp, Homo sapien
agttcaggaagatctacatgggcta

SEQ ID NO: 3517205 - DNA, 25 bp, Homo sapien
tttcttctttgggagctgggtacca

SEQ ID NO: 3517206 - DNA, 25 bp, Homo sapien
tcacacagtagctaaatggcctttc

SEQ ID NO: 3517207 - DNA, 25 bp, Homo sapien
ttcagttgctctataattacccagt

SEQ ID NO: 3517208 - DNA, 25 bp, Homo sapien
cccagtgatgggtgatctgttttct

SEQ ID NO: 3517209 - DNA, 25 bp, Homo sapien
gtctacagtatgttcacagatatct

SEQ ID NO: 3517210 - DNA, 25 bp, Homo sapien
gctagtacttaggacttcccatttc

SEQ ID NO: 3517211 - DNA, 25 bp, Homo sapien
catctgttgctagtacttaggactt

SEQ ID NO: 3517212 - DNA, 25 bp, Homo sapien
gtatgttcacagatatctggctgac

SEQ ID NO: 3517213 - DNA, 25 bp, Homo sapien
gatactgtatgccaatttcttaccc

SEQ ID NO: 3517214 - DNA, 25 bp, Homo sapien
tgccaatttcttacccatcagacat

SEQ ID NO: 3517215 - DNA, 25 bp, Homo sapien
caagtccatggttagacatgtgggt

SEQ ID NO: 3517216 - DNA, 25 bp, Homo sapien
cttttgccagctgtaagatactgta

SEQ ID NO: 3517217 - DNA, 25 bp, Homo sapien
tccttcctgcctggcactgctaggg

SEQ ID NO: 3517218 - DNA, 25 bp, Homo sapien
ggcagctccttcctgcctggcactg

SEQ ID NO: 3517219 - DNA, 25 bp, Homo sapien
cctgcctggcactgctaggggcaga

SEQ ID NO: 3517220 - DNA, 25 bp, Homo sapien
ctggcagctccttcctgcctggcac

SEQ ID NO: 3517221 - DNA, 25 bp, Homo sapien
tatcctataggaataggagccaggg

SEQ ID NO: 3517222 - DNA, 25 bp, Homo sapien
gcctctccggtagggcagaaacagt

SEQ ID NO: 3517223 - DNA, 25 bp, Homo sapien
ctagaaagatcagggctgcagtagg

SEQ ID NO: 3517224 - DNA, 25 bp, Homo sapien
gcccctggaaggttgcaatggaaga

SEQ ID NO: 3517225 - DNA, 25 bp, Homo sapien
ctgaattccggtagcagccatggga

SEQ ID NO: 3517226 - DNA, 25 bp, Homo sapien
ccatgggatttctggaaaaagttgc

SEQ ID NO: 3517227 - DNA, 25 bp, Homo sapien
taagacagttattagcagctgtggg

SEQ ID NO: 3517228 - DNA, 25 bp, Homo sapien
ggtcctgaaccagaaagagtgtcca

SEQ ID NO: 3517229 - DNA, 25 bp, Homo sapien
ggcattcatttcactggctccacag

SEQ ID NO: 3517230 - DNA, 25 bp, Homo sapien
tggcattcatttcactggctccaca

SEQ ID NO: 3517231 - DNA, 25 bp, Homo sapien
ttgtggagcccgagcttcctgccag

SEQ ID NO: 3517232 - DNA, 25 bp, Homo sapien
tccttgtggagcccgagcttcctgc

SEQ ID NO: 3517233 - DNA, 25 bp, Homo sapien
cttgtggagcccgagcttcctgcca

SEQ ID NO: 3517234 - DNA, 25 bp, Homo sapien
tgtggagcccgagcttcctgccagc

SEQ ID NO: 3517235 - DNA, 25 bp, Homo sapien
tgttctcaggcgctgcgcttcaagt

SEQ ID NO: 3517236 - DNA, 25 bp, Homo sapien
tccatgcagtcacagctgttctcag

SEQ ID NO: 3517237 - DNA, 25 bp, Homo sapien
cggcatcttgctactgggtgcattt

SEQ ID NO: 3517238 - DNA, 25 bp, Homo sapien
gattctcagatcttcggcatcttgc

SEQ ID NO: 3517239 - DNA, 25 bp, Homo sapien
ccagcagcagcggtcattgagaaat

SEQ ID NO: 3517240 - DNA, 25 bp, Homo sapien
tctgggagataaagttctgcaagcg

SEQ ID NO: 3517241 - DNA, 25 bp, Homo sapien
gggattgtacccatcagcagctttt

SEQ ID NO: 3517242 - DNA, 25 bp, Homo sapien
gaatcccagattgaacagtgcattg

SEQ ID NO: 3517243 - DNA, 25 bp, Homo sapien
caaactggttcccattgaagaatac

SEQ ID NO: 3517244 - DNA, 25 bp, Homo sapien
taattggtgtgctcccctgtgtaga

SEQ ID NO: 3517245 - DNA, 25 bp, Homo sapien
gagaagtaaatagacctttttgagc

SEQ ID NO: 3517246 - DNA, 25 bp, Homo sapien
taatgagcgggtaagatctgtcaca

SEQ ID NO: 3517247 - DNA, 25 bp, Homo sapien
tctggcccttctaacacgtatagcc

SEQ ID NO: 3517248 - DNA, 25 bp, Homo sapien
ctgatgaatacactagattggctct

SEQ ID NO: 3517249 - DNA, 25 bp, Homo sapien
cagacctcttcgatcacctctggcc

SEQ ID NO: 3517250 - DNA, 25 bp, Homo sapien
ctagattggctctatctctgtccag

SEQ ID NO: 3517251 - DNA, 25 bp, Homo sapien
gagctataggaatccaatattacaa

SEQ ID NO: 3517252 - DNA, 25 bp, Homo sapien
caggaagcttgccaagaaaaaagct

SEQ ID NO: 3517253 - DNA, 25 bp, Homo sapien
tccaacttcgacagaagtcatccca

SEQ ID NO: 3517254 - DNA, 25 bp, Homo sapien
gaaagtggaatgagagatcaaacat

SEQ ID NO: 3517255 - DNA, 25 bp, Homo sapien
ctgtgcatctcctcccttatgcagc

SEQ ID NO: 3517256 - DNA, 25 bp, Homo sapien
tgaaacaatgacaaacgagggagag

SEQ ID NO: 3517257 - DNA, 25 bp, Homo sapien
agggagtaaaggttgcagacgtcct

SEQ ID NO: 3517258 - DNA, 25 bp, Homo sapien
tgcagacgtccttgggttgtcttca

SEQ ID NO: 3517259 - DNA, 25 bp, Homo sapien
aaggacagcccaggtattggcgagg

SEQ ID NO: 3517260 - DNA, 25 bp, Homo sapien
taggctcctgacaaccgtggaactg

SEQ ID NO: 3517261 - DNA, 25 bp, Homo sapien
gcaacatgccctagatcactgagct

SEQ ID NO: 3517262 - DNA, 25 bp, Homo sapien
gaaccatgaggtgcatgaggcgacc

SEQ ID NO: 3517263 - DNA, 25 bp, Homo sapien
gtggaactgccttgtcaatactgga

SEQ ID NO: 3517264 - DNA, 25 bp, Homo sapien
gggattagctgaataggcactggat

SEQ ID NO: 3517265 - DNA, 25 bp, Homo sapien
aaccactttcgcagacttgttgttg

SEQ ID NO: 3517266 - DNA, 25 bp, Homo sapien
tgtttgaacatctgtcaagggctgg

SEQ ID NO: 3517267 - DNA, 25 bp, Homo sapien
ctggatgccaggatattatattctc

SEQ ID NO: 3517268 - DNA, 25 bp, Homo sapien
gcatcagggcttcaggtggccagct

SEQ ID NO: 3517269 - DNA, 25 bp, Homo sapien
aacacgtatccggaacacattggga

SEQ ID NO: 3517270 - DNA, 25 bp, Homo sapien
cagcgggtcgtgagaaatggccctc

SEQ ID NO: 3517271 - DNA, 25 bp, Homo sapien
gttcccacaaggctgcaacacgtat

SEQ ID NO: 3517272 - DNA, 25 bp, Homo sapien
gaatactctgattttattacccacc

SEQ ID NO: 3517273 - DNA, 25 bp, Homo sapien
cttccactgaagtctgaatactctg

SEQ ID NO: 3517274 - DNA, 25 bp, Homo sapien
cactgaagtctgaatactctgattt

SEQ ID NO: 3517275 - DNA, 25 bp, Homo sapien
tctgaatactctgattttattaccc

SEQ ID NO: 3517276 - DNA, 25 bp, Homo sapien
gcaactttaactgtagcttcacccc

SEQ ID NO: 3517277 - DNA, 25 bp, Homo sapien
tcctgacaacccacttccttgtgca

SEQ ID NO: 3517278 - DNA, 25 bp, Homo sapien
taactgtagcttcaccccaggacat

SEQ ID NO: 3517279 - DNA, 25 bp, Homo sapien
actgtagcttcaccccaggacatca

SEQ ID NO: 3517280 - DNA, 25 bp, Homo sapien
gagcctctttatccagccagaatgg

SEQ ID NO: 3517281 - DNA, 25 bp, Homo sapien
tttgcaaaggtatttagccaggccc

SEQ ID NO: 3517282 - DNA, 25 bp, Homo sapien
ggatgcagcacaatacaagctttgc

SEQ ID NO: 3517283 - DNA, 25 bp, Homo sapien
tgagatagcattgagaggccgcctg

SEQ ID NO: 3517284 - DNA, 25 bp, Homo sapien
agactgccacagctaaggctcctgg

SEQ ID NO: 3517285 - DNA, 25 bp, Homo sapien
caaagggccccgcacagaagttggg

SEQ ID NO: 3517286 - DNA, 25 bp, Homo sapien
gagtccaacatgacaagactgccac

SEQ ID NO: 3517287 - DNA, 25 bp, Homo sapien
gataatcgattgtcactttggcagt

SEQ ID NO: 3517288 - DNA, 25 bp, Homo sapien
ctctgggttgagtcatcttgatttc

SEQ ID NO: 3517289 - DNA, 25 bp, Homo sapien
gactctgggttgagtcatcttgatt

SEQ ID NO: 3517290 - DNA, 25 bp, Homo sapien
actctgggttgagtcatcttgattt

SEQ ID NO: 3517291 - DNA, 25 bp, Homo sapien
ggactctgggttgagtcatcttgat

SEQ ID NO: 3517292 - DNA, 25 bp, Homo sapien
ggtgataaaattcatgcgaagctaa

SEQ ID NO: 3517293 - DNA, 25 bp, Homo sapien
gcagatggtggctggttctaggcaa

SEQ ID NO: 3517294 - DNA, 25 bp, Homo sapien
aaattcatgcgaagctaaacaatac

SEQ ID NO: 3517295 - DNA, 25 bp, Homo sapien
ggcaaggtgataaaattcatgcgaa

SEQ ID NO: 3517296 - DNA, 25 bp, Homo sapien
gatggaggtcctggcacagcttaaa

SEQ ID NO: 3517297 - DNA, 25 bp, Homo sapien
tttacgggtgagaagccagattttc

SEQ ID NO: 3517298 - DNA, 25 bp, Homo sapien
ggctctgccatatgtcaactgtgtg

SEQ ID NO: 3517299 - DNA, 25 bp, Homo sapien
ttttcaagcagggagatgtgttcac

SEQ ID NO: 3517300 - DNA, 25 bp, Homo sapien
ctggttatcttggtcttggaagcac

SEQ ID NO: 3517301 - DNA, 25 bp, Homo sapien
ccttgggcaagggtgcattgatgca

SEQ ID NO: 3517302 - DNA, 25 bp, Homo sapien
tactatgattgcctggttatcttgg

SEQ ID NO: 3517303 - DNA, 25 bp, Homo sapien
cattgatgcatctactatgattgcc

SEQ ID NO: 3517304 - DNA, 25 bp, Homo sapien
caggagcctgactcctccaagaaga

SEQ ID NO: 3517305 - DNA, 25 bp, Homo sapien
gctggcaggagcctgactcctccaa

SEQ ID NO: 3517306 - DNA, 25 bp, Homo sapien
tgtggaagatctggctggcaggagc

SEQ ID NO: 3517307 - DNA, 25 bp, Homo sapien
tgatcctttgtcttttaagtgttgt

SEQ ID NO: 3517308 - DNA, 25 bp, Homo sapien
gatggtgcttccaccactgagatct

SEQ ID NO: 3517309 - DNA, 25 bp, Homo sapien
caagacgttggtaaatttcctcaag

SEQ ID NO: 3517310 - DNA, 25 bp, Homo sapien
taacagagaggaacggaaagaggca

SEQ ID NO: 3517311 - DNA, 25 bp, Homo sapien
gaaagaggcattgtctacggaaacc

SEQ ID NO: 3517312 - DNA, 25 bp, Homo sapien
tcgtctactcaatgttcaaagccag

SEQ ID NO: 3517313 - DNA, 25 bp, Homo sapien
gagtttcctccgtctggaattgtct

SEQ ID NO: 3517314 - DNA, 25 bp, Homo sapien
ggaattgtcttcttcgtctactcaa

SEQ ID NO: 3517315 - DNA, 25 bp, Homo sapien
aaatttccatgatatttcttgtgga

SEQ ID NO: 3517316 - DNA, 25 bp, Homo sapien
agttgacaggtaaaaatagccagtt

SEQ ID NO: 3517317 - DNA, 25 bp, Homo sapien
cagttgacaggtaaaaatagccagt

SEQ ID NO: 3517318 - DNA, 25 bp, Homo sapien
ttgacaggtaaaaatagccagttct

SEQ ID NO: 3517319 - DNA, 25 bp, Homo sapien
gttgacaggtaaaaatagccagttc

SEQ ID NO: 3517320 - DNA, 25 bp, Homo sapien
gacctcaatgccagtacctgttgga

SEQ ID NO: 3517321 - DNA, 25 bp, Homo sapien
aagataggcattattcctgttcccc

SEQ ID NO: 3517322 - DNA, 25 bp, Homo sapien
ttgtgcagaacactcctggaagata

SEQ ID NO: 3517323 - DNA, 25 bp, Homo sapien
taggcattattcctgttccccttct

SEQ ID NO: 3517324 - DNA, 25 bp, Homo sapien
gccttcagttttgtgcagaacactc

SEQ ID NO: 3517325 - DNA, 25 bp, Homo sapien
gaaaggtattagagaaactactgga

SEQ ID NO: 3517326 - DNA, 25 bp, Homo sapien
ctctgtgaacgttctttctctggga

SEQ ID NO: 3517327 - DNA, 25 bp, Homo sapien
tactggactattttgtgggatctca

SEQ ID NO: 3517328 - DNA, 25 bp, Homo sapien
gggattgttttataaccaggtgcca

SEQ ID NO: 3517329 - DNA, 25 bp, Homo sapien
caagagaagatatcgagaggaaggt

SEQ ID NO: 3517330 - DNA, 25 bp, Homo sapien
tggagagggactcatattcccttgt

SEQ ID NO: 3517331 - DNA, 25 bp, Homo sapien
tgttgttggattcagaccagataca

SEQ ID NO: 3517332 - DNA, 25 bp, Homo sapien
gaggaaggtaggtcttcagatgtcc

SEQ ID NO: 3517333 - DNA, 25 bp, Homo sapien
cagccgcttgtatttctgccgggtt

SEQ ID NO: 3517334 - DNA, 25 bp, Homo sapien
cacagccgcttgtatttctgccggg

SEQ ID NO: 3517335 - DNA, 25 bp, Homo sapien
tcacagccgcttgtatttctgccgg

SEQ ID NO: 3517336 - DNA, 25 bp, Homo sapien
gccgcttgtatttctgccgggttac

SEQ ID NO: 3517337 - DNA, 25 bp, Homo sapien
gaatccactatgaaattctgcaaaa

SEQ ID NO: 3517338 - DNA, 25 bp, Homo sapien
cttggggaatccactatgaaattct

SEQ ID NO: 3517339 - DNA, 25 bp, Homo sapien
cttgaaatctgggtatttgaactcc

SEQ ID NO: 3517340 - DNA, 25 bp, Homo sapien
aatctgggtatttgaactcctggtt

SEQ ID NO: 3517341 - DNA, 25 bp, Homo sapien
ctctgctgccactagtccactggtt

SEQ ID NO: 3517342 - DNA, 25 bp, Homo sapien
ggcatcatatggaaccacttctggg

SEQ ID NO: 3517343 - DNA, 25 bp, Homo sapien
tgctggcatcatatggaaccacttc

SEQ ID NO: 3517344 - DNA, 25 bp, Homo sapien
ccactggttaggtgacacttgctgg

SEQ ID NO: 3517345 - DNA, 25 bp, Homo sapien
aaaccagatacagaagggtagtctc

SEQ ID NO: 3517346 - DNA, 25 bp, Homo sapien
tgacaaaaaccagatacagaagggt

SEQ ID NO: 3517347 - DNA, 25 bp, Homo sapien
tcaaacgttcatggcaatgacaaaa

SEQ ID NO: 3517348 - DNA, 25 bp, Homo sapien
tggcaatgacaaaaaccagatacag

SEQ ID NO: 3517349 - DNA, 25 bp, Homo sapien
cccctgctgcctgctgagatggtct

SEQ ID NO: 3517350 - DNA, 25 bp, Homo sapien
ctgctgcctgctgagatggtctccc

SEQ ID NO: 3517351 - DNA, 25 bp, Homo sapien
tgcctgctgagatggtctccctctc

SEQ ID NO: 3517352 - DNA, 25 bp, Homo sapien
gctgcctgctgagatggtctccctc

SEQ ID NO: 3517353 - DNA, 25 bp, Homo sapien
accagctcagcaggagcaaggtctg

SEQ ID NO: 3517354 - DNA, 25 bp, Homo sapien
agctcagcaggagcaaggtctgttg

SEQ ID NO: 3517355 - DNA, 25 bp, Homo sapien
ctgcaccagctcagcaggagcaagg

SEQ ID NO: 3517356 - DNA, 25 bp, Homo sapien
gctcagcaggagcaaggtctgttgc

SEQ ID NO: 3517357 - DNA, 25 bp, Homo sapien
cacaatctgtgctgttaggtcataa

SEQ ID NO: 3517358 - DNA, 25 bp, Homo sapien
aacacaatctgtgctgttaggtcat

SEQ ID NO: 3517359 - DNA, 25 bp, Homo sapien
acacaatctgtgctgttaggtcata

SEQ ID NO: 3517360 - DNA, 25 bp, Homo sapien
caatctgtgctgttaggtcataaaa

SEQ ID NO: 3517361 - DNA, 25 bp, Homo sapien
ggcaggtgacttgctatgcatgacc

SEQ ID NO: 3517362 - DNA, 25 bp, Homo sapien
tgaccctattactgcagcagctgct

SEQ ID NO: 3517363 - DNA, 25 bp, Homo sapien
ttatatccatcagcagccataggtc

SEQ ID NO: 3517364 - DNA, 25 bp, Homo sapien
tgcaggccctttgactggatgctct

SEQ ID NO: 3517365 - DNA, 25 bp, Homo sapien
tggtttccgtgcagtatgtacaaga

SEQ ID NO: 3517366 - DNA, 25 bp, Homo sapien
cctcctctgatactctctggcagta

SEQ ID NO: 3517367 - DNA, 25 bp, Homo sapien
agttagtaggaactgctggcttact

SEQ ID NO: 3517368 - DNA, 25 bp, Homo sapien
gcagtacaagagagttagtaggaac

SEQ ID NO: 3517369 - DNA, 25 bp, Homo sapien
caggttcagattaaactgaaagagt

SEQ ID NO: 3517370 - DNA, 25 bp, Homo sapien
ggttcagattaaactgaaagagtga

SEQ ID NO: 3517371 - DNA, 25 bp, Homo sapien
ttcagattaaactgaaagagtgaag

SEQ ID NO: 3517372 - DNA, 25 bp, Homo sapien
cagattaaactgaaagagtgaagca

SEQ ID NO: 3517373 - DNA, 25 bp, Homo sapien
cgcctccttcccctcctccctcaca

SEQ ID NO: 3517374 - DNA, 25 bp, Homo sapien
gcctccttcccctcctccctcacac

SEQ ID NO: 3517375 - DNA, 25 bp, Homo sapien
gatgttttcatcgattttgccaaca

SEQ ID NO: 3517376 - DNA, 25 bp, Homo sapien
taggcagcgaacacttctcaagatg

SEQ ID NO: 3517377 - DNA, 25 bp, Homo sapien
ccacagacggttaagtaggcagcga

SEQ ID NO: 3517378 - DNA, 25 bp, Homo sapien
acactcagctgctttatcggctctg

SEQ ID NO: 3517379 - DNA, 25 bp, Homo sapien
tcaggccagtcatgaagtgtctccc

SEQ ID NO: 3517380 - DNA, 25 bp, Homo sapien
gacctcgtctgacattctcaggcca

SEQ ID NO: 3517381 - DNA, 25 bp, Homo sapien
taaatgcctcgaaggcaaaatcccc

SEQ ID NO: 3517382 - DNA, 25 bp, Homo sapien
gccgcgcatactgcttcctctaaat

SEQ ID NO: 3517383 - DNA, 25 bp, Homo sapien
agagatggaaaagcggtcaggagag

SEQ ID NO: 3517384 - DNA, 25 bp, Homo sapien
gaggaaagggtccattactgtgctc

SEQ ID NO: 3517385 - DNA, 25 bp, Homo sapien
cagatagcagagatagttccatggg

SEQ ID NO: 3517386 - DNA, 25 bp, Homo sapien
gggtcctggacacccataagtctcc

SEQ ID NO: 3517387 - DNA, 25 bp, Homo sapien
gacttctgtgagatggcaactcatg

SEQ ID NO: 3517388 - DNA, 25 bp, Homo sapien
caaatctcgatttcaaacaatgttc

SEQ ID NO: 3517389 - DNA, 25 bp, Homo sapien
caatgttcctttcaagtcatccaaa

SEQ ID NO: 3517390 - DNA, 25 bp, Homo sapien
atctcgatttcaaacaatgttcctt

SEQ ID NO: 3517391 - DNA, 25 bp, Homo sapien
caagaaaatctaggccctgcagaaa

SEQ ID NO: 3517392 - DNA, 25 bp, Homo sapien
tgacttttccactgtaggatccctc

SEQ ID NO: 3517393 - DNA, 25 bp, Homo sapien
gacttttccactgtaggatccctcc

SEQ ID NO: 3517394 - DNA, 25 bp, Homo sapien
ctcatgacttttccactgtaggatc

SEQ ID NO: 3517395 - DNA, 25 bp, Homo sapien
catgacttttccactgtaggatccc

SEQ ID NO: 3517396 - DNA, 25 bp, Homo sapien
ggcctagctaagtgctcctgccagt

SEQ ID NO: 3517397 - DNA, 25 bp, Homo sapien
aagtcttccacctgaggcctagcta

SEQ ID NO: 3517398 - DNA, 25 bp, Homo sapien
gtctgcttcaggcggcttccctctt

SEQ ID NO: 3517399 - DNA, 25 bp, Homo sapien
cagctccaaattactctgatgaaga

SEQ ID NO: 3517400 - DNA, 25 bp, Homo sapien
gcccaggaccttgctgacttctgaa

SEQ ID NO: 3517401 - DNA, 25 bp, Homo sapien
tgctgattttcctgtggtcgcccag

SEQ ID NO: 3517402 - DNA, 25 bp, Homo sapien
gacttctgaagctggcctgagcttg

SEQ ID NO: 3517403 - DNA, 25 bp, Homo sapien
ctgcacgttgctttccgcctcagcc

SEQ ID NO: 3517404 - DNA, 25 bp, Homo sapien
ggacagctggttaaggaatggctct

SEQ ID NO: 3517405 - DNA, 25 bp, Homo sapien
ccgctaattttgtggcagcagtatg

SEQ ID NO: 3517406 - DNA, 25 bp, Homo sapien
gaatggctctgagtgctcatgcagc

SEQ ID NO: 3517407 - DNA, 25 bp, Homo sapien
aggagcagtacttcaggctggcaag

SEQ ID NO: 3517408 - DNA, 25 bp, Homo sapien
catctattaagcagctgtggtatac

SEQ ID NO: 3517409 - DNA, 25 bp, Homo sapien
ggctgaagactttgttgacacttcc

SEQ ID NO: 3517410 - DNA, 25 bp, Homo sapien
ggaattgtgaggacaccaatgcaca

SEQ ID NO: 3517411 - DNA, 25 bp, Homo sapien
tccctgaaccaagtgataaacatct

SEQ ID NO: 3517412 - DNA, 25 bp, Homo sapien
tgatgctacctgatcctggtaccca

SEQ ID NO: 3517413 - DNA, 25 bp, Homo sapien
tggtacccacaggtaagtggacaac

SEQ ID NO: 3517414 - DNA, 25 bp, Homo sapien
tcctggtacccacaggtaagtggac

SEQ ID NO: 3517415 - DNA, 25 bp, Homo sapien
ctgctacctgtgtgatgctacctga

SEQ ID NO: 3517416 - DNA, 25 bp, Homo sapien
gcgcttctcttcagtaagggtaacc

SEQ ID NO: 3517417 - DNA, 25 bp, Homo sapien
tttcagcgcttctcttcagtaaggg

SEQ ID NO: 3517418 - DNA, 25 bp, Homo sapien
cctgtttcagcgcttctcttcagta

SEQ ID NO: 3517419 - DNA, 25 bp, Homo sapien
cttcctgtttcagcgcttctcttca

SEQ ID NO: 3517420 - DNA, 25 bp, Homo sapien
taaacaggtaactcaaccagcatca

SEQ ID NO: 3517421 - DNA, 25 bp, Homo sapien
ctaaacaggtaactcaaccagcatc

SEQ ID NO: 3517422 - DNA, 25 bp, Homo sapien
aaacaggtaactcaaccagcatcat

SEQ ID NO: 3517423 - DNA, 25 bp, Homo sapien
acaggtaactcaaccagcatcatac

SEQ ID NO: 3517424 - DNA, 25 bp, Homo sapien
tgtacaatcaaaaaggagcctacgg

SEQ ID NO: 3517425 - DNA, 25 bp, Homo sapien
gagcctacgggatcacttctgagca

SEQ ID NO: 3517426 - DNA, 25 bp, Homo sapien
gtgccgctgtagagcactggcccac

SEQ ID NO: 3517427 - DNA, 25 bp, Homo sapien
tggtgcacgcagaacaatgtttggc

SEQ ID NO: 3517428 - DNA, 25 bp, Homo sapien
ccttagcttgacaaatatagccttt

SEQ ID NO: 3517429 - DNA, 25 bp, Homo sapien
ccaggaacagtcaccatggtcattc

SEQ ID NO: 3517430 - DNA, 25 bp, Homo sapien
gacaaatatagcctttctcatcatc

SEQ ID NO: 3517431 - DNA, 25 bp, Homo sapien
agttggctccccttgcctgcaaggt

SEQ ID NO: 3517432 - DNA, 25 bp, Homo sapien
ctggacatgagcactcaagaggtgt

SEQ ID NO: 3517433 - DNA, 25 bp, Homo sapien
tgttgcctgaagaatgagatgcttt

SEQ ID NO: 3517434 - DNA, 25 bp, Homo sapien
tgtgctaagtaagcgggcaacctga

SEQ ID NO: 3517435 - DNA, 25 bp, Homo sapien
taaaagagaggaaatcgccttggcc

SEQ ID NO: 3517436 - DNA, 25 bp, Homo sapien
cctccatacagctgtgcaggtgttg

SEQ ID NO: 3517437 - DNA, 25 bp, Homo sapien
acagctgtgcaggtgttgttcttgg

SEQ ID NO: 3517438 - DNA, 25 bp, Homo sapien
caggacatcctttatggtgcctctg

SEQ ID NO: 3517439 - DNA, 25 bp, Homo sapien
acatcctttatggtgcctctggcct

SEQ ID NO: 3517440 - DNA, 25 bp, Homo sapien
caatccaaaaacctgcaggccagca

SEQ ID NO: 3517441 - DNA, 25 bp, Homo sapien
caggattctgtcaatccaaaaacct

SEQ ID NO: 3517442 - DNA, 25 bp, Homo sapien
ctgtcaatccaaaaacctgcaggcc

SEQ ID NO: 3517443 - DNA, 25 bp, Homo sapien
gcaccctggaaaccaaacctcacat

SEQ ID NO: 3517444 - DNA, 25 bp, Homo sapien
ctttataatccgatagggaacctgg

SEQ ID NO: 3517445 - DNA, 25 bp, Homo sapien
agctttataatccgatagggaacct

SEQ ID NO: 3517446 - DNA, 25 bp, Homo sapien
gctttataatccgatagggaacctg

SEQ ID NO: 3517447 - DNA, 25 bp, Homo sapien
tttataatccgatagggaacctgga

SEQ ID NO: 3517448 - DNA, 25 bp, Homo sapien
tgttgagcgggacactccctgagac

SEQ ID NO: 3517449 - DNA, 25 bp, Homo sapien
ttcctgaagtgtgttgagcgggaca

SEQ ID NO: 3517450 - DNA, 25 bp, Homo sapien
acgacagaggcctgcatcagacagg

SEQ ID NO: 3517451 - DNA, 25 bp, Homo sapien
ttttcacgacagaggcctgcatcag

SEQ ID NO: 3517452 - DNA, 25 bp, Homo sapien
ggagtaagtatgaaaggactttgct

SEQ ID NO: 3517453 - DNA, 25 bp, Homo sapien
tccatcattgcaatgtctgcctgag

SEQ ID NO: 3517454 - DNA, 25 bp, Homo sapien
tgtctcagatgtcacaaccccagag

SEQ ID NO: 3517455 - DNA, 25 bp, Homo sapien
tgctgtaattagaaggttcctgcac

SEQ ID NO: 3517456 - DNA, 25 bp, Homo sapien
ctatttcgaggcaagtgttggaggg

SEQ ID NO: 3517457 - DNA, 25 bp, Homo sapien
tatttcgaggcaagtgttggagggg

SEQ ID NO: 3517458 - DNA, 25 bp, Homo sapien
caggtatcaagcttcagctggctgg

SEQ ID NO: 3517459 - DNA, 25 bp, Homo sapien
cttcagctggctggactcccggcag

SEQ ID NO: 3517460 - DNA, 25 bp, Homo sapien
gaaccaggagccaggtatcaagctt

SEQ ID NO: 3517461 - DNA, 25 bp, Homo sapien
gggcagccacccctggaaccaggag

SEQ ID NO: 3517462 - DNA, 25 bp, Homo sapien
ctgggcagcggggctcagagctcag

SEQ ID NO: 3517463 - DNA, 25 bp, Homo sapien
tgggcagcggggctcagagctcagc

SEQ ID NO: 3517464 - DNA, 25 bp, Homo sapien
catctggtgcttcggtcctctgggc

SEQ ID NO: 3517465 - DNA, 25 bp, Homo sapien
aagtagcacgaaggctgagaggccc

SEQ ID NO: 3517466 - DNA, 25 bp, Homo sapien
gccgacctattttctggactcccat

SEQ ID NO: 3517467 - DNA, 25 bp, Homo sapien
cggcttggactgaagtagcacgaag

SEQ ID NO: 3517468 - DNA, 25 bp, Homo sapien
tccgggaaacaggtaccaatttgca

SEQ ID NO: 3517469 - DNA, 25 bp, Homo sapien
gccaacaaggtaatagggcattgtg

SEQ ID NO: 3517470 - DNA, 25 bp, Homo sapien
caatttgcagcaatcacaataagaa

SEQ ID NO: 3517471 - DNA, 25 bp, Homo sapien
tctctggctgatgcaagccaacaag

SEQ ID NO: 3517472 - DNA, 25 bp, Homo sapien
accagcacaggcccctgcagagtga

SEQ ID NO: 3517473 - DNA, 25 bp, Homo sapien
ggcccctgcagagtgacagggcccc

SEQ ID NO: 3517474 - DNA, 25 bp, Homo sapien
tggtccccaaggttccactgccctc

SEQ ID NO: 3517475 - DNA, 25 bp, Homo sapien
caggcccctgcagagtgacagggcc

SEQ ID NO: 3517476 - DNA, 25 bp, Homo sapien
tcttgggtgatcgatttgcatactg

SEQ ID NO: 3517477 - DNA, 25 bp, Homo sapien
ttgagttgtaccttccagtttctga

SEQ ID NO: 3517478 - DNA, 25 bp, Homo sapien
tctgaattgtcctgatcttgggtga

SEQ ID NO: 3517479 - DNA, 25 bp, Homo sapien
catactgtatcgatctcaagggctg

SEQ ID NO: 3517480 - DNA, 25 bp, Homo sapien
ggcccagggtcagctttggttttga

SEQ ID NO: 3517481 - DNA, 25 bp, Homo sapien
gcccagggtcagctttggttttgag

SEQ ID NO: 3517482 - DNA, 25 bp, Homo sapien
agacgtgttccctgcagaatcgtac

SEQ ID NO: 3517483 - DNA, 25 bp, Homo sapien
tgcagaatcgtaccacacattccct

SEQ ID NO: 3517484 - DNA, 25 bp, Homo sapien
gaaagtccaggtccactagtccacc

SEQ ID NO: 3517485 - DNA, 25 bp, Homo sapien
ggcttcccaatagctagcggcatgg

SEQ ID NO: 3517486 - DNA, 25 bp, Homo sapien
cacactggtcgcctcaggagtaaaa

SEQ ID NO: 3517487 - DNA, 25 bp, Homo sapien
tagggagaaacttgcaccagctgct

SEQ ID NO: 3517488 - DNA, 25 bp, Homo sapien
agaaccttccggcaattatgaattg

SEQ ID NO: 3517489 - DNA, 25 bp, Homo sapien
tcagtgccttagaaccttccggcaa

SEQ ID NO: 3517490 - DNA, 25 bp, Homo sapien
ccttagaaccttccggcaattatga

SEQ ID NO: 3517491 - DNA, 25 bp, Homo sapien
aaccttccggcaattatgaattggc

SEQ ID NO: 3517492 - DNA, 25 bp, Homo sapien
cgcctacgcatggttggggcgcttg

SEQ ID NO: 3517493 - DNA, 25 bp, Homo sapien
tggttggggcgcttgcctcccagct

SEQ ID NO: 3517494 - DNA, 25 bp, Homo sapien
catggttggggcgcttgcctcccag

SEQ ID NO: 3517495 - DNA, 25 bp, Homo sapien
ctacgcatggttggggcgcttgcct

SEQ ID NO: 3517496 - DNA, 25 bp, Homo sapien
ggaggacagaaagccccaaacggca

SEQ ID NO: 3517497 - DNA, 25 bp, Homo sapien
cacagtccgcctagcttttcccaga

SEQ ID NO: 3517498 - DNA, 25 bp, Homo sapien
cgccattcacagtccgcctagcttt

SEQ ID NO: 3517499 - DNA, 25 bp, Homo sapien
cagtccgcctagcttttcccagaag

SEQ ID NO: 3517500 - DNA, 25 bp, Homo sapien
gcaacatgcggaatcaattttcggg

SEQ ID NO: 3517501 - DNA, 25 bp, Homo sapien
aaacgttcgggctgatgtcggcaac

SEQ ID NO: 3517502 - DNA, 25 bp, Homo sapien
acttggcccgggagttggctgcggg

SEQ ID NO: 3517503 - DNA, 25 bp, Homo sapien
cggagggccctcacggctgagcaaa

SEQ ID NO: 3517504 - DNA, 25 bp, Homo sapien
ggtcatggaatttagccacccctga

SEQ ID NO: 3517505 - DNA, 25 bp, Homo sapien
gagtaagtgtggcatgttcacccgg

SEQ ID NO: 3517506 - DNA, 25 bp, Homo sapien
cacccctgaatgtgggcgacaaaag

SEQ ID NO: 3517507 - DNA, 25 bp, Homo sapien
gttcacccggtgagagccactcagt

SEQ ID NO: 3517508 - DNA, 25 bp, Homo sapien
tcaggaggttctgatttccatcgtt

SEQ ID NO: 3517509 - DNA, 25 bp, Homo sapien
gctgtaggaaaccttggcgaaggcc

SEQ ID NO: 3517510 - DNA, 25 bp, Homo sapien
ggccctgacacattcgaaatttcac

SEQ ID NO: 3517511 - DNA, 25 bp, Homo sapien
tggtgaatatttgtgcagatgcctc

SEQ ID NO: 3517512 - DNA, 25 bp, Homo sapien
gcatgcttggactgaccaatgtgtg

SEQ ID NO: 3517513 - DNA, 25 bp, Homo sapien
tgtgagtggtgagacccattcagtt

SEQ ID NO: 3517514 - DNA, 25 bp, Homo sapien
agggcagccaatcccagtcttctct

SEQ ID NO: 3517515 - DNA, 25 bp, Homo sapien
ggcagccaagcttgccaaagggcag

SEQ ID NO: 3517516 - DNA, 25 bp, Homo sapien
tagagaagatccagtgaggacatca

SEQ ID NO: 3517517 - DNA, 25 bp, Homo sapien
tgatcagtttattgattagagaaga

SEQ ID NO: 3517518 - DNA, 25 bp, Homo sapien
aaatctgagagggagctttgagtgt

SEQ ID NO: 3517519 - DNA, 25 bp, Homo sapien
tccacccatggagggatggcacctg

SEQ ID NO: 3517520 - DNA, 25 bp, Homo sapien
gggcacatggggtattttggggaga

SEQ ID NO: 3517521 - DNA, 25 bp, Homo sapien
ggcacatggggtattttggggagac

SEQ ID NO: 3517522 - DNA, 25 bp, Homo sapien
agggcacatggggtattttggggag

SEQ ID NO: 3517523 - DNA, 25 bp, Homo sapien
cccatggacgatgggggcactcaga

SEQ ID NO: 3517524 - DNA, 25 bp, Homo sapien
aacccagtccagacagatcaggctc

SEQ ID NO: 3517525 - DNA, 25 bp, Homo sapien
ttaggtgagccgcatctgggaaccc

SEQ ID NO: 3517526 - DNA, 25 bp, Homo sapien
cttggcctttaggtgagccgcatct

SEQ ID NO: 3517527 - DNA, 25 bp, Homo sapien
ccgtgttccgacagagcctgtacaa

SEQ ID NO: 3517528 - DNA, 25 bp, Homo sapien
aatattttggagcctttgtaattca

SEQ ID NO: 3517529 - DNA, 25 bp, Homo sapien
tgtggactcccgtgttccgacagag

SEQ ID NO: 3517530 - DNA, 25 bp, Homo sapien
tgtacaagaggaataccatccaaga

SEQ ID NO: 3517531 - DNA, 25 bp, Homo sapien
ctgaattttcatagaatgggggaac

SEQ ID NO: 3517532 - DNA, 25 bp, Homo sapien
ttaaaccagtcttgttcctgcccag

SEQ ID NO: 3517533 - DNA, 25 bp, Homo sapien
cacagtacttcattatgtgggccac

SEQ ID NO: 3517534 - DNA, 25 bp, Homo sapien
gcccagctatctttcacctacataa

SEQ ID NO: 3517535 - DNA, 25 bp, Homo sapien
ggcatctccctttttgcactcacag

SEQ ID NO: 3517536 - DNA, 25 bp, Homo sapien
ccagggctagtgtgcttgtccaaca

SEQ ID NO: 3517537 - DNA, 25 bp, Homo sapien
tccagggctagtgtgcttgtccaac

SEQ ID NO: 3517538 - DNA, 25 bp, Homo sapien
ggcatctgtggagggtcccagttac

SEQ ID NO: 3517539 - DNA, 25 bp, Homo sapien
ccttcctggcatctgtggagggtcc

SEQ ID NO: 3517540 - DNA, 25 bp, Homo sapien
catctgtggagggtcccagttacct

SEQ ID NO: 3517541 - DNA, 25 bp, Homo sapien
cctggcatctgtggagggtcccagt

SEQ ID NO: 3517542 - DNA, 25 bp, Homo sapien
gggcttcaggaaggccgttgcctga

SEQ ID NO: 3517543 - DNA, 25 bp, Homo sapien
caggaaggccgttgcctgaatgcaa

SEQ ID NO: 3517544 - DNA, 25 bp, Homo sapien
tgaatgcaaacagcgtagacttgat

SEQ ID NO: 3517545 - DNA, 25 bp, Homo sapien
aacagcgtagacttgatcttgtgtc

SEQ ID NO: 3517546 - DNA, 25 bp, Homo sapien
gaaccccttgtctctgagcagactg

SEQ ID NO: 3517547 - DNA, 25 bp, Homo sapien
ggaaggaacggacactaagtgaaca

SEQ ID NO: 3517548 - DNA, 25 bp, Homo sapien
tcgtgggatcactgccctggctctc

SEQ ID NO: 3517549 - DNA, 25 bp, Homo sapien
attgcagcctcgtgggatcactgcc

SEQ ID NO: 3517550 - DNA, 25 bp, Homo sapien
ctgataaacacttccccttcctagt

SEQ ID NO: 3517551 - DNA, 25 bp, Homo sapien
tgataaacacttccccttcctagtc

SEQ ID NO: 3517552 - DNA, 25 bp, Homo sapien
ttgctggacaaaaagatgggctctt

SEQ ID NO: 3517553 - DNA, 25 bp, Homo sapien
tagaagctgatatcactgggaaccg

SEQ ID NO: 3517554 - DNA, 25 bp, Homo sapien
cactctggatgcaactcattgctgg

SEQ ID NO: 3517555 - DNA, 25 bp, Homo sapien
cactcttggctgctaggctcgtaga

SEQ ID NO: 3517556 - DNA, 25 bp, Homo sapien
actccaaaaggctctaagctgtttc

SEQ ID NO: 3517557 - DNA, 25 bp, Homo sapien
ctccaaaaggctctaagctgtttca

SEQ ID NO: 3517558 - DNA, 25 bp, Homo sapien
ctgacacgaagaagtcaggtaaaga

SEQ ID NO: 3517559 - DNA, 25 bp, Homo sapien
caatgccatgctctcttatcttctc

SEQ ID NO: 3517560 - DNA, 25 bp, Homo sapien
aagtcaggtaaagaggcaatgccat

SEQ ID NO: 3517561 - DNA, 25 bp, Homo sapien
gtaaagaggcaatgccatgctctct

SEQ ID NO: 3517562 - DNA, 25 bp, Homo sapien
ctccagcagcaagagggtggcacat

SEQ ID NO: 3517563 - DNA, 25 bp, Homo sapien
aggctccagcagcaagagggtggca

SEQ ID NO: 3517564 - DNA, 25 bp, Homo sapien
agggcaggagagctctgcaggctcc

SEQ ID NO: 3517565 - DNA, 25 bp, Homo sapien
cttgggccaggcagaagcaatggca

SEQ ID NO: 3517566 - DNA, 25 bp, Homo sapien
tcacccaaagatggcatgttgaaca

SEQ ID NO: 3517567 - DNA, 25 bp, Homo sapien
ggtgccaacatacaccaggatagat

SEQ ID NO: 3517568 - DNA, 25 bp, Homo sapien
agttcttatagacactcccctaagg

SEQ ID NO: 3517569 - DNA, 25 bp, Homo sapien
tcccttaattatgaggcagaggagg

SEQ ID NO: 3517570 - DNA, 25 bp, Homo sapien
tgctataggaaccaaagcacagtac

SEQ ID NO: 3517571 - DNA, 25 bp, Homo sapien
ggccacacccagtgttgctatagga

SEQ ID NO: 3517572 - DNA, 25 bp, Homo sapien
gccatgggccaagtaggtacctgca

SEQ ID NO: 3517573 - DNA, 25 bp, Homo sapien
gatgtgatggcaacccttaaggtca

SEQ ID NO: 3517574 - DNA, 25 bp, Homo sapien
caacagccctacacaaactttacac

SEQ ID NO: 3517575 - DNA, 25 bp, Homo sapien
agagttgcagttgtcccaacagccc

SEQ ID NO: 3517576 - DNA, 25 bp, Homo sapien
cttgacaacagagttgcagttgtcc

SEQ ID NO: 3517577 - DNA, 25 bp, Homo sapien
tttacactttgaaacagcagccagc

SEQ ID NO: 3517578 - DNA, 25 bp, Homo sapien
ggtgtactccgaagaagcagcctgg

SEQ ID NO: 3517579 - DNA, 25 bp, Homo sapien
taatttcagccctagagtgatcacg

SEQ ID NO: 3517580 - DNA, 25 bp, Homo sapien
tcctactgagggtaaatgggctttc

SEQ ID NO: 3517581 - DNA, 25 bp, Homo sapien
gctgagctgggtacacatgaaaaca

SEQ ID NO: 3517582 - DNA, 25 bp, Homo sapien
tactatgaaatagggagcaccgcaa

SEQ ID NO: 3517583 - DNA, 25 bp, Homo sapien
gaatctaaactgacatgacgggacg

SEQ ID NO: 3517584 - DNA, 25 bp, Homo sapien
tattaacggccgatctcagaggtgg

SEQ ID NO: 3517585 - DNA, 25 bp, Homo sapien
ggtgaaacgttttgctgtcccagct

SEQ ID NO: 3517586 - DNA, 25 bp, Homo sapien
ggcttcaggtttggccgcaggactc

SEQ ID NO: 3517587 - DNA, 25 bp, Homo sapien
cagagttaacagtaggaacatccca

SEQ ID NO: 3517588 - DNA, 25 bp, Homo sapien
caactcagtgtaaaggtgccagccc

SEQ ID NO: 3517589 - DNA, 25 bp, Homo sapien
tgaactccctagatgtgccagctgg

SEQ ID NO: 3517590 - DNA, 25 bp, Homo sapien
tatgctctacatgcagctgcacacg

SEQ ID NO: 3517591 - DNA, 25 bp, Homo sapien
aacacattcacaacctgtaggccgg

SEQ ID NO: 3517592 - DNA, 25 bp, Homo sapien
tcaacaggcaaacacaattgggtcc

SEQ ID NO: 3517593 - DNA, 25 bp, Homo sapien
ttgtggagccacaaatgcatgcggg

SEQ ID NO: 3517594 - DNA, 25 bp, Homo sapien
ataccataagtgctctggatgaccg

SEQ ID NO: 3517595 - DNA, 25 bp, Homo sapien
tgccatagtgatagcaccaggatac

SEQ ID NO: 3517596 - DNA, 25 bp, Homo sapien
tcatttccagctaggcttccgccat

SEQ ID NO: 3517597 - DNA, 25 bp, Homo sapien
cgaggtgctagagcagtcagatgtc

SEQ ID NO: 3517598 - DNA, 25 bp, Homo sapien
tccctggaggagtactgcaaatctc

SEQ ID NO: 3517599 - DNA, 25 bp, Homo sapien
cctagcatgtcccaaagagtgagat

SEQ ID NO: 3517600 - DNA, 25 bp, Homo sapien
gaagatctcccagcacattttgaaa

SEQ ID NO: 3517601 - DNA, 25 bp, Homo sapien
ggcaaagtttggataacacctggca

SEQ ID NO: 3517602 - DNA, 25 bp, Homo sapien
caggagttctggatcttatgccaaa

SEQ ID NO: 3517603 - DNA, 25 bp, Homo sapien
tctaaccaatgtcgaggccaattat

SEQ ID NO: 3517604 - DNA, 25 bp, Homo sapien
tatcttgtggtagatcccacaacaa

SEQ ID NO: 3517605 - DNA, 25 bp, Homo sapien
gatatcaaaagcatgtctagtttct

SEQ ID NO: 3517606 - DNA, 25 bp, Homo sapien
taagtggatcttgcttagccgggcc

SEQ ID NO: 3517607 - DNA, 25 bp, Homo sapien
gttgcttatactccccaatccgaag

SEQ ID NO: 3517608 - DNA, 25 bp, Homo sapien
tcaacaatgcaggtgcgtttcggtc

SEQ ID NO: 3517609 - DNA, 25 bp, Homo sapien
tccgagacctcatcagttgcttata

SEQ ID NO: 3517610 - DNA, 25 bp, Homo sapien
ttaatgtgtggctcgctgctggcac

SEQ ID NO: 3517611 - DNA, 25 bp, Homo sapien
taatgttggagttatgcatgtcggg

SEQ ID NO: 3517612 - DNA, 25 bp, Homo sapien
cctttgcccaaaccatgaatgcatt

SEQ ID NO: 3517613 - DNA, 25 bp, Homo sapien
gcgggcgtccctgtagactcgtgct

SEQ ID NO: 3517614 - DNA, 25 bp, Homo sapien
tgtagtttagctgcagagccattca

SEQ ID NO: 3517615 - DNA, 25 bp, Homo sapien
caataatactgctgtagtttagctg

SEQ ID NO: 3517616 - DNA, 25 bp, Homo sapien
tactgctgtagtttagctgcagagc

SEQ ID NO: 3517617 - DNA, 25 bp, Homo sapien
ctgttggccaacaataatactgctg

SEQ ID NO: 3517618 - DNA, 25 bp, Homo sapien
gagtctttaattaccagcaacagca

SEQ ID NO: 3517619 - DNA, 25 bp, Homo sapien
gagacggctttccagctgacctaag

SEQ ID NO: 3517620 - DNA, 25 bp, Homo sapien
cacagttatgtacctggagacggct

SEQ ID NO: 3517621 - DNA, 25 bp, Homo sapien
gcagttagaagcctagacccacagt

SEQ ID NO: 3517622 - DNA, 25 bp, Homo sapien
aaatgactcttagatacaacatata

SEQ ID NO: 3517623 - DNA, 25 bp, Homo sapien
tttggaacacacatatctgataaga

SEQ ID NO: 3517624 - DNA, 25 bp, Homo sapien
tatctgataagaacttgcatctagg

SEQ ID NO: 3517625 - DNA, 25 bp, Homo sapien
aaactctgcttatcaaaagtcattg

SEQ ID NO: 3517626 - DNA, 25 bp, Homo sapien
tgttttcatcttaaggttccttagc

SEQ ID NO: 3517627 - DNA, 25 bp, Homo sapien
gctatctacatcaagaaattcacta

SEQ ID NO: 3517628 - DNA, 25 bp, Homo sapien
tcaactgttgaagctatctacatca

SEQ ID NO: 3517629 - DNA, 25 bp, Homo sapien
agagacatgaatagaaaggcctagt

SEQ ID NO: 3517630 - DNA, 25 bp, Homo sapien
catcttcatttgactttcccgttaa

SEQ ID NO: 3517631 - DNA, 25 bp, Homo sapien
aaggtcgatgacacctgggcccagt

SEQ ID NO: 3517632 - DNA, 25 bp, Homo sapien
cttctggccgagtaaggtcgatgac

SEQ ID NO: 3517633 - DNA, 25 bp, Homo sapien
actggggccccaaattctcaaagcg

SEQ ID NO: 3517634 - DNA, 25 bp, Homo sapien
tgacatggacagcactgacagcatc

SEQ ID NO: 3517635 - DNA, 25 bp, Homo sapien
ggaagattccgttgaaagctgtttg

SEQ ID NO: 3517636 - DNA, 25 bp, Homo sapien
cactgacagcatctagaccatagta

SEQ ID NO: 3517637 - DNA, 25 bp, Homo sapien
atctttcaggaagattccgttgaaa

SEQ ID NO: 3517638 - DNA, 25 bp, Homo sapien
ccagagcttctatgcatatcttctc

SEQ ID NO: 3517639 - DNA, 25 bp, Homo sapien
cctgccagagcttctatgcatatct

SEQ ID NO: 3517640 - DNA, 25 bp, Homo sapien
tatcttctctctgtcggatttgctc

SEQ ID NO: 3517641 - DNA, 25 bp, Homo sapien
atatcttctctctgtcggatttgct

SEQ ID NO: 3517642 - DNA, 25 bp, Homo sapien
catagtttgcattggtattcctggg

SEQ ID NO: 3517643 - DNA, 25 bp, Homo sapien
cctgctgctttaggagggaaaccca

SEQ ID NO: 3517644 - DNA, 25 bp, Homo sapien
gcaatagagagggttgagccaacaa

SEQ ID NO: 3517645 - DNA, 25 bp, Homo sapien
tacacggctcaatttaatgggagag

SEQ ID NO: 3517646 - DNA, 25 bp, Homo sapien
caattacttgatagagtctctgcct

SEQ ID NO: 3517647 - DNA, 25 bp, Homo sapien
cattagatggaaacactctgagtgt

SEQ ID NO: 3517648 - DNA, 25 bp, Homo sapien
tgtacagcctgactacatttgtgct

SEQ ID NO: 3517649 - DNA, 25 bp, Homo sapien
tctgtactgagcatgttcggcatta

SEQ ID NO: 3517650 - DNA, 25 bp, Homo sapien
tgccagagagacaagcctttttcaa

SEQ ID NO: 3517651 - DNA, 25 bp, Homo sapien
gcctttttcaaaccatatgcgaagt

SEQ ID NO: 3517652 - DNA, 25 bp, Homo sapien
agagagacaagcctttttcaaacca

SEQ ID NO: 3517653 - DNA, 25 bp, Homo sapien
accatatgcgaagtgactgattgca

SEQ ID NO: 3517654 - DNA, 25 bp, Homo sapien
ccaggcgatgatccaggcttgctga

SEQ ID NO: 3517655 - DNA, 25 bp, Homo sapien
caggcgatgatccaggcttgctgat

SEQ ID NO: 3517656 - DNA, 25 bp, Homo sapien
aggcgatgatccaggcttgctgatt

SEQ ID NO: 3517657 - DNA, 25 bp, Homo sapien
taagcatatgcatagatccacaaag

SEQ ID NO: 3517658 - DNA, 25 bp, Homo sapien
caaactggctaggagggatgacaac

SEQ ID NO: 3517659 - DNA, 25 bp, Homo sapien
ggaaagtctgttccctatgtagtca

SEQ ID NO: 3517660 - DNA, 25 bp, Homo sapien
tgcaagaccgagaagctaatatccc

SEQ ID NO: 3517661 - DNA, 25 bp, Homo sapien
tactgcctcaaatatcaactataga

SEQ ID NO: 3517662 - DNA, 25 bp, Homo sapien
cttcccttgaagattaatatgtttg

SEQ ID NO: 3517663 - DNA, 25 bp, Homo sapien
gtttgaagcactcacacttgtactt

SEQ ID NO: 3517664 - DNA, 25 bp, Homo sapien
tgtgtaagctgatttgactgcaaac

SEQ ID NO: 3517665 - DNA, 25 bp, Homo sapien
tgacactaaacttgtgatatgtcct

SEQ ID NO: 3517666 - DNA, 25 bp, Homo sapien
ctgacactaaacttgtgatatgtcc

SEQ ID NO: 3517667 - DNA, 25 bp, Homo sapien
aatctatggctgcaggttgatacct

SEQ ID NO: 3517668 - DNA, 25 bp, Homo sapien
tcagtaaagtacaagacagccctca

SEQ ID NO: 3517669 - DNA, 25 bp, Homo sapien
caaatctatggctgcaggttgatac

SEQ ID NO: 3517670 - DNA, 25 bp, Homo sapien
aagtacaagacagccctcaagctgg

SEQ ID NO: 3517671 - DNA, 25 bp, Homo sapien
gctgttcagccccatattatttatg

SEQ ID NO: 3517672 - DNA, 25 bp, Homo sapien
tttcccgtcaacaccatgtggctgt

SEQ ID NO: 3517673 - DNA, 25 bp, Homo sapien
tggatctgctctcgcatcttccgcg

SEQ ID NO: 3517674 - DNA, 25 bp, Homo sapien
cgcgcctcctgaatggctttcatca

SEQ ID NO: 3517675 - DNA, 25 bp, Homo sapien
ctaattcgtaagtctcttcctggtg

SEQ ID NO: 3517676 - DNA, 25 bp, Homo sapien
aagtctcttcctggtgttgactttt

SEQ ID NO: 3517677 - DNA, 25 bp, Homo sapien
tcttcctggtgttgacttttccatt

SEQ ID NO: 3517678 - DNA, 25 bp, Homo sapien
tctcttcctggtgttgacttttcca

SEQ ID NO: 3517679 - DNA, 25 bp, Homo sapien
ccaatggggctagggatgctgcttt

SEQ ID NO: 3517680 - DNA, 25 bp, Homo sapien
cttgggtcgggatgagagattcaga

SEQ ID NO: 3517681 - DNA, 25 bp, Homo sapien
tacaggctctgctgtcttgggtcgg

SEQ ID NO: 3517682 - DNA, 25 bp, Homo sapien
tttggcagattgacagggctggttt

SEQ ID NO: 3517683 - DNA, 25 bp, Homo sapien
gatggcatctttgctccaggtgaca

SEQ ID NO: 3517684 - DNA, 25 bp, Homo sapien
gtaggtgagaccgtccctgctgtgt

SEQ ID NO: 3517685 - DNA, 25 bp, Homo sapien
ttttatcccagtaggtgagaccgtc

SEQ ID NO: 3517686 - DNA, 25 bp, Homo sapien
ttaacttgagttacagggctggtcc

SEQ ID NO: 3517687 - DNA, 25 bp, Homo sapien
tggccagctgagcggcatagagctg

SEQ ID NO: 3517688 - DNA, 25 bp, Homo sapien
gctggccagctgagcggcatagagc

SEQ ID NO: 3517689 - DNA, 25 bp, Homo sapien
ctggccagctgagcggcatagagct

SEQ ID NO: 3517690 - DNA, 25 bp, Homo sapien
taacataactctttgagctaatggg

SEQ ID NO: 3517691 - DNA, 25 bp, Homo sapien
gcagaggctgcattgggtgtggagg

SEQ ID NO: 3517692 - DNA, 25 bp, Homo sapien
tgctcctctaacataactctttgag

SEQ ID NO: 3517693 - DNA, 25 bp, Homo sapien
ctgggtagtttgctcctctaacata

SEQ ID NO: 3517694 - DNA, 25 bp, Homo sapien
aacactgaattgtactagggcaaca

SEQ ID NO: 3517695 - DNA, 25 bp, Homo sapien
tgaaaaagggacacagcaggctaag

SEQ ID NO: 3517696 - DNA, 25 bp, Homo sapien
cattactatcccttctggttggtcc

SEQ ID NO: 3517697 - DNA, 25 bp, Homo sapien
taagtctgttgggtctcttgtctgc

SEQ ID NO: 3517698 - DNA, 25 bp, Homo sapien
gctgcttcagtgcactaatcgctta

SEQ ID NO: 3517699 - DNA, 25 bp, Homo sapien
taatcgcttaaagagcagcaaagac

SEQ ID NO: 3517700 - DNA, 25 bp, Homo sapien
tgtaaatgctccttcttgactctcc

SEQ ID NO: 3517701 - DNA, 25 bp, Homo sapien
gcagccaggcgataattcaacatta

SEQ ID NO: 3517702 - DNA, 25 bp, Homo sapien
catcccagtatggtcaaacatctgc

SEQ ID NO: 3517703 - DNA, 25 bp, Homo sapien
ctaatgcagcaggcgctccatccca

SEQ ID NO: 3517704 - DNA, 25 bp, Homo sapien
gctgaacatgctcagagtgcatccc

SEQ ID NO: 3517705 - DNA, 25 bp, Homo sapien
tctgctggcatgcaacctgctgaac

SEQ ID NO: 3517706 - DNA, 25 bp, Homo sapien
gaatagtaatcttgtctaagtcact

SEQ ID NO: 3517707 - DNA, 25 bp, Homo sapien
tcttgtctaagtcacttaactcttc

SEQ ID NO: 3517708 - DNA, 25 bp, Homo sapien
taatgccaagaatcctgaccaagag

SEQ ID NO: 3517709 - DNA, 25 bp, Homo sapien
gaaagcttctattcctatataccag

SEQ ID NO: 3517710 - DNA, 25 bp, Homo sapien
gaagactgctgtctagtacaggacc

SEQ ID NO: 3517711 - DNA, 25 bp, Homo sapien
tagggtagttttaggtttgcagcaa

SEQ ID NO: 3517712 - DNA, 25 bp, Homo sapien
gacctggcatataatacgtgctaaa

SEQ ID NO: 3517713 - DNA, 25 bp, Homo sapien
ttagggtagttttaggtttgcagca

SEQ ID NO: 3517714 - DNA, 25 bp, Homo sapien
ttttgacttacttaaggaccaatga

SEQ ID NO: 3517715 - DNA, 25 bp, Homo sapien
gacttacttaaggaccaatgataac

SEQ ID NO: 3517716 - DNA, 25 bp, Homo sapien
ttgacttacttaaggaccaatgata

SEQ ID NO: 3517717 - DNA, 25 bp, Homo sapien
cttacttaaggaccaatgataacat

SEQ ID NO: 3517718 - DNA, 25 bp, Homo sapien
ctgccaaaacggtcacttaggccct

SEQ ID NO: 3517719 - DNA, 25 bp, Homo sapien
tttgtggttgtaagagtggccacca

SEQ ID NO: 3517720 - DNA, 25 bp, Homo sapien
aattcctgccaaaacggtcacttag

SEQ ID NO: 3517721 - DNA, 25 bp, Homo sapien
taatttgtgggtgggagacatgacc

SEQ ID NO: 3517722 - DNA, 25 bp, Homo sapien
tggaatgaactgtacggggtagtta

SEQ ID NO: 3517723 - DNA, 25 bp, Homo sapien
atgaactgtacggggtagttatcac

SEQ ID NO: 3517724 - DNA, 25 bp, Homo sapien
gagctgtaaagggctgagtccagaa

SEQ ID NO: 3517725 - DNA, 25 bp, Homo sapien
tggagctgtaaagggctgagtccag

SEQ ID NO: 3517726 - DNA, 25 bp, Homo sapien
aacccttgaccaatcatccgaaaat

SEQ ID NO: 3517727 - DNA, 25 bp, Homo sapien
acttatttcacagctgcatccaaac

SEQ ID NO: 3517728 - DNA, 25 bp, Homo sapien
tcacttatttcacagctgcatccaa

SEQ ID NO: 3517729 - DNA, 25 bp, Homo sapien
tgcatccaaacccttgaccaatcat

SEQ ID NO: 3517730 - DNA, 25 bp, Homo sapien
cagagtccgctggtcatgtggaaaa

SEQ ID NO: 3517731 - DNA, 25 bp, Homo sapien
gaggaatccctgttgggcagcagca

SEQ ID NO: 3517732 - DNA, 25 bp, Homo sapien
aaattgggatcatgagcggaggcat

SEQ ID NO: 3517733 - DNA, 25 bp, Homo sapien
tatgttattccaggggggaagagga

SEQ ID NO: 3517734 - DNA, 25 bp, Homo sapien
cacttaggttctgtctcttccaatt

SEQ ID NO: 3517735 - DNA, 25 bp, Homo sapien
agatgtgtgtgaaacacttaggttc

SEQ ID NO: 3517736 - DNA, 25 bp, Homo sapien
atctttcagagaatcaagacagcag

SEQ ID NO: 3517737 - DNA, 25 bp, Homo sapien
cagagaatcaagacagcagcagatg

SEQ ID NO: 3517738 - DNA, 25 bp, Homo sapien
gccattttttgccatctgccccaga

SEQ ID NO: 3517739 - DNA, 25 bp, Homo sapien
caggtgctattgtttgtccccgaag

SEQ ID NO: 3517740 - DNA, 25 bp, Homo sapien
tctgtgctaagttgttgatgatgcc

SEQ ID NO: 3517741 - DNA, 25 bp, Homo sapien
agatacatgaatgggctaactggcc

SEQ ID NO: 3517742 - DNA, 25 bp, Homo sapien
aatctcacttctggcaaaattgata

SEQ ID NO: 3517743 - DNA, 25 bp, Homo sapien
tttctgataattgcctctcttcctc

SEQ ID NO: 3517744 - DNA, 25 bp, Homo sapien
tgtaaagaggatgaaagcaaatctc

SEQ ID NO: 3517745 - DNA, 25 bp, Homo sapien
tcttaaacataaacctacatcatgt

SEQ ID NO: 3517746 - DNA, 25 bp, Homo sapien
taggctcaaggtatcttcatgtctc

SEQ ID NO: 3517747 - DNA, 25 bp, Homo sapien
tgtagagatatggtcacacccaact

SEQ ID NO: 3517748 - DNA, 25 bp, Homo sapien
tagagatatggtcacacccaactaa

SEQ ID NO: 3517749 - DNA, 25 bp, Homo sapien
ctgggaatataagcacatgcctaat

SEQ ID NO: 3517750 - DNA, 25 bp, Homo sapien
cgaggctgagataatggttcttcta

SEQ ID NO: 3517751 - DNA, 25 bp, Homo sapien
tagtatcttacttttgagccagtag

SEQ ID NO: 3517752 - DNA, 25 bp, Homo sapien
gagccagtaggtatcaattttctca

SEQ ID NO: 3517753 - DNA, 25 bp, Homo sapien
tactgcttaccttaaggaatcaagg

SEQ ID NO: 3517754 - DNA, 25 bp, Homo sapien
tgtaggctctacagtaatttccttg

SEQ ID NO: 3517755 - DNA, 25 bp, Homo sapien
ttaatgacccagtagcagccaatgc

SEQ ID NO: 3517756 - DNA, 25 bp, Homo sapien
aagccactttgggatgggacggtca

SEQ ID NO: 3517757 - DNA, 25 bp, Homo sapien
gaaaccaggatcttttagtcaacca

SEQ ID NO: 3517758 - DNA, 25 bp, Homo sapien
tattgaggctagagatacggagaca

SEQ ID NO: 3517759 - DNA, 25 bp, Homo sapien
tttgcatcattaacttttaaccagg

SEQ ID NO: 3517760 - DNA, 25 bp, Homo sapien
taattttcctagcatcactttcact

SEQ ID NO: 3517761 - DNA, 25 bp, Homo sapien
gctgaggttgtctctattaagccat

SEQ ID NO: 3517762 - DNA, 25 bp, Homo sapien
taaccaggcatcgatagctttattg

SEQ ID NO: 3517763 - DNA, 25 bp, Homo sapien
tcattacagtggctggataccacca

SEQ ID NO: 3517764 - DNA, 25 bp, Homo sapien
tgaggccaacaatgaagatacctta

SEQ ID NO: 3517765 - DNA, 25 bp, Homo sapien
gaactatgccgtaatcaggatccta

SEQ ID NO: 3517766 - DNA, 25 bp, Homo sapien
caagtcatagcaaagatagcctgag

SEQ ID NO: 3517767 - DNA, 25 bp, Homo sapien
aacatactaactcatggcaggaggc

SEQ ID NO: 3517768 - DNA, 25 bp, Homo sapien
gcacatggtagtacttactgaaaaa

SEQ ID NO: 3517769 - DNA, 25 bp, Homo sapien
tctggttgtttatggtcctcactct

SEQ ID NO: 3517770 - DNA, 25 bp, Homo sapien
taattgttccttgcttggaaaaatc

SEQ ID NO: 3517771 - DNA, 25 bp, Homo sapien
gccaatatcctcatagacaaataaa

SEQ ID NO: 3517772 - DNA, 25 bp, Homo sapien
aaggtatactccaaccctcaggatg

SEQ ID NO: 3517773 - DNA, 25 bp, Homo sapien
tatacaattttagcttgccaatatc

SEQ ID NO: 3517774 - DNA, 25 bp, Homo sapien
gctttctagctagtaagtaaaacag

SEQ ID NO: 3517775 - DNA, 25 bp, Homo sapien
acattttcctattcagtattatgta

SEQ ID NO: 3517776 - DNA, 25 bp, Homo sapien
ttttcctattcagtattatgtaatg

SEQ ID NO: 3517777 - DNA, 25 bp, Homo sapien
gagacattttcctattcagtattat

SEQ ID NO: 3517778 - DNA, 25 bp, Homo sapien
agagacattttcctattcagtatta

SEQ ID NO: 3517779 - DNA, 25 bp, Homo sapien
caggagattaattttgtgctgctgt

SEQ ID NO: 3517780 - DNA, 25 bp, Homo sapien
ctggatctgttgctgcaggagatta

SEQ ID NO: 3517781 - DNA, 25 bp, Homo sapien
gaagttgctgctgttgtctcgcaat

SEQ ID NO: 3517782 - DNA, 25 bp, Homo sapien
ttgtgctgctgttgcagaagttgct

SEQ ID NO: 3517783 - DNA, 25 bp, Homo sapien
gaatccttgtagaatagagatagaa

SEQ ID NO: 3517784 - DNA, 25 bp, Homo sapien
tttagaaatcgaatccttgtagaat

SEQ ID NO: 3517785 - DNA, 25 bp, Homo sapien
gaaatcgaatccttgtagaatagag

SEQ ID NO: 3517786 - DNA, 25 bp, Homo sapien
ctaaatggcttaatttggatgtaaa

SEQ ID NO: 3517787 - DNA, 25 bp, Homo sapien
gagagatgatccttagtgagaacac

SEQ ID NO: 3517788 - DNA, 25 bp, Homo sapien
ctacagctcgaagtccagagagatg

SEQ ID NO: 3517789 - DNA, 25 bp, Homo sapien
gatgatccttagtgagaacacactc

SEQ ID NO: 3517790 - DNA, 25 bp, Homo sapien
ctgctacagctcgaagtccagagag

SEQ ID NO: 3517791 - DNA, 25 bp, Homo sapien
gccaatcaatttgattactctctga

SEQ ID NO: 3517792 - DNA, 25 bp, Homo sapien
ttccacatctccagttcgtcagtgc

SEQ ID NO: 3517793 - DNA, 25 bp, Homo sapien
aatcaatttgattactctctgagcc

SEQ ID NO: 3517794 - DNA, 25 bp, Homo sapien
catctccagttcgtcagtgcctttt

SEQ ID NO: 3517795 - DNA, 25 bp, Homo sapien
gtagctgctcccgtaaactgatcag

SEQ ID NO: 3517796 - DNA, 25 bp, Homo sapien
ttcatcatgcgctgccagtagctgc

SEQ ID NO: 3517797 - DNA, 25 bp, Homo sapien
tcatggtggagagctgccgttcttt

SEQ ID NO: 3517798 - DNA, 25 bp, Homo sapien
gctgttggcgagcaaggtccatttg

SEQ ID NO: 3517799 - DNA, 25 bp, Homo sapien
aagaagagatctcacaagcttgaga

SEQ ID NO: 3517800 - DNA, 25 bp, Homo sapien
gaagagatctcacaagcttgagaaa

SEQ ID NO: 3517801 - DNA, 25 bp, Homo sapien
agcaagaagagatctcacaagcttg

SEQ ID NO: 3517802 - DNA, 25 bp, Homo sapien
caagaagagatctcacaagcttgag

SEQ ID NO: 3517803 - DNA, 25 bp, Homo sapien
cctaagacatttaaagatctgggac

SEQ ID NO: 3517804 - DNA, 25 bp, Homo sapien
gagggcagaatttagaaagggacta

SEQ ID NO: 3517805 - DNA, 25 bp, Homo sapien
aggccattgagggtacaggaacacc

SEQ ID NO: 3517806 - DNA, 25 bp, Homo sapien
gactggaggccattgagggtacagg

SEQ ID NO: 3517807 - DNA, 25 bp, Homo sapien
ggagctacctaacatcatctgtttc

SEQ ID NO: 3517808 - DNA, 25 bp, Homo sapien
caacatcacacagtgtgcgcctgac

SEQ ID NO: 3517809 - DNA, 25 bp, Homo sapien
cagcagaggtcatcaggagctacct

SEQ ID NO: 3517810 - DNA, 25 bp, Homo sapien
tacaagtcagcatgccttttatcca

SEQ ID NO: 3517811 - DNA, 25 bp, Homo sapien
ttgttccatggggtcgtctttatcc

SEQ ID NO: 3517812 - DNA, 25 bp, Homo sapien
tccatggggtcgtctttatccccaa

SEQ ID NO: 3517813 - DNA, 25 bp, Homo sapien
ctctcagattagtcaggtggatcag

SEQ ID NO: 3517814 - DNA, 25 bp, Homo sapien
tcagattagtcaggtggatcagtgc

SEQ ID NO: 3517815 - DNA, 25 bp, Homo sapien
ttgtcttaatagagcctgtcagccc

SEQ ID NO: 3517816 - DNA, 25 bp, Homo sapien
ttttatctctccgatgagaaaggca

SEQ ID NO: 3517817 - DNA, 25 bp, Homo sapien
ttaatagagcctgtcagcccacagc

SEQ ID NO: 3517818 - DNA, 25 bp, Homo sapien
tattttatctctccgatgagaaagg

SEQ ID NO: 3517819 - DNA, 25 bp, Homo sapien
ggctctatcacaaaatggtcttcag

SEQ ID NO: 3517820 - DNA, 25 bp, Homo sapien
gtctcaataggaagtcaataatgcg

SEQ ID NO: 3517821 - DNA, 25 bp, Homo sapien
ctggaagagaagagtgccgtgattc

SEQ ID NO: 3517822 - DNA, 25 bp, Homo sapien
gatccattgaattctttaccagttg

SEQ ID NO: 3517823 - DNA, 25 bp, Homo sapien
ccactgttgcacaagtggtagaaaa

SEQ ID NO: 3517824 - DNA, 25 bp, Homo sapien
ccccactgttgcacaagtggtagaa

SEQ ID NO: 3517825 - DNA, 25 bp, Homo sapien
ttgcacaagtggtagaaaatcaaat

SEQ ID NO: 3517826 - DNA, 25 bp, Homo sapien
ctgttgcacaagtggtagaaaatca

SEQ ID NO: 3517827 - DNA, 25 bp, Homo sapien
taagacaatgacttcacatagcctt

SEQ ID NO: 3517828 - DNA, 25 bp, Homo sapien
tatgattcctaagccagttggtctg

SEQ ID NO: 3517829 - DNA, 25 bp, Homo sapien
ttctctactgcaacaaacttgggaa

SEQ ID NO: 3517830 - DNA, 25 bp, Homo sapien
taaagtacgctgttgggagatacag

SEQ ID NO: 3517831 - DNA, 25 bp, Homo sapien
caattatcatgcactgatgaaaaaa

SEQ ID NO: 3517832 - DNA, 25 bp, Homo sapien
tgtaaataggatcctgtctaaatgt

SEQ ID NO: 3517833 - DNA, 25 bp, Homo sapien
taacagttccagacatatagtaggt

SEQ ID NO: 3517834 - DNA, 25 bp, Homo sapien
tactgacacatctatagaatatctc

SEQ ID NO: 3517835 - DNA, 25 bp, Homo sapien
tatactcctgccctaattcttgtgg

SEQ ID NO: 3517836 - DNA, 25 bp, Homo sapien
gcatatgtacagtttcaagtcgatc

SEQ ID NO: 3517837 - DNA, 25 bp, Homo sapien
tcttgtggcttgaacccattccaga

SEQ ID NO: 3517838 - DNA, 25 bp, Homo sapien
aatcagactgtttccaatagaaggc

SEQ ID NO: 3517839 - DNA, 25 bp, Homo sapien
ttcccatgattgacaaacagattca

SEQ ID NO: 3517840 - DNA, 25 bp, Homo sapien
tgcattcccatgattgacaaacaga

SEQ ID NO: 3517841 - DNA, 25 bp, Homo sapien
attcattgcattcccatgattgaca

SEQ ID NO: 3517842 - DNA, 25 bp, Homo sapien
cattgcattcccatgattgacaaac

SEQ ID NO: 3517843 - DNA, 25 bp, Homo sapien
ctatgaaaataaacagttacctgcc

SEQ ID NO: 3517844 - DNA, 25 bp, Homo sapien
aataaacagttacctgcctgtaatt

SEQ ID NO: 3517845 - DNA, 25 bp, Homo sapien
gaaaataaacagttacctgcctgta

SEQ ID NO: 3517846 - DNA, 25 bp, Homo sapien
atgaaaataaacagttacctgcctg

SEQ ID NO: 3517847 - DNA, 25 bp, Homo sapien
atagatacagatgggttatgggccc

SEQ ID NO: 3517848 - DNA, 25 bp, Homo sapien
tatgggccctaccagtagttctgtc

SEQ ID NO: 3517849 - DNA, 25 bp, Homo sapien
tcagccatgaaggttagacccactc

SEQ ID NO: 3517850 - DNA, 25 bp, Homo sapien
gaggcaccttcacactaaggaggaa

SEQ ID NO: 3517851 - DNA, 25 bp, Homo sapien
agttcactggtatttagtctttcca

SEQ ID NO: 3517852 - DNA, 25 bp, Homo sapien
tcttttgaaagtagtttttccatgc

SEQ ID NO: 3517853 - DNA, 25 bp, Homo sapien
atttctccaagaagttcactggtat

SEQ ID NO: 3517854 - DNA, 25 bp, Homo sapien
ttgaaagtagtttttccatgcagga

SEQ ID NO: 3517855 - DNA, 25 bp, Homo sapien
gtttaatgtctttaagttgtcatca

SEQ ID NO: 3517856 - DNA, 25 bp, Homo sapien
tttaatgtctttaagttgtcatcat

SEQ ID NO: 3517857 - DNA, 25 bp, Homo sapien
ccctcccgaaagaagatacagaaca

SEQ ID NO: 3517858 - DNA, 25 bp, Homo sapien
tacttctaccaacaacgtatgagtg

SEQ ID NO: 3517859 - DNA, 25 bp, Homo sapien
tagcatgaattagtagtctggtcct

SEQ ID NO: 3517860 - DNA, 25 bp, Homo sapien
agttatcttatgctccctttccagg

SEQ ID NO: 3517861 - DNA, 25 bp, Homo sapien
gatgctcagggtgcacaactctcag

SEQ ID NO: 3517862 - DNA, 25 bp, Homo sapien
cacaggaaccagtgtcggtaggaac

SEQ ID NO: 3517863 - DNA, 25 bp, Homo sapien
gaactgtgatctacgaactgctgga

SEQ ID NO: 3517864 - DNA, 25 bp, Homo sapien
actccaaggatacccagtcaaaagg

SEQ ID NO: 3517865 - DNA, 25 bp, Homo sapien
aaaatgacaccttctatgtgaccat

SEQ ID NO: 3517866 - DNA, 25 bp, Homo sapien
gaccattatcatccgaagacaagta

SEQ ID NO: 3517867 - DNA, 25 bp, Homo sapien
tatgtgaccattatcatccgaagac

SEQ ID NO: 3517868 - DNA, 25 bp, Homo sapien
ctgctctagctagaagtaaaatgac

SEQ ID NO: 3517869 - DNA, 25 bp, Homo sapien
caatgagctagaattgtcatctcaa

SEQ ID NO: 3517870 - DNA, 25 bp, Homo sapien
gattacccacttctagccaagacgg

SEQ ID NO: 3517871 - DNA, 25 bp, Homo sapien
caagacggaggctgaatttaccctc

SEQ ID NO: 3517872 - DNA, 25 bp, Homo sapien
tcttcacaaccttgacagaagaatg

SEQ ID NO: 3517873 - DNA, 25 bp, Homo sapien
aagttgtacactttagaactagagt

SEQ ID NO: 3517874 - DNA, 25 bp, Homo sapien
cctgatcttaagggaaattcctgta

SEQ ID NO: 3517875 - DNA, 25 bp, Homo sapien
tgatcttaagggaaattcctgtagc

SEQ ID NO: 3517876 - DNA, 25 bp, Homo sapien
acactttagaactagagtattttgt

SEQ ID NO: 3517877 - DNA, 25 bp, Homo sapien
ccaaatgaaatctaattattaccta

SEQ ID NO: 3517878 - DNA, 25 bp, Homo sapien
caaatgaaatctaattattacctac

SEQ ID NO: 3517879 - DNA, 25 bp, Homo sapien
cccaaatgaaatctaattattacct

SEQ ID NO: 3517880 - DNA, 25 bp, Homo sapien
aataacccaacaaggcataattgcc

SEQ ID NO: 3517881 - DNA, 25 bp, Homo sapien
tcaaataacccaacaaggcataatt

SEQ ID NO: 3517882 - DNA, 25 bp, Homo sapien
acccaacaaggcataattgcctaat

SEQ ID NO: 3517883 - DNA, 25 bp, Homo sapien
aacccaacaaggcataattgcctaa

SEQ ID NO: 3517884 - DNA, 25 bp, Homo sapien
gcgtagacgccaagctttctaacag

SEQ ID NO: 3517885 - DNA, 25 bp, Homo sapien
tactcagagctcatagcgtagacgc

SEQ ID NO: 3517886 - DNA, 25 bp, Homo sapien
tatgacctatggtacaaacataaaa

SEQ ID NO: 3517887 - DNA, 25 bp, Homo sapien
cacttcatctgatcaaaactataca

SEQ ID NO: 3517888 - DNA, 25 bp, Homo sapien
tcagcagttatggtttaaaataact

SEQ ID NO: 3517889 - DNA, 25 bp, Homo sapien
actaaggtactccagaaatcttgaa

SEQ ID NO: 3517890 - DNA, 25 bp, Homo sapien
gctgctaatgttcgataatttcagt

SEQ ID NO: 3517891 - DNA, 25 bp, Homo sapien
tcttgttatgtcagagaggaaactc

SEQ ID NO: 3517892 - DNA, 25 bp, Homo sapien
ggagcaatctcaatgtaataggtta

SEQ ID NO: 3517893 - DNA, 25 bp, Homo sapien
tcatagccttattgaagtgaggaca

SEQ ID NO: 3517894 - DNA, 25 bp, Homo sapien
aaaagggtctaattgcataggagca

SEQ ID NO: 3517895 - DNA, 25 bp, Homo sapien
taataggttatacacccaggcactg

SEQ ID NO: 3517896 - DNA, 25 bp, Homo sapien
ttctttcttgtcaacagttttaata

SEQ ID NO: 3517897 - DNA, 25 bp, Homo sapien
tctttcttgtcaacagttttaataa

SEQ ID NO: 3517898 - DNA, 25 bp, Homo sapien
cttctttcttgtcaacagttttaat

SEQ ID NO: 3517899 - DNA, 25 bp, Homo sapien
cttgctgaccccctcctctttaact

SEQ ID NO: 3517900 - DNA, 25 bp, Homo sapien
gaccccctcctctttaactggcatc

SEQ ID NO: 3517901 - DNA, 25 bp, Homo sapien
tgctgaccccctcctctttaactgg

SEQ ID NO: 3517902 - DNA, 25 bp, Homo sapien
gctgaccccctcctctttaactggc

SEQ ID NO: 3517903 - DNA, 25 bp, Homo sapien
gtacccagccaacacagcattttat

SEQ ID NO: 3517904 - DNA, 25 bp, Homo sapien
acagtacccagccaacacagcattt

SEQ ID NO: 3517905 - DNA, 25 bp, Homo sapien
cgcacccggccagccacagtaccca

SEQ ID NO: 3517906 - DNA, 25 bp, Homo sapien
caaccttcgcttgctgggttcacgt

SEQ ID NO: 3517907 - DNA, 25 bp, Homo sapien
gccgctgtaatggtgctgttgcaaa

SEQ ID NO: 3517908 - DNA, 25 bp, Homo sapien
tctcagttctaggtacagctactca

SEQ ID NO: 3517909 - DNA, 25 bp, Homo sapien
tctgcactcccaatgctagcggatg

SEQ ID NO: 3517910 - DNA, 25 bp, Homo sapien
tcaactaagaaagctacgataggtc

SEQ ID NO: 3517911 - DNA, 25 bp, Homo sapien
gaagaacgacgatattcttgtgctc

SEQ ID NO: 3517912 - DNA, 25 bp, Homo sapien
agtccagtagaagaacgacgatatt

SEQ ID NO: 3517913 - DNA, 25 bp, Homo sapien
cagtagaagaacgacgatattcttg

SEQ ID NO: 3517914 - DNA, 25 bp, Homo sapien
tagaagaacgacgatattcttgtgc

SEQ ID NO: 3517915 - DNA, 25 bp, Homo sapien
taatgattaacaaagttctggcaaa

SEQ ID NO: 3517916 - DNA, 25 bp, Homo sapien
cattatttagcgaccgattggaaac

SEQ ID NO: 3517917 - DNA, 25 bp, Homo sapien
caagtcacaagaggttacagtatga

SEQ ID NO: 3517918 - DNA, 25 bp, Homo sapien
ccaagtgtccagaaacaataaacag

SEQ ID NO: 3517919 - DNA, 25 bp, Homo sapien
tcagaagggatgattggctttcagt

SEQ ID NO: 3517920 - DNA, 25 bp, Homo sapien
cagaagggatgattggctttcagtg

SEQ ID NO: 3517921 - DNA, 25 bp, Homo sapien
gaaactttagtatcagcttttccaa

SEQ ID NO: 3517922 - DNA, 25 bp, Homo sapien
tttcagtggggaaactttagtatca

SEQ ID NO: 3517923 - DNA, 25 bp, Homo sapien
cattggaaagcctgtcccaccagga

SEQ ID NO: 3517924 - DNA, 25 bp, Homo sapien
cacaggcaacctagctccagagtct

SEQ ID NO: 3517925 - DNA, 25 bp, Homo sapien
gcagaaagcacacaattccactggg

SEQ ID NO: 3517926 - DNA, 25 bp, Homo sapien
gcaaggcaggtatcattcatacaga

SEQ ID NO: 3517927 - DNA, 25 bp, Homo sapien
atgatacacaagacatgatagtggc

SEQ ID NO: 3517928 - DNA, 25 bp, Homo sapien
tacttagtagtatgatacacaagac

SEQ ID NO: 3517929 - DNA, 25 bp, Homo sapien
catatacttagtagtatgatacaca

SEQ ID NO: 3517930 - DNA, 25 bp, Homo sapien
tgatacacaagacatgatagtggct

SEQ ID NO: 3517931 - DNA, 25 bp, Homo sapien
cagacggtcctggattacaagcagc

SEQ ID NO: 3517932 - DNA, 25 bp, Homo sapien
tccttaggcaagagtcaaagggcct

SEQ ID NO: 3517933 - DNA, 25 bp, Homo sapien
ggttgatcaaagcatctgcctggag

SEQ ID NO: 3517934 - DNA, 25 bp, Homo sapien
tattggcaacaagacgggtgataca

SEQ ID NO: 3517935 - DNA, 25 bp, Homo sapien
taacacatggtaacaaagaggacga

SEQ ID NO: 3517936 - DNA, 25 bp, Homo sapien
tgtggacaacaaagcctcagaagcc

SEQ ID NO: 3517937 - DNA, 25 bp, Homo sapien
tctaggatgtacacgaacctgagtg

SEQ ID NO: 3517938 - DNA, 25 bp, Homo sapien
ctatccccaggaagctagacagtat

SEQ ID NO: 3517939 - DNA, 25 bp, Homo sapien
gaataactttttcctagctagtgac

SEQ ID NO: 3517940 - DNA, 25 bp, Homo sapien
aaacagagcccaacagtgaagtcca

SEQ ID NO: 3517941 - DNA, 25 bp, Homo sapien
gacaattatgcacttctctgaccct

SEQ ID NO: 3517942 - DNA, 25 bp, Homo sapien
aaacggagctatctgtttaacactc

SEQ ID NO: 3517943 - DNA, 25 bp, Homo sapien
gactcccttcgtcaggcttatgtgg

SEQ ID NO: 3517944 - DNA, 25 bp, Homo sapien
tgtgtccaccacatcggcaagactc

SEQ ID NO: 3517945 - DNA, 25 bp, Homo sapien
actggtcattatctcacggtcccga

SEQ ID NO: 3517946 - DNA, 25 bp, Homo sapien
aagactccctttgcggcgctctggg

SEQ ID NO: 3517947 - DNA, 25 bp, Homo sapien
ccttaccactgatacttcagcacat

SEQ ID NO: 3517948 - DNA, 25 bp, Homo sapien
tgggaggccacatgttgatcactgc

SEQ ID NO: 3517949 - DNA, 25 bp, Homo sapien
cagcatcttgttgaatggtactgac

SEQ ID NO: 3517950 - DNA, 25 bp, Homo sapien
tctccatcagctgcacaggcaaatg

SEQ ID NO: 3517951 - DNA, 25 bp, Homo sapien
gacagaacgctgtcccagtcagcat

SEQ ID NO: 3517952 - DNA, 25 bp, Homo sapien
ccactcttcaatccggctttctctt

SEQ ID NO: 3517953 - DNA, 25 bp, Homo sapien
ccagaacttcagaacttgagggcat

SEQ ID NO: 3517954 - DNA, 25 bp, Homo sapien
cttccactcttcaatccggctttct

SEQ ID NO: 3517955 - DNA, 25 bp, Homo sapien
gccagaacttcagaacttgagggca

SEQ ID NO: 3517956 - DNA, 25 bp, Homo sapien
cttcccaaatcacaagaaacctctg

SEQ ID NO: 3517957 - DNA, 25 bp, Homo sapien
ctttgacaccttcccaaatcacaag

SEQ ID NO: 3517958 - DNA, 25 bp, Homo sapien
ttcccaaatcacaagaaacctctga

SEQ ID NO: 3517959 - DNA, 25 bp, Homo sapien
cacctttgacaccttcccaaatcac

SEQ ID NO: 3517960 - DNA, 25 bp, Homo sapien
ccctcctcaactagaaatacgattt

SEQ ID NO: 3517961 - DNA, 25 bp, Homo sapien
tctttccaaaaataggcaccctggc

SEQ ID NO: 3517962 - DNA, 25 bp, Homo sapien
tactactatagtttggccatctgga

SEQ ID NO: 3517963 - DNA, 25 bp, Homo sapien
cacagtgcactactttctccaaagt

SEQ ID NO: 3517964 - DNA, 25 bp, Homo sapien
gatgctggggcacgatatttcccag

SEQ ID NO: 3517965 - DNA, 25 bp, Homo sapien
cctcttcaacaccaaatattatctt

SEQ ID NO: 3517966 - DNA, 25 bp, Homo sapien
ttattcatgccctaacattcacagt

SEQ ID NO: 3517967 - DNA, 25 bp, Homo sapien
ttatttcaatagaatgaggtctcaa

SEQ ID NO: 3517968 - DNA, 25 bp, Homo sapien
ctacttctggcatcatatcggcact

SEQ ID NO: 3517969 - DNA, 25 bp, Homo sapien
gacccaggacagatcaacttaaatt

SEQ ID NO: 3517970 - DNA, 25 bp, Homo sapien
catagcactcttgctgatagtaaga

SEQ ID NO: 3517971 - DNA, 25 bp, Homo sapien
ggaaaacctactgcactatagatag

SEQ ID NO: 3517972 - DNA, 25 bp, Homo sapien
gaatattaaggagtgctatctcaag

SEQ ID NO: 3517973 - DNA, 25 bp, Homo sapien
gatagagcatcaacaaattctttat

SEQ ID NO: 3517974 - DNA, 25 bp, Homo sapien
gctgatagagcatcaacaaattctt

SEQ ID NO: 3517975 - DNA, 25 bp, Homo sapien
aagctgatagagcatcaacaaattc

SEQ ID NO: 3517976 - DNA, 25 bp, Homo sapien
gaaaagctgatagagcatcaacaaa

SEQ ID NO: 3517977 - DNA, 25 bp, Homo sapien
ttgtcctttggtggccacgatatct

SEQ ID NO: 3517978 - DNA, 25 bp, Homo sapien
tcttcattggaagcgtctattgctg

SEQ ID NO: 3517979 - DNA, 25 bp, Homo sapien
ttcattggaagcgtctattgctgtc

SEQ ID NO: 3517980 - DNA, 25 bp, Homo sapien
ttggaagcgtctattgctgtcatta

SEQ ID NO: 3517981 - DNA, 25 bp, Homo sapien
tgagttccttagactcttccacact

SEQ ID NO: 3517982 - DNA, 25 bp, Homo sapien
aatattgagttccttagactcttcc

SEQ ID NO: 3517983 - DNA, 25 bp, Homo sapien
catagattccttatacagcaacatc

SEQ ID NO: 3517984 - DNA, 25 bp, Homo sapien
tccacacttatgtcactacattgct

SEQ ID NO: 3517985 - DNA, 25 bp, Homo sapien
caccccgctgccttaacaatattat

SEQ ID NO: 3517986 - DNA, 25 bp, Homo sapien
cagctctttggatactcattcttgc

SEQ ID NO: 3517987 - DNA, 25 bp, Homo sapien
tcttctctagctggattaataatca

SEQ ID NO: 3517988 - DNA, 25 bp, Homo sapien
tcttgctaagtaaaagcatatttct

SEQ ID NO: 3517989 - DNA, 25 bp, Homo sapien
gcagtagtccatctaaaaccataac

SEQ ID NO: 3517990 - DNA, 25 bp, Homo sapien
gtcttcattccaatagctaagattc

SEQ ID NO: 3517991 - DNA, 25 bp, Homo sapien
ttgtttttctgtagctgagtgcagt

SEQ ID NO: 3517992 - DNA, 25 bp, Homo sapien
ttcattccaatagctaagattccac

SEQ ID NO: 3517993 - DNA, 25 bp, Homo sapien
gacttaggggctggctagaaatatt

SEQ ID NO: 3517994 - DNA, 25 bp, Homo sapien
tactattgttacatgagacaacaac

SEQ ID NO: 3517995 - DNA, 25 bp, Homo sapien
cacccactcctgtttcacctgacta

SEQ ID NO: 3517996 - DNA, 25 bp, Homo sapien
aactgtaggtatttgttccatcacc

SEQ ID NO: 3517997 - DNA, 25 bp, Homo sapien
tcatgtccttgaagctcaccatgac

SEQ ID NO: 3517998 - DNA, 25 bp, Homo sapien
catgtccttgaagctcaccatgacc

SEQ ID NO: 3517999 - DNA, 25 bp, Homo sapien
ttcatgtccttgaagctcaccatga

SEQ ID NO: 3518000 - DNA, 25 bp, Homo sapien
cctatccccaatggtctctcctaac

SEQ ID NO: 3518001 - DNA, 25 bp, Homo sapien
tcctatccccaatggtctctcctaa

SEQ ID NO: 3518002 - DNA, 25 bp, Homo sapien
tgttatgaaacagccttttatccca

SEQ ID NO: 3518003 - DNA, 25 bp, Homo sapien
tgtcagcttctgttatactctgcct

SEQ ID NO: 3518004 - DNA, 25 bp, Homo sapien
tttatcccaggcaaaggtcgcatta

SEQ ID NO: 3518005 - DNA, 25 bp, Homo sapien
gctagtggaacatgagaagtgcttt

SEQ ID NO: 3518006 - DNA, 25 bp, Homo sapien
tcaggctccctagcagttgagacta

SEQ ID NO: 3518007 - DNA, 25 bp, Homo sapien
ttttttccagagtgatagggtctca

SEQ ID NO: 3518008 - DNA, 25 bp, Homo sapien
acctcccagcctgatgttttataga

SEQ ID NO: 3518009 - DNA, 25 bp, Homo sapien
ccagcctgatgttttatagagataa

SEQ ID NO: 3518010 - DNA, 25 bp, Homo sapien
atgccatagtcttctggatttagga

SEQ ID NO: 3518011 - DNA, 25 bp, Homo sapien
gattctcttttccaagaggaccaac

SEQ ID NO: 3518012 - DNA, 25 bp, Homo sapien
tttcttcagtgttaggactccccat

SEQ ID NO: 3518013 - DNA, 25 bp, Homo sapien
aaatgactaagactgatgtgctaca

SEQ ID NO: 3518014 - DNA, 25 bp, Homo sapien
ttccaacttgagacaacagcagccg

SEQ ID NO: 3518015 - DNA, 25 bp, Homo sapien
tgatctaacgttaacctcctctagg

SEQ ID NO: 3518016 - DNA, 25 bp, Homo sapien
taatgattgctgttaaaccaccatg

SEQ ID NO: 3518017 - DNA, 25 bp, Homo sapien
tagccctggccttagcaacaagctc

SEQ ID NO: 3518018 - DNA, 25 bp, Homo sapien
tagaaagtgttctatccctctacca

SEQ ID NO: 3518019 - DNA, 25 bp, Homo sapien
tctccattaagggattgccccagtc

SEQ ID NO: 3518020 - DNA, 25 bp, Homo sapien
cacactgattgcagcatccagagat

SEQ ID NO: 3518021 - DNA, 25 bp, Homo sapien
ttattttgctggacacactgattgc

SEQ ID NO: 3518022 - DNA, 25 bp, Homo sapien
gctggacacactgattgcagcatcc

SEQ ID NO: 3518023 - DNA, 25 bp, Homo sapien
agagatggaggcatgtaaaaatgtt

SEQ ID NO: 3518024 - DNA, 25 bp, Homo sapien
aagttccatatatagacaccaagca

SEQ ID NO: 3518025 - DNA, 25 bp, Homo sapien
taagttccatatatagacaccaagc

SEQ ID NO: 3518026 - DNA, 25 bp, Homo sapien
ttaagttccatatatagacaccaag

SEQ ID NO: 3518027 - DNA, 25 bp, Homo sapien
cacatagtcccctacaaattctaaa

SEQ ID NO: 3518028 - DNA, 25 bp, Homo sapien
acagctccagaaacacgccggtatt

SEQ ID NO: 3518029 - DNA, 25 bp, Homo sapien
atagatttaatctccacatagtccc

SEQ ID NO: 3518030 - DNA, 25 bp, Homo sapien
aatgttaagattactcacagctcca

SEQ ID NO: 3518031 - DNA, 25 bp, Homo sapien
tatgagactatctattccagacagc

SEQ ID NO: 3518032 - DNA, 25 bp, Homo sapien
tagacccctgcgcaaacttcagaga

SEQ ID NO: 3518033 - DNA, 25 bp, Homo sapien
agatcaaactttctaacctgggcac

SEQ ID NO: 3518034 - DNA, 25 bp, Homo sapien
tttcagtaggttgcccaaggaacca

SEQ ID NO: 3518035 - DNA, 25 bp, Homo sapien
ttcagttctaacctaggcaggaaac

SEQ ID NO: 3518036 - DNA, 25 bp, Homo sapien
ttataacccctgtgtagtacccata

SEQ ID NO: 3518037 - DNA, 25 bp, Homo sapien
taccctttcctatgtcgggcactag

SEQ ID NO: 3518038 - DNA, 25 bp, Homo sapien
taggctacctagtcccatataaagg

SEQ ID NO: 3518039 - DNA, 25 bp, Homo sapien
tgggaattggatgctctgtggaact

SEQ ID NO: 3518040 - DNA, 25 bp, Homo sapien
cactagggccttttgatgatgcagt

SEQ ID NO: 3518041 - DNA, 25 bp, Homo sapien
catgcagaatcgtggccactagggc

SEQ ID NO: 3518042 - DNA, 25 bp, Homo sapien
tgaataagacaaggctacatgcaga

SEQ ID NO: 3518043 - DNA, 25 bp, Homo sapien
gctctccaaggtaatgacccctgta

SEQ ID NO: 3518044 - DNA, 25 bp, Homo sapien
ccaaggtaatgacccctgtagcagc

SEQ ID NO: 3518045 - DNA, 25 bp, Homo sapien
ttagctctccaaggtaatgacccct

SEQ ID NO: 3518046 - DNA, 25 bp, Homo sapien
tctccaaggtaatgacccctgtagc

SEQ ID NO: 3518047 - DNA, 25 bp, Homo sapien
cacaaagtgtttactctcatcatgc

SEQ ID NO: 3518048 - DNA, 25 bp, Homo sapien
tctcatcatgcttacgtttcctcct

SEQ ID NO: 3518049 - DNA, 25 bp, Homo sapien
gacctaatcacatccacaaagtgtt

SEQ ID NO: 3518050 - DNA, 25 bp, Homo sapien
catcatgcttacgtttcctcctttc

SEQ ID NO: 3518051 - DNA, 25 bp, Homo sapien
attcattcacttaagtttatatcaa

SEQ ID NO: 3518052 - DNA, 25 bp, Homo sapien
cttgtgtgctccaaaggtataaaat

SEQ ID NO: 3518053 - DNA, 25 bp, Homo sapien
gcttgtgtgctccaaaggtataaaa

SEQ ID NO: 3518054 - DNA, 25 bp, Homo sapien
tgtgtgctccaaaggtataaaatag

SEQ ID NO: 3518055 - DNA, 25 bp, Homo sapien
ctcacagacagacttgcacacctta

SEQ ID NO: 3518056 - DNA, 25 bp, Homo sapien
tgcacaccttactaagaaaccttcc

SEQ ID NO: 3518057 - DNA, 25 bp, Homo sapien
gacttgcacaccttactaagaaacc

SEQ ID NO: 3518058 - DNA, 25 bp, Homo sapien
gacagacttgcacaccttactaaga

SEQ ID NO: 3518059 - DNA, 25 bp, Homo sapien
cacaaaaaatatcagccccagcacc

SEQ ID NO: 3518060 - DNA, 25 bp, Homo sapien
ccccatgcattaaggtggtttggta

SEQ ID NO: 3518061 - DNA, 25 bp, Homo sapien
cagatgcaactcaaacacacagagc

SEQ ID NO: 3518062 - DNA, 25 bp, Homo sapien
tacctaaggcgtggaacccataaga

SEQ ID NO: 3518063 - DNA, 25 bp, Homo sapien
tggctgaagaggtaacagatgcaac

SEQ ID NO: 3518064 - DNA, 25 bp, Homo sapien
ctaggaaactttatggaaaccatgt

SEQ ID NO: 3518065 - DNA, 25 bp, Homo sapien
catgtattccatgctgctcaaccta

SEQ ID NO: 3518066 - DNA, 25 bp, Homo sapien
tattattttggtattgagggccaca

SEQ ID NO: 3518067 - DNA, 25 bp, Homo sapien
tgaacttggagatcattgagtccag

SEQ ID NO: 3518068 - DNA, 25 bp, Homo sapien
acaaaagcactttttatttgaggca

SEQ ID NO: 3518069 - DNA, 25 bp, Homo sapien
cacaaaagcactttttatttgaggc

SEQ ID NO: 3518070 - DNA, 25 bp, Homo sapien
tcacaaaagcactttttatttgagg

SEQ ID NO: 3518071 - DNA, 25 bp, Homo sapien
caaaagcactttttatttgaggcaa

SEQ ID NO: 3518072 - DNA, 25 bp, Homo sapien
tccccagcagggcaaaaagaagggc

SEQ ID NO: 3518073 - DNA, 25 bp, Homo sapien
tgttagtggcactactttaacctgg

SEQ ID NO: 3518074 - DNA, 25 bp, Homo sapien
cacaggctatactacatttgcaatg

SEQ ID NO: 3518075 - DNA, 25 bp, Homo sapien
tattctactgacagggctcctcaga

SEQ ID NO: 3518076 - DNA, 25 bp, Homo sapien
tgttgtagttgagtgaggtggtcat

SEQ ID NO: 3518077 - DNA, 25 bp, Homo sapien
cctgttgtagttgagtgaggtggtc

SEQ ID NO: 3518078 - DNA, 25 bp, Homo sapien
tagttgagtgaggtggtcatatcct

SEQ ID NO: 3518079 - DNA, 25 bp, Homo sapien
ttgtagttgagtgaggtggtcatat

SEQ ID NO: 3518080 - DNA, 25 bp, Homo sapien
taaagaccttaacgttctcagcaaa

SEQ ID NO: 3518081 - DNA, 25 bp, Homo sapien
aagaccttaacgttctcagcaaatg

SEQ ID NO: 3518082 - DNA, 25 bp, Homo sapien
agaccttaacgttctcagcaaatgc

SEQ ID NO: 3518083 - DNA, 25 bp, Homo sapien
gaccttaacgttctcagcaaatgca

SEQ ID NO: 3518084 - DNA, 25 bp, Homo sapien
tccaggaggcaaggtcctcgggctt

SEQ ID NO: 3518085 - DNA, 25 bp, Homo sapien
ggatcctccaggaggcaaggtcctc

SEQ ID NO: 3518086 - DNA, 25 bp, Homo sapien
ggaggcaaggtcctcgggcttggcc

SEQ ID NO: 3518087 - DNA, 25 bp, Homo sapien
ttgatcctgggatcctccaggaggc

SEQ ID NO: 3518088 - DNA, 25 bp, Homo sapien
cgggagagccgagggggctgtaggc

SEQ ID NO: 3518089 - DNA, 25 bp, Homo sapien
ctgtcgggagagccgagggggctgt

SEQ ID NO: 3518090 - DNA, 25 bp, Homo sapien
tcgggagagccgagggggctgtagg

SEQ ID NO: 3518091 - DNA, 25 bp, Homo sapien
ggagagccgagggggctgtaggcag

SEQ ID NO: 3518092 - DNA, 25 bp, Homo sapien
cacaatgcctttggacttaacttct

SEQ ID NO: 3518093 - DNA, 25 bp, Homo sapien
tggttaactgcaggcttatccttta

SEQ ID NO: 3518094 - DNA, 25 bp, Homo sapien
taactgcaggcttatcctttaagcc

SEQ ID NO: 3518095 - DNA, 25 bp, Homo sapien
atctggttaactgcaggcttatcct

SEQ ID NO: 3518096 - DNA, 25 bp, Homo sapien
gttaactgcaggcttatcctttaag

SEQ ID NO: 3518097 - DNA, 25 bp, Homo sapien
taaggtaaggatccaggtagtccag

SEQ ID NO: 3518098 - DNA, 25 bp, Homo sapien
tggacatcctggcaccgttgctgag

SEQ ID NO: 3518099 - DNA, 25 bp, Homo sapien
tcatgtcactaagcgtcttctggca

SEQ ID NO: 3518100 - DNA, 25 bp, Homo sapien
tgctgagcacgaagtggctggccat

SEQ ID NO: 3518101 - DNA, 25 bp, Homo sapien
gatgagtcctaaataccccgacatg

SEQ ID NO: 3518102 - DNA, 25 bp, Homo sapien
gatagaagggaaaagttctatgttc

SEQ ID NO: 3518103 - DNA, 25 bp, Homo sapien
atgtattatatcaaaatagctggaa

SEQ ID NO: 3518104 - DNA, 25 bp, Homo sapien
gacatgatcattatacactctaggc

SEQ ID NO: 3518105 - DNA, 25 bp, Homo sapien
ttcaagaggaaagcaataagcatgg

SEQ ID NO: 3518106 - DNA, 25 bp, Homo sapien
aattgtgtatcaaggcaccccaaga

SEQ ID NO: 3518107 - DNA, 25 bp, Homo sapien
tagtgaaccgcaaacacaaatcagt

SEQ ID NO: 3518108 - DNA, 25 bp, Homo sapien
gagtactaagggctatatgtcccaa

SEQ ID NO: 3518109 - DNA, 25 bp, Homo sapien
gctaagggccaagcaagagacattt

SEQ ID NO: 3518110 - DNA, 25 bp, Homo sapien
catcttcaactggagccttgatgcc

SEQ ID NO: 3518111 - DNA, 25 bp, Homo sapien
ggaaagggacttcactgatgtctgc

SEQ ID NO: 3518112 - DNA, 25 bp, Homo sapien
catttagaaaagcttcgtccatcac

SEQ ID NO: 3518113 - DNA, 25 bp, Homo sapien
caacatttgcttgaacggtactgct

SEQ ID NO: 3518114 - DNA, 25 bp, Homo sapien
tactttattctgtctggacccggtg

SEQ ID NO: 3518115 - DNA, 25 bp, Homo sapien
taaagaggcattgatactaggacca

SEQ ID NO: 3518116 - DNA, 25 bp, Homo sapien
ggacccggtgtatataaatggctac

SEQ ID NO: 3518117 - DNA, 25 bp, Homo sapien
tggaaatatggcctaaagctgtact

SEQ ID NO: 3518118 - DNA, 25 bp, Homo sapien
tagaaattcattacagccatagcct

SEQ ID NO: 3518119 - DNA, 25 bp, Homo sapien
ccagaacggctggagatattactca

SEQ ID NO: 3518120 - DNA, 25 bp, Homo sapien
tagagtaactcacatctcaagcatc

SEQ ID NO: 3518121 - DNA, 25 bp, Homo sapien
tcattgccacacataggtttccttt

SEQ ID NO: 3518122 - DNA, 25 bp, Homo sapien
ggtcttagctgataatacctctgag

SEQ ID NO: 3518123 - DNA, 25 bp, Homo sapien
tgtcagttaaatgtcttccaagctt

SEQ ID NO: 3518124 - DNA, 25 bp, Homo sapien
gagatcaagttaagtagcttcagaa

SEQ ID NO: 3518125 - DNA, 25 bp, Homo sapien
aagtttcttctgacttaattaacat

SEQ ID NO: 3518126 - DNA, 25 bp, Homo sapien
tgtaaagtttcttctgacttaatta

SEQ ID NO: 3518127 - DNA, 25 bp, Homo sapien
gaggatcctcttcctagtccttcaa

SEQ ID NO: 3518128 - DNA, 25 bp, Homo sapien
cagctcatccctagaggatcctctt

SEQ ID NO: 3518129 - DNA, 25 bp, Homo sapien
ggatcctcttcctagtccttcaact

SEQ ID NO: 3518130 - DNA, 25 bp, Homo sapien
tagtccttcaactgtttcttctcac

SEQ ID NO: 3518131 - DNA, 25 bp, Homo sapien
ttcagcaatgcccatctaaatccca

SEQ ID NO: 3518132 - DNA, 25 bp, Homo sapien
tcagcaatgcccatctaaatcccat

SEQ ID NO: 3518133 - DNA, 25 bp, Homo sapien
ccaggtgatttgcatccctactaaa

SEQ ID NO: 3518134 - DNA, 25 bp, Homo sapien
gttataacaatttacactcccagtg

SEQ ID NO: 3518135 - DNA, 25 bp, Homo sapien
tcaccaacacgcaaggcattgtcag

SEQ ID NO: 3518136 - DNA, 25 bp, Homo sapien
tacctgggtcattgattcctatgcc

SEQ ID NO: 3518137 - DNA, 25 bp, Homo sapien
atcttcacatatggtctcatgcaca

SEQ ID NO: 3518138 - DNA, 25 bp, Homo sapien
tcacatatggtctcatgcacagaaa

SEQ ID NO: 3518139 - DNA, 25 bp, Homo sapien
catatggtctcatgcacagaaatct

SEQ ID NO: 3518140 - DNA, 25 bp, Homo sapien
tggtctcatgcacagaaatctttat

SEQ ID NO: 3518141 - DNA, 25 bp, Homo sapien
aaacgtcaaccccagcaactgttca

SEQ ID NO: 3518142 - DNA, 25 bp, Homo sapien
aggaaacgtcaaccccagcaactgt

SEQ ID NO: 3518143 - DNA, 25 bp, Homo sapien
atgaggaaacgtcaaccccagcaac

SEQ ID NO: 3518144 - DNA, 25 bp, Homo sapien
cttatgaggaaacgtcaaccccagc

SEQ ID NO: 3518145 - DNA, 25 bp, Homo sapien
tctattctttgggggatgcggttta

SEQ ID NO: 3518146 - DNA, 25 bp, Homo sapien
gggatgcggtttaggtcggctcgca

SEQ ID NO: 3518147 - DNA, 25 bp, Homo sapien
tttaggtcggctcgcaagggaagcc

SEQ ID NO: 3518148 - DNA, 25 bp, Homo sapien
gctcgcaagggaagcccgttttgtc

SEQ ID NO: 3518149 - DNA, 25 bp, Homo sapien
tgaaccttcaaagccgacacgcatt

SEQ ID NO: 3518150 - DNA, 25 bp, Homo sapien
cacagaacgaggagggatgactaca

SEQ ID NO: 3518151 - DNA, 25 bp, Homo sapien
agcgctcacaaagccctcgggatgt

SEQ ID NO: 3518152 - DNA, 25 bp, Homo sapien
ggtaacaagagatacagcgctcaca

SEQ ID NO: 3518153 - DNA, 25 bp, Homo sapien
cgaacttcacggagacttacaaatt

SEQ ID NO: 3518154 - DNA, 25 bp, Homo sapien
ttaggatggcgataacagctttctg

SEQ ID NO: 3518155 - DNA, 25 bp, Homo sapien
cgagagggcagacagatttccggac

SEQ ID NO: 3518156 - DNA, 25 bp, Homo sapien
tttccggacgaatacttaggatggc

SEQ ID NO: 3518157 - DNA, 25 bp, Homo sapien
ggcgtagcccgttaactcaagtctg

SEQ ID NO: 3518158 - DNA, 25 bp, Homo sapien
gctaggtcaattgtcacagtccggg

SEQ ID NO: 3518159 - DNA, 25 bp, Homo sapien
taagtattcaaagcatttcccgtcg

SEQ ID NO: 3518160 - DNA, 25 bp, Homo sapien
caatcagtgtgagcggccatgtcgt

SEQ ID NO: 3518161 - DNA, 25 bp, Homo sapien
ccacgcggcgcaagaaccccgggcg

SEQ ID NO: 3518162 - DNA, 25 bp, Homo sapien
agccccacgcggcgcaagaaccccg

SEQ ID NO: 3518163 - DNA, 25 bp, Homo sapien
gcggcgcaagaaccccgggcgctga

SEQ ID NO: 3518164 - DNA, 25 bp, Homo sapien
gcgcaagaaccccgggcgctgagct

SEQ ID NO: 3518165 - DNA, 25 bp, Homo sapien
cgctgcctctgtgttgtccgaatgt

SEQ ID NO: 3518166 - DNA, 25 bp, Homo sapien
gcagcagtcgctgcctctgtgttgt

SEQ ID NO: 3518167 - DNA, 25 bp, Homo sapien
agtcgctgcctctgtgttgtccgaa

SEQ ID NO: 3518168 - DNA, 25 bp, Homo sapien
ctgcctctgtgttgtccgaatgtcc

SEQ ID NO: 3518169 - DNA, 25 bp, Homo sapien
tgcgcaccgcaaccagcaaaggcaa

SEQ ID NO: 3518170 - DNA, 25 bp, Homo sapien
aaccagcaaaggcaattcggctttg

SEQ ID NO: 3518171 - DNA, 25 bp, Homo sapien
aaggcaattcggctttgctaacttt

SEQ ID NO: 3518172 - DNA, 25 bp, Homo sapien
cgcaaccagcaaaggcaattcggct

SEQ ID NO: 3518173 - DNA, 25 bp, Homo sapien
ccatccgggcggacaattcagacct

SEQ ID NO: 3518174 - DNA, 25 bp, Homo sapien
gaagtcgctaacttctttcaggaag

SEQ ID NO: 3518175 - DNA, 25 bp, Homo sapien
tggacaagcataactgtcaatcgct

SEQ ID NO: 3518176 - DNA, 25 bp, Homo sapien
ggaaggacttcaaagctactgtata

SEQ ID NO: 3518177 - DNA, 25 bp, Homo sapien
ttcaccgcgtctcattacatctgcc

SEQ ID NO: 3518178 - DNA, 25 bp, Homo sapien
gagtgccagtctgcgtacaccttca

SEQ ID NO: 3518179 - DNA, 25 bp, Homo sapien
tgcgagttacccagggctgcagtga

SEQ ID NO: 3518180 - DNA, 25 bp, Homo sapien
gaaaagctgtttgtgttagcctgcg

SEQ ID NO: 3518181 - DNA, 25 bp, Homo sapien
tgccaaagtcctgtaaccatctact

SEQ ID NO: 3518182 - DNA, 25 bp, Homo sapien
gatttcccccccacgattgaatgga

SEQ ID NO: 3518183 - DNA, 25 bp, Homo sapien
tggaagctctgtactgtaccgactt

SEQ ID NO: 3518184 - DNA, 25 bp, Homo sapien
tccatctgcctaagagaaactgtaa

SEQ ID NO: 3518185 - DNA, 25 bp, Homo sapien
taagtcgccaccttgaggtcgaggg

SEQ ID NO: 3518186 - DNA, 25 bp, Homo sapien
tgcctaagtcgccaccttgaggtcg

SEQ ID NO: 3518187 - DNA, 25 bp, Homo sapien
cagctaggggctgtagagacgaacc

SEQ ID NO: 3518188 - DNA, 25 bp, Homo sapien
tagagacgaacccagctgacactgg

SEQ ID NO: 3518189 - DNA, 25 bp, Homo sapien
agggtgggggcagcttcgaagaggc

SEQ ID NO: 3518190 - DNA, 25 bp, Homo sapien
gggtgggggcagcttcgaagaggca

SEQ ID NO: 3518191 - DNA, 25 bp, Homo sapien
agagggtgggggcagcttcgaagag

SEQ ID NO: 3518192 - DNA, 25 bp, Homo sapien
tgggggcagcttcgaagaggcatac

SEQ ID NO: 3518193 - DNA, 25 bp, Homo sapien
gcggtgacctcggctcagagctgac

SEQ ID NO: 3518194 - DNA, 25 bp, Homo sapien
agagctgactccgtactccctggga

SEQ ID NO: 3518195 - DNA, 25 bp, Homo sapien
gaagaccgagctcccttctgcggtg

SEQ ID NO: 3518196 - DNA, 25 bp, Homo sapien
caactgctccggtcctggccgaaga

SEQ ID NO: 3518197 - DNA, 25 bp, Homo sapien
ctggtcactgcctccaaggcttggg

SEQ ID NO: 3518198 - DNA, 25 bp, Homo sapien
cacaccgtaggtcctcctcggtgaa

SEQ ID NO: 3518199 - DNA, 25 bp, Homo sapien
tcctcctcggtgaactgtgccccat

SEQ ID NO: 3518200 - DNA, 25 bp, Homo sapien
catctgcaaggccacaccgtaggtc

SEQ ID NO: 3518201 - DNA, 25 bp, Homo sapien
ttcatcccagctttcaatcaaattt

SEQ ID NO: 3518202 - DNA, 25 bp, Homo sapien
tcatcccagctttcaatcaaatttt

SEQ ID NO: 3518203 - DNA, 25 bp, Homo sapien
attcgtcatccttacaatcacagat

SEQ ID NO: 3518204 - DNA, 25 bp, Homo sapien
tcattcgtcatccttacaatcacag

SEQ ID NO: 3518205 - DNA, 25 bp, Homo sapien
tgctttacccgttgtttcaccacta

SEQ ID NO: 3518206 - DNA, 25 bp, Homo sapien
caaatcgcaagttcacttggtatat

SEQ ID NO: 3518207 - DNA, 25 bp, Homo sapien
tgcacaaatcgcaagttcacttggt

SEQ ID NO: 3518208 - DNA, 25 bp, Homo sapien
tctgctttacccgttgtttcaccac

SEQ ID NO: 3518209 - DNA, 25 bp, Homo sapien
accacaaagaggtgctccttaagta

SEQ ID NO: 3518210 - DNA, 25 bp, Homo sapien
ccacaaagaggtgctccttaagtaa

SEQ ID NO: 3518211 - DNA, 25 bp, Homo sapien
cacaaagaggtgctccttaagtaaa

SEQ ID NO: 3518212 - DNA, 25 bp, Homo sapien
acaaagaggtgctccttaagtaaag

SEQ ID NO: 3518213 - DNA, 25 bp, Homo sapien
gcaggaagagcagaggtggtcggag

SEQ ID NO: 3518214 - DNA, 25 bp, Homo sapien
gggcaggaagagcagaggtggtcgg

SEQ ID NO: 3518215 - DNA, 25 bp, Homo sapien
caggaagagcagaggtggtcggaga

SEQ ID NO: 3518216 - DNA, 25 bp, Homo sapien
ggaagagcagaggtggtcggagaag

SEQ ID NO: 3518217 - DNA, 25 bp, Homo sapien
aagtgaagattaggctcagtggagc

SEQ ID NO: 3518218 - DNA, 25 bp, Homo sapien
aatcttcctagcattccacccagaa

SEQ ID NO: 3518219 - DNA, 25 bp, Homo sapien
gctcagtggagccagattggaatcc

SEQ ID NO: 3518220 - DNA, 25 bp, Homo sapien
tgggaagtgaagattaggctcagtg

SEQ ID NO: 3518221 - DNA, 25 bp, Homo sapien
cacaggttctgcatccgtgcactca

SEQ ID NO: 3518222 - DNA, 25 bp, Homo sapien
cagaagtcttattactcatgctgtc

SEQ ID NO: 3518223 - DNA, 25 bp, Homo sapien
caagtagtagggaaaatggatggac

SEQ ID NO: 3518224 - DNA, 25 bp, Homo sapien
cacagttagtcctctatatccacag

SEQ ID NO: 3518225 - DNA, 25 bp, Homo sapien
ctgttggataagtaacagattcata

SEQ ID NO: 3518226 - DNA, 25 bp, Homo sapien
aagacaggaaataccagaccaccat

SEQ ID NO: 3518227 - DNA, 25 bp, Homo sapien
ggataagtaacagattcatagaaag

SEQ ID NO: 3518228 - DNA, 25 bp, Homo sapien
atagaaagacaggaaataccagacc

SEQ ID NO: 3518229 - DNA, 25 bp, Homo sapien
ggaatcctacactgcctactttcag

SEQ ID NO: 3518230 - DNA, 25 bp, Homo sapien
ataatagataaaagaaggaacagcc

SEQ ID NO: 3518231 - DNA, 25 bp, Homo sapien
catacatgtgctattgtggaaacaa

SEQ ID NO: 3518232 - DNA, 25 bp, Homo sapien
tgcctgcttagagaaatcatacatg

SEQ ID NO: 3518233 - DNA, 25 bp, Homo sapien
caaggctctgatttaaaagttgtca

SEQ ID NO: 3518234 - DNA, 25 bp, Homo sapien
gtcatttagaatccggcaaaacagt

SEQ ID NO: 3518235 - DNA, 25 bp, Homo sapien
taaaagttgtcatttagaatccggc

SEQ ID NO: 3518236 - DNA, 25 bp, Homo sapien
acttctgtagatttcaaggctctga

SEQ ID NO: 3518237 - DNA, 25 bp, Homo sapien
gataaaatgtcccagtctttagtat

SEQ ID NO: 3518238 - DNA, 25 bp, Homo sapien
tctgataaaatgtcccagtctttag

SEQ ID NO: 3518239 - DNA, 25 bp, Homo sapien
tgaagatttaccatccaggtgccaa

SEQ ID NO: 3518240 - DNA, 25 bp, Homo sapien
gatcttgtttcacagtaacttgaag

SEQ ID NO: 3518241 - DNA, 25 bp, Homo sapien
agccccgaggctcaattcgcgctgt

SEQ ID NO: 3518242 - DNA, 25 bp, Homo sapien
tggaggaagcgttcccgcggatgtg

SEQ ID NO: 3518243 - DNA, 25 bp, Homo sapien
cgaggctcaattcgcgctgtgtggc

SEQ ID NO: 3518244 - DNA, 25 bp, Homo sapien
aagcgttcccgcggatgtgtatggc

SEQ ID NO: 3518245 - DNA, 25 bp, Homo sapien
aggccccgccttcggctggtggagg

SEQ ID NO: 3518246 - DNA, 25 bp, Homo sapien
aattcgcgctgtgtggcgggagtgc

SEQ ID NO: 3518247 - DNA, 25 bp, Homo sapien
tccaccagccgaaggcggggcctct

SEQ ID NO: 3518248 - DNA, 25 bp, Homo sapien
actcccgccacacagcgcgaattga

SEQ ID NO: 3518249 - DNA, 25 bp, Homo sapien
gccatacacatccgcgggaacgctt

SEQ ID NO: 3518250 - DNA, 25 bp, Homo sapien
cacacagcgcgaattgagcctcggg

SEQ ID NO: 3518251 - DNA, 25 bp, Homo sapien
gccacacagcgcgaattgagcctcg

SEQ ID NO: 3518252 - DNA, 25 bp, Homo sapien
atacacatccgcgggaacgcttcct

SEQ ID NO: 3518253 - DNA, 25 bp, Homo sapien
tcattgcatactggcccgaataaaa

SEQ ID NO: 3518254 - DNA, 25 bp, Homo sapien
tctgattcattgcatactggcccga

SEQ ID NO: 3518255 - DNA, 25 bp, Homo sapien
gattcattgcatactggcccgaata

SEQ ID NO: 3518256 - DNA, 25 bp, Homo sapien
tgtccgtgactaaaactacaattcc

SEQ ID NO: 3518257 - DNA, 25 bp, Homo sapien
tgtgtccgtgactaaaactacaatt

SEQ ID NO: 3518258 - DNA, 25 bp, Homo sapien
tactggcccgaataaaaaagatgtg

SEQ ID NO: 3518259 - DNA, 25 bp, Homo sapien
ggaattgtagttttagtcacggaca

SEQ ID NO: 3518260 - DNA, 25 bp, Homo sapien
aattgtagttttagtcacggacaca

SEQ ID NO: 3518261 - DNA, 25 bp, Homo sapien
tattcgggccagtatgcaatgaatc

SEQ ID NO: 3518262 - DNA, 25 bp, Homo sapien
ttttattcgggccagtatgcaatga

SEQ ID NO: 3518263 - DNA, 25 bp, Homo sapien
tcgggccagtatgcaatgaatcaga

SEQ ID NO: 3518264 - DNA, 25 bp, Homo sapien
cacatcttttttattcgggccagta

SEQ ID NO: 3518265 - DNA, 25 bp, Homo sapien
ttctctgccacagtcgtcaccgttg

SEQ ID NO: 3518266 - DNA, 25 bp, Homo sapien
aaccagcagcttacaatccgccaag

SEQ ID NO: 3518267 - DNA, 25 bp, Homo sapien
agcagcttacaatccgccaagggcc

SEQ ID NO: 3518268 - DNA, 25 bp, Homo sapien
agcagcgccactacagaacgcagag

SEQ ID NO: 3518269 - DNA, 25 bp, Homo sapien
aagggcccaagcagcgccactacag

SEQ ID NO: 3518270 - DNA, 25 bp, Homo sapien
gacgaaaaatgccgaaccctctcgc

SEQ ID NO: 3518271 - DNA, 25 bp, Homo sapien
caacggtgacgactgtggcagagaa

SEQ ID NO: 3518272 - DNA, 25 bp, Homo sapien
cccttggcggattgtaagctgctgg

SEQ ID NO: 3518273 - DNA, 25 bp, Homo sapien
tctgtagtggcgctgcttgggccct

SEQ ID NO: 3518274 - DNA, 25 bp, Homo sapien
ggcatttttcgtcgggatccccgca

SEQ ID NO: 3518275 - DNA, 25 bp, Homo sapien
tttcgtcgggatccccgcaaggatg

SEQ ID NO: 3518276 - DNA, 25 bp, Homo sapien
gctctgcgttctgtagtggcgctgc

SEQ ID NO: 3518277 - DNA, 25 bp, Homo sapien
ggaaaaatctgtacaaacgtgcacg

SEQ ID NO: 3518278 - DNA, 25 bp, Homo sapien
tctatactgagtacaaaggcccgag

SEQ ID NO: 3518279 - DNA, 25 bp, Homo sapien
tctcggtttacccttactagtgcag

SEQ ID NO: 3518280 - DNA, 25 bp, Homo sapien
cagtaccaaattacacccgtggcac

SEQ ID NO: 3518281 - DNA, 25 bp, Homo sapien
ccaaaacagggagagtcttgccgtc

SEQ ID NO: 3518282 - DNA, 25 bp, Homo sapien
cattgtcacgggaacatttagaacc

SEQ ID NO: 3518283 - DNA, 25 bp, Homo sapien
aaatgttcgtgcacgtttgtacaga

SEQ ID NO: 3518284 - DNA, 25 bp, Homo sapien
tagctgcactagtaagggtaaaccg

SEQ ID NO: 3518285 - DNA, 25 bp, Homo sapien
taaaccgagaacagtattgagccga

SEQ ID NO: 3518286 - DNA, 25 bp, Homo sapien
tatagagacggcaagactctccctg

SEQ ID NO: 3518287 - DNA, 25 bp, Homo sapien
tctcgggcctttgtactcagtatag

SEQ ID NO: 3518288 - DNA, 25 bp, Homo sapien
taaatgttcccgtgacaatgtcgaa

SEQ ID NO: 3518289 - DNA, 25 bp, Homo sapien
ctcaacgtcttagacctcaccacca

SEQ ID NO: 3518290 - DNA, 25 bp, Homo sapien
tctcaacgtcttagacctcaccacc

SEQ ID NO: 3518291 - DNA, 25 bp, Homo sapien
gtctcaacgtcttagacctcaccac

SEQ ID NO: 3518292 - DNA, 25 bp, Homo sapien
tcaacgtcttagacctcaccaccag

SEQ ID NO: 3518293 - DNA, 25 bp, Homo sapien
gtggtgaggtctaagacgttgagac

SEQ ID NO: 3518294 - DNA, 25 bp, Homo sapien
ctggtggtgaggtctaagacgttga

SEQ ID NO: 3518295 - DNA, 25 bp, Homo sapien
ggtggtgaggtctaagacgttgaga

SEQ ID NO: 3518296 - DNA, 25 bp, Homo sapien
tggtggtgaggtctaagacgttgag

SEQ ID NO: 3518297 - DNA, 25 bp, Homo sapien
cagtccttcttacttagcatacata

SEQ ID NO: 3518298 - DNA, 25 bp, Homo sapien
agtccttcttacttagcatacataa

SEQ ID NO: 3518299 - DNA, 25 bp, Homo sapien
gtccttcttacttagcatacataaa

SEQ ID NO: 3518300 - DNA, 25 bp, Homo sapien
tccttcttacttagcatacataaaa

SEQ ID NO: 3518301 - DNA, 25 bp, Homo sapien
ttcagtccttcttacttagcataca

SEQ ID NO: 3518302 - DNA, 25 bp, Homo sapien
tcagtccttcttacttagcatacat

SEQ ID NO: 3518303 - DNA, 25 bp, Homo sapien
ttatgtatgctaagtaagaaggact

SEQ ID NO: 3518304 - DNA, 25 bp, Homo sapien
atgtatgctaagtaagaaggactga

SEQ ID NO: 3518305 - DNA, 25 bp, Homo sapien
tatgtatgctaagtaagaaggactg

SEQ ID NO: 3518306 - DNA, 25 bp, Homo sapien
tttatgtatgctaagtaagaaggac

SEQ ID NO: 3518307 - DNA, 25 bp, Homo sapien
tgtatgctaagtaagaaggactgaa

SEQ ID NO: 3518308 - DNA, 25 bp, Homo sapien
ttttatgtatgctaagtaagaagga

SEQ ID NO: 3518309 - DNA, 25 bp, Homo sapien
cagtccttcttacttagcatacata

SEQ ID NO: 3518310 - DNA, 25 bp, Homo sapien
gtccttcttacttagcatacataaa

SEQ ID NO: 3518311 - DNA, 25 bp, Homo sapien
tccttcttacttagcatacataaaa

SEQ ID NO: 3518312 - DNA, 25 bp, Homo sapien
ttcagtccttcttacttagcataca

SEQ ID NO: 3518313 - DNA, 25 bp, Homo sapien
tcagtccttcttacttagcatacat

SEQ ID NO: 3518314 - DNA, 25 bp, Homo sapien
ggaatccaagtatattcagtccttc

SEQ ID NO: 3518315 - DNA, 25 bp, Homo sapien
gaaggactgaatatacttggattcc

SEQ ID NO: 3518316 - DNA, 25 bp, Homo sapien
ttatgtatgctaagtaagaaggact

SEQ ID NO: 3518317 - DNA, 25 bp, Homo sapien
tatgtatgctaagtaagaaggactg

SEQ ID NO: 3518318 - DNA, 25 bp, Homo sapien
tttatgtatgctaagtaagaaggac

SEQ ID NO: 3518319 - DNA, 25 bp, Homo sapien
tgtatgctaagtaagaaggactgaa

SEQ ID NO: 3518320 - DNA, 25 bp, Homo sapien
ttttatgtatgctaagtaagaagga

SEQ ID NO: 3518321 - DNA, 25 bp, Homo sapien
aagccaaaagaaatcacacagaaca

SEQ ID NO: 3518322 - DNA, 25 bp, Homo sapien
gccaaaagaaatcacacagaacagg

SEQ ID NO: 3518323 - DNA, 25 bp, Homo sapien
agccaaaagaaatcacacagaacag

SEQ ID NO: 3518324 - DNA, 25 bp, Homo sapien
aaagccaaaagaaatcacacagaac

SEQ ID NO: 3518325 - DNA, 25 bp, Homo sapien
caaagccaaaagaaatcacacagaa

SEQ ID NO: 3518326 - DNA, 25 bp, Homo sapien
caaaagaaatcacacagaacaggaa

SEQ ID NO: 3518327 - DNA, 25 bp, Homo sapien
tgtgatttcttttggctttgggaaa

SEQ ID NO: 3518328 - DNA, 25 bp, Homo sapien
tgtgtgatttcttttggctttggga

SEQ ID NO: 3518329 - DNA, 25 bp, Homo sapien
ctgttctgtgtgatttcttttggct

SEQ ID NO: 3518330 - DNA, 25 bp, Homo sapien
ttcctgttctgtgtgatttcttttg

SEQ ID NO: 3518331 - DNA, 25 bp, Homo sapien
cctgttctgtgtgatttcttttggc

SEQ ID NO: 3518332 - DNA, 25 bp, Homo sapien
ttctgtgtgatttcttttggctttg

SEQ ID NO: 3518333 - DNA, 25 bp, Homo sapien
aaaatattcatgatagccggctagg

SEQ ID NO: 3518334 - DNA, 25 bp, Homo sapien
gatcaaagctacaatcttggcctca

SEQ ID NO: 3518335 - DNA, 25 bp, Homo sapien
ggatgatgacagtattgcactgatc

SEQ ID NO: 3518336 - DNA, 25 bp, Homo sapien
taacagcatcaagttattccaggat

SEQ ID NO: 3518337 - DNA, 25 bp, Homo sapien
catatgttcttagctggttcttcct

SEQ ID NO: 3518338 - DNA, 25 bp, Homo sapien
ggaatacctctaaacaccccatatg

SEQ ID NO: 3518339 - DNA, 25 bp, Homo sapien
tcctagccggctatcatgaatattt

SEQ ID NO: 3518340 - DNA, 25 bp, Homo sapien
tcatcctggaataacttgatgctgt

SEQ ID NO: 3518341 - DNA, 25 bp, Homo sapien
tgaggccaagattgtagctttgatc

SEQ ID NO: 3518342 - DNA, 25 bp, Homo sapien
ggaagaaccagctaagaacatatga

SEQ ID NO: 3518343 - DNA, 25 bp, Homo sapien
gatcagtgcaatactgtcatcatcc

SEQ ID NO: 3518344 - DNA, 25 bp, Homo sapien
attttattggtcacaggaagaacca

SEQ ID NO: 3518345 - DNA, 25 bp, Homo sapien
aatcagtccaatccactctttatgg

SEQ ID NO: 3518346 - DNA, 25 bp, Homo sapien
tcataagtgctcattaaaacaccat

SEQ ID NO: 3518347 - DNA, 25 bp, Homo sapien
tgatactaccgaaaaacttcaagtg

SEQ ID NO: 3518348 - DNA, 25 bp, Homo sapien
taatgctcattgctttatgtgccat

SEQ ID NO: 3518349 - DNA, 25 bp, Homo sapien
tgtgaagatacagtaacaaaccttc

SEQ ID NO: 3518350 - DNA, 25 bp, Homo sapien
tattaccaactgattaaactgcata

SEQ ID NO: 3518351 - DNA, 25 bp, Homo sapien
gtatcttcacagatgattggttaag

SEQ ID NO: 3518352 - DNA, 25 bp, Homo sapien
tgtgttaatggcacataaagcaatg

SEQ ID NO: 3518353 - DNA, 25 bp, Homo sapien
agcaatgagcattaacacttgaagt

SEQ ID NO: 3518354 - DNA, 25 bp, Homo sapien
ccataaagagtggattggactgatt

SEQ ID NO: 3518355 - DNA, 25 bp, Homo sapien
cacttgaagtttttcggtagtatca

SEQ ID NO: 3518356 - DNA, 25 bp, Homo sapien
gaaggtttgttactgtatcttcaca

SEQ ID NO: 3518357 - DNA, 25 bp, Homo sapien
tcaggatgttccactttgtctttaa

SEQ ID NO: 3518358 - DNA, 25 bp, Homo sapien
ttttccctgcaactagacggtccca

SEQ ID NO: 3518359 - DNA, 25 bp, Homo sapien
tgtttcacaaagacaggaggttgga

SEQ ID NO: 3518360 - DNA, 25 bp, Homo sapien
tgtcactacagaaaaccctgtttca

SEQ ID NO: 3518361 - DNA, 25 bp, Homo sapien
aatcttgtttggctgctgtcactac

SEQ ID NO: 3518362 - DNA, 25 bp, Homo sapien
caggctttccagtgctttcgtggca

SEQ ID NO: 3518363 - DNA, 25 bp, Homo sapien
tgggaccgtctagttgcagggaaaa

SEQ ID NO: 3518364 - DNA, 25 bp, Homo sapien
taaagacaaagtggaacatcctgag

SEQ ID NO: 3518365 - DNA, 25 bp, Homo sapien
cagcagccaaacaagattacagagt

SEQ ID NO: 3518366 - DNA, 25 bp, Homo sapien
gagattgccacgaaagcactggaaa

SEQ ID NO: 3518367 - DNA, 25 bp, Homo sapien
tccaacctcctgtctttgtgaaaca

SEQ ID NO: 3518368 - DNA, 25 bp, Homo sapien
ggttttctgtagtgacagcagccaa

SEQ ID NO: 3518369 - DNA, 25 bp, Homo sapien
gctctgaagatcacacacctatctc

SEQ ID NO: 3518370 - DNA, 25 bp, Homo sapien
tcaatgttttgcacattgtattact

SEQ ID NO: 3518371 - DNA, 25 bp, Homo sapien
gggaggtgctctgaagatcacacac

SEQ ID NO: 3518372 - DNA, 25 bp, Homo sapien
tagtttgaaaaccatggtattatat

SEQ ID NO: 3518373 - DNA, 25 bp, Homo sapien
ggtgctctgaagatcacacacctat

SEQ ID NO: 3518374 - DNA, 25 bp, Homo sapien
tcagttatcaatgttttgcacattg

SEQ ID NO: 3518375 - DNA, 25 bp, Homo sapien
tgtgtgatcttcagagcacctcccc

SEQ ID NO: 3518376 - DNA, 25 bp, Homo sapien
gataggtgtgtgatcttcagagcac

SEQ ID NO: 3518377 - DNA, 25 bp, Homo sapien
gagataggtgtgtgatcttcagagc

SEQ ID NO: 3518378 - DNA, 25 bp, Homo sapien
caatgtgcaaaacattgataactga

SEQ ID NO: 3518379 - DNA, 25 bp, Homo sapien
gaaaatataataccatggttttcaa

SEQ ID NO: 3518380 - DNA, 25 bp, Homo sapien
agtaatacaatgtgcaaaacattga

SEQ ID NO: 3518381 - DNA, 25 bp, Homo sapien
tgagaaagaccgtaagttctgtcgg

SEQ ID NO: 3518382 - DNA, 25 bp, Homo sapien
tagaaacactctactttgtagccat

SEQ ID NO: 3518383 - DNA, 25 bp, Homo sapien
taagttctgtcggtcttagaaacac

SEQ ID NO: 3518384 - DNA, 25 bp, Homo sapien
taagaaagagctctgtctggctggg

SEQ ID NO: 3518385 - DNA, 25 bp, Homo sapien
tagccattagaacaacagctttaag

SEQ ID NO: 3518386 - DNA, 25 bp, Homo sapien
cagctttaagacttgagtagaattt

SEQ ID NO: 3518387 - DNA, 25 bp, Homo sapien
gagtgtttctaagaccgacagaact

SEQ ID NO: 3518388 - DNA, 25 bp, Homo sapien
ccagccagacagagctctttcttaa

SEQ ID NO: 3518389 - DNA, 25 bp, Homo sapien
aaattctactcaagtcttaaagctg

SEQ ID NO: 3518390 - DNA, 25 bp, Homo sapien
taatggctacaaagtagagtgtttc

SEQ ID NO: 3518391 - DNA, 25 bp, Homo sapien
cgacagaacttacggtctttctcag

SEQ ID NO: 3518392 - DNA, 25 bp, Homo sapien
taaagctgttgttctaatggctaca

SEQ ID NO: 3518393 - DNA, 25 bp, Homo sapien
tctccatcatggtcttctacctaaa

SEQ ID NO: 3518394 - DNA, 25 bp, Homo sapien
ctacctaaaacatcaatcaacaggc

SEQ ID NO: 3518395 - DNA, 25 bp, Homo sapien
tccatcatggtcttctacctaaaac

SEQ ID NO: 3518396 - DNA, 25 bp, Homo sapien
tctacctaaaacatcaatcaacagg

SEQ ID NO: 3518397 - DNA, 25 bp, Homo sapien
ttctccatcatggtcttctacctaa

SEQ ID NO: 3518398 - DNA, 25 bp, Homo sapien
tcttctacctaaaacatcaatcaac

SEQ ID NO: 3518399 - DNA, 25 bp, Homo sapien
gcctgttgattgatgttttaggtag

SEQ ID NO: 3518400 - DNA, 25 bp, Homo sapien
cctgttgattgatgttttaggtaga

SEQ ID NO: 3518401 - DNA, 25 bp, Homo sapien
ttaggtagaagaccatgatggagaa

SEQ ID NO: 3518402 - DNA, 25 bp, Homo sapien
gttttaggtagaagaccatgatgga

SEQ ID NO: 3518403 - DNA, 25 bp, Homo sapien
ttttaggtagaagaccatgatggag

SEQ ID NO: 3518404 - DNA, 25 bp, Homo sapien
tttaggtagaagaccatgatggaga

SEQ ID NO: 3518405 - DNA, 25 bp, Homo sapien
tttcagaatcatctggactttcagg

SEQ ID NO: 3518406 - DNA, 25 bp, Homo sapien
gagttcttcagcagattcttctttc

SEQ ID NO: 3518407 - DNA, 25 bp, Homo sapien
tttctctgactctgaatcgctttca

SEQ ID NO: 3518408 - DNA, 25 bp, Homo sapien
gaatcatctggactttcaggatcag

SEQ ID NO: 3518409 - DNA, 25 bp, Homo sapien
gaatcgctttcagaatcatctggac

SEQ ID NO: 3518410 - DNA, 25 bp, Homo sapien
tcttcagcagattcttctttctctg

SEQ ID NO: 3518411 - DNA, 25 bp, Homo sapien
gaaagaagaatctgctgaagaactc

SEQ ID NO: 3518412 - DNA, 25 bp, Homo sapien
cctgaaagtccagatgattctgaaa

SEQ ID NO: 3518413 - DNA, 25 bp, Homo sapien
ctgatcctgaaagtccagatgattc

SEQ ID NO: 3518414 - DNA, 25 bp, Homo sapien
cagagaaagaagaatctgctgaaga

SEQ ID NO: 3518415 - DNA, 25 bp, Homo sapien
tgaaagcgattcagagtcagagaaa

SEQ ID NO: 3518416 - DNA, 25 bp, Homo sapien
tccagatgattctgaaagcgattca

SEQ ID NO: 3518417 - DNA, 25 bp, Homo sapien
agtgtaacccatggcatttgaaagc

SEQ ID NO: 3518418 - DNA, 25 bp, Homo sapien
agtcctccactgtgcattgtaacaa

SEQ ID NO: 3518419 - DNA, 25 bp, Homo sapien
aatacaaagactaagcgtttgggag

SEQ ID NO: 3518420 - DNA, 25 bp, Homo sapien
tagtcatgcccataaaagtgtaacc

SEQ ID NO: 3518421 - DNA, 25 bp, Homo sapien
tgctctataagcagtcctccactgt

SEQ ID NO: 3518422 - DNA, 25 bp, Homo sapien
tacaaaggtctgtgctctataagca

SEQ ID NO: 3518423 - DNA, 25 bp, Homo sapien
gcttatagagcacagacctttgtat

SEQ ID NO: 3518424 - DNA, 25 bp, Homo sapien
gctttcaaatgccatgggttacact

SEQ ID NO: 3518425 - DNA, 25 bp, Homo sapien
tgggttacacttttatgggcatgac

SEQ ID NO: 3518426 - DNA, 25 bp, Homo sapien
ttgttacaatgcacagtggaggact

SEQ ID NO: 3518427 - DNA, 25 bp, Homo sapien
cagtggaggactgcttatagagcac

SEQ ID NO: 3518428 - DNA, 25 bp, Homo sapien
aaagtaagccttattgttacaatgc

SEQ ID NO: 3518429 - DNA, 25 bp, Homo sapien
tttggtccaaaagagtagagctaac

SEQ ID NO: 3518430 - DNA, 25 bp, Homo sapien
taatgaggataaaggtatcacagcc

SEQ ID NO: 3518431 - DNA, 25 bp, Homo sapien
ttaatttagattgtgactggcagca

SEQ ID NO: 3518432 - DNA, 25 bp, Homo sapien
caagtgtgaaaagtacttgctctca

SEQ ID NO: 3518433 - DNA, 25 bp, Homo sapien
cagtaagcctgttcctcatttgtag

SEQ ID NO: 3518434 - DNA, 25 bp, Homo sapien
tcagtaacaggaaactaagtaccca

SEQ ID NO: 3518435 - DNA, 25 bp, Homo sapien
ctacaaatgaggaacaggcttactg

SEQ ID NO: 3518436 - DNA, 25 bp, Homo sapien
gttagctctactcttttggaccaaa

SEQ ID NO: 3518437 - DNA, 25 bp, Homo sapien
gaatattatgatcccaagtagtctt

SEQ ID NO: 3518438 - DNA, 25 bp, Homo sapien
tgctgccagtcacaatctaaattaa

SEQ ID NO: 3518439 - DNA, 25 bp, Homo sapien
tagtttcctgttactgagttagctc

SEQ ID NO: 3518440 - DNA, 25 bp, Homo sapien
catgagagcaagtacttttcacact

SEQ ID NO: 3518441 - DNA, 25 bp, Homo sapien
aaaaattctggagtgcctgaaccac

SEQ ID NO: 3518442 - DNA, 25 bp, Homo sapien
tcagtgactacttacacacagggct

SEQ ID NO: 3518443 - DNA, 25 bp, Homo sapien
tgtatcagaccccaaagttgttgcc

SEQ ID NO: 3518444 - DNA, 25 bp, Homo sapien
gcctggtttcctagcacccattaaa

SEQ ID NO: 3518445 - DNA, 25 bp, Homo sapien
gctgcttggagtcaaatcgctgctg

SEQ ID NO: 3518446 - DNA, 25 bp, Homo sapien
acagctgcttggagtcaaatcgctg

SEQ ID NO: 3518447 - DNA, 25 bp, Homo sapien
tgcttggagtcaaatcgctgctgag

SEQ ID NO: 3518448 - DNA, 25 bp, Homo sapien
cttggagtcaaatcgctgctgagca

SEQ ID NO: 3518449 - DNA, 25 bp, Homo sapien
cagtgccatcttcctttgttccaaa

SEQ ID NO: 3518450 - DNA, 25 bp, Homo sapien
catcaggtctgcaggacatagtctc

SEQ ID NO: 3518451 - DNA, 25 bp, Homo sapien
aggaagccccggtccaggaacatga

SEQ ID NO: 3518452 - DNA, 25 bp, Homo sapien
gaagggcagtgccatcttcctttgt

SEQ ID NO: 3518453 - DNA, 25 bp, Homo sapien
agatagtacctcaggttggtatagc

SEQ ID NO: 3518454 - DNA, 25 bp, Homo sapien
ctgtcgtggagatagtacctcaggt

SEQ ID NO: 3518455 - DNA, 25 bp, Homo sapien
aacaccaggactctccaagactgcc

SEQ ID NO: 3518456 - DNA, 25 bp, Homo sapien
ggtatagctcagtaacaccaggact

SEQ ID NO: 3518457 - DNA, 25 bp, Homo sapien
cttgctggagtctactgggaacacc

SEQ ID NO: 3518458 - DNA, 25 bp, Homo sapien
tcatgaagtcgatactggcagcata

SEQ ID NO: 3518459 - DNA, 25 bp, Homo sapien
cattggaagttggactagcctcggc

SEQ ID NO: 3518460 - DNA, 25 bp, Homo sapien
cacccagtgtggagtttattgctac

SEQ ID NO: 3518461 - DNA, 25 bp, Homo sapien
tcacaatgggcgtggctagagcact

SEQ ID NO: 3518462 - DNA, 25 bp, Homo sapien
ctctaataaaggtgcagtctggccc

SEQ ID NO: 3518463 - DNA, 25 bp, Homo sapien
ggcacgtctgcacacacatgatgga

SEQ ID NO: 3518464 - DNA, 25 bp, Homo sapien
tcaatgtgggtagcgctcttggcct

SEQ ID NO: 3518465 - DNA, 25 bp, Homo sapien
tgcactggttctcgggcatcagggt

SEQ ID NO: 3518466 - DNA, 25 bp, Homo sapien
ctgcactggttctcgggcatcaggg

SEQ ID NO: 3518467 - DNA, 25 bp, Homo sapien
tctgcactggttctcgggcatcagg

SEQ ID NO: 3518468 - DNA, 25 bp, Homo sapien
ctgaggagagcaggggatgggggca

SEQ ID NO: 3518469 - DNA, 25 bp, Homo sapien
gagcaggggatgggggcacagttcc

SEQ ID NO: 3518470 - DNA, 25 bp, Homo sapien
gagagcaggggatgggggcacagtt

SEQ ID NO: 3518471 - DNA, 25 bp, Homo sapien
caggggatgggggcacagttccggt

SEQ ID NO: 3518472 - DNA, 25 bp, Homo sapien
tcgtattagagccactgaggattga

SEQ ID NO: 3518473 - DNA, 25 bp, Homo sapien
gccactgaggattgagttcctaaaa

SEQ ID NO: 3518474 - DNA, 25 bp, Homo sapien
ggtggattgctcagtccctatcgta

SEQ ID NO: 3518475 - DNA, 25 bp, Homo sapien
tcagtccctatcgtattagagccac

SEQ ID NO: 3518476 - DNA, 25 bp, Homo sapien
tggaaggaggcatcagcaggtggca

SEQ ID NO: 3518477 - DNA, 25 bp, Homo sapien
cagcgctagggaggtgcaggaagca

SEQ ID NO: 3518478 - DNA, 25 bp, Homo sapien
agcgctagggaggtgcaggaagcag

SEQ ID NO: 3518479 - DNA, 25 bp, Homo sapien
tcagcgctagggaggtgcaggaagc

SEQ ID NO: 3518480 - DNA, 25 bp, Homo sapien
gctcagcgctagggaggtgcaggaa

SEQ ID NO: 3518481 - DNA, 25 bp, Homo sapien
ttagacaaaggtgtagtggagtccg

SEQ ID NO: 3518482 - DNA, 25 bp, Homo sapien
agacaaaggtgtagtggagtccgtt

SEQ ID NO: 3518483 - DNA, 25 bp, Homo sapien
ttggaaggtgttagacaaaggtgta

SEQ ID NO: 3518484 - DNA, 25 bp, Homo sapien
tgttagacaaaggtgtagtggagtc

SEQ ID NO: 3518485 - DNA, 25 bp, Homo sapien
ctggaagacagggggcctttaggcg

SEQ ID NO: 3518486 - DNA, 25 bp, Homo sapien
cacacaggaattaagcggtgtgtta

SEQ ID NO: 3518487 - DNA, 25 bp, Homo sapien
gcggtgtgttagactcctcatcagc

SEQ ID NO: 3518488 - DNA, 25 bp, Homo sapien
agcaccagatgccccatttggcagg

SEQ ID NO: 3518489 - DNA, 25 bp, Homo sapien
ggaattaagcggtgtgttagactcc

SEQ ID NO: 3518490 - DNA, 25 bp, Homo sapien
cacgaagggcctgggcttgagggtg

SEQ ID NO: 3518491 - DNA, 25 bp, Homo sapien
agggtgagggacagatccacggggc

SEQ ID NO: 3518492 - DNA, 25 bp, Homo sapien
gcctgggcttgagggtgagggacag

SEQ ID NO: 3518493 - DNA, 25 bp, Homo sapien
tgagggtgagggacagatccacggg

SEQ ID NO: 3518494 - DNA, 25 bp, Homo sapien
ggggaaccggatgggtcaggctgca

SEQ ID NO: 3518495 - DNA, 25 bp, Homo sapien
ctggtggggaaccggatgggtcagg

SEQ ID NO: 3518496 - DNA, 25 bp, Homo sapien
ggaaccggatgggtcaggctgcagt

SEQ ID NO: 3518497 - DNA, 25 bp, Homo sapien
gtggggaaccggatgggtcaggctg

SEQ ID NO: 3518498 - DNA, 25 bp, Homo sapien
ctctatggctgttccctccccagaa

SEQ ID NO: 3518499 - DNA, 25 bp, Homo sapien
catgacaccacttcaggctctatgg

SEQ ID NO: 3518500 - DNA, 25 bp, Homo sapien
gccacatccttggctacttctagac

SEQ ID NO: 3518501 - DNA, 25 bp, Homo sapien
gaattggtaggggccatgacaccac

SEQ ID NO: 3518502 - DNA, 25 bp, Homo sapien
accacccagacacacagtggcctct

SEQ ID NO: 3518503 - DNA, 25 bp, Homo sapien
aggagcaccacccagacacacagtg

SEQ ID NO: 3518504 - DNA, 25 bp, Homo sapien
ctggccaggagcaccacccagacac

SEQ ID NO: 3518505 - DNA, 25 bp, Homo sapien
cacccagacacacagtggcctctgc

SEQ ID NO: 3518506 - DNA, 25 bp, Homo sapien
ctctggaacaggccatgctgggccc

SEQ ID NO: 3518507 - DNA, 25 bp, Homo sapien
gctctggaacaggccatgctgggcc

SEQ ID NO: 3518508 - DNA, 25 bp, Homo sapien
ccctcaactaccatccttgacacct

SEQ ID NO: 3518509 - DNA, 25 bp, Homo sapien
acctgcttgctacgctgggaggcct

SEQ ID NO: 3518510 - DNA, 25 bp, Homo sapien
cctgaggtcggctgtaggttgcaca

SEQ ID NO: 3518511 - DNA, 25 bp, Homo sapien
cgtaggagatgttgatgatgcgctc

SEQ ID NO: 3518512 - DNA, 25 bp, Homo sapien
tcggaggccagggcgtaggagatgt

SEQ ID NO: 3518513 - DNA, 25 bp, Homo sapien
cacgtagcgctcagggattgacacc

SEQ ID NO: 3518514 - DNA, 25 bp, Homo sapien
tgggtggctcttcgggatctagctc

SEQ ID NO: 3518515 - DNA, 25 bp, Homo sapien
tcttctcggctttgcggtaccgcgc

SEQ ID NO: 3518516 - DNA, 25 bp, Homo sapien
gattgacaccttctctggtttggac

SEQ ID NO: 3518517 - DNA, 25 bp, Homo sapien
agcatctcccgtggacctagtggca

SEQ ID NO: 3518518 - DNA, 25 bp, Homo sapien
gactaagaacacgaaaggaagcttc

SEQ ID NO: 3518519 - DNA, 25 bp, Homo sapien
caaactcggcttggtgaaaccttgc

SEQ ID NO: 3518520 - DNA, 25 bp, Homo sapien
gaaaccttgcttggactaagaacac

SEQ ID NO: 3518521 - DNA, 25 bp, Homo sapien
acgacccgttccagcaactgcaggt

SEQ ID NO: 3518522 - DNA, 25 bp, Homo sapien
tccaactcagtgacaggcatggcct

SEQ ID NO: 3518523 - DNA, 25 bp, Homo sapien
caagtcatagtcttgaggctccagg

SEQ ID NO: 3518524 - DNA, 25 bp, Homo sapien
ctgcaggtcaaagtcctgctcacgc

SEQ ID NO: 3518525 - DNA, 25 bp, Homo sapien
ttcctgattgctgaaagagcccggc

SEQ ID NO: 3518526 - DNA, 25 bp, Homo sapien
aacgtagtcgcttcctgattgctga

SEQ ID NO: 3518527 - DNA, 25 bp, Homo sapien
gagcccggctggtcacctttttcca

SEQ ID NO: 3518528 - DNA, 25 bp, Homo sapien
gaggttaaacgtagtcgcttcctga

SEQ ID NO: 3518529 - DNA, 25 bp, Homo sapien
tgctccaaatagagacaagtcctca

SEQ ID NO: 3518530 - DNA, 25 bp, Homo sapien
tatcctggggaagaaccacgccaat

SEQ ID NO: 3518531 - DNA, 25 bp, Homo sapien
actagactctataaggtatcctggg

SEQ ID NO: 3518532 - DNA, 25 bp, Homo sapien
aaacactcatttccttacacgctca

SEQ ID NO: 3518533 - DNA, 25 bp, Homo sapien
tctgggaacactcaacaggctatgg

SEQ ID NO: 3518534 - DNA, 25 bp, Homo sapien
tcagtaggcctgcatgaagagggca

SEQ ID NO: 3518535 - DNA, 25 bp, Homo sapien
ccggtaataagtagcacaggccagt

SEQ ID NO: 3518536 - DNA, 25 bp, Homo sapien
caggctatggagacaagaaccgcta

SEQ ID NO: 3518537 - DNA, 25 bp, Homo sapien
ccaagatctccagggagcggccggc

SEQ ID NO: 3518538 - DNA, 25 bp, Homo sapien
ctcgctggtgatcccctgagtacag

SEQ ID NO: 3518539 - DNA, 25 bp, Homo sapien
ggccttctggtgtcgcttcatgcgc

SEQ ID NO: 3518540 - DNA, 25 bp, Homo sapien
tgtcctcttgcgctctcggaccagg

SEQ ID NO: 3518541 - DNA, 25 bp, Homo sapien
cacatgcacactctagttgggctcc

SEQ ID NO: 3518542 - DNA, 25 bp, Homo sapien
gctttctgagtagcacccattctgc

SEQ ID NO: 3518543 - DNA, 25 bp, Homo sapien
tatttcctctaagcaacacgatgcc

SEQ ID NO: 3518544 - DNA, 25 bp, Homo sapien
gatgcagacacttaggctcaggcct

SEQ ID NO: 3518545 - DNA, 25 bp, Homo sapien
gagacccctccggagtgtgacgtag

SEQ ID NO: 3518546 - DNA, 25 bp, Homo sapien
tgtgacgtagggagcaatggtggac

SEQ ID NO: 3518547 - DNA, 25 bp, Homo sapien
gcaatggtggacgactgctggagcc

SEQ ID NO: 3518548 - DNA, 25 bp, Homo sapien
gaaggtcgccttgctgctttcggca

SEQ ID NO: 3518549 - DNA, 25 bp, Homo sapien
gagcaaggtccccaatagaggatgg

SEQ ID NO: 3518550 - DNA, 25 bp, Homo sapien
ccaggcttcccttacatgcagatga

SEQ ID NO: 3518551 - DNA, 25 bp, Homo sapien
cactcaactggcaagaaagcattta

SEQ ID NO: 3518552 - DNA, 25 bp, Homo sapien
cagagcactgggattgtcttccggt

SEQ ID NO: 3518553 - DNA, 25 bp, Homo sapien
ccgctgagggtcgccagctcaggct

SEQ ID NO: 3518554 - DNA, 25 bp, Homo sapien
ggctcactgacatacgaccgcagct

SEQ ID NO: 3518555 - DNA, 25 bp, Homo sapien
ccacaagtcctagggagggctgggc

SEQ ID NO: 3518556 - DNA, 25 bp, Homo sapien
agctcaggctcactgacatacgacc

SEQ ID NO: 3518557 - DNA, 25 bp, Homo sapien
atgatggtggcctctcttggcagag

SEQ ID NO: 3518558 - DNA, 25 bp, Homo sapien
gtctgactgccgcttgaggccccgc

SEQ ID NO: 3518559 - DNA, 25 bp, Homo sapien
aggccccgcacagatgtgtgccgga

SEQ ID NO: 3518560 - DNA, 25 bp, Homo sapien
ctcgcttcctctcgtctgactgccg

SEQ ID NO: 3518561 - DNA, 25 bp, Homo sapien
gagaaccagaccagtggtcagcgag

SEQ ID NO: 3518562 - DNA, 25 bp, Homo sapien
agggaggactgctaggtactgccac

SEQ ID NO: 3518563 - DNA, 25 bp, Homo sapien
gtactgccacagtggaggtttaaag

SEQ ID NO: 3518564 - DNA, 25 bp, Homo sapien
ccagaccagtggtcagcgagacgga

SEQ ID NO: 3518565 - DNA, 25 bp, Homo sapien
attggccctacacgagctctggcgc

SEQ ID NO: 3518566 - DNA, 25 bp, Homo sapien
agcctgagccggctcattggcccta

SEQ ID NO: 3518567 - DNA, 25 bp, Homo sapien
gctctggcgccttcagcaaggtggg

SEQ ID NO: 3518568 - DNA, 25 bp, Homo sapien
ctggagagtaacatctacccactca

SEQ ID NO: 3518569 - DNA, 25 bp, Homo sapien
cataaaacattgattgcctttgatt

SEQ ID NO: 3518570 - DNA, 25 bp, Homo sapien
gaggatccacagtttccaatcctga

SEQ ID NO: 3518571 - DNA, 25 bp, Homo sapien
caatcctgacaagatatccgaatca

SEQ ID NO: 3518572 - DNA, 25 bp, Homo sapien
caagatatccgaatcaccaatttct

SEQ ID NO: 3518573 - DNA, 25 bp, Homo sapien
cctccaagcctttgttggcaaaaat

SEQ ID NO: 3518574 - DNA, 25 bp, Homo sapien
cagggcagcagaactcatgtgtttt

SEQ ID NO: 3518575 - DNA, 25 bp, Homo sapien
tctgggattgggaaggagatctcaa

SEQ ID NO: 3518576 - DNA, 25 bp, Homo sapien
ggtgctgggccatatcctgggtcca

SEQ ID NO: 3518577 - DNA, 25 bp, Homo sapien
tgggtgaggtcggtacggcacgtag

SEQ ID NO: 3518578 - DNA, 25 bp, Homo sapien
gactgaaggggggatgtcactttcc

SEQ ID NO: 3518579 - DNA, 25 bp, Homo sapien
tcggtacggcacgtaggtttgcagc

SEQ ID NO: 3518580 - DNA, 25 bp, Homo sapien
ggcttcgccttagttggtgactgaa

SEQ ID NO: 3518581 - DNA, 25 bp, Homo sapien
tgtgggggcggcttgctctcagaag

SEQ ID NO: 3518582 - DNA, 25 bp, Homo sapien
gagtgaaggcacaggcgggtgagga

SEQ ID NO: 3518583 - DNA, 25 bp, Homo sapien
tgctctcagaagttgagagtgaagg

SEQ ID NO: 3518584 - DNA, 25 bp, Homo sapien
ggcacaggcgggtgaggaaacaaag

SEQ ID NO: 3518585 - DNA, 25 bp, Homo sapien
acatccaggaagatgaacatctcac

SEQ ID NO: 3518586 - DNA, 25 bp, Homo sapien
cccaatcagatcccccacatccagg

SEQ ID NO: 3518587 - DNA, 25 bp, Homo sapien
ccacatccaggaagatgaacatctc

SEQ ID NO: 3518588 - DNA, 25 bp, Homo sapien
tcagatcccccacatccaggaagat

SEQ ID NO: 3518589 - DNA, 25 bp, Homo sapien
ccactagaattctgaagttctcttt

SEQ ID NO: 3518590 - DNA, 25 bp, Homo sapien
tctccatagatctttctgtatctgc

SEQ ID NO: 3518591 - DNA, 25 bp, Homo sapien
ttttttactgactccactagaattc

SEQ ID NO: 3518592 - DNA, 25 bp, Homo sapien
gatctttctgtatctgcgatttctc

SEQ ID NO: 3518593 - DNA, 25 bp, Homo sapien
cctaggctatatgatcatgtgcatt

SEQ ID NO: 3518594 - DNA, 25 bp, Homo sapien
gcattctgacaaccaaaatcgaatg

SEQ ID NO: 3518595 - DNA, 25 bp, Homo sapien
caaccaaaatcgaatgggaagagga

SEQ ID NO: 3518596 - DNA, 25 bp, Homo sapien
catacaatggggaaggacctaggct

SEQ ID NO: 3518597 - DNA, 25 bp, Homo sapien
atagctgcatgtgggtatggagcac

SEQ ID NO: 3518598 - DNA, 25 bp, Homo sapien
tgtccaagacagtagccgatagctg

SEQ ID NO: 3518599 - DNA, 25 bp, Homo sapien
tatggagcacttgaatgagtctggt

SEQ ID NO: 3518600 - DNA, 25 bp, Homo sapien
aatttccttagactggcgctgccca

SEQ ID NO: 3518601 - DNA, 25 bp, Homo sapien
aaaggctcttctgtgttgctcctgc

SEQ ID NO: 3518602 - DNA, 25 bp, Homo sapien
aggctcttctgtgttgctcctgcag

SEQ ID NO: 3518603 - DNA, 25 bp, Homo sapien
caggtattcgttccaagcattttcc

SEQ ID NO: 3518604 - DNA, 25 bp, Homo sapien
tctccaacttcaggtattcgttcca

SEQ ID NO: 3518605 - DNA, 25 bp, Homo sapien
gctcggatatggacaaggtcctcct

SEQ ID NO: 3518606 - DNA, 25 bp, Homo sapien
agctcagctcggatatggacaaggt

SEQ ID NO: 3518607 - DNA, 25 bp, Homo sapien
gctggtctcggtactgctccatctg

SEQ ID NO: 3518608 - DNA, 25 bp, Homo sapien
tctgtctgtgcaacacctccagcac

SEQ ID NO: 3518609 - DNA, 25 bp, Homo sapien
tctctttaagggctcgtatcttgtc

SEQ ID NO: 3518610 - DNA, 25 bp, Homo sapien
ctttaagggctcgtatcttgtcttc

SEQ ID NO: 3518611 - DNA, 25 bp, Homo sapien
gttctctttaagggctcgtatcttg

SEQ ID NO: 3518612 - DNA, 25 bp, Homo sapien
ttaagggctcgtatcttgtcttcca

SEQ ID NO: 3518613 - DNA, 25 bp, Homo sapien
atccttgagaaggtcccggcctgtc

SEQ ID NO: 3518614 - DNA, 25 bp, Homo sapien
tcagtgtcgctctcagcgatcttca

SEQ ID NO: 3518615 - DNA, 25 bp, Homo sapien
ggcttcagacttcgatccttgagaa

SEQ ID NO: 3518616 - DNA, 25 bp, Homo sapien
gatcttcacaggcttcagacttcga

SEQ ID NO: 3518617 - DNA, 25 bp, Homo sapien
tactactgaacgtgggaacaaacac

SEQ ID NO: 3518618 - DNA, 25 bp, Homo sapien
caaacacaagttacgaagcccatca

SEQ ID NO: 3518619 - DNA, 25 bp, Homo sapien
agtttaatgaagtctctgagcagcc

SEQ ID NO: 3518620 - DNA, 25 bp, Homo sapien
gaagatttgccaccgataagacaga

SEQ ID NO: 3518621 - DNA, 25 bp, Homo sapien
cttctcctgggccgacagccccgtg

SEQ ID NO: 3518622 - DNA, 25 bp, Homo sapien
agcacgttgatcaaaggttcattat

SEQ ID NO: 3518623 - DNA, 25 bp, Homo sapien
tcagcactttgtaaagcacgttgat

SEQ ID NO: 3518624 - DNA, 25 bp, Homo sapien
ttctcctgggccgacagccccgtgc

SEQ ID NO: 3518625 - DNA, 25 bp, Homo sapien
tccataggcatggtgggaacaaccc

SEQ ID NO: 3518626 - DNA, 25 bp, Homo sapien
tctacaggtatgtctgagtggactg

SEQ ID NO: 3518627 - DNA, 25 bp, Homo sapien
taggcccaggtgcactatggatgct

SEQ ID NO: 3518628 - DNA, 25 bp, Homo sapien
gtgacaagaactatgcaggcagctg

SEQ ID NO: 3518629 - DNA, 25 bp, Homo sapien
caggtctttcttcagctggaggtag

SEQ ID NO: 3518630 - DNA, 25 bp, Homo sapien
ctttcttcagctggaggtaggtatc

SEQ ID NO: 3518631 - DNA, 25 bp, Homo sapien
ctttagatccaggtactccaggtct

SEQ ID NO: 3518632 - DNA, 25 bp, Homo sapien
tccaggtctttcttcagctggaggt

SEQ ID NO: 3518633 - DNA, 25 bp, Homo sapien
gagtttccataactcgaggtttcac

SEQ ID NO: 3518634 - DNA, 25 bp, Homo sapien
acacagttatgaacaccaagagttt

SEQ ID NO: 3518635 - DNA, 25 bp, Homo sapien
cataactcgaggtttcacatgtgaa

SEQ ID NO: 3518636 - DNA, 25 bp, Homo sapien
cagttatgaacaccaagagtttcca

SEQ ID NO: 3518637 - DNA, 25 bp, Homo sapien
tagaacattgtgtcatgcaggcctt

SEQ ID NO: 3518638 - DNA, 25 bp, Homo sapien
catgcttctagctgagggatcctga

SEQ ID NO: 3518639 - DNA, 25 bp, Homo sapien
caaagcccaacgttcttgcaacagt

SEQ ID NO: 3518640 - DNA, 25 bp, Homo sapien
ctatttttgcctgaggacaacccca

SEQ ID NO: 3518641 - DNA, 25 bp, Homo sapien
caccatccagataagagagggcgcc

SEQ ID NO: 3518642 - DNA, 25 bp, Homo sapien
tccctccaggctgacgcatatgtgc

SEQ ID NO: 3518643 - DNA, 25 bp, Homo sapien
tgaacatgaccatacaccagcctgg

SEQ ID NO: 3518644 - DNA, 25 bp, Homo sapien
tgtgaggttcagcaagatatgagat

SEQ ID NO: 3518645 - DNA, 25 bp, Homo sapien
acacgcgagagccagaaagcacaga

SEQ ID NO: 3518646 - DNA, 25 bp, Homo sapien
agaccagagcatgggcacgagcgaa

SEQ ID NO: 3518647 - DNA, 25 bp, Homo sapien
gagaagcgacagtttagggccccta

SEQ ID NO: 3518648 - DNA, 25 bp, Homo sapien
ccagtgccagaagggtaggctcagc

SEQ ID NO: 3518649 - DNA, 25 bp, Homo sapien
cacactggccaacttggcctggtgc

SEQ ID NO: 3518650 - DNA, 25 bp, Homo sapien
tgagaagcaacgagagctcctccag

SEQ ID NO: 3518651 - DNA, 25 bp, Homo sapien
ctggtgccgccttaaccgggtgaga

SEQ ID NO: 3518652 - DNA, 25 bp, Homo sapien
ggctgatggcgaaatttcgcacact

SEQ ID NO: 3518653 - DNA, 25 bp, Homo sapien
acaaggaagttagcaccgcaggagc

SEQ ID NO: 3518654 - DNA, 25 bp, Homo sapien
tcttcaccccggtgtcagtgccagg

SEQ ID NO: 3518655 - DNA, 25 bp, Homo sapien
cagcactgatgtgacaccgttaagc

SEQ ID NO: 3518656 - DNA, 25 bp, Homo sapien
taaaggcactggcagtaaaagggct

SEQ ID NO: 3518657 - DNA, 25 bp, Homo sapien
tagttaactaatcaaagatcaggga

SEQ ID NO: 3518658 - DNA, 25 bp, Homo sapien
cgagctttgaagattgagttaacta

SEQ ID NO: 3518659 - DNA, 25 bp, Homo sapien
tattcccctacatttccctgatacg

SEQ ID NO: 3518660 - DNA, 25 bp, Homo sapien
tcttgaaagaggagataagcctaat

SEQ ID NO: 3518661 - DNA, 25 bp, Homo sapien
gatgagatagggctttgcaggctat

SEQ ID NO: 3518662 - DNA, 25 bp, Homo sapien
aaatgttgatgagatagggctttgc

SEQ ID NO: 3518663 - DNA, 25 bp, Homo sapien
ggctatgtcttgtcattcaccctac

SEQ ID NO: 3518664 - DNA, 25 bp, Homo sapien
tttgcaggctatgtcttgtcattca

SEQ ID NO: 3518665 - DNA, 25 bp, Homo sapien
cggtgtgggtcatgtaacccatgga

SEQ ID NO: 3518666 - DNA, 25 bp, Homo sapien
gagcgtcggtccacatgagatgagt

SEQ ID NO: 3518667 - DNA, 25 bp, Homo sapien
cgctgacggtgtgggtcatgtaacc

SEQ ID NO: 3518668 - DNA, 25 bp, Homo sapien
catgtaaactgggagcgctgacggt

SEQ ID NO: 3518669 - DNA, 25 bp, Homo sapien
ttgtagtcacttggcaggtttcggg

SEQ ID NO: 3518670 - DNA, 25 bp, Homo sapien
aaggacagggattggccaggaccct

SEQ ID NO: 3518671 - DNA, 25 bp, Homo sapien
gcttcactgtgactcgctctgctgg

SEQ ID NO: 3518672 - DNA, 25 bp, Homo sapien
tggctcggtcctgcgcatacttgta

SEQ ID NO: 3518673 - DNA, 25 bp, Homo sapien
aagaacgggtcaggcaaccaagcga

SEQ ID NO: 3518674 - DNA, 25 bp, Homo sapien
ggtcaggcaaccaagcgagggttct

SEQ ID NO: 3518675 - DNA, 25 bp, Homo sapien
gcaaccaagcgagggttctgcaggc

SEQ ID NO: 3518676 - DNA, 25 bp, Homo sapien
gtaagaacgggtcaggcaaccaagc

SEQ ID NO: 3518677 - DNA, 25 bp, Homo sapien
aatgcacattggctttgctatctcc

SEQ ID NO: 3518678 - DNA, 25 bp, Homo sapien
ttggtctggatgctggcgcatccgc

SEQ ID NO: 3518679 - DNA, 25 bp, Homo sapien
tggcgcatccgctgcaatccctggg

SEQ ID NO: 3518680 - DNA, 25 bp, Homo sapien
tatcaggcctgtggcagacttggtc

SEQ ID NO: 3518681 - DNA, 25 bp, Homo sapien
tctctgcccgttggggctgtgcctg

SEQ ID NO: 3518682 - DNA, 25 bp, Homo sapien
ctcctgggccatatgaggcaggcag

SEQ ID NO: 3518683 - DNA, 25 bp, Homo sapien
aggcaggcagcattccattcttctc

SEQ ID NO: 3518684 - DNA, 25 bp, Homo sapien
tggtacccaccagtcccattctgtt

SEQ ID NO: 3518685 - DNA, 25 bp, Homo sapien
caatctctcgtatgtccgggtccca

SEQ ID NO: 3518686 - DNA, 25 bp, Homo sapien
ctggcgagtacggagacctggcctt

SEQ ID NO: 3518687 - DNA, 25 bp, Homo sapien
tcctgcctctcgaagttgacaatgt

SEQ ID NO: 3518688 - DNA, 25 bp, Homo sapien
tggccacgatgaggacaatctctcg

SEQ ID NO: 3518689 - DNA, 25 bp, Homo sapien
gactttggggttatgaacagctcct

SEQ ID NO: 3518690 - DNA, 25 bp, Homo sapien
agttttctagccctgaagactttgg

SEQ ID NO: 3518691 - DNA, 25 bp, Homo sapien
cactgggcagttttctagccctgaa

SEQ ID NO: 3518692 - DNA, 25 bp, Homo sapien
tcagcttgccactgggcagttttct

SEQ ID NO: 3518693 - DNA, 25 bp, Homo sapien
gcaggtcattgctacgatcgtgaac

SEQ ID NO: 3518694 - DNA, 25 bp, Homo sapien
tctgaaaccggtcactgttcaaaaa

SEQ ID NO: 3518695 - DNA, 25 bp, Homo sapien
gcagcttggccatgcaaagcagaga

SEQ ID NO: 3518696 - DNA, 25 bp, Homo sapien
caatgactgtattactcaggcagct

SEQ ID NO: 3518697 - DNA, 25 bp, Homo sapien
ttaatgtctatcatggaattctgaa

SEQ ID NO: 3518698 - DNA, 25 bp, Homo sapien
tactggaattaatgtctatcatgga

SEQ ID NO: 3518699 - DNA, 25 bp, Homo sapien
aaaatactggaattaatgtctatca

SEQ ID NO: 3518700 - DNA, 25 bp, Homo sapien
ctggaattaatgtctatcatggaat

SEQ ID NO: 3518701 - DNA, 25 bp, Homo sapien
gactcaggaatttcaagatctctga

SEQ ID NO: 3518702 - DNA, 25 bp, Homo sapien
cagccaacagactcaggaatttcaa

SEQ ID NO: 3518703 - DNA, 25 bp, Homo sapien
gatctctgattatatgcttggttga

SEQ ID NO: 3518704 - DNA, 25 bp, Homo sapien
tcaagatctctgattatatgcttgg

SEQ ID NO: 3518705 - DNA, 25 bp, Homo sapien
tcttcagtgacgatcgagacagcac

SEQ ID NO: 3518706 - DNA, 25 bp, Homo sapien
tgttatagatgagcgctcgcatccc

SEQ ID NO: 3518707 - DNA, 25 bp, Homo sapien
caagcgttcatgtcctcctgggtgt

SEQ ID NO: 3518708 - DNA, 25 bp, Homo sapien
gaagtagtaggtcctcatgcctgac

SEQ ID NO: 3518709 - DNA, 25 bp, Homo sapien
gatataaggcaacagtattccacgc

SEQ ID NO: 3518710 - DNA, 25 bp, Homo sapien
gacagtagcgtcactcgagggaaac

SEQ ID NO: 3518711 - DNA, 25 bp, Homo sapien
tttaacccttccagagaatggcagg

SEQ ID NO: 3518712 - DNA, 25 bp, Homo sapien
tctatctatggctggaaagcgtgac

SEQ ID NO: 3518713 - DNA, 25 bp, Homo sapien
gcagtgaaggaaatccatggaggcc

SEQ ID NO: 3518714 - DNA, 25 bp, Homo sapien
cagtgaaggaaatccatggaggcca

SEQ ID NO: 3518715 - DNA, 25 bp, Homo sapien
agtgaaggaaatccatggaggccac

SEQ ID NO: 3518716 - DNA, 25 bp, Homo sapien
caggagagatcacgtagctgggcaa

SEQ ID NO: 3518717 - DNA, 25 bp, Homo sapien
tttgcggcttatgcgatcctcaggg

SEQ ID NO: 3518718 - DNA, 25 bp, Homo sapien
gggatgctcccgaggaccgcttctt

SEQ ID NO: 3518719 - DNA, 25 bp, Homo sapien
taaaggaatatttgcggcttatgcg

SEQ ID NO: 3518720 - DNA, 25 bp, Homo sapien
gcagtaatcagcaagcacaaaccac

SEQ ID NO: 3518721 - DNA, 25 bp, Homo sapien
tatagtaaaataagcagtaatcagc

SEQ ID NO: 3518722 - DNA, 25 bp, Homo sapien
tagtaaaataagcagtaatcagcaa

SEQ ID NO: 3518723 - DNA, 25 bp, Homo sapien
gtaatcagcaagcacaaaccacctc

SEQ ID NO: 3518724 - DNA, 25 bp, Homo sapien
ttcctccaggattctcactcctcgg

SEQ ID NO: 3518725 - DNA, 25 bp, Homo sapien
ggattctcactcctcggcttcctca

SEQ ID NO: 3518726 - DNA, 25 bp, Homo sapien
caggattctcactcctcggcttcct

SEQ ID NO: 3518727 - DNA, 25 bp, Homo sapien
ctccaggattctcactcctcggctt

SEQ ID NO: 3518728 - DNA, 25 bp, Homo sapien
aaagctgtggactttactgctggac

SEQ ID NO: 3518729 - DNA, 25 bp, Homo sapien
gttcctccgaatggcctggtctctc

SEQ ID NO: 3518730 - DNA, 25 bp, Homo sapien
gaacattggggttcctccgaatggc

SEQ ID NO: 3518731 - DNA, 25 bp, Homo sapien
tgtggactttactgctggactttat

SEQ ID NO: 3518732 - DNA, 25 bp, Homo sapien
gatctgtcatttggggagaacactt

SEQ ID NO: 3518733 - DNA, 25 bp, Homo sapien
gctggacaagggacatatccctctt

SEQ ID NO: 3518734 - DNA, 25 bp, Homo sapien
ttctgctggacaagggacatatccc

SEQ ID NO: 3518735 - DNA, 25 bp, Homo sapien
ctgttctgctggacaagggacatat

SEQ ID NO: 3518736 - DNA, 25 bp, Homo sapien
agccgtggatgtttcactgaccatg

SEQ ID NO: 3518737 - DNA, 25 bp, Homo sapien
catgctggacggtctttggtttctg

SEQ ID NO: 3518738 - DNA, 25 bp, Homo sapien
cttgcttcgacatatgtggattcgg

SEQ ID NO: 3518739 - DNA, 25 bp, Homo sapien
gaggcggtcccagccgtggatgttt

SEQ ID NO: 3518740 - DNA, 25 bp, Homo sapien
ggggattccagtgagtaaaagccga

SEQ ID NO: 3518741 - DNA, 25 bp, Homo sapien
gagacaggggattccagtgagtaaa

SEQ ID NO: 3518742 - DNA, 25 bp, Homo sapien
gacaggggattccagtgagtaaaag

SEQ ID NO: 3518743 - DNA, 25 bp, Homo sapien
caggggattccagtgagtaaaagcc

SEQ ID NO: 3518744 - DNA, 25 bp, Homo sapien
caaatccctccacacaaatccagta

SEQ ID NO: 3518745 - DNA, 25 bp, Homo sapien
cagtacctatccctggacagctgga

SEQ ID NO: 3518746 - DNA, 25 bp, Homo sapien
cagctggatgcctgatgccaagacc

SEQ ID NO: 3518747 - DNA, 25 bp, Homo sapien
cagcatttgccagtctttcaaggca

SEQ ID NO: 3518748 - DNA, 25 bp, Homo sapien
aagataaccgctgatcaggagcagg

SEQ ID NO: 3518749 - DNA, 25 bp, Homo sapien
gcaagataaccgctgatcaggagca

SEQ ID NO: 3518750 - DNA, 25 bp, Homo sapien
gataaccgctgatcaggagcaggaa

SEQ ID NO: 3518751 - DNA, 25 bp, Homo sapien
tgcagcaagataaccgctgatcagg

SEQ ID NO: 3518752 - DNA, 25 bp, Homo sapien
cagtgcagtataaagcaccttacaa

SEQ ID NO: 3518753 - DNA, 25 bp, Homo sapien
cctccccatactagcttctgggatg

SEQ ID NO: 3518754 - DNA, 25 bp, Homo sapien
taaagcaccttacaatcttgacatt

SEQ ID NO: 3518755 - DNA, 25 bp, Homo sapien
aaacccacatattctaactccacgt

SEQ ID NO: 3518756 - DNA, 25 bp, Homo sapien
aactgaacagtcaagtttctgcatc

SEQ ID NO: 3518757 - DNA, 25 bp, Homo sapien
gtgcgactatcatagacactgtctc

SEQ ID NO: 3518758 - DNA, 25 bp, Homo sapien
aaactgaacagtcaagtttctgcat

SEQ ID NO: 3518759 - DNA, 25 bp, Homo sapien
tacctaagattgtcactgcagccca

SEQ ID NO: 3518760 - DNA, 25 bp, Homo sapien
tggttacaactctccagtgcttggc

SEQ ID NO: 3518761 - DNA, 25 bp, Homo sapien
gctgctccagaagaattacctacaa

SEQ ID NO: 3518762 - DNA, 25 bp, Homo sapien
gggcctacctctagagtctctgatt

SEQ ID NO: 3518763 - DNA, 25 bp, Homo sapien
gaaaactgtcccgtcacaggatgcc

SEQ ID NO: 3518764 - DNA, 25 bp, Homo sapien
tgtcccgtcacaggatgcctgaatg

SEQ ID NO: 3518765 - DNA, 25 bp, Homo sapien
ccgtcacaggatgcctgaatgctgt

SEQ ID NO: 3518766 - DNA, 25 bp, Homo sapien
ggagaaaactgtcccgtcacaggat

SEQ ID NO: 3518767 - DNA, 25 bp, Homo sapien
aaggaagtcttggctccaagagaat

SEQ ID NO: 3518768 - DNA, 25 bp, Homo sapien
aggaagtcttggctccaagagaata

SEQ ID NO: 3518769 - DNA, 25 bp, Homo sapien
cagtacgagctaaaacaagaatgaa

SEQ ID NO: 3518770 - DNA, 25 bp, Homo sapien
acagtacgagctaaaacaagaatga

SEQ ID NO: 3518771 - DNA, 25 bp, Homo sapien
gacagtacgagctaaaacaagaatg

SEQ ID NO: 3518772 - DNA, 25 bp, Homo sapien
ccctactacaaaatgtcttcacttc

SEQ ID NO: 3518773 - DNA, 25 bp, Homo sapien
ctccctactacaaaatgtcttcact

SEQ ID NO: 3518774 - DNA, 25 bp, Homo sapien
tccctactacaaaatgtcttcactt

SEQ ID NO: 3518775 - DNA, 25 bp, Homo sapien
caaaaaagcagagttaagtctgagc

SEQ ID NO: 3518776 - DNA, 25 bp, Homo sapien
tatgacctcatttggcagacagcag

SEQ ID NO: 3518777 - DNA, 25 bp, Homo sapien
gcaagcccgtggaattctatgacct

SEQ ID NO: 3518778 - DNA, 25 bp, Homo sapien
agcagactagtcttcccaaaaaagc

SEQ ID NO: 3518779 - DNA, 25 bp, Homo sapien
atagaagttttcaaacctgtcctgt

SEQ ID NO: 3518780 - DNA, 25 bp, Homo sapien
tggtttaagatcaagaggcaccttc

SEQ ID NO: 3518781 - DNA, 25 bp, Homo sapien
tccccgacaggttcagaaactgcgg

SEQ ID NO: 3518782 - DNA, 25 bp, Homo sapien
ggcccgagaaaagccgcattctata

SEQ ID NO: 3518783 - DNA, 25 bp, Homo sapien
ccctttgggctccacgttcggatag

SEQ ID NO: 3518784 - DNA, 25 bp, Homo sapien
tcccaaggtgttacaaatccagcag

SEQ ID NO: 3518785 - DNA, 25 bp, Homo sapien
ggctagaggtaatcaaccaggcaag

SEQ ID NO: 3518786 - DNA, 25 bp, Homo sapien
ttcggatagtgtcttccccagctgc

SEQ ID NO: 3518787 - DNA, 25 bp, Homo sapien
agcttggaatatctgtgtgcagcca

SEQ ID NO: 3518788 - DNA, 25 bp, Homo sapien
agctagtatagatgcagtgccacca

SEQ ID NO: 3518789 - DNA, 25 bp, Homo sapien
cagtgccaccatgctagactattat

SEQ ID NO: 3518790 - DNA, 25 bp, Homo sapien
agtgggtggcatgatggtagcttac

SEQ ID NO: 3518791 - DNA, 25 bp, Homo sapien
tggtcccaggtgtcagcagggagcc

SEQ ID NO: 3518792 - DNA, 25 bp, Homo sapien
tcccaggtgtcagcagggagcccag

SEQ ID NO: 3518793 - DNA, 25 bp, Homo sapien
gtcccaggtgtcagcagggagccca

SEQ ID NO: 3518794 - DNA, 25 bp, Homo sapien
caggtgtcagcagggagcccaggtg

SEQ ID NO: 3518795 - DNA, 25 bp, Homo sapien
gaaaacagaaggcagcggtagtacc

SEQ ID NO: 3518796 - DNA, 25 bp, Homo sapien
cctagcgggagaaaatgtgtgacca

SEQ ID NO: 3518797 - DNA, 25 bp, Homo sapien
tgaacacttcacatgcactgacgta

SEQ ID NO: 3518798 - DNA, 25 bp, Homo sapien
caggtgcaaatactgtgctgagagc

SEQ ID NO: 3518799 - DNA, 25 bp, Homo sapien
ttattagcgaagctgggaagaagcc

SEQ ID NO: 3518800 - DNA, 25 bp, Homo sapien
gttccagaaaattaagcgacttgcc

SEQ ID NO: 3518801 - DNA, 25 bp, Homo sapien
cctaaagagatacggcaatggccac

SEQ ID NO: 3518802 - DNA, 25 bp, Homo sapien
aagatcacacacctagaaagcccag

SEQ ID NO: 3518803 - DNA, 25 bp, Homo sapien
tgggttctggtcctcacttaactaa

SEQ ID NO: 3518804 - DNA, 25 bp, Homo sapien
aagattcacccctgtattaccccat

SEQ ID NO: 3518805 - DNA, 25 bp, Homo sapien
aaactattctgtatgcccaggtcac

SEQ ID NO: 3518806 - DNA, 25 bp, Homo sapien
tatcattgcacactttgggaaactc

SEQ ID NO: 3518807 - DNA, 25 bp, Homo sapien
tccgtagccggctcctggcaagtgt

SEQ ID NO: 3518808 - DNA, 25 bp, Homo sapien
caagtgtgggtgtagaggaagggca

SEQ ID NO: 3518809 - DNA, 25 bp, Homo sapien
ccgattttgggaagcggcgctctct

SEQ ID NO: 3518810 - DNA, 25 bp, Homo sapien
ccctgcacacttggcggaacgcttg

SEQ ID NO: 3518811 - DNA, 25 bp, Homo sapien
ggcgggccaccggtcagcggcgctg

SEQ ID NO: 3518812 - DNA, 25 bp, Homo sapien
cccagggaggacagctccgcggctc

SEQ ID NO: 3518813 - DNA, 25 bp, Homo sapien
gcggctccatgcgactgcttcgcga

SEQ ID NO: 3518814 - DNA, 25 bp, Homo sapien
gtcagcggcgctgggctacggagcg

SEQ ID NO: 3518815 - DNA, 25 bp, Homo sapien
cacttgacatcagcaccgatcaaag

SEQ ID NO: 3518816 - DNA, 25 bp, Homo sapien
gttcggccaggacggcgcgtccgag

SEQ ID NO: 3518817 - DNA, 25 bp, Homo sapien
cacattcctttcctcgtagaggatg

SEQ ID NO: 3518818 - DNA, 25 bp, Homo sapien
aagcacgtggcgcagcgccagacag

SEQ ID NO: 3518819 - DNA, 25 bp, Homo sapien
caacacccaaggacagaaagtacat

SEQ ID NO: 3518820 - DNA, 25 bp, Homo sapien
gctttgatacggccccagttggtgc

SEQ ID NO: 3518821 - DNA, 25 bp, Homo sapien
gatacggccccagttggtgccccaa

SEQ ID NO: 3518822 - DNA, 25 bp, Homo sapien
tccttccctctgcaagctttgatac

SEQ ID NO: 3518823 - DNA, 25 bp, Homo sapien
aaataaagtatgtgctgggatattt

SEQ ID NO: 3518824 - DNA, 25 bp, Homo sapien
aataaagtatgtgctgggatatttt

SEQ ID NO: 3518825 - DNA, 25 bp, Homo sapien
cctgggagcctatctgagcagcatt

SEQ ID NO: 3518826 - DNA, 25 bp, Homo sapien
ttgttcaaggctgagagcacgctgc

SEQ ID NO: 3518827 - DNA, 25 bp, Homo sapien
aaaacccagagtagcttccaagtcg

SEQ ID NO: 3518828 - DNA, 25 bp, Homo sapien
agataagttatcgtgcctcctgccg

SEQ ID NO: 3518829 - DNA, 25 bp, Homo sapien
aactgtgttacttcttccaaataag

SEQ ID NO: 3518830 - DNA, 25 bp, Homo sapien
caagacgccagttcagtaactgtgt

SEQ ID NO: 3518831 - DNA, 25 bp, Homo sapien
aaactaggaacaagacgccagttca

SEQ ID NO: 3518832 - DNA, 25 bp, Homo sapien
cagtaactgtgttacttcttccaaa

SEQ ID NO: 3518833 - DNA, 25 bp, Homo sapien
gaggctcattctcaagggaccaaag

SEQ ID NO: 3518834 - DNA, 25 bp, Homo sapien
taaatatcgaatgtgaggctgggca

SEQ ID NO: 3518835 - DNA, 25 bp, Homo sapien
gaaaaatcaggtctctgcagggcac

SEQ ID NO: 3518836 - DNA, 25 bp, Homo sapien
ttcagatccccatgtgcaagcagca

SEQ ID NO: 3518837 - DNA, 25 bp, Homo sapien
aattcaagaaaccacaaactgtggc

SEQ ID NO: 3518838 - DNA, 25 bp, Homo sapien
tccttaatcagaccatacatcatga

SEQ ID NO: 3518839 - DNA, 25 bp, Homo sapien
caacaacaatgttcctcttcctggg

SEQ ID NO: 3518840 - DNA, 25 bp, Homo sapien
cacatgttggaaggccgaaaacaga

SEQ ID NO: 3518841 - DNA, 25 bp, Homo sapien
ggtaccacatttgccaagccaaagc

SEQ ID NO: 3518842 - DNA, 25 bp, Homo sapien
tctctgggcagaggtaacagaccag

SEQ ID NO: 3518843 - DNA, 25 bp, Homo sapien
agaaacccaatggttcagagaatgg

SEQ ID NO: 3518844 - DNA, 25 bp, Homo sapien
gacccctagatctgatgagacccag

SEQ ID NO: 3518845 - DNA, 25 bp, Homo sapien
gatacaggaaagtacacagacaggg

SEQ ID NO: 3518846 - DNA, 25 bp, Homo sapien
cagtgagaacttgctgttgagccaa

SEQ ID NO: 3518847 - DNA, 25 bp, Homo sapien
gataaccctgagacacgaagaacct

SEQ ID NO: 3518848 - DNA, 25 bp, Homo sapien
tccacacagagatgggtactcgcat

SEQ ID NO: 3518849 - DNA, 25 bp, Homo sapien
tcctgctagagacctaaaggtgggc

SEQ ID NO: 3518850 - DNA, 25 bp, Homo sapien
cacccatgatctttccccgtctggg

SEQ ID NO: 3518851 - DNA, 25 bp, Homo sapien
gggctcttcctgctagagacctaaa

SEQ ID NO: 3518852 - DNA, 25 bp, Homo sapien
ctgctgtggcgccacccatgatctt

SEQ ID NO: 3518853 - DNA, 25 bp, Homo sapien
taatgctcaagtactatccagcctg

SEQ ID NO: 3518854 - DNA, 25 bp, Homo sapien
tgactcctaagcatggtccgcaggc

SEQ ID NO: 3518855 - DNA, 25 bp, Homo sapien
tctccaagccaatgcacatagggct

SEQ ID NO: 3518856 - DNA, 25 bp, Homo sapien
cagcctgatctgctcgccattgtgg

SEQ ID NO: 3518857 - DNA, 25 bp, Homo sapien
gtatacttggttgactggaaagggc

SEQ ID NO: 3518858 - DNA, 25 bp, Homo sapien
gtatttaagggcaccactttcactg

SEQ ID NO: 3518859 - DNA, 25 bp, Homo sapien
ggatcacatgcttgacaggtagatt

SEQ ID NO: 3518860 - DNA, 25 bp, Homo sapien
cactgcctcctaaaggtaagtatac

SEQ ID NO: 3518861 - DNA, 25 bp, Homo sapien
gcctaaatcttgatgaacatgtccc

SEQ ID NO: 3518862 - DNA, 25 bp, Homo sapien
gccaggagagctatttgtacagcca

SEQ ID NO: 3518863 - DNA, 25 bp, Homo sapien
tgtttctgcaaatcagagagccctg

SEQ ID NO: 3518864 - DNA, 25 bp, Homo sapien
tgctgggctgcaacactggagctgt

SEQ ID NO: 3518865 - DNA, 25 bp, Homo sapien
gagggatgaagatatgagtcaggca

SEQ ID NO: 3518866 - DNA, 25 bp, Homo sapien
agtcaggcagaaagtccaccctgtg

SEQ ID NO: 3518867 - DNA, 25 bp, Homo sapien
gagtcaggcagaaagtccaccctgt

SEQ ID NO: 3518868 - DNA, 25 bp, Homo sapien
cttgagggatgaagatatgagtcag

SEQ ID NO: 3518869 - DNA, 25 bp, Homo sapien
ggatgctgttgtccaactgtttctg

SEQ ID NO: 3518870 - DNA, 25 bp, Homo sapien
agccagcgctgagatcaggcctcct

SEQ ID NO: 3518871 - DNA, 25 bp, Homo sapien
tgtccaactgtttctgccaggccat

SEQ ID NO: 3518872 - DNA, 25 bp, Homo sapien
tcaactcatgggcaagccagcgctg

SEQ ID NO: 3518873 - DNA, 25 bp, Homo sapien
ggccaaagccatccagtacacccat

SEQ ID NO: 3518874 - DNA, 25 bp, Homo sapien
tttttgcagcggaacaacacagttt

SEQ ID NO: 3518875 - DNA, 25 bp, Homo sapien
acaatttttgcagcggaacaacaca

SEQ ID NO: 3518876 - DNA, 25 bp, Homo sapien
aaacaatttttgcagcggaacaaca

SEQ ID NO: 3518877 - DNA, 25 bp, Homo sapien
attgtcttcataataaaagatgaca

SEQ ID NO: 3518878 - DNA, 25 bp, Homo sapien
gattttattgtcttcataataaaag

SEQ ID NO: 3518879 - DNA, 25 bp, Homo sapien
tttattgtcttcataataaaagatg

SEQ ID NO: 3518880 - DNA, 25 bp, Homo sapien
aaactcaagattttattgtcttcat

SEQ ID NO: 3518881 - DNA, 25 bp, Homo sapien
caacgcactcaagccttagcacaat

SEQ ID NO: 3518882 - DNA, 25 bp, Homo sapien
cttgcatcttttaatagccagcatt

SEQ ID NO: 3518883 - DNA, 25 bp, Homo sapien
gcagttgggctcaacgcactcaagc

SEQ ID NO: 3518884 - DNA, 25 bp, Homo sapien
tgggctcaacgcactcaagccttag

SEQ ID NO: 3518885 - DNA, 25 bp, Homo sapien
cgccgctttccctgggcgtacagag

SEQ ID NO: 3518886 - DNA, 25 bp, Homo sapien
tcttgtactgtgtcactttatgggg

SEQ ID NO: 3518887 - DNA, 25 bp, Homo sapien
tcataacgccgctttccctgggcgt

SEQ ID NO: 3518888 - DNA, 25 bp, Homo sapien
gaaaatcggcttagtttgcccacca

SEQ ID NO: 3518889 - DNA, 25 bp, Homo sapien
ttaaaatcggttggacagcaggcac

SEQ ID NO: 3518890 - DNA, 25 bp, Homo sapien
tgtaaggctaacctgtgtctacccc

SEQ ID NO: 3518891 - DNA, 25 bp, Homo sapien
ccagctatcccacaaggagtggcca

SEQ ID NO: 3518892 - DNA, 25 bp, Homo sapien
tccacatcttgtaaggctaacctgt

SEQ ID NO: 3518893 - DNA, 25 bp, Homo sapien
ggccacactggcaggtacactcagt

SEQ ID NO: 3518894 - DNA, 25 bp, Homo sapien
ccactctacagagatctcaaggaca

SEQ ID NO: 3518895 - DNA, 25 bp, Homo sapien
tcaaggacaggtttaatcaggaacc

SEQ ID NO: 3518896 - DNA, 25 bp, Homo sapien
gagatctcaaggacaggtttaatca

SEQ ID NO: 3518897 - DNA, 25 bp, Homo sapien
ctctacagagatctcaaggacaggt

SEQ ID NO: 3518898 - DNA, 25 bp, Homo sapien
attcatcagctctaggccaatgtga

SEQ ID NO: 3518899 - DNA, 25 bp, Homo sapien
cagttctaaaacccgtcctcctgtg

SEQ ID NO: 3518900 - DNA, 25 bp, Homo sapien
cagaaagccattcatcagctctagg

SEQ ID NO: 3518901 - DNA, 25 bp, Homo sapien
taggccaatgtgaaacccgtggtac

SEQ ID NO: 3518902 - DNA, 25 bp, Homo sapien
cagaagataggtggaatgagggccc

SEQ ID NO: 3518903 - DNA, 25 bp, Homo sapien
ttcccaagtccaatactcatcactg

SEQ ID NO: 3518904 - DNA, 25 bp, Homo sapien
ctggatgccgtagctcccaaaaggg

SEQ ID NO: 3518905 - DNA, 25 bp, Homo sapien
caagtccaatactcatcactgtcct

SEQ ID NO: 3518906 - DNA, 25 bp, Homo sapien
catatcaggatgaggtatttgggcc

SEQ ID NO: 3518907 - DNA, 25 bp, Homo sapien
atatcaggatgaggtatttgggccc

SEQ ID NO: 3518908 - DNA, 25 bp, Homo sapien
gcatatcaggatgaggtatttgggc

SEQ ID NO: 3518909 - DNA, 25 bp, Homo sapien
aagcatatcaggatgaggtatttgg

SEQ ID NO: 3518910 - DNA, 25 bp, Homo sapien
tgtttagctggtaagccaacccatt

SEQ ID NO: 3518911 - DNA, 25 bp, Homo sapien
tgactggaagctagtgcagagacaa

SEQ ID NO: 3518912 - DNA, 25 bp, Homo sapien
cttgaacaagacaggctcggttcct

SEQ ID NO: 3518913 - DNA, 25 bp, Homo sapien
tataacatgtctgagtcaggctgag

SEQ ID NO: 3518914 - DNA, 25 bp, Homo sapien
ctggtactgggtaggccaaaggaca

SEQ ID NO: 3518915 - DNA, 25 bp, Homo sapien
gacaaactgaatttggtccagggac

SEQ ID NO: 3518916 - DNA, 25 bp, Homo sapien
aggtctgggagctgcgtctctgcag

SEQ ID NO: 3518917 - DNA, 25 bp, Homo sapien
gctccaggctgaaagctacgtgact

SEQ ID NO: 3518918 - DNA, 25 bp, Homo sapien
tttctctgtcagtagggtcaaggcc

SEQ ID NO: 3518919 - DNA, 25 bp, Homo sapien
cagtagggtcaaggccaccaggtga

SEQ ID NO: 3518920 - DNA, 25 bp, Homo sapien
ctagaagcaccaagcacacaggcct

SEQ ID NO: 3518921 - DNA, 25 bp, Homo sapien
tctgtcagtagggtcaaggccacca

SEQ ID NO: 3518922 - DNA, 25 bp, Homo sapien
aagcaaggcatgtctcgaatcaaaa

SEQ ID NO: 3518923 - DNA, 25 bp, Homo sapien
caactatatccagattgcctaaacc

SEQ ID NO: 3518924 - DNA, 25 bp, Homo sapien
aaaataacctttgctacaactatat

SEQ ID NO: 3518925 - DNA, 25 bp, Homo sapien
caaggcatgtctcgaatcaaaaata

SEQ ID NO: 3518926 - DNA, 25 bp, Homo sapien
ctgtgcgaagctcgagtgtcttcct

SEQ ID NO: 3518927 - DNA, 25 bp, Homo sapien
tgcgaagctcgagtgtcttcctgaa

SEQ ID NO: 3518928 - DNA, 25 bp, Homo sapien
tgtgcgaagctcgagtgtcttcctg

SEQ ID NO: 3518929 - DNA, 25 bp, Homo sapien
gcgaagctcgagtgtcttcctgaaa

SEQ ID NO: 3518930 - DNA, 25 bp, Homo sapien
atacaatcccccactcactcccaac

SEQ ID NO: 3518931 - DNA, 25 bp, Homo sapien
catacaatcccccactcactcccaa

SEQ ID NO: 3518932 - DNA, 25 bp, Homo sapien
tacaatcccccactcactcccaact

SEQ ID NO: 3518933 - DNA, 25 bp, Homo sapien
acactgagaaaaccagaggctcccc

SEQ ID NO: 3518934 - DNA, 25 bp, Homo sapien
agaggtgaaggcagcacattcccaa

SEQ ID NO: 3518935 - DNA, 25 bp, Homo sapien
caacccacactgagaaaaccagagg

SEQ ID NO: 3518936 - DNA, 25 bp, Homo sapien
ccaccatttctaactgggactgaca

SEQ ID NO: 3518937 - DNA, 25 bp, Homo sapien
tctctgagacccaaacaggcacaca

SEQ ID NO: 3518938 - DNA, 25 bp, Homo sapien
tttctgcattggtctctcctgcctt

SEQ ID NO: 3518939 - DNA, 25 bp, Homo sapien
atggccctcacccctaatccccagc

SEQ ID NO: 3518940 - DNA, 25 bp, Homo sapien
agctccttcacattttctgcattgg

SEQ ID NO: 3518941 - DNA, 25 bp, Homo sapien
agagaactgcttctgagggataacc

SEQ ID NO: 3518942 - DNA, 25 bp, Homo sapien
taccctgcctttctgagggaggccc

SEQ ID NO: 3518943 - DNA, 25 bp, Homo sapien
ctgcctcacagtcatcagggaaggt

SEQ ID NO: 3518944 - DNA, 25 bp, Homo sapien
tcacagtcatcagggaaggtgcagg

SEQ ID NO: 3518945 - DNA, 25 bp, Homo sapien
tgagacgtgccagacaatgcatttg

SEQ ID NO: 3518946 - DNA, 25 bp, Homo sapien
tcagagccgataaccaggtggctgc

SEQ ID NO: 3518947 - DNA, 25 bp, Homo sapien
catttgtcctttagtggtcagagcc

SEQ ID NO: 3518948 - DNA, 25 bp, Homo sapien
ttgacacctgtgacgtgagacgtgc

SEQ ID NO: 3518949 - DNA, 25 bp, Homo sapien
catcctgtttggagatgtagggccc

SEQ ID NO: 3518950 - DNA, 25 bp, Homo sapien
gaaaagccaacaaggagtctctccg

SEQ ID NO: 3518951 - DNA, 25 bp, Homo sapien
gggaactcgcattcctctgccggta

SEQ ID NO: 3518952 - DNA, 25 bp, Homo sapien
ccaaggttaccacaactgctgatac

SEQ ID NO: 3518953 - DNA, 25 bp, Homo sapien
agtttgctgagatgatgctgtctta

SEQ ID NO: 3518954 - DNA, 25 bp, Homo sapien
tgctgtcttacactgagcaaagaga

SEQ ID NO: 3518955 - DNA, 25 bp, Homo sapien
tttgctgagatgatgctgtcttaca

SEQ ID NO: 3518956 - DNA, 25 bp, Homo sapien
atgctgtcttacactgagcaaagag

SEQ ID NO: 3518957 - DNA, 25 bp, Homo sapien
tgagaattaaatcaatgacagttac

SEQ ID NO: 3518958 - DNA, 25 bp, Homo sapien
caggattacggcaagattctatgtc

SEQ ID NO: 3518959 - DNA, 25 bp, Homo sapien
gaaactagtagtagttcctacctca

SEQ ID NO: 3518960 - DNA, 25 bp, Homo sapien
gacagttacagaacagttcctagca

SEQ ID NO: 3518961 - DNA, 25 bp, Homo sapien
cttcctctcggaggccgccaaacaa

SEQ ID NO: 3518962 - DNA, 25 bp, Homo sapien
gcagagtctgcggcctcttcccccc

SEQ ID NO: 3518963 - DNA, 25 bp, Homo sapien
atccagccggattgcaaggtccagg

SEQ ID NO: 3518964 - DNA, 25 bp, Homo sapien
gcccaggtccccagcgtaggtgcgg

SEQ ID NO: 3518965 - DNA, 25 bp, Homo sapien
tcgatgaagtagctggcgccctcct

SEQ ID NO: 3518966 - DNA, 25 bp, Homo sapien
ctgagcggatcatgtggcccgagtt

SEQ ID NO: 3518967 - DNA, 25 bp, Homo sapien
ccaggtcgtgcagcggagctggtca

SEQ ID NO: 3518968 - DNA, 25 bp, Homo sapien
tgtggcccgagttgacgggctcccc

SEQ ID NO: 3518969 - DNA, 25 bp, Homo sapien
ggtgcgcggatgcagccaggtcgtg

SEQ ID NO: 3518970 - DNA, 25 bp, Homo sapien
acaccccgtaggaccaatgctcagg

SEQ ID NO: 3518971 - DNA, 25 bp, Homo sapien
aagaagacgcggccatcccggcaca

SEQ ID NO: 3518972 - DNA, 25 bp, Homo sapien
ccccgtaggaccaatgctcaggtaa

SEQ ID NO: 3518973 - DNA, 25 bp, Homo sapien
aatgctcaggtaaagtgtcccgccc

SEQ ID NO: 3518974 - DNA, 25 bp, Homo sapien
gctgctctggagcaagcagggttgg

SEQ ID NO: 3518975 - DNA, 25 bp, Homo sapien
agagctgctctggagcaagcagggt

SEQ ID NO: 3518976 - DNA, 25 bp, Homo sapien
ttgggggtggaggaacactgcaggt

SEQ ID NO: 3518977 - DNA, 25 bp, Homo sapien
aaatgctggaagacaagagctgctc

SEQ ID NO: 3518978 - DNA, 25 bp, Homo sapien
gagcagtgaaaggaccccacaaggt

SEQ ID NO: 3518979 - DNA, 25 bp, Homo sapien
cccacaaggtcagctaaggtttctt

SEQ ID NO: 3518980 - DNA, 25 bp, Homo sapien
tacaagacgttcacaggtcccagag

SEQ ID NO: 3518981 - DNA, 25 bp, Homo sapien
catttggtcctaaagcggtagggag

SEQ ID NO: 3518982 - DNA, 25 bp, Homo sapien
ctacagccggtcctcgctgggctgt

SEQ ID NO: 3518983 - DNA, 25 bp, Homo sapien
tgtggacatccaatctcacagcagt

SEQ ID NO: 3518984 - DNA, 25 bp, Homo sapien
ggacatccaatctcacagcagtcat

SEQ ID NO: 3518985 - DNA, 25 bp, Homo sapien
tacagccggtcctcgctgggctgtt

SEQ ID NO: 3518986 - DNA, 25 bp, Homo sapien
gcggtatgggacagtaagtagtgcc

SEQ ID NO: 3518987 - DNA, 25 bp, Homo sapien
tgtagaggcaatgcggtatgggaca

SEQ ID NO: 3518988 - DNA, 25 bp, Homo sapien
ggccacagtctttgtagaggcaatg

SEQ ID NO: 3518989 - DNA, 25 bp, Homo sapien
tccctaaaggccacagtctttgtag

SEQ ID NO: 3518990 - DNA, 25 bp, Homo sapien
agcaactgatactcttacagaaacg

SEQ ID NO: 3518991 - DNA, 25 bp, Homo sapien
caactgatactcttacagaaacgtc

SEQ ID NO: 3518992 - DNA, 25 bp, Homo sapien
gatactcttacagaaacgtcagaaa

SEQ ID NO: 3518993 - DNA, 25 bp, Homo sapien
gccaaaagcaactgatactcttaca

SEQ ID NO: 3518994 - DNA, 25 bp, Homo sapien
ggcactgggaatatgaggcaaccaa

SEQ ID NO: 3518995 - DNA, 25 bp, Homo sapien
taaacatcagaccaaccgctgtgca

SEQ ID NO: 3518996 - DNA, 25 bp, Homo sapien
tcacagtccagtctggtagggcaga

SEQ ID NO: 3518997 - DNA, 25 bp, Homo sapien
gccgtaggaccatagaaacacagcc

SEQ ID NO: 3518998 - DNA, 25 bp, Homo sapien
tctacctcatagagtgaccatgagg

SEQ ID NO: 3518999 - DNA, 25 bp, Homo sapien
tggtagttccccaatgtccgcagag

SEQ ID NO: 3519000 - DNA, 25 bp, Homo sapien
caccagtgtgtcaaattgtctgcct

SEQ ID NO: 3519001 - DNA, 25 bp, Homo sapien
gggttgcccgaaactgtggacagta

SEQ ID NO: 3519002 - DNA, 25 bp, Homo sapien
tgtctgtgtactcaagcaataaaat

SEQ ID NO: 3519003 - DNA, 25 bp, Homo sapien
gtgtactcaagcaataaaatgattg

SEQ ID NO: 3519004 - DNA, 25 bp, Homo sapien
tttgtctgtgtactcaagcaataaa

SEQ ID NO: 3519005 - DNA, 25 bp, Homo sapien
atttgtctgtgtactcaagcaataa

SEQ ID NO: 3519006 - DNA, 25 bp, Homo sapien
gtctgtgtactcaagcaataaaatg

SEQ ID NO: 3519007 - DNA, 25 bp, Homo sapien
ctgtgtactcaagcaataaaatgat

SEQ ID NO: 3519008 - DNA, 25 bp, Homo sapien
cattttattgcttgagtacacagac

SEQ ID NO: 3519009 - DNA, 25 bp, Homo sapien
aatcattttattgcttgagtacaca

SEQ ID NO: 3519010 - DNA, 25 bp, Homo sapien
tcattttattgcttgagtacacaga

SEQ ID NO: 3519011 - DNA, 25 bp, Homo sapien
tttattgcttgagtacacagacaaa

SEQ ID NO: 3519012 - DNA, 25 bp, Homo sapien
caatcattttattgcttgagtacac

SEQ ID NO: 3519013 - DNA, 25 bp, Homo sapien
ttattgcttgagtacacagacaaat

SEQ ID NO: 3519014 - DNA, 25 bp, Homo sapien
catctacagcctctgccctggtcgc

SEQ ID NO: 3519015 - DNA, 25 bp, Homo sapien
tcatctacagcctctgccctggtcg

SEQ ID NO: 3519016 - DNA, 25 bp, Homo sapien
atcatctacagcctctgccctggtc

SEQ ID NO: 3519017 - DNA, 25 bp, Homo sapien
atctacagcctctgccctggtcgca

SEQ ID NO: 3519018 - DNA, 25 bp, Homo sapien
tacagcctctgccctggtcgcataa

SEQ ID NO: 3519019 - DNA, 25 bp, Homo sapien
tctacagcctctgccctggtcgcat

SEQ ID NO: 3519020 - DNA, 25 bp, Homo sapien
cgaccagggcagaggctgtagatga

SEQ ID NO: 3519021 - DNA, 25 bp, Homo sapien
atgcgaccagggcagaggctgtaga

SEQ ID NO: 3519022 - DNA, 25 bp, Homo sapien
gcgaccagggcagaggctgtagatg

SEQ ID NO: 3519023 - DNA, 25 bp, Homo sapien
ttatgcgaccagggcagaggctgta

SEQ ID NO: 3519024 - DNA, 25 bp, Homo sapien
gaccagggcagaggctgtagatgat

SEQ ID NO: 3519025 - DNA, 25 bp, Homo sapien
tgcgaccagggcagaggctgtagat

SEQ ID NO: 3519026 - DNA, 25 bp, Homo sapien
gggactagtattaatcctgattttc

SEQ ID NO: 3519027 - DNA, 25 bp, Homo sapien
cattgtgcttgaacacaatgagttg

SEQ ID NO: 3519028 - DNA, 25 bp, Homo sapien
cagaagtttggtgcactttatatag

SEQ ID NO: 3519029 - DNA, 25 bp, Homo sapien
tgtttgagaatagcaccattagtgg

SEQ ID NO: 3519030 - DNA, 25 bp, Homo sapien
ttaatgaatgtggagggactagtat

SEQ ID NO: 3519031 - DNA, 25 bp, Homo sapien
tcaggtattcagaagtttggtgcac

SEQ ID NO: 3519032 - DNA, 25 bp, Homo sapien
tatataaagtgcaccaaacttctga

SEQ ID NO: 3519033 - DNA, 25 bp, Homo sapien
ccaactcattgtgttcaagcacaat

SEQ ID NO: 3519034 - DNA, 25 bp, Homo sapien
ccactaatggtgctattctcaaaca

SEQ ID NO: 3519035 - DNA, 25 bp, Homo sapien
tgcaccaaacttctgaatacctgaa

SEQ ID NO: 3519036 - DNA, 25 bp, Homo sapien
atactagtccctccacattcattaa

SEQ ID NO: 3519037 - DNA, 25 bp, Homo sapien
gaaaatcaggattaatactagtccc

SEQ ID NO: 3519038 - DNA, 25 bp, Homo sapien
ttggttgccagacattcgcagtttc

SEQ ID NO: 3519039 - DNA, 25 bp, Homo sapien
gattggttgccagacattcgcagtt

SEQ ID NO: 3519040 - DNA, 25 bp, Homo sapien
ggttgccagacattcgcagtttcca

SEQ ID NO: 3519041 - DNA, 25 bp, Homo sapien
tggttgccagacattcgcagtttcc

SEQ ID NO: 3519042 - DNA, 25 bp, Homo sapien
gccagacattcgcagtttccaccag

SEQ ID NO: 3519043 - DNA, 25 bp, Homo sapien
attggttgccagacattcgcagttt

SEQ ID NO: 3519044 - DNA, 25 bp, Homo sapien
ggaaactgcgaatgtctggcaacca

SEQ ID NO: 3519045 - DNA, 25 bp, Homo sapien
aactgcgaatgtctggcaaccaatc

SEQ ID NO: 3519046 - DNA, 25 bp, Homo sapien
gaaactgcgaatgtctggcaaccaa

SEQ ID NO: 3519047 - DNA, 25 bp, Homo sapien
tggaaactgcgaatgtctggcaacc

SEQ ID NO: 3519048 - DNA, 25 bp, Homo sapien
aaactgcgaatgtctggcaaccaat

SEQ ID NO: 3519049 - DNA, 25 bp, Homo sapien
ctggtggaaactgcgaatgtctggc

SEQ ID NO: 3519050 - DNA, 25 bp, Homo sapien
ttgcagaccccagatttagaccatg

SEQ ID NO: 3519051 - DNA, 25 bp, Homo sapien
tacataatcgaatgggtgtggctgc

SEQ ID NO: 3519052 - DNA, 25 bp, Homo sapien
tcaagaataggagtcagccagtagt

SEQ ID NO: 3519053 - DNA, 25 bp, Homo sapien
aagcagagggccatagttgcagacc

SEQ ID NO: 3519054 - DNA, 25 bp, Homo sapien
gactctcttttagatagtaggtaga

SEQ ID NO: 3519055 - DNA, 25 bp, Homo sapien
ttagaccatgaataagccctttgac

SEQ ID NO: 3519056 - DNA, 25 bp, Homo sapien
tctacctactatctaaaagagagtc

SEQ ID NO: 3519057 - DNA, 25 bp, Homo sapien
caagcagccacacccattcgattat

SEQ ID NO: 3519058 - DNA, 25 bp, Homo sapien
gagtcaaagggcttattcatggtct

SEQ ID NO: 3519059 - DNA, 25 bp, Homo sapien
ggcttattcatggtctaaatctggg

SEQ ID NO: 3519060 - DNA, 25 bp, Homo sapien
tactactggctgactcctattcttg

SEQ ID NO: 3519061 - DNA, 25 bp, Homo sapien
ggtctgcaactatggccctctgctt

SEQ ID NO: 3519062 - DNA, 25 bp, Homo sapien
ccgtttggctcgatattataagacc

SEQ ID NO: 3519063 - DNA, 25 bp, Homo sapien
gccggattcaccgtttggctcgata

SEQ ID NO: 3519064 - DNA, 25 bp, Homo sapien
agagccggattcaccgtttggctcg

SEQ ID NO: 3519065 - DNA, 25 bp, Homo sapien
gcgagtcctccctcccaattggaaa

SEQ ID NO: 3519066 - DNA, 25 bp, Homo sapien
gatattataagaccaagcgagtcct

SEQ ID NO: 3519067 - DNA, 25 bp, Homo sapien
tcaccgtttggctcgatattataag

SEQ ID NO: 3519068 - DNA, 25 bp, Homo sapien
ggactcgcttggtcttataatatcg

SEQ ID NO: 3519069 - DNA, 25 bp, Homo sapien
tatcgagccaaacggtgaatccggc

SEQ ID NO: 3519070 - DNA, 25 bp, Homo sapien
ggtcttataatatcgagccaaacgg

SEQ ID NO: 3519071 - DNA, 25 bp, Homo sapien
ttccaattgggagggaggactcgct

SEQ ID NO: 3519072 - DNA, 25 bp, Homo sapien
tcttataatatcgagccaaacggtg

SEQ ID NO: 3519073 - DNA, 25 bp, Homo sapien
ttataatatcgagccaaacggtgaa

SEQ ID NO: 3519074 - DNA, 25 bp, Homo sapien
gatgctaaattccgtctgattctaa

SEQ ID NO: 3519075 - DNA, 25 bp, Homo sapien
atgctaaattccgtctgattctaat

SEQ ID NO: 3519076 - DNA, 25 bp, Homo sapien
gctaaattccgtctgattctaatag

SEQ ID NO: 3519077 - DNA, 25 bp, Homo sapien
tgctaaattccgtctgattctaata

SEQ ID NO: 3519078 - DNA, 25 bp, Homo sapien
attagaatcagacggaatttagcat

SEQ ID NO: 3519079 - DNA, 25 bp, Homo sapien
ttagaatcagacggaatttagcatc

SEQ ID NO: 3519080 - DNA, 25 bp, Homo sapien
ctattagaatcagacggaatttagc

SEQ ID NO: 3519081 - DNA, 25 bp, Homo sapien
tattagaatcagacggaatttagca

SEQ ID NO: 3519082 - DNA, 25 bp, Homo sapien
tttcggtaaaatgtaatgcatctgg

SEQ ID NO: 3519083 - DNA, 25 bp, Homo sapien
gctaataaataaaacctggtgctaa

SEQ ID NO: 3519084 - DNA, 25 bp, Homo sapien
gctaagtaggactgcttgtactaaa

SEQ ID NO: 3519085 - DNA, 25 bp, Homo sapien
tctggtttgaattatccaaggctta

SEQ ID NO: 3519086 - DNA, 25 bp, Homo sapien
aaaacctggtgctaagtaggactgc

SEQ ID NO: 3519087 - DNA, 25 bp, Homo sapien
cattatagaaagtgcatggtagctc

SEQ ID NO: 3519088 - DNA, 25 bp, Homo sapien
ttagcaccaggttttatttattagc

SEQ ID NO: 3519089 - DNA, 25 bp, Homo sapien
ttggatagaatttgaacttcaaagc

SEQ ID NO: 3519090 - DNA, 25 bp, Homo sapien
tacaagcagtcctacttagcaccag

SEQ ID NO: 3519091 - DNA, 25 bp, Homo sapien
ccagatgcattacattttaccgaaa

SEQ ID NO: 3519092 - DNA, 25 bp, Homo sapien
taagccttggataattcaaaccaga

SEQ ID NO: 3519093 - DNA, 25 bp, Homo sapien
gagctaccatgcactttctataatg

SEQ ID NO: 3519094 - DNA, 25 bp, Homo sapien
ttgcacaagtacgttttgtgacagg

SEQ ID NO: 3519095 - DNA, 25 bp, Homo sapien
gttgcacaagtacgttttgtgacag

SEQ ID NO: 3519096 - DNA, 25 bp, Homo sapien
cctgtcacaaaacgtacttgtgcaa

SEQ ID NO: 3519097 - DNA, 25 bp, Homo sapien
ctgtcacaaaacgtacttgtgcaac

SEQ ID NO: 3519098 - DNA, 25 bp, Homo sapien
tctgagccttgacatcatcacattc

SEQ ID NO: 3519099 - DNA, 25 bp, Homo sapien
tataaaagtatacccccatcttaca

SEQ ID NO: 3519100 - DNA, 25 bp, Homo sapien
tgacatcatcacattctccagtttg

SEQ ID NO: 3519101 - DNA, 25 bp, Homo sapien
gacatcatcacattctccagtttgt

SEQ ID NO: 3519102 - DNA, 25 bp, Homo sapien
gatttctgagccttgacatcatcac

SEQ ID NO: 3519103 - DNA, 25 bp, Homo sapien
atgtgcattctcacgttggtttctg

SEQ ID NO: 3519104 - DNA, 25 bp, Homo sapien
caaactggagaatgtgatgatgtca

SEQ ID NO: 3519105 - DNA, 25 bp, Homo sapien
acaaactggagaatgtgatgatgtc

SEQ ID NO: 3519106 - DNA, 25 bp, Homo sapien
gaatgtgatgatgtcaaggctcaga

SEQ ID NO: 3519107 - DNA, 25 bp, Homo sapien
cagaaaccaacgtgagaatgcacat

SEQ ID NO: 3519108 - DNA, 25 bp, Homo sapien
gtgatgatgtcaaggctcagaaatc

SEQ ID NO: 3519109 - DNA, 25 bp, Homo sapien
gagaatgtgatgatgtcaaggctca

SEQ ID NO: 3519110 - DNA, 25 bp, Homo sapien
ggttttccaacattcgcagtttcca

SEQ ID NO: 3519111 - DNA, 25 bp, Homo sapien
gatggttttccaacattcgcagttt

SEQ ID NO: 3519112 - DNA, 25 bp, Homo sapien
ttccaacattcgcagtttccaccag

SEQ ID NO: 3519113 - DNA, 25 bp, Homo sapien
atgatggttttccaacattcgcagt

SEQ ID NO: 3519114 - DNA, 25 bp, Homo sapien
ttttccaacattcgcagtttccacc

SEQ ID NO: 3519115 - DNA, 25 bp, Homo sapien
tggttttccaacattcgcagtttcc

SEQ ID NO: 3519116 - DNA, 25 bp, Homo sapien
ctggtggaaactgcgaatgttggaa

SEQ ID NO: 3519117 - DNA, 25 bp, Homo sapien
aaactgcgaatgttggaaaaccatc

SEQ ID NO: 3519118 - DNA, 25 bp, Homo sapien
ggaaactgcgaatgttggaaaacca

SEQ ID NO: 3519119 - DNA, 25 bp, Homo sapien
actgcgaatgttggaaaaccatcat

SEQ ID NO: 3519120 - DNA, 25 bp, Homo sapien
ggtggaaactgcgaatgttggaaaa

SEQ ID NO: 3519121 - DNA, 25 bp, Homo sapien
tggaaactgcgaatgttggaaaacc

SEQ ID NO: 3519122 - DNA, 25 bp, Homo sapien
tttggtcatctgtattccagcaagc

SEQ ID NO: 3519123 - DNA, 25 bp, Homo sapien
gtaaatgttagctgtggaatctcat

SEQ ID NO: 3519124 - DNA, 25 bp, Homo sapien
taatccctttggtcatctgtattcc

SEQ ID NO: 3519125 - DNA, 25 bp, Homo sapien
tctcattaatccctttggtcatctg

SEQ ID NO: 3519126 - DNA, 25 bp, Homo sapien
tatctgaccagagttctcagtaaat

SEQ ID NO: 3519127 - DNA, 25 bp, Homo sapien
ccctttggtcatctgtattccagca

SEQ ID NO: 3519128 - DNA, 25 bp, Homo sapien
ggaatacagatgaccaaagggatta

SEQ ID NO: 3519129 - DNA, 25 bp, Homo sapien
atttactgagaactctggtcagata

SEQ ID NO: 3519130 - DNA, 25 bp, Homo sapien
tgctggaatacagatgaccaaaggg

SEQ ID NO: 3519131 - DNA, 25 bp, Homo sapien
atgagattccacagctaacatttac

SEQ ID NO: 3519132 - DNA, 25 bp, Homo sapien
gcttgctggaatacagatgaccaaa

SEQ ID NO: 3519133 - DNA, 25 bp, Homo sapien
cagatgaccaaagggattaatgaga

SEQ ID NO: 3519134 - DNA, 25 bp, Homo sapien
taacatagcctatttcgcctgtcct

SEQ ID NO: 3519135 - DNA, 25 bp, Homo sapien
catagcctatttcgcctgtcctcgt

SEQ ID NO: 3519136 - DNA, 25 bp, Homo sapien
ttgtgtctaacatagcctatttcgc

SEQ ID NO: 3519137 - DNA, 25 bp, Homo sapien
acatagcctatttcgcctgtcctcg

SEQ ID NO: 3519138 - DNA, 25 bp, Homo sapien
gtctaacatagcctatttcgcctgt

SEQ ID NO: 3519139 - DNA, 25 bp, Homo sapien
tgtgtctaacatagcctatttcgcc

SEQ ID NO: 3519140 - DNA, 25 bp, Homo sapien
gacaggcgaaataggctatgttaga

SEQ ID NO: 3519141 - DNA, 25 bp, Homo sapien
acgaggacaggcgaaataggctatg

SEQ ID NO: 3519142 - DNA, 25 bp, Homo sapien
gcgaaataggctatgttagacacaa

SEQ ID NO: 3519143 - DNA, 25 bp, Homo sapien
cgaggacaggcgaaataggctatgt

SEQ ID NO: 3519144 - DNA, 25 bp, Homo sapien
ggcgaaataggctatgttagacaca

SEQ ID NO: 3519145 - DNA, 25 bp, Homo sapien
cacgaggacaggcgaaataggctat

SEQ ID NO: 3519146 - DNA, 25 bp, Homo sapien
aagggccttactccttcacagatcg

SEQ ID NO: 3519147 - DNA, 25 bp, Homo sapien
cgatctgtgaaggagtaaggccctt

SEQ ID NO: 3519148 - DNA, 25 bp, Homo sapien
tgaggaacttgcgtgtatgaggagc

SEQ ID NO: 3519149 - DNA, 25 bp, Homo sapien
tgggttctcatcctaaggctgcttt

SEQ ID NO: 3519150 - DNA, 25 bp, Homo sapien
gagaccgctgttctgcggcgccatt

SEQ ID NO: 3519151 - DNA, 25 bp, Homo sapien
ttttgcggaaggagagaccgctgtt

SEQ ID NO: 3519152 - DNA, 25 bp, Homo sapien
cgtgtatgaggagcgcggttttgcg

SEQ ID NO: 3519153 - DNA, 25 bp, Homo sapien
tgcggcgccattcctgggttctcat

SEQ ID NO: 3519154 - DNA, 25 bp, Homo sapien
atgagaacccaggaatggcgccgca

SEQ ID NO: 3519155 - DNA, 25 bp, Homo sapien
gaacagcggtctctccttccgcaaa

SEQ ID NO: 3519156 - DNA, 25 bp, Homo sapien
gctcctcatacacgcaagttcctca

SEQ ID NO: 3519157 - DNA, 25 bp, Homo sapien
aatggcgccgcagaacagcggtctc

SEQ ID NO: 3519158 - DNA, 25 bp, Homo sapien
aaagcagccttaggatgagaaccca

SEQ ID NO: 3519159 - DNA, 25 bp, Homo sapien
tagaaagcagccttaggatgagaac

SEQ ID NO: 3519160 - DNA, 25 bp, Homo sapien
gtagcgcgctgggaccggggagaat

SEQ ID NO: 3519161 - DNA, 25 bp, Homo sapien
gtaagtagcgcgctgggaccgggga

SEQ ID NO: 3519162 - DNA, 25 bp, Homo sapien
agcgcgctgggaccggggagaatcc

SEQ ID NO: 3519163 - DNA, 25 bp, Homo sapien
aagtagcgcgctgggaccggggaga

SEQ ID NO: 3519164 - DNA, 25 bp, Homo sapien
taagtagcgcgctgggaccggggag

SEQ ID NO: 3519165 - DNA, 25 bp, Homo sapien
tagcgcgctgggaccggggagaatc

SEQ ID NO: 3519166 - DNA, 25 bp, Homo sapien
gattctccccggtcccagcgcgcta

SEQ ID NO: 3519167 - DNA, 25 bp, Homo sapien
tctccccggtcccagcgcgctactt

SEQ ID NO: 3519168 - DNA, 25 bp, Homo sapien
ctccccggtcccagcgcgctactta

SEQ ID NO: 3519169 - DNA, 25 bp, Homo sapien
ccggattctccccggtcccagcgcg

SEQ ID NO: 3519170 - DNA, 25 bp, Homo sapien
ggattctccccggtcccagcgcgct

SEQ ID NO: 3519171 - DNA, 25 bp, Homo sapien
tccccggtcccagcgcgctacttac

SEQ ID NO: 3519172 - DNA, 25 bp, Homo sapien
cagtcggctttaccctatcgacgca

SEQ ID NO: 3519173 - DNA, 25 bp, Homo sapien
agtcggctttaccctatcgacgcag

SEQ ID NO: 3519174 - DNA, 25 bp, Homo sapien
cccagtcggctttaccctatcgacg

SEQ ID NO: 3519175 - DNA, 25 bp, Homo sapien
gtcccagtcggctttaccctatcga

SEQ ID NO: 3519176 - DNA, 25 bp, Homo sapien
tcccagtcggctttaccctatcgac

SEQ ID NO: 3519177 - DNA, 25 bp, Homo sapien
gtcggctttaccctatcgacgcagc

SEQ ID NO: 3519178 - DNA, 25 bp, Homo sapien
tcgatagggtaaagccgactgggac

SEQ ID NO: 3519179 - DNA, 25 bp, Homo sapien
ctgcgtcgatagggtaaagccgact

SEQ ID NO: 3519180 - DNA, 25 bp, Homo sapien
gctgcgtcgatagggtaaagccgac

SEQ ID NO: 3519181 - DNA, 25 bp, Homo sapien
tgcgtcgatagggtaaagccgactg

SEQ ID NO: 3519182 - DNA, 25 bp, Homo sapien
cgtcgatagggtaaagccgactggg

SEQ ID NO: 3519183 - DNA, 25 bp, Homo sapien
gtcgatagggtaaagccgactggga

SEQ ID NO: 3519184 - DNA, 25 bp, Homo sapien
tgggctgctctggcactagccgcca

SEQ ID NO: 3519185 - DNA, 25 bp, Homo sapien
ctcggggcatcaagccggattgctg

SEQ ID NO: 3519186 - DNA, 25 bp, Homo sapien
tcacctcgagactgcttctctcccc

SEQ ID NO: 3519187 - DNA, 25 bp, Homo sapien
gcagcgggccgaggggatgatgttc

SEQ ID NO: 3519188 - DNA, 25 bp, Homo sapien
tgagctcggggcatcaagccggatt

SEQ ID NO: 3519189 - DNA, 25 bp, Homo sapien
ccgccacctcacctcgagactgctt

SEQ ID NO: 3519190 - DNA, 25 bp, Homo sapien
ctcgaggtgaggtggcggctagtgc

SEQ ID NO: 3519191 - DNA, 25 bp, Homo sapien
ccccgcccagcaatccggcttgatg

SEQ ID NO: 3519192 - DNA, 25 bp, Homo sapien
aatccggcttgatgccccgagctca

SEQ ID NO: 3519193 - DNA, 25 bp, Homo sapien
tggcggctagtgccagagcagccca

SEQ ID NO: 3519194 - DNA, 25 bp, Homo sapien
gagagaagcagtctcgaggtgaggt

SEQ ID NO: 3519195 - DNA, 25 bp, Homo sapien
cagcaatccggcttgatgccccgag

SEQ ID NO: 3519196 - DNA, 25 bp, Homo sapien
tcacctcgagactgcttctctcccc

SEQ ID NO: 3519197 - DNA, 25 bp, Homo sapien
tctgggctgctctggcactagccgc

SEQ ID NO: 3519198 - DNA, 25 bp, Homo sapien
gcatcaagccggattgctgggcggg

SEQ ID NO: 3519199 - DNA, 25 bp, Homo sapien
tgatgttctgggctgctctggcact

SEQ ID NO: 3519200 - DNA, 25 bp, Homo sapien
tgagctcggggcatcaagccggatt

SEQ ID NO: 3519201 - DNA, 25 bp, Homo sapien
aagacagggagtgtgggcagcgggc

SEQ ID NO: 3519202 - DNA, 25 bp, Homo sapien
tcacttcctgcgtgttgggtggctt

SEQ ID NO: 3519203 - DNA, 25 bp, Homo sapien
gcggcgtttccactctcgctctcct

SEQ ID NO: 3519204 - DNA, 25 bp, Homo sapien
cttcctgcgtgttgggtggcttcct

SEQ ID NO: 3519205 - DNA, 25 bp, Homo sapien
ttgggtggcttcctgcggcgtttcc

SEQ ID NO: 3519206 - DNA, 25 bp, Homo sapien
tgaggtcacttcctgcgtgttgggt

SEQ ID NO: 3519207 - DNA, 25 bp, Homo sapien
gggtggcttcctgcggcgtttccac

SEQ ID NO: 3519208 - DNA, 25 bp, Homo sapien
agcgagagtggaaacgccgcaggaa

SEQ ID NO: 3519209 - DNA, 25 bp, Homo sapien
cgaaaggagagcgagagtggaaacg

SEQ ID NO: 3519210 - DNA, 25 bp, Homo sapien
gtggaaacgccgcaggaagccaccc

SEQ ID NO: 3519211 - DNA, 25 bp, Homo sapien
acccaacacgcaggaagtgacctca

SEQ ID NO: 3519212 - DNA, 25 bp, Homo sapien
aggaagccacccaacacgcaggaag

SEQ ID NO: 3519213 - DNA, 25 bp, Homo sapien
aagccacccaacacgcaggaagtga

SEQ ID NO: 3519214 - DNA, 25 bp, Homo sapien
cgcactcgaattcccctgcgcaggg

SEQ ID NO: 3519215 - DNA, 25 bp, Homo sapien
tgaagaaccggtctaaggagttgaa

SEQ ID NO: 3519216 - DNA, 25 bp, Homo sapien
gagttgaaccaggtccccacggatg

SEQ ID NO: 3519217 - DNA, 25 bp, Homo sapien
cctaatctgtcaggggagagtcgct

SEQ ID NO: 3519218 - DNA, 25 bp, Homo sapien
aagggttgggcagaggcttacggag

SEQ ID NO: 3519219 - DNA, 25 bp, Homo sapien
gaattcggtctcaaaagcttaagtg

SEQ ID NO: 3519220 - DNA, 25 bp, Homo sapien
tgcactgctagtcaaacaacatgga

SEQ ID NO: 3519221 - DNA, 25 bp, Homo sapien
tatggaccattagtgttaggcacca

SEQ ID NO: 3519222 - DNA, 25 bp, Homo sapien
gaattcttgtcatgggcctcttgtg

SEQ ID NO: 3519223 - DNA, 25 bp, Homo sapien
aaaaatcagaaacgaagtgccaggg

SEQ ID NO: 3519224 - DNA, 25 bp, Homo sapien
ggctataaaaggtgcataacaggaa

SEQ ID NO: 3519225 - DNA, 25 bp, Homo sapien
caaaataggtggctgaactgacata

SEQ ID NO: 3519226 - DNA, 25 bp, Homo sapien
tagcagctggattttacggtaacat

SEQ ID NO: 3519227 - DNA, 25 bp, Homo sapien
ttgccgcagtcagctgataccattt

SEQ ID NO: 3519228 - DNA, 25 bp, Homo sapien
agtatgttgccgcagtcagctgata

SEQ ID NO: 3519229 - DNA, 25 bp, Homo sapien
tatgttgccgcagtcagctgatacc

SEQ ID NO: 3519230 - DNA, 25 bp, Homo sapien
ttacaagtatgttgccgcagtcagc

SEQ ID NO: 3519231 - DNA, 25 bp, Homo sapien
tctgcactgagtacacttagttgaa

SEQ ID NO: 3519232 - DNA, 25 bp, Homo sapien
aagttctcgctgtcttagggtttct

SEQ ID NO: 3519233 - DNA, 25 bp, Homo sapien
caaaggcagggttactccacccaag

SEQ ID NO: 3519234 - DNA, 25 bp, Homo sapien
aaattctcccgcagagattctgcac

SEQ ID NO: 3519235 - DNA, 25 bp, Homo sapien
gccaacatggctctattgcactcta

SEQ ID NO: 3519236 - DNA, 25 bp, Homo sapien
ggttcacacactggaaacgtagttg

SEQ ID NO: 3519237 - DNA, 25 bp, Homo sapien
tcatctaagaggtggagtgatctaa

SEQ ID NO: 3519238 - DNA, 25 bp, Homo sapien
tatggctcctaaggtctatgagggc

SEQ ID NO: 3519239 - DNA, 25 bp, Homo sapien
taaaatctcaaaacaatggacacag

SEQ ID NO: 3519240 - DNA, 25 bp, Homo sapien
ctcaaaacaatggacacagagaagg

SEQ ID NO: 3519241 - DNA, 25 bp, Homo sapien
gagctcaagggatgtatccacctcg

SEQ ID NO: 3519242 - DNA, 25 bp, Homo sapien
agagaaggggacaacacacactggg

SEQ ID NO: 3519243 - DNA, 25 bp, Homo sapien
ccaaggaaacttctagaaatgattt

SEQ ID NO: 3519244 - DNA, 25 bp, Homo sapien
caaggaaacttctagaaatgatttt

SEQ ID NO: 3519245 - DNA, 25 bp, Homo sapien
aaccaaggaaacttctagaaatgat

SEQ ID NO: 3519246 - DNA, 25 bp, Homo sapien
accaaggaaacttctagaaatgatt

SEQ ID NO: 3519247 - DNA, 25 bp, Homo sapien
tttcattgaatgtcggattcctcgt

SEQ ID NO: 3519248 - DNA, 25 bp, Homo sapien
tctggaagtaggtatgttttgacat

SEQ ID NO: 3519249 - DNA, 25 bp, Homo sapien
tatctggaagtaggtatgttttgac

SEQ ID NO: 3519250 - DNA, 25 bp, Homo sapien
tgtcggattcctcgtttttcgtgaa

SEQ ID NO: 3519251 - DNA, 25 bp, Homo sapien
cctctacaaccatcattctttgtaa

SEQ ID NO: 3519252 - DNA, 25 bp, Homo sapien
gaaaagcagtcccttaatagtaatg

SEQ ID NO: 3519253 - DNA, 25 bp, Homo sapien
ttcctctacaaccatcattctttgt

SEQ ID NO: 3519254 - DNA, 25 bp, Homo sapien
cttaatagtaatgcttcctaccaag

SEQ ID NO: 3519255 - DNA, 25 bp, Homo sapien
aagatctttgatatgcatcaccatg

SEQ ID NO: 3519256 - DNA, 25 bp, Homo sapien
aagagatggataatttcacagctcc

SEQ ID NO: 3519257 - DNA, 25 bp, Homo sapien
acagctcctcctatttggcctggag

SEQ ID NO: 3519258 - DNA, 25 bp, Homo sapien
gatgaaaagagtaccatttcggtaa

SEQ ID NO: 3519259 - DNA, 25 bp, Homo sapien
ttcagctttctcatcacgaagtaaa

SEQ ID NO: 3519260 - DNA, 25 bp, Homo sapien
gacctagctatcccttcagctttct

SEQ ID NO: 3519261 - DNA, 25 bp, Homo sapien
agacctagctatcccttcagctttc

SEQ ID NO: 3519262 - DNA, 25 bp, Homo sapien
tctcatcacgaagtaaagggtggaa

SEQ ID NO: 3519263 - DNA, 25 bp, Homo sapien
actctgtaagtaactgtttaactca

SEQ ID NO: 3519264 - DNA, 25 bp, Homo sapien
tcctagaaccatcctattaggaaag

SEQ ID NO: 3519265 - DNA, 25 bp, Homo sapien
tctgctacatccgttgaagcattca

SEQ ID NO: 3519266 - DNA, 25 bp, Homo sapien
catccgttgaagcattcatcaaact

SEQ ID NO: 3519267 - DNA, 25 bp, Homo sapien
gaaattcgtcaaatgttcggaagac

SEQ ID NO: 3519268 - DNA, 25 bp, Homo sapien
tattgtgaagttcctgaaattcgtc

SEQ ID NO: 3519269 - DNA, 25 bp, Homo sapien
gatggttcaatctgtccttccctca

SEQ ID NO: 3519270 - DNA, 25 bp, Homo sapien
ttccctcaaaattcggactacataa

SEQ ID NO: 3519271 - DNA, 25 bp, Homo sapien
aaaacagagacttccttgattcgac

SEQ ID NO: 3519272 - DNA, 25 bp, Homo sapien
tatttcttatgatatgtaaaaacag

SEQ ID NO: 3519273 - DNA, 25 bp, Homo sapien
gaagctgagcaaggttgtgaatgaa

SEQ ID NO: 3519274 - DNA, 25 bp, Homo sapien
ttgattcgaccatcttgtctaaagg

SEQ ID NO: 3519275 - DNA, 25 bp, Homo sapien
tcttgaatacttgtaagttctggta

SEQ ID NO: 3519276 - DNA, 25 bp, Homo sapien
catctctaacgtatttcaaatcttg

SEQ ID NO: 3519277 - DNA, 25 bp, Homo sapien
gtttggggttgaagtgcatctctaa

SEQ ID NO: 3519278 - DNA, 25 bp, Homo sapien
aattgtagcttctgcgtctgtagtt

SEQ ID NO: 3519279 - DNA, 25 bp, Homo sapien
gaggtccacaaacaactgaaaacga

SEQ ID NO: 3519280 - DNA, 25 bp, Homo sapien
tatcagaggtcagcacaaaaggagc

SEQ ID NO: 3519281 - DNA, 25 bp, Homo sapien
ccccattaatgacatatgccatatc

SEQ ID NO: 3519282 - DNA, 25 bp, Homo sapien
tgtaggcctgacagcagaggtccac

SEQ ID NO: 3519283 - DNA, 25 bp, Homo sapien
gcctaaaacataggtggctacacag

SEQ ID NO: 3519284 - DNA, 25 bp, Homo sapien
cattgtgtcgatcacagatgcctaa

SEQ ID NO: 3519285 - DNA, 25 bp, Homo sapien
gcttcgaagcattatattgtcattg

SEQ ID NO: 3519286 - DNA, 25 bp, Homo sapien
tcaatgtgaaacatgtgtcccgtgc

SEQ ID NO: 3519287 - DNA, 25 bp, Homo sapien
gggtatcggaagcaggaaccagctc

SEQ ID NO: 3519288 - DNA, 25 bp, Homo sapien
cttcttcagagggattgtatttcct

SEQ ID NO: 3519289 - DNA, 25 bp, Homo sapien
ccactctgcaagtggtttatcttta

SEQ ID NO: 3519290 - DNA, 25 bp, Homo sapien
gattgtatttccttagccactctgc

SEQ ID NO: 3519291 - DNA, 25 bp, Homo sapien
agccagatcttatccataatcttta

SEQ ID NO: 3519292 - DNA, 25 bp, Homo sapien
tgaaaattaccatcctcagatctag

SEQ ID NO: 3519293 - DNA, 25 bp, Homo sapien
cagatctagtccttctttaagccag

SEQ ID NO: 3519294 - DNA, 25 bp, Homo sapien
tatcttgccgaagatcttcaccaac

SEQ ID NO: 3519295 - DNA, 25 bp, Homo sapien
tctcccatagggtcagcattcacca

SEQ ID NO: 3519296 - DNA, 25 bp, Homo sapien
tagggggacagcattagaactgaag

SEQ ID NO: 3519297 - DNA, 25 bp, Homo sapien
aatttcttctcccatagggtcagca

SEQ ID NO: 3519298 - DNA, 25 bp, Homo sapien
ccattgtgacttttagggggacagc

SEQ ID NO: 3519299 - DNA, 25 bp, Homo sapien
gcccagctaaacacctgttcctttg

SEQ ID NO: 3519300 - DNA, 25 bp, Homo sapien
catagcttcccacaacctctaactc

SEQ ID NO: 3519301 - DNA, 25 bp, Homo sapien
aacatgcccagctaaacacctgttc

SEQ ID NO: 3519302 - DNA, 25 bp, Homo sapien
accatagcttcccacaacctctaac

SEQ ID NO: 3519303 - DNA, 25 bp, Homo sapien
gataaatatggatcctaatcacaac

SEQ ID NO: 3519304 - DNA, 25 bp, Homo sapien
tgccttaagcatacctgcccatttg

SEQ ID NO: 3519305 - DNA, 25 bp, Homo sapien
tcacaaccatccatgcttataacca

SEQ ID NO: 3519306 - DNA, 25 bp, Homo sapien
caacctgtgcaggttttaccttcat

SEQ ID NO: 3519307 - DNA, 25 bp, Homo sapien
ggactgtactcgttccatacttctt

SEQ ID NO: 3519308 - DNA, 25 bp, Homo sapien
tgaaaaaaggactgtactcgttcca

SEQ ID NO: 3519309 - DNA, 25 bp, Homo sapien
agagggagacggcatttatttttct

SEQ ID NO: 3519310 - DNA, 25 bp, Homo sapien
tagacttggcttgagagggagacgg

SEQ ID NO: 3519311 - DNA, 25 bp, Homo sapien
tgcagcaatggatacacggttccta

SEQ ID NO: 3519312 - DNA, 25 bp, Homo sapien
aattccaactgcctttttgcagcaa

SEQ ID NO: 3519313 - DNA, 25 bp, Homo sapien
tatgaaattgcaagtgtcccctgaa

SEQ ID NO: 3519314 - DNA, 25 bp, Homo sapien
caaagtaggaggacttacattgtcc

SEQ ID NO: 3519315 - DNA, 25 bp, Homo sapien
tgtcatcgtagtgtagggggcatgc

SEQ ID NO: 3519316 - DNA, 25 bp, Homo sapien
tgcatgtcatcgtagtgtagggggc

SEQ ID NO: 3519317 - DNA, 25 bp, Homo sapien
catcgtagtgtagggggcatgctaa

SEQ ID NO: 3519318 - DNA, 25 bp, Homo sapien
catgtcatcgtagtgtagggggcat

SEQ ID NO: 3519319 - DNA, 25 bp, Homo sapien
ctgtctggctgatccactagcctgc

SEQ ID NO: 3519320 - DNA, 25 bp, Homo sapien
tctggctgatccactagcctgcctt

SEQ ID NO: 3519321 - DNA, 25 bp, Homo sapien
tgtctggctgatccactagcctgcc

SEQ ID NO: 3519322 - DNA, 25 bp, Homo sapien
tggctgatccactagcctgccttac

SEQ ID NO: 3519323 - DNA, 25 bp, Homo sapien
caaaacatgttcgtatcgggtacta

SEQ ID NO: 3519324 - DNA, 25 bp, Homo sapien
tgtacaagtttcgtctgttttagaa

SEQ ID NO: 3519325 - DNA, 25 bp, Homo sapien
agtcgttttcctcctactgacagga

SEQ ID NO: 3519326 - DNA, 25 bp, Homo sapien
tttctgctactcctcctaaaagctg

SEQ ID NO: 3519327 - DNA, 25 bp, Homo sapien
acatcatgcagggcatctttgagaa

SEQ ID NO: 3519328 - DNA, 25 bp, Homo sapien
ctgtacatcatgcagggcatctttg

SEQ ID NO: 3519329 - DNA, 25 bp, Homo sapien
gtacatcatgcagggcatctttgag

SEQ ID NO: 3519330 - DNA, 25 bp, Homo sapien
atcatgcagggcatctttgagaagc

SEQ ID NO: 3519331 - DNA, 25 bp, Homo sapien
ccatgattgttaggctggtcttaaa

SEQ ID NO: 3519332 - DNA, 25 bp, Homo sapien
gagatcaagcgatccactagcttca

SEQ ID NO: 3519333 - DNA, 25 bp, Homo sapien
gctatataagcaagtcgaaacccat

SEQ ID NO: 3519334 - DNA, 25 bp, Homo sapien
gtggcataccatttagacttacagg

SEQ ID NO: 3519335 - DNA, 25 bp, Homo sapien
gcactaatgaactattcaagtaaat

SEQ ID NO: 3519336 - DNA, 25 bp, Homo sapien
aatgccctggacaaaaggaattgca

SEQ ID NO: 3519337 - DNA, 25 bp, Homo sapien
caaaaggaattgcactaatgaacta

SEQ ID NO: 3519338 - DNA, 25 bp, Homo sapien
cctggacaaaaggaattgcactaat

SEQ ID NO: 3519339 - DNA, 25 bp, Homo sapien
cacagctagggatcttacttcctga

SEQ ID NO: 3519340 - DNA, 25 bp, Homo sapien
taatggcctcaatccaggtcacagc

SEQ ID NO: 3519341 - DNA, 25 bp, Homo sapien
tcacagctagggatcttacttcctg

SEQ ID NO: 3519342 - DNA, 25 bp, Homo sapien
tgtacaaactgtggaagaagatctg

SEQ ID NO: 3519343 - DNA, 25 bp, Homo sapien
gaagcaataataacgtttctcccat

SEQ ID NO: 3519344 - DNA, 25 bp, Homo sapien
ccaatgcaattagtgggtacaatgc

SEQ ID NO: 3519345 - DNA, 25 bp, Homo sapien
gcaagattaacccatttccagtttg

SEQ ID NO: 3519346 - DNA, 25 bp, Homo sapien
cactggtgaagcaatgagtaagttt

SEQ ID NO: 3519347 - DNA, 25 bp, Homo sapien
aagtgatgagtctttatgaagaata

SEQ ID NO: 3519348 - DNA, 25 bp, Homo sapien
gcttctgtcaacttgaggagttgta

SEQ ID NO: 3519349 - DNA, 25 bp, Homo sapien
ctctagtgtttctaagttatgttgc

SEQ ID NO: 3519350 - DNA, 25 bp, Homo sapien
aagttatgttgctgtataatgcttc

SEQ ID NO: 3519351 - DNA, 25 bp, Homo sapien
ccaaagatatagaagtttagttcca

SEQ ID NO: 3519352 - DNA, 25 bp, Homo sapien
ggaacagaatttgtatgtgatgaag

SEQ ID NO: 3519353 - DNA, 25 bp, Homo sapien
agatatagaagtttagttccacatg

SEQ ID NO: 3519354 - DNA, 25 bp, Homo sapien
aaagatatagaagtttagttccaca

SEQ ID NO: 3519355 - DNA, 25 bp, Homo sapien
caaagaaatatatctcaaggtggtg

SEQ ID NO: 3519356 - DNA, 25 bp, Homo sapien
tagcacaactatggctaagtgcagc

SEQ ID NO: 3519357 - DNA, 25 bp, Homo sapien
gaaaatggtgttgaggacagaacac

SEQ ID NO: 3519358 - DNA, 25 bp, Homo sapien
ggattcactctccacattgtactga

SEQ ID NO: 3519359 - DNA, 25 bp, Homo sapien
gcaatgggccaagtatgctgaccct

SEQ ID NO: 3519360 - DNA, 25 bp, Homo sapien
cctgttgtagttcaaatttgccatg

SEQ ID NO: 3519361 - DNA, 25 bp, Homo sapien
ttgtggaccataaagtctctgctgc

SEQ ID NO: 3519362 - DNA, 25 bp, Homo sapien
ctgacccttgccctagactactaat

SEQ ID NO: 3519363 - DNA, 25 bp, Homo sapien
tatttgttgatgataccaggccttt

SEQ ID NO: 3519364 - DNA, 25 bp, Homo sapien
caaactccaacctgcctttacagag

SEQ ID NO: 3519365 - DNA, 25 bp, Homo sapien
gaagaagttagacctagaggcctga

SEQ ID NO: 3519366 - DNA, 25 bp, Homo sapien
taaacttttaccagacatagccatg

SEQ ID NO: 3519367 - DNA, 25 bp, Homo sapien
gaatgtaacatatcccgaacttacc

SEQ ID NO: 3519368 - DNA, 25 bp, Homo sapien
tgtgcatcatctattctccagaatg

SEQ ID NO: 3519369 - DNA, 25 bp, Homo sapien
aggccatatagattatactatccca

SEQ ID NO: 3519370 - DNA, 25 bp, Homo sapien
gagccctgcctagagatgctttaat

SEQ ID NO: 3519371 - DNA, 25 bp, Homo sapien
aaagctgtgcatacctattcagata

SEQ ID NO: 3519372 - DNA, 25 bp, Homo sapien
tataaacgacagtcattggctgctg

SEQ ID NO: 3519373 - DNA, 25 bp, Homo sapien
caagactgtggtattatgtcaacaa

SEQ ID NO: 3519374 - DNA, 25 bp, Homo sapien
catcaagggaacttacaagactgtg

SEQ ID NO: 3519375 - DNA, 25 bp, Homo sapien
tgcttattagaatcaggggaacttc

SEQ ID NO: 3519376 - DNA, 25 bp, Homo sapien
aagaactgattctaatggcaattgt

SEQ ID NO: 3519377 - DNA, 25 bp, Homo sapien
agaactgattctaatggcaattgtg

SEQ ID NO: 3519378 - DNA, 25 bp, Homo sapien
gaagaactgattctaatggcaattg

SEQ ID NO: 3519379 - DNA, 25 bp, Homo sapien
aaagatcctttccattgtgagacag

SEQ ID NO: 3519380 - DNA, 25 bp, Homo sapien
tgtgagacagtgaacatatcaagta

SEQ ID NO: 3519381 - DNA, 25 bp, Homo sapien
gaagaaattcttgtaagtgccaacc

SEQ ID NO: 3519382 - DNA, 25 bp, Homo sapien
tgattgaataggtttaaaaagatcc

SEQ ID NO: 3519383 - DNA, 25 bp, Homo sapien
ctgagaaaagaaagtttaacttgat

SEQ ID NO: 3519384 - DNA, 25 bp, Homo sapien
gacactcttgctactttgggcacag

SEQ ID NO: 3519385 - DNA, 25 bp, Homo sapien
tccatgcttccttgacactcttgct

SEQ ID NO: 3519386 - DNA, 25 bp, Homo sapien
catgcttccttgacactcttgctac

SEQ ID NO: 3519387 - DNA, 25 bp, Homo sapien
tccttgacactcttgctactttggg

SEQ ID NO: 3519388 - DNA, 25 bp, Homo sapien
gcttacttgaacaggattttcagga

SEQ ID NO: 3519389 - DNA, 25 bp, Homo sapien
cataaattgctgcagttaattggtt

SEQ ID NO: 3519390 - DNA, 25 bp, Homo sapien
ggagtctgagaagatcataaattgc

SEQ ID NO: 3519391 - DNA, 25 bp, Homo sapien
taggactcctaccagaatttgcatg

SEQ ID NO: 3519392 - DNA, 25 bp, Homo sapien
tagttgaactcctgctagtgtcttc

SEQ ID NO: 3519393 - DNA, 25 bp, Homo sapien
ctagttgaactcctgctagtgtctt

SEQ ID NO: 3519394 - DNA, 25 bp, Homo sapien
cctagttgaactcctgctagtgtct

SEQ ID NO: 3519395 - DNA, 25 bp, Homo sapien
ccctagttgaactcctgctagtgtc

SEQ ID NO: 3519396 - DNA, 25 bp, Homo sapien
ttttactccttggaagattaactgc

SEQ ID NO: 3519397 - DNA, 25 bp, Homo sapien
ttactccttggaagattaactgctc

SEQ ID NO: 3519398 - DNA, 25 bp, Homo sapien
aagattaactgctctctttagcttc

SEQ ID NO: 3519399 - DNA, 25 bp, Homo sapien
tttactccttggaagattaactgct

SEQ ID NO: 3519400 - DNA, 25 bp, Homo sapien
ctgtaatggcaagagtctcgacacc

SEQ ID NO: 3519401 - DNA, 25 bp, Homo sapien
acagctttaattacttgatctactg

SEQ ID NO: 3519402 - DNA, 25 bp, Homo sapien
tcgacaccatctaaagcactacaga

SEQ ID NO: 3519403 - DNA, 25 bp, Homo sapien
catctaaagcactacagatttttct

SEQ ID NO: 3519404 - DNA, 25 bp, Homo sapien
gaccaattccagagacgaagtcaga

SEQ ID NO: 3519405 - DNA, 25 bp, Homo sapien
agatatcctctactcttttgtgatg

SEQ ID NO: 3519406 - DNA, 25 bp, Homo sapien
gggttaattttcacttcgtctgaca

SEQ ID NO: 3519407 - DNA, 25 bp, Homo sapien
cattagaatcagaagtagaagcata

SEQ ID NO: 3519408 - DNA, 25 bp, Homo sapien
tatcaatttattgtctatcagttcc

SEQ ID NO: 3519409 - DNA, 25 bp, Homo sapien
tggcctacactactctttaagtgcc

SEQ ID NO: 3519410 - DNA, 25 bp, Homo sapien
tactagagctagaccctataaacat

SEQ ID NO: 3519411 - DNA, 25 bp, Homo sapien
tgctttcctttctgatactagagct

SEQ ID NO: 3519412 - DNA, 25 bp, Homo sapien
ggaagacacttcccatctgggttcc

SEQ ID NO: 3519413 - DNA, 25 bp, Homo sapien
gaagacacttcccatctgggttcct

SEQ ID NO: 3519414 - DNA, 25 bp, Homo sapien
tgcagattttggtgctttcccaacc

SEQ ID NO: 3519415 - DNA, 25 bp, Homo sapien
cagattttggtgctttcccaacctt

SEQ ID NO: 3519416 - DNA, 25 bp, Homo sapien
cacatgcagattttggtgctttccc

SEQ ID NO: 3519417 - DNA, 25 bp, Homo sapien
catgcagattttggtgctttcccaa

SEQ ID NO: 3519418 - DNA, 25 bp, Homo sapien
caactatgtattcctgtgagagcca

SEQ ID NO: 3519419 - DNA, 25 bp, Homo sapien
gctctgccattaaaacgtgaacaca

SEQ ID NO: 3519420 - DNA, 25 bp, Homo sapien
gcttttatgcacctcctatcgctgg

SEQ ID NO: 3519421 - DNA, 25 bp, Homo sapien
tgttctcctacctgacacctttggc

SEQ ID NO: 3519422 - DNA, 25 bp, Homo sapien
tacaaagttcccatataatgttgga

SEQ ID NO: 3519423 - DNA, 25 bp, Homo sapien
aatataatccaggatatcacattac

SEQ ID NO: 3519424 - DNA, 25 bp, Homo sapien
aatcttacataaaccacgttacatt

SEQ ID NO: 3519425 - DNA, 25 bp, Homo sapien
cacgttacatttgtctaagctagac

SEQ ID NO: 3519426 - DNA, 25 bp, Homo sapien
gaaactactgcagttgactagagta

SEQ ID NO: 3519427 - DNA, 25 bp, Homo sapien
agacatcaaggatgactccagggtt

SEQ ID NO: 3519428 - DNA, 25 bp, Homo sapien
tcaagttatgcatgtgtagggaagg

SEQ ID NO: 3519429 - DNA, 25 bp, Homo sapien
ctccagggttttggtctgagcaaat

SEQ ID NO: 3519430 - DNA, 25 bp, Homo sapien
tggtctcctgacctagaagataaag

SEQ ID NO: 3519431 - DNA, 25 bp, Homo sapien
ggaacatcccttctaagaggccttc

SEQ ID NO: 3519432 - DNA, 25 bp, Homo sapien
taactgcaaggcatacctctataat

SEQ ID NO: 3519433 - DNA, 25 bp, Homo sapien
cctcaacttaggtaaggtgctcttc

SEQ ID NO: 3519434 - DNA, 25 bp, Homo sapien
tttgaagagccagttctacttggtt

SEQ ID NO: 3519435 - DNA, 25 bp, Homo sapien
ctacttggttgtgataagaatctaa

SEQ ID NO: 3519436 - DNA, 25 bp, Homo sapien
cttggttgtgataagaatctaagag

SEQ ID NO: 3519437 - DNA, 25 bp, Homo sapien
aagagccagttctacttggttgtga

SEQ ID NO: 3519438 - DNA, 25 bp, Homo sapien
atccacgggtgtttcatcatcttct

SEQ ID NO: 3519439 - DNA, 25 bp, Homo sapien
tctatttgatacaggtgtttgttta

SEQ ID NO: 3519440 - DNA, 25 bp, Homo sapien
tgtgtcccattttcgacagttttga

SEQ ID NO: 3519441 - DNA, 25 bp, Homo sapien
gaatatgctcatgacttccaaggca

SEQ ID NO: 3519442 - DNA, 25 bp, Homo sapien
ttgcactgaaggtcaagagttgtag

SEQ ID NO: 3519443 - DNA, 25 bp, Homo sapien
gccagattttgacacattgcactga

SEQ ID NO: 3519444 - DNA, 25 bp, Homo sapien
tccaaggatgttgctcagtagttaa

SEQ ID NO: 3519445 - DNA, 25 bp, Homo sapien
caattcaataggatccaatgtattt

SEQ ID NO: 3519446 - DNA, 25 bp, Homo sapien
ttcaataaatcaattcaataggatc

SEQ ID NO: 3519447 - DNA, 25 bp, Homo sapien
taaatcaattcaataggatccaatg

SEQ ID NO: 3519448 - DNA, 25 bp, Homo sapien
gattcaagtcatcatgtacccagca

SEQ ID NO: 3519449 - DNA, 25 bp, Homo sapien
tgccaacatctacttgattcaagtc

SEQ ID NO: 3519450 - DNA, 25 bp, Homo sapien
gcaaagggcttgcattataatgatt

SEQ ID NO: 3519451 - DNA, 25 bp, Homo sapien
cccagcaaagggcttgcattataat

SEQ ID NO: 3519452 - DNA, 25 bp, Homo sapien
gccctctatatatgttggttctgca

SEQ ID NO: 3519453 - DNA, 25 bp, Homo sapien
aatgtagtccacaaatgtaggccac

SEQ ID NO: 3519454 - DNA, 25 bp, Homo sapien
ccccacagatgatatttagcagtat

SEQ ID NO: 3519455 - DNA, 25 bp, Homo sapien
caggaggatgtgcatcagttgtatg

SEQ ID NO: 3519456 - DNA, 25 bp, Homo sapien
taaaagtaactggtagctgaaatcc

SEQ ID NO: 3519457 - DNA, 25 bp, Homo sapien
ctagcattttctccgcatatgtttc

SEQ ID NO: 3519458 - DNA, 25 bp, Homo sapien
tagcctgggtttgtgcggtgattgg

SEQ ID NO: 3519459 - DNA, 25 bp, Homo sapien
tgtcaatggagaccttcacactagc

SEQ ID NO: 3519460 - DNA, 25 bp, Homo sapien
cattagtgcatagcctctagagcca

SEQ ID NO: 3519461 - DNA, 25 bp, Homo sapien
tactactacttacctgatagggttg

SEQ ID NO: 3519462 - DNA, 25 bp, Homo sapien
gaggtagcacatgtaaccattagtg

SEQ ID NO: 3519463 - DNA, 25 bp, Homo sapien
tagaagacaggtaccagtcctcctt

SEQ ID NO: 3519464 - DNA, 25 bp, Homo sapien
tttttgtagcgaaatctttaagcat

SEQ ID NO: 3519465 - DNA, 25 bp, Homo sapien
actgctgactgagtaaattattcac

SEQ ID NO: 3519466 - DNA, 25 bp, Homo sapien
tttcaatatagaccagataaggtat

SEQ ID NO: 3519467 - DNA, 25 bp, Homo sapien
ctaagccacacattacagtttgatg

SEQ ID NO: 3519468 - DNA, 25 bp, Homo sapien
tggcaaactactggtcccatttggg

SEQ ID NO: 3519469 - DNA, 25 bp, Homo sapien
cctcattctgtacttcaacttcttg

SEQ ID NO: 3519470 - DNA, 25 bp, Homo sapien
tgtaatggatcgacaaaaagctgcc

SEQ ID NO: 3519471 - DNA, 25 bp, Homo sapien
gaagaagagaacttccagttggcaa

SEQ ID NO: 3519472 - DNA, 25 bp, Homo sapien
aaatatggagattgtcccggaagac

SEQ ID NO: 3519473 - DNA, 25 bp, Homo sapien
tgtaacagttgccacagaaagggat

SEQ ID NO: 3519474 - DNA, 25 bp, Homo sapien
tatggccctgggcttttgcaagctg

SEQ ID NO: 3519475 - DNA, 25 bp, Homo sapien
ggtaaagcataagtggaaggcccag

SEQ ID NO: 3519476 - DNA, 25 bp, Homo sapien
tttcttgtagcttccaaaatagcaa

SEQ ID NO: 3519477 - DNA, 25 bp, Homo sapien
cttgtagcttccaaaatagcaaggc

SEQ ID NO: 3519478 - DNA, 25 bp, Homo sapien
tttttcttgtagcttccaaaatagc

SEQ ID NO: 3519479 - DNA, 25 bp, Homo sapien
tcttgtagcttccaaaatagcaagg

SEQ ID NO: 3519480 - DNA, 25 bp, Homo sapien
tcaggttcgcaaaggtgctcaggct

SEQ ID NO: 3519481 - DNA, 25 bp, Homo sapien
tttggcaggccatcagtccacgtgg

SEQ ID NO: 3519482 - DNA, 25 bp, Homo sapien
tccacgtggtgaggctatgaaggcc

SEQ ID NO: 3519483 - DNA, 25 bp, Homo sapien
taagaaactgcgatcaagccaggtg

SEQ ID NO: 3519484 - DNA, 25 bp, Homo sapien
actgctttatatatgtagtcgaatc

SEQ ID NO: 3519485 - DNA, 25 bp, Homo sapien
cagcactgctttatatatgtagtcg

SEQ ID NO: 3519486 - DNA, 25 bp, Homo sapien
gcactgctttatatatgtagtcgaa

SEQ ID NO: 3519487 - DNA, 25 bp, Homo sapien
tacagcactgctttatatatgtagt

SEQ ID NO: 3519488 - DNA, 25 bp, Homo sapien
taataactaatcttgttcaaagagg

SEQ ID NO: 3519489 - DNA, 25 bp, Homo sapien
tcttgttcaaagaggcaggcctcct

SEQ ID NO: 3519490 - DNA, 25 bp, Homo sapien
ctaatcttgttcaaagaggcaggcc

SEQ ID NO: 3519491 - DNA, 25 bp, Homo sapien
gcaggcctccttcgtttcacttaat

SEQ ID NO: 3519492 - DNA, 25 bp, Homo sapien
tttcccctcagctggctcagccgcc

SEQ ID NO: 3519493 - DNA, 25 bp, Homo sapien
cgccgaaagcttcggccgactccac

SEQ ID NO: 3519494 - DNA, 25 bp, Homo sapien
aagccgccacagtccgagccatttt

SEQ ID NO: 3519495 - DNA, 25 bp, Homo sapien
tccgcctctaccacaacctgagccg

SEQ ID NO: 3519496 - DNA, 25 bp, Homo sapien
tgttttcaagaccaagcagtactga

SEQ ID NO: 3519497 - DNA, 25 bp, Homo sapien
ggagatcatcccatgagtgtagggc

SEQ ID NO: 3519498 - DNA, 25 bp, Homo sapien
tcttggtatacgagtgacctgtgag

SEQ ID NO: 3519499 - DNA, 25 bp, Homo sapien
gcaggtcaagttctcatacacagca

SEQ ID NO: 3519500 - DNA, 25 bp, Homo sapien
gctgagtctttggagatctgagtca

SEQ ID NO: 3519501 - DNA, 25 bp, Homo sapien
gactcccagaacagcttccaagtct

SEQ ID NO: 3519502 - DNA, 25 bp, Homo sapien
gctttggcccattccctctggctga

SEQ ID NO: 3519503 - DNA, 25 bp, Homo sapien
tccaagtctgagtgccaggagttgc

SEQ ID NO: 3519504 - DNA, 25 bp, Homo sapien
caggctgaaacacagtggctcttca

SEQ ID NO: 3519505 - DNA, 25 bp, Homo sapien
ctactgatcaggaaaggagtttttg

SEQ ID NO: 3519506 - DNA, 25 bp, Homo sapien
gatcaggaaaggagtttttgacctg

SEQ ID NO: 3519507 - DNA, 25 bp, Homo sapien
ctgatcaggaaaggagtttttgacc

SEQ ID NO: 3519508 - DNA, 25 bp, Homo sapien
ccatgctgtcctccattgttaaggt

SEQ ID NO: 3519509 - DNA, 25 bp, Homo sapien
ccttattaaagtagtgatatataga

SEQ ID NO: 3519510 - DNA, 25 bp, Homo sapien
gttcttggtgtgacaactttctaaa

SEQ ID NO: 3519511 - DNA, 25 bp, Homo sapien
tgctgtcctccattgttaaggtgat

SEQ ID NO: 3519512 - DNA, 25 bp, Homo sapien
ttatgggactctattatcaggcctt

SEQ ID NO: 3519513 - DNA, 25 bp, Homo sapien
ttgtattgactttcccactattgta

SEQ ID NO: 3519514 - DNA, 25 bp, Homo sapien
atgtaagaggtcctagcaccatttt

SEQ ID NO: 3519515 - DNA, 25 bp, Homo sapien
ttccctcacaatcccaagctattga

SEQ ID NO: 3519516 - DNA, 25 bp, Homo sapien
aatatatgttgtaaaaattcttcca

SEQ ID NO: 3519517 - DNA, 25 bp, Homo sapien
tattgttctagtcgttgtttgtata

SEQ ID NO: 3519518 - DNA, 25 bp, Homo sapien
aaaatattgttctagtcgttgtttg

SEQ ID NO: 3519519 - DNA, 25 bp, Homo sapien
atatatgttgtaaaaattcttccag

SEQ ID NO: 3519520 - DNA, 25 bp, Homo sapien
gacttgaaacgcctgtcactgcggt

SEQ ID NO: 3519521 - DNA, 25 bp, Homo sapien
taagacagttccgagtgaagtgtgg

SEQ ID NO: 3519522 - DNA, 25 bp, Homo sapien
gcctccgcgctctatcagtctgggt

SEQ ID NO: 3519523 - DNA, 25 bp, Homo sapien
tcactgcggtctggaaacgcctgtc

SEQ ID NO: 3519524 - DNA, 25 bp, Homo sapien
tattggaaagtgatcttagaaacca

SEQ ID NO: 3519525 - DNA, 25 bp, Homo sapien
attggaaagtgatcttagaaaccaa

SEQ ID NO: 3519526 - DNA, 25 bp, Homo sapien
tgccttagcctcccaggtaactagg

SEQ ID NO: 3519527 - DNA, 25 bp, Homo sapien
tagcctcccaggtaactaggattac

SEQ ID NO: 3519528 - DNA, 25 bp, Homo sapien
ccttagcctcccaggtaactaggat

SEQ ID NO: 3519529 - DNA, 25 bp, Homo sapien
ttacaggcatgaaccaccataccca

SEQ ID NO: 3519530 - DNA, 25 bp, Homo sapien
gctttccgagtagcttgtgctacag

SEQ ID NO: 3519531 - DNA, 25 bp, Homo sapien
accagtgaaaccatccgaacctggt

SEQ ID NO: 3519532 - DNA, 25 bp, Homo sapien
gaaaccatccgaacctggtgctttc

SEQ ID NO: 3519533 - DNA, 25 bp, Homo sapien
tactagttattgactcagtgtctcc

SEQ ID NO: 3519534 - DNA, 25 bp, Homo sapien
ttttactagttattgactcagtgtc

SEQ ID NO: 3519535 - DNA, 25 bp, Homo sapien
tcattgcagcttcaccctagtgggc

SEQ ID NO: 3519536 - DNA, 25 bp, Homo sapien
tgaaatatgatatggctagacgtgg

SEQ ID NO: 3519537 - DNA, 25 bp, Homo sapien
cacgcgggtgccactaagcatggct

SEQ ID NO: 3519538 - DNA, 25 bp, Homo sapien
tctgttacaccttttgcagtatccc

SEQ ID NO: 3519539 - DNA, 25 bp, Homo sapien
tattgtagctataggtgccagagac

SEQ ID NO: 3519540 - DNA, 25 bp, Homo sapien
gtgccttgtagctctctcacttata

SEQ ID NO: 3519541 - DNA, 25 bp, Homo sapien
gaactccttaaataggttctgtgcc

SEQ ID NO: 3519542 - DNA, 25 bp, Homo sapien
ttatgcggccttatgttaatttggc

SEQ ID NO: 3519543 - DNA, 25 bp, Homo sapien
gctctgctggtaaaatgcatctccc

SEQ ID NO: 3519544 - DNA, 25 bp, Homo sapien
ggctacagtagagtggttctgcaaa

SEQ ID NO: 3519545 - DNA, 25 bp, Homo sapien
gcacccggccagtagtcttgtctta

SEQ ID NO: 3519546 - DNA, 25 bp, Homo sapien
gcaaatgctcaatgccttccccagg

SEQ ID NO: 3519547 - DNA, 25 bp, Homo sapien
catggagtaactcaagctaagggct

SEQ ID NO: 3519548 - DNA, 25 bp, Homo sapien
ccttgggcaatgagagactgctaca

SEQ ID NO: 3519549 - DNA, 25 bp, Homo sapien
ttaaaacaaggctacacaggagact

SEQ ID NO: 3519550 - DNA, 25 bp, Homo sapien
caggagacttgcctagacatgctca

SEQ ID NO: 3519551 - DNA, 25 bp, Homo sapien
cccagtagggccgagtctgctagga

SEQ ID NO: 3519552 - DNA, 25 bp, Homo sapien
taaggaacctcttgatgacttggta

SEQ ID NO: 3519553 - DNA, 25 bp, Homo sapien
ggcctctgaggtggtgagaatacta

SEQ ID NO: 3519554 - DNA, 25 bp, Homo sapien
gagcggtttgctcagttcagtaaca

SEQ ID NO: 3519555 - DNA, 25 bp, Homo sapien
caagatcctatcaactccattaagt

SEQ ID NO: 3519556 - DNA, 25 bp, Homo sapien
tccaagatcctatcaactccattaa

SEQ ID NO: 3519557 - DNA, 25 bp, Homo sapien
agatcctatcaactccattaagtga

SEQ ID NO: 3519558 - DNA, 25 bp, Homo sapien
aagatcctatcaactccattaagtg

SEQ ID NO: 3519559 - DNA, 25 bp, Homo sapien
tggaatggcttttcctgatgaccca

SEQ ID NO: 3519560 - DNA, 25 bp, Homo sapien
tgagggaagtaacccatgcactgct

SEQ ID NO: 3519561 - DNA, 25 bp, Homo sapien
caaacggacacaaggagggactgaa

SEQ ID NO: 3519562 - DNA, 25 bp, Homo sapien
gctcaagagcacactgttgcagctg

SEQ ID NO: 3519563 - DNA, 25 bp, Homo sapien
gtcatacagctagagccaggattcg

SEQ ID NO: 3519564 - DNA, 25 bp, Homo sapien
gctagggtctatggcgcctcttgaa

SEQ ID NO: 3519565 - DNA, 25 bp, Homo sapien
cagttggctcgagagttagtgctcc

SEQ ID NO: 3519566 - DNA, 25 bp, Homo sapien
tgttatagaagaggcaactgagaca

SEQ ID NO: 3519567 - DNA, 25 bp, Homo sapien
ggcagagttctaggcaagttcacac

SEQ ID NO: 3519568 - DNA, 25 bp, Homo sapien
cacgaggccgatgtggcaaaaggca

SEQ ID NO: 3519569 - DNA, 25 bp, Homo sapien
caagccaccttctggacaaagtgag

SEQ ID NO: 3519570 - DNA, 25 bp, Homo sapien
gctttattgacaacggagaaggcag

SEQ ID NO: 3519571 - DNA, 25 bp, Homo sapien
ttagccaggtgctttttcagggacc

SEQ ID NO: 3519572 - DNA, 25 bp, Homo sapien
tgtccctgccggtgtaggctccaca

SEQ ID NO: 3519573 - DNA, 25 bp, Homo sapien
agacctgaaactggccctcggaggg

SEQ ID NO: 3519574 - DNA, 25 bp, Homo sapien
ggcacttcttggagccacagacgca

SEQ ID NO: 3519575 - DNA, 25 bp, Homo sapien
aagtgccttgtaacaccctggatga

SEQ ID NO: 3519576 - DNA, 25 bp, Homo sapien
ctggccgggctacataccacatggt

SEQ ID NO: 3519577 - DNA, 25 bp, Homo sapien
ggactggctggacgcacagctctag

SEQ ID NO: 3519578 - DNA, 25 bp, Homo sapien
ctgaggccagaaatagcatagtgac

SEQ ID NO: 3519579 - DNA, 25 bp, Homo sapien
gagtagtccacagagtaacgtccgt

SEQ ID NO: 3519580 - DNA, 25 bp, Homo sapien
tgatcatgctcttgcggaggtcacc

SEQ ID NO: 3519581 - DNA, 25 bp, Homo sapien
ggaggtcacccacacgtagcatgaa

SEQ ID NO: 3519582 - DNA, 25 bp, Homo sapien
ctgtggtcctcatcaagctggcggg

SEQ ID NO: 3519583 - DNA, 25 bp, Homo sapien
cagcgtggtgaacacgtcctgcagg

SEQ ID NO: 3519584 - DNA, 25 bp, Homo sapien
gaagatgagcaatgtgtgtggccac

SEQ ID NO: 3519585 - DNA, 25 bp, Homo sapien
ggcgtgtcagcacgtattcctcggg

SEQ ID NO: 3519586 - DNA, 25 bp, Homo sapien
tcccggatgttcttgtgggccacgt

SEQ ID NO: 3519587 - DNA, 25 bp, Homo sapien
ctagggcctcactgcagagtcctct

SEQ ID NO: 3519588 - DNA, 25 bp, Homo sapien
ggaggcacccctcggacgtggccta

SEQ ID NO: 3519589 - DNA, 25 bp, Homo sapien
tgctggcctcacttctgagataact

SEQ ID NO: 3519590 - DNA, 25 bp, Homo sapien
ttcacttcttaataccagcctcagg

SEQ ID NO: 3519591 - DNA, 25 bp, Homo sapien
ggccgtcctcccgtctgtctgtccg

SEQ ID NO: 3519592 - DNA, 25 bp, Homo sapien
tcctgctcctcacgccacggccgtc

SEQ ID NO: 3519593 - DNA, 25 bp, Homo sapien
cgtgggtccgcggagaccgacctgg

SEQ ID NO: 3519594 - DNA, 25 bp, Homo sapien
ggctaggcaggggtctaggacggcg

SEQ ID NO: 3519595 - DNA, 25 bp, Homo sapien
agtgatttacagttagaaaacccag

SEQ ID NO: 3519596 - DNA, 25 bp, Homo sapien
tatgggcagggtccgaatgtgggat

SEQ ID NO: 3519597 - DNA, 25 bp, Homo sapien
caggggtatgggcagggtccgaatg

SEQ ID NO: 3519598 - DNA, 25 bp, Homo sapien
ggcagggtccgaatgtgggatggca

SEQ ID NO: 3519599 - DNA, 25 bp, Homo sapien
tctggcttatcgaactcaaggatgg

SEQ ID NO: 3519600 - DNA, 25 bp, Homo sapien
tcacttgtctgcacggacgaaggag

SEQ ID NO: 3519601 - DNA, 25 bp, Homo sapien
gatcaccaggtctgcactcaggatg

SEQ ID NO: 3519602 - DNA, 25 bp, Homo sapien
acgaaggaggcgaagacgctgtcct

SEQ ID NO: 3519603 - DNA, 25 bp, Homo sapien
ttcctatggagaagtaacgccagcc

SEQ ID NO: 3519604 - DNA, 25 bp, Homo sapien
agggtggccctcctgcggcttggag

SEQ ID NO: 3519605 - DNA, 25 bp, Homo sapien
gggtggatgtgactacaagctctcc

SEQ ID NO: 3519606 - DNA, 25 bp, Homo sapien
atggtgggaataccacccgcggtgg

SEQ ID NO: 3519607 - DNA, 25 bp, Homo sapien
agtgcggtctgcgaaggctgtcatc

SEQ ID NO: 3519608 - DNA, 25 bp, Homo sapien
accacagtgcggtctgcgaaggctg

SEQ ID NO: 3519609 - DNA, 25 bp, Homo sapien
tcaccaccttttggaggatgttttc

SEQ ID NO: 3519610 - DNA, 25 bp, Homo sapien
gtctgcgaaggctgtcatcaccacc

SEQ ID NO: 3519611 - DNA, 25 bp, Homo sapien
catgtcaatggaagccgtggcctcg

SEQ ID NO: 3519612 - DNA, 25 bp, Homo sapien
gatgctggtcttcctcacgaaggcc

SEQ ID NO: 3519613 - DNA, 25 bp, Homo sapien
atgtcaatggaagccgtggcctcgt

SEQ ID NO: 3519614 - DNA, 25 bp, Homo sapien
gtcaatggaagccgtggcctcgtcc

SEQ ID NO: 3519615 - DNA, 25 bp, Homo sapien
aacagcccggggagatgaagtagga

SEQ ID NO: 3519616 - DNA, 25 bp, Homo sapien
gaagtaggactgagttaatcttgtg

SEQ ID NO: 3519617 - DNA, 25 bp, Homo sapien
aaaacagcccggggagatgaagtag

SEQ ID NO: 3519618 - DNA, 25 bp, Homo sapien
acagcccggggagatgaagtaggac

SEQ ID NO: 3519619 - DNA, 25 bp, Homo sapien
gcacctgacacaacaatgtggaggc

SEQ ID NO: 3519620 - DNA, 25 bp, Homo sapien
tgtgtccaagagcacaggcgtgtgc

SEQ ID NO: 3519621 - DNA, 25 bp, Homo sapien
aatgtggaggccgtctgcaaggact

SEQ ID NO: 3519622 - DNA, 25 bp, Homo sapien
gcaaataggtgggtgtgtgtccaag

SEQ ID NO: 3519623 - DNA, 25 bp, Homo sapien
tgacccgtgtctatgattgcccagt

SEQ ID NO: 3519624 - DNA, 25 bp, Homo sapien
gattcattgaaaccaaggcttggcc

SEQ ID NO: 3519625 - DNA, 25 bp, Homo sapien
caccggtggccttgatgagtgaccc

SEQ ID NO: 3519626 - DNA, 25 bp, Homo sapien
aggatccctgactgtacccgctgta

SEQ ID NO: 3519627 - DNA, 25 bp, Homo sapien
cagctgcatagccaggagtagttac

SEQ ID NO: 3519628 - DNA, 25 bp, Homo sapien
ccagctgcatagccaggagtagtta

SEQ ID NO: 3519629 - DNA, 25 bp, Homo sapien
tcagctgggcgatttccagggcctc

SEQ ID NO: 3519630 - DNA, 25 bp, Homo sapien
cagcttcagctgggcgatttccagg

SEQ ID NO: 3519631 - DNA, 25 bp, Homo sapien
tcccacagtgtgctatctgagcact

SEQ ID NO: 3519632 - DNA, 25 bp, Homo sapien
cacagtgtgctatctgagcacttcc

SEQ ID NO: 3519633 - DNA, 25 bp, Homo sapien
cgagagcagactgagttggaggtct

SEQ ID NO: 3519634 - DNA, 25 bp, Homo sapien
tgagttggaggtctggctgggagaa

SEQ ID NO: 3519635 - DNA, 25 bp, Homo sapien
gggcagtgagcgagagcagactgag

SEQ ID NO: 3519636 - DNA, 25 bp, Homo sapien
agggagcagggtcctgcctgcatcc

SEQ ID NO: 3519637 - DNA, 25 bp, Homo sapien
cggatggtgccgctgaagaggacgg

SEQ ID NO: 3519638 - DNA, 25 bp, Homo sapien
ggatggtgccgctgaagaggacggg

SEQ ID NO: 3519639 - DNA, 25 bp, Homo sapien
gatggtgccgctgaagaggacgggg

SEQ ID NO: 3519640 - DNA, 25 bp, Homo sapien
tggtgccgctgaagaggacggggtc

SEQ ID NO: 3519641 - DNA, 25 bp, Homo sapien
tgcagcggcagtttggcgatgtcaa

SEQ ID NO: 3519642 - DNA, 25 bp, Homo sapien
aggatgatggagaggcgtgagcgca

SEQ ID NO: 3519643 - DNA, 25 bp, Homo sapien
ggtgtgcagcggcagtttggcgatg

SEQ ID NO: 3519644 - DNA, 25 bp, Homo sapien
cagtttggcgatgtcaatgccatca

SEQ ID NO: 3519645 - DNA, 25 bp, Homo sapien
tgcaggggaaggcggtgactgctgg

SEQ ID NO: 3519646 - DNA, 25 bp, Homo sapien
caggggaaggcggtgactgctgggc

SEQ ID NO: 3519647 - DNA, 25 bp, Homo sapien
gggtgcaggggaaggcggtgactgc

SEQ ID NO: 3519648 - DNA, 25 bp, Homo sapien
ctgcatgggtcccagtgagggtgca

SEQ ID NO: 3519649 - DNA, 25 bp, Homo sapien
gtggggtgcccgccttacaactcac

SEQ ID NO: 3519650 - DNA, 25 bp, Homo sapien
tgtgggtacacgtggggtgcccgcc

SEQ ID NO: 3519651 - DNA, 25 bp, Homo sapien
gggctgaggcctcatctggtggctg

SEQ ID NO: 3519652 - DNA, 25 bp, Homo sapien
ggctgaggcctcatctggtggctgt

SEQ ID NO: 3519653 - DNA, 25 bp, Homo sapien
cttcgaacgtgtccaccatgcggaa

SEQ ID NO: 3519654 - DNA, 25 bp, Homo sapien
cgtgtccaccatgcggaagaaggca

SEQ ID NO: 3519655 - DNA, 25 bp, Homo sapien
cgaacgtgtccaccatgcggaagaa

SEQ ID NO: 3519656 - DNA, 25 bp, Homo sapien
aacgtgtccaccatgcggaagaagg

SEQ ID NO: 3519657 - DNA, 25 bp, Homo sapien
ttttctgactagtttctctttggac

SEQ ID NO: 3519658 - DNA, 25 bp, Homo sapien
ggctgctgggaatagcctctatgct

SEQ ID NO: 3519659 - DNA, 25 bp, Homo sapien
ggaggtcacagggtatctttttggc

SEQ ID NO: 3519660 - DNA, 25 bp, Homo sapien
caccacaggtttgggcttgtttcct

SEQ ID NO: 3519661 - DNA, 25 bp, Homo sapien
gtctgggtgtgccgggtacttggct

SEQ ID NO: 3519662 - DNA, 25 bp, Homo sapien
ccggcacgcaagtgcaggcatggat

SEQ ID NO: 3519663 - DNA, 25 bp, Homo sapien
acagggaccggcacgcaagtgcagg

SEQ ID NO: 3519664 - DNA, 25 bp, Homo sapien
ggcatggatgtccatttgcctgggc

SEQ ID NO: 3519665 - DNA, 25 bp, Homo sapien
acagaggtacatcccaaggtcagag

SEQ ID NO: 3519666 - DNA, 25 bp, Homo sapien
tacaatacggagacagatagtgaca

SEQ ID NO: 3519667 - DNA, 25 bp, Homo sapien
tggagccacctctgatcccgttgct

SEQ ID NO: 3519668 - DNA, 25 bp, Homo sapien
catggacagccacagcaaagtgaga

SEQ ID NO: 3519669 - DNA, 25 bp, Homo sapien
ctgaccattcgcagagagggaggcc

SEQ ID NO: 3519670 - DNA, 25 bp, Homo sapien
ggccctgacaaagcccgtgtgagct

SEQ ID NO: 3519671 - DNA, 25 bp, Homo sapien
ggcagtgccctagggaaagcccctg

SEQ ID NO: 3519672 - DNA, 25 bp, Homo sapien
gagtccagagtgtcggtctccttgg

SEQ ID NO: 3519673 - DNA, 25 bp, Homo sapien
gcaggagactgcgatgtctgaatag

SEQ ID NO: 3519674 - DNA, 25 bp, Homo sapien
tgactgcgaagccatccagctccgt

SEQ ID NO: 3519675 - DNA, 25 bp, Homo sapien
ctgaatagtgagaggcctcggccct

SEQ ID NO: 3519676 - DNA, 25 bp, Homo sapien
cgatgtctgaatagtgagaggcctc

SEQ ID NO: 3519677 - DNA, 25 bp, Homo sapien
cattgggttgggcccgtgctctgac

SEQ ID NO: 3519678 - DNA, 25 bp, Homo sapien
tgcagcattgggttgggcccgtgct

SEQ ID NO: 3519679 - DNA, 25 bp, Homo sapien
ctgcagcattgggttgggcccgtgc

SEQ ID NO: 3519680 - DNA, 25 bp, Homo sapien
cagcattgggttgggcccgtgctct

SEQ ID NO: 3519681 - DNA, 25 bp, Homo sapien
gcttcagggagctgtcgtagcgcac

SEQ ID NO: 3519682 - DNA, 25 bp, Homo sapien
gcgatgagggcattgacgtgcttca

SEQ ID NO: 3519683 - DNA, 25 bp, Homo sapien
cattgacgtgcttcagcaccggctt

SEQ ID NO: 3519684 - DNA, 25 bp, Homo sapien
tgtcgtagcgcacgctcaggttctg

SEQ ID NO: 3519685 - DNA, 25 bp, Homo sapien
ctcagccaccaggcatgggccacag

SEQ ID NO: 3519686 - DNA, 25 bp, Homo sapien
gggctcagccaccaggcatgggcca

SEQ ID NO: 3519687 - DNA, 25 bp, Homo sapien
gctcagccaccaggcatgggccaca

SEQ ID NO: 3519688 - DNA, 25 bp, Homo sapien
ctgggctcagccaccaggcatgggc

SEQ ID NO: 3519689 - DNA, 25 bp, Homo sapien
gacacactcctccttggactcttcc

SEQ ID NO: 3519690 - DNA, 25 bp, Homo sapien
tagtatccgaaagtgccaccccatc

SEQ ID NO: 3519691 - DNA, 25 bp, Homo sapien
ttgtggcccccaacccagacacact

SEQ ID NO: 3519692 - DNA, 25 bp, Homo sapien
ctagtatccgaaagtgccaccccat

SEQ ID NO: 3519693 - DNA, 25 bp, Homo sapien
tcgtagctctctgcctcggttttca

SEQ ID NO: 3519694 - DNA, 25 bp, Homo sapien
cctcggttttcaggagcccatggat

SEQ ID NO: 3519695 - DNA, 25 bp, Homo sapien
caccatccagttgaggtagttggag

SEQ ID NO: 3519696 - DNA, 25 bp, Homo sapien
ctcaccatccagttgaggtagttgg

SEQ ID NO: 3519697 - DNA, 25 bp, Homo sapien
gaggcacagggagggtcagtcatgt

SEQ ID NO: 3519698 - DNA, 25 bp, Homo sapien
gggagcaagccagtggcgcacactc

SEQ ID NO: 3519699 - DNA, 25 bp, Homo sapien
ggtcgcttagttctgtcctcagcca

SEQ ID NO: 3519700 - DNA, 25 bp, Homo sapien
gattccttttgctgccatccactgc

SEQ ID NO: 3519701 - DNA, 25 bp, Homo sapien
gcaaatgaaattggggtaaggcctg

SEQ ID NO: 3519702 - DNA, 25 bp, Homo sapien
catgtctccagtgacgaaggtgctc

SEQ ID NO: 3519703 - DNA, 25 bp, Homo sapien
agtgctggtgtctgacccctcctct

SEQ ID NO: 3519704 - DNA, 25 bp, Homo sapien
cactgtccctctggcatcagatgca

SEQ ID NO: 3519705 - DNA, 25 bp, Homo sapien
cattagggcgtaggtaaggcccagg

SEQ ID NO: 3519706 - DNA, 25 bp, Homo sapien
tggagatggaggtcaccgctgcgat

SEQ ID NO: 3519707 - DNA, 25 bp, Homo sapien
accgctgcgatgagcaccacacatg

SEQ ID NO: 3519708 - DNA, 25 bp, Homo sapien
tgagcaccacacatgcaccgatgta

SEQ ID NO: 3519709 - DNA, 25 bp, Homo sapien
ggagccaacatgtcccacaagctca

SEQ ID NO: 3519710 - DNA, 25 bp, Homo sapien
ctttaacatgcacgcctcagctggc

SEQ ID NO: 3519711 - DNA, 25 bp, Homo sapien
cacacaatgtgggtgtcatatgacc

SEQ ID NO: 3519712 - DNA, 25 bp, Homo sapien
acacacaagggctgcgaaggctgga

SEQ ID NO: 3519713 - DNA, 25 bp, Homo sapien
aaggagcacaggctagacactagga

SEQ ID NO: 3519714 - DNA, 25 bp, Homo sapien
ctagacactaggaggaccaccaggg

SEQ ID NO: 3519715 - DNA, 25 bp, Homo sapien
caggaaggcttggtgtccacacgat

SEQ ID NO: 3519716 - DNA, 25 bp, Homo sapien
gatctggtatcctatcctctctttc

SEQ ID NO: 3519717 - DNA, 25 bp, Homo sapien
tggagtctgtgtattcgagaagctt

SEQ ID NO: 3519718 - DNA, 25 bp, Homo sapien
gagtctgtgtattcgagaagcttct

SEQ ID NO: 3519719 - DNA, 25 bp, Homo sapien
ggagtctgtgtattcgagaagcttc

SEQ ID NO: 3519720 - DNA, 25 bp, Homo sapien
agtctgtgtattcgagaagcttctg

SEQ ID NO: 3519721 - DNA, 25 bp, Homo sapien
tggtttgataggaccaaactcaggg

SEQ ID NO: 3519722 - DNA, 25 bp, Homo sapien
catcgctggtttgataggaccaaac

SEQ ID NO: 3519723 - DNA, 25 bp, Homo sapien
cttgctgacgtaggcccggcccaga

SEQ ID NO: 3519724 - DNA, 25 bp, Homo sapien
cctcatcatcgctggtttgatagga

SEQ ID NO: 3519725 - DNA, 25 bp, Homo sapien
ccctggaaggtgttagttcagcttt

SEQ ID NO: 3519726 - DNA, 25 bp, Homo sapien
atttgcttttcaccctggaaggtgt

SEQ ID NO: 3519727 - DNA, 25 bp, Homo sapien
tttcaccctggaaggtgttagttca

SEQ ID NO: 3519728 - DNA, 25 bp, Homo sapien
ggtgttagttcagctttgattgtct

SEQ ID NO: 3519729 - DNA, 25 bp, Homo sapien
ccttctacggtttcggcaaagtgtg

SEQ ID NO: 3519730 - DNA, 25 bp, Homo sapien
gagaagtggaagctgggtggtgtca

SEQ ID NO: 3519731 - DNA, 25 bp, Homo sapien
ctacggtttcggcaaagtgtgagag

SEQ ID NO: 3519732 - DNA, 25 bp, Homo sapien
tggtgagtccttctacggtttcggc

SEQ ID NO: 3519733 - DNA, 25 bp, Homo sapien
gacgccacccggaagtacttctgga

SEQ ID NO: 3519734 - DNA, 25 bp, Homo sapien
agatgacggccagggctgagacaca

SEQ ID NO: 3519735 - DNA, 25 bp, Homo sapien
cttctggatgaagtagcacacgatg

SEQ ID NO: 3519736 - DNA, 25 bp, Homo sapien
cacaggtgtgacataggagatgacg

SEQ ID NO: 3519737 - DNA, 25 bp, Homo sapien
ctggtcgatggtgttacagtcagat

SEQ ID NO: 3519738 - DNA, 25 bp, Homo sapien
gtcgatggtgttacagtcagatgaa

SEQ ID NO: 3519739 - DNA, 25 bp, Homo sapien
gatgctcccaaggggcgtggtctca

SEQ ID NO: 3519740 - DNA, 25 bp, Homo sapien
gctcccaaggggcgtggtctcaaaa

SEQ ID NO: 3519741 - DNA, 25 bp, Homo sapien
ctgtatccccgtgaattcctgcagc

SEQ ID NO: 3519742 - DNA, 25 bp, Homo sapien
catctggcctgtatccccgtgaatt

SEQ ID NO: 3519743 - DNA, 25 bp, Homo sapien
tctggcctgtatccccgtgaattcc

SEQ ID NO: 3519744 - DNA, 25 bp, Homo sapien
tagacatctggcctgtatccccgtg

SEQ ID NO: 3519745 - DNA, 25 bp, Homo sapien
tcccccagtgtcaaaacctgaggct

SEQ ID NO: 3519746 - DNA, 25 bp, Homo sapien
ttcccccagtgtcaaaacctgaggc

SEQ ID NO: 3519747 - DNA, 25 bp, Homo sapien
taggatgatccggtttagcaggctg

SEQ ID NO: 3519748 - DNA, 25 bp, Homo sapien
cactccacagtgacagacgtgacga

SEQ ID NO: 3519749 - DNA, 25 bp, Homo sapien
cagacgtgacgaggcacagcacaat

SEQ ID NO: 3519750 - DNA, 25 bp, Homo sapien
caccgtgaacaccatggcatagaca

SEQ ID NO: 3519751 - DNA, 25 bp, Homo sapien
gggtcagggtcagggcgctgtcggt

SEQ ID NO: 3519752 - DNA, 25 bp, Homo sapien
gagggagcagttcctggctgcaggg

SEQ ID NO: 3519753 - DNA, 25 bp, Homo sapien
tggctgagggagcagttcctggctg

SEQ ID NO: 3519754 - DNA, 25 bp, Homo sapien
gcaggggtcagggtcagggcgctgt

SEQ ID NO: 3519755 - DNA, 25 bp, Homo sapien
ggacgacaggttgtcatcctcctcg

SEQ ID NO: 3519756 - DNA, 25 bp, Homo sapien
gagaagaccagcaacgacaggagca

SEQ ID NO: 3519757 - DNA, 25 bp, Homo sapien
acttggccagccagtagtcgatggc

SEQ ID NO: 3519758 - DNA, 25 bp, Homo sapien
catgggatctcagcacgctggtgca

SEQ ID NO: 3519759 - DNA, 25 bp, Homo sapien
tccctcgaggacatggcacgagata

SEQ ID NO: 3519760 - DNA, 25 bp, Homo sapien
tcgaggacatggcacgagataggcc

SEQ ID NO: 3519761 - DNA, 25 bp, Homo sapien
aggacatggcacgagataggccctg

SEQ ID NO: 3519762 - DNA, 25 bp, Homo sapien
gccatccctcgaggacatggcacga

SEQ ID NO: 3519763 - DNA, 25 bp, Homo sapien
tcccacatctgccctttagggggct

SEQ ID NO: 3519764 - DNA, 25 bp, Homo sapien
catctgccctttagggggcttcctg

SEQ ID NO: 3519765 - DNA, 25 bp, Homo sapien
ctggtaggagccagttcatgcccag

SEQ ID NO: 3519766 - DNA, 25 bp, Homo sapien
tctggtaggagccagttcatgccca

SEQ ID NO: 3519767 - DNA, 25 bp, Homo sapien
cctgtcggttcatgagggtcttcca

SEQ ID NO: 3519768 - DNA, 25 bp, Homo sapien
gtaccctccctctggatggtgccat

SEQ ID NO: 3519769 - DNA, 25 bp, Homo sapien
agtccttgagggtaccctccctctg

SEQ ID NO: 3519770 - DNA, 25 bp, Homo sapien
gctcttggtcctgtcggttcatgag

SEQ ID NO: 3519771 - DNA, 25 bp, Homo sapien
gggctcgagagtcctgatcactgat

SEQ ID NO: 3519772 - DNA, 25 bp, Homo sapien
gatgacaccatcacgtagacctgac

SEQ ID NO: 3519773 - DNA, 25 bp, Homo sapien
tgccaaggtcactacagaaactcag

SEQ ID NO: 3519774 - DNA, 25 bp, Homo sapien
tgaactacaaggtattgccaaggtc

SEQ ID NO: 3519775 - DNA, 25 bp, Homo sapien
taggagtaggcaagacctagagttc

SEQ ID NO: 3519776 - DNA, 25 bp, Homo sapien
aaaataagcagagccatttggcacc

SEQ ID NO: 3519777 - DNA, 25 bp, Homo sapien
caaagagggcctcaattttggctgt

SEQ ID NO: 3519778 - DNA, 25 bp, Homo sapien
gggtctcatcatacatggaaggaag

SEQ ID NO: 3519779 - DNA, 25 bp, Homo sapien
gcataaagccatccagtgctggtct

SEQ ID NO: 3519780 - DNA, 25 bp, Homo sapien
ggtgataccaaacccctggcctgta

SEQ ID NO: 3519781 - DNA, 25 bp, Homo sapien
gacaacggattggttcctgccaaga

SEQ ID NO: 3519782 - DNA, 25 bp, Homo sapien
tgggtcatcaaaagggcaggaatca

SEQ ID NO: 3519783 - DNA, 25 bp, Homo sapien
gcaggtactgtagcttgtgggtcac

SEQ ID NO: 3519784 - DNA, 25 bp, Homo sapien
cagctcaaggatgccggcctgcatt

SEQ ID NO: 3519785 - DNA, 25 bp, Homo sapien
actgtcctcttgtcgtcccggagca

SEQ ID NO: 3519786 - DNA, 25 bp, Homo sapien
tggtcactcagatggatatccagag

SEQ ID NO: 3519787 - DNA, 25 bp, Homo sapien
cctcattggctactgcagagctcca

SEQ ID NO: 3519788 - DNA, 25 bp, Homo sapien
gttatcagccattcttatagtcggg

SEQ ID NO: 3519789 - DNA, 25 bp, Homo sapien
tatagtcgggctgcataagtgttga

SEQ ID NO: 3519790 - DNA, 25 bp, Homo sapien
catctgaagtctgcaatgggtcatt

SEQ ID NO: 3519791 - DNA, 25 bp, Homo sapien
ctcgggccacactgattcgctggcg

SEQ ID NO: 3519792 - DNA, 25 bp, Homo sapien
tggcgttgaccaccagacaggttga

SEQ ID NO: 3519793 - DNA, 25 bp, Homo sapien
gcgtgctggtagagggctcgggcca

SEQ ID NO: 3519794 - DNA, 25 bp, Homo sapien
caagaagacaacgttggcgtgctgg

SEQ ID NO: 3519795 - DNA, 25 bp, Homo sapien
ccccaatctgggtctggtctccatg

SEQ ID NO: 3519796 - DNA, 25 bp, Homo sapien
catggggcaggatgtcgatgtctgg

SEQ ID NO: 3519797 - DNA, 25 bp, Homo sapien
ccgttccccaatctgggtctggtct

SEQ ID NO: 3519798 - DNA, 25 bp, Homo sapien
caggatgtcgatgtctggctgcaga

SEQ ID NO: 3519799 - DNA, 25 bp, Homo sapien
gcccgagcacttgcagagggtcatt

SEQ ID NO: 3519800 - DNA, 25 bp, Homo sapien
agcctggtcagagttggcccgagca

SEQ ID NO: 3519801 - DNA, 25 bp, Homo sapien
cgagcacttgcagagggtcattagt

SEQ ID NO: 3519802 - DNA, 25 bp, Homo sapien
ctggtcagagttggcccgagcactt

SEQ ID NO: 3519803 - DNA, 25 bp, Homo sapien
aaattccgtgtacaaagagctcggc

SEQ ID NO: 3519804 - DNA, 25 bp, Homo sapien
catcttggtcacttactggctgggt

SEQ ID NO: 3519805 - DNA, 25 bp, Homo sapien
tatgtagtaagagcgcagtcgatgc

SEQ ID NO: 3519806 - DNA, 25 bp, Homo sapien
aaagggcgctcatgatctctgtgca

SEQ ID NO: 3519807 - DNA, 25 bp, Homo sapien
agtggcatttagcagccatggtttc

SEQ ID NO: 3519808 - DNA, 25 bp, Homo sapien
cgttgtttgttgaagggactctcaa

SEQ ID NO: 3519809 - DNA, 25 bp, Homo sapien
gttgaagggactctcaaagatgatg

SEQ ID NO: 3519810 - DNA, 25 bp, Homo sapien
gtttctgcgaagcataggccacggg

SEQ ID NO: 3519811 - DNA, 25 bp, Homo sapien
cttatgtgaagggagtaaatggatg

SEQ ID NO: 3519812 - DNA, 25 bp, Homo sapien
cacattttgagtgatgtggtttttg

SEQ ID NO: 3519813 - DNA, 25 bp, Homo sapien
aagggagtaaatggatgcacagaaa

SEQ ID NO: 3519814 - DNA, 25 bp, Homo sapien
cattttgagtgatgtggtttttgaa

SEQ ID NO: 3519815 - DNA, 25 bp, Homo sapien
gagttgaccctggggggcaatgttc

SEQ ID NO: 3519816 - DNA, 25 bp, Homo sapien
agggagttgaccctggggggcaatg

SEQ ID NO: 3519817 - DNA, 25 bp, Homo sapien
gggcaatgttcccaggacgcagtac

SEQ ID NO: 3519818 - DNA, 25 bp, Homo sapien
tggagggagttgaccctggggggca

SEQ ID NO: 3519819 - DNA, 25 bp, Homo sapien
tgatatccaagtcggtcgctgtctc

SEQ ID NO: 3519820 - DNA, 25 bp, Homo sapien
ctgatatccaagtcggtcgctgtct

SEQ ID NO: 3519821 - DNA, 25 bp, Homo sapien
atatccaagtcggtcgctgtctccc

SEQ ID NO: 3519822 - DNA, 25 bp, Homo sapien
atccaagtcggtcgctgtctcccgc

SEQ ID NO: 3519823 - DNA, 25 bp, Homo sapien
tctcatgggagtgaaccatatcctc

SEQ ID NO: 3519824 - DNA, 25 bp, Homo sapien
aaaggcatactgagctctcatggga

SEQ ID NO: 3519825 - DNA, 25 bp, Homo sapien
tgagcatgcctttacaatcccctgg

SEQ ID NO: 3519826 - DNA, 25 bp, Homo sapien
gacccagtctgtagccacaaatgct

SEQ ID NO: 3519827 - DNA, 25 bp, Homo sapien
ttcaggttggaatgaataggctgag

SEQ ID NO: 3519828 - DNA, 25 bp, Homo sapien
gatcaggagtatgaagcccgcaatg

SEQ ID NO: 3519829 - DNA, 25 bp, Homo sapien
ctggaggacccagttaagagggaga

SEQ ID NO: 3519830 - DNA, 25 bp, Homo sapien
tctggggggaaaacttgtcagatca

SEQ ID NO: 3519831 - DNA, 25 bp, Homo sapien
gctgctcccgtgtcaaatattctgc

SEQ ID NO: 3519832 - DNA, 25 bp, Homo sapien
tcagaagacaaccacggaatgtggg

SEQ ID NO: 3519833 - DNA, 25 bp, Homo sapien
cccatatggccccatcagaagacaa

SEQ ID NO: 3519834 - DNA, 25 bp, Homo sapien
gctccaggcatgatctgcagcccca

SEQ ID NO: 3519835 - DNA, 25 bp, Homo sapien
aaatatgatcactaccattacagag

SEQ ID NO: 3519836 - DNA, 25 bp, Homo sapien
gaggtctgatttttggctcaagaaa

SEQ ID NO: 3519837 - DNA, 25 bp, Homo sapien
gctcaagaaatatgatcactaccat

SEQ ID NO: 3519838 - DNA, 25 bp, Homo sapien
tatgatcactaccattacagaggct

SEQ ID NO: 3519839 - DNA, 25 bp, Homo sapien
gggtcctctcctatctcgctgtcag

SEQ ID NO: 3519840 - DNA, 25 bp, Homo sapien
gtcctctcctatctcgctgtcagga

SEQ ID NO: 3519841 - DNA, 25 bp, Homo sapien
cctctcctatctcgctgtcaggaag

SEQ ID NO: 3519842 - DNA, 25 bp, Homo sapien
ctggggtcctctcctatctcgctgt

SEQ ID NO: 3519843 - DNA, 25 bp, Homo sapien
gccatggtacattactcccctgtga

SEQ ID NO: 3519844 - DNA, 25 bp, Homo sapien
tgaaggaggtttattctgatcgccc

SEQ ID NO: 3519845 - DNA, 25 bp, Homo sapien
gagaaaatagctccgactccaacgt

SEQ ID NO: 3519846 - DNA, 25 bp, Homo sapien
tgataaatgccccttgtcaggagaa

SEQ ID NO: 3519847 - DNA, 25 bp, Homo sapien
gcagatgcgaccagggccgtcctga

SEQ ID NO: 3519848 - DNA, 25 bp, Homo sapien
tccaggaattgtacaggcagatgcg

SEQ ID NO: 3519849 - DNA, 25 bp, Homo sapien
cagggccgtcctgagagaagccttt

SEQ ID NO: 3519850 - DNA, 25 bp, Homo sapien
ggcacttgagcccctgacttcagct

SEQ ID NO: 3519851 - DNA, 25 bp, Homo sapien
ccaccacaggcaacagcattgcagc

SEQ ID NO: 3519852 - DNA, 25 bp, Homo sapien
caccacaggcaacagcattgcagca

SEQ ID NO: 3519853 - DNA, 25 bp, Homo sapien
accacaggcaacagcattgcagcag

SEQ ID NO: 3519854 - DNA, 25 bp, Homo sapien
gcagacctggggctcaatgtctgag

SEQ ID NO: 3519855 - DNA, 25 bp, Homo sapien
gtaagtgttgataaggacagagctg

SEQ ID NO: 3519856 - DNA, 25 bp, Homo sapien
aagtgttgataaggacagagctgtg

SEQ ID NO: 3519857 - DNA, 25 bp, Homo sapien
taagtgttgataaggacagagctgt

SEQ ID NO: 3519858 - DNA, 25 bp, Homo sapien
agtaagtgttgataaggacagagct

SEQ ID NO: 3519859 - DNA, 25 bp, Homo sapien
aggcatgcagttggacagcagaaaa

SEQ ID NO: 3519860 - DNA, 25 bp, Homo sapien
ggcatgcagttggacagcagaaaag

SEQ ID NO: 3519861 - DNA, 25 bp, Homo sapien
tgatattcagacattgggcccaaag

SEQ ID NO: 3519862 - DNA, 25 bp, Homo sapien
gctcagttctgtactcatgcttatg

SEQ ID NO: 3519863 - DNA, 25 bp, Homo sapien
ctgaggagggaaatttgccatcttt

SEQ ID NO: 3519864 - DNA, 25 bp, Homo sapien
gatacaccattcagggacatcttgg

SEQ ID NO: 3519865 - DNA, 25 bp, Homo sapien
aggagcgaggacttgccgcagccca

SEQ ID NO: 3519866 - DNA, 25 bp, Homo sapien
tgccccacgatcatagtcagctggc

SEQ ID NO: 3519867 - DNA, 25 bp, Homo sapien
ccccagtgcggctagaaggagcgag

SEQ ID NO: 3519868 - DNA, 25 bp, Homo sapien
cagaagacagcccctgagaccttct

SEQ ID NO: 3519869 - DNA, 25 bp, Homo sapien
ccatactttgctcatggctgcctct

SEQ ID NO: 3519870 - DNA, 25 bp, Homo sapien
tccatactttgctcatggctgcctc

SEQ ID NO: 3519871 - DNA, 25 bp, Homo sapien
ctccatactttgctcatggctgcct

SEQ ID NO: 3519872 - DNA, 25 bp, Homo sapien
tccacgtgaagtagcctcccatgat

SEQ ID NO: 3519873 - DNA, 25 bp, Homo sapien
tacgaatggtgatgttggacagtgt

SEQ ID NO: 3519874 - DNA, 25 bp, Homo sapien
ccatctggggtccacgtgaagtagc

SEQ ID NO: 3519875 - DNA, 25 bp, Homo sapien
gatacgaatggtgatgttggacagt

SEQ ID NO: 3519876 - DNA, 25 bp, Homo sapien
agacactgattccagcccctggatc

SEQ ID NO: 3519877 - DNA, 25 bp, Homo sapien
gacactgattccagcccctggatca

SEQ ID NO: 3519878 - DNA, 25 bp, Homo sapien
cagttcccagtgaatagtctctggc

SEQ ID NO: 3519879 - DNA, 25 bp, Homo sapien
cactgattccagcccctggatcact

SEQ ID NO: 3519880 - DNA, 25 bp, Homo sapien
cacttggtggtccctggtttctgga

SEQ ID NO: 3519881 - DNA, 25 bp, Homo sapien
ttggtggtccctggtttctggactc

SEQ ID NO: 3519882 - DNA, 25 bp, Homo sapien
cttggtggtccctggtttctggact

SEQ ID NO: 3519883 - DNA, 25 bp, Homo sapien
cccacttggtggtccctggtttctg

SEQ ID NO: 3519884 - DNA, 25 bp, Homo sapien
gacacagcagttgtcagcatcgcca

SEQ ID NO: 3519885 - DNA, 25 bp, Homo sapien
cacagcagttgtcagcatcgccatc

SEQ ID NO: 3519886 - DNA, 25 bp, Homo sapien
tggacacagcagttgtcagcatcgc

SEQ ID NO: 3519887 - DNA, 25 bp, Homo sapien
cagcagttgtcagcatcgccatctg

SEQ ID NO: 3519888 - DNA, 25 bp, Homo sapien
gccccgacaatcctcccgggctgga

SEQ ID NO: 3519889 - DNA, 25 bp, Homo sapien
tgcagtgggccggtgaggccccgac

SEQ ID NO: 3519890 - DNA, 25 bp, Homo sapien
cgcttgcggttcacaaccctgaggg

SEQ ID NO: 3519891 - DNA, 25 bp, Homo sapien
tggacgcttgcggttcacaaccctg

SEQ ID NO: 3519892 - DNA, 25 bp, Homo sapien
ccactgggctgggagctgtgtaggg

SEQ ID NO: 3519893 - DNA, 25 bp, Homo sapien
tggtttggaggtgaggacccactgg

SEQ ID NO: 3519894 - DNA, 25 bp, Homo sapien
gggctgggagctgtgtagggaaggg

SEQ ID NO: 3519895 - DNA, 25 bp, Homo sapien
gtggtttggaggtgaggacccactg

SEQ ID NO: 3519896 - DNA, 25 bp, Homo sapien
gctcatggggggcacactgctcctc

SEQ ID NO: 3519897 - DNA, 25 bp, Homo sapien
caggaactcgcttagcttttgcacg

SEQ ID NO: 3519898 - DNA, 25 bp, Homo sapien
ggggggcacactgctcctcacggat

SEQ ID NO: 3519899 - DNA, 25 bp, Homo sapien
actggacaggaactcgcttagcttt

SEQ ID NO: 3519900 - DNA, 25 bp, Homo sapien
tttctgtgcgccacccctagatggg

SEQ ID NO: 3519901 - DNA, 25 bp, Homo sapien
actgggaagagtggagctggccctc

SEQ ID NO: 3519902 - DNA, 25 bp, Homo sapien
accctcaaggcaaggttattctggg

SEQ ID NO: 3519903 - DNA, 25 bp, Homo sapien
gaagcttcaggtagtgtcctgcgcc

SEQ ID NO: 3519904 - DNA, 25 bp, Homo sapien
gaaaaggcctctgctactctggtgt

SEQ ID NO: 3519905 - DNA, 25 bp, Homo sapien
tgaaaaggcctctgctactctggtg

SEQ ID NO: 3519906 - DNA, 25 bp, Homo sapien
caggcaggtgcagcgttcttaaatc

SEQ ID NO: 3519907 - DNA, 25 bp, Homo sapien
gggatcagtgcaacagttttcaggc

SEQ ID NO: 3519908 - DNA, 25 bp, Homo sapien
ccagagtgtttgaaaatatgaacgc

SEQ ID NO: 3519909 - DNA, 25 bp, Homo sapien
tcctggaaacagtgggatccagagt

SEQ ID NO: 3519910 - DNA, 25 bp, Homo sapien
cctccatagaggcatgacaggctct

SEQ ID NO: 3519911 - DNA, 25 bp, Homo sapien
ccttcaggctttcattcccaagagg

SEQ ID NO: 3519912 - DNA, 25 bp, Homo sapien
tttgaacccatgctagagtctcccc

SEQ ID NO: 3519913 - DNA, 25 bp, Homo sapien
tggccatgggtaaggacaagccagc

SEQ ID NO: 3519914 - DNA, 25 bp, Homo sapien
ttggccatcactcgagcaagccttg

SEQ ID NO: 3519915 - DNA, 25 bp, Homo sapien
tgtgttccgggaccaaacagctgtg

SEQ ID NO: 3519916 - DNA, 25 bp, Homo sapien
ctcctgggaggtatgtaagcaagtc

SEQ ID NO: 3519917 - DNA, 25 bp, Homo sapien
gaaagtgacagtgagtcccctctcc

SEQ ID NO: 3519918 - DNA, 25 bp, Homo sapien
gctttgacggtagatcggaccacac

SEQ ID NO: 3519919 - DNA, 25 bp, Homo sapien
tttgaagaagctgacgtggcccacg

SEQ ID NO: 3519920 - DNA, 25 bp, Homo sapien
gagggcgagaagtcggcctctttga

SEQ ID NO: 3519921 - DNA, 25 bp, Homo sapien
acagcaggaacagcggtgtgaccaa

SEQ ID NO: 3519922 - DNA, 25 bp, Homo sapien
ccctcccacactggaaacgctcagc

SEQ ID NO: 3519923 - DNA, 25 bp, Homo sapien
gaggcacaagtgaggccagggtggc

SEQ ID NO: 3519924 - DNA, 25 bp, Homo sapien
tggcccagggtgtgggtccctccca

SEQ ID NO: 3519925 - DNA, 25 bp, Homo sapien
ctgtggacagaggcacaagtgaggc

SEQ ID NO: 3519926 - DNA, 25 bp, Homo sapien
tcatggaaacgtccccaacaagttc

SEQ ID NO: 3519927 - DNA, 25 bp, Homo sapien
agatctcgggttaggtcagcacggc

SEQ ID NO: 3519928 - DNA, 25 bp, Homo sapien
gagtgattacgaaactgcacagtgc

SEQ ID NO: 3519929 - DNA, 25 bp, Homo sapien
tcctcatcgggataacgtaaacaga

SEQ ID NO: 3519930 - DNA, 25 bp, Homo sapien
catcataatattcagtggcatggag

SEQ ID NO: 3519931 - DNA, 25 bp, Homo sapien
aatactaagcctccggtcttccagg

SEQ ID NO: 3519932 - DNA, 25 bp, Homo sapien
tctgtaggagcatgctgcttgaccc

SEQ ID NO: 3519933 - DNA, 25 bp, Homo sapien
taaaagagcaggttgcaaaactgca

SEQ ID NO: 3519934 - DNA, 25 bp, Homo sapien
aatggggatggccgtgttcatgaaa

SEQ ID NO: 3519935 - DNA, 25 bp, Homo sapien
atggggatggccgtgttcatgaaaa

SEQ ID NO: 3519936 - DNA, 25 bp, Homo sapien
tccagtaggctaggggcagaactct

SEQ ID NO: 3519937 - DNA, 25 bp, Homo sapien
taagtcactccgtgtggacagggtg

SEQ ID NO: 3519938 - DNA, 25 bp, Homo sapien
gctggctgtggccaactgtgaggtc

SEQ ID NO: 3519939 - DNA, 25 bp, Homo sapien
gaactctagccctgtggcacttcca

SEQ ID NO: 3519940 - DNA, 25 bp, Homo sapien
tggggaatcttcaggccttttccta

SEQ ID NO: 3519941 - DNA, 25 bp, Homo sapien
agggacttcacgcattccaaataag

SEQ ID NO: 3519942 - DNA, 25 bp, Homo sapien
acacagggacttcacgcattccaaa

SEQ ID NO: 3519943 - DNA, 25 bp, Homo sapien
acttcacgcattccaaataagactc

SEQ ID NO: 3519944 - DNA, 25 bp, Homo sapien
ctttggctgtgattcccaaaggaac

SEQ ID NO: 3519945 - DNA, 25 bp, Homo sapien
tgtgttcttattccagaactgctcc

SEQ ID NO: 3519946 - DNA, 25 bp, Homo sapien
tgatgtggggagatatgggacagtt

SEQ ID NO: 3519947 - DNA, 25 bp, Homo sapien
gaagagaccaactgtagatagtgat

SEQ ID NO: 3519948 - DNA, 25 bp, Homo sapien
accaacatgtctcagcaagagcaca

SEQ ID NO: 3519949 - DNA, 25 bp, Homo sapien
ggaggcaatgacaaccaacatgtct

SEQ ID NO: 3519950 - DNA, 25 bp, Homo sapien
acaaccaacatgtctcagcaagagc

SEQ ID NO: 3519951 - DNA, 25 bp, Homo sapien
aaagtgggctcggaggcaatgacaa

SEQ ID NO: 3519952 - DNA, 25 bp, Homo sapien
tgcaggctcacagtttgggcctaat

SEQ ID NO: 3519953 - DNA, 25 bp, Homo sapien
agcatgcaggctcacagtttgggcc

SEQ ID NO: 3519954 - DNA, 25 bp, Homo sapien
tctgattaacttcagctttgttgcc

SEQ ID NO: 3519955 - DNA, 25 bp, Homo sapien
catgcaggctcacagtttgggccta

SEQ ID NO: 3519956 - DNA, 25 bp, Homo sapien
tggcgagaccatcagacagagtcac

SEQ ID NO: 3519957 - DNA, 25 bp, Homo sapien
gaatagggctcactcaacatccact

SEQ ID NO: 3519958 - DNA, 25 bp, Homo sapien
tgatggtgccgcatatgagcaggat

SEQ ID NO: 3519959 - DNA, 25 bp, Homo sapien
taccagttcgggactccatacacag

SEQ ID NO: 3519960 - DNA, 25 bp, Homo sapien
aatttcccctgtctatggagtgctt

SEQ ID NO: 3519961 - DNA, 25 bp, Homo sapien
tactcttcatgtaaccagcctccag

SEQ ID NO: 3519962 - DNA, 25 bp, Homo sapien
ctgagctccctagatgttccttcca

SEQ ID NO: 3519963 - DNA, 25 bp, Homo sapien
agtgcttagcctgagtgtgtttgga

SEQ ID NO: 3519964 - DNA, 25 bp, Homo sapien
cttgcatgtacgcagcagcacccag

SEQ ID NO: 3519965 - DNA, 25 bp, Homo sapien
ctctgacaccctctccttgcatgta

SEQ ID NO: 3519966 - DNA, 25 bp, Homo sapien
tctccttgcatgtacgcagcagcac

SEQ ID NO: 3519967 - DNA, 25 bp, Homo sapien
gacaccctctccttgcatgtacgca

SEQ ID NO: 3519968 - DNA, 25 bp, Homo sapien
ggaagatgttctcccaggcgtacag

SEQ ID NO: 3519969 - DNA, 25 bp, Homo sapien
agcttcagcagcttgatgccgcgga

SEQ ID NO: 3519970 - DNA, 25 bp, Homo sapien
aggtatagatggcaaaggccctgag

SEQ ID NO: 3519971 - DNA, 25 bp, Homo sapien
tctccacccgcgtgcggaagatgtt

SEQ ID NO: 3519972 - DNA, 25 bp, Homo sapien
caggagccagtagaatgatgacagc

SEQ ID NO: 3519973 - DNA, 25 bp, Homo sapien
cctgagacagcttggtggccacgaa

SEQ ID NO: 3519974 - DNA, 25 bp, Homo sapien
tgacagctgctccaattaaggcact

SEQ ID NO: 3519975 - DNA, 25 bp, Homo sapien
gccacgaagtactggacaggagcca

SEQ ID NO: 3519976 - DNA, 25 bp, Homo sapien
cataatgggctctcatgcaagcaga

SEQ ID NO: 3519977 - DNA, 25 bp, Homo sapien
cctagagtgggacaagccttggtgc

SEQ ID NO: 3519978 - DNA, 25 bp, Homo sapien
tcaaaaggaggttagcataatgggc

SEQ ID NO: 3519979 - DNA, 25 bp, Homo sapien
gcaaagttactgcacccatgccaga

SEQ ID NO: 3519980 - DNA, 25 bp, Homo sapien
tcttccctggcctgccctgcagcat

SEQ ID NO: 3519981 - DNA, 25 bp, Homo sapien
cctcttccctggcctgccctgcagc

SEQ ID NO: 3519982 - DNA, 25 bp, Homo sapien
cttccctggcctgccctgcagcatc

SEQ ID NO: 3519983 - DNA, 25 bp, Homo sapien
tccctggcctgccctgcagcatcac

SEQ ID NO: 3519984 - DNA, 25 bp, Homo sapien
tcaaatggaggccatcagggtgttc

SEQ ID NO: 3519985 - DNA, 25 bp, Homo sapien
tggacttatctctggcatccagtcc

SEQ ID NO: 3519986 - DNA, 25 bp, Homo sapien
ggcatccagtccttcattagttgtg

SEQ ID NO: 3519987 - DNA, 25 bp, Homo sapien
tagttgtgctcaaatggaggccatc

SEQ ID NO: 3519988 - DNA, 25 bp, Homo sapien
agggcaccttgtgagccggtgtctg

SEQ ID NO: 3519989 - DNA, 25 bp, Homo sapien
ggcaccttgtgagccggtgtctgca

SEQ ID NO: 3519990 - DNA, 25 bp, Homo sapien
ttgtgagccggtgtctgcacccaca

SEQ ID NO: 3519991 - DNA, 25 bp, Homo sapien
caccttgtgagccggtgtctgcacc

SEQ ID NO: 3519992 - DNA, 25 bp, Homo sapien
aaaaaccacatgagctgattggtgt

SEQ ID NO: 3519993 - DNA, 25 bp, Homo sapien
ggtgtcgatggcaaccagattacag

SEQ ID NO: 3519994 - DNA, 25 bp, Homo sapien
aaccagattacagatctgtccagca

SEQ ID NO: 3519995 - DNA, 25 bp, Homo sapien
ctggcatagcccagaggtttgggca

SEQ ID NO: 3519996 - DNA, 25 bp, Homo sapien
ctccctggctttgatcatctttcca

SEQ ID NO: 3519997 - DNA, 25 bp, Homo sapien
cttcttcagaggggccctgaacact

SEQ ID NO: 3519998 - DNA, 25 bp, Homo sapien
gccctgaacactccctggctttgat

SEQ ID NO: 3519999 - DNA, 25 bp, Homo sapien
tcagaggggccctgaacactccctg

SEQ ID NO: 3520000 - DNA, 25 bp, Homo sapien
tccagtttcaatggccacatagtag

SEQ ID NO: 3520001 - DNA, 25 bp, Homo sapien
gcaaggaacagaagcacagctaaga

SEQ ID NO: 3520002 - DNA, 25 bp, Homo sapien
tgtattgctcctctcaagttaattc

SEQ ID NO: 3520003 - DNA, 25 bp, Homo sapien
tagtaggatgcttgcagaaatgtcc

SEQ ID NO: 3520004 - DNA, 25 bp, Homo sapien
ggatgagacaaagtaaaccccgaga

SEQ ID NO: 3520005 - DNA, 25 bp, Homo sapien
gatgagacaaagtaaaccccgagaa

SEQ ID NO: 3520006 - DNA, 25 bp, Homo sapien
tgggatgagacaaagtaaaccccga

SEQ ID NO: 3520007 - DNA, 25 bp, Homo sapien
ctgtgcatcctgtttggcagggtgt

SEQ ID NO: 3520008 - DNA, 25 bp, Homo sapien
gactgtgcatcctgtttggcagggt

SEQ ID NO: 3520009 - DNA, 25 bp, Homo sapien
ctggactgtgcatcctgtttggcag

SEQ ID NO: 3520010 - DNA, 25 bp, Homo sapien
gccctggactgtgcatcctgtttgg

SEQ ID NO: 3520011 - DNA, 25 bp, Homo sapien
tcagaaatgttcgtccttgcggata

SEQ ID NO: 3520012 - DNA, 25 bp, Homo sapien
gacatgtttcttgccaactctgagt

SEQ ID NO: 3520013 - DNA, 25 bp, Homo sapien
tcgtccttgcggataccaaggatga

SEQ ID NO: 3520014 - DNA, 25 bp, Homo sapien
gatgacatgtttcttgccaactctg

SEQ ID NO: 3520015 - DNA, 25 bp, Homo sapien
tcattttgtggccatttaaacctaa

SEQ ID NO: 3520016 - DNA, 25 bp, Homo sapien
tgaaaaagttttcattttgtggcca

SEQ ID NO: 3520017 - DNA, 25 bp, Homo sapien
ttcattttgtggccatttaaaccta

SEQ ID NO: 3520018 - DNA, 25 bp, Homo sapien
agatggcccgggcaccttgagtgcc

SEQ ID NO: 3520019 - DNA, 25 bp, Homo sapien
cagcaggtcggccaagatgcggaaa

SEQ ID NO: 3520020 - DNA, 25 bp, Homo sapien
aggcgcctcccgaaggcatggctga

SEQ ID NO: 3520021 - DNA, 25 bp, Homo sapien
caaggtggtccacgatcccaaagat

SEQ ID NO: 3520022 - DNA, 25 bp, Homo sapien
acctccctcggtgtcttgaagaaga

SEQ ID NO: 3520023 - DNA, 25 bp, Homo sapien
tcaaaggcctcgcagagccgttggt

SEQ ID NO: 3520024 - DNA, 25 bp, Homo sapien
tttggacagcagattcacgaagggc

SEQ ID NO: 3520025 - DNA, 25 bp, Homo sapien
gaaggcgttcatccaccagtaggtg

SEQ ID NO: 3520026 - DNA, 25 bp, Homo sapien
agaagcgtagctgcgagaagccgat

SEQ ID NO: 3520027 - DNA, 25 bp, Homo sapien
aagccgatggcgtggtccaagaact

SEQ ID NO: 3520028 - DNA, 25 bp, Homo sapien
tgatgaaggccagggtccaatacac

SEQ ID NO: 3520029 - DNA, 25 bp, Homo sapien
ggagcagcatcccatagaggatcac

SEQ ID NO: 3520030 - DNA, 25 bp, Homo sapien
tttaactaagttacaggcactgtgc

SEQ ID NO: 3520031 - DNA, 25 bp, Homo sapien
cacacgcagcgggtgctctttggac

SEQ ID NO: 3520032 - DNA, 25 bp, Homo sapien
tcaaagaaagtacactgccgtcacc

SEQ ID NO: 3520033 - DNA, 25 bp, Homo sapien
tgaggcccagaaataggatgtgacc

SEQ ID NO: 3520034 - DNA, 25 bp, Homo sapien
ccggggggatcgatgccatccacct

SEQ ID NO: 3520035 - DNA, 25 bp, Homo sapien
cggggggatcgatgccatccacctt

SEQ ID NO: 3520036 - DNA, 25 bp, Homo sapien
ggggggatcgatgccatccaccttg

SEQ ID NO: 3520037 - DNA, 25 bp, Homo sapien
gggggatcgatgccatccaccttgg

SEQ ID NO: 3520038 - DNA, 25 bp, Homo sapien
gaagttggaagtctcgatgttgtga

SEQ ID NO: 3520039 - DNA, 25 bp, Homo sapien
tgttgtgatagtagaccacggaggt

SEQ ID NO: 3520040 - DNA, 25 bp, Homo sapien
catgaacgccatcccggctggcatg

SEQ ID NO: 3520041 - DNA, 25 bp, Homo sapien
atcccggctggcatgtacaggtgca

SEQ ID NO: 3520042 - DNA, 25 bp, Homo sapien
gactgtgaagaccttgaatggtggg

SEQ ID NO: 3520043 - DNA, 25 bp, Homo sapien
aatgaggccagagataggtggggct

SEQ ID NO: 3520044 - DNA, 25 bp, Homo sapien
accttgaatggtgggctgaggatct

SEQ ID NO: 3520045 - DNA, 25 bp, Homo sapien
ctgtgaagaccttgaatggtgggct

SEQ ID NO: 3520046 - DNA, 25 bp, Homo sapien
gaaatgaagccatgtgctgtggtgg

SEQ ID NO: 3520047 - DNA, 25 bp, Homo sapien
ctgcaatctcacacaccaggacgaa

SEQ ID NO: 3520048 - DNA, 25 bp, Homo sapien
catgtgctgtggtggatgtgcacct

SEQ ID NO: 3520049 - DNA, 25 bp, Homo sapien
tgcaatctcacacaccaggacgaag

SEQ ID NO: 3520050 - DNA, 25 bp, Homo sapien
ccaactttgcaagcaagggcgccgg

SEQ ID NO: 3520051 - DNA, 25 bp, Homo sapien
gctactttgcgcagagcctgagaag

SEQ ID NO: 3520052 - DNA, 25 bp, Homo sapien
ctgcgtcggcgagtcggagctactt

SEQ ID NO: 3520053 - DNA, 25 bp, Homo sapien
ggccgtggcgcccaactttgcaagc

SEQ ID NO: 3520054 - DNA, 25 bp, Homo sapien
ttccctcttccctaggcccagctgc

SEQ ID NO: 3520055 - DNA, 25 bp, Homo sapien
cggctcagcccggtgaaagcatagg

SEQ ID NO: 3520056 - DNA, 25 bp, Homo sapien
cataggggttagctgggcctccatc

SEQ ID NO: 3520057 - DNA, 25 bp, Homo sapien
gggtgacccggctccctaagctgcg

SEQ ID NO: 3520058 - DNA, 25 bp, Homo sapien
tgatcccatgggtcacaaacgtccg

SEQ ID NO: 3520059 - DNA, 25 bp, Homo sapien
cacaaacgtccgctgtgtttggcgc

SEQ ID NO: 3520060 - DNA, 25 bp, Homo sapien
tgaagggatgagctggtgtgcgagt

SEQ ID NO: 3520061 - DNA, 25 bp, Homo sapien
tgcagaagcaaaacttggtgatccc

SEQ ID NO: 3520062 - DNA, 25 bp, Homo sapien
agacgtgcggcaccacgttgagcgc

SEQ ID NO: 3520063 - DNA, 25 bp, Homo sapien
ctggtccacccggtaggcggccgag

SEQ ID NO: 3520064 - DNA, 25 bp, Homo sapien
acgttgagcgcgtccacaaagcagc

SEQ ID NO: 3520065 - DNA, 25 bp, Homo sapien
gatgaagagtaggaagacgtgcggc

SEQ ID NO: 3520066 - DNA, 25 bp, Homo sapien
gctccgctggctccgcgcgcctgcc

SEQ ID NO: 3520067 - DNA, 25 bp, Homo sapien
tcgggctcagctggctccgctggct

SEQ ID NO: 3520068 - DNA, 25 bp, Homo sapien
gctgggctcgggctcagctggctcc

SEQ ID NO: 3520069 - DNA, 25 bp, Homo sapien
gctcgggctcagctggctccgctgg

SEQ ID NO: 3520070 - DNA, 25 bp, Homo sapien
cagctccgccgcccggcccggccgt

SEQ ID NO: 3520071 - DNA, 25 bp, Homo sapien
cttgcagctccgccgcccggcccgg

SEQ ID NO: 3520072 - DNA, 25 bp, Homo sapien
ctccgccgcccggcccggccgtcag

SEQ ID NO: 3520073 - DNA, 25 bp, Homo sapien
tgcagctccgccgcccggcccggcc

SEQ ID NO: 3520074 - DNA, 25 bp, Homo sapien
ctcccagatgttgccggggtggctt

SEQ ID NO: 3520075 - DNA, 25 bp, Homo sapien
gcgaggaacccgaccggccctgcta

SEQ ID NO: 3520076 - DNA, 25 bp, Homo sapien
gccctgctacgcttgcgcccacctt

SEQ ID NO: 3520077 - DNA, 25 bp, Homo sapien
tccagatgtggaggcgcgtgctccc

SEQ ID NO: 3520078 - DNA, 25 bp, Homo sapien
tcagatgggaagattcgagggtgat

SEQ ID NO: 3520079 - DNA, 25 bp, Homo sapien
cacaaatgaccctgcagtgatttgc

SEQ ID NO: 3520080 - DNA, 25 bp, Homo sapien
tcactgttatcagtcgggggtcaga

SEQ ID NO: 3520081 - DNA, 25 bp, Homo sapien
tacccgtgggtgaaacaggtacaca

SEQ ID NO: 3520082 - DNA, 25 bp, Homo sapien
atggggcctgcagagtagtctgagc

SEQ ID NO: 3520083 - DNA, 25 bp, Homo sapien
tgcagagtagtctgagctggctcac

SEQ ID NO: 3520084 - DNA, 25 bp, Homo sapien
cctgcagagtagtctgagctggctc

SEQ ID NO: 3520085 - DNA, 25 bp, Homo sapien
gggcctgcagagtagtctgagctgg

SEQ ID NO: 3520086 - DNA, 25 bp, Homo sapien
tgtcattggccagcctgcaaccatc

SEQ ID NO: 3520087 - DNA, 25 bp, Homo sapien
agtggccagctgtgccacatacagg

SEQ ID NO: 3520088 - DNA, 25 bp, Homo sapien
ttctgtgcttgccgagaacctgctg

SEQ ID NO: 3520089 - DNA, 25 bp, Homo sapien
acccttgaccaacgaagagtctgtg

SEQ ID NO: 3520090 - DNA, 25 bp, Homo sapien
acagtcactgttcttcagtggtggg

SEQ ID NO: 3520091 - DNA, 25 bp, Homo sapien
gcagaacagtcactgttcttcagtg

SEQ ID NO: 3520092 - DNA, 25 bp, Homo sapien
tggtggggagaagtgttctgccaac

SEQ ID NO: 3520093 - DNA, 25 bp, Homo sapien
ctacccaacagcagaacagtcactg

SEQ ID NO: 3520094 - DNA, 25 bp, Homo sapien
tattaccaagttctcgggatccagc

SEQ ID NO: 3520095 - DNA, 25 bp, Homo sapien
tctttcagtcccacatggtagtcgc

SEQ ID NO: 3520096 - DNA, 25 bp, Homo sapien
tctctgagcgccagtaatttgaagg

SEQ ID NO: 3520097 - DNA, 25 bp, Homo sapien
tttctccagaaccaggttaggtgcc

SEQ ID NO: 3520098 - DNA, 25 bp, Homo sapien
cagagtaaggtttggagtgacaatc

SEQ ID NO: 3520099 - DNA, 25 bp, Homo sapien
ttttattaatgagctcagagtaagg

SEQ ID NO: 3520100 - DNA, 25 bp, Homo sapien
tccagtggggtcttattagggttca

SEQ ID NO: 3520101 - DNA, 25 bp, Homo sapien
caatcctggcagcaattagagcaga

SEQ ID NO: 3520102 - DNA, 25 bp, Homo sapien
tctctcaaggctgatccgaggcttt

SEQ ID NO: 3520103 - DNA, 25 bp, Homo sapien
ccttcagaagagtggcccgagctgt

SEQ ID NO: 3520104 - DNA, 25 bp, Homo sapien
gagctgttccttatctggccctggt

SEQ ID NO: 3520105 - DNA, 25 bp, Homo sapien
ttcagggccaaagggagtttgagat

SEQ ID NO: 3520106 - DNA, 25 bp, Homo sapien
gggtgcaggccccaagtggctacac

SEQ ID NO: 3520107 - DNA, 25 bp, Homo sapien
caagagtcctttgcaaaaggcaagt

SEQ ID NO: 3520108 - DNA, 25 bp, Homo sapien
gggggagtacccactctggcagcac

SEQ ID NO: 3520109 - DNA, 25 bp, Homo sapien
gagcaaggccccacaagggggagta

SEQ ID NO: 3520110 - DNA, 25 bp, Homo sapien
ccggccaagtgtcttgggagcatga

SEQ ID NO: 3520111 - DNA, 25 bp, Homo sapien
agcatgaggccctaatgttttggga

SEQ ID NO: 3520112 - DNA, 25 bp, Homo sapien
caaacaccagtttcacagccacctg

SEQ ID NO: 3520113 - DNA, 25 bp, Homo sapien
accaaacaccagtttcacagccacc

SEQ ID NO: 3520114 - DNA, 25 bp, Homo sapien
cacagggtgagaaacacatcctaca

SEQ ID NO: 3520115 - DNA, 25 bp, Homo sapien
ggttccacggtatatcccacagata

SEQ ID NO: 3520116 - DNA, 25 bp, Homo sapien
cgtttggtctaagcacggctcaggc

SEQ ID NO: 3520117 - DNA, 25 bp, Homo sapien
gccatgacagggcacaacaggacat

SEQ ID NO: 3520118 - DNA, 25 bp, Homo sapien
gtccaaagaacctgctgacagcgtg

SEQ ID NO: 3520119 - DNA, 25 bp, Homo sapien
cagtccaaagaacctgctgacagcg

SEQ ID NO: 3520120 - DNA, 25 bp, Homo sapien
tccagacgccagtccaaagaacctg

SEQ ID NO: 3520121 - DNA, 25 bp, Homo sapien
gccctgtggcccgcctgcctattca

SEQ ID NO: 3520122 - DNA, 25 bp, Homo sapien
ttgggggctttcagctacggaggag

SEQ ID NO: 3520123 - DNA, 25 bp, Homo sapien
cgtgtctgtgcacggcagcacggtc

SEQ ID NO: 3520124 - DNA, 25 bp, Homo sapien
ctgcaggaggaacccgtgtctgtgc

SEQ ID NO: 3520125 - DNA, 25 bp, Homo sapien
ggcagcacggtcttcaaggagcttt

SEQ ID NO: 3520126 - DNA, 25 bp, Homo sapien
cggcaaccacaaggtcgatccagtc

SEQ ID NO: 3520127 - DNA, 25 bp, Homo sapien
tcatcgtcatactcctttggggggc

SEQ ID NO: 3520128 - DNA, 25 bp, Homo sapien
agctcatcgtcatactcctttgggg

SEQ ID NO: 3520129 - DNA, 25 bp, Homo sapien
gctcatcgtcatactcctttggggg

SEQ ID NO: 3520130 - DNA, 25 bp, Homo sapien
ggagaagccgtgtgactctggggca

SEQ ID NO: 3520131 - DNA, 25 bp, Homo sapien
tctgccccggcactccatccccatt

SEQ ID NO: 3520132 - DNA, 25 bp, Homo sapien
actctggggcacactcagttggatg

SEQ ID NO: 3520133 - DNA, 25 bp, Homo sapien
ttggatggtgcatctgccccggcac

SEQ ID NO: 3520134 - DNA, 25 bp, Homo sapien
ttgccgttgattgccatgatctcgt

SEQ ID NO: 3520135 - DNA, 25 bp, Homo sapien
gatctcgtcccctttcacaatgcca

SEQ ID NO: 3520136 - DNA, 25 bp, Homo sapien
gttgattgccatgatctcgtcccct

SEQ ID NO: 3520137 - DNA, 25 bp, Homo sapien
tgattgccatgatctcgtccccttt

SEQ ID NO: 3520138 - DNA, 25 bp, Homo sapien
agcagctccccgctcatacacagca

SEQ ID NO: 3520139 - DNA, 25 bp, Homo sapien
atgggggagtccacaccgccttcca

SEQ ID NO: 3520140 - DNA, 25 bp, Homo sapien
tgggggagtccacaccgccttccag

SEQ ID NO: 3520141 - DNA, 25 bp, Homo sapien
gctccccgctcatacacagcagaaa

SEQ ID NO: 3520142 - DNA, 25 bp, Homo sapien
gtaggagccggacatccttccccat

SEQ ID NO: 3520143 - DNA, 25 bp, Homo sapien
aggagccggacatccttccccatga

SEQ ID NO: 3520144 - DNA, 25 bp, Homo sapien
tccttccccatgatctgctctgggg

SEQ ID NO: 3520145 - DNA, 25 bp, Homo sapien
tgcgtaggagccggacatccttccc

SEQ ID NO: 3520146 - DNA, 25 bp, Homo sapien
caaagccttcctcatatttccggaa

SEQ ID NO: 3520147 - DNA, 25 bp, Homo sapien
tcaaagccttcctcatatttccgga

SEQ ID NO: 3520148 - DNA, 25 bp, Homo sapien
catagagtaggggtcaaagccttcc

SEQ ID NO: 3520149 - DNA, 25 bp, Homo sapien
ttagggcaacacagcagagggtctt

SEQ ID NO: 3520150 - DNA, 25 bp, Homo sapien
gaagcaaagggagggctttagggca

SEQ ID NO: 3520151 - DNA, 25 bp, Homo sapien
gctttagggcaacacagcagagggt

SEQ ID NO: 3520152 - DNA, 25 bp, Homo sapien
gagggctttagggcaacacagcaga

SEQ ID NO: 3520153 - DNA, 25 bp, Homo sapien
cagtgacgtctagatggtctggaga

SEQ ID NO: 3520154 - DNA, 25 bp, Homo sapien
gactttagaggatcttgaccctgcc

SEQ ID NO: 3520155 - DNA, 25 bp, Homo sapien
acaggaggccggcagccctagcagc

SEQ ID NO: 3520156 - DNA, 25 bp, Homo sapien
ttcagcggcacaagcgtcaggggct

SEQ ID NO: 3520157 - DNA, 25 bp, Homo sapien
ccatccagctcaagagaaggctgtt

SEQ ID NO: 3520158 - DNA, 25 bp, Homo sapien
gggatgaagcccaaggtgtctccac

SEQ ID NO: 3520159 - DNA, 25 bp, Homo sapien
tgtctccacccagtgctctgacccc

SEQ ID NO: 3520160 - DNA, 25 bp, Homo sapien
tcttccaagtctccactggagcagg

SEQ ID NO: 3520161 - DNA, 25 bp, Homo sapien
tggcagtgtcctcatgtaatgctta

SEQ ID NO: 3520162 - DNA, 25 bp, Homo sapien
ggagcccacggacaacaagaagaaa

SEQ ID NO: 3520163 - DNA, 25 bp, Homo sapien
tggagggagcccacggacaacaaga

SEQ ID NO: 3520164 - DNA, 25 bp, Homo sapien
ggcagtgtcctcatgtaatgcttac

SEQ ID NO: 3520165 - DNA, 25 bp, Homo sapien
agattctgcggagcgcaggttggcc

SEQ ID NO: 3520166 - DNA, 25 bp, Homo sapien
cccagattctgcggagcgcaggttg

SEQ ID NO: 3520167 - DNA, 25 bp, Homo sapien
tctgcggagcgcaggttggcccttt

SEQ ID NO: 3520168 - DNA, 25 bp, Homo sapien
attctgcggagcgcaggttggccct

SEQ ID NO: 3520169 - DNA, 25 bp, Homo sapien
tgaggtggcacctgaacacacagtg

SEQ ID NO: 3520170 - DNA, 25 bp, Homo sapien
ggttccgggcacaagatgagcacca

SEQ ID NO: 3520171 - DNA, 25 bp, Homo sapien
cagaatgcaccaactaggttccggg

SEQ ID NO: 3520172 - DNA, 25 bp, Homo sapien
tatgtggccttcctcgggagtcaca

SEQ ID NO: 3520173 - DNA, 25 bp, Homo sapien
tgtctgaatgctgtctgataaacca

SEQ ID NO: 3520174 - DNA, 25 bp, Homo sapien
tgaatgctgtctgataaaccaccat

SEQ ID NO: 3520175 - DNA, 25 bp, Homo sapien
aatgctgtctgataaaccaccatcc

SEQ ID NO: 3520176 - DNA, 25 bp, Homo sapien
tctgaatgctgtctgataaaccacc

SEQ ID NO: 3520177 - DNA, 25 bp, Homo sapien
taaaggcctgctcaatgcccaaaga

SEQ ID NO: 3520178 - DNA, 25 bp, Homo sapien
gctgacgggacagttaaggcccaaa

SEQ ID NO: 3520179 - DNA, 25 bp, Homo sapien
catgacatggatgcatccgcaggct

SEQ ID NO: 3520180 - DNA, 25 bp, Homo sapien
aagatgctacccagttgttgtcaag

SEQ ID NO: 3520181 - DNA, 25 bp, Homo sapien
tcctctagagacaacctggagggga

SEQ ID NO: 3520182 - DNA, 25 bp, Homo sapien
tgctcctctagagacaacctggagg

SEQ ID NO: 3520183 - DNA, 25 bp, Homo sapien
ctgctcctctagagacaacctggag

SEQ ID NO: 3520184 - DNA, 25 bp, Homo sapien
gctcctctagagacaacctggaggg

SEQ ID NO: 3520185 - DNA, 25 bp, Homo sapien
tgtagatgaaattgggctcctggtg

SEQ ID NO: 3520186 - DNA, 25 bp, Homo sapien
ggcctgtagatgaaattgggctcct

SEQ ID NO: 3520187 - DNA, 25 bp, Homo sapien
ggctcctggtggaccatgacaggtt

SEQ ID NO: 3520188 - DNA, 25 bp, Homo sapien
cctggtggaccatgacaggtttgga

SEQ ID NO: 3520189 - DNA, 25 bp, Homo sapien
tttaagggctgtctctttggccaca

SEQ ID NO: 3520190 - DNA, 25 bp, Homo sapien
gctgttcctagttggtaggcacata

SEQ ID NO: 3520191 - DNA, 25 bp, Homo sapien
ggtgctatccagtgtcccttgtctt

SEQ ID NO: 3520192 - DNA, 25 bp, Homo sapien
tctcagtggccatgggtgctatcca

SEQ ID NO: 3520193 - DNA, 25 bp, Homo sapien
aaatgttgtgcaaggctaactcagc

SEQ ID NO: 3520194 - DNA, 25 bp, Homo sapien
taataaaaaccactggtcaggtgct

SEQ ID NO: 3520195 - DNA, 25 bp, Homo sapien
ctctgagagtctcccgctggaagct

SEQ ID NO: 3520196 - DNA, 25 bp, Homo sapien
tgcctttgcactgactcaagcctgg

SEQ ID NO: 3520197 - DNA, 25 bp, Homo sapien
cagcgccgagggcagtgggcgggtg

SEQ ID NO: 3520198 - DNA, 25 bp, Homo sapien
aggtcttgggtgggaacggatggcg

SEQ ID NO: 3520199 - DNA, 25 bp, Homo sapien
tcagtgcttcttccagcgccgaggg

SEQ ID NO: 3520200 - DNA, 25 bp, Homo sapien
gagttagtgggcttcccactgtggt

SEQ ID NO: 3520201 - DNA, 25 bp, Homo sapien
gctcacatggccagataagggaagg

SEQ ID NO: 3520202 - DNA, 25 bp, Homo sapien
gcgctcacatggccagataagggaa

SEQ ID NO: 3520203 - DNA, 25 bp, Homo sapien
aggcgctcacatggccagataaggg

SEQ ID NO: 3520204 - DNA, 25 bp, Homo sapien
ctcacatggccagataagggaagga

SEQ ID NO: 3520205 - DNA, 25 bp, Homo sapien
aacatgtccaaagggatgtcgtcca

SEQ ID NO: 3520206 - DNA, 25 bp, Homo sapien
gtccgcctgcgaagcgtctcaaggg

SEQ ID NO: 3520207 - DNA, 25 bp, Homo sapien
caaagggatgtcgtccaggtcagtg

SEQ ID NO: 3520208 - DNA, 25 bp, Homo sapien
tcttggggggatagtagaacatgtc

SEQ ID NO: 3520209 - DNA, 25 bp, Homo sapien
cagcaggagggtctatgtggaaaga

SEQ ID NO: 3520210 - DNA, 25 bp, Homo sapien
gacagcaggagggtctatgtggaaa

SEQ ID NO: 3520211 - DNA, 25 bp, Homo sapien
agacagcaggagggtctatgtggaa

SEQ ID NO: 3520212 - DNA, 25 bp, Homo sapien
acagcaggagggtctatgtggaaag

SEQ ID NO: 3520213 - DNA, 25 bp, Homo sapien
cagaggaaatctgctcgaggcgcgt

SEQ ID NO: 3520214 - DNA, 25 bp, Homo sapien
cgattcttcaaggtcttcccgctct

SEQ ID NO: 3520215 - DNA, 25 bp, Homo sapien
cccaatattgaatcttttccgattc

SEQ ID NO: 3520216 - DNA, 25 bp, Homo sapien
gaggcgcgtttgacagagcctctcc

SEQ ID NO: 3520217 - DNA, 25 bp, Homo sapien
tcctgggccagccggttgatcttta

SEQ ID NO: 3520218 - DNA, 25 bp, Homo sapien
ctgggccagccggttgatctttagc

SEQ ID NO: 3520219 - DNA, 25 bp, Homo sapien
tgggccagccggttgatctttagct

SEQ ID NO: 3520220 - DNA, 25 bp, Homo sapien
ggccagccggttgatctttagctgc

SEQ ID NO: 3520221 - DNA, 25 bp, Homo sapien
ttagaaatagtgtcgacagcacagc

SEQ ID NO: 3520222 - DNA, 25 bp, Homo sapien
tagatgtggcattgtttatatgaca

SEQ ID NO: 3520223 - DNA, 25 bp, Homo sapien
tagtgtcgacagcacagcacacggg

SEQ ID NO: 3520224 - DNA, 25 bp, Homo sapien
tatgacaaaggttagaaatagtgtc

SEQ ID NO: 3520225 - DNA, 25 bp, Homo sapien
ctgcttctctcatggggttgcaggg

SEQ ID NO: 3520226 - DNA, 25 bp, Homo sapien
gcttctctcatggggttgcagggaa

SEQ ID NO: 3520227 - DNA, 25 bp, Homo sapien
tgcttctctcatggggttgcaggga

SEQ ID NO: 3520228 - DNA, 25 bp, Homo sapien
gatatcatggccatggatacccact

SEQ ID NO: 3520229 - DNA, 25 bp, Homo sapien
tcatggccatggatacccacttgca

SEQ ID NO: 3520230 - DNA, 25 bp, Homo sapien
tatgcacagatatcatggccatgga

SEQ ID NO: 3520231 - DNA, 25 bp, Homo sapien
gggaatttatgcacagatatcatgg

SEQ ID NO: 3520232 - DNA, 25 bp, Homo sapien
caaagtcagcctgtcaagggaaaca

SEQ ID NO: 3520233 - DNA, 25 bp, Homo sapien
ggacaatgtgtgaaggaattcccag

SEQ ID NO: 3520234 - DNA, 25 bp, Homo sapien
aaagcgctggtcaagtgataacatc

SEQ ID NO: 3520235 - DNA, 25 bp, Homo sapien
aatgaggcatcctaagccaccaaag

SEQ ID NO: 3520236 - DNA, 25 bp, Homo sapien
gggcacatgcagagatattcctagg

SEQ ID NO: 3520237 - DNA, 25 bp, Homo sapien
tgcgtctggcacagctggtctcata

SEQ ID NO: 3520238 - DNA, 25 bp, Homo sapien
taggtacacccactccgataatttg

SEQ ID NO: 3520239 - DNA, 25 bp, Homo sapien
gctgatgcacacactgccagatggt

SEQ ID NO: 3520240 - DNA, 25 bp, Homo sapien
tgttgcctttgcaacagcaccctgc

SEQ ID NO: 3520241 - DNA, 25 bp, Homo sapien
caatgttgcctttgcaacagcaccc

SEQ ID NO: 3520242 - DNA, 25 bp, Homo sapien
atgttgcctttgcaacagcaccctg

SEQ ID NO: 3520243 - DNA, 25 bp, Homo sapien
aatgttgcctttgcaacagcaccct

SEQ ID NO: 3520244 - DNA, 25 bp, Homo sapien
gaacaggccaagtcacaccatttag

SEQ ID NO: 3520245 - DNA, 25 bp, Homo sapien
atggagatggagttagccttccaag

SEQ ID NO: 3520246 - DNA, 25 bp, Homo sapien
ccatttagtgttgataggacaagga

SEQ ID NO: 3520247 - DNA, 25 bp, Homo sapien
ccttccaagtgaacaggccaagtca

SEQ ID NO: 3520248 - DNA, 25 bp, Homo sapien
cttccggatggttgggaatttgcca

SEQ ID NO: 3520249 - DNA, 25 bp, Homo sapien
atttgccatcgtaacgataaaacca

SEQ ID NO: 3520250 - DNA, 25 bp, Homo sapien
gccatcgtaacgataaaaccatcca

SEQ ID NO: 3520251 - DNA, 25 bp, Homo sapien
catcgtaacgataaaaccatccaaa

SEQ ID NO: 3520252 - DNA, 25 bp, Homo sapien
tgggagctgggttcccaaggaatgc

SEQ ID NO: 3520253 - DNA, 25 bp, Homo sapien
agatgggagctgggttcccaaggaa

SEQ ID NO: 3520254 - DNA, 25 bp, Homo sapien
gggagctgggttcccaaggaatgca

SEQ ID NO: 3520255 - DNA, 25 bp, Homo sapien
gatgggagctgggttcccaaggaat

SEQ ID NO: 3520256 - DNA, 25 bp, Homo sapien
tgcagaacaggcctaagaccaccga

SEQ ID NO: 3520257 - DNA, 25 bp, Homo sapien
cagaacaggcctaagaccaccgaga

SEQ ID NO: 3520258 - DNA, 25 bp, Homo sapien
ttggttgcagaacaggcctaagacc

SEQ ID NO: 3520259 - DNA, 25 bp, Homo sapien
ggttgcagaacaggcctaagaccac

SEQ ID NO: 3520260 - DNA, 25 bp, Homo sapien
ggtgtctgcctagaactgttgttcg

SEQ ID NO: 3520261 - DNA, 25 bp, Homo sapien
tagtgcaggtcaagtcctccgcttt

SEQ ID NO: 3520262 - DNA, 25 bp, Homo sapien
aaactggcttgtctcatagtgcagg

SEQ ID NO: 3520263 - DNA, 25 bp, Homo sapien
ctgggacagctcttggaaggacagc

SEQ ID NO: 3520264 - DNA, 25 bp, Homo sapien
cctgctggaccagacactacctcct

SEQ ID NO: 3520265 - DNA, 25 bp, Homo sapien
tgagtgctggaacaggatgctgaaa

SEQ ID NO: 3520266 - DNA, 25 bp, Homo sapien
cctgagtgctggaacaggatgctga

SEQ ID NO: 3520267 - DNA, 25 bp, Homo sapien
ggaccagacactacctcctcagttg

SEQ ID NO: 3520268 - DNA, 25 bp, Homo sapien
aatattcgagccagcggttcagtgg

SEQ ID NO: 3520269 - DNA, 25 bp, Homo sapien
aaatattcgagccagcggttcagtg

SEQ ID NO: 3520270 - DNA, 25 bp, Homo sapien
tctaaatattcgagccagcggttca

SEQ ID NO: 3520271 - DNA, 25 bp, Homo sapien
aatatctaaatattcgagccagcgg

SEQ ID NO: 3520272 - DNA, 25 bp, Homo sapien
gagctttacagactctattggcccc

SEQ ID NO: 3520273 - DNA, 25 bp, Homo sapien
cctgggcattgagtcctgtcgtcta

SEQ ID NO: 3520274 - DNA, 25 bp, Homo sapien
tctaggctttgtgtacagtgcttgg

SEQ ID NO: 3520275 - DNA, 25 bp, Homo sapien
gcaacagctgatctaccagcctggg

SEQ ID NO: 3520276 - DNA, 25 bp, Homo sapien
ggcgggcagggtaaagcagagcagc

SEQ ID NO: 3520277 - DNA, 25 bp, Homo sapien
ggaggcgggcagggtaaagcagagc

SEQ ID NO: 3520278 - DNA, 25 bp, Homo sapien
gcgggcagggtaaagcagagcagcc

SEQ ID NO: 3520279 - DNA, 25 bp, Homo sapien
aggcgggcagggtaaagcagagcag

SEQ ID NO: 3520280 - DNA, 25 bp, Homo sapien
tgcgggctcgagctcaggttccact

SEQ ID NO: 3520281 - DNA, 25 bp, Homo sapien
aggtcatctgcgggctcgagctcag

SEQ ID NO: 3520282 - DNA, 25 bp, Homo sapien
atctgcgggctcgagctcaggttcc

SEQ ID NO: 3520283 - DNA, 25 bp, Homo sapien
tcatctgcgggctcgagctcaggtt

SEQ ID NO: 3520284 - DNA, 25 bp, Homo sapien
gagtttccagcttggactctggcct

SEQ ID NO: 3520285 - DNA, 25 bp, Homo sapien
taggactctggaaggtagtataccc

SEQ ID NO: 3520286 - DNA, 25 bp, Homo sapien
cagaacttgcccattggcctatgca

SEQ ID NO: 3520287 - DNA, 25 bp, Homo sapien
agtatacccgtttgcttgtgagctg

SEQ ID NO: 3520288 - DNA, 25 bp, Homo sapien
ttaggcaagagtagctgttcctttg

SEQ ID NO: 3520289 - DNA, 25 bp, Homo sapien
ctcagcagtgatggttttaggcaag

SEQ ID NO: 3520290 - DNA, 25 bp, Homo sapien
ggtactgggtgtacctcagcagtga

SEQ ID NO: 3520291 - DNA, 25 bp, Homo sapien
ggttttaggcaagagtagctgttcc

SEQ ID NO: 3520292 - DNA, 25 bp, Homo sapien
tgttccatctccttccggtatctct

SEQ ID NO: 3520293 - DNA, 25 bp, Homo sapien
ctgccttctgggcaatttcttttct

SEQ ID NO: 3520294 - DNA, 25 bp, Homo sapien
atctccttccggtatctctcatttt

SEQ ID NO: 3520295 - DNA, 25 bp, Homo sapien
ctctcattttcctctgctgccttct

SEQ ID NO: 3520296 - DNA, 25 bp, Homo sapien
gccgctcccggtctgtcatgaacag

SEQ ID NO: 3520297 - DNA, 25 bp, Homo sapien
tcttgttggactccatcgccagccg

SEQ ID NO: 3520298 - DNA, 25 bp, Homo sapien
tgcagctcacgctgccgcgcctctg

SEQ ID NO: 3520299 - DNA, 25 bp, Homo sapien
cagccgcttctgcatgagaagctcc

SEQ ID NO: 3520300 - DNA, 25 bp, Homo sapien
tgggcagaagtcctctcgctctgct

SEQ ID NO: 3520301 - DNA, 25 bp, Homo sapien
aatccctgacccaaacttcttgctg

SEQ ID NO: 3520302 - DNA, 25 bp, Homo sapien
gggaacctggggatcccctgacaca

SEQ ID NO: 3520303 - DNA, 25 bp, Homo sapien
tcagcaccatcaggcactgcggctc

SEQ ID NO: 3520304 - DNA, 25 bp, Homo sapien
agctacaatggagatggtcaggctg

SEQ ID NO: 3520305 - DNA, 25 bp, Homo sapien
gctgcggctactcttcagcacattt

SEQ ID NO: 3520306 - DNA, 25 bp, Homo sapien
tgcggctactcttcagcacatttac

SEQ ID NO: 3520307 - DNA, 25 bp, Homo sapien
ctacaatggagatggtcaggctgcg

SEQ ID NO: 3520308 - DNA, 25 bp, Homo sapien
atccaggttagagaagtcgacgcca

SEQ ID NO: 3520309 - DNA, 25 bp, Homo sapien
ggttagagaagtcgacgccattgac

SEQ ID NO: 3520310 - DNA, 25 bp, Homo sapien
gaagtcgacgccattgacttcgaca

SEQ ID NO: 3520311 - DNA, 25 bp, Homo sapien
ccattgacttcgacaatctggtccc

SEQ ID NO: 3520312 - DNA, 25 bp, Homo sapien
ggctgataaagatgccaggcttctg

SEQ ID NO: 3520313 - DNA, 25 bp, Homo sapien
cacatggctgataaagatgccaggc

SEQ ID NO: 3520314 - DNA, 25 bp, Homo sapien
catggctgataaagatgccaggctt

SEQ ID NO: 3520315 - DNA, 25 bp, Homo sapien
gagccaggtttcacatggctgataa

SEQ ID NO: 3520316 - DNA, 25 bp, Homo sapien
ccaaggcctcgggagcctaccaggc

SEQ ID NO: 3520317 - DNA, 25 bp, Homo sapien
caaggcctcgggagcctaccaggct

SEQ ID NO: 3520318 - DNA, 25 bp, Homo sapien
agccaaggcctcgggagcctaccag

SEQ ID NO: 3520319 - DNA, 25 bp, Homo sapien
gccaaggcctcgggagcctaccagg

SEQ ID NO: 3520320 - DNA, 25 bp, Homo sapien
ctgagggtgcatctctagagcaagc

SEQ ID NO: 3520321 - DNA, 25 bp, Homo sapien
tgctgccccacagcggtgtgctggc

SEQ ID NO: 3520322 - DNA, 25 bp, Homo sapien
accggccacccctccttgaagatga

SEQ ID NO: 3520323 - DNA, 25 bp, Homo sapien
gccagatcatcattccgtccctggg

SEQ ID NO: 3520324 - DNA, 25 bp, Homo sapien
ccagattccgacacaaactgatcca

SEQ ID NO: 3520325 - DNA, 25 bp, Homo sapien
tccgacacaaactgatccacatact

SEQ ID NO: 3520326 - DNA, 25 bp, Homo sapien
gacacaaactgatccacatactgcc

SEQ ID NO: 3520327 - DNA, 25 bp, Homo sapien
gattccgacacaaactgatccacat

SEQ ID NO: 3520328 - DNA, 25 bp, Homo sapien
cttttcacggggatcaggccgatgt

SEQ ID NO: 3520329 - DNA, 25 bp, Homo sapien
tctcactttgatggacacagttttc

SEQ ID NO: 3520330 - DNA, 25 bp, Homo sapien
gatggaatatccattgatccggacg

SEQ ID NO: 3520331 - DNA, 25 bp, Homo sapien
cctcctcatgggtacaggaggagat

SEQ ID NO: 3520332 - DNA, 25 bp, Homo sapien
tcttggttcgaatgaggttgatgac

SEQ ID NO: 3520333 - DNA, 25 bp, Homo sapien
gaataagccttgatctcaaccaacc

SEQ ID NO: 3520334 - DNA, 25 bp, Homo sapien
atgctcccggactgctctccggaaa

SEQ ID NO: 3520335 - DNA, 25 bp, Homo sapien
gctcccggactgctctccggaaaag

SEQ ID NO: 3520336 - DNA, 25 bp, Homo sapien
cctggaataagccttgatctcaacc

SEQ ID NO: 3520337 - DNA, 25 bp, Homo sapien
gcccagaaccccagtcggaatgatt

SEQ ID NO: 3520338 - DNA, 25 bp, Homo sapien
cagaaccccagtcggaatgattccc

SEQ ID NO: 3520339 - DNA, 25 bp, Homo sapien
gaaccccagtcggaatgattcccac

SEQ ID NO: 3520340 - DNA, 25 bp, Homo sapien
tgcccagaaccccagtcggaatgat

SEQ ID NO: 3520341 - DNA, 25 bp, Homo sapien
cctggctcaggttgcaggatcaact

SEQ ID NO: 3520342 - DNA, 25 bp, Homo sapien
ccgtcagctagagaaagggccgata

SEQ ID NO: 3520343 - DNA, 25 bp, Homo sapien
caagggccacgatgatataacgatc

SEQ ID NO: 3520344 - DNA, 25 bp, Homo sapien
tataacgatctgagggacagcggca

SEQ ID NO: 3520345 - DNA, 25 bp, Homo sapien
ccacgcacactcaggccgaggcctt

SEQ ID NO: 3520346 - DNA, 25 bp, Homo sapien
tggagcccgacgctgtctgcctgac

SEQ ID NO: 3520347 - DNA, 25 bp, Homo sapien
gggtgcagacggtccagacgcacct

SEQ ID NO: 3520348 - DNA, 25 bp, Homo sapien
ctgtctgcctgaccgcctttgatga

SEQ ID NO: 3520349 - DNA, 25 bp, Homo sapien
gagcgccggggggtcagctgatcat

SEQ ID NO: 3520350 - DNA, 25 bp, Homo sapien
gcgccggggggtcagctgatcatat

SEQ ID NO: 3520351 - DNA, 25 bp, Homo sapien
gccggggggtcagctgatcatattc

SEQ ID NO: 3520352 - DNA, 25 bp, Homo sapien
tggagcgccggggggtcagctgatc

SEQ ID NO: 3520353 - DNA, 25 bp, Homo sapien
ggatcagcggccgaatggcatcaaa

SEQ ID NO: 3520354 - DNA, 25 bp, Homo sapien
agacggctgggttcattgatgacca

SEQ ID NO: 3520355 - DNA, 25 bp, Homo sapien
gcatcaaacagaggcagacggctgg

SEQ ID NO: 3520356 - DNA, 25 bp, Homo sapien
ttcaggtctcccacgagcacggcca

SEQ ID NO: 3520357 - DNA, 25 bp, Homo sapien
catcatagagatagtccttctctgc

SEQ ID NO: 3520358 - DNA, 25 bp, Homo sapien
cacatcatagagatagtccttctct

SEQ ID NO: 3520359 - DNA, 25 bp, Homo sapien
tagagatagtccttctctgcatcat

SEQ ID NO: 3520360 - DNA, 25 bp, Homo sapien
catagagatagtccttctctgcatc

SEQ ID NO: 3520361 - DNA, 25 bp, Homo sapien
agcacccgcccccatagcagacctc

SEQ ID NO: 3520362 - DNA, 25 bp, Homo sapien
gaccccaatgcatcagacctatgca

SEQ ID NO: 3520363 - DNA, 25 bp, Homo sapien
gaaaatccaatagcagaatcacagc

SEQ ID NO: 3520364 - DNA, 25 bp, Homo sapien
tctgaccccaatgcatcagacctat

SEQ ID NO: 3520365 - DNA, 25 bp, Homo sapien
atggtggctgtagtgccggataaat

SEQ ID NO: 3520366 - DNA, 25 bp, Homo sapien
gtagtgccggataaatgctttcagg

SEQ ID NO: 3520367 - DNA, 25 bp, Homo sapien
tgggccactcgcttagatagcacat

SEQ ID NO: 3520368 - DNA, 25 bp, Homo sapien
aaggatttgggccactcgcttagat

SEQ ID NO: 3520369 - DNA, 25 bp, Homo sapien
tgggttctgtccactagtcagtttc

SEQ ID NO: 3520370 - DNA, 25 bp, Homo sapien
agtcagtttcatggccactccttcc

SEQ ID NO: 3520371 - DNA, 25 bp, Homo sapien
ttcactctgtcttgtcctgacctta

SEQ ID NO: 3520372 - DNA, 25 bp, Homo sapien
ttgtcctgaccttagctgggttctg

SEQ ID NO: 3520373 - DNA, 25 bp, Homo sapien
taagtaatgactgttgcgatgagga

SEQ ID NO: 3520374 - DNA, 25 bp, Homo sapien
ctgggccttgcctagcgcatggcgc

SEQ ID NO: 3520375 - DNA, 25 bp, Homo sapien
cagttcctggatgatccccaacctg

SEQ ID NO: 3520376 - DNA, 25 bp, Homo sapien
gtaaatttctcccagcatgtctgtg

SEQ ID NO: 3520377 - DNA, 25 bp, Homo sapien
tgtgtgaaacctggccacttccaga

SEQ ID NO: 3520378 - DNA, 25 bp, Homo sapien
gactcagaggcatcctaagacttgg

SEQ ID NO: 3520379 - DNA, 25 bp, Homo sapien
tggatctctttgatggccctctctg

SEQ ID NO: 3520380 - DNA, 25 bp, Homo sapien
tgaatcattctcgaaatgccctgtg

SEQ ID NO: 3520381 - DNA, 25 bp, Homo sapien
gtctccacatgcctcaacagccctg

SEQ ID NO: 3520382 - DNA, 25 bp, Homo sapien
actgtctccacatgcctcaacagcc

SEQ ID NO: 3520383 - DNA, 25 bp, Homo sapien
tctccacatgcctcaacagccctga

SEQ ID NO: 3520384 - DNA, 25 bp, Homo sapien
ctgtctccacatgcctcaacagccc

SEQ ID NO: 3520385 - DNA, 25 bp, Homo sapien
tatgccggaattctcgggccacttt

SEQ ID NO: 3520386 - DNA, 25 bp, Homo sapien
tgccggaattctcgggccacttttc

SEQ ID NO: 3520387 - DNA, 25 bp, Homo sapien
cttatgccggaattctcgggccact

SEQ ID NO: 3520388 - DNA, 25 bp, Homo sapien
attctcgggccacttttcggtccat

SEQ ID NO: 3520389 - DNA, 25 bp, Homo sapien
agctgcgtcgttgcacgacccgttc

SEQ ID NO: 3520390 - DNA, 25 bp, Homo sapien
aggtccagctgcgtcgttgcacgac

SEQ ID NO: 3520391 - DNA, 25 bp, Homo sapien
gccaggtccagctgcgtcgttgcac

SEQ ID NO: 3520392 - DNA, 25 bp, Homo sapien
tgcacgacccgttccttcgggtgcc

SEQ ID NO: 3520393 - DNA, 25 bp, Homo sapien
ccctcgtgtccctatgggagtcctg

SEQ ID NO: 3520394 - DNA, 25 bp, Homo sapien
tggccctgcgctcaagtcctccggt

SEQ ID NO: 3520395 - DNA, 25 bp, Homo sapien
agtcctggcgtctgcgctctgctgg

SEQ ID NO: 3520396 - DNA, 25 bp, Homo sapien
ggagtcctggcgtctgcgctctgct

SEQ ID NO: 3520397 - DNA, 25 bp, Homo sapien
ttagcacttagggtgggataggcca

SEQ ID NO: 3520398 - DNA, 25 bp, Homo sapien
gctcccatccgtatttctggcatca

SEQ ID NO: 3520399 - DNA, 25 bp, Homo sapien
tggcatcagcgaccccagggcttta

SEQ ID NO: 3520400 - DNA, 25 bp, Homo sapien
cccagggctttagcacttagggtgg

SEQ ID NO: 3520401 - DNA, 25 bp, Homo sapien
gaagggtttccacacttggcaggga

SEQ ID NO: 3520402 - DNA, 25 bp, Homo sapien
agtaatctgatggaaggtgccttcc

SEQ ID NO: 3520403 - DNA, 25 bp, Homo sapien
tccagcctgcttaatcacattgaac

SEQ ID NO: 3520404 - DNA, 25 bp, Homo sapien
cttgtagttgaagtggctccagcct

SEQ ID NO: 3520405 - DNA, 25 bp, Homo sapien
ggcctgcggcctgcacacggcccat

SEQ ID NO: 3520406 - DNA, 25 bp, Homo sapien
gtgggatcctggcagaggtgcccta

SEQ ID NO: 3520407 - DNA, 25 bp, Homo sapien
gcagcccacgcctccacgacagctg

SEQ ID NO: 3520408 - DNA, 25 bp, Homo sapien
ggcaagaacatagatcagtgggatc

SEQ ID NO: 3520409 - DNA, 25 bp, Homo sapien
atcctgagccttgctccaatttcaa

SEQ ID NO: 3520410 - DNA, 25 bp, Homo sapien
atttcaaagctttctctggccccag

SEQ ID NO: 3520411 - DNA, 25 bp, Homo sapien
ctgagccttgctccaatttcaaagc

SEQ ID NO: 3520412 - DNA, 25 bp, Homo sapien
tcatcctgagccttgctccaatttc

SEQ ID NO: 3520413 - DNA, 25 bp, Homo sapien
ggctgctgacagatcctgatggtcc

SEQ ID NO: 3520414 - DNA, 25 bp, Homo sapien
acagatcctgatggtccgcagcctg

SEQ ID NO: 3520415 - DNA, 25 bp, Homo sapien
tgctgacagatcctgatggtccgca

SEQ ID NO: 3520416 - DNA, 25 bp, Homo sapien
tgacagatcctgatggtccgcagcc

SEQ ID NO: 3520417 - DNA, 25 bp, Homo sapien
tgcaattgccatagtcagaaacctg

SEQ ID NO: 3520418 - DNA, 25 bp, Homo sapien
gatgaggcccaaaacaagctctcag

SEQ ID NO: 3520419 - DNA, 25 bp, Homo sapien
gggcctcctgatatctcctcttagg

SEQ ID NO: 3520420 - DNA, 25 bp, Homo sapien
ttaacacgatccgaaccacagctgt

SEQ ID NO: 3520421 - DNA, 25 bp, Homo sapien
ccacaaaccagggtaaatgatgtca

SEQ ID NO: 3520422 - DNA, 25 bp, Homo sapien
cacaaaccagggtaaatgatgtcat

SEQ ID NO: 3520423 - DNA, 25 bp, Homo sapien
accacaaaccagggtaaatgatgtc

SEQ ID NO: 3520424 - DNA, 25 bp, Homo sapien
gaccacaaaccagggtaaatgatgt

SEQ ID NO: 3520425 - DNA, 25 bp, Homo sapien
tcttccccttgaatgctatagaggc

SEQ ID NO: 3520426 - DNA, 25 bp, Homo sapien
gacctgcggtctaagccatatggct

SEQ ID NO: 3520427 - DNA, 25 bp, Homo sapien
agttcttcaaggtactccccactca

SEQ ID NO: 3520428 - DNA, 25 bp, Homo sapien
ggtgctccatagcacaatggcatgg

SEQ ID NO: 3520429 - DNA, 25 bp, Homo sapien
cttcgttgtaataattgttatacat

SEQ ID NO: 3520430 - DNA, 25 bp, Homo sapien
ctccttcgttgtaataattgttata

SEQ ID NO: 3520431 - DNA, 25 bp, Homo sapien
ccttcgttgtaataattgttataca

SEQ ID NO: 3520432 - DNA, 25 bp, Homo sapien
tccttcgttgtaataattgttatac

SEQ ID NO: 3520433 - DNA, 25 bp, Homo sapien
tgaatcctacgtaagtgggtgtttg

SEQ ID NO: 3520434 - DNA, 25 bp, Homo sapien
gtatctgaatcctacgtaagtgggt

SEQ ID NO: 3520435 - DNA, 25 bp, Homo sapien
gtgtttgaatccagatcctgtatct

SEQ ID NO: 3520436 - DNA, 25 bp, Homo sapien
gaatccagatcctgtatctgaatcc

SEQ ID NO: 3520437 - DNA, 25 bp, Homo sapien
tacagacggtatgctggggcccaca

SEQ ID NO: 3520438 - DNA, 25 bp, Homo sapien
ctatacagacggtatgctggggccc

SEQ ID NO: 3520439 - DNA, 25 bp, Homo sapien
acagacggtatgctggggcccacac

SEQ ID NO: 3520440 - DNA, 25 bp, Homo sapien
tatacagacggtatgctggggccca

SEQ ID NO: 3520441 - DNA, 25 bp, Homo sapien
gctgccctgtttttcagagacgtca

SEQ ID NO: 3520442 - DNA, 25 bp, Homo sapien
gcatccacaggtatgacccagaaag

SEQ ID NO: 3520443 - DNA, 25 bp, Homo sapien
tgactcagaactatcaacaaactga

SEQ ID NO: 3520444 - DNA, 25 bp, Homo sapien
gatggccaaataacactggcatagc

SEQ ID NO: 3520445 - DNA, 25 bp, Homo sapien
gctgccttggctagctcagaccctg

SEQ ID NO: 3520446 - DNA, 25 bp, Homo sapien
accctacgccagcggctaaaagctg

SEQ ID NO: 3520447 - DNA, 25 bp, Homo sapien
aaagctgccttggctagctcagacc

SEQ ID NO: 3520448 - DNA, 25 bp, Homo sapien
ccaccctacgccagcggctaaaagc

SEQ ID NO: 3520449 - DNA, 25 bp, Homo sapien
caacccgcaagtgagaggcatggag

SEQ ID NO: 3520450 - DNA, 25 bp, Homo sapien
gagccagaagattcgaactgaagtt

SEQ ID NO: 3520451 - DNA, 25 bp, Homo sapien
agctggagccgaagtcatgatctag

SEQ ID NO: 3520452 - DNA, 25 bp, Homo sapien
cctgggaccacctgcgaagatcctg

SEQ ID NO: 3520453 - DNA, 25 bp, Homo sapien
gcggccccgcccgacaactggcttc

SEQ ID NO: 3520454 - DNA, 25 bp, Homo sapien
ggccccgcccgacaactggcttcat

SEQ ID NO: 3520455 - DNA, 25 bp, Homo sapien
taatgctgtgtgaccgccgcggccc

SEQ ID NO: 3520456 - DNA, 25 bp, Homo sapien
gggctaatgctgtgtgaccgccgcg

SEQ ID NO: 3520457 - DNA, 25 bp, Homo sapien
ggctcgttagccccgccggcgtgtg

SEQ ID NO: 3520458 - DNA, 25 bp, Homo sapien
ctgtgggctcgttagccccgccggc

SEQ ID NO: 3520459 - DNA, 25 bp, Homo sapien
tgtgggctcgttagccccgccggcg

SEQ ID NO: 3520460 - DNA, 25 bp, Homo sapien
tcgttagccccgccggcgtgtgcgc

SEQ ID NO: 3520461 - DNA, 25 bp, Homo sapien
tcccttttcctagagctcaggagcc

SEQ ID NO: 3520462 - DNA, 25 bp, Homo sapien
cccttttcctagagctcaggagcca

SEQ ID NO: 3520463 - DNA, 25 bp, Homo sapien
ctccaactgagtcctgaggtttggg

SEQ ID NO: 3520464 - DNA, 25 bp, Homo sapien
ggtggctgcctccaatacgtggcgc

SEQ ID NO: 3520465 - DNA, 25 bp, Homo sapien
gcctccaatacgtggcgcccagagt

SEQ ID NO: 3520466 - DNA, 25 bp, Homo sapien
tggtttctccaactgagtcctgagg

SEQ ID NO: 3520467 - DNA, 25 bp, Homo sapien
gggagtttgtggcgtgcgttctgtg

SEQ ID NO: 3520468 - DNA, 25 bp, Homo sapien
agcatgcattctgtgagaagcgtgc

SEQ ID NO: 3520469 - DNA, 25 bp, Homo sapien
gcagcatgcattctgtgagaagcgt

SEQ ID NO: 3520470 - DNA, 25 bp, Homo sapien
ctgtgagaagcgtgcagggagtttg

SEQ ID NO: 3520471 - DNA, 25 bp, Homo sapien
agcactgtatgtgacttgtctgcag

SEQ ID NO: 3520472 - DNA, 25 bp, Homo sapien
tgtatattgtgtgagaggtgtgcac

SEQ ID NO: 3520473 - DNA, 25 bp, Homo sapien
tgtgcacagtgtaaggtgagcactg

SEQ ID NO: 3520474 - DNA, 25 bp, Homo sapien
tgtacagggagcgtgcactgtatat

SEQ ID NO: 3520475 - DNA, 25 bp, Homo sapien
tgcccagggggcccgccatctcctc

SEQ ID NO: 3520476 - DNA, 25 bp, Homo sapien
ctgcccagggggcccgccatctcct

SEQ ID NO: 3520477 - DNA, 25 bp, Homo sapien
gagcgcgaatttcccggccctgtct

SEQ ID NO: 3520478 - DNA, 25 bp, Homo sapien
ccccaaaagctttgtgccgatttct

SEQ ID NO: 3520479 - DNA, 25 bp, Homo sapien
gaccacctcacagaggagcgcgaat

SEQ ID NO: 3520480 - DNA, 25 bp, Homo sapien
tttctccattttcccgcggagatgg

SEQ ID NO: 3520481 - DNA, 25 bp, Homo sapien
gagcgagcgcatcgtgatcaacgtg

SEQ ID NO: 3520482 - DNA, 25 bp, Homo sapien
gcgtcttcgcgcacatcctgaacta

SEQ ID NO: 3520483 - DNA, 25 bp, Homo sapien
acttcgactatgacccgcgtgctga

SEQ ID NO: 3520484 - DNA, 25 bp, Homo sapien
agctggagatgaccaagcgcctggc

SEQ ID NO: 3520485 - DNA, 25 bp, Homo sapien
gagatggtgggtcccatacacggtt

SEQ ID NO: 3520486 - DNA, 25 bp, Homo sapien
tctgcatggagggccgtaatgaggg

SEQ ID NO: 3520487 - DNA, 25 bp, Homo sapien
gcaggagatggtgggtcccatacac

SEQ ID NO: 3520488 - DNA, 25 bp, Homo sapien
tgggtcccatacacggttctctgag

SEQ ID NO: 3520489 - DNA, 25 bp, Homo sapien
gatcgagaacgttcgcaatggcacg

SEQ ID NO: 3520490 - DNA, 25 bp, Homo sapien
gaacatccccatcggcttctggtgg

SEQ ID NO: 3520491 - DNA, 25 bp, Homo sapien
tccttacctacatcgagggcgtctg

SEQ ID NO: 3520492 - DNA, 25 bp, Homo sapien
tatggagacatgtacccgcagacgt

SEQ ID NO: 3520493 - DNA, 25 bp, Homo sapien
gcactgtacgtgaaatgctttgcca

SEQ ID NO: 3520494 - DNA, 25 bp, Homo sapien
gatttgtcgagaaacgcactgtacg

SEQ ID NO: 3520495 - DNA, 25 bp, Homo sapien
ccagtcacatggtgtcagagttacc

SEQ ID NO: 3520496 - DNA, 25 bp, Homo sapien
tgccatcttgtacgaaagacttttt

SEQ ID NO: 3520497 - DNA, 25 bp, Homo sapien
aaagccactttattaaagattctct

SEQ ID NO: 3520498 - DNA, 25 bp, Homo sapien
aagccactttattaaagattctcta

SEQ ID NO: 3520499 - DNA, 25 bp, Homo sapien
tcctcgatggcatctggggaaaggt

SEQ ID NO: 3520500 - DNA, 25 bp, Homo sapien
gtcagattggctttgggttgaagtt

SEQ ID NO: 3520501 - DNA, 25 bp, Homo sapien
tgtcctcgatggcatctggggaaag

SEQ ID NO: 3520502 - DNA, 25 bp, Homo sapien
tctggaccagtcagattggctttgg

SEQ ID NO: 3520503 - DNA, 25 bp, Homo sapien
acaaggagtcctgacgatgacagca

SEQ ID NO: 3520504 - DNA, 25 bp, Homo sapien
agggccaaggagtggccagccccac

SEQ ID NO: 3520505 - DNA, 25 bp, Homo sapien
gggcccagacgttggcttcagtgcc

SEQ ID NO: 3520506 - DNA, 25 bp, Homo sapien
gcagctggcagagggccaaggagtg

SEQ ID NO: 3520507 - DNA, 25 bp, Homo sapien
ccatgctcattccagccccaagagt

SEQ ID NO: 3520508 - DNA, 25 bp, Homo sapien
attccagccccaagagtaacacact

SEQ ID NO: 3520509 - DNA, 25 bp, Homo sapien
atgctcattccagccccaagagtaa

SEQ ID NO: 3520510 - DNA, 25 bp, Homo sapien
gctcattccagccccaagagtaaca

SEQ ID NO: 3520511 - DNA, 25 bp, Homo sapien
gtatgggctttgtgcccggccctgg

SEQ ID NO: 3520512 - DNA, 25 bp, Homo sapien
gagtggcaccagctgaccgtcagca

SEQ ID NO: 3520513 - DNA, 25 bp, Homo sapien
ctggtatgggctttgtgcccggccc

SEQ ID NO: 3520514 - DNA, 25 bp, Homo sapien
agtggcaccagctgaccgtcagcag

SEQ ID NO: 3520515 - DNA, 25 bp, Homo sapien
tgtgtgataatggtacgtaggtccc

SEQ ID NO: 3520516 - DNA, 25 bp, Homo sapien
ggtccccactgacttcatagggttg

SEQ ID NO: 3520517 - DNA, 25 bp, Homo sapien
cacacaactgtgtgataatggtacg

SEQ ID NO: 3520518 - DNA, 25 bp, Homo sapien
taatggtacgtaggtccccactgac

SEQ ID NO: 3520519 - DNA, 25 bp, Homo sapien
gttgacggagatctgctttgctggt

SEQ ID NO: 3520520 - DNA, 25 bp, Homo sapien
acggagatctgctttgctggtcctg

SEQ ID NO: 3520521 - DNA, 25 bp, Homo sapien
tgacggagatctgctttgctggtcc

SEQ ID NO: 3520522 - DNA, 25 bp, Homo sapien
ctggttgacggagatctgctttgct

SEQ ID NO: 3520523 - DNA, 25 bp, Homo sapien
cagggttagatctggcaggttctgc

SEQ ID NO: 3520524 - DNA, 25 bp, Homo sapien
caaatctgacaagcaatggtaaagc

SEQ ID NO: 3520525 - DNA, 25 bp, Homo sapien
tcagggcattgcatcaaatctgaca

SEQ ID NO: 3520526 - DNA, 25 bp, Homo sapien
ggcttcatgtagaatggcagttcat

SEQ ID NO: 3520527 - DNA, 25 bp, Homo sapien
ctaagctcatctcctttgaaagggt

SEQ ID NO: 3520528 - DNA, 25 bp, Homo sapien
taagctcatctcctttgaaagggta

SEQ ID NO: 3520529 - DNA, 25 bp, Homo sapien
tacatgccgaaattgagcatccagg

SEQ ID NO: 3520530 - DNA, 25 bp, Homo sapien
caaatgccagccctaggagcttata

SEQ ID NO: 3520531 - DNA, 25 bp, Homo sapien
aattgagcatccaggttggctttag

SEQ ID NO: 3520532 - DNA, 25 bp, Homo sapien
cctaggagcttatatacatgccgaa

SEQ ID NO: 3520533 - DNA, 25 bp, Homo sapien
tgtgttacaggtatgagtgtgtgtt

SEQ ID NO: 3520534 - DNA, 25 bp, Homo sapien
atgcgtgtgtgttacaggtatgagt

SEQ ID NO: 3520535 - DNA, 25 bp, Homo sapien
tttctaccaatccacagattctcac

SEQ ID NO: 3520536 - DNA, 25 bp, Homo sapien
gcctctttctaccaatccacagatt

SEQ ID NO: 3520537 - DNA, 25 bp, Homo sapien
gagctccacagatggcctgcaccgg

SEQ ID NO: 3520538 - DNA, 25 bp, Homo sapien
taagccggtacgcattcatgtgagc

SEQ ID NO: 3520539 - DNA, 25 bp, Homo sapien
gcagcaggagtctttccgagaagag

SEQ ID NO: 3520540 - DNA, 25 bp, Homo sapien
ccttggaatagtgagcagagctgtg

SEQ ID NO: 3520541 - DNA, 25 bp, Homo sapien
tgtgcccataggctaaaatcaaact

SEQ ID NO: 3520542 - DNA, 25 bp, Homo sapien
cagctggtatttcggttcccctcgg

SEQ ID NO: 3520543 - DNA, 25 bp, Homo sapien
cctctagtacttctctcagctggta

SEQ ID NO: 3520544 - DNA, 25 bp, Homo sapien
ttgaggtccaaatcacatggatctc

SEQ ID NO: 3520545 - DNA, 25 bp, Homo sapien
cattggctacatgtagaagacagac

SEQ ID NO: 3520546 - DNA, 25 bp, Homo sapien
tactggttcccagactgtgatggac

SEQ ID NO: 3520547 - DNA, 25 bp, Homo sapien
tttcctaggcagtcagtatagggca

SEQ ID NO: 3520548 - DNA, 25 bp, Homo sapien
tcacaagagcatcagaaaggtcccc

SEQ ID NO: 3520549 - DNA, 25 bp, Homo sapien
taggcccttctataggtcctctgag

SEQ ID NO: 3520550 - DNA, 25 bp, Homo sapien
gagttcatggagcaacttctcagca

SEQ ID NO: 3520551 - DNA, 25 bp, Homo sapien
taagacaatgagtgtaggtaggccc

SEQ ID NO: 3520552 - DNA, 25 bp, Homo sapien
gaactctgtcagcaaactctacatg

SEQ ID NO: 3520553 - DNA, 25 bp, Homo sapien
ggcccacttccaggtctatagaact

SEQ ID NO: 3520554 - DNA, 25 bp, Homo sapien
tataatccataaccacagagtctga

SEQ ID NO: 3520555 - DNA, 25 bp, Homo sapien
cagactgcttctggcccctaaaggg

SEQ ID NO: 3520556 - DNA, 25 bp, Homo sapien
taaagggatggtgctctctagctgg

SEQ ID NO: 3520557 - DNA, 25 bp, Homo sapien
tggtctggtcatccgatcatcagca

SEQ ID NO: 3520558 - DNA, 25 bp, Homo sapien
tcagcactgaagtctctcacaggat

SEQ ID NO: 3520559 - DNA, 25 bp, Homo sapien
catattgaacccagaatggtggctg

SEQ ID NO: 3520560 - DNA, 25 bp, Homo sapien
gaagggattctaatctcctgaggaa

SEQ ID NO: 3520561 - DNA, 25 bp, Homo sapien
caggagacctgggttgtagttcaca

SEQ ID NO: 3520562 - DNA, 25 bp, Homo sapien
tacagtcctgtgagacgggtgctat

SEQ ID NO: 3520563 - DNA, 25 bp, Homo sapien
tatatatctgtaccgtgtgctggcc

SEQ ID NO: 3520564 - DNA, 25 bp, Homo sapien
taaattagctaacctccctagggca

SEQ ID NO: 3520565 - DNA, 25 bp, Homo sapien
aagtcacatcttacactgatggtgg

SEQ ID NO: 3520566 - DNA, 25 bp, Homo sapien
gacctgcctccgtgattccattacc

SEQ ID NO: 3520567 - DNA, 25 bp, Homo sapien
tcttacactgatggtggcaggcaaa

SEQ ID NO: 3520568 - DNA, 25 bp, Homo sapien
ggaaagacctgcctccgtgattcca

SEQ ID NO: 3520569 - DNA, 25 bp, Homo sapien
gggctgccatcaagacccctgacat

SEQ ID NO: 3520570 - DNA, 25 bp, Homo sapien
aacgcctttaacagtgcccaagtca

SEQ ID NO: 3520571 - DNA, 25 bp, Homo sapien
cttagaccacctgagtctggattcc

SEQ ID NO: 3520572 - DNA, 25 bp, Homo sapien
tgttaaaacacaacaaggatcacct

SEQ ID NO: 3520573 - DNA, 25 bp, Homo sapien
catgccaaggttagatgttctgcca

SEQ ID NO: 3520574 - DNA, 25 bp, Homo sapien
caggcattacctgcacatgtggtag

SEQ ID NO: 3520575 - DNA, 25 bp, Homo sapien
cattttcccgtacctagaagatggg

SEQ ID NO: 3520576 - DNA, 25 bp, Homo sapien
gccctagggtttggagatatcacca

SEQ ID NO: 3520577 - DNA, 25 bp, Homo sapien
agaacaacttctgggagtgggtatc

SEQ ID NO: 3520578 - DNA, 25 bp, Homo sapien
ctatgccattgggaagaacaacttc

SEQ ID NO: 3520579 - DNA, 25 bp, Homo sapien
tgccattgggaagaacaacttctgg

SEQ ID NO: 3520580 - DNA, 25 bp, Homo sapien
ttgggaagaacaacttctgggagtg

SEQ ID NO: 3520581 - DNA, 25 bp, Homo sapien
cctttttatgtctggctttctacac

SEQ ID NO: 3520582 - DNA, 25 bp, Homo sapien
tcaaatgccacttcccgggcaggga

SEQ ID NO: 3520583 - DNA, 25 bp, Homo sapien
aaaccagaagcagtccaatcattct

SEQ ID NO: 3520584 - DNA, 25 bp, Homo sapien
tcctttttatgtctggctttctaca

SEQ ID NO: 3520585 - DNA, 25 bp, Homo sapien
ccaaattatgctctgagccacaaga

SEQ ID NO: 3520586 - DNA, 25 bp, Homo sapien
tgccaaattatgctctgagccacaa

SEQ ID NO: 3520587 - DNA, 25 bp, Homo sapien
ttgccaaattatgctctgagccaca

SEQ ID NO: 3520588 - DNA, 25 bp, Homo sapien
gccaaattatgctctgagccacaag

SEQ ID NO: 3520589 - DNA, 25 bp, Homo sapien
gttatgctctgtgccgcactgcgag

SEQ ID NO: 3520590 - DNA, 25 bp, Homo sapien
tgggagaagcgtaccagaagcagct

SEQ ID NO: 3520591 - DNA, 25 bp, Homo sapien
gtacgtgcggaaacacatgatggcc

SEQ ID NO: 3520592 - DNA, 25 bp, Homo sapien
gcactgcgagcccttggcgggcaca

SEQ ID NO: 3520593 - DNA, 25 bp, Homo sapien
ggctgcgcaatccttatgagactct

SEQ ID NO: 3520594 - DNA, 25 bp, Homo sapien
gttgctaggagccagaatgctcact

SEQ ID NO: 3520595 - DNA, 25 bp, Homo sapien
gcagactggtaaaattccacggcct

SEQ ID NO: 3520596 - DNA, 25 bp, Homo sapien
tgcatgcgtgtatcaattctgaaag

SEQ ID NO: 3520597 - DNA, 25 bp, Homo sapien
tgtcctcgttaaaagagatctctcc

SEQ ID NO: 3520598 - DNA, 25 bp, Homo sapien
tcagatgataagtgccagtaaaagc

SEQ ID NO: 3520599 - DNA, 25 bp, Homo sapien
cttagagaatatggttaggaacggc

SEQ ID NO: 3520600 - DNA, 25 bp, Homo sapien
tgatgcggaaacagatactaaacag

SEQ ID NO: 3520601 - DNA, 25 bp, Homo sapien
atgaagtgatcaattaggacctgga

SEQ ID NO: 3520602 - DNA, 25 bp, Homo sapien
tggaagttcagagaatgaagtgatc

SEQ ID NO: 3520603 - DNA, 25 bp, Homo sapien
ggaagttcagagaatgaagtgatca

SEQ ID NO: 3520604 - DNA, 25 bp, Homo sapien
gaagtgatcaattaggacctggaca

SEQ ID NO: 3520605 - DNA, 25 bp, Homo sapien
ctgggaagactgctaagaatggtga

SEQ ID NO: 3520606 - DNA, 25 bp, Homo sapien
gagaagctgaggtgccacctcactg

SEQ ID NO: 3520607 - DNA, 25 bp, Homo sapien
taatttgggcatttcagcacagaga

SEQ ID NO: 3520608 - DNA, 25 bp, Homo sapien
gaagactgctaagaatggtgaatta

SEQ ID NO: 3520609 - DNA, 25 bp, Homo sapien
acaaaacgtacatttgtttattgct

SEQ ID NO: 3520610 - DNA, 25 bp, Homo sapien
cgaaaaaccaatgtaagaaatctat

SEQ ID NO: 3520611 - DNA, 25 bp, Homo sapien
cccaaagtgctacaagaaattcgtt

SEQ ID NO: 3520612 - DNA, 25 bp, Homo sapien
tacacatcgccatgcctaatgtttg

SEQ ID NO: 3520613 - DNA, 25 bp, Homo sapien
gctccttttgcaaagatatctctga

SEQ ID NO: 3520614 - DNA, 25 bp, Homo sapien
ctccctgagtcttggatgacaccag

SEQ ID NO: 3520615 - DNA, 25 bp, Homo sapien
ttccatttctgctacccatagccag

SEQ ID NO: 3520616 - DNA, 25 bp, Homo sapien
attaattattgtagcagttgctcct

SEQ ID NO: 3520617 - DNA, 25 bp, Homo sapien
ttacatctgtgagaagtcacttcct

SEQ ID NO: 3520618 - DNA, 25 bp, Homo sapien
tacatctgtgagaagtcacttccta

SEQ ID NO: 3520619 - DNA, 25 bp, Homo sapien
gcatgctgttcggtggtcttgaaca

SEQ ID NO: 3520620 - DNA, 25 bp, Homo sapien
tcagttgctccagttaagcaatgcg

SEQ ID NO: 3520621 - DNA, 25 bp, Homo sapien
gtttccagccttcataagtctccaa

SEQ ID NO: 3520622 - DNA, 25 bp, Homo sapien
caatgcggagacgaaggcatgctgt

SEQ ID NO: 3520623 - DNA, 25 bp, Homo sapien
tagtctgctcggccccaggtaaaca

SEQ ID NO: 3520624 - DNA, 25 bp, Homo sapien
ccccaggtaaacatcttgccagttt

SEQ ID NO: 3520625 - DNA, 25 bp, Homo sapien
catagtctgctcggccccaggtaaa

SEQ ID NO: 3520626 - DNA, 25 bp, Homo sapien
atagtctgctcggccccaggtaaac

SEQ ID NO: 3520627 - DNA, 25 bp, Homo sapien
gatatgctctgtgtaccatccagct

SEQ ID NO: 3520628 - DNA, 25 bp, Homo sapien
agctttcctcactagaataatcttc

SEQ ID NO: 3520629 - DNA, 25 bp, Homo sapien
tgaggaagacgaaaacccagattaa

SEQ ID NO: 3520630 - DNA, 25 bp, Homo sapien
tcccaggagcccatgtagaactcag

SEQ ID NO: 3520631 - DNA, 25 bp, Homo sapien
gttactatggaccatctgccaggac

SEQ ID NO: 3520632 - DNA, 25 bp, Homo sapien
agagacagttaccacccaagctaca

SEQ ID NO: 3520633 - DNA, 25 bp, Homo sapien
ggaggacttttccatggccagggcc

SEQ ID NO: 3520634 - DNA, 25 bp, Homo sapien
aagattatctttcagggtgctcaca

SEQ ID NO: 3520635 - DNA, 25 bp, Homo sapien
ttgtcgaatacacccacttcagagg

SEQ ID NO: 3520636 - DNA, 25 bp, Homo sapien
ggcccagccccttgtcgaatacacc

SEQ ID NO: 3520637 - DNA, 25 bp, Homo sapien
tctgcttcaggtgcacacatgctac

SEQ ID NO: 3520638 - DNA, 25 bp, Homo sapien
ccaaggctagctggctgcctactgc

SEQ ID NO: 3520639 - DNA, 25 bp, Homo sapien
ctgggccagagcacgggcctccact

SEQ ID NO: 3520640 - DNA, 25 bp, Homo sapien
caaggatagctgaagctgacctgaa

SEQ ID NO: 3520641 - DNA, 25 bp, Homo sapien
aaccgtaagttctctgctactgtct

SEQ ID NO: 3520642 - DNA, 25 bp, Homo sapien
cgtaagttctctgctactgtctcac

SEQ ID NO: 3520643 - DNA, 25 bp, Homo sapien
caaccgtaagttctctgctactgtc

SEQ ID NO: 3520644 - DNA, 25 bp, Homo sapien
ccgtaagttctctgctactgtctca

SEQ ID NO: 3520645 - DNA, 25 bp, Homo sapien
agcaaccaggtgtgtccatccactc

SEQ ID NO: 3520646 - DNA, 25 bp, Homo sapien
aaccaggtgtgtccatccactccag

SEQ ID NO: 3520647 - DNA, 25 bp, Homo sapien
accaggtgtgtccatccactccaga

SEQ ID NO: 3520648 - DNA, 25 bp, Homo sapien
gcaaccaggtgtgtccatccactcc

SEQ ID NO: 3520649 - DNA, 25 bp, Homo sapien
tagccagttgcccatgcttgttgct

SEQ ID NO: 3520650 - DNA, 25 bp, Homo sapien
gcagcctcattagccagttgcccat

SEQ ID NO: 3520651 - DNA, 25 bp, Homo sapien
tcattagccagttgcccatgcttgt

SEQ ID NO: 3520652 - DNA, 25 bp, Homo sapien
gaaagcagcctcattagccagttgc

SEQ ID NO: 3520653 - DNA, 25 bp, Homo sapien
aatgaagctgagtggtctgagccag

SEQ ID NO: 3520654 - DNA, 25 bp, Homo sapien
taatgaagctgagtggtctgagcca

SEQ ID NO: 3520655 - DNA, 25 bp, Homo sapien
ttaatgaagctgagtggtctgagcc

SEQ ID NO: 3520656 - DNA, 25 bp, Homo sapien
gttaatgaagctgagtggtctgagc

SEQ ID NO: 3520657 - DNA, 25 bp, Homo sapien
cagggcacaaccgtcgtccacatga

SEQ ID NO: 3520658 - DNA, 25 bp, Homo sapien
tcgtccacatgatgccaaaccagtc

SEQ ID NO: 3520659 - DNA, 25 bp, Homo sapien
tgcccagggcacaaccgtcgtccac

SEQ ID NO: 3520660 - DNA, 25 bp, Homo sapien
gggcacaaccgtcgtccacatgatg

SEQ ID NO: 3520661 - DNA, 25 bp, Homo sapien
gtggactcacgaagcacctgagcct

SEQ ID NO: 3520662 - DNA, 25 bp, Homo sapien
gctgccacagccaattagtgctgtc

SEQ ID NO: 3520663 - DNA, 25 bp, Homo sapien
cctcagctgccacagccaattagtg

SEQ ID NO: 3520664 - DNA, 25 bp, Homo sapien
actccacaagtggactcacgaagca

SEQ ID NO: 3520665 - DNA, 25 bp, Homo sapien
gcagcaatacaaacaaccttctctt

SEQ ID NO: 3520666 - DNA, 25 bp, Homo sapien
tgtagcagctactgcatgcctcagt

SEQ ID NO: 3520667 - DNA, 25 bp, Homo sapien
gtagcagctactgcatgcctcagtc

SEQ ID NO: 3520668 - DNA, 25 bp, Homo sapien
gtccagcagcaatacaaacaacctt

SEQ ID NO: 3520669 - DNA, 25 bp, Homo sapien
cagatgcaggctgaacagcagaaag

SEQ ID NO: 3520670 - DNA, 25 bp, Homo sapien
catcccagatgcaggctgaacagca

SEQ ID NO: 3520671 - DNA, 25 bp, Homo sapien
aacacaacatcccagatgcaggctg

SEQ ID NO: 3520672 - DNA, 25 bp, Homo sapien
tatgcccagggcctaagcaccaaat

SEQ ID NO: 3520673 - DNA, 25 bp, Homo sapien
gagttggatccacatgatagaactt

SEQ ID NO: 3520674 - DNA, 25 bp, Homo sapien
gggaaccacacatcttcgaggtcca

SEQ ID NO: 3520675 - DNA, 25 bp, Homo sapien
gaggaactcctaactggccaaagga

SEQ ID NO: 3520676 - DNA, 25 bp, Homo sapien
gccaaaggagttggatccacatgat

SEQ ID NO: 3520677 - DNA, 25 bp, Homo sapien
tgcaaatctatgaagtaagatgtct

SEQ ID NO: 3520678 - DNA, 25 bp, Homo sapien
atgggacagccaaagagggatttgc

SEQ ID NO: 3520679 - DNA, 25 bp, Homo sapien
ggatatcctctgtgtgaccaagccc

SEQ ID NO: 3520680 - DNA, 25 bp, Homo sapien
cagttgcccatctttgttcaggcca

SEQ ID NO: 3520681 - DNA, 25 bp, Homo sapien
taatcgtaaaatcccagccacaggc

SEQ ID NO: 3520682 - DNA, 25 bp, Homo sapien
cactcctgggtttacagaagtcatt

SEQ ID NO: 3520683 - DNA, 25 bp, Homo sapien
ggcaacagcacatcttccttatggc

SEQ ID NO: 3520684 - DNA, 25 bp, Homo sapien
tccttatggccgaggccaagttgcc

SEQ ID NO: 3520685 - DNA, 25 bp, Homo sapien
caagttgcccatagctatttgcacc

SEQ ID NO: 3520686 - DNA, 25 bp, Homo sapien
cctggagatgagaagtaaaatcttt

SEQ ID NO: 3520687 - DNA, 25 bp, Homo sapien
ctactcctagctggttcttcctgga

SEQ ID NO: 3520688 - DNA, 25 bp, Homo sapien
cttcctggagatgagaagtaaaatc

SEQ ID NO: 3520689 - DNA, 25 bp, Homo sapien
ggttcttcctggagatgagaagtaa

SEQ ID NO: 3520690 - DNA, 25 bp, Homo sapien
aggggcataagtcccagaagcccac

SEQ ID NO: 3520691 - DNA, 25 bp, Homo sapien
agatggaagagtaagccatagcagg

SEQ ID NO: 3520692 - DNA, 25 bp, Homo sapien
atagcaggggcataagtcccagaag

SEQ ID NO: 3520693 - DNA, 25 bp, Homo sapien
taagccatagcaggggcataagtcc

SEQ ID NO: 3520694 - DNA, 25 bp, Homo sapien
cgctgtcttccaggcgctattcggg

SEQ ID NO: 3520695 - DNA, 25 bp, Homo sapien
gaggcaggttcttcccgcggcgcca

SEQ ID NO: 3520696 - DNA, 25 bp, Homo sapien
ctggagggctctcgcggaaccagac

SEQ ID NO: 3520697 - DNA, 25 bp, Homo sapien
caggcccctaagtcgaccgcgaaga

SEQ ID NO: 3520698 - DNA, 25 bp, Homo sapien
ccctgaactgcccacgccgcggcca

SEQ ID NO: 3520699 - DNA, 25 bp, Homo sapien
agcagctcccacatctcggcgcccc

SEQ ID NO: 3520700 - DNA, 25 bp, Homo sapien
ccagcagctcccacatctcggcgcc

SEQ ID NO: 3520701 - DNA, 25 bp, Homo sapien
ctcagccgcccagcccctgaactgc

SEQ ID NO: 3520702 - DNA, 25 bp, Homo sapien
caggcgaagagcgcggccgccgcgg

SEQ ID NO: 3520703 - DNA, 25 bp, Homo sapien
ccgaggcgctgggctcgcgctccat

SEQ ID NO: 3520704 - DNA, 25 bp, Homo sapien
ggcggcctccgaggcgctgggctcg

SEQ ID NO: 3520705 - DNA, 25 bp, Homo sapien
cgggggcggcctccgaggcgctggg

SEQ ID NO: 3520706 - DNA, 25 bp, Homo sapien
gggacgcgtgatgggtagggcgcgg

SEQ ID NO: 3520707 - DNA, 25 bp, Homo sapien
agccggaccggggacgcgtgatggg

SEQ ID NO: 3520708 - DNA, 25 bp, Homo sapien
gctccgccggcgcttccgggaggga

SEQ ID NO: 3520709 - DNA, 25 bp, Homo sapien
cgggggtaggtgagcgccggagccg

SEQ ID NO: 3520710 - DNA, 25 bp, Homo sapien
atgcaggtgcactgcgcgccacagt

SEQ ID NO: 3520711 - DNA, 25 bp, Homo sapien
cataatttcatgtttcatgcaggtg

SEQ ID NO: 3520712 - DNA, 25 bp, Homo sapien
actgcgcgccacagttcacaaagct

SEQ ID NO: 3520713 - DNA, 25 bp, Homo sapien
tcacaaagctccttcgcgtttttgt

SEQ ID NO: 3520714 - DNA, 25 bp, Homo sapien
cttggaggcccacgacagcccagag

SEQ ID NO: 3520715 - DNA, 25 bp, Homo sapien
ttggaggcccacgacagcccagagg

SEQ ID NO: 3520716 - DNA, 25 bp, Homo sapien
ggaggcccacgacagcccagagggg

SEQ ID NO: 3520717 - DNA, 25 bp, Homo sapien
tggaggcccacgacagcccagaggg

SEQ ID NO: 3520718 - DNA, 25 bp, Homo sapien
gaatgtgcaggagctataccatgct

SEQ ID NO: 3520719 - DNA, 25 bp, Homo sapien
tatcaatgtggtgtgggtctcaacc

SEQ ID NO: 3520720 - DNA, 25 bp, Homo sapien
ccatctcaggtctaaggaaagttac

SEQ ID NO: 3520721 - DNA, 25 bp, Homo sapien
taaaaatgggatccttcaccgctca

SEQ ID NO: 3520722 - DNA, 25 bp, Homo sapien
ctgggtccctgagagagcttggtat

SEQ ID NO: 3520723 - DNA, 25 bp, Homo sapien
ccgttctgagaaatacaagggcttg

SEQ ID NO: 3520724 - DNA, 25 bp, Homo sapien
gagcttggtatgcatccctctagat

SEQ ID NO: 3520725 - DNA, 25 bp, Homo sapien
ctctagatttaggacccagacaggc

SEQ ID NO: 3520726 - DNA, 25 bp, Homo sapien
agcaaagacaaactgatgctttggg

SEQ ID NO: 3520727 - DNA, 25 bp, Homo sapien
gagcaaagacaaactgatgctttgg

SEQ ID NO: 3520728 - DNA, 25 bp, Homo sapien
tgagcaaagacaaactgatgctttg

SEQ ID NO: 3520729 - DNA, 25 bp, Homo sapien
gcaaagacaaactgatgctttgggg

SEQ ID NO: 3520730 - DNA, 25 bp, Homo sapien
gaaatgtaggtattctgaagaccag

SEQ ID NO: 3520731 - DNA, 25 bp, Homo sapien
gaaaattctaagactctcaggactc

SEQ ID NO: 3520732 - DNA, 25 bp, Homo sapien
aagaattattaaccggctgggcatg

SEQ ID NO: 3520733 - DNA, 25 bp, Homo sapien
cgagctgaaatcacgcaactgcgct

SEQ ID NO: 3520734 - DNA, 25 bp, Homo sapien
catagacatccaggagttcgttgga

SEQ ID NO: 3520735 - DNA, 25 bp, Homo sapien
gaactgaagtcatgtatctgggtga

SEQ ID NO: 3520736 - DNA, 25 bp, Homo sapien
tggcagggctgtcatattgaacaac

SEQ ID NO: 3520737 - DNA, 25 bp, Homo sapien
catgaagttgtacagcattggccta

SEQ ID NO: 3520738 - DNA, 25 bp, Homo sapien
ccaggatcaggtgttcaaggaaagc

SEQ ID NO: 3520739 - DNA, 25 bp, Homo sapien
tattctaagcgatcctaaagggtca

SEQ ID NO: 3520740 - DNA, 25 bp, Homo sapien
aagtttcccttggacccatgagtag

SEQ ID NO: 3520741 - DNA, 25 bp, Homo sapien
ttaggtaacaatatgagtcagcgcc

SEQ ID NO: 3520742 - DNA, 25 bp, Homo sapien
tatggattatacttcactccaaatg

SEQ ID NO: 3520743 - DNA, 25 bp, Homo sapien
tccaaatggacgcttaattgttttg

SEQ ID NO: 3520744 - DNA, 25 bp, Homo sapien
cactgacaacatcgagatcatgctg

SEQ ID NO: 3520745 - DNA, 25 bp, Homo sapien
tctttcaggatctgaatactccgtg

SEQ ID NO: 3520746 - DNA, 25 bp, Homo sapien
gggctttactttggcatgtccagaa

SEQ ID NO: 3520747 - DNA, 25 bp, Homo sapien
gtaatcttgggatcaaagggcttta

SEQ ID NO: 3520748 - DNA, 25 bp, Homo sapien
ctttggcatgtccagaaagtgcatg

SEQ ID NO: 3520749 - DNA, 25 bp, Homo sapien
tgtgataagacattcctgtttgcag

SEQ ID NO: 3520750 - DNA, 25 bp, Homo sapien
tcttgtttacatagaccaaactcca

SEQ ID NO: 3520751 - DNA, 25 bp, Homo sapien
aagactcttagctgtccatcttgtt

SEQ ID NO: 3520752 - DNA, 25 bp, Homo sapien
aagaaagtaagccagcaccaaagac

SEQ ID NO: 3520753 - DNA, 25 bp, Homo sapien
ttacatagaccaaactccacagtga

SEQ ID NO: 3520754 - DNA, 25 bp, Homo sapien
agcctcctctgaagcgccaagagaa

SEQ ID NO: 3520755 - DNA, 25 bp, Homo sapien
actaggttcagccaaaagcgggaca

SEQ ID NO: 3520756 - DNA, 25 bp, Homo sapien
cctctgaagcgccaagagaagccaa

SEQ ID NO: 3520757 - DNA, 25 bp, Homo sapien
aaaagcgggacatgacctaagagtt

SEQ ID NO: 3520758 - DNA, 25 bp, Homo sapien
tctcttggtgataagtaaccagcca

SEQ ID NO: 3520759 - DNA, 25 bp, Homo sapien
ggctaaacctgataagaaatctctt

SEQ ID NO: 3520760 - DNA, 25 bp, Homo sapien
taaccagccacaggacggatggaaa

SEQ ID NO: 3520761 - DNA, 25 bp, Homo sapien
tgcagtgaaaaactcgaaaggctaa

SEQ ID NO: 3520762 - DNA, 25 bp, Homo sapien
ggagacatcttccaattgtgggata

SEQ ID NO: 3520763 - DNA, 25 bp, Homo sapien
tctctgcaagcatgggttgggtaga

SEQ ID NO: 3520764 - DNA, 25 bp, Homo sapien
cagtgaattcaacctttggaatggg

SEQ ID NO: 3520765 - DNA, 25 bp, Homo sapien
tgagctcttggaatacggttcccca

SEQ ID NO: 3520766 - DNA, 25 bp, Homo sapien
ctttcgacgtttacggtagacattg

SEQ ID NO: 3520767 - DNA, 25 bp, Homo sapien
ttcatagccaagtccgcaaaatact

SEQ ID NO: 3520768 - DNA, 25 bp, Homo sapien
acgtttacggtagacattgtctttg

SEQ ID NO: 3520769 - DNA, 25 bp, Homo sapien
caagtccgcaaaatactttcgacgt

SEQ ID NO: 3520770 - DNA, 25 bp, Homo sapien
catacatcagaactctgttggcaca

SEQ ID NO: 3520771 - DNA, 25 bp, Homo sapien
atggtccaggtcagaaatcttcttt

SEQ ID NO: 3520772 - DNA, 25 bp, Homo sapien
acatcagaactctgttggcacaatg

SEQ ID NO: 3520773 - DNA, 25 bp, Homo sapien
gcatctagttcagatccatacatca

SEQ ID NO: 3520774 - DNA, 25 bp, Homo sapien
tatgtaacagattcacatgcttctc

SEQ ID NO: 3520775 - DNA, 25 bp, Homo sapien
tcaattgttctctgttgatgtcaca

SEQ ID NO: 3520776 - DNA, 25 bp, Homo sapien
gagaacattggtatgagacttcagc

SEQ ID NO: 3520777 - DNA, 25 bp, Homo sapien
tctttttgattttcgggactcgata

SEQ ID NO: 3520778 - DNA, 25 bp, Homo sapien
ctttctaaggaatggtctttgttct

SEQ ID NO: 3520779 - DNA, 25 bp, Homo sapien
ttctaaggaatggtctttgttctcc

SEQ ID NO: 3520780 - DNA, 25 bp, Homo sapien
tttctaaggaatggtctttgttctc

SEQ ID NO: 3520781 - DNA, 25 bp, Homo sapien
gatgaatttggagtaattctctaaa

SEQ ID NO: 3520782 - DNA, 25 bp, Homo sapien
atgaatttggagtaattctctaaaa

SEQ ID NO: 3520783 - DNA, 25 bp, Homo sapien
cttttagggcatgactgaagcctgc

SEQ ID NO: 3520784 - DNA, 25 bp, Homo sapien
ggccagctctagatacatatgcact

SEQ ID NO: 3520785 - DNA, 25 bp, Homo sapien
gatggataactgctagccaggagaa

SEQ ID NO: 3520786 - DNA, 25 bp, Homo sapien
ctattgtagcctaaactagtcagga

SEQ ID NO: 3520787 - DNA, 25 bp, Homo sapien
gaatatagcttctagcccatccatg

SEQ ID NO: 3520788 - DNA, 25 bp, Homo sapien
cagggatggcctcagataagcattc

SEQ ID NO: 3520789 - DNA, 25 bp, Homo sapien
gaagcaccacagtcaaagttagggc

SEQ ID NO: 3520790 - DNA, 25 bp, Homo sapien
gaataaaatttcaacccaagcgcat

SEQ ID NO: 3520791 - DNA, 25 bp, Homo sapien
gaggataattaacaccactctcatg

SEQ ID NO: 3520792 - DNA, 25 bp, Homo sapien
tttttcttgccctaggaattaggca

SEQ ID NO: 3520793 - DNA, 25 bp, Homo sapien
gacattctaaatacctctggctaag

SEQ ID NO: 3520794 - DNA, 25 bp, Homo sapien
gaacagttgctaacctacactaagt

SEQ ID NO: 3520795 - DNA, 25 bp, Homo sapien
tagaagacacatccctatctggaga

SEQ ID NO: 3520796 - DNA, 25 bp, Homo sapien
taactgactctaaaccgcaaggacc

SEQ ID NO: 3520797 - DNA, 25 bp, Homo sapien
taccggatctaggaagcacaaagca

SEQ ID NO: 3520798 - DNA, 25 bp, Homo sapien
ccaaaggcaaggttgagttcacacg

SEQ ID NO: 3520799 - DNA, 25 bp, Homo sapien
tgatgatggtaagtgcgatgctgag

SEQ ID NO: 3520800 - DNA, 25 bp, Homo sapien
ttgcatctgagactccttcttcttc

SEQ ID NO: 3520801 - DNA, 25 bp, Homo sapien
tcagtcgtctgttgggatggtggtg

SEQ ID NO: 3520802 - DNA, 25 bp, Homo sapien
tgatggtaagtgcgatgctgagaag

SEQ ID NO: 3520803 - DNA, 25 bp, Homo sapien
gccgccaaagcctcgacggcggtcc

SEQ ID NO: 3520804 - DNA, 25 bp, Homo sapien
tcactcacctcgggcgccagtaggt

SEQ ID NO: 3520805 - DNA, 25 bp, Homo sapien
ccgcgcctgccaagcgccgccaaag

SEQ ID NO: 3520806 - DNA, 25 bp, Homo sapien
tgactccgcaagaccaccaatttac

SEQ ID NO: 3520807 - DNA, 25 bp, Homo sapien
cactgcgagaaatttcccttgtcta

SEQ ID NO: 3520808 - DNA, 25 bp, Homo sapien
ttggctcctggcacttaacataatg

SEQ ID NO: 3520809 - DNA, 25 bp, Homo sapien
caccctgtgaggtgtacaattctga

SEQ ID NO: 3520810 - DNA, 25 bp, Homo sapien
gttgtgtaaccaccaaacgatcaaa

SEQ ID NO: 3520811 - DNA, 25 bp, Homo sapien
tagcgtttctgtatgccaatggtga

SEQ ID NO: 3520812 - DNA, 25 bp, Homo sapien
ccaatggtgaacagtatgaaaaaga

SEQ ID NO: 3520813 - DNA, 25 bp, Homo sapien
gcgtttctgtatgccaatggtgaac

SEQ ID NO: 3520814 - DNA, 25 bp, Homo sapien
tcaatagcgtttctgtatgccaatg

SEQ ID NO: 3520815 - DNA, 25 bp, Homo sapien
tcttcaaagcaagcaatgtggcatc

SEQ ID NO: 3520816 - DNA, 25 bp, Homo sapien
gaggcactgaaactagacactttgg

SEQ ID NO: 3520817 - DNA, 25 bp, Homo sapien
tcctttcagtgacaaagaccctgtg

SEQ ID NO: 3520818 - DNA, 25 bp, Homo sapien
gagaaactgaaagtgctcactgcac

SEQ ID NO: 3520819 - DNA, 25 bp, Homo sapien
ctgcatttcactggagtgctctgtg

SEQ ID NO: 3520820 - DNA, 25 bp, Homo sapien
aaactgttgtgtagagactagacaa

SEQ ID NO: 3520821 - DNA, 25 bp, Homo sapien
tacgcactggcctattattcacggg

SEQ ID NO: 3520822 - DNA, 25 bp, Homo sapien
tattcacgggatgatatttaaaacc

SEQ ID NO: 3520823 - DNA, 25 bp, Homo sapien
tcgggacaaattaatgatagcacct

SEQ ID NO: 3520824 - DNA, 25 bp, Homo sapien
ctatgttcagataggtgtgtgtgca

SEQ ID NO: 3520825 - DNA, 25 bp, Homo sapien
gcacataggcacataatagtttctc

SEQ ID NO: 3520826 - DNA, 25 bp, Homo sapien
tgtagaactgaatcccaggtgtgga

SEQ ID NO: 3520827 - DNA, 25 bp, Homo sapien
tgtgaacttatttcactgctcattt

SEQ ID NO: 3520828 - DNA, 25 bp, Homo sapien
taatggtctgcaatatgcaatgctg

SEQ ID NO: 3520829 - DNA, 25 bp, Homo sapien
tattagcaaagccaagcatcttttc

SEQ ID NO: 3520830 - DNA, 25 bp, Homo sapien
tcttattgataagtaggagctccct

SEQ ID NO: 3520831 - DNA, 25 bp, Homo sapien
cactcgtatgcacacctcaggaaaa

SEQ ID NO: 3520832 - DNA, 25 bp, Homo sapien
tgtatggaaagcgtagagaagaact

SEQ ID NO: 3520833 - DNA, 25 bp, Homo sapien
tatacaagtatcttaccagggtttg

SEQ ID NO: 3520834 - DNA, 25 bp, Homo sapien
tcaaagcaaagtgtagccttgccac

SEQ ID NO: 3520835 - DNA, 25 bp, Homo sapien
caagatccagatctactaaatctcc

SEQ ID NO: 3520836 - DNA, 25 bp, Homo sapien
gccgggacataatctcttaagtcct

SEQ ID NO: 3520837 - DNA, 25 bp, Homo sapien
ttaggccgggacataatctcttaag

SEQ ID NO: 3520838 - DNA, 25 bp, Homo sapien
cttaagtcctcaagatccagatcta

SEQ ID NO: 3520839 - DNA, 25 bp, Homo sapien
ctgtgcttggggaaattggccccgt

SEQ ID NO: 3520840 - DNA, 25 bp, Homo sapien
gcacacttgatttccctcaatgtct

SEQ ID NO: 3520841 - DNA, 25 bp, Homo sapien
gctttgtgttgttcaaagaggcatt

SEQ ID NO: 3520842 - DNA, 25 bp, Homo sapien
ttatcgccctgctcatacagtgcca

SEQ ID NO: 3520843 - DNA, 25 bp, Homo sapien
tccctcaatgtctgctgtcttaatg

SEQ ID NO: 3520844 - DNA, 25 bp, Homo sapien
tgtgaccgagctttcatggaaatca

SEQ ID NO: 3520845 - DNA, 25 bp, Homo sapien
ggtactgtgaccgagctttcatgga

SEQ ID NO: 3520846 - DNA, 25 bp, Homo sapien
ttaaggtactgtgaccgagctttca

SEQ ID NO: 3520847 - DNA, 25 bp, Homo sapien
gaccgagctttcatggaaatcagga

SEQ ID NO: 3520848 - DNA, 25 bp, Homo sapien
aagaggaagtcgcacatgtgaccat

SEQ ID NO: 3520849 - DNA, 25 bp, Homo sapien
tagagctttgaatcggcctcgtaag

SEQ ID NO: 3520850 - DNA, 25 bp, Homo sapien
aaccagcccacgtgtacagcagaaa

SEQ ID NO: 3520851 - DNA, 25 bp, Homo sapien
gcagaaatcagtattgtttgcctct

SEQ ID NO: 3520852 - DNA, 25 bp, Homo sapien
cagcaaattcatctcctcctactct

SEQ ID NO: 3520853 - DNA, 25 bp, Homo sapien
tcagcaaattcatctcctcctactc

SEQ ID NO: 3520854 - DNA, 25 bp, Homo sapien
agcaaattcatctcctcctactctt

SEQ ID NO: 3520855 - DNA, 25 bp, Homo sapien
gagccagctcatggttacggagcag

SEQ ID NO: 3520856 - DNA, 25 bp, Homo sapien
tccctcggagtcacaaatgctcagg

SEQ ID NO: 3520857 - DNA, 25 bp, Homo sapien
cagggtacaccttttagcaagtagg

SEQ ID NO: 3520858 - DNA, 25 bp, Homo sapien
caagtctaagtaaactctggcccca

SEQ ID NO: 3520859 - DNA, 25 bp, Homo sapien
tatcacttgatgtgagcaacgaaca

SEQ ID NO: 3520860 - DNA, 25 bp, Homo sapien
gaaatagccaactcacactaaagca

SEQ ID NO: 3520861 - DNA, 25 bp, Homo sapien
taaagaccagtcagatatcacttga

SEQ ID NO: 3520862 - DNA, 25 bp, Homo sapien
ctaacattttcagatcagtcaaggc

SEQ ID NO: 3520863 - DNA, 25 bp, Homo sapien
aaaggagccacctcattacatctgg

SEQ ID NO: 3520864 - DNA, 25 bp, Homo sapien
tgaaaggagccacctcattacatct

SEQ ID NO: 3520865 - DNA, 25 bp, Homo sapien
gccacctcattacatctggattttt

SEQ ID NO: 3520866 - DNA, 25 bp, Homo sapien
ggagccacctcattacatctggatt

SEQ ID NO: 3520867 - DNA, 25 bp, Homo sapien
cctcaactgaggatgataaatatca

SEQ ID NO: 3520868 - DNA, 25 bp, Homo sapien
gtgagacaagtctaggacagaaaaa

SEQ ID NO: 3520869 - DNA, 25 bp, Homo sapien
cagacaattatggtctaatatgggc

SEQ ID NO: 3520870 - DNA, 25 bp, Homo sapien
ggtgacagtggtgaaacctcagatt

SEQ ID NO: 3520871 - DNA, 25 bp, Homo sapien
agtttatttcttgtacagaagtaat

SEQ ID NO: 3520872 - DNA, 25 bp, Homo sapien
ataaagtttatttcttgtacagaag

SEQ ID NO: 3520873 - DNA, 25 bp, Homo sapien
ttatttcttgtacagaagtaattcc

SEQ ID NO: 3520874 - DNA, 25 bp, Homo sapien
tttcttgtacagaagtaattccaat

SEQ ID NO: 3520875 - DNA, 25 bp, Homo sapien
atcagcaagcgccttatcaacttca

SEQ ID NO: 3520876 - DNA, 25 bp, Homo sapien
tcaacttcacgtaggattttaataa

SEQ ID NO: 3520877 - DNA, 25 bp, Homo sapien
gcgccttatcaacttcacgtaggat

SEQ ID NO: 3520878 - DNA, 25 bp, Homo sapien
gcaagcgccttatcaacttcacgta

SEQ ID NO: 3520879 - DNA, 25 bp, Homo sapien
ccattccgttttactcttgagctag

SEQ ID NO: 3520880 - DNA, 25 bp, Homo sapien
tagtaacagtacttcctaagcagtc

SEQ ID NO: 3520881 - DNA, 25 bp, Homo sapien
gcagatctccagatgatagtaacag

SEQ ID NO: 3520882 - DNA, 25 bp, Homo sapien
gtactgattgctctacctgtggttt

SEQ ID NO: 3520883 - DNA, 25 bp, Homo sapien
aggttttgaaatgcagaggaacact

SEQ ID NO: 3520884 - DNA, 25 bp, Homo sapien
ggttttgaaatgcagaggaacactt

SEQ ID NO: 3520885 - DNA, 25 bp, Homo sapien
gttttgaaatgcagaggaacacttc

SEQ ID NO: 3520886 - DNA, 25 bp, Homo sapien
catcaaggaggcttatgtaacccaa

SEQ ID NO: 3520887 - DNA, 25 bp, Homo sapien
caaatcaggatattcaattccctcc

SEQ ID NO: 3520888 - DNA, 25 bp, Homo sapien
tttagtgaagggcaccaccatccac

SEQ ID NO: 3520889 - DNA, 25 bp, Homo sapien
caaacatgttctccactgtcgtctt

SEQ ID NO: 3520890 - DNA, 25 bp, Homo sapien
gtgttagactctgccgagttctctg

SEQ ID NO: 3520891 - DNA, 25 bp, Homo sapien
tttttctgacactgttccatatttt

SEQ ID NO: 3520892 - DNA, 25 bp, Homo sapien
tgtgttagactctgccgagttctct

SEQ ID NO: 3520893 - DNA, 25 bp, Homo sapien
tggttttttctgacactgttccata

SEQ ID NO: 3520894 - DNA, 25 bp, Homo sapien
cttgaagaatgatgggtggatcatc

SEQ ID NO: 3520895 - DNA, 25 bp, Homo sapien
cagactggcagaattcatggcagac

SEQ ID NO: 3520896 - DNA, 25 bp, Homo sapien
cagtctgtgaggcatagatggcaga

SEQ ID NO: 3520897 - DNA, 25 bp, Homo sapien
tatctttagatactcttgctcagtc

SEQ ID NO: 3520898 - DNA, 25 bp, Homo sapien
aatgagtaactgtagtgcatcccga

SEQ ID NO: 3520899 - DNA, 25 bp, Homo sapien
taactgtagtgcatcccgataaacc

SEQ ID NO: 3520900 - DNA, 25 bp, Homo sapien
gtagtgcatcccgataaaccacctt

SEQ ID NO: 3520901 - DNA, 25 bp, Homo sapien
agtgcatcccgataaaccaccttac

SEQ ID NO: 3520902 - DNA, 25 bp, Homo sapien
catccactgtagtaagcagttgtaa

SEQ ID NO: 3520903 - DNA, 25 bp, Homo sapien
ccactgtagtaagcagttgtaaaat

SEQ ID NO: 3520904 - DNA, 25 bp, Homo sapien
tgtagtaagcagttgtaaaatgtgc

SEQ ID NO: 3520905 - DNA, 25 bp, Homo sapien
atcatccactgtagtaagcagttgt

SEQ ID NO: 3520906 - DNA, 25 bp, Homo sapien
ccttatcctaaggaaggcaactgaa

SEQ ID NO: 3520907 - DNA, 25 bp, Homo sapien
cacccaggtgatgtatgtagtaccc

SEQ ID NO: 3520908 - DNA, 25 bp, Homo sapien
cagctttaaagtctaggcttgggaa

SEQ ID NO: 3520909 - DNA, 25 bp, Homo sapien
ggcaactgaaaagaccgaagcatga

SEQ ID NO: 3520910 - DNA, 25 bp, Homo sapien
tgtaaccactatacaggttgcatca

SEQ ID NO: 3520911 - DNA, 25 bp, Homo sapien
tagtgaattaacgtaacaaggagtg

SEQ ID NO: 3520912 - DNA, 25 bp, Homo sapien
ggttgcatcacaaatagtagtagtg

SEQ ID NO: 3520913 - DNA, 25 bp, Homo sapien
gcattttcccagaacattttacaca

SEQ ID NO: 3520914 - DNA, 25 bp, Homo sapien
catttctgacccattctaacattag

SEQ ID NO: 3520915 - DNA, 25 bp, Homo sapien
aatcaaagagcttgtccacaacctc

SEQ ID NO: 3520916 - DNA, 25 bp, Homo sapien
cacaagccgaaacactggctgctct

SEQ ID NO: 3520917 - DNA, 25 bp, Homo sapien
tggcagcttcaagtatacagggcac

SEQ ID NO: 3520918 - DNA, 25 bp, Homo sapien
gcagtacttattctaaagggtgatt

SEQ ID NO: 3520919 - DNA, 25 bp, Homo sapien
taagaaaaccaaatcttgccaaagc

SEQ ID NO: 3520920 - DNA, 25 bp, Homo sapien
agcaatagggttaagcaaaattcct

SEQ ID NO: 3520921 - DNA, 25 bp, Homo sapien
ttatcagtgtcccaggagtttaaga

SEQ ID NO: 3520922 - DNA, 25 bp, Homo sapien
cataatgaagcaaatgctatcataa

SEQ ID NO: 3520923 - DNA, 25 bp, Homo sapien
tttgttgaacttgacataatgaagc

SEQ ID NO: 3520924 - DNA, 25 bp, Homo sapien
tatcataaatagctggatgttcctg

SEQ ID NO: 3520925 - DNA, 25 bp, Homo sapien
tgctatcataaatagctggatgttc

SEQ ID NO: 3520926 - DNA, 25 bp, Homo sapien
ctgggaaaggcaagtaagcaacaac

SEQ ID NO: 3520927 - DNA, 25 bp, Homo sapien
ctacatggtaaacgtgggttgaatt

SEQ ID NO: 3520928 - DNA, 25 bp, Homo sapien
tgggtctgaatcatacaaacagtgc

SEQ ID NO: 3520929 - DNA, 25 bp, Homo sapien
agcagagtaggtgggtctgaatcat

SEQ ID NO: 3520930 - DNA, 25 bp, Homo sapien
gagtaggtgggtctgaatcatacaa

SEQ ID NO: 3520931 - DNA, 25 bp, Homo sapien
taggtgggtctgaatcatacaaaca

SEQ ID NO: 3520932 - DNA, 25 bp, Homo sapien
tactgcaggtaaaaggattaagagg

SEQ ID NO: 3520933 - DNA, 25 bp, Homo sapien
acagagctgcatctttgtagtcacc

SEQ ID NO: 3520934 - DNA, 25 bp, Homo sapien
caaagaagttaaccgatatgcctca

SEQ ID NO: 3520935 - DNA, 25 bp, Homo sapien
tgtagtcaccatgtgtccattccaa

SEQ ID NO: 3520936 - DNA, 25 bp, Homo sapien
gctgatggacacacatatctcctgg

SEQ ID NO: 3520937 - DNA, 25 bp, Homo sapien
tgatggacacacatatctcctggaa

SEQ ID NO: 3520938 - DNA, 25 bp, Homo sapien
ctcctggaaacaggccatattacct

SEQ ID NO: 3520939 - DNA, 25 bp, Homo sapien
tggaaacaggccatattacctaaaa

SEQ ID NO: 3520940 - DNA, 25 bp, Homo sapien
gactcctagctttcaagttgcctca

SEQ ID NO: 3520941 - DNA, 25 bp, Homo sapien
tctcaaggtgaaagcaaaataatcc

SEQ ID NO: 3520942 - DNA, 25 bp, Homo sapien
tgaagctgaggaagactctcaaggt

SEQ ID NO: 3520943 - DNA, 25 bp, Homo sapien
gatattggtcccgttgacaggaaaa

SEQ ID NO: 3520944 - DNA, 25 bp, Homo sapien
cccatgaatatatcaggagcattaa

SEQ ID NO: 3520945 - DNA, 25 bp, Homo sapien
atatcaggagcattaaattcttgga

SEQ ID NO: 3520946 - DNA, 25 bp, Homo sapien
tggacttggccagtactcccatgaa

SEQ ID NO: 3520947 - DNA, 25 bp, Homo sapien
tcttaatcgaggacacttggacttg

SEQ ID NO: 3520948 - DNA, 25 bp, Homo sapien
tcttcatcaagctccgtcagctgct

SEQ ID NO: 3520949 - DNA, 25 bp, Homo sapien
ccatttcttcatcaagctccgtcag

SEQ ID NO: 3520950 - DNA, 25 bp, Homo sapien
tttcttcatcaagctccgtcagctg

SEQ ID NO: 3520951 - DNA, 25 bp, Homo sapien
atcaagctccgtcagctgctcctca

SEQ ID NO: 3520952 - DNA, 25 bp, Homo sapien
ctgagctagatttggtgttttcagg

SEQ ID NO: 3520953 - DNA, 25 bp, Homo sapien
gatttggtgttttcagggctaacaa

SEQ ID NO: 3520954 - DNA, 25 bp, Homo sapien
tagatttggtgttttcagggctaac

SEQ ID NO: 3520955 - DNA, 25 bp, Homo sapien
gagctagatttggtgttttcagggc

SEQ ID NO: 3520956 - DNA, 25 bp, Homo sapien
ggaaaatgtacaaacagccctggat

SEQ ID NO: 3520957 - DNA, 25 bp, Homo sapien
gttcagagttaagaaagggcctagc

SEQ ID NO: 3520958 - DNA, 25 bp, Homo sapien
taagagcagtatcatgaatagccct

SEQ ID NO: 3520959 - DNA, 25 bp, Homo sapien
ttctggtagcaaaaacgatggacca

SEQ ID NO: 3520960 - DNA, 25 bp, Homo sapien
atgagtccgctgaggacgccgaaga

SEQ ID NO: 3520961 - DNA, 25 bp, Homo sapien
cagtgtttgctgtagaccgtgctcc

SEQ ID NO: 3520962 - DNA, 25 bp, Homo sapien
tgaggacgccgaagagccagtgttt

SEQ ID NO: 3520963 - DNA, 25 bp, Homo sapien
tgtagaccgtgctccctatgcagtc

SEQ ID NO: 3520964 - DNA, 25 bp, Homo sapien
cccgcgcttgaaggccgtgccggaa

SEQ ID NO: 3520965 - DNA, 25 bp, Homo sapien
actttgtcgcgtcccgcgcttgaag

SEQ ID NO: 3520966 - DNA, 25 bp, Homo sapien
tcgcgtcccgcgcttgaaggccgtg

SEQ ID NO: 3520967 - DNA, 25 bp, Homo sapien
gactttgtcgcgtcccgcgcttgaa

SEQ ID NO: 3520968 - DNA, 25 bp, Homo sapien
ctggtgttttcataagatggtttca

SEQ ID NO: 3520969 - DNA, 25 bp, Homo sapien
tggtgttttcataagatggtttcat

SEQ ID NO: 3520970 - DNA, 25 bp, Homo sapien
actggtgttttcataagatggtttc

SEQ ID NO: 3520971 - DNA, 25 bp, Homo sapien
gactggtgttttcataagatggttt

SEQ ID NO: 3520972 - DNA, 25 bp, Homo sapien
aagcatttttatgtgttctatatca

SEQ ID NO: 3520973 - DNA, 25 bp, Homo sapien
caagtactagggatatagaattcag

SEQ ID NO: 3520974 - DNA, 25 bp, Homo sapien
aattcagtaactgtaggtcaacaaa

SEQ ID NO: 3520975 - DNA, 25 bp, Homo sapien
tgtgttctatatcaagtactaggga

SEQ ID NO: 3520976 - DNA, 25 bp, Homo sapien
tggtagcctggccagccagcgaatc

SEQ ID NO: 3520977 - DNA, 25 bp, Homo sapien
tggccccatttgttggtagcctggc

SEQ ID NO: 3520978 - DNA, 25 bp, Homo sapien
ctctggccccatttgttggtagcct

SEQ ID NO: 3520979 - DNA, 25 bp, Homo sapien
ccagccagcgaatcctctgcatggt

SEQ ID NO: 3520980 - DNA, 25 bp, Homo sapien
tagtccaggcaagcaaggagattaa

SEQ ID NO: 3520981 - DNA, 25 bp, Homo sapien
ttctaccatccactcagaccctcgc

SEQ ID NO: 3520982 - DNA, 25 bp, Homo sapien
tctaccatccactcagaccctcgca

SEQ ID NO: 3520983 - DNA, 25 bp, Homo sapien
aaggcagtcaagctctgctcactca

SEQ ID NO: 3520984 - DNA, 25 bp, Homo sapien
gctcactcattcctggcaacatcag

SEQ ID NO: 3520985 - DNA, 25 bp, Homo sapien
tctcctgactgtccaaggcagtcaa

SEQ ID NO: 3520986 - DNA, 25 bp, Homo sapien
tccaaggcagtcaagctctgctcac

SEQ ID NO: 3520987 - DNA, 25 bp, Homo sapien
agccccaagccccctttgtacagca

SEQ ID NO: 3520988 - DNA, 25 bp, Homo sapien
ttctgtagcccagacagccccaagc

SEQ ID NO: 3520989 - DNA, 25 bp, Homo sapien
ctgatcacttctgtagcccagacag

SEQ ID NO: 3520990 - DNA, 25 bp, Homo sapien
gatcacttctgtagcccagacagcc

SEQ ID NO: 3520991 - DNA, 25 bp, Homo sapien
catagttcccccaagcatggaagta

SEQ ID NO: 3520992 - DNA, 25 bp, Homo sapien
tagttcccccaagcatggaagtatt

SEQ ID NO: 3520993 - DNA, 25 bp, Homo sapien
ttcccccaagcatggaagtatttgt

SEQ ID NO: 3520994 - DNA, 25 bp, Homo sapien
tcatagttcccccaagcatggaagt

SEQ ID NO: 3520995 - DNA, 25 bp, Homo sapien
cagagtaggctttccacatgtcttt

SEQ ID NO: 3520996 - DNA, 25 bp, Homo sapien
taggctttccacatgtctttagtcc

SEQ ID NO: 3520997 - DNA, 25 bp, Homo sapien
gagtaggctttccacatgtctttag

SEQ ID NO: 3520998 - DNA, 25 bp, Homo sapien
tcatgtcagagtaggctttccacat

SEQ ID NO: 3520999 - DNA, 25 bp, Homo sapien
cccaatgaaatggaggagtattgcc

SEQ ID NO: 3521000 - DNA, 25 bp, Homo sapien
gtcctccccaatgaaatggaggagt

SEQ ID NO: 3521001 - DNA, 25 bp, Homo sapien
tggaggagtattgcctgcctcacag

SEQ ID NO: 3521002 - DNA, 25 bp, Homo sapien
aatggaggagtattgcctgcctcac

SEQ ID NO: 3521003 - DNA, 25 bp, Homo sapien
gccttgaggaatgttaaccatcctt

SEQ ID NO: 3521004 - DNA, 25 bp, Homo sapien
agctgccttgaggaatgttaaccat

SEQ ID NO: 3521005 - DNA, 25 bp, Homo sapien
ctgccttgaggaatgttaaccatcc

SEQ ID NO: 3521006 - DNA, 25 bp, Homo sapien
cttgaggaatgttaaccatccttgg

SEQ ID NO: 3521007 - DNA, 25 bp, Homo sapien
aaccaaggataatacacattctgtt

SEQ ID NO: 3521008 - DNA, 25 bp, Homo sapien
caaccaaggataatacacattctgt

SEQ ID NO: 3521009 - DNA, 25 bp, Homo sapien
aaacacaaccaaggataatacacat

SEQ ID NO: 3521010 - DNA, 25 bp, Homo sapien
cggggtatttagttaattcataatg

SEQ ID NO: 3521011 - DNA, 25 bp, Homo sapien
tggctttccaaagcgctgcaattac

SEQ ID NO: 3521012 - DNA, 25 bp, Homo sapien
taatgttatacccacctctatctag

SEQ ID NO: 3521013 - DNA, 25 bp, Homo sapien
taattcataatgttatacccacctc

SEQ ID NO: 3521014 - DNA, 25 bp, Homo sapien
tcttatcacactgttcacaatgttg

SEQ ID NO: 3521015 - DNA, 25 bp, Homo sapien
atttattggtggctcttatcacact

SEQ ID NO: 3521016 - DNA, 25 bp, Homo sapien
ctgttcacaatgttgaactcaggtc

SEQ ID NO: 3521017 - DNA, 25 bp, Homo sapien
ttattggtggctcttatcacactgt

SEQ ID NO: 3521018 - DNA, 25 bp, Homo sapien
ccctcaatttccaaatgctgtagta

SEQ ID NO: 3521019 - DNA, 25 bp, Homo sapien
tctgctgatgctcaatcctatctgt

SEQ ID NO: 3521020 - DNA, 25 bp, Homo sapien
tgctgtagtaggacgtagctgtagt

SEQ ID NO: 3521021 - DNA, 25 bp, Homo sapien
aatcctatctgtccaccctcaattt

SEQ ID NO: 3521022 - DNA, 25 bp, Homo sapien
tgttggttctcacctgcgattctgc

SEQ ID NO: 3521023 - DNA, 25 bp, Homo sapien
agtgtttgcagccaatgctctgggc

SEQ ID NO: 3521024 - DNA, 25 bp, Homo sapien
aaccgcaccctgaggtctttaagag

SEQ ID NO: 3521025 - DNA, 25 bp, Homo sapien
tcttgcaaaggctggctcagtcacc

SEQ ID NO: 3521026 - DNA, 25 bp, Homo sapien
tctgcagttggtcgttctgagaaca

SEQ ID NO: 3521027 - DNA, 25 bp, Homo sapien
tgtcctctgcagttggtcgttctga

SEQ ID NO: 3521028 - DNA, 25 bp, Homo sapien
cccttcattgcaggtctgctcactg

SEQ ID NO: 3521029 - DNA, 25 bp, Homo sapien
tctgagaacagctgttccccttcat

SEQ ID NO: 3521030 - DNA, 25 bp, Homo sapien
catggtggcaagatccctcttaaat

SEQ ID NO: 3521031 - DNA, 25 bp, Homo sapien
gttggtgttaattttgtgatattcg

SEQ ID NO: 3521032 - DNA, 25 bp, Homo sapien
cattatcttttgtggccttgaagta

SEQ ID NO: 3521033 - DNA, 25 bp, Homo sapien
taatgaacattatcttttgtggcct

SEQ ID NO: 3521034 - DNA, 25 bp, Homo sapien
actttagcacaggatggctgtctac

SEQ ID NO: 3521035 - DNA, 25 bp, Homo sapien
gtcactaaatcccagaaaggctctt

SEQ ID NO: 3521036 - DNA, 25 bp, Homo sapien
tttccgtgcagctcctaaaggcatc

SEQ ID NO: 3521037 - DNA, 25 bp, Homo sapien
agaagggtcctctggagtcactaaa

SEQ ID NO: 3521038 - DNA, 25 bp, Homo sapien
aaacgcggttgtgctctggctcctg

SEQ ID NO: 3521039 - DNA, 25 bp, Homo sapien
ggaaacgcggttgtgctctggctcc

SEQ ID NO: 3521040 - DNA, 25 bp, Homo sapien
aacgcggttgtgctctggctcctgg

SEQ ID NO: 3521041 - DNA, 25 bp, Homo sapien
caggaaacgcggttgtgctctggct

SEQ ID NO: 3521042 - DNA, 25 bp, Homo sapien
aaatgtgtagcaagtggtagcctct

SEQ ID NO: 3521043 - DNA, 25 bp, Homo sapien
cacttggaaagaaagcatacacatg

SEQ ID NO: 3521044 - DNA, 25 bp, Homo sapien
caccgaaacatggtgtcaggccatt

SEQ ID NO: 3521045 - DNA, 25 bp, Homo sapien
tgcatacacttctctaccacttgga

SEQ ID NO: 3521046 - DNA, 25 bp, Homo sapien
caatcaacggacgtgaggagactcc

SEQ ID NO: 3521047 - DNA, 25 bp, Homo sapien
gacagtaaatcccatacggcagggt

SEQ ID NO: 3521048 - DNA, 25 bp, Homo sapien
gtgacttattatctgcgagcctctg

SEQ ID NO: 3521049 - DNA, 25 bp, Homo sapien
tgtcggactgacaggaaacgcggtt

SEQ ID NO: 3521050 - DNA, 25 bp, Homo sapien
aggctgtacgtgaccatcctgctca

SEQ ID NO: 3521051 - DNA, 25 bp, Homo sapien
ctgctcacagtgctggtcttcctcc

SEQ ID NO: 3521052 - DNA, 25 bp, Homo sapien
caggctgtacgtgaccatcctgctc

SEQ ID NO: 3521053 - DNA, 25 bp, Homo sapien
gccagcagagcttgaagaggtattg

SEQ ID NO: 3521054 - DNA, 25 bp, Homo sapien
aggccagcagagcttgaagaggtat

SEQ ID NO: 3521055 - DNA, 25 bp, Homo sapien
ggccagcagagcttgaagaggtatt

SEQ ID NO: 3521056 - DNA, 25 bp, Homo sapien
gaccactttcaggaccagtcgtaga

SEQ ID NO: 3521057 - DNA, 25 bp, Homo sapien
cgtagatacagctgttcttctctgg

SEQ ID NO: 3521058 - DNA, 25 bp, Homo sapien
tcaggaccagtcgtagatacagctg

SEQ ID NO: 3521059 - DNA, 25 bp, Homo sapien
gggcttggaacaaggaccactttca

SEQ ID NO: 3521060 - DNA, 25 bp, Homo sapien
atttcacatcaggaagaaccctgac

SEQ ID NO: 3521061 - DNA, 25 bp, Homo sapien
atctgagggagctggatttcacatc

SEQ ID NO: 3521062 - DNA, 25 bp, Homo sapien
tcacatcaggaagaaccctgaccac

SEQ ID NO: 3521063 - DNA, 25 bp, Homo sapien
gagggagctggatttcacatcagga

SEQ ID NO: 3521064 - DNA, 25 bp, Homo sapien
ggtgccctataccagttcctgggga

SEQ ID NO: 3521065 - DNA, 25 bp, Homo sapien
ggacacaaagctcagtgaccctgtg

SEQ ID NO: 3521066 - DNA, 25 bp, Homo sapien
gacacaaagctcagtgaccctgtgt

SEQ ID NO: 3521067 - DNA, 25 bp, Homo sapien
tattgaacacctctaggtgccctat

SEQ ID NO: 3521068 - DNA, 25 bp, Homo sapien
tatttcttaggcaggccgtcaggtc

SEQ ID NO: 3521069 - DNA, 25 bp, Homo sapien
ttaggcaggccgtcaggtctgaagc

SEQ ID NO: 3521070 - DNA, 25 bp, Homo sapien
tctgaagcggtcggggtctttgcca

SEQ ID NO: 3521071 - DNA, 25 bp, Homo sapien
tcagtatttcttaggcaggccgtca

SEQ ID NO: 3521072 - DNA, 25 bp, Homo sapien
aaatagcagtctattaatccctgaa

SEQ ID NO: 3521073 - DNA, 25 bp, Homo sapien
gcagtctattaatccctgaagatag

SEQ ID NO: 3521074 - DNA, 25 bp, Homo sapien
attaatccctgaagatagaccctgg

SEQ ID NO: 3521075 - DNA, 25 bp, Homo sapien
tctattaatccctgaagatagaccc

SEQ ID NO: 3521076 - DNA, 25 bp, Homo sapien
catagtttccccgagcatagagata

SEQ ID NO: 3521077 - DNA, 25 bp, Homo sapien
gatatcattatgtcccaataggctc

SEQ ID NO: 3521078 - DNA, 25 bp, Homo sapien
ttgaattttggtgattggatatcat

SEQ ID NO: 3521079 - DNA, 25 bp, Homo sapien
cccgagcatagagatatctgtttga

SEQ ID NO: 3521080 - DNA, 25 bp, Homo sapien
tcattggcattgtgcttaaagtaac

SEQ ID NO: 3521081 - DNA, 25 bp, Homo sapien
gatctactagcaagagttttctcca

SEQ ID NO: 3521082 - DNA, 25 bp, Homo sapien
tggcatggcatgactgtcctttctc

SEQ ID NO: 3521083 - DNA, 25 bp, Homo sapien
tttcaaatgctattcctagtcccac

SEQ ID NO: 3521084 - DNA, 25 bp, Homo sapien
gcagaaaacaatgcctgtgaaaagc

SEQ ID NO: 3521085 - DNA, 25 bp, Homo sapien
agctttcactggtgactcccatgac

SEQ ID NO: 3521086 - DNA, 25 bp, Homo sapien
gagcctccttgaaaaacgaacgcca

SEQ ID NO: 3521087 - DNA, 25 bp, Homo sapien
aaacgaacgccagctttcactggtg

SEQ ID NO: 3521088 - DNA, 25 bp, Homo sapien
ggtatgtatgttcggcccaggctag

SEQ ID NO: 3521089 - DNA, 25 bp, Homo sapien
caacgtgttatttggtctgtggtca

SEQ ID NO: 3521090 - DNA, 25 bp, Homo sapien
tgtgccagccaaaggactgaatttg

SEQ ID NO: 3521091 - DNA, 25 bp, Homo sapien
gcactgaccccgtaatgaggtagaa

SEQ ID NO: 3521092 - DNA, 25 bp, Homo sapien
gacctttctccagatgaaatttcag

SEQ ID NO: 3521093 - DNA, 25 bp, Homo sapien
ggcagagctgctggtatcttctggc

SEQ ID NO: 3521094 - DNA, 25 bp, Homo sapien
tggcattaatgggagaacggtttta

SEQ ID NO: 3521095 - DNA, 25 bp, Homo sapien
ggagctatagttggtacctctgctg

SEQ ID NO: 3521096 - DNA, 25 bp, Homo sapien
gatggcttatgttctgccaaagaaa

SEQ ID NO: 3521097 - DNA, 25 bp, Homo sapien
gaaaatgagtatgttatctaggata

SEQ ID NO: 3521098 - DNA, 25 bp, Homo sapien
tatcttctgattatgatggcttatg

SEQ ID NO: 3521099 - DNA, 25 bp, Homo sapien
tagttgtcttctcaatttcatagta

SEQ ID NO: 3521100 - DNA, 25 bp, Homo sapien
gaatggagacaccacactgagcctt

SEQ ID NO: 3521101 - DNA, 25 bp, Homo sapien
attgcctggatcaatgcctgggtca

SEQ ID NO: 3521102 - DNA, 25 bp, Homo sapien
cctgcaaccaccttcacgagatagt

SEQ ID NO: 3521103 - DNA, 25 bp, Homo sapien
ggtgaactcctcaactgctaagcag

SEQ ID NO: 3521104 - DNA, 25 bp, Homo sapien
cagttgtggttgtattcctcagtca

SEQ ID NO: 3521105 - DNA, 25 bp, Homo sapien
gttgtggttgtattcctcagtcatc

SEQ ID NO: 3521106 - DNA, 25 bp, Homo sapien
tgtggttgtattcctcagtcatctt

SEQ ID NO: 3521107 - DNA, 25 bp, Homo sapien
gtggttgtattcctcagtcatcttc

SEQ ID NO: 3521108 - DNA, 25 bp, Homo sapien
ggagatgtccaactcaagcagtgag

SEQ ID NO: 3521109 - DNA, 25 bp, Homo sapien
tgagaaccagagcaactgatcacgt

SEQ ID NO: 3521110 - DNA, 25 bp, Homo sapien
gccctctgcaagctagaaactcagg

SEQ ID NO: 3521111 - DNA, 25 bp, Homo sapien
taaatataacagtaggctgggctca

SEQ ID NO: 3521112 - DNA, 25 bp, Homo sapien
cataggtattaggtgtgactttaca

SEQ ID NO: 3521113 - DNA, 25 bp, Homo sapien
ataaaaggtatttgggtgtgccaga

SEQ ID NO: 3521114 - DNA, 25 bp, Homo sapien
gatgctgtctcaaataacgaaacaa

SEQ ID NO: 3521115 - DNA, 25 bp, Homo sapien
tccttggatacaaatttcgatttaa

SEQ ID NO: 3521116 - DNA, 25 bp, Homo sapien
gacctcactaactttgtatccctgc

SEQ ID NO: 3521117 - DNA, 25 bp, Homo sapien
tgccccgagggcctcatagccaggt

SEQ ID NO: 3521118 - DNA, 25 bp, Homo sapien
tattatatgccatatctcagcttct

SEQ ID NO: 3521119 - DNA, 25 bp, Homo sapien
gcatttattagatgcctattatatg

SEQ ID NO: 3521120 - DNA, 25 bp, Homo sapien
ttggcagcctgatcggccagcgagt

SEQ ID NO: 3521121 - DNA, 25 bp, Homo sapien
ccacggcctgtgagtctctggatat

SEQ ID NO: 3521122 - DNA, 25 bp, Homo sapien
gccccatttattggcagcctgatcg

SEQ ID NO: 3521123 - DNA, 25 bp, Homo sapien
gagtcctccgcaccacggcctgtga

SEQ ID NO: 3521124 - DNA, 25 bp, Homo sapien
ggaggagtgaaaacactgaccctgc

SEQ ID NO: 3521125 - DNA, 25 bp, Homo sapien
aggaggagtgaaaacactgaccctg

SEQ ID NO: 3521126 - DNA, 25 bp, Homo sapien
gaggagtgaaaacactgaccctgcc

SEQ ID NO: 3521127 - DNA, 25 bp, Homo sapien
cagccctaacgtcccaggagctcca

SEQ ID NO: 3521128 - DNA, 25 bp, Homo sapien
ccccttttggcagcatcatagttcc

SEQ ID NO: 3521129 - DNA, 25 bp, Homo sapien
gaagtatttgtctgagccgatgtaa

SEQ ID NO: 3521130 - DNA, 25 bp, Homo sapien
tctgagccgatgtaattggcttctc

SEQ ID NO: 3521131 - DNA, 25 bp, Homo sapien
cgatgtaattggcttctctcatgtc

SEQ ID NO: 3521132 - DNA, 25 bp, Homo sapien
tttctaatcacccagagagaaactg

SEQ ID NO: 3521133 - DNA, 25 bp, Homo sapien
gagcacactggagcaatgtaactca

SEQ ID NO: 3521134 - DNA, 25 bp, Homo sapien
ggagcaatgtaactcactacaactt

SEQ ID NO: 3521135 - DNA, 25 bp, Homo sapien
ttggctgcactttctaatcacccag

SEQ ID NO: 3521136 - DNA, 25 bp, Homo sapien
ctgaaagactcgagacaggcaaccc

SEQ ID NO: 3521137 - DNA, 25 bp, Homo sapien
tcccttacggctcaggagatgtgtt

SEQ ID NO: 3521138 - DNA, 25 bp, Homo sapien
tgtttttgatacaccttgcagcggc

SEQ ID NO: 3521139 - DNA, 25 bp, Homo sapien
tgtgcgttgttactggatgccccgt

SEQ ID NO: 3521140 - DNA, 25 bp, Homo sapien
aggaacgaaaagaagcttcggctgc

SEQ ID NO: 3521141 - DNA, 25 bp, Homo sapien
ggaacgaaaagaagcttcggctgct

SEQ ID NO: 3521142 - DNA, 25 bp, Homo sapien
catcaaaagcctcgccaaggaacga

SEQ ID NO: 3521143 - DNA, 25 bp, Homo sapien
tgggacttatattccgacgagagcc

SEQ ID NO: 3521144 - DNA, 25 bp, Homo sapien
tctaggaaaccttgcagcaggacct

SEQ ID NO: 3521145 - DNA, 25 bp, Homo sapien
gcctgactgcataagaggatgccaa

SEQ ID NO: 3521146 - DNA, 25 bp, Homo sapien
ggaaggcaggagttaccaccagact

SEQ ID NO: 3521147 - DNA, 25 bp, Homo sapien
taaagcctttagcacctggtattcc

SEQ ID NO: 3521148 - DNA, 25 bp, Homo sapien
caagtactaccaggcccgaccctgc

SEQ ID NO: 3521149 - DNA, 25 bp, Homo sapien
agtactaccaggcccgaccctgctt

SEQ ID NO: 3521150 - DNA, 25 bp, Homo sapien
tactaccaggcccgaccctgcttac

SEQ ID NO: 3521151 - DNA, 25 bp, Homo sapien
agatcagaggagataagacaccttc

SEQ ID NO: 3521152 - DNA, 25 bp, Homo sapien
tcagaggagataagacaccttcaga

SEQ ID NO: 3521153 - DNA, 25 bp, Homo sapien
gaggagataagacaccttcagaatg

SEQ ID NO: 3521154 - DNA, 25 bp, Homo sapien
ctctctagatcagaggagataagac

SEQ ID NO: 3521155 - DNA, 25 bp, Homo sapien
ttaaaaatcactccttggtgtgctc

SEQ ID NO: 3521156 - DNA, 25 bp, Homo sapien
aaaaatcactccttggtgtgctcct

SEQ ID NO: 3521157 - DNA, 25 bp, Homo sapien
aaaatcactccttggtgtgctcctc

SEQ ID NO: 3521158 - DNA, 25 bp, Homo sapien
taaaaatcactccttggtgtgctcc

SEQ ID NO: 3521159 - DNA, 25 bp, Homo sapien
ctgatctgtgctgtagctgagctgc

SEQ ID NO: 3521160 - DNA, 25 bp, Homo sapien
gatctgtgctgtagctgagctgcgg

SEQ ID NO: 3521161 - DNA, 25 bp, Homo sapien
tgctgtagctgagctgcgggtccct

SEQ ID NO: 3521162 - DNA, 25 bp, Homo sapien
tctgtgctgtagctgagctgcgggt

SEQ ID NO: 3521163 - DNA, 25 bp, Homo sapien
tgtgtaagcaggatccgagcgttct

SEQ ID NO: 3521164 - DNA, 25 bp, Homo sapien
cgagcgttctgcacaccgaggaaat

SEQ ID NO: 3521165 - DNA, 25 bp, Homo sapien
gagggccagtgtcttcgtcaaatta

SEQ ID NO: 3521166 - DNA, 25 bp, Homo sapien
tgcaaagtgaacgagcttcgggcct

SEQ ID NO: 3521167 - DNA, 25 bp, Homo sapien
tgacagtctggtggtaactcctgcc

SEQ ID NO: 3521168 - DNA, 25 bp, Homo sapien
taggctacttgagggagtgacagtc

SEQ ID NO: 3521169 - DNA, 25 bp, Homo sapien
tcttatgcagtcaggcttcagggct

SEQ ID NO: 3521170 - DNA, 25 bp, Homo sapien
cagagggaacacacggtaaatgcgt

SEQ ID NO: 3521171 - DNA, 25 bp, Homo sapien
tataccaagccataagttgtgctgc

SEQ ID NO: 3521172 - DNA, 25 bp, Homo sapien
cttgatcagaagcaacgcctttggg

SEQ ID NO: 3521173 - DNA, 25 bp, Homo sapien
catgtaacaggtgcagagccaagac

SEQ ID NO: 3521174 - DNA, 25 bp, Homo sapien
aacaaggccaagagattcagcagtg

SEQ ID NO: 3521175 - DNA, 25 bp, Homo sapien
tgttggctatgcacacaagagtgtc

SEQ ID NO: 3521176 - DNA, 25 bp, Homo sapien
tgatgccactgggaccttcagagga

SEQ ID NO: 3521177 - DNA, 25 bp, Homo sapien
cataaaaagtgtctcagtgctctcc

SEQ ID NO: 3521178 - DNA, 25 bp, Homo sapien
gagcaaggccaatacagggacacat

SEQ ID NO: 3521179 - DNA, 25 bp, Homo sapien
ctggagtaggaagtagaaggtccac

SEQ ID NO: 3521180 - DNA, 25 bp, Homo sapien
gtccacggagcagacccaaagcaag

SEQ ID NO: 3521181 - DNA, 25 bp, Homo sapien
gaaggtccacggagcagacccaaag

SEQ ID NO: 3521182 - DNA, 25 bp, Homo sapien
aggtccacggagcagacccaaagca

SEQ ID NO: 3521183 - DNA, 25 bp, Homo sapien
ggtggaacccatcactgtagcagtg

SEQ ID NO: 3521184 - DNA, 25 bp, Homo sapien
tgaattaaagcctatggtggaaccc

SEQ ID NO: 3521185 - DNA, 25 bp, Homo sapien
tctgatacacagtgcaaagctttgc

SEQ ID NO: 3521186 - DNA, 25 bp, Homo sapien
gaaagtaaggtctggacacagcaag

SEQ ID NO: 3521187 - DNA, 25 bp, Homo sapien
gagcaggttgccaccccagttcagg

SEQ ID NO: 3521188 - DNA, 25 bp, Homo sapien
tgagcaggttgccaccccagttcag

SEQ ID NO: 3521189 - DNA, 25 bp, Homo sapien
gagtagatattcaaaccaaggcagt

SEQ ID NO: 3521190 - DNA, 25 bp, Homo sapien
gaaaagggaggcaaccatgaatcac

SEQ ID NO: 3521191 - DNA, 25 bp, Homo sapien
tgtgatgccctgtaaaacagccggt

SEQ ID NO: 3521192 - DNA, 25 bp, Homo sapien
tgtctatgggtctgataactaccag

SEQ ID NO: 3521193 - DNA, 25 bp, Homo sapien
tcatgctgtctgcttgtcacgggac

SEQ ID NO: 3521194 - DNA, 25 bp, Homo sapien
tgctgtgccttgagaaggtctgtga

SEQ ID NO: 3521195 - DNA, 25 bp, Homo sapien
cctctgggccttctagtagtgactg

SEQ ID NO: 3521196 - DNA, 25 bp, Homo sapien
tttatcaaatgagaattgctgtgcc

SEQ ID NO: 3521197 - DNA, 25 bp, Homo sapien
gctcataataaacctcctgtctaca

SEQ ID NO: 3521198 - DNA, 25 bp, Homo sapien
aatgctcataataaacctcctgtct

SEQ ID NO: 3521199 - DNA, 25 bp, Homo sapien
aaaatgctcataataaacctcctgt

SEQ ID NO: 3521200 - DNA, 25 bp, Homo sapien
tgctcataataaacctcctgtctac

SEQ ID NO: 3521201 - DNA, 25 bp, Homo sapien
tgctatgtaaatgtacaggagcctg

SEQ ID NO: 3521202 - DNA, 25 bp, Homo sapien
gacaaatgacaatctacttacataa

SEQ ID NO: 3521203 - DNA, 25 bp, Homo sapien
tatgtaaatgtacaggagcctgaca

SEQ ID NO: 3521204 - DNA, 25 bp, Homo sapien
aggagcctgacaaatgacaatctac

SEQ ID NO: 3521205 - DNA, 25 bp, Homo sapien
tacagacactgacaaaagtagcccc

SEQ ID NO: 3521206 - DNA, 25 bp, Homo sapien
gaaaagcttctgctcccaacatgga

SEQ ID NO: 3521207 - DNA, 25 bp, Homo sapien
aaacacatctcattgcggcctggac

SEQ ID NO: 3521208 - DNA, 25 bp, Homo sapien
tcacagatgccgatgccaagggtac

SEQ ID NO: 3521209 - DNA, 25 bp, Homo sapien
aaaccgatcgcatttttcaagcatg

SEQ ID NO: 3521210 - DNA, 25 bp, Homo sapien
ttcaagcatgctttgtatcaaggcc

SEQ ID NO: 3521211 - DNA, 25 bp, Homo sapien
cagagaaaccgatcgcatttttcaa

SEQ ID NO: 3521212 - DNA, 25 bp, Homo sapien
ctgggaccagagaaaccgatcgcat

SEQ ID NO: 3521213 - DNA, 25 bp, Homo sapien
cacaatgagatatatagtacctgac

SEQ ID NO: 3521214 - DNA, 25 bp, Homo sapien
gaactcttacagcaacaacaacgaa

SEQ ID NO: 3521215 - DNA, 25 bp, Homo sapien
aacacccaacctgattcaacatggg

SEQ ID NO: 3521216 - DNA, 25 bp, Homo sapien
gaatatcagagaactcttacagcaa

SEQ ID NO: 3521217 - DNA, 25 bp, Homo sapien
agaattccactttcaggtatatacc

SEQ ID NO: 3521218 - DNA, 25 bp, Homo sapien
tatactcatattcatagcagcgtta

SEQ ID NO: 3521219 - DNA, 25 bp, Homo sapien
atgattccagaattccactttcagg

SEQ ID NO: 3521220 - DNA, 25 bp, Homo sapien
tggaagacatatttgtatactcata

SEQ ID NO: 3521221 - DNA, 25 bp, Homo sapien
ggttaatctgaacagcatcttggtc

SEQ ID NO: 3521222 - DNA, 25 bp, Homo sapien
catcttggtcatggctgtgaatgaa

SEQ ID NO: 3521223 - DNA, 25 bp, Homo sapien
cctcatgttagtgatgggtcgggac

SEQ ID NO: 3521224 - DNA, 25 bp, Homo sapien
gggtcgggactaaatgatctccaca

SEQ ID NO: 3521225 - DNA, 25 bp, Homo sapien
cacattcctgtagcagtgaccaagc

SEQ ID NO: 3521226 - DNA, 25 bp, Homo sapien
catggccttagctaacagaagtgcc

SEQ ID NO: 3521227 - DNA, 25 bp, Homo sapien
tgaggctcccatttagtgactcctg

SEQ ID NO: 3521228 - DNA, 25 bp, Homo sapien
tatcgcaggttctggtaaacttctc

SEQ ID NO: 3521229 - DNA, 25 bp, Homo sapien
caatccctgtactcttgtggagcct

SEQ ID NO: 3521230 - DNA, 25 bp, Homo sapien
aatgtgacacaggaaagaacttgac

SEQ ID NO: 3521231 - DNA, 25 bp, Homo sapien
ggcatatcctatgctaagcactgga

SEQ ID NO: 3521232 - DNA, 25 bp, Homo sapien
cactcagtaattacccagggcatat

SEQ ID NO: 3521233 - DNA, 25 bp, Homo sapien
tatatgatcattgaaaggttcacca

SEQ ID NO: 3521234 - DNA, 25 bp, Homo sapien
ccaagagtaaccagttaggattgac

SEQ ID NO: 3521235 - DNA, 25 bp, Homo sapien
tatcaagggctataggtaaaaaaca

SEQ ID NO: 3521236 - DNA, 25 bp, Homo sapien
tgagaggtctggagtaacttctaaa

SEQ ID NO: 3521237 - DNA, 25 bp, Homo sapien
ctccagctccaaacagagaattaga

SEQ ID NO: 3521238 - DNA, 25 bp, Homo sapien
cagagaattagatatccaggccaga

SEQ ID NO: 3521239 - DNA, 25 bp, Homo sapien
cttccatcaggctcatatcattcag

SEQ ID NO: 3521240 - DNA, 25 bp, Homo sapien
tacacaatattggtgaaggcctctc

SEQ ID NO: 3521241 - DNA, 25 bp, Homo sapien
caagacctgcagatgtctgtcattt

SEQ ID NO: 3521242 - DNA, 25 bp, Homo sapien
tttaattagatgaaggatcagctga

SEQ ID NO: 3521243 - DNA, 25 bp, Homo sapien
ccacaagacctgcagatgtctgtca

SEQ ID NO: 3521244 - DNA, 25 bp, Homo sapien
tctttggttataaaatctgcaggaa

SEQ ID NO: 3521245 - DNA, 25 bp, Homo sapien
accccaggaaagcaagtgtgaatga

SEQ ID NO: 3521246 - DNA, 25 bp, Homo sapien
ctgtaaccccaggaaagcaagtgtg

SEQ ID NO: 3521247 - DNA, 25 bp, Homo sapien
ccaggaaagcaagtgtgaatgaggc

SEQ ID NO: 3521248 - DNA, 25 bp, Homo sapien
gtaaccccaggaaagcaagtgtgaa

SEQ ID NO: 3521249 - DNA, 25 bp, Homo sapien
catccattgtgctggtgcttggtgg

SEQ ID NO: 3521250 - DNA, 25 bp, Homo sapien
cagaagggactcaagaaaagatgac

SEQ ID NO: 3521251 - DNA, 25 bp, Homo sapien
taaagactctggttgcagaagggac

SEQ ID NO: 3521252 - DNA, 25 bp, Homo sapien
ggagcatcaagggacactgccaaaa

SEQ ID NO: 3521253 - DNA, 25 bp, Homo sapien
caaaatgtctagaaatgctggtgac

SEQ ID NO: 3521254 - DNA, 25 bp, Homo sapien
gaaaacctgattaagagatgaatat

SEQ ID NO: 3521255 - DNA, 25 bp, Homo sapien
ggaaaaaagtcaccaatcttcatgc

SEQ ID NO: 3521256 - DNA, 25 bp, Homo sapien
ctggtgaccaagctccaagataaca

SEQ ID NO: 3521257 - DNA, 25 bp, Homo sapien
ttaaggatcgaagagcagactcccc

SEQ ID NO: 3521258 - DNA, 25 bp, Homo sapien
caccagactgtctaaataggccaaa

SEQ ID NO: 3521259 - DNA, 25 bp, Homo sapien
tgtatgatatccgatggcaaaatgg

SEQ ID NO: 3521260 - DNA, 25 bp, Homo sapien
aaaactcagcaggatgatgatgaca

SEQ ID NO: 3521261 - DNA, 25 bp, Homo sapien
gactatcaaaaggaacctcgtcatc

SEQ ID NO: 3521262 - DNA, 25 bp, Homo sapien
caaccaacaacggactatcaaaagg

SEQ ID NO: 3521263 - DNA, 25 bp, Homo sapien
ggaacctcgtcatctagtaacttta

SEQ ID NO: 3521264 - DNA, 25 bp, Homo sapien
tatcaaaaggaacctcgtcatctag

SEQ ID NO: 3521265 - DNA, 25 bp, Homo sapien
ctccatatacacaggattggaactt

SEQ ID NO: 3521266 - DNA, 25 bp, Homo sapien
catatacacaggattggaacttgcc

SEQ ID NO: 3521267 - DNA, 25 bp, Homo sapien
tatacacaggattggaacttgccat

SEQ ID NO: 3521268 - DNA, 25 bp, Homo sapien
ccatatacacaggattggaacttgc

SEQ ID NO: 3521269 - DNA, 25 bp, Homo sapien
caatattaagcattacaagagaaac

SEQ ID NO: 3521270 - DNA, 25 bp, Homo sapien
tccaaactttatctcttaggcggaa

SEQ ID NO: 3521271 - DNA, 25 bp, Homo sapien
tcattagtcacgtacctactgtgtg

SEQ ID NO: 3521272 - DNA, 25 bp, Homo sapien
tactgtgtggacctattatgtgcaa

SEQ ID NO: 3521273 - DNA, 25 bp, Homo sapien
caaggtcttgaaacgttgtctaggc

SEQ ID NO: 3521274 - DNA, 25 bp, Homo sapien
gaaacgttgtctaggctggcatgtg

SEQ ID NO: 3521275 - DNA, 25 bp, Homo sapien
gcctagctgcaatacctgggtgtgt

SEQ ID NO: 3521276 - DNA, 25 bp, Homo sapien
tacgttgcctagctgcagtgcctgt

SEQ ID NO: 3521277 - DNA, 25 bp, Homo sapien
taatacgaatttctatctttgataa

SEQ ID NO: 3521278 - DNA, 25 bp, Homo sapien
tctttgataaggcaatctgagtatt

SEQ ID NO: 3521279 - DNA, 25 bp, Homo sapien
tttgataaggcaatctgagtattac

SEQ ID NO: 3521280 - DNA, 25 bp, Homo sapien
ttttaatacgaatttctatctttga

SEQ ID NO: 3521281 - DNA, 25 bp, Homo sapien
tcaatccttcaataaaagtatccca

SEQ ID NO: 3521282 - DNA, 25 bp, Homo sapien
aagcttgatactctccttcgctctt

SEQ ID NO: 3521283 - DNA, 25 bp, Homo sapien
acagaagggctattactgtaactaa

SEQ ID NO: 3521284 - DNA, 25 bp, Homo sapien
gcttgatactctccttcgctctttt

SEQ ID NO: 3521285 - DNA, 25 bp, Homo sapien
tgcaatggcgcatggagaacatatt

SEQ ID NO: 3521286 - DNA, 25 bp, Homo sapien
tcaattcagccaggtcgttccgaag

SEQ ID NO: 3521287 - DNA, 25 bp, Homo sapien
gttccgaagaccacttgcaatggcg

SEQ ID NO: 3521288 - DNA, 25 bp, Homo sapien
tttctaaatgtgaaagccactcctg

SEQ ID NO: 3521289 - DNA, 25 bp, Homo sapien
taaaaactatctcaacaagatgaca

SEQ ID NO: 3521290 - DNA, 25 bp, Homo sapien
tactcatctggaataaacgttactt

SEQ ID NO: 3521291 - DNA, 25 bp, Homo sapien
tcaggaccactactgatggactcag

SEQ ID NO: 3521292 - DNA, 25 bp, Homo sapien
ttaacctaaccaatgtaacatactc

SEQ ID NO: 3521293 - DNA, 25 bp, Homo sapien
gctgttgctactttaagctcctgga

SEQ ID NO: 3521294 - DNA, 25 bp, Homo sapien
gcttctgctgttgctactttaagct

SEQ ID NO: 3521295 - DNA, 25 bp, Homo sapien
gctactttaagctcctggaacctgt

SEQ ID NO: 3521296 - DNA, 25 bp, Homo sapien
gttgctactttaagctcctggaacc

SEQ ID NO: 3521297 - DNA, 25 bp, Homo sapien
tcagtagttttacgcacaaagctag

SEQ ID NO: 3521298 - DNA, 25 bp, Homo sapien
tgggcaggtatctgaactcacatcc

SEQ ID NO: 3521299 - DNA, 25 bp, Homo sapien
cactttcagatcagggctcgtgtga

SEQ ID NO: 3521300 - DNA, 25 bp, Homo sapien
gaagggtgccaatcttctcagtagt

SEQ ID NO: 3521301 - DNA, 25 bp, Homo sapien
atgccgaacgggagaaaagtttcat

SEQ ID NO: 3521302 - DNA, 25 bp, Homo sapien
agatggagaacgaaatggtaatgga

SEQ ID NO: 3521303 - DNA, 25 bp, Homo sapien
aaatggtaatggaatgccgaacggg

SEQ ID NO: 3521304 - DNA, 25 bp, Homo sapien
taatggaatgccgaacgggagaaaa

SEQ ID NO: 3521305 - DNA, 25 bp, Homo sapien
caccgaggcaggtaccttcatttgc

SEQ ID NO: 3521306 - DNA, 25 bp, Homo sapien
gatggtccacataaaacaccgaggc

SEQ ID NO: 3521307 - DNA, 25 bp, Homo sapien
gccacaggaatactcgcacatcgaa

SEQ ID NO: 3521308 - DNA, 25 bp, Homo sapien
catcgaaaaaggaaggcaatgaccc

SEQ ID NO: 3521309 - DNA, 25 bp, Homo sapien
cacaacactgatctggcaggtcctc

SEQ ID NO: 3521310 - DNA, 25 bp, Homo sapien
gctgtgaggtgaattctttaaatct

SEQ ID NO: 3521311 - DNA, 25 bp, Homo sapien
cttcatttccgtgtgagccacaaca

SEQ ID NO: 3521312 - DNA, 25 bp, Homo sapien
gactgactgcctcttctactactaa

SEQ ID NO: 3521313 - DNA, 25 bp, Homo sapien
gatgaaatggagcttcttctactgc

SEQ ID NO: 3521314 - DNA, 25 bp, Homo sapien
tgctacaagctgaatccaaaggttc

SEQ ID NO: 3521315 - DNA, 25 bp, Homo sapien
gagaaattagatcattgtaggtgcc

SEQ ID NO: 3521316 - DNA, 25 bp, Homo sapien
taagatcaattcttccagttgagaa

SEQ ID NO: 3521317 - DNA, 25 bp, Homo sapien
gcatgtattgctgtatctgtaggtc

SEQ ID NO: 3521318 - DNA, 25 bp, Homo sapien
tgtaacacaatcttgcaaggtagga

SEQ ID NO: 3521319 - DNA, 25 bp, Homo sapien
tctgggcatgtattgctgtatctgt

SEQ ID NO: 3521320 - DNA, 25 bp, Homo sapien
ttgcaaggtaggagagtttcaccaa

SEQ ID NO: 3521321 - DNA, 25 bp, Homo sapien
gactttcccatttaggtgcaaacag

SEQ ID NO: 3521322 - DNA, 25 bp, Homo sapien
ggaaaagacagcatgtacgagcagc

SEQ ID NO: 3521323 - DNA, 25 bp, Homo sapien
ttcttagcaggcgttccacacagcg

SEQ ID NO: 3521324 - DNA, 25 bp, Homo sapien
agttccataggcctcttcttagcag

SEQ ID NO: 3521325 - DNA, 25 bp, Homo sapien
gaacttgaacattctgaggaatgaa

SEQ ID NO: 3521326 - DNA, 25 bp, Homo sapien
agaacttgaacattctgaggaatga

SEQ ID NO: 3521327 - DNA, 25 bp, Homo sapien
tgtccaagtcagcacacaatgctca

SEQ ID NO: 3521328 - DNA, 25 bp, Homo sapien
ctttctgtccaagtcagcacacaat

SEQ ID NO: 3521329 - DNA, 25 bp, Homo sapien
tacccttagaggcaattagttaaca

SEQ ID NO: 3521330 - DNA, 25 bp, Homo sapien
agctgtatgatcatactgaggttct

SEQ ID NO: 3521331 - DNA, 25 bp, Homo sapien
ccagctgtatgatcatactgaggtt

SEQ ID NO: 3521332 - DNA, 25 bp, Homo sapien
gctgtatgatcatactgaggttctg

SEQ ID NO: 3521333 - DNA, 25 bp, Homo sapien
cagctgtatgatcatactgaggttc

SEQ ID NO: 3521334 - DNA, 25 bp, Homo sapien
aaagaaacaagctccatattctcca

SEQ ID NO: 3521335 - DNA, 25 bp, Homo sapien
caatatatcagaggttgctggcccc

SEQ ID NO: 3521336 - DNA, 25 bp, Homo sapien
tggcaacgagaggagtttcttgaac

SEQ ID NO: 3521337 - DNA, 25 bp, Homo sapien
gagcctgggcgagcacaatatatca

SEQ ID NO: 3521338 - DNA, 25 bp, Homo sapien
ctaacatccagaaaggaagagaaag

SEQ ID NO: 3521339 - DNA, 25 bp, Homo sapien
cagaaaggaagagaaagcagattta

SEQ ID NO: 3521340 - DNA, 25 bp, Homo sapien
taacatccagaaaggaagagaaagc

SEQ ID NO: 3521341 - DNA, 25 bp, Homo sapien
atccagaaaggaagagaaagcagat

SEQ ID NO: 3521342 - DNA, 25 bp, Homo sapien
tccaaataatctaactgtacaacac

SEQ ID NO: 3521343 - DNA, 25 bp, Homo sapien
gatcgagtaagtgaagatataagta

SEQ ID NO: 3521344 - DNA, 25 bp, Homo sapien
cagtgtcacacaagaaggatcgagt

SEQ ID NO: 3521345 - DNA, 25 bp, Homo sapien
tgtacaacacaggagtcaacagttg

SEQ ID NO: 3521346 - DNA, 25 bp, Homo sapien
ttcccagcatgatcacctacaaaaa

SEQ ID NO: 3521347 - DNA, 25 bp, Homo sapien
gaagtattgagtttgatagcagaaa

SEQ ID NO: 3521348 - DNA, 25 bp, Homo sapien
cagagagctgtgactcttcggcctt

SEQ ID NO: 3521349 - DNA, 25 bp, Homo sapien
gactcttcggcctttgtgttctgaa

SEQ ID NO: 3521350 - DNA, 25 bp, Homo sapien
tgatttaattcccaaacaaccacaa

SEQ ID NO: 3521351 - DNA, 25 bp, Homo sapien
ttccggtttcccacgacgctcttga

SEQ ID NO: 3521352 - DNA, 25 bp, Homo sapien
ttcccaaacaaccacaagaccttga

SEQ ID NO: 3521353 - DNA, 25 bp, Homo sapien
cacgacgctcttgatttaattccca

SEQ ID NO: 3521354 - DNA, 25 bp, Homo sapien
catcatgtaaacaacaggcgacttg

SEQ ID NO: 3521355 - DNA, 25 bp, Homo sapien
tcatcatcatgtaaacaacaggcga

SEQ ID NO: 3521356 - DNA, 25 bp, Homo sapien
catgtaaacaacaggcgacttgaga

SEQ ID NO: 3521357 - DNA, 25 bp, Homo sapien
acaacaggcgacttgagaaattgca

SEQ ID NO: 3521358 - DNA, 25 bp, Homo sapien
actccaaatggtgtatgacagagct

SEQ ID NO: 3521359 - DNA, 25 bp, Homo sapien
tttatattggagaaatttgcattta

SEQ ID NO: 3521360 - DNA, 25 bp, Homo sapien
tccaaatggtgtatgacagagctgc

SEQ ID NO: 3521361 - DNA, 25 bp, Homo sapien
aaatggtgtatgacagagctgccct

SEQ ID NO: 3521362 - DNA, 25 bp, Homo sapien
tgcccaaagccaaccatttccgaga

SEQ ID NO: 3521363 - DNA, 25 bp, Homo sapien
catttccgagacacagctatgctcg

SEQ ID NO: 3521364 - DNA, 25 bp, Homo sapien
aaccatttccgagacacagctatgc

SEQ ID NO: 3521365 - DNA, 25 bp, Homo sapien
tccgagacacagctatgctcgtgca

SEQ ID NO: 3521366 - DNA, 25 bp, Homo sapien
gaattccaaggacaatcaaaacaca

SEQ ID NO: 3521367 - DNA, 25 bp, Homo sapien
gatgctagtatctcctttagggcag

SEQ ID NO: 3521368 - DNA, 25 bp, Homo sapien
gagctatgtgaagtatgcaggccca

SEQ ID NO: 3521369 - DNA, 25 bp, Homo sapien
gagatatcagtcatgcacccactct

SEQ ID NO: 3521370 - DNA, 25 bp, Homo sapien
agagtttgcagagagctgagatggt

SEQ ID NO: 3521371 - DNA, 25 bp, Homo sapien
aggcatgagaatcacttgaacccgg

SEQ ID NO: 3521372 - DNA, 25 bp, Homo sapien
gtaatcctagcctctctggtggctg

SEQ ID NO: 3521373 - DNA, 25 bp, Homo sapien
gaggcagagtttgcagagagctgag

SEQ ID NO: 3521374 - DNA, 25 bp, Homo sapien
gacaggtaagaacacccaagattcc

SEQ ID NO: 3521375 - DNA, 25 bp, Homo sapien
gtaagaacacccaagattccacaaa

SEQ ID NO: 3521376 - DNA, 25 bp, Homo sapien
aagtatgactaggacaggtaagaac

SEQ ID NO: 3521377 - DNA, 25 bp, Homo sapien
tgactaggacaggtaagaacaccca

SEQ ID NO: 3521378 - DNA, 25 bp, Homo sapien
gagagtaatggatccagagattcaa

SEQ ID NO: 3521379 - DNA, 25 bp, Homo sapien
ctttagacgactggagtccagccgc

SEQ ID NO: 3521380 - DNA, 25 bp, Homo sapien
cgcagggctgagagtaatggatcca

SEQ ID NO: 3521381 - DNA, 25 bp, Homo sapien
caagaacatggctgtaggactctgg

SEQ ID NO: 3521382 - DNA, 25 bp, Homo sapien
gccagaaagctgaaacttgttgaat

SEQ ID NO: 3521383 - DNA, 25 bp, Homo sapien
ccagaaagctgaaacttgttgaatg

SEQ ID NO: 3521384 - DNA, 25 bp, Homo sapien
tataatttaagaagcccaccattca

SEQ ID NO: 3521385 - DNA, 25 bp, Homo sapien
ttaacaaatatgtggggaacataga

SEQ ID NO: 3521386 - DNA, 25 bp, Homo sapien
cccaccattcatttaacatgcattt

SEQ ID NO: 3521387 - DNA, 25 bp, Homo sapien
aacaaatatgtggggaacatagaga

SEQ ID NO: 3521388 - DNA, 25 bp, Homo sapien
tacctagtaaagtaccaggcacagt

SEQ ID NO: 3521389 - DNA, 25 bp, Homo sapien
catactttctagtggcaaaacgaag

SEQ ID NO: 3521390 - DNA, 25 bp, Homo sapien
gataaagttctaaccctcatagagc

SEQ ID NO: 3521391 - DNA, 25 bp, Homo sapien
gtaacactgttcctaatacaccttg

SEQ ID NO: 3521392 - DNA, 25 bp, Homo sapien
taatattgtacaagccttcaacagc

SEQ ID NO: 3521393 - DNA, 25 bp, Homo sapien
cgttaagtgtacatgagggttcaat

SEQ ID NO: 3521394 - DNA, 25 bp, Homo sapien
cattgattcaacagagcaagtggtc

SEQ ID NO: 3521395 - DNA, 25 bp, Homo sapien
caaacagtataaagaggaacagcag

SEQ ID NO: 3521396 - DNA, 25 bp, Homo sapien
aggacctgaacacaccgctagagac

SEQ ID NO: 3521397 - DNA, 25 bp, Homo sapien
acccacaaaaagctccttgcctagt

SEQ ID NO: 3521398 - DNA, 25 bp, Homo sapien
tccaggacctgaacacaccgctaga

SEQ ID NO: 3521399 - DNA, 25 bp, Homo sapien
gctccttgcctagtggaactactac

SEQ ID NO: 3521400 - DNA, 25 bp, Homo sapien
tgagaggagacccagtaaccaattt

SEQ ID NO: 3521401 - DNA, 25 bp, Homo sapien
ctcacagaccagcagcccggaggtc

SEQ ID NO: 3521402 - DNA, 25 bp, Homo sapien
ttaacagcagtaactttaatatctt

SEQ ID NO: 3521403 - DNA, 25 bp, Homo sapien
taaccaattttcaaagccaggctca

SEQ ID NO: 3521404 - DNA, 25 bp, Homo sapien
ctcgcagctctcagtagatcggatc

SEQ ID NO: 3521405 - DNA, 25 bp, Homo sapien
gcagctctcagtagatcggatcttg

SEQ ID NO: 3521406 - DNA, 25 bp, Homo sapien
tcagtagatcggatcttgtctcccg

SEQ ID NO: 3521407 - DNA, 25 bp, Homo sapien
cggatcttgtctcccggcttagcgc

SEQ ID NO: 3521408 - DNA, 25 bp, Homo sapien
actggaaccggaggagctctaggcc

SEQ ID NO: 3521409 - DNA, 25 bp, Homo sapien
gactggaaacaacgctactaacggc

SEQ ID NO: 3521410 - DNA, 25 bp, Homo sapien
gattacgctctctacggcctgcgac

SEQ ID NO: 3521411 - DNA, 25 bp, Homo sapien
taagagcggaacgtgaacttcagtc

SEQ ID NO: 3521412 - DNA, 25 bp, Homo sapien
gtctagagttgtagcttccacctgg

SEQ ID NO: 3521413 - DNA, 25 bp, Homo sapien
agactcctcgcagccagcgatggag

SEQ ID NO: 3521414 - DNA, 25 bp, Homo sapien
tctaagaagcgcagcggaactcgac

SEQ ID NO: 3521415 - DNA, 25 bp, Homo sapien
ctcgaccggatccaacccagttagt

SEQ ID NO: 3521416 - DNA, 25 bp, Homo sapien
agttctcctgggaagaagtgtttgc

SEQ ID NO: 3521417 - DNA, 25 bp, Homo sapien
gaatacactcaagaaaaacctggaa

SEQ ID NO: 3521418 - DNA, 25 bp, Homo sapien
aggcattgtaagatagctacagtga

SEQ ID NO: 3521419 - DNA, 25 bp, Homo sapien
aatcacagaaggcattgtaagatag

SEQ ID NO: 3521420 - DNA, 25 bp, Homo sapien
cacctgaaggcaaagatagatttac

SEQ ID NO: 3521421 - DNA, 25 bp, Homo sapien
aaagaattgcttgggcacctgaagg

SEQ ID NO: 3521422 - DNA, 25 bp, Homo sapien
tgtacctcatggcagaaagaattgc

SEQ ID NO: 3521423 - DNA, 25 bp, Homo sapien
ttgctgattgtaaagaaagtgcgtc

SEQ ID NO: 3521424 - DNA, 25 bp, Homo sapien
agcttcagctggtcctacatgcagg

SEQ ID NO: 3521425 - DNA, 25 bp, Homo sapien
caggggacacaactaacttccattt

SEQ ID NO: 3521426 - DNA, 25 bp, Homo sapien
cagctggtcctacatgcaggggaca

SEQ ID NO: 3521427 - DNA, 25 bp, Homo sapien
gcaggggacacaactaacttccatt

SEQ ID NO: 3521428 - DNA, 25 bp, Homo sapien
cagccctccaagtaactaagtagct

SEQ ID NO: 3521429 - DNA, 25 bp, Homo sapien
tcagccctccaagtaactaagtagc

SEQ ID NO: 3521430 - DNA, 25 bp, Homo sapien
taagtctgctattctacaagttttg

SEQ ID NO: 3521431 - DNA, 25 bp, Homo sapien
tacaagttttgataaacacatgctg

SEQ ID NO: 3521432 - DNA, 25 bp, Homo sapien
tacttgcacattggagactgaaagg

SEQ ID NO: 3521433 - DNA, 25 bp, Homo sapien
tgacagacaagcagatgacctcaca

SEQ ID NO: 3521434 - DNA, 25 bp, Homo sapien
taagtttatggcacagggtagacct

SEQ ID NO: 3521435 - DNA, 25 bp, Homo sapien
ggagactgttgctcaaccatcagga

SEQ ID NO: 3521436 - DNA, 25 bp, Homo sapien
tatatttgcagaaagtcgcataggg

SEQ ID NO: 3521437 - DNA, 25 bp, Homo sapien
gcagaaagtcgcatagggtttttta

SEQ ID NO: 3521438 - DNA, 25 bp, Homo sapien
aatattgcactgaatgtttgtggtt

SEQ ID NO: 3521439 - DNA, 25 bp, Homo sapien
gaaataagaaacgataaatattgca

SEQ ID NO: 3521440 - DNA, 25 bp, Homo sapien
gtgcctggcctggccaggctgtctt

SEQ ID NO: 3521441 - DNA, 25 bp, Homo sapien
cgtgcctggcctggccaggctgtct

SEQ ID NO: 3521442 - DNA, 25 bp, Homo sapien
ggcgtgaactccgctcactgctagc

SEQ ID NO: 3521443 - DNA, 25 bp, Homo sapien
gtgaactccgctcactgctagctct

SEQ ID NO: 3521444 - DNA, 25 bp, Homo sapien
tggaatctcagaccttgtgaaggtg

SEQ ID NO: 3521445 - DNA, 25 bp, Homo sapien
tgtctaggctacaacaggattctag

SEQ ID NO: 3521446 - DNA, 25 bp, Homo sapien
tacgtactgcatttgccccttgagc

SEQ ID NO: 3521447 - DNA, 25 bp, Homo sapien
cccgtttgaagaagagtgcagatac

SEQ ID NO: 3521448 - DNA, 25 bp, Homo sapien
tggacatgaattctcgaattccagt

SEQ ID NO: 3521449 - DNA, 25 bp, Homo sapien
catgaattctcgaattccagtctga

SEQ ID NO: 3521450 - DNA, 25 bp, Homo sapien
gatggcatgatgggtggacatgaat

SEQ ID NO: 3521451 - DNA, 25 bp, Homo sapien
tgaattctcgaattccagtctgagg

SEQ ID NO: 3521452 - DNA, 25 bp, Homo sapien
catgaaagaccgcatggcatccttt

SEQ ID NO: 3521453 - DNA, 25 bp, Homo sapien
ccaaaagatgacctggtaagggata

SEQ ID NO: 3521454 - DNA, 25 bp, Homo sapien
gcatcctttcccgtggaccaaaaga

SEQ ID NO: 3521455 - DNA, 25 bp, Homo sapien
tgggtccttctaaaggcctctggca

SEQ ID NO: 3521456 - DNA, 25 bp, Homo sapien
gattctgatatgactcagagttgtg

SEQ ID NO: 3521457 - DNA, 25 bp, Homo sapien
actgaaaataacaagctgatgatac

SEQ ID NO: 3521458 - DNA, 25 bp, Homo sapien
caggctattggtataagcatttcct

SEQ ID NO: 3521459 - DNA, 25 bp, Homo sapien
aaattcagaaatggtagtccggcgc

SEQ ID NO: 3521460 - DNA, 25 bp, Homo sapien
tcaaagtaccgcgtcattaaggtta

SEQ ID NO: 3521461 - DNA, 25 bp, Homo sapien
tgtgttaagtgaatccccaacctac

SEQ ID NO: 3521462 - DNA, 25 bp, Homo sapien
caaattaagcatcacttgcttggca

SEQ ID NO: 3521463 - DNA, 25 bp, Homo sapien
gaagtgtacattagcaaaagatgct

SEQ ID NO: 3521464 - DNA, 25 bp, Homo sapien
tcaaatcagagttttaaggtcagga

SEQ ID NO: 3521465 - DNA, 25 bp, Homo sapien
gaatcaccagagacacttttagaag

SEQ ID NO: 3521466 - DNA, 25 bp, Homo sapien
gcgtaggtactaattcccatgcagg

SEQ ID NO: 3521467 - DNA, 25 bp, Homo sapien
cacagtcctcaaggcctggttttgg

SEQ ID NO: 3521468 - DNA, 25 bp, Homo sapien
taatacaggaagataacctaaacaa

SEQ ID NO: 3521469 - DNA, 25 bp, Homo sapien
ttcaaatctatagtcatttacctag

SEQ ID NO: 3521470 - DNA, 25 bp, Homo sapien
taacctaaacaattgaagatcaaag

SEQ ID NO: 3521471 - DNA, 25 bp, Homo sapien
caaatctatagtcatttacctagaa

SEQ ID NO: 3521472 - DNA, 25 bp, Homo sapien
ccctcagaatgtagaggtggttcaa

SEQ ID NO: 3521473 - DNA, 25 bp, Homo sapien
tttattacttaaagactgagcctgt

SEQ ID NO: 3521474 - DNA, 25 bp, Homo sapien
catagaacacctcttcattgtcctg

SEQ ID NO: 3521475 - DNA, 25 bp, Homo sapien
tggaaaaggtaccaacaaatgccta

SEQ ID NO: 3521476 - DNA, 25 bp, Homo sapien
tttgtagccttgtagcctcatgagc

SEQ ID NO: 3521477 - DNA, 25 bp, Homo sapien
tgtatacgtaattgccatctggtcc

SEQ ID NO: 3521478 - DNA, 25 bp, Homo sapien
tgtaaaccgcttggtgacaacagat

SEQ ID NO: 3521479 - DNA, 25 bp, Homo sapien
tatagtttggacctgccactctgct

SEQ ID NO: 3521480 - DNA, 25 bp, Homo sapien
tattttacacttgaatgataaactg

SEQ ID NO: 3521481 - DNA, 25 bp, Homo sapien
aaaagtttacagaggatagaaagtg

SEQ ID NO: 3521482 - DNA, 25 bp, Homo sapien
tttacacttgaatgataaactgcaa

SEQ ID NO: 3521483 - DNA, 25 bp, Homo sapien
cagaggatagaaagtgcattaataa

SEQ ID NO: 3521484 - DNA, 25 bp, Homo sapien
ctcaacctccagctggtatcagaga

SEQ ID NO: 3521485 - DNA, 25 bp, Homo sapien
caacctccagctggtatcagagaag

SEQ ID NO: 3521486 - DNA, 25 bp, Homo sapien
tcaacctccagctggtatcagagaa

SEQ ID NO: 3521487 - DNA, 25 bp, Homo sapien
tcagtagaggtcactgagaccggca

SEQ ID NO: 3521488 - DNA, 25 bp, Homo sapien
cactgagaccggcagtctttcttgc

SEQ ID NO: 3521489 - DNA, 25 bp, Homo sapien
cctcagctggaactgtttacgggac

SEQ ID NO: 3521490 - DNA, 25 bp, Homo sapien
gtttacgggacagaagacgtacatg

SEQ ID NO: 3521491 - DNA, 25 bp, Homo sapien
aatggctttgatttaggcccaggca

SEQ ID NO: 3521492 - DNA, 25 bp, Homo sapien
taagaaccctaactcatgacctgcc

SEQ ID NO: 3521493 - DNA, 25 bp, Homo sapien
tacaagagggcttgaaagggcagcc

SEQ ID NO: 3521494 - DNA, 25 bp, Homo sapien
tataaaggcttactcaacagggaaa

SEQ ID NO: 3521495 - DNA, 25 bp, Homo sapien
gttacactcatcttaatgctgcctg

SEQ ID NO: 3521496 - DNA, 25 bp, Homo sapien
cctgctcagaccaatcctcagtact

SEQ ID NO: 3521497 - DNA, 25 bp, Homo sapien
ggcacagaagagttacactcatctt

SEQ ID NO: 3521498 - DNA, 25 bp, Homo sapien
ttcccctgctcagaccaatcctcag

SEQ ID NO: 3521499 - DNA, 25 bp, Homo sapien
gtcagtgcctctacaacccaagtta

SEQ ID NO: 3521500 - DNA, 25 bp, Homo sapien
tttgcaaggtcagtgcctctacaac

SEQ ID NO: 3521501 - DNA, 25 bp, Homo sapien
ttggtttgtggtttgcaaggtcagt

SEQ ID NO: 3521502 - DNA, 25 bp, Homo sapien
tacaaagaaactctcttggtttgtg

SEQ ID NO: 3521503 - DNA, 25 bp, Homo sapien
gagctgtgggaatgataacttcatc

SEQ ID NO: 3521504 - DNA, 25 bp, Homo sapien
ggcttctcccaagtaaaagatagtg

SEQ ID NO: 3521505 - DNA, 25 bp, Homo sapien
tcaggatctgtttgtataagggagc

SEQ ID NO: 3521506 - DNA, 25 bp, Homo sapien
gatagtgtcttcaatagcgttttct

SEQ ID NO: 3521507 - DNA, 25 bp, Homo sapien
gctgattgtgccatccctactggga

SEQ ID NO: 3521508 - DNA, 25 bp, Homo sapien
cactgaccgcagagatgagagaggc

SEQ ID NO: 3521509 - DNA, 25 bp, Homo sapien
tctgcctgggcacgatccatttcct

SEQ ID NO: 3521510 - DNA, 25 bp, Homo sapien
tcttgatctaaacgggtaaccatct

SEQ ID NO: 3521511 - DNA, 25 bp, Homo sapien
gcaaaaaacacttgcttacttccca

SEQ ID NO: 3521512 - DNA, 25 bp, Homo sapien
tataggaatctgctataattcctgg

SEQ ID NO: 3521513 - DNA, 25 bp, Homo sapien
taattaccataattcaatctcctgg

SEQ ID NO: 3521514 - DNA, 25 bp, Homo sapien
aatctcctggacttgctttggtttc

SEQ ID NO: 3521515 - DNA, 25 bp, Homo sapien
ggcatcccacctatttgctattgca

SEQ ID NO: 3521516 - DNA, 25 bp, Homo sapien
cctccttttccattgctccatgttg

SEQ ID NO: 3521517 - DNA, 25 bp, Homo sapien
atcctccttttccattgctccatgt

SEQ ID NO: 3521518 - DNA, 25 bp, Homo sapien
ctccttttccattgctccatgttgc

SEQ ID NO: 3521519 - DNA, 25 bp, Homo sapien
tccttttccattgctccatgttgcc

SEQ ID NO: 3521520 - DNA, 25 bp, Homo sapien
gattacaaagcacaagaaacattac

SEQ ID NO: 3521521 - DNA, 25 bp, Homo sapien
tccacagagtaacactgtcccaagt

SEQ ID NO: 3521522 - DNA, 25 bp, Homo sapien
cgatgtccacagagtaacactgtcc

SEQ ID NO: 3521523 - DNA, 25 bp, Homo sapien
tcccaagtaattgcatgatcagagt

SEQ ID NO: 3521524 - DNA, 25 bp, Homo sapien
taacactgtcccaagtaattgcatg

SEQ ID NO: 3521525 - DNA, 25 bp, Homo sapien
ccaagtcaaactggatgtgtaggct

SEQ ID NO: 3521526 - DNA, 25 bp, Homo sapien
ctgctgggaattccacacagtggtt

SEQ ID NO: 3521527 - DNA, 25 bp, Homo sapien
taagtgccagaccaagtcaaactgg

SEQ ID NO: 3521528 - DNA, 25 bp, Homo sapien
tagaaaatggttgtatagaattgag

SEQ ID NO: 3521529 - DNA, 25 bp, Homo sapien
tgccttcgtgactacagccatatca

SEQ ID NO: 3521530 - DNA, 25 bp, Homo sapien
ctgccttcgtgactacagccatatc

SEQ ID NO: 3521531 - DNA, 25 bp, Homo sapien
gccttcgtgactacagccatatcat

SEQ ID NO: 3521532 - DNA, 25 bp, Homo sapien
agcggtggcggtgcctgccgtggct

SEQ ID NO: 3521533 - DNA, 25 bp, Homo sapien
gctgcagcgacggtagcagcagctc

SEQ ID NO: 3521534 - DNA, 25 bp, Homo sapien
tgccgtggctgcagcgacggtagca

SEQ ID NO: 3521535 - DNA, 25 bp, Homo sapien
caaagctccaagtgaggtgaccact

SEQ ID NO: 3521536 - DNA, 25 bp, Homo sapien
tagaagaaatttgaatattctctat

SEQ ID NO: 3521537 - DNA, 25 bp, Homo sapien
ttcttctcaaacatcttagaagaaa

SEQ ID NO: 3521538 - DNA, 25 bp, Homo sapien
caaaccaaactttcttctcaaacat

SEQ ID NO: 3521539 - DNA, 25 bp, Homo sapien
gaagaaatttgaatattctctatac

SEQ ID NO: 3521540 - DNA, 25 bp, Homo sapien
tgaagatgtctatagcactctgata

SEQ ID NO: 3521541 - DNA, 25 bp, Homo sapien
aacactatgtaaactgaggttgaag

SEQ ID NO: 3521542 - DNA, 25 bp, Homo sapien
aaaggactctacatagatcaaggct

SEQ ID NO: 3521543 - DNA, 25 bp, Homo sapien
ggtttgttccttcattattcaccga

SEQ ID NO: 3521544 - DNA, 25 bp, Homo sapien
cggaatgtaatgttcaagtgagggt

SEQ ID NO: 3521545 - DNA, 25 bp, Homo sapien
tatgtggtaggaacattttaagtct

SEQ ID NO: 3521546 - DNA, 25 bp, Homo sapien
ttttgttacctgcacggaatgtaat

SEQ ID NO: 3521547 - DNA, 25 bp, Homo sapien
tacatatttacgtgggtaccatgtg

SEQ ID NO: 3521548 - DNA, 25 bp, Homo sapien
caccaccatttatgaacaatgtctt

SEQ ID NO: 3521549 - DNA, 25 bp, Homo sapien
atagctttgggtcttacattaagtc

SEQ ID NO: 3521550 - DNA, 25 bp, Homo sapien
gttgactatctcctttgttgtgcag

SEQ ID NO: 3521551 - DNA, 25 bp, Homo sapien
taatttagtatcatcgcagtagtct

SEQ ID NO: 3521552 - DNA, 25 bp, Homo sapien
agtggtcacaggaggctgagaaggg

SEQ ID NO: 3521553 - DNA, 25 bp, Homo sapien
caacagtggtcacaggaggctgaga

SEQ ID NO: 3521554 - DNA, 25 bp, Homo sapien
acagtggtcacaggaggctgagaag

SEQ ID NO: 3521555 - DNA, 25 bp, Homo sapien
tggtcacaggaggctgagaagggta

SEQ ID NO: 3521556 - DNA, 25 bp, Homo sapien
gcaggatatggaccaccaggtgggt

SEQ ID NO: 3521557 - DNA, 25 bp, Homo sapien
atggaccaccaggtgggtaaggaca

SEQ ID NO: 3521558 - DNA, 25 bp, Homo sapien
atatggaccaccaggtgggtaagga

SEQ ID NO: 3521559 - DNA, 25 bp, Homo sapien
aggatatggaccaccaggtgggtaa

SEQ ID NO: 3521560 - DNA, 25 bp, Homo sapien
taggatgattactggccacctggtt

SEQ ID NO: 3521561 - DNA, 25 bp, Homo sapien
catttgccttttacaagcgcattaa

SEQ ID NO: 3521562 - DNA, 25 bp, Homo sapien
tgattaaaaagagctagcccaggct

SEQ ID NO: 3521563 - DNA, 25 bp, Homo sapien
tttacaagcgcattaaaattactga

SEQ ID NO: 3521564 - DNA, 25 bp, Homo sapien
gactttctagcgtgtgttaacagac

SEQ ID NO: 3521565 - DNA, 25 bp, Homo sapien
cattgactttctagcgtgtgttaac

SEQ ID NO: 3521566 - DNA, 25 bp, Homo sapien
tttatcattgactttctagcgtgtg

SEQ ID NO: 3521567 - DNA, 25 bp, Homo sapien
gcgtgtgttaacagactgatttcat

SEQ ID NO: 3521568 - DNA, 25 bp, Homo sapien
tatccggatgggtatggagagattc

SEQ ID NO: 3521569 - DNA, 25 bp, Homo sapien
ctgggattgggagggtatccggatg

SEQ ID NO: 3521570 - DNA, 25 bp, Homo sapien
gattgggagggtatccggatgggta

SEQ ID NO: 3521571 - DNA, 25 bp, Homo sapien
gatgggtatggagagattccacctg

SEQ ID NO: 3521572 - DNA, 25 bp, Homo sapien
aattctggccttcttcggtccaagg

SEQ ID NO: 3521573 - DNA, 25 bp, Homo sapien
attctggccttcttcggtccaaggt

SEQ ID NO: 3521574 - DNA, 25 bp, Homo sapien
tctggccttcttcggtccaaggtta

SEQ ID NO: 3521575 - DNA, 25 bp, Homo sapien
tttgtcatagcggtcactcgctata

SEQ ID NO: 3521576 - DNA, 25 bp, Homo sapien
ctttgtcatagcggtcactcgctat

SEQ ID NO: 3521577 - DNA, 25 bp, Homo sapien
tcatagcggtcactcgctatattat

SEQ ID NO: 3521578 - DNA, 25 bp, Homo sapien
tgtcatagcggtcactcgctatatt

SEQ ID NO: 3521579 - DNA, 25 bp, Homo sapien
tgggaatctgtacatgcagatgtgg

SEQ ID NO: 3521580 - DNA, 25 bp, Homo sapien
caaatgccagtctttggtgggaatc

SEQ ID NO: 3521581 - DNA, 25 bp, Homo sapien
tggaagcccaaatgccagtctttgg

SEQ ID NO: 3521582 - DNA, 25 bp, Homo sapien
gatgtggggcctcagaatacttcca

SEQ ID NO: 3521583 - DNA, 25 bp, Homo sapien
tatgagttttaaagtaaaatctcaa

SEQ ID NO: 3521584 - DNA, 25 bp, Homo sapien
taaagtaaaatctcaattctactta

SEQ ID NO: 3521585 - DNA, 25 bp, Homo sapien
atgagttttaaagtaaaatctcaat

SEQ ID NO: 3521586 - DNA, 25 bp, Homo sapien
tatatgagttttaaagtaaaatctc

SEQ ID NO: 3521587 - DNA, 25 bp, Homo sapien
catgacctgaataagccccaacaag

SEQ ID NO: 3521588 - DNA, 25 bp, Homo sapien
gccccgttgcctggtatggcggata

SEQ ID NO: 3521589 - DNA, 25 bp, Homo sapien
cctggtatggcggataggatgccga

SEQ ID NO: 3521590 - DNA, 25 bp, Homo sapien
agaagactggaggttcatctccaaa

SEQ ID NO: 3521591 - DNA, 25 bp, Homo sapien
aaaaggttagccatttctcatcggt

SEQ ID NO: 3521592 - DNA, 25 bp, Homo sapien
aattcaagtcagctacagagttgct

SEQ ID NO: 3521593 - DNA, 25 bp, Homo sapien
tctcatcggttttcaactcagcttg

SEQ ID NO: 3521594 - DNA, 25 bp, Homo sapien
catgatgtgcagcaaggttcttgct

SEQ ID NO: 3521595 - DNA, 25 bp, Homo sapien
agggatgtcccgtttctattgtctt

SEQ ID NO: 3521596 - DNA, 25 bp, Homo sapien
gtggagggatgtcccgtttctattg

SEQ ID NO: 3521597 - DNA, 25 bp, Homo sapien
gtggagtggagggatgtcccgtttc

SEQ ID NO: 3521598 - DNA, 25 bp, Homo sapien
gagtggagggatgtcccgtttctat

SEQ ID NO: 3521599 - DNA, 25 bp, Homo sapien
aacatatctcttaaggtgggaaaat

SEQ ID NO: 3521600 - DNA, 25 bp, Homo sapien
tactttggtagacagaacagcaact

SEQ ID NO: 3521601 - DNA, 25 bp, Homo sapien
ggtagacagaacagcaacttttgtc

SEQ ID NO: 3521602 - DNA, 25 bp, Homo sapien
attttcagaggcgttctgcttagtt

SEQ ID NO: 3521603 - DNA, 25 bp, Homo sapien
ccattcatgtagataaggaagatat

SEQ ID NO: 3521604 - DNA, 25 bp, Homo sapien
tagtaggcttaacaaaacagatagg

SEQ ID NO: 3521605 - DNA, 25 bp, Homo sapien
atttgcatcaacatgctttcctgtt

SEQ ID NO: 3521606 - DNA, 25 bp, Homo sapien
ggtatgtgtccagtagccataggca

SEQ ID NO: 3521607 - DNA, 25 bp, Homo sapien
ctctataaggcacagggattgttcc

SEQ ID NO: 3521608 - DNA, 25 bp, Homo sapien
acagggattgttccagtgaggttca

SEQ ID NO: 3521609 - DNA, 25 bp, Homo sapien
aaggcacagggattgttccagtgag

SEQ ID NO: 3521610 - DNA, 25 bp, Homo sapien
gcacagggattgttccagtgaggtt

SEQ ID NO: 3521611 - DNA, 25 bp, Homo sapien
agttccctggaactgccatcgttaa

SEQ ID NO: 3521612 - DNA, 25 bp, Homo sapien
gttccctggaactgccatcgttaaa

SEQ ID NO: 3521613 - DNA, 25 bp, Homo sapien
ttagttccctggaactgccatcgtt

SEQ ID NO: 3521614 - DNA, 25 bp, Homo sapien
tccctggaactgccatcgttaaaaa

SEQ ID NO: 3521615 - DNA, 25 bp, Homo sapien
acagtttcacgtacagttaggtctc

SEQ ID NO: 3521616 - DNA, 25 bp, Homo sapien
gacagtttcacgtacagttaggtct

SEQ ID NO: 3521617 - DNA, 25 bp, Homo sapien
ttgacagtttcacgtacagttaggt

SEQ ID NO: 3521618 - DNA, 25 bp, Homo sapien
acattgacagtttcacgtacagtta

SEQ ID NO: 3521619 - DNA, 25 bp, Homo sapien
cactgatgctcaacgtctagagacc

SEQ ID NO: 3521620 - DNA, 25 bp, Homo sapien
taaggtcaccaataactgccacatg

SEQ ID NO: 3521621 - DNA, 25 bp, Homo sapien
taagatcacttcatagaggataacg

SEQ ID NO: 3521622 - DNA, 25 bp, Homo sapien
cagtatttgaccaagctgattcagc

SEQ ID NO: 3521623 - DNA, 25 bp, Homo sapien
atcttctatggcttcccatatgtct

SEQ ID NO: 3521624 - DNA, 25 bp, Homo sapien
ggtcacaatcttctatggcttccca

SEQ ID NO: 3521625 - DNA, 25 bp, Homo sapien
ctgggtcacaatcttctatggcttc

SEQ ID NO: 3521626 - DNA, 25 bp, Homo sapien
gtcacaatcttctatggcttcccat

SEQ ID NO: 3521627 - DNA, 25 bp, Homo sapien
ttcttgagctggctctccgacaccg

SEQ ID NO: 3521628 - DNA, 25 bp, Homo sapien
cattttcttgagctggctctccgac

SEQ ID NO: 3521629 - DNA, 25 bp, Homo sapien
gacaccattttcttgagctggctct

SEQ ID NO: 3521630 - DNA, 25 bp, Homo sapien
cttggacaccattttcttgagctgg

SEQ ID NO: 3521631 - DNA, 25 bp, Homo sapien
ctgggctgccccagaccgtcccaca

SEQ ID NO: 3521632 - DNA, 25 bp, Homo sapien
aacaacaggaagtcggcaccactac

SEQ ID NO: 3521633 - DNA, 25 bp, Homo sapien
agaccgtcccacacaatcgcacacc

SEQ ID NO: 3521634 - DNA, 25 bp, Homo sapien
caacccggcctcaaacaacaggaag

SEQ ID NO: 3521635 - DNA, 25 bp, Homo sapien
taaaaattataacaagctctgcatg

SEQ ID NO: 3521636 - DNA, 25 bp, Homo sapien
gggaaaaaatgtatcttctgctaca

SEQ ID NO: 3521637 - DNA, 25 bp, Homo sapien
cactaaaaattataacaagctctgc

SEQ ID NO: 3521638 - DNA, 25 bp, Homo sapien
ttctgctacatcaaaaaagcatttt

SEQ ID NO: 3521639 - DNA, 25 bp, Homo sapien
tggcaatagtccctacctcagtggt

SEQ ID NO: 3521640 - DNA, 25 bp, Homo sapien
tacattgtggccttccagagggcaa

SEQ ID NO: 3521641 - DNA, 25 bp, Homo sapien
tagaggttgtatggataagtgcccc

SEQ ID NO: 3521642 - DNA, 25 bp, Homo sapien
tggtgtacaggaccccagctttagg

SEQ ID NO: 3521643 - DNA, 25 bp, Homo sapien
gatgaatgtttacccctgctgtaga

SEQ ID NO: 3521644 - DNA, 25 bp, Homo sapien
ggtagaagtccagcctctcaaattg

SEQ ID NO: 3521645 - DNA, 25 bp, Homo sapien
gctttactattactaccaacaggat

SEQ ID NO: 3521646 - DNA, 25 bp, Homo sapien
gatcctgtgaatgtacaactgacac

SEQ ID NO: 3521647 - DNA, 25 bp, Homo sapien
ggttccaaggatgcaaggcaaactt

SEQ ID NO: 3521648 - DNA, 25 bp, Homo sapien
tactccattggttccaaggatgcaa

SEQ ID NO: 3521649 - DNA, 25 bp, Homo sapien
ttttaactgttgttggagactgtgg

SEQ ID NO: 3521650 - DNA, 25 bp, Homo sapien
aggatgcaaggcaaacttaaaaaca

SEQ ID NO: 3521651 - DNA, 25 bp, Homo sapien
tacagaatgcactttcttcttattg

SEQ ID NO: 3521652 - DNA, 25 bp, Homo sapien
tgatacagaatgcactttcttctta

SEQ ID NO: 3521653 - DNA, 25 bp, Homo sapien
gatacagaatgcactttcttcttat

SEQ ID NO: 3521654 - DNA, 25 bp, Homo sapien
acagaatgcactttcttcttattgt

SEQ ID NO: 3521655 - DNA, 25 bp, Homo sapien
actgatagtccaacagaccaggatc

SEQ ID NO: 3521656 - DNA, 25 bp, Homo sapien
tagtccaacagaccaggatctttga

SEQ ID NO: 3521657 - DNA, 25 bp, Homo sapien
acagaccaggatctttgacctttta

SEQ ID NO: 3521658 - DNA, 25 bp, Homo sapien
ccaacagaccaggatctttgacctt

SEQ ID NO: 3521659 - DNA, 25 bp, Homo sapien
cacttgagaggtatgactcactact

SEQ ID NO: 3521660 - DNA, 25 bp, Homo sapien
ggtatgactcactacttcttcttgg

SEQ ID NO: 3521661 - DNA, 25 bp, Homo sapien
gacagctgcacttgagaggtatgac

SEQ ID NO: 3521662 - DNA, 25 bp, Homo sapien
ctgttggacagctgcacttgagagg

SEQ ID NO: 3521663 - DNA, 25 bp, Homo sapien
ctgttttctctcatcagtaacagtt

SEQ ID NO: 3521664 - DNA, 25 bp, Homo sapien
acttcaaagctgcatacacagactg

SEQ ID NO: 3521665 - DNA, 25 bp, Homo sapien
acggactctcgctgttacctagcct

SEQ ID NO: 3521666 - DNA, 25 bp, Homo sapien
tcaaaacttcaaagctgcatacaca

SEQ ID NO: 3521667 - DNA, 25 bp, Homo sapien
cgctgttacctagcctggtgtgcaa

SEQ ID NO: 3521668 - DNA, 25 bp, Homo sapien
tcttctccttgctcgccaataaccc

SEQ ID NO: 3521669 - DNA, 25 bp, Homo sapien
gtcttctccttgctcgccaataacc

SEQ ID NO: 3521670 - DNA, 25 bp, Homo sapien
cttctccttgctcgccaataaccca

SEQ ID NO: 3521671 - DNA, 25 bp, Homo sapien
catgttacataggtcatgatttcca

SEQ ID NO: 3521672 - DNA, 25 bp, Homo sapien
tcagtttccatgttacataggtcat

SEQ ID NO: 3521673 - DNA, 25 bp, Homo sapien
gatcactcgatttgcaggaaatgta

SEQ ID NO: 3521674 - DNA, 25 bp, Homo sapien
cagattacatccaattccgatcact

SEQ ID NO: 3521675 - DNA, 25 bp, Homo sapien
cactgaggaaggtatggcttagaac

SEQ ID NO: 3521676 - DNA, 25 bp, Homo sapien
tcactgaggaaggtatggcttagaa

SEQ ID NO: 3521677 - DNA, 25 bp, Homo sapien
cacatcaaggtacgactgagaacta

SEQ ID NO: 3521678 - DNA, 25 bp, Homo sapien
gacaagggctctgaacatatccaca

SEQ ID NO: 3521679 - DNA, 25 bp, Homo sapien
tgagaactacccaaagagttgactg

SEQ ID NO: 3521680 - DNA, 25 bp, Homo sapien
tgagatgcaacgagcaggacactgt

SEQ ID NO: 3521681 - DNA, 25 bp, Homo sapien
tgaagatttcaaggtccatcgtggc

SEQ ID NO: 3521682 - DNA, 25 bp, Homo sapien
gaggtctaagaggacaagcctgtct

SEQ ID NO: 3521683 - DNA, 25 bp, Homo sapien
ccacattaggaaggttgaagatttc

SEQ ID NO: 3521684 - DNA, 25 bp, Homo sapien
ctttgctgatctccacattaggaag

SEQ ID NO: 3521685 - DNA, 25 bp, Homo sapien
agaagcatttatttagtgacaaaag

SEQ ID NO: 3521686 - DNA, 25 bp, Homo sapien
tatttagtgacaaaagactgaatac

SEQ ID NO: 3521687 - DNA, 25 bp, Homo sapien
gaggtaatagcaggccaggtacggt

SEQ ID NO: 3521688 - DNA, 25 bp, Homo sapien
gcatttatttagtgacaaaagactg

SEQ ID NO: 3521689 - DNA, 25 bp, Homo sapien
gcaggcaataccgagttctccacct

SEQ ID NO: 3521690 - DNA, 25 bp, Homo sapien
aattgctaatgtgcaggcaataccg

SEQ ID NO: 3521691 - DNA, 25 bp, Homo sapien
taatgtgcaggcaataccgagttct

SEQ ID NO: 3521692 - DNA, 25 bp, Homo sapien
gctgaaattgctaatgtgcaggcaa

SEQ ID NO: 3521693 - DNA, 25 bp, Homo sapien
tacagcaagtggttttgaacaagaa

SEQ ID NO: 3521694 - DNA, 25 bp, Homo sapien
atatacagcaagtggttttgaacaa

SEQ ID NO: 3521695 - DNA, 25 bp, Homo sapien
caagtggttttgaacaagaattgtt

SEQ ID NO: 3521696 - DNA, 25 bp, Homo sapien
tgttttatctgtttaagaccaattc

SEQ ID NO: 3521697 - DNA, 25 bp, Homo sapien
atggtaataccctgtgataaaggca

SEQ ID NO: 3521698 - DNA, 25 bp, Homo sapien
tacatggtaataccctgtgataaag

SEQ ID NO: 3521699 - DNA, 25 bp, Homo sapien
acatggtaataccctgtgataaagg

SEQ ID NO: 3521700 - DNA, 25 bp, Homo sapien
catggtaataccctgtgataaaggc

SEQ ID NO: 3521701 - DNA, 25 bp, Homo sapien
aactggtaactcataactctcaaga

SEQ ID NO: 3521702 - DNA, 25 bp, Homo sapien
ggtaactcataactctcaagataat

SEQ ID NO: 3521703 - DNA, 25 bp, Homo sapien
gagtttagtgagaaactggtaactc

SEQ ID NO: 3521704 - DNA, 25 bp, Homo sapien
tagtgagaaactggtaactcataac

SEQ ID NO: 3521705 - DNA, 25 bp, Homo sapien
ttaatccaacaatgacagatttagg

SEQ ID NO: 3521706 - DNA, 25 bp, Homo sapien
tataggctagcaagtctacctgccg

SEQ ID NO: 3521707 - DNA, 25 bp, Homo sapien
gaaacttggcaatcatttctttaat

SEQ ID NO: 3521708 - DNA, 25 bp, Homo sapien
cctgccgtgcctcatcagatgatga

SEQ ID NO: 3521709 - DNA, 25 bp, Homo sapien
tccagttttggagatagggcaaata

SEQ ID NO: 3521710 - DNA, 25 bp, Homo sapien
gccttgagcatccacatgttttccg

SEQ ID NO: 3521711 - DNA, 25 bp, Homo sapien
cgaaagggtgagaatccaaaatcca

SEQ ID NO: 3521712 - DNA, 25 bp, Homo sapien
caaaatccagaaacgaattggtatg

SEQ ID NO: 3521713 - DNA, 25 bp, Homo sapien
tgagatgggcagatgacttgagcct

SEQ ID NO: 3521714 - DNA, 25 bp, Homo sapien
tgagcctggcaggtgaagtttgcag

SEQ ID NO: 3521715 - DNA, 25 bp, Homo sapien
atgggcagatgacttgagcctggca

SEQ ID NO: 3521716 - DNA, 25 bp, Homo sapien
ccagcctgggttacggagtaagaca

SEQ ID NO: 3521717 - DNA, 25 bp, Homo sapien
taacacaatgttggctgtataagaa

SEQ ID NO: 3521718 - DNA, 25 bp, Homo sapien
ctaaaagagagtaataaaggcagac

SEQ ID NO: 3521719 - DNA, 25 bp, Homo sapien
gatgggaggatagatataggcttca

SEQ ID NO: 3521720 - DNA, 25 bp, Homo sapien
agtatcattataacttaacacaatg

SEQ ID NO: 3521721 - DNA, 25 bp, Homo sapien
attgtgccagtaaaattcagcaggt

SEQ ID NO: 3521722 - DNA, 25 bp, Homo sapien
aggaattgtgccagtaaaattcagc

SEQ ID NO: 3521723 - DNA, 25 bp, Homo sapien
gaattgtgccagtaaaattcagcag

SEQ ID NO: 3521724 - DNA, 25 bp, Homo sapien
aattgtgccagtaaaattcagcagg

SEQ ID NO: 3521725 - DNA, 25 bp, Homo sapien
ttccacagttaggtccctgaacttg

SEQ ID NO: 3521726 - DNA, 25 bp, Homo sapien
tccacagttaggtccctgaacttgt

SEQ ID NO: 3521727 - DNA, 25 bp, Homo sapien
ccacagttaggtccctgaacttgta

SEQ ID NO: 3521728 - DNA, 25 bp, Homo sapien
cttccacagttaggtccctgaactt

SEQ ID NO: 3521729 - DNA, 25 bp, Homo sapien
tccagacagcttaaatgatgaggca

SEQ ID NO: 3521730 - DNA, 25 bp, Homo sapien
tgatgaggcagaatggatcacccct

SEQ ID NO: 3521731 - DNA, 25 bp, Homo sapien
tcaccactatgcaggatccaaccgt

SEQ ID NO: 3521732 - DNA, 25 bp, Homo sapien
gatccaaccgtctttttggcacggc

SEQ ID NO: 3521733 - DNA, 25 bp, Homo sapien
gccaagcagccgtctcaggccctcg

SEQ ID NO: 3521734 - DNA, 25 bp, Homo sapien
ctcaggccctcgcagtcgaactcca

SEQ ID NO: 3521735 - DNA, 25 bp, Homo sapien
tcaggccctcgcagtcgaactccat

SEQ ID NO: 3521736 - DNA, 25 bp, Homo sapien
cttgccaagcagccgtctcaggccc

SEQ ID NO: 3521737 - DNA, 25 bp, Homo sapien
gtcccgagctaggtcccaggactcc

SEQ ID NO: 3521738 - DNA, 25 bp, Homo sapien
caggccggtcccgagctaggtccca

SEQ ID NO: 3521739 - DNA, 25 bp, Homo sapien
cggtcccgagctaggtcccaggact

SEQ ID NO: 3521740 - DNA, 25 bp, Homo sapien
gccggtcccgagctaggtcccagga

SEQ ID NO: 3521741 - DNA, 25 bp, Homo sapien
cgctgaggaccaaacttcccggcgg

SEQ ID NO: 3521742 - DNA, 25 bp, Homo sapien
aagtgacgagggcacggccagaaac

SEQ ID NO: 3521743 - DNA, 25 bp, Homo sapien
acggaagccgctgaggaccaaactt

SEQ ID NO: 3521744 - DNA, 25 bp, Homo sapien
ttggcgtcaaggaaaccacgaccca

SEQ ID NO: 3521745 - DNA, 25 bp, Homo sapien
aacttggggacacttatgaagagaa

SEQ ID NO: 3521746 - DNA, 25 bp, Homo sapien
aggaaacttggggacacttatgaag

SEQ ID NO: 3521747 - DNA, 25 bp, Homo sapien
gaaacttggggacacttatgaagag

SEQ ID NO: 3521748 - DNA, 25 bp, Homo sapien
cttggggacacttatgaagagaaga

SEQ ID NO: 3521749 - DNA, 25 bp, Homo sapien
gaatccgagtgcagacaaagcagta

SEQ ID NO: 3521750 - DNA, 25 bp, Homo sapien
aagtgagtcttctagtgtgagcccc

SEQ ID NO: 3521751 - DNA, 25 bp, Homo sapien
cagcatgtcagaaggttgattacgt

SEQ ID NO: 3521752 - DNA, 25 bp, Homo sapien
gcagtagcctaaggcatgtgcccag

SEQ ID NO: 3521753 - DNA, 25 bp, Homo sapien
acgttgctccaggcgaaagcatgat

SEQ ID NO: 3521754 - DNA, 25 bp, Homo sapien
gctccaggcgaaagcatgatcctga

SEQ ID NO: 3521755 - DNA, 25 bp, Homo sapien
gttgctccaggcgaaagcatgatcc

SEQ ID NO: 3521756 - DNA, 25 bp, Homo sapien
gatcctgatgacacgtggggaaaag

SEQ ID NO: 3521757 - DNA, 25 bp, Homo sapien
ccatgaggctgccaactggcaggaa

SEQ ID NO: 3521758 - DNA, 25 bp, Homo sapien
catccgccaggtgggcattgataaa

SEQ ID NO: 3521759 - DNA, 25 bp, Homo sapien
tgggaaccccgattctggtcatttc

SEQ ID NO: 3521760 - DNA, 25 bp, Homo sapien
cagcacatcaagatggcatgcaggg

SEQ ID NO: 3521761 - DNA, 25 bp, Homo sapien
tacttcacccgggacatgagggatc

SEQ ID NO: 3521762 - DNA, 25 bp, Homo sapien
cagagaagtcttcatatccatcctt

SEQ ID NO: 3521763 - DNA, 25 bp, Homo sapien
atccttattggaaacctgcttgatt

SEQ ID NO: 3521764 - DNA, 25 bp, Homo sapien
ccttcactgcttgcttcagagaagt

SEQ ID NO: 3521765 - DNA, 25 bp, Homo sapien
tattggaaacctgcttgatttcatc

SEQ ID NO: 3521766 - DNA, 25 bp, Homo sapien
taacttgatttgtccattgtgtaaa

SEQ ID NO: 3521767 - DNA, 25 bp, Homo sapien
gcaccagaaaacaagctaagctatc

SEQ ID NO: 3521768 - DNA, 25 bp, Homo sapien
gaaatctctatctcactcttaatca

SEQ ID NO: 3521769 - DNA, 25 bp, Homo sapien
taatcatacactaaacgtctgaata

SEQ ID NO: 3521770 - DNA, 25 bp, Homo sapien
aaataaatagtagtctaatatattc

SEQ ID NO: 3521771 - DNA, 25 bp, Homo sapien
ttcaatacattgaaaataaaacaac

SEQ ID NO: 3521772 - DNA, 25 bp, Homo sapien
aatagtagtctaatatattcaatac

SEQ ID NO: 3521773 - DNA, 25 bp, Homo sapien
tcagaaaataaatagtagtctaata

SEQ ID NO: 3521774 - DNA, 25 bp, Homo sapien
tatttattctctttccaaacatgtt

SEQ ID NO: 3521775 - DNA, 25 bp, Homo sapien
tcatatatttattctctttccaaac

SEQ ID NO: 3521776 - DNA, 25 bp, Homo sapien
tctctcttcatatatttattctctt

SEQ ID NO: 3521777 - DNA, 25 bp, Homo sapien
tatatttattctctttccaaacatg

SEQ ID NO: 3521778 - DNA, 25 bp, Homo sapien
gtctcctgctatatctcagaaattt

SEQ ID NO: 3521779 - DNA, 25 bp, Homo sapien
tgctatatctcagaaatttaccaat

SEQ ID NO: 3521780 - DNA, 25 bp, Homo sapien
gctatatctcagaaatttaccaata

SEQ ID NO: 3521781 - DNA, 25 bp, Homo sapien
ttggtctcctgctatatctcagaaa

SEQ ID NO: 3521782 - DNA, 25 bp, Homo sapien
aatcttggggattacattaaaaatg

SEQ ID NO: 3521783 - DNA, 25 bp, Homo sapien
ggagaaaatcttggggattacatta

SEQ ID NO: 3521784 - DNA, 25 bp, Homo sapien
tgaaaatttgagttcccacattctt

SEQ ID NO: 3521785 - DNA, 25 bp, Homo sapien
gagaaaatcttggggattacattaa

SEQ ID NO: 3521786 - DNA, 25 bp, Homo sapien
gggactgtgcaatcagagccatgag

SEQ ID NO: 3521787 - DNA, 25 bp, Homo sapien
tagccttaaaagaagtgccctttgc

SEQ ID NO: 3521788 - DNA, 25 bp, Homo sapien
ggcacacatgtaaggccgcctgtga

SEQ ID NO: 3521789 - DNA, 25 bp, Homo sapien
tttgttagagaatgccacacccatg

SEQ ID NO: 3521790 - DNA, 25 bp, Homo sapien
catgatcctaagtcagcctgattgg

SEQ ID NO: 3521791 - DNA, 25 bp, Homo sapien
gaaggtggtgctctcgataccataa

SEQ ID NO: 3521792 - DNA, 25 bp, Homo sapien
aatgagtccgtcttaaaagcctggc

SEQ ID NO: 3521793 - DNA, 25 bp, Homo sapien
taagggcctgttgtaggacaatccc

SEQ ID NO: 3521794 - DNA, 25 bp, Homo sapien
acaggatgacatccatatgatagtt

SEQ ID NO: 3521795 - DNA, 25 bp, Homo sapien
gtcacaggatgacatccatatgata

SEQ ID NO: 3521796 - DNA, 25 bp, Homo sapien
cacaggatgacatccatatgatagt

SEQ ID NO: 3521797 - DNA, 25 bp, Homo sapien
tcacaggatgacatccatatgatag

SEQ ID NO: 3521798 - DNA, 25 bp, Homo sapien
tgagtggccccacattagagtgcat

SEQ ID NO: 3521799 - DNA, 25 bp, Homo sapien
actaagtttgattgggagcagggca

SEQ ID NO: 3521800 - DNA, 25 bp, Homo sapien
gggcagtgccctactcacagatcag

SEQ ID NO: 3521801 - DNA, 25 bp, Homo sapien
tcatcaggatcaaggctggcatctg

SEQ ID NO: 3521802 - DNA, 25 bp, Homo sapien
ggcccttcgacgttgcatttcttct

SEQ ID NO: 3521803 - DNA, 25 bp, Homo sapien
gcttcttggcccttcgacgttgcat

SEQ ID NO: 3521804 - DNA, 25 bp, Homo sapien
tcttcttcacgtctcatttcctcta

SEQ ID NO: 3521805 - DNA, 25 bp, Homo sapien
tcttggcccttcgacgttgcatttc

SEQ ID NO: 3521806 - DNA, 25 bp, Homo sapien
ctttccaactactttccatgtaacg

SEQ ID NO: 3521807 - DNA, 25 bp, Homo sapien
tactttccatgtaacgtaaggcata

SEQ ID NO: 3521808 - DNA, 25 bp, Homo sapien
tccatgtaacgtaaggcataatcac

SEQ ID NO: 3521809 - DNA, 25 bp, Homo sapien
tccaactactttccatgtaacgtaa

SEQ ID NO: 3521810 - DNA, 25 bp, Homo sapien
ttcagagtcgtattcatcatcatcg

SEQ ID NO: 3521811 - DNA, 25 bp, Homo sapien
agatttctctaatgtgcttggatat

SEQ ID NO: 3521812 - DNA, 25 bp, Homo sapien
tttcggtcataaccaaagatttctc

SEQ ID NO: 3521813 - DNA, 25 bp, Homo sapien
tctaatgtgcttggatatttcttcc

SEQ ID NO: 3521814 - DNA, 25 bp, Homo sapien
aagacaccaaaagtagcaactacca

SEQ ID NO: 3521815 - DNA, 25 bp, Homo sapien
gaagtatgaatgactctcagaatta

SEQ ID NO: 3521816 - DNA, 25 bp, Homo sapien
gcaactaccatctactataatcaca

SEQ ID NO: 3521817 - DNA, 25 bp, Homo sapien
cagaattatattgttcaaactgagt

SEQ ID NO: 3521818 - DNA, 25 bp, Homo sapien
gctcaatgacatttcggaccagata

SEQ ID NO: 3521819 - DNA, 25 bp, Homo sapien
gacgattgccaaaagtcccctggag

SEQ ID NO: 3521820 - DNA, 25 bp, Homo sapien
gcataaagcaagtacgacctagcag

SEQ ID NO: 3521821 - DNA, 25 bp, Homo sapien
tctccgtggagcctaacaagtgctt

SEQ ID NO: 3521822 - DNA, 25 bp, Homo sapien
tagtgggacctgagctactaactgt

SEQ ID NO: 3521823 - DNA, 25 bp, Homo sapien
aattactgacagtccgtccagctgg

SEQ ID NO: 3521824 - DNA, 25 bp, Homo sapien
cacttatggatctcccagggccact

SEQ ID NO: 3521825 - DNA, 25 bp, Homo sapien
aagctgctcactggtcttcctggga

SEQ ID NO: 3521826 - DNA, 25 bp, Homo sapien
cagaactaactgtgggtcgagcaac

SEQ ID NO: 3521827 - DNA, 25 bp, Homo sapien
tcttggacccactgattgatcgctc

SEQ ID NO: 3521828 - DNA, 25 bp, Homo sapien
ttcatgtggactgctcacaggccgg

SEQ ID NO: 3521829 - DNA, 25 bp, Homo sapien
ggctgcctgacacctggactcttag

SEQ ID NO: 3521830 - DNA, 25 bp, Homo sapien
tactctcggtcggttccttggctgg

SEQ ID NO: 3521831 - DNA, 25 bp, Homo sapien
aaacaggtttgtcgtggccctcacg

SEQ ID NO: 3521832 - DNA, 25 bp, Homo sapien
gactctgcgtgattgtactcgagga

SEQ ID NO: 3521833 - DNA, 25 bp, Homo sapien
gagctattgccagatcctgccttga

SEQ ID NO: 3521834 - DNA, 25 bp, Homo sapien
tggaggccccactgccaaactatac

SEQ ID NO: 3521835 - DNA, 25 bp, Homo sapien
aaagcttgtacagctgctgattgga

SEQ ID NO: 3521836 - DNA, 25 bp, Homo sapien
ctgctgattggacacctttaacttt

SEQ ID NO: 3521837 - DNA, 25 bp, Homo sapien
tctttttttggaggccccactgcca

SEQ ID NO: 3521838 - DNA, 25 bp, Homo sapien
ctaaaggttgttcagccctgaggag

SEQ ID NO: 3521839 - DNA, 25 bp, Homo sapien
ggtactgctctaggctagaaatcca

SEQ ID NO: 3521840 - DNA, 25 bp, Homo sapien
cactagttgagaggtactgctctag

SEQ ID NO: 3521841 - DNA, 25 bp, Homo sapien
ggagagtctatttggggcttctaaa

SEQ ID NO: 3521842 - DNA, 25 bp, Homo sapien
aaaaagataagaattataatgctgg

SEQ ID NO: 3521843 - DNA, 25 bp, Homo sapien
ttctaggcttactagctttggcggg

SEQ ID NO: 3521844 - DNA, 25 bp, Homo sapien
tggtaactaaatcaaacttctaggc

SEQ ID NO: 3521845 - DNA, 25 bp, Homo sapien
cttctaggcttactagctttggcgg

SEQ ID NO: 3521846 - DNA, 25 bp, Homo sapien
ggttactagacccaatattgattca

SEQ ID NO: 3521847 - DNA, 25 bp, Homo sapien
cacggcttagaggaatggttattca

SEQ ID NO: 3521848 - DNA, 25 bp, Homo sapien
catgcaaagcttatgactcacggct

SEQ ID NO: 3521849 - DNA, 25 bp, Homo sapien
cacagaacagtactgggcatcaaag

SEQ ID NO: 3521850 - DNA, 25 bp, Homo sapien
tacaccgctcttgcgactgtaagcg

SEQ ID NO: 3521851 - DNA, 25 bp, Homo sapien
tgtggaagccaaaaactaccagcgc

SEQ ID NO: 3521852 - DNA, 25 bp, Homo sapien
gctcacctattctgttggccaagga

SEQ ID NO: 3521853 - DNA, 25 bp, Homo sapien
tgggccacacacattccgaacttgg

SEQ ID NO: 3521854 - DNA, 25 bp, Homo sapien
cccttggaagctatcatgagaattt

SEQ ID NO: 3521855 - DNA, 25 bp, Homo sapien
gacaccttgtcccttggaagctatc

SEQ ID NO: 3521856 - DNA, 25 bp, Homo sapien
tgttgacaccttgtcccttggaagc

SEQ ID NO: 3521857 - DNA, 25 bp, Homo sapien
ccttgtcccttggaagctatcatga

SEQ ID NO: 3521858 - DNA, 25 bp, Homo sapien
aggcactcggaaaggactgacagcg

SEQ ID NO: 3521859 - DNA, 25 bp, Homo sapien
gcgctcgcgagtccctgcgtaactt

SEQ ID NO: 3521860 - DNA, 25 bp, Homo sapien
actgacagcgcacctaaccgaggcg

SEQ ID NO: 3521861 - DNA, 25 bp, Homo sapien
tccacggcctatatcctttcagggc

SEQ ID NO: 3521862 - DNA, 25 bp, Homo sapien
agatgcggctgatgcagttccatcc

SEQ ID NO: 3521863 - DNA, 25 bp, Homo sapien
agttccatccccgagagctaaatgg

SEQ ID NO: 3521864 - DNA, 25 bp, Homo sapien
cccgagagctaaatggaagaacact

SEQ ID NO: 3521865 - DNA, 25 bp, Homo sapien
ggttgctagaaacccatctggcttt

SEQ ID NO: 3521866 - DNA, 25 bp, Homo sapien
gccctcaagatgattatcgtaggag

SEQ ID NO: 3521867 - DNA, 25 bp, Homo sapien
gattatcgtaggagtagtcctccac

SEQ ID NO: 3521868 - DNA, 25 bp, Homo sapien
caagatgattatcgtaggagtagtc

SEQ ID NO: 3521869 - DNA, 25 bp, Homo sapien
gtcgtcgccctcaagatgattatcg

SEQ ID NO: 3521870 - DNA, 25 bp, Homo sapien
tctggtaaggtgctctccccaaagc

SEQ ID NO: 3521871 - DNA, 25 bp, Homo sapien
ttctggtaaggtgctctccccaaag

SEQ ID NO: 3521872 - DNA, 25 bp, Homo sapien
tcattctggtaaggtgctctcccca

SEQ ID NO: 3521873 - DNA, 25 bp, Homo sapien
cattctggtaaggtgctctccccaa

SEQ ID NO: 3521874 - DNA, 25 bp, Homo sapien
cgctgcagcccggagcagggtgcca

SEQ ID NO: 3521875 - DNA, 25 bp, Homo sapien
ggccgtgggcgcgtcctggccgctg

SEQ ID NO: 3521876 - DNA, 25 bp, Homo sapien
tggccgtgggcgcgtcctggccgct

SEQ ID NO: 3521877 - DNA, 25 bp, Homo sapien
tgcagcccggagcagggtgccagcc

SEQ ID NO: 3521878 - DNA, 25 bp, Homo sapien
ctcgggcaagcccaaagctcaggtc

SEQ ID NO: 3521879 - DNA, 25 bp, Homo sapien
tcaggtcccatacgctacccttaga

SEQ ID NO: 3521880 - DNA, 25 bp, Homo sapien
ggtctcaagaattcaagtagcccca

SEQ ID NO: 3521881 - DNA, 25 bp, Homo sapien
ccagggctagggtgaaccatgccaa

SEQ ID NO: 3521882 - DNA, 25 bp, Homo sapien
cctggacactaaagagggaagatct

SEQ ID NO: 3521883 - DNA, 25 bp, Homo sapien
caggtctgggattccctatcatgca

SEQ ID NO: 3521884 - DNA, 25 bp, Homo sapien
aagaccaggcccagtcacaagaagg

SEQ ID NO: 3521885 - DNA, 25 bp, Homo sapien
gacctacctagtgtgaagaaatggg

SEQ ID NO: 3521886 - DNA, 25 bp, Homo sapien
ggatgagttacgtttattgccccat

SEQ ID NO: 3521887 - DNA, 25 bp, Homo sapien
agaaactccacatcataacagcctc

SEQ ID NO: 3521888 - DNA, 25 bp, Homo sapien
cattaacaaacaccagagagcaaac

SEQ ID NO: 3521889 - DNA, 25 bp, Homo sapien
gccccatcccttcactgaatgttta

SEQ ID NO: 3521890 - DNA, 25 bp, Homo sapien
cagactctcggtgatggatgctaca

SEQ ID NO: 3521891 - DNA, 25 bp, Homo sapien
tcttctgcagactctcggtgatgga

SEQ ID NO: 3521892 - DNA, 25 bp, Homo sapien
gtgatggatgctacaactgacttat

SEQ ID NO: 3521893 - DNA, 25 bp, Homo sapien
ggatgctacaactgacttatcatct

SEQ ID NO: 3521894 - DNA, 25 bp, Homo sapien
accacagcaatggagtgtcatggaa

SEQ ID NO: 3521895 - DNA, 25 bp, Homo sapien
tgaaagctggatagcacccacagtg

SEQ ID NO: 3521896 - DNA, 25 bp, Homo sapien
ggcctagttcttttacacagctcag

SEQ ID NO: 3521897 - DNA, 25 bp, Homo sapien
caatgaggtagcttactaaggtcac

SEQ ID NO: 3521898 - DNA, 25 bp, Homo sapien
tctgaaggcaggtctaggctcacca

SEQ ID NO: 3521899 - DNA, 25 bp, Homo sapien
ttatttccagaaccgtgccagagag

SEQ ID NO: 3521900 - DNA, 25 bp, Homo sapien
ggttgagtcctgatcaccagtatct

SEQ ID NO: 3521901 - DNA, 25 bp, Homo sapien
ccagagagatcgtgattggtgagtc

SEQ ID NO: 3521902 - DNA, 25 bp, Homo sapien
aatagttgaccaatggcccacaaga

SEQ ID NO: 3521903 - DNA, 25 bp, Homo sapien
tgcaccacctgttggcagtcagatt

SEQ ID NO: 3521904 - DNA, 25 bp, Homo sapien
gccaattaagaatgtttgcaccacc

SEQ ID NO: 3521905 - DNA, 25 bp, Homo sapien
taacaaatgacatcgaaaggatggg

SEQ ID NO: 3521906 - DNA, 25 bp, Homo sapien
catagacggtgagcgtgcagctgct

SEQ ID NO: 3521907 - DNA, 25 bp, Homo sapien
cacacgccgctggtggagttgtacc

SEQ ID NO: 3521908 - DNA, 25 bp, Homo sapien
gttcccaaggaaggcgcaggtcatg

SEQ ID NO: 3521909 - DNA, 25 bp, Homo sapien
tgatgttgacgtcgcccttgtagag

SEQ ID NO: 3521910 - DNA, 25 bp, Homo sapien
tccgcagcgtcccagatattaaccg

SEQ ID NO: 3521911 - DNA, 25 bp, Homo sapien
tacgtcatatcagcgaccacagtct

SEQ ID NO: 3521912 - DNA, 25 bp, Homo sapien
cctcagagcagaacgcgtttgcgct

SEQ ID NO: 3521913 - DNA, 25 bp, Homo sapien
ctcagttcgagtttcccgacgcggc

SEQ ID NO: 3521914 - DNA, 25 bp, Homo sapien
aggtgtccctggagtcaagtggctc

SEQ ID NO: 3521915 - DNA, 25 bp, Homo sapien
ggtgtccctggagtcaagtggctca

SEQ ID NO: 3521916 - DNA, 25 bp, Homo sapien
tacttgttgctgaagacacgctcgg

SEQ ID NO: 3521917 - DNA, 25 bp, Homo sapien
gatttcattccgagccaccactctg

SEQ ID NO: 3521918 - DNA, 25 bp, Homo sapien
ctgccgtgtaccaggtggctgtgct

SEQ ID NO: 3521919 - DNA, 25 bp, Homo sapien
ggctgtgcttgcatcccgcttcatg

SEQ ID NO: 3521920 - DNA, 25 bp, Homo sapien
tggtgggaacgccatctttctgcca

SEQ ID NO: 3521921 - DNA, 25 bp, Homo sapien
tgaagcaagattcggtacacccctg

SEQ ID NO: 3521922 - DNA, 25 bp, Homo sapien
ccctgagtcagagcgcttggtgcta

SEQ ID NO: 3521923 - DNA, 25 bp, Homo sapien
ggtaattgtctctcggcccttggtg

SEQ ID NO: 3521924 - DNA, 25 bp, Homo sapien
tgtcccagcgcgaaccaccatgtga

SEQ ID NO: 3521925 - DNA, 25 bp, Homo sapien
gaaccaccatgtgactcttcagccg

SEQ ID NO: 3521926 - DNA, 25 bp, Homo sapien
gcagagggctgtcccagcgcgaacc

SEQ ID NO: 3521927 - DNA, 25 bp, Homo sapien
ccatgtgactcttcagccgggcact

SEQ ID NO: 3521928 - DNA, 25 bp, Homo sapien
catttctgacgactgatggctccac

SEQ ID NO: 3521929 - DNA, 25 bp, Homo sapien
aactaaatcacctttgcgaagctaa

SEQ ID NO: 3521930 - DNA, 25 bp, Homo sapien
tcccatacagcatggctggccttgt

SEQ ID NO: 3521931 - DNA, 25 bp, Homo sapien
ggtaataactctgtctcccatacag

SEQ ID NO: 3521932 - DNA, 25 bp, Homo sapien
ttcacagcccggattcggaagaagt

SEQ ID NO: 3521933 - DNA, 25 bp, Homo sapien
agatacatgcaggtcctggaccagg

SEQ ID NO: 3521934 - DNA, 25 bp, Homo sapien
catctcaaggatgtagccagagggt

SEQ ID NO: 3521935 - DNA, 25 bp, Homo sapien
gatgagtcctcccactgtgtagcag

SEQ ID NO: 3521936 - DNA, 25 bp, Homo sapien
cttggccactactgagctggatggc

SEQ ID NO: 3521937 - DNA, 25 bp, Homo sapien
actactgagctggatggcacactgg

SEQ ID NO: 3521938 - DNA, 25 bp, Homo sapien
gccactactgagctggatggcacac

SEQ ID NO: 3521939 - DNA, 25 bp, Homo sapien
tggccactactgagctggatggcac

SEQ ID NO: 3521940 - DNA, 25 bp, Homo sapien
ggtccttgttgactggcacccacag

SEQ ID NO: 3521941 - DNA, 25 bp, Homo sapien
tcgttctacaatgtagccgagcact

SEQ ID NO: 3521942 - DNA, 25 bp, Homo sapien
ggcattccacgtgatggtcacggct

SEQ ID NO: 3521943 - DNA, 25 bp, Homo sapien
ggcttctttagtcacatcagtcact

SEQ ID NO: 3521944 - DNA, 25 bp, Homo sapien
taggagggggagcatgtagatattt

SEQ ID NO: 3521945 - DNA, 25 bp, Homo sapien
ggagcatgtagatatttgcccacct

SEQ ID NO: 3521946 - DNA, 25 bp, Homo sapien
gcatgtagatatttgcccacctcat

SEQ ID NO: 3521947 - DNA, 25 bp, Homo sapien
agtgcaaaggttaggagggggagca

SEQ ID NO: 3521948 - DNA, 25 bp, Homo sapien
ctgcaaacacttcttctgtctccag

SEQ ID NO: 3521949 - DNA, 25 bp, Homo sapien
tctgtctccagtgggtcactcacac

SEQ ID NO: 3521950 - DNA, 25 bp, Homo sapien
atgggatttcctgcaaacacttctt

SEQ ID NO: 3521951 - DNA, 25 bp, Homo sapien
tcttctgtctccagtgggtcactca

SEQ ID NO: 3521952 - DNA, 25 bp, Homo sapien
caggatacggaactggtaggctttt

SEQ ID NO: 3521953 - DNA, 25 bp, Homo sapien
ttctgaattgactgccaggatacgg

SEQ ID NO: 3521954 - DNA, 25 bp, Homo sapien
gaactgtgtcacaggtcgtccacca

SEQ ID NO: 3521955 - DNA, 25 bp, Homo sapien
tgcacacaactacctgagagctcca

SEQ ID NO: 3521956 - DNA, 25 bp, Homo sapien
tcttcacgcacacagttggagatgg

SEQ ID NO: 3521957 - DNA, 25 bp, Homo sapien
ccgtggtcattcttgagcttgagca

SEQ ID NO: 3521958 - DNA, 25 bp, Homo sapien
cttgagcaggatgaggccgctgtct

SEQ ID NO: 3521959 - DNA, 25 bp, Homo sapien
cttcacagtgatggcgtgcgcagcc

SEQ ID NO: 3521960 - DNA, 25 bp, Homo sapien
gaggcttcactttccgtgcccttgg

SEQ ID NO: 3521961 - DNA, 25 bp, Homo sapien
gcccatactgggaaagatgagcttg

SEQ ID NO: 3521962 - DNA, 25 bp, Homo sapien
cggaatgtgtacttgccctcgtgct

SEQ ID NO: 3521963 - DNA, 25 bp, Homo sapien
aatctgcatgcctggcaagtccgtg

SEQ ID NO: 3521964 - DNA, 25 bp, Homo sapien
tccttgccatccttcagccacacac

SEQ ID NO: 3521965 - DNA, 25 bp, Homo sapien
ctccttgccatccttcagccacaca

SEQ ID NO: 3521966 - DNA, 25 bp, Homo sapien
agtggccgcgtgcacgtcggacatc

SEQ ID NO: 3521967 - DNA, 25 bp, Homo sapien
agcactacacacaactcagctgggc

SEQ ID NO: 3521968 - DNA, 25 bp, Homo sapien
ttctcgtcattcagcactacacaca

SEQ ID NO: 3521969 - DNA, 25 bp, Homo sapien
gtcggacatcccgctcttcactgtg

SEQ ID NO: 3521970 - DNA, 25 bp, Homo sapien
tgtactcgccaccatcactgagctg

SEQ ID NO: 3521971 - DNA, 25 bp, Homo sapien
tacttagtgccatgcatcagcagct

SEQ ID NO: 3521972 - DNA, 25 bp, Homo sapien
tgaggttgctcacaaacttgatggg

SEQ ID NO: 3521973 - DNA, 25 bp, Homo sapien
tcagtagggtctccatcctgcatgg

SEQ ID NO: 3521974 - DNA, 25 bp, Homo sapien
tggagaggcggatctcaaacacagc

SEQ ID NO: 3521975 - DNA, 25 bp, Homo sapien
gtcagaccatcttcggacaccgtga

SEQ ID NO: 3521976 - DNA, 25 bp, Homo sapien
caaacacagctgtctggcgctctgt

SEQ ID NO: 3521977 - DNA, 25 bp, Homo sapien
taatcttaagcgtgtgcgtcagacc

SEQ ID NO: 3521978 - DNA, 25 bp, Homo sapien
gagtactggatcctcagtggctcag

SEQ ID NO: 3521979 - DNA, 25 bp, Homo sapien
gcttatcgcccacggacaggctgta

SEQ ID NO: 3521980 - DNA, 25 bp, Homo sapien
catgttcacgttgctaataaccagc

SEQ ID NO: 3521981 - DNA, 25 bp, Homo sapien
gcttcacatcgtacttgcccaggga

SEQ ID NO: 3521982 - DNA, 25 bp, Homo sapien
cctcatggaacaggtaggaaagctg

SEQ ID NO: 3521983 - DNA, 25 bp, Homo sapien
catggaacaggtaggaaagctgatg

SEQ ID NO: 3521984 - DNA, 25 bp, Homo sapien
tgcctcatggaacaggtaggaaagc

SEQ ID NO: 3521985 - DNA, 25 bp, Homo sapien
ctgcctcatggaacaggtaggaaag

SEQ ID NO: 3521986 - DNA, 25 bp, Homo sapien
agctggagggtgcatgtccaaccct

SEQ ID NO: 3521987 - DNA, 25 bp, Homo sapien
catatcatcttgacattggggtctt

SEQ ID NO: 3521988 - DNA, 25 bp, Homo sapien
agttccattatgcagtcaaagacca

SEQ ID NO: 3521989 - DNA, 25 bp, Homo sapien
ccaggggcttcagaatccggatggc

SEQ ID NO: 3521990 - DNA, 25 bp, Homo sapien
ttcagttccattatgcagtcaaaga

SEQ ID NO: 3521991 - DNA, 25 bp, Homo sapien
ttcttgggcactttggacaaaatct

SEQ ID NO: 3521992 - DNA, 25 bp, Homo sapien
tgagcagcccccgaaagtcggtgaa

SEQ ID NO: 3521993 - DNA, 25 bp, Homo sapien
ctttcttgggcactttggacaaaat

SEQ ID NO: 3521994 - DNA, 25 bp, Homo sapien
tgaaaccatactccatgcacacctt

SEQ ID NO: 3521995 - DNA, 25 bp, Homo sapien
ctcttcttcagcatctttttgaagt

SEQ ID NO: 3521996 - DNA, 25 bp, Homo sapien
tcttcagcatctttttgaagtccat

SEQ ID NO: 3521997 - DNA, 25 bp, Homo sapien
tttttgaagtccattttctcttgac

SEQ ID NO: 3521998 - DNA, 25 bp, Homo sapien
cttcttcagcatctttttgaagtcc

SEQ ID NO: 3521999 - DNA, 25 bp, Homo sapien
agtcatccgaagtcagtggctccag

SEQ ID NO: 3522000 - DNA, 25 bp, Homo sapien
ggtatagatggcatctgcatggtca

SEQ ID NO: 3522001 - DNA, 25 bp, Homo sapien
ttgtcagagtcatccgaagtcagtg

SEQ ID NO: 3522002 - DNA, 25 bp, Homo sapien
cttctgttaccagcagagatacggt

SEQ ID NO: 3522003 - DNA, 25 bp, Homo sapien
gctgtcgtagaatatcttggcggac

SEQ ID NO: 3522004 - DNA, 25 bp, Homo sapien
cttcagcacgtgttccttgttaatg

SEQ ID NO: 3522005 - DNA, 25 bp, Homo sapien
cacccgggctcggaacacggctttg

SEQ ID NO: 3522006 - DNA, 25 bp, Homo sapien
atatcttggcggactccttgatggg

SEQ ID NO: 3522007 - DNA, 25 bp, Homo sapien
tccacgaactcagggacgctgtcgc

SEQ ID NO: 3522008 - DNA, 25 bp, Homo sapien
gaagaactccactatgctcgaggac

SEQ ID NO: 3522009 - DNA, 25 bp, Homo sapien
ggatgtttgagctccgggtcactaa

SEQ ID NO: 3522010 - DNA, 25 bp, Homo sapien
gaccggttgaggcttctccacgaac

SEQ ID NO: 3522011 - DNA, 25 bp, Homo sapien
ctttcttgagaggacggtggagcat

SEQ ID NO: 3522012 - DNA, 25 bp, Homo sapien
caggtagaagcccagctcgcgatgg

SEQ ID NO: 3522013 - DNA, 25 bp, Homo sapien
aggcgagaggtcagaatgggctcca

SEQ ID NO: 3522014 - DNA, 25 bp, Homo sapien
atgggaggacagagctttcttgaga

SEQ ID NO: 3522015 - DNA, 25 bp, Homo sapien
agaaagcagggtgagtcgatgggcc

SEQ ID NO: 3522016 - DNA, 25 bp, Homo sapien
aaagcagggtgagtcgatgggccat

SEQ ID NO: 3522017 - DNA, 25 bp, Homo sapien
gaaagcagggtgagtcgatgggcca

SEQ ID NO: 3522018 - DNA, 25 bp, Homo sapien
ggagaaagcagggtgagtcgatggg

SEQ ID NO: 3522019 - DNA, 25 bp, Homo sapien
ccagctggctgaagctttaacaaag

SEQ ID NO: 3522020 - DNA, 25 bp, Homo sapien
gagatctgatctgtgttgaacatcc

SEQ ID NO: 3522021 - DNA, 25 bp, Homo sapien
ggaagaatagctgcccttcccgatc

SEQ ID NO: 3522022 - DNA, 25 bp, Homo sapien
caagattagaagcacacgttgggtg

SEQ ID NO: 3522023 - DNA, 25 bp, Homo sapien
aggtctgcacgtgggtggtggagct

SEQ ID NO: 3522024 - DNA, 25 bp, Homo sapien
gaaggtctgcacgtgggtggtggag

SEQ ID NO: 3522025 - DNA, 25 bp, Homo sapien
ctggagaactccatggacacgtgct

SEQ ID NO: 3522026 - DNA, 25 bp, Homo sapien
tggagaactccatggacacgtgctc

SEQ ID NO: 3522027 - DNA, 25 bp, Homo sapien
catctgccggctgtgaatggttgtc

SEQ ID NO: 3522028 - DNA, 25 bp, Homo sapien
tctgccggctgtgaatggttgtcat

SEQ ID NO: 3522029 - DNA, 25 bp, Homo sapien
agcatctgccggctgtgaatggttg

SEQ ID NO: 3522030 - DNA, 25 bp, Homo sapien
gcatctgccggctgtgaatggttgt

SEQ ID NO: 3522031 - DNA, 25 bp, Homo sapien
ggtgacagcaggcgtgggcactcac

SEQ ID NO: 3522032 - DNA, 25 bp, Homo sapien
tttggaggctcagctagtgcctgga

SEQ ID NO: 3522033 - DNA, 25 bp, Homo sapien
ccaacactcgaatgctgtgtccacg

SEQ ID NO: 3522034 - DNA, 25 bp, Homo sapien
tttgccccaacagtgaggctaccag

SEQ ID NO: 3522035 - DNA, 25 bp, Homo sapien
gctaccagtgtcatctgttccttaa

SEQ ID NO: 3522036 - DNA, 25 bp, Homo sapien
gaccacgagcgaattataaaaagac

SEQ ID NO: 3522037 - DNA, 25 bp, Homo sapien
aaatgtctctgtctgccgtgggata

SEQ ID NO: 3522038 - DNA, 25 bp, Homo sapien
agagtcatgcatgccctcctgatgg

SEQ ID NO: 3522039 - DNA, 25 bp, Homo sapien
cacgtggctccaagataatacatgt

SEQ ID NO: 3522040 - DNA, 25 bp, Homo sapien
gcatggacatgggaacacacgcaga

SEQ ID NO: 3522041 - DNA, 25 bp, Homo sapien
cacgcatggacatgggaacacacgc

SEQ ID NO: 3522042 - DNA, 25 bp, Homo sapien
atggacatgggaacacacgcagagc

SEQ ID NO: 3522043 - DNA, 25 bp, Homo sapien
ggacatgggaacacacgcagagcaa

SEQ ID NO: 3522044 - DNA, 25 bp, Homo sapien
tcacgtagatctgggctgagtcccc

SEQ ID NO: 3522045 - DNA, 25 bp, Homo sapien
gcagtgcccagagaaccttgtagga

SEQ ID NO: 3522046 - DNA, 25 bp, Homo sapien
tgtgatgcccactccaacctagaga

SEQ ID NO: 3522047 - DNA, 25 bp, Homo sapien
acacagtgtccggtacagagggcag

SEQ ID NO: 3522048 - DNA, 25 bp, Homo sapien
tcgtagaggctcatgacgtggtgca

SEQ ID NO: 3522049 - DNA, 25 bp, Homo sapien
tggtgcacaaactggtactgctcgc

SEQ ID NO: 3522050 - DNA, 25 bp, Homo sapien
gacagctgcttttcgtagaggctca

SEQ ID NO: 3522051 - DNA, 25 bp, Homo sapien
tggtactgctcgcatgtctggatca

SEQ ID NO: 3522052 - DNA, 25 bp, Homo sapien
cttcaggatgtccaccacaccctcc

SEQ ID NO: 3522053 - DNA, 25 bp, Homo sapien
cagcagatgctggtggcaatgaagc

SEQ ID NO: 3522054 - DNA, 25 bp, Homo sapien
ctgtcctgacggagctggcacgtgg

SEQ ID NO: 3522055 - DNA, 25 bp, Homo sapien
gctggcacgtggtcttcaggatgtc

SEQ ID NO: 3522056 - DNA, 25 bp, Homo sapien
ggggtcttctggtcgggccaggatg

SEQ ID NO: 3522057 - DNA, 25 bp, Homo sapien
aatgcttcaggcctcgctcctcagt

SEQ ID NO: 3522058 - DNA, 25 bp, Homo sapien
gtaatgcttcaggcctcgctcctca

SEQ ID NO: 3522059 - DNA, 25 bp, Homo sapien
cagtaatgcttcaggcctcgctcct

SEQ ID NO: 3522060 - DNA, 25 bp, Homo sapien
gagaacggagccctcacgaatggga

SEQ ID NO: 3522061 - DNA, 25 bp, Homo sapien
tgggatcagtgctcttacaaaagga

SEQ ID NO: 3522062 - DNA, 25 bp, Homo sapien
cctttatcattgctcgagtgtggga

SEQ ID NO: 3522063 - DNA, 25 bp, Homo sapien
tgccacgtgaggacatgaccctgga

SEQ ID NO: 3522064 - DNA, 25 bp, Homo sapien
cagtcctggccttgggtacatttga

SEQ ID NO: 3522065 - DNA, 25 bp, Homo sapien
gcctgccctcttgtggacagattgg

SEQ ID NO: 3522066 - DNA, 25 bp, Homo sapien
gatgaaccctcaattataagcacag

SEQ ID NO: 3522067 - DNA, 25 bp, Homo sapien
tgtacaaccccaaagcagcaaagag

SEQ ID NO: 3522068 - DNA, 25 bp, Homo sapien
catccgtaattatcagaaaatctgg

SEQ ID NO: 3522069 - DNA, 25 bp, Homo sapien
tgttctctgtggagcccccagttaa

SEQ ID NO: 3522070 - DNA, 25 bp, Homo sapien
caaggggtttgattctacctctggc

SEQ ID NO: 3522071 - DNA, 25 bp, Homo sapien
gttaagcccctacactcatcctcag

SEQ ID NO: 3522072 - DNA, 25 bp, Homo sapien
agccggtaatcctccgtgtgaatga

SEQ ID NO: 3522073 - DNA, 25 bp, Homo sapien
tcctccggccaatactcggtgcatt

SEQ ID NO: 3522074 - DNA, 25 bp, Homo sapien
agtgatctcaacaccgtcgtacgcc

SEQ ID NO: 3522075 - DNA, 25 bp, Homo sapien
cttgagggagatgagtcgcagccgg

SEQ ID NO: 3522076 - DNA, 25 bp, Homo sapien
tgaacaccgccgacctcttgagatt

SEQ ID NO: 3522077 - DNA, 25 bp, Homo sapien
tgtttaaggtcacgggcactggaag

SEQ ID NO: 3522078 - DNA, 25 bp, Homo sapien
tgtagggcgcaatgtagcagacact

SEQ ID NO: 3522079 - DNA, 25 bp, Homo sapien
ccttatgggtacaggagtagccaac

SEQ ID NO: 3522080 - DNA, 25 bp, Homo sapien
tcgttcatctcctcgatgttggtga

SEQ ID NO: 3522081 - DNA, 25 bp, Homo sapien
ccgtgctgacgatgggtccctgagt

SEQ ID NO: 3522082 - DNA, 25 bp, Homo sapien
cacaccatgcgccagaagtcggcga

SEQ ID NO: 3522083 - DNA, 25 bp, Homo sapien
gttggtgatcatgacaatgatgggc

SEQ ID NO: 3522084 - DNA, 25 bp, Homo sapien
tggtgtagggacaaggctggaggat

SEQ ID NO: 3522085 - DNA, 25 bp, Homo sapien
ggatggatcccatcgactcaggcct

SEQ ID NO: 3522086 - DNA, 25 bp, Homo sapien
gaggccgtcagggtgggaatacgta

SEQ ID NO: 3522087 - DNA, 25 bp, Homo sapien
caggagccagactggtgtagggaca

SEQ ID NO: 3522088 - DNA, 25 bp, Homo sapien
ttggcattgatgtaggaactcagag

SEQ ID NO: 3522089 - DNA, 25 bp, Homo sapien
gcattgatgtaggaactcagagggt

SEQ ID NO: 3522090 - DNA, 25 bp, Homo sapien
tggcattgatgtaggaactcagagg

SEQ ID NO: 3522091 - DNA, 25 bp, Homo sapien
attgatgtaggaactcagagggtcg

SEQ ID NO: 3522092 - DNA, 25 bp, Homo sapien
tttgtaccggttcttccgcaccagc

SEQ ID NO: 3522093 - DNA, 25 bp, Homo sapien
agggatgtcgtactctttcggatcc

SEQ ID NO: 3522094 - DNA, 25 bp, Homo sapien
ttcttccgcaccagcccagggatgt

SEQ ID NO: 3522095 - DNA, 25 bp, Homo sapien
gtactctttcggatccacaaagttc

SEQ ID NO: 3522096 - DNA, 25 bp, Homo sapien
ctgtttggtgaatttggttgaggaa

SEQ ID NO: 3522097 - DNA, 25 bp, Homo sapien
tgtttggtgaatttggttgaggaat

SEQ ID NO: 3522098 - DNA, 25 bp, Homo sapien
gtttggtgaatttggttgaggaatg

SEQ ID NO: 3522099 - DNA, 25 bp, Homo sapien
ccggagtgcacatgtccagggtcag

SEQ ID NO: 3522100 - DNA, 25 bp, Homo sapien
acacgggaggcgctgagcaggtact

SEQ ID NO: 3522101 - DNA, 25 bp, Homo sapien
gagatagccaaagccctcctcgttg

SEQ ID NO: 3522102 - DNA, 25 bp, Homo sapien
tactcgcgggcggactcctcacgtg

SEQ ID NO: 3522103 - DNA, 25 bp, Homo sapien
aatcaaacacaggagtctcgggcac

SEQ ID NO: 3522104 - DNA, 25 bp, Homo sapien
ggtccaggaagtcatcctcgatctt

SEQ ID NO: 3522105 - DNA, 25 bp, Homo sapien
gacccatggacttgacggtgagtga

SEQ ID NO: 3522106 - DNA, 25 bp, Homo sapien
tggcggctcactgactggcgcctgt

SEQ ID NO: 3522107 - DNA, 25 bp, Homo sapien
tggttggggtgtacagcatcacaga

SEQ ID NO: 3522108 - DNA, 25 bp, Homo sapien
gcatcacagatttcggaccacgctg

SEQ ID NO: 3522109 - DNA, 25 bp, Homo sapien
cacagatttcggaccacgctggctg

SEQ ID NO: 3522110 - DNA, 25 bp, Homo sapien
tgtacagcatcacagatttcggacc

SEQ ID NO: 3522111 - DNA, 25 bp, Homo sapien
agactggggactccccacgtcccag

SEQ ID NO: 3522112 - DNA, 25 bp, Homo sapien
tggtaacgaggaccaggcccacgga

SEQ ID NO: 3522113 - DNA, 25 bp, Homo sapien
taacgaggaccaggcccacggacag

SEQ ID NO: 3522114 - DNA, 25 bp, Homo sapien
cgaggaccaggcccacggacagaaa

SEQ ID NO: 3522115 - DNA, 25 bp, Homo sapien
acatcagataaacaggtcagggtgg

SEQ ID NO: 3522116 - DNA, 25 bp, Homo sapien
tctcagctcttgcaatgatgacaaa

SEQ ID NO: 3522117 - DNA, 25 bp, Homo sapien
ggaacatcagataaacaggtcaggg

SEQ ID NO: 3522118 - DNA, 25 bp, Homo sapien
tggtgggggcagagttctcagctct

SEQ ID NO: 3522119 - DNA, 25 bp, Homo sapien
cagatgtggccataaccgctgaacc

SEQ ID NO: 3522120 - DNA, 25 bp, Homo sapien
tgtttcaggagcgtcagcaaagagg

SEQ ID NO: 3522121 - DNA, 25 bp, Homo sapien
ggtttgtggcgttctgtgaccagat

SEQ ID NO: 3522122 - DNA, 25 bp, Homo sapien
caaagaggagacgaggtttgtggcg

SEQ ID NO: 3522123 - DNA, 25 bp, Homo sapien
cttcccccgtgttcccccagcagag

SEQ ID NO: 3522124 - DNA, 25 bp, Homo sapien
ggctcctgaacctctaaggtccaga

SEQ ID NO: 3522125 - DNA, 25 bp, Homo sapien
aacctctaaggtccagaccgggcag

SEQ ID NO: 3522126 - DNA, 25 bp, Homo sapien
gcatggaggctcctgaacctctaag

SEQ ID NO: 3522127 - DNA, 25 bp, Homo sapien
cctgaacctctaaggtccagaccgg

SEQ ID NO: 3522128 - DNA, 25 bp, Homo sapien
tctggattcttaggttagggaggca

SEQ ID NO: 3522129 - DNA, 25 bp, Homo sapien
tctccagacccttgtgaggcctgtg

SEQ ID NO: 3522130 - DNA, 25 bp, Homo sapien
gctggtgcggtagctcagaattcca

SEQ ID NO: 3522131 - DNA, 25 bp, Homo sapien
gagaaccctgtacggctgggagctc

SEQ ID NO: 3522132 - DNA, 25 bp, Homo sapien
tgagctggatctgagggcggcgagg

SEQ ID NO: 3522133 - DNA, 25 bp, Homo sapien
agggggtggcggcatctctctctgt

SEQ ID NO: 3522134 - DNA, 25 bp, Homo sapien
tggagcccttcagcctcgtccagtg

SEQ ID NO: 3522135 - DNA, 25 bp, Homo sapien
aactgtgaggcagcgaacaggcaca

SEQ ID NO: 3522136 - DNA, 25 bp, Homo sapien
tgggccatgcgggccgatgactccg

SEQ ID NO: 3522137 - DNA, 25 bp, Homo sapien
gccatgcgggccgatgactccggcc

SEQ ID NO: 3522138 - DNA, 25 bp, Homo sapien
tgcgggccgatgactccggccctgt

SEQ ID NO: 3522139 - DNA, 25 bp, Homo sapien
catgcgggccgatgactccggccct

SEQ ID NO: 3522140 - DNA, 25 bp, Homo sapien
ccagatgcatccaactgatgggtat

SEQ ID NO: 3522141 - DNA, 25 bp, Homo sapien
gggaccagatgcatccaactgatgg

SEQ ID NO: 3522142 - DNA, 25 bp, Homo sapien
tatttactgggcaactggtagatgt

SEQ ID NO: 3522143 - DNA, 25 bp, Homo sapien
tactgggcaactggtagatgtacat

SEQ ID NO: 3522144 - DNA, 25 bp, Homo sapien
gaagaaggggtacagtagtgggaga

SEQ ID NO: 3522145 - DNA, 25 bp, Homo sapien
ttttcaagagtgtgcgtgaagaagg

SEQ ID NO: 3522146 - DNA, 25 bp, Homo sapien
cattttcaagagtgtgcgtgaagaa

SEQ ID NO: 3522147 - DNA, 25 bp, Homo sapien
agtcattttcaagagtgtgcgtgaa

SEQ ID NO: 3522148 - DNA, 25 bp, Homo sapien
tcggagtcatcagcagcgtggttct

SEQ ID NO: 3522149 - DNA, 25 bp, Homo sapien
cagcagcgtggttctctctctcact

SEQ ID NO: 3522150 - DNA, 25 bp, Homo sapien
agggcccctccctcggagtcatcag

SEQ ID NO: 3522151 - DNA, 25 bp, Homo sapien
ctccctcggagtcatcagcagcgtg

SEQ ID NO: 3522152 - DNA, 25 bp, Homo sapien
atgactgatccaaggctgaacacac

SEQ ID NO: 3522153 - DNA, 25 bp, Homo sapien
tgcctttcatgtctctgacccttgg

SEQ ID NO: 3522154 - DNA, 25 bp, Homo sapien
gatcctctcccttgcacactgaaaa

SEQ ID NO: 3522155 - DNA, 25 bp, Homo sapien
aaaccagcctgggtcaatcagatcc

SEQ ID NO: 3522156 - DNA, 25 bp, Homo sapien
gaagggtgccatcttccagggcagg

SEQ ID NO: 3522157 - DNA, 25 bp, Homo sapien
gcaggaagctttctcagcaaaaagc

SEQ ID NO: 3522158 - DNA, 25 bp, Homo sapien
tcccaaggtgtctggatggggaagg

SEQ ID NO: 3522159 - DNA, 25 bp, Homo sapien
ccagggcaggaagctttctcagcaa

SEQ ID NO: 3522160 - DNA, 25 bp, Homo sapien
ctggtgatataaatgaaggagagag

SEQ ID NO: 3522161 - DNA, 25 bp, Homo sapien
aaggagagagggcagcttcagatca

SEQ ID NO: 3522162 - DNA, 25 bp, Homo sapien
gagagggcagcttcagatcatccag

SEQ ID NO: 3522163 - DNA, 25 bp, Homo sapien
gagagagggcagcttcagatcatcc

SEQ ID NO: 3522164 - DNA, 25 bp, Homo sapien
aagactctgggatgaatcttgcgga

SEQ ID NO: 3522165 - DNA, 25 bp, Homo sapien
gataaggtccatgaagactctggga

SEQ ID NO: 3522166 - DNA, 25 bp, Homo sapien
tgaatcttgcggagtgctggtaaac

SEQ ID NO: 3522167 - DNA, 25 bp, Homo sapien
tcctcccacggataaggtccatgaa

SEQ ID NO: 3522168 - DNA, 25 bp, Homo sapien
ctgggaagatcttggcatcttcagg

SEQ ID NO: 3522169 - DNA, 25 bp, Homo sapien
tcttggcatcttcaggtttggtgga

SEQ ID NO: 3522170 - DNA, 25 bp, Homo sapien
gatcttggcatcttcaggtttggtg

SEQ ID NO: 3522171 - DNA, 25 bp, Homo sapien
ggaagatcttggcatcttcaggttt

SEQ ID NO: 3522172 - DNA, 25 bp, Homo sapien
gatgacctgagtttctaccttctac

SEQ ID NO: 3522173 - DNA, 25 bp, Homo sapien
tgattctaagactgagcctgcatgt

SEQ ID NO: 3522174 - DNA, 25 bp, Homo sapien
caacaactgattaggtgcccgaagc

SEQ ID NO: 3522175 - DNA, 25 bp, Homo sapien
ttctacatatgacaggtgacagacc

SEQ ID NO: 3522176 - DNA, 25 bp, Homo sapien
cgccgagctctgtgcgtctgcgtgt

SEQ ID NO: 3522177 - DNA, 25 bp, Homo sapien
gaccgcctcaccaaatgcgcttcag

SEQ ID NO: 3522178 - DNA, 25 bp, Homo sapien
ttcagctgcagagtcgctggcgcag

SEQ ID NO: 3522179 - DNA, 25 bp, Homo sapien
gctcgccgggaattgcgcagggctg

SEQ ID NO: 3522180 - DNA, 25 bp, Homo sapien
gtgggagcagcgcatccatttcatt

SEQ ID NO: 3522181 - DNA, 25 bp, Homo sapien
tctcccgagcaactctgcgcggagt

SEQ ID NO: 3522182 - DNA, 25 bp, Homo sapien
tgcgcggagtctccgcagtcgtcgc

SEQ ID NO: 3522183 - DNA, 25 bp, Homo sapien
agtcgtcgcccccatgccaaggttg

SEQ ID NO: 3522184 - DNA, 25 bp, Homo sapien
tacggcaactgccagagggaccccg

SEQ ID NO: 3522185 - DNA, 25 bp, Homo sapien
ggaccccggcagggccgtgcgcgct

SEQ ID NO: 3522186 - DNA, 25 bp, Homo sapien
cccggcagggccgtgcgcgctgaac

SEQ ID NO: 3522187 - DNA, 25 bp, Homo sapien
gcaactgccagagggaccccggcag

SEQ ID NO: 3522188 - DNA, 25 bp, Homo sapien
tggcgctccccgcatgttgccaaca

SEQ ID NO: 3522189 - DNA, 25 bp, Homo sapien
tcattgggggcatgccgtggcgctc

SEQ ID NO: 3522190 - DNA, 25 bp, Homo sapien
gttgggggagggagtcggctcattg

SEQ ID NO: 3522191 - DNA, 25 bp, Homo sapien
gagtaggggccagcgagacaaaggg

SEQ ID NO: 3522192 - DNA, 25 bp, Homo sapien
gcaataccaggtgccgaggactcgt

SEQ ID NO: 3522193 - DNA, 25 bp, Homo sapien
ggacgctgaggaggcgtcctttttc

SEQ ID NO: 3522194 - DNA, 25 bp, Homo sapien
cggccccatactagggcgcatgcaa

SEQ ID NO: 3522195 - DNA, 25 bp, Homo sapien
tgcgcaagtggagcggccccatact

SEQ ID NO: 3522196 - DNA, 25 bp, Homo sapien
agtcttgccctcctgacgtgcggcg

SEQ ID NO: 3522197 - DNA, 25 bp, Homo sapien
ttgccctcctgacgtgcggcgcggg

SEQ ID NO: 3522198 - DNA, 25 bp, Homo sapien
tagagcgagtggacagcccctccct

SEQ ID NO: 3522199 - DNA, 25 bp, Homo sapien
ctagagcgagtggacagcccctccc

SEQ ID NO: 3522200 - DNA, 25 bp, Homo sapien
tggttttctcgtgggcaccaggggc

SEQ ID NO: 3522201 - DNA, 25 bp, Homo sapien
gggcaccaggggcccggacgagcag

SEQ ID NO: 3522202 - DNA, 25 bp, Homo sapien
gcaccaggggcccggacgagcaggg

SEQ ID NO: 3522203 - DNA, 25 bp, Homo sapien
tgggcaccaggggcccggacgagca

SEQ ID NO: 3522204 - DNA, 25 bp, Homo sapien
tattctccaggctgctagtgcgctg

SEQ ID NO: 3522205 - DNA, 25 bp, Homo sapien
atcctgccacaatcttccgtattct

SEQ ID NO: 3522206 - DNA, 25 bp, Homo sapien
tgctagtgcgctggccagaggtttc

SEQ ID NO: 3522207 - DNA, 25 bp, Homo sapien
agaggtttccggcattccatcccca

SEQ ID NO: 3522208 - DNA, 25 bp, Homo sapien
tctacacagcagtcaaggcgatcct

SEQ ID NO: 3522209 - DNA, 25 bp, Homo sapien
tatagtctctttactggtctcccag

SEQ ID NO: 3522210 - DNA, 25 bp, Homo sapien
atttaagtcagagcacgtcgttcct

SEQ ID NO: 3522211 - DNA, 25 bp, Homo sapien
cagggcagggatcctaaactccatt

SEQ ID NO: 3522212 - DNA, 25 bp, Homo sapien
tattcttggagtacaaatggtcctg

SEQ ID NO: 3522213 - DNA, 25 bp, Homo sapien
tttgtacatcacagcgaaagcagct

SEQ ID NO: 3522214 - DNA, 25 bp, Homo sapien
gcagctgaggtttctggacatcacc

SEQ ID NO: 3522215 - DNA, 25 bp, Homo sapien
tgggtcctgaaagtggactccaagg

SEQ ID NO: 3522216 - DNA, 25 bp, Homo sapien
tgctgctgtccagtcctgtgcccca

SEQ ID NO: 3522217 - DNA, 25 bp, Homo sapien
gtgccccaggcaggcactgctgcca

SEQ ID NO: 3522218 - DNA, 25 bp, Homo sapien
tgccccaggcaggcactgctgccat

SEQ ID NO: 3522219 - DNA, 25 bp, Homo sapien
tgctgtccagtcctgtgccccaggc

SEQ ID NO: 3522220 - DNA, 25 bp, Homo sapien
tggtcaagggcatcttccgggatcc

SEQ ID NO: 3522221 - DNA, 25 bp, Homo sapien
ccactagacaggaagccacagaaca

SEQ ID NO: 3522222 - DNA, 25 bp, Homo sapien
cagccatgtgactgtgatgaaatct

SEQ ID NO: 3522223 - DNA, 25 bp, Homo sapien
atggtcatgtacagcctggtcaagg

SEQ ID NO: 3522224 - DNA, 25 bp, Homo sapien
ccggccaggttgagggtgtagaggg

SEQ ID NO: 3522225 - DNA, 25 bp, Homo sapien
cccggccaggttgagggtgtagagg

SEQ ID NO: 3522226 - DNA, 25 bp, Homo sapien
caagtcaatctcagcaccggtgtgg

SEQ ID NO: 3522227 - DNA, 25 bp, Homo sapien
ccgttttgtgagctcacacaccaag

SEQ ID NO: 3522228 - DNA, 25 bp, Homo sapien
aggcaccagcccgttttgtgagctc

SEQ ID NO: 3522229 - DNA, 25 bp, Homo sapien
ccggtgtggatcttgaagaccttca

SEQ ID NO: 3522230 - DNA, 25 bp, Homo sapien
ctgccaccaactggatgttcttttc

SEQ ID NO: 3522231 - DNA, 25 bp, Homo sapien
tgccaccaactggatgttcttttct

SEQ ID NO: 3522232 - DNA, 25 bp, Homo sapien
ttggcccgccactgtgcatcttcag

SEQ ID NO: 3522233 - DNA, 25 bp, Homo sapien
agagcttgcaccgttgccaccaaca

SEQ ID NO: 3522234 - DNA, 25 bp, Homo sapien
aagctggaagcttgacacttgttga

SEQ ID NO: 3522235 - DNA, 25 bp, Homo sapien
ggcaccaagctggaagcttgacact

SEQ ID NO: 3522236 - DNA, 25 bp, Homo sapien
tgccatgggtgatgttagcaaaagg

SEQ ID NO: 3522237 - DNA, 25 bp, Homo sapien
aacactgaagaattgccatgggtga

SEQ ID NO: 3522238 - DNA, 25 bp, Homo sapien
agccaacactgaagaattgccatgg

SEQ ID NO: 3522239 - DNA, 25 bp, Homo sapien
tgaatacaggtgtccattccagggt

SEQ ID NO: 3522240 - DNA, 25 bp, Homo sapien
gcgtttgccaagaggagcctttctc

SEQ ID NO: 3522241 - DNA, 25 bp, Homo sapien
ggctgttcataagggccagcaccac

SEQ ID NO: 3522242 - DNA, 25 bp, Homo sapien
tgagaggctgttcataagggccagc

SEQ ID NO: 3522243 - DNA, 25 bp, Homo sapien
tggccaccacgatatcaaacagcgt

SEQ ID NO: 3522244 - DNA, 25 bp, Homo sapien
agcagctggtgaattattggcaact

SEQ ID NO: 3522245 - DNA, 25 bp, Homo sapien
ccttgggtcgatgacagcagctggt

SEQ ID NO: 3522246 - DNA, 25 bp, Homo sapien
caactgtgatggcatggatatctcc

SEQ ID NO: 3522247 - DNA, 25 bp, Homo sapien
gcattttcatgcagaatccttgggt

SEQ ID NO: 3522248 - DNA, 25 bp, Homo sapien
atctgactaacagggcagaggctct

SEQ ID NO: 3522249 - DNA, 25 bp, Homo sapien
catctgactaacagggcagaggctc

SEQ ID NO: 3522250 - DNA, 25 bp, Homo sapien
ccatctgactaacagggcagaggct

SEQ ID NO: 3522251 - DNA, 25 bp, Homo sapien
cccatctgactaacagggcagaggc

SEQ ID NO: 3522252 - DNA, 25 bp, Homo sapien
atggaaattaaacgaacaacacaag

SEQ ID NO: 3522253 - DNA, 25 bp, Homo sapien
cagtataataggaatcactgaatgc

SEQ ID NO: 3522254 - DNA, 25 bp, Homo sapien
ccagtataataggaatcactgaatg

SEQ ID NO: 3522255 - DNA, 25 bp, Homo sapien
gtataataggaatcactgaatgctg

SEQ ID NO: 3522256 - DNA, 25 bp, Homo sapien
tataataggaatcactgaatgctga

SEQ ID NO: 3522257 - DNA, 25 bp, Homo sapien
caccaattatcagagtcaacatcac

SEQ ID NO: 3522258 - DNA, 25 bp, Homo sapien
cacacagcagtgaggaaatctaata

SEQ ID NO: 3522259 - DNA, 25 bp, Homo sapien
ctgacaagcaggaccagggtgaacc

SEQ ID NO: 3522260 - DNA, 25 bp, Homo sapien
acatcactaaacaggaagctacaga

SEQ ID NO: 3522261 - DNA, 25 bp, Homo sapien
gtgtgtggggcagtggcagcagtac

SEQ ID NO: 3522262 - DNA, 25 bp, Homo sapien
aggtgtgtggggcagtggcagcagt

SEQ ID NO: 3522263 - DNA, 25 bp, Homo sapien
accgctgacaggtgtgtggggcagt

SEQ ID NO: 3522264 - DNA, 25 bp, Homo sapien
atgaccgctgacaggtgtgtggggc

SEQ ID NO: 3522265 - DNA, 25 bp, Homo sapien
ggcggtgctcggtgctgatggtgct

SEQ ID NO: 3522266 - DNA, 25 bp, Homo sapien
caggcggtgctcggtgctgatggtg

SEQ ID NO: 3522267 - DNA, 25 bp, Homo sapien
acaggcggtgctcggtgctgatggt

SEQ ID NO: 3522268 - DNA, 25 bp, Homo sapien
tgacaaatctagagaaatggatgga

SEQ ID NO: 3522269 - DNA, 25 bp, Homo sapien
gagagaactaacaaagtcactgaag

SEQ ID NO: 3522270 - DNA, 25 bp, Homo sapien
acaacaccgtggtgacaaatctaga

SEQ ID NO: 3522271 - DNA, 25 bp, Homo sapien
gtaatacaggcggagaacaacaccg

SEQ ID NO: 3522272 - DNA, 25 bp, Homo sapien
gaggatcagcactatgaggaccagg

SEQ ID NO: 3522273 - DNA, 25 bp, Homo sapien
gggtctcctctgtatcactaattgg

SEQ ID NO: 3522274 - DNA, 25 bp, Homo sapien
gccacaacgatgaggatgggtctcc

SEQ ID NO: 3522275 - DNA, 25 bp, Homo sapien
tgccagcccgaccaggtcaatgatg

SEQ ID NO: 3522276 - DNA, 25 bp, Homo sapien
gctcagaaaccctagtctggtgccc

SEQ ID NO: 3522277 - DNA, 25 bp, Homo sapien
gcctcttgctaaagaggtagagcct

SEQ ID NO: 3522278 - DNA, 25 bp, Homo sapien
tgtccagagttgaagaagtgctgcc

SEQ ID NO: 3522279 - DNA, 25 bp, Homo sapien
ctgtccagagttgaagaagtgctgc

SEQ ID NO: 3522280 - DNA, 25 bp, Homo sapien
gtgctgcctcttgctaaagaggtag

SEQ ID NO: 3522281 - DNA, 25 bp, Homo sapien
cagcctcactgttggtgagaagcac

SEQ ID NO: 3522282 - DNA, 25 bp, Homo sapien
gtttcctgaggaaggcaccatccac

SEQ ID NO: 3522283 - DNA, 25 bp, Homo sapien
ctgaatctgcttcccgacagctcca

SEQ ID NO: 3522284 - DNA, 25 bp, Homo sapien
tgcctgaatctgcttcccgacagct

SEQ ID NO: 3522285 - DNA, 25 bp, Homo sapien
gacagctccagggtttcctgaggaa

SEQ ID NO: 3522286 - DNA, 25 bp, Homo sapien
ttaagagacgacaggaaaatggaag

SEQ ID NO: 3522287 - DNA, 25 bp, Homo sapien
tgcctaacgaaacccatgaagaagt

SEQ ID NO: 3522288 - DNA, 25 bp, Homo sapien
cactgtgagcagatggtcatgtaca

SEQ ID NO: 3522289 - DNA, 25 bp, Homo sapien
tataagacttcccagtccatgtgga

SEQ ID NO: 3522290 - DNA, 25 bp, Homo sapien
cagccacgtaactgtgatgaatctg

SEQ ID NO: 3522291 - DNA, 25 bp, Homo sapien
agccacgtaactgtgatgaatctga

SEQ ID NO: 3522292 - DNA, 25 bp, Homo sapien
gaccgttgacaggtgtgtggggtgg

SEQ ID NO: 3522293 - DNA, 25 bp, Homo sapien
ttgacaggtgtgtggggtggcggca

SEQ ID NO: 3522294 - DNA, 25 bp, Homo sapien
ggtgtgtggggtggcggcagcgtta

SEQ ID NO: 3522295 - DNA, 25 bp, Homo sapien
aggtgtgtggggtggcggcagcgtt

SEQ ID NO: 3522296 - DNA, 25 bp, Homo sapien
ggtgctcatggcactcagaatattc

SEQ ID NO: 3522297 - DNA, 25 bp, Homo sapien
cacaggattgacaggcagcgcttgg

SEQ ID NO: 3522298 - DNA, 25 bp, Homo sapien
gctcatggcactcagaatattcagg

SEQ ID NO: 3522299 - DNA, 25 bp, Homo sapien
gattgacaggcagcgcttggtgctc

SEQ ID NO: 3522300 - DNA, 25 bp, Homo sapien
acagggatgtataatgtggctgctg

SEQ ID NO: 3522301 - DNA, 25 bp, Homo sapien
tgtaacagggatgtataatgtggct

SEQ ID NO: 3522302 - DNA, 25 bp, Homo sapien
gttattgatgaggtgtaacagggat

SEQ ID NO: 3522303 - DNA, 25 bp, Homo sapien
gatgaggtgtaacagggatgtataa

SEQ ID NO: 3522304 - DNA, 25 bp, Homo sapien
ggttgaggatgtagatggagacagc

SEQ ID NO: 3522305 - DNA, 25 bp, Homo sapien
ttggtgtcagttctgtacccaagac

SEQ ID NO: 3522306 - DNA, 25 bp, Homo sapien
attggtgtcagttctgtacccaaga

SEQ ID NO: 3522307 - DNA, 25 bp, Homo sapien
tggtgtcagttctgtacccaagact

SEQ ID NO: 3522308 - DNA, 25 bp, Homo sapien
atgcacgtcagcaccgtgaagctca

SEQ ID NO: 3522309 - DNA, 25 bp, Homo sapien
gctcagaaaccccagtctggtgccc

SEQ ID NO: 3522310 - DNA, 25 bp, Homo sapien
ccctgtccacgtggatccataaaaa

SEQ ID NO: 3522311 - DNA, 25 bp, Homo sapien
cactgaacaggaagccacataacat

SEQ ID NO: 3522312 - DNA, 25 bp, Homo sapien
gacaaaataagacttccctgtccac

SEQ ID NO: 3522313 - DNA, 25 bp, Homo sapien
aataagacttccctgtccacgtgga

SEQ ID NO: 3522314 - DNA, 25 bp, Homo sapien
gctcggtgctcacggcactcagaaa

SEQ ID NO: 3522315 - DNA, 25 bp, Homo sapien
gacggacaggcagcgctcggtgctc

SEQ ID NO: 3522316 - DNA, 25 bp, Homo sapien
agcgctcggtgctcacggcactcag

SEQ ID NO: 3522317 - DNA, 25 bp, Homo sapien
tgctcacggcactcagaaagctcag

SEQ ID NO: 3522318 - DNA, 25 bp, Homo sapien
caccgtgaggctcaaggtctgcttg

SEQ ID NO: 3522319 - DNA, 25 bp, Homo sapien
ttaacagggaatatataaggcggcc

SEQ ID NO: 3522320 - DNA, 25 bp, Homo sapien
gggatactgatgaagcttaacaggg

SEQ ID NO: 3522321 - DNA, 25 bp, Homo sapien
gttctgtgtccaaggttgagatggt

SEQ ID NO: 3522322 - DNA, 25 bp, Homo sapien
gctcagaaaccctagtctggtgacc

SEQ ID NO: 3522323 - DNA, 25 bp, Homo sapien
aaagacatgccgaacattaaagtag

SEQ ID NO: 3522324 - DNA, 25 bp, Homo sapien
gagaaagacatgccgaacattaaag

SEQ ID NO: 3522325 - DNA, 25 bp, Homo sapien
gaaagacatgccgaacattaaagta

SEQ ID NO: 3522326 - DNA, 25 bp, Homo sapien
aagacatgccgaacattaaagtagt

SEQ ID NO: 3522327 - DNA, 25 bp, Homo sapien
gcctttctgggattcagtgacttca

SEQ ID NO: 3522328 - DNA, 25 bp, Homo sapien
ctgggattcagtgacttcagagaac

SEQ ID NO: 3522329 - DNA, 25 bp, Homo sapien
acgtcccttgtgctaaaggtggagg

SEQ ID NO: 3522330 - DNA, 25 bp, Homo sapien
ctttgtccagtggtgaagacgtccc

SEQ ID NO: 3522331 - DNA, 25 bp, Homo sapien
ttaattcaggagatgcatacaggag

SEQ ID NO: 3522332 - DNA, 25 bp, Homo sapien
cttaattcaggagatgcatacagga

SEQ ID NO: 3522333 - DNA, 25 bp, Homo sapien
agtcaaagctggtgagcaatccagg

SEQ ID NO: 3522334 - DNA, 25 bp, Homo sapien
tgaagatgctggacagacttgttat

SEQ ID NO: 3522335 - DNA, 25 bp, Homo sapien
gagcaatccaggcttatgaagatgc

SEQ ID NO: 3522336 - DNA, 25 bp, Homo sapien
tatttcctgtatgaggactatggac

SEQ ID NO: 3522337 - DNA, 25 bp, Homo sapien
ggagaacactcctggatgtcctgca

SEQ ID NO: 3522338 - DNA, 25 bp, Homo sapien
gctcctccttgatatgaaaccaaga

SEQ ID NO: 3522339 - DNA, 25 bp, Homo sapien
ctggagaacactcctggatgtcctg

SEQ ID NO: 3522340 - DNA, 25 bp, Homo sapien
tgctcctccttgatatgaaaccaag

SEQ ID NO: 3522341 - DNA, 25 bp, Homo sapien
caggaagccatcgtccaccttcatt

SEQ ID NO: 3522342 - DNA, 25 bp, Homo sapien
ctcaggaagccatcgtccaccttca

SEQ ID NO: 3522343 - DNA, 25 bp, Homo sapien
tttcctcaggaagccatcgtccacc

SEQ ID NO: 3522344 - DNA, 25 bp, Homo sapien
ggaagccatcgtccaccttcattca

SEQ ID NO: 3522345 - DNA, 25 bp, Homo sapien
gagcccacgaagaagtaaatgttgg

SEQ ID NO: 3522346 - DNA, 25 bp, Homo sapien
aaggagcccacgaagaagtaaatgt

SEQ ID NO: 3522347 - DNA, 25 bp, Homo sapien
cacgaagaagtaaatgttggggttg

SEQ ID NO: 3522348 - DNA, 25 bp, Homo sapien
atgttggggttggccgttaagagag

SEQ ID NO: 3522349 - DNA, 25 bp, Homo sapien
atgaacgtgacaatataagacttcc

SEQ ID NO: 3522350 - DNA, 25 bp, Homo sapien
ctagatgaacgtgacaatataagac

SEQ ID NO: 3522351 - DNA, 25 bp, Homo sapien
tagatgaacgtgacaatataagact

SEQ ID NO: 3522352 - DNA, 25 bp, Homo sapien
aacgtgacaatataagacttccaaa

SEQ ID NO: 3522353 - DNA, 25 bp, Homo sapien
cagtggcatcttccgggacccacaa

SEQ ID NO: 3522354 - DNA, 25 bp, Homo sapien
agtggcatcttccgggacccacaaa

SEQ ID NO: 3522355 - DNA, 25 bp, Homo sapien
ccccctactatgatgaaatctgatg

SEQ ID NO: 3522356 - DNA, 25 bp, Homo sapien
accgctgacaggtgtaggggcgggg

SEQ ID NO: 3522357 - DNA, 25 bp, Homo sapien
aaatcagcccccctactatgatgaa

SEQ ID NO: 3522358 - DNA, 25 bp, Homo sapien
tcagcccccctactatgatgaaatc

SEQ ID NO: 3522359 - DNA, 25 bp, Homo sapien
aagtcggccatggacaggttgaaga

SEQ ID NO: 3522360 - DNA, 25 bp, Homo sapien
gaggatattgatgaggcttaacgga

SEQ ID NO: 3522361 - DNA, 25 bp, Homo sapien
gaaaacgtataatgtggcttctgag

SEQ ID NO: 3522362 - DNA, 25 bp, Homo sapien
tcatggcgcttagaaagctcaggct

SEQ ID NO: 3522363 - DNA, 25 bp, Homo sapien
cgctcaggaaccctagtctggtgtc

SEQ ID NO: 3522364 - DNA, 25 bp, Homo sapien
ccaaggctgggatggttggatccac

SEQ ID NO: 3522365 - DNA, 25 bp, Homo sapien
gctgggatggttggatccacgctca

SEQ ID NO: 3522366 - DNA, 25 bp, Homo sapien
atggttggatccacgctcaggaacc

SEQ ID NO: 3522367 - DNA, 25 bp, Homo sapien
gaaagatatgccaaacattgaagtg

SEQ ID NO: 3522368 - DNA, 25 bp, Homo sapien
agaagtgacagtagagaaagatatg

SEQ ID NO: 3522369 - DNA, 25 bp, Homo sapien
caaacattgaagtggtctgatagag

SEQ ID NO: 3522370 - DNA, 25 bp, Homo sapien
aagtgacagtagagaaagatatgcc

SEQ ID NO: 3522371 - DNA, 25 bp, Homo sapien
tctcttttgtccagaggtgaagact

SEQ ID NO: 3522372 - DNA, 25 bp, Homo sapien
ctgggattcagtgacttcagaggac

SEQ ID NO: 3522373 - DNA, 25 bp, Homo sapien
gacttcccttgtgctaaaggtggag

SEQ ID NO: 3522374 - DNA, 25 bp, Homo sapien
ggactcttctgtgttgcttaattca

SEQ ID NO: 3522375 - DNA, 25 bp, Homo sapien
cagaaaaatttggaccaatatgatg

SEQ ID NO: 3522376 - DNA, 25 bp, Homo sapien
aatttggaccaatatgatgggcatg

SEQ ID NO: 3522377 - DNA, 25 bp, Homo sapien
cttcttctatactctgctgtaactg

SEQ ID NO: 3522378 - DNA, 25 bp, Homo sapien
ggaccaatatgatgggcatgagcat

SEQ ID NO: 3522379 - DNA, 25 bp, Homo sapien
ctctcatttgttggaatcatattgt

SEQ ID NO: 3522380 - DNA, 25 bp, Homo sapien
tcagctgggtgcttggatgtggcat

SEQ ID NO: 3522381 - DNA, 25 bp, Homo sapien
gttggaatcatattgtcctgcttca

SEQ ID NO: 3522382 - DNA, 25 bp, Homo sapien
cctgcttcagctgggtgcttggatg

SEQ ID NO: 3522383 - DNA, 25 bp, Homo sapien
gtctttactagaaatcaaggccagt

SEQ ID NO: 3522384 - DNA, 25 bp, Homo sapien
tctttactagaaatcaaggccagtg

SEQ ID NO: 3522385 - DNA, 25 bp, Homo sapien
ttctcaaggggaagcggccatggtt

SEQ ID NO: 3522386 - DNA, 25 bp, Homo sapien
gcggccatggttgtctttactagaa

SEQ ID NO: 3522387 - DNA, 25 bp, Homo sapien
cgtggcagggcagtattgctctcaa

SEQ ID NO: 3522388 - DNA, 25 bp, Homo sapien
tggcagggcagtattgctctcaaag

SEQ ID NO: 3522389 - DNA, 25 bp, Homo sapien
tcaagcgtggcagggcagtattgct

SEQ ID NO: 3522390 - DNA, 25 bp, Homo sapien
agcgtggcagggcagtattgctctc

SEQ ID NO: 3522391 - DNA, 25 bp, Homo sapien
tgacagggcagaggttcttcctcac

SEQ ID NO: 3522392 - DNA, 25 bp, Homo sapien
tgcccgaatctgcttcccgacagct

SEQ ID NO: 3522393 - DNA, 25 bp, Homo sapien
tccagggttccctcaggaagccgcc

SEQ ID NO: 3522394 - DNA, 25 bp, Homo sapien
gctccagggttccctcaggaagccg

SEQ ID NO: 3522395 - DNA, 25 bp, Homo sapien
ccgaatctgcttcccgacagctcca

SEQ ID NO: 3522396 - DNA, 25 bp, Homo sapien
gacttccaaatccaggtggatccca

SEQ ID NO: 3522397 - DNA, 25 bp, Homo sapien
aaatgacttccaaatccaggtggat

SEQ ID NO: 3522398 - DNA, 25 bp, Homo sapien
aggtggatcccagtagacagagccc

SEQ ID NO: 3522399 - DNA, 25 bp, Homo sapien
gcactaccgtttagaggggacagga

SEQ ID NO: 3522400 - DNA, 25 bp, Homo sapien
cggagtaggaagactagcactgtga

SEQ ID NO: 3522401 - DNA, 25 bp, Homo sapien
gatcgtcacgtacagcccggtcaga

SEQ ID NO: 3522402 - DNA, 25 bp, Homo sapien
tcgtcacgtacagcccggtcagagg

SEQ ID NO: 3522403 - DNA, 25 bp, Homo sapien
gggcaggctgcggagtaggaagact

SEQ ID NO: 3522404 - DNA, 25 bp, Homo sapien
acagagaaccacacataaaaaaatc

SEQ ID NO: 3522405 - DNA, 25 bp, Homo sapien
ggacccacagagaaccacacataaa

SEQ ID NO: 3522406 - DNA, 25 bp, Homo sapien
ctggacccacagagaaccacacata

SEQ ID NO: 3522407 - DNA, 25 bp, Homo sapien
acccacagagaaccacacataaaaa

SEQ ID NO: 3522408 - DNA, 25 bp, Homo sapien
gaaatctgatggttgacaccaaata

SEQ ID NO: 3522409 - DNA, 25 bp, Homo sapien
aaatctgatggttgacaccaaatag

SEQ ID NO: 3522410 - DNA, 25 bp, Homo sapien
ctccaggatgctccgcagtagggac

SEQ ID NO: 3522411 - DNA, 25 bp, Homo sapien
cattcactccaggatgctccgcagt

SEQ ID NO: 3522412 - DNA, 25 bp, Homo sapien
ggaagtcacagaacattcactccag

SEQ ID NO: 3522413 - DNA, 25 bp, Homo sapien
aagtcacagaacattcactccagga

SEQ ID NO: 3522414 - DNA, 25 bp, Homo sapien
ggtgtgtggggggaggaggcagcgg

SEQ ID NO: 3522415 - DNA, 25 bp, Homo sapien
accgctgacaggtgtgtggggggag

SEQ ID NO: 3522416 - DNA, 25 bp, Homo sapien
gaccgctgacaggtgtgtgggggga

SEQ ID NO: 3522417 - DNA, 25 bp, Homo sapien
gtgtggggggaggaggcagcggtac

SEQ ID NO: 3522418 - DNA, 25 bp, Homo sapien
gaatgtataacgtggccgctgagga

SEQ ID NO: 3522419 - DNA, 25 bp, Homo sapien
atgacagatattgatgaggagtgag

SEQ ID NO: 3522420 - DNA, 25 bp, Homo sapien
gctcagaaacggtagtctggtgtcc

SEQ ID NO: 3522421 - DNA, 25 bp, Homo sapien
tgggttgcttggatccacgctcaga

SEQ ID NO: 3522422 - DNA, 25 bp, Homo sapien
ccaagaatgcacatgggcaggaggc

SEQ ID NO: 3522423 - DNA, 25 bp, Homo sapien
aagaatgcacatgggcaggaggctt

SEQ ID NO: 3522424 - DNA, 25 bp, Homo sapien
tcccaagaatgcacatgggcaggag

SEQ ID NO: 3522425 - DNA, 25 bp, Homo sapien
caagaatgcacatgggcaggaggct

SEQ ID NO: 3522426 - DNA, 25 bp, Homo sapien
caatcggtttccagaaggaagctcc

SEQ ID NO: 3522427 - DNA, 25 bp, Homo sapien
agactgggctggtagcaatcggttt

SEQ ID NO: 3522428 - DNA, 25 bp, Homo sapien
ggtagcaatcggtttccagaaggaa

SEQ ID NO: 3522429 - DNA, 25 bp, Homo sapien
gctggtagcaatcggtttccagaag

SEQ ID NO: 3522430 - DNA, 25 bp, Homo sapien
gtctcctgtcttttcatgaaacaag

SEQ ID NO: 3522431 - DNA, 25 bp, Homo sapien
tctcctgtcttttcatgaaacaaga

SEQ ID NO: 3522432 - DNA, 25 bp, Homo sapien
ctgtcttttcatgaaacaagatcat

SEQ ID NO: 3522433 - DNA, 25 bp, Homo sapien
tcctgtcttttcatgaaacaagatc

SEQ ID NO: 3522434 - DNA, 25 bp, Homo sapien
gttttgcggcctatcatacggtctg

SEQ ID NO: 3522435 - DNA, 25 bp, Homo sapien
tcattatgtaatgttggaggctgca

SEQ ID NO: 3522436 - DNA, 25 bp, Homo sapien
gcatttgtcccttcgttcagtcata

SEQ ID NO: 3522437 - DNA, 25 bp, Homo sapien
tggcctttgctcactagaagcaggg

SEQ ID NO: 3522438 - DNA, 25 bp, Homo sapien
cagagaaagagtggccggaagacga

SEQ ID NO: 3522439 - DNA, 25 bp, Homo sapien
caatgaggagtcattgccaatgttg

SEQ ID NO: 3522440 - DNA, 25 bp, Homo sapien
ttgtcaaagtggttgcagagaaaga

SEQ ID NO: 3522441 - DNA, 25 bp, Homo sapien
aggtgtgcgagagaatggcaaatgg

SEQ ID NO: 3522442 - DNA, 25 bp, Homo sapien
cctgtgatttcctgtgcagggatct

SEQ ID NO: 3522443 - DNA, 25 bp, Homo sapien
tgcctgcagtagttgaagggaagcc

SEQ ID NO: 3522444 - DNA, 25 bp, Homo sapien
agcctggtgcttatcaaagtactgg

SEQ ID NO: 3522445 - DNA, 25 bp, Homo sapien
tatcaaagtactggacagccctgtg

SEQ ID NO: 3522446 - DNA, 25 bp, Homo sapien
tatctgatggaagtagaggctgtcc

SEQ ID NO: 3522447 - DNA, 25 bp, Homo sapien
cttccaggacgaattagagagcccc

SEQ ID NO: 3522448 - DNA, 25 bp, Homo sapien
tgagtaaggcagttccagagacact

SEQ ID NO: 3522449 - DNA, 25 bp, Homo sapien
taaaagtgggaacagtcatggaccg

SEQ ID NO: 3522450 - DNA, 25 bp, Homo sapien
tctggagagccagcttgaggatcgg

SEQ ID NO: 3522451 - DNA, 25 bp, Homo sapien
cagactgcttctcgacatctccggg

SEQ ID NO: 3522452 - DNA, 25 bp, Homo sapien
gaagcatccttcactgtgatccacc

SEQ ID NO: 3522453 - DNA, 25 bp, Homo sapien
tccggggtgccctgacggaagcatc

SEQ ID NO: 3522454 - DNA, 25 bp, Homo sapien
tatgacaaaataagacatcagaatc

SEQ ID NO: 3522455 - DNA, 25 bp, Homo sapien
tcccttccaagatgctcagcagtag

SEQ ID NO: 3522456 - DNA, 25 bp, Homo sapien
tggtcagtggcagacccctggagcc

SEQ ID NO: 3522457 - DNA, 25 bp, Homo sapien
atgacaaaataagacatcagaatcc

SEQ ID NO: 3522458 - DNA, 25 bp, Homo sapien
acacgaccgctgacaggtgtctggg

SEQ ID NO: 3522459 - DNA, 25 bp, Homo sapien
cacacacgaccgctgacaggtgtct

SEQ ID NO: 3522460 - DNA, 25 bp, Homo sapien
aggacacacacgaccgctgacaggt

SEQ ID NO: 3522461 - DNA, 25 bp, Homo sapien
cagagcaggacacacacgaccgctg

SEQ ID NO: 3522462 - DNA, 25 bp, Homo sapien
ggccacaggacggacaggcagcgct

SEQ ID NO: 3522463 - DNA, 25 bp, Homo sapien
acaggacggacaggcagcgctcggt

SEQ ID NO: 3522464 - DNA, 25 bp, Homo sapien
ccacaggacggacaggcagcgctcg

SEQ ID NO: 3522465 - DNA, 25 bp, Homo sapien
cagatgggccacaggacggacaggc

SEQ ID NO: 3522466 - DNA, 25 bp, Homo sapien
cagaagaagttactgaggtacacca

SEQ ID NO: 3522467 - DNA, 25 bp, Homo sapien
ccaggctgaggacgtagacagagaa

SEQ ID NO: 3522468 - DNA, 25 bp, Homo sapien
caggaagaccgggatcagggtctcc

SEQ ID NO: 3522469 - DNA, 25 bp, Homo sapien
gaccagggcaatgaaaaggatcagg

SEQ ID NO: 3522470 - DNA, 25 bp, Homo sapien
gctcagaaaacctccactggtgccc

SEQ ID NO: 3522471 - DNA, 25 bp, Homo sapien
ttctactggagttggtgagttgaga

SEQ ID NO: 3522472 - DNA, 25 bp, Homo sapien
tttctactggagttggtgagttgag

SEQ ID NO: 3522473 - DNA, 25 bp, Homo sapien
tctactggagttggtgagttgagaa

SEQ ID NO: 3522474 - DNA, 25 bp, Homo sapien
gctgcctggcacctgaaagggcaca

SEQ ID NO: 3522475 - DNA, 25 bp, Homo sapien
cccaaactgctgatggcaatttaaa

SEQ ID NO: 3522476 - DNA, 25 bp, Homo sapien
cccccaaactgctgatggcaattta

SEQ ID NO: 3522477 - DNA, 25 bp, Homo sapien
ccccaaactgctgatggcaatttaa

SEQ ID NO: 3522478 - DNA, 25 bp, Homo sapien
ctgccagtgtcgttggctcagccag

SEQ ID NO: 3522479 - DNA, 25 bp, Homo sapien
agccagggctcttggcgacatggag

SEQ ID NO: 3522480 - DNA, 25 bp, Homo sapien
aagagctgccagtgtcgttggctca

SEQ ID NO: 3522481 - DNA, 25 bp, Homo sapien
ctcaagagctgccagtgtcgttggc

SEQ ID NO: 3522482 - DNA, 25 bp, Homo sapien
ttgcaatgtctatgtgcagatgtca

SEQ ID NO: 3522483 - DNA, 25 bp, Homo sapien
gatcactattaggatgcgtaacaaa

SEQ ID NO: 3522484 - DNA, 25 bp, Homo sapien
ggtggaaccagggagccaaactcat

SEQ ID NO: 3522485 - DNA, 25 bp, Homo sapien
tcttcccgcagtaattaagtgtgtt

SEQ ID NO: 3522486 - DNA, 25 bp, Homo sapien
tgaaaggccctgaacctgtggctag

SEQ ID NO: 3522487 - DNA, 25 bp, Homo sapien
aatgagcctctaaaacctatgaccc

SEQ ID NO: 3522488 - DNA, 25 bp, Homo sapien
gaaagctcaaagtggtacagtctct

SEQ ID NO: 3522489 - DNA, 25 bp, Homo sapien
tattgacaaggaaacatcgctgccc

SEQ ID NO: 3522490 - DNA, 25 bp, Homo sapien
ttctctagcagatcataactgggag

SEQ ID NO: 3522491 - DNA, 25 bp, Homo sapien
tcaagcacagaatgatttggtggca

SEQ ID NO: 3522492 - DNA, 25 bp, Homo sapien
aactgggagatgattgccattcaca

SEQ ID NO: 3522493 - DNA, 25 bp, Homo sapien
tccgtagtgaaagcaaagtcttggt

SEQ ID NO: 3522494 - DNA, 25 bp, Homo sapien
ttctgataaatcttggcagacatct

SEQ ID NO: 3522495 - DNA, 25 bp, Homo sapien
ggtttagaaagatggacttttctga

SEQ ID NO: 3522496 - DNA, 25 bp, Homo sapien
ttcagatactatattggctgtttca

SEQ ID NO: 3522497 - DNA, 25 bp, Homo sapien
cagatactatattggctgtttcaaa

SEQ ID NO: 3522498 - DNA, 25 bp, Homo sapien
tatgctctgcaactcgttttttgaa

SEQ ID NO: 3522499 - DNA, 25 bp, Homo sapien
taggacaaagggatcaactcttcag

SEQ ID NO: 3522500 - DNA, 25 bp, Homo sapien
tacaaagccccacgataggacaaag

SEQ ID NO: 3522501 - DNA, 25 bp, Homo sapien
tctgagttttcacgagatgtgtaac

SEQ ID NO: 3522502 - DNA, 25 bp, Homo sapien
aaaaatctgagaaacggcgcacctc

SEQ ID NO: 3522503 - DNA, 25 bp, Homo sapien
gtaaagacctgatcacttctgagga

SEQ ID NO: 3522504 - DNA, 25 bp, Homo sapien
ggaaaggtatcgatctgtgcaggat

SEQ ID NO: 3522505 - DNA, 25 bp, Homo sapien
taatgtacgactacaaaggagaggc

SEQ ID NO: 3522506 - DNA, 25 bp, Homo sapien
cttttccacttgttgtgtaaggcct

SEQ ID NO: 3522507 - DNA, 25 bp, Homo sapien
tcttttccacttgttgtgtaaggcc

SEQ ID NO: 3522508 - DNA, 25 bp, Homo sapien
ttttccacttgttgtgtaaggcctc

SEQ ID NO: 3522509 - DNA, 25 bp, Homo sapien
gggccaaaatttttggcatagcaaa

SEQ ID NO: 3522510 - DNA, 25 bp, Homo sapien
cgtggggccaaaatttttggcatag

SEQ ID NO: 3522511 - DNA, 25 bp, Homo sapien
ggggccaaaatttttggcatagcaa

SEQ ID NO: 3522512 - DNA, 25 bp, Homo sapien
tggggccaaaatttttggcatagca

SEQ ID NO: 3522513 - DNA, 25 bp, Homo sapien
tcagtgacatttgtggactccagac

SEQ ID NO: 3522514 - DNA, 25 bp, Homo sapien
actccagactcttcccacagatggc

SEQ ID NO: 3522515 - DNA, 25 bp, Homo sapien
taaagttccccatctttgtcagtga

SEQ ID NO: 3522516 - DNA, 25 bp, Homo sapien
gatggcacagcggaaacaggtcttg

SEQ ID NO: 3522517 - DNA, 25 bp, Homo sapien
ggtagacgggcttttgctttgtatc

SEQ ID NO: 3522518 - DNA, 25 bp, Homo sapien
tactgtgaggcgtctgctatatcca

SEQ ID NO: 3522519 - DNA, 25 bp, Homo sapien
gtggacactggagggtagacgggct

SEQ ID NO: 3522520 - DNA, 25 bp, Homo sapien
caacaggttgagttaggcagtggtt

SEQ ID NO: 3522521 - DNA, 25 bp, Homo sapien
ggactctccaaacttcgcagtgaat

SEQ ID NO: 3522522 - DNA, 25 bp, Homo sapien
cacatcgagggcacttctcggactc

SEQ ID NO: 3522523 - DNA, 25 bp, Homo sapien
ttctcagcagcatagactgacttgc

SEQ ID NO: 3522524 - DNA, 25 bp, Homo sapien
tggtaactgagcgtgccggctttgg

SEQ ID NO: 3522525 - DNA, 25 bp, Homo sapien
gacacattgttcaaacttggtcaga

SEQ ID NO: 3522526 - DNA, 25 bp, Homo sapien
gtcaacaatagagtccattctccca

SEQ ID NO: 3522527 - DNA, 25 bp, Homo sapien
ttttctcttgacatgcaaaccaaga

SEQ ID NO: 3522528 - DNA, 25 bp, Homo sapien
tctcccacttccagaaaacgttgct

SEQ ID NO: 3522529 - DNA, 25 bp, Homo sapien
cgcccgtgtctgtgctgagacagcc

SEQ ID NO: 3522530 - DNA, 25 bp, Homo sapien
tgctcgcccgtgtctgtgctgagac

SEQ ID NO: 3522531 - DNA, 25 bp, Homo sapien
agatgctcgcccgtgtctgtgctga

SEQ ID NO: 3522532 - DNA, 25 bp, Homo sapien
ccgagatgctcgcccgtgtctgtgc

SEQ ID NO: 3522533 - DNA, 25 bp, Homo sapien
ccatagcacaccttgcagtagatct

SEQ ID NO: 3522534 - DNA, 25 bp, Homo sapien
tagatctccgactcatgagccgcga

SEQ ID NO: 3522535 - DNA, 25 bp, Homo sapien
tgtcgtgctgtcaagagccttcctg

SEQ ID NO: 3522536 - DNA, 25 bp, Homo sapien
gggccatatctgcgcccatagcaca

SEQ ID NO: 3522537 - DNA, 25 bp, Homo sapien
ttccattgcactggatttcttctgc

SEQ ID NO: 3522538 - DNA, 25 bp, Homo sapien
attttgcgcctccgccccagtttgg

SEQ ID NO: 3522539 - DNA, 25 bp, Homo sapien
tcttctgcatggtagacggtctttt

SEQ ID NO: 3522540 - DNA, 25 bp, Homo sapien
tggaaacacgtcttgtggaaactcc

SEQ ID NO: 3522541 - DNA, 25 bp, Homo sapien
ttgaagactatctggtcaaggtcaa

SEQ ID NO: 3522542 - DNA, 25 bp, Homo sapien
gaagactatctggtcaaggtcaagt

SEQ ID NO: 3522543 - DNA, 25 bp, Homo sapien
cttgaagactatctggtcaaggtca

SEQ ID NO: 3522544 - DNA, 25 bp, Homo sapien
tgaagactatctggtcaaggtcaag

SEQ ID NO: 3522545 - DNA, 25 bp, Homo sapien
cttgtcctctttaaatatatgaagg

SEQ ID NO: 3522546 - DNA, 25 bp, Homo sapien
tccgttcagctcaactgagtctgag

SEQ ID NO: 3522547 - DNA, 25 bp, Homo sapien
tatatgaaggctgtcaccagccttg

SEQ ID NO: 3522548 - DNA, 25 bp, Homo sapien
tgtggactccgttcagctcaactga

SEQ ID NO: 3522549 - DNA, 25 bp, Homo sapien
cgtgtgaggcagatgattcctaagg

SEQ ID NO: 3522550 - DNA, 25 bp, Homo sapien
atattcgtgtgaggcagatgattcc

SEQ ID NO: 3522551 - DNA, 25 bp, Homo sapien
ttcgtgtgaggcagatgattcctaa

SEQ ID NO: 3522552 - DNA, 25 bp, Homo sapien
agaatattcgtgtgaggcagatgat

SEQ ID NO: 3522553 - DNA, 25 bp, Homo sapien
gacgaaggagttaagtcgtcaagcc

SEQ ID NO: 3522554 - DNA, 25 bp, Homo sapien
aaaggagaagatgcttgcatgtcga

SEQ ID NO: 3522555 - DNA, 25 bp, Homo sapien
tcacaaagacgaaggagttaagtcg

SEQ ID NO: 3522556 - DNA, 25 bp, Homo sapien
aaactcgggtcctcggggaatgcat

SEQ ID NO: 3522557 - DNA, 25 bp, Homo sapien
atgacgatgccaggcggcccaagct

SEQ ID NO: 3522558 - DNA, 25 bp, Homo sapien
gaacacgcatgacgatgccaggcgg

SEQ ID NO: 3522559 - DNA, 25 bp, Homo sapien
cacagtctgaacacgcatgacgatg

SEQ ID NO: 3522560 - DNA, 25 bp, Homo sapien
tctgaacacgcatgacgatgccagg

SEQ ID NO: 3522561 - DNA, 25 bp, Homo sapien
cattgaacaaatccccaacgtattt

SEQ ID NO: 3522562 - DNA, 25 bp, Homo sapien
tacaacattatacatcacacagcat

SEQ ID NO: 3522563 - DNA, 25 bp, Homo sapien
catatttgcttagagggaagtaaac

SEQ ID NO: 3522564 - DNA, 25 bp, Homo sapien
gaatgctgtgttaggcatgtcaagc

SEQ ID NO: 3522565 - DNA, 25 bp, Homo sapien
gacttccagttttcgctgtgggaca

SEQ ID NO: 3522566 - DNA, 25 bp, Homo sapien
taaggaggttttattagcaccctca

SEQ ID NO: 3522567 - DNA, 25 bp, Homo sapien
gaaactttcggccactaattgtgac

SEQ ID NO: 3522568 - DNA, 25 bp, Homo sapien
gaccctttgggtgtcacaggaacag

SEQ ID NO: 3522569 - DNA, 25 bp, Homo sapien
ctgcacattgggtgagatgagtccc

SEQ ID NO: 3522570 - DNA, 25 bp, Homo sapien
ggtgagaccattagcttcaacggtg

SEQ ID NO: 3522571 - DNA, 25 bp, Homo sapien
aggaacgattccagacccagggctg

SEQ ID NO: 3522572 - DNA, 25 bp, Homo sapien
gacaggtacggctgccacggaagtt

SEQ ID NO: 3522573 - DNA, 25 bp, Homo sapien
tgcaattggggagctgtaaatcctg

SEQ ID NO: 3522574 - DNA, 25 bp, Homo sapien
ctgcaattggggagctgtaaatcct

SEQ ID NO: 3522575 - DNA, 25 bp, Homo sapien
gcaattggggagctgtaaatcctgt

SEQ ID NO: 3522576 - DNA, 25 bp, Homo sapien
gctgtaaatcctgtggtttggggaa

SEQ ID NO: 3522577 - DNA, 25 bp, Homo sapien
agcactgcgtgagagggattaggta

SEQ ID NO: 3522578 - DNA, 25 bp, Homo sapien
cgtgagagggattaggtatcctgat

SEQ ID NO: 3522579 - DNA, 25 bp, Homo sapien
ccccagggatgagcactgcgtgaga

SEQ ID NO: 3522580 - DNA, 25 bp, Homo sapien
gcccccagggatgagcactgcgtga

SEQ ID NO: 3522581 - DNA, 25 bp, Homo sapien
cacctttggatgatggcactgaccc

SEQ ID NO: 3522582 - DNA, 25 bp, Homo sapien
aatgcttgccccgaataatgcagaa

SEQ ID NO: 3522583 - DNA, 25 bp, Homo sapien
ggccacgtgcctctttcaggactaa

SEQ ID NO: 3522584 - DNA, 25 bp, Homo sapien
tcattggaccaaagcctccagcgga

SEQ ID NO: 3522585 - DNA, 25 bp, Homo sapien
gcggagacattttcaagtcctttta

SEQ ID NO: 3522586 - DNA, 25 bp, Homo sapien
gctggctccctggttcggctctttg

SEQ ID NO: 3522587 - DNA, 25 bp, Homo sapien
aggcctggtagaggcactggccttt

SEQ ID NO: 3522588 - DNA, 25 bp, Homo sapien
gaaccactgtcctcgagcatgcttg

SEQ ID NO: 3522589 - DNA, 25 bp, Homo sapien
ggtttgcagggtccagatcttgcca

SEQ ID NO: 3522590 - DNA, 25 bp, Homo sapien
tggcgtcacactttggtgggcttga

SEQ ID NO: 3522591 - DNA, 25 bp, Homo sapien
atgagggacggtgctgtcagctcca

SEQ ID NO: 3522592 - DNA, 25 bp, Homo sapien
ctttagaagagtgggtggtgcacac

SEQ ID NO: 3522593 - DNA, 25 bp, Homo sapien
attttacaaatagctgcgagctgag

SEQ ID NO: 3522594 - DNA, 25 bp, Homo sapien
ttacaaatagctgcgagctgagcca

SEQ ID NO: 3522595 - DNA, 25 bp, Homo sapien
tacaaatagctgcgagctgagccat

SEQ ID NO: 3522596 - DNA, 25 bp, Homo sapien
tttacaaatagctgcgagctgagcc

SEQ ID NO: 3522597 - DNA, 25 bp, Homo sapien
ggtgcagaattctgagaactctcag

SEQ ID NO: 3522598 - DNA, 25 bp, Homo sapien
ggaagggtgcagaattctgagaact

SEQ ID NO: 3522599 - DNA, 25 bp, Homo sapien
tacttgggaagggtgcagaattctg

SEQ ID NO: 3522600 - DNA, 25 bp, Homo sapien
tttacttgggaagggtgcagaattc

SEQ ID NO: 3522601 - DNA, 25 bp, Homo sapien
agaaaggaagagagcaccggtcaaa

SEQ ID NO: 3522602 - DNA, 25 bp, Homo sapien
gctactgggcgcagaatttatcttt

SEQ ID NO: 3522603 - DNA, 25 bp, Homo sapien
caatttgataagagatgggtgtcga

SEQ ID NO: 3522604 - DNA, 25 bp, Homo sapien
ctttgttggtcttgatagggctact

SEQ ID NO: 3522605 - DNA, 25 bp, Homo sapien
tctcttttgaagaccgtctcacctc

SEQ ID NO: 3522606 - DNA, 25 bp, Homo sapien
tcttgataagatccaggctactcag

SEQ ID NO: 3522607 - DNA, 25 bp, Homo sapien
ctggttttcggcctctttcctctgt

SEQ ID NO: 3522608 - DNA, 25 bp, Homo sapien
gaacattagctatatcatacaacct

SEQ ID NO: 3522609 - DNA, 25 bp, Homo sapien
tctgggccggtccatttgaaagctg

SEQ ID NO: 3522610 - DNA, 25 bp, Homo sapien
tatctgaggcgttgacaccaaaaac

SEQ ID NO: 3522611 - DNA, 25 bp, Homo sapien
aaaacagcatcacaaatttctggct

SEQ ID NO: 3522612 - DNA, 25 bp, Homo sapien
ggctcattacccttaaagacttgtc

SEQ ID NO: 3522613 - DNA, 25 bp, Homo sapien
ttaaaatcttggcagcaacttctag

SEQ ID NO: 3522614 - DNA, 25 bp, Homo sapien
ttgagattgtgtcgcccgtgccaag

SEQ ID NO: 3522615 - DNA, 25 bp, Homo sapien
gatcatcataatctgctcggcgtac

SEQ ID NO: 3522616 - DNA, 25 bp, Homo sapien
tcacgatatcgtaaatgcgtcgacg

SEQ ID NO: 3522617 - DNA, 25 bp, Homo sapien
ggcgaggcggctcaccatatgtaaa

SEQ ID NO: 3522618 - DNA, 25 bp, Homo sapien
catgactccaaaggtaccccaaatt

SEQ ID NO: 3522619 - DNA, 25 bp, Homo sapien
tacaaacatgtattagaagggcaac

SEQ ID NO: 3522620 - DNA, 25 bp, Homo sapien
taaattaagatacccacatgactcc

SEQ ID NO: 3522621 - DNA, 25 bp, Homo sapien
tcctcagaatagtgctgaaggtcca

SEQ ID NO: 3522622 - DNA, 25 bp, Homo sapien
aagttcctctgccacttcgtcaagg

SEQ ID NO: 3522623 - DNA, 25 bp, Homo sapien
taggatatcgtgctaagaacttatg

SEQ ID NO: 3522624 - DNA, 25 bp, Homo sapien
cagatgtcattattcacagcagggt

SEQ ID NO: 3522625 - DNA, 25 bp, Homo sapien
ttttcgacttggttgggatttctca

SEQ ID NO: 3522626 - DNA, 25 bp, Homo sapien
ccaacacgatatttgctgtggtgga

SEQ ID NO: 3522627 - DNA, 25 bp, Homo sapien
tggatctctgccaacacgatatttg

SEQ ID NO: 3522628 - DNA, 25 bp, Homo sapien
caggtaatccacttctgttgtcaaa

SEQ ID NO: 3522629 - DNA, 25 bp, Homo sapien
tctctgttgcggatctcagggctca

SEQ ID NO: 3522630 - DNA, 25 bp, Homo sapien
gtccccttttatgtggctcacaaaa

SEQ ID NO: 3522631 - DNA, 25 bp, Homo sapien
tatgtggctcacaaaagagattttc

SEQ ID NO: 3522632 - DNA, 25 bp, Homo sapien
ccttttatgtggctcacaaaagaga

SEQ ID NO: 3522633 - DNA, 25 bp, Homo sapien
tttatgtggctcacaaaagagattt

SEQ ID NO: 3522634 - DNA, 25 bp, Homo sapien
ccgatggttcaagtagtccaatcaa

SEQ ID NO: 3522635 - DNA, 25 bp, Homo sapien
caaatcccgatggttcaagtagtcc

SEQ ID NO: 3522636 - DNA, 25 bp, Homo sapien
tccccaaatcccgatggttcaagta

SEQ ID NO: 3522637 - DNA, 25 bp, Homo sapien
tggttcaagtagtccaatcaattgt

SEQ ID NO: 3522638 - DNA, 25 bp, Homo sapien
tatttactccctgttcgggtggcca

SEQ ID NO: 3522639 - DNA, 25 bp, Homo sapien
ccaagtaactgggtacaagtctgca

SEQ ID NO: 3522640 - DNA, 25 bp, Homo sapien
taaagtcgtgggaggtcgcttgaca

SEQ ID NO: 3522641 - DNA, 25 bp, Homo sapien
ccaataaggcaagcaggtactgtcc

SEQ ID NO: 3522642 - DNA, 25 bp, Homo sapien
tggcagtcagtctttccgcagcgcc

SEQ ID NO: 3522643 - DNA, 25 bp, Homo sapien
cagtctttccgcagcgccgaggtgg

SEQ ID NO: 3522644 - DNA, 25 bp, Homo sapien
aggtgggtgccggagagagacgccg

SEQ ID NO: 3522645 - DNA, 25 bp, Homo sapien
cagtcagtctttccgcagcgccgag

SEQ ID NO: 3522646 - DNA, 25 bp, Homo sapien
ggagcgtgaccgtccaggagcagcc

SEQ ID NO: 3522647 - DNA, 25 bp, Homo sapien
cgggcagagggagcgtgaccgtcca

SEQ ID NO: 3522648 - DNA, 25 bp, Homo sapien
ggcgggcagagggagcgtgaccgtc

SEQ ID NO: 3522649 - DNA, 25 bp, Homo sapien
cagagggagcgtgaccgtccaggag

SEQ ID NO: 3522650 - DNA, 25 bp, Homo sapien
ctggggcactgccgtagctggcagc

SEQ ID NO: 3522651 - DNA, 25 bp, Homo sapien
gggcactgccgtagctggcagctcc

SEQ ID NO: 3522652 - DNA, 25 bp, Homo sapien
tggggcactgccgtagctggcagct

SEQ ID NO: 3522653 - DNA, 25 bp, Homo sapien
ggggcactgccgtagctggcagctc

SEQ ID NO: 3522654 - DNA, 25 bp, Homo sapien
ttccctaagccagtacacgaagtct

SEQ ID NO: 3522655 - DNA, 25 bp, Homo sapien
cacctcggcaatgtgcatcaggcaa

SEQ ID NO: 3522656 - DNA, 25 bp, Homo sapien
gatttctcattcgtgtcaggttcct

SEQ ID NO: 3522657 - DNA, 25 bp, Homo sapien
ctgagggcctgagaatggttagcat

SEQ ID NO: 3522658 - DNA, 25 bp, Homo sapien
atgaaggaaacttgacttgagacat

SEQ ID NO: 3522659 - DNA, 25 bp, Homo sapien
aatgaaggaaacttgacttgagaca

SEQ ID NO: 3522660 - DNA, 25 bp, Homo sapien
ggtgagaggacccacttctaacaac

SEQ ID NO: 3522661 - DNA, 25 bp, Homo sapien
ctgaaaattgagggtgagaggaccc

SEQ ID NO: 3522662 - DNA, 25 bp, Homo sapien
cagatggatctttttcagcggaaat

SEQ ID NO: 3522663 - DNA, 25 bp, Homo sapien
ttttcagcggaaataagatcagttc

SEQ ID NO: 3522664 - DNA, 25 bp, Homo sapien
ataagatcagttcaaaagctgcttg

SEQ ID NO: 3522665 - DNA, 25 bp, Homo sapien
tagtctcagatggatctttttcagc

SEQ ID NO: 3522666 - DNA, 25 bp, Homo sapien
ccatggaatttaagacatcttaatc

SEQ ID NO: 3522667 - DNA, 25 bp, Homo sapien
ctttatcaacattacttatttgtga

SEQ ID NO: 3522668 - DNA, 25 bp, Homo sapien
cgagtgtcactgtagaagagcgtgg

SEQ ID NO: 3522669 - DNA, 25 bp, Homo sapien
cactgtagaagagcgtggagtggct

SEQ ID NO: 3522670 - DNA, 25 bp, Homo sapien
ccttctctttatcaacattacttat

SEQ ID NO: 3522671 - DNA, 25 bp, Homo sapien
tttcgcacaggaaattacaacaaca

SEQ ID NO: 3522672 - DNA, 25 bp, Homo sapien
ctttcgcacaggaaattacaacaac

SEQ ID NO: 3522673 - DNA, 25 bp, Homo sapien
ttcgcacaggaaattacaacaacat

SEQ ID NO: 3522674 - DNA, 25 bp, Homo sapien
ggttgtagtcgcagcagcacgtgtt

SEQ ID NO: 3522675 - DNA, 25 bp, Homo sapien
caaatactagtgctaagttgtctgc

SEQ ID NO: 3522676 - DNA, 25 bp, Homo sapien
gaacatactggataggttcatgcct

SEQ ID NO: 3522677 - DNA, 25 bp, Homo sapien
agcacgtgttgaagcccttggagca

SEQ ID NO: 3522678 - DNA, 25 bp, Homo sapien
tacctccaggattgtttgctgatga

SEQ ID NO: 3522679 - DNA, 25 bp, Homo sapien
catgattctcatcccctacctccag

SEQ ID NO: 3522680 - DNA, 25 bp, Homo sapien
cacatgattctcatcccctacctcc

SEQ ID NO: 3522681 - DNA, 25 bp, Homo sapien
ccctacctccaggattgtttgctga

SEQ ID NO: 3522682 - DNA, 25 bp, Homo sapien
ttcccatcagccttctttattatat

SEQ ID NO: 3522683 - DNA, 25 bp, Homo sapien
cttcccatcagccttctttattata

SEQ ID NO: 3522684 - DNA, 25 bp, Homo sapien
cctccaggtccccaaagttgctcat

SEQ ID NO: 3522685 - DNA, 25 bp, Homo sapien
ccctccaggtccccaaagttgctca

SEQ ID NO: 3522686 - DNA, 25 bp, Homo sapien
cgtgcgtcatcctaggtaacctggc

SEQ ID NO: 3522687 - DNA, 25 bp, Homo sapien
caagcacgtgcgtcatcctaggtaa

SEQ ID NO: 3522688 - DNA, 25 bp, Homo sapien
tcctaggtaacctggctgttggaga

SEQ ID NO: 3522689 - DNA, 25 bp, Homo sapien
agatccacttcaagcacgtgcgtca

SEQ ID NO: 3522690 - DNA, 25 bp, Homo sapien
ggtaagatgccacattgctttctct

SEQ ID NO: 3522691 - DNA, 25 bp, Homo sapien
tatttcatgtgagttgatgccctga

SEQ ID NO: 3522692 - DNA, 25 bp, Homo sapien
ctgatggtaagatgccacattgctt

SEQ ID NO: 3522693 - DNA, 25 bp, Homo sapien
ttatttcatgtgagttgatgccctg

SEQ ID NO: 3522694 - DNA, 25 bp, Homo sapien
tccacatttgggaagcagaataatc

SEQ ID NO: 3522695 - DNA, 25 bp, Homo sapien
tgctttgtgggctacggctgcttcc

SEQ ID NO: 3522696 - DNA, 25 bp, Homo sapien
tgagacctcaatgtgagtgtccaca

SEQ ID NO: 3522697 - DNA, 25 bp, Homo sapien
cacctgggccctgaagatgccctgg

SEQ ID NO: 3522698 - DNA, 25 bp, Homo sapien
gttttgctcatatttggctgtgcca

SEQ ID NO: 3522699 - DNA, 25 bp, Homo sapien
gccaggcagcgaactccacacaatg

SEQ ID NO: 3522700 - DNA, 25 bp, Homo sapien
tgagtacaacactatcatcatatga

SEQ ID NO: 3522701 - DNA, 25 bp, Homo sapien
ctgtgccattggctgcggagccagg

SEQ ID NO: 3522702 - DNA, 25 bp, Homo sapien
tggcctttggttagataactgtgcc

SEQ ID NO: 3522703 - DNA, 25 bp, Homo sapien
ctggcctttggttagataactgtgc

SEQ ID NO: 3522704 - DNA, 25 bp, Homo sapien
ggcctttggttagataactgtgcct

SEQ ID NO: 3522705 - DNA, 25 bp, Homo sapien
ccttgtgattagtcagttgctcgca

SEQ ID NO: 3522706 - DNA, 25 bp, Homo sapien
aatgcagtcccataggttttatttc

SEQ ID NO: 3522707 - DNA, 25 bp, Homo sapien
cagatgggctgtgtaaatgcagtcc

SEQ ID NO: 3522708 - DNA, 25 bp, Homo sapien
cttgtggtcacagcatcttgcgttt

SEQ ID NO: 3522709 - DNA, 25 bp, Homo sapien
tgtttactaggcttcaggatcagtt

SEQ ID NO: 3522710 - DNA, 25 bp, Homo sapien
tcttgtggggatcttccgctctgaa

SEQ ID NO: 3522711 - DNA, 25 bp, Homo sapien
tcagagtcaggctcttgtggggatc

SEQ ID NO: 3522712 - DNA, 25 bp, Homo sapien
cgctctgaagaggattgtgttcttc

SEQ ID NO: 3522713 - DNA, 25 bp, Homo sapien
gcagatatgatccaagggaccattg

SEQ ID NO: 3522714 - DNA, 25 bp, Homo sapien
gatatgatccaagggaccattgcag

SEQ ID NO: 3522715 - DNA, 25 bp, Homo sapien
cagatatgatccaagggaccattgc

SEQ ID NO: 3522716 - DNA, 25 bp, Homo sapien
agcagatatgatccaagggaccatt

SEQ ID NO: 3522717 - DNA, 25 bp, Homo sapien
cttgtagctcaagagtctggaaagg

SEQ ID NO: 3522718 - DNA, 25 bp, Homo sapien
ggtttggctgtacagctctcctctg

SEQ ID NO: 3522719 - DNA, 25 bp, Homo sapien
gcaggactcaggcaactgaagctca

SEQ ID NO: 3522720 - DNA, 25 bp, Homo sapien
ccaggtctgttgtttacagcatcaa

SEQ ID NO: 3522721 - DNA, 25 bp, Homo sapien
ctggagaaagctgacataagagcag

SEQ ID NO: 3522722 - DNA, 25 bp, Homo sapien
aaagctgacataagagcaggcacac

SEQ ID NO: 3522723 - DNA, 25 bp, Homo sapien
ggagaaagctgacataagagcaggc

SEQ ID NO: 3522724 - DNA, 25 bp, Homo sapien
agaaagctgacataagagcaggcac

SEQ ID NO: 3522725 - DNA, 25 bp, Homo sapien
tcttgagactattgtccacacaagt

SEQ ID NO: 3522726 - DNA, 25 bp, Homo sapien
gaaaagcctgtgctggatgccaggc

SEQ ID NO: 3522727 - DNA, 25 bp, Homo sapien
acacaagtggtgtggtccaaggcca

SEQ ID NO: 3522728 - DNA, 25 bp, Homo sapien
gactattgtccacacaagtggtgtg

SEQ ID NO: 3522729 - DNA, 25 bp, Homo sapien
tctcttacaagcctgacagttgtaa

SEQ ID NO: 3522730 - DNA, 25 bp, Homo sapien
actctcttacaagcctgacagttgt

SEQ ID NO: 3522731 - DNA, 25 bp, Homo sapien
cttacaagcctgacagttgtaaagc

SEQ ID NO: 3522732 - DNA, 25 bp, Homo sapien
caactctcttacaagcctgacagtt

SEQ ID NO: 3522733 - DNA, 25 bp, Homo sapien
ggaattatgtaacctcttgcctttg

SEQ ID NO: 3522734 - DNA, 25 bp, Homo sapien
caattgtgattatttcctcggaggg

SEQ ID NO: 3522735 - DNA, 25 bp, Homo sapien
cttttgtttccaggatgttagtggc

SEQ ID NO: 3522736 - DNA, 25 bp, Homo sapien
gacagctttgcaatgaggcttgcct

SEQ ID NO: 3522737 - DNA, 25 bp, Homo sapien
gctttgggcacttccgccctactca

SEQ ID NO: 3522738 - DNA, 25 bp, Homo sapien
tttgtccctgatcctgcgcctttgt

SEQ ID NO: 3522739 - DNA, 25 bp, Homo sapien
cactgacccctcacgaaacttggag

SEQ ID NO: 3522740 - DNA, 25 bp, Homo sapien
ttccgccctactcatggcaaagagc

SEQ ID NO: 3522741 - DNA, 25 bp, Homo sapien
ccgccgattggcagcgaggcgccat

SEQ ID NO: 3522742 - DNA, 25 bp, Homo sapien
cagcgaggcgccatgtgaactgcac

SEQ ID NO: 3522743 - DNA, 25 bp, Homo sapien
gattggcagcgaggcgccatgtgaa

SEQ ID NO: 3522744 - DNA, 25 bp, Homo sapien
aggccgccgattggcagcgaggcgc

SEQ ID NO: 3522745 - DNA, 25 bp, Homo sapien
gttatacctaagaaggcctggcctg

SEQ ID NO: 3522746 - DNA, 25 bp, Homo sapien
gacttgtctggcacctggaatccta

SEQ ID NO: 3522747 - DNA, 25 bp, Homo sapien
cccacagcagaaggagtaagttata

SEQ ID NO: 3522748 - DNA, 25 bp, Homo sapien
tcccctgtggcttagcagaagtggc

SEQ ID NO: 3522749 - DNA, 25 bp, Homo sapien
ggaccctggtgtctcgcctgccata

SEQ ID NO: 3522750 - DNA, 25 bp, Homo sapien
tggtgtctcgcctgccatacactgc

SEQ ID NO: 3522751 - DNA, 25 bp, Homo sapien
tgaggaccctggtgtctcgcctgcc

SEQ ID NO: 3522752 - DNA, 25 bp, Homo sapien
ctggtgtctcgcctgccatacactg

SEQ ID NO: 3522753 - DNA, 25 bp, Homo sapien
gataatatgcaattatgatggcttc

SEQ ID NO: 3522754 - DNA, 25 bp, Homo sapien
ttttggctaggtgtagatgtctgca

SEQ ID NO: 3522755 - DNA, 25 bp, Homo sapien
atttgggacctctgacactgtagac

SEQ ID NO: 3522756 - DNA, 25 bp, Homo sapien
acaattttaattgggctggtacagc

SEQ ID NO: 3522757 - DNA, 25 bp, Homo sapien
ttttaacttgaactctagccgtcat

SEQ ID NO: 3522758 - DNA, 25 bp, Homo sapien
cattttaacttgaactctagccgtc

SEQ ID NO: 3522759 - DNA, 25 bp, Homo sapien
tcattttaacttgaactctagccgt

SEQ ID NO: 3522760 - DNA, 25 bp, Homo sapien
attcattttaacttgaactctagcc

SEQ ID NO: 3522761 - DNA, 25 bp, Homo sapien
gggcaaattgtgagagcaagtaatg

SEQ ID NO: 3522762 - DNA, 25 bp, Homo sapien
taatgaggagtctcaatttctgagg

SEQ ID NO: 3522763 - DNA, 25 bp, Homo sapien
ttgtgagagcaagtaatgaggagtc

SEQ ID NO: 3522764 - DNA, 25 bp, Homo sapien
ggagtctcaatttctgagggcagag

SEQ ID NO: 3522765 - DNA, 25 bp, Homo sapien
ctagtttgcagatgaagggtaccag

SEQ ID NO: 3522766 - DNA, 25 bp, Homo sapien
gcttgcttcttctagctgggttgtc

SEQ ID NO: 3522767 - DNA, 25 bp, Homo sapien
tttccttgggatgctagtttgcaga

SEQ ID NO: 3522768 - DNA, 25 bp, Homo sapien
ctgcttgcttcttctagctgggttg

SEQ ID NO: 3522769 - DNA, 25 bp, Homo sapien
ttttgaatcaagtggctctaagacc

SEQ ID NO: 3522770 - DNA, 25 bp, Homo sapien
tatcgagccggtgcatcaggaaatc

SEQ ID NO: 3522771 - DNA, 25 bp, Homo sapien
tactctatctgaaaaagcctcttgc

SEQ ID NO: 3522772 - DNA, 25 bp, Homo sapien
tcctttggtaggcaccttgacatct

SEQ ID NO: 3522773 - DNA, 25 bp, Homo sapien
gcccacatcctgtaattgtgccagt

SEQ ID NO: 3522774 - DNA, 25 bp, Homo sapien
ccctgttgcatcaaataccaatttg

SEQ ID NO: 3522775 - DNA, 25 bp, Homo sapien
taatttcatagccatcgatttcccc

SEQ ID NO: 3522776 - DNA, 25 bp, Homo sapien
cctgatacgctctttcattggcctg

SEQ ID NO: 3522777 - DNA, 25 bp, Homo sapien
ggaggccagagtctgcattctgaat

SEQ ID NO: 3522778 - DNA, 25 bp, Homo sapien
gaggccagagtctgcattctgaatc

SEQ ID NO: 3522779 - DNA, 25 bp, Homo sapien
tgatagggccggtcgtgataacagc

SEQ ID NO: 3522780 - DNA, 25 bp, Homo sapien
ggtcgtgataacagcatctccttca

SEQ ID NO: 3522781 - DNA, 25 bp, Homo sapien
ccttaataaagagcggcgcctcact

SEQ ID NO: 3522782 - DNA, 25 bp, Homo sapien
cactatttgtggtgatagggccggt

SEQ ID NO: 3522783 - DNA, 25 bp, Homo sapien
agcagcttctgaggatccgttgggt

SEQ ID NO: 3522784 - DNA, 25 bp, Homo sapien
tctgaggatccgttgggtccacaag

SEQ ID NO: 3522785 - DNA, 25 bp, Homo sapien
aggatccgttgggtccacaaggcag

SEQ ID NO: 3522786 - DNA, 25 bp, Homo sapien
cttagtgctgctaagggcgtgcagc

SEQ ID NO: 3522787 - DNA, 25 bp, Homo sapien
cactggcaccccgctctgagctccc

SEQ ID NO: 3522788 - DNA, 25 bp, Homo sapien
ttcttccagttgtcccaccccaggc

SEQ ID NO: 3522789 - DNA, 25 bp, Homo sapien
tcttccagttgtcccaccccaggct

SEQ ID NO: 3522790 - DNA, 25 bp, Homo sapien
gcaccccgctctgagctccctgagg

SEQ ID NO: 3522791 - DNA, 25 bp, Homo sapien
gctgggcttggccacatccgctgcc

SEQ ID NO: 3522792 - DNA, 25 bp, Homo sapien
tgggcttggccacatccgctgccct

SEQ ID NO: 3522793 - DNA, 25 bp, Homo sapien
ctgggcttggccacatccgctgccc

SEQ ID NO: 3522794 - DNA, 25 bp, Homo sapien
caagacgttcactgttaatgtgtcc

SEQ ID NO: 3522795 - DNA, 25 bp, Homo sapien
tgttgaagtgggcaagacgttcact

SEQ ID NO: 3522796 - DNA, 25 bp, Homo sapien
tgggcaagacgttcactgttaatgt

SEQ ID NO: 3522797 - DNA, 25 bp, Homo sapien
ggaggatgttgaagtgggcaagacg

SEQ ID NO: 3522798 - DNA, 25 bp, Homo sapien
taggacagtaccatgcacatagaag

SEQ ID NO: 3522799 - DNA, 25 bp, Homo sapien
catcagctcaactcgcagggattaa

SEQ ID NO: 3522800 - DNA, 25 bp, Homo sapien
taaatttgggtgttgctagtggcac

SEQ ID NO: 3522801 - DNA, 25 bp, Homo sapien
gatgctaatattcgttcccctgctg

SEQ ID NO: 3522802 - DNA, 25 bp, Homo sapien
ggaagaggaagatacattatcttca

SEQ ID NO: 3522803 - DNA, 25 bp, Homo sapien
aacctctggtggtgggctttgccaa

SEQ ID NO: 3522804 - DNA, 25 bp, Homo sapien
ctgctatgttccaggtagaacctct

SEQ ID NO: 3522805 - DNA, 25 bp, Homo sapien
attatcttcatcaatggagtgaggc

SEQ ID NO: 3522806 - DNA, 25 bp, Homo sapien
cagacgagatcgggcgcattcaggg

SEQ ID NO: 3522807 - DNA, 25 bp, Homo sapien
cccgaccctgcttagcttctgagat

SEQ ID NO: 3522808 - DNA, 25 bp, Homo sapien
cgaccctgcttagcttctgagatca

SEQ ID NO: 3522809 - DNA, 25 bp, Homo sapien
cattcagggtggtatggtcgtagac

SEQ ID NO: 3522810 - DNA, 25 bp, Homo sapien
cccttcatgataaatgatcccttcc

SEQ ID NO: 3522811 - DNA, 25 bp, Homo sapien
ccttcatgataaatgatcccttcct

SEQ ID NO: 3522812 - DNA, 25 bp, Homo sapien
cagacacctgcacgtggggatgcat

SEQ ID NO: 3522813 - DNA, 25 bp, Homo sapien
tgagcggcctcatcacaaatggctt

SEQ ID NO: 3522814 - DNA, 25 bp, Homo sapien
agatgcagacacctgcacgtgggga

SEQ ID NO: 3522815 - DNA, 25 bp, Homo sapien
tggtacccactgagcggcctcatca

SEQ ID NO: 3522816 - DNA, 25 bp, Homo sapien
cttctatgaactgtattttgctcat

SEQ ID NO: 3522817 - DNA, 25 bp, Homo sapien
ccccacccctctcagttctggctcc

SEQ ID NO: 3522818 - DNA, 25 bp, Homo sapien
gataaagagtgcatcccttcaagct

SEQ ID NO: 3522819 - DNA, 25 bp, Homo sapien
gagttgctgctggttaaagcccgaa

SEQ ID NO: 3522820 - DNA, 25 bp, Homo sapien
cctggtctgatggtaccagggataa

SEQ ID NO: 3522821 - DNA, 25 bp, Homo sapien
cccgaagtgggaatcggcacagcag

SEQ ID NO: 3522822 - DNA, 25 bp, Homo sapien
tttctggccaaagtgaggttggggc

SEQ ID NO: 3522823 - DNA, 25 bp, Homo sapien
ccttgtggttctgatagggctgtaa

SEQ ID NO: 3522824 - DNA, 25 bp, Homo sapien
caaagtgaggttggggctgggtgct

SEQ ID NO: 3522825 - DNA, 25 bp, Homo sapien
cttgtggttctgatagggctgtaag

SEQ ID NO: 3522826 - DNA, 25 bp, Homo sapien
gccaaaaggcgtcatggacagtgag

SEQ ID NO: 3522827 - DNA, 25 bp, Homo sapien
ccaaaaggcgtcatggacagtgagg

SEQ ID NO: 3522828 - DNA, 25 bp, Homo sapien
aaaaggcgtcatggacagtgaggag

SEQ ID NO: 3522829 - DNA, 25 bp, Homo sapien
aggcgtcatggacagtgaggaggtg

SEQ ID NO: 3522830 - DNA, 25 bp, Homo sapien
ctgaaggcactgatgttaaccccat

SEQ ID NO: 3522831 - DNA, 25 bp, Homo sapien
gaaccacagtgtcctgaaggcactg

SEQ ID NO: 3522832 - DNA, 25 bp, Homo sapien
ccagaaccacagtgtcctgaaggca

SEQ ID NO: 3522833 - DNA, 25 bp, Homo sapien
tcctgaaggcactgatgttaacccc

SEQ ID NO: 3522834 - DNA, 25 bp, Homo sapien
ttgaccagaccttcagcaaaacgcc

SEQ ID NO: 3522835 - DNA, 25 bp, Homo sapien
ccttttgaccagaccttcagcaaaa

SEQ ID NO: 3522836 - DNA, 25 bp, Homo sapien
ttttgaccagaccttcagcaaaacg

SEQ ID NO: 3522837 - DNA, 25 bp, Homo sapien
accagaccttcagcaaaacgcccat

SEQ ID NO: 3522838 - DNA, 25 bp, Homo sapien
cctgcaggtagagcactgtgctgga

SEQ ID NO: 3522839 - DNA, 25 bp, Homo sapien
atcctgcaggtagagcactgtgctg

SEQ ID NO: 3522840 - DNA, 25 bp, Homo sapien
tgcaggtagagcactgtgctggaca

SEQ ID NO: 3522841 - DNA, 25 bp, Homo sapien
tcagaatacatcctgcaggtagagc

SEQ ID NO: 3522842 - DNA, 25 bp, Homo sapien
tctctgaaattgagtgggctggttc

SEQ ID NO: 3522843 - DNA, 25 bp, Homo sapien
caatctcttccagattacttgagtc

SEQ ID NO: 3522844 - DNA, 25 bp, Homo sapien
tggaaacatgatactgccaatctct

SEQ ID NO: 3522845 - DNA, 25 bp, Homo sapien
atgaacaaaactagttggaaacatg

SEQ ID NO: 3522846 - DNA, 25 bp, Homo sapien
tcagtcaggcgcaaggtgggggcca

SEQ ID NO: 3522847 - DNA, 25 bp, Homo sapien
cccccatcacactccccctgaattc

SEQ ID NO: 3522848 - DNA, 25 bp, Homo sapien
tgaattcttcctttgccctcagtca

SEQ ID NO: 3522849 - DNA, 25 bp, Homo sapien
agccctgggaggtggcggtccctgc

SEQ ID NO: 3522850 - DNA, 25 bp, Homo sapien
tgtctgccccttgtttgtatctgca

SEQ ID NO: 3522851 - DNA, 25 bp, Homo sapien
tagtatgaaagaagctgacgggaca

SEQ ID NO: 3522852 - DNA, 25 bp, Homo sapien
atatactggcatagagagctttagc

SEQ ID NO: 3522853 - DNA, 25 bp, Homo sapien
tccaccctgggtcacatagtatgaa

SEQ ID NO: 3522854 - DNA, 25 bp, Homo sapien
gaaatccttccagccatgaatctaa

SEQ ID NO: 3522855 - DNA, 25 bp, Homo sapien
atgtctctctgcacaatcctcaggg

SEQ ID NO: 3522856 - DNA, 25 bp, Homo sapien
gaatctaaacccttcgctgataaat

SEQ ID NO: 3522857 - DNA, 25 bp, Homo sapien
aatgactctgttaggttttgtctcc

SEQ ID NO: 3522858 - DNA, 25 bp, Homo sapien
catcaaaaggctgtggatatttggg

SEQ ID NO: 3522859 - DNA, 25 bp, Homo sapien
aggctgtggatatttgggggcctgc

SEQ ID NO: 3522860 - DNA, 25 bp, Homo sapien
tactgcatcaaaaggctgtggatat

SEQ ID NO: 3522861 - DNA, 25 bp, Homo sapien
cagaacctactgcatcaaaaggctg

SEQ ID NO: 3522862 - DNA, 25 bp, Homo sapien
caaatagcggagaatacaaactgcc

SEQ ID NO: 3522863 - DNA, 25 bp, Homo sapien
gaagtccattgctcccagagacagt

SEQ ID NO: 3522864 - DNA, 25 bp, Homo sapien
tagcctgaacgtaccacaatggata

SEQ ID NO: 3522865 - DNA, 25 bp, Homo sapien
tattggctagaacacctacatgcag

SEQ ID NO: 3522866 - DNA, 25 bp, Homo sapien
gtttccaatctgtcaaggactccaa

SEQ ID NO: 3522867 - DNA, 25 bp, Homo sapien
ggtgacattaagatctttcaaggct

SEQ ID NO: 3522868 - DNA, 25 bp, Homo sapien
tttcaaggcttcaatcctactgtca

SEQ ID NO: 3522869 - DNA, 25 bp, Homo sapien
agatctcttttaggctcatgatggt

SEQ ID NO: 3522870 - DNA, 25 bp, Homo sapien
gattcattgggtcaacttgggccag

SEQ ID NO: 3522871 - DNA, 25 bp, Homo sapien
gtattgaatcaagcacagggccctc

SEQ ID NO: 3522872 - DNA, 25 bp, Homo sapien
ttgtagccgatctgacccaagtggc

SEQ ID NO: 3522873 - DNA, 25 bp, Homo sapien
cagcagttggacagtagagaaccac

SEQ ID NO: 3522874 - DNA, 25 bp, Homo sapien
tccaggaggttcaagggactcatca

SEQ ID NO: 3522875 - DNA, 25 bp, Homo sapien
ccatcaaaattgtagcagggagggc

SEQ ID NO: 3522876 - DNA, 25 bp, Homo sapien
caaaaagggctggagttacacgata

SEQ ID NO: 3522877 - DNA, 25 bp, Homo sapien
tttgatccccacgtaaggctgtgag

SEQ ID NO: 3522878 - DNA, 25 bp, Homo sapien
actgccgtccgtggtctgctttaca

SEQ ID NO: 3522879 - DNA, 25 bp, Homo sapien
tgtgcccagactggacattactcca

SEQ ID NO: 3522880 - DNA, 25 bp, Homo sapien
ctctatcccatgctgagtgcagctg

SEQ ID NO: 3522881 - DNA, 25 bp, Homo sapien
tacagcttggctgtgtcagtagaca

SEQ ID NO: 3522882 - DNA, 25 bp, Homo sapien
acaccaactgggcctctcagggaga

SEQ ID NO: 3522883 - DNA, 25 bp, Homo sapien
ccttctctgggaatgctgaggctgg

SEQ ID NO: 3522884 - DNA, 25 bp, Homo sapien
cagaggagtgatgattccacaaaca

SEQ ID NO: 3522885 - DNA, 25 bp, Homo sapien
aggcaaactgcgtgatcaccagagg

SEQ ID NO: 3522886 - DNA, 25 bp, Homo sapien
gcttcctctagagcgaggccttctc

SEQ ID NO: 3522887 - DNA, 25 bp, Homo sapien
ttcttcttcttccgagccactcttc

SEQ ID NO: 3522888 - DNA, 25 bp, Homo sapien
ctgcttcctctagagcgaggccttc

SEQ ID NO: 3522889 - DNA, 25 bp, Homo sapien
tcttcttcttccgagccactcttct

SEQ ID NO: 3522890 - DNA, 25 bp, Homo sapien
tggttagatactcctcctctctgtt

SEQ ID NO: 3522891 - DNA, 25 bp, Homo sapien
ccaggctggttagatactcctcctc

SEQ ID NO: 3522892 - DNA, 25 bp, Homo sapien
tgggtagcttctggtcttcctttaa

SEQ ID NO: 3522893 - DNA, 25 bp, Homo sapien
cctgggtagcttctggtcttccttt

SEQ ID NO: 3522894 - DNA, 25 bp, Homo sapien
ccttgttacaggaaaggagcctggg

SEQ ID NO: 3522895 - DNA, 25 bp, Homo sapien
catggtctgcccctggtgagtgtct

SEQ ID NO: 3522896 - DNA, 25 bp, Homo sapien
gacaagccattctcatctgtgcagt

SEQ ID NO: 3522897 - DNA, 25 bp, Homo sapien
tctgtgcagtaaggaaactcccagg

SEQ ID NO: 3522898 - DNA, 25 bp, Homo sapien
ttgctttgctcagaatcggtggtaa

SEQ ID NO: 3522899 - DNA, 25 bp, Homo sapien
tgctcagaatcggtggtaaaagaga

SEQ ID NO: 3522900 - DNA, 25 bp, Homo sapien
gctttgctcagaatcggtggtaaaa

SEQ ID NO: 3522901 - DNA, 25 bp, Homo sapien
cagaatcggtggtaaaagagactat

SEQ ID NO: 3522902 - DNA, 25 bp, Homo sapien
gctggctgccgggcctttctaagga

SEQ ID NO: 3522903 - DNA, 25 bp, Homo sapien
gatctgggcgtcgtgttctttttcc

SEQ ID NO: 3522904 - DNA, 25 bp, Homo sapien
aggagcaactgcgtgaggtgcctca

SEQ ID NO: 3522905 - DNA, 25 bp, Homo sapien
tcttggcagagctctgatctgggcg

SEQ ID NO: 3522906 - DNA, 25 bp, Homo sapien
cttgaacatccagctattgccgggg

SEQ ID NO: 3522907 - DNA, 25 bp, Homo sapien
tgactgtggacttcttgcagccaaa

SEQ ID NO: 3522908 - DNA, 25 bp, Homo sapien
gatgaccgggtgcaactggttcttt

SEQ ID NO: 3522909 - DNA, 25 bp, Homo sapien
acactgggtgaggattggaggccag

SEQ ID NO: 3522910 - DNA, 25 bp, Homo sapien
gattgtctgaagtctgcctagaacc

SEQ ID NO: 3522911 - DNA, 25 bp, Homo sapien
aggctaatttactggcctgctgagc

SEQ ID NO: 3522912 - DNA, 25 bp, Homo sapien
tgtgtcaggcggcccaagtgctttc

SEQ ID NO: 3522913 - DNA, 25 bp, Homo sapien
ggctcttggcaagggtgctgtgtca

SEQ ID NO: 3522914 - DNA, 25 bp, Homo sapien
tcctgggccccctagatgctcagtg

SEQ ID NO: 3522915 - DNA, 25 bp, Homo sapien
tagatgctcagtgtagccacttctc

SEQ ID NO: 3522916 - DNA, 25 bp, Homo sapien
ccctcttgtcagcagatctctcaac

SEQ ID NO: 3522917 - DNA, 25 bp, Homo sapien
ctgtgtccttcaccacctatctttt

SEQ ID NO: 3522918 - DNA, 25 bp, Homo sapien
ctcggagagccacagccagttgtca

SEQ ID NO: 3522919 - DNA, 25 bp, Homo sapien
tgtagccagattgatttcccaggaa

SEQ ID NO: 3522920 - DNA, 25 bp, Homo sapien
tctggctgcctaaaagattgtcctg

SEQ ID NO: 3522921 - DNA, 25 bp, Homo sapien
ccagttgtcaccgaaacccagatga

SEQ ID NO: 3522922 - DNA, 25 bp, Homo sapien
tcaatgcagccccattaacaatctc

SEQ ID NO: 3522923 - DNA, 25 bp, Homo sapien
tcaccactgcgatgtgtttgctgtg

SEQ ID NO: 3522924 - DNA, 25 bp, Homo sapien
ctctggatcgcatgatcaacagtgc

SEQ ID NO: 3522925 - DNA, 25 bp, Homo sapien
gtcaccactgcgatgtgtttgctgt

SEQ ID NO: 3522926 - DNA, 25 bp, Homo sapien
ttgggaggtgaggttataccctgtc

SEQ ID NO: 3522927 - DNA, 25 bp, Homo sapien
gctgtgaccttcaattcaccggctc

SEQ ID NO: 3522928 - DNA, 25 bp, Homo sapien
tccccacaacgttgtcatttccttc

SEQ ID NO: 3522929 - DNA, 25 bp, Homo sapien
tgaggttataccctgtccccacaac

SEQ ID NO: 3522930 - DNA, 25 bp, Homo sapien
ggatggagacgcagttcattacaag

SEQ ID NO: 3522931 - DNA, 25 bp, Homo sapien
tcaggatggagacgcagttcattac

SEQ ID NO: 3522932 - DNA, 25 bp, Homo sapien
gattgttcccctaatcaggatggag

SEQ ID NO: 3522933 - DNA, 25 bp, Homo sapien
ctgtgtgaggattgttcccctaatc

SEQ ID NO: 3522934 - DNA, 25 bp, Homo sapien
gcacagaactgcgagtttcactggg

SEQ ID NO: 3522935 - DNA, 25 bp, Homo sapien
tttcactggggtgcgtgtgtttgtc

SEQ ID NO: 3522936 - DNA, 25 bp, Homo sapien
gggatgcgtgaggaatgtctgcaca

SEQ ID NO: 3522937 - DNA, 25 bp, Homo sapien
ctgagatgagtggaggaatggccgt

SEQ ID NO: 3522938 - DNA, 25 bp, Homo sapien
acagggccgctctcagtttgtgtcc

SEQ ID NO: 3522939 - DNA, 25 bp, Homo sapien
gacttgcagagcaggccggtaacca

SEQ ID NO: 3522940 - DNA, 25 bp, Homo sapien
taaccacactggttacagggccgct

SEQ ID NO: 3522941 - DNA, 25 bp, Homo sapien
gagcaggccggtaaccacactggtt

SEQ ID NO: 3522942 - DNA, 25 bp, Homo sapien
cagctcttactctgcataggcccat

SEQ ID NO: 3522943 - DNA, 25 bp, Homo sapien
gttggatcttcagctcttactctgc

SEQ ID NO: 3522944 - DNA, 25 bp, Homo sapien
cagttggatcttcagctcttactct

SEQ ID NO: 3522945 - DNA, 25 bp, Homo sapien
catcctttccagttggatcttcagc

SEQ ID NO: 3522946 - DNA, 25 bp, Homo sapien
gaaggagtaagcagttacttcttgc

SEQ ID NO: 3522947 - DNA, 25 bp, Homo sapien
aaggagtaagcagttacttcttgca

SEQ ID NO: 3522948 - DNA, 25 bp, Homo sapien
aggagtaagcagttacttcttgcac

SEQ ID NO: 3522949 - DNA, 25 bp, Homo sapien
aaggaaggagtaagcagttacttct

SEQ ID NO: 3522950 - DNA, 25 bp, Homo sapien
gtcctctcttatgctatgtccagat

SEQ ID NO: 3522951 - DNA, 25 bp, Homo sapien
ctctcttatgctatgtccagatgcc

SEQ ID NO: 3522952 - DNA, 25 bp, Homo sapien
tcctctcttatgctatgtccagatg

SEQ ID NO: 3522953 - DNA, 25 bp, Homo sapien
ctcttatgctatgtccagatgccag

SEQ ID NO: 3522954 - DNA, 25 bp, Homo sapien
ccagggtttggctccctggatgctc

SEQ ID NO: 3522955 - DNA, 25 bp, Homo sapien
tgacactcttggagccagtatgtct

SEQ ID NO: 3522956 - DNA, 25 bp, Homo sapien
gggagaatctcctgttgctgacact

SEQ ID NO: 3522957 - DNA, 25 bp, Homo sapien
tggatgctccccatccggtcaggaa

SEQ ID NO: 3522958 - DNA, 25 bp, Homo sapien
cagcagaggagttggacttgtccgg

SEQ ID NO: 3522959 - DNA, 25 bp, Homo sapien
tgcccagagccaagcgtagtgcagg

SEQ ID NO: 3522960 - DNA, 25 bp, Homo sapien
gagaggagccagtggacattatgtt

SEQ ID NO: 3522961 - DNA, 25 bp, Homo sapien
ggctctggggcaagcacacccagga

SEQ ID NO: 3522962 - DNA, 25 bp, Homo sapien
gaagtccggattcctacacatacac

SEQ ID NO: 3522963 - DNA, 25 bp, Homo sapien
gtccggattcctacacatacactca

SEQ ID NO: 3522964 - DNA, 25 bp, Homo sapien
tcctgaagtccggattcctacacat

SEQ ID NO: 3522965 - DNA, 25 bp, Homo sapien
agatcctgaagtccggattcctaca

SEQ ID NO: 3522966 - DNA, 25 bp, Homo sapien
acacaatcacacaggtgtcgacatt

SEQ ID NO: 3522967 - DNA, 25 bp, Homo sapien
attcacaaatacagttgccaacaca

SEQ ID NO: 3522968 - DNA, 25 bp, Homo sapien
acaaatacagttgccaacacaatca

SEQ ID NO: 3522969 - DNA, 25 bp, Homo sapien
cacaatcacacaggtgtcgacattc

SEQ ID NO: 3522970 - DNA, 25 bp, Homo sapien
ttcccgatctccctgcccgcaattc

SEQ ID NO: 3522971 - DNA, 25 bp, Homo sapien
tgcccgcaattcaggggcctcttct

SEQ ID NO: 3522972 - DNA, 25 bp, Homo sapien
tcccaggacttttgccttcccgatc

SEQ ID NO: 3522973 - DNA, 25 bp, Homo sapien
caggacttttgccttcccgatctcc

SEQ ID NO: 3522974 - DNA, 25 bp, Homo sapien
aagaggtactcagcccgccaagagg

SEQ ID NO: 3522975 - DNA, 25 bp, Homo sapien
ctgccaacagggctaagaggtactc

SEQ ID NO: 3522976 - DNA, 25 bp, Homo sapien
cgccaagaggccgcggtgctcacag

SEQ ID NO: 3522977 - DNA, 25 bp, Homo sapien
ggctaagaggtactcagcccgccaa

SEQ ID NO: 3522978 - DNA, 25 bp, Homo sapien
ctgaccaccgtggagcaggtttgct

SEQ ID NO: 3522979 - DNA, 25 bp, Homo sapien
cactgaccaccgtggagcaggtttg

SEQ ID NO: 3522980 - DNA, 25 bp, Homo sapien
tgacactgaccaccgtggagcaggt

SEQ ID NO: 3522981 - DNA, 25 bp, Homo sapien
ctttgacactgaccaccgtggagca

SEQ ID NO: 3522982 - DNA, 25 bp, Homo sapien
tgggccttggttgccaccacactgc

SEQ ID NO: 3522983 - DNA, 25 bp, Homo sapien
cttggttgccaccacactgctctca

SEQ ID NO: 3522984 - DNA, 25 bp, Homo sapien
ttggttgccaccacactgctctcat

SEQ ID NO: 3522985 - DNA, 25 bp, Homo sapien
gcctgggccttggttgccaccacac

SEQ ID NO: 3522986 - DNA, 25 bp, Homo sapien
aaatcatccgctttgacttcttcct

SEQ ID NO: 3522987 - DNA, 25 bp, Homo sapien
ggctctctggatgtgccaaggcgct

SEQ ID NO: 3522988 - DNA, 25 bp, Homo sapien
caaggcgctgtacatggagtcaaca

SEQ ID NO: 3522989 - DNA, 25 bp, Homo sapien
tctcctaaatcatccgctttgactt

SEQ ID NO: 3522990 - DNA, 25 bp, Homo sapien
cctgctgcgagaaagtgggcagctt

SEQ ID NO: 3522991 - DNA, 25 bp, Homo sapien
tcaaacccttgcatcaggtggtagt

SEQ ID NO: 3522992 - DNA, 25 bp, Homo sapien
tgctatcagcatgcaccaaccctgt

SEQ ID NO: 3522993 - DNA, 25 bp, Homo sapien
ggcagcttgcagcagtcaaaccctt

SEQ ID NO: 3522994 - DNA, 25 bp, Homo sapien
cagcttcaactctgtggttcctgaa

SEQ ID NO: 3522995 - DNA, 25 bp, Homo sapien
agcttcaactctgtggttcctgaag

SEQ ID NO: 3522996 - DNA, 25 bp, Homo sapien
tggccaagatcctcttttactccca

SEQ ID NO: 3522997 - DNA, 25 bp, Homo sapien
gagccgatgctgtttctgaggcagc

SEQ ID NO: 3522998 - DNA, 25 bp, Homo sapien
ctttcaggtctgtggagccgatgct

SEQ ID NO: 3522999 - DNA, 25 bp, Homo sapien
ccagtgctcctttcaggtctgtgga

SEQ ID NO: 3523000 - DNA, 25 bp, Homo sapien
gatgagggggcggttgcctgacatc

SEQ ID NO: 3523001 - DNA, 25 bp, Homo sapien
agctcctgacagctcatgagcctct

SEQ ID NO: 3523002 - DNA, 25 bp, Homo sapien
gggcggttgcctgacatcccttctg

SEQ ID NO: 3523003 - DNA, 25 bp, Homo sapien
ggagctcctgacagctcatgagcct

SEQ ID NO: 3523004 - DNA, 25 bp, Homo sapien
ggtgttcttggtaactcctcctcca

SEQ ID NO: 3523005 - DNA, 25 bp, Homo sapien
gcctgagaataactgtgccccaatt

SEQ ID NO: 3523006 - DNA, 25 bp, Homo sapien
ttgaagccgccgtctccctgagctg

SEQ ID NO: 3523007 - DNA, 25 bp, Homo sapien
acttcccgagactggcctgagaata

SEQ ID NO: 3523008 - DNA, 25 bp, Homo sapien
aggaactcttgaagccgccgtctcc

SEQ ID NO: 3523009 - DNA, 25 bp, Homo sapien
tgactgaattttggccgagcccagg

SEQ ID NO: 3523010 - DNA, 25 bp, Homo sapien
tgaattttggccgagcccagggtga

SEQ ID NO: 3523011 - DNA, 25 bp, Homo sapien
aagcatgactgaattttggccgagc

SEQ ID NO: 3523012 - DNA, 25 bp, Homo sapien
aattttggccgagcccagggtgaca

SEQ ID NO: 3523013 - DNA, 25 bp, Homo sapien
gcctttttggcaccgaatgcagtgc

SEQ ID NO: 3523014 - DNA, 25 bp, Homo sapien
gcgtgatctgctgcccatgagtcag

SEQ ID NO: 3523015 - DNA, 25 bp, Homo sapien
aagtgactaaggctgtcgcctcccg

SEQ ID NO: 3523016 - DNA, 25 bp, Homo sapien
ggctcggccattcctaagtgactaa

SEQ ID NO: 3523017 - DNA, 25 bp, Homo sapien
ttgacttatgtagattgaggagtgg

SEQ ID NO: 3523018 - DNA, 25 bp, Homo sapien
cttatgtagattgaggagtgggaat

SEQ ID NO: 3523019 - DNA, 25 bp, Homo sapien
acacattgctctgttgacttatgta

SEQ ID NO: 3523020 - DNA, 25 bp, Homo sapien
gctctgttgacttatgtagattgag

SEQ ID NO: 3523021 - DNA, 25 bp, Homo sapien
tttagctgcttgtgtcctagcaagg

SEQ ID NO: 3523022 - DNA, 25 bp, Homo sapien
tttggtacagataaaaacatattgt

SEQ ID NO: 3523023 - DNA, 25 bp, Homo sapien
tgctggcattactggtagagttctc

SEQ ID NO: 3523024 - DNA, 25 bp, Homo sapien
tgggtcataatttggtacagataaa

SEQ ID NO: 3523025 - DNA, 25 bp, Homo sapien
ccaagataatgttaaggaagaggag

SEQ ID NO: 3523026 - DNA, 25 bp, Homo sapien
aggagtcaagctctgcgggctccaa

SEQ ID NO: 3523027 - DNA, 25 bp, Homo sapien
ccaatatctacttgagcaggcctgc

SEQ ID NO: 3523028 - DNA, 25 bp, Homo sapien
ggtaacagatccagggttcccatgc

SEQ ID NO: 3523029 - DNA, 25 bp, Homo sapien
gttgcgggtgttgtctgaactagaa

SEQ ID NO: 3523030 - DNA, 25 bp, Homo sapien
tgtctgaactagaacgaagtccgca

SEQ ID NO: 3523031 - DNA, 25 bp, Homo sapien
gaacgaagtccgcaaacatcttccc

SEQ ID NO: 3523032 - DNA, 25 bp, Homo sapien
gaactagaacgaagtccgcaaacat

SEQ ID NO: 3523033 - DNA, 25 bp, Homo sapien
tcctctgtgtttgaggtggtgcctc

SEQ ID NO: 3523034 - DNA, 25 bp, Homo sapien
aggtggtgcctctgcgtgtgactct

SEQ ID NO: 3523035 - DNA, 25 bp, Homo sapien
tgtttgaggtggtgcctctgcgtgt

SEQ ID NO: 3523036 - DNA, 25 bp, Homo sapien
tggtgcctctgcgtgtgactctcac

SEQ ID NO: 3523037 - DNA, 25 bp, Homo sapien
tagccgatggcttgtttgtaacata

SEQ ID NO: 3523038 - DNA, 25 bp, Homo sapien
ttcgagtgagatagccgatggcttg

SEQ ID NO: 3523039 - DNA, 25 bp, Homo sapien
gatgctgtgtttcgagtgagatagc

SEQ ID NO: 3523040 - DNA, 25 bp, Homo sapien
gcttgtttgtaacatagacttttcc

SEQ ID NO: 3523041 - DNA, 25 bp, Homo sapien
cacttagtgtcgtagcaatggaaat

SEQ ID NO: 3523042 - DNA, 25 bp, Homo sapien
gagggacagggatccccaatgggct

SEQ ID NO: 3523043 - DNA, 25 bp, Homo sapien
aatgggctcatagcctcagattctg

SEQ ID NO: 3523044 - DNA, 25 bp, Homo sapien
aagatgctggaggatccccgtgagc

SEQ ID NO: 3523045 - DNA, 25 bp, Homo sapien
gcatcgcagctcagtgcctggtggc

SEQ ID NO: 3523046 - DNA, 25 bp, Homo sapien
ggatgacagcagtaaccaaaagagg

SEQ ID NO: 3523047 - DNA, 25 bp, Homo sapien
atgacagcagtaaccaaaagaggaa

SEQ ID NO: 3523048 - DNA, 25 bp, Homo sapien
gaggtggggagcatcgcagctcagt

SEQ ID NO: 3523049 - DNA, 25 bp, Homo sapien
cactgtacatggttgtgtgcgctat

SEQ ID NO: 3523050 - DNA, 25 bp, Homo sapien
tatgactgccactatgttactaggc

SEQ ID NO: 3523051 - DNA, 25 bp, Homo sapien
tacaggaccgccatcattatatgca

SEQ ID NO: 3523052 - DNA, 25 bp, Homo sapien
cagaggttaccattgggcatactga

SEQ ID NO: 3523053 - DNA, 25 bp, Homo sapien
aacagacatagacagggccgtgcat

SEQ ID NO: 3523054 - DNA, 25 bp, Homo sapien
cctagaatggctaagaaggtgcctt

SEQ ID NO: 3523055 - DNA, 25 bp, Homo sapien
tctgagatctttgtcactttgggcc

SEQ ID NO: 3523056 - DNA, 25 bp, Homo sapien
caatagtacgggaggtggcatcaga

SEQ ID NO: 3523057 - DNA, 25 bp, Homo sapien
taagagtgctaatcctatcatgagg

SEQ ID NO: 3523058 - DNA, 25 bp, Homo sapien
tatcagattcttggtaagggccctc

SEQ ID NO: 3523059 - DNA, 25 bp, Homo sapien
tatagggtgggcacaaagtgtcctg

SEQ ID NO: 3523060 - DNA, 25 bp, Homo sapien
actaggatgccaacacggtatcaga

SEQ ID NO: 3523061 - DNA, 25 bp, Homo sapien
taggtaaatgtcgtcaagcctccac

SEQ ID NO: 3523062 - DNA, 25 bp, Homo sapien
cattgccaggtacttgtgctaaatg

SEQ ID NO: 3523063 - DNA, 25 bp, Homo sapien
tcataaatcgcgaaggctggcctgc

SEQ ID NO: 3523064 - DNA, 25 bp, Homo sapien
taatccaagcagttctacagggtgg

SEQ ID NO: 3523065 - DNA, 25 bp, Homo sapien
agcaacccaaacagcgaattcgagt

SEQ ID NO: 3523066 - DNA, 25 bp, Homo sapien
tgccggggtcatggagcctctcccg

SEQ ID NO: 3523067 - DNA, 25 bp, Homo sapien
aattcgagtcgaggaacctgttggg

SEQ ID NO: 3523068 - DNA, 25 bp, Homo sapien
ttcagtcagcgaggaaaccacagag

SEQ ID NO: 3523069 - DNA, 25 bp, Homo sapien
gggaagcttccctgcgtattgtatt

SEQ ID NO: 3523070 - DNA, 25 bp, Homo sapien
gaaatgtgcagcctttgaaaactgg

SEQ ID NO: 3523071 - DNA, 25 bp, Homo sapien
ttaaagcgggagacgagcttcggcc

SEQ ID NO: 3523072 - DNA, 25 bp, Homo sapien
tcaaaccgttaaggtgaccggagca

SEQ ID NO: 3523073 - DNA, 25 bp, Homo sapien
ccggggcggccccggctgtcagcgc

SEQ ID NO: 3523074 - DNA, 25 bp, Homo sapien
cggccccggctgtcagcgcgcgccg

SEQ ID NO: 3523075 - DNA, 25 bp, Homo sapien
gggcggccccggctgtcagcgcgcg

SEQ ID NO: 3523076 - DNA, 25 bp, Homo sapien
gccccggctgtcagcgcgcgccgca

SEQ ID NO: 3523077 - DNA, 25 bp, Homo sapien
cacagccttgcctctatctagctca

SEQ ID NO: 3523078 - DNA, 25 bp, Homo sapien
acagccttgcctctatctagctcac

SEQ ID NO: 3523079 - DNA, 25 bp, Homo sapien
aggcgctaaggtgctctcagtccgg

SEQ ID NO: 3523080 - DNA, 25 bp, Homo sapien
gagcatgtgcagacccgcaggcgct

SEQ ID NO: 3523081 - DNA, 25 bp, Homo sapien
ggctcttgccgcacctctgctgcgt

SEQ ID NO: 3523082 - DNA, 25 bp, Homo sapien
ccaagagagacctttcgggggctct

SEQ ID NO: 3523083 - DNA, 25 bp, Homo sapien
agacgtcttgggacccttgcgccct

SEQ ID NO: 3523084 - DNA, 25 bp, Homo sapien
cctctcggtggagacgtcttgggac

SEQ ID NO: 3523085 - DNA, 25 bp, Homo sapien
cggtgctcgcgagcagggtggcagc

SEQ ID NO: 3523086 - DNA, 25 bp, Homo sapien
ggctgctcgctctttctctcgccgg

SEQ ID NO: 3523087 - DNA, 25 bp, Homo sapien
gggcctcctcacttcggagatgcag

SEQ ID NO: 3523088 - DNA, 25 bp, Homo sapien
acaagttaatatgggcgtccaagcc

SEQ ID NO: 3523089 - DNA, 25 bp, Homo sapien
ggaaatttgcaagaggcggcagccc

SEQ ID NO: 3523090 - DNA, 25 bp, Homo sapien
cgtagcctccggaacgggactcgtg

SEQ ID NO: 3523091 - DNA, 25 bp, Homo sapien
tggtgggcgcctcgtgggctaaggc

SEQ ID NO: 3523092 - DNA, 25 bp, Homo sapien
ctcgtgggctaaggcccggcgcctg

SEQ ID NO: 3523093 - DNA, 25 bp, Homo sapien
attgcttcgagttccccgacctggg

SEQ ID NO: 3523094 - DNA, 25 bp, Homo sapien
caaaggcgcgctcgcccgattgctt

SEQ ID NO: 3523095 - DNA, 25 bp, Homo sapien
ggacgtgctgggaaagcccaagccc

SEQ ID NO: 3523096 - DNA, 25 bp, Homo sapien
cagggacgtgctgggaaagcccaag

SEQ ID NO: 3523097 - DNA, 25 bp, Homo sapien
cgtgctgggaaagcccaagccccgg

SEQ ID NO: 3523098 - DNA, 25 bp, Homo sapien
ccgcgctgcctttagcggtcgcccc

SEQ ID NO: 3523099 - DNA, 25 bp, Homo sapien
tcgcctccaaaatgaagtcgggact

SEQ ID NO: 3523100 - DNA, 25 bp, Homo sapien
ccaaaatgaagtcgggactgcccaa

SEQ ID NO: 3523101 - DNA, 25 bp, Homo sapien
tgcccaaacccgtgcacagcgccgc

SEQ ID NO: 3523102 - DNA, 25 bp, Homo sapien
cctggtcgcctccaaaatgaagtcg

SEQ ID NO: 3523103 - DNA, 25 bp, Homo sapien
cccctgaaatcgcaggtgctgcagg

SEQ ID NO: 3523104 - DNA, 25 bp, Homo sapien
cggaagagcggctcggtggaaaacg

SEQ ID NO: 3523105 - DNA, 25 bp, Homo sapien
gatgaatagttctttcgggatggtg

SEQ ID NO: 3523106 - DNA, 25 bp, Homo sapien
ccaggtgagagatgccgtttgccgg

SEQ ID NO: 3523107 - DNA, 25 bp, Homo sapien
ggggatgcgcgaggagagtgggccg

SEQ ID NO: 3523108 - DNA, 25 bp, Homo sapien
ccattccccttaggccggcaggttg

SEQ ID NO: 3523109 - DNA, 25 bp, Homo sapien
gagaagggtctaccatgtggccagg

SEQ ID NO: 3523110 - DNA, 25 bp, Homo sapien
tgccggaggtttgccttaagagctc

SEQ ID NO: 3523111 - DNA, 25 bp, Homo sapien
caaaaaacgtgtgcatcgctggaaa

SEQ ID NO: 3523112 - DNA, 25 bp, Homo sapien
caagaagccagtatccgcagcagca

SEQ ID NO: 3523113 - DNA, 25 bp, Homo sapien
cggacaaggaatgatctaaggcccc

SEQ ID NO: 3523114 - DNA, 25 bp, Homo sapien
gcagagattctgttccggacaagga

SEQ ID NO: 3523115 - DNA, 25 bp, Homo sapien
gaagaaaaggggatcgcgggtggca

SEQ ID NO: 3523116 - DNA, 25 bp, Homo sapien
agaaaaggggatcgcgggtggcagt

SEQ ID NO: 3523117 - DNA, 25 bp, Homo sapien
aaggggatcgcgggtggcagtgaac

SEQ ID NO: 3523118 - DNA, 25 bp, Homo sapien
aaaaggggatcgcgggtggcagtga

SEQ ID NO: 3523119 - DNA, 25 bp, Homo sapien
ggcttgaagatgacctgtccctgcc

SEQ ID NO: 3523120 - DNA, 25 bp, Homo sapien
ctgcggggtgacgggattccgggca

SEQ ID NO: 3523121 - DNA, 25 bp, Homo sapien
tgcggggtgacgggattccgggcaa

SEQ ID NO: 3523122 - DNA, 25 bp, Homo sapien
tggagactcctagcgccttggctgg

SEQ ID NO: 3523123 - DNA, 25 bp, Homo sapien
cggtactagtgcaccagctgaggcc

SEQ ID NO: 3523124 - DNA, 25 bp, Homo sapien
gtagatcctggtgttggtagcccga

SEQ ID NO: 3523125 - DNA, 25 bp, Homo sapien
ctgggactgcggtactagtgcacca

SEQ ID NO: 3523126 - DNA, 25 bp, Homo sapien
tggccgtgcaatctcttttacagaa

SEQ ID NO: 3523127 - DNA, 25 bp, Homo sapien
cagaaattagcaagggccaatcagg

SEQ ID NO: 3523128 - DNA, 25 bp, Homo sapien
taggagggggctatattttcttggc

SEQ ID NO: 3523129 - DNA, 25 bp, Homo sapien
ggacaggccgacctgacggatgtga

SEQ ID NO: 3523130 - DNA, 25 bp, Homo sapien
ttggttatggcatgaggactgtgtc

SEQ ID NO: 3523131 - DNA, 25 bp, Homo sapien
catcaaagtgattttggccaatggg

SEQ ID NO: 3523132 - DNA, 25 bp, Homo sapien
cagtctgcctgatagggtacccatt

SEQ ID NO: 3523133 - DNA, 25 bp, Homo sapien
tgccctcgtttgccagtgcccaggg

SEQ ID NO: 3523134 - DNA, 25 bp, Homo sapien
aatccagccttcagtaacgttgtgc

SEQ ID NO: 3523135 - DNA, 25 bp, Homo sapien
tgccctggagtcctgtgacttgtgg

SEQ ID NO: 3523136 - DNA, 25 bp, Homo sapien
tctgtgccctctgtcaacaatccag

SEQ ID NO: 3523137 - DNA, 25 bp, Homo sapien
cacacaggcgaaggttttggccaag

SEQ ID NO: 3523138 - DNA, 25 bp, Homo sapien
gttgcaaagcccctgaatggaccca

SEQ ID NO: 3523139 - DNA, 25 bp, Homo sapien
agtgccttccagaggggcttgttgc

SEQ ID NO: 3523140 - DNA, 25 bp, Homo sapien
tgacaatgggcctgttggggccctc

SEQ ID NO: 3523141 - DNA, 25 bp, Homo sapien
cctgaatggacccattgaggctcca

SEQ ID NO: 3523142 - DNA, 25 bp, Homo sapien
cggacaccaggatcatagtcagctc

SEQ ID NO: 3523143 - DNA, 25 bp, Homo sapien
ggacaccaggatcatagtcagctcc

SEQ ID NO: 3523144 - DNA, 25 bp, Homo sapien
caccaggatcatagtcagctccttc

SEQ ID NO: 3523145 - DNA, 25 bp, Homo sapien
gacaccaggatcatagtcagctcct

SEQ ID NO: 3523146 - DNA, 25 bp, Homo sapien
ctgacttgataacatgggactgaga

SEQ ID NO: 3523147 - DNA, 25 bp, Homo sapien
taaggcacctgcaccgttagttcct

SEQ ID NO: 3523148 - DNA, 25 bp, Homo sapien
cctgacttgataacatgggactgag

SEQ ID NO: 3523149 - DNA, 25 bp, Homo sapien
cctgcaccgttagttcctgacttga

SEQ ID NO: 3523150 - DNA, 25 bp, Homo sapien
acagcctggtatcagctctgcccat

SEQ ID NO: 3523151 - DNA, 25 bp, Homo sapien
agatagtgggagcaggaatccttca

SEQ ID NO: 3523152 - DNA, 25 bp, Homo sapien
agggcacagcctggtatcagctctg

SEQ ID NO: 3523153 - DNA, 25 bp, Homo sapien
agctctgcccatctctagatagtgg

SEQ ID NO: 3523154 - DNA, 25 bp, Homo sapien
tctgcccttgtccaagccagtccac

SEQ ID NO: 3523155 - DNA, 25 bp, Homo sapien
gtccacatgtggattagaagctgca

SEQ ID NO: 3523156 - DNA, 25 bp, Homo sapien
gcccttgtccaagccagtccacatg

SEQ ID NO: 3523157 - DNA, 25 bp, Homo sapien
tccacatgtggattagaagctgcag

SEQ ID NO: 3523158 - DNA, 25 bp, Homo sapien
accaagcaaggtgtgaggagtaggt

SEQ ID NO: 3523159 - DNA, 25 bp, Homo sapien
gggggcatctccctcccagattttc

SEQ ID NO: 3523160 - DNA, 25 bp, Homo sapien
ccaagcaaggtgtgaggagtaggtg

SEQ ID NO: 3523161 - DNA, 25 bp, Homo sapien
aaccaagcaaggtgtgaggagtagg

SEQ ID NO: 3523162 - DNA, 25 bp, Homo sapien
ggctgctgcaacgttgttcccaatt

SEQ ID NO: 3523163 - DNA, 25 bp, Homo sapien
agaggcagccagtaattaagctcac

SEQ ID NO: 3523164 - DNA, 25 bp, Homo sapien
taagctggatgattaggagctagag

SEQ ID NO: 3523165 - DNA, 25 bp, Homo sapien
tgtcattcacaactccagtcactgg

SEQ ID NO: 3523166 - DNA, 25 bp, Homo sapien
ttttccatttttgcttctggtatgc

SEQ ID NO: 3523167 - DNA, 25 bp, Homo sapien
tcattttccatttttgcttctggta

SEQ ID NO: 3523168 - DNA, 25 bp, Homo sapien
ccatttttgcttctggtatgctcat

SEQ ID NO: 3523169 - DNA, 25 bp, Homo sapien
ttccatttttgcttctggtatgctc

SEQ ID NO: 3523170 - DNA, 25 bp, Homo sapien
gcaaggtttggcagaaatggccttc

SEQ ID NO: 3523171 - DNA, 25 bp, Homo sapien
gttttatcaacagctcctctgcatt

SEQ ID NO: 3523172 - DNA, 25 bp, Homo sapien
tcttcacatgcaaggtttggcagaa

SEQ ID NO: 3523173 - DNA, 25 bp, Homo sapien
ttctctcttcacatgcaaggtttgg

SEQ ID NO: 3523174 - DNA, 25 bp, Homo sapien
tgtgatctcgtaggatcttcaaagt

SEQ ID NO: 3523175 - DNA, 25 bp, Homo sapien
ggttctgtgatctcgtaggatcttc

SEQ ID NO: 3523176 - DNA, 25 bp, Homo sapien
ctccttggttctgtgatctcgtagg

SEQ ID NO: 3523177 - DNA, 25 bp, Homo sapien
cagtaaaggcaaagggctttctcct

SEQ ID NO: 3523178 - DNA, 25 bp, Homo sapien
ctgctgggagttaaaaaggctgatc

SEQ ID NO: 3523179 - DNA, 25 bp, Homo sapien
gatttctcggacttcacgcacagag

SEQ ID NO: 3523180 - DNA, 25 bp, Homo sapien
gatcagggcgccagtttctttttgg

SEQ ID NO: 3523181 - DNA, 25 bp, Homo sapien
tagtcacaacaaatctgctcctgct

SEQ ID NO: 3523182 - DNA, 25 bp, Homo sapien
ggtacagagagagctgccaaggcct

SEQ ID NO: 3523183 - DNA, 25 bp, Homo sapien
tttgaaaacctttctgaggacagag

SEQ ID NO: 3523184 - DNA, 25 bp, Homo sapien
ctggtacagagagagctgccaaggc

SEQ ID NO: 3523185 - DNA, 25 bp, Homo sapien
ccaaggcctggtcaggccacctttg

SEQ ID NO: 3523186 - DNA, 25 bp, Homo sapien
ggattgtgggttccctccacgccag

SEQ ID NO: 3523187 - DNA, 25 bp, Homo sapien
gattgtgggttccctccacgccagc

SEQ ID NO: 3523188 - DNA, 25 bp, Homo sapien
attgtgggttccctccacgccagct

SEQ ID NO: 3523189 - DNA, 25 bp, Homo sapien
ggcaatcgccttgtgactagaccca

SEQ ID NO: 3523190 - DNA, 25 bp, Homo sapien
gaagctggcaatcgccttgtgacta

SEQ ID NO: 3523191 - DNA, 25 bp, Homo sapien
atgaagctggcaatcgccttgtgac

SEQ ID NO: 3523192 - DNA, 25 bp, Homo sapien
gctggcaatcgccttgtgactagac

SEQ ID NO: 3523193 - DNA, 25 bp, Homo sapien
ttaccagctctaagagctaagggtt

SEQ ID NO: 3523194 - DNA, 25 bp, Homo sapien
ctctaagagctaagggttccagctg

SEQ ID NO: 3523195 - DNA, 25 bp, Homo sapien
ccagctctaagagctaagggttcca

SEQ ID NO: 3523196 - DNA, 25 bp, Homo sapien
ctgcagacgggcttgatccctgcca

SEQ ID NO: 3523197 - DNA, 25 bp, Homo sapien
gggagacggcacctcttgtgctcag

SEQ ID NO: 3523198 - DNA, 25 bp, Homo sapien
aggggagacggcacctcttgtgctc

SEQ ID NO: 3523199 - DNA, 25 bp, Homo sapien
gccttccttgtcgctggcttgtgga

SEQ ID NO: 3523200 - DNA, 25 bp, Homo sapien
cttccttgtcgctggcttgtggaca

SEQ ID NO: 3523201 - DNA, 25 bp, Homo sapien
acaagttccgaggtctgggtggcta

SEQ ID NO: 3523202 - DNA, 25 bp, Homo sapien
tttcaggataccgaaagttgctggg

SEQ ID NO: 3523203 - DNA, 25 bp, Homo sapien
tcagaaacaagttccgaggtctggg

SEQ ID NO: 3523204 - DNA, 25 bp, Homo sapien
ccttggggagctgaaggattcttga

SEQ ID NO: 3523205 - DNA, 25 bp, Homo sapien
gggactgggctgcattatctctccg

SEQ ID NO: 3523206 - DNA, 25 bp, Homo sapien
ccaggaaagtcgatgtgtgtatgtc

SEQ ID NO: 3523207 - DNA, 25 bp, Homo sapien
tctcttggattgcacacgctgggat

SEQ ID NO: 3523208 - DNA, 25 bp, Homo sapien
cctgaaatgcattccgcacttggta

SEQ ID NO: 3523209 - DNA, 25 bp, Homo sapien
ggacagcgtggtccgcgtcccccga

SEQ ID NO: 3523210 - DNA, 25 bp, Homo sapien
ttgatctctactgcggtttggcttg

SEQ ID NO: 3523211 - DNA, 25 bp, Homo sapien
catggctattgatctctactgcggt

SEQ ID NO: 3523212 - DNA, 25 bp, Homo sapien
gcacatggctattgatctctactgc

SEQ ID NO: 3523213 - DNA, 25 bp, Homo sapien
gctattgatctctactgcggtttgg

SEQ ID NO: 3523214 - DNA, 25 bp, Homo sapien
gaaatgtgatcggaaatctctgggt

SEQ ID NO: 3523215 - DNA, 25 bp, Homo sapien
tgctgtggccaagtcggttaacccc

SEQ ID NO: 3523216 - DNA, 25 bp, Homo sapien
tcaactggcggggaccataattccc

SEQ ID NO: 3523217 - DNA, 25 bp, Homo sapien
tttttatcggatagtttcaactggc

SEQ ID NO: 3523218 - DNA, 25 bp, Homo sapien
gaatcattagtagccctcagcagga

SEQ ID NO: 3523219 - DNA, 25 bp, Homo sapien
catcttggaagtcaattgtgtgtga

SEQ ID NO: 3523220 - DNA, 25 bp, Homo sapien
ggaacatcttggaagtcaattgtgt

SEQ ID NO: 3523221 - DNA, 25 bp, Homo sapien
ctttgaatcattagtagccctcagc

SEQ ID NO: 3523222 - DNA, 25 bp, Homo sapien
gtgtgtgcccgaacttttatcactg

SEQ ID NO: 3523223 - DNA, 25 bp, Homo sapien
aggtgtgtgcccgaacttttatcac

SEQ ID NO: 3523224 - DNA, 25 bp, Homo sapien
gaggtgtgtgcccgaacttttatca

SEQ ID NO: 3523225 - DNA, 25 bp, Homo sapien
ggtgtgtgcccgaacttttatcact

SEQ ID NO: 3523226 - DNA, 25 bp, Homo sapien
gaggcattggtcaaagaccccctgg

SEQ ID NO: 3523227 - DNA, 25 bp, Homo sapien
aggcattggtcaaagaccccctggg

SEQ ID NO: 3523228 - DNA, 25 bp, Homo sapien
ggcattggtcaaagaccccctgggc

SEQ ID NO: 3523229 - DNA, 25 bp, Homo sapien
tccactaattgtaactggcatagat

SEQ ID NO: 3523230 - DNA, 25 bp, Homo sapien
gaaagtattaccaccttcagctaga

SEQ ID NO: 3523231 - DNA, 25 bp, Homo sapien
tcagggacttctaggactttctcct

SEQ ID NO: 3523232 - DNA, 25 bp, Homo sapien
tcagctagaaaacaacggtcatttc

SEQ ID NO: 3523233 - DNA, 25 bp, Homo sapien
tcgttccaacctttgtgggatccag

SEQ ID NO: 3523234 - DNA, 25 bp, Homo sapien
tcaagactactgatttctcgttcca

SEQ ID NO: 3523235 - DNA, 25 bp, Homo sapien
tgggatccagtccattggtggatga

SEQ ID NO: 3523236 - DNA, 25 bp, Homo sapien
ctttgtgggattcaaggccttttag

SEQ ID NO: 3523237 - DNA, 25 bp, Homo sapien
cagtgtttaaatgttaccgatcggg

SEQ ID NO: 3523238 - DNA, 25 bp, Homo sapien
tacagaatgtaagactcacacagtg

SEQ ID NO: 3523239 - DNA, 25 bp, Homo sapien
aatgttaccgatcgggtaggtgact

SEQ ID NO: 3523240 - DNA, 25 bp, Homo sapien
gagctgaatgatctgccaagtagtt

SEQ ID NO: 3523241 - DNA, 25 bp, Homo sapien
tcttcaaagaggcaattggtgttcc

SEQ ID NO: 3523242 - DNA, 25 bp, Homo sapien
agtggcagttgtggttacagtccgc

SEQ ID NO: 3523243 - DNA, 25 bp, Homo sapien
tccaggatgtttcagctgctaagcc

SEQ ID NO: 3523244 - DNA, 25 bp, Homo sapien
tgttccaaggccatctacagtgcag

SEQ ID NO: 3523245 - DNA, 25 bp, Homo sapien
agctgccaaatggcaagagggcaag

SEQ ID NO: 3523246 - DNA, 25 bp, Homo sapien
agagggcaaggcgttggaaccgcat

SEQ ID NO: 3523247 - DNA, 25 bp, Homo sapien
tggcaagagggcaaggcgttggaac

SEQ ID NO: 3523248 - DNA, 25 bp, Homo sapien
ccaaatggcaagagggcaaggcgtt

SEQ ID NO: 3523249 - DNA, 25 bp, Homo sapien
tccgaaggatttggccagcccattg

SEQ ID NO: 3523250 - DNA, 25 bp, Homo sapien
ctcctcctgccctccgaaggatttg

SEQ ID NO: 3523251 - DNA, 25 bp, Homo sapien
cagcccattggctcctcgtaccaag

SEQ ID NO: 3523252 - DNA, 25 bp, Homo sapien
ttggctcctcgtaccaagcctgaca

SEQ ID NO: 3523253 - DNA, 25 bp, Homo sapien
caaatggtatgaggggtcactggcc

SEQ ID NO: 3523254 - DNA, 25 bp, Homo sapien
gaatgtgggcctggtcggcatgaga

SEQ ID NO: 3523255 - DNA, 25 bp, Homo sapien
catgtagaggatcgagcaggagaat

SEQ ID NO: 3523256 - DNA, 25 bp, Homo sapien
tggccccccacacgggtttgagagc

SEQ ID NO: 3523257 - DNA, 25 bp, Homo sapien
gtgactgcttgaccgctccaacttc

SEQ ID NO: 3523258 - DNA, 25 bp, Homo sapien
gaagcttttgcagttctccaagcat

SEQ ID NO: 3523259 - DNA, 25 bp, Homo sapien
acgtgactgcttgaccgctccaact

SEQ ID NO: 3523260 - DNA, 25 bp, Homo sapien
gacgtgactgcttgaccgctccaac

SEQ ID NO: 3523261 - DNA, 25 bp, Homo sapien
ttctctggatattctagcacttggg

SEQ ID NO: 3523262 - DNA, 25 bp, Homo sapien
tagctagattgacgttcctccctgc

SEQ ID NO: 3523263 - DNA, 25 bp, Homo sapien
tgggcccacttctgacaagcctggg

SEQ ID NO: 3523264 - DNA, 25 bp, Homo sapien
cacagtctcacatagaggattccag

SEQ ID NO: 3523265 - DNA, 25 bp, Homo sapien
agtagagcaaggcagtttcggcctc

SEQ ID NO: 3523266 - DNA, 25 bp, Homo sapien
agagcaaggcagtttcggcctccac

SEQ ID NO: 3523267 - DNA, 25 bp, Homo sapien
tagagcaaggcagtttcggcctcca

SEQ ID NO: 3523268 - DNA, 25 bp, Homo sapien
tcagtagagcaaggcagtttcggcc

SEQ ID NO: 3523269 - DNA, 25 bp, Homo sapien
tattaacagtttctccactgtcaca

SEQ ID NO: 3523270 - DNA, 25 bp, Homo sapien
tttattaacagtttctccactgtca

SEQ ID NO: 3523271 - DNA, 25 bp, Homo sapien
ttaacagtttctccactgtcacagg

SEQ ID NO: 3523272 - DNA, 25 bp, Homo sapien
tctttcttttcagacctcttcttat

SEQ ID NO: 3523273 - DNA, 25 bp, Homo sapien
tctgggagatggactcagacgaata

SEQ ID NO: 3523274 - DNA, 25 bp, Homo sapien
gagatggactcagacgaataaccca

SEQ ID NO: 3523275 - DNA, 25 bp, Homo sapien
taaggctgttgcttagtgccagtat

SEQ ID NO: 3523276 - DNA, 25 bp, Homo sapien
gctgttgcttagtgccagtattgat

SEQ ID NO: 3523277 - DNA, 25 bp, Homo sapien
tctgctttgcatgtcatgggctctc

SEQ ID NO: 3523278 - DNA, 25 bp, Homo sapien
cacaccctttctgttgtggagttcc

SEQ ID NO: 3523279 - DNA, 25 bp, Homo sapien
gggctctcctactggactggatgga

SEQ ID NO: 3523280 - DNA, 25 bp, Homo sapien
tcaggtccggctgacatcagaatcc

SEQ ID NO: 3523281 - DNA, 25 bp, Homo sapien
gcaggccactctggatttgcttagt

SEQ ID NO: 3523282 - DNA, 25 bp, Homo sapien
tgtcttcaaggttacaggctgtggg

SEQ ID NO: 3523283 - DNA, 25 bp, Homo sapien
tgtgggatttgtctgcgatcatagc

SEQ ID NO: 3523284 - DNA, 25 bp, Homo sapien
gcttagtttttccatcgcctttcta

SEQ ID NO: 3523285 - DNA, 25 bp, Homo sapien
cataacctctacaaagttgaatgaa

SEQ ID NO: 3523286 - DNA, 25 bp, Homo sapien
tggaatctggaatccggcacccatg

SEQ ID NO: 3523287 - DNA, 25 bp, Homo sapien
cctttcgatgaaacatgtagattcc

SEQ ID NO: 3523288 - DNA, 25 bp, Homo sapien
ggcacccatgccaatgtctcggtag

SEQ ID NO: 3523289 - DNA, 25 bp, Homo sapien
ctagacactcccagagagggcatgg

SEQ ID NO: 3523290 - DNA, 25 bp, Homo sapien
cgttgactgctgaggactgcgctgc

SEQ ID NO: 3523291 - DNA, 25 bp, Homo sapien
agtgctttgaactagacactcccag

SEQ ID NO: 3523292 - DNA, 25 bp, Homo sapien
gactgctgaggactgcgctgctgct

SEQ ID NO: 3523293 - DNA, 25 bp, Homo sapien
tcactggcttcatccatgcaatggg

SEQ ID NO: 3523294 - DNA, 25 bp, Homo sapien
ggggagaatgcaagctgccaccgcc

SEQ ID NO: 3523295 - DNA, 25 bp, Homo sapien
tcatccatgcaatggggagaatgca

SEQ ID NO: 3523296 - DNA, 25 bp, Homo sapien
gagaatgcaagctgccaccgcccat

SEQ ID NO: 3523297 - DNA, 25 bp, Homo sapien
tgcaagggcctgattgccatcatac

SEQ ID NO: 3523298 - DNA, 25 bp, Homo sapien
ttctgcaagggcctgattgccatca

SEQ ID NO: 3523299 - DNA, 25 bp, Homo sapien
aagggcctgattgccatcataccag

SEQ ID NO: 3523300 - DNA, 25 bp, Homo sapien
caagggcctgattgccatcatacca

SEQ ID NO: 3523301 - DNA, 25 bp, Homo sapien
tgttcatgttcccatcagacaatgt

SEQ ID NO: 3523302 - DNA, 25 bp, Homo sapien
atgttcccatcagacaatgtcacca

SEQ ID NO: 3523303 - DNA, 25 bp, Homo sapien
ggcttgttcatgttcccatcagaca

SEQ ID NO: 3523304 - DNA, 25 bp, Homo sapien
gtggcttgttcatgttcccatcaga

SEQ ID NO: 3523305 - DNA, 25 bp, Homo sapien
caggcatgacccagtgtctgctgct

SEQ ID NO: 3523306 - DNA, 25 bp, Homo sapien
tcacaggcatgacccagtgtctgct

SEQ ID NO: 3523307 - DNA, 25 bp, Homo sapien
tggctgtggtgccattcacaggcat

SEQ ID NO: 3523308 - DNA, 25 bp, Homo sapien
tgtgtggctgtggtgccattcacag

SEQ ID NO: 3523309 - DNA, 25 bp, Homo sapien
gattatctgcttttgggatgcagcc

SEQ ID NO: 3523310 - DNA, 25 bp, Homo sapien
tatgacaaccataggaattcctggg

SEQ ID NO: 3523311 - DNA, 25 bp, Homo sapien
cctgactgggtttaggtgacagacc

SEQ ID NO: 3523312 - DNA, 25 bp, Homo sapien
tggaaactaggaggcccaaaactca

SEQ ID NO: 3523313 - DNA, 25 bp, Homo sapien
agaatctttaaagtgtcccaaatga

SEQ ID NO: 3523314 - DNA, 25 bp, Homo sapien
tataaagaatctttaaagtgtccca

SEQ ID NO: 3523315 - DNA, 25 bp, Homo sapien
ggcatataaagaatctttaaagtgt

SEQ ID NO: 3523316 - DNA, 25 bp, Homo sapien
gtggcatataaagaatctttaaagt

SEQ ID NO: 3523317 - DNA, 25 bp, Homo sapien
ggttttacaaacaatcatccattga

SEQ ID NO: 3523318 - DNA, 25 bp, Homo sapien
catgaactgtgtctggtgaggctct

SEQ ID NO: 3523319 - DNA, 25 bp, Homo sapien
tacttgaggaaatcatggatcccac

SEQ ID NO: 3523320 - DNA, 25 bp, Homo sapien
ctgggcagcatcaactccttgtcct

SEQ ID NO: 3523321 - DNA, 25 bp, Homo sapien
atcagcatttgtaaccctcagtgcc

SEQ ID NO: 3523322 - DNA, 25 bp, Homo sapien
cagcatttgtaaccctcagtgccgc

SEQ ID NO: 3523323 - DNA, 25 bp, Homo sapien
atttgtaaccctcagtgccgccctc

SEQ ID NO: 3523324 - DNA, 25 bp, Homo sapien
gtaaccctcagtgccgccctcctct

SEQ ID NO: 3523325 - DNA, 25 bp, Homo sapien
catgaaagctgaaacaggggcaggt

SEQ ID NO: 3523326 - DNA, 25 bp, Homo sapien
caggtggccccttgtgaaaggcagc

SEQ ID NO: 3523327 - DNA, 25 bp, Homo sapien
tgtgaaaggcagctccttgaattgg

SEQ ID NO: 3523328 - DNA, 25 bp, Homo sapien
ggcagctccttgaattggcctcgaa

SEQ ID NO: 3523329 - DNA, 25 bp, Homo sapien
gatccttgggcagctgagttgcctc

SEQ ID NO: 3523330 - DNA, 25 bp, Homo sapien
cacatgcctggggagtgtctgagat

SEQ ID NO: 3523331 - DNA, 25 bp, Homo sapien
agctgccagaaagccggccacatgc

SEQ ID NO: 3523332 - DNA, 25 bp, Homo sapien
tacacagctctaagggcacacacat

SEQ ID NO: 3523333 - DNA, 25 bp, Homo sapien
tgtgggtagagtgattggcagactt

SEQ ID NO: 3523334 - DNA, 25 bp, Homo sapien
tgtttcttagcagaagggtccccat

SEQ ID NO: 3523335 - DNA, 25 bp, Homo sapien
tctgtttcttagcagaagggtcccc

SEQ ID NO: 3523336 - DNA, 25 bp, Homo sapien
ggtagagtgattggcagacttggag

SEQ ID NO: 3523337 - DNA, 25 bp, Homo sapien
cagagagaatggaccacttcttagg

SEQ ID NO: 3523338 - DNA, 25 bp, Homo sapien
acaccagcgactgtggcacacaggg

SEQ ID NO: 3523339 - DNA, 25 bp, Homo sapien
tttctggacaccagcgactgtggca

SEQ ID NO: 3523340 - DNA, 25 bp, Homo sapien
gcagagagaatggaccacttcttag

SEQ ID NO: 3523341 - DNA, 25 bp, Homo sapien
tagctcccaaagtagggtgtgaagg

SEQ ID NO: 3523342 - DNA, 25 bp, Homo sapien
tctgctagctcccaaagtagggtgt

SEQ ID NO: 3523343 - DNA, 25 bp, Homo sapien
tcagaatctgctagctcccaaagta

SEQ ID NO: 3523344 - DNA, 25 bp, Homo sapien
gaatctgctagctcccaaagtaggg

SEQ ID NO: 3523345 - DNA, 25 bp, Homo sapien
ctagaagttcgtattgtcagtttct

SEQ ID NO: 3523346 - DNA, 25 bp, Homo sapien
cccctctaacaaggcctttgaagct

SEQ ID NO: 3523347 - DNA, 25 bp, Homo sapien
cctctaacaaggcctttgaagcttt

SEQ ID NO: 3523348 - DNA, 25 bp, Homo sapien
tgaagctttcttgcttcacgtctgc

SEQ ID NO: 3523349 - DNA, 25 bp, Homo sapien
ttcttgcttcacgtctgccttttcc

SEQ ID NO: 3523350 - DNA, 25 bp, Homo sapien
tgtggcttgaagcttagaacatgga

SEQ ID NO: 3523351 - DNA, 25 bp, Homo sapien
cagtgccagagttcctccatcccct

SEQ ID NO: 3523352 - DNA, 25 bp, Homo sapien
caagtgcactgtgaagacccatgag

SEQ ID NO: 3523353 - DNA, 25 bp, Homo sapien
gaagcttagaacatggacttggcag

SEQ ID NO: 3523354 - DNA, 25 bp, Homo sapien
ctcgagacgcttgctttttcattgg

SEQ ID NO: 3523355 - DNA, 25 bp, Homo sapien
tttcattggtgtccttactgagaat

SEQ ID NO: 3523356 - DNA, 25 bp, Homo sapien
tggtgtccttactgagaatttcctc

SEQ ID NO: 3523357 - DNA, 25 bp, Homo sapien
tgtagaacaagcacggtcttgctcg

SEQ ID NO: 3523358 - DNA, 25 bp, Homo sapien
tttattccagctacaaagtgtcctg

SEQ ID NO: 3523359 - DNA, 25 bp, Homo sapien
ttccagctacaaagtgtcctgccat

SEQ ID NO: 3523360 - DNA, 25 bp, Homo sapien
tattccagctacaaagtgtcctgcc

SEQ ID NO: 3523361 - DNA, 25 bp, Homo sapien
tcatttattccagctacaaagtgtc

SEQ ID NO: 3523362 - DNA, 25 bp, Homo sapien
aatttagtgcctgttcccacgatgt

SEQ ID NO: 3523363 - DNA, 25 bp, Homo sapien
aaatgcacatacataggaaaggaaa

SEQ ID NO: 3523364 - DNA, 25 bp, Homo sapien
tgcacatacataggaaaggaaaggg

SEQ ID NO: 3523365 - DNA, 25 bp, Homo sapien
gcctgttcccacgatgtgctcagtc

SEQ ID NO: 3523366 - DNA, 25 bp, Homo sapien
gggattctaatgctccagatggcag

SEQ ID NO: 3523367 - DNA, 25 bp, Homo sapien
gactggaggttgatagacattccca

SEQ ID NO: 3523368 - DNA, 25 bp, Homo sapien
gcccagtaggcagcatccgttgtga

SEQ ID NO: 3523369 - DNA, 25 bp, Homo sapien
caaaatgttagccagaggcctcggc

SEQ ID NO: 3523370 - DNA, 25 bp, Homo sapien
cttgatgcagtggaactgagttccc

SEQ ID NO: 3523371 - DNA, 25 bp, Homo sapien
tcctctaactcagagtcacttgatg

SEQ ID NO: 3523372 - DNA, 25 bp, Homo sapien
ctaaagtgccccagggacatgggca

SEQ ID NO: 3523373 - DNA, 25 bp, Homo sapien
atgagctgggaaccgccgccatttt

SEQ ID NO: 3523374 - DNA, 25 bp, Homo sapien
gtttactttcagaaacttctgcatt

SEQ ID NO: 3523375 - DNA, 25 bp, Homo sapien
aaagccagtggaagtttactttcag

SEQ ID NO: 3523376 - DNA, 25 bp, Homo sapien
ttgagtctgacctgttgattgcagc

SEQ ID NO: 3523377 - DNA, 25 bp, Homo sapien
tgagtctgacctgttgattgcagct

SEQ ID NO: 3523378 - DNA, 25 bp, Homo sapien
aactcatattctatggagggcttgt

SEQ ID NO: 3523379 - DNA, 25 bp, Homo sapien
cactgtgttattcaactcatattct

SEQ ID NO: 3523380 - DNA, 25 bp, Homo sapien
gagtgtaaacttctgcaagatcatt

SEQ ID NO: 3523381 - DNA, 25 bp, Homo sapien
tatggagggcttgtagagtgtaaac

SEQ ID NO: 3523382 - DNA, 25 bp, Homo sapien
ggtactttatgtggaggagagcact

SEQ ID NO: 3523383 - DNA, 25 bp, Homo sapien
ccttggcacttgcagagcttggtgg

SEQ ID NO: 3523384 - DNA, 25 bp, Homo sapien
ggtggtactttatgtggaggagagc

SEQ ID NO: 3523385 - DNA, 25 bp, Homo sapien
tccttggcacttgcagagcttggtg

SEQ ID NO: 3523386 - DNA, 25 bp, Homo sapien
caggcttcagtgactctcgcaaata

SEQ ID NO: 3523387 - DNA, 25 bp, Homo sapien
tcttgtgaatgtgcacttggctgcc

SEQ ID NO: 3523388 - DNA, 25 bp, Homo sapien
gggtaccagtgtgtagcccacgtgc

SEQ ID NO: 3523389 - DNA, 25 bp, Homo sapien
gaggacatgacatcctcaggcttca

SEQ ID NO: 3523390 - DNA, 25 bp, Homo sapien
gcaatgagaatatttgagacaatgg

SEQ ID NO: 3523391 - DNA, 25 bp, Homo sapien
gtgtcggggttgcaatgagaatatt

SEQ ID NO: 3523392 - DNA, 25 bp, Homo sapien
gagaatatttgagacaatggtcatg

SEQ ID NO: 3523393 - DNA, 25 bp, Homo sapien
tatttgagacaatggtcatggtata

SEQ ID NO: 3523394 - DNA, 25 bp, Homo sapien
cagctggtggattcaaggatcaggt

SEQ ID NO: 3523395 - DNA, 25 bp, Homo sapien
gcagccagctggtggattcaaggat

SEQ ID NO: 3523396 - DNA, 25 bp, Homo sapien
gccagctggtggattcaaggatcag

SEQ ID NO: 3523397 - DNA, 25 bp, Homo sapien
ctggtggattcaaggatcaggttta

SEQ ID NO: 3523398 - DNA, 25 bp, Homo sapien
agaacatcttcaaacctgttactgc

SEQ ID NO: 3523399 - DNA, 25 bp, Homo sapien
ccccagaacatcttcaaacctgtta

SEQ ID NO: 3523400 - DNA, 25 bp, Homo sapien
tcccccagaacatcttcaaacctgt

SEQ ID NO: 3523401 - DNA, 25 bp, Homo sapien
cagaacatcttcaaacctgttactg

SEQ ID NO: 3523402 - DNA, 25 bp, Homo sapien
taccccagtcccatagaaggtgtct

SEQ ID NO: 3523403 - DNA, 25 bp, Homo sapien
gagagcagccaaagcatccttggtt

SEQ ID NO: 3523404 - DNA, 25 bp, Homo sapien
tgaaggggcacaagcaccacttgct

SEQ ID NO: 3523405 - DNA, 25 bp, Homo sapien
cagatgctggcaggtcggtgaaggg

SEQ ID NO: 3523406 - DNA, 25 bp, Homo sapien
gtggaatctctctgggaagcacatt

SEQ ID NO: 3523407 - DNA, 25 bp, Homo sapien
aatcaaaagcctgccatagggttgc

SEQ ID NO: 3523408 - DNA, 25 bp, Homo sapien
gacatcagacgaagtaatagttgcc

SEQ ID NO: 3523409 - DNA, 25 bp, Homo sapien
cctcagtgagcaaagaccctggctg

SEQ ID NO: 3523410 - DNA, 25 bp, Homo sapien
gcagctcatctaatgttgaccatac

SEQ ID NO: 3523411 - DNA, 25 bp, Homo sapien
cataccttgacccagccggttttct

SEQ ID NO: 3523412 - DNA, 25 bp, Homo sapien
taggatactagcatttctgaattca

SEQ ID NO: 3523413 - DNA, 25 bp, Homo sapien
cccaaactggttttcataggatact

SEQ ID NO: 3523414 - DNA, 25 bp, Homo sapien
ctggaggccgccagtcgcatgctca

SEQ ID NO: 3523415 - DNA, 25 bp, Homo sapien
ctcaagggcattgcccagaggactt

SEQ ID NO: 3523416 - DNA, 25 bp, Homo sapien
cagaggacttttagccgggcactga

SEQ ID NO: 3523417 - DNA, 25 bp, Homo sapien
gcagccccaagattgcactcaaggg

SEQ ID NO: 3523418 - DNA, 25 bp, Homo sapien
ggtgaatatgtccagaccagacctg

SEQ ID NO: 3523419 - DNA, 25 bp, Homo sapien
cagacctggagtgaccttgataggc

SEQ ID NO: 3523420 - DNA, 25 bp, Homo sapien
tgtccagaccagacctggagtgacc

SEQ ID NO: 3523421 - DNA, 25 bp, Homo sapien
ccttgataggctgttgtttctggca

SEQ ID NO: 3523422 - DNA, 25 bp, Homo sapien
taggccgatcccactgaaacgatct

SEQ ID NO: 3523423 - DNA, 25 bp, Homo sapien
gatagattctcgtttctctaggccg

SEQ ID NO: 3523424 - DNA, 25 bp, Homo sapien
gcgctcttggaacgcttgggaagtt

SEQ ID NO: 3523425 - DNA, 25 bp, Homo sapien
ctgatttatggcaggttccagcagg

SEQ ID NO: 3523426 - DNA, 25 bp, Homo sapien
ctgggcctcacaggataaacaaggg

SEQ ID NO: 3523427 - DNA, 25 bp, Homo sapien
gcctcacaggataaacaagggccca

SEQ ID NO: 3523428 - DNA, 25 bp, Homo sapien
ctcacaggataaacaagggcccagg

SEQ ID NO: 3523429 - DNA, 25 bp, Homo sapien
tgtccaccactgtcactaccagcag

SEQ ID NO: 3523430 - DNA, 25 bp, Homo sapien
acatcggaagccctggatactccca

SEQ ID NO: 3523431 - DNA, 25 bp, Homo sapien
tctgaacatcggaagccctggatac

SEQ ID NO: 3523432 - DNA, 25 bp, Homo sapien
tgaacatcggaagccctggatactc

SEQ ID NO: 3523433 - DNA, 25 bp, Homo sapien
cttctgaacatcggaagccctggat

SEQ ID NO: 3523434 - DNA, 25 bp, Homo sapien
acatctggacgagtgaccagggcca

SEQ ID NO: 3523435 - DNA, 25 bp, Homo sapien
ggatcattcctacagacaaccagtg

SEQ ID NO: 3523436 - DNA, 25 bp, Homo sapien
tccctccctggagataggatcattc

SEQ ID NO: 3523437 - DNA, 25 bp, Homo sapien
gctaatttgagcatccgatagtcac

SEQ ID NO: 3523438 - DNA, 25 bp, Homo sapien
tcagtacaccgtggcattctttcag

SEQ ID NO: 3523439 - DNA, 25 bp, Homo sapien
gtctacagcagggattgtctcacaa

SEQ ID NO: 3523440 - DNA, 25 bp, Homo sapien
gaaatctagttgttcgctgaggttg

SEQ ID NO: 3523441 - DNA, 25 bp, Homo sapien
caattacaaattagtcgccttctca

SEQ ID NO: 3523442 - DNA, 25 bp, Homo sapien
gcttggtagtatgttttaccaccac

SEQ ID NO: 3523443 - DNA, 25 bp, Homo sapien
gaaattctctacttgatcaatctct

SEQ ID NO: 3523444 - DNA, 25 bp, Homo sapien
catcagaagtgttcgggagaatgca

SEQ ID NO: 3523445 - DNA, 25 bp, Homo sapien
gcattttccaaaagacgcatgaagc

SEQ ID NO: 3523446 - DNA, 25 bp, Homo sapien
gcatgcctaatactgctccctcttg

SEQ ID NO: 3523447 - DNA, 25 bp, Homo sapien
ccatctgagtttccaacagtcggac

SEQ ID NO: 3523448 - DNA, 25 bp, Homo sapien
ttgaattcagcatgcctaatactgc

SEQ ID NO: 3523449 - DNA, 25 bp, Homo sapien
tctgagtttccaacagtcggactgt

SEQ ID NO: 3523450 - DNA, 25 bp, Homo sapien
gagcccttgtttgattagcttagca

SEQ ID NO: 3523451 - DNA, 25 bp, Homo sapien
gattagcttagcaacatctttgcag

SEQ ID NO: 3523452 - DNA, 25 bp, Homo sapien
tgtccccatggcctgctagatctga

SEQ ID NO: 3523453 - DNA, 25 bp, Homo sapien
tctttgcagtactccccagtgaggt

SEQ ID NO: 3523454 - DNA, 25 bp, Homo sapien
tgcagcagtgcagtctatatgccat

SEQ ID NO: 3523455 - DNA, 25 bp, Homo sapien
tcctggttatctggctcactttgca

SEQ ID NO: 3523456 - DNA, 25 bp, Homo sapien
cccttcaactgtgtgttctcctggg

SEQ ID NO: 3523457 - DNA, 25 bp, Homo sapien
atggctcgtggccattgaagaaact

SEQ ID NO: 3523458 - DNA, 25 bp, Homo sapien
tggtgaggactacccttcaagtctg

SEQ ID NO: 3523459 - DNA, 25 bp, Homo sapien
actagagcaagtcggtacgtatttc

SEQ ID NO: 3523460 - DNA, 25 bp, Homo sapien
tcatagctagtgtcagttaccaacc

SEQ ID NO: 3523461 - DNA, 25 bp, Homo sapien
aaatgagaagccacctttcgccgct

SEQ ID NO: 3523462 - DNA, 25 bp, Homo sapien
gtcgttttctgatacatccacgttg

SEQ ID NO: 3523463 - DNA, 25 bp, Homo sapien
gggttgtcgttttctgatacatcca

SEQ ID NO: 3523464 - DNA, 25 bp, Homo sapien
tcagaggctttcccgcttttctggg

SEQ ID NO: 3523465 - DNA, 25 bp, Homo sapien
ttctggggttgtcgttttctgatac

SEQ ID NO: 3523466 - DNA, 25 bp, Homo sapien
tgtacttcaaagctaagcctagggt

SEQ ID NO: 3523467 - DNA, 25 bp, Homo sapien
aaggccttaaggtgtccattctcgc

SEQ ID NO: 3523468 - DNA, 25 bp, Homo sapien
ttaggagtcaggttcttgcccaagg

SEQ ID NO: 3523469 - DNA, 25 bp, Homo sapien
gcttcttgcagctggcatgccgtgg

SEQ ID NO: 3523470 - DNA, 25 bp, Homo sapien
gttctaattggagcttcaccaaaat

SEQ ID NO: 3523471 - DNA, 25 bp, Homo sapien
tgttctaattggagcttcaccaaaa

SEQ ID NO: 3523472 - DNA, 25 bp, Homo sapien
attatacattgcaatggattttgtt

SEQ ID NO: 3523473 - DNA, 25 bp, Homo sapien
tttgttctaattggagcttcaccaa

SEQ ID NO: 3523474 - DNA, 25 bp, Homo sapien
ccagtccgccttccaggtatcattt

SEQ ID NO: 3523475 - DNA, 25 bp, Homo sapien
gccagtccgccttccaggtatcatt

SEQ ID NO: 3523476 - DNA, 25 bp, Homo sapien
atacatgtgggtcctctcagcccca

SEQ ID NO: 3523477 - DNA, 25 bp, Homo sapien
ttatttagtcatgatcagaatgctg

SEQ ID NO: 3523478 - DNA, 25 bp, Homo sapien
taaatcggccaggatatacatgtgg

SEQ ID NO: 3523479 - DNA, 25 bp, Homo sapien
ggcacagaaagtctaagatacctaa

SEQ ID NO: 3523480 - DNA, 25 bp, Homo sapien
cttgagccactgcacccagcccagt

SEQ ID NO: 3523481 - DNA, 25 bp, Homo sapien
tgagccactgcacccagcccagtca

SEQ ID NO: 3523482 - DNA, 25 bp, Homo sapien
agccactgcacccagcccagtcatt

SEQ ID NO: 3523483 - DNA, 25 bp, Homo sapien
cttgttagccaagctggtcttcaac

SEQ ID NO: 3523484 - DNA, 25 bp, Homo sapien
cacatggtcctgttccttagctgtc

SEQ ID NO: 3523485 - DNA, 25 bp, Homo sapien
gacatccctgatgttggactgaggg

SEQ ID NO: 3523486 - DNA, 25 bp, Homo sapien
tggagttgatatagccgattggcac

SEQ ID NO: 3523487 - DNA, 25 bp, Homo sapien
tattgttgggagtaacttcgacctc

SEQ ID NO: 3523488 - DNA, 25 bp, Homo sapien
gcagtatttcaagtggacgagggcc

SEQ ID NO: 3523489 - DNA, 25 bp, Homo sapien
taactcggatgttggacagattctc

SEQ ID NO: 3523490 - DNA, 25 bp, Homo sapien
taaagatacagtcagttccagggac

SEQ ID NO: 3523491 - DNA, 25 bp, Homo sapien
tccttgtcagccagaacttgggtct

SEQ ID NO: 3523492 - DNA, 25 bp, Homo sapien
ctgcctgggcttctcggattcagct

SEQ ID NO: 3523493 - DNA, 25 bp, Homo sapien
tacacaggatgctagcagcacagcc

SEQ ID NO: 3523494 - DNA, 25 bp, Homo sapien
gcctgggcttctcggattcagcttg

SEQ ID NO: 3523495 - DNA, 25 bp, Homo sapien
cacaggatgctagcagcacagcctg

SEQ ID NO: 3523496 - DNA, 25 bp, Homo sapien
gggctgctggattgatcaggctgga

SEQ ID NO: 3523497 - DNA, 25 bp, Homo sapien
atcaggctggagctttagtttgtac

SEQ ID NO: 3523498 - DNA, 25 bp, Homo sapien
gaaggaagagggctgtgtattaaga

SEQ ID NO: 3523499 - DNA, 25 bp, Homo sapien
gctgtgtattaagaagcagccctgc

SEQ ID NO: 3523500 - DNA, 25 bp, Homo sapien
gtgaaggtcaaatcaggaaaggcca

SEQ ID NO: 3523501 - DNA, 25 bp, Homo sapien
ggtctgcttcttaagacgctgaatg

SEQ ID NO: 3523502 - DNA, 25 bp, Homo sapien
gggtctgcttcttaagacgctgaat

SEQ ID NO: 3523503 - DNA, 25 bp, Homo sapien
tgaaggtcaaatcaggaaaggccag

SEQ ID NO: 3523504 - DNA, 25 bp, Homo sapien
tgccttgaacaatagccagaaaacg

SEQ ID NO: 3523505 - DNA, 25 bp, Homo sapien
caaaggatctcgttccgctcgggcc

SEQ ID NO: 3523506 - DNA, 25 bp, Homo sapien
gtttcacgggaacaattgccttgaa

SEQ ID NO: 3523507 - DNA, 25 bp, Homo sapien
acaatagccagaaaacgagttccac

SEQ ID NO: 3523508 - DNA, 25 bp, Homo sapien
ggacttttttgcaactgaatgcagc

SEQ ID NO: 3523509 - DNA, 25 bp, Homo sapien
cttttttgcaactgaatgcagctgt

SEQ ID NO: 3523510 - DNA, 25 bp, Homo sapien
tctggacttttttgcaactgaatgc

SEQ ID NO: 3523511 - DNA, 25 bp, Homo sapien
cagtctggacttttttgcaactgaa

SEQ ID NO: 3523512 - DNA, 25 bp, Homo sapien
gccagccctgtaaatgggctgtgcc

SEQ ID NO: 3523513 - DNA, 25 bp, Homo sapien
gggctgtgccttgattctggagcag

SEQ ID NO: 3523514 - DNA, 25 bp, Homo sapien
aattgagcaggtaagtcctggatgc

SEQ ID NO: 3523515 - DNA, 25 bp, Homo sapien
agctgcgcagtgtgagcttagtcac

SEQ ID NO: 3523516 - DNA, 25 bp, Homo sapien
ttcggcagcttttactgaacgaggg

SEQ ID NO: 3523517 - DNA, 25 bp, Homo sapien
gcttttactgaacgaggggagacca

SEQ ID NO: 3523518 - DNA, 25 bp, Homo sapien
cttttactgaacgaggggagaccat

SEQ ID NO: 3523519 - DNA, 25 bp, Homo sapien
ctgttcggcagcttttactgaacga

SEQ ID NO: 3523520 - DNA, 25 bp, Homo sapien
gcatcagcgacaccatagacaacct

SEQ ID NO: 3523521 - DNA, 25 bp, Homo sapien
tgtctgtctgtgtcatcagcctgag

SEQ ID NO: 3523522 - DNA, 25 bp, Homo sapien
catggcacagattggatcttttcgg

SEQ ID NO: 3523523 - DNA, 25 bp, Homo sapien
caggatgtgtgtttgtcttggcagc

SEQ ID NO: 3523524 - DNA, 25 bp, Homo sapien
tgggcttgtggggtaagagggccat

SEQ ID NO: 3523525 - DNA, 25 bp, Homo sapien
atgtgcaggtgaggaacacaggccc

SEQ ID NO: 3523526 - DNA, 25 bp, Homo sapien
gtgaggaacacaggccctcccaggc

SEQ ID NO: 3523527 - DNA, 25 bp, Homo sapien
agcctctggcagcagggaaccttgg

SEQ ID NO: 3523528 - DNA, 25 bp, Homo sapien
tgaaatctctggttccacattgata

SEQ ID NO: 3523529 - DNA, 25 bp, Homo sapien
tctctggttccacattgataaacaa

SEQ ID NO: 3523530 - DNA, 25 bp, Homo sapien
ggttccacattgataaacaactcgg

SEQ ID NO: 3523531 - DNA, 25 bp, Homo sapien
cattgataaacaactcggatttgta

SEQ ID NO: 3523532 - DNA, 25 bp, Homo sapien
tctgagcggcatcaggcaatgggaa

SEQ ID NO: 3523533 - DNA, 25 bp, Homo sapien
gatgtgcgttgtacccttcccaaga

SEQ ID NO: 3523534 - DNA, 25 bp, Homo sapien
taagggccattactcctgtctgagc

SEQ ID NO: 3523535 - DNA, 25 bp, Homo sapien
tatcacgctgaggaatgctaagggc

SEQ ID NO: 3523536 - DNA, 25 bp, Homo sapien
caagaaatcagacggaggctcagac

SEQ ID NO: 3523537 - DNA, 25 bp, Homo sapien
cacgtcgggcaagaagaatcctgtc

SEQ ID NO: 3523538 - DNA, 25 bp, Homo sapien
tctgacgagtccgacaaaagcacgt

SEQ ID NO: 3523539 - DNA, 25 bp, Homo sapien
tcagacagcggcataaaaatggagc

SEQ ID NO: 3523540 - DNA, 25 bp, Homo sapien
taggcagctctctaccaggtctggt

SEQ ID NO: 3523541 - DNA, 25 bp, Homo sapien
catcagacaacgagagtgtggcttc

SEQ ID NO: 3523542 - DNA, 25 bp, Homo sapien
tggtgacgaatccaaaaagcccctc

SEQ ID NO: 3523543 - DNA, 25 bp, Homo sapien
cagtcggtctgctggtcggaagtca

SEQ ID NO: 3523544 - DNA, 25 bp, Homo sapien
gctgtgagtccatcgacatctccct

SEQ ID NO: 3523545 - DNA, 25 bp, Homo sapien
ctccgcagttagcaaggatggcctg

SEQ ID NO: 3523546 - DNA, 25 bp, Homo sapien
gcttaggaatcccaaatgtcgaata

SEQ ID NO: 3523547 - DNA, 25 bp, Homo sapien
tgtcagaactaacagtgtgaagacc

SEQ ID NO: 3523548 - DNA, 25 bp, Homo sapien
ccgtgttggtgcagagagtgcccct

SEQ ID NO: 3523549 - DNA, 25 bp, Homo sapien
ctttgaggtggagcaacccctgaat

SEQ ID NO: 3523550 - DNA, 25 bp, Homo sapien
gactgctggcctcttgaaacctcca

SEQ ID NO: 3523551 - DNA, 25 bp, Homo sapien
gagtgcccctgggcagtagaaggca

SEQ ID NO: 3523552 - DNA, 25 bp, Homo sapien
ggtccccgctttgaccaccacagca

SEQ ID NO: 3523553 - DNA, 25 bp, Homo sapien
cccttgcaccctctcgttctcactc

SEQ ID NO: 3523554 - DNA, 25 bp, Homo sapien
tgtgccatctgttgtggctttggag

SEQ ID NO: 3523555 - DNA, 25 bp, Homo sapien
caggaccttttggatgacggctccc

SEQ ID NO: 3523556 - DNA, 25 bp, Homo sapien
ttgtccaacccgaccatgctgagga

SEQ ID NO: 3523557 - DNA, 25 bp, Homo sapien
gagacatgaatgtctaaccttttga

SEQ ID NO: 3523558 - DNA, 25 bp, Homo sapien
ttccttttattccagcgagtcccac

SEQ ID NO: 3523559 - DNA, 25 bp, Homo sapien
tctttgtccccaaccaggatttgaa

SEQ ID NO: 3523560 - DNA, 25 bp, Homo sapien
aatgctgatgggcagtatgatccat

SEQ ID NO: 3523561 - DNA, 25 bp, Homo sapien
gcagtatgatccatacactgacagc

SEQ ID NO: 3523562 - DNA, 25 bp, Homo sapien
gccgcttccggaatagctccatgtc

SEQ ID NO: 3523563 - DNA, 25 bp, Homo sapien
cagccgcttccggaatagctccatg

SEQ ID NO: 3523564 - DNA, 25 bp, Homo sapien
tctgaagagtaaggtctggcctgac

SEQ ID NO: 3523565 - DNA, 25 bp, Homo sapien
ttcttggcatgcgcctccaccttga

SEQ ID NO: 3523566 - DNA, 25 bp, Homo sapien
tcactggtgaaccatagagctgact

SEQ ID NO: 3523567 - DNA, 25 bp, Homo sapien
gctgactgaggtccgctttaggctt

SEQ ID NO: 3523568 - DNA, 25 bp, Homo sapien
ctgtttttctgttattggcgtatag

SEQ ID NO: 3523569 - DNA, 25 bp, Homo sapien
gtttttctgttattggcgtatagga

SEQ ID NO: 3523570 - DNA, 25 bp, Homo sapien
tgtttttctgttattggcgtatagg

SEQ ID NO: 3523571 - DNA, 25 bp, Homo sapien
ttttctgttattggcgtataggaat

SEQ ID NO: 3523572 - DNA, 25 bp, Homo sapien
gatcatcgccgttgaaatgaaaaga

SEQ ID NO: 3523573 - DNA, 25 bp, Homo sapien
gacactgaagatacttctcgggaaa

SEQ ID NO: 3523574 - DNA, 25 bp, Homo sapien
gaacccacatgaagctctgaaacca

SEQ ID NO: 3523575 - DNA, 25 bp, Homo sapien
gagcaaagtcggaaacacagagaag

SEQ ID NO: 3523576 - DNA, 25 bp, Homo sapien
ttacataagtgtcgtgcctgcctgg

SEQ ID NO: 3523577 - DNA, 25 bp, Homo sapien
tcaataagggtgagggtcactccct

SEQ ID NO: 3523578 - DNA, 25 bp, Homo sapien
gacctggtcctcgacatgtgggtga

SEQ ID NO: 3523579 - DNA, 25 bp, Homo sapien
gatgcggtcaccctgcaaaagactt

SEQ ID NO: 3523580 - DNA, 25 bp, Homo sapien
cactcgcgtactgtgaatttgggag

SEQ ID NO: 3523581 - DNA, 25 bp, Homo sapien
taaagttgacttctcctcgtgggca

SEQ ID NO: 3523582 - DNA, 25 bp, Homo sapien
gcttagccttcattagtcatctggg

SEQ ID NO: 3523583 - DNA, 25 bp, Homo sapien
aaccatatatttagcctgtgaccag

SEQ ID NO: 3523584 - DNA, 25 bp, Homo sapien
gaagcagggttgtctaatatgcaca

SEQ ID NO: 3523585 - DNA, 25 bp, Homo sapien
tgctgcctgattggtgaacattgac

SEQ ID NO: 3523586 - DNA, 25 bp, Homo sapien
gacttcaagtagcatagcccttgtg

SEQ ID NO: 3523587 - DNA, 25 bp, Homo sapien
gacttctgtacctagtgctgcctga

SEQ ID NO: 3523588 - DNA, 25 bp, Homo sapien
gactgtacaggtctctctgtccaca

SEQ ID NO: 3523589 - DNA, 25 bp, Homo sapien
aaaagtgagaaatctagtcagtcct

SEQ ID NO: 3523590 - DNA, 25 bp, Homo sapien
taagttatgcaattaaacagctacc

SEQ ID NO: 3523591 - DNA, 25 bp, Homo sapien
cagttcataagagctgtgcaaagac

SEQ ID NO: 3523592 - DNA, 25 bp, Homo sapien
cgccagagagcttttggaaggtgac

SEQ ID NO: 3523593 - DNA, 25 bp, Homo sapien
gaagactcaatatgtatgttgtgcc

SEQ ID NO: 3523594 - DNA, 25 bp, Homo sapien
taggagccccttgctacctattagg

SEQ ID NO: 3523595 - DNA, 25 bp, Homo sapien
tggaaatgagagactggagtgaaat

SEQ ID NO: 3523596 - DNA, 25 bp, Homo sapien
cagagtgtgtctcacagtaaggtcc

SEQ ID NO: 3523597 - DNA, 25 bp, Homo sapien
aaaatagtactctggcgtgcgagcg

SEQ ID NO: 3523598 - DNA, 25 bp, Homo sapien
aaagtgaatgcgcagactggacccc

SEQ ID NO: 3523599 - DNA, 25 bp, Homo sapien
aaggtccaggccgtgggaccacaga

SEQ ID NO: 3523600 - DNA, 25 bp, Homo sapien
gagttcgcgctccttggagttccgc

SEQ ID NO: 3523601 - DNA, 25 bp, Homo sapien
aaggtttcccgggactgctcgagtg

SEQ ID NO: 3523602 - DNA, 25 bp, Homo sapien
cctcctcggaatctgagaagtccga

SEQ ID NO: 3523603 - DNA, 25 bp, Homo sapien
ggagttccgccatttcatgcgtcgg

SEQ ID NO: 3523604 - DNA, 25 bp, Homo sapien
cagaaatgagttccggtggattccc

SEQ ID NO: 3523605 - DNA, 25 bp, Homo sapien
tcccggccggcgagaagaagggaga

SEQ ID NO: 3523606 - DNA, 25 bp, Homo sapien
tcagctcgcggttccgtttgcctca

SEQ ID NO: 3523607 - DNA, 25 bp, Homo sapien
tgcaggctctgtccttcgggctgtg

SEQ ID NO: 3523608 - DNA, 25 bp, Homo sapien
cttgcggtcgggcttgctgatgtac

SEQ ID NO: 3523609 - DNA, 25 bp, Homo sapien
cgccagcttcttgcggtcgggcttg

SEQ ID NO: 3523610 - DNA, 25 bp, Homo sapien
gagaagactgctcgacgcagcatgc

SEQ ID NO: 3523611 - DNA, 25 bp, Homo sapien
cagcgccttccgctgcacgtcggag

SEQ ID NO: 3523612 - DNA, 25 bp, Homo sapien
gactagggccggtctgtgtgtggct

SEQ ID NO: 3523613 - DNA, 25 bp, Homo sapien
aagagaaattagccccggctggtag

SEQ ID NO: 3523614 - DNA, 25 bp, Homo sapien
tctctcggcggcgtggagggactag

SEQ ID NO: 3523615 - DNA, 25 bp, Homo sapien
ccccggctggtaggtgtctctcggc

SEQ ID NO: 3523616 - DNA, 25 bp, Homo sapien
cctttgtggggaatcgtggccaagt

SEQ ID NO: 3523617 - DNA, 25 bp, Homo sapien
gtgctgaaacctttgtggggaatcg

SEQ ID NO: 3523618 - DNA, 25 bp, Homo sapien
tgaaacctttgtggggaatcgtggc

SEQ ID NO: 3523619 - DNA, 25 bp, Homo sapien
acctttgtggggaatcgtggccaag

SEQ ID NO: 3523620 - DNA, 25 bp, Homo sapien
gaaaacggcggcgtgaagggatgcc

SEQ ID NO: 3523621 - DNA, 25 bp, Homo sapien
gggatgccaacagctcctcgccggg

SEQ ID NO: 3523622 - DNA, 25 bp, Homo sapien
gaagggatgccaacagctcctcgcc

SEQ ID NO: 3523623 - DNA, 25 bp, Homo sapien
ggaaccgcctcaaattgggaccatg

SEQ ID NO: 3523624 - DNA, 25 bp, Homo sapien
tgggagggacgctctggagcaaggc

SEQ ID NO: 3523625 - DNA, 25 bp, Homo sapien
aaataagaagatctgatgaaaggct

SEQ ID NO: 3523626 - DNA, 25 bp, Homo sapien
aggctgaaaagacccttcgaagtag

SEQ ID NO: 3523627 - DNA, 25 bp, Homo sapien
ggtcttgggagggacgctctggagc

SEQ ID NO: 3523628 - DNA, 25 bp, Homo sapien
ctgaatgggcccttagggttctgac

SEQ ID NO: 3523629 - DNA, 25 bp, Homo sapien
gaaaatgccgactgcaaggactggg

SEQ ID NO: 3523630 - DNA, 25 bp, Homo sapien
tcggctgatgcggatcagatcctcc

SEQ ID NO: 3523631 - DNA, 25 bp, Homo sapien
gaggatggcgttcactccaaacttc

SEQ ID NO: 3523632 - DNA, 25 bp, Homo sapien
tcagaaacgtcgtctcgctggcagg

SEQ ID NO: 3523633 - DNA, 25 bp, Homo sapien
tctccaagtaacaatcccacttggg

SEQ ID NO: 3523634 - DNA, 25 bp, Homo sapien
cacagtgtcctctctcttgggctta

SEQ ID NO: 3523635 - DNA, 25 bp, Homo sapien
tcagtggccggagggtaaacgcctc

SEQ ID NO: 3523636 - DNA, 25 bp, Homo sapien
ataacccttctttcagtggccggag

SEQ ID NO: 3523637 - DNA, 25 bp, Homo sapien
agaagtcccattctgacgactcagg

SEQ ID NO: 3523638 - DNA, 25 bp, Homo sapien
cagggaaacttggaaacggatgctt

SEQ ID NO: 3523639 - DNA, 25 bp, Homo sapien
gagtgaaatcagtgttagaagtccc

SEQ ID NO: 3523640 - DNA, 25 bp, Homo sapien
ggccactggatgtgtgtccgtaaga

SEQ ID NO: 3523641 - DNA, 25 bp, Homo sapien
gcatttgccggggtgtagttttcac

SEQ ID NO: 3523642 - DNA, 25 bp, Homo sapien
ccaagtcttccggatgatcagaata

SEQ ID NO: 3523643 - DNA, 25 bp, Homo sapien
gaacttgaagccagcgtgagccctt

SEQ ID NO: 3523644 - DNA, 25 bp, Homo sapien
tttcaccgtttcctgtccgtcgaca

SEQ ID NO: 3523645 - DNA, 25 bp, Homo sapien
tttatcagcttcattaagtgaatag

SEQ ID NO: 3523646 - DNA, 25 bp, Homo sapien
cttgactattgtcttgcatcacatt

SEQ ID NO: 3523647 - DNA, 25 bp, Homo sapien
acttgactattgtcttgcatcacat

SEQ ID NO: 3523648 - DNA, 25 bp, Homo sapien
cacatttatcagcttcattaagtga

SEQ ID NO: 3523649 - DNA, 25 bp, Homo sapien
tacttcaactcccttcttggacaac

SEQ ID NO: 3523650 - DNA, 25 bp, Homo sapien
cttgcagtgcggacttggagaaagt

SEQ ID NO: 3523651 - DNA, 25 bp, Homo sapien
tggacaaccctctgccctagcaata

SEQ ID NO: 3523652 - DNA, 25 bp, Homo sapien
ggccaaggagatatgagaccgttca

SEQ ID NO: 3523653 - DNA, 25 bp, Homo sapien
tgattgtgtgaaagggtagctctga

SEQ ID NO: 3523654 - DNA, 25 bp, Homo sapien
ggctcttagtgactgattgtgtgaa

SEQ ID NO: 3523655 - DNA, 25 bp, Homo sapien
tagtgactgattgtgtgaaagggta

SEQ ID NO: 3523656 - DNA, 25 bp, Homo sapien
ccagaggctcttagtgactgattgt

SEQ ID NO: 3523657 - DNA, 25 bp, Homo sapien
aaggaaagacgccagaatctgatgg

SEQ ID NO: 3523658 - DNA, 25 bp, Homo sapien
tgtttatcaaggaggagttgtccgt

SEQ ID NO: 3523659 - DNA, 25 bp, Homo sapien
ggcagcgtggatgcttgtttatcaa

SEQ ID NO: 3523660 - DNA, 25 bp, Homo sapien
cttgtcgaatagagcccattgagtg

SEQ ID NO: 3523661 - DNA, 25 bp, Homo sapien
tgaggtaatggggtaatcggattga

SEQ ID NO: 3523662 - DNA, 25 bp, Homo sapien
gtaatggggtaatcggattgaaaga

SEQ ID NO: 3523663 - DNA, 25 bp, Homo sapien
tgatgtgaggtaatggggtaatcgg

SEQ ID NO: 3523664 - DNA, 25 bp, Homo sapien
atgtgaggtaatggggtaatcggat

SEQ ID NO: 3523665 - DNA, 25 bp, Homo sapien
acattcttttctgatggtgcatctg

SEQ ID NO: 3523666 - DNA, 25 bp, Homo sapien
ctgatggtgcatctgagtgctgaga

SEQ ID NO: 3523667 - DNA, 25 bp, Homo sapien
gagtgctgagattctctctccctgg

SEQ ID NO: 3523668 - DNA, 25 bp, Homo sapien
tgttccatctgctccagcttactgg

SEQ ID NO: 3523669 - DNA, 25 bp, Homo sapien
agcttgggctctttcagatgttcca

SEQ ID NO: 3523670 - DNA, 25 bp, Homo sapien
tctcctgtttaattggacttgggaa

SEQ ID NO: 3523671 - DNA, 25 bp, Homo sapien
ttcaagcttgggctctttcagatgt

SEQ ID NO: 3523672 - DNA, 25 bp, Homo sapien
ttaattggacttgggaagcttggag

SEQ ID NO: 3523673 - DNA, 25 bp, Homo sapien
cctccattggagagcatataaatta

SEQ ID NO: 3523674 - DNA, 25 bp, Homo sapien
gcttcaaggttctcaggttaaggga

SEQ ID NO: 3523675 - DNA, 25 bp, Homo sapien
gaatagctctcaatgggcttcaagg

SEQ ID NO: 3523676 - DNA, 25 bp, Homo sapien
gggttgggcctcatatcgatatgac

SEQ ID NO: 3523677 - DNA, 25 bp, Homo sapien
gcgctggtgtgtgcccttttatctc

SEQ ID NO: 3523678 - DNA, 25 bp, Homo sapien
gagattttgttgtattcatggtggt

SEQ ID NO: 3523679 - DNA, 25 bp, Homo sapien
aatagggctgggctaaagccccctg

SEQ ID NO: 3523680 - DNA, 25 bp, Homo sapien
tgcagtggggagattaaaactttca

SEQ ID NO: 3523681 - DNA, 25 bp, Homo sapien
cccgttggcatctagtgaatgtcat

SEQ ID NO: 3523682 - DNA, 25 bp, Homo sapien
agcagaaacacactggatgatgtta

SEQ ID NO: 3523683 - DNA, 25 bp, Homo sapien
gattacaacccgttggcatctagtg

SEQ ID NO: 3523684 - DNA, 25 bp, Homo sapien
tagtgaatgtcatgtactccgaaag

SEQ ID NO: 3523685 - DNA, 25 bp, Homo sapien
cggccagccccggatgcaggaactt

SEQ ID NO: 3523686 - DNA, 25 bp, Homo sapien
taactgctctttcaactagctgacg

SEQ ID NO: 3523687 - DNA, 25 bp, Homo sapien
tgacgaacggccagccccggatgca

SEQ ID NO: 3523688 - DNA, 25 bp, Homo sapien
tttcaactagctgacgaacggccag

SEQ ID NO: 3523689 - DNA, 25 bp, Homo sapien
ttccgtggccgtcagttttgggctg

SEQ ID NO: 3523690 - DNA, 25 bp, Homo sapien
tcagttttgggctggttactactcc

SEQ ID NO: 3523691 - DNA, 25 bp, Homo sapien
gtgtcgttggcttccgtggccgtca

SEQ ID NO: 3523692 - DNA, 25 bp, Homo sapien
gcccaggagagcatgggtgtcgttg

SEQ ID NO: 3523693 - DNA, 25 bp, Homo sapien
aaaagctgccactaagatcctgaca

SEQ ID NO: 3523694 - DNA, 25 bp, Homo sapien
ttatttccctgaacagactgtaatt

SEQ ID NO: 3523695 - DNA, 25 bp, Homo sapien
aattttccatgcttacggtcatgaa

SEQ ID NO: 3523696 - DNA, 25 bp, Homo sapien
catgcttacggtcatgaatgcttgg

SEQ ID NO: 3523697 - DNA, 25 bp, Homo sapien
tggcttctgtgcatagtctagtgtc

SEQ ID NO: 3523698 - DNA, 25 bp, Homo sapien
actgttcccacataggaagccactg

SEQ ID NO: 3523699 - DNA, 25 bp, Homo sapien
tgctgttcagcctgaagtgctccct

SEQ ID NO: 3523700 - DNA, 25 bp, Homo sapien
tgtcctgctcctgaagttgcctctg

SEQ ID NO: 3523701 - DNA, 25 bp, Homo sapien
tccttggaaatgcatactaggtttc

SEQ ID NO: 3523702 - DNA, 25 bp, Homo sapien
aatacggtaacaagcaagtctgtgt

SEQ ID NO: 3523703 - DNA, 25 bp, Homo sapien
gggtgaaccgccttgataatgatga

SEQ ID NO: 3523704 - DNA, 25 bp, Homo sapien
ttcattgaatgctcgtgatctaagc

SEQ ID NO: 3523705 - DNA, 25 bp, Homo sapien
cagggaggaacgctgaatcttaatc

SEQ ID NO: 3523706 - DNA, 25 bp, Homo sapien
tcattggctgcctgtggatcgcatt

SEQ ID NO: 3523707 - DNA, 25 bp, Homo sapien
ggttactagaagactggaatgctgg

SEQ ID NO: 3523708 - DNA, 25 bp, Homo sapien
cattgtttagcctgagagtgcccat

SEQ ID NO: 3523709 - DNA, 25 bp, Homo sapien
aaacagttgtgtaaaactcggactg

SEQ ID NO: 3523710 - DNA, 25 bp, Homo sapien
gactgtaaagtcacagttgactgct

SEQ ID NO: 3523711 - DNA, 25 bp, Homo sapien
cacactggcaggttgagacagggac

SEQ ID NO: 3523712 - DNA, 25 bp, Homo sapien
ctgggagggtgtagacacactggca

SEQ ID NO: 3523713 - DNA, 25 bp, Homo sapien
tgttaacgacattagtgggaccgca

SEQ ID NO: 3523714 - DNA, 25 bp, Homo sapien
aacatcgttgtgtctgtggcgcccc

SEQ ID NO: 3523715 - DNA, 25 bp, Homo sapien
cagtcctcatctccgggctttgcaa

SEQ ID NO: 3523716 - DNA, 25 bp, Homo sapien
tcagaattgcccagtccggttttgt

SEQ ID NO: 3523717 - DNA, 25 bp, Homo sapien
caggaaatggattttttcttcgtgt

SEQ ID NO: 3523718 - DNA, 25 bp, Homo sapien
ttgccccagtctaggctttactgga

SEQ ID NO: 3523719 - DNA, 25 bp, Homo sapien
ttccccaaactctaaaatcgtctgc

SEQ ID NO: 3523720 - DNA, 25 bp, Homo sapien
gtctaggctttactggagaattcat

SEQ ID NO: 3523721 - DNA, 25 bp, Homo sapien
gggcaggtgtccagttatacttctt

SEQ ID NO: 3523722 - DNA, 25 bp, Homo sapien
gctttacgcatccttcaaacacagg

SEQ ID NO: 3523723 - DNA, 25 bp, Homo sapien
tccaccctgctcttcagtgtgggtg

SEQ ID NO: 3523724 - DNA, 25 bp, Homo sapien
cttatcattaggtgggcttcaggca

SEQ ID NO: 3523725 - DNA, 25 bp, Homo sapien
gcttcaggcatagtcttaagatagc

SEQ ID NO: 3523726 - DNA, 25 bp, Homo sapien
tgtcttgttcagaaatggtaagcat

SEQ ID NO: 3523727 - DNA, 25 bp, Homo sapien
ctgtcttgttcagaaatggtaagca

SEQ ID NO: 3523728 - DNA, 25 bp, Homo sapien
gataaacagcccttgttcctcggga

SEQ ID NO: 3523729 - DNA, 25 bp, Homo sapien
tcctcgggataaggactggcagtcc

SEQ ID NO: 3523730 - DNA, 25 bp, Homo sapien
tattttgggcgccagcggagaaacc

SEQ ID NO: 3523731 - DNA, 25 bp, Homo sapien
catggccgaaacagaagccctgtcg

SEQ ID NO: 3523732 - DNA, 25 bp, Homo sapien
ccttaccagactcttgggccagtgg

SEQ ID NO: 3523733 - DNA, 25 bp, Homo sapien
gagaacaaggccatccatgacctgg

SEQ ID NO: 3523734 - DNA, 25 bp, Homo sapien
ggtgagaccaagagacaagcagatg

SEQ ID NO: 3523735 - DNA, 25 bp, Homo sapien
tgaccgtggttagagcaatgctgaa

SEQ ID NO: 3523736 - DNA, 25 bp, Homo sapien
gggtttgacacctatctgtccctgc

SEQ ID NO: 3523737 - DNA, 25 bp, Homo sapien
tacaaagtgacgtgggtaggattca

SEQ ID NO: 3523738 - DNA, 25 bp, Homo sapien
gcccaagatcacagttacaaagtga

SEQ ID NO: 3523739 - DNA, 25 bp, Homo sapien
tgcctctagagttcacgttctcact

SEQ ID NO: 3523740 - DNA, 25 bp, Homo sapien
tgttctgtaacaggttcgtccgcct

SEQ ID NO: 3523741 - DNA, 25 bp, Homo sapien
cacagccatgtgctcgttagcgtca

SEQ ID NO: 3523742 - DNA, 25 bp, Homo sapien
accggtgtccgaggccgatctgatt

SEQ ID NO: 3523743 - DNA, 25 bp, Homo sapien
ggatgaggacgatgcagatctcccc

SEQ ID NO: 3523744 - DNA, 25 bp, Homo sapien
tgttggtcaggatggccttgatttc

SEQ ID NO: 3523745 - DNA, 25 bp, Homo sapien
ctttgtcgccatgctggagtgcact

SEQ ID NO: 3523746 - DNA, 25 bp, Homo sapien
cactggcgcgatctccgttcactgc

SEQ ID NO: 3523747 - DNA, 25 bp, Homo sapien
gctttgtcgccatgctggagtgcac

SEQ ID NO: 3523748 - DNA, 25 bp, Homo sapien
catttggaacttaggagtcatttcc

SEQ ID NO: 3523749 - DNA, 25 bp, Homo sapien
gaaggcctttatttgaaatccagct

SEQ ID NO: 3523750 - DNA, 25 bp, Homo sapien
ggcttataccctagtgagaaggcct

SEQ ID NO: 3523751 - DNA, 25 bp, Homo sapien
taataggaggcttctcatagcaact

SEQ ID NO: 3523752 - DNA, 25 bp, Homo sapien
tttgagcaggtgcatctgtaatgcc

SEQ ID NO: 3523753 - DNA, 25 bp, Homo sapien
tttgggaacctcttgtccactcctc

SEQ ID NO: 3523754 - DNA, 25 bp, Homo sapien
gtgggacacctgagaacttgctgga

SEQ ID NO: 3523755 - DNA, 25 bp, Homo sapien
tcatactccaggcactgtgtgacga

SEQ ID NO: 3523756 - DNA, 25 bp, Homo sapien
tcatgtgttctttgctctggcacat

SEQ ID NO: 3523757 - DNA, 25 bp, Homo sapien
ctgttttcatgaggtttcctcatgt

SEQ ID NO: 3523758 - DNA, 25 bp, Homo sapien
ggtttcctcatgtgttctttgctct

SEQ ID NO: 3523759 - DNA, 25 bp, Homo sapien
tcatgaggtttcctcatgtgttctt

SEQ ID NO: 3523760 - DNA, 25 bp, Homo sapien
cacttgctgctagaaggtactgcaa

SEQ ID NO: 3523761 - DNA, 25 bp, Homo sapien
atctagtgacatttcttattaaagc

SEQ ID NO: 3523762 - DNA, 25 bp, Homo sapien
agagaccattttctagcaagggcca

SEQ ID NO: 3523763 - DNA, 25 bp, Homo sapien
gttttcttatttggaatctagtgac

SEQ ID NO: 3523764 - DNA, 25 bp, Homo sapien
gctcctagcaggttaaagggaccac

SEQ ID NO: 3523765 - DNA, 25 bp, Homo sapien
tagccagcaccttggataatgaatg

SEQ ID NO: 3523766 - DNA, 25 bp, Homo sapien
tgtttggctggcaacactcttggct

SEQ ID NO: 3523767 - DNA, 25 bp, Homo sapien
gagctgggattactaccaattggaa

SEQ ID NO: 3523768 - DNA, 25 bp, Homo sapien
tgcccaccacgtttgagaggcagac

SEQ ID NO: 3523769 - DNA, 25 bp, Homo sapien
cagacatgtggccaactttggtctt

SEQ ID NO: 3523770 - DNA, 25 bp, Homo sapien
cttatcaaagtactgagcgattggc

SEQ ID NO: 3523771 - DNA, 25 bp, Homo sapien
caccacgtttgagaggcagacatgt

SEQ ID NO: 3523772 - DNA, 25 bp, Homo sapien
agctgtgcccaggttaatgacttgg

SEQ ID NO: 3523773 - DNA, 25 bp, Homo sapien
aaccagagagagccctgaatcaggc

SEQ ID NO: 3523774 - DNA, 25 bp, Homo sapien
caatcacccagactcttaaatggtt

SEQ ID NO: 3523775 - DNA, 25 bp, Homo sapien
ctttcctttgtcagtcccaccaatc

SEQ ID NO: 3523776 - DNA, 25 bp, Homo sapien
gaagaagcattcacaaatcctccac

SEQ ID NO: 3523777 - DNA, 25 bp, Homo sapien
agaagaagcattcacaaatcctcca

SEQ ID NO: 3523778 - DNA, 25 bp, Homo sapien
aagaagcattcacaaatcctccaca

SEQ ID NO: 3523779 - DNA, 25 bp, Homo sapien
gaagcattcacaaatcctccacatt

SEQ ID NO: 3523780 - DNA, 25 bp, Homo sapien
agccttggttaactacataaactgc

SEQ ID NO: 3523781 - DNA, 25 bp, Homo sapien
aactacataaactgcctgtacagtg

SEQ ID NO: 3523782 - DNA, 25 bp, Homo sapien
tgcctgtacagtgaagatttccaac

SEQ ID NO: 3523783 - DNA, 25 bp, Homo sapien
cataaactgcctgtacagtgaagat

SEQ ID NO: 3523784 - DNA, 25 bp, Homo sapien
agcgacttgaatgcggtaggccgcc

SEQ ID NO: 3523785 - DNA, 25 bp, Homo sapien
taacgccagagcaatagcttgtaaa

SEQ ID NO: 3523786 - DNA, 25 bp, Homo sapien
tccttccttagtgcaaaggagggca

SEQ ID NO: 3523787 - DNA, 25 bp, Homo sapien
agtgccccgctaacgccagagcaat

SEQ ID NO: 3523788 - DNA, 25 bp, Homo sapien
agtaacactggcgtcaggactgtca

SEQ ID NO: 3523789 - DNA, 25 bp, Homo sapien
taacactggcgtcaggactgtcacc

SEQ ID NO: 3523790 - DNA, 25 bp, Homo sapien
cttggcagtaacactggcgtcagga

SEQ ID NO: 3523791 - DNA, 25 bp, Homo sapien
ctggcgtcaggactgtcaccggatg

SEQ ID NO: 3523792 - DNA, 25 bp, Homo sapien
tccattctccacgtagcccctccct

SEQ ID NO: 3523793 - DNA, 25 bp, Homo sapien
accccgcagccgttcctgcgcgtca

SEQ ID NO: 3523794 - DNA, 25 bp, Homo sapien
ccttctagaatcttgcggctgaaag

SEQ ID NO: 3523795 - DNA, 25 bp, Homo sapien
ggagcccgaatagcgcctcagccaa

SEQ ID NO: 3523796 - DNA, 25 bp, Homo sapien
cggcagtctccacgccggaacccaa

SEQ ID NO: 3523797 - DNA, 25 bp, Homo sapien
tgcagagcctgacgcgcggcagtct

SEQ ID NO: 3523798 - DNA, 25 bp, Homo sapien
gaacccaagtgctcactgggccggg

SEQ ID NO: 3523799 - DNA, 25 bp, Homo sapien
gccagcgggcgaaatatcaggcctg

SEQ ID NO: 3523800 - DNA, 25 bp, Homo sapien
tcccggggcagccaagtctgtgcgc

SEQ ID NO: 3523801 - DNA, 25 bp, Homo sapien
gggcgccgcgtagactctccattcg

SEQ ID NO: 3523802 - DNA, 25 bp, Homo sapien
agccaagtctgtgcgccctggaacg

SEQ ID NO: 3523803 - DNA, 25 bp, Homo sapien
aacgtccgggcgccgcgtagactct

SEQ ID NO: 3523804 - DNA, 25 bp, Homo sapien
gccagaaccttccaaagtcgtgact

SEQ ID NO: 3523805 - DNA, 25 bp, Homo sapien
caaattgggaaactggccagaacct

SEQ ID NO: 3523806 - DNA, 25 bp, Homo sapien
gagggaggcctacaccgatctttgg

SEQ ID NO: 3523807 - DNA, 25 bp, Homo sapien
gtcttgagccctctcggaaactggg

SEQ ID NO: 3523808 - DNA, 25 bp, Homo sapien
gccagccggaacttgagcaggcacc

SEQ ID NO: 3523809 - DNA, 25 bp, Homo sapien
gtttaggcagaaacactcgtaggtc

SEQ ID NO: 3523810 - DNA, 25 bp, Homo sapien
cagcgccagccggaacttgagcagg

SEQ ID NO: 3523811 - DNA, 25 bp, Homo sapien
gcagaaacactcgtaggtccccttg

SEQ ID NO: 3523812 - DNA, 25 bp, Homo sapien
ctgggctgttggcagtagggaaggg

SEQ ID NO: 3523813 - DNA, 25 bp, Homo sapien
ggctgggctgttggcagtagggaag

SEQ ID NO: 3523814 - DNA, 25 bp, Homo sapien
agtgggctgggctgttggcagtagg

SEQ ID NO: 3523815 - DNA, 25 bp, Homo sapien
gctgttggcagtagggaagggaaaa

SEQ ID NO: 3523816 - DNA, 25 bp, Homo sapien
agctagaccggcaaggaaggagaga

SEQ ID NO: 3523817 - DNA, 25 bp, Homo sapien
gttccccgagctagaccggcaagga

SEQ ID NO: 3523818 - DNA, 25 bp, Homo sapien
tgtggctcctcatccccgaggccag

SEQ ID NO: 3523819 - DNA, 25 bp, Homo sapien
tgctgataatccccttctagtctcc

SEQ ID NO: 3523820 - DNA, 25 bp, Homo sapien
tgattatagctattgcattgtacac

SEQ ID NO: 3523821 - DNA, 25 bp, Homo sapien
ttatagctattgcattgtacacaca

SEQ ID NO: 3523822 - DNA, 25 bp, Homo sapien
tcctcttctgattatagctattgca

SEQ ID NO: 3523823 - DNA, 25 bp, Homo sapien
tgtacacacaacaagaaagtccatc

SEQ ID NO: 3523824 - DNA, 25 bp, Homo sapien
atccccgccacagtacggttgaaca

SEQ ID NO: 3523825 - DNA, 25 bp, Homo sapien
catccccgccacagtacggttgaac

SEQ ID NO: 3523826 - DNA, 25 bp, Homo sapien
ccatccccgccacagtacggttgaa

SEQ ID NO: 3523827 - DNA, 25 bp, Homo sapien
tccccgccacagtacggttgaacat

SEQ ID NO: 3523828 - DNA, 25 bp, Homo sapien
aacagtcccgaggcttggcggccct

SEQ ID NO: 3523829 - DNA, 25 bp, Homo sapien
tctggagactcgctgtacatgaggg

SEQ ID NO: 3523830 - DNA, 25 bp, Homo sapien
gtcccgaggcttggcggccctccat

SEQ ID NO: 3523831 - DNA, 25 bp, Homo sapien
tcaggggtctggagactcgctgtac

SEQ ID NO: 3523832 - DNA, 25 bp, Homo sapien
agtaaaagcaaatgtcaggagtgga

SEQ ID NO: 3523833 - DNA, 25 bp, Homo sapien
ggatccattattttgatagtcgtgt

SEQ ID NO: 3523834 - DNA, 25 bp, Homo sapien
gtctcaggatccattattttgatag

SEQ ID NO: 3523835 - DNA, 25 bp, Homo sapien
gagtggagggctgtgaagggtctca

SEQ ID NO: 3523836 - DNA, 25 bp, Homo sapien
ctgctctggtggagctcagggcaaa

SEQ ID NO: 3523837 - DNA, 25 bp, Homo sapien
ctctggtggagctcagggcaaaaga

SEQ ID NO: 3523838 - DNA, 25 bp, Homo sapien
tgctctggtggagctcagggcaaaa

SEQ ID NO: 3523839 - DNA, 25 bp, Homo sapien
ctggtggagctcagggcaaaagacc

SEQ ID NO: 3523840 - DNA, 25 bp, Homo sapien
gctctgcctccttgtttcacactat

SEQ ID NO: 3523841 - DNA, 25 bp, Homo sapien
ccacgatgcccagcttttctgtatt

SEQ ID NO: 3523842 - DNA, 25 bp, Homo sapien
aagctctgcctccttgtttcacact

SEQ ID NO: 3523843 - DNA, 25 bp, Homo sapien
gggactctaggcgcccgccacgatg

SEQ ID NO: 3523844 - DNA, 25 bp, Homo sapien
gattggattccagcctaacatcttc

SEQ ID NO: 3523845 - DNA, 25 bp, Homo sapien
tgaagatatagagatgatgattgga

SEQ ID NO: 3523846 - DNA, 25 bp, Homo sapien
aaagtctgctgggcatttgtaaccc

SEQ ID NO: 3523847 - DNA, 25 bp, Homo sapien
tgcttgtctatttgcaggcttgcaa

SEQ ID NO: 3523848 - DNA, 25 bp, Homo sapien
tttaacggcactctaatgagagctg

SEQ ID NO: 3523849 - DNA, 25 bp, Homo sapien
cttaggtaagtagcgagtgagccaa

SEQ ID NO: 3523850 - DNA, 25 bp, Homo sapien
gagagctgatcatatgtctgcagaa

SEQ ID NO: 3523851 - DNA, 25 bp, Homo sapien
cactgcactggtagtacattttagg

SEQ ID NO: 3523852 - DNA, 25 bp, Homo sapien
aattagcattctctcatgggactgg

SEQ ID NO: 3523853 - DNA, 25 bp, Homo sapien
gaaagccatattgatgagaagcccc

SEQ ID NO: 3523854 - DNA, 25 bp, Homo sapien
taattgtgagaacggagacctcatc

SEQ ID NO: 3523855 - DNA, 25 bp, Homo sapien
gcagacgtcgcacaatggtaccaaa

SEQ ID NO: 3523856 - DNA, 25 bp, Homo sapien
tctttgttcccttggctgtaggtca

SEQ ID NO: 3523857 - DNA, 25 bp, Homo sapien
tactgttgttgcacctggatttgag

SEQ ID NO: 3523858 - DNA, 25 bp, Homo sapien
tgacctttaaatggataggacttgg

SEQ ID NO: 3523859 - DNA, 25 bp, Homo sapien
cagaggctagcacaataactgttgc

SEQ ID NO: 3523860 - DNA, 25 bp, Homo sapien
taatacaacatggtgtatggtgtcc

SEQ ID NO: 3523861 - DNA, 25 bp, Homo sapien
acatggtgtatggtgtccttgtcca

SEQ ID NO: 3523862 - DNA, 25 bp, Homo sapien
aagatgtgtgattttaatgttagct

SEQ ID NO: 3523863 - DNA, 25 bp, Homo sapien
aatgcaacacgctccgggtggaagg

SEQ ID NO: 3523864 - DNA, 25 bp, Homo sapien
tcctttgggtcttagccgaatctga

SEQ ID NO: 3523865 - DNA, 25 bp, Homo sapien
tggagtcagctgacatcagtttacc

SEQ ID NO: 3523866 - DNA, 25 bp, Homo sapien
ctggattgtgcagtagacttcttga

SEQ ID NO: 3523867 - DNA, 25 bp, Homo sapien
cattcagctcaacttctggattgtg

SEQ ID NO: 3523868 - DNA, 25 bp, Homo sapien
gctgcgctgatttggtgaacttcac

SEQ ID NO: 3523869 - DNA, 25 bp, Homo sapien
caaaggaccacaacataaagggcca

SEQ ID NO: 3523870 - DNA, 25 bp, Homo sapien
cagcatgctagtaaagccttctctc

SEQ ID NO: 3523871 - DNA, 25 bp, Homo sapien
aaaatagggcagagaccagaacagc

SEQ ID NO: 3523872 - DNA, 25 bp, Homo sapien
tcgtttcggccgcaggtcctgggac

SEQ ID NO: 3523873 - DNA, 25 bp, Homo sapien
gcaacattggcgactgcggctcgga

SEQ ID NO: 3523874 - DNA, 25 bp, Homo sapien
tcctgggactccgacttcggtgctc

SEQ ID NO: 3523875 - DNA, 25 bp, Homo sapien
tgaactgtggcaacttcggcagccc

SEQ ID NO: 3523876 - DNA, 25 bp, Homo sapien
cgagctttgcgctggtctggggaac

SEQ ID NO: 3523877 - DNA, 25 bp, Homo sapien
tctggggaacggcggtagcgtggac

SEQ ID NO: 3523878 - DNA, 25 bp, Homo sapien
cggcggtagcgtggaccggttcctg

SEQ ID NO: 3523879 - DNA, 25 bp, Homo sapien
gcgtggaccggttcctgggatctct

SEQ ID NO: 3523880 - DNA, 25 bp, Homo sapien
ggactcacgggcttgaagatgtccc

SEQ ID NO: 3523881 - DNA, 25 bp, Homo sapien
tgagtgccccttctcaggggacccg

SEQ ID NO: 3523882 - DNA, 25 bp, Homo sapien
tgaagatgtccccgttgagtgcccc

SEQ ID NO: 3523883 - DNA, 25 bp, Homo sapien
tgctcggagtgacagggtgaaaata

SEQ ID NO: 3523884 - DNA, 25 bp, Homo sapien
aggagtgaggggcgcggccgagtag

SEQ ID NO: 3523885 - DNA, 25 bp, Homo sapien
tgaggggcgcggccgagtaggcgca

SEQ ID NO: 3523886 - DNA, 25 bp, Homo sapien
agtgaggggcgcggccgagtaggcg

SEQ ID NO: 3523887 - DNA, 25 bp, Homo sapien
gaggggcgcggccgagtaggcgcac

SEQ ID NO: 3523888 - DNA, 25 bp, Homo sapien
tgctgctagtaaccggctttccgtc

SEQ ID NO: 3523889 - DNA, 25 bp, Homo sapien
acttgtaaggtgctgtggaaaccac

SEQ ID NO: 3523890 - DNA, 25 bp, Homo sapien
gagttcccgaacttgtaaggtgctg

SEQ ID NO: 3523891 - DNA, 25 bp, Homo sapien
ccagggagtcgaaacccgcagcagg

SEQ ID NO: 3523892 - DNA, 25 bp, Homo sapien
gttttctcttgccataatcgcaggg

SEQ ID NO: 3523893 - DNA, 25 bp, Homo sapien
aaggatgacgcttgattgtctgaag

SEQ ID NO: 3523894 - DNA, 25 bp, Homo sapien
ggagcaaggatgacgcttgattgtc

SEQ ID NO: 3523895 - DNA, 25 bp, Homo sapien
gccataatcgcagggttccgtgtgg

SEQ ID NO: 3523896 - DNA, 25 bp, Homo sapien
tccggagacgcagttgtgaggactc

SEQ ID NO: 3523897 - DNA, 25 bp, Homo sapien
tgaggactctcagcgcatcttcttc

SEQ ID NO: 3523898 - DNA, 25 bp, Homo sapien
ttcgttctgcctccggagacgcagt

SEQ ID NO: 3523899 - DNA, 25 bp, Homo sapien
ttcggagactggcttgcagccgcct

SEQ ID NO: 3523900 - DNA, 25 bp, Homo sapien
gcttcttgagttcaggcccatccgg

SEQ ID NO: 3523901 - DNA, 25 bp, Homo sapien
tgcggagacgccaaggctcagtcta

SEQ ID NO: 3523902 - DNA, 25 bp, Homo sapien
gctcagtctagcttagaatagttgc

SEQ ID NO: 3523903 - DNA, 25 bp, Homo sapien
taaaaccaggacacgctgaaggagt

SEQ ID NO: 3523904 - DNA, 25 bp, Homo sapien
aaggctggcttgtgattatcagcat

SEQ ID NO: 3523905 - DNA, 25 bp, Homo sapien
gctgcgttgaaagtttctttgtcaa

SEQ ID NO: 3523906 - DNA, 25 bp, Homo sapien
tggcttgtgattatcagcatccaaa

SEQ ID NO: 3523907 - DNA, 25 bp, Homo sapien
caagtgggacaattgttgtctgggc

SEQ ID NO: 3523908 - DNA, 25 bp, Homo sapien
ctacataaggttcaagacagcccat

SEQ ID NO: 3523909 - DNA, 25 bp, Homo sapien
actacataaggttcaagacagccca

SEQ ID NO: 3523910 - DNA, 25 bp, Homo sapien
gattccagtggaattgaggaccagg

SEQ ID NO: 3523911 - DNA, 25 bp, Homo sapien
gagtctggtgtaacaggtaccagta

SEQ ID NO: 3523912 - DNA, 25 bp, Homo sapien
tggagctgttgaagtgtgaatatag

SEQ ID NO: 3523913 - DNA, 25 bp, Homo sapien
gtgaatatagtttccccgagtcctc

SEQ ID NO: 3523914 - DNA, 25 bp, Homo sapien
agatggatatcgtcaccgagcttga

SEQ ID NO: 3523915 - DNA, 25 bp, Homo sapien
gatatcgtcaccgagcttgaccttg

SEQ ID NO: 3523916 - DNA, 25 bp, Homo sapien
tcaccgagcttgaccttgtgaacac

SEQ ID NO: 3523917 - DNA, 25 bp, Homo sapien
gagcttgaccttgtgaacaccaccc

SEQ ID NO: 3523918 - DNA, 25 bp, Homo sapien
atgttctttagctccctggaaacag

SEQ ID NO: 3523919 - DNA, 25 bp, Homo sapien
aacagatctctagttcattgttttc

SEQ ID NO: 3523920 - DNA, 25 bp, Homo sapien
gagcatgttctttagctccctggaa

SEQ ID NO: 3523921 - DNA, 25 bp, Homo sapien
agttgagcatgttctttagctccct

SEQ ID NO: 3523922 - DNA, 25 bp, Homo sapien
agccaatatttctgctgagagctag

SEQ ID NO: 3523923 - DNA, 25 bp, Homo sapien
tcccagaagaggatactccaagccc

SEQ ID NO: 3523924 - DNA, 25 bp, Homo sapien
catagaagattgtaagatcacagcc

SEQ ID NO: 3523925 - DNA, 25 bp, Homo sapien
cacgtgtgttttccaggtaagcatc

SEQ ID NO: 3523926 - DNA, 25 bp, Homo sapien
taaaatcgtggtggtttggcagcac

SEQ ID NO: 3523927 - DNA, 25 bp, Homo sapien
ctaaaatcgtggtggtttggcagca

SEQ ID NO: 3523928 - DNA, 25 bp, Homo sapien
agggcccgttgacattgtccagtga

SEQ ID NO: 3523929 - DNA, 25 bp, Homo sapien
gcccgttgacattgtccagtgaggc

SEQ ID NO: 3523930 - DNA, 25 bp, Homo sapien
cttccagggcccgttgacattgtcc

SEQ ID NO: 3523931 - DNA, 25 bp, Homo sapien
ccagggcccgttgacattgtccagt

SEQ ID NO: 3523932 - DNA, 25 bp, Homo sapien
cagagcccttgagtgaaagtgaaat

SEQ ID NO: 3523933 - DNA, 25 bp, Homo sapien
gatgaaccgtcaatgttactatgtt

SEQ ID NO: 3523934 - DNA, 25 bp, Homo sapien
aggatgcacaccacgttgtcaggtt

SEQ ID NO: 3523935 - DNA, 25 bp, Homo sapien
gatgcacaccacgttgtcaggttgc

SEQ ID NO: 3523936 - DNA, 25 bp, Homo sapien
aattgcgggctttaccaccatctgc

SEQ ID NO: 3523937 - DNA, 25 bp, Homo sapien
tcataacagcaatcgaaagccatga

SEQ ID NO: 3523938 - DNA, 25 bp, Homo sapien
tgaatgttgctaagtagttgagtcc

SEQ ID NO: 3523939 - DNA, 25 bp, Homo sapien
gatcaactgaagatagcactgacat

SEQ ID NO: 3523940 - DNA, 25 bp, Homo sapien
gttcctggttctacaccattatatc

SEQ ID NO: 3523941 - DNA, 25 bp, Homo sapien
ggatgtgtacgatacacagcttccc

SEQ ID NO: 3523942 - DNA, 25 bp, Homo sapien
acaccattatatcctgaaggctgga

SEQ ID NO: 3523943 - DNA, 25 bp, Homo sapien
aatccaggatgtgtacgatacacag

SEQ ID NO: 3523944 - DNA, 25 bp, Homo sapien
cattgccagggctgatagaatcctc

SEQ ID NO: 3523945 - DNA, 25 bp, Homo sapien
tcaactctggccagttcaagaagct

SEQ ID NO: 3523946 - DNA, 25 bp, Homo sapien
ggactctatccctgctttgcccaga

SEQ ID NO: 3523947 - DNA, 25 bp, Homo sapien
tactgttggagacagaggtgtcctc

SEQ ID NO: 3523948 - DNA, 25 bp, Homo sapien
agtggctccaaccctgcccaaaggc

SEQ ID NO: 3523949 - DNA, 25 bp, Homo sapien
cccaggaacctgaatgcacaaacac

SEQ ID NO: 3523950 - DNA, 25 bp, Homo sapien
tcctgagcacaaggttgaaggctga

SEQ ID NO: 3523951 - DNA, 25 bp, Homo sapien
ttcctgtccggaaagcctcactgtc

SEQ ID NO: 3523952 - DNA, 25 bp, Homo sapien
tggacagatgcacacatttcttgga

SEQ ID NO: 3523953 - DNA, 25 bp, Homo sapien
tccatagagccactgatatgatgca

SEQ ID NO: 3523954 - DNA, 25 bp, Homo sapien
tagagccactgatatgatgcacttt

SEQ ID NO: 3523955 - DNA, 25 bp, Homo sapien
catagagccactgatatgatgcact

SEQ ID NO: 3523956 - DNA, 25 bp, Homo sapien
ggtccatagagccactgatatgatg

SEQ ID NO: 3523957 - DNA, 25 bp, Homo sapien
gtgtacatcgtcagtgctgttcata

SEQ ID NO: 3523958 - DNA, 25 bp, Homo sapien
tttctttgttgcctgagcatgccag

SEQ ID NO: 3523959 - DNA, 25 bp, Homo sapien
gttgcttcacaactcctctgatctg

SEQ ID NO: 3523960 - DNA, 25 bp, Homo sapien
ctttgttgcctgagcatgccagaca

SEQ ID NO: 3523961 - DNA, 25 bp, Homo sapien
ttcaggtccccagatgggactctgc

SEQ ID NO: 3523962 - DNA, 25 bp, Homo sapien
catctctgtgatgcgcaaggagctt

SEQ ID NO: 3523963 - DNA, 25 bp, Homo sapien
gctttgaggctagagcattcaggtc

SEQ ID NO: 3523964 - DNA, 25 bp, Homo sapien
caaggagcttgaagtgggaattggg

SEQ ID NO: 3523965 - DNA, 25 bp, Homo sapien
ggaccgcctgttctattcaccttag

SEQ ID NO: 3523966 - DNA, 25 bp, Homo sapien
gcacagccaatgagaagcacatctg

SEQ ID NO: 3523967 - DNA, 25 bp, Homo sapien
taacaaaataccctccaaagctgag

SEQ ID NO: 3523968 - DNA, 25 bp, Homo sapien
gagaagcacatctggcaggagaaca

SEQ ID NO: 3523969 - DNA, 25 bp, Homo sapien
gtattcatccccatagtctctcttc

SEQ ID NO: 3523970 - DNA, 25 bp, Homo sapien
ccattacagtctgtgttttctgata

SEQ ID NO: 3523971 - DNA, 25 bp, Homo sapien
cttcccattacagtctgtgttttct

SEQ ID NO: 3523972 - DNA, 25 bp, Homo sapien
gttgggggcatactgtattcatccc

SEQ ID NO: 3523973 - DNA, 25 bp, Homo sapien
cagccactaccagagtcttgaagac

SEQ ID NO: 3523974 - DNA, 25 bp, Homo sapien
tatgatgggcccaagggtactagga

SEQ ID NO: 3523975 - DNA, 25 bp, Homo sapien
ccggaagataattggtggtagcagc

SEQ ID NO: 3523976 - DNA, 25 bp, Homo sapien
ccaggtgatctaggaaggcaggccc

SEQ ID NO: 3523977 - DNA, 25 bp, Homo sapien
tactttggctggcatgtatagctcc

SEQ ID NO: 3523978 - DNA, 25 bp, Homo sapien
tcagcattagtctgtgccgtgcaca

SEQ ID NO: 3523979 - DNA, 25 bp, Homo sapien
tataggagtgatacaaggaacaatc

SEQ ID NO: 3523980 - DNA, 25 bp, Homo sapien
aaattctgtgcgtatccttagctaa

SEQ ID NO: 3523981 - DNA, 25 bp, Homo sapien
gttgatacatctgtatccagtttgt

SEQ ID NO: 3523982 - DNA, 25 bp, Homo sapien
tgttgatacatctgtatccagtttg

SEQ ID NO: 3523983 - DNA, 25 bp, Homo sapien
gcacagaattccctaatgcagactg

SEQ ID NO: 3523984 - DNA, 25 bp, Homo sapien
tgccaggaaggcagcatccggcaga

SEQ ID NO: 3523985 - DNA, 25 bp, Homo sapien
ctaatgcagactgcctcttggaaca

SEQ ID NO: 3523986 - DNA, 25 bp, Homo sapien
ttggaacagatttggcagggctgcc

SEQ ID NO: 3523987 - DNA, 25 bp, Homo sapien
aatacatcgccctctggcaggaggc

SEQ ID NO: 3523988 - DNA, 25 bp, Homo sapien
cactttccttgtgagaaccaccgga

SEQ ID NO: 3523989 - DNA, 25 bp, Homo sapien
ttctgcactttccttgtgagaacca

SEQ ID NO: 3523990 - DNA, 25 bp, Homo sapien
gagaaccaccggaggaatacatcgc

SEQ ID NO: 3523991 - DNA, 25 bp, Homo sapien
ccttttagggttaggcatgctggca

SEQ ID NO: 3523992 - DNA, 25 bp, Homo sapien
gcttgatcatgggagcagcctgcac

SEQ ID NO: 3523993 - DNA, 25 bp, Homo sapien
cagagaagaagctccgtgtataagc

SEQ ID NO: 3523994 - DNA, 25 bp, Homo sapien
gatgtagataccagatcagcccagg

SEQ ID NO: 3523995 - DNA, 25 bp, Homo sapien
ggtctggtgggcatgcaggtgtggt

SEQ ID NO: 3523996 - DNA, 25 bp, Homo sapien
gtgggcatgcaggtgtggtggtctc

SEQ ID NO: 3523997 - DNA, 25 bp, Homo sapien
ggcatgcaggtgtggtggtctctct

SEQ ID NO: 3523998 - DNA, 25 bp, Homo sapien
tgggcatgcaggtgtggtggtctct

SEQ ID NO: 3523999 - DNA, 25 bp, Homo sapien
tgtggtgatggtcccagaatcagcc

SEQ ID NO: 3524000 - DNA, 25 bp, Homo sapien
tcagccataacacttaaaattagca

SEQ ID NO: 3524001 - DNA, 25 bp, Homo sapien
tggtcccagaatcagccataacact

SEQ ID NO: 3524002 - DNA, 25 bp, Homo sapien
ggtgatggtcccagaatcagccata

SEQ ID NO: 3524003 - DNA, 25 bp, Homo sapien
tcttctggaaatctatagcagactg

SEQ ID NO: 3524004 - DNA, 25 bp, Homo sapien
acactgaaggcttcagtatctctat

SEQ ID NO: 3524005 - DNA, 25 bp, Homo sapien
aatctatagcagactgggtgatttc

SEQ ID NO: 3524006 - DNA, 25 bp, Homo sapien
tggaaatctatagcagactgggtga

SEQ ID NO: 3524007 - DNA, 25 bp, Homo sapien
agaaccttggttagttgcaagattc

SEQ ID NO: 3524008 - DNA, 25 bp, Homo sapien
tcagagctaggctactgctgtcact

SEQ ID NO: 3524009 - DNA, 25 bp, Homo sapien
gcaagattcacattatccatgcaca

SEQ ID NO: 3524010 - DNA, 25 bp, Homo sapien
ttggccacaagtcttatataattag

SEQ ID NO: 3524011 - DNA, 25 bp, Homo sapien
tataatcttcacttacataatatgt

SEQ ID NO: 3524012 - DNA, 25 bp, Homo sapien
ttagggaatgcagttatcaccaggt

SEQ ID NO: 3524013 - DNA, 25 bp, Homo sapien
aatgcagttatcaccaggtcgctcc

SEQ ID NO: 3524014 - DNA, 25 bp, Homo sapien
gtcgctcccctacgtcaattttata

SEQ ID NO: 3524015 - DNA, 25 bp, Homo sapien
tcagctcgcagagtattttgtggaa

SEQ ID NO: 3524016 - DNA, 25 bp, Homo sapien
ttcttcagctcgcagagtattttgt

SEQ ID NO: 3524017 - DNA, 25 bp, Homo sapien
gctcgcagagtattttgtggaataa

SEQ ID NO: 3524018 - DNA, 25 bp, Homo sapien
tgttggttcttaaaaccgtgatata

SEQ ID NO: 3524019 - DNA, 25 bp, Homo sapien
tcatttcatacttgacagcagaatt

SEQ ID NO: 3524020 - DNA, 25 bp, Homo sapien
ctcatttcatacttgacagcagaat

SEQ ID NO: 3524021 - DNA, 25 bp, Homo sapien
catacattcttgacatggcagtacc

SEQ ID NO: 3524022 - DNA, 25 bp, Homo sapien
ccaagagattattctgctgttgaac

SEQ ID NO: 3524023 - DNA, 25 bp, Homo sapien
cacagtgcccacttgaccatagaaa

SEQ ID NO: 3524024 - DNA, 25 bp, Homo sapien
tcttgacatggcagtaccaggacat

SEQ ID NO: 3524025 - DNA, 25 bp, Homo sapien
gaccctgcttagcttccaagatcag

SEQ ID NO: 3524026 - DNA, 25 bp, Homo sapien
gcttagcttccaagatcagatgata

SEQ ID NO: 3524027 - DNA, 25 bp, Homo sapien
tgaccctgcttagcttccaagatca

SEQ ID NO: 3524028 - DNA, 25 bp, Homo sapien
gacagcctacagcacccggtattcc

SEQ ID NO: 3524029 - DNA, 25 bp, Homo sapien
cagcctcaaggatgctctggagaag

SEQ ID NO: 3524030 - DNA, 25 bp, Homo sapien
ggtggattctgtcttccgcttaagc

SEQ ID NO: 3524031 - DNA, 25 bp, Homo sapien
ggaagaccgttcactgatgtctgac

SEQ ID NO: 3524032 - DNA, 25 bp, Homo sapien
taagcctagtgagaacagcctcaag

SEQ ID NO: 3524033 - DNA, 25 bp, Homo sapien
tggcaaactgcctctccatatattt

SEQ ID NO: 3524034 - DNA, 25 bp, Homo sapien
cttgtagcgtttgccttttgtgcgt

SEQ ID NO: 3524035 - DNA, 25 bp, Homo sapien
tagtcctggtttgtgtgaatgcaat

SEQ ID NO: 3524036 - DNA, 25 bp, Homo sapien
tggtattggcagaaagtgagcttgt

SEQ ID NO: 3524037 - DNA, 25 bp, Homo sapien
ttttgtgtccgagggctaagctgta

SEQ ID NO: 3524038 - DNA, 25 bp, Homo sapien
ctgcatgtgcacaggtgcctggtgt

SEQ ID NO: 3524039 - DNA, 25 bp, Homo sapien
tgcacaggtgcctggtgtggtgtca

SEQ ID NO: 3524040 - DNA, 25 bp, Homo sapien
gtgcctggtgtggtgtcattgtcct

SEQ ID NO: 3524041 - DNA, 25 bp, Homo sapien
cacaggtgcctggtgtggtgtcatt

SEQ ID NO: 3524042 - DNA, 25 bp, Homo sapien
gtctgcagcaagaatatgtccccat

SEQ ID NO: 3524043 - DNA, 25 bp, Homo sapien
agaaactttgttcgctgaagaacga

SEQ ID NO: 3524044 - DNA, 25 bp, Homo sapien
tcagaaactttgttcgctgaagaac

SEQ ID NO: 3524045 - DNA, 25 bp, Homo sapien
gcaagaatatgtccccatactcagt

SEQ ID NO: 3524046 - DNA, 25 bp, Homo sapien
tatgtctgcttggacactggatttt

SEQ ID NO: 3524047 - DNA, 25 bp, Homo sapien
gtatcattagccagtctttgacttc

SEQ ID NO: 3524048 - DNA, 25 bp, Homo sapien
tgtctgcttggacactggattttct

SEQ ID NO: 3524049 - DNA, 25 bp, Homo sapien
cagtatcattagccagtctttgact

SEQ ID NO: 3524050 - DNA, 25 bp, Homo sapien
cttgcaggtgatgacgtttgaaaac

SEQ ID NO: 3524051 - DNA, 25 bp, Homo sapien
ccagtactttgccatactgacctga

SEQ ID NO: 3524052 - DNA, 25 bp, Homo sapien
gccatactgacctgaggacttgcag

SEQ ID NO: 3524053 - DNA, 25 bp, Homo sapien
tcttggtggtgagagccagtacttt

SEQ ID NO: 3524054 - DNA, 25 bp, Homo sapien
ttttacaatcctctcttggataatg

SEQ ID NO: 3524055 - DNA, 25 bp, Homo sapien
ttctttgatctctgatgactcactt

SEQ ID NO: 3524056 - DNA, 25 bp, Homo sapien
tcactttgtctcacaacaatgatca

SEQ ID NO: 3524057 - DNA, 25 bp, Homo sapien
tgtctcacaacaatgatcagggtct

SEQ ID NO: 3524058 - DNA, 25 bp, Homo sapien
tcacaacaatgatcagggtcttcat

SEQ ID NO: 3524059 - DNA, 25 bp, Homo sapien
tccacattacgatcaaggacttctc

SEQ ID NO: 3524060 - DNA, 25 bp, Homo sapien
ctgggctcagtaggtcagagatgag

SEQ ID NO: 3524061 - DNA, 25 bp, Homo sapien
tctggccctgggtgaaatggtggtt

SEQ ID NO: 3524062 - DNA, 25 bp, Homo sapien
tcgctctccacattacgatcaagga

SEQ ID NO: 3524063 - DNA, 25 bp, Homo sapien
cgaccataccctccgggacatagag

SEQ ID NO: 3524064 - DNA, 25 bp, Homo sapien
tatagatgaccacgaccataccctc

SEQ ID NO: 3524065 - DNA, 25 bp, Homo sapien
ctggccataggagtttatagatgac

SEQ ID NO: 3524066 - DNA, 25 bp, Homo sapien
cctccgggacatagagaatgtgctt

SEQ ID NO: 3524067 - DNA, 25 bp, Homo sapien
gaggaggggtcctgcttccaaagct

SEQ ID NO: 3524068 - DNA, 25 bp, Homo sapien
actgtgaggtatctctatagatggg

SEQ ID NO: 3524069 - DNA, 25 bp, Homo sapien
gacgctggatagacaatgactgtga

SEQ ID NO: 3524070 - DNA, 25 bp, Homo sapien
ccaaagctgcactctgagatgtata

SEQ ID NO: 3524071 - DNA, 25 bp, Homo sapien
tatctctagtactgtcttgtggaat

SEQ ID NO: 3524072 - DNA, 25 bp, Homo sapien
ctgtgagtatctctagtactgtctt

SEQ ID NO: 3524073 - DNA, 25 bp, Homo sapien
tcttgtggaatgaagtgcatgggtt

SEQ ID NO: 3524074 - DNA, 25 bp, Homo sapien
gagtatctctagtactgtcttgtgg

SEQ ID NO: 3524075 - DNA, 25 bp, Homo sapien
atatttaaaaggagacctgaaggct

SEQ ID NO: 3524076 - DNA, 25 bp, Homo sapien
aggagacctgaaggcttcttgggtc

SEQ ID NO: 3524077 - DNA, 25 bp, Homo sapien
aaaggagacctgaaggcttcttggg

SEQ ID NO: 3524078 - DNA, 25 bp, Homo sapien
gagacctgaaggcttcttgggtcat

SEQ ID NO: 3524079 - DNA, 25 bp, Homo sapien
ttgagattttcactcgtatttcaag

SEQ ID NO: 3524080 - DNA, 25 bp, Homo sapien
atggcagcattttgatcccccgtgt

SEQ ID NO: 3524081 - DNA, 25 bp, Homo sapien
gcagcattttgatcccccgtgttac

SEQ ID NO: 3524082 - DNA, 25 bp, Homo sapien
gattttcactcgtatttcaaggatg

SEQ ID NO: 3524083 - DNA, 25 bp, Homo sapien
tgtggccaacattgtagcaattctt

SEQ ID NO: 3524084 - DNA, 25 bp, Homo sapien
actgtggccaacattgtagcaattc

SEQ ID NO: 3524085 - DNA, 25 bp, Homo sapien
cattgtagcaattcttttggatgac

SEQ ID NO: 3524086 - DNA, 25 bp, Homo sapien
ccaacattgtagcaattcttttgga

SEQ ID NO: 3524087 - DNA, 25 bp, Homo sapien
agatggaggcacaacttgcaagaca

SEQ ID NO: 3524088 - DNA, 25 bp, Homo sapien
aaccttaggaaacttatggtcatag

SEQ ID NO: 3524089 - DNA, 25 bp, Homo sapien
gcacaacttgcaagacaggaacagg

SEQ ID NO: 3524090 - DNA, 25 bp, Homo sapien
tatggtcatagtggaaggtgaagag

SEQ ID NO: 3524091 - DNA, 25 bp, Homo sapien
ccagcacaactgtgatgagaatgcc

SEQ ID NO: 3524092 - DNA, 25 bp, Homo sapien
cctggaaacagaacacgatgaatgt

SEQ ID NO: 3524093 - DNA, 25 bp, Homo sapien
cagcacaactgtgatgagaatgcca

SEQ ID NO: 3524094 - DNA, 25 bp, Homo sapien
ggaaacagaacacgatgaatgtggc

SEQ ID NO: 3524095 - DNA, 25 bp, Homo sapien
ccgccttagtgttgagttgtgagca

SEQ ID NO: 3524096 - DNA, 25 bp, Homo sapien
taggcttgccgccttagtgttgagt

SEQ ID NO: 3524097 - DNA, 25 bp, Homo sapien
ccttagtgttgagttgtgagcagcc

SEQ ID NO: 3524098 - DNA, 25 bp, Homo sapien
tgcagaggtaggcttgccgccttag

SEQ ID NO: 3524099 - DNA, 25 bp, Homo sapien
tactgtgcgtcagggaaaaagaaaa

SEQ ID NO: 3524100 - DNA, 25 bp, Homo sapien
tggtttatcaactggcaagggtact

SEQ ID NO: 3524101 - DNA, 25 bp, Homo sapien
caagggtactgtgcgtcagggaaaa

SEQ ID NO: 3524102 - DNA, 25 bp, Homo sapien
tcttggtggaacacagccagggttc

SEQ ID NO: 3524103 - DNA, 25 bp, Homo sapien
atgtgcagacaagctgcttcctgga

SEQ ID NO: 3524104 - DNA, 25 bp, Homo sapien
cctgtagtgctctgaaaccattcat

SEQ ID NO: 3524105 - DNA, 25 bp, Homo sapien
tatgagtatgtttgcattgagtgca

SEQ ID NO: 3524106 - DNA, 25 bp, Homo sapien
tgtagtgctctgaaaccattcatta

SEQ ID NO: 3524107 - DNA, 25 bp, Homo sapien
gcttgttggaggtatgaggtatcat

SEQ ID NO: 3524108 - DNA, 25 bp, Homo sapien
actgcttgttggaggtatgaggtat

SEQ ID NO: 3524109 - DNA, 25 bp, Homo sapien
tgcttgttggaggtatgaggtatca

SEQ ID NO: 3524110 - DNA, 25 bp, Homo sapien
ctgcttgttggaggtatgaggtatc

SEQ ID NO: 3524111 - DNA, 25 bp, Homo sapien
tgtgggaatcacagtcccacatcta

SEQ ID NO: 3524112 - DNA, 25 bp, Homo sapien
cttctacacatttgactcagtaggg

SEQ ID NO: 3524113 - DNA, 25 bp, Homo sapien
gatggttcttggctctctgggacca

SEQ ID NO: 3524114 - DNA, 25 bp, Homo sapien
aatcaagtgaaccaagatagatggt

SEQ ID NO: 3524115 - DNA, 25 bp, Homo sapien
cacttgtccatatgacagttccctt

SEQ ID NO: 3524116 - DNA, 25 bp, Homo sapien
taactgattcccacttgtccatatg

SEQ ID NO: 3524117 - DNA, 25 bp, Homo sapien
gacagttcccttcctgttgttagtg

SEQ ID NO: 3524118 - DNA, 25 bp, Homo sapien
gttcccttcctgttgttagtgatca

SEQ ID NO: 3524119 - DNA, 25 bp, Homo sapien
ttaggaacacatttagatgcctctt

SEQ ID NO: 3524120 - DNA, 25 bp, Homo sapien
tgaaaacttaaaagtgcagcaatat

SEQ ID NO: 3524121 - DNA, 25 bp, Homo sapien
gtaaggtcacaaattgaatcaagga

SEQ ID NO: 3524122 - DNA, 25 bp, Homo sapien
tggttacaaaacctaagcccatata

SEQ ID NO: 3524123 - DNA, 25 bp, Homo sapien
ggagaagaagttaaaatcagatgtt

SEQ ID NO: 3524124 - DNA, 25 bp, Homo sapien
tttggattcttatctggggctggac

SEQ ID NO: 3524125 - DNA, 25 bp, Homo sapien
cagatgttgaagcaagtttaaggtt

SEQ ID NO: 3524126 - DNA, 25 bp, Homo sapien
aactacaggagacgcccgaagtgga

SEQ ID NO: 3524127 - DNA, 25 bp, Homo sapien
caggtgacccagcagactaataaat

SEQ ID NO: 3524128 - DNA, 25 bp, Homo sapien
cagaccttggtgagcactataaacc

SEQ ID NO: 3524129 - DNA, 25 bp, Homo sapien
cagtggcttagagcatcctgatgta

SEQ ID NO: 3524130 - DNA, 25 bp, Homo sapien
taggtgtccctttgtataaccagag

SEQ ID NO: 3524131 - DNA, 25 bp, Homo sapien
ttcactcttgactggcaatttgaaa

SEQ ID NO: 3524132 - DNA, 25 bp, Homo sapien
tcactcttgactggcaatttgaaaa

SEQ ID NO: 3524133 - DNA, 25 bp, Homo sapien
atttgaaaaggtattgtatttctgt

SEQ ID NO: 3524134 - DNA, 25 bp, Homo sapien
gatgctcagagtctcttgtgggtag

SEQ ID NO: 3524135 - DNA, 25 bp, Homo sapien
aatgatgctcagagtctcttgtggg

SEQ ID NO: 3524136 - DNA, 25 bp, Homo sapien
gagaatgatgctcagagtctcttgt

SEQ ID NO: 3524137 - DNA, 25 bp, Homo sapien
gaatgatgctcagagtctcttgtgg

SEQ ID NO: 3524138 - DNA, 25 bp, Homo sapien
gacatcttttgccaaatagtaagct

SEQ ID NO: 3524139 - DNA, 25 bp, Homo sapien
catttcttatgtaaatgttgacatc

SEQ ID NO: 3524140 - DNA, 25 bp, Homo sapien
ttcctgctttggatggccatttctt

SEQ ID NO: 3524141 - DNA, 25 bp, Homo sapien
tggatggccatttcttatgtaaatg

SEQ ID NO: 3524142 - DNA, 25 bp, Homo sapien
aatgttctggcgactgtgtcgttga

SEQ ID NO: 3524143 - DNA, 25 bp, Homo sapien
gcaattgtgtagatgctttaccagg

SEQ ID NO: 3524144 - DNA, 25 bp, Homo sapien
accaggagctgggttaatccatcaa

SEQ ID NO: 3524145 - DNA, 25 bp, Homo sapien
tgtcgttgagtaactgcaattgtgt

SEQ ID NO: 3524146 - DNA, 25 bp, Homo sapien
tggagaaggagattgagagcaggta

SEQ ID NO: 3524147 - DNA, 25 bp, Homo sapien
tacttctcacattctcttattcttg

SEQ ID NO: 3524148 - DNA, 25 bp, Homo sapien
tcattggattgtgacaactccatct

SEQ ID NO: 3524149 - DNA, 25 bp, Homo sapien
tctgcccccctataatgagtaagca

SEQ ID NO: 3524150 - DNA, 25 bp, Homo sapien
gctctgtttccctggaaatataagc

SEQ ID NO: 3524151 - DNA, 25 bp, Homo sapien
agtagcttggtttagccttctggaa

SEQ ID NO: 3524152 - DNA, 25 bp, Homo sapien
tgagcccagaagtagcttggtttag

SEQ ID NO: 3524153 - DNA, 25 bp, Homo sapien
gcccagaagtagcttggtttagcct

SEQ ID NO: 3524154 - DNA, 25 bp, Homo sapien
ccagaagtagcttggtttagccttc

SEQ ID NO: 3524155 - DNA, 25 bp, Homo sapien
cttcctaaagatagaagatgtcttt

SEQ ID NO: 3524156 - DNA, 25 bp, Homo sapien
tcaatatcactgtttgtgtgctttg

SEQ ID NO: 3524157 - DNA, 25 bp, Homo sapien
atcatcttcctaaagatagaagatg

SEQ ID NO: 3524158 - DNA, 25 bp, Homo sapien
catcttcctaaagatagaagatgtc

SEQ ID NO: 3524159 - DNA, 25 bp, Homo sapien
tgagatctgcacgaccagcaatagg

SEQ ID NO: 3524160 - DNA, 25 bp, Homo sapien
agatctgcacgaccagcaataggaa

SEQ ID NO: 3524161 - DNA, 25 bp, Homo sapien
cagcaataggaataactggcacctt

SEQ ID NO: 3524162 - DNA, 25 bp, Homo sapien
caataggaataactggcaccttcat

SEQ ID NO: 3524163 - DNA, 25 bp, Homo sapien
tggggttgacacacagttcttagag

SEQ ID NO: 3524164 - DNA, 25 bp, Homo sapien
gagtcacttgaagctatttcacaac

SEQ ID NO: 3524165 - DNA, 25 bp, Homo sapien
catacttcccttggatgaaaaatgg

SEQ ID NO: 3524166 - DNA, 25 bp, Homo sapien
tctctgctaaagatccagcatactt

SEQ ID NO: 3524167 - DNA, 25 bp, Homo sapien
ggcccgaccctttggcttctcaaga

SEQ ID NO: 3524168 - DNA, 25 bp, Homo sapien
caggcccgaccctttggcttctcaa

SEQ ID NO: 3524169 - DNA, 25 bp, Homo sapien
aggcccgaccctttggcttctcaag

SEQ ID NO: 3524170 - DNA, 25 bp, Homo sapien
cactgttccccatagtttcagagat

SEQ ID NO: 3524171 - DNA, 25 bp, Homo sapien
tcttggctttctccactccaggcta

SEQ ID NO: 3524172 - DNA, 25 bp, Homo sapien
taagcaagagctatttcacatgaaa

SEQ ID NO: 3524173 - DNA, 25 bp, Homo sapien
tgggaaattgggactataaactgcc

SEQ ID NO: 3524174 - DNA, 25 bp, Homo sapien
tagtgttaacgtgctaggtggttga

SEQ ID NO: 3524175 - DNA, 25 bp, Homo sapien
aagattggcaggtacttttatatcc

SEQ ID NO: 3524176 - DNA, 25 bp, Homo sapien
tatccttttctggtagtacctttga

SEQ ID NO: 3524177 - DNA, 25 bp, Homo sapien
ttttctggtagtacctttgactatg

SEQ ID NO: 3524178 - DNA, 25 bp, Homo sapien
ctactttttgacatcagtggaaatt

SEQ ID NO: 3524179 - DNA, 25 bp, Homo sapien
gacatcagtggaaattacattggcc

SEQ ID NO: 3524180 - DNA, 25 bp, Homo sapien
tctctgaaaaaaactcctcgattgt

SEQ ID NO: 3524181 - DNA, 25 bp, Homo sapien
ctcgattgtgtctcaaagatggagc

SEQ ID NO: 3524182 - DNA, 25 bp, Homo sapien
cactggcatgcccataggtggcttt

SEQ ID NO: 3524183 - DNA, 25 bp, Homo sapien
gcatgcccataggtggctttataga

SEQ ID NO: 3524184 - DNA, 25 bp, Homo sapien
cataggtggctttatagatgggcac

SEQ ID NO: 3524185 - DNA, 25 bp, Homo sapien
gtgtcctccactggcatgcccatag

SEQ ID NO: 3524186 - DNA, 25 bp, Homo sapien
ggatgatggagatgcgagataaacc

SEQ ID NO: 3524187 - DNA, 25 bp, Homo sapien
tggatggacaatctggacctcctct

SEQ ID NO: 3524188 - DNA, 25 bp, Homo sapien
tagttttgcaactgcatcgtggaaa

SEQ ID NO: 3524189 - DNA, 25 bp, Homo sapien
gagatatagtaaatgtgggcttcag

SEQ ID NO: 3524190 - DNA, 25 bp, Homo sapien
gttcacaaaaccatgtgctataaat

SEQ ID NO: 3524191 - DNA, 25 bp, Homo sapien
cagttcacaaaaccatgtgctataa

SEQ ID NO: 3524192 - DNA, 25 bp, Homo sapien
agttcacaaaaccatgtgctataaa

SEQ ID NO: 3524193 - DNA, 25 bp, Homo sapien
ttcacaaaaccatgtgctataaatg

SEQ ID NO: 3524194 - DNA, 25 bp, Homo sapien
atacccaaaggactataaatcatgc

SEQ ID NO: 3524195 - DNA, 25 bp, Homo sapien
cccagccatcccatttactgggtat

SEQ ID NO: 3524196 - DNA, 25 bp, Homo sapien
tgtttattgcggcactattcacaat

SEQ ID NO: 3524197 - DNA, 25 bp, Homo sapien
tgctataaggacacatgcacacgta

SEQ ID NO: 3524198 - DNA, 25 bp, Homo sapien
gaaggctctctgtattggtcaactc

SEQ ID NO: 3524199 - DNA, 25 bp, Homo sapien
caggaggaaggctctctgtattggt

SEQ ID NO: 3524200 - DNA, 25 bp, Homo sapien
cctctgcttctataaccagagatac

SEQ ID NO: 3524201 - DNA, 25 bp, Homo sapien
gagttgtggcaagttgtaagttttc

SEQ ID NO: 3524202 - DNA, 25 bp, Homo sapien
gaggatttaatccaattcagttttg

SEQ ID NO: 3524203 - DNA, 25 bp, Homo sapien
ccttagggagagaggatttaatcca

SEQ ID NO: 3524204 - DNA, 25 bp, Homo sapien
ggagagaggatttaatccaattcag

SEQ ID NO: 3524205 - DNA, 25 bp, Homo sapien
ggatttaatccaattcagttttgtc

SEQ ID NO: 3524206 - DNA, 25 bp, Homo sapien
cctatcctttttgttcttattcaat

SEQ ID NO: 3524207 - DNA, 25 bp, Homo sapien
tcatgtggcaagtagatgtatcaca

SEQ ID NO: 3524208 - DNA, 25 bp, Homo sapien
tttttagctttaggattcatgtggc

SEQ ID NO: 3524209 - DNA, 25 bp, Homo sapien
tggcaagtagatgtatcacagtggc

SEQ ID NO: 3524210 - DNA, 25 bp, Homo sapien
caagtagatgtatcacagtggccca

SEQ ID NO: 3524211 - DNA, 25 bp, Homo sapien
tgtagagccctatcaccctcataaa

SEQ ID NO: 3524212 - DNA, 25 bp, Homo sapien
ctgtagagccctatcaccctcataa

SEQ ID NO: 3524213 - DNA, 25 bp, Homo sapien
aatgtgtgggctggttgcatcataa

SEQ ID NO: 3524214 - DNA, 25 bp, Homo sapien
gagtggtggtacagatttgagtata

SEQ ID NO: 3524215 - DNA, 25 bp, Homo sapien
tcacgtggaaatccttggcaaatcg

SEQ ID NO: 3524216 - DNA, 25 bp, Homo sapien
caaaaccatgtgaattcatgtgaga

SEQ ID NO: 3524217 - DNA, 25 bp, Homo sapien
gccctcctgctctggtgactgtcct

SEQ ID NO: 3524218 - DNA, 25 bp, Homo sapien
acctgttggaacgattctgcctgca

SEQ ID NO: 3524219 - DNA, 25 bp, Homo sapien
ctttgactgtctctgcccctctggg

SEQ ID NO: 3524220 - DNA, 25 bp, Homo sapien
caacctggcagggggctttgactgt

SEQ ID NO: 3524221 - DNA, 25 bp, Homo sapien
gagcaattgctgcatctctacattt

SEQ ID NO: 3524222 - DNA, 25 bp, Homo sapien
cagtaatttgttccagtaaatcctt

SEQ ID NO: 3524223 - DNA, 25 bp, Homo sapien
tctgacacctttagcatgacatctt

SEQ ID NO: 3524224 - DNA, 25 bp, Homo sapien
tcaaaatttgctgagcaattgctgc

SEQ ID NO: 3524225 - DNA, 25 bp, Homo sapien
tcctcttattttccagttcttgttc

SEQ ID NO: 3524226 - DNA, 25 bp, Homo sapien
tcttcaggggtcctcttattttcca

SEQ ID NO: 3524227 - DNA, 25 bp, Homo sapien
tcttattttccagttcttgttccat

SEQ ID NO: 3524228 - DNA, 25 bp, Homo sapien
ctgctttaagcaggtttcttcaggg

SEQ ID NO: 3524229 - DNA, 25 bp, Homo sapien
tctccagaagtacttggcagccttt

SEQ ID NO: 3524230 - DNA, 25 bp, Homo sapien
gaatcttgcaataggcacagctggg

SEQ ID NO: 3524231 - DNA, 25 bp, Homo sapien
tgttcatcacacaccaaatatcaca

SEQ ID NO: 3524232 - DNA, 25 bp, Homo sapien
tatcacaatggttgagagcacttgg

SEQ ID NO: 3524233 - DNA, 25 bp, Homo sapien
tcagtccttggccacaccagatgtg

SEQ ID NO: 3524234 - DNA, 25 bp, Homo sapien
cagtccttggccacaccagatgtgc

SEQ ID NO: 3524235 - DNA, 25 bp, Homo sapien
tcaaatgagctcttccccaccctta

SEQ ID NO: 3524236 - DNA, 25 bp, Homo sapien
caaatgagctcttccccacccttac

SEQ ID NO: 3524237 - DNA, 25 bp, Homo sapien
ttctctcttctaggataagcactcc

SEQ ID NO: 3524238 - DNA, 25 bp, Homo sapien
taggataagcactccttggatgctc

SEQ ID NO: 3524239 - DNA, 25 bp, Homo sapien
gatggcagtctttgtccattctctc

SEQ ID NO: 3524240 - DNA, 25 bp, Homo sapien
ttgttgcgtttttctaaagccagaa

SEQ ID NO: 3524241 - DNA, 25 bp, Homo sapien
ccacctcccctcaggattcactggc

SEQ ID NO: 3524242 - DNA, 25 bp, Homo sapien
catttggtttctaacttgaagggca

SEQ ID NO: 3524243 - DNA, 25 bp, Homo sapien
aattcagacccttgaagtttgccag

SEQ ID NO: 3524244 - DNA, 25 bp, Homo sapien
tggcaattcagacccttgaagtttg

SEQ ID NO: 3524245 - DNA, 25 bp, Homo sapien
ttgatgatagatcaaatttttctgc

SEQ ID NO: 3524246 - DNA, 25 bp, Homo sapien
atgatagatcaaatttttctgcttc

SEQ ID NO: 3524247 - DNA, 25 bp, Homo sapien
cttttgatgatagatcaaatttttc

SEQ ID NO: 3524248 - DNA, 25 bp, Homo sapien
cgtgtttcttttgatgatagatcaa

SEQ ID NO: 3524249 - DNA, 25 bp, Homo sapien
atgtgattgacctgtgtagcaacac

SEQ ID NO: 3524250 - DNA, 25 bp, Homo sapien
tgtgattgacctgtgtagcaacact

SEQ ID NO: 3524251 - DNA, 25 bp, Homo sapien
gtgattgacctgtgtagcaacactg

SEQ ID NO: 3524252 - DNA, 25 bp, Homo sapien
tttgaatgcgatatggtttttccac

SEQ ID NO: 3524253 - DNA, 25 bp, Homo sapien
tggagaagattctctggggtattct

SEQ ID NO: 3524254 - DNA, 25 bp, Homo sapien
gacacttttgaatgcgatatggttt

SEQ ID NO: 3524255 - DNA, 25 bp, Homo sapien
tgaaagacacttttgaatgcgatat

SEQ ID NO: 3524256 - DNA, 25 bp, Homo sapien
gggtagtgttactcaatggaaaatc

SEQ ID NO: 3524257 - DNA, 25 bp, Homo sapien
atttgagagcaaatacgggcttttt

SEQ ID NO: 3524258 - DNA, 25 bp, Homo sapien
gaagctgggtagtgttactcaatgg

SEQ ID NO: 3524259 - DNA, 25 bp, Homo sapien
gggaatttgagagcaaatacgggct

SEQ ID NO: 3524260 - DNA, 25 bp, Homo sapien
ccaggagtgcatgaatatgaggagt

SEQ ID NO: 3524261 - DNA, 25 bp, Homo sapien
ttctatttgtgccaggagtgcatga

SEQ ID NO: 3524262 - DNA, 25 bp, Homo sapien
tggaaaatatcgtggttggtttgga

SEQ ID NO: 3524263 - DNA, 25 bp, Homo sapien
tggaaatggaaaatatcgtggttgg

SEQ ID NO: 3524264 - DNA, 25 bp, Homo sapien
tctgactgtctctggttcttaaagc

SEQ ID NO: 3524265 - DNA, 25 bp, Homo sapien
ggaaacatgtccttgtttatccaag

SEQ ID NO: 3524266 - DNA, 25 bp, Homo sapien
gttcttaaagccttcgttcagctct

SEQ ID NO: 3524267 - DNA, 25 bp, Homo sapien
cagctcttttcgttcagggaaataa

SEQ ID NO: 3524268 - DNA, 25 bp, Homo sapien
ctgttttaatttcattgtctactaa

SEQ ID NO: 3524269 - DNA, 25 bp, Homo sapien
tataatctgtgtcatttttggttac

SEQ ID NO: 3524270 - DNA, 25 bp, Homo sapien
tgtgtcatttttggttacctttcca

SEQ ID NO: 3524271 - DNA, 25 bp, Homo sapien
tcatttttggttacctttccactga

SEQ ID NO: 3524272 - DNA, 25 bp, Homo sapien
tttttgacgtagtctgtcactgtcg

SEQ ID NO: 3524273 - DNA, 25 bp, Homo sapien
cttttctgaatgtgcagaaacatca

SEQ ID NO: 3524274 - DNA, 25 bp, Homo sapien
tttctgaatgtgcagaaacatcact

SEQ ID NO: 3524275 - DNA, 25 bp, Homo sapien
ttctgaatgtgcagaaacatcactt

SEQ ID NO: 3524276 - DNA, 25 bp, Homo sapien
ttttctgaatgtgcagaaacatcac

SEQ ID NO: 3524277 - DNA, 25 bp, Homo sapien
gattggaaaatttcagtggaccatt

SEQ ID NO: 3524278 - DNA, 25 bp, Homo sapien
tgaagcagtagaaggtagattggaa

SEQ ID NO: 3524279 - DNA, 25 bp, Homo sapien
gaagcagtagaaggtagattggaaa

SEQ ID NO: 3524280 - DNA, 25 bp, Homo sapien
tgagtagctatcaacaccttctgtt

SEQ ID NO: 3524281 - DNA, 25 bp, Homo sapien
gcattgcgttgtttgttatctaacc

SEQ ID NO: 3524282 - DNA, 25 bp, Homo sapien
gatttaattcatggcccaaacccca

SEQ ID NO: 3524283 - DNA, 25 bp, Homo sapien
tctggttcacctgaattgagtagct

SEQ ID NO: 3524284 - DNA, 25 bp, Homo sapien
tgttaccatcatcccagtcggtgga

SEQ ID NO: 3524285 - DNA, 25 bp, Homo sapien
tcccagtcggtggaaatgctttgaa

SEQ ID NO: 3524286 - DNA, 25 bp, Homo sapien
agaagcttgttaccatcatcccagt

SEQ ID NO: 3524287 - DNA, 25 bp, Homo sapien
tgaaagggaggagctaaacccacca

SEQ ID NO: 3524288 - DNA, 25 bp, Homo sapien
ctctccctctttctgatgttctcct

SEQ ID NO: 3524289 - DNA, 25 bp, Homo sapien
taatataacactattctctctctcc

SEQ ID NO: 3524290 - DNA, 25 bp, Homo sapien
ctccctctttctgatgttctccttg

SEQ ID NO: 3524291 - DNA, 25 bp, Homo sapien
cctttgctaatataacactattctc

SEQ ID NO: 3524292 - DNA, 25 bp, Homo sapien
aacgttcagcaatatacacttcaac

SEQ ID NO: 3524293 - DNA, 25 bp, Homo sapien
gcaatatacacttcaacagtaacag

SEQ ID NO: 3524294 - DNA, 25 bp, Homo sapien
cttcaacagtaacagggacagtgtg

SEQ ID NO: 3524295 - DNA, 25 bp, Homo sapien
acagtaacagggacagtgtggaaaa

SEQ ID NO: 3524296 - DNA, 25 bp, Homo sapien
ggtcacagtctgtatcctctctgaa

SEQ ID NO: 3524297 - DNA, 25 bp, Homo sapien
tctctgaagcaatgattttccccat

SEQ ID NO: 3524298 - DNA, 25 bp, Homo sapien
atacgtcttcttggtcacagtctgt

SEQ ID NO: 3524299 - DNA, 25 bp, Homo sapien
gtctgtatcctctctgaagcaatga

SEQ ID NO: 3524300 - DNA, 25 bp, Homo sapien
actgggtcagcatttggaaagggat

SEQ ID NO: 3524301 - DNA, 25 bp, Homo sapien
gaaagggatgaggggactgccccat

SEQ ID NO: 3524302 - DNA, 25 bp, Homo sapien
ctcattgacctgggtgactgggtca

SEQ ID NO: 3524303 - DNA, 25 bp, Homo sapien
ggtgactgggtcagcatttggaaag

SEQ ID NO: 3524304 - DNA, 25 bp, Homo sapien
tttcctgttggtacaagcaccctgc

SEQ ID NO: 3524305 - DNA, 25 bp, Homo sapien
gattttcctgttggtacaagcaccc

SEQ ID NO: 3524306 - DNA, 25 bp, Homo sapien
tcctgttggtacaagcaccctgctc

SEQ ID NO: 3524307 - DNA, 25 bp, Homo sapien
ggattttcctgttggtacaagcacc

SEQ ID NO: 3524308 - DNA, 25 bp, Homo sapien
tttttggttgcgtctctgcccggct

SEQ ID NO: 3524309 - DNA, 25 bp, Homo sapien
ttttggttgcgtctctgcccggctt

SEQ ID NO: 3524310 - DNA, 25 bp, Homo sapien
tggttgcgtctctgcccggctttgg

SEQ ID NO: 3524311 - DNA, 25 bp, Homo sapien
ttggttgcgtctctgcccggctttg

SEQ ID NO: 3524312 - DNA, 25 bp, Homo sapien
caaccttatccccataagtggaagt

SEQ ID NO: 3524313 - DNA, 25 bp, Homo sapien
tgtcagtacatagcatccttcaaaa

SEQ ID NO: 3524314 - DNA, 25 bp, Homo sapien
gctctccacagatgataatgtcagt

SEQ ID NO: 3524315 - DNA, 25 bp, Homo sapien
tttgccctggaatccatgttctcaa

SEQ ID NO: 3524316 - DNA, 25 bp, Homo sapien
caggaaccatgatctgtgactgcca

SEQ ID NO: 3524317 - DNA, 25 bp, Homo sapien
gaattcaaatatagaccaagagggc

SEQ ID NO: 3524318 - DNA, 25 bp, Homo sapien
cagatggacatgcagagaaatagcc

SEQ ID NO: 3524319 - DNA, 25 bp, Homo sapien
ggacaggacgtgcagccaataacat

SEQ ID NO: 3524320 - DNA, 25 bp, Homo sapien
tgcatacttgtgttcctttcccctg

SEQ ID NO: 3524321 - DNA, 25 bp, Homo sapien
cttgtgttcctttcccctgctttca

SEQ ID NO: 3524322 - DNA, 25 bp, Homo sapien
catacttgtgttcctttcccctgct

SEQ ID NO: 3524323 - DNA, 25 bp, Homo sapien
tgtgttcctttcccctgctttcact

SEQ ID NO: 3524324 - DNA, 25 bp, Homo sapien
taattctgactttggcagaagcatc

SEQ ID NO: 3524325 - DNA, 25 bp, Homo sapien
gataattctgactttggcagaagca

SEQ ID NO: 3524326 - DNA, 25 bp, Homo sapien
ataattctgactttggcagaagcat

SEQ ID NO: 3524327 - DNA, 25 bp, Homo sapien
gaaaaagtaatagctcttggccgga

SEQ ID NO: 3524328 - DNA, 25 bp, Homo sapien
ttgttagtggtcaagtcaattgcca

SEQ ID NO: 3524329 - DNA, 25 bp, Homo sapien
gtaatagctcttggccggagaaagt

SEQ ID NO: 3524330 - DNA, 25 bp, Homo sapien
gttgttagtggtcaagtcaattgcc

SEQ ID NO: 3524331 - DNA, 25 bp, Homo sapien
gaaaacctgtgacactacaacgtgg

SEQ ID NO: 3524332 - DNA, 25 bp, Homo sapien
tacaacgtgggagatcctgcatcac

SEQ ID NO: 3524333 - DNA, 25 bp, Homo sapien
tggcccctgagtatgtatgttcaac

SEQ ID NO: 3524334 - DNA, 25 bp, Homo sapien
gatcctgtgtctgcactaaggcacg

SEQ ID NO: 3524335 - DNA, 25 bp, Homo sapien
tccaagtaagaaggttgttggtagc

SEQ ID NO: 3524336 - DNA, 25 bp, Homo sapien
gctaatgtggtaccttgcaaagcct

SEQ ID NO: 3524337 - DNA, 25 bp, Homo sapien
taagaaggttgttggtagctaatgt

SEQ ID NO: 3524338 - DNA, 25 bp, Homo sapien
ttggtagctaatgtggtaccttgca

SEQ ID NO: 3524339 - DNA, 25 bp, Homo sapien
tatcaaaagaatacccttacagtac

SEQ ID NO: 3524340 - DNA, 25 bp, Homo sapien
caaaagaatacccttacagtactgt

SEQ ID NO: 3524341 - DNA, 25 bp, Homo sapien
actatcaaaagaatacccttacagt

SEQ ID NO: 3524342 - DNA, 25 bp, Homo sapien
atcaaaagaatacccttacagtact

SEQ ID NO: 3524343 - DNA, 25 bp, Homo sapien
ggtggttcaccaaagcagctgttaa

SEQ ID NO: 3524344 - DNA, 25 bp, Homo sapien
tggccacgacaagctgaaattgagg

SEQ ID NO: 3524345 - DNA, 25 bp, Homo sapien
tcttgataatagaggtgccaggcac

SEQ ID NO: 3524346 - DNA, 25 bp, Homo sapien
taatcttatctagacctggccacga

SEQ ID NO: 3524347 - DNA, 25 bp, Homo sapien
tgggcttcagatattaggcaatcgt

SEQ ID NO: 3524348 - DNA, 25 bp, Homo sapien
tcccagcggcttgaaagatcatgaa

SEQ ID NO: 3524349 - DNA, 25 bp, Homo sapien
tcagggccaagtgggccatatctgt

SEQ ID NO: 3524350 - DNA, 25 bp, Homo sapien
aaataaatgattaggtcccagcggc

SEQ ID NO: 3524351 - DNA, 25 bp, Homo sapien
taagaaatcagcttgtggaacttcc

SEQ ID NO: 3524352 - DNA, 25 bp, Homo sapien
ctatcatttgcagccatcgatggaa

SEQ ID NO: 3524353 - DNA, 25 bp, Homo sapien
gagtagattggtggctaccagaagc

SEQ ID NO: 3524354 - DNA, 25 bp, Homo sapien
ggaaaagtgcccattgttggatgaa

SEQ ID NO: 3524355 - DNA, 25 bp, Homo sapien
cactcatgtgcaggaggtaaaaatg

SEQ ID NO: 3524356 - DNA, 25 bp, Homo sapien
tcagttggattacctacagaagaag

SEQ ID NO: 3524357 - DNA, 25 bp, Homo sapien
gatgtcactgagctatcactggaga

SEQ ID NO: 3524358 - DNA, 25 bp, Homo sapien
tacttctgaatgcagtgttaggcac

SEQ ID NO: 3524359 - DNA, 25 bp, Homo sapien
cactggagatagctataacttactg

SEQ ID NO: 3524360 - DNA, 25 bp, Homo sapien
ctctcaattggcgaggcatggtggc

SEQ ID NO: 3524361 - DNA, 25 bp, Homo sapien
aacaaacacgtttttcataaggcag

SEQ ID NO: 3524362 - DNA, 25 bp, Homo sapien
taaaaccattagctctcaattggcg

SEQ ID NO: 3524363 - DNA, 25 bp, Homo sapien
acacgtttttcataaggcagcagga

SEQ ID NO: 3524364 - DNA, 25 bp, Homo sapien
tactcatcctgcttctacgtagctt

SEQ ID NO: 3524365 - DNA, 25 bp, Homo sapien
atcctgcttctacgtagctttcttt

SEQ ID NO: 3524366 - DNA, 25 bp, Homo sapien
ttactcatcctgcttctacgtagct

SEQ ID NO: 3524367 - DNA, 25 bp, Homo sapien
actcatcctgcttctacgtagcttt

SEQ ID NO: 3524368 - DNA, 25 bp, Homo sapien
gaatcccagatagttcttcctggta

SEQ ID NO: 3524369 - DNA, 25 bp, Homo sapien
cttagtagttaatggatgcaggaca

SEQ ID NO: 3524370 - DNA, 25 bp, Homo sapien
tcacttttcttctggaatgccaatt

SEQ ID NO: 3524371 - DNA, 25 bp, Homo sapien
tctcgagactgaaattttgggtttc

SEQ ID NO: 3524372 - DNA, 25 bp, Homo sapien
tctggtaccaaagccgggcagagac

SEQ ID NO: 3524373 - DNA, 25 bp, Homo sapien
cattctggtaccaaagccgggcaga

SEQ ID NO: 3524374 - DNA, 25 bp, Homo sapien
atcattctggtaccaaagccgggca

SEQ ID NO: 3524375 - DNA, 25 bp, Homo sapien
gcatcattctggtaccaaagccggg

SEQ ID NO: 3524376 - DNA, 25 bp, Homo sapien
cacaaatggcatgtgctgacatcct

SEQ ID NO: 3524377 - DNA, 25 bp, Homo sapien
tatggaaattgtcccctgaagctac

SEQ ID NO: 3524378 - DNA, 25 bp, Homo sapien
taagtttgcagctttgggtgggaca

SEQ ID NO: 3524379 - DNA, 25 bp, Homo sapien
catcctcatactttattagggaaca

SEQ ID NO: 3524380 - DNA, 25 bp, Homo sapien
cactggtccagaaccttaaggcaga

SEQ ID NO: 3524381 - DNA, 25 bp, Homo sapien
tttcctgaacgtttattgtgttgca

SEQ ID NO: 3524382 - DNA, 25 bp, Homo sapien
tgttgtcataatcatcgtcgtcatc

SEQ ID NO: 3524383 - DNA, 25 bp, Homo sapien
ccttaaggcagatgatctatttcat

SEQ ID NO: 3524384 - DNA, 25 bp, Homo sapien
tcagatttgagagcaataagtcttc

SEQ ID NO: 3524385 - DNA, 25 bp, Homo sapien
gcccctccgtttaaaagccatcaga

SEQ ID NO: 3524386 - DNA, 25 bp, Homo sapien
ggcttctgtgatattccggcccctc

SEQ ID NO: 3524387 - DNA, 25 bp, Homo sapien
taaaagccatcagatttgagagcaa

SEQ ID NO: 3524388 - DNA, 25 bp, Homo sapien
gacatcatattgacgctacactgcc

SEQ ID NO: 3524389 - DNA, 25 bp, Homo sapien
tcagcaatggaaaagcgaacatgaa

SEQ ID NO: 3524390 - DNA, 25 bp, Homo sapien
tgacaagaagtctgtctgacaagac

SEQ ID NO: 3524391 - DNA, 25 bp, Homo sapien
gaggaagacatcatattgacgctac

SEQ ID NO: 3524392 - DNA, 25 bp, Homo sapien
ttcccgtgggctctcatgtctatct

SEQ ID NO: 3524393 - DNA, 25 bp, Homo sapien
tgggctctcatgtctatctgagcca

SEQ ID NO: 3524394 - DNA, 25 bp, Homo sapien
cccgtgggctctcatgtctatctga

SEQ ID NO: 3524395 - DNA, 25 bp, Homo sapien
gctctcatgtctatctgagccacta

SEQ ID NO: 3524396 - DNA, 25 bp, Homo sapien
gctgcattaagtgcttgagaactga

SEQ ID NO: 3524397 - DNA, 25 bp, Homo sapien
tgcttgagaactgatccccagccac

SEQ ID NO: 3524398 - DNA, 25 bp, Homo sapien
ttgagaactgatccccagccacagg

SEQ ID NO: 3524399 - DNA, 25 bp, Homo sapien
tttgctgcattaagtgcttgagaac

SEQ ID NO: 3524400 - DNA, 25 bp, Homo sapien
ctttccttttggactaccacaacat

SEQ ID NO: 3524401 - DNA, 25 bp, Homo sapien
cttttggactaccacaacatacttc

SEQ ID NO: 3524402 - DNA, 25 bp, Homo sapien
acaacatacttccacaccactctct

SEQ ID NO: 3524403 - DNA, 25 bp, Homo sapien
atacttccacaccactctctccaac

SEQ ID NO: 3524404 - DNA, 25 bp, Homo sapien
tggatggggactccgtagttcatgt

SEQ ID NO: 3524405 - DNA, 25 bp, Homo sapien
cagtgccttggatggggactccgta

SEQ ID NO: 3524406 - DNA, 25 bp, Homo sapien
ccttggatggggactccgtagttca

SEQ ID NO: 3524407 - DNA, 25 bp, Homo sapien
gccttggatggggactccgtagttc

SEQ ID NO: 3524408 - DNA, 25 bp, Homo sapien
tttattagattgcagtccagttgtc

SEQ ID NO: 3524409 - DNA, 25 bp, Homo sapien
tgaaggattatcttgcagaggaccc

SEQ ID NO: 3524410 - DNA, 25 bp, Homo sapien
catgtgtcaggaatcagggttaggt

SEQ ID NO: 3524411 - DNA, 25 bp, Homo sapien
tgtcaactacgtctgtggtgtcatc

SEQ ID NO: 3524412 - DNA, 25 bp, Homo sapien
ctagaggtaagtcagatgtggcccc

SEQ ID NO: 3524413 - DNA, 25 bp, Homo sapien
tacatgactgagctctccccagtgg

SEQ ID NO: 3524414 - DNA, 25 bp, Homo sapien
ccccagtggctctttagtacctgga

SEQ ID NO: 3524415 - DNA, 25 bp, Homo sapien
tagatagtattggattacatgactg

SEQ ID NO: 3524416 - DNA, 25 bp, Homo sapien
ttctgatgcaggttaggagtaacaa

SEQ ID NO: 3524417 - DNA, 25 bp, Homo sapien
aagaataatttctggcatggcagcc

SEQ ID NO: 3524418 - DNA, 25 bp, Homo sapien
taataagcgaactagaggattctga

SEQ ID NO: 3524419 - DNA, 25 bp, Homo sapien
ctccttttaataagcgaactagagg

SEQ ID NO: 3524420 - DNA, 25 bp, Homo sapien
tttttgaccaaagagatctatctgg

SEQ ID NO: 3524421 - DNA, 25 bp, Homo sapien
tcaatcctcctaactggtgagtggg

SEQ ID NO: 3524422 - DNA, 25 bp, Homo sapien
ggtgagtgggacatcaacagctgtc

SEQ ID NO: 3524423 - DNA, 25 bp, Homo sapien
gaagtcgactgggatttcctggaaa

SEQ ID NO: 3524424 - DNA, 25 bp, Homo sapien
tcagcattctggtaatggaatacag

SEQ ID NO: 3524425 - DNA, 25 bp, Homo sapien
cagccttcagcattctggtaatgga

SEQ ID NO: 3524426 - DNA, 25 bp, Homo sapien
gagcttggtgcctgatccttgctcc

SEQ ID NO: 3524427 - DNA, 25 bp, Homo sapien
ctccatattggggtacagaaaattc

SEQ ID NO: 3524428 - DNA, 25 bp, Homo sapien
tgcacagatgcgctggaaaccagcc

SEQ ID NO: 3524429 - DNA, 25 bp, Homo sapien
atcatgcacagatgcgctggaaacc

SEQ ID NO: 3524430 - DNA, 25 bp, Homo sapien
ttccctaaatttatgtggaatcatg

SEQ ID NO: 3524431 - DNA, 25 bp, Homo sapien
catgcacagatgcgctggaaaccag

SEQ ID NO: 3524432 - DNA, 25 bp, Homo sapien
tccagaaatgctcaggctctcaatt

SEQ ID NO: 3524433 - DNA, 25 bp, Homo sapien
agtcacttttaagattgcaagagtc

SEQ ID NO: 3524434 - DNA, 25 bp, Homo sapien
tcatgcatattgtcccctgagttgt

SEQ ID NO: 3524435 - DNA, 25 bp, Homo sapien
cctttagcaaggaaatttactgtag

SEQ ID NO: 3524436 - DNA, 25 bp, Homo sapien
tgccccagaagtaactacttgttgt

SEQ ID NO: 3524437 - DNA, 25 bp, Homo sapien
ttgccccagaagtaactacttgttg

SEQ ID NO: 3524438 - DNA, 25 bp, Homo sapien
caccctcaaactcttctactttgcc

SEQ ID NO: 3524439 - DNA, 25 bp, Homo sapien
tccattaatgtgcaatttctcctcc

SEQ ID NO: 3524440 - DNA, 25 bp, Homo sapien
ttcctctccattaatgtgcaatttc

SEQ ID NO: 3524441 - DNA, 25 bp, Homo sapien
cattaatgtgcaatttctcctcctg

SEQ ID NO: 3524442 - DNA, 25 bp, Homo sapien
ctctccattaatgtgcaatttctcc

SEQ ID NO: 3524443 - DNA, 25 bp, Homo sapien
ctgttgagtacttctgccgggagga

SEQ ID NO: 3524444 - DNA, 25 bp, Homo sapien
tagactctatgagattagcgatgga

SEQ ID NO: 3524445 - DNA, 25 bp, Homo sapien
gttgacaacaggaatgatcccactg

SEQ ID NO: 3524446 - DNA, 25 bp, Homo sapien
gaaatatgcaaggagatagactcta

SEQ ID NO: 3524447 - DNA, 25 bp, Homo sapien
tgatcactcttgacgtccaaacctc

SEQ ID NO: 3524448 - DNA, 25 bp, Homo sapien
gctataaatttagacctgatcactc

SEQ ID NO: 3524449 - DNA, 25 bp, Homo sapien
ataatgatgactctaagagctataa

SEQ ID NO: 3524450 - DNA, 25 bp, Homo sapien
aagagctataaatttagacctgatc

SEQ ID NO: 3524451 - DNA, 25 bp, Homo sapien
cactcgtttggaatatcttcatcac

SEQ ID NO: 3524452 - DNA, 25 bp, Homo sapien
aaaattgtcttctatcctcactcgt

SEQ ID NO: 3524453 - DNA, 25 bp, Homo sapien
tggcaatattaacaagtacccaaag

SEQ ID NO: 3524454 - DNA, 25 bp, Homo sapien
tttggttgataatgtggctggatac

SEQ ID NO: 3524455 - DNA, 25 bp, Homo sapien
gtctgatccgcacaaacctaagtta

SEQ ID NO: 3524456 - DNA, 25 bp, Homo sapien
tgagtggctcctcagtacattgcct

SEQ ID NO: 3524457 - DNA, 25 bp, Homo sapien
tccagtgggaggcacatagtattac

SEQ ID NO: 3524458 - DNA, 25 bp, Homo sapien
taagttgacaggttgccctacacgc

SEQ ID NO: 3524459 - DNA, 25 bp, Homo sapien
tcatagtgtgagatacagctgcaaa

SEQ ID NO: 3524460 - DNA, 25 bp, Homo sapien
tatggtagaactcttcactgggttg

SEQ ID NO: 3524461 - DNA, 25 bp, Homo sapien
tatctaccatatgctggacactgtg

SEQ ID NO: 3524462 - DNA, 25 bp, Homo sapien
gacagatacggcttccactttcatg

SEQ ID NO: 3524463 - DNA, 25 bp, Homo sapien
tacccctgggttgtaccacagaatg

SEQ ID NO: 3524464 - DNA, 25 bp, Homo sapien
aagaaattgctggttttcactcaag

SEQ ID NO: 3524465 - DNA, 25 bp, Homo sapien
tttctacaagattacactactcata

SEQ ID NO: 3524466 - DNA, 25 bp, Homo sapien
gaaaagtgtactgactactggaata

SEQ ID NO: 3524467 - DNA, 25 bp, Homo sapien
gcaatcactatcagctgtggaacac

SEQ ID NO: 3524468 - DNA, 25 bp, Homo sapien
aaatatcttgattgctgtaaaggtc

SEQ ID NO: 3524469 - DNA, 25 bp, Homo sapien
gaatttattcaaggcaatcactatc

SEQ ID NO: 3524470 - DNA, 25 bp, Homo sapien
ggtctatctccctagtaaaaatgaa

SEQ ID NO: 3524471 - DNA, 25 bp, Homo sapien
taaacacttcatttacatataaggc

SEQ ID NO: 3524472 - DNA, 25 bp, Homo sapien
taacctagttaacggcagaagctgc

SEQ ID NO: 3524473 - DNA, 25 bp, Homo sapien
caaggttgtgatttattaacctagt

SEQ ID NO: 3524474 - DNA, 25 bp, Homo sapien
gaagctgcactaaaacctggatctt

SEQ ID NO: 3524475 - DNA, 25 bp, Homo sapien
taaacatttgtctgtgcgtcaatgc

SEQ ID NO: 3524476 - DNA, 25 bp, Homo sapien
tgctttaaagggacatactatgtgg

SEQ ID NO: 3524477 - DNA, 25 bp, Homo sapien
caaaggcatatattcgtatttactg

SEQ ID NO: 3524478 - DNA, 25 bp, Homo sapien
gcattaatttaatatccaaaggcat

SEQ ID NO: 3524479 - DNA, 25 bp, Homo sapien
gaaaatccgtgacactacatgccag

SEQ ID NO: 3524480 - DNA, 25 bp, Homo sapien
ccatggctttaagtggagtacttcc

SEQ ID NO: 3524481 - DNA, 25 bp, Homo sapien
taacaaggccaaactccagataggc

SEQ ID NO: 3524482 - DNA, 25 bp, Homo sapien
gaaaactcttcactactgagggagg

SEQ ID NO: 3524483 - DNA, 25 bp, Homo sapien
tactttggacacacgaaggcatata

SEQ ID NO: 3524484 - DNA, 25 bp, Homo sapien
attatactttggacacacgaaggca

SEQ ID NO: 3524485 - DNA, 25 bp, Homo sapien
ataattatactttggacacacgaag

SEQ ID NO: 3524486 - DNA, 25 bp, Homo sapien
tatatttggtgagaacattgtaatt

SEQ ID NO: 3524487 - DNA, 25 bp, Homo sapien
gcaccactacgaagagctaataaga

SEQ ID NO: 3524488 - DNA, 25 bp, Homo sapien
gaactgaggcctgcgctgagaccca

SEQ ID NO: 3524489 - DNA, 25 bp, Homo sapien
ctatacagaactgaggcctgcgctg

SEQ ID NO: 3524490 - DNA, 25 bp, Homo sapien
ttcctaaatgcaccactacgaagag

SEQ ID NO: 3524491 - DNA, 25 bp, Homo sapien
gcgctttacaggtctccagggcagt

SEQ ID NO: 3524492 - DNA, 25 bp, Homo sapien
tgggtggcggctagtcactaaagtc

SEQ ID NO: 3524493 - DNA, 25 bp, Homo sapien
tctgaaggtcatagtgcaaacgttg

SEQ ID NO: 3524494 - DNA, 25 bp, Homo sapien
aacgttgaccccagtctgttagcag

SEQ ID NO: 3524495 - DNA, 25 bp, Homo sapien
aagttgttctgaggcaagcgctccc

SEQ ID NO: 3524496 - DNA, 25 bp, Homo sapien
gaagttcgctaatcccggaactgga

SEQ ID NO: 3524497 - DNA, 25 bp, Homo sapien
ttgaagcgcagcatgtgcaccgcag

SEQ ID NO: 3524498 - DNA, 25 bp, Homo sapien
caccaggtggtaacgagctgcatcc

SEQ ID NO: 3524499 - DNA, 25 bp, Homo sapien
tagtgcttgagaccgccagaagctc

SEQ ID NO: 3524500 - DNA, 25 bp, Homo sapien
tcccaggtgctgacgtaggtagtgc

SEQ ID NO: 3524501 - DNA, 25 bp, Homo sapien
ccgccagaagctcggaaaagcgatc

SEQ ID NO: 3524502 - DNA, 25 bp, Homo sapien
gaaaagcgatccaggtgctgcagaa

SEQ ID NO: 3524503 - DNA, 25 bp, Homo sapien
gccctacttccgctttcaccttgga

SEQ ID NO: 3524504 - DNA, 25 bp, Homo sapien
cttggagacggcgactctctgcgta

SEQ ID NO: 3524505 - DNA, 25 bp, Homo sapien
tttcaccttggagacggcgactctc

SEQ ID NO: 3524506 - DNA, 25 bp, Homo sapien
gaggtgcgcgaaggccctacttccg

SEQ ID NO: 3524507 - DNA, 25 bp, Homo sapien
aacatccgcgaaatgatacgcctct

SEQ ID NO: 3524508 - DNA, 25 bp, Homo sapien
tgattggaacatccgcgaaatgata

SEQ ID NO: 3524509 - DNA, 25 bp, Homo sapien
tggaacatccgcgaaatgatacgcc

SEQ ID NO: 3524510 - DNA, 25 bp, Homo sapien
ctgattggaacatccgcgaaatgat

SEQ ID NO: 3524511 - DNA, 25 bp, Homo sapien
cgagaatttccggaaccacgtgcga

SEQ ID NO: 3524512 - DNA, 25 bp, Homo sapien
accacgtgcgagatgatgccagtca

SEQ ID NO: 3524513 - DNA, 25 bp, Homo sapien
tccggaaccacgtgcgagatgatgc

SEQ ID NO: 3524514 - DNA, 25 bp, Homo sapien
gaatttccggaaccacgtgcgagat

SEQ ID NO: 3524515 - DNA, 25 bp, Homo sapien
ttaatcacttccagatctatatgaa

SEQ ID NO: 3524516 - DNA, 25 bp, Homo sapien
taatcacttccagatctatatgaag

SEQ ID NO: 3524517 - DNA, 25 bp, Homo sapien
aatcacttccagatctatatgaaga

SEQ ID NO: 3524518 - DNA, 25 bp, Homo sapien
attcccagaggcatacctaacttgc

SEQ ID NO: 3524519 - DNA, 25 bp, Homo sapien
ttgccgcctacgctgattcccagag

SEQ ID NO: 3524520 - DNA, 25 bp, Homo sapien
tgtctttgctctcccatggaatgtc

SEQ ID NO: 3524521 - DNA, 25 bp, Homo sapien
gggccactgaaccttgccgcctacg

SEQ ID NO: 3524522 - DNA, 25 bp, Homo sapien
tctggaacaggagactaaaacccca

SEQ ID NO: 3524523 - DNA, 25 bp, Homo sapien
agccaacgtagcctgtgattctcaa

SEQ ID NO: 3524524 - DNA, 25 bp, Homo sapien
cataatacagtggtagggcctagac

SEQ ID NO: 3524525 - DNA, 25 bp, Homo sapien
taaataaatagcaatggtagggcca

SEQ ID NO: 3524526 - DNA, 25 bp, Homo sapien
gcatttttaggtggcgttcatgtac

SEQ ID NO: 3524527 - DNA, 25 bp, Homo sapien
cattgtcgttcaaaaagcttttctt

SEQ ID NO: 3524528 - DNA, 25 bp, Homo sapien
tcattgtcgttcaaaaagcttttct

SEQ ID NO: 3524529 - DNA, 25 bp, Homo sapien
cagtttgcatttttaggtggcgttc

SEQ ID NO: 3524530 - DNA, 25 bp, Homo sapien
ggcctttagtggatatagccctttc

SEQ ID NO: 3524531 - DNA, 25 bp, Homo sapien
ctggagctgagctacaccagtgggc

SEQ ID NO: 3524532 - DNA, 25 bp, Homo sapien
tttcagtcctagaataaagagaggg

SEQ ID NO: 3524533 - DNA, 25 bp, Homo sapien
caccagtgggctctttttcagtcct

SEQ ID NO: 3524534 - DNA, 25 bp, Homo sapien
ttgcatcattactgagggataaaaa

SEQ ID NO: 3524535 - DNA, 25 bp, Homo sapien
gcatcattactgagggataaaaaac

SEQ ID NO: 3524536 - DNA, 25 bp, Homo sapien
catctaagcccgatgtactctccca

SEQ ID NO: 3524537 - DNA, 25 bp, Homo sapien
aaaaatccccccatagcactcagaa

SEQ ID NO: 3524538 - DNA, 25 bp, Homo sapien
tcctacctagcctgtctgattcact

SEQ ID NO: 3524539 - DNA, 25 bp, Homo sapien
ggtgaaggaagagtgtgtcttttct

SEQ ID NO: 3524540 - DNA, 25 bp, Homo sapien
tcagagctgtgcttaaccaggaagt

SEQ ID NO: 3524541 - DNA, 25 bp, Homo sapien
aagtgccagatggtactgaatcact

SEQ ID NO: 3524542 - DNA, 25 bp, Homo sapien
tggacaggttgctcaatctctctga

SEQ ID NO: 3524543 - DNA, 25 bp, Homo sapien
tgctctcaaaaagctcccagacttg

SEQ ID NO: 3524544 - DNA, 25 bp, Homo sapien
tctgatccttggcaattaaactgca

SEQ ID NO: 3524545 - DNA, 25 bp, Homo sapien
gaaatgtatgacgtaaatccaggct

SEQ ID NO: 3524546 - DNA, 25 bp, Homo sapien
gccaaggagctaggtgatcagtctc

SEQ ID NO: 3524547 - DNA, 25 bp, Homo sapien
tgcagccaaggagctaggtgatcag

SEQ ID NO: 3524548 - DNA, 25 bp, Homo sapien
caaggagctaggtgatcagtctcaa

SEQ ID NO: 3524549 - DNA, 25 bp, Homo sapien
cagccaaggagctaggtgatcagtc

SEQ ID NO: 3524550 - DNA, 25 bp, Homo sapien
ctgatatttgcaagaagccgatgac

SEQ ID NO: 3524551 - DNA, 25 bp, Homo sapien
tctagatctcaagctgacgccaagt

SEQ ID NO: 3524552 - DNA, 25 bp, Homo sapien
taggctctatgatgtgacttcccag

SEQ ID NO: 3524553 - DNA, 25 bp, Homo sapien
tacaggcatatagaaagcaggtcca

SEQ ID NO: 3524554 - DNA, 25 bp, Homo sapien
caaggtactgtaagaattctcggaa

SEQ ID NO: 3524555 - DNA, 25 bp, Homo sapien
atttgttgaaacacgacccctgccg

SEQ ID NO: 3524556 - DNA, 25 bp, Homo sapien
gctaactcagacattttgcaccaag

SEQ ID NO: 3524557 - DNA, 25 bp, Homo sapien
cgaatgctgcagatctcccgtgtgg

SEQ ID NO: 3524558 - DNA, 25 bp, Homo sapien
tgttacagacttacgtatacccttg

SEQ ID NO: 3524559 - DNA, 25 bp, Homo sapien
ggaaggctgccttaaagtatatctc

SEQ ID NO: 3524560 - DNA, 25 bp, Homo sapien
tacatgagctgacatacgttgatac

SEQ ID NO: 3524561 - DNA, 25 bp, Homo sapien
tatacccttgtatacctgggacagg

SEQ ID NO: 3524562 - DNA, 25 bp, Homo sapien
caatgtagcatctctatgacccgtc

SEQ ID NO: 3524563 - DNA, 25 bp, Homo sapien
tgcattcctaagctccatgatttcc

SEQ ID NO: 3524564 - DNA, 25 bp, Homo sapien
gctaaaatcagagtgtcaccaaggc

SEQ ID NO: 3524565 - DNA, 25 bp, Homo sapien
tctctttctctcataggttggaaag

SEQ ID NO: 3524566 - DNA, 25 bp, Homo sapien
aaaacatggtcacaactggcactgg

SEQ ID NO: 3524567 - DNA, 25 bp, Homo sapien
ttgaagactggccaggacatagacc

SEQ ID NO: 3524568 - DNA, 25 bp, Homo sapien
caatcggcaccaaccagggatgtga

SEQ ID NO: 3524569 - DNA, 25 bp, Homo sapien
catgattagcttggatctacctgga

SEQ ID NO: 3524570 - DNA, 25 bp, Homo sapien
aaatgatccaagacacaatgcccac

SEQ ID NO: 3524571 - DNA, 25 bp, Homo sapien
gggacagaatagtacctacaggata

SEQ ID NO: 3524572 - DNA, 25 bp, Homo sapien
ggatcaccaaatgtagctcaaagga

SEQ ID NO: 3524573 - DNA, 25 bp, Homo sapien
tcgactagagttgacttcctcaaag

SEQ ID NO: 3524574 - DNA, 25 bp, Homo sapien
aagcataactagaagagggagacta

SEQ ID NO: 3524575 - DNA, 25 bp, Homo sapien
tctgttatacatacaaatgccttgt

SEQ ID NO: 3524576 - DNA, 25 bp, Homo sapien
tctcaacacatataggcagtcatgg

SEQ ID NO: 3524577 - DNA, 25 bp, Homo sapien
gggagactagaacaataaaaagcca

SEQ ID NO: 3524578 - DNA, 25 bp, Homo sapien
tagcataatgcttatcagtgaaaat

SEQ ID NO: 3524579 - DNA, 25 bp, Homo sapien
atagcataatgcttatcagtgaaaa

SEQ ID NO: 3524580 - DNA, 25 bp, Homo sapien
ggtctattcatgcagaaattattca

SEQ ID NO: 3524581 - DNA, 25 bp, Homo sapien
gcataatgcttatcagtgaaaataa

SEQ ID NO: 3524582 - DNA, 25 bp, Homo sapien
catgcagcacgttacaaagaggccg

SEQ ID NO: 3524583 - DNA, 25 bp, Homo sapien
gagaaagctgatcacactcacggtg

SEQ ID NO: 3524584 - DNA, 25 bp, Homo sapien
taatttagggctcaacatgtggcct

SEQ ID NO: 3524585 - DNA, 25 bp, Homo sapien
ctcacggtgacaggccatggttgga

SEQ ID NO: 3524586 - DNA, 25 bp, Homo sapien
cgcgatgcagcacaaatataagtag

SEQ ID NO: 3524587 - DNA, 25 bp, Homo sapien
tactacaaagatccttacagagctg

SEQ ID NO: 3524588 - DNA, 25 bp, Homo sapien
taaaaacagatgtaacgcgatgcag

SEQ ID NO: 3524589 - DNA, 25 bp, Homo sapien
tacaatagaacatcactgccctctg

SEQ ID NO: 3524590 - DNA, 25 bp, Homo sapien
taaacagttattggcagtagattct

SEQ ID NO: 3524591 - DNA, 25 bp, Homo sapien
taatgaaaagtctagccattctcta

SEQ ID NO: 3524592 - DNA, 25 bp, Homo sapien
ttttttagcattgcacttaagggca

SEQ ID NO: 3524593 - DNA, 25 bp, Homo sapien
gaaattaaattgatgaagcccactt

SEQ ID NO: 3524594 - DNA, 25 bp, Homo sapien
cacagtgaacctgctattcagtagc

SEQ ID NO: 3524595 - DNA, 25 bp, Homo sapien
gactctgaagttggtaaccactgca

SEQ ID NO: 3524596 - DNA, 25 bp, Homo sapien
gtagcaagagcctaaatatccaata

SEQ ID NO: 3524597 - DNA, 25 bp, Homo sapien
tatccaataatcagtaaaggaacac

SEQ ID NO: 3524598 - DNA, 25 bp, Homo sapien
acatctaaaattccccgagatgcag

SEQ ID NO: 3524599 - DNA, 25 bp, Homo sapien
gcccggatgtagcaatttgtttttc

SEQ ID NO: 3524600 - DNA, 25 bp, Homo sapien
tttcttgcacagattgaacatctaa

SEQ ID NO: 3524601 - DNA, 25 bp, Homo sapien
tgaacatctaaaattccccgagatg

SEQ ID NO: 3524602 - DNA, 25 bp, Homo sapien
ctctgcagcctctgcaagctttgct

SEQ ID NO: 3524603 - DNA, 25 bp, Homo sapien
tctgcagcctctgcaagctttgctc

SEQ ID NO: 3524604 - DNA, 25 bp, Homo sapien
agcctctgcaagctttgctcttttc

SEQ ID NO: 3524605 - DNA, 25 bp, Homo sapien
tgcagcctctgcaagctttgctctt

SEQ ID NO: 3524606 - DNA, 25 bp, Homo sapien
gatggtagacacagttgaaaacgca

SEQ ID NO: 3524607 - DNA, 25 bp, Homo sapien
aaagatggtagacacagttgaaaac

SEQ ID NO: 3524608 - DNA, 25 bp, Homo sapien
tttaaaagatggtagacacagttga

SEQ ID NO: 3524609 - DNA, 25 bp, Homo sapien
taaaagatggtagacacagttgaaa

SEQ ID NO: 3524610 - DNA, 25 bp, Homo sapien
aaagagctcccggagaaagcaatgt

SEQ ID NO: 3524611 - DNA, 25 bp, Homo sapien
gagaaagcaatgtcttttcgcgccg

SEQ ID NO: 3524612 - DNA, 25 bp, Homo sapien
tcttttcgcgccgaattccatctac

SEQ ID NO: 3524613 - DNA, 25 bp, Homo sapien
gagctcccggagaaagcaatgtctt

SEQ ID NO: 3524614 - DNA, 25 bp, Homo sapien
cggaatgtcccacgcgtaacgccct

SEQ ID NO: 3524615 - DNA, 25 bp, Homo sapien
gtaacgccctctgcgtgcgccggcg

SEQ ID NO: 3524616 - DNA, 25 bp, Homo sapien
acatcccccggaatgtcccacgcgt

SEQ ID NO: 3524617 - DNA, 25 bp, Homo sapien
tcccacgcgtaacgccctctgcgtg

SEQ ID NO: 3524618 - DNA, 25 bp, Homo sapien
agtcagtggaaggtagaaagacgcc

SEQ ID NO: 3524619 - DNA, 25 bp, Homo sapien
tgttacaaaagtggagatctacacg

SEQ ID NO: 3524620 - DNA, 25 bp, Homo sapien
taggtcgctctgacaggacccaacg

SEQ ID NO: 3524621 - DNA, 25 bp, Homo sapien
gatccggcgcagctaaagtcagtgg

SEQ ID NO: 3524622 - DNA, 25 bp, Homo sapien
ggtccggcgtgggaggcgcggactc

SEQ ID NO: 3524623 - DNA, 25 bp, Homo sapien
cggcgtgggaggcgcggactccccg

SEQ ID NO: 3524624 - DNA, 25 bp, Homo sapien
cgggacaaggaaaacacagccccat

SEQ ID NO: 3524625 - DNA, 25 bp, Homo sapien
caggtccggcgtgggaggcgcggac

SEQ ID NO: 3524626 - DNA, 25 bp, Homo sapien
agcttgagaaccctgaccgggtccg

SEQ ID NO: 3524627 - DNA, 25 bp, Homo sapien
ctaactgcgcggtccggagccggtc

SEQ ID NO: 3524628 - DNA, 25 bp, Homo sapien
agggacgacagcttgagaaccctga

SEQ ID NO: 3524629 - DNA, 25 bp, Homo sapien
ggccaggcggcgctaactgcgcggt

SEQ ID NO: 3524630 - DNA, 25 bp, Homo sapien
aataagactcaagtatttgcagctg

SEQ ID NO: 3524631 - DNA, 25 bp, Homo sapien
taagactcaagtatttgcagctgct

SEQ ID NO: 3524632 - DNA, 25 bp, Homo sapien
ataagactcaagtatttgcagctgc

SEQ ID NO: 3524633 - DNA, 25 bp, Homo sapien
ttctgtccacctgtaaggctgagat

SEQ ID NO: 3524634 - DNA, 25 bp, Homo sapien
tatggcttatctgcaatagcaacac

SEQ ID NO: 3524635 - DNA, 25 bp, Homo sapien
tagttataataacagtctcctagga

SEQ ID NO: 3524636 - DNA, 25 bp, Homo sapien
aattctagagcctgtagcttggata

SEQ ID NO: 3524637 - DNA, 25 bp, Homo sapien
gcttggatattaaatacttgcactg

SEQ ID NO: 3524638 - DNA, 25 bp, Homo sapien
tagactcctgctttatcaagatgac

SEQ ID NO: 3524639 - DNA, 25 bp, Homo sapien
tatgtcacttgatgttcacaatcca

SEQ ID NO: 3524640 - DNA, 25 bp, Homo sapien
tttccgaaatggtggagtattgcat

SEQ ID NO: 3524641 - DNA, 25 bp, Homo sapien
ccacatatttctgtctggagcatgg

SEQ ID NO: 3524642 - DNA, 25 bp, Homo sapien
tgaaaaccttttattcagtctcctc

SEQ ID NO: 3524643 - DNA, 25 bp, Homo sapien
ggagtcctggttctggaataggaga

SEQ ID NO: 3524644 - DNA, 25 bp, Homo sapien
agtcctggttctggaataggagaag

SEQ ID NO: 3524645 - DNA, 25 bp, Homo sapien
taggagtcctggttctggaatagga

SEQ ID NO: 3524646 - DNA, 25 bp, Homo sapien
aggtgttgcatattctgaatacgtt

SEQ ID NO: 3524647 - DNA, 25 bp, Homo sapien
ggtgttgcatattctgaatacgttt

SEQ ID NO: 3524648 - DNA, 25 bp, Homo sapien
taggtgttgcatattctgaatacgt

SEQ ID NO: 3524649 - DNA, 25 bp, Homo sapien
taacattctgattacatttttggtt

SEQ ID NO: 3524650 - DNA, 25 bp, Homo sapien
gtaacattctgattacatttttggt

SEQ ID NO: 3524651 - DNA, 25 bp, Homo sapien
aaggtaacattctgattacattttt

SEQ ID NO: 3524652 - DNA, 25 bp, Homo sapien
ggtaacattctgattacatttttgg

SEQ ID NO: 3524653 - DNA, 25 bp, Homo sapien
gacctctgaaggatgatgttgtctt

SEQ ID NO: 3524654 - DNA, 25 bp, Homo sapien
ctgccgctcagtgacctctgaagga

SEQ ID NO: 3524655 - DNA, 25 bp, Homo sapien
aaggatgatgttgtcttggtccttc

SEQ ID NO: 3524656 - DNA, 25 bp, Homo sapien
tctgaaggatgatgttgtcttggtc

SEQ ID NO: 3524657 - DNA, 25 bp, Homo sapien
caggcacatgccgtggagccttagg

SEQ ID NO: 3524658 - DNA, 25 bp, Homo sapien
gggaaggctcgatgtcccagcaata

SEQ ID NO: 3524659 - DNA, 25 bp, Homo sapien
atgccgtggagccttagggcgcccc

SEQ ID NO: 3524660 - DNA, 25 bp, Homo sapien
aaggctcgatgtcccagcaatacag

SEQ ID NO: 3524661 - DNA, 25 bp, Homo sapien
atttgttaacatatctagcttagtc

SEQ ID NO: 3524662 - DNA, 25 bp, Homo sapien
ttaacatatctagcttagtctccat

SEQ ID NO: 3524663 - DNA, 25 bp, Homo sapien
ttgttaacatatctagcttagtctc

SEQ ID NO: 3524664 - DNA, 25 bp, Homo sapien
tgttaacatatctagcttagtctcc

SEQ ID NO: 3524665 - DNA, 25 bp, Homo sapien
agaataccaagctgatccacagagg

SEQ ID NO: 3524666 - DNA, 25 bp, Homo sapien
gactgattttaggaagccagagtag

SEQ ID NO: 3524667 - DNA, 25 bp, Homo sapien
gctgctagtactgctgccacagctg

SEQ ID NO: 3524668 - DNA, 25 bp, Homo sapien
ggagctactactatccctgaagcag

SEQ ID NO: 3524669 - DNA, 25 bp, Homo sapien
gtgatcagcagagattttgctccag

SEQ ID NO: 3524670 - DNA, 25 bp, Homo sapien
ggctctttcagcactgatttcgcag

SEQ ID NO: 3524671 - DNA, 25 bp, Homo sapien
cattagctagctgcgccgggttgta

SEQ ID NO: 3524672 - DNA, 25 bp, Homo sapien
gaagaacattatagcctctaagtga

SEQ ID NO: 3524673 - DNA, 25 bp, Homo sapien
tcattcttctgatgacagatctcat

SEQ ID NO: 3524674 - DNA, 25 bp, Homo sapien
tcttctgatgacagatctcatctgt

SEQ ID NO: 3524675 - DNA, 25 bp, Homo sapien
gtgacattctcattgtcatcattct

SEQ ID NO: 3524676 - DNA, 25 bp, Homo sapien
tacttggtgacattctcattgtcat

SEQ ID NO: 3524677 - DNA, 25 bp, Homo sapien
tgctgcacctgccacggatgtctcc

SEQ ID NO: 3524678 - DNA, 25 bp, Homo sapien
gtctccattgtgtgcagctggaaca

SEQ ID NO: 3524679 - DNA, 25 bp, Homo sapien
tgtgctgcacctgccacggatgtct

SEQ ID NO: 3524680 - DNA, 25 bp, Homo sapien
cggatgtctccattgtgtgcagctg

SEQ ID NO: 3524681 - DNA, 25 bp, Homo sapien
agaattctccttggaggaattttct

SEQ ID NO: 3524682 - DNA, 25 bp, Homo sapien
aataactcagcttttgagtgagata

SEQ ID NO: 3524683 - DNA, 25 bp, Homo sapien
ccaggggctacttcaccagaaatga

SEQ ID NO: 3524684 - DNA, 25 bp, Homo sapien
gagtgagatagtctgagaattctcc

SEQ ID NO: 3524685 - DNA, 25 bp, Homo sapien
tctcagagttgctggctagcatatt

SEQ ID NO: 3524686 - DNA, 25 bp, Homo sapien
catcaggctattctttatcaggcca

SEQ ID NO: 3524687 - DNA, 25 bp, Homo sapien
tgaaacgtgcactgtctcaagttgg

SEQ ID NO: 3524688 - DNA, 25 bp, Homo sapien
aactaggagagtacaaatgatgatc

SEQ ID NO: 3524689 - DNA, 25 bp, Homo sapien
ttaacttcacaggaaattttgctgc

SEQ ID NO: 3524690 - DNA, 25 bp, Homo sapien
ttcacaggaaattttgctgccgttg

SEQ ID NO: 3524691 - DNA, 25 bp, Homo sapien
atccttagtcttttcatctttaact

SEQ ID NO: 3524692 - DNA, 25 bp, Homo sapien
ttttgctgccgttggggatgatgca

SEQ ID NO: 3524693 - DNA, 25 bp, Homo sapien
aggcagaagtatgtagccccgtgaa

SEQ ID NO: 3524694 - DNA, 25 bp, Homo sapien
gtatgtagccccgtgaagcacatca

SEQ ID NO: 3524695 - DNA, 25 bp, Homo sapien
cagaagtatgtagccccgtgaagca

SEQ ID NO: 3524696 - DNA, 25 bp, Homo sapien
tgtagccccgtgaagcacatcacaa

SEQ ID NO: 3524697 - DNA, 25 bp, Homo sapien
ccatgagagcttcacaagtatattg

SEQ ID NO: 3524698 - DNA, 25 bp, Homo sapien
tgaaaaccaatttgaggtccatgag

SEQ ID NO: 3524699 - DNA, 25 bp, Homo sapien
ttcactcttgaatcatgatggaccc

SEQ ID NO: 3524700 - DNA, 25 bp, Homo sapien
tgaatcatgatggacccaacaggtt

SEQ ID NO: 3524701 - DNA, 25 bp, Homo sapien
tactgtgacagtccttatttggccc

SEQ ID NO: 3524702 - DNA, 25 bp, Homo sapien
cttataagttctactgtgacagtcc

SEQ ID NO: 3524703 - DNA, 25 bp, Homo sapien
aactgtatccttataagttctactg

SEQ ID NO: 3524704 - DNA, 25 bp, Homo sapien
cagtccttatttggccctgtgacca

SEQ ID NO: 3524705 - DNA, 25 bp, Homo sapien
ggcttcaagttttgtcagtatgtcc

SEQ ID NO: 3524706 - DNA, 25 bp, Homo sapien
cctagggtttctcctggaggatcaa

SEQ ID NO: 3524707 - DNA, 25 bp, Homo sapien
ggttgacttgtgctagaatatcacc

SEQ ID NO: 3524708 - DNA, 25 bp, Homo sapien
tcttggcacctctacttctaactgg

SEQ ID NO: 3524709 - DNA, 25 bp, Homo sapien
tgggaggagacatccccgataatct

SEQ ID NO: 3524710 - DNA, 25 bp, Homo sapien
taatctgttggaatgacaacctcct

SEQ ID NO: 3524711 - DNA, 25 bp, Homo sapien
gagacatccccgataatctgttgga

SEQ ID NO: 3524712 - DNA, 25 bp, Homo sapien
aatgacaacctccttctctctgttc

SEQ ID NO: 3524713 - DNA, 25 bp, Homo sapien
ctctaggattggtagcagcttctcc

SEQ ID NO: 3524714 - DNA, 25 bp, Homo sapien
taggattggtagcagcttctccagt

SEQ ID NO: 3524715 - DNA, 25 bp, Homo sapien
ggattggtagcagcttctccagtgg

SEQ ID NO: 3524716 - DNA, 25 bp, Homo sapien
tctaggattggtagcagcttctcca

SEQ ID NO: 3524717 - DNA, 25 bp, Homo sapien
taaaagtaagtcaatgtgtgagggt

SEQ ID NO: 3524718 - DNA, 25 bp, Homo sapien
cagatcccaagcacagccccgtgtg

SEQ ID NO: 3524719 - DNA, 25 bp, Homo sapien
gtgagggtgacctggcagatcccaa

SEQ ID NO: 3524720 - DNA, 25 bp, Homo sapien
gatcccaagcacagccccgtgtgct

SEQ ID NO: 3524721 - DNA, 25 bp, Homo sapien
tcctgggcatcaggcatagtagctt

SEQ ID NO: 3524722 - DNA, 25 bp, Homo sapien
caggcatagtagcttccccttcttt

SEQ ID NO: 3524723 - DNA, 25 bp, Homo sapien
ctgggcatcaggcatagtagcttcc

SEQ ID NO: 3524724 - DNA, 25 bp, Homo sapien
gcatcaggcatagtagcttcccctt

SEQ ID NO: 3524725 - DNA, 25 bp, Homo sapien
gaattcactcttttagtcagcccat

SEQ ID NO: 3524726 - DNA, 25 bp, Homo sapien
tttagtcagcccatggtgtaaagtc

SEQ ID NO: 3524727 - DNA, 25 bp, Homo sapien
cccgttgctagatccaaagaattca

SEQ ID NO: 3524728 - DNA, 25 bp, Homo sapien
tctagagatcccgttgctagatcca

SEQ ID NO: 3524729 - DNA, 25 bp, Homo sapien
ggtaggcccaagtgacagcctggtg

SEQ ID NO: 3524730 - DNA, 25 bp, Homo sapien
aggcagccacttgtactcttttggg

SEQ ID NO: 3524731 - DNA, 25 bp, Homo sapien
tcttttggggtaggcccaagtgaca

SEQ ID NO: 3524732 - DNA, 25 bp, Homo sapien
ttggggtaggcccaagtgacagcct

SEQ ID NO: 3524733 - DNA, 25 bp, Homo sapien
cactgcctctctgtcttctccaccc

SEQ ID NO: 3524734 - DNA, 25 bp, Homo sapien
atgacatagacactgcctctctgtc

SEQ ID NO: 3524735 - DNA, 25 bp, Homo sapien
ctgcctctctgtcttctccacccac

SEQ ID NO: 3524736 - DNA, 25 bp, Homo sapien
tcatgacatagacactgcctctctg

SEQ ID NO: 3524737 - DNA, 25 bp, Homo sapien
taaacatcatttgcagttgtgtttc

SEQ ID NO: 3524738 - DNA, 25 bp, Homo sapien
tgtttcaatatcacaacatatctga

SEQ ID NO: 3524739 - DNA, 25 bp, Homo sapien
ccccatctaaccctgccaatgtcac

SEQ ID NO: 3524740 - DNA, 25 bp, Homo sapien
ttccatctgactataatgtctcccc

SEQ ID NO: 3524741 - DNA, 25 bp, Homo sapien
aaatcaatatctcctttataagcca

SEQ ID NO: 3524742 - DNA, 25 bp, Homo sapien
tgtctcctgttagctttggaatttg

SEQ ID NO: 3524743 - DNA, 25 bp, Homo sapien
ctttaatttgtgatgctaggttgtt

SEQ ID NO: 3524744 - DNA, 25 bp, Homo sapien
ctacctttttgatgtgggtaattag

SEQ ID NO: 3524745 - DNA, 25 bp, Homo sapien
atttctccattaacactgcctcagc

SEQ ID NO: 3524746 - DNA, 25 bp, Homo sapien
tctcgactctgaggataagtctata

SEQ ID NO: 3524747 - DNA, 25 bp, Homo sapien
tcatgtgaatggatattctcgactc

SEQ ID NO: 3524748 - DNA, 25 bp, Homo sapien
tcgactctgaggataagtctatata

SEQ ID NO: 3524749 - DNA, 25 bp, Homo sapien
tgaatggatattctcgactctgagg

SEQ ID NO: 3524750 - DNA, 25 bp, Homo sapien
tctttgtagtagatggtataattcc

SEQ ID NO: 3524751 - DNA, 25 bp, Homo sapien
tttctttgtagtagatggtataatt

SEQ ID NO: 3524752 - DNA, 25 bp, Homo sapien
ttctttgtagtagatggtataattc

SEQ ID NO: 3524753 - DNA, 25 bp, Homo sapien
gctgttctgaacaataagcttttgg

SEQ ID NO: 3524754 - DNA, 25 bp, Homo sapien
agttttgctgttctgaacaataagc

SEQ ID NO: 3524755 - DNA, 25 bp, Homo sapien
acaataagcttttgggactttgcag

SEQ ID NO: 3524756 - DNA, 25 bp, Homo sapien
tctgaacaataagcttttgggactt

SEQ ID NO: 3524757 - DNA, 25 bp, Homo sapien
ttgatgcttccggaatgtagaccca

SEQ ID NO: 3524758 - DNA, 25 bp, Homo sapien
ctctgttgatgcttccggaatgtag

SEQ ID NO: 3524759 - DNA, 25 bp, Homo sapien
taaaaggctctgttgatgcttccgg

SEQ ID NO: 3524760 - DNA, 25 bp, Homo sapien
cttccggaatgtagacccatgagta

SEQ ID NO: 3524761 - DNA, 25 bp, Homo sapien
ctaggaagaccatctctaacacagg

SEQ ID NO: 3524762 - DNA, 25 bp, Homo sapien
acaggtcgaggggtcttgaatgcta

SEQ ID NO: 3524763 - DNA, 25 bp, Homo sapien
gaccatctctaacacaggtcgaggg

SEQ ID NO: 3524764 - DNA, 25 bp, Homo sapien
ggaagaccatctctaacacaggtcg

SEQ ID NO: 3524765 - DNA, 25 bp, Homo sapien
gatcagctgtaggtatgccttgatt

SEQ ID NO: 3524766 - DNA, 25 bp, Homo sapien
taagccttgaatttagagaggtact

SEQ ID NO: 3524767 - DNA, 25 bp, Homo sapien
ttactcaggatcagctgtaggtatg

SEQ ID NO: 3524768 - DNA, 25 bp, Homo sapien
agctgtaggtatgccttgatttggc

SEQ ID NO: 3524769 - DNA, 25 bp, Homo sapien
ggggggcaaatcctcgagcttgatg

SEQ ID NO: 3524770 - DNA, 25 bp, Homo sapien
tttcctgactcagggcatgttgagt

SEQ ID NO: 3524771 - DNA, 25 bp, Homo sapien
ggtggggggcaaatcctcgagcttg

SEQ ID NO: 3524772 - DNA, 25 bp, Homo sapien
aagtgtctatttagactaagaggta

SEQ ID NO: 3524773 - DNA, 25 bp, Homo sapien
caatgcttggtgacaattccctcct

SEQ ID NO: 3524774 - DNA, 25 bp, Homo sapien
tgtacctctgtgatctcctcgctat

SEQ ID NO: 3524775 - DNA, 25 bp, Homo sapien
tctcctcgctatgactaaggctgga

SEQ ID NO: 3524776 - DNA, 25 bp, Homo sapien
ggagggcaaagcacctttgaaataa

SEQ ID NO: 3524777 - DNA, 25 bp, Homo sapien
tgggctcaggtcactcatgctcctg

SEQ ID NO: 3524778 - DNA, 25 bp, Homo sapien
atatttgtggttgattagcagagga

SEQ ID NO: 3524779 - DNA, 25 bp, Homo sapien
tcaatatttgtggttgattagcaga

SEQ ID NO: 3524780 - DNA, 25 bp, Homo sapien
tcttctcatggacaatttgcctatc

SEQ ID NO: 3524781 - DNA, 25 bp, Homo sapien
gtaatcttctcatggacaatttgcc

SEQ ID NO: 3524782 - DNA, 25 bp, Homo sapien
ctcatggacaatttgcctatcctgg

SEQ ID NO: 3524783 - DNA, 25 bp, Homo sapien
tatcctggtgtctagcatctggaaa

SEQ ID NO: 3524784 - DNA, 25 bp, Homo sapien
tcaggcaaggacagttcatgtaatg

SEQ ID NO: 3524785 - DNA, 25 bp, Homo sapien
tatttgaatgagtcaaccaaggcag

SEQ ID NO: 3524786 - DNA, 25 bp, Homo sapien
aacaggatactggtgagtgcttgag

SEQ ID NO: 3524787 - DNA, 25 bp, Homo sapien
cagatcaaagtaggaagattcttcc

SEQ ID NO: 3524788 - DNA, 25 bp, Homo sapien
aataggaattggtcatcccactggc

SEQ ID NO: 3524789 - DNA, 25 bp, Homo sapien
ggaattggtcatcccactggccctt

SEQ ID NO: 3524790 - DNA, 25 bp, Homo sapien
ttctttcaaataggaattggtcatc

SEQ ID NO: 3524791 - DNA, 25 bp, Homo sapien
tggtcatcccactggcccttttatt

SEQ ID NO: 3524792 - DNA, 25 bp, Homo sapien
cactccctaagaaaagcctgcctgt

SEQ ID NO: 3524793 - DNA, 25 bp, Homo sapien
actccctaagaaaagcctgcctgtc

SEQ ID NO: 3524794 - DNA, 25 bp, Homo sapien
tcactccctaagaaaagcctgcctg

SEQ ID NO: 3524795 - DNA, 25 bp, Homo sapien
gtggcgcctgctttgggaccggaaa

SEQ ID NO: 3524796 - DNA, 25 bp, Homo sapien
tggcgcctgctttgggaccggaaag

SEQ ID NO: 3524797 - DNA, 25 bp, Homo sapien
agacgagcggcgtacccatcaacct

SEQ ID NO: 3524798 - DNA, 25 bp, Homo sapien
agtcagagacgagcggcgtacccat

SEQ ID NO: 3524799 - DNA, 25 bp, Homo sapien
ggcagagtcagagacgagcggcgta

SEQ ID NO: 3524800 - DNA, 25 bp, Homo sapien
gagacgagcggcgtacccatcaacc

SEQ ID NO: 3524801 - DNA, 25 bp, Homo sapien
ctggccaaatccttggatgcccctg

SEQ ID NO: 3524802 - DNA, 25 bp, Homo sapien
tcggcttctcgaccaagggcctggg

SEQ ID NO: 3524803 - DNA, 25 bp, Homo sapien
tctcggcttctcgaccaagggcctg

SEQ ID NO: 3524804 - DNA, 25 bp, Homo sapien
cctgctgtcaacaaaaccatcaagt

SEQ ID NO: 3524805 - DNA, 25 bp, Homo sapien
cgcaagggcctgtgtagtcacgcac

SEQ ID NO: 3524806 - DNA, 25 bp, Homo sapien
tgaagcctgaacaaatacgggtgga

SEQ ID NO: 3524807 - DNA, 25 bp, Homo sapien
ggcaccacgggaagacatgataccc

SEQ ID NO: 3524808 - DNA, 25 bp, Homo sapien
cacttgctgcagatgggtgtgaccg

SEQ ID NO: 3524809 - DNA, 25 bp, Homo sapien
tgtgcctcatcaaggaggagccact

SEQ ID NO: 3524810 - DNA, 25 bp, Homo sapien
agaagtccaagctgtgcctcatcaa

SEQ ID NO: 3524811 - DNA, 25 bp, Homo sapien
gctgtgcctcatcaaggaggagcca

SEQ ID NO: 3524812 - DNA, 25 bp, Homo sapien
aagaagtccaagctgtgcctcatca

SEQ ID NO: 3524813 - DNA, 25 bp, Homo sapien
tggttcgcccatcgagacactgagc

SEQ ID NO: 3524814 - DNA, 25 bp, Homo sapien
tgagcgagtagatcaagcaccagcc

SEQ ID NO: 3524815 - DNA, 25 bp, Homo sapien
ttactttgaaaaccgcaaggctctg

SEQ ID NO: 3524816 - DNA, 25 bp, Homo sapien
cagtcgacagtggtaagaggcctct

SEQ ID NO: 3524817 - DNA, 25 bp, Homo sapien
cacttacagcggcacatcctggaga

SEQ ID NO: 3524818 - DNA, 25 bp, Homo sapien
ccaggaagagtaggtgcggcactta

SEQ ID NO: 3524819 - DNA, 25 bp, Homo sapien
gcaggttctgcgaggtggaattcca

SEQ ID NO: 3524820 - DNA, 25 bp, Homo sapien
tacacgtgtcctcaaatgcaggttc

SEQ ID NO: 3524821 - DNA, 25 bp, Homo sapien
agccaggtctcgggtggcagccgat

SEQ ID NO: 3524822 - DNA, 25 bp, Homo sapien
cgggtggcagccgatctggtcacag

SEQ ID NO: 3524823 - DNA, 25 bp, Homo sapien
ggtctcgggtggcagccgatctggt

SEQ ID NO: 3524824 - DNA, 25 bp, Homo sapien
ccaggtctcgggtggcagccgatct

SEQ ID NO: 3524825 - DNA, 25 bp, Homo sapien
gcaatgctacgaatgtgtttcctgg

SEQ ID NO: 3524826 - DNA, 25 bp, Homo sapien
tcacacaaaggtcttctcccagcat

SEQ ID NO: 3524827 - DNA, 25 bp, Homo sapien
gttgctcccgttggattacacaggc

SEQ ID NO: 3524828 - DNA, 25 bp, Homo sapien
agcatactcccgttgctcccgttgg

SEQ ID NO: 3524829 - DNA, 25 bp, Homo sapien
cttccattatttttagtctctctgt

SEQ ID NO: 3524830 - DNA, 25 bp, Homo sapien
tacttggtgctaatttctcctttta

SEQ ID NO: 3524831 - DNA, 25 bp, Homo sapien
ttatatctggattctcttccattat

SEQ ID NO: 3524832 - DNA, 25 bp, Homo sapien
ccattatttttagtctctctgttat

SEQ ID NO: 3524833 - DNA, 25 bp, Homo sapien
taggtcactggacctccaggactca

SEQ ID NO: 3524834 - DNA, 25 bp, Homo sapien
aggtcactggacctccaggactcac

SEQ ID NO: 3524835 - DNA, 25 bp, Homo sapien
ttaggtcactggacctccaggactc

SEQ ID NO: 3524836 - DNA, 25 bp, Homo sapien
caggtagcacgctgggctgaatctc

SEQ ID NO: 3524837 - DNA, 25 bp, Homo sapien
aggtagcacgctgggctgaatctca

SEQ ID NO: 3524838 - DNA, 25 bp, Homo sapien
ggtagcacgctgggctgaatctcat

SEQ ID NO: 3524839 - DNA, 25 bp, Homo sapien
gtgttgcctgccgggggcctccttc

SEQ ID NO: 3524840 - DNA, 25 bp, Homo sapien
tgttgcctgccgggggcctccttcc

SEQ ID NO: 3524841 - DNA, 25 bp, Homo sapien
ttgcctgccgggggcctccttccat

SEQ ID NO: 3524842 - DNA, 25 bp, Homo sapien
gttgcctgccgggggcctccttcca

SEQ ID NO: 3524843 - DNA, 25 bp, Homo sapien
tgtccagttaactaagggatgtcta

SEQ ID NO: 3524844 - DNA, 25 bp, Homo sapien
agtgtccagttaactaagggatgtc

SEQ ID NO: 3524845 - DNA, 25 bp, Homo sapien
ctcagtgtccagttaactaagggat

SEQ ID NO: 3524846 - DNA, 25 bp, Homo sapien
tcagtgtccagttaactaagggatg

SEQ ID NO: 3524847 - DNA, 25 bp, Homo sapien
gacaatcattctgacccacatcagc

SEQ ID NO: 3524848 - DNA, 25 bp, Homo sapien
cttcctgacaatcattctgacccac

SEQ ID NO: 3524849 - DNA, 25 bp, Homo sapien
ctgacaatcattctgacccacatca

SEQ ID NO: 3524850 - DNA, 25 bp, Homo sapien
tcctgacaatcattctgacccacat

SEQ ID NO: 3524851 - DNA, 25 bp, Homo sapien
tcaaagttcctggacaggcatcttc

SEQ ID NO: 3524852 - DNA, 25 bp, Homo sapien
tatggggtcctctgctccaaatggc

SEQ ID NO: 3524853 - DNA, 25 bp, Homo sapien
tcacagacttgtcctggatatgggg

SEQ ID NO: 3524854 - DNA, 25 bp, Homo sapien
aaagttcctggacaggcatcttccc

SEQ ID NO: 3524855 - DNA, 25 bp, Homo sapien
cactgtcctctttattgctttgtcc

SEQ ID NO: 3524856 - DNA, 25 bp, Homo sapien
gctgccactgtcctctttattgctt

SEQ ID NO: 3524857 - DNA, 25 bp, Homo sapien
gccactgtcctctttattgctttgt

SEQ ID NO: 3524858 - DNA, 25 bp, Homo sapien
ctgtcctctttattgctttgtcccg

SEQ ID NO: 3524859 - DNA, 25 bp, Homo sapien
tgtggtcacaggaccttgctttaat

SEQ ID NO: 3524860 - DNA, 25 bp, Homo sapien
gtggtcacaggaccttgctttaatt

SEQ ID NO: 3524861 - DNA, 25 bp, Homo sapien
gctttttccacttcatcttctccat

SEQ ID NO: 3524862 - DNA, 25 bp, Homo sapien
tgctttttccacttcatcttctcca

SEQ ID NO: 3524863 - DNA, 25 bp, Homo sapien
catgctttttccacttcatcttctc

SEQ ID NO: 3524864 - DNA, 25 bp, Homo sapien
ctcatgctttttccacttcatcttc

SEQ ID NO: 3524865 - DNA, 25 bp, Homo sapien
caggagaggctgaaacaaggctgaa

SEQ ID NO: 3524866 - DNA, 25 bp, Homo sapien
tacaggccttggatattaggcagtg

SEQ ID NO: 3524867 - DNA, 25 bp, Homo sapien
caacatcggagtgccatgactagct

SEQ ID NO: 3524868 - DNA, 25 bp, Homo sapien
tggtgtagacaatatcctagcaggg

SEQ ID NO: 3524869 - DNA, 25 bp, Homo sapien
cgaatgttggatatgtttcagaaca

SEQ ID NO: 3524870 - DNA, 25 bp, Homo sapien
ttcaagtgtccaactacagtcgaat

SEQ ID NO: 3524871 - DNA, 25 bp, Homo sapien
caactacagtcgaatgttggatatg

SEQ ID NO: 3524872 - DNA, 25 bp, Homo sapien
tgacaaaggatttggacaaggatat

SEQ ID NO: 3524873 - DNA, 25 bp, Homo sapien
ctgtctggacggtcctgataccatt

SEQ ID NO: 3524874 - DNA, 25 bp, Homo sapien
tctggacggtcctgataccattctg

SEQ ID NO: 3524875 - DNA, 25 bp, Homo sapien
gacggtcctgataccattctgtcag

SEQ ID NO: 3524876 - DNA, 25 bp, Homo sapien
gtcctgataccattctgtcaggaag

SEQ ID NO: 3524877 - DNA, 25 bp, Homo sapien
tgtgtgcagttgatgagcctaagat

SEQ ID NO: 3524878 - DNA, 25 bp, Homo sapien
gagaatgcaggcttagacgaagtag

SEQ ID NO: 3524879 - DNA, 25 bp, Homo sapien
gacgaagtagcaccacaattcactg

SEQ ID NO: 3524880 - DNA, 25 bp, Homo sapien
gctgaggtcatactgagtgcacatt

SEQ ID NO: 3524881 - DNA, 25 bp, Homo sapien
tatgctggggaatagaatcgcttga

SEQ ID NO: 3524882 - DNA, 25 bp, Homo sapien
gcttcttggtatgctggggaataga

SEQ ID NO: 3524883 - DNA, 25 bp, Homo sapien
cttcttggtatgctggggaatagaa

SEQ ID NO: 3524884 - DNA, 25 bp, Homo sapien
tggtatgctggggaatagaatcgct

SEQ ID NO: 3524885 - DNA, 25 bp, Homo sapien
agaattttagaccaatatccttgat

SEQ ID NO: 3524886 - DNA, 25 bp, Homo sapien
gaattttagaccaatatccttgatg

SEQ ID NO: 3524887 - DNA, 25 bp, Homo sapien
attctgataccaaagccaggcagag

SEQ ID NO: 3524888 - DNA, 25 bp, Homo sapien
gcatcattctgataccaaagccagg

SEQ ID NO: 3524889 - DNA, 25 bp, Homo sapien
aatgggcccaaatgagtacttgctg

SEQ ID NO: 3524890 - DNA, 25 bp, Homo sapien
ctgttagaagaatttgatggagtca

SEQ ID NO: 3524891 - DNA, 25 bp, Homo sapien
tatgacacctttctagggaaaaagc

SEQ ID NO: 3524892 - DNA, 25 bp, Homo sapien
gtttaacagctagtcttattcaatg

SEQ ID NO: 3524893 - DNA, 25 bp, Homo sapien
tccccagttgcaattccacagtata

SEQ ID NO: 3524894 - DNA, 25 bp, Homo sapien
gacattttaccaatagcttctactg

SEQ ID NO: 3524895 - DNA, 25 bp, Homo sapien
tgctatgcttcctggtagaccttta

SEQ ID NO: 3524896 - DNA, 25 bp, Homo sapien
aattccacagtatatcacaattgca

SEQ ID NO: 3524897 - DNA, 25 bp, Homo sapien
gatgagatgttgaagaggctctgta

SEQ ID NO: 3524898 - DNA, 25 bp, Homo sapien
caggatcatttcactcagcacgtta

SEQ ID NO: 3524899 - DNA, 25 bp, Homo sapien
cactcagcacgttattatttagtcc

SEQ ID NO: 3524900 - DNA, 25 bp, Homo sapien
gtttcagtttgatgagatgttgaag

SEQ ID NO: 3524901 - DNA, 25 bp, Homo sapien
ttgagatagaaagaggattttgggt

SEQ ID NO: 3524902 - DNA, 25 bp, Homo sapien
cttgagatagaaagaggattttggg

SEQ ID NO: 3524903 - DNA, 25 bp, Homo sapien
tgagatagaaagaggattttgggtt

SEQ ID NO: 3524904 - DNA, 25 bp, Homo sapien
tcattcctgattcaaggccctctct

SEQ ID NO: 3524905 - DNA, 25 bp, Homo sapien
tgttctttagccaattgctcagtca

SEQ ID NO: 3524906 - DNA, 25 bp, Homo sapien
attgctcagtcatctctctatctcc

SEQ ID NO: 3524907 - DNA, 25 bp, Homo sapien
aattgctcagtcatctctctatctc

SEQ ID NO: 3524908 - DNA, 25 bp, Homo sapien
aagtcagcggtcagagtgtgtatca

SEQ ID NO: 3524909 - DNA, 25 bp, Homo sapien
gaagtcagcggtcagagtgtgtatc

SEQ ID NO: 3524910 - DNA, 25 bp, Homo sapien
gtaactggaaaaagactatgaagtc

SEQ ID NO: 3524911 - DNA, 25 bp, Homo sapien
agtcagcggtcagagtgtgtatcat

SEQ ID NO: 3524912 - DNA, 25 bp, Homo sapien
cttgaacttcctttgagtcacttaa

SEQ ID NO: 3524913 - DNA, 25 bp, Homo sapien
acttaatttctctaggaaggatctt

SEQ ID NO: 3524914 - DNA, 25 bp, Homo sapien
ggatcttcgttcttccctgcttgct

SEQ ID NO: 3524915 - DNA, 25 bp, Homo sapien
tctctaggaaggatcttcgttcttc

SEQ ID NO: 3524916 - DNA, 25 bp, Homo sapien
tctaaacatatttctagcatgagac

SEQ ID NO: 3524917 - DNA, 25 bp, Homo sapien
taaacatatttctagcatgagacat

SEQ ID NO: 3524918 - DNA, 25 bp, Homo sapien
ctaaacatatttctagcatgagaca

SEQ ID NO: 3524919 - DNA, 25 bp, Homo sapien
tgggctcagcttattttttcttatg

SEQ ID NO: 3524920 - DNA, 25 bp, Homo sapien
cttatggctttgagtttatctttca

SEQ ID NO: 3524921 - DNA, 25 bp, Homo sapien
tttcttatggctttgagtttatctt

SEQ ID NO: 3524922 - DNA, 25 bp, Homo sapien
tttttcttatggctttgagtttatc

SEQ ID NO: 3524923 - DNA, 25 bp, Homo sapien
cagctcaaaaacttagagagggacc

SEQ ID NO: 3524924 - DNA, 25 bp, Homo sapien
cggtgtaagtaataatctaccagag

SEQ ID NO: 3524925 - DNA, 25 bp, Homo sapien
tgtgctatccaagccagattcaata

SEQ ID NO: 3524926 - DNA, 25 bp, Homo sapien
gagagggaccacacgatgcctggtt

SEQ ID NO: 3524927 - DNA, 25 bp, Homo sapien
aatctttatgaccaaagtgaaattt

SEQ ID NO: 3524928 - DNA, 25 bp, Homo sapien
ctttatgaccaaagtgaaatttaag

SEQ ID NO: 3524929 - DNA, 25 bp, Homo sapien
tctttatgaccaaagtgaaatttaa

SEQ ID NO: 3524930 - DNA, 25 bp, Homo sapien
atctttatgaccaaagtgaaattta

SEQ ID NO: 3524931 - DNA, 25 bp, Homo sapien
aggggtcctctgttcgaaatggcct

SEQ ID NO: 3524932 - DNA, 25 bp, Homo sapien
cattagctgccttcttaagtttgtg

SEQ ID NO: 3524933 - DNA, 25 bp, Homo sapien
attagctgccttcttaagtttgtgg

SEQ ID NO: 3524934 - DNA, 25 bp, Homo sapien
ctagcagcggttgctgagaaagtaa

SEQ ID NO: 3524935 - DNA, 25 bp, Homo sapien
tcagggtaagctttgaatgattaaa

SEQ ID NO: 3524936 - DNA, 25 bp, Homo sapien
ttttctgtctcttcggatgcaaggg

SEQ ID NO: 3524937 - DNA, 25 bp, Homo sapien
ctgagaaagtaagcttttttcaggg

SEQ ID NO: 3524938 - DNA, 25 bp, Homo sapien
aacctgggtccctatgaaatacctg

SEQ ID NO: 3524939 - DNA, 25 bp, Homo sapien
gaaatacctgttggtcaagttgtag

SEQ ID NO: 3524940 - DNA, 25 bp, Homo sapien
caagttgtagtttatgcaggtgaca

SEQ ID NO: 3524941 - DNA, 25 bp, Homo sapien
tagttactgaattacgaaatgcaaa

SEQ ID NO: 3524942 - DNA, 25 bp, Homo sapien
ttcagtgtggaacatagaattattc

SEQ ID NO: 3524943 - DNA, 25 bp, Homo sapien
atcatgcgtttgtccttttggcaat

SEQ ID NO: 3524944 - DNA, 25 bp, Homo sapien
attacgagtgctctggatactctgc

SEQ ID NO: 3524945 - DNA, 25 bp, Homo sapien
ccacaggccaggcaatcatgcgttt

SEQ ID NO: 3524946 - DNA, 25 bp, Homo sapien
tccttttggcaattacgagtgctct

SEQ ID NO: 3524947 - DNA, 25 bp, Homo sapien
ctaagtattgcacaaggaaaaatgc

SEQ ID NO: 3524948 - DNA, 25 bp, Homo sapien
tccatagtaagaaaaacttacactc

SEQ ID NO: 3524949 - DNA, 25 bp, Homo sapien
tacactcaactaagtattgcacaag

SEQ ID NO: 3524950 - DNA, 25 bp, Homo sapien
aacttacactcaactaagtattgca

SEQ ID NO: 3524951 - DNA, 25 bp, Homo sapien
atgaactctcgcttcccttttccag

SEQ ID NO: 3524952 - DNA, 25 bp, Homo sapien
aatgaactctcgcttcccttttcca

SEQ ID NO: 3524953 - DNA, 25 bp, Homo sapien
tgaactctcgcttcccttttccagc

SEQ ID NO: 3524954 - DNA, 25 bp, Homo sapien
cccagggcagctccttctctccagc

SEQ ID NO: 3524955 - DNA, 25 bp, Homo sapien
ctgcccagggcagctccttctctcc

SEQ ID NO: 3524956 - DNA, 25 bp, Homo sapien
agggcagctccttctctccagccat

SEQ ID NO: 3524957 - DNA, 25 bp, Homo sapien
cagggcagctccttctctccagcca

SEQ ID NO: 3524958 - DNA, 25 bp, Homo sapien
tgaaccacgacccatatgtattcct

SEQ ID NO: 3524959 - DNA, 25 bp, Homo sapien
cacgacccatatgtattccttcact

SEQ ID NO: 3524960 - DNA, 25 bp, Homo sapien
gattgaaccacgacccatatgtatt

SEQ ID NO: 3524961 - DNA, 25 bp, Homo sapien
gacccatatgtattccttcactttc

SEQ ID NO: 3524962 - DNA, 25 bp, Homo sapien
tcttcaccatcatcaaatactggct

SEQ ID NO: 3524963 - DNA, 25 bp, Homo sapien
tgtacaatgtctagtgttagaacct

SEQ ID NO: 3524964 - DNA, 25 bp, Homo sapien
gctgaacgccaactgtgtacaatgt

SEQ ID NO: 3524965 - DNA, 25 bp, Homo sapien
cctgaatataccacagagctataag

SEQ ID NO: 3524966 - DNA, 25 bp, Homo sapien
ccttgagagggattagcagtcacac

SEQ ID NO: 3524967 - DNA, 25 bp, Homo sapien
ggaacaggccataatcaatctaggc

SEQ ID NO: 3524968 - DNA, 25 bp, Homo sapien
gcagtcacactaatgagtgcctgga

SEQ ID NO: 3524969 - DNA, 25 bp, Homo sapien
taggtgcttgtcaaaggaacaggcc

SEQ ID NO: 3524970 - DNA, 25 bp, Homo sapien
cattgacaggacagtctagcagact

SEQ ID NO: 3524971 - DNA, 25 bp, Homo sapien
tgacaggacagtctagcagactctg

SEQ ID NO: 3524972 - DNA, 25 bp, Homo sapien
caggacagtctagcagactctgtgc

SEQ ID NO: 3524973 - DNA, 25 bp, Homo sapien
actgacattgacaggacagtctagc

SEQ ID NO: 3524974 - DNA, 25 bp, Homo sapien
cagtagattcagtgtttagtgaggg

SEQ ID NO: 3524975 - DNA, 25 bp, Homo sapien
gattcagtgtttagtgagggatcat

SEQ ID NO: 3524976 - DNA, 25 bp, Homo sapien
gagggatcattttgtaaagatgctc

SEQ ID NO: 3524977 - DNA, 25 bp, Homo sapien
gctcccttcaatgtgcgttttcaca

SEQ ID NO: 3524978 - DNA, 25 bp, Homo sapien
aagaccatagatgctaggaaaaatc

SEQ ID NO: 3524979 - DNA, 25 bp, Homo sapien
gaccatagatgctaggaaaaatctg

SEQ ID NO: 3524980 - DNA, 25 bp, Homo sapien
atagatgctaggaaaaatctgcatc

SEQ ID NO: 3524981 - DNA, 25 bp, Homo sapien
ccatagatgctaggaaaaatctgca

SEQ ID NO: 3524982 - DNA, 25 bp, Homo sapien
gcatgtggtatgcaaacaaacttga

SEQ ID NO: 3524983 - DNA, 25 bp, Homo sapien
gccaatttacgcgatcaagaaaact

SEQ ID NO: 3524984 - DNA, 25 bp, Homo sapien
cattgaaagtttgggtagagctaga

SEQ ID NO: 3524985 - DNA, 25 bp, Homo sapien
taggtacataattgtcaacggtgtt

SEQ ID NO: 3524986 - DNA, 25 bp, Homo sapien
tataaatggactaaattctgcaatt

SEQ ID NO: 3524987 - DNA, 25 bp, Homo sapien
ttaaatataaatggactaaattctg

SEQ ID NO: 3524988 - DNA, 25 bp, Homo sapien
aatataaatggactaaattctgcaa

SEQ ID NO: 3524989 - DNA, 25 bp, Homo sapien
taaatataaatggactaaattctgc

SEQ ID NO: 3524990 - DNA, 25 bp, Homo sapien
cagcactaaccaaattagcttctgt

SEQ ID NO: 3524991 - DNA, 25 bp, Homo sapien
gataatagacataagaacggttgac

SEQ ID NO: 3524992 - DNA, 25 bp, Homo sapien
cagagccagtcacagcactaaccaa

SEQ ID NO: 3524993 - DNA, 25 bp, Homo sapien
tagcttctgtatgaattagtggata

SEQ ID NO: 3524994 - DNA, 25 bp, Homo sapien
caatccacagccaattcccctttcc

SEQ ID NO: 3524995 - DNA, 25 bp, Homo sapien
acgagatcccatacttagcagcaaa

SEQ ID NO: 3524996 - DNA, 25 bp, Homo sapien
cctttgcaaagtactaggagggagg

SEQ ID NO: 3524997 - DNA, 25 bp, Homo sapien
gagggagggaacgagatcccatact

SEQ ID NO: 3524998 - DNA, 25 bp, Homo sapien
gtaatccaggacttgtcaatgcaaa

SEQ ID NO: 3524999 - DNA, 25 bp, Homo sapien
cctgagtcatatatgtgctgttttg

SEQ ID NO: 3525000 - DNA, 25 bp, Homo sapien
gagcagcatagcaagtaatccagga

SEQ ID NO: 3525001 - DNA, 25 bp, Homo sapien
catgagtcaaagtaaatcctgagtc

SEQ ID NO: 3525002 - DNA, 25 bp, Homo sapien
aactgcaacaatcttattggagaaa

SEQ ID NO: 3525003 - DNA, 25 bp, Homo sapien
ctgcaacaatcttattggagaaaaa

SEQ ID NO: 3525004 - DNA, 25 bp, Homo sapien
caactgcaacaatcttattggagaa

SEQ ID NO: 3525005 - DNA, 25 bp, Homo sapien
aatcacagcacaaggtgtacttggg

SEQ ID NO: 3525006 - DNA, 25 bp, Homo sapien
aatctttccttgctctgtatcccca

SEQ ID NO: 3525007 - DNA, 25 bp, Homo sapien
tataatctttccttgctctgtatcc

SEQ ID NO: 3525008 - DNA, 25 bp, Homo sapien
tctttccttgctctgtatccccata

SEQ ID NO: 3525009 - DNA, 25 bp, Homo sapien
aggatataatctttccttgctctgt

SEQ ID NO: 3525010 - DNA, 25 bp, Homo sapien
gcatctatttagatagtcatgtggc

SEQ ID NO: 3525011 - DNA, 25 bp, Homo sapien
catctatttagatagtcatgtggct

SEQ ID NO: 3525012 - DNA, 25 bp, Homo sapien
tctatttagatagtcatgtggcttt

SEQ ID NO: 3525013 - DNA, 25 bp, Homo sapien
atttagatagtcatgtggcttttgt

SEQ ID NO: 3525014 - DNA, 25 bp, Homo sapien
ccttcaaagtgagcagggaatctat

SEQ ID NO: 3525015 - DNA, 25 bp, Homo sapien
gactgaatttgaatgccatcgccac

SEQ ID NO: 3525016 - DNA, 25 bp, Homo sapien
gaaacctctagataggaattcctgg

SEQ ID NO: 3525017 - DNA, 25 bp, Homo sapien
tcaaacactgggctaggagtgctag

SEQ ID NO: 3525018 - DNA, 25 bp, Homo sapien
tgtgtgaacttgagccaccaggtcc

SEQ ID NO: 3525019 - DNA, 25 bp, Homo sapien
cagcagatgtcttaacggtcccgaa

SEQ ID NO: 3525020 - DNA, 25 bp, Homo sapien
gtttaagcggcgagagacacctgcc

SEQ ID NO: 3525021 - DNA, 25 bp, Homo sapien
gggaataaatgatccgcccctggcc

SEQ ID NO: 3525022 - DNA, 25 bp, Homo sapien
atggagtggccataacaaagcaacc

SEQ ID NO: 3525023 - DNA, 25 bp, Homo sapien
taccctctgatcattttctatggag

SEQ ID NO: 3525024 - DNA, 25 bp, Homo sapien
cattttctatggagtggccataaca

SEQ ID NO: 3525025 - DNA, 25 bp, Homo sapien
tctgatcattttctatggagtggcc

SEQ ID NO: 3525026 - DNA, 25 bp, Homo sapien
tcttacaaggcttttctggttatgc

SEQ ID NO: 3525027 - DNA, 25 bp, Homo sapien
tctctagctgcttaaaatcattaaa

SEQ ID NO: 3525028 - DNA, 25 bp, Homo sapien
tcataattgctatcagtataaaatc

SEQ ID NO: 3525029 - DNA, 25 bp, Homo sapien
ttacaaggcttttctggttatgctt

SEQ ID NO: 3525030 - DNA, 25 bp, Homo sapien
tcacactcagaaactcgttgaatat

SEQ ID NO: 3525031 - DNA, 25 bp, Homo sapien
gaagtaaatattcctgcatcacact

SEQ ID NO: 3525032 - DNA, 25 bp, Homo sapien
cactcagaaactcgttgaatattat

SEQ ID NO: 3525033 - DNA, 25 bp, Homo sapien
aaatatgccaggaagtaaatattcc

SEQ ID NO: 3525034 - DNA, 25 bp, Homo sapien
tgttttgttgaattctcagcttgag

SEQ ID NO: 3525035 - DNA, 25 bp, Homo sapien
tttgttgaattctcagcttgagatt

SEQ ID NO: 3525036 - DNA, 25 bp, Homo sapien
tttagatttaatgtgtatggatgtt

SEQ ID NO: 3525037 - DNA, 25 bp, Homo sapien
agatttaatgtgtatggatgttttg

SEQ ID NO: 3525038 - DNA, 25 bp, Homo sapien
attagaatgtgtccttgtgctcctt

SEQ ID NO: 3525039 - DNA, 25 bp, Homo sapien
tctttccctgtaatactctagaagt

SEQ ID NO: 3525040 - DNA, 25 bp, Homo sapien
tttctctttccctgtaatactctag

SEQ ID NO: 3525041 - DNA, 25 bp, Homo sapien
ttccctgtaatactctagaagttgg

SEQ ID NO: 3525042 - DNA, 25 bp, Homo sapien
ccctgtaatactctagaagttggag

SEQ ID NO: 3525043 - DNA, 25 bp, Homo sapien
tatataagtccaactctattagatt

SEQ ID NO: 3525044 - DNA, 25 bp, Homo sapien
atatataagtccaactctattagat

SEQ ID NO: 3525045 - DNA, 25 bp, Homo sapien
aatatataagtccaactctattaga

SEQ ID NO: 3525046 - DNA, 25 bp, Homo sapien
ttaatctttgtcaatatataagtcc

SEQ ID NO: 3525047 - DNA, 25 bp, Homo sapien
ggatgtatgggcacaatcaggttct

SEQ ID NO: 3525048 - DNA, 25 bp, Homo sapien
ttttcaagcttgctcaccaatatgg

SEQ ID NO: 3525049 - DNA, 25 bp, Homo sapien
gcttgctcaccaatatggcttccca

SEQ ID NO: 3525050 - DNA, 25 bp, Homo sapien
gggcacaatcaggttctttttcatt

SEQ ID NO: 3525051 - DNA, 25 bp, Homo sapien
ttttgctcagtggtaatatttgcac

SEQ ID NO: 3525052 - DNA, 25 bp, Homo sapien
tttttgctcagtggtaatatttgca

SEQ ID NO: 3525053 - DNA, 25 bp, Homo sapien
ctttttgctcagtggtaatatttgc

SEQ ID NO: 3525054 - DNA, 25 bp, Homo sapien
caatgtaagtcaaagcaattaagtc

SEQ ID NO: 3525055 - DNA, 25 bp, Homo sapien
caattaagtcatgacttgatttacc

SEQ ID NO: 3525056 - DNA, 25 bp, Homo sapien
taagtcatgacttgatttaccagtc

SEQ ID NO: 3525057 - DNA, 25 bp, Homo sapien
gggatgttgaattgctacaatgtaa

SEQ ID NO: 3525058 - DNA, 25 bp, Homo sapien
gttcttaactgcctcagtcttgctt

SEQ ID NO: 3525059 - DNA, 25 bp, Homo sapien
ttaactgcctcagtcttgcttaagt

SEQ ID NO: 3525060 - DNA, 25 bp, Homo sapien
caaatagagtgatgcggtatctgct

SEQ ID NO: 3525061 - DNA, 25 bp, Homo sapien
tcttcctcttaatagaacattgtct

SEQ ID NO: 3525062 - DNA, 25 bp, Homo sapien
ctctggaaggattctcaacttgaat

SEQ ID NO: 3525063 - DNA, 25 bp, Homo sapien
tctgaagtactgacaattccagtgt

SEQ ID NO: 3525064 - DNA, 25 bp, Homo sapien
tctggaaggattctcaacttgaatt

SEQ ID NO: 3525065 - DNA, 25 bp, Homo sapien
agtactgacaattccagtgtttgaa

SEQ ID NO: 3525066 - DNA, 25 bp, Homo sapien
cttataatgtcaattgctggcagct

SEQ ID NO: 3525067 - DNA, 25 bp, Homo sapien
tataatgtcaattgctggcagctgg

SEQ ID NO: 3525068 - DNA, 25 bp, Homo sapien
tggatggaaaggatgcttgactctt

SEQ ID NO: 3525069 - DNA, 25 bp, Homo sapien
catgcacactgctgtgttggagctt

SEQ ID NO: 3525070 - DNA, 25 bp, Homo sapien
cctgctgtgctagccctgttttcct

SEQ ID NO: 3525071 - DNA, 25 bp, Homo sapien
tcttcacctgctgtgctagccctgt

SEQ ID NO: 3525072 - DNA, 25 bp, Homo sapien
ttcacctgctgtgctagccctgttt

SEQ ID NO: 3525073 - DNA, 25 bp, Homo sapien
gctgtgctagccctgttttcctcta

SEQ ID NO: 3525074 - DNA, 25 bp, Homo sapien
cttcctggatttcggtagctgggag

SEQ ID NO: 3525075 - DNA, 25 bp, Homo sapien
gccttcctggatttcggtagctggg

SEQ ID NO: 3525076 - DNA, 25 bp, Homo sapien
ctggatttcggtagctgggagtgtt

SEQ ID NO: 3525077 - DNA, 25 bp, Homo sapien
gatttcggtagctgggagtgttttc

SEQ ID NO: 3525078 - DNA, 25 bp, Homo sapien
atcataaagggacgctgggttttgg

SEQ ID NO: 3525079 - DNA, 25 bp, Homo sapien
tatttttggctatgtcccttcctgg

SEQ ID NO: 3525080 - DNA, 25 bp, Homo sapien
catcatctgttgagacgatcatgga

SEQ ID NO: 3525081 - DNA, 25 bp, Homo sapien
cttgatttcattcttgtcccagtgc

SEQ ID NO: 3525082 - DNA, 25 bp, Homo sapien
ttttcctcctcctctcttctataaa

SEQ ID NO: 3525083 - DNA, 25 bp, Homo sapien
tcctcctcctctcttctataaatat

SEQ ID NO: 3525084 - DNA, 25 bp, Homo sapien
ctcctcctctcttctataaatattc

SEQ ID NO: 3525085 - DNA, 25 bp, Homo sapien
ttcctcctcctctcttctataaata

SEQ ID NO: 3525086 - DNA, 25 bp, Homo sapien
tactgttgttgttcctactcaatcc

SEQ ID NO: 3525087 - DNA, 25 bp, Homo sapien
agctgtactgttgttgttcctactc

SEQ ID NO: 3525088 - DNA, 25 bp, Homo sapien
tgtcaggattgggatttgttcctga

SEQ ID NO: 3525089 - DNA, 25 bp, Homo sapien
tgattcagccaaagatgtacacgag

SEQ ID NO: 3525090 - DNA, 25 bp, Homo sapien
ggagagttgacataagggaaaggag

SEQ ID NO: 3525091 - DNA, 25 bp, Homo sapien
agagttgacataagggaaaggagca

SEQ ID NO: 3525092 - DNA, 25 bp, Homo sapien
tgcttgccattaagagaggagaagg

SEQ ID NO: 3525093 - DNA, 25 bp, Homo sapien
tgggagagttgacataagggaaagg

SEQ ID NO: 3525094 - DNA, 25 bp, Homo sapien
gaagcactgtgtctcactgtcattt

SEQ ID NO: 3525095 - DNA, 25 bp, Homo sapien
atactagaagcactgtgtctcactg

SEQ ID NO: 3525096 - DNA, 25 bp, Homo sapien
ctagaagcactgtgtctcactgtca

SEQ ID NO: 3525097 - DNA, 25 bp, Homo sapien
gaaagctgttttatactagaagcac

SEQ ID NO: 3525098 - DNA, 25 bp, Homo sapien
tctgccttgttcactggactgtgaa

SEQ ID NO: 3525099 - DNA, 25 bp, Homo sapien
gccttgttcactggactgtgaaaaa

SEQ ID NO: 3525100 - DNA, 25 bp, Homo sapien
tatgtgtctgccttgttcactggac

SEQ ID NO: 3525101 - DNA, 25 bp, Homo sapien
tgtctgccttgttcactggactgtg

SEQ ID NO: 3525102 - DNA, 25 bp, Homo sapien
tcatcctcgtttttcctgtgtagat

SEQ ID NO: 3525103 - DNA, 25 bp, Homo sapien
catcctcgtttttcctgtgtagatc

SEQ ID NO: 3525104 - DNA, 25 bp, Homo sapien
cttcaatgcagactttcttcttgca

SEQ ID NO: 3525105 - DNA, 25 bp, Homo sapien
agactttcttcttgcacatttcaaa

SEQ ID NO: 3525106 - DNA, 25 bp, Homo sapien
gcagactttcttcttgcacatttca

SEQ ID NO: 3525107 - DNA, 25 bp, Homo sapien
caatgcagactttcttcttgcacat

SEQ ID NO: 3525108 - DNA, 25 bp, Homo sapien
atacagaggtgaaccactcttagat

SEQ ID NO: 3525109 - DNA, 25 bp, Homo sapien
tcttccatcctgagctgaatggatc

SEQ ID NO: 3525110 - DNA, 25 bp, Homo sapien
atggatcctaagaagtttttgttgc

SEQ ID NO: 3525111 - DNA, 25 bp, Homo sapien
accactcttagatttccctctttgc

SEQ ID NO: 3525112 - DNA, 25 bp, Homo sapien
aatttttacctgcatgacggtctgg

SEQ ID NO: 3525113 - DNA, 25 bp, Homo sapien
tgttattgatcacgctctgcctctg

SEQ ID NO: 3525114 - DNA, 25 bp, Homo sapien
taaaagggtgcacttccaccagagg

SEQ ID NO: 3525115 - DNA, 25 bp, Homo sapien
tagcaggcaacccaatcaagtgata

SEQ ID NO: 3525116 - DNA, 25 bp, Homo sapien
gctttgattatcagcagggtgtcca

SEQ ID NO: 3525117 - DNA, 25 bp, Homo sapien
ttgctttgattatcagcagggtgtc

SEQ ID NO: 3525118 - DNA, 25 bp, Homo sapien
tgctttgattatcagcagggtgtcc

SEQ ID NO: 3525119 - DNA, 25 bp, Homo sapien
ggtcactcgtgacttactagtttga

SEQ ID NO: 3525120 - DNA, 25 bp, Homo sapien
atgtattccaggctggttggctgct

SEQ ID NO: 3525121 - DNA, 25 bp, Homo sapien
agccagggctcatggtcactcgtga

SEQ ID NO: 3525122 - DNA, 25 bp, Homo sapien
gctggctcttggaaaggagtatgta

SEQ ID NO: 3525123 - DNA, 25 bp, Homo sapien
tgctctgccacccaggctggagtgc

SEQ ID NO: 3525124 - DNA, 25 bp, Homo sapien
gtcttgctctgccacccaggctgga

SEQ ID NO: 3525125 - DNA, 25 bp, Homo sapien
tttgccattttttttttcagacaga

SEQ ID NO: 3525126 - DNA, 25 bp, Homo sapien
tgcaggcacccaccaccacgcccgg

SEQ ID NO: 3525127 - DNA, 25 bp, Homo sapien
tatacatccagcaaagtttactgtg

SEQ ID NO: 3525128 - DNA, 25 bp, Homo sapien
ttagagactctctttcagtaagttc

SEQ ID NO: 3525129 - DNA, 25 bp, Homo sapien
gaaacttgtagcaggagacatttaa

SEQ ID NO: 3525130 - DNA, 25 bp, Homo sapien
aataactaagttagagactctcttt

SEQ ID NO: 3525131 - DNA, 25 bp, Homo sapien
ctaaagtggttttgtggcagtatcc

SEQ ID NO: 3525132 - DNA, 25 bp, Homo sapien
tgtgtgcttctgattcacaggcccg

SEQ ID NO: 3525133 - DNA, 25 bp, Homo sapien
ctgtttttgagagactattgtgtgc

SEQ ID NO: 3525134 - DNA, 25 bp, Homo sapien
cacaggcccggtccctgattggtga

SEQ ID NO: 3525135 - DNA, 25 bp, Homo sapien
acttcttgtaccctgtgtgtattct

SEQ ID NO: 3525136 - DNA, 25 bp, Homo sapien
cacttcttgtaccctgtgtgtattc

SEQ ID NO: 3525137 - DNA, 25 bp, Homo sapien
tttaagtccgaagcaatagttttgc

SEQ ID NO: 3525138 - DNA, 25 bp, Homo sapien
caaattttcagtaaagcttgacagt

SEQ ID NO: 3525139 - DNA, 25 bp, Homo sapien
tcaagtgcagttgactctgaaagcc

SEQ ID NO: 3525140 - DNA, 25 bp, Homo sapien
actttacatgtgtttccaggccttg

SEQ ID NO: 3525141 - DNA, 25 bp, Homo sapien
tgtatgagactcaaatgattcccat

SEQ ID NO: 3525142 - DNA, 25 bp, Homo sapien
gcaaaaaggaatgcgtgtatgagac

SEQ ID NO: 3525143 - DNA, 25 bp, Homo sapien
ggctgcaatttcatagtaggggcaa

SEQ ID NO: 3525144 - DNA, 25 bp, Homo sapien
attgctgtctctttatacctttata

SEQ ID NO: 3525145 - DNA, 25 bp, Homo sapien
tacaagagggaaatctgtgtgtcaa

SEQ ID NO: 3525146 - DNA, 25 bp, Homo sapien
tgtttgctgacaaagggggatctga

SEQ ID NO: 3525147 - DNA, 25 bp, Homo sapien
gagggaaatctgtgtgtcaattgaa

SEQ ID NO: 3525148 - DNA, 25 bp, Homo sapien
gaaatggagaatacaagagggaaat

SEQ ID NO: 3525149 - DNA, 25 bp, Homo sapien
gatgtttcagcttctagcataaaag

SEQ ID NO: 3525150 - DNA, 25 bp, Homo sapien
tattcatagaaggattgatgacatc

SEQ ID NO: 3525151 - DNA, 25 bp, Homo sapien
gacatctttgacagggctagatgtt

SEQ ID NO: 3525152 - DNA, 25 bp, Homo sapien
tcatttccctctaaagagtatgaat

SEQ ID NO: 3525153 - DNA, 25 bp, Homo sapien
tatttcgtagaagccctcgatgttt

SEQ ID NO: 3525154 - DNA, 25 bp, Homo sapien
ttcgtagaagccctcgatgtttctt

SEQ ID NO: 3525155 - DNA, 25 bp, Homo sapien
cattatttcgtagaagccctcgatg

SEQ ID NO: 3525156 - DNA, 25 bp, Homo sapien
cgtagaagccctcgatgtttcttga

SEQ ID NO: 3525157 - DNA, 25 bp, Homo sapien
gagtcaacctctggcatcagcatga

SEQ ID NO: 3525158 - DNA, 25 bp, Homo sapien
aaggtttaataactgctctactgga

SEQ ID NO: 3525159 - DNA, 25 bp, Homo sapien
aaagccacaaggttggaagtgccca

SEQ ID NO: 3525160 - DNA, 25 bp, Homo sapien
cttgtagcccctttgatttggacaa

SEQ ID NO: 3525161 - DNA, 25 bp, Homo sapien
ctgagaaaaggctttagggttcagc

SEQ ID NO: 3525162 - DNA, 25 bp, Homo sapien
ttcacttgtactctgagaaaaggct

SEQ ID NO: 3525163 - DNA, 25 bp, Homo sapien
cataatacacttctacatttgccat

SEQ ID NO: 3525164 - DNA, 25 bp, Homo sapien
attatctttctgtggtgtgttgaat

SEQ ID NO: 3525165 - DNA, 25 bp, Homo sapien
cattatctttctgtggtgtgttgaa

SEQ ID NO: 3525166 - DNA, 25 bp, Homo sapien
ttatctttctgtggtgtgttgaata

SEQ ID NO: 3525167 - DNA, 25 bp, Homo sapien
tcattatctttctgtggtgtgttga

SEQ ID NO: 3525168 - DNA, 25 bp, Homo sapien
tttgaatgcctgatttttcctgttc

SEQ ID NO: 3525169 - DNA, 25 bp, Homo sapien
ctttttgaatgcctgatttttcctg

SEQ ID NO: 3525170 - DNA, 25 bp, Homo sapien
tcattcatccaataactctttttga

SEQ ID NO: 3525171 - DNA, 25 bp, Homo sapien
taactctttttgaatgcctgatttt

SEQ ID NO: 3525172 - DNA, 25 bp, Homo sapien
tgtatgtgccagtatagcattgaga

SEQ ID NO: 3525173 - DNA, 25 bp, Homo sapien
gaccgaaatttaactgtatgtgcca

SEQ ID NO: 3525174 - DNA, 25 bp, Homo sapien
gataaatagacattacttgagccat

SEQ ID NO: 3525175 - DNA, 25 bp, Homo sapien
caaaactgtgataaggaggaccgaa

SEQ ID NO: 3525176 - DNA, 25 bp, Homo sapien
tagacagtgggcttacatacaaact

SEQ ID NO: 3525177 - DNA, 25 bp, Homo sapien
tcatgggtctttctagttgacagag

SEQ ID NO: 3525178 - DNA, 25 bp, Homo sapien
gcctgttttgcaatatagtaccaaa

SEQ ID NO: 3525179 - DNA, 25 bp, Homo sapien
taaagggcctagacattgttctatc

SEQ ID NO: 3525180 - DNA, 25 bp, Homo sapien
gagtttattgtccttgactggtagg

SEQ ID NO: 3525181 - DNA, 25 bp, Homo sapien
caaagcatatccattaagaagagtt

SEQ ID NO: 3525182 - DNA, 25 bp, Homo sapien
tatattccaaagcatatccattaag

SEQ ID NO: 3525183 - DNA, 25 bp, Homo sapien
tttttatctctctccgcaccctctt

SEQ ID NO: 3525184 - DNA, 25 bp, Homo sapien
cacattacaggaatgtttaggcaga

SEQ ID NO: 3525185 - DNA, 25 bp, Homo sapien
gtcttggtcccccacattacaggaa

SEQ ID NO: 3525186 - DNA, 25 bp, Homo sapien
cattcatgtcctttattggaacagc

SEQ ID NO: 3525187 - DNA, 25 bp, Homo sapien
agctgccattcatgtcctttattgg

SEQ ID NO: 3525188 - DNA, 25 bp, Homo sapien
cgttgcctcatatatcaatgcaggc

SEQ ID NO: 3525189 - DNA, 25 bp, Homo sapien
gctgccatttgattcagatacccaa

SEQ ID NO: 3525190 - DNA, 25 bp, Homo sapien
cacacacagagctagaggaatttta

SEQ ID NO: 3525191 - DNA, 25 bp, Homo sapien
tgcctcacatgtgcttgcggttggg

SEQ ID NO: 3525192 - DNA, 25 bp, Homo sapien
caggattgtacccatggagtgacat

SEQ ID NO: 3525193 - DNA, 25 bp, Homo sapien
atctgtgtccatgggtgtagggtca

SEQ ID NO: 3525194 - DNA, 25 bp, Homo sapien
catagctttcaggattgtacccatg

SEQ ID NO: 3525195 - DNA, 25 bp, Homo sapien
tccaccagcaatacaatcatctgtg

SEQ ID NO: 3525196 - DNA, 25 bp, Homo sapien
tgtgaaatctattcagataacctcg

SEQ ID NO: 3525197 - DNA, 25 bp, Homo sapien
ggtgcataggataactgtgaaatct

SEQ ID NO: 3525198 - DNA, 25 bp, Homo sapien
ataacctcgatgaagggcacgggcc

SEQ ID NO: 3525199 - DNA, 25 bp, Homo sapien
ttatttcattaaaaggtgcatagga

SEQ ID NO: 3525200 - DNA, 25 bp, Homo sapien
gatactgagccagtattcaatgttt

SEQ ID NO: 3525201 - DNA, 25 bp, Homo sapien
gtattcaatgttttccatgacatct

SEQ ID NO: 3525202 - DNA, 25 bp, Homo sapien
agaacggtaagaccctgatactgag

SEQ ID NO: 3525203 - DNA, 25 bp, Homo sapien
ccctgatactgagccagtattcaat

SEQ ID NO: 3525204 - DNA, 25 bp, Homo sapien
tttagaaagattccgcaagtagtta

SEQ ID NO: 3525205 - DNA, 25 bp, Homo sapien
gagagtcattagaagactattgcca

SEQ ID NO: 3525206 - DNA, 25 bp, Homo sapien
aagtgagcaatagtgtcattttggc

SEQ ID NO: 3525207 - DNA, 25 bp, Homo sapien
caatagtgtcattttggcaagtgac

SEQ ID NO: 3525208 - DNA, 25 bp, Homo sapien
acctgcgtacaggcgggctgagtct

SEQ ID NO: 3525209 - DNA, 25 bp, Homo sapien
gataatgtcatcaattaaggcagga

SEQ ID NO: 3525210 - DNA, 25 bp, Homo sapien
aaggcaggaacaggccattttcatt

SEQ ID NO: 3525211 - DNA, 25 bp, Homo sapien
aatttcacaagataatgtcatcaat

SEQ ID NO: 3525212 - DNA, 25 bp, Homo sapien
atgtatttattttcctacaggtaat

SEQ ID NO: 3525213 - DNA, 25 bp, Homo sapien
ttcctacaggtaatttttctgtggc

SEQ ID NO: 3525214 - DNA, 25 bp, Homo sapien
tttttgcataagaatatcaatgtat

SEQ ID NO: 3525215 - DNA, 25 bp, Homo sapien
tttctgtggcttcaacattttctct

SEQ ID NO: 3525216 - DNA, 25 bp, Homo sapien
tcccagtttaaaatgcttgtatctc

SEQ ID NO: 3525217 - DNA, 25 bp, Homo sapien
taaaatgcttgtatctcttaatggt

SEQ ID NO: 3525218 - DNA, 25 bp, Homo sapien
cccagtttaaaatgcttgtatctct

SEQ ID NO: 3525219 - DNA, 25 bp, Homo sapien
gcttgtatctcttaatggtcagcat

SEQ ID NO: 3525220 - DNA, 25 bp, Homo sapien
cctgaatctgcagttagattcaaca

SEQ ID NO: 3525221 - DNA, 25 bp, Homo sapien
ctcctgaatctgcagttagattcaa

SEQ ID NO: 3525222 - DNA, 25 bp, Homo sapien
tcctgaatctgcagttagattcaac

SEQ ID NO: 3525223 - DNA, 25 bp, Homo sapien
ctgaatctgcagttagattcaacac

SEQ ID NO: 3525224 - DNA, 25 bp, Homo sapien
cattgaccacctttgcatcagagct

SEQ ID NO: 3525225 - DNA, 25 bp, Homo sapien
ctatatgatgaaaatgagaaaaggc

SEQ ID NO: 3525226 - DNA, 25 bp, Homo sapien
aatgagaaaaggcatctgagaccct

SEQ ID NO: 3525227 - DNA, 25 bp, Homo sapien
gagaaaaggcatctgagaccctcgc

SEQ ID NO: 3525228 - DNA, 25 bp, Homo sapien
aaaatgagaaaaggcatctgagacc

SEQ ID NO: 3525229 - DNA, 25 bp, Homo sapien
tctgagccatggccctcaaattgag

SEQ ID NO: 3525230 - DNA, 25 bp, Homo sapien
catggccctcaaattgagcaatttt

SEQ ID NO: 3525231 - DNA, 25 bp, Homo sapien
ttgtaagcatctaaccaaaaatttg

SEQ ID NO: 3525232 - DNA, 25 bp, Homo sapien
gtaagcatctaaccaaaaatttgac

SEQ ID NO: 3525233 - DNA, 25 bp, Homo sapien
cactgtgaagcaaggagttagatgt

SEQ ID NO: 3525234 - DNA, 25 bp, Homo sapien
tcctgtgctaggctcctataactcc

SEQ ID NO: 3525235 - DNA, 25 bp, Homo sapien
ccttaagtaactcccctccatcctg

SEQ ID NO: 3525236 - DNA, 25 bp, Homo sapien
tataactcctatggcatccactgtg

SEQ ID NO: 3525237 - DNA, 25 bp, Homo sapien
taaattgtccatcttttcattgatc

SEQ ID NO: 3525238 - DNA, 25 bp, Homo sapien
ttatttgtaaattgtccatcttttc

SEQ ID NO: 3525239 - DNA, 25 bp, Homo sapien
aaattgtccatcttttcattgatca

SEQ ID NO: 3525240 - DNA, 25 bp, Homo sapien
ttgtaaattgtccatcttttcattg

SEQ ID NO: 3525241 - DNA, 25 bp, Homo sapien
ctagtctgtgatcaatataattaaa

SEQ ID NO: 3525242 - DNA, 25 bp, Homo sapien
cttactagtctgtgatcaatataat

SEQ ID NO: 3525243 - DNA, 25 bp, Homo sapien
tactagtctgtgatcaatataatta

SEQ ID NO: 3525244 - DNA, 25 bp, Homo sapien
actagtctgtgatcaatataattaa

SEQ ID NO: 3525245 - DNA, 25 bp, Homo sapien
actgcatattctatctctgggaggc

SEQ ID NO: 3525246 - DNA, 25 bp, Homo sapien
cagtaggtcctgtgtgcagtatgca

SEQ ID NO: 3525247 - DNA, 25 bp, Homo sapien
gagggccaaaattcagctcagcctg

SEQ ID NO: 3525248 - DNA, 25 bp, Homo sapien
tggccatgaatgttaagcacctgtt

SEQ ID NO: 3525249 - DNA, 25 bp, Homo sapien
cttctccttccatgtactcagtttt

SEQ ID NO: 3525250 - DNA, 25 bp, Homo sapien
ttcctcctgttgttactatgaatct

SEQ ID NO: 3525251 - DNA, 25 bp, Homo sapien
tcctgttgttactatgaatctcacg

SEQ ID NO: 3525252 - DNA, 25 bp, Homo sapien
ccttccatgtactcagttttttcag

SEQ ID NO: 3525253 - DNA, 25 bp, Homo sapien
gctccatgccgagagggaagggtgc

SEQ ID NO: 3525254 - DNA, 25 bp, Homo sapien
tgcagctccatgccgagagggaagg

SEQ ID NO: 3525255 - DNA, 25 bp, Homo sapien
ctgcagctccatgccgagagggaag

SEQ ID NO: 3525256 - DNA, 25 bp, Homo sapien
cagctccatgccgagagggaagggt

SEQ ID NO: 3525257 - DNA, 25 bp, Homo sapien
catgtgagtgtaacagcaagaaact

SEQ ID NO: 3525258 - DNA, 25 bp, Homo sapien
cttgaataactctccctggtaaggg

SEQ ID NO: 3525259 - DNA, 25 bp, Homo sapien
caagaaacttagcaagacatcccat

SEQ ID NO: 3525260 - DNA, 25 bp, Homo sapien
ctggtaagggatgtgcatgtgagtg

SEQ ID NO: 3525261 - DNA, 25 bp, Homo sapien
agagcacagtgccaaaattgtacat

SEQ ID NO: 3525262 - DNA, 25 bp, Homo sapien
tgtgcccacctcaatgacattcccc

SEQ ID NO: 3525263 - DNA, 25 bp, Homo sapien
gttgctctgattgtccagagagcac

SEQ ID NO: 3525264 - DNA, 25 bp, Homo sapien
gtgataaaaggcatgcaatgtgccc

SEQ ID NO: 3525265 - DNA, 25 bp, Homo sapien
ctcctcttgaacctcctttgagcat

SEQ ID NO: 3525266 - DNA, 25 bp, Homo sapien
tccatcctcctcttgaacctccttt

SEQ ID NO: 3525267 - DNA, 25 bp, Homo sapien
ctcttgaacctcctttgagcatcat

SEQ ID NO: 3525268 - DNA, 25 bp, Homo sapien
atcctcctcttgaacctcctttgag

SEQ ID NO: 3525269 - DNA, 25 bp, Homo sapien
agaaggcaaccagagtttaggaaga

SEQ ID NO: 3525270 - DNA, 25 bp, Homo sapien
cacacgcacaagttgagtaacccaa

SEQ ID NO: 3525271 - DNA, 25 bp, Homo sapien
gaattttggggcagagctttgaaga

SEQ ID NO: 3525272 - DNA, 25 bp, Homo sapien
tcttaccacgggtaagtatgaggct

SEQ ID NO: 3525273 - DNA, 25 bp, Homo sapien
ctgaggcagatcctgatggttgctg

SEQ ID NO: 3525274 - DNA, 25 bp, Homo sapien
caatcccttcgtttaattcttgcta

SEQ ID NO: 3525275 - DNA, 25 bp, Homo sapien
tcaatcccttcgtttaattcttgct

SEQ ID NO: 3525276 - DNA, 25 bp, Homo sapien
cagataatggatatttcgtacaaac

SEQ ID NO: 3525277 - DNA, 25 bp, Homo sapien
cttcgcaaagctctgaaaaagcggt

SEQ ID NO: 3525278 - DNA, 25 bp, Homo sapien
gctcttcagtggaacctccgtagtc

SEQ ID NO: 3525279 - DNA, 25 bp, Homo sapien
cacacttggaaggtggaatgttcag

SEQ ID NO: 3525280 - DNA, 25 bp, Homo sapien
tcagtttcagccacaaagtggcagt

SEQ ID NO: 3525281 - DNA, 25 bp, Homo sapien
tccacagtcaagtcaattgaccctc

SEQ ID NO: 3525282 - DNA, 25 bp, Homo sapien
gaagacacggttttgggctagataa

SEQ ID NO: 3525283 - DNA, 25 bp, Homo sapien
catacgcctcataggaagacacggt

SEQ ID NO: 3525284 - DNA, 25 bp, Homo sapien
tcatgaaatttgcacgagagcactc

SEQ ID NO: 3525285 - DNA, 25 bp, Homo sapien
tttctccccaaatttatggctgagg

SEQ ID NO: 3525286 - DNA, 25 bp, Homo sapien
aagtgtttggccttgtactaagtga

SEQ ID NO: 3525287 - DNA, 25 bp, Homo sapien
aattgctatagcagagatgtagtcg

SEQ ID NO: 3525288 - DNA, 25 bp, Homo sapien
tgattctgtacatgaatccattgtg

SEQ ID NO: 3525289 - DNA, 25 bp, Homo sapien
tcaaaacgtgcaatgtgatgattct

SEQ ID NO: 3525290 - DNA, 25 bp, Homo sapien
tgtacatgaatccattgtgtaatga

SEQ ID NO: 3525291 - DNA, 25 bp, Homo sapien
taataatcacacatcgttacaattg

SEQ ID NO: 3525292 - DNA, 25 bp, Homo sapien
taaaagtttgtcaatgctgtggatc

SEQ ID NO: 3525293 - DNA, 25 bp, Homo sapien
gatttcgtatttctaaggcagcttc

SEQ ID NO: 3525294 - DNA, 25 bp, Homo sapien
tgtcagtttcacctatgatatccaa

SEQ ID NO: 3525295 - DNA, 25 bp, Homo sapien
taaagttcgtggtaatgttacttca

SEQ ID NO: 3525296 - DNA, 25 bp, Homo sapien
aaattcagggagtcatagcacagcc

SEQ ID NO: 3525297 - DNA, 25 bp, Homo sapien
gacatggccgtgagtaaattcaggg

SEQ ID NO: 3525298 - DNA, 25 bp, Homo sapien
taaaatccagtagcctctggaaacc

SEQ ID NO: 3525299 - DNA, 25 bp, Homo sapien
ggacctccattgaccgactattaca

SEQ ID NO: 3525300 - DNA, 25 bp, Homo sapien
gaaaatgctttaaggtctaaatcga

SEQ ID NO: 3525301 - DNA, 25 bp, Homo sapien
tctaaatcgatagattcagtagcac

SEQ ID NO: 3525302 - DNA, 25 bp, Homo sapien
taaggtctaaatcgatagattcagt

SEQ ID NO: 3525303 - DNA, 25 bp, Homo sapien
atcgatagattcagtagcacaagta

SEQ ID NO: 3525304 - DNA, 25 bp, Homo sapien
ctgtttcccgtaaaaacatcattat

SEQ ID NO: 3525305 - DNA, 25 bp, Homo sapien
aacatgatgatttccctgtttcccg

SEQ ID NO: 3525306 - DNA, 25 bp, Homo sapien
gaaaccattcttttaaacatgatga

SEQ ID NO: 3525307 - DNA, 25 bp, Homo sapien
cttgtttatcaactattttactggg

SEQ ID NO: 3525308 - DNA, 25 bp, Homo sapien
tgtcatgacaagatgatatattgtg

SEQ ID NO: 3525309 - DNA, 25 bp, Homo sapien
taaagactatatgtcacaagataac

SEQ ID NO: 3525310 - DNA, 25 bp, Homo sapien
taacaggaacgcagaaacagatctt

SEQ ID NO: 3525311 - DNA, 25 bp, Homo sapien
tagtaatgttgctggcatgatacca

SEQ ID NO: 3525312 - DNA, 25 bp, Homo sapien
tcttggaccactagataacttttct

SEQ ID NO: 3525313 - DNA, 25 bp, Homo sapien
tgtagcagctgtagtcagcacggct

SEQ ID NO: 3525314 - DNA, 25 bp, Homo sapien
agcacggctgcttaagaaatcttgg

SEQ ID NO: 3525315 - DNA, 25 bp, Homo sapien
gaaaaatacatggaagcttcggtgc

SEQ ID NO: 3525316 - DNA, 25 bp, Homo sapien
tgagtttagacagagtgcgaccact

SEQ ID NO: 3525317 - DNA, 25 bp, Homo sapien
ggactgtgaccaccggctgagttca

SEQ ID NO: 3525318 - DNA, 25 bp, Homo sapien
tgaggttactcaccctgccatctgg

SEQ ID NO: 3525319 - DNA, 25 bp, Homo sapien
gctatctgggtgttgcccgggacaa

SEQ ID NO: 3525320 - DNA, 25 bp, Homo sapien
gttgccgtactgcaatagatttggc

SEQ ID NO: 3525321 - DNA, 25 bp, Homo sapien
cgatgttgccgtactgcaatagatt

SEQ ID NO: 3525322 - DNA, 25 bp, Homo sapien
gatgttgccgtactgcaatagattt

SEQ ID NO: 3525323 - DNA, 25 bp, Homo sapien
tgttgccgtactgcaatagatttgg

SEQ ID NO: 3525324 - DNA, 25 bp, Homo sapien
tttcctctgtcttttttccttcaca

SEQ ID NO: 3525325 - DNA, 25 bp, Homo sapien
ctgtcttttttccttcacagcacat

SEQ ID NO: 3525326 - DNA, 25 bp, Homo sapien
tctgtcttttttccttcacagcaca

SEQ ID NO: 3525327 - DNA, 25 bp, Homo sapien
cctctgtcttttttccttcacagca

SEQ ID NO: 3525328 - DNA, 25 bp, Homo sapien
aatcctcaatcaagcttaatgtaag

SEQ ID NO: 3525329 - DNA, 25 bp, Homo sapien
atcctcaatcaagcttaatgtaagt

SEQ ID NO: 3525330 - DNA, 25 bp, Homo sapien
tcaatcctcaatcaagcttaatgta

SEQ ID NO: 3525331 - DNA, 25 bp, Homo sapien
caatcctcaatcaagcttaatgtaa

SEQ ID NO: 3525332 - DNA, 25 bp, Homo sapien
ttgccggagatccagagctcctctt

SEQ ID NO: 3525333 - DNA, 25 bp, Homo sapien
tgccggagatccagagctcctcttg

SEQ ID NO: 3525334 - DNA, 25 bp, Homo sapien
cattgccggagatccagagctcctc

SEQ ID NO: 3525335 - DNA, 25 bp, Homo sapien
ccggagatccagagctcctcttgtt

SEQ ID NO: 3525336 - DNA, 25 bp, Homo sapien
ggtagccaggggtcacatagtcatg

SEQ ID NO: 3525337 - DNA, 25 bp, Homo sapien
gggaaggccacgatggaagacacaa

SEQ ID NO: 3525338 - DNA, 25 bp, Homo sapien
ggaaggccacgatggaagacacaaa

SEQ ID NO: 3525339 - DNA, 25 bp, Homo sapien
tatatatatgaatccatggtgtggg

SEQ ID NO: 3525340 - DNA, 25 bp, Homo sapien
tgtgaatcactgtatgcttataaaa

SEQ ID NO: 3525341 - DNA, 25 bp, Homo sapien
ccagaccctatccatacatcatata

SEQ ID NO: 3525342 - DNA, 25 bp, Homo sapien
ttgatgctgaccgatggctagaact

SEQ ID NO: 3525343 - DNA, 25 bp, Homo sapien
catggtatgtcagccaatagtagac

SEQ ID NO: 3525344 - DNA, 25 bp, Homo sapien
tgataacctggagatacctcagcct

SEQ ID NO: 3525345 - DNA, 25 bp, Homo sapien
tcccatacacaaaggagctgtagct

SEQ ID NO: 3525346 - DNA, 25 bp, Homo sapien
gcaacttgatccttaatgacacgac

SEQ ID NO: 3525347 - DNA, 25 bp, Homo sapien
aatcagataaatctggtgattgaag

SEQ ID NO: 3525348 - DNA, 25 bp, Homo sapien
tctccttctcgctagcaactctcat

SEQ ID NO: 3525349 - DNA, 25 bp, Homo sapien
ttcctctccttctcgctagcaactc

SEQ ID NO: 3525350 - DNA, 25 bp, Homo sapien
ctctccttctcgctagcaactctca

SEQ ID NO: 3525351 - DNA, 25 bp, Homo sapien
tcctctccttctcgctagcaactct

SEQ ID NO: 3525352 - DNA, 25 bp, Homo sapien
ttttttcctgttgccgaacatctgt

SEQ ID NO: 3525353 - DNA, 25 bp, Homo sapien
tccgaaatgcatatggccatatctc

SEQ ID NO: 3525354 - DNA, 25 bp, Homo sapien
gatgttgttgagatcaaatgctctc

SEQ ID NO: 3525355 - DNA, 25 bp, Homo sapien
gccatatctctgtgtaaagggattt

SEQ ID NO: 3525356 - DNA, 25 bp, Homo sapien
tccggaatggtcatttaagggagaa

SEQ ID NO: 3525357 - DNA, 25 bp, Homo sapien
ccatgagctgtttgtaactccggaa

SEQ ID NO: 3525358 - DNA, 25 bp, Homo sapien
tcttgtagcacccatgagctgtttg

SEQ ID NO: 3525359 - DNA, 25 bp, Homo sapien
tgtaactccggaatggtcatttaag

SEQ ID NO: 3525360 - DNA, 25 bp, Homo sapien
tcgtcttccttatggaaacagtggc

SEQ ID NO: 3525361 - DNA, 25 bp, Homo sapien
cttggcagttgcagcatataactac

SEQ ID NO: 3525362 - DNA, 25 bp, Homo sapien
tataactacatcagtgctcatcgtc

SEQ ID NO: 3525363 - DNA, 25 bp, Homo sapien
cagtgctcatcgtcttccttatgga

SEQ ID NO: 3525364 - DNA, 25 bp, Homo sapien
tttttgtagttcacatgcgcatggg

SEQ ID NO: 3525365 - DNA, 25 bp, Homo sapien
gcatgggtgagaatcccatcctcct

SEQ ID NO: 3525366 - DNA, 25 bp, Homo sapien
cactctctggagtagttttcctgat

SEQ ID NO: 3525367 - DNA, 25 bp, Homo sapien
cacttatcactctggttctttggaa

SEQ ID NO: 3525368 - DNA, 25 bp, Homo sapien
gcataagacccaatcatcctcataa

SEQ ID NO: 3525369 - DNA, 25 bp, Homo sapien
ctggcttttaagcataagacccaat

SEQ ID NO: 3525370 - DNA, 25 bp, Homo sapien
tcataaacggtatactgtatagtca

SEQ ID NO: 3525371 - DNA, 25 bp, Homo sapien
tcctcataaacggtatactgtatag

SEQ ID NO: 3525372 - DNA, 25 bp, Homo sapien
tgtctgccaggcagtccacatcttt

SEQ ID NO: 3525373 - DNA, 25 bp, Homo sapien
ccaggcagtccacatctttctccat

SEQ ID NO: 3525374 - DNA, 25 bp, Homo sapien
ttctccatcccaggaagcatgtagg

SEQ ID NO: 3525375 - DNA, 25 bp, Homo sapien
tacagtcttccagtgtgtctgtctg

SEQ ID NO: 3525376 - DNA, 25 bp, Homo sapien
tccaggtgtttggacctgattataa

SEQ ID NO: 3525377 - DNA, 25 bp, Homo sapien
taagcttgaaactttgtggtttgca

SEQ ID NO: 3525378 - DNA, 25 bp, Homo sapien
tggacctgattataagcttgaaact

SEQ ID NO: 3525379 - DNA, 25 bp, Homo sapien
ctgcatctccaggtgtttggacctg

SEQ ID NO: 3525380 - DNA, 25 bp, Homo sapien
cacacgaacccagaaagagcatgtg

SEQ ID NO: 3525381 - DNA, 25 bp, Homo sapien
tgaggcacacgaacccagaaagagc

SEQ ID NO: 3525382 - DNA, 25 bp, Homo sapien
agaaacttactgaggcacacgaacc

SEQ ID NO: 3525383 - DNA, 25 bp, Homo sapien
tactgaggcacacgaacccagaaag

SEQ ID NO: 3525384 - DNA, 25 bp, Homo sapien
tcactgatttgaattcaatggtttt

SEQ ID NO: 3525385 - DNA, 25 bp, Homo sapien
cagctggatatgtatcagacccagt

SEQ ID NO: 3525386 - DNA, 25 bp, Homo sapien
gtagggttatcacctggtacaataa

SEQ ID NO: 3525387 - DNA, 25 bp, Homo sapien
tcagacccagtagggttatcacctg

SEQ ID NO: 3525388 - DNA, 25 bp, Homo sapien
taattcatgatgttgagcttcacat

SEQ ID NO: 3525389 - DNA, 25 bp, Homo sapien
ttcatgatgttgagcttcacataag

SEQ ID NO: 3525390 - DNA, 25 bp, Homo sapien
tcatgatgttgagcttcacataagc

SEQ ID NO: 3525391 - DNA, 25 bp, Homo sapien
aattcatgatgttgagcttcacata

SEQ ID NO: 3525392 - DNA, 25 bp, Homo sapien
tcaaagtggagtccctgaggtatca

SEQ ID NO: 3525393 - DNA, 25 bp, Homo sapien
taatagcaaccaactgggcaccact

SEQ ID NO: 3525394 - DNA, 25 bp, Homo sapien
gatggccgttagctcaatctacagg

SEQ ID NO: 3525395 - DNA, 25 bp, Homo sapien
tatcagtaagtgagtgcccttccag

SEQ ID NO: 3525396 - DNA, 25 bp, Homo sapien
gaaacagacattaaatccaggcact

SEQ ID NO: 3525397 - DNA, 25 bp, Homo sapien
ttacaacaacccagtaaagcagatg

SEQ ID NO: 3525398 - DNA, 25 bp, Homo sapien
ggtcacacagtcattaagcaataga

SEQ ID NO: 3525399 - DNA, 25 bp, Homo sapien
tgccaagcagtggtctaagtacctt

SEQ ID NO: 3525400 - DNA, 25 bp, Homo sapien
caaagagcctcatgagaatcttctg

SEQ ID NO: 3525401 - DNA, 25 bp, Homo sapien
ccaaagagcctcatgagaatcttct

SEQ ID NO: 3525402 - DNA, 25 bp, Homo sapien
tccaaagagcctcatgagaatcttc

SEQ ID NO: 3525403 - DNA, 25 bp, Homo sapien
ctccaaagagcctcatgagaatctt

SEQ ID NO: 3525404 - DNA, 25 bp, Homo sapien
tctgttttgtaagacttcttaaggc

SEQ ID NO: 3525405 - DNA, 25 bp, Homo sapien
gccatgtgctccaagcacttgagaa

SEQ ID NO: 3525406 - DNA, 25 bp, Homo sapien
cttctcttgatgctgtcttcttaca

SEQ ID NO: 3525407 - DNA, 25 bp, Homo sapien
cagggttctaagatatgaactgctg

SEQ ID NO: 3525408 - DNA, 25 bp, Homo sapien
taaaagcccttacggagacagtctc

SEQ ID NO: 3525409 - DNA, 25 bp, Homo sapien
gaccagttactgaacaatcaagaga

SEQ ID NO: 3525410 - DNA, 25 bp, Homo sapien
caatgcctgcatactgagctcttat

SEQ ID NO: 3525411 - DNA, 25 bp, Homo sapien
gagactctgagagataactgcctgt

SEQ ID NO: 3525412 - DNA, 25 bp, Homo sapien
aaattacctagaaggacaatcctgg

SEQ ID NO: 3525413 - DNA, 25 bp, Homo sapien
tatcctgctttgtgtcaagttctga

SEQ ID NO: 3525414 - DNA, 25 bp, Homo sapien
aactggagccatttatacagtgaca

SEQ ID NO: 3525415 - DNA, 25 bp, Homo sapien
aaagccacttggcacaactatcctg

SEQ ID NO: 3525416 - DNA, 25 bp, Homo sapien
aagcttgtttctgccttaagtcacc

SEQ ID NO: 3525417 - DNA, 25 bp, Homo sapien
ttaagcttgtttctgccttaagtca

SEQ ID NO: 3525418 - DNA, 25 bp, Homo sapien
taagcttgtttctgccttaagtcac

SEQ ID NO: 3525419 - DNA, 25 bp, Homo sapien
attttcgtcaatactcatggtgctc

SEQ ID NO: 3525420 - DNA, 25 bp, Homo sapien
ttttcgtcaatactcatggtgctcc

SEQ ID NO: 3525421 - DNA, 25 bp, Homo sapien
tttcgtcaatactcatggtgctcca

SEQ ID NO: 3525422 - DNA, 25 bp, Homo sapien
tcagctgttagtgataactgcagat

SEQ ID NO: 3525423 - DNA, 25 bp, Homo sapien
agctgttagtgataactgcagattt

SEQ ID NO: 3525424 - DNA, 25 bp, Homo sapien
cagctgttagtgataactgcagatt

SEQ ID NO: 3525425 - DNA, 25 bp, Homo sapien
tttcttaaagaatgctaccctccat

SEQ ID NO: 3525426 - DNA, 25 bp, Homo sapien
cctccatttaagaggcttcagttgc

SEQ ID NO: 3525427 - DNA, 25 bp, Homo sapien
gggcattttcattccaaaacaggac

SEQ ID NO: 3525428 - DNA, 25 bp, Homo sapien
ctgtaggtcacctctcttaggggca

SEQ ID NO: 3525429 - DNA, 25 bp, Homo sapien
gaagtcatcagtgtagccagggaaa

SEQ ID NO: 3525430 - DNA, 25 bp, Homo sapien
agtcatcagtgtagccagggaaatc

SEQ ID NO: 3525431 - DNA, 25 bp, Homo sapien
tggtttcattttgctccccattaat

SEQ ID NO: 3525432 - DNA, 25 bp, Homo sapien
tttgctccccattaatctctgaagt

SEQ ID NO: 3525433 - DNA, 25 bp, Homo sapien
catctcttattgtgttgcttcctat

SEQ ID NO: 3525434 - DNA, 25 bp, Homo sapien
caggacatgcatctcttattgtgtt

SEQ ID NO: 3525435 - DNA, 25 bp, Homo sapien
catgcatctcttattgtgttgcttc

SEQ ID NO: 3525436 - DNA, 25 bp, Homo sapien
ggacatgcatctcttattgtgttgc

SEQ ID NO: 3525437 - DNA, 25 bp, Homo sapien
caccggaaacatccatcctcctttt

SEQ ID NO: 3525438 - DNA, 25 bp, Homo sapien
catcttcctgaacaaacttcggccc

SEQ ID NO: 3525439 - DNA, 25 bp, Homo sapien
ttcggcccaccggaaacatccatcc

SEQ ID NO: 3525440 - DNA, 25 bp, Homo sapien
atcttcctgaacaaacttcggccca

SEQ ID NO: 3525441 - DNA, 25 bp, Homo sapien
agcagttctctggaatttattcata

SEQ ID NO: 3525442 - DNA, 25 bp, Homo sapien
ctggaatttattcatattacataac

SEQ ID NO: 3525443 - DNA, 25 bp, Homo sapien
caagacagtattatagaccacaggc

SEQ ID NO: 3525444 - DNA, 25 bp, Homo sapien
tatatacctcatataagttgaatta

SEQ ID NO: 3525445 - DNA, 25 bp, Homo sapien
tgtaagacccatttcatcatcgtga

SEQ ID NO: 3525446 - DNA, 25 bp, Homo sapien
tagacatcctgattactagtaagat

SEQ ID NO: 3525447 - DNA, 25 bp, Homo sapien
tgtgaaagtagaagagctatagtat

SEQ ID NO: 3525448 - DNA, 25 bp, Homo sapien
aatgtgtagtttacctgctttctcc

SEQ ID NO: 3525449 - DNA, 25 bp, Homo sapien
gccatggccccgttgaatgcagtca

SEQ ID NO: 3525450 - DNA, 25 bp, Homo sapien
aattatggtactagggcttcaggca

SEQ ID NO: 3525451 - DNA, 25 bp, Homo sapien
tagggtcagctttcctgccatggcc

SEQ ID NO: 3525452 - DNA, 25 bp, Homo sapien
gctggctcactggaagaatcctgca

SEQ ID NO: 3525453 - DNA, 25 bp, Homo sapien
ggcagggctgtaatggtgaaatctt

SEQ ID NO: 3525454 - DNA, 25 bp, Homo sapien
caaaaggctaggatgtagatgacac

SEQ ID NO: 3525455 - DNA, 25 bp, Homo sapien
cctcaggatggccaaaaattgtaag

SEQ ID NO: 3525456 - DNA, 25 bp, Homo sapien
tccttgacaaaatccacgtgacagt

SEQ ID NO: 3525457 - DNA, 25 bp, Homo sapien
aaggttccggtgcattgtctaatcg

SEQ ID NO: 3525458 - DNA, 25 bp, Homo sapien
tgtagtagctagaattcccaaaact

SEQ ID NO: 3525459 - DNA, 25 bp, Homo sapien
caaaactcacatcataaggttccgg

SEQ ID NO: 3525460 - DNA, 25 bp, Homo sapien
agtacgaagtggaggtatgtcatcc

SEQ ID NO: 3525461 - DNA, 25 bp, Homo sapien
taagcaatgagacacccagaatagc

SEQ ID NO: 3525462 - DNA, 25 bp, Homo sapien
cagaatagcacctaaaatggccccg

SEQ ID NO: 3525463 - DNA, 25 bp, Homo sapien
catttctgtcgtcataaagtcgccg

SEQ ID NO: 3525464 - DNA, 25 bp, Homo sapien
aaagtcgccgatgggaaaatgaatc

SEQ ID NO: 3525465 - DNA, 25 bp, Homo sapien
ttattcaaagaaccgaactctatgc

SEQ ID NO: 3525466 - DNA, 25 bp, Homo sapien
attcaaagaaccgaactctatgcat

SEQ ID NO: 3525467 - DNA, 25 bp, Homo sapien
ataattattcaaagaaccgaactct

SEQ ID NO: 3525468 - DNA, 25 bp, Homo sapien
attattcaaagaaccgaactctatg

SEQ ID NO: 3525469 - DNA, 25 bp, Homo sapien
gatctgacgtatttggaaagagttt

SEQ ID NO: 3525470 - DNA, 25 bp, Homo sapien
ttggtgaattttaaggtaggctgta

SEQ ID NO: 3525471 - DNA, 25 bp, Homo sapien
tatcactgtttgtggtaagccatcc

SEQ ID NO: 3525472 - DNA, 25 bp, Homo sapien
aggggtaaacccagtgaagctatca

SEQ ID NO: 3525473 - DNA, 25 bp, Homo sapien
gaatgactcgccttgagatttgagg

SEQ ID NO: 3525474 - DNA, 25 bp, Homo sapien
acaaagctatggatcaagggagggc

SEQ ID NO: 3525475 - DNA, 25 bp, Homo sapien
catggctccccgatagaagtgaata

SEQ ID NO: 3525476 - DNA, 25 bp, Homo sapien
ggtgtcattgaccaaagaccaagtg

SEQ ID NO: 3525477 - DNA, 25 bp, Homo sapien
cccttgatgtggcaagaatagattg

SEQ ID NO: 3525478 - DNA, 25 bp, Homo sapien
aatcccttgatgtggcaagaataga

SEQ ID NO: 3525479 - DNA, 25 bp, Homo sapien
gatgtggcaagaatagattgtatta

SEQ ID NO: 3525480 - DNA, 25 bp, Homo sapien
aacaatcccttgatgtggcaagaat

SEQ ID NO: 3525481 - DNA, 25 bp, Homo sapien
ctcaaagaaaactctgtctgctatg

SEQ ID NO: 3525482 - DNA, 25 bp, Homo sapien
tctcaaagaaaactctgtctgctat

SEQ ID NO: 3525483 - DNA, 25 bp, Homo sapien
tgacaatgtcgcactgagcaggagg

SEQ ID NO: 3525484 - DNA, 25 bp, Homo sapien
gcttgtgtaacagagcgcccaggaa

SEQ ID NO: 3525485 - DNA, 25 bp, Homo sapien
tcaggcttaggaggtatttacaatc

SEQ ID NO: 3525486 - DNA, 25 bp, Homo sapien
gaaaggaatctgtcgtgcattagag

SEQ ID NO: 3525487 - DNA, 25 bp, Homo sapien
aaatgttcaaaatctgccgctgcac

SEQ ID NO: 3525488 - DNA, 25 bp, Homo sapien
gagggactctgcttccaagttaaga

SEQ ID NO: 3525489 - DNA, 25 bp, Homo sapien
tgaccaaccagttccagatattgcg

SEQ ID NO: 3525490 - DNA, 25 bp, Homo sapien
tacttgggtgctgtccaaactggca

SEQ ID NO: 3525491 - DNA, 25 bp, Homo sapien
tgacaagcctctagctggatccaga

SEQ ID NO: 3525492 - DNA, 25 bp, Homo sapien
gccatgtgggaacaatgacaagcct

SEQ ID NO: 3525493 - DNA, 25 bp, Homo sapien
cacaggcagctacaaagcagttggg

SEQ ID NO: 3525494 - DNA, 25 bp, Homo sapien
tgttagttgtttgccacacacaggc

SEQ ID NO: 3525495 - DNA, 25 bp, Homo sapien
tctacatgaccgaatacgacgagag

SEQ ID NO: 3525496 - DNA, 25 bp, Homo sapien
tgattccagacgtaccaaagggtct

SEQ ID NO: 3525497 - DNA, 25 bp, Homo sapien
ggaacatttgcaacaacaacggaga

SEQ ID NO: 3525498 - DNA, 25 bp, Homo sapien
accatgaatggccttagttgacacc

SEQ ID NO: 3525499 - DNA, 25 bp, Homo sapien
taatgttatccacagattcagcctg

SEQ ID NO: 3525500 - DNA, 25 bp, Homo sapien
aacattcttaaaagtggttagcaca

SEQ ID NO: 3525501 - DNA, 25 bp, Homo sapien
tactcactgcagttatcctgaaaat

SEQ ID NO: 3525502 - DNA, 25 bp, Homo sapien
aaataagtgatttgaaggttgctca

SEQ ID NO: 3525503 - DNA, 25 bp, Homo sapien
tctatagtaaacctagctaatttgc

SEQ ID NO: 3525504 - DNA, 25 bp, Homo sapien
gtatcattttcatgtgtaccattga

SEQ ID NO: 3525505 - DNA, 25 bp, Homo sapien
catgtacatacagctataacttctg

SEQ ID NO: 3525506 - DNA, 25 bp, Homo sapien
gcaatattgagattaagtacatgag

SEQ ID NO: 3525507 - DNA, 25 bp, Homo sapien
tggtgtaaccctataaagccacaaa

SEQ ID NO: 3525508 - DNA, 25 bp, Homo sapien
gagtcatagttgctttgaactgtgc

SEQ ID NO: 3525509 - DNA, 25 bp, Homo sapien
gccacatggccaatggtttactttt

SEQ ID NO: 3525510 - DNA, 25 bp, Homo sapien
tcctctattttttccgtatctgatc

SEQ ID NO: 3525511 - DNA, 25 bp, Homo sapien
ataaatcatagtaatgaattgcatc

SEQ ID NO: 3525512 - DNA, 25 bp, Homo sapien
taaatcatagtaatgaattgcatct

SEQ ID NO: 3525513 - DNA, 25 bp, Homo sapien
aataaatcatagtaatgaattgcat

SEQ ID NO: 3525514 - DNA, 25 bp, Homo sapien
tattttatttaaactctggcattaa

SEQ ID NO: 3525515 - DNA, 25 bp, Homo sapien
ttctcggaaatgtactgacctagtg

SEQ ID NO: 3525516 - DNA, 25 bp, Homo sapien
gctgctaatcctagtgagggcctga

SEQ ID NO: 3525517 - DNA, 25 bp, Homo sapien
tgaacctaagccatttgactgcagt

SEQ ID NO: 3525518 - DNA, 25 bp, Homo sapien
gaagacatactgcatggacagcaca

SEQ ID NO: 3525519 - DNA, 25 bp, Homo sapien
tagaaatgggtagtctcaaatgcca

SEQ ID NO: 3525520 - DNA, 25 bp, Homo sapien
gacatccctgtcttctagcaatggc

SEQ ID NO: 3525521 - DNA, 25 bp, Homo sapien
tttcaaagaatatcccgagagacag

SEQ ID NO: 3525522 - DNA, 25 bp, Homo sapien
tagaaataggcaccagacatccctg

SEQ ID NO: 3525523 - DNA, 25 bp, Homo sapien
acaccagcatagtgttttgtacttc

SEQ ID NO: 3525524 - DNA, 25 bp, Homo sapien
tgaactccacaccagcatagtgttt

SEQ ID NO: 3525525 - DNA, 25 bp, Homo sapien
cagtggttgaatatcctcacctctt

SEQ ID NO: 3525526 - DNA, 25 bp, Homo sapien
taacagtggttgaatatcctcacct

SEQ ID NO: 3525527 - DNA, 25 bp, Homo sapien
cagcaacaatgcatcctaagcagcc

SEQ ID NO: 3525528 - DNA, 25 bp, Homo sapien
cccactgcactgtagtaaaggtagg

SEQ ID NO: 3525529 - DNA, 25 bp, Homo sapien
gaggctgatgattactccagcaaca

SEQ ID NO: 3525530 - DNA, 25 bp, Homo sapien
gagtaccaggtatcagctattccag

SEQ ID NO: 3525531 - DNA, 25 bp, Homo sapien
gacttagcaccatctataaagtcag

SEQ ID NO: 3525532 - DNA, 25 bp, Homo sapien
cagtaagaagacctcctagtgcacc

SEQ ID NO: 3525533 - DNA, 25 bp, Homo sapien
ctggtgcagggtaaatgaaggcccc

SEQ ID NO: 3525534 - DNA, 25 bp, Homo sapien
gtctgttgacagaggcaaaggccat

SEQ ID NO: 3525535 - DNA, 25 bp, Homo sapien
tgctggatagtactggaggccctgt

SEQ ID NO: 3525536 - DNA, 25 bp, Homo sapien
ttcccagggagaataagcccagcat

SEQ ID NO: 3525537 - DNA, 25 bp, Homo sapien
gcattggtcctccacacatgccgtg

SEQ ID NO: 3525538 - DNA, 25 bp, Homo sapien
aacacgattcccagggagaataagc

SEQ ID NO: 3525539 - DNA, 25 bp, Homo sapien
agcccagcattggtcctccacacat

SEQ ID NO: 3525540 - DNA, 25 bp, Homo sapien
tttaatttggagctggtatcattaa

SEQ ID NO: 3525541 - DNA, 25 bp, Homo sapien
aggtacacatcacgccaaataagag

SEQ ID NO: 3525542 - DNA, 25 bp, Homo sapien
ctgcacaacacctcccatgacagat

SEQ ID NO: 3525543 - DNA, 25 bp, Homo sapien
agaggtacacatcacgccaaataag

SEQ ID NO: 3525544 - DNA, 25 bp, Homo sapien
acacctcccatgacagatgcagcca

SEQ ID NO: 3525545 - DNA, 25 bp, Homo sapien
ccgtgggttggataagcctcgtcta

SEQ ID NO: 3525546 - DNA, 25 bp, Homo sapien
cattctttcctgataccctgctgga

SEQ ID NO: 3525547 - DNA, 25 bp, Homo sapien
ggagttgccttggagtacacataaa

SEQ ID NO: 3525548 - DNA, 25 bp, Homo sapien
tgactggccatagtaagcacaacat

SEQ ID NO: 3525549 - DNA, 25 bp, Homo sapien
atgatatggaatagaaagtccacca

SEQ ID NO: 3525550 - DNA, 25 bp, Homo sapien
gatatggaatagaaagtccaccagc

SEQ ID NO: 3525551 - DNA, 25 bp, Homo sapien
ggaatagaaagtccaccagctgtac

SEQ ID NO: 3525552 - DNA, 25 bp, Homo sapien
tatggaatagaaagtccaccagctg

SEQ ID NO: 3525553 - DNA, 25 bp, Homo sapien
aagcctttactgatccaggtgctca

SEQ ID NO: 3525554 - DNA, 25 bp, Homo sapien
acagctcttgacaaaatcctcaaag

SEQ ID NO: 3525555 - DNA, 25 bp, Homo sapien
aggcattgatgctggaagccacggt

SEQ ID NO: 3525556 - DNA, 25 bp, Homo sapien
agcttgtcggagagatgaggaaaac

SEQ ID NO: 3525557 - DNA, 25 bp, Homo sapien
aagccacaaaaagtcctggcagtcc

SEQ ID NO: 3525558 - DNA, 25 bp, Homo sapien
ctcagagttccactgaaggcacaag

SEQ ID NO: 3525559 - DNA, 25 bp, Homo sapien
gagttccactgaaggcacaagccac

SEQ ID NO: 3525560 - DNA, 25 bp, Homo sapien
acaaaaagtcctggcagtcctggca

SEQ ID NO: 3525561 - DNA, 25 bp, Homo sapien
aggcagcagcgacatccaaagccat

SEQ ID NO: 3525562 - DNA, 25 bp, Homo sapien
agagtccaaaggcagcagcgacatc

SEQ ID NO: 3525563 - DNA, 25 bp, Homo sapien
tccaaaggcagcagcgacatccaaa

SEQ ID NO: 3525564 - DNA, 25 bp, Homo sapien
gaagagtccaaaggcagcagcgaca

SEQ ID NO: 3525565 - DNA, 25 bp, Homo sapien
caagggtcacagtctttaaagtgag

SEQ ID NO: 3525566 - DNA, 25 bp, Homo sapien
tctttaaagtgagagtacatgatta

SEQ ID NO: 3525567 - DNA, 25 bp, Homo sapien
tgagagtacatgattaagccagaga

SEQ ID NO: 3525568 - DNA, 25 bp, Homo sapien
agtccaagggtcacagtctttaaag

SEQ ID NO: 3525569 - DNA, 25 bp, Homo sapien
atgcaactgtgtgtagatgtgctca

SEQ ID NO: 3525570 - DNA, 25 bp, Homo sapien
tgtgtgtagatgtgctcatcgtaac

SEQ ID NO: 3525571 - DNA, 25 bp, Homo sapien
gacgtgataccctgcatcaactcct

SEQ ID NO: 3525572 - DNA, 25 bp, Homo sapien
taactgggagatgggacgtgatacc

SEQ ID NO: 3525573 - DNA, 25 bp, Homo sapien
tatataactttggtctctactttgg

SEQ ID NO: 3525574 - DNA, 25 bp, Homo sapien
caaaatggttgaatcgtttccaggc

SEQ ID NO: 3525575 - DNA, 25 bp, Homo sapien
tttcaagtatcctggttaggctggg

SEQ ID NO: 3525576 - DNA, 25 bp, Homo sapien
aaataagaaactgtgcattgaaagc

SEQ ID NO: 3525577 - DNA, 25 bp, Homo sapien
tagttgattgattgaccccatagat

SEQ ID NO: 3525578 - DNA, 25 bp, Homo sapien
gcatcgctgaatagttgattgattg

SEQ ID NO: 3525579 - DNA, 25 bp, Homo sapien
ttctgttttgcaagagatgcatcgc

SEQ ID NO: 3525580 - DNA, 25 bp, Homo sapien
gattgaccccatagattccgagcca

SEQ ID NO: 3525581 - DNA, 25 bp, Homo sapien
tcgcctgagaggatctacatcaaag

SEQ ID NO: 3525582 - DNA, 25 bp, Homo sapien
aaaaagtgtgtcgcctgagaggatc

SEQ ID NO: 3525583 - DNA, 25 bp, Homo sapien
tgtgtcgcctgagaggatctacatc

SEQ ID NO: 3525584 - DNA, 25 bp, Homo sapien
aaagtgtgtcgcctgagaggatcta

SEQ ID NO: 3525585 - DNA, 25 bp, Homo sapien
ccccagcatgagttgatccttgaat

SEQ ID NO: 3525586 - DNA, 25 bp, Homo sapien
gcccacaatcatgacaaccatctga

SEQ ID NO: 3525587 - DNA, 25 bp, Homo sapien
tgagaaccgttaagaagcccacaat

SEQ ID NO: 3525588 - DNA, 25 bp, Homo sapien
tcaaatatatgtagtcgagatccat

SEQ ID NO: 3525589 - DNA, 25 bp, Homo sapien
catttaagtctgagtactctcttcc

SEQ ID NO: 3525590 - DNA, 25 bp, Homo sapien
tatttaagcaatgccataatcctca

SEQ ID NO: 3525591 - DNA, 25 bp, Homo sapien
ggtccccttgaaattttgccatgca

SEQ ID NO: 3525592 - DNA, 25 bp, Homo sapien
cctcagaaattcaaggatgataaaa

SEQ ID NO: 3525593 - DNA, 25 bp, Homo sapien
gataattcaactgtctgggaaccac

SEQ ID NO: 3525594 - DNA, 25 bp, Homo sapien
gtaaatgtaatccaggcttacccag

SEQ ID NO: 3525595 - DNA, 25 bp, Homo sapien
agattatagttgcagggaatgggca

SEQ ID NO: 3525596 - DNA, 25 bp, Homo sapien
tgtacatggtacaatgactcagaag

SEQ ID NO: 3525597 - DNA, 25 bp, Homo sapien
ctgctataattagatgcctattgct

SEQ ID NO: 3525598 - DNA, 25 bp, Homo sapien
ttaattttggaataacgaattctgc

SEQ ID NO: 3525599 - DNA, 25 bp, Homo sapien
gagatttgcccttatcccatattag

SEQ ID NO: 3525600 - DNA, 25 bp, Homo sapien
aactgtgacagataagccgacatac

SEQ ID NO: 3525601 - DNA, 25 bp, Homo sapien
gagccccagagatcaaacccagtca

SEQ ID NO: 3525602 - DNA, 25 bp, Homo sapien
agaatgtgcaaacaattcctgttgc

SEQ ID NO: 3525603 - DNA, 25 bp, Homo sapien
agggtacagtagaatgtgcaaacaa

SEQ ID NO: 3525604 - DNA, 25 bp, Homo sapien
cagagccccagagatcaaacccagt

SEQ ID NO: 3525605 - DNA, 25 bp, Homo sapien
tgagtgccagggcaggagcatacac

SEQ ID NO: 3525606 - DNA, 25 bp, Homo sapien
tacaccaccactcctgtgtagagaa

SEQ ID NO: 3525607 - DNA, 25 bp, Homo sapien
agggcaggagcatacaccaccactc

SEQ ID NO: 3525608 - DNA, 25 bp, Homo sapien
ggagcatacaccaccactcctgtgt

SEQ ID NO: 3525609 - DNA, 25 bp, Homo sapien
cagcatagcgaactggtttgttgaa

SEQ ID NO: 3525610 - DNA, 25 bp, Homo sapien
ctgtacaatgtagatgaccgtggca

SEQ ID NO: 3525611 - DNA, 25 bp, Homo sapien
gtttgttgaatcgtagttgtaagta

SEQ ID NO: 3525612 - DNA, 25 bp, Homo sapien
gatgaccgtggcagcatagcgaact

SEQ ID NO: 3525613 - DNA, 25 bp, Homo sapien
atctcactctgtgatctgtgcttca

SEQ ID NO: 3525614 - DNA, 25 bp, Homo sapien
tctcactctgtgatctgtgcttcag

SEQ ID NO: 3525615 - DNA, 25 bp, Homo sapien
gaattccagtttgagatttgctggc

SEQ ID NO: 3525616 - DNA, 25 bp, Homo sapien
ctccttgaattccagtttgagattt

SEQ ID NO: 3525617 - DNA, 25 bp, Homo sapien
tgccccaaagcggtagacttcagaa

SEQ ID NO: 3525618 - DNA, 25 bp, Homo sapien
tgacatgaagctggctgtcagagac

SEQ ID NO: 3525619 - DNA, 25 bp, Homo sapien
tgtcagagacaagccgacagggcca

SEQ ID NO: 3525620 - DNA, 25 bp, Homo sapien
gaagactaggaaggatgccccaaag

SEQ ID NO: 3525621 - DNA, 25 bp, Homo sapien
tccttaatggcaaagaacaccccaa

SEQ ID NO: 3525622 - DNA, 25 bp, Homo sapien
tttctctccttaatggcaaagaaca

SEQ ID NO: 3525623 - DNA, 25 bp, Homo sapien
tggcaaagaacaccccaattccaga

SEQ ID NO: 3525624 - DNA, 25 bp, Homo sapien
caaactgcaaagttcttcacctcca

SEQ ID NO: 3525625 - DNA, 25 bp, Homo sapien
gagtttctttcaacgaggtctcagg

SEQ ID NO: 3525626 - DNA, 25 bp, Homo sapien
tgtgaatcttcagacaccaacgtgt

SEQ ID NO: 3525627 - DNA, 25 bp, Homo sapien
caacgtgtacttagtgaagatctca

SEQ ID NO: 3525628 - DNA, 25 bp, Homo sapien
aaatctgaccctagctaagagctgt

SEQ ID NO: 3525629 - DNA, 25 bp, Homo sapien
cctctgtttaaattcctccactaga

SEQ ID NO: 3525630 - DNA, 25 bp, Homo sapien
taaaaatatgaagactctcccaaga

SEQ ID NO: 3525631 - DNA, 25 bp, Homo sapien
cactagatttggagatttgatatga

SEQ ID NO: 3525632 - DNA, 25 bp, Homo sapien
ctgcaaatcttggtctttaatatat

SEQ ID NO: 3525633 - DNA, 25 bp, Homo sapien
ggcctatcttttccatggtcatcag

SEQ ID NO: 3525634 - DNA, 25 bp, Homo sapien
tatgtatatcgagagatatcaccac

SEQ ID NO: 3525635 - DNA, 25 bp, Homo sapien
ctacttatgtatatcgagagatatc

SEQ ID NO: 3525636 - DNA, 25 bp, Homo sapien
tttgcatattctcaagggcctatct

SEQ ID NO: 3525637 - DNA, 25 bp, Homo sapien
ttcagtgatcttcactacacactta

SEQ ID NO: 3525638 - DNA, 25 bp, Homo sapien
tcttcagtgatcttcactacacact

SEQ ID NO: 3525639 - DNA, 25 bp, Homo sapien
cttcagtgatcttcactacacactt

SEQ ID NO: 3525640 - DNA, 25 bp, Homo sapien
ttactctgaaatctcttaaactcac

SEQ ID NO: 3525641 - DNA, 25 bp, Homo sapien
tttgactcttactctgaaatctctt

SEQ ID NO: 3525642 - DNA, 25 bp, Homo sapien
tgactcttactctgaaatctcttaa

SEQ ID NO: 3525643 - DNA, 25 bp, Homo sapien
ctcttactctgaaatctcttaaact

SEQ ID NO: 3525644 - DNA, 25 bp, Homo sapien
ccaagggcattcattatggttcttt

SEQ ID NO: 3525645 - DNA, 25 bp, Homo sapien
cccaagggcattcattatggttctt

SEQ ID NO: 3525646 - DNA, 25 bp, Homo sapien
tcccaagggcattcattatggttct

SEQ ID NO: 3525647 - DNA, 25 bp, Homo sapien
gacctcaggccaagcgggacagtat

SEQ ID NO: 3525648 - DNA, 25 bp, Homo sapien
tcaggccaagcgggacagtatgaac

SEQ ID NO: 3525649 - DNA, 25 bp, Homo sapien
acctcaggccaagcgggacagtatg

SEQ ID NO: 3525650 - DNA, 25 bp, Homo sapien
tagacctcaggccaagcgggacagt

SEQ ID NO: 3525651 - DNA, 25 bp, Homo sapien
gatctactcaaaacctcaggttcct

SEQ ID NO: 3525652 - DNA, 25 bp, Homo sapien
ctgagcagctctggtcagatctact

SEQ ID NO: 3525653 - DNA, 25 bp, Homo sapien
gcagctctggtcagatctactcaaa

SEQ ID NO: 3525654 - DNA, 25 bp, Homo sapien
ggtcagatctactcaaaacctcagg

SEQ ID NO: 3525655 - DNA, 25 bp, Homo sapien
tagtacttgtagtcaaattctaacc

SEQ ID NO: 3525656 - DNA, 25 bp, Homo sapien
caaattctaacccttccacactgaa

SEQ ID NO: 3525657 - DNA, 25 bp, Homo sapien
ctcatagaactgattatagtacttg

SEQ ID NO: 3525658 - DNA, 25 bp, Homo sapien
tctgtatgtgtaaggccaatggaaa

SEQ ID NO: 3525659 - DNA, 25 bp, Homo sapien
caggccaatcatagattcagaattg

SEQ ID NO: 3525660 - DNA, 25 bp, Homo sapien
caatcatagattcagaattggagtc

SEQ ID NO: 3525661 - DNA, 25 bp, Homo sapien
ggcaggccaatcatagattcagaat

SEQ ID NO: 3525662 - DNA, 25 bp, Homo sapien
tagattcagaattggagtcgttcat

SEQ ID NO: 3525663 - DNA, 25 bp, Homo sapien
tttttgataagcatttattaccagg

SEQ ID NO: 3525664 - DNA, 25 bp, Homo sapien
tgataagcatttattaccaggctca

SEQ ID NO: 3525665 - DNA, 25 bp, Homo sapien
gataagcatttattaccaggctcat

SEQ ID NO: 3525666 - DNA, 25 bp, Homo sapien
tttgataagcatttattaccaggct

SEQ ID NO: 3525667 - DNA, 25 bp, Homo sapien
ttcatagatatacactcacaattat

SEQ ID NO: 3525668 - DNA, 25 bp, Homo sapien
tttattgctaatgcccctttctgtg

SEQ ID NO: 3525669 - DNA, 25 bp, Homo sapien
gccagagacccaccatttattgcta

SEQ ID NO: 3525670 - DNA, 25 bp, Homo sapien
tggtagctgagcctaagtggttcag

SEQ ID NO: 3525671 - DNA, 25 bp, Homo sapien
gcccctttctgtgggaagtctgact

SEQ ID NO: 3525672 - DNA, 25 bp, Homo sapien
cattctggtcatgatgtgttttttc

SEQ ID NO: 3525673 - DNA, 25 bp, Homo sapien
catcttccccaagctagttgttttg

SEQ ID NO: 3525674 - DNA, 25 bp, Homo sapien
aaagaagcattctggtcatgatgtg

SEQ ID NO: 3525675 - DNA, 25 bp, Homo sapien
gttgttttgcacaccaaagaagcat

SEQ ID NO: 3525676 - DNA, 25 bp, Homo sapien
tagtagttctaagcttccagtgaac

SEQ ID NO: 3525677 - DNA, 25 bp, Homo sapien
ttctgaggatctaccagaaccactt

SEQ ID NO: 3525678 - DNA, 25 bp, Homo sapien
tgggtagggcactctactatcaact

SEQ ID NO: 3525679 - DNA, 25 bp, Homo sapien
aattgctgacccatgtttctgagga

SEQ ID NO: 3525680 - DNA, 25 bp, Homo sapien
ggttcgcctttaggccatttcctga

SEQ ID NO: 3525681 - DNA, 25 bp, Homo sapien
gaattttcagccttcctataatgga

SEQ ID NO: 3525682 - DNA, 25 bp, Homo sapien
cagatgccgcatgtgggttcgcctt

SEQ ID NO: 3525683 - DNA, 25 bp, Homo sapien
aatatattgggagctcaatcggccc

SEQ ID NO: 3525684 - DNA, 25 bp, Homo sapien
tgctggatctctgaggaaacattcc

SEQ ID NO: 3525685 - DNA, 25 bp, Homo sapien
agtagccaaatcagaccgatgatga

SEQ ID NO: 3525686 - DNA, 25 bp, Homo sapien
gagaacagcatgctatattagtaac

SEQ ID NO: 3525687 - DNA, 25 bp, Homo sapien
aatcagaccgatgatgagaacagca

SEQ ID NO: 3525688 - DNA, 25 bp, Homo sapien
taacaagtagcaagactgaaacagt

SEQ ID NO: 3525689 - DNA, 25 bp, Homo sapien
tgagagctgttgcaattgatattac

SEQ ID NO: 3525690 - DNA, 25 bp, Homo sapien
catacaaaagattattccaggctac

SEQ ID NO: 3525691 - DNA, 25 bp, Homo sapien
aactctgaacatatcaataacaagt

SEQ ID NO: 3525692 - DNA, 25 bp, Homo sapien
tggagagcatccaacaggatatcct

SEQ ID NO: 3525693 - DNA, 25 bp, Homo sapien
ccatgactggagagcatccaacagg

SEQ ID NO: 3525694 - DNA, 25 bp, Homo sapien
actgatgtgtatgacgaggaaacac

SEQ ID NO: 3525695 - DNA, 25 bp, Homo sapien
gagcatccaacaggatatcctttta

SEQ ID NO: 3525696 - DNA, 25 bp, Homo sapien
tcattcttgatcctcaggatctgac

SEQ ID NO: 3525697 - DNA, 25 bp, Homo sapien
tcttgatcctcaggatctgacacat

SEQ ID NO: 3525698 - DNA, 25 bp, Homo sapien
tacttcttcattcttgatcctcagg

SEQ ID NO: 3525699 - DNA, 25 bp, Homo sapien
tcttcattcttgatcctcaggatct

SEQ ID NO: 3525700 - DNA, 25 bp, Homo sapien
tgctcagatgcatttaatgtggata

SEQ ID NO: 3525701 - DNA, 25 bp, Homo sapien
gctcagatgcatttaatgtggatac

SEQ ID NO: 3525702 - DNA, 25 bp, Homo sapien
ctgctcagatgcatttaatgtggat

SEQ ID NO: 3525703 - DNA, 25 bp, Homo sapien
ctcagatgcatttaatgtggatacc

SEQ ID NO: 3525704 - DNA, 25 bp, Homo sapien
tgtgactgagtcattggcattagac

SEQ ID NO: 3525705 - DNA, 25 bp, Homo sapien
atgtgactgagtcattggcattaga

SEQ ID NO: 3525706 - DNA, 25 bp, Homo sapien
tatgtgactgagtcattggcattag

SEQ ID NO: 3525707 - DNA, 25 bp, Homo sapien
ttatgtgactgagtcattggcatta

SEQ ID NO: 3525708 - DNA, 25 bp, Homo sapien
cttcatgctggtggaagactctcca

SEQ ID NO: 3525709 - DNA, 25 bp, Homo sapien
gcagatgactaattgtcttggtcca

SEQ ID NO: 3525710 - DNA, 25 bp, Homo sapien
aaggtaccacctctcgatattggca

SEQ ID NO: 3525711 - DNA, 25 bp, Homo sapien
catcccttggtgaagaagctaagca

SEQ ID NO: 3525712 - DNA, 25 bp, Homo sapien
tgcagggagatttctgatgcctctg

SEQ ID NO: 3525713 - DNA, 25 bp, Homo sapien
ggccaagctttgtagtggttgcaca

SEQ ID NO: 3525714 - DNA, 25 bp, Homo sapien
gcacagtcacactgatatgctgatt

SEQ ID NO: 3525715 - DNA, 25 bp, Homo sapien
gctttgtcatcagtgctatagtaaa

SEQ ID NO: 3525716 - DNA, 25 bp, Homo sapien
tgtccatacaggtctcccaaactaa

SEQ ID NO: 3525717 - DNA, 25 bp, Homo sapien
aaagacccctctgagtaagtaggag

SEQ ID NO: 3525718 - DNA, 25 bp, Homo sapien
gacgaactggatggccataataaga

SEQ ID NO: 3525719 - DNA, 25 bp, Homo sapien
tcttaaatcttaggtagaagccaag

SEQ ID NO: 3525720 - DNA, 25 bp, Homo sapien
ggaatacaggcgctcatcactatgc

SEQ ID NO: 3525721 - DNA, 25 bp, Homo sapien
ggcaagaagcaacaagttgcaggct

SEQ ID NO: 3525722 - DNA, 25 bp, Homo sapien
acagccctgcgaatccttcgggcaa

SEQ ID NO: 3525723 - DNA, 25 bp, Homo sapien
ctgcgaatccttcgggcaagaagca

SEQ ID NO: 3525724 - DNA, 25 bp, Homo sapien
actcacagccctgcgaatccttcgg

SEQ ID NO: 3525725 - DNA, 25 bp, Homo sapien
tctaaggaccaaagctgacagtttc

SEQ ID NO: 3525726 - DNA, 25 bp, Homo sapien
ggatgtgacgggcaccagaatgctc

SEQ ID NO: 3525727 - DNA, 25 bp, Homo sapien
aactgccaggagcaaaaaggcttcc

SEQ ID NO: 3525728 - DNA, 25 bp, Homo sapien
gtaccacatcagattggaaactggg

SEQ ID NO: 3525729 - DNA, 25 bp, Homo sapien
tctattcagttgcacatatattggg

SEQ ID NO: 3525730 - DNA, 25 bp, Homo sapien
cattacttgaagtacattaaaacca

SEQ ID NO: 3525731 - DNA, 25 bp, Homo sapien
tctctccttgaggacttatcaagtc

SEQ ID NO: 3525732 - DNA, 25 bp, Homo sapien
ggaagacacggataattatcactcc

SEQ ID NO: 3525733 - DNA, 25 bp, Homo sapien
ggtgctacaaggactaccggcatca

SEQ ID NO: 3525734 - DNA, 25 bp, Homo sapien
ccacaaaagagagtgaagtaatcac

SEQ ID NO: 3525735 - DNA, 25 bp, Homo sapien
acagtgcacctgcttggctcttggc

SEQ ID NO: 3525736 - DNA, 25 bp, Homo sapien
tagaagggccttgatcgtggctctg

SEQ ID NO: 3525737 - DNA, 25 bp, Homo sapien
cttgcagggcttgtctagtagtaac

SEQ ID NO: 3525738 - DNA, 25 bp, Homo sapien
taaagagactaaagaggtcaggtgc

SEQ ID NO: 3525739 - DNA, 25 bp, Homo sapien
tagaactcctagcattcttgcaggg

SEQ ID NO: 3525740 - DNA, 25 bp, Homo sapien
tcatgtcgagatgtgagatactttc

SEQ ID NO: 3525741 - DNA, 25 bp, Homo sapien
ggaatcctaaatctgacacatattg

SEQ ID NO: 3525742 - DNA, 25 bp, Homo sapien
tgtctgatgctggacaaattatcta

SEQ ID NO: 3525743 - DNA, 25 bp, Homo sapien
ccttagaagggtgcatgaaatcata

SEQ ID NO: 3525744 - DNA, 25 bp, Homo sapien
caatgatagagtatctgttatggga

SEQ ID NO: 3525745 - DNA, 25 bp, Homo sapien
taagtgacatgatcctcataggtca

SEQ ID NO: 3525746 - DNA, 25 bp, Homo sapien
cctgctctttgcatgacagtcttct

SEQ ID NO: 3525747 - DNA, 25 bp, Homo sapien
tcagtgttgggctacacaagttggg

SEQ ID NO: 3525748 - DNA, 25 bp, Homo sapien
caatctagcggaagagacagagcct

SEQ ID NO: 3525749 - DNA, 25 bp, Homo sapien
tgatggtgccacgttagacatgcct

SEQ ID NO: 3525750 - DNA, 25 bp, Homo sapien
gactgctcttggttagatgcctaaa

SEQ ID NO: 3525751 - DNA, 25 bp, Homo sapien
tagaagtcaggtctccattgggata

SEQ ID NO: 3525752 - DNA, 25 bp, Homo sapien
tcagtagctgccttaaacaatgtcc

SEQ ID NO: 3525753 - DNA, 25 bp, Homo sapien
taatacgtgcatggcactgtaccag

SEQ ID NO: 3525754 - DNA, 25 bp, Homo sapien
tctggagcccttttaggaaaggtga

SEQ ID NO: 3525755 - DNA, 25 bp, Homo sapien
gaatgtatcctacgaagtaaatccc

SEQ ID NO: 3525756 - DNA, 25 bp, Homo sapien
gacatgacttaatccattgggaaac

SEQ ID NO: 3525757 - DNA, 25 bp, Homo sapien
tgacagtcaatatatgccaacagca

SEQ ID NO: 3525758 - DNA, 25 bp, Homo sapien
tccataaagcgaaggaacagactga

SEQ ID NO: 3525759 - DNA, 25 bp, Homo sapien
tgtaattgctgtatgtgggtaaatg

SEQ ID NO: 3525760 - DNA, 25 bp, Homo sapien
tgatccccaggatgatgcaaagcat

SEQ ID NO: 3525761 - DNA, 25 bp, Homo sapien
gatggggaaatactcatctaccaat

SEQ ID NO: 3525762 - DNA, 25 bp, Homo sapien
ttcagacaaaatgaatccactcctc

SEQ ID NO: 3525763 - DNA, 25 bp, Homo sapien
cagacaaaatgaatccactcctcaa

SEQ ID NO: 3525764 - DNA, 25 bp, Homo sapien
ggtcaagatggggaaatactcatct

SEQ ID NO: 3525765 - DNA, 25 bp, Homo sapien
cttggtcaccttcagtttgcatgca

SEQ ID NO: 3525766 - DNA, 25 bp, Homo sapien
gctcccaggagtaatcctaggtact

SEQ ID NO: 3525767 - DNA, 25 bp, Homo sapien
cttgtccttctaggatgctgctccc

SEQ ID NO: 3525768 - DNA, 25 bp, Homo sapien
ctcattagcacttcctgcacttgtc

SEQ ID NO: 3525769 - DNA, 25 bp, Homo sapien
ccgcacccagcgaattttttgtgtt

SEQ ID NO: 3525770 - DNA, 25 bp, Homo sapien
ctgcctaagcctcctgggtagctgg

SEQ ID NO: 3525771 - DNA, 25 bp, Homo sapien
tccacctccggggttgaagcaactc

SEQ ID NO: 3525772 - DNA, 25 bp, Homo sapien
cacctccggggttgaagcaactctc

SEQ ID NO: 3525773 - DNA, 25 bp, Homo sapien
cactcggacactttgaattctggta

SEQ ID NO: 3525774 - DNA, 25 bp, Homo sapien
tgaattctggtatgaagtccacatc

SEQ ID NO: 3525775 - DNA, 25 bp, Homo sapien
attctggtatgaagtccacatctcc

SEQ ID NO: 3525776 - DNA, 25 bp, Homo sapien
gaattctggtatgaagtccacatct

SEQ ID NO: 3525777 - DNA, 25 bp, Homo sapien
gcacaagctttgtgtttgcagctct

SEQ ID NO: 3525778 - DNA, 25 bp, Homo sapien
gagatccccaggcaccacctgggag

SEQ ID NO: 3525779 - DNA, 25 bp, Homo sapien
cagaggcagccttgcagagatcccc

SEQ ID NO: 3525780 - DNA, 25 bp, Homo sapien
gcagccaggattgttgcccactctg

SEQ ID NO: 3525781 - DNA, 25 bp, Homo sapien
atttttcagtgccactgactctgtt

SEQ ID NO: 3525782 - DNA, 25 bp, Homo sapien
taagtgggagaaatcacctatgcca

SEQ ID NO: 3525783 - DNA, 25 bp, Homo sapien
ctgtaatatgagttaggagcctggg

SEQ ID NO: 3525784 - DNA, 25 bp, Homo sapien
cctcatacagttgaaagggcactgt

SEQ ID NO: 3525785 - DNA, 25 bp, Homo sapien
caaggtaaagggctcttgatcctcc

SEQ ID NO: 3525786 - DNA, 25 bp, Homo sapien
ttctgcagcatggggtggctgcggg

SEQ ID NO: 3525787 - DNA, 25 bp, Homo sapien
gcagcatggggtggctgcgggtcat

SEQ ID NO: 3525788 - DNA, 25 bp, Homo sapien
ctgcagcatggggtggctgcgggtc

SEQ ID NO: 3525789 - DNA, 25 bp, Homo sapien
cctgagtaggcttctgcagcatggg

SEQ ID NO: 3525790 - DNA, 25 bp, Homo sapien
caaagaatcaaagaaaccacctcct

SEQ ID NO: 3525791 - DNA, 25 bp, Homo sapien
ctaggttttagctctcttgcacaca

SEQ ID NO: 3525792 - DNA, 25 bp, Homo sapien
cagtccattgaattggaatcaaaga

SEQ ID NO: 3525793 - DNA, 25 bp, Homo sapien
ttagctctcttgcacacaacttcaa

SEQ ID NO: 3525794 - DNA, 25 bp, Homo sapien
tcatcagagtatgggtctctggagt

SEQ ID NO: 3525795 - DNA, 25 bp, Homo sapien
gggctgcagacttagacccccttaa

SEQ ID NO: 3525796 - DNA, 25 bp, Homo sapien
ttacatccacttcatcagagtatgg

SEQ ID NO: 3525797 - DNA, 25 bp, Homo sapien
cagggctgcagacttagaccccctt

SEQ ID NO: 3525798 - DNA, 25 bp, Homo sapien
tcgtataatcaaggtatgtgaaaag

SEQ ID NO: 3525799 - DNA, 25 bp, Homo sapien
gaaaagtgcaatgggagcaaggagg

SEQ ID NO: 3525800 - DNA, 25 bp, Homo sapien
ctgaattcaagctggtgattcgtat

SEQ ID NO: 3525801 - DNA, 25 bp, Homo sapien
tgtgaaaagtgcaatgggagcaagg

SEQ ID NO: 3525802 - DNA, 25 bp, Homo sapien
tgtccgtgtcaagcagcattcaaag

SEQ ID NO: 3525803 - DNA, 25 bp, Homo sapien
tgccctcttgtttgtccgtgtcaag

SEQ ID NO: 3525804 - DNA, 25 bp, Homo sapien
gtgtcaagcagcattcaaagaactg

SEQ ID NO: 3525805 - DNA, 25 bp, Homo sapien
tcttgtttgtccgtgtcaagcagca

SEQ ID NO: 3525806 - DNA, 25 bp, Homo sapien
caagcagccctcatagactctggca

SEQ ID NO: 3525807 - DNA, 25 bp, Homo sapien
tggactctctggagtatgagtccaa

SEQ ID NO: 3525808 - DNA, 25 bp, Homo sapien
agactctggcatgggtttgtctgct

SEQ ID NO: 3525809 - DNA, 25 bp, Homo sapien
tctctggagtatgagtccaagcagc

SEQ ID NO: 3525810 - DNA, 25 bp, Homo sapien
ttgagcacaatatgccagacactct

SEQ ID NO: 3525811 - DNA, 25 bp, Homo sapien
tggcagcccggattctttcagagag

SEQ ID NO: 3525812 - DNA, 25 bp, Homo sapien
gagtctgactgctcttcaaagggag

SEQ ID NO: 3525813 - DNA, 25 bp, Homo sapien
aagtgtactcctagacctgtcagcg

SEQ ID NO: 3525814 - DNA, 25 bp, Homo sapien
cagcggccctctttggtattcagga

SEQ ID NO: 3525815 - DNA, 25 bp, Homo sapien
tttctgggcagcattagtggaaagt

SEQ ID NO: 3525816 - DNA, 25 bp, Homo sapien
gctttctgggcagcattagtggaaa

SEQ ID NO: 3525817 - DNA, 25 bp, Homo sapien
ttctgggcagcattagtggaaagtc

SEQ ID NO: 3525818 - DNA, 25 bp, Homo sapien
ctttctgggcagcattagtggaaag

SEQ ID NO: 3525819 - DNA, 25 bp, Homo sapien
aagaaattctaggaagcagcccaac

SEQ ID NO: 3525820 - DNA, 25 bp, Homo sapien
agaagtcactgaccagcactccagg

SEQ ID NO: 3525821 - DNA, 25 bp, Homo sapien
aaggctaaactggtggcctggcaac

SEQ ID NO: 3525822 - DNA, 25 bp, Homo sapien
gaagccaactccaagtgttcagggt

SEQ ID NO: 3525823 - DNA, 25 bp, Homo sapien
tcctgtgagttgaactgcacccaaa

SEQ ID NO: 3525824 - DNA, 25 bp, Homo sapien
tgtgagttgaactgcacccaaatga

SEQ ID NO: 3525825 - DNA, 25 bp, Homo sapien
taatcctgtgagttgaactgcaccc

SEQ ID NO: 3525826 - DNA, 25 bp, Homo sapien
tctaatcctgtgagttgaactgcac

SEQ ID NO: 3525827 - DNA, 25 bp, Homo sapien
ctgcagatgggatcagagatggagg

SEQ ID NO: 3525828 - DNA, 25 bp, Homo sapien
cagatgggatcagagatggaggtct

SEQ ID NO: 3525829 - DNA, 25 bp, Homo sapien
gcagatgggatcagagatggaggtc

SEQ ID NO: 3525830 - DNA, 25 bp, Homo sapien
atgggatcagagatggaggtctcac

SEQ ID NO: 3525831 - DNA, 25 bp, Homo sapien
catccaagtatcaggagagatgcat

SEQ ID NO: 3525832 - DNA, 25 bp, Homo sapien
gatgcatagttctaagaggagccat

SEQ ID NO: 3525833 - DNA, 25 bp, Homo sapien
ccatctaaaagcaggcagagtttga

SEQ ID NO: 3525834 - DNA, 25 bp, Homo sapien
gaggaaaagcatccaagtatcagga

SEQ ID NO: 3525835 - DNA, 25 bp, Homo sapien
ccgaacactgcgcttttctgaaggg

SEQ ID NO: 3525836 - DNA, 25 bp, Homo sapien
gaaattgttacaggaggagccaaga

SEQ ID NO: 3525837 - DNA, 25 bp, Homo sapien
agaaattgttacaggaggagccaag

SEQ ID NO: 3525838 - DNA, 25 bp, Homo sapien
agggcttaaaaagcgtcgcaccacg

SEQ ID NO: 3525839 - DNA, 25 bp, Homo sapien
ccatccgatatctcagtgactccag

SEQ ID NO: 3525840 - DNA, 25 bp, Homo sapien
ccaatgcccctctttggatgatcat

SEQ ID NO: 3525841 - DNA, 25 bp, Homo sapien
ggtcgatgctttgctccatccgata

SEQ ID NO: 3525842 - DNA, 25 bp, Homo sapien
tccaggtcctgcaatgatgcccctt

SEQ ID NO: 3525843 - DNA, 25 bp, Homo sapien
aaacgtgtttccacctgacacaaag

SEQ ID NO: 3525844 - DNA, 25 bp, Homo sapien
tgcattctccaaaccgggaaggaaa

SEQ ID NO: 3525845 - DNA, 25 bp, Homo sapien
gttgtgtcgattagctgcattctcc

SEQ ID NO: 3525846 - DNA, 25 bp, Homo sapien
gaaacgttcacattccctagagaaa

SEQ ID NO: 3525847 - DNA, 25 bp, Homo sapien
tatacactctgccttcgggtgcagg

SEQ ID NO: 3525848 - DNA, 25 bp, Homo sapien
gcccatttcaaacagatatatgatg

SEQ ID NO: 3525849 - DNA, 25 bp, Homo sapien
tggcccactttcaactctatacact

SEQ ID NO: 3525850 - DNA, 25 bp, Homo sapien
aaagctatgataatatctaggacaa

SEQ ID NO: 3525851 - DNA, 25 bp, Homo sapien
ctcaaaagagatggatcaaagaagg

SEQ ID NO: 3525852 - DNA, 25 bp, Homo sapien
cccattcattacaaaggccttgacg

SEQ ID NO: 3525853 - DNA, 25 bp, Homo sapien
ccttgggagtatttcttcaaagaca

SEQ ID NO: 3525854 - DNA, 25 bp, Homo sapien
ttaaacatttggatgatgccttggg

SEQ ID NO: 3525855 - DNA, 25 bp, Homo sapien
ttcacataccagcaacagagaatct

SEQ ID NO: 3525856 - DNA, 25 bp, Homo sapien
tatcagttagggtgttttcacatac

SEQ ID NO: 3525857 - DNA, 25 bp, Homo sapien
ctggtaacaagaggggtctgtatca

SEQ ID NO: 3525858 - DNA, 25 bp, Homo sapien
ggtctgtatcagttagggtgttttc

SEQ ID NO: 3525859 - DNA, 25 bp, Homo sapien
tgaaaatgcaccagtatgaccacct

SEQ ID NO: 3525860 - DNA, 25 bp, Homo sapien
gatgtttgttccctcggctaaatca

SEQ ID NO: 3525861 - DNA, 25 bp, Homo sapien
tcttcctacagatactttgtggcct

SEQ ID NO: 3525862 - DNA, 25 bp, Homo sapien
tgccttgggcagtgggatcttccta

SEQ ID NO: 3525863 - DNA, 25 bp, Homo sapien
tgtttgtttgctgtagtataaccat

SEQ ID NO: 3525864 - DNA, 25 bp, Homo sapien
ctaactcagactccgataaacctgg

SEQ ID NO: 3525865 - DNA, 25 bp, Homo sapien
ccgagtttgtcgctggttttactct

SEQ ID NO: 3525866 - DNA, 25 bp, Homo sapien
gttttactctgtgccgcctcttcca

SEQ ID NO: 3525867 - DNA, 25 bp, Homo sapien
agcctgagtcaggtaattccatcat

SEQ ID NO: 3525868 - DNA, 25 bp, Homo sapien
agagcctgagtcaggtaattccatc

SEQ ID NO: 3525869 - DNA, 25 bp, Homo sapien
gagcctgagtcaggtaattccatca

SEQ ID NO: 3525870 - DNA, 25 bp, Homo sapien
ggtagaaaaatagttgttggctcca

SEQ ID NO: 3525871 - DNA, 25 bp, Homo sapien
tgtaacatgcagtcagctcactagt

SEQ ID NO: 3525872 - DNA, 25 bp, Homo sapien
aagggtcctgaagccaaaatctttg

SEQ ID NO: 3525873 - DNA, 25 bp, Homo sapien
cattcccctaagtatacacagtgat

SEQ ID NO: 3525874 - DNA, 25 bp, Homo sapien
tatggagatttaatgtgcccttttc

SEQ ID NO: 3525875 - DNA, 25 bp, Homo sapien
tgaaggaacaaaggttacacatttc

SEQ ID NO: 3525876 - DNA, 25 bp, Homo sapien
ttacacatttcaaaaggacctctac

SEQ ID NO: 3525877 - DNA, 25 bp, Homo sapien
gctgctgcaatgcagatgaaggaac

SEQ ID NO: 3525878 - DNA, 25 bp, Homo sapien
gacaaggacagttcctgattgtagc

SEQ ID NO: 3525879 - DNA, 25 bp, Homo sapien
caaggacagttcctgattgtagcgc

SEQ ID NO: 3525880 - DNA, 25 bp, Homo sapien
aaggacagttcctgattgtagcgct

SEQ ID NO: 3525881 - DNA, 25 bp, Homo sapien
aggacagttcctgattgtagcgctc

SEQ ID NO: 3525882 - DNA, 25 bp, Homo sapien
cccattgccttttgagagtaaacca

SEQ ID NO: 3525883 - DNA, 25 bp, Homo sapien
cctccatatctgcaaagcccttgtt

SEQ ID NO: 3525884 - DNA, 25 bp, Homo sapien
agagtaaaccagttagcttctctcc

SEQ ID NO: 3525885 - DNA, 25 bp, Homo sapien
tccatatctgcaaagcccttgttgc

SEQ ID NO: 3525886 - DNA, 25 bp, Homo sapien
taagaaacttgaataaccatgacca

SEQ ID NO: 3525887 - DNA, 25 bp, Homo sapien
gggttagcatgatataagaaacttg

SEQ ID NO: 3525888 - DNA, 25 bp, Homo sapien
atgaaaattgtattcctggccttgg

SEQ ID NO: 3525889 - DNA, 25 bp, Homo sapien
catgaccaatgcagggataatcttt

SEQ ID NO: 3525890 - DNA, 25 bp, Homo sapien
cttttgaagccccttctgagtctac

SEQ ID NO: 3525891 - DNA, 25 bp, Homo sapien
ttttgaagccccttctgagtctacg

SEQ ID NO: 3525892 - DNA, 25 bp, Homo sapien
tgaagccccttctgagtctacgatt

SEQ ID NO: 3525893 - DNA, 25 bp, Homo sapien
ttgaagccccttctgagtctacgat

SEQ ID NO: 3525894 - DNA, 25 bp, Homo sapien
tgagcagcactaatgggagcagtcc

SEQ ID NO: 3525895 - DNA, 25 bp, Homo sapien
accatctccataatgctacaaatta

SEQ ID NO: 3525896 - DNA, 25 bp, Homo sapien
cctctggaatccaattctgcagctg

SEQ ID NO: 3525897 - DNA, 25 bp, Homo sapien
gagcctctggaatccaattctgcag

SEQ ID NO: 3525898 - DNA, 25 bp, Homo sapien
agtaggcagatttggacagaatgaa

SEQ ID NO: 3525899 - DNA, 25 bp, Homo sapien
taggcagatttggacagaatgaatg

SEQ ID NO: 3525900 - DNA, 25 bp, Homo sapien
tgaatcggggtggtggaggtttcag

SEQ ID NO: 3525901 - DNA, 25 bp, Homo sapien
tattctcaacactttatataaatga

SEQ ID NO: 3525902 - DNA, 25 bp, Homo sapien
atgaaatcatacaggctgggtgtgg

SEQ ID NO: 3525903 - DNA, 25 bp, Homo sapien
aaaggaatcatacaacatgcagtct

SEQ ID NO: 3525904 - DNA, 25 bp, Homo sapien
tgcccctttgtcataggccagcaat

SEQ ID NO: 3525905 - DNA, 25 bp, Homo sapien
ttagactgaatagacaaataattat

SEQ ID NO: 3525906 - DNA, 25 bp, Homo sapien
agactgaatagacaaataattatcc

SEQ ID NO: 3525907 - DNA, 25 bp, Homo sapien
ccctttgtcataggccagcaattcc

SEQ ID NO: 3525908 - DNA, 25 bp, Homo sapien
tctagcttcaccactttctgtatca

SEQ ID NO: 3525909 - DNA, 25 bp, Homo sapien
agaggagagaacattagacctcatc

SEQ ID NO: 3525910 - DNA, 25 bp, Homo sapien
tgggtttctagcttcaccactttct

SEQ ID NO: 3525911 - DNA, 25 bp, Homo sapien
gcagccaagaggagagaacattaga

SEQ ID NO: 3525912 - DNA, 25 bp, Homo sapien
taagtaccctgaaccaagacagctg

SEQ ID NO: 3525913 - DNA, 25 bp, Homo sapien
aaatgtttcatcaagggaggccctc

SEQ ID NO: 3525914 - DNA, 25 bp, Homo sapien
gccccagcaatgagacaatcacagt

SEQ ID NO: 3525915 - DNA, 25 bp, Homo sapien
gaacaatcagctgcaactgaggctg

SEQ ID NO: 3525916 - DNA, 25 bp, Homo sapien
cagcaatatggcagcgtcagacctg

SEQ ID NO: 3525917 - DNA, 25 bp, Homo sapien
ttggggcacacaaaacaagtcacca

SEQ ID NO: 3525918 - DNA, 25 bp, Homo sapien
gggcctgccaacagttacattcctg

SEQ ID NO: 3525919 - DNA, 25 bp, Homo sapien
aagtcaccaggagaaatttgctcca

SEQ ID NO: 3525920 - DNA, 25 bp, Homo sapien
tgacactgtagagccttggtcattt

SEQ ID NO: 3525921 - DNA, 25 bp, Homo sapien
ttaaaggtgatgaacccatcttgcc

SEQ ID NO: 3525922 - DNA, 25 bp, Homo sapien
gatacaaatgcttcggtccaaggct

SEQ ID NO: 3525923 - DNA, 25 bp, Homo sapien
tcctgcaccaaagagttgatgaagc

SEQ ID NO: 3525924 - DNA, 25 bp, Homo sapien
aagttcccattgcataaagccagtt

SEQ ID NO: 3525925 - DNA, 25 bp, Homo sapien
agttcccattgcataaagccagttg

SEQ ID NO: 3525926 - DNA, 25 bp, Homo sapien
caagttcccattgcataaagccagt

SEQ ID NO: 3525927 - DNA, 25 bp, Homo sapien
gaaagccttaaacaagcgccttgac

SEQ ID NO: 3525928 - DNA, 25 bp, Homo sapien
actgcaatgaacaagcctagctagg

SEQ ID NO: 3525929 - DNA, 25 bp, Homo sapien
cacatgttgaaatgtggcctccggt

SEQ ID NO: 3525930 - DNA, 25 bp, Homo sapien
tcatgaatgacttgccgctgctgtc

SEQ ID NO: 3525931 - DNA, 25 bp, Homo sapien
tacaatatcaggaaatttgtggacc

SEQ ID NO: 3525932 - DNA, 25 bp, Homo sapien
caatatcaggaaatttgtggaccac

SEQ ID NO: 3525933 - DNA, 25 bp, Homo sapien
ttgaagggcgtccactgatcctcca

SEQ ID NO: 3525934 - DNA, 25 bp, Homo sapien
ttgtggaccacattgaagggcgtcc

SEQ ID NO: 3525935 - DNA, 25 bp, Homo sapien
ccaaggtcatacgcgcattctatca

SEQ ID NO: 3525936 - DNA, 25 bp, Homo sapien
ttccaaggtcatacgcgcattctat

SEQ ID NO: 3525937 - DNA, 25 bp, Homo sapien
tccaaggtcatacgcgcattctatc

SEQ ID NO: 3525938 - DNA, 25 bp, Homo sapien
caaggtcatacgcgcattctatcag

SEQ ID NO: 3525939 - DNA, 25 bp, Homo sapien
ttttagagcttgagaaaacactctt

SEQ ID NO: 3525940 - DNA, 25 bp, Homo sapien
tgaccacggcaaatacatgaatatc

SEQ ID NO: 3525941 - DNA, 25 bp, Homo sapien
cccaccgaggtaccgagcatagtaa

SEQ ID NO: 3525942 - DNA, 25 bp, Homo sapien
tattttagacccagggtacatgggc

SEQ ID NO: 3525943 - DNA, 25 bp, Homo sapien
ctgggcaacagagccagagggagac

SEQ ID NO: 3525944 - DNA, 25 bp, Homo sapien
tcatttgagcccacgagttcaaggt

SEQ ID NO: 3525945 - DNA, 25 bp, Homo sapien
gctactcaggaggctgaggtaagag

SEQ ID NO: 3525946 - DNA, 25 bp, Homo sapien
ctggtggcatgctcctgtgattcca

SEQ ID NO: 3525947 - DNA, 25 bp, Homo sapien
atatgccaaaacccatcagcaaaga

SEQ ID NO: 3525948 - DNA, 25 bp, Homo sapien
tatgccaaaacccatcagcaaagac

SEQ ID NO: 3525949 - DNA, 25 bp, Homo sapien
gccaaaacccatcagcaaagactgt

SEQ ID NO: 3525950 - DNA, 25 bp, Homo sapien
tgccaaaacccatcagcaaagactg

SEQ ID NO: 3525951 - DNA, 25 bp, Homo sapien
caaattaatcttatgttcataaatg

SEQ ID NO: 3525952 - DNA, 25 bp, Homo sapien
cataaatgtaaactagtaacaatat

SEQ ID NO: 3525953 - DNA, 25 bp, Homo sapien
tcaagcatgcagtttagaggtgctt

SEQ ID NO: 3525954 - DNA, 25 bp, Homo sapien
aattcttctaagggttactcaagca

SEQ ID NO: 3525955 - DNA, 25 bp, Homo sapien
tttaatacaagctaaatacaaacac

SEQ ID NO: 3525956 - DNA, 25 bp, Homo sapien
ttttaatacaagctaaatacaaaca

SEQ ID NO: 3525957 - DNA, 25 bp, Homo sapien
ttaatacaagctaaatacaaacaca

SEQ ID NO: 3525958 - DNA, 25 bp, Homo sapien
caataatcacattaagtgttgagtt

SEQ ID NO: 3525959 - DNA, 25 bp, Homo sapien
aacatgccaagatcaaccttaaaaa

SEQ ID NO: 3525960 - DNA, 25 bp, Homo sapien
caaatgcaaaaattgctatttgtca

SEQ ID NO: 3525961 - DNA, 25 bp, Homo sapien
tgttgagttattgactgagcagtaa

SEQ ID NO: 3525962 - DNA, 25 bp, Homo sapien
aggcaaagattgctcctggctttat

SEQ ID NO: 3525963 - DNA, 25 bp, Homo sapien
caaggcaaagattgctcctggcttt

SEQ ID NO: 3525964 - DNA, 25 bp, Homo sapien
gattgctcctggctttatgaattac

SEQ ID NO: 3525965 - DNA, 25 bp, Homo sapien
caaagattgctcctggctttatgaa

SEQ ID NO: 3525966 - DNA, 25 bp, Homo sapien
cttgtgtggctgacttatcacaggt

SEQ ID NO: 3525967 - DNA, 25 bp, Homo sapien
tataaaaggctggttctggatagga

SEQ ID NO: 3525968 - DNA, 25 bp, Homo sapien
tatgaattggtttccacggaattgg

SEQ ID NO: 3525969 - DNA, 25 bp, Homo sapien
tccttcctgatagatccttagcttc

SEQ ID NO: 3525970 - DNA, 25 bp, Homo sapien
tgcagctggacgaggtttatgtttc

SEQ ID NO: 3525971 - DNA, 25 bp, Homo sapien
gtttcgcattttccaaccattcttg

SEQ ID NO: 3525972 - DNA, 25 bp, Homo sapien
gacgaggtttatgtttcgcattttc

SEQ ID NO: 3525973 - DNA, 25 bp, Homo sapien
gtttatgtttcgcattttccaacca

SEQ ID NO: 3525974 - DNA, 25 bp, Homo sapien
tcttcctctcacattcttcagcatt

SEQ ID NO: 3525975 - DNA, 25 bp, Homo sapien
ttttcttgcaagtattctttctcca

SEQ ID NO: 3525976 - DNA, 25 bp, Homo sapien
gctttttcttgcaagtattctttct

SEQ ID NO: 3525977 - DNA, 25 bp, Homo sapien
tcttgcaagtattctttctccagtt

SEQ ID NO: 3525978 - DNA, 25 bp, Homo sapien
tacaatgtcagtctacctgctgggc

SEQ ID NO: 3525979 - DNA, 25 bp, Homo sapien
tgaggtcagtgacaaagatcttgct

SEQ ID NO: 3525980 - DNA, 25 bp, Homo sapien
tgatatcatggcagttggcacaaca

SEQ ID NO: 3525981 - DNA, 25 bp, Homo sapien
tacctgcaattaacagtacaatgtc

SEQ ID NO: 3525982 - DNA, 25 bp, Homo sapien
cgctgcaccgagagaacctttgttt

SEQ ID NO: 3525983 - DNA, 25 bp, Homo sapien
gagcagtcactactaccgagagagg

SEQ ID NO: 3525984 - DNA, 25 bp, Homo sapien
ttagcaaaaggaagacacaacaggc

SEQ ID NO: 3525985 - DNA, 25 bp, Homo sapien
ggcacgctagttctacaccacacag

SEQ ID NO: 3525986 - DNA, 25 bp, Homo sapien
acagtgttatccatcatataccttg

SEQ ID NO: 3525987 - DNA, 25 bp, Homo sapien
aaatcagttgtgttttgagaacgaa

SEQ ID NO: 3525988 - DNA, 25 bp, Homo sapien
gaaaataaattaccacggcaacaca

SEQ ID NO: 3525989 - DNA, 25 bp, Homo sapien
tgttatccatcatataccttgttga

SEQ ID NO: 3525990 - DNA, 25 bp, Homo sapien
taggagtaccagatgagatagaaca

SEQ ID NO: 3525991 - DNA, 25 bp, Homo sapien
gcagccacagatacagctaaaatgt

SEQ ID NO: 3525992 - DNA, 25 bp, Homo sapien
aatatgacttagagaaaatagcagc

SEQ ID NO: 3525993 - DNA, 25 bp, Homo sapien
agagcagtctttacaaatagaggta

SEQ ID NO: 3525994 - DNA, 25 bp, Homo sapien
ctagtgatttatgtcagggcaagcc

SEQ ID NO: 3525995 - DNA, 25 bp, Homo sapien
ttagaggaaagagcaaactattctg

SEQ ID NO: 3525996 - DNA, 25 bp, Homo sapien
ggaattttgccttcaataactagtg

SEQ ID NO: 3525997 - DNA, 25 bp, Homo sapien
taattggattaggtctactgccact

SEQ ID NO: 3525998 - DNA, 25 bp, Homo sapien
tcaggcctagaaatacagacttggt

SEQ ID NO: 3525999 - DNA, 25 bp, Homo sapien
taagccttgatgaccgagaagacag

SEQ ID NO: 3526000 - DNA, 25 bp, Homo sapien
tatcatgcgcaggtattcatctagc

SEQ ID NO: 3526001 - DNA, 25 bp, Homo sapien
gaggcacttgccataaggatccaaa

SEQ ID NO: 3526002 - DNA, 25 bp, Homo sapien
gagatgtcaatgtgtgtatccattt

SEQ ID NO: 3526003 - DNA, 25 bp, Homo sapien
aaaagagatgtcaatgtgtgtatcc

SEQ ID NO: 3526004 - DNA, 25 bp, Homo sapien
aagagatgtcaatgtgtgtatccat

SEQ ID NO: 3526005 - DNA, 25 bp, Homo sapien
aaagagatgtcaatgtgtgtatcca

SEQ ID NO: 3526006 - DNA, 25 bp, Homo sapien
tttctgaacccattccttgtgcttt

SEQ ID NO: 3526007 - DNA, 25 bp, Homo sapien
agttgcagccggtcacgttcttctt

SEQ ID NO: 3526008 - DNA, 25 bp, Homo sapien
ctagagctttcagttgcagccggtc

SEQ ID NO: 3526009 - DNA, 25 bp, Homo sapien
tctagagctttcagttgcagccggt

SEQ ID NO: 3526010 - DNA, 25 bp, Homo sapien
ctctagagctttcagttgcagccgg

SEQ ID NO: 3526011 - DNA, 25 bp, Homo sapien
ctggtaagcgcacctgtttctgttc

SEQ ID NO: 3526012 - DNA, 25 bp, Homo sapien
gcggctttctggtaagcgcacctgt

SEQ ID NO: 3526013 - DNA, 25 bp, Homo sapien
gctttctggtaagcgcacctgtttc

SEQ ID NO: 3526014 - DNA, 25 bp, Homo sapien
tcaggcggctttctggtaagcgcac

SEQ ID NO: 3526015 - DNA, 25 bp, Homo sapien
ccaccatgcacctctgtcagtctgt

SEQ ID NO: 3526016 - DNA, 25 bp, Homo sapien
ctccaccatgcacctctgtcagtct

SEQ ID NO: 3526017 - DNA, 25 bp, Homo sapien
tccaccatgcacctctgtcagtctg

SEQ ID NO: 3526018 - DNA, 25 bp, Homo sapien
taaaatcccacacagctctaggttg

SEQ ID NO: 3526019 - DNA, 25 bp, Homo sapien
aagggctgactcaggttgcctgctc

SEQ ID NO: 3526020 - DNA, 25 bp, Homo sapien
ggtcaatgcatcctctaaacatggc

SEQ ID NO: 3526021 - DNA, 25 bp, Homo sapien
ccagtcagatcaatatggcaggtga

SEQ ID NO: 3526022 - DNA, 25 bp, Homo sapien
agtaggttgtagtaaacaggtcact

SEQ ID NO: 3526023 - DNA, 25 bp, Homo sapien
tactgattgctagtgaagtaggttg

SEQ ID NO: 3526024 - DNA, 25 bp, Homo sapien
caacctcagcatgtggagacatggt

SEQ ID NO: 3526025 - DNA, 25 bp, Homo sapien
tttataacacaaagtgctgaagcac

SEQ ID NO: 3526026 - DNA, 25 bp, Homo sapien
caaactggaagctctggtggccaag

SEQ ID NO: 3526027 - DNA, 25 bp, Homo sapien
tcgtcaaactggaagctctggtggc

SEQ ID NO: 3526028 - DNA, 25 bp, Homo sapien
tccattcctctcaggctcgccactt

SEQ ID NO: 3526029 - DNA, 25 bp, Homo sapien
gtcctcgtcaaactggaagctctgg

SEQ ID NO: 3526030 - DNA, 25 bp, Homo sapien
cagcccctgcccacgtgcgcccgtc

SEQ ID NO: 3526031 - DNA, 25 bp, Homo sapien
gcccctgcccacgtgcgcccgtcat

SEQ ID NO: 3526032 - DNA, 25 bp, Homo sapien
ggcggcgacggcgagcgcaccacct

SEQ ID NO: 3526033 - DNA, 25 bp, Homo sapien
cggcgacggcgagcgcaccacctcc

SEQ ID NO: 3526034 - DNA, 25 bp, Homo sapien
tgggtctgcagtcagcagagaaacc

SEQ ID NO: 3526035 - DNA, 25 bp, Homo sapien
cagagaaaccggcgtaggaagaggg

SEQ ID NO: 3526036 - DNA, 25 bp, Homo sapien
gagtccgaggagggccgagacctgg

SEQ ID NO: 3526037 - DNA, 25 bp, Homo sapien
cgaggagggccgagacctgggtctg

SEQ ID NO: 3526038 - DNA, 25 bp, Homo sapien
tgaatcagggaaagacgcagaaacc

SEQ ID NO: 3526039 - DNA, 25 bp, Homo sapien
cgtttgcctggcatcttaagggacc

SEQ ID NO: 3526040 - DNA, 25 bp, Homo sapien
tattgtagggtctgcgtaaagcaca

SEQ ID NO: 3526041 - DNA, 25 bp, Homo sapien
gcttgtttagtacggtgtctcccca

SEQ ID NO: 3526042 - DNA, 25 bp, Homo sapien
ccatcaccagttagccctgtggcat

SEQ ID NO: 3526043 - DNA, 25 bp, Homo sapien
tggagctgagaagccataatcgaga

SEQ ID NO: 3526044 - DNA, 25 bp, Homo sapien
ccccaagggtatgaggcagagtcag

SEQ ID NO: 3526045 - DNA, 25 bp, Homo sapien
gaacataattaagtccagcggcctc

SEQ ID NO: 3526046 - DNA, 25 bp, Homo sapien
tctaatactgtccacttacaaatat

SEQ ID NO: 3526047 - DNA, 25 bp, Homo sapien
ttttagataaagattgaatcaatgg

SEQ ID NO: 3526048 - DNA, 25 bp, Homo sapien
gattgaatcaatggtttttctgaaa

SEQ ID NO: 3526049 - DNA, 25 bp, Homo sapien
ccatgagtatagttcagacttagga

SEQ ID NO: 3526050 - DNA, 25 bp, Homo sapien
tttaataattcaaaacactgagtac

SEQ ID NO: 3526051 - DNA, 25 bp, Homo sapien
ccatatagcacaaagattaacactt

SEQ ID NO: 3526052 - DNA, 25 bp, Homo sapien
tcaaaacactgagtacaatattgta

SEQ ID NO: 3526053 - DNA, 25 bp, Homo sapien
tattgtatttcataccatatagcac

SEQ ID NO: 3526054 - DNA, 25 bp, Homo sapien
attaggagtttcttaccaagttatg

SEQ ID NO: 3526055 - DNA, 25 bp, Homo sapien
caaaattacaacacactgtaaataa

SEQ ID NO: 3526056 - DNA, 25 bp, Homo sapien
gatgtgtaaatatacatgatagcaa

SEQ ID NO: 3526057 - DNA, 25 bp, Homo sapien
ttatcagatgtgtaaatatacatga

SEQ ID NO: 3526058 - DNA, 25 bp, Homo sapien
ttttgatatacaaagattctgtttt

SEQ ID NO: 3526059 - DNA, 25 bp, Homo sapien
caatttaacagtctgctactggcag

SEQ ID NO: 3526060 - DNA, 25 bp, Homo sapien
accacaatttaacagtctgctactg

SEQ ID NO: 3526061 - DNA, 25 bp, Homo sapien
tacactgacaatgtacaacaaagac

SEQ ID NO: 3526062 - DNA, 25 bp, Homo sapien
taataggtctaaagcccatagatgg

SEQ ID NO: 3526063 - DNA, 25 bp, Homo sapien
gatttagcacactgttcaaaaaaca

SEQ ID NO: 3526064 - DNA, 25 bp, Homo sapien
tcagaataactaatatggcagtggg

SEQ ID NO: 3526065 - DNA, 25 bp, Homo sapien
tataactttaagactccacccagta

SEQ ID NO: 3526066 - DNA, 25 bp, Homo sapien
taggtgacatcccagcaaattggaa

SEQ ID NO: 3526067 - DNA, 25 bp, Homo sapien
ctcacagttctagctgggacagtcc

SEQ ID NO: 3526068 - DNA, 25 bp, Homo sapien
tttttggccctgcagtaagttgtcc

SEQ ID NO: 3526069 - DNA, 25 bp, Homo sapien
tcttctaagtgacaccaggcagtga

SEQ ID NO: 3526070 - DNA, 25 bp, Homo sapien
tgcataatcagagtgggccgactgt

SEQ ID NO: 3526071 - DNA, 25 bp, Homo sapien
tcgcagcagtcgcaaacagtcaggt

SEQ ID NO: 3526072 - DNA, 25 bp, Homo sapien
tactctggtagaagcaggctcgtcc

SEQ ID NO: 3526073 - DNA, 25 bp, Homo sapien
taagcatagcgcaccaaagggaatc

SEQ ID NO: 3526074 - DNA, 25 bp, Homo sapien
gatgcagaatattcccctctatgga

SEQ ID NO: 3526075 - DNA, 25 bp, Homo sapien
gctactgtagcacctaggaaagcca

SEQ ID NO: 3526076 - DNA, 25 bp, Homo sapien
ggcagcaacccggaactgtttgaga

SEQ ID NO: 3526077 - DNA, 25 bp, Homo sapien
aagaaacccagctactttgcagcca

SEQ ID NO: 3526078 - DNA, 25 bp, Homo sapien
ttcccatgaataagttagacacaga

SEQ ID NO: 3526079 - DNA, 25 bp, Homo sapien
agattcccatgaataagttagacac

SEQ ID NO: 3526080 - DNA, 25 bp, Homo sapien
catcaagaaaagttaggatgccagt

SEQ ID NO: 3526081 - DNA, 25 bp, Homo sapien
agttaggatgccagtatagattccc

SEQ ID NO: 3526082 - DNA, 25 bp, Homo sapien
gaaaatgaaccacacagtaagacga

SEQ ID NO: 3526083 - DNA, 25 bp, Homo sapien
ggcagtgatgtacaagatgcaaatg

SEQ ID NO: 3526084 - DNA, 25 bp, Homo sapien
cagtaagacgaatcatccagcttcc

SEQ ID NO: 3526085 - DNA, 25 bp, Homo sapien
tttggacgaaggcagtgatgtacaa

SEQ ID NO: 3526086 - DNA, 25 bp, Homo sapien
aatacatacgcagccccttaagaag

SEQ ID NO: 3526087 - DNA, 25 bp, Homo sapien
cttctctagtagattaggcagacta

SEQ ID NO: 3526088 - DNA, 25 bp, Homo sapien
cacttagatgattcttgccaactgc

SEQ ID NO: 3526089 - DNA, 25 bp, Homo sapien
tcagcagcaatcactagtgaatcca

SEQ ID NO: 3526090 - DNA, 25 bp, Homo sapien
ctgttgaaggtgtacaatggataat

SEQ ID NO: 3526091 - DNA, 25 bp, Homo sapien
aatggataattatttgactatgttc

SEQ ID NO: 3526092 - DNA, 25 bp, Homo sapien
gataattatttgactatgttcttca

SEQ ID NO: 3526093 - DNA, 25 bp, Homo sapien
gtacaatggataattatttgactat

SEQ ID NO: 3526094 - DNA, 25 bp, Homo sapien
cccaaaatgcacagcactgataagc

SEQ ID NO: 3526095 - DNA, 25 bp, Homo sapien
ccccaaaatgcacagcactgataag

SEQ ID NO: 3526096 - DNA, 25 bp, Homo sapien
ccaaaatgcacagcactgataagca

SEQ ID NO: 3526097 - DNA, 25 bp, Homo sapien
aaccccaaaatgcacagcactgata

SEQ ID NO: 3526098 - DNA, 25 bp, Homo sapien
caggacactctgtaattttggagcc

SEQ ID NO: 3526099 - DNA, 25 bp, Homo sapien
tctttgaggccatcaagggctccag

SEQ ID NO: 3526100 - DNA, 25 bp, Homo sapien
gctcggcctcgtaacaatactctct

SEQ ID NO: 3526101 - DNA, 25 bp, Homo sapien
gcaaagactgacgtagaaaacaccc

SEQ ID NO: 3526102 - DNA, 25 bp, Homo sapien
tctttcagcttgaagttgcccacaa

SEQ ID NO: 3526103 - DNA, 25 bp, Homo sapien
gaagttgcccacaagtttcagttga

SEQ ID NO: 3526104 - DNA, 25 bp, Homo sapien
cattcaggccttccgtaggaaagga

SEQ ID NO: 3526105 - DNA, 25 bp, Homo sapien
tgaggttaacaaagtcttttgctgc

SEQ ID NO: 3526106 - DNA, 25 bp, Homo sapien
gtggcaaaagctctactgtgaattt

SEQ ID NO: 3526107 - DNA, 25 bp, Homo sapien
tggcaaaagctctactgtgaatttc

SEQ ID NO: 3526108 - DNA, 25 bp, Homo sapien
ggcaaaagctctactgtgaatttca

SEQ ID NO: 3526109 - DNA, 25 bp, Homo sapien
actcttctttttcagcctggagtgc

SEQ ID NO: 3526110 - DNA, 25 bp, Homo sapien
tcactcttctttttcagcctggagt

SEQ ID NO: 3526111 - DNA, 25 bp, Homo sapien
agtttcactcttctttttcagcctg

SEQ ID NO: 3526112 - DNA, 25 bp, Homo sapien
tttcactcttctttttcagcctgga

SEQ ID NO: 3526113 - DNA, 25 bp, Homo sapien
agaatccttagagatatcaggcctt

SEQ ID NO: 3526114 - DNA, 25 bp, Homo sapien
aggtgccttcctttatttggtagat

SEQ ID NO: 3526115 - DNA, 25 bp, Homo sapien
cttagagatatcaggccttgaaagg

SEQ ID NO: 3526116 - DNA, 25 bp, Homo sapien
ggtagatttgattacgctgtaaaga

SEQ ID NO: 3526117 - DNA, 25 bp, Homo sapien
ggaaggtctcttatattattgtaag

SEQ ID NO: 3526118 - DNA, 25 bp, Homo sapien
tcttccagagcatggcaaccattaa

SEQ ID NO: 3526119 - DNA, 25 bp, Homo sapien
tggaaggtctcttatattattgtaa

SEQ ID NO: 3526120 - DNA, 25 bp, Homo sapien
gaaggtctcttatattattgtaaga

SEQ ID NO: 3526121 - DNA, 25 bp, Homo sapien
cctcagtgatacaataagcctaaga

SEQ ID NO: 3526122 - DNA, 25 bp, Homo sapien
tagttaactttcagtcccactgcag

SEQ ID NO: 3526123 - DNA, 25 bp, Homo sapien
gaatatattgttgagcatagacact

SEQ ID NO: 3526124 - DNA, 25 bp, Homo sapien
gtcagcttctcaaatacctcagtga

SEQ ID NO: 3526125 - DNA, 25 bp, Homo sapien
gactatgaggagagatacccctgga

SEQ ID NO: 3526126 - DNA, 25 bp, Homo sapien
cttaggctgcagatgaaagaaggag

SEQ ID NO: 3526127 - DNA, 25 bp, Homo sapien
aaatgcacattacccaccctggaga

SEQ ID NO: 3526128 - DNA, 25 bp, Homo sapien
ccctggagatgactcaaatatctgc

SEQ ID NO: 3526129 - DNA, 25 bp, Homo sapien
caaattattaggtatgctgcttatc

SEQ ID NO: 3526130 - DNA, 25 bp, Homo sapien
ttgacacaaattattaggtatgctg

SEQ ID NO: 3526131 - DNA, 25 bp, Homo sapien
gacacaaattattaggtatgctgct

SEQ ID NO: 3526132 - DNA, 25 bp, Homo sapien
ttaggtatgctgcttatctttgtac

SEQ ID NO: 3526133 - DNA, 25 bp, Homo sapien
atatagaataagtgctcacatattt

SEQ ID NO: 3526134 - DNA, 25 bp, Homo sapien
aataattcaactcaagatagtaagc

SEQ ID NO: 3526135 - DNA, 25 bp, Homo sapien
ttcaactcaagatagtaagcaaaat

SEQ ID NO: 3526136 - DNA, 25 bp, Homo sapien
tagaataagtgctcacatatttaca

SEQ ID NO: 3526137 - DNA, 25 bp, Homo sapien
taagactcctgtggctagaggtcct

SEQ ID NO: 3526138 - DNA, 25 bp, Homo sapien
taaatggcacgctgcagtaagactc

SEQ ID NO: 3526139 - DNA, 25 bp, Homo sapien
gtcaggtagactattcccacagccg

SEQ ID NO: 3526140 - DNA, 25 bp, Homo sapien
tgtgatagtctacatcgaatgcccc

SEQ ID NO: 3526141 - DNA, 25 bp, Homo sapien
caccatgcttgcaccacgaatgact

SEQ ID NO: 3526142 - DNA, 25 bp, Homo sapien
gggaactgctgcaccatgcttgcac

SEQ ID NO: 3526143 - DNA, 25 bp, Homo sapien
tgctgcaccatgcttgcaccacgaa

SEQ ID NO: 3526144 - DNA, 25 bp, Homo sapien
tcctgtaagattggggaactgctgc

SEQ ID NO: 3526145 - DNA, 25 bp, Homo sapien
cagtgcaactataactaaaaataaa

SEQ ID NO: 3526146 - DNA, 25 bp, Homo sapien
caattataaattctgcccaagggag

SEQ ID NO: 3526147 - DNA, 25 bp, Homo sapien
gtttaaaattacagtgcaactataa

SEQ ID NO: 3526148 - DNA, 25 bp, Homo sapien
catctcttgaatgtacttgaaagta

SEQ ID NO: 3526149 - DNA, 25 bp, Homo sapien
gataaattgtgaaatgctgagttcc

SEQ ID NO: 3526150 - DNA, 25 bp, Homo sapien
ataaattgtgaaatgctgagttccc

SEQ ID NO: 3526151 - DNA, 25 bp, Homo sapien
agataaattgtgaaatgctgagttc

SEQ ID NO: 3526152 - DNA, 25 bp, Homo sapien
aatgctccatcagggataacagaaa

SEQ ID NO: 3526153 - DNA, 25 bp, Homo sapien
tcaaatgctccatcagggataacag

SEQ ID NO: 3526154 - DNA, 25 bp, Homo sapien
agaaatagaattactatgaaatcct

SEQ ID NO: 3526155 - DNA, 25 bp, Homo sapien
catcaaatgctccatcagggataac

SEQ ID NO: 3526156 - DNA, 25 bp, Homo sapien
tcatgccactgcaccgtgacactcc

SEQ ID NO: 3526157 - DNA, 25 bp, Homo sapien
catgccactgcaccgtgacactcca

SEQ ID NO: 3526158 - DNA, 25 bp, Homo sapien
gctttaatagcctgaggaaattccc

SEQ ID NO: 3526159 - DNA, 25 bp, Homo sapien
aatagcctgaggaaattcccccaag

SEQ ID NO: 3526160 - DNA, 25 bp, Homo sapien
agggctttaatagcctgaggaaatt

SEQ ID NO: 3526161 - DNA, 25 bp, Homo sapien
ttaatagcctgaggaaattccccca

SEQ ID NO: 3526162 - DNA, 25 bp, Homo sapien
gggtagattcacacaactgttgtcc

SEQ ID NO: 3526163 - DNA, 25 bp, Homo sapien
gattcacacaactgttgtcctcata

SEQ ID NO: 3526164 - DNA, 25 bp, Homo sapien
tagattcacacaactgttgtcctca

SEQ ID NO: 3526165 - DNA, 25 bp, Homo sapien
cagggtagattcacacaactgttgt

SEQ ID NO: 3526166 - DNA, 25 bp, Homo sapien
atgcagttgcccaaaatatgaatat

SEQ ID NO: 3526167 - DNA, 25 bp, Homo sapien
tgcagttgcccaaaatatgaatata

SEQ ID NO: 3526168 - DNA, 25 bp, Homo sapien
catcaaaacagtgttgactcaggct

SEQ ID NO: 3526169 - DNA, 25 bp, Homo sapien
ggtctccaggttatctagtccatca

SEQ ID NO: 3526170 - DNA, 25 bp, Homo sapien
aacagtgttgactcaggcttctaat

SEQ ID NO: 3526171 - DNA, 25 bp, Homo sapien
ggttatctagtccatcaaaacagtg

SEQ ID NO: 3526172 - DNA, 25 bp, Homo sapien
cacagatgccgtaactgaacaagtc

SEQ ID NO: 3526173 - DNA, 25 bp, Homo sapien
aggcacctccgtcaagctgttgtca

SEQ ID NO: 3526174 - DNA, 25 bp, Homo sapien
caagtccttcaaaactgtcctcggg

SEQ ID NO: 3526175 - DNA, 25 bp, Homo sapien
agaactaccaggcttgaaaggttgg

SEQ ID NO: 3526176 - DNA, 25 bp, Homo sapien
ttctagtgaaatgagtcagttcaag

SEQ ID NO: 3526177 - DNA, 25 bp, Homo sapien
tgagtcagttcaagtctcacaactc

SEQ ID NO: 3526178 - DNA, 25 bp, Homo sapien
gaaatgagtcagttcaagtctcaca

SEQ ID NO: 3526179 - DNA, 25 bp, Homo sapien
gtgaaatgagtcagttcaagtctca

SEQ ID NO: 3526180 - DNA, 25 bp, Homo sapien
tataagtgtcatgtacaggcaaagc

SEQ ID NO: 3526181 - DNA, 25 bp, Homo sapien
taggctactttgcttccaatgttac

SEQ ID NO: 3526182 - DNA, 25 bp, Homo sapien
gctactctgattctgtaccaaagag

SEQ ID NO: 3526183 - DNA, 25 bp, Homo sapien
catccttattacctctaggcaagtt

SEQ ID NO: 3526184 - DNA, 25 bp, Homo sapien
agcactcagccctcgaatggcttca

SEQ ID NO: 3526185 - DNA, 25 bp, Homo sapien
tggcttcactgggtactgttttcaa

SEQ ID NO: 3526186 - DNA, 25 bp, Homo sapien
ggcttcactgggtactgttttcaac

SEQ ID NO: 3526187 - DNA, 25 bp, Homo sapien
tcagccctcgaatggcttcactggg

SEQ ID NO: 3526188 - DNA, 25 bp, Homo sapien
gcagagcccggaaacatggacatta

SEQ ID NO: 3526189 - DNA, 25 bp, Homo sapien
gatggcagatcccaagctcttaagg

SEQ ID NO: 3526190 - DNA, 25 bp, Homo sapien
gatcatctactagttagggcctgcc

SEQ ID NO: 3526191 - DNA, 25 bp, Homo sapien
gaagtaagggtttgctccaatgcat

SEQ ID NO: 3526192 - DNA, 25 bp, Homo sapien
aagaaaggtcgttgcccgccaattg

SEQ ID NO: 3526193 - DNA, 25 bp, Homo sapien
ctttcaacccagacaaggcctttgg

SEQ ID NO: 3526194 - DNA, 25 bp, Homo sapien
agaaaggtcgttgcccgccaattgt

SEQ ID NO: 3526195 - DNA, 25 bp, Homo sapien
ctttgagttctttcaacccagacaa

SEQ ID NO: 3526196 - DNA, 25 bp, Homo sapien
tctacctgtattgtgatgcctctgg

SEQ ID NO: 3526197 - DNA, 25 bp, Homo sapien
tcttgcccggctggctgaaatactt

SEQ ID NO: 3526198 - DNA, 25 bp, Homo sapien
gatactgatagctggtacacaaaca

SEQ ID NO: 3526199 - DNA, 25 bp, Homo sapien
taatgagtaacaagcacagcagcgt

SEQ ID NO: 3526200 - DNA, 25 bp, Homo sapien
ttttcctcctggactactgccatga

SEQ ID NO: 3526201 - DNA, 25 bp, Homo sapien
gtttccaaagaccacgagagtgtct

SEQ ID NO: 3526202 - DNA, 25 bp, Homo sapien
ggaatttggccctctattagcaaag

SEQ ID NO: 3526203 - DNA, 25 bp, Homo sapien
actacttcaggacctattggctgcc

SEQ ID NO: 3526204 - DNA, 25 bp, Homo sapien
aaggactaggccacatgtcagatgg

SEQ ID NO: 3526205 - DNA, 25 bp, Homo sapien
catgtcagatggtaatctgggccaa

SEQ ID NO: 3526206 - DNA, 25 bp, Homo sapien
taactccttcatgaaatgcactgag

SEQ ID NO: 3526207 - DNA, 25 bp, Homo sapien
gcactgagcgacactagagtttctt

SEQ ID NO: 3526208 - DNA, 25 bp, Homo sapien
ctggggtttcaccaagttggtcagg

SEQ ID NO: 3526209 - DNA, 25 bp, Homo sapien
ttacagccatgtaccaccacactcg

SEQ ID NO: 3526210 - DNA, 25 bp, Homo sapien
gctaattctgtattttcagtagaga

SEQ ID NO: 3526211 - DNA, 25 bp, Homo sapien
acccccctcagcctgccaaagtcct

SEQ ID NO: 3526212 - DNA, 25 bp, Homo sapien
caagggctgactatgtgttcagaac

SEQ ID NO: 3526213 - DNA, 25 bp, Homo sapien
ggtactcaacctactggccctcaaa

SEQ ID NO: 3526214 - DNA, 25 bp, Homo sapien
tgaaagaggtacactggttcccatg

SEQ ID NO: 3526215 - DNA, 25 bp, Homo sapien
aatgtgagcctgtttcctacgtgcc

SEQ ID NO: 3526216 - DNA, 25 bp, Homo sapien
gactcctggtaatcttaaaattcat

SEQ ID NO: 3526217 - DNA, 25 bp, Homo sapien
attcattgttaatgatgttacccct

SEQ ID NO: 3526218 - DNA, 25 bp, Homo sapien
tattgctaattttcgtcaaagcacc

SEQ ID NO: 3526219 - DNA, 25 bp, Homo sapien
ttttcgtcaaagcaccaccagactc

SEQ ID NO: 3526220 - DNA, 25 bp, Homo sapien
tctgcaggtctttgtacatgtcctc

SEQ ID NO: 3526221 - DNA, 25 bp, Homo sapien
ttgtacatgtcctcttgaataactc

SEQ ID NO: 3526222 - DNA, 25 bp, Homo sapien
ctctgcaggtctttgtacatgtcct

SEQ ID NO: 3526223 - DNA, 25 bp, Homo sapien
tacatgtcctcttgaataactcccc

SEQ ID NO: 3526224 - DNA, 25 bp, Homo sapien
cgctaagcagattaaccaggtttga

SEQ ID NO: 3526225 - DNA, 25 bp, Homo sapien
caggtttgactccacatccaggtct

SEQ ID NO: 3526226 - DNA, 25 bp, Homo sapien
catgaggttggcatatggttggtca

SEQ ID NO: 3526227 - DNA, 25 bp, Homo sapien
taactggcaatcgaaggcatcaacg

SEQ ID NO: 3526228 - DNA, 25 bp, Homo sapien
caactgagtaatgttgttcatactg

SEQ ID NO: 3526229 - DNA, 25 bp, Homo sapien
tgcatcttctggcaactgagtaatg

SEQ ID NO: 3526230 - DNA, 25 bp, Homo sapien
aatgcatcttctggcaactgagtaa

SEQ ID NO: 3526231 - DNA, 25 bp, Homo sapien
atgcatcttctggcaactgagtaat

SEQ ID NO: 3526232 - DNA, 25 bp, Homo sapien
taagaatattgttaattaagtggta

SEQ ID NO: 3526233 - DNA, 25 bp, Homo sapien
agttaagaatattgttaattaagtg

SEQ ID NO: 3526234 - DNA, 25 bp, Homo sapien
aatattgttaattaagtggtatgaa

SEQ ID NO: 3526235 - DNA, 25 bp, Homo sapien
agaatattgttaattaagtggtatg

SEQ ID NO: 3526236 - DNA, 25 bp, Homo sapien
taaaagaggctagatgcaacaggct

SEQ ID NO: 3526237 - DNA, 25 bp, Homo sapien
tcaatttgtagcagaacactgggtc

SEQ ID NO: 3526238 - DNA, 25 bp, Homo sapien
tttgctgtagaaacgtcatcctgac

SEQ ID NO: 3526239 - DNA, 25 bp, Homo sapien
ggagggcgccttcttgtcagaaaga

SEQ ID NO: 3526240 - DNA, 25 bp, Homo sapien
ctaactggtgttcccaggcatctct

SEQ ID NO: 3526241 - DNA, 25 bp, Homo sapien
ggtgtcaacagctgttctggtaacc

SEQ ID NO: 3526242 - DNA, 25 bp, Homo sapien
gcatctctgggtgtcaacagctgtt

SEQ ID NO: 3526243 - DNA, 25 bp, Homo sapien
aactggtgttcccaggcatctctgg

SEQ ID NO: 3526244 - DNA, 25 bp, Homo sapien
tttcaatagtccatttaacatcaac

SEQ ID NO: 3526245 - DNA, 25 bp, Homo sapien
ttataaagattatcgtctgggcaaa

SEQ ID NO: 3526246 - DNA, 25 bp, Homo sapien
cgtctgggcaaattggaaacactca

SEQ ID NO: 3526247 - DNA, 25 bp, Homo sapien
agattatcgtctgggcaaattggaa

SEQ ID NO: 3526248 - DNA, 25 bp, Homo sapien
cagaaacaatggtcaaatggtgctt

SEQ ID NO: 3526249 - DNA, 25 bp, Homo sapien
gagtccctccctgtagctaaagtaa

SEQ ID NO: 3526250 - DNA, 25 bp, Homo sapien
ccagctcatagcaaaaagtcagtta

SEQ ID NO: 3526251 - DNA, 25 bp, Homo sapien
tagactatgaggttaatgggtcaca

SEQ ID NO: 3526252 - DNA, 25 bp, Homo sapien
gagcacgctctacgtgcctggcatg

SEQ ID NO: 3526253 - DNA, 25 bp, Homo sapien
caaacatgtcttgcttggaagtata

SEQ ID NO: 3526254 - DNA, 25 bp, Homo sapien
tatgttagtatcttgtgagcacgct

SEQ ID NO: 3526255 - DNA, 25 bp, Homo sapien
cctggcatgcatacaccaacaaatg

SEQ ID NO: 3526256 - DNA, 25 bp, Homo sapien
tgtaccactgtgtgcagcttaaagg

SEQ ID NO: 3526257 - DNA, 25 bp, Homo sapien
ttttttgtccatgtagccggtagag

SEQ ID NO: 3526258 - DNA, 25 bp, Homo sapien
gctgtcacctggagacacaacagga

SEQ ID NO: 3526259 - DNA, 25 bp, Homo sapien
gccggtagagtgatgctgctgtcac

SEQ ID NO: 3526260 - DNA, 25 bp, Homo sapien
tggagtccaattcccatgggccaca

SEQ ID NO: 3526261 - DNA, 25 bp, Homo sapien
tgtgctctaaactatcctccctgtg

SEQ ID NO: 3526262 - DNA, 25 bp, Homo sapien
ccctattatcatgtaagcggctgga

SEQ ID NO: 3526263 - DNA, 25 bp, Homo sapien
tacatatactaggtgcccatgcaga

SEQ ID NO: 3526264 - DNA, 25 bp, Homo sapien
tggaccactcactcaccacaggtgt

SEQ ID NO: 3526265 - DNA, 25 bp, Homo sapien
ttacgtacctatcacacagctgcag

SEQ ID NO: 3526266 - DNA, 25 bp, Homo sapien
tctgtttgatagataggcccttagc

SEQ ID NO: 3526267 - DNA, 25 bp, Homo sapien
tgggaatggcactaaaaaatctggc

SEQ ID NO: 3526268 - DNA, 25 bp, Homo sapien
ttggaacttgtactgatgagtaaat

SEQ ID NO: 3526269 - DNA, 25 bp, Homo sapien
tgtactgatgagtaaatcaaaggcc

SEQ ID NO: 3526270 - DNA, 25 bp, Homo sapien
tactgatgagtaaatcaaaggccat

SEQ ID NO: 3526271 - DNA, 25 bp, Homo sapien
ctttggaacttgtactgatgagtaa

SEQ ID NO: 3526272 - DNA, 25 bp, Homo sapien
gctgcttaggaagagtatggatttc

SEQ ID NO: 3526273 - DNA, 25 bp, Homo sapien
gacagtagtaggtccaagctgctta

SEQ ID NO: 3526274 - DNA, 25 bp, Homo sapien
tacagagcacaataccactgttaag

SEQ ID NO: 3526275 - DNA, 25 bp, Homo sapien
gaaagggtaaggtagtatctcacat

SEQ ID NO: 3526276 - DNA, 25 bp, Homo sapien
tccaggaataaaactgcaagcagcc

SEQ ID NO: 3526277 - DNA, 25 bp, Homo sapien
gagcaaacaactagtcaaccgagac

SEQ ID NO: 3526278 - DNA, 25 bp, Homo sapien
caaccgagacaaagggtcatacaag

SEQ ID NO: 3526279 - DNA, 25 bp, Homo sapien
ttttcaatgaggcattacacgcctg

SEQ ID NO: 3526280 - DNA, 25 bp, Homo sapien
tgtatacttctgtgtaatagcctgt

SEQ ID NO: 3526281 - DNA, 25 bp, Homo sapien
tatccatagtcatgtgtatcaatag

SEQ ID NO: 3526282 - DNA, 25 bp, Homo sapien
taatcactcagccttaataccgttg

SEQ ID NO: 3526283 - DNA, 25 bp, Homo sapien
cactgttgaacttggttttaatcac

SEQ ID NO: 3526284 - DNA, 25 bp, Homo sapien
gatggtatgtaacattacctgacct

SEQ ID NO: 3526285 - DNA, 25 bp, Homo sapien
aaggatggcatcagatactgttcaa

SEQ ID NO: 3526286 - DNA, 25 bp, Homo sapien
ggaatttagtaagagccaaccagca

SEQ ID NO: 3526287 - DNA, 25 bp, Homo sapien
cctgccaggtaagttataggaatgc

SEQ ID NO: 3526288 - DNA, 25 bp, Homo sapien
tatctaagcaaactacagggatgag

SEQ ID NO: 3526289 - DNA, 25 bp, Homo sapien
cactaactgtgggatatttgaacaa

SEQ ID NO: 3526290 - DNA, 25 bp, Homo sapien
tataggtaggcccagcaattcttca

SEQ ID NO: 3526291 - DNA, 25 bp, Homo sapien
cctgccatggaccaagatggttact

SEQ ID NO: 3526292 - DNA, 25 bp, Homo sapien
ggagataactacagagaggcatgga

SEQ ID NO: 3526293 - DNA, 25 bp, Homo sapien
taggccagacgcaaaaggttacatt

SEQ ID NO: 3526294 - DNA, 25 bp, Homo sapien
gaggcatggaaattcatcaagtgaa

SEQ ID NO: 3526295 - DNA, 25 bp, Homo sapien
ccaaggtagaaaatagttcagcagt

SEQ ID NO: 3526296 - DNA, 25 bp, Homo sapien
catgaagaatgaagcgttctgctgc

SEQ ID NO: 3526297 - DNA, 25 bp, Homo sapien
tgaagcgttctgctgcatgccctca

SEQ ID NO: 3526298 - DNA, 25 bp, Homo sapien
agcgttctgctgcatgccctcacag

SEQ ID NO: 3526299 - DNA, 25 bp, Homo sapien
gaatgaagcgttctgctgcatgccc

SEQ ID NO: 3526300 - DNA, 25 bp, Homo sapien
taacacataggtaccccataaccag

SEQ ID NO: 3526301 - DNA, 25 bp, Homo sapien
gggctactgcatacgttagctacta

SEQ ID NO: 3526302 - DNA, 25 bp, Homo sapien
ctaaataggttgtgagggctactgc

SEQ ID NO: 3526303 - DNA, 25 bp, Homo sapien
cccagggtagaaaacgcacaactgt

SEQ ID NO: 3526304 - DNA, 25 bp, Homo sapien
ggctctcattggcatgaaggttccc

SEQ ID NO: 3526305 - DNA, 25 bp, Homo sapien
aggttcccaaagattgagttaggat

SEQ ID NO: 3526306 - DNA, 25 bp, Homo sapien
tgatccaagaaactacagtgggctc

SEQ ID NO: 3526307 - DNA, 25 bp, Homo sapien
ccctgctccttatgtccacatggaa

SEQ ID NO: 3526308 - DNA, 25 bp, Homo sapien
gaagcgtttccttggtgcaaccctg

SEQ ID NO: 3526309 - DNA, 25 bp, Homo sapien
aaccctgaagataatgcaagctgcc

SEQ ID NO: 3526310 - DNA, 25 bp, Homo sapien
gacaaattgcattctcactcggcgt

SEQ ID NO: 3526311 - DNA, 25 bp, Homo sapien
ggcttagtcactcccacaagaaatg

SEQ ID NO: 3526312 - DNA, 25 bp, Homo sapien
gaagagagtgcgaattataaaattc

SEQ ID NO: 3526313 - DNA, 25 bp, Homo sapien
aaccagacacttgaagagagtgcga

SEQ ID NO: 3526314 - DNA, 25 bp, Homo sapien
gacacttgaagagagtgcgaattat

SEQ ID NO: 3526315 - DNA, 25 bp, Homo sapien
cttgaagagagtgcgaattataaaa

SEQ ID NO: 3526316 - DNA, 25 bp, Homo sapien
tgagagatagacctgacagagacag

SEQ ID NO: 3526317 - DNA, 25 bp, Homo sapien
gaatatgcctaaacttgcctggatc

SEQ ID NO: 3526318 - DNA, 25 bp, Homo sapien
tatgataccataaccggcagagcat

SEQ ID NO: 3526319 - DNA, 25 bp, Homo sapien
tcctaatgttaagagccaagggcct

SEQ ID NO: 3526320 - DNA, 25 bp, Homo sapien
tacaccttagggaagaatctgagat

SEQ ID NO: 3526321 - DNA, 25 bp, Homo sapien
caagtgttaagccatacccacagga

SEQ ID NO: 3526322 - DNA, 25 bp, Homo sapien
gacctgccaggaaatacacagtaga

SEQ ID NO: 3526323 - DNA, 25 bp, Homo sapien
tgcattctgcaacaagtctccatgg

SEQ ID NO: 3526324 - DNA, 25 bp, Homo sapien
ttgttgggtaagagcatgtccacca

SEQ ID NO: 3526325 - DNA, 25 bp, Homo sapien
ttgttttctcggactcccctgcgtg

SEQ ID NO: 3526326 - DNA, 25 bp, Homo sapien
tcggactcccctgcgtgctgcagaa

SEQ ID NO: 3526327 - DNA, 25 bp, Homo sapien
taaaaggccttgttgggtaagagca

SEQ ID NO: 3526328 - DNA, 25 bp, Homo sapien
tgggccgaggtaggtgccgggacgc

SEQ ID NO: 3526329 - DNA, 25 bp, Homo sapien
cgaggtaggtgccgggacgcactac

SEQ ID NO: 3526330 - DNA, 25 bp, Homo sapien
gccgaggtaggtgccgggacgcact

SEQ ID NO: 3526331 - DNA, 25 bp, Homo sapien
ctgggccgaggtaggtgccgggacg

SEQ ID NO: 3526332 - DNA, 25 bp, Homo sapien
cctcgggcacggccgtcagcccctt

SEQ ID NO: 3526333 - DNA, 25 bp, Homo sapien
ccctcgggcacggccgtcagcccct

SEQ ID NO: 3526334 - DNA, 25 bp, Homo sapien
gtccacccgacggtcgccgtcgcag

SEQ ID NO: 3526335 - DNA, 25 bp, Homo sapien
agcagtccacccgacggtcgccgtc

SEQ ID NO: 3526336 - DNA, 25 bp, Homo sapien
ccggagcagtccacccgacggtcgc

SEQ ID NO: 3526337 - DNA, 25 bp, Homo sapien
cggagcagtccacccgacggtcgcc

SEQ ID NO: 3526338 - DNA, 25 bp, Homo sapien
gggcgccgcgcagagaggcggcgcc

SEQ ID NO: 3526339 - DNA, 25 bp, Homo sapien
agagcagccctagcgggcccggcat

SEQ ID NO: 3526340 - DNA, 25 bp, Homo sapien
gcgccgctgggcccggccgagccga

SEQ ID NO: 3526341 - DNA, 25 bp, Homo sapien
gcgccgcgcagagaggcggcgccgc

SEQ ID NO: 3526342 - DNA, 25 bp, Homo sapien
gctgcggccgcctcccgcgccggcc

SEQ ID NO: 3526343 - DNA, 25 bp, Homo sapien
ctgcggccgcctcccgcgccggcct

SEQ ID NO: 3526344 - DNA, 25 bp, Homo sapien
tgctgcggccgcctcccgcgccggc

SEQ ID NO: 3526345 - DNA, 25 bp, Homo sapien
tcaaggttgcagagcgcagccttca

SEQ ID NO: 3526346 - DNA, 25 bp, Homo sapien
gctgctccatggacgcgcagaggca

SEQ ID NO: 3526347 - DNA, 25 bp, Homo sapien
agggacgcggcgctccggagtttcg

SEQ ID NO: 3526348 - DNA, 25 bp, Homo sapien
caatgcagcggctcttcaaggttgc

SEQ ID NO: 3526349 - DNA, 25 bp, Homo sapien
atgcaaaagtatcccttctcccgga

SEQ ID NO: 3526350 - DNA, 25 bp, Homo sapien
agtatcccttctcccggagcgccat

SEQ ID NO: 3526351 - DNA, 25 bp, Homo sapien
aagtatcccttctcccggagcgcca

SEQ ID NO: 3526352 - DNA, 25 bp, Homo sapien
caaaagtatcccttctcccggagcg

SEQ ID NO: 3526353 - DNA, 25 bp, Homo sapien
cagagaaagtgatgtttctgaacac

SEQ ID NO: 3526354 - DNA, 25 bp, Homo sapien
acaggaattttgtaaaaggtcagag

SEQ ID NO: 3526355 - DNA, 25 bp, Homo sapien
gtttctgaacactggacaatttcca

SEQ ID NO: 3526356 - DNA, 25 bp, Homo sapien
ttttgtaaaaggtcagagaaagtga

SEQ ID NO: 3526357 - DNA, 25 bp, Homo sapien
ctgccatggcgttgagtcgttttac

SEQ ID NO: 3526358 - DNA, 25 bp, Homo sapien
tgccatggcgttgagtcgttttact

SEQ ID NO: 3526359 - DNA, 25 bp, Homo sapien
ggaattcaaagaccggtagacgctc

SEQ ID NO: 3526360 - DNA, 25 bp, Homo sapien
caaagaccggtagacgctcttctac

SEQ ID NO: 3526361 - DNA, 25 bp, Homo sapien
tgaaggaattcaaagaccggtagac

SEQ ID NO: 3526362 - DNA, 25 bp, Homo sapien
gaagactgaaggaattcaaagaccg

SEQ ID NO: 3526363 - DNA, 25 bp, Homo sapien
ggagacaatgccctgacgataccaa

SEQ ID NO: 3526364 - DNA, 25 bp, Homo sapien
tacccagttttggtagtgatgccgc

SEQ ID NO: 3526365 - DNA, 25 bp, Homo sapien
aaacggctaggtgcttaggtgctca

SEQ ID NO: 3526366 - DNA, 25 bp, Homo sapien
cacagctgcacaggtatccaaggaa

SEQ ID NO: 3526367 - DNA, 25 bp, Homo sapien
tctaaggtgacacacggtaatggtg

SEQ ID NO: 3526368 - DNA, 25 bp, Homo sapien
catactgccgctcttgaaataacac

SEQ ID NO: 3526369 - DNA, 25 bp, Homo sapien
tgctctcaatcacgtcatactgccg

SEQ ID NO: 3526370 - DNA, 25 bp, Homo sapien
gaaatcaagcaacctgtctaaggtg

SEQ ID NO: 3526371 - DNA, 25 bp, Homo sapien
taacctttgaagaaacactactagc

SEQ ID NO: 3526372 - DNA, 25 bp, Homo sapien
tttctcactacttaaccatacctgg

SEQ ID NO: 3526373 - DNA, 25 bp, Homo sapien
tacatccattctgggtattaccaca

SEQ ID NO: 3526374 - DNA, 25 bp, Homo sapien
taaaaccagattgttggcagaggac

SEQ ID NO: 3526375 - DNA, 25 bp, Homo sapien
tgaagtgcccacattaagacagtac

SEQ ID NO: 3526376 - DNA, 25 bp, Homo sapien
tttaagtctacaccaggtcatgctg

SEQ ID NO: 3526377 - DNA, 25 bp, Homo sapien
gaacagattgtggattaccgtaggg

SEQ ID NO: 3526378 - DNA, 25 bp, Homo sapien
tgaccctaggtgtcctttagaacca

SEQ ID NO: 3526379 - DNA, 25 bp, Homo sapien
aaccaggaagctataatttataatg

SEQ ID NO: 3526380 - DNA, 25 bp, Homo sapien
accaggaagctataatttataatga

SEQ ID NO: 3526381 - DNA, 25 bp, Homo sapien
ctactgcagctgtagctatactaaa

SEQ ID NO: 3526382 - DNA, 25 bp, Homo sapien
agctactgcagctgtagctatacta

SEQ ID NO: 3526383 - DNA, 25 bp, Homo sapien
gctactgcagctgtagctatactaa

SEQ ID NO: 3526384 - DNA, 25 bp, Homo sapien
taatgaactgccgtagatgagactg

SEQ ID NO: 3526385 - DNA, 25 bp, Homo sapien
gcattgcagccattagtaagtcaca

SEQ ID NO: 3526386 - DNA, 25 bp, Homo sapien
taactggtttgtctctaggaatgga

SEQ ID NO: 3526387 - DNA, 25 bp, Homo sapien
taaaaacagtaggacagaattgccc

SEQ ID NO: 3526388 - DNA, 25 bp, Homo sapien
taacctttccttgtgcggctttcag

SEQ ID NO: 3526389 - DNA, 25 bp, Homo sapien
actttgggtgtgtatcgtaccacta

SEQ ID NO: 3526390 - DNA, 25 bp, Homo sapien
tgttgcctgcgttttgctgatctca

SEQ ID NO: 3526391 - DNA, 25 bp, Homo sapien
tcattttttcaaagcgcgactccat

SEQ ID NO: 3526392 - DNA, 25 bp, Homo sapien
tattcgggatatatagattggagag

SEQ ID NO: 3526393 - DNA, 25 bp, Homo sapien
tcaacaactcgaggatgagaatgtc

SEQ ID NO: 3526394 - DNA, 25 bp, Homo sapien
gagttgatctccacgtttgaggccc

SEQ ID NO: 3526395 - DNA, 25 bp, Homo sapien
caattccacctggaattattcggga

SEQ ID NO: 3526396 - DNA, 25 bp, Homo sapien
tgagcacgtatttttgacgtctgaa

SEQ ID NO: 3526397 - DNA, 25 bp, Homo sapien
tgattctgagaaggtaagctaaaca

SEQ ID NO: 3526398 - DNA, 25 bp, Homo sapien
aacagaaggtattttagagacgaca

SEQ ID NO: 3526399 - DNA, 25 bp, Homo sapien
gaatgctcacaaattcactggtgat

SEQ ID NO: 3526400 - DNA, 25 bp, Homo sapien
tttgcagtagcgttcgctctcactt

SEQ ID NO: 3526401 - DNA, 25 bp, Homo sapien
ctttgcagtagcgttcgctctcact

SEQ ID NO: 3526402 - DNA, 25 bp, Homo sapien
ttgcagtagcgttcgctctcacttc

SEQ ID NO: 3526403 - DNA, 25 bp, Homo sapien
tctccactcctttgtagtttttcca

SEQ ID NO: 3526404 - DNA, 25 bp, Homo sapien
cacagcattgcagaattcactttga

SEQ ID NO: 3526405 - DNA, 25 bp, Homo sapien
caagtcagtaggattgtttttaaag

SEQ ID NO: 3526406 - DNA, 25 bp, Homo sapien
gaccaagtcagtaggattgttttta

SEQ ID NO: 3526407 - DNA, 25 bp, Homo sapien
agaccaagtcagtaggattgttttt

SEQ ID NO: 3526408 - DNA, 25 bp, Homo sapien
cccaacccgaatacaagcgaggttg

SEQ ID NO: 3526409 - DNA, 25 bp, Homo sapien
ttgtggagaaagtaatgaaggagtt

SEQ ID NO: 3526410 - DNA, 25 bp, Homo sapien
taatgaaggagtttgtgtgcaaaca

SEQ ID NO: 3526411 - DNA, 25 bp, Homo sapien
ccgaatacaagcgaggttgtggaga

SEQ ID NO: 3526412 - DNA, 25 bp, Homo sapien
cgtgtgtccgttctcgtgctgtaca

SEQ ID NO: 3526413 - DNA, 25 bp, Homo sapien
caatgagtgtagtctgtgcgaaccg

SEQ ID NO: 3526414 - DNA, 25 bp, Homo sapien
cgaaccgggtgtgtgacgtttgctt

SEQ ID NO: 3526415 - DNA, 25 bp, Homo sapien
tacgggtctccgaatgctgcttctg

SEQ ID NO: 3526416 - DNA, 25 bp, Homo sapien
ccagccgcacgggttcccctagcgc

SEQ ID NO: 3526417 - DNA, 25 bp, Homo sapien
gccgcacgggttcccctagcgccgc

SEQ ID NO: 3526418 - DNA, 25 bp, Homo sapien
ctccagccgcacgggttcccctagc

SEQ ID NO: 3526419 - DNA, 25 bp, Homo sapien
agccgcacgggttcccctagcgccg

SEQ ID NO: 3526420 - DNA, 25 bp, Homo sapien
gcaatgatgtcacttgtcacgtgga

SEQ ID NO: 3526421 - DNA, 25 bp, Homo sapien
cagatgggctttgatccagtggtgc

SEQ ID NO: 3526422 - DNA, 25 bp, Homo sapien
ccagtggtgctgcttggaattctca

SEQ ID NO: 3526423 - DNA, 25 bp, Homo sapien
cacttgtcacgtggagtaagtgata

SEQ ID NO: 3526424 - DNA, 25 bp, Homo sapien
gaactaaccaggtccgaccatgctt

SEQ ID NO: 3526425 - DNA, 25 bp, Homo sapien
gagctcagacaagatcaagcatgtt

SEQ ID NO: 3526426 - DNA, 25 bp, Homo sapien
tctgagctcagacaagatcaagcat

SEQ ID NO: 3526427 - DNA, 25 bp, Homo sapien
caagaactaaccaggtccgaccatg

SEQ ID NO: 3526428 - DNA, 25 bp, Homo sapien
gcctttagattagggttctgcaccc

SEQ ID NO: 3526429 - DNA, 25 bp, Homo sapien
tgatccactggactaccacacttgg

SEQ ID NO: 3526430 - DNA, 25 bp, Homo sapien
tgcacccatagctgatgatccactg

SEQ ID NO: 3526431 - DNA, 25 bp, Homo sapien
tcatcacctagaggtttcagtgcct

SEQ ID NO: 3526432 - DNA, 25 bp, Homo sapien
gtcgtgttccaaatgtggaaggctt

SEQ ID NO: 3526433 - DNA, 25 bp, Homo sapien
tgtcgtgttccaaatgtggaaggct

SEQ ID NO: 3526434 - DNA, 25 bp, Homo sapien
ttgtcgtgttccaaatgtggaaggc

SEQ ID NO: 3526435 - DNA, 25 bp, Homo sapien
cttgtcgtgttccaaatgtggaagg

SEQ ID NO: 3526436 - DNA, 25 bp, Homo sapien
tggcagttgctgttgcaaaagggac

SEQ ID NO: 3526437 - DNA, 25 bp, Homo sapien
ggcatcaatgtacacagctgactgt

SEQ ID NO: 3526438 - DNA, 25 bp, Homo sapien
tcaagtggcatcaatgtacacagct

SEQ ID NO: 3526439 - DNA, 25 bp, Homo sapien
aggagaggagatggcagttgctgtt

SEQ ID NO: 3526440 - DNA, 25 bp, Homo sapien
gaaacagagagcagcatgagcaaac

SEQ ID NO: 3526441 - DNA, 25 bp, Homo sapien
catgagcaaactgctgatcaggttt

SEQ ID NO: 3526442 - DNA, 25 bp, Homo sapien
gagagcagcatgagcaaactgctga

SEQ ID NO: 3526443 - DNA, 25 bp, Homo sapien
cagcatgagcaaactgctgatcagg

SEQ ID NO: 3526444 - DNA, 25 bp, Homo sapien
atgtttgttcatttccattggtcat

SEQ ID NO: 3526445 - DNA, 25 bp, Homo sapien
tatgtttgttcatttccattggtca

SEQ ID NO: 3526446 - DNA, 25 bp, Homo sapien
tgttgggctcaaaggctgagatagt

SEQ ID NO: 3526447 - DNA, 25 bp, Homo sapien
ttgggctcaaaggctgagatagttt

SEQ ID NO: 3526448 - DNA, 25 bp, Homo sapien
gttgggctcaaaggctgagatagtt

SEQ ID NO: 3526449 - DNA, 25 bp, Homo sapien
gaagatgcatgaataggtccaacca

SEQ ID NO: 3526450 - DNA, 25 bp, Homo sapien
aggaaggataaagggctgagtagaa

SEQ ID NO: 3526451 - DNA, 25 bp, Homo sapien
acaccaggcaccagttggggagctt

SEQ ID NO: 3526452 - DNA, 25 bp, Homo sapien
caccaggcaccagttggggagcttt

SEQ ID NO: 3526453 - DNA, 25 bp, Homo sapien
gggccatttgtatgggtgatgagga

SEQ ID NO: 3526454 - DNA, 25 bp, Homo sapien
cagtctgcactggatgtggtcagct

SEQ ID NO: 3526455 - DNA, 25 bp, Homo sapien
cagggctgtccatgctagagatact

SEQ ID NO: 3526456 - DNA, 25 bp, Homo sapien
cagcttcttgaatcaccagggctgt

SEQ ID NO: 3526457 - DNA, 25 bp, Homo sapien
gctgtccatgctagagatacttcca

SEQ ID NO: 3526458 - DNA, 25 bp, Homo sapien
ctctcttcagctggagaaagaccat

SEQ ID NO: 3526459 - DNA, 25 bp, Homo sapien
cttcctctcttcagctggagaaaga

SEQ ID NO: 3526460 - DNA, 25 bp, Homo sapien
cctctcttcagctggagaaagacca

SEQ ID NO: 3526461 - DNA, 25 bp, Homo sapien
tcctctcttcagctggagaaagacc

SEQ ID NO: 3526462 - DNA, 25 bp, Homo sapien
tgtaaactaacagaacgagaactca

SEQ ID NO: 3526463 - DNA, 25 bp, Homo sapien
gaaggatccactcccctcatccaat

SEQ ID NO: 3526464 - DNA, 25 bp, Homo sapien
ttcaatgtgaggtttagaggagaca

SEQ ID NO: 3526465 - DNA, 25 bp, Homo sapien
agatcttgtgtaaactaacagaacg

SEQ ID NO: 3526466 - DNA, 25 bp, Homo sapien
gaatcctcagcccaagcagaaatca

SEQ ID NO: 3526467 - DNA, 25 bp, Homo sapien
gcagaaatcagacacctccatgctg

SEQ ID NO: 3526468 - DNA, 25 bp, Homo sapien
ggctttattgttctactcaggagca

SEQ ID NO: 3526469 - DNA, 25 bp, Homo sapien
aacaaagcagcttcaagtcctggaa

SEQ ID NO: 3526470 - DNA, 25 bp, Homo sapien
gctagatgtaaggaaggtgtgttac

SEQ ID NO: 3526471 - DNA, 25 bp, Homo sapien
ggttcaatggcccagctagatgtaa

SEQ ID NO: 3526472 - DNA, 25 bp, Homo sapien
gttttaaacattggcatattctggt

SEQ ID NO: 3526473 - DNA, 25 bp, Homo sapien
taaacattggcatattctggttcaa

SEQ ID NO: 3526474 - DNA, 25 bp, Homo sapien
ttatgttttactccacctgaccatt

SEQ ID NO: 3526475 - DNA, 25 bp, Homo sapien
atgttttactccacctgaccattgc

SEQ ID NO: 3526476 - DNA, 25 bp, Homo sapien
ccttatgttttactccacctgacca

SEQ ID NO: 3526477 - DNA, 25 bp, Homo sapien
ttccttatgttttactccacctgac

SEQ ID NO: 3526478 - DNA, 25 bp, Homo sapien
tagcctacatggataggagtgagac

SEQ ID NO: 3526479 - DNA, 25 bp, Homo sapien
tctagcctacatggataggagtgag

SEQ ID NO: 3526480 - DNA, 25 bp, Homo sapien
tgcactctagcctacatggatagga

SEQ ID NO: 3526481 - DNA, 25 bp, Homo sapien
cactctagcctacatggataggagt

SEQ ID NO: 3526482 - DNA, 25 bp, Homo sapien
caactctggtgggttggttagcata

SEQ ID NO: 3526483 - DNA, 25 bp, Homo sapien
taaaagtctctctaattagccttgg

SEQ ID NO: 3526484 - DNA, 25 bp, Homo sapien
ctaactagctaagagaccctggaca

SEQ ID NO: 3526485 - DNA, 25 bp, Homo sapien
ttagccttggtgaataggactctca

SEQ ID NO: 3526486 - DNA, 25 bp, Homo sapien
gcgtctcgcagggtatcagtctcat

SEQ ID NO: 3526487 - DNA, 25 bp, Homo sapien
acttggaaatagttctcggttgctc

SEQ ID NO: 3526488 - DNA, 25 bp, Homo sapien
gcctcgccatgtggtggatctcaca

SEQ ID NO: 3526489 - DNA, 25 bp, Homo sapien
gtcattctgctaacacaatcccagg

SEQ ID NO: 3526490 - DNA, 25 bp, Homo sapien
cggcaccaaatttcatgtgtgtccg

SEQ ID NO: 3526491 - DNA, 25 bp, Homo sapien
caaatttcatgtgtgtccgtgtgaa

SEQ ID NO: 3526492 - DNA, 25 bp, Homo sapien
gcaccaaatttcatgtgtgtccgtg

SEQ ID NO: 3526493 - DNA, 25 bp, Homo sapien
cacggcaccaaatttcatgtgtgtc

SEQ ID NO: 3526494 - DNA, 25 bp, Homo sapien
attagtacacttaaatagaacttgt

SEQ ID NO: 3526495 - DNA, 25 bp, Homo sapien
aattagtacacttaaatagaacttg

SEQ ID NO: 3526496 - DNA, 25 bp, Homo sapien
gatctggcccttgcaatcctttaag

SEQ ID NO: 3526497 - DNA, 25 bp, Homo sapien
tttaccatagagagaacaaggccac

SEQ ID NO: 3526498 - DNA, 25 bp, Homo sapien
tgctgccatgcatgaaacacttctg

SEQ ID NO: 3526499 - DNA, 25 bp, Homo sapien
tattgggtaaaagagccactgacca

SEQ ID NO: 3526500 - DNA, 25 bp, Homo sapien
ggcagaaggttgctgtggccttcac

SEQ ID NO: 3526501 - DNA, 25 bp, Homo sapien
tcttccattgagcaaggcaccttca

SEQ ID NO: 3526502 - DNA, 25 bp, Homo sapien
caccttcccgaagtcttgtctctgg

SEQ ID NO: 3526503 - DNA, 25 bp, Homo sapien
gatttcctatgggtccccttgatca

SEQ ID NO: 3526504 - DNA, 25 bp, Homo sapien
tctgggttgatacagggctctacct

SEQ ID NO: 3526505 - DNA, 25 bp, Homo sapien
ggtcctccagtcgagaacctcttga

SEQ ID NO: 3526506 - DNA, 25 bp, Homo sapien
tgtaggcacttaaagcacgaggtcc

SEQ ID NO: 3526507 - DNA, 25 bp, Homo sapien
tagaccttgggatggccactcagaa

SEQ ID NO: 3526508 - DNA, 25 bp, Homo sapien
aaatatttcagaacgcgcaactgat

SEQ ID NO: 3526509 - DNA, 25 bp, Homo sapien
ttcagaacgcgcaactgatttttct

SEQ ID NO: 3526510 - DNA, 25 bp, Homo sapien
tcacttgttcacagcagtggtaaaa

SEQ ID NO: 3526511 - DNA, 25 bp, Homo sapien
tgttcacagcagtggtaaaatattt

SEQ ID NO: 3526512 - DNA, 25 bp, Homo sapien
tgttctgagcaaacataggtccttc

SEQ ID NO: 3526513 - DNA, 25 bp, Homo sapien
tcccctaagccagtaaagcaatgac

SEQ ID NO: 3526514 - DNA, 25 bp, Homo sapien
tactctgaccaacgcccaaagaatg

SEQ ID NO: 3526515 - DNA, 25 bp, Homo sapien
taggtccttccgtcaaaagcagctt

SEQ ID NO: 3526516 - DNA, 25 bp, Homo sapien
tccaacgctatcagaagttaaaagc

SEQ ID NO: 3526517 - DNA, 25 bp, Homo sapien
cgaagatacttactgtctaaaatgt

SEQ ID NO: 3526518 - DNA, 25 bp, Homo sapien
aaagaggacagtttattatcaattc

SEQ ID NO: 3526519 - DNA, 25 bp, Homo sapien
atagtactaacaagaacgaagatac

SEQ ID NO: 3526520 - DNA, 25 bp, Homo sapien
aaagcagcatgcaatttattatttt

SEQ ID NO: 3526521 - DNA, 25 bp, Homo sapien
agcagcatgcaatttattatttttt

SEQ ID NO: 3526522 - DNA, 25 bp, Homo sapien
gcatgcaatttattattttttttaa

SEQ ID NO: 3526523 - DNA, 25 bp, Homo sapien
cagcatgcaatttattatttttttt

SEQ ID NO: 3526524 - DNA, 25 bp, Homo sapien
ggtcatggacatgtccaataaatag

SEQ ID NO: 3526525 - DNA, 25 bp, Homo sapien
ttggcaacggcaacaaaccacaaca

SEQ ID NO: 3526526 - DNA, 25 bp, Homo sapien
ttatcaaggaatgtaatgcagactt

SEQ ID NO: 3526527 - DNA, 25 bp, Homo sapien
aagttgtgcgcaaatgactgtttcc

SEQ ID NO: 3526528 - DNA, 25 bp, Homo sapien
cccttttaatggtcaatgtacatac

SEQ ID NO: 3526529 - DNA, 25 bp, Homo sapien
tccccttttaatggtcaatgtacat

SEQ ID NO: 3526530 - DNA, 25 bp, Homo sapien
atcttccccttttaatggtcaatgt

SEQ ID NO: 3526531 - DNA, 25 bp, Homo sapien
ttccccttttaatggtcaatgtaca

SEQ ID NO: 3526532 - DNA, 25 bp, Homo sapien
caagaagtgtctatccttatgaatc

SEQ ID NO: 3526533 - DNA, 25 bp, Homo sapien
tatgaatcgccagccaattctcttt

SEQ ID NO: 3526534 - DNA, 25 bp, Homo sapien
tgctatccatggtaagggcccgcac

SEQ ID NO: 3526535 - DNA, 25 bp, Homo sapien
tctctttttgctatccatggtaagg

SEQ ID NO: 3526536 - DNA, 25 bp, Homo sapien
ggtagttcggcactgggagttccaa

SEQ ID NO: 3526537 - DNA, 25 bp, Homo sapien
gactgggtagttcggcactgggagt

SEQ ID NO: 3526538 - DNA, 25 bp, Homo sapien
tcggcactgggagttccaatgcctt

SEQ ID NO: 3526539 - DNA, 25 bp, Homo sapien
cactgggagttccaatgccttttgt

SEQ ID NO: 3526540 - DNA, 25 bp, Homo sapien
tgggattgcacttggtctcgtagaa

SEQ ID NO: 3526541 - DNA, 25 bp, Homo sapien
ccttcttttgtgtaacccatgggat

SEQ ID NO: 3526542 - DNA, 25 bp, Homo sapien
tacagggaccttttcaaggactgtg

SEQ ID NO: 3526543 - DNA, 25 bp, Homo sapien
cagttggccttttgatacagggacc

SEQ ID NO: 3526544 - DNA, 25 bp, Homo sapien
tgccgttacccactcactaatactg

SEQ ID NO: 3526545 - DNA, 25 bp, Homo sapien
ggctccaaaggcacttgactactga

SEQ ID NO: 3526546 - DNA, 25 bp, Homo sapien
cccctcggcgggcagggtcagagtg

SEQ ID NO: 3526547 - DNA, 25 bp, Homo sapien
tgtttgcagcatctaggtaattttt

SEQ ID NO: 3526548 - DNA, 25 bp, Homo sapien
gtgtcagccaatgatgtcaagcctc

SEQ ID NO: 3526549 - DNA, 25 bp, Homo sapien
caccctggacgtgtacaagtctgcg

SEQ ID NO: 3526550 - DNA, 25 bp, Homo sapien
tatcacgtgttcgaaagtgtcagcc

SEQ ID NO: 3526551 - DNA, 25 bp, Homo sapien
tcaagcctcttgaacctgccttggg

SEQ ID NO: 3526552 - DNA, 25 bp, Homo sapien
ggccaagccaccttgtcctcggatg

SEQ ID NO: 3526553 - DNA, 25 bp, Homo sapien
tgtcctcggatgtttgcttctttca

SEQ ID NO: 3526554 - DNA, 25 bp, Homo sapien
gccaccttgtcctcggatgtttgct

SEQ ID NO: 3526555 - DNA, 25 bp, Homo sapien
gtaggccaagccaccttgtcctcgg

SEQ ID NO: 3526556 - DNA, 25 bp, Homo sapien
ataaccatagtaaggaaaaggatgg

SEQ ID NO: 3526557 - DNA, 25 bp, Homo sapien
caaccaaagtatgaaataaccatag

SEQ ID NO: 3526558 - DNA, 25 bp, Homo sapien
gtatgaaataaccatagtaaggaaa

SEQ ID NO: 3526559 - DNA, 25 bp, Homo sapien
gcagccttcatgcaaccaaagtatg

SEQ ID NO: 3526560 - DNA, 25 bp, Homo sapien
ttagggctttctttcaccgggatgc

SEQ ID NO: 3526561 - DNA, 25 bp, Homo sapien
ttatgtcttggtgataaactccagc

SEQ ID NO: 3526562 - DNA, 25 bp, Homo sapien
gattgtaattccaggccattctgca

SEQ ID NO: 3526563 - DNA, 25 bp, Homo sapien
gccatgtggcccatctgattgtaat

SEQ ID NO: 3526564 - DNA, 25 bp, Homo sapien
tgctcatgctgtcacgagaaacaca

SEQ ID NO: 3526565 - DNA, 25 bp, Homo sapien
caagttagcaacatggtcctttgca

SEQ ID NO: 3526566 - DNA, 25 bp, Homo sapien
tctgatgggcctttctagctatgtg

SEQ ID NO: 3526567 - DNA, 25 bp, Homo sapien
tgatgtctaggcatgaatagcacaa

SEQ ID NO: 3526568 - DNA, 25 bp, Homo sapien
ttcattgagccatcctgttttacag

SEQ ID NO: 3526569 - DNA, 25 bp, Homo sapien
gaaagataatttcattgagccatcc

SEQ ID NO: 3526570 - DNA, 25 bp, Homo sapien
gatactctattatagcaaagaagaa

SEQ ID NO: 3526571 - DNA, 25 bp, Homo sapien
gataatttcattgagccatcctgtt

SEQ ID NO: 3526572 - DNA, 25 bp, Homo sapien
acttggaaagggaggttccaagatg

SEQ ID NO: 3526573 - DNA, 25 bp, Homo sapien
tcagtgacccactctgtaataaaga

SEQ ID NO: 3526574 - DNA, 25 bp, Homo sapien
gacccactctgtaataaagaacttg

SEQ ID NO: 3526575 - DNA, 25 bp, Homo sapien
cccactctgtaataaagaacttgga

SEQ ID NO: 3526576 - DNA, 25 bp, Homo sapien
ttcagggatcagtttgttaaattcc

SEQ ID NO: 3526577 - DNA, 25 bp, Homo sapien
tatgaaaccattttcagggatcagt

SEQ ID NO: 3526578 - DNA, 25 bp, Homo sapien
ctttatgaaaccattttcagggatc

SEQ ID NO: 3526579 - DNA, 25 bp, Homo sapien
tcagggatcagtttgttaaattcca

SEQ ID NO: 3526580 - DNA, 25 bp, Homo sapien
tgaaacgtggaggtacacagcacag

SEQ ID NO: 3526581 - DNA, 25 bp, Homo sapien
tacagaagcgtgtgggtagacgcca

SEQ ID NO: 3526582 - DNA, 25 bp, Homo sapien
cttctgggatgcacagtcatgccat

SEQ ID NO: 3526583 - DNA, 25 bp, Homo sapien
gtagacgccaaaacatgtgtggacc

SEQ ID NO: 3526584 - DNA, 25 bp, Homo sapien
ctgagtagtaacaaggattaacctt

SEQ ID NO: 3526585 - DNA, 25 bp, Homo sapien
aggattaaccttgtgcactcatgga

SEQ ID NO: 3526586 - DNA, 25 bp, Homo sapien
catggagaaaactggtggctccaca

SEQ ID NO: 3526587 - DNA, 25 bp, Homo sapien
ggagaaaactggtggctccacacat

SEQ ID NO: 3526588 - DNA, 25 bp, Homo sapien
tgatggcacaaaagacagaacacct

SEQ ID NO: 3526589 - DNA, 25 bp, Homo sapien
tgctacgtgacttgtgacccatcca

SEQ ID NO: 3526590 - DNA, 25 bp, Homo sapien
cagaacagatggtccggcatggata

SEQ ID NO: 3526591 - DNA, 25 bp, Homo sapien
tggtctgacaccctatgctacgtga

SEQ ID NO: 3526592 - DNA, 25 bp, Homo sapien
ggtgggagtacaaacaattcaagcc

SEQ ID NO: 3526593 - DNA, 25 bp, Homo sapien
cgtgtgtgtcactagagctggcgca

SEQ ID NO: 3526594 - DNA, 25 bp, Homo sapien
tcacacactctgtttgatgaggcta

SEQ ID NO: 3526595 - DNA, 25 bp, Homo sapien
tctgcaagtggcaacgtgggtccat

SEQ ID NO: 3526596 - DNA, 25 bp, Homo sapien
gtgaaacacaacacaaccctgaggg

SEQ ID NO: 3526597 - DNA, 25 bp, Homo sapien
tgtacattgtaaaggtcaaccctac

SEQ ID NO: 3526598 - DNA, 25 bp, Homo sapien
agcatcacaccagggattgtcaaca

SEQ ID NO: 3526599 - DNA, 25 bp, Homo sapien
caacatatgggaaagagctttgtac

SEQ ID NO: 3526600 - DNA, 25 bp, Homo sapien
gatactgagatagtgcagaggaatg

SEQ ID NO: 3526601 - DNA, 25 bp, Homo sapien
gagatactgagatagtgcagaggaa

SEQ ID NO: 3526602 - DNA, 25 bp, Homo sapien
atactgagatagtgcagaggaatga

SEQ ID NO: 3526603 - DNA, 25 bp, Homo sapien
tgagatactgagatagtgcagagga

SEQ ID NO: 3526604 - DNA, 25 bp, Homo sapien
ggatgctagccgttgattcctggca

SEQ ID NO: 3526605 - DNA, 25 bp, Homo sapien
tctgaatatggtaacaaggaaatcc

SEQ ID NO: 3526606 - DNA, 25 bp, Homo sapien
gaaatcctagtaactgtagcgttgg

SEQ ID NO: 3526607 - DNA, 25 bp, Homo sapien
gccatttggctagtaaagctggtga

SEQ ID NO: 3526608 - DNA, 25 bp, Homo sapien
tttgaagctcatctgtgcatgttat

SEQ ID NO: 3526609 - DNA, 25 bp, Homo sapien
cagagtgtaaccagtaagtttgctc

SEQ ID NO: 3526610 - DNA, 25 bp, Homo sapien
tcttccattgaacaacagccagcac

SEQ ID NO: 3526611 - DNA, 25 bp, Homo sapien
caacacaacttgatgcgattcttgt

SEQ ID NO: 3526612 - DNA, 25 bp, Homo sapien
tcattttctggatgcaccaatgttg

SEQ ID NO: 3526613 - DNA, 25 bp, Homo sapien
gatgaaggcaattaactcacatagt

SEQ ID NO: 3526614 - DNA, 25 bp, Homo sapien
ccctcctggtgagtcaaaatgaaca

SEQ ID NO: 3526615 - DNA, 25 bp, Homo sapien
tgaacaagaaataccccaggacctc

SEQ ID NO: 3526616 - DNA, 25 bp, Homo sapien
gagagtgtcgcagaccctttcagtt

SEQ ID NO: 3526617 - DNA, 25 bp, Homo sapien
ccaagttttccaagctacattggct

SEQ ID NO: 3526618 - DNA, 25 bp, Homo sapien
cctttcagttcccagcggtaggaat

SEQ ID NO: 3526619 - DNA, 25 bp, Homo sapien
gcttcggacttgtaagtccacttca

SEQ ID NO: 3526620 - DNA, 25 bp, Homo sapien
cactccccccgcaagtcggcgcggg

SEQ ID NO: 3526621 - DNA, 25 bp, Homo sapien
gggctgaaggcgcaagcttccctcc

SEQ ID NO: 3526622 - DNA, 25 bp, Homo sapien
tagccgtgtgcagctccggggaagg

SEQ ID NO: 3526623 - DNA, 25 bp, Homo sapien
ctccggggaagggatgcgggctgaa

SEQ ID NO: 3526624 - DNA, 25 bp, Homo sapien
gtgtctcattaaagccccccgagca

SEQ ID NO: 3526625 - DNA, 25 bp, Homo sapien
atcgtggttccgattctggctccag

SEQ ID NO: 3526626 - DNA, 25 bp, Homo sapien
tccccggcggcggagtcacatcgtg

SEQ ID NO: 3526627 - DNA, 25 bp, Homo sapien
gagtcacatcgtggttccgattctg

SEQ ID NO: 3526628 - DNA, 25 bp, Homo sapien
gtgcgcgggacagcgagcgggcggg

SEQ ID NO: 3526629 - DNA, 25 bp, Homo sapien
gacattatttagctcttcggttgag

SEQ ID NO: 3526630 - DNA, 25 bp, Homo sapien
tccaggctgcgccttgcgcccgggt

SEQ ID NO: 3526631 - DNA, 25 bp, Homo sapien
ccttgcgcccgggtcagacattatt

SEQ ID NO: 3526632 - DNA, 25 bp, Homo sapien
ctcctggggcgccttggacaggacg

SEQ ID NO: 3526633 - DNA, 25 bp, Homo sapien
ccgcggcttcgaggggtgttccagc

SEQ ID NO: 3526634 - DNA, 25 bp, Homo sapien
tctgcagaaaccccggctgtgggcg

SEQ ID NO: 3526635 - DNA, 25 bp, Homo sapien
ggccccgcgacatcgccctgcgagt

SEQ ID NO: 3526636 - DNA, 25 bp, Homo sapien
gcaccttcctgcactacggagcttg

SEQ ID NO: 3526637 - DNA, 25 bp, Homo sapien
tgcactacggagcttgcgaacgcga

SEQ ID NO: 3526638 - DNA, 25 bp, Homo sapien
gcttgcgaacgcgagcacacaatga

SEQ ID NO: 3526639 - DNA, 25 bp, Homo sapien
gagcacacaatgaaatcgcacagag

SEQ ID NO: 3526640 - DNA, 25 bp, Homo sapien
gaagctccatttgatctcggcagag

SEQ ID NO: 3526641 - DNA, 25 bp, Homo sapien
ggagatttcatgctagttcgccggg

SEQ ID NO: 3526642 - DNA, 25 bp, Homo sapien
tgtcaaagtaaccatcaaggcagct

SEQ ID NO: 3526643 - DNA, 25 bp, Homo sapien
attgcatggcggaggtaatactcgc

SEQ ID NO: 3526644 - DNA, 25 bp, Homo sapien
tgatgcgggcgccttggagttcctt

SEQ ID NO: 3526645 - DNA, 25 bp, Homo sapien
ggagttcctttgcagcacgcttgga

SEQ ID NO: 3526646 - DNA, 25 bp, Homo sapien
cagccctgcagatccgtatttaaaa

SEQ ID NO: 3526647 - DNA, 25 bp, Homo sapien
ggatctcggaacaatctgtgcccca

SEQ ID NO: 3526648 - DNA, 25 bp, Homo sapien
agaaagcgggaaccctctaagccag

SEQ ID NO: 3526649 - DNA, 25 bp, Homo sapien
taagccagcgcccgaaactcgcggg

SEQ ID NO: 3526650 - DNA, 25 bp, Homo sapien
cttgagaaagcgggaaccctctaag

SEQ ID NO: 3526651 - DNA, 25 bp, Homo sapien
tgagaaagcgggaaccctctaagcc

SEQ ID NO: 3526652 - DNA, 25 bp, Homo sapien
tagatcctggagataaacacttgca

SEQ ID NO: 3526653 - DNA, 25 bp, Homo sapien
ccaccccggtggctagatcctggag

SEQ ID NO: 3526654 - DNA, 25 bp, Homo sapien
ctttgcggcttacaccaccccggtg

SEQ ID NO: 3526655 - DNA, 25 bp, Homo sapien
tgcatttcccaaagttaacccagta

SEQ ID NO: 3526656 - DNA, 25 bp, Homo sapien
gagccgaacctcagaaaagacgctt

SEQ ID NO: 3526657 - DNA, 25 bp, Homo sapien
cagccccgatctcagtgtgagccga

SEQ ID NO: 3526658 - DNA, 25 bp, Homo sapien
gaagccaacttcagcgagctcaatg

SEQ ID NO: 3526659 - DNA, 25 bp, Homo sapien
aaacgctccgctccaaaatctgact

SEQ ID NO: 3526660 - DNA, 25 bp, Homo sapien
ctttacagcggggccaagaagacta

SEQ ID NO: 3526661 - DNA, 25 bp, Homo sapien
tttacagcggggccaagaagactac

SEQ ID NO: 3526662 - DNA, 25 bp, Homo sapien
gaatggactcctatcgcccggatta

SEQ ID NO: 3526663 - DNA, 25 bp, Homo sapien
gacaaatccgttggctctgtccaag

SEQ ID NO: 3526664 - DNA, 25 bp, Homo sapien
tgatacttgatattgctctagacgg

SEQ ID NO: 3526665 - DNA, 25 bp, Homo sapien
tacggtttgtcacgtgcggatggct

SEQ ID NO: 3526666 - DNA, 25 bp, Homo sapien
aacttgttgcttatcagcgccggca

SEQ ID NO: 3526667 - DNA, 25 bp, Homo sapien
tgagcgaggttaccaatgattgccc

SEQ ID NO: 3526668 - DNA, 25 bp, Homo sapien
tatagatttacgcaaacgccctcac

SEQ ID NO: 3526669 - DNA, 25 bp, Homo sapien
agttcggctttgctcagtggatcgc

SEQ ID NO: 3526670 - DNA, 25 bp, Homo sapien
gagatttctcattccccactgcagc

SEQ ID NO: 3526671 - DNA, 25 bp, Homo sapien
tcctctggatggctactctggccca

SEQ ID NO: 3526672 - DNA, 25 bp, Homo sapien
ctgggactccttctagcaaactcta

SEQ ID NO: 3526673 - DNA, 25 bp, Homo sapien
cacgttttcaaggatgttgcagctg

SEQ ID NO: 3526674 - DNA, 25 bp, Homo sapien
accacatccagaggctttcggccct

SEQ ID NO: 3526675 - DNA, 25 bp, Homo sapien
tgttttcataaggaccacatccaga

SEQ ID NO: 3526676 - DNA, 25 bp, Homo sapien
ttgttttcataaggaccacatccag

SEQ ID NO: 3526677 - DNA, 25 bp, Homo sapien
catccagaggctttcggcccttccc

SEQ ID NO: 3526678 - DNA, 25 bp, Homo sapien
tctgacacgtccacactcattagag

SEQ ID NO: 3526679 - DNA, 25 bp, Homo sapien
caagttcgcacattaagacaagggt

SEQ ID NO: 3526680 - DNA, 25 bp, Homo sapien
catttgatgtcacgagcctgtgatg

SEQ ID NO: 3526681 - DNA, 25 bp, Homo sapien
taaagagtggctctgttcgtgcaca

SEQ ID NO: 3526682 - DNA, 25 bp, Homo sapien
tactcaatatacgatcgtgtatctg

SEQ ID NO: 3526683 - DNA, 25 bp, Homo sapien
gctgggtgcagacaagaaccgtcag

SEQ ID NO: 3526684 - DNA, 25 bp, Homo sapien
aaagccaccttgttctcagtctcac

SEQ ID NO: 3526685 - DNA, 25 bp, Homo sapien
gacaagaaccgtcagccttacagtt

SEQ ID NO: 3526686 - DNA, 25 bp, Homo sapien
tccccctagatgaaatgccaagggc

SEQ ID NO: 3526687 - DNA, 25 bp, Homo sapien
ggctccagaagctccccctagatga

SEQ ID NO: 3526688 - DNA, 25 bp, Homo sapien
tgccaagggcttaatgggcagcaga

SEQ ID NO: 3526689 - DNA, 25 bp, Homo sapien
tagaatacttgtcaatggtgagggc

SEQ ID NO: 3526690 - DNA, 25 bp, Homo sapien
ccatgagaggtgttgtatgcacacc

SEQ ID NO: 3526691 - DNA, 25 bp, Homo sapien
ccccatgagaggtgttgtatgcaca

SEQ ID NO: 3526692 - DNA, 25 bp, Homo sapien
gttgtatgcacaccaaagcttctca

SEQ ID NO: 3526693 - DNA, 25 bp, Homo sapien
aaccccatgagaggtgttgtatgca

SEQ ID NO: 3526694 - DNA, 25 bp, Homo sapien
gctgacaatgaagaagcgttcctgg

SEQ ID NO: 3526695 - DNA, 25 bp, Homo sapien
caatgaagaagcgttcctggtgatt

SEQ ID NO: 3526696 - DNA, 25 bp, Homo sapien
gacaatgaagaagcgttcctggtga

SEQ ID NO: 3526697 - DNA, 25 bp, Homo sapien
gcaggatttgacattccctcctcat

SEQ ID NO: 3526698 - DNA, 25 bp, Homo sapien
atcccttggcaatgcaccagttgca

SEQ ID NO: 3526699 - DNA, 25 bp, Homo sapien
gacctagcttgttcactggccttga

SEQ ID NO: 3526700 - DNA, 25 bp, Homo sapien
aatgcaccagttgcattgacctagc

SEQ ID NO: 3526701 - DNA, 25 bp, Homo sapien
cagttgcattgacctagcttgttca

SEQ ID NO: 3526702 - DNA, 25 bp, Homo sapien
tcagaaggtctggtatcacacatgg

SEQ ID NO: 3526703 - DNA, 25 bp, Homo sapien
agtctcaaggagaagctatgttccc

SEQ ID NO: 3526704 - DNA, 25 bp, Homo sapien
cactattactatcaggcactcagag

SEQ ID NO: 3526705 - DNA, 25 bp, Homo sapien
agggcatgccacctaggactagtat

SEQ ID NO: 3526706 - DNA, 25 bp, Homo sapien
tttctgcacattcgggagattttcc

SEQ ID NO: 3526707 - DNA, 25 bp, Homo sapien
tgacctgggctagttgttctgatgt

SEQ ID NO: 3526708 - DNA, 25 bp, Homo sapien
tcaagctcaacctcaatctggaagt

SEQ ID NO: 3526709 - DNA, 25 bp, Homo sapien
tgggttgctattgcccctctgagca

SEQ ID NO: 3526710 - DNA, 25 bp, Homo sapien
ggactctgaagtaagattccctaca

SEQ ID NO: 3526711 - DNA, 25 bp, Homo sapien
ttattcagagagtcatatgtcagca

SEQ ID NO: 3526712 - DNA, 25 bp, Homo sapien
aatatggctcgccttttctaaaagc

SEQ ID NO: 3526713 - DNA, 25 bp, Homo sapien
tgggtgctaaattcaccttgttggc

SEQ ID NO: 3526714 - DNA, 25 bp, Homo sapien
gaggcaaggcgagggacaatggtgg

SEQ ID NO: 3526715 - DNA, 25 bp, Homo sapien
tgtaggaggcaaggcgagggacaat

SEQ ID NO: 3526716 - DNA, 25 bp, Homo sapien
aggaggcaaggcgagggacaatggt

SEQ ID NO: 3526717 - DNA, 25 bp, Homo sapien
gtaggaggcaaggcgagggacaatg

SEQ ID NO: 3526718 - DNA, 25 bp, Homo sapien
tctccaacgtctctgacgttgcttt

SEQ ID NO: 3526719 - DNA, 25 bp, Homo sapien
tcttggtataaatgacaccttcttg

SEQ ID NO: 3526720 - DNA, 25 bp, Homo sapien
tttccaatcttggtataaatgacac

SEQ ID NO: 3526721 - DNA, 25 bp, Homo sapien
cgtctctgacgttgctttccaatct

SEQ ID NO: 3526722 - DNA, 25 bp, Homo sapien
tgtctttcaagggactcaggtttca

SEQ ID NO: 3526723 - DNA, 25 bp, Homo sapien
tcaagggactcaggtttcacaccca

SEQ ID NO: 3526724 - DNA, 25 bp, Homo sapien
gggactcaggtttcacacccacaga

SEQ ID NO: 3526725 - DNA, 25 bp, Homo sapien
tctttcaagggactcaggtttcaca

SEQ ID NO: 3526726 - DNA, 25 bp, Homo sapien
cccagcccaggtaagaaaggctaga

SEQ ID NO: 3526727 - DNA, 25 bp, Homo sapien
cctgaccccggggatactgataggg

SEQ ID NO: 3526728 - DNA, 25 bp, Homo sapien
cagggctggtaagttccaagtggcc

SEQ ID NO: 3526729 - DNA, 25 bp, Homo sapien
ctaatcagggctggtaagttccaag

SEQ ID NO: 3526730 - DNA, 25 bp, Homo sapien
ctgctctgagacttcggtggagcag

SEQ ID NO: 3526731 - DNA, 25 bp, Homo sapien
gcaggtgttattctggtcatcaaca

SEQ ID NO: 3526732 - DNA, 25 bp, Homo sapien
gccataaatatctcgagtcagggag

SEQ ID NO: 3526733 - DNA, 25 bp, Homo sapien
ctcagagccataaatatctcgagtc

SEQ ID NO: 3526734 - DNA, 25 bp, Homo sapien
gaagcagaccttaatcttagtctct

SEQ ID NO: 3526735 - DNA, 25 bp, Homo sapien
gaccttaatcttagtctctaaatcc

SEQ ID NO: 3526736 - DNA, 25 bp, Homo sapien
agctaagaagcagaccttaatctta

SEQ ID NO: 3526737 - DNA, 25 bp, Homo sapien
taagaagcagaccttaatcttagtc

SEQ ID NO: 3526738 - DNA, 25 bp, Homo sapien
tcttgactcaaggtgtgggttttgc

SEQ ID NO: 3526739 - DNA, 25 bp, Homo sapien
actctgatgttcttcatagtgtctt

SEQ ID NO: 3526740 - DNA, 25 bp, Homo sapien
gtgtcttcttgactcaaggtgtggg

SEQ ID NO: 3526741 - DNA, 25 bp, Homo sapien
tcttcttgactcaaggtgtgggttt

SEQ ID NO: 3526742 - DNA, 25 bp, Homo sapien
ataacccacagccgtaaaactcaag

SEQ ID NO: 3526743 - DNA, 25 bp, Homo sapien
cccacagccgtaaaactcaagtctt

SEQ ID NO: 3526744 - DNA, 25 bp, Homo sapien
ttataacccacagccgtaaaactca

SEQ ID NO: 3526745 - DNA, 25 bp, Homo sapien
cacagccgtaaaactcaagtctttc

SEQ ID NO: 3526746 - DNA, 25 bp, Homo sapien
gagaggagaatgtgccgatgcctct

SEQ ID NO: 3526747 - DNA, 25 bp, Homo sapien
ccgatgcctctatgggcagaagaca

SEQ ID NO: 3526748 - DNA, 25 bp, Homo sapien
gcagaagacaggcttgcatggtagc

SEQ ID NO: 3526749 - DNA, 25 bp, Homo sapien
ccgctgggccttctaatcagtaggg

SEQ ID NO: 3526750 - DNA, 25 bp, Homo sapien
tatgccaggtgttcgcctcaaagag

SEQ ID NO: 3526751 - DNA, 25 bp, Homo sapien
ccaagatgcccttcacaatcctgtt

SEQ ID NO: 3526752 - DNA, 25 bp, Homo sapien
aggcatttatgggagacaccagttt

SEQ ID NO: 3526753 - DNA, 25 bp, Homo sapien
ttaatgaggccttggattccactca

SEQ ID NO: 3526754 - DNA, 25 bp, Homo sapien
gcccatatagatttctacatccacc

SEQ ID NO: 3526755 - DNA, 25 bp, Homo sapien
catatagatttctacatccacctgc

SEQ ID NO: 3526756 - DNA, 25 bp, Homo sapien
ttgcccatatagatttctacatcca

SEQ ID NO: 3526757 - DNA, 25 bp, Homo sapien
ccatatagatttctacatccacctg

SEQ ID NO: 3526758 - DNA, 25 bp, Homo sapien
agtggtcaagccaggctaagaagcc

SEQ ID NO: 3526759 - DNA, 25 bp, Homo sapien
aattgaggttcagtgaggttgaatc

SEQ ID NO: 3526760 - DNA, 25 bp, Homo sapien
gcctgttccaaagtggtcaagccag

SEQ ID NO: 3526761 - DNA, 25 bp, Homo sapien
tgaggttcagtgaggttgaatcctt

SEQ ID NO: 3526762 - DNA, 25 bp, Homo sapien
tagttgttgtcatgccgtacagact

SEQ ID NO: 3526763 - DNA, 25 bp, Homo sapien
taaacatcaaggtatagctcaggaa

SEQ ID NO: 3526764 - DNA, 25 bp, Homo sapien
gctcaggaacacttcgataacaaga

SEQ ID NO: 3526765 - DNA, 25 bp, Homo sapien
tgttacatacatcttacaacgcacg

SEQ ID NO: 3526766 - DNA, 25 bp, Homo sapien
catggagacgtcaccaatcggtttg

SEQ ID NO: 3526767 - DNA, 25 bp, Homo sapien
ggctgccatataacccattgttgag

SEQ ID NO: 3526768 - DNA, 25 bp, Homo sapien
cttgtgacaatacagcatggagacg

SEQ ID NO: 3526769 - DNA, 25 bp, Homo sapien
cagtttcgtaaagcaagatgagcag

SEQ ID NO: 3526770 - DNA, 25 bp, Homo sapien
ccaggccttctttggtgactggcac

SEQ ID NO: 3526771 - DNA, 25 bp, Homo sapien
cttcatcctctggaagttccaggcc

SEQ ID NO: 3526772 - DNA, 25 bp, Homo sapien
tctggaagttccaggccttctttgg

SEQ ID NO: 3526773 - DNA, 25 bp, Homo sapien
gaagttccaggccttctttggtgac

SEQ ID NO: 3526774 - DNA, 25 bp, Homo sapien
tcccctcaaattccttcagctgttg

SEQ ID NO: 3526775 - DNA, 25 bp, Homo sapien
ccctcaaattccttcagctgttgga

SEQ ID NO: 3526776 - DNA, 25 bp, Homo sapien
aagtcttcccctcaaattccttcag

SEQ ID NO: 3526777 - DNA, 25 bp, Homo sapien
cttcccctcaaattccttcagctgt

SEQ ID NO: 3526778 - DNA, 25 bp, Homo sapien
atcaatgggctcaatcatatagatc

SEQ ID NO: 3526779 - DNA, 25 bp, Homo sapien
agtactcatcaatgggctcaatcat

SEQ ID NO: 3526780 - DNA, 25 bp, Homo sapien
tcatcaatgggctcaatcatataga

SEQ ID NO: 3526781 - DNA, 25 bp, Homo sapien
aatgggctcaatcatatagatcact

SEQ ID NO: 3526782 - DNA, 25 bp, Homo sapien
gttagctacctggtccttggtctca

SEQ ID NO: 3526783 - DNA, 25 bp, Homo sapien
ccacaaaggctgagttagctacctg

SEQ ID NO: 3526784 - DNA, 25 bp, Homo sapien
gttccacaaaggctgagttagctac

SEQ ID NO: 3526785 - DNA, 25 bp, Homo sapien
ttagctacctggtccttggtctcac

SEQ ID NO: 3526786 - DNA, 25 bp, Homo sapien
tttccttcattctggtgcagtagtc

SEQ ID NO: 3526787 - DNA, 25 bp, Homo sapien
ccttcattctggtgcagtagtcctt

SEQ ID NO: 3526788 - DNA, 25 bp, Homo sapien
cattctggtgcagtagtccttgaga

SEQ ID NO: 3526789 - DNA, 25 bp, Homo sapien
ggtgcagtagtccttgagagaaacc

SEQ ID NO: 3526790 - DNA, 25 bp, Homo sapien
agcttcttccgattttgagagtctt

SEQ ID NO: 3526791 - DNA, 25 bp, Homo sapien
cagaggcagacgtgtagtaccttaa

SEQ ID NO: 3526792 - DNA, 25 bp, Homo sapien
agtcttcttgtattccaagctttat

SEQ ID NO: 3526793 - DNA, 25 bp, Homo sapien
ggcagacgtgtagtaccttaacagc

SEQ ID NO: 3526794 - DNA, 25 bp, Homo sapien
agagggagatcctccgagtctacca

SEQ ID NO: 3526795 - DNA, 25 bp, Homo sapien
tagagggagatcctccgagtctacc

SEQ ID NO: 3526796 - DNA, 25 bp, Homo sapien
cgtacatacaatttgatgttgttct

SEQ ID NO: 3526797 - DNA, 25 bp, Homo sapien
ctgcgtacatacaatttgatgttgt

SEQ ID NO: 3526798 - DNA, 25 bp, Homo sapien
gcgtacatacaatttgatgttgttc

SEQ ID NO: 3526799 - DNA, 25 bp, Homo sapien
ctctgcgtacatacaatttgatgtt

SEQ ID NO: 3526800 - DNA, 25 bp, Homo sapien
ggtcaaaaggagcacgtcatgggac

SEQ ID NO: 3526801 - DNA, 25 bp, Homo sapien
tcaaacaggtcaaaaggagcacgtc

SEQ ID NO: 3526802 - DNA, 25 bp, Homo sapien
gttttcaaacaggtcaaaaggagca

SEQ ID NO: 3526803 - DNA, 25 bp, Homo sapien
aacaggtcaaaaggagcacgtcatg

SEQ ID NO: 3526804 - DNA, 25 bp, Homo sapien
aaatagaagggctctgaattccaac

SEQ ID NO: 3526805 - DNA, 25 bp, Homo sapien
tggtcaagttcttgcagaattctcc

SEQ ID NO: 3526806 - DNA, 25 bp, Homo sapien
ttggtcaagttcttgcagaattctc

SEQ ID NO: 3526807 - DNA, 25 bp, Homo sapien
ggtcaagttcttgcagaattctccg

SEQ ID NO: 3526808 - DNA, 25 bp, Homo sapien
acatcttcaatttcaggtttgtctt

SEQ ID NO: 3526809 - DNA, 25 bp, Homo sapien
tcctccaagtactcagtttggtctt

SEQ ID NO: 3526810 - DNA, 25 bp, Homo sapien
gataacctttgttccacgacccata

SEQ ID NO: 3526811 - DNA, 25 bp, Homo sapien
ctttcaggtgtaggataacctttgt

SEQ ID NO: 3526812 - DNA, 25 bp, Homo sapien
caggtgtaggataacctttgttcca

SEQ ID NO: 3526813 - DNA, 25 bp, Homo sapien
tgtaggataacctttgttccacgac

SEQ ID NO: 3526814 - DNA, 25 bp, Homo sapien
ggcgatagtaccaaggttattgatc

SEQ ID NO: 3526815 - DNA, 25 bp, Homo sapien
cccagacttggcgatagtaccaagg

SEQ ID NO: 3526816 - DNA, 25 bp, Homo sapien
ggtcccagacttggcgatagtacca

SEQ ID NO: 3526817 - DNA, 25 bp, Homo sapien
gacttggcgatagtaccaaggttat

SEQ ID NO: 3526818 - DNA, 25 bp, Homo sapien
aattccagtatccacaatagtgaga

SEQ ID NO: 3526819 - DNA, 25 bp, Homo sapien
ttccagtatccacaatagtgagagt

SEQ ID NO: 3526820 - DNA, 25 bp, Homo sapien
ggttaatatgcagctctttcccaga

SEQ ID NO: 3526821 - DNA, 25 bp, Homo sapien
ccagtatccacaatagtgagagttt

SEQ ID NO: 3526822 - DNA, 25 bp, Homo sapien
gggatctgtcaagctttcataccag

SEQ ID NO: 3526823 - DNA, 25 bp, Homo sapien
gatgatcaatgacatcaactgggca

SEQ ID NO: 3526824 - DNA, 25 bp, Homo sapien
tgcctgaaaggcgaatgtctcaacc

SEQ ID NO: 3526825 - DNA, 25 bp, Homo sapien
ctccatcggttggtcttgggtctgg

SEQ ID NO: 3526826 - DNA, 25 bp, Homo sapien
cttggctaagtgaccgcacaggacc

SEQ ID NO: 3526827 - DNA, 25 bp, Homo sapien
cccacggcacagcaacaccaggatg

SEQ ID NO: 3526828 - DNA, 25 bp, Homo sapien
ttggctaagtgaccgcacaggaccc

SEQ ID NO: 3526829 - DNA, 25 bp, Homo sapien
caggacccacggcacagcaacacca

SEQ ID NO: 3526830 - DNA, 25 bp, Homo sapien
ccttcgaagatactattgtatccct

SEQ ID NO: 3526831 - DNA, 25 bp, Homo sapien
gtttgcaaggttcattcccttcgaa

SEQ ID NO: 3526832 - DNA, 25 bp, Homo sapien
gaagatactattgtatccctttccc

SEQ ID NO: 3526833 - DNA, 25 bp, Homo sapien
gcaaggttcattcccttcgaagata

SEQ ID NO: 3526834 - DNA, 25 bp, Homo sapien
catactccagacctttccactttta

SEQ ID NO: 3526835 - DNA, 25 bp, Homo sapien
tcatactccagacctttccactttt

SEQ ID NO: 3526836 - DNA, 25 bp, Homo sapien
cataattaggtaaccaattggacaa

SEQ ID NO: 3526837 - DNA, 25 bp, Homo sapien
gaagaaggctggtcatgcttacgct

SEQ ID NO: 3526838 - DNA, 25 bp, Homo sapien
gcctgagagatggaacgggaccata

SEQ ID NO: 3526839 - DNA, 25 bp, Homo sapien
tcatgcttacgctgcctgagacttg

SEQ ID NO: 3526840 - DNA, 25 bp, Homo sapien
gcctcatcccctaagctttctgctg

SEQ ID NO: 3526841 - DNA, 25 bp, Homo sapien
tggagcctcattcacaaaatctctc

SEQ ID NO: 3526842 - DNA, 25 bp, Homo sapien
ttggagcctcattcacaaaatctct

SEQ ID NO: 3526843 - DNA, 25 bp, Homo sapien
gagcctcattcacaaaatctctctg

SEQ ID NO: 3526844 - DNA, 25 bp, Homo sapien
ggagcctcattcacaaaatctctct

SEQ ID NO: 3526845 - DNA, 25 bp, Homo sapien
ttctatgcacacaatcatgttgtct

SEQ ID NO: 3526846 - DNA, 25 bp, Homo sapien
cctcattagtcctagcagctctgtt

SEQ ID NO: 3526847 - DNA, 25 bp, Homo sapien
gatactactgtacataccatctaaa

SEQ ID NO: 3526848 - DNA, 25 bp, Homo sapien
tattatttcctaagacctcattaaa

SEQ ID NO: 3526849 - DNA, 25 bp, Homo sapien
aaagcacggtcattggctccccagg

SEQ ID NO: 3526850 - DNA, 25 bp, Homo sapien
caggcccatttatagctctgagcca

SEQ ID NO: 3526851 - DNA, 25 bp, Homo sapien
tttctgtggcgccaggaagactgag

SEQ ID NO: 3526852 - DNA, 25 bp, Homo sapien
caaacactcatggtcaaagcacggt

SEQ ID NO: 3526853 - DNA, 25 bp, Homo sapien
tctctgcttggatagagctgatggg

SEQ ID NO: 3526854 - DNA, 25 bp, Homo sapien
gcttgcgcgtaatttctctgcttgg

SEQ ID NO: 3526855 - DNA, 25 bp, Homo sapien
aagagcatgcacacttcagcttgcg

SEQ ID NO: 3526856 - DNA, 25 bp, Homo sapien
gaaattccattcagtagactcaagt

SEQ ID NO: 3526857 - DNA, 25 bp, Homo sapien
aactggtaccactccttctgaagct

SEQ ID NO: 3526858 - DNA, 25 bp, Homo sapien
ggatgcaaggctgcttcaatatacg

SEQ ID NO: 3526859 - DNA, 25 bp, Homo sapien
ggaactggtaccactccttctgaag

SEQ ID NO: 3526860 - DNA, 25 bp, Homo sapien
tagcttaccaaccagaaagagtaca

SEQ ID NO: 3526861 - DNA, 25 bp, Homo sapien
tgcattgggctctgagaagaggaca

SEQ ID NO: 3526862 - DNA, 25 bp, Homo sapien
tgtgcattgggctctgagaagagga

SEQ ID NO: 3526863 - DNA, 25 bp, Homo sapien
cattgggctctgagaagaggacagc

SEQ ID NO: 3526864 - DNA, 25 bp, Homo sapien
ctgtgcattgggctctgagaagagg

SEQ ID NO: 3526865 - DNA, 25 bp, Homo sapien
gatgatggctcagtagtgtcacaga

SEQ ID NO: 3526866 - DNA, 25 bp, Homo sapien
gaagtaagtcacaacccctgatgat

SEQ ID NO: 3526867 - DNA, 25 bp, Homo sapien
ctgggtaagcactaatattgatcaa

SEQ ID NO: 3526868 - DNA, 25 bp, Homo sapien
tggtggtcttagtctttggagttaa

SEQ ID NO: 3526869 - DNA, 25 bp, Homo sapien
gccctcctaaactattcttcacttg

SEQ ID NO: 3526870 - DNA, 25 bp, Homo sapien
tcctaaactattcttcacttgcatt

SEQ ID NO: 3526871 - DNA, 25 bp, Homo sapien
ttatgacaaccttctttccaagccc

SEQ ID NO: 3526872 - DNA, 25 bp, Homo sapien
ttgcattcacaaaatcgcacagctg

SEQ ID NO: 3526873 - DNA, 25 bp, Homo sapien
cactgtgccaatatgaatcattctc

SEQ ID NO: 3526874 - DNA, 25 bp, Homo sapien
ggaatttgatgaccttcactgtgcc

SEQ ID NO: 3526875 - DNA, 25 bp, Homo sapien
tactgagctgagaacgtggagacag

SEQ ID NO: 3526876 - DNA, 25 bp, Homo sapien
atgtctgccccggagcctgtcaact

SEQ ID NO: 3526877 - DNA, 25 bp, Homo sapien
tatcacctggtactaggaacacccc

SEQ ID NO: 3526878 - DNA, 25 bp, Homo sapien
gagagcaagcaagtctagcagtgcc

SEQ ID NO: 3526879 - DNA, 25 bp, Homo sapien
gaagatgcttgccaaccaaagttag

SEQ ID NO: 3526880 - DNA, 25 bp, Homo sapien
gggaatgctctacaagtctcagaag

SEQ ID NO: 3526881 - DNA, 25 bp, Homo sapien
tgcaagtgcagtgacaaacattcaa

SEQ ID NO: 3526882 - DNA, 25 bp, Homo sapien
tattaaggttcataacaattcttgt

SEQ ID NO: 3526883 - DNA, 25 bp, Homo sapien
tgaattgctgttacccaaagcgctt

SEQ ID NO: 3526884 - DNA, 25 bp, Homo sapien
tcagtggtagaattatgcatgcttc

SEQ ID NO: 3526885 - DNA, 25 bp, Homo sapien
gacttggctttgagagcgcactggt

SEQ ID NO: 3526886 - DNA, 25 bp, Homo sapien
ggctgttatccaatacagcattcgc

SEQ ID NO: 3526887 - DNA, 25 bp, Homo sapien
cttggctttgagagcgcactggtac

SEQ ID NO: 3526888 - DNA, 25 bp, Homo sapien
atacagcattcgctattattttcaa

SEQ ID NO: 3526889 - DNA, 25 bp, Homo sapien
ttcttttcccaatcagattatcctc

SEQ ID NO: 3526890 - DNA, 25 bp, Homo sapien
tcttttcccaatcagattatcctct

SEQ ID NO: 3526891 - DNA, 25 bp, Homo sapien
tattcttttcccaatcagattatcc

SEQ ID NO: 3526892 - DNA, 25 bp, Homo sapien
ttttcccaatcagattatcctcttg

SEQ ID NO: 3526893 - DNA, 25 bp, Homo sapien
ctaccaatgatcattgcagcattca

SEQ ID NO: 3526894 - DNA, 25 bp, Homo sapien
ggccactgtccccaagaccccagaa

SEQ ID NO: 3526895 - DNA, 25 bp, Homo sapien
gagggccactgtccccaagacccca

SEQ ID NO: 3526896 - DNA, 25 bp, Homo sapien
actgtccccaagaccccagaatggt

SEQ ID NO: 3526897 - DNA, 25 bp, Homo sapien
ccactgtccccaagaccccagaatg

SEQ ID NO: 3526898 - DNA, 25 bp, Homo sapien
agtcctcttggaaccaatcactgtt

SEQ ID NO: 3526899 - DNA, 25 bp, Homo sapien
tattacactgatgggccttaatgtg

SEQ ID NO: 3526900 - DNA, 25 bp, Homo sapien
tcagtcctcttggaaccaatcactg

SEQ ID NO: 3526901 - DNA, 25 bp, Homo sapien
cagtcctcttggaaccaatcactgt

SEQ ID NO: 3526902 - DNA, 25 bp, Homo sapien
tattaatcatggtagccactcgtca

SEQ ID NO: 3526903 - DNA, 25 bp, Homo sapien
gaccatgaggtctagtcacttatta

SEQ ID NO: 3526904 - DNA, 25 bp, Homo sapien
cttttagtatgaggaggaccatgag

SEQ ID NO: 3526905 - DNA, 25 bp, Homo sapien
cacttattaatcatggtagccactc

SEQ ID NO: 3526906 - DNA, 25 bp, Homo sapien
caagtagcaagggacaatattttat

SEQ ID NO: 3526907 - DNA, 25 bp, Homo sapien
aatagagaaccaaatacatcttggg

SEQ ID NO: 3526908 - DNA, 25 bp, Homo sapien
catggtaacttacactcagggattt

SEQ ID NO: 3526909 - DNA, 25 bp, Homo sapien
aaatgtcctagtcaacttgttgtgg

SEQ ID NO: 3526910 - DNA, 25 bp, Homo sapien
cttgggtaaacttagctttaagatg

SEQ ID NO: 3526911 - DNA, 25 bp, Homo sapien
gggtattgataaactttgaaaagca

SEQ ID NO: 3526912 - DNA, 25 bp, Homo sapien
tctgcttgctgaaagtacttgggta

SEQ ID NO: 3526913 - DNA, 25 bp, Homo sapien
aaagcagatttgatcaacttcattt

SEQ ID NO: 3526914 - DNA, 25 bp, Homo sapien
ttccaaattttctaaccatgcttgg

SEQ ID NO: 3526915 - DNA, 25 bp, Homo sapien
cttccaaattttctaaccatgcttg

SEQ ID NO: 3526916 - DNA, 25 bp, Homo sapien
tgtcactcccatatgcggttgatgg

SEQ ID NO: 3526917 - DNA, 25 bp, Homo sapien
gattgtaactagatacagactggaa

SEQ ID NO: 3526918 - DNA, 25 bp, Homo sapien
tttccaacttgccaatgggagttac

SEQ ID NO: 3526919 - DNA, 25 bp, Homo sapien
gggaaagatccatcagtatcttttc

SEQ ID NO: 3526920 - DNA, 25 bp, Homo sapien
tcgaacacgtttggcaaatccagaa

SEQ ID NO: 3526921 - DNA, 25 bp, Homo sapien
agaatttacgtctgcagttaacgaa

SEQ ID NO: 3526922 - DNA, 25 bp, Homo sapien
tgaattatcttgtcgaacacgtttg

SEQ ID NO: 3526923 - DNA, 25 bp, Homo sapien
tgtaagtgcttctcacttgaattat

SEQ ID NO: 3526924 - DNA, 25 bp, Homo sapien
gatggcaccatgcttggtacaggca

SEQ ID NO: 3526925 - DNA, 25 bp, Homo sapien
gcagcagtagtcattgccatgtagg

SEQ ID NO: 3526926 - DNA, 25 bp, Homo sapien
gtttccttttggcagcagtagtcat

SEQ ID NO: 3526927 - DNA, 25 bp, Homo sapien
catagaatgcttagttgagaatgaa

SEQ ID NO: 3526928 - DNA, 25 bp, Homo sapien
tatgagggatagctacttcacacaa

SEQ ID NO: 3526929 - DNA, 25 bp, Homo sapien
gaatcattgagctgcacactttgag

SEQ ID NO: 3526930 - DNA, 25 bp, Homo sapien
tatagtaaatgtagagtccaagtcc

SEQ ID NO: 3526931 - DNA, 25 bp, Homo sapien
ggtaatttacacttcgagctcttga

SEQ ID NO: 3526932 - DNA, 25 bp, Homo sapien
ctgactcaagcgatcggcctgcgtc

SEQ ID NO: 3526933 - DNA, 25 bp, Homo sapien
aagcgatcggcctgcgtcagtctcc

SEQ ID NO: 3526934 - DNA, 25 bp, Homo sapien
ccacaatgccttgccaagttttgta

SEQ ID NO: 3526935 - DNA, 25 bp, Homo sapien
gcatgggccacaatgccttgccaag

SEQ ID NO: 3526936 - DNA, 25 bp, Homo sapien
gaaatccctggtagatcgttttgct

SEQ ID NO: 3526937 - DNA, 25 bp, Homo sapien
caagttgtggaaaggtcataagaac

SEQ ID NO: 3526938 - DNA, 25 bp, Homo sapien
taccaaatgttcgatctctttgaag

SEQ ID NO: 3526939 - DNA, 25 bp, Homo sapien
acaggccggcttcttttaatgtgca

SEQ ID NO: 3526940 - DNA, 25 bp, Homo sapien
ttatttgagcataccagtagaacat

SEQ ID NO: 3526941 - DNA, 25 bp, Homo sapien
taccagtagaacatgaatagattct

SEQ ID NO: 3526942 - DNA, 25 bp, Homo sapien
ataaatatcccatttgcatggaaca

SEQ ID NO: 3526943 - DNA, 25 bp, Homo sapien
aatatcccatttgcatggaacatca

SEQ ID NO: 3526944 - DNA, 25 bp, Homo sapien
aatgtatcctgtaacacataaaact

SEQ ID NO: 3526945 - DNA, 25 bp, Homo sapien
tgtatcctgtaacacataaaactca

SEQ ID NO: 3526946 - DNA, 25 bp, Homo sapien
cagtggaaaattgaacttctgtgct

SEQ ID NO: 3526947 - DNA, 25 bp, Homo sapien
tatcctgtaacacataaaactcaac

SEQ ID NO: 3526948 - DNA, 25 bp, Homo sapien
agctagatccatcatatgtctaatt

SEQ ID NO: 3526949 - DNA, 25 bp, Homo sapien
aagctagatccatcatatgtctaat

SEQ ID NO: 3526950 - DNA, 25 bp, Homo sapien
gctagatccatcatatgtctaattt

SEQ ID NO: 3526951 - DNA, 25 bp, Homo sapien
ctggaggtgcaaatggtgacaatga

SEQ ID NO: 3526952 - DNA, 25 bp, Homo sapien
aaatggtgacaatgaagatctttct

SEQ ID NO: 3526953 - DNA, 25 bp, Homo sapien
gaggtgcaaatggtgacaatgaaga

SEQ ID NO: 3526954 - DNA, 25 bp, Homo sapien
tgcaaatggtgacaatgaagatctt

SEQ ID NO: 3526955 - DNA, 25 bp, Homo sapien
gaaatgaactgcatacttccaagac

SEQ ID NO: 3526956 - DNA, 25 bp, Homo sapien
ttacaatcatgaaacgacaagcacg

SEQ ID NO: 3526957 - DNA, 25 bp, Homo sapien
caaaagacagcccacactagttaag

SEQ ID NO: 3526958 - DNA, 25 bp, Homo sapien
gcactaaagttagactactgcaacc

SEQ ID NO: 3526959 - DNA, 25 bp, Homo sapien
atttctttttcgacacgatggagcc

SEQ ID NO: 3526960 - DNA, 25 bp, Homo sapien
tatgaccgttttgacttaagagtcc

SEQ ID NO: 3526961 - DNA, 25 bp, Homo sapien
ccaggtaggagcgacgagttttcaa

SEQ ID NO: 3526962 - DNA, 25 bp, Homo sapien
gcaagtctatgatctcgttttccag

SEQ ID NO: 3526963 - DNA, 25 bp, Homo sapien
caggctagagtcatagataagggaa

SEQ ID NO: 3526964 - DNA, 25 bp, Homo sapien
ttccatttcaggctagagtcataga

SEQ ID NO: 3526965 - DNA, 25 bp, Homo sapien
ggaaaaatagttgatagccaccgtc

SEQ ID NO: 3526966 - DNA, 25 bp, Homo sapien
tcccctcaagggaaatacaagagtc

SEQ ID NO: 3526967 - DNA, 25 bp, Homo sapien
tagccttgactataaaatttccaga

SEQ ID NO: 3526968 - DNA, 25 bp, Homo sapien
aatgggtgagtaagtagccttgact

SEQ ID NO: 3526969 - DNA, 25 bp, Homo sapien
ggtgagtaagtagccttgactataa

SEQ ID NO: 3526970 - DNA, 25 bp, Homo sapien
tgtaaagaatgggtgagtaagtagc

SEQ ID NO: 3526971 - DNA, 25 bp, Homo sapien
tgtttatggcactgttgttggtaga

SEQ ID NO: 3526972 - DNA, 25 bp, Homo sapien
ttgtttatggcactgttgttggtag

SEQ ID NO: 3526973 - DNA, 25 bp, Homo sapien
gaaggaataagcagtaggaggcata

SEQ ID NO: 3526974 - DNA, 25 bp, Homo sapien
cagtaggaggcataatcatatggtg

SEQ ID NO: 3526975 - DNA, 25 bp, Homo sapien
gcataatcatatggtgcctccatgg

SEQ ID NO: 3526976 - DNA, 25 bp, Homo sapien
gaataagcagtaggaggcataatca

SEQ ID NO: 3526977 - DNA, 25 bp, Homo sapien
atttttcctacagcatgagcattca

SEQ ID NO: 3526978 - DNA, 25 bp, Homo sapien
gctgtgagcaagtctataagcatca

SEQ ID NO: 3526979 - DNA, 25 bp, Homo sapien
tgaaacacgttgaaatcgggcaaat

SEQ ID NO: 3526980 - DNA, 25 bp, Homo sapien
gctttagagtgtcacaaattgtgcc

SEQ ID NO: 3526981 - DNA, 25 bp, Homo sapien
tttcctgagggtttgaaatcattaa

SEQ ID NO: 3526982 - DNA, 25 bp, Homo sapien
ttcctgagggtttgaaatcattaac

SEQ ID NO: 3526983 - DNA, 25 bp, Homo sapien
ctgctcattacagatctttacatat

SEQ ID NO: 3526984 - DNA, 25 bp, Homo sapien
tctgctcattacagatctttacata

SEQ ID NO: 3526985 - DNA, 25 bp, Homo sapien
tttgcccggttagcatacttaagag

SEQ ID NO: 3526986 - DNA, 25 bp, Homo sapien
tacagaggaaggactaacagcagct

SEQ ID NO: 3526987 - DNA, 25 bp, Homo sapien
gagaatcctttaacaagcgagtaag

SEQ ID NO: 3526988 - DNA, 25 bp, Homo sapien
tatgtgtcatcgtagaatacagagg

SEQ ID NO: 3526989 - DNA, 25 bp, Homo sapien
tcctgccaggtcaatgagtgacatc

SEQ ID NO: 3526990 - DNA, 25 bp, Homo sapien
gagtgacatcttggcaatacggaca

SEQ ID NO: 3526991 - DNA, 25 bp, Homo sapien
tgtgccttctacaaatcgggtcccc

SEQ ID NO: 3526992 - DNA, 25 bp, Homo sapien
gctaaggcattgatgacattcccaa

SEQ ID NO: 3526993 - DNA, 25 bp, Homo sapien
tggcattcatatcagtgggatgttg

SEQ ID NO: 3526994 - DNA, 25 bp, Homo sapien
catgagaacgagaagatgtggcatt

SEQ ID NO: 3526995 - DNA, 25 bp, Homo sapien
aaaacagcatgagaacgagaagatg

SEQ ID NO: 3526996 - DNA, 25 bp, Homo sapien
tgtggcattcatatcagtgggatgt

SEQ ID NO: 3526997 - DNA, 25 bp, Homo sapien
ggtgtaaagtaagtccatgaacgac

SEQ ID NO: 3526998 - DNA, 25 bp, Homo sapien
gccctgaatttactaagagatcacg

SEQ ID NO: 3526999 - DNA, 25 bp, Homo sapien
cggacagcaagtggccctgaattta

SEQ ID NO: 3527000 - DNA, 25 bp, Homo sapien
ttttgggtatcttcccggacagcaa

SEQ ID NO: 3527001 - DNA, 25 bp, Homo sapien
ggtctatgtatgacactcaccaagg

SEQ ID NO: 3527002 - DNA, 25 bp, Homo sapien
gaactggagcctagacagcttcact

SEQ ID NO: 3527003 - DNA, 25 bp, Homo sapien
tatcccaagtgtgaggcctaggcct

SEQ ID NO: 3527004 - DNA, 25 bp, Homo sapien
gaataattgttctcaagctggtcta

SEQ ID NO: 3527005 - DNA, 25 bp, Homo sapien
gtaacattgttagatacatcactcc

SEQ ID NO: 3527006 - DNA, 25 bp, Homo sapien
gaaactgcagtactacatattttct

SEQ ID NO: 3527007 - DNA, 25 bp, Homo sapien
gatcctagcatagtgtgggtcttcc

SEQ ID NO: 3527008 - DNA, 25 bp, Homo sapien
tctcatccatgcatttgtaaaggtg

SEQ ID NO: 3527009 - DNA, 25 bp, Homo sapien
tagaagggtcaagtagatgtccgtc

SEQ ID NO: 3527010 - DNA, 25 bp, Homo sapien
catgtggtttaataacataggcaac

SEQ ID NO: 3527011 - DNA, 25 bp, Homo sapien
ggcaactgaaaggacagatgtctat

SEQ ID NO: 3527012 - DNA, 25 bp, Homo sapien
gatgtccgtcctaatgcaaaagtga

SEQ ID NO: 3527013 - DNA, 25 bp, Homo sapien
catgaaccactttatgaaatccagc

SEQ ID NO: 3527014 - DNA, 25 bp, Homo sapien
ggacgtacacgaactactactttca

SEQ ID NO: 3527015 - DNA, 25 bp, Homo sapien
agtagtgtgttcaaaaacttctgac

SEQ ID NO: 3527016 - DNA, 25 bp, Homo sapien
aacttctgactgagttgacgtttca

SEQ ID NO: 3527017 - DNA, 25 bp, Homo sapien
tcctatctgtataaatacttgaata

SEQ ID NO: 3527018 - DNA, 25 bp, Homo sapien
tgttgattatcttgattcctatctg

SEQ ID NO: 3527019 - DNA, 25 bp, Homo sapien
gattatcttgattcctatctgtata

SEQ ID NO: 3527020 - DNA, 25 bp, Homo sapien
tcttgattcctatctgtataaatac

SEQ ID NO: 3527021 - DNA, 25 bp, Homo sapien
acttcactttaatgtccgcctccca

SEQ ID NO: 3527022 - DNA, 25 bp, Homo sapien
gtttcattggctgccgctcgcgtga

SEQ ID NO: 3527023 - DNA, 25 bp, Homo sapien
caggttaccgcaaccacttcacttt

SEQ ID NO: 3527024 - DNA, 25 bp, Homo sapien
tttcctcagcgcttcgtttcattgg

SEQ ID NO: 3527025 - DNA, 25 bp, Homo sapien
agtcgctggcccgagttagaggcca

SEQ ID NO: 3527026 - DNA, 25 bp, Homo sapien
tcctggaccgtagtggtagtcgctg

SEQ ID NO: 3527027 - DNA, 25 bp, Homo sapien
aagtcttcgtgcttcaggtgaggag

SEQ ID NO: 3527028 - DNA, 25 bp, Homo sapien
ggcgcattcaggttctcctggaccg

SEQ ID NO: 3527029 - DNA, 25 bp, Homo sapien
aattttatgctctcaacagccaaaa

SEQ ID NO: 3527030 - DNA, 25 bp, Homo sapien
caattttatgctctcaacagccaaa

SEQ ID NO: 3527031 - DNA, 25 bp, Homo sapien
gcaattttatgctctcaacagccaa

SEQ ID NO: 3527032 - DNA, 25 bp, Homo sapien
attttatgctctcaacagccaaaag

SEQ ID NO: 3527033 - DNA, 25 bp, Homo sapien
agaactggtgacagtccttggacag

SEQ ID NO: 3527034 - DNA, 25 bp, Homo sapien
gcagacagctttattcactattccc

SEQ ID NO: 3527035 - DNA, 25 bp, Homo sapien
tggtgacagtccttggacaggaaag

SEQ ID NO: 3527036 - DNA, 25 bp, Homo sapien
ttttctgctgtctggcagacagctt

SEQ ID NO: 3527037 - DNA, 25 bp, Homo sapien
taaatatcagggtttataatccaat

SEQ ID NO: 3527038 - DNA, 25 bp, Homo sapien
ggtaggatagtttgtatgcacataa

SEQ ID NO: 3527039 - DNA, 25 bp, Homo sapien
taatgctgtatatggtggtgtacac

SEQ ID NO: 3527040 - DNA, 25 bp, Homo sapien
ccctttgagaggctgtaattggagg

SEQ ID NO: 3527041 - DNA, 25 bp, Homo sapien
aacccatagtgaagattagaagtag

SEQ ID NO: 3527042 - DNA, 25 bp, Homo sapien
ttgtgatgtaaaacccatagtgaag

SEQ ID NO: 3527043 - DNA, 25 bp, Homo sapien
gatgtaaaacccatagtgaagatta

SEQ ID NO: 3527044 - DNA, 25 bp, Homo sapien
taaaacccatagtgaagattagaag

SEQ ID NO: 3527045 - DNA, 25 bp, Homo sapien
ggatcacatccaggatatcacacta

SEQ ID NO: 3527046 - DNA, 25 bp, Homo sapien
ccttcgtggttttgagatgtataca

SEQ ID NO: 3527047 - DNA, 25 bp, Homo sapien
tgaagaccttcgtggttttgagatg

SEQ ID NO: 3527048 - DNA, 25 bp, Homo sapien
tggttttgagatgtatacaatcagg

SEQ ID NO: 3527049 - DNA, 25 bp, Homo sapien
tagccagaactgaccctatgtattt

SEQ ID NO: 3527050 - DNA, 25 bp, Homo sapien
agtgtccgtcattgagcgagtgttc

SEQ ID NO: 3527051 - DNA, 25 bp, Homo sapien
cgagtgttcttttgaaaggtgctaa

SEQ ID NO: 3527052 - DNA, 25 bp, Homo sapien
tcttcaagagttggttagtggcaga

SEQ ID NO: 3527053 - DNA, 25 bp, Homo sapien
tcttctttcagggaaaattgtcgtc

SEQ ID NO: 3527054 - DNA, 25 bp, Homo sapien
gattttagtggggaagcacagctac

SEQ ID NO: 3527055 - DNA, 25 bp, Homo sapien
aattgtcgtctttgactaagtatac

SEQ ID NO: 3527056 - DNA, 25 bp, Homo sapien
gtatacagatctaggtgggacacac

SEQ ID NO: 3527057 - DNA, 25 bp, Homo sapien
caggatgcccaaccttgtgagtgga

SEQ ID NO: 3527058 - DNA, 25 bp, Homo sapien
tcaagcaccttagaaaccatgggaa

SEQ ID NO: 3527059 - DNA, 25 bp, Homo sapien
ccaagatggatgagcacttattaac

SEQ ID NO: 3527060 - DNA, 25 bp, Homo sapien
tgccgttagaagaatgatgaaggtc

SEQ ID NO: 3527061 - DNA, 25 bp, Homo sapien
gattcgcccatgtaatcatgctgca

SEQ ID NO: 3527062 - DNA, 25 bp, Homo sapien
ggacaataacttcggagctcggcct

SEQ ID NO: 3527063 - DNA, 25 bp, Homo sapien
caacaattttcctagcaatgtgatc

SEQ ID NO: 3527064 - DNA, 25 bp, Homo sapien
catcacattgagaaaccggacaata

SEQ ID NO: 3527065 - DNA, 25 bp, Homo sapien
gcagtgcatcacgttgacagccaca

SEQ ID NO: 3527066 - DNA, 25 bp, Homo sapien
tggaaattcaacagccgaatgctgg

SEQ ID NO: 3527067 - DNA, 25 bp, Homo sapien
gacatgggttgcgtcaccgagactt

SEQ ID NO: 3527068 - DNA, 25 bp, Homo sapien
tgtaagtagcataagggtatcccag

SEQ ID NO: 3527069 - DNA, 25 bp, Homo sapien
gtaggaggaatagcgcttgagttca

SEQ ID NO: 3527070 - DNA, 25 bp, Homo sapien
tgtagagccgtgcttaaaaagtaag

SEQ ID NO: 3527071 - DNA, 25 bp, Homo sapien
ggtggttaacggctataatcacagc

SEQ ID NO: 3527072 - DNA, 25 bp, Homo sapien
ttagccttgtagagccgtgcttaaa

SEQ ID NO: 3527073 - DNA, 25 bp, Homo sapien
gcatcaattaccaaatagggtaaaa

SEQ ID NO: 3527074 - DNA, 25 bp, Homo sapien
tacaagttgtatatctcaggtggca

SEQ ID NO: 3527075 - DNA, 25 bp, Homo sapien
taagcattagtcagatgcttcaggg

SEQ ID NO: 3527076 - DNA, 25 bp, Homo sapien
tacaacctggaaggtttaggctgat

SEQ ID NO: 3527077 - DNA, 25 bp, Homo sapien
caatgctcccttaatgttgttacaa

SEQ ID NO: 3527078 - DNA, 25 bp, Homo sapien
ggatttttcagtatgatatgggcca

SEQ ID NO: 3527079 - DNA, 25 bp, Homo sapien
taataatagctcacaatgcctttag

SEQ ID NO: 3527080 - DNA, 25 bp, Homo sapien
aatccttacagagaattgtttcaca

SEQ ID NO: 3527081 - DNA, 25 bp, Homo sapien
tatactattaatttgctcagtgcac

SEQ ID NO: 3527082 - DNA, 25 bp, Homo sapien
gaaatatcagcataactatgtgggc

SEQ ID NO: 3527083 - DNA, 25 bp, Homo sapien
ttgttcactacttctgctttacagg

SEQ ID NO: 3527084 - DNA, 25 bp, Homo sapien
tacaaattttaggttggtgaatcca

SEQ ID NO: 3527085 - DNA, 25 bp, Homo sapien
tagaaactgaatgtactgggttgaa

SEQ ID NO: 3527086 - DNA, 25 bp, Homo sapien
tttttcaccctgtatagtatgggaa

SEQ ID NO: 3527087 - DNA, 25 bp, Homo sapien
catgcgtggtgcttgtaatgtcagc

SEQ ID NO: 3527088 - DNA, 25 bp, Homo sapien
cttataagagaagatagggcgggca

SEQ ID NO: 3527089 - DNA, 25 bp, Homo sapien
ccaggtgtgctggcctcaggactca

SEQ ID NO: 3527090 - DNA, 25 bp, Homo sapien
ttggccctggctgacacaggcccag

SEQ ID NO: 3527091 - DNA, 25 bp, Homo sapien
ctggctgacacaggcccaggtgtgc

SEQ ID NO: 3527092 - DNA, 25 bp, Homo sapien
ctggcttggccctggctgacacagg

SEQ ID NO: 3527093 - DNA, 25 bp, Homo sapien
gtttatataccacaacgtagcatgt

SEQ ID NO: 3527094 - DNA, 25 bp, Homo sapien
gcttctcaaagtatttagcaaggga

SEQ ID NO: 3527095 - DNA, 25 bp, Homo sapien
gcaagggagtacctgaagccataaa

SEQ ID NO: 3527096 - DNA, 25 bp, Homo sapien
tcaggttaggtatttagtcattccc

SEQ ID NO: 3527097 - DNA, 25 bp, Homo sapien
cgaggagctggctacagtcctggtc

SEQ ID NO: 3527098 - DNA, 25 bp, Homo sapien
ttgctgtatgaggactgggaccgag

SEQ ID NO: 3527099 - DNA, 25 bp, Homo sapien
ggaccgaggagctggctacagtcct

SEQ ID NO: 3527100 - DNA, 25 bp, Homo sapien
tgtatgaggactgggaccgaggagc

SEQ ID NO: 3527101 - DNA, 25 bp, Homo sapien
gttccatagacctgactatcaaggg

SEQ ID NO: 3527102 - DNA, 25 bp, Homo sapien
caccactcacctctttaatgttagg

SEQ ID NO: 3527103 - DNA, 25 bp, Homo sapien
ttaaaatgggatcaaatatctgtat

SEQ ID NO: 3527104 - DNA, 25 bp, Homo sapien
tagtttttacgtctgcaattccaga

SEQ ID NO: 3527105 - DNA, 25 bp, Homo sapien
cagggtactctgcccttcttaggtg

SEQ ID NO: 3527106 - DNA, 25 bp, Homo sapien
tcatcaggccgtcatcagggtactc

SEQ ID NO: 3527107 - DNA, 25 bp, Homo sapien
acctgcagagctgaggtcatcaggc

SEQ ID NO: 3527108 - DNA, 25 bp, Homo sapien
gtcttctagatgtcctataggaatc

SEQ ID NO: 3527109 - DNA, 25 bp, Homo sapien
tcacacagccattatccagtcacat

SEQ ID NO: 3527110 - DNA, 25 bp, Homo sapien
tctgttattggcgagggtcgctgca

SEQ ID NO: 3527111 - DNA, 25 bp, Homo sapien
gggtcgctgcaagtttcctcctgat

SEQ ID NO: 3527112 - DNA, 25 bp, Homo sapien
gccattatccagtcacatcttaagt

SEQ ID NO: 3527113 - DNA, 25 bp, Homo sapien
gatcttgacaacctttatgctggct

SEQ ID NO: 3527114 - DNA, 25 bp, Homo sapien
cctgctcttcttattgggaatgcga

SEQ ID NO: 3527115 - DNA, 25 bp, Homo sapien
tatgctggctcctaccaactcattc

SEQ ID NO: 3527116 - DNA, 25 bp, Homo sapien
tcctaggtgctctggtaatgatctt

SEQ ID NO: 3527117 - DNA, 25 bp, Homo sapien
aacaatctttacttaacccacatgg

SEQ ID NO: 3527118 - DNA, 25 bp, Homo sapien
caaaggacaagatgaggcatgggcc

SEQ ID NO: 3527119 - DNA, 25 bp, Homo sapien
cttcaaaggacaagatgaggcatgg

SEQ ID NO: 3527120 - DNA, 25 bp, Homo sapien
tacttaacccacatggaaaacttgc

SEQ ID NO: 3527121 - DNA, 25 bp, Homo sapien
tcagcatcagctatgtaatctatat

SEQ ID NO: 3527122 - DNA, 25 bp, Homo sapien
catcagcatcagctatgtaatctat

SEQ ID NO: 3527123 - DNA, 25 bp, Homo sapien
gcatcagctatgtaatctatatcca

SEQ ID NO: 3527124 - DNA, 25 bp, Homo sapien
tcatcagcatcagctatgtaatcta

SEQ ID NO: 3527125 - DNA, 25 bp, Homo sapien
atttcctttttccattcagaattca

SEQ ID NO: 3527126 - DNA, 25 bp, Homo sapien
tttcctttttccattcagaattcat

SEQ ID NO: 3527127 - DNA, 25 bp, Homo sapien
gcggaaggctgcgagaatgttttat

SEQ ID NO: 3527128 - DNA, 25 bp, Homo sapien
ttgtctgcagggcttactaacactt

SEQ ID NO: 3527129 - DNA, 25 bp, Homo sapien
tagcacgtcattggtaatcccagcg

SEQ ID NO: 3527130 - DNA, 25 bp, Homo sapien
gcgacacctttcacatccgcggtat

SEQ ID NO: 3527131 - DNA, 25 bp, Homo sapien
gaattcctagtatagttacaggcca

SEQ ID NO: 3527132 - DNA, 25 bp, Homo sapien
tagtatagttacaggccatttccgt

SEQ ID NO: 3527133 - DNA, 25 bp, Homo sapien
gggatgcggaattcctagtatagtt

SEQ ID NO: 3527134 - DNA, 25 bp, Homo sapien
caggccatttccgtgaacgcagaca

SEQ ID NO: 3527135 - DNA, 25 bp, Homo sapien
agtagtgatagaattgtccctggtc

SEQ ID NO: 3527136 - DNA, 25 bp, Homo sapien
agtgatagaattgtccctggtccag

SEQ ID NO: 3527137 - DNA, 25 bp, Homo sapien
ttaagtagtgatagaattgtccctg

SEQ ID NO: 3527138 - DNA, 25 bp, Homo sapien
tagtgatagaattgtccctggtcca

SEQ ID NO: 3527139 - DNA, 25 bp, Homo sapien
tgactctccctactgagctgcccat

SEQ ID NO: 3527140 - DNA, 25 bp, Homo sapien
ctgcgctgttgatggtaatgctaga

SEQ ID NO: 3527141 - DNA, 25 bp, Homo sapien
ttgatggtaatgctagatccagaaa

SEQ ID NO: 3527142 - DNA, 25 bp, Homo sapien
gctgttgatggtaatgctagatcca

SEQ ID NO: 3527143 - DNA, 25 bp, Homo sapien
gaaaaaacaaggagccattttctgc

SEQ ID NO: 3527144 - DNA, 25 bp, Homo sapien
ccctgacactggtgttggttcataa

SEQ ID NO: 3527145 - DNA, 25 bp, Homo sapien
tttgagctgaccgagcactgccctg

SEQ ID NO: 3527146 - DNA, 25 bp, Homo sapien
tgacagctgttcctattattgccag

SEQ ID NO: 3527147 - DNA, 25 bp, Homo sapien
gctggtgatatagggacctcaagaa

SEQ ID NO: 3527148 - DNA, 25 bp, Homo sapien
gaagctggtgatatagggacctcaa

SEQ ID NO: 3527149 - DNA, 25 bp, Homo sapien
gcaggcagcaggagttagctccttg

SEQ ID NO: 3527150 - DNA, 25 bp, Homo sapien
ctgcttgagaagctggtgatatagg

SEQ ID NO: 3527151 - DNA, 25 bp, Homo sapien
tgacgctctgccgtcttcatttttc

SEQ ID NO: 3527152 - DNA, 25 bp, Homo sapien
tgccttggaaaagcgtcagataaag

SEQ ID NO: 3527153 - DNA, 25 bp, Homo sapien
ccgcatgattcaatgaggaggcgga

SEQ ID NO: 3527154 - DNA, 25 bp, Homo sapien
tgattaagagacagcccgcatgatt

SEQ ID NO: 3527155 - DNA, 25 bp, Homo sapien
taaatgcctgtagaagtgtcgtggg

SEQ ID NO: 3527156 - DNA, 25 bp, Homo sapien
ccagtagaatctgaagttgtggaaa

SEQ ID NO: 3527157 - DNA, 25 bp, Homo sapien
aaggacctttactgtctgctggcaa

SEQ ID NO: 3527158 - DNA, 25 bp, Homo sapien
gattaaaaggacctttactgtctgc

SEQ ID NO: 3527159 - DNA, 25 bp, Homo sapien
ggagaccagtagaatctgaagttgt

SEQ ID NO: 3527160 - DNA, 25 bp, Homo sapien
cacatgcatggtttattagcagtca

SEQ ID NO: 3527161 - DNA, 25 bp, Homo sapien
tagcagtcaccttagattcctgtgg

SEQ ID NO: 3527162 - DNA, 25 bp, Homo sapien
tttattagcagtcaccttagattcc

SEQ ID NO: 3527163 - DNA, 25 bp, Homo sapien
catggtttattagcagtcaccttag

SEQ ID NO: 3527164 - DNA, 25 bp, Homo sapien
gatttatcagggcaggctctctggg

SEQ ID NO: 3527165 - DNA, 25 bp, Homo sapien
caacagtgattttctgcttagtagc

SEQ ID NO: 3527166 - DNA, 25 bp, Homo sapien
tgagtggacagcaaggtttgagttt

SEQ ID NO: 3527167 - DNA, 25 bp, Homo sapien
tagcccaaagacttgagtggacagc

SEQ ID NO: 3527168 - DNA, 25 bp, Homo sapien
aatcacaaacagcactgtgcttaat

SEQ ID NO: 3527169 - DNA, 25 bp, Homo sapien
taatcacaaacagcactgtgcttaa

SEQ ID NO: 3527170 - DNA, 25 bp, Homo sapien
ttaatcacaaacagcactgtgctta

SEQ ID NO: 3527171 - DNA, 25 bp, Homo sapien
atcacaaacagcactgtgcttaatg

SEQ ID NO: 3527172 - DNA, 25 bp, Homo sapien
gccagggttggtctattagtcctcc

SEQ ID NO: 3527173 - DNA, 25 bp, Homo sapien
tagcagtctgctggacggataatgc

SEQ ID NO: 3527174 - DNA, 25 bp, Homo sapien
tcttcttgttgtctggtgtgcggcc

SEQ ID NO: 3527175 - DNA, 25 bp, Homo sapien
tgtgcggccaggaaaaattcactgc

SEQ ID NO: 3527176 - DNA, 25 bp, Homo sapien
catttgcgacggaaggttatctctg

SEQ ID NO: 3527177 - DNA, 25 bp, Homo sapien
tatacattatgtcaggctccaccag

SEQ ID NO: 3527178 - DNA, 25 bp, Homo sapien
tgtctgggaaaccatacggctgtga

SEQ ID NO: 3527179 - DNA, 25 bp, Homo sapien
tccggtgatgaatgcggtgcctacc

SEQ ID NO: 3527180 - DNA, 25 bp, Homo sapien
gaaccaggactgagcatttcttcta

SEQ ID NO: 3527181 - DNA, 25 bp, Homo sapien
tcatctttgtcctcacttggagaga

SEQ ID NO: 3527182 - DNA, 25 bp, Homo sapien
gcactgaagacagccttgtgtttcc

SEQ ID NO: 3527183 - DNA, 25 bp, Homo sapien
gtttccatgtatacagttgctgcag

SEQ ID NO: 3527184 - DNA, 25 bp, Homo sapien
accctcagaaaaccccagtcattgg

SEQ ID NO: 3527185 - DNA, 25 bp, Homo sapien
agaaaaccccagtcattggctaggt

SEQ ID NO: 3527186 - DNA, 25 bp, Homo sapien
tcactgggcttggtaatcctgaggc

SEQ ID NO: 3527187 - DNA, 25 bp, Homo sapien
gaggcccctccgcagaaagccaggg

SEQ ID NO: 3527188 - DNA, 25 bp, Homo sapien
ttttgtgagcacctgatgatattgg

SEQ ID NO: 3527189 - DNA, 25 bp, Homo sapien
ctgatgatattggacttctgtggct

SEQ ID NO: 3527190 - DNA, 25 bp, Homo sapien
gaaattgaaagacctgctttcacgt

SEQ ID NO: 3527191 - DNA, 25 bp, Homo sapien
gaggatccagataaatccaaaataa

SEQ ID NO: 3527192 - DNA, 25 bp, Homo sapien
ccttcccgccagtcctcccctatag

SEQ ID NO: 3527193 - DNA, 25 bp, Homo sapien
cttcccgccagtcctcccctatagg

SEQ ID NO: 3527194 - DNA, 25 bp, Homo sapien
ttcccgccagtcctcccctataggc

SEQ ID NO: 3527195 - DNA, 25 bp, Homo sapien
tcccgccagtcctcccctataggca

SEQ ID NO: 3527196 - DNA, 25 bp, Homo sapien
gttccttagttgccaatgagttctg

SEQ ID NO: 3527197 - DNA, 25 bp, Homo sapien
tccttagttgccaatgagttctggt

SEQ ID NO: 3527198 - DNA, 25 bp, Homo sapien
ttccttagttgccaatgagttctgg

SEQ ID NO: 3527199 - DNA, 25 bp, Homo sapien
ccttagttgccaatgagttctggtt

SEQ ID NO: 3527200 - DNA, 25 bp, Homo sapien
acctctttgctgacttcggtgtcag

SEQ ID NO: 3527201 - DNA, 25 bp, Homo sapien
tgggcatttactgcagatatgaaga

SEQ ID NO: 3527202 - DNA, 25 bp, Homo sapien
agaaatagataacctctttgctgac

SEQ ID NO: 3527203 - DNA, 25 bp, Homo sapien
ctgacttcggtgtcagcaagatctc

SEQ ID NO: 3527204 - DNA, 25 bp, Homo sapien
caatgtcaagatttagaagtgtaca

SEQ ID NO: 3527205 - DNA, 25 bp, Homo sapien
gtagtttgtaggaggactttcagag

SEQ ID NO: 3527206 - DNA, 25 bp, Homo sapien
gtttgtaggaggactttcagagagc

SEQ ID NO: 3527207 - DNA, 25 bp, Homo sapien
gaagtgtacagctctccttttctcc

SEQ ID NO: 3527208 - DNA, 25 bp, Homo sapien
ttgatgataggaggcttttgttccc

SEQ ID NO: 3527209 - DNA, 25 bp, Homo sapien
gatgataggaggcttttgttccctt

SEQ ID NO: 3527210 - DNA, 25 bp, Homo sapien
ttttttgatgataggaggcttttgt

SEQ ID NO: 3527211 - DNA, 25 bp, Homo sapien
ttttgatgataggaggcttttgttc

SEQ ID NO: 3527212 - DNA, 25 bp, Homo sapien
tttttcaaccgttatgtgggcagaa

SEQ ID NO: 3527213 - DNA, 25 bp, Homo sapien
catcccataatttttcaaccgttat

SEQ ID NO: 3527214 - DNA, 25 bp, Homo sapien
attcacagtggcacttgcaacatcc

SEQ ID NO: 3527215 - DNA, 25 bp, Homo sapien
cagtggcacttgcaacatcccataa

SEQ ID NO: 3527216 - DNA, 25 bp, Homo sapien
gatcattgccaagcatagctcatgg

SEQ ID NO: 3527217 - DNA, 25 bp, Homo sapien
tagggctgacatacttctgacaaat

SEQ ID NO: 3527218 - DNA, 25 bp, Homo sapien
tcaattagtatctgctagcctggtc

SEQ ID NO: 3527219 - DNA, 25 bp, Homo sapien
tgtcttgcccatgacggatcattgc

SEQ ID NO: 3527220 - DNA, 25 bp, Homo sapien
tcaatctaaacgggcacttccacaa

SEQ ID NO: 3527221 - DNA, 25 bp, Homo sapien
acgggcacttccacaaccaaagaca

SEQ ID NO: 3527222 - DNA, 25 bp, Homo sapien
atctaaacgggcacttccacaacca

SEQ ID NO: 3527223 - DNA, 25 bp, Homo sapien
tctaaacgggcacttccacaaccaa

SEQ ID NO: 3527224 - DNA, 25 bp, Homo sapien
tgtgagacaggaccccctcgttcat

SEQ ID NO: 3527225 - DNA, 25 bp, Homo sapien
tttcactaatggtcagattgcagcg

SEQ ID NO: 3527226 - DNA, 25 bp, Homo sapien
tcactaatggtcagattgcagcgag

SEQ ID NO: 3527227 - DNA, 25 bp, Homo sapien
gcatttcactaatggtcagattgca

SEQ ID NO: 3527228 - DNA, 25 bp, Homo sapien
tgttttccaacttattattcccaga

SEQ ID NO: 3527229 - DNA, 25 bp, Homo sapien
acagtactccgcaccgacactgaaa

SEQ ID NO: 3527230 - DNA, 25 bp, Homo sapien
gaggtgtcagtcacagtactccgca

SEQ ID NO: 3527231 - DNA, 25 bp, Homo sapien
ccgacactgaaactgatccagggtc

SEQ ID NO: 3527232 - DNA, 25 bp, Homo sapien
tactgctttattgtataggatagca

SEQ ID NO: 3527233 - DNA, 25 bp, Homo sapien
tgttggaacagctgtttgttgatcc

SEQ ID NO: 3527234 - DNA, 25 bp, Homo sapien
gtttgttgatccagctgacattctc

SEQ ID NO: 3527235 - DNA, 25 bp, Homo sapien
aggatagcaggacttctgttggaac

SEQ ID NO: 3527236 - DNA, 25 bp, Homo sapien
caagataccagtgtgagttttactc

SEQ ID NO: 3527237 - DNA, 25 bp, Homo sapien
taaacaatagcaagataccagtgtg

SEQ ID NO: 3527238 - DNA, 25 bp, Homo sapien
agttttactcactctaatgaaaagg

SEQ ID NO: 3527239 - DNA, 25 bp, Homo sapien
tcactctaatgaaaagggttgagtt

SEQ ID NO: 3527240 - DNA, 25 bp, Homo sapien
agacaaagcttaaatcgtccccagt

SEQ ID NO: 3527241 - DNA, 25 bp, Homo sapien
gaagacaaagcttaaatcgtcccca

SEQ ID NO: 3527242 - DNA, 25 bp, Homo sapien
taagctttaaacagtccccaatctg

SEQ ID NO: 3527243 - DNA, 25 bp, Homo sapien
gctttaaacagtccccaatctggaa

SEQ ID NO: 3527244 - DNA, 25 bp, Homo sapien
tcattctcaggcctctcaactgcta

SEQ ID NO: 3527245 - DNA, 25 bp, Homo sapien
atattcattctcaggcctctcaact

SEQ ID NO: 3527246 - DNA, 25 bp, Homo sapien
ttctcaggcctctcaactgctattt

SEQ ID NO: 3527247 - DNA, 25 bp, Homo sapien
ctcaggcctctcaactgctattttc

SEQ ID NO: 3527248 - DNA, 25 bp, Homo sapien
aggaaaaactagaggactgtggcaa

SEQ ID NO: 3527249 - DNA, 25 bp, Homo sapien
tgaggggcaattagagaggaaaaac

SEQ ID NO: 3527250 - DNA, 25 bp, Homo sapien
cagaacacttcataatcatgtaggt

SEQ ID NO: 3527251 - DNA, 25 bp, Homo sapien
cataatcatgtaggttggttgggtt

SEQ ID NO: 3527252 - DNA, 25 bp, Homo sapien
cttgcaggagtctctgtctttgaat

SEQ ID NO: 3527253 - DNA, 25 bp, Homo sapien
actactttatgaaacctttcttgca

SEQ ID NO: 3527254 - DNA, 25 bp, Homo sapien
gaaatcacattcagctcagcagaag

SEQ ID NO: 3527255 - DNA, 25 bp, Homo sapien
tcttgcattccaaccaaactgaaca

SEQ ID NO: 3527256 - DNA, 25 bp, Homo sapien
gtgcaatatgttgggcatcactgaa

SEQ ID NO: 3527257 - DNA, 25 bp, Homo sapien
actgaaagcagctccatatcatact

SEQ ID NO: 3527258 - DNA, 25 bp, Homo sapien
tctgtaagttcaagtgcaatatgtt

SEQ ID NO: 3527259 - DNA, 25 bp, Homo sapien
acaggttctgtaagttcaagtgcaa

SEQ ID NO: 3527260 - DNA, 25 bp, Homo sapien
cacgtaactgcaggatgtagcccag

SEQ ID NO: 3527261 - DNA, 25 bp, Homo sapien
cacagatggtacaggtcccacgtca

SEQ ID NO: 3527262 - DNA, 25 bp, Homo sapien
gctttctgatcctatgtaacaggga

SEQ ID NO: 3527263 - DNA, 25 bp, Homo sapien
taaagagctccctaaatcacatacc

SEQ ID NO: 3527264 - DNA, 25 bp, Homo sapien
tcctctgcatctcttggctagtggc

SEQ ID NO: 3527265 - DNA, 25 bp, Homo sapien
tagtggccagcagagaaccacctac

SEQ ID NO: 3527266 - DNA, 25 bp, Homo sapien
tcatgaaaacattgagctgagtctg

SEQ ID NO: 3527267 - DNA, 25 bp, Homo sapien
taggtcatcaagcatccagccatgg

SEQ ID NO: 3527268 - DNA, 25 bp, Homo sapien
tgagcacatagaggtttaggattat

SEQ ID NO: 3527269 - DNA, 25 bp, Homo sapien
aggaaggtgttttatgagcacatag

SEQ ID NO: 3527270 - DNA, 25 bp, Homo sapien
ttttatgagcacatagaggtttagg

SEQ ID NO: 3527271 - DNA, 25 bp, Homo sapien
ggtgttttatgagcacatagaggtt

SEQ ID NO: 3527272 - DNA, 25 bp, Homo sapien
gccaacacccttagatgatcttcct

SEQ ID NO: 3527273 - DNA, 25 bp, Homo sapien
caacacccttagatgatcttcctgc

SEQ ID NO: 3527274 - DNA, 25 bp, Homo sapien
cccgccaacacccttagatgatctt

SEQ ID NO: 3527275 - DNA, 25 bp, Homo sapien
acacccttagatgatcttcctgcat

SEQ ID NO: 3527276 - DNA, 25 bp, Homo sapien
cagctggtggtaccctttgtaagaa

SEQ ID NO: 3527277 - DNA, 25 bp, Homo sapien
gaattaacggtatggtcttccactc

SEQ ID NO: 3527278 - DNA, 25 bp, Homo sapien
caatagatgtgttcagaattaacgg

SEQ ID NO: 3527279 - DNA, 25 bp, Homo sapien
ctggcctccttattgatgctgaaat

SEQ ID NO: 3527280 - DNA, 25 bp, Homo sapien
cccactcccactaaatgtaaaaatg

SEQ ID NO: 3527281 - DNA, 25 bp, Homo sapien
gactcccactcccactaaatgtaaa

SEQ ID NO: 3527282 - DNA, 25 bp, Homo sapien
aaatgtcactacatttttcagacac

SEQ ID NO: 3527283 - DNA, 25 bp, Homo sapien
gacactgccaggaacctccatagct

SEQ ID NO: 3527284 - DNA, 25 bp, Homo sapien
gggcattgccagctcttgccagtct

SEQ ID NO: 3527285 - DNA, 25 bp, Homo sapien
agtctgatgctgcagggcattgcca

SEQ ID NO: 3527286 - DNA, 25 bp, Homo sapien
ctacagagttctgcagtctgatgct

SEQ ID NO: 3527287 - DNA, 25 bp, Homo sapien
tgcagtctgatgctgcagggcattg

SEQ ID NO: 3527288 - DNA, 25 bp, Homo sapien
ctgactcaatcccttctttgctgag

SEQ ID NO: 3527289 - DNA, 25 bp, Homo sapien
actcaatcccttctttgctgagtag

SEQ ID NO: 3527290 - DNA, 25 bp, Homo sapien
tttgctgagtagatcctttgctcat

SEQ ID NO: 3527291 - DNA, 25 bp, Homo sapien
tctttgctgagtagatcctttgctc

SEQ ID NO: 3527292 - DNA, 25 bp, Homo sapien
atcagagatggctgttttatttcca

SEQ ID NO: 3527293 - DNA, 25 bp, Homo sapien
ttagaatcacatgcagaaatatcag

SEQ ID NO: 3527294 - DNA, 25 bp, Homo sapien
aaatatcagagatggctgttttatt

SEQ ID NO: 3527295 - DNA, 25 bp, Homo sapien
ctttagaatcacatgcagaaatatc

SEQ ID NO: 3527296 - DNA, 25 bp, Homo sapien
cagtggctggaggtaatggctttta

SEQ ID NO: 3527297 - DNA, 25 bp, Homo sapien
cagagctgggcactaactccagtgg

SEQ ID NO: 3527298 - DNA, 25 bp, Homo sapien
gacctttctgtaggcagcacaccac

SEQ ID NO: 3527299 - DNA, 25 bp, Homo sapien
gggtgatgccctctttctactagct

SEQ ID NO: 3527300 - DNA, 25 bp, Homo sapien
tatttccaacatgcccatataggcc

SEQ ID NO: 3527301 - DNA, 25 bp, Homo sapien
cccttatctgggtcaggaaccttgg

SEQ ID NO: 3527302 - DNA, 25 bp, Homo sapien
cataagctttacataagtccttggc

SEQ ID NO: 3527303 - DNA, 25 bp, Homo sapien
gctatgcctagccaaatctgtccag

SEQ ID NO: 3527304 - DNA, 25 bp, Homo sapien
tgtattaattagtagaagtctagga

SEQ ID NO: 3527305 - DNA, 25 bp, Homo sapien
aaacaaggctccagcgataataagg

SEQ ID NO: 3527306 - DNA, 25 bp, Homo sapien
taataaggacggtaagttcagccat

SEQ ID NO: 3527307 - DNA, 25 bp, Homo sapien
tagtagaagtctaggaagaagcagg

SEQ ID NO: 3527308 - DNA, 25 bp, Homo sapien
tatctgaaaacggttatctgagagc

SEQ ID NO: 3527309 - DNA, 25 bp, Homo sapien
tctcgacgttatctgaaaacggtta

SEQ ID NO: 3527310 - DNA, 25 bp, Homo sapien
tcactttctcgacgttatctgaaaa

SEQ ID NO: 3527311 - DNA, 25 bp, Homo sapien
gaaaacggttatctgagagcatgct

SEQ ID NO: 3527312 - DNA, 25 bp, Homo sapien
cattagcaagccagattcttcacct

SEQ ID NO: 3527313 - DNA, 25 bp, Homo sapien
tgtaagtttaggatgtcgtgagaaa

SEQ ID NO: 3527314 - DNA, 25 bp, Homo sapien
cattcaaagtataggcattcaaggt

SEQ ID NO: 3527315 - DNA, 25 bp, Homo sapien
ttaggatgtcgtgagaaatttctgc

SEQ ID NO: 3527316 - DNA, 25 bp, Homo sapien
ggttttgatggctccacccacaaag

SEQ ID NO: 3527317 - DNA, 25 bp, Homo sapien
caagtgattgggcaaagcatcgtaa

SEQ ID NO: 3527318 - DNA, 25 bp, Homo sapien
caaagcatcgtaaggagatttttcc

SEQ ID NO: 3527319 - DNA, 25 bp, Homo sapien
cacaaagtatttgagagaatctcgc

SEQ ID NO: 3527320 - DNA, 25 bp, Homo sapien
caaaacttgtaatcagtgaataaga

SEQ ID NO: 3527321 - DNA, 25 bp, Homo sapien
aaacttgtaatcagtgaataagaat

SEQ ID NO: 3527322 - DNA, 25 bp, Homo sapien
tcaaaacttgtaatcagtgaataag

SEQ ID NO: 3527323 - DNA, 25 bp, Homo sapien
aaaacttgtaatcagtgaataagaa

SEQ ID NO: 3527324 - DNA, 25 bp, Homo sapien
cctacacatgaactcctcaaatggg

SEQ ID NO: 3527325 - DNA, 25 bp, Homo sapien
tggccaggccacttcgtctacatga

SEQ ID NO: 3527326 - DNA, 25 bp, Homo sapien
tggccacatactgctttcatctgag

SEQ ID NO: 3527327 - DNA, 25 bp, Homo sapien
tctgagtgtgctgattccctgctgt

SEQ ID NO: 3527328 - DNA, 25 bp, Homo sapien
ccccaaatatcctttctgaattcca

SEQ ID NO: 3527329 - DNA, 25 bp, Homo sapien
ccaaatatcctttctgaattccatt

SEQ ID NO: 3527330 - DNA, 25 bp, Homo sapien
ccattttctcttctagacttaaatc

SEQ ID NO: 3527331 - DNA, 25 bp, Homo sapien
tttctcttctagacttaaatcccat

SEQ ID NO: 3527332 - DNA, 25 bp, Homo sapien
ccaggtctgagcttcagaatgaaag

SEQ ID NO: 3527333 - DNA, 25 bp, Homo sapien
aggtctgagcttcagaatgaaaggg

SEQ ID NO: 3527334 - DNA, 25 bp, Homo sapien
tcaccaggtctgagcttcagaatga

SEQ ID NO: 3527335 - DNA, 25 bp, Homo sapien
caccaggtctgagcttcagaatgaa

SEQ ID NO: 3527336 - DNA, 25 bp, Homo sapien
ttggaatggcccaaatcctgaagaa

SEQ ID NO: 3527337 - DNA, 25 bp, Homo sapien
tggttctgtgaaggcatttagatcc

SEQ ID NO: 3527338 - DNA, 25 bp, Homo sapien
tcaaaggatttccagtgctttcggg

SEQ ID NO: 3527339 - DNA, 25 bp, Homo sapien
tttcaagtggcaattcagtgatgac

SEQ ID NO: 3527340 - DNA, 25 bp, Homo sapien
ggcaaagtcatgagacccttagctg

SEQ ID NO: 3527341 - DNA, 25 bp, Homo sapien
caagctaaggtataaagtgtggaca

SEQ ID NO: 3527342 - DNA, 25 bp, Homo sapien
gactgagactagtccggcaaagtca

SEQ ID NO: 3527343 - DNA, 25 bp, Homo sapien
gatgattcaacatctcaagctaagg

SEQ ID NO: 3527344 - DNA, 25 bp, Homo sapien
gctgaatatagatggcgcaatggct

SEQ ID NO: 3527345 - DNA, 25 bp, Homo sapien
tgctgttggtatgaacattctgacc

SEQ ID NO: 3527346 - DNA, 25 bp, Homo sapien
gctttgtcaagaaatgtggccagtt

SEQ ID NO: 3527347 - DNA, 25 bp, Homo sapien
cagaatcttcccagtgtgcgctagc

SEQ ID NO: 3527348 - DNA, 25 bp, Homo sapien
aaagacaaatgggatgtgatatttt

SEQ ID NO: 3527349 - DNA, 25 bp, Homo sapien
cacagtgcttttgggtagataaaca

SEQ ID NO: 3527350 - DNA, 25 bp, Homo sapien
cccacagtgcttttgggtagataaa

SEQ ID NO: 3527351 - DNA, 25 bp, Homo sapien
aggacccacagtgcttttgggtaga

SEQ ID NO: 3527352 - DNA, 25 bp, Homo sapien
cttgctggggtcatatacctcaaag

SEQ ID NO: 3527353 - DNA, 25 bp, Homo sapien
ttactttatgtctcccaggtctctt

SEQ ID NO: 3527354 - DNA, 25 bp, Homo sapien
atacctcaaaggcatcaatatattc

SEQ ID NO: 3527355 - DNA, 25 bp, Homo sapien
tcatggccacgggtatttgaatgtg

SEQ ID NO: 3527356 - DNA, 25 bp, Homo sapien
gcacagggaagatacccacaatcat

SEQ ID NO: 3527357 - DNA, 25 bp, Homo sapien
ggaatcacaaaccctccaggcacag

SEQ ID NO: 3527358 - DNA, 25 bp, Homo sapien
aaccctccaggcacagggaagatac

SEQ ID NO: 3527359 - DNA, 25 bp, Homo sapien
tccaggcacagggaagatacccaca

SEQ ID NO: 3527360 - DNA, 25 bp, Homo sapien
ctgccactgtcaagagaccgtaaaa

SEQ ID NO: 3527361 - DNA, 25 bp, Homo sapien
caagagaccgtaaaaacagaaggtg

SEQ ID NO: 3527362 - DNA, 25 bp, Homo sapien
tgtcaagagaccgtaaaaacagaag

SEQ ID NO: 3527363 - DNA, 25 bp, Homo sapien
ccactgtcaagagaccgtaaaaaca

SEQ ID NO: 3527364 - DNA, 25 bp, Homo sapien
ggccatgactgtaattacagctaag

SEQ ID NO: 3527365 - DNA, 25 bp, Homo sapien
ctccagcgatgctcctttgcattct

SEQ ID NO: 3527366 - DNA, 25 bp, Homo sapien
gcattctgctgctcccttatggcca

SEQ ID NO: 3527367 - DNA, 25 bp, Homo sapien
gactgtaattacagctaagtttaca

SEQ ID NO: 3527368 - DNA, 25 bp, Homo sapien
gaatgatacatcaaggcctgccatg

SEQ ID NO: 3527369 - DNA, 25 bp, Homo sapien
gactttatggtatgactcatgagcc

SEQ ID NO: 3527370 - DNA, 25 bp, Homo sapien
gatgagggaatgagagcacactgat

SEQ ID NO: 3527371 - DNA, 25 bp, Homo sapien
gcacactgatagaagtaaagggcag

SEQ ID NO: 3527372 - DNA, 25 bp, Homo sapien
caattcgcagaccatctttaatgta

SEQ ID NO: 3527373 - DNA, 25 bp, Homo sapien
gcagaccatctttaatgtaacggta

SEQ ID NO: 3527374 - DNA, 25 bp, Homo sapien
catctttaatgtaacggtatcctga

SEQ ID NO: 3527375 - DNA, 25 bp, Homo sapien
tcaccattgttcaattcgcagacca

SEQ ID NO: 3527376 - DNA, 25 bp, Homo sapien
catttttctatcccgttctttgcca

SEQ ID NO: 3527377 - DNA, 25 bp, Homo sapien
atcccgttctttgccaacataattg

SEQ ID NO: 3527378 - DNA, 25 bp, Homo sapien
ccgttctttgccaacataattgcac

SEQ ID NO: 3527379 - DNA, 25 bp, Homo sapien
ctatcccgttctttgccaacataat

SEQ ID NO: 3527380 - DNA, 25 bp, Homo sapien
aggtgaactgcaaaacaagtcccag

SEQ ID NO: 3527381 - DNA, 25 bp, Homo sapien
actgcaaaacaagtcccaggcgcac

SEQ ID NO: 3527382 - DNA, 25 bp, Homo sapien
tgccaggtgaactgcaaaacaagtc

SEQ ID NO: 3527383 - DNA, 25 bp, Homo sapien
tgaactgcaaaacaagtcccaggcg

SEQ ID NO: 3527384 - DNA, 25 bp, Homo sapien
tctggggccatttgtagcttctctt

SEQ ID NO: 3527385 - DNA, 25 bp, Homo sapien
acggtgagtcagtcgctgtcatcca

SEQ ID NO: 3527386 - DNA, 25 bp, Homo sapien
ctctttttgatagccagaattttcc

SEQ ID NO: 3527387 - DNA, 25 bp, Homo sapien
tcctgtttatgctcatcccgagcat

SEQ ID NO: 3527388 - DNA, 25 bp, Homo sapien
ctcattgcaatcacccattgccacc

SEQ ID NO: 3527389 - DNA, 25 bp, Homo sapien
tcattgcaatcacccattgccacca

SEQ ID NO: 3527390 - DNA, 25 bp, Homo sapien
cattgcaatcacccattgccaccac

SEQ ID NO: 3527391 - DNA, 25 bp, Homo sapien
tgccactttatactcaataagccct

SEQ ID NO: 3527392 - DNA, 25 bp, Homo sapien
gatgccacttcctattctaggacac

SEQ ID NO: 3527393 - DNA, 25 bp, Homo sapien
ctattctaggacactgaactgccac

SEQ ID NO: 3527394 - DNA, 25 bp, Homo sapien
cactttatactcaataagccctttc

SEQ ID NO: 3527395 - DNA, 25 bp, Homo sapien
cccagagactgggcaacatttgaac

SEQ ID NO: 3527396 - DNA, 25 bp, Homo sapien
acatattctgaacaattgtgtcaaa

SEQ ID NO: 3527397 - DNA, 25 bp, Homo sapien
acatttggcacatattctgaacaat

SEQ ID NO: 3527398 - DNA, 25 bp, Homo sapien
ggcacatattctgaacaattgtgtc

SEQ ID NO: 3527399 - DNA, 25 bp, Homo sapien
tatcataactaaatcaactggatta

SEQ ID NO: 3527400 - DNA, 25 bp, Homo sapien
cagcagagtttccaattacattgta

SEQ ID NO: 3527401 - DNA, 25 bp, Homo sapien
ggattattagactatcactttatgg

SEQ ID NO: 3527402 - DNA, 25 bp, Homo sapien
aatattctagcactccattcttggg

SEQ ID NO: 3527403 - DNA, 25 bp, Homo sapien
taggtctcacggttcttctgcacag

SEQ ID NO: 3527404 - DNA, 25 bp, Homo sapien
tctgcacaggactgggaattatgag

SEQ ID NO: 3527405 - DNA, 25 bp, Homo sapien
tcaagtctaatccatttgcctctcc

SEQ ID NO: 3527406 - DNA, 25 bp, Homo sapien
gaatccaggctctgggttcatttca

SEQ ID NO: 3527407 - DNA, 25 bp, Homo sapien
agaaagacggctgatgaagtgccag

SEQ ID NO: 3527408 - DNA, 25 bp, Homo sapien
ccaggaacggtgataagcaacagca

SEQ ID NO: 3527409 - DNA, 25 bp, Homo sapien
tcccaggaacggtgataagcaacag

SEQ ID NO: 3527410 - DNA, 25 bp, Homo sapien
aaagaaagacggctgatgaagtgcc

SEQ ID NO: 3527411 - DNA, 25 bp, Homo sapien
agtagagtagaggtattgttgcagc

SEQ ID NO: 3527412 - DNA, 25 bp, Homo sapien
tgcagcttcagaaagtctcacttca

SEQ ID NO: 3527413 - DNA, 25 bp, Homo sapien
agtctcacttcacctctggcttcac

SEQ ID NO: 3527414 - DNA, 25 bp, Homo sapien
gaaattgctttaagtagagtagagg

SEQ ID NO: 3527415 - DNA, 25 bp, Homo sapien
gatgcttgattttgaggtgttacca

SEQ ID NO: 3527416 - DNA, 25 bp, Homo sapien
tgtttttcggattcagctgctggat

SEQ ID NO: 3527417 - DNA, 25 bp, Homo sapien
ggtgttaccatgctactgcctccat

SEQ ID NO: 3527418 - DNA, 25 bp, Homo sapien
tgctactgcctccatctgtatctgt

SEQ ID NO: 3527419 - DNA, 25 bp, Homo sapien
tgcttcctggtacaccggagcggtg

SEQ ID NO: 3527420 - DNA, 25 bp, Homo sapien
tccatgatgtagacctgcttcctgg

SEQ ID NO: 3527421 - DNA, 25 bp, Homo sapien
tgaaagaagggcgaggtcatgcttt

SEQ ID NO: 3527422 - DNA, 25 bp, Homo sapien
ttccgaaaagccactcttatctcca

SEQ ID NO: 3527423 - DNA, 25 bp, Homo sapien
cagctctttcccctcaatgttgaga

SEQ ID NO: 3527424 - DNA, 25 bp, Homo sapien
agctctttcccctcaatgttgagag

SEQ ID NO: 3527425 - DNA, 25 bp, Homo sapien
gagcagctctttcccctcaatgttg

SEQ ID NO: 3527426 - DNA, 25 bp, Homo sapien
ctggagcagctctttcccctcaatg

SEQ ID NO: 3527427 - DNA, 25 bp, Homo sapien
tttataggcaaagagatgatctatt

SEQ ID NO: 3527428 - DNA, 25 bp, Homo sapien
catatcagtcaaggatttataggca

SEQ ID NO: 3527429 - DNA, 25 bp, Homo sapien
tttacgactataagcatgttccttc

SEQ ID NO: 3527430 - DNA, 25 bp, Homo sapien
caagtcataaggattcatatcagtc

SEQ ID NO: 3527431 - DNA, 25 bp, Homo sapien
gatttctgctggctccacttcctct

SEQ ID NO: 3527432 - DNA, 25 bp, Homo sapien
cagcttatctccacaactgctttga

SEQ ID NO: 3527433 - DNA, 25 bp, Homo sapien
tcattccactgacccttgacaatca

SEQ ID NO: 3527434 - DNA, 25 bp, Homo sapien
tctcattccactgacccttgacaat

SEQ ID NO: 3527435 - DNA, 25 bp, Homo sapien
ccacaagaaaatcaaacttagaggg

SEQ ID NO: 3527436 - DNA, 25 bp, Homo sapien
aaccacaagaaaatcaaacttagag

SEQ ID NO: 3527437 - DNA, 25 bp, Homo sapien
cacaagaaaatcaaacttagaggga

SEQ ID NO: 3527438 - DNA, 25 bp, Homo sapien
accacaagaaaatcaaacttagagg

SEQ ID NO: 3527439 - DNA, 25 bp, Homo sapien
tttttgatgggccaactggcgagtt

SEQ ID NO: 3527440 - DNA, 25 bp, Homo sapien
gactgagcttcttgcccctgaacta

SEQ ID NO: 3527441 - DNA, 25 bp, Homo sapien
tgaactacctgaatttttgcctgac

SEQ ID NO: 3527442 - DNA, 25 bp, Homo sapien
cagacaggctgttggactttttgat

SEQ ID NO: 3527443 - DNA, 25 bp, Homo sapien
tggtctctagcagcaactcaaggct

SEQ ID NO: 3527444 - DNA, 25 bp, Homo sapien
gttggaattcagagtatctgtggtc

SEQ ID NO: 3527445 - DNA, 25 bp, Homo sapien
gactgaaggaagtagctaggacctg

SEQ ID NO: 3527446 - DNA, 25 bp, Homo sapien
cagagtatctgtggtctctagcagc

SEQ ID NO: 3527447 - DNA, 25 bp, Homo sapien
tcaatagtttaccttacagaagtag

SEQ ID NO: 3527448 - DNA, 25 bp, Homo sapien
aattgcatctgcaacttttagcagg

SEQ ID NO: 3527449 - DNA, 25 bp, Homo sapien
cactttggagtagtcaggcctatta

SEQ ID NO: 3527450 - DNA, 25 bp, Homo sapien
ggtggtatatagcacactttgaaga

SEQ ID NO: 3527451 - DNA, 25 bp, Homo sapien
tatctgcttaactacttaattaccc

SEQ ID NO: 3527452 - DNA, 25 bp, Homo sapien
tcttagtcaataaaactccaacatt

SEQ ID NO: 3527453 - DNA, 25 bp, Homo sapien
ggtttacttttactcctatgatgta

SEQ ID NO: 3527454 - DNA, 25 bp, Homo sapien
ctccaacatttaggtttatagcctg

SEQ ID NO: 3527455 - DNA, 25 bp, Homo sapien
tactcagcatctcaacttcttgagt

SEQ ID NO: 3527456 - DNA, 25 bp, Homo sapien
cactagaaagacagcctgataaatc

SEQ ID NO: 3527457 - DNA, 25 bp, Homo sapien
gcactagaaagacagcctgataaat

SEQ ID NO: 3527458 - DNA, 25 bp, Homo sapien
catgcccaggtgttttcttactcca

SEQ ID NO: 3527459 - DNA, 25 bp, Homo sapien
tgcccaggtgttttcttactccaag

SEQ ID NO: 3527460 - DNA, 25 bp, Homo sapien
ttcttactccaaggctagaatttac

SEQ ID NO: 3527461 - DNA, 25 bp, Homo sapien
accatgcccaggtgttttcttactc

SEQ ID NO: 3527462 - DNA, 25 bp, Homo sapien
tcctactgtaatcttgttcctccat

SEQ ID NO: 3527463 - DNA, 25 bp, Homo sapien
ttttcctactgtaatcttgttcctc

SEQ ID NO: 3527464 - DNA, 25 bp, Homo sapien
tgctgtcttcctacaccttttttcc

SEQ ID NO: 3527465 - DNA, 25 bp, Homo sapien
caccttttttcctactgtaatcttg

SEQ ID NO: 3527466 - DNA, 25 bp, Homo sapien
aaggctgagcgcagcttgagtctgg

SEQ ID NO: 3527467 - DNA, 25 bp, Homo sapien
tgagcgcagcttgagtctgggacac

SEQ ID NO: 3527468 - DNA, 25 bp, Homo sapien
gctgagcgcagcttgagtctgggac

SEQ ID NO: 3527469 - DNA, 25 bp, Homo sapien
cttcagattccagatcctgttacct

SEQ ID NO: 3527470 - DNA, 25 bp, Homo sapien
tcatttccagtttgtggaccagagt

SEQ ID NO: 3527471 - DNA, 25 bp, Homo sapien
tgaatctttccactgttgtggaata

SEQ ID NO: 3527472 - DNA, 25 bp, Homo sapien
tgttgtggaatatcatcatatttga

SEQ ID NO: 3527473 - DNA, 25 bp, Homo sapien
agtgtactgtgaaaactggtacttc

SEQ ID NO: 3527474 - DNA, 25 bp, Homo sapien
tcttttgtaacttcccatcggctgc

SEQ ID NO: 3527475 - DNA, 25 bp, Homo sapien
cttttgtaacttcccatcggctgcc

SEQ ID NO: 3527476 - DNA, 25 bp, Homo sapien
acacccaacacagtgtactgtgaaa

SEQ ID NO: 3527477 - DNA, 25 bp, Homo sapien
gttgcgtccaacacacagctgatcc

SEQ ID NO: 3527478 - DNA, 25 bp, Homo sapien
gatctcaagcgagtccatcctcaag

SEQ ID NO: 3527479 - DNA, 25 bp, Homo sapien
gcagtgcaccagagtacatgccatc

SEQ ID NO: 3527480 - DNA, 25 bp, Homo sapien
aagtaatggttccagttccaggcag

SEQ ID NO: 3527481 - DNA, 25 bp, Homo sapien
tcatacttaataacttgacgcagaa

SEQ ID NO: 3527482 - DNA, 25 bp, Homo sapien
catacttaataacttgacgcagaaa

SEQ ID NO: 3527483 - DNA, 25 bp, Homo sapien
cactgtgatgccttcttagaatcag

SEQ ID NO: 3527484 - DNA, 25 bp, Homo sapien
gtgacactgtgatgccttcttagaa

SEQ ID NO: 3527485 - DNA, 25 bp, Homo sapien
gtgatgccttcttagaatcagacat

SEQ ID NO: 3527486 - DNA, 25 bp, Homo sapien
tgacactgtgatgccttcttagaat

SEQ ID NO: 3527487 - DNA, 25 bp, Homo sapien
tataagctaataacatactctccac

SEQ ID NO: 3527488 - DNA, 25 bp, Homo sapien
tctccactttgactgagcaactgta

SEQ ID NO: 3527489 - DNA, 25 bp, Homo sapien
gctaataacatactctccactttga

SEQ ID NO: 3527490 - DNA, 25 bp, Homo sapien
ctccactttgactgagcaactgtaa

SEQ ID NO: 3527491 - DNA, 25 bp, Homo sapien
cttgccttttcaacgtagtctctca

SEQ ID NO: 3527492 - DNA, 25 bp, Homo sapien
gttgttaaaacaatgtctaagccca

SEQ ID NO: 3527493 - DNA, 25 bp, Homo sapien
gtattttcgcatctcagttgttaaa

SEQ ID NO: 3527494 - DNA, 25 bp, Homo sapien
ttttattgtattttcgcatctcagt

SEQ ID NO: 3527495 - DNA, 25 bp, Homo sapien
ttgttaaaacaatgtctaagcccat

SEQ ID NO: 3527496 - DNA, 25 bp, Homo sapien
tccccactatggtgggtcaccatgt

SEQ ID NO: 3527497 - DNA, 25 bp, Homo sapien
cactatggtgggtcaccatgttgat

SEQ ID NO: 3527498 - DNA, 25 bp, Homo sapien
aatttagcagggacacccaatcggc

SEQ ID NO: 3527499 - DNA, 25 bp, Homo sapien
ccactatggtgggtcaccatgttga

SEQ ID NO: 3527500 - DNA, 25 bp, Homo sapien
ccttcaagcaggagttaagactgtc

SEQ ID NO: 3527501 - DNA, 25 bp, Homo sapien
gacatccccaataagagaccacctg

SEQ ID NO: 3527502 - DNA, 25 bp, Homo sapien
taagcagaggctattggcccagggc

SEQ ID NO: 3527503 - DNA, 25 bp, Homo sapien
tgcacatgacgtggatcccgttgag

SEQ ID NO: 3527504 - DNA, 25 bp, Homo sapien
ttcagtggtcctcgggatgacaatc

SEQ ID NO: 3527505 - DNA, 25 bp, Homo sapien
gacttctgtataaggctcgtgcttc

SEQ ID NO: 3527506 - DNA, 25 bp, Homo sapien
tcttaagctgacttctgtataaggc

SEQ ID NO: 3527507 - DNA, 25 bp, Homo sapien
tataaggctcgtgcttcagtggtcc

SEQ ID NO: 3527508 - DNA, 25 bp, Homo sapien
tagtcaaataatgggagattctgtt

SEQ ID NO: 3527509 - DNA, 25 bp, Homo sapien
gctagtcaaataatgggagattctg

SEQ ID NO: 3527510 - DNA, 25 bp, Homo sapien
aatttcctggatcaaggctagtcaa

SEQ ID NO: 3527511 - DNA, 25 bp, Homo sapien
tcaatttcctggatcaaggctagtc

SEQ ID NO: 3527512 - DNA, 25 bp, Homo sapien
tattagaataccaacaaacacagga

SEQ ID NO: 3527513 - DNA, 25 bp, Homo sapien
ggttgaataacttaccagaggtcac

SEQ ID NO: 3527514 - DNA, 25 bp, Homo sapien
aaagagactggtactaacatcccca

SEQ ID NO: 3527515 - DNA, 25 bp, Homo sapien
gaaggtgcacatcttacaacatagg

SEQ ID NO: 3527516 - DNA, 25 bp, Homo sapien
tttcatgaacatccccataacaagg

SEQ ID NO: 3527517 - DNA, 25 bp, Homo sapien
agaaagtgctgcaatcatttcatga

SEQ ID NO: 3527518 - DNA, 25 bp, Homo sapien
tgcaatcatttcatgaacatcccca

SEQ ID NO: 3527519 - DNA, 25 bp, Homo sapien
gtgctgcaatcatttcatgaacatc

SEQ ID NO: 3527520 - DNA, 25 bp, Homo sapien
cacgatggcatttaaagattgggcc

SEQ ID NO: 3527521 - DNA, 25 bp, Homo sapien
tgtgttatgaactaaatcatgtccc

SEQ ID NO: 3527522 - DNA, 25 bp, Homo sapien
ccccaacacgatggcatttaaagat

SEQ ID NO: 3527523 - DNA, 25 bp, Homo sapien
tgaaagagcattcatatgtgttatg

SEQ ID NO: 3527524 - DNA, 25 bp, Homo sapien
gccacaggtttctactgaggttcct

SEQ ID NO: 3527525 - DNA, 25 bp, Homo sapien
gttccttgaagtgggccaataagta

SEQ ID NO: 3527526 - DNA, 25 bp, Homo sapien
ccaaggtggttatgtcttttccatc

SEQ ID NO: 3527527 - DNA, 25 bp, Homo sapien
tccatcaacgggaacaagagtagaa

SEQ ID NO: 3527528 - DNA, 25 bp, Homo sapien
gttaacatggcggaattgtccataa

SEQ ID NO: 3527529 - DNA, 25 bp, Homo sapien
catggcggaattgtccataacctgt

SEQ ID NO: 3527530 - DNA, 25 bp, Homo sapien
aattgtccataacctgtgagaacag

SEQ ID NO: 3527531 - DNA, 25 bp, Homo sapien
gcggaattgtccataacctgtgaga

SEQ ID NO: 3527532 - DNA, 25 bp, Homo sapien
tgaaatggaattctcttggagcaca

SEQ ID NO: 3527533 - DNA, 25 bp, Homo sapien
catgaaatggaattctcttggagca

SEQ ID NO: 3527534 - DNA, 25 bp, Homo sapien
tttgaatgtaattggaaggttatgg

SEQ ID NO: 3527535 - DNA, 25 bp, Homo sapien
tgcatgaaatggaattctcttggag

SEQ ID NO: 3527536 - DNA, 25 bp, Homo sapien
tagaagggaagatagcagtttataa

SEQ ID NO: 3527537 - DNA, 25 bp, Homo sapien
gtctatgctcttttataccactgtc

SEQ ID NO: 3527538 - DNA, 25 bp, Homo sapien
agtaaatcgtgtctgaagtaacttg

SEQ ID NO: 3527539 - DNA, 25 bp, Homo sapien
ttttggagtaaatcgtgtctgaagt

SEQ ID NO: 3527540 - DNA, 25 bp, Homo sapien
caattgcgtgcaaataggagtttct

SEQ ID NO: 3527541 - DNA, 25 bp, Homo sapien
tagacaatgtggtgtcagcataacc

SEQ ID NO: 3527542 - DNA, 25 bp, Homo sapien
tcttggcccaattactctgagcaca

SEQ ID NO: 3527543 - DNA, 25 bp, Homo sapien
caagaacatatgcacgcgagtacac

SEQ ID NO: 3527544 - DNA, 25 bp, Homo sapien
ggaagatagcctagagaatagtaca

SEQ ID NO: 3527545 - DNA, 25 bp, Homo sapien
cttgggccttaattacaagagttga

SEQ ID NO: 3527546 - DNA, 25 bp, Homo sapien
gctacgtaacaacagttttgctaac

SEQ ID NO: 3527547 - DNA, 25 bp, Homo sapien
gagttgaaactctattttatgatcc

SEQ ID NO: 3527548 - DNA, 25 bp, Homo sapien
cctaagcctggctaaggatgaagct

SEQ ID NO: 3527549 - DNA, 25 bp, Homo sapien
gctggaatgcgtggagcacatccca

SEQ ID NO: 3527550 - DNA, 25 bp, Homo sapien
tatggataaacaattgcacagcctc

SEQ ID NO: 3527551 - DNA, 25 bp, Homo sapien
ggcacaattggaatactcccagagc

SEQ ID NO: 3527552 - DNA, 25 bp, Homo sapien
tggatgatgggaaacttctatgacc

SEQ ID NO: 3527553 - DNA, 25 bp, Homo sapien
gataataggtttgttgtacagcctc

SEQ ID NO: 3527554 - DNA, 25 bp, Homo sapien
taactcttagctagctgcatttacc

SEQ ID NO: 3527555 - DNA, 25 bp, Homo sapien
tgcatttacctcctaggcatccctg

SEQ ID NO: 3527556 - DNA, 25 bp, Homo sapien
tcttgaaagcaaacggaaacctgag

SEQ ID NO: 3527557 - DNA, 25 bp, Homo sapien
gatggcacctcggaaaaatccctaa

SEQ ID NO: 3527558 - DNA, 25 bp, Homo sapien
aatgaagactaaaggccagggactc

SEQ ID NO: 3527559 - DNA, 25 bp, Homo sapien
caatcgatgcagatagatggcacct

SEQ ID NO: 3527560 - DNA, 25 bp, Homo sapien
taggcataactccttgtcccttgcc

SEQ ID NO: 3527561 - DNA, 25 bp, Homo sapien
cccagttggcactgatcctgttata

SEQ ID NO: 3527562 - DNA, 25 bp, Homo sapien
tagtgacttcatttaggcataactc

SEQ ID NO: 3527563 - DNA, 25 bp, Homo sapien
gatcctgttatatcttgtcgttact

SEQ ID NO: 3527564 - DNA, 25 bp, Homo sapien
atgtattagcatgctttcatgaaga

SEQ ID NO: 3527565 - DNA, 25 bp, Homo sapien
caaatggggccatatggtctgatat

SEQ ID NO: 3527566 - DNA, 25 bp, Homo sapien
gggccatatggtctgatatgtatta

SEQ ID NO: 3527567 - DNA, 25 bp, Homo sapien
ccatatggtctgatatgtattagca

SEQ ID NO: 3527568 - DNA, 25 bp, Homo sapien
gatttcatagtgcaaggctgatcgc

SEQ ID NO: 3527569 - DNA, 25 bp, Homo sapien
tcaatctccagcatataaagtagtg

SEQ ID NO: 3527570 - DNA, 25 bp, Homo sapien
aatcaatttctaaaggcccttgcag

SEQ ID NO: 3527571 - DNA, 25 bp, Homo sapien
ccataatcactgtagctgcttggca

SEQ ID NO: 3527572 - DNA, 25 bp, Homo sapien
cacagagattccttaactccttctt

SEQ ID NO: 3527573 - DNA, 25 bp, Homo sapien
acagagattccttaactccttcttc

SEQ ID NO: 3527574 - DNA, 25 bp, Homo sapien
tactcggaccagacgaatgattctg

SEQ ID NO: 3527575 - DNA, 25 bp, Homo sapien
tctgaggatggcaaaggacatggcc

SEQ ID NO: 3527576 - DNA, 25 bp, Homo sapien
ggtagtaggttcatccgcctctgca

SEQ ID NO: 3527577 - DNA, 25 bp, Homo sapien
gaagaagatcagaaggcccagttcc

SEQ ID NO: 3527578 - DNA, 25 bp, Homo sapien
cactgtagcggactgaactgtagcc

SEQ ID NO: 3527579 - DNA, 25 bp, Homo sapien
tttgggtctcaaagcgtaggcctga

SEQ ID NO: 3527580 - DNA, 25 bp, Homo sapien
cagtgccatgacgagatccctgtcg

SEQ ID NO: 3527581 - DNA, 25 bp, Homo sapien
tgtaggaacactcatcaccatggtc

SEQ ID NO: 3527582 - DNA, 25 bp, Homo sapien
ctctgccggtagtgggctttcttct

SEQ ID NO: 3527583 - DNA, 25 bp, Homo sapien
gaagctgctctgccggtagtgggct

SEQ ID NO: 3527584 - DNA, 25 bp, Homo sapien
gctgctctgccggtagtgggctttc

SEQ ID NO: 3527585 - DNA, 25 bp, Homo sapien
tgctctgccggtagtgggctttctt

SEQ ID NO: 3527586 - DNA, 25 bp, Homo sapien
gtacaggccccgcgtgactggtggt

SEQ ID NO: 3527587 - DNA, 25 bp, Homo sapien
gtcatgggaggtacaggccccgcgt

SEQ ID NO: 3527588 - DNA, 25 bp, Homo sapien
atgggaggtacaggccccgcgtgac

SEQ ID NO: 3527589 - DNA, 25 bp, Homo sapien
ctccgactaccccggctgctctgag

SEQ ID NO: 3527590 - DNA, 25 bp, Homo sapien
acagcagctgtggccgctgcaacag

SEQ ID NO: 3527591 - DNA, 25 bp, Homo sapien
cagcataaccataaggcatgtgact

SEQ ID NO: 3527592 - DNA, 25 bp, Homo sapien
tgagctctccgcactcaccattgca

SEQ ID NO: 3527593 - DNA, 25 bp, Homo sapien
cccgggcctgggcagcataaccata

SEQ ID NO: 3527594 - DNA, 25 bp, Homo sapien
tggtcgagataaatagcctggcact

SEQ ID NO: 3527595 - DNA, 25 bp, Homo sapien
tgtttttaaatcagcacgccccatg

SEQ ID NO: 3527596 - DNA, 25 bp, Homo sapien
gcctggcactctcaagactaagaag

SEQ ID NO: 3527597 - DNA, 25 bp, Homo sapien
gtttggaacccttaagcagattgct

SEQ ID NO: 3527598 - DNA, 25 bp, Homo sapien
tggaggctccaaatatccacggaac

SEQ ID NO: 3527599 - DNA, 25 bp, Homo sapien
tggttcctctggagttcagcacagg

SEQ ID NO: 3527600 - DNA, 25 bp, Homo sapien
taaaaggaatcactcgggtttggca

SEQ ID NO: 3527601 - DNA, 25 bp, Homo sapien
gcagcgatcacttgttaagcccgaa

SEQ ID NO: 3527602 - DNA, 25 bp, Homo sapien
taacttcaaatatggtggaacaggg

SEQ ID NO: 3527603 - DNA, 25 bp, Homo sapien
tttagcctactacaacatgaagagc

SEQ ID NO: 3527604 - DNA, 25 bp, Homo sapien
cagggtggtcctttgcggcttttct

SEQ ID NO: 3527605 - DNA, 25 bp, Homo sapien
taaaacaggtggcactgaaaagtca

SEQ ID NO: 3527606 - DNA, 25 bp, Homo sapien
cagacattctttttccccttcaatt

SEQ ID NO: 3527607 - DNA, 25 bp, Homo sapien
agacattctttttccccttcaattg

SEQ ID NO: 3527608 - DNA, 25 bp, Homo sapien
cacagacattctttttccccttcaa

SEQ ID NO: 3527609 - DNA, 25 bp, Homo sapien
tcacagacattctttttccccttca

SEQ ID NO: 3527610 - DNA, 25 bp, Homo sapien
cttgtccaatctatcacaaatgcca

SEQ ID NO: 3527611 - DNA, 25 bp, Homo sapien
caccattcaactcatagccttctct

SEQ ID NO: 3527612 - DNA, 25 bp, Homo sapien
gccttctctcctaccaaaattgtta

SEQ ID NO: 3527613 - DNA, 25 bp, Homo sapien
tgtccaatctatcacaaatgccaaa

SEQ ID NO: 3527614 - DNA, 25 bp, Homo sapien
taggtctcatctaagaagtgtccac

SEQ ID NO: 3527615 - DNA, 25 bp, Homo sapien
tagaacccagtgcagattagcagga

SEQ ID NO: 3527616 - DNA, 25 bp, Homo sapien
gcagatccctggcaatggaaccctt

SEQ ID NO: 3527617 - DNA, 25 bp, Homo sapien
cctttggttgtgaagtgcagatccc

SEQ ID NO: 3527618 - DNA, 25 bp, Homo sapien
gggctcagatagtccccagtggtga

SEQ ID NO: 3527619 - DNA, 25 bp, Homo sapien
aaccctcatccgaaagtactgttct

SEQ ID NO: 3527620 - DNA, 25 bp, Homo sapien
tatgaggtgacggtttggcaataag

SEQ ID NO: 3527621 - DNA, 25 bp, Homo sapien
taattcgtatacaaagcttgtaagc

SEQ ID NO: 3527622 - DNA, 25 bp, Homo sapien
tgctcctggtgcttaatgttacaca

SEQ ID NO: 3527623 - DNA, 25 bp, Homo sapien
ttggtgctcctggtgcttaatgtta

SEQ ID NO: 3527624 - DNA, 25 bp, Homo sapien
gctcctggtgcttaatgttacacat

SEQ ID NO: 3527625 - DNA, 25 bp, Homo sapien
ggtgctcctggtgcttaatgttaca

SEQ ID NO: 3527626 - DNA, 25 bp, Homo sapien
tcaacccagccagtatcaaatatgt

SEQ ID NO: 3527627 - DNA, 25 bp, Homo sapien
cactcaatggtaaacactgtgctag

SEQ ID NO: 3527628 - DNA, 25 bp, Homo sapien
acttcaggtgctaagggagaataca

SEQ ID NO: 3527629 - DNA, 25 bp, Homo sapien
ggatttgaacctagaagcttccgac

SEQ ID NO: 3527630 - DNA, 25 bp, Homo sapien
gaaggatgctcagcttgagcagctt

SEQ ID NO: 3527631 - DNA, 25 bp, Homo sapien
gcatatttaggtgggataacacgaa

SEQ ID NO: 3527632 - DNA, 25 bp, Homo sapien
cagccttgggatacaaacactgact

SEQ ID NO: 3527633 - DNA, 25 bp, Homo sapien
taacacgaagaactgcaagagctga

SEQ ID NO: 3527634 - DNA, 25 bp, Homo sapien
ttaggaaaaacgcaagttcagcagt

SEQ ID NO: 3527635 - DNA, 25 bp, Homo sapien
gcactgctgatgtccctttaccata

SEQ ID NO: 3527636 - DNA, 25 bp, Homo sapien
gactcttctccgcttgctcaaattg

SEQ ID NO: 3527637 - DNA, 25 bp, Homo sapien
ttaagtgtctatggtgctgtttccc

SEQ ID NO: 3527638 - DNA, 25 bp, Homo sapien
ttcttttgggctactccaagcactg

SEQ ID NO: 3527639 - DNA, 25 bp, Homo sapien
gaatattccaccactcataattaac

SEQ ID NO: 3527640 - DNA, 25 bp, Homo sapien
tattccaccactcataattaactaa

SEQ ID NO: 3527641 - DNA, 25 bp, Homo sapien
ggaatattccaccactcataattaa

SEQ ID NO: 3527642 - DNA, 25 bp, Homo sapien
ccaccactcataattaactaaactt

SEQ ID NO: 3527643 - DNA, 25 bp, Homo sapien
gttctctggctttgatcactcctgc

SEQ ID NO: 3527644 - DNA, 25 bp, Homo sapien
agttctctggctttgatcactcctg

SEQ ID NO: 3527645 - DNA, 25 bp, Homo sapien
gaagggaatgacgaaggctctcttt

SEQ ID NO: 3527646 - DNA, 25 bp, Homo sapien
ggtgtatgactaggtgccaaggcaa

SEQ ID NO: 3527647 - DNA, 25 bp, Homo sapien
tacagttagagataaggccgtgcct

SEQ ID NO: 3527648 - DNA, 25 bp, Homo sapien
ggctcccttgcttcaggtacagtta

SEQ ID NO: 3527649 - DNA, 25 bp, Homo sapien
aggaagagagttgcttctatataag

SEQ ID NO: 3527650 - DNA, 25 bp, Homo sapien
ctgcaagtgaaggtgctaagggtct

SEQ ID NO: 3527651 - DNA, 25 bp, Homo sapien
gcaccactagatgtatgggctactg

SEQ ID NO: 3527652 - DNA, 25 bp, Homo sapien
tgaaggtgctaagggtctgtacaag

SEQ ID NO: 3527653 - DNA, 25 bp, Homo sapien
tgcgtgttcagctgcacctgccaga

SEQ ID NO: 3527654 - DNA, 25 bp, Homo sapien
catttatggataggcacagtgagcc

SEQ ID NO: 3527655 - DNA, 25 bp, Homo sapien
gtaatagggctcatttttgctgtcc

SEQ ID NO: 3527656 - DNA, 25 bp, Homo sapien
ggctgagcagctgatggcaatatct

SEQ ID NO: 3527657 - DNA, 25 bp, Homo sapien
agcttcttgccacaggtacatttca

SEQ ID NO: 3527658 - DNA, 25 bp, Homo sapien
cctgaacaagcttcttgccacaggt

SEQ ID NO: 3527659 - DNA, 25 bp, Homo sapien
tatagctgactcttctctagattgt

SEQ ID NO: 3527660 - DNA, 25 bp, Homo sapien
ttctctagattgtcctaagaaccct

SEQ ID NO: 3527661 - DNA, 25 bp, Homo sapien
tagattatcaatgaaacctcctttc

SEQ ID NO: 3527662 - DNA, 25 bp, Homo sapien
aacacaactttagctgcatttcgca

SEQ ID NO: 3527663 - DNA, 25 bp, Homo sapien
tttcatatcaacctgctatccttgc

SEQ ID NO: 3527664 - DNA, 25 bp, Homo sapien
tatgtcccctattgcatttactgac

SEQ ID NO: 3527665 - DNA, 25 bp, Homo sapien
tcataggagcttagtgaaggcaaac

SEQ ID NO: 3527666 - DNA, 25 bp, Homo sapien
tcacgtacagcagagcatgtagtta

SEQ ID NO: 3527667 - DNA, 25 bp, Homo sapien
gaagtgaacactcgaaagaactggt

SEQ ID NO: 3527668 - DNA, 25 bp, Homo sapien
tgtctctctgtcatctacttgacat

SEQ ID NO: 3527669 - DNA, 25 bp, Homo sapien
tggcagtttgccgtgaacataaaag

SEQ ID NO: 3527670 - DNA, 25 bp, Homo sapien
ggaacagtgcttacttcagggaaaa

SEQ ID NO: 3527671 - DNA, 25 bp, Homo sapien
tgaaatgaggatcgcttgtagctgg

SEQ ID NO: 3527672 - DNA, 25 bp, Homo sapien
ccttaaaggtcatggaacaatcatc

SEQ ID NO: 3527673 - DNA, 25 bp, Homo sapien
tcaaattagaggctggtctgaaatg

SEQ ID NO: 3527674 - DNA, 25 bp, Homo sapien
caaattagaggctggtctgaaatgg

SEQ ID NO: 3527675 - DNA, 25 bp, Homo sapien
ctgaaatgggccatcgaagaatttc

SEQ ID NO: 3527676 - DNA, 25 bp, Homo sapien
gccatcgaagaatttctactgctga

SEQ ID NO: 3527677 - DNA, 25 bp, Homo sapien
tgtggaacacttttcagggccaaat

SEQ ID NO: 3527678 - DNA, 25 bp, Homo sapien
gaacacttttcagggccaaatagaa

SEQ ID NO: 3527679 - DNA, 25 bp, Homo sapien
attttgacacatcttgaatccatgg

SEQ ID NO: 3527680 - DNA, 25 bp, Homo sapien
tccagttgtggaacacttttcaggg

SEQ ID NO: 3527681 - DNA, 25 bp, Homo sapien
catggtttcggtagatgaatagatt

SEQ ID NO: 3527682 - DNA, 25 bp, Homo sapien
gtgatattggtttgggtcatggttt

SEQ ID NO: 3527683 - DNA, 25 bp, Homo sapien
attggttcaagtctactatttctcc

SEQ ID NO: 3527684 - DNA, 25 bp, Homo sapien
tttggtccttattccgcatcctctc

SEQ ID NO: 3527685 - DNA, 25 bp, Homo sapien
gaaaccaacgaatgatccccagtac

SEQ ID NO: 3527686 - DNA, 25 bp, Homo sapien
gagtcgtccactgtggtcggagaac

SEQ ID NO: 3527687 - DNA, 25 bp, Homo sapien
gtttcttgaagccactggagtcgtc

SEQ ID NO: 3527688 - DNA, 25 bp, Homo sapien
cagggagggaaccttctgcattgct

SEQ ID NO: 3527689 - DNA, 25 bp, Homo sapien
caggcaaacagtggaaatgcacacc

SEQ ID NO: 3527690 - DNA, 25 bp, Homo sapien
ggtgacagtaacaggcaaacagtgg

SEQ ID NO: 3527691 - DNA, 25 bp, Homo sapien
gcaaacagtggaaatgcacaccatc

SEQ ID NO: 3527692 - DNA, 25 bp, Homo sapien
gggtgacagtaacaggcaaacagtg

SEQ ID NO: 3527693 - DNA, 25 bp, Homo sapien
tgcctttgaagaggttggcagttgt

SEQ ID NO: 3527694 - DNA, 25 bp, Homo sapien
cctttgaagaggttggcagttgtct

SEQ ID NO: 3527695 - DNA, 25 bp, Homo sapien
ctgtgtgacactgatgcaggaaaat

SEQ ID NO: 3527696 - DNA, 25 bp, Homo sapien
tgacactgatgcaggaaaattgcct

SEQ ID NO: 3527697 - DNA, 25 bp, Homo sapien
tcattattgttactgagagaggaca

SEQ ID NO: 3527698 - DNA, 25 bp, Homo sapien
cattattgttactgagagaggacag

SEQ ID NO: 3527699 - DNA, 25 bp, Homo sapien
attattgttactgagagaggacagc

SEQ ID NO: 3527700 - DNA, 25 bp, Homo sapien
ggctgagcctcaagttttgttgaga

SEQ ID NO: 3527701 - DNA, 25 bp, Homo sapien
caaaaagactggacctgatggagtt

SEQ ID NO: 3527702 - DNA, 25 bp, Homo sapien
cctgggcaatcttggatgaggcttt

SEQ ID NO: 3527703 - DNA, 25 bp, Homo sapien
gataagagcgtctggaaagtgggtg

SEQ ID NO: 3527704 - DNA, 25 bp, Homo sapien
ccctctggactaatagagataaggt

SEQ ID NO: 3527705 - DNA, 25 bp, Homo sapien
tagagataaggttggctttccggtc

SEQ ID NO: 3527706 - DNA, 25 bp, Homo sapien
gctttccggtcagccgtggactgca

SEQ ID NO: 3527707 - DNA, 25 bp, Homo sapien
caagatgttctatctttggacttgg

SEQ ID NO: 3527708 - DNA, 25 bp, Homo sapien
cagcgactgtgttagattcatgacc

SEQ ID NO: 3527709 - DNA, 25 bp, Homo sapien
gtgtgtcccactgacaatgctgtgt

SEQ ID NO: 3527710 - DNA, 25 bp, Homo sapien
ggcctttagttgtcgctgatgggaa

SEQ ID NO: 3527711 - DNA, 25 bp, Homo sapien
ccacaaccttgaattggcctttagt

SEQ ID NO: 3527712 - DNA, 25 bp, Homo sapien
cctctgggctgaacattgagatctg

SEQ ID NO: 3527713 - DNA, 25 bp, Homo sapien
catatgctgttatggtccagagaca

SEQ ID NO: 3527714 - DNA, 25 bp, Homo sapien
tcaagaaggctaacattggcacccc

SEQ ID NO: 3527715 - DNA, 25 bp, Homo sapien
gccagtggtgagctaaaaatctctc

SEQ ID NO: 3527716 - DNA, 25 bp, Homo sapien
tcgtatgcctgacgtgcaccaggga

SEQ ID NO: 3527717 - DNA, 25 bp, Homo sapien
ttcagcttttgtctcgaaggaggcc

SEQ ID NO: 3527718 - DNA, 25 bp, Homo sapien
gacactcaagattggccatcctggg

SEQ ID NO: 3527719 - DNA, 25 bp, Homo sapien
gaagttcaaccccagcaagattaaa

SEQ ID NO: 3527720 - DNA, 25 bp, Homo sapien
ctgtgtccaaaaaaacttggtaatg

SEQ ID NO: 3527721 - DNA, 25 bp, Homo sapien
aaacttggtaatgacattgccaagg

SEQ ID NO: 3527722 - DNA, 25 bp, Homo sapien
tgtccaaaaaaacttggtaatgaca

SEQ ID NO: 3527723 - DNA, 25 bp, Homo sapien
aaaaaacttggtaatgacattgcca

SEQ ID NO: 3527724 - DNA, 25 bp, Homo sapien
tgaccattcggtacagacagaccca

SEQ ID NO: 3527725 - DNA, 25 bp, Homo sapien
actgaccattcggtacagacagacc

SEQ ID NO: 3527726 - DNA, 25 bp, Homo sapien
ctgaccattcggtacagacagaccc

SEQ ID NO: 3527727 - DNA, 25 bp, Homo sapien
gatcctggggactgtcgagtctatg

SEQ ID NO: 3527728 - DNA, 25 bp, Homo sapien
tgccacggccatgatcataaaagtc

SEQ ID NO: 3527729 - DNA, 25 bp, Homo sapien
ttctgccacggccatgatcataaaa

SEQ ID NO: 3527730 - DNA, 25 bp, Homo sapien
cgagtctatgggctgtgatattgat

SEQ ID NO: 3527731 - DNA, 25 bp, Homo sapien
gcttgtttctctacagtcttgccaa

SEQ ID NO: 3527732 - DNA, 25 bp, Homo sapien
ccaaggatggttgtgccagtttgca

SEQ ID NO: 3527733 - DNA, 25 bp, Homo sapien
tcagtgtaggttcctagaactggaa

SEQ ID NO: 3527734 - DNA, 25 bp, Homo sapien
aagcattgccaaattatcaccaagg

SEQ ID NO: 3527735 - DNA, 25 bp, Homo sapien
tgccttctgtgctaaaggaattatc

SEQ ID NO: 3527736 - DNA, 25 bp, Homo sapien
gccttctgtgctaaaggaattatct

SEQ ID NO: 3527737 - DNA, 25 bp, Homo sapien
tctgccttctgtgctaaaggaatta

SEQ ID NO: 3527738 - DNA, 25 bp, Homo sapien
ttctgccttctgtgctaaaggaatt

SEQ ID NO: 3527739 - DNA, 25 bp, Homo sapien
gggatgccgaggcttagagaaggaa

SEQ ID NO: 3527740 - DNA, 25 bp, Homo sapien
ctgttggtaggggatgccgaggctt

SEQ ID NO: 3527741 - DNA, 25 bp, Homo sapien
gggactgttggtaggggatgccgag

SEQ ID NO: 3527742 - DNA, 25 bp, Homo sapien
atgccgaggcttagagaaggaatca

SEQ ID NO: 3527743 - DNA, 25 bp, Homo sapien
tctttgtcttcaccaaggagaggca

SEQ ID NO: 3527744 - DNA, 25 bp, Homo sapien
cagagccctcctccgcagtctttcc

SEQ ID NO: 3527745 - DNA, 25 bp, Homo sapien
tctttcctgttgtccaccaggtgag

SEQ ID NO: 3527746 - DNA, 25 bp, Homo sapien
gttgtccaccaggtgagcttccctg

SEQ ID NO: 3527747 - DNA, 25 bp, Homo sapien
tgaagacctaatcaccttgcatact

SEQ ID NO: 3527748 - DNA, 25 bp, Homo sapien
caagcacaggacttatgagtcaacc

SEQ ID NO: 3527749 - DNA, 25 bp, Homo sapien
ggcaggcatcacacagagtagaacg

SEQ ID NO: 3527750 - DNA, 25 bp, Homo sapien
ttttatcaatactctgtcctctgga

SEQ ID NO: 3527751 - DNA, 25 bp, Homo sapien
tgtaaatggacaatgggtgaagatt

SEQ ID NO: 3527752 - DNA, 25 bp, Homo sapien
taaactgcagataccaaattaaggt

SEQ ID NO: 3527753 - DNA, 25 bp, Homo sapien
catagaaataggttgaattaccagc

SEQ ID NO: 3527754 - DNA, 25 bp, Homo sapien
gacctcattcatgtagagtctcagt

SEQ ID NO: 3527755 - DNA, 25 bp, Homo sapien
tgtactccaaactacatcattcaag

SEQ ID NO: 3527756 - DNA, 25 bp, Homo sapien
gccagacatgtcctaaatctttgaa

SEQ ID NO: 3527757 - DNA, 25 bp, Homo sapien
tcaagatcaattacttaccattcat

SEQ ID NO: 3527758 - DNA, 25 bp, Homo sapien
acttctctggcttatagacatgtac

SEQ ID NO: 3527759 - DNA, 25 bp, Homo sapien
ataaatgaatttactgatacctttt

SEQ ID NO: 3527760 - DNA, 25 bp, Homo sapien
tgaatttactgatacctttttcctg

SEQ ID NO: 3527761 - DNA, 25 bp, Homo sapien
cctttttcctgtttatacatatcat

SEQ ID NO: 3527762 - DNA, 25 bp, Homo sapien
ttataaatgaatttactgatacctt

SEQ ID NO: 3527763 - DNA, 25 bp, Homo sapien
ccctggtgctgtggttaaggctagt

SEQ ID NO: 3527764 - DNA, 25 bp, Homo sapien
tcccatcacttggaaagaaacaggc

SEQ ID NO: 3527765 - DNA, 25 bp, Homo sapien
cacaggagggccttatgatatcatt

SEQ ID NO: 3527766 - DNA, 25 bp, Homo sapien
gatgtccagtgctgacctcaatcta

SEQ ID NO: 3527767 - DNA, 25 bp, Homo sapien
atgaaaagatatgtactgggtgtgc

SEQ ID NO: 3527768 - DNA, 25 bp, Homo sapien
tgagcctcatccctagaatagggct

SEQ ID NO: 3527769 - DNA, 25 bp, Homo sapien
caactgaaagaaggtcaattgtaat

SEQ ID NO: 3527770 - DNA, 25 bp, Homo sapien
ctaaaggaactatatccatagattc

SEQ ID NO: 3527771 - DNA, 25 bp, Homo sapien
caaatactacgaacaactgcagcgc

SEQ ID NO: 3527772 - DNA, 25 bp, Homo sapien
tgcagcgctactggcctggatataa

SEQ ID NO: 3527773 - DNA, 25 bp, Homo sapien
catattgtcacttcgctggagatac

SEQ ID NO: 3527774 - DNA, 25 bp, Homo sapien
ggaaaagcccatcacagacagattg

SEQ ID NO: 3527775 - DNA, 25 bp, Homo sapien
catggatatctcacttctttgggaa

SEQ ID NO: 3527776 - DNA, 25 bp, Homo sapien
cactgcagcttacgattagctctgg

SEQ ID NO: 3527777 - DNA, 25 bp, Homo sapien
taaaaacgtgagaagtacaatgcca

SEQ ID NO: 3527778 - DNA, 25 bp, Homo sapien
ccattcataagatgtgaaaccaaca

SEQ ID NO: 3527779 - DNA, 25 bp, Homo sapien
taggaagttgttatcctttgtacac

SEQ ID NO: 3527780 - DNA, 25 bp, Homo sapien
tttgtacaccttatttcaatttcgc

SEQ ID NO: 3527781 - DNA, 25 bp, Homo sapien
ttgtacaccttatttcaatttcgct

SEQ ID NO: 3527782 - DNA, 25 bp, Homo sapien
tgtacaccttatttcaatttcgctg

SEQ ID NO: 3527783 - DNA, 25 bp, Homo sapien
ccatacttcggcttctctcaaggaa

SEQ ID NO: 3527784 - DNA, 25 bp, Homo sapien
tgtcccaggatctctatgccatttg

SEQ ID NO: 3527785 - DNA, 25 bp, Homo sapien
gacagtagtagatcctaaagatgcc

SEQ ID NO: 3527786 - DNA, 25 bp, Homo sapien
taggtgaaaccttccaagttacatg

SEQ ID NO: 3527787 - DNA, 25 bp, Homo sapien
tagccatacccagaagaatacaagg

SEQ ID NO: 3527788 - DNA, 25 bp, Homo sapien
gaagctacttgggattgacactgcc

SEQ ID NO: 3527789 - DNA, 25 bp, Homo sapien
tcaggaggataccattatagcccag

SEQ ID NO: 3527790 - DNA, 25 bp, Homo sapien
gcaacaatcagaacgtggcacagct

SEQ ID NO: 3527791 - DNA, 25 bp, Homo sapien
gtagttgctacctaaacatgatagc

SEQ ID NO: 3527792 - DNA, 25 bp, Homo sapien
gttgctacctaaacatgatagccca

SEQ ID NO: 3527793 - DNA, 25 bp, Homo sapien
gctacctaaacatgatagcccattt

SEQ ID NO: 3527794 - DNA, 25 bp, Homo sapien
ctaaacatgatagcccatttataca

SEQ ID NO: 3527795 - DNA, 25 bp, Homo sapien
gatgcacctcatggtaactatggct

SEQ ID NO: 3527796 - DNA, 25 bp, Homo sapien
tgtaaggcaaccctaattcaggaag

SEQ ID NO: 3527797 - DNA, 25 bp, Homo sapien
ctgtggctgtgcttcctaatggaaa

SEQ ID NO: 3527798 - DNA, 25 bp, Homo sapien
tgaggaggagtcgacaaaaacccac

SEQ ID NO: 3527799 - DNA, 25 bp, Homo sapien
tcctatccttatgaagagaggcttg

SEQ ID NO: 3527800 - DNA, 25 bp, Homo sapien
gagaggcttgttacggttcctaagc

SEQ ID NO: 3527801 - DNA, 25 bp, Homo sapien
tgcaaagaatgatagccaaactggg

SEQ ID NO: 3527802 - DNA, 25 bp, Homo sapien
aacaataccgctgctgctttcgagg

SEQ ID NO: 3527803 - DNA, 25 bp, Homo sapien
tctgaaaggcattactgatgttgca

SEQ ID NO: 3527804 - DNA, 25 bp, Homo sapien
ggacgaaactaccatcctccaccat

SEQ ID NO: 3527805 - DNA, 25 bp, Homo sapien
tccccaggacgaaactaccatcctc

SEQ ID NO: 3527806 - DNA, 25 bp, Homo sapien
gatgttgcatatgaataaatccctc

SEQ ID NO: 3527807 - DNA, 25 bp, Homo sapien
cccatattgaaaaggagtctgcatg

SEQ ID NO: 3527808 - DNA, 25 bp, Homo sapien
cgaagattgcatcgacacacagtgc

SEQ ID NO: 3527809 - DNA, 25 bp, Homo sapien
tggctgtcctttggcgaacactaac

SEQ ID NO: 3527810 - DNA, 25 bp, Homo sapien
gaagattgctataaattgggaccac

SEQ ID NO: 3527811 - DNA, 25 bp, Homo sapien
taaccgtcggtcatgatgccataac

SEQ ID NO: 3527812 - DNA, 25 bp, Homo sapien
cattgatgtacgttgtgtaaccgtc

SEQ ID NO: 3527813 - DNA, 25 bp, Homo sapien
tacacgtcgaggcattgatgtacgt

SEQ ID NO: 3527814 - DNA, 25 bp, Homo sapien
ttggtcggttgaaagctgactgtac

SEQ ID NO: 3527815 - DNA, 25 bp, Homo sapien
agtaatataaggattactcctcagg

SEQ ID NO: 3527816 - DNA, 25 bp, Homo sapien
cagttgagcctcctcagatataatg

SEQ ID NO: 3527817 - DNA, 25 bp, Homo sapien
gaagctactgcccaattttactcta

SEQ ID NO: 3527818 - DNA, 25 bp, Homo sapien
ggagagcgtgtcacatttactgtaa

SEQ ID NO: 3527819 - DNA, 25 bp, Homo sapien
caagcgtgtgtaactgggaaaatct

SEQ ID NO: 3527820 - DNA, 25 bp, Homo sapien
gtaaacacggccattgcacacaagc

SEQ ID NO: 3527821 - DNA, 25 bp, Homo sapien
aaggcaggtcggagaaaacccagat

SEQ ID NO: 3527822 - DNA, 25 bp, Homo sapien
ctagagagaatatagcggctgccca

SEQ ID NO: 3527823 - DNA, 25 bp, Homo sapien
ttgggccggactcgcctctgaaccg

SEQ ID NO: 3527824 - DNA, 25 bp, Homo sapien
ggactcgcctctgaaccgtgtttaa

SEQ ID NO: 3527825 - DNA, 25 bp, Homo sapien
catggagcttgggccggactcgcct

SEQ ID NO: 3527826 - DNA, 25 bp, Homo sapien
gcctctgaaccgtgtttaacagctc

SEQ ID NO: 3527827 - DNA, 25 bp, Homo sapien
ctagaggaggtccatgtgtcatgag

SEQ ID NO: 3527828 - DNA, 25 bp, Homo sapien
tctgggtaggttaaagccccatcca

SEQ ID NO: 3527829 - DNA, 25 bp, Homo sapien
tgtcatgagtatgtcaatgccctca

SEQ ID NO: 3527830 - DNA, 25 bp, Homo sapien
catgagtatgtcaatgccctcaggg

SEQ ID NO: 3527831 - DNA, 25 bp, Homo sapien
ggcatacatgtaacagacaagtcgg

SEQ ID NO: 3527832 - DNA, 25 bp, Homo sapien
gatggtttgaataccctggagtgag

SEQ ID NO: 3527833 - DNA, 25 bp, Homo sapien
tgtgtataaagtgaccctaaccttg

SEQ ID NO: 3527834 - DNA, 25 bp, Homo sapien
gccaaatgaaagaggtaaacctgtg

SEQ ID NO: 3527835 - DNA, 25 bp, Homo sapien
ctacaacgtctgagctgcctataaa

SEQ ID NO: 3527836 - DNA, 25 bp, Homo sapien
tctgagctgcctataaaatgcaggg

SEQ ID NO: 3527837 - DNA, 25 bp, Homo sapien
aacgtctgagctgcctataaaatgc

SEQ ID NO: 3527838 - DNA, 25 bp, Homo sapien
ctgcctataaaatgcagggacctgg

SEQ ID NO: 3527839 - DNA, 25 bp, Homo sapien
aagctggcacttgatgatctttcca

SEQ ID NO: 3527840 - DNA, 25 bp, Homo sapien
tttccaacctgcacctctgaacaca

SEQ ID NO: 3527841 - DNA, 25 bp, Homo sapien
ggccaaagctggcacttgatgatct

SEQ ID NO: 3527842 - DNA, 25 bp, Homo sapien
acctctgaacacagctggccaaagc

SEQ ID NO: 3527843 - DNA, 25 bp, Homo sapien
gcttgtgagggaccaagtctagtgt

SEQ ID NO: 3527844 - DNA, 25 bp, Homo sapien
gggaccaagtctagtgtgagagaaa

SEQ ID NO: 3527845 - DNA, 25 bp, Homo sapien
agggaccaagtctagtgtgagagaa

SEQ ID NO: 3527846 - DNA, 25 bp, Homo sapien
ctaaactgcttgtgagggaccaagt

SEQ ID NO: 3527847 - DNA, 25 bp, Homo sapien
ctgagctggctgcatcaaaaagact

SEQ ID NO: 3527848 - DNA, 25 bp, Homo sapien
gcatcaaaaagacttgggttcttat

SEQ ID NO: 3527849 - DNA, 25 bp, Homo sapien
catcaaaaagacttgggttcttatt

SEQ ID NO: 3527850 - DNA, 25 bp, Homo sapien
cctgagctggctgcatcaaaaagac

SEQ ID NO: 3527851 - DNA, 25 bp, Homo sapien
cagctgtgctcggatttggcacaga

SEQ ID NO: 3527852 - DNA, 25 bp, Homo sapien
agggattacagcttggaagccttgg

SEQ ID NO: 3527853 - DNA, 25 bp, Homo sapien
tctgcagggattacagcttggaagc

SEQ ID NO: 3527854 - DNA, 25 bp, Homo sapien
gctgtgctcggatttggcacagaag

SEQ ID NO: 3527855 - DNA, 25 bp, Homo sapien
atcaccagctcatccacaatagccc

SEQ ID NO: 3527856 - DNA, 25 bp, Homo sapien
catcaccagctcatccacaatagcc

SEQ ID NO: 3527857 - DNA, 25 bp, Homo sapien
tctctggaaagtgggttataactgc

SEQ ID NO: 3527858 - DNA, 25 bp, Homo sapien
ttgcgagtgcattcctaacaggccc

SEQ ID NO: 3527859 - DNA, 25 bp, Homo sapien
cagtgttttagaaggcgagggacca

SEQ ID NO: 3527860 - DNA, 25 bp, Homo sapien
gggccaggacaatgtgtcagaatca

SEQ ID NO: 3527861 - DNA, 25 bp, Homo sapien
tctaacaaggtctcaagagatgcag

SEQ ID NO: 3527862 - DNA, 25 bp, Homo sapien
ttagacatcagtcacttgaagccac

SEQ ID NO: 3527863 - DNA, 25 bp, Homo sapien
gctgtatctccaatagtccctgcca

SEQ ID NO: 3527864 - DNA, 25 bp, Homo sapien
ggatggagccaaagaacttgcactt

SEQ ID NO: 3527865 - DNA, 25 bp, Homo sapien
ccagactgtcataattctgggttga

SEQ ID NO: 3527866 - DNA, 25 bp, Homo sapien
cccaggagttattgctggaaacaca

SEQ ID NO: 3527867 - DNA, 25 bp, Homo sapien
aagtagcagtttattctcctcctaa

SEQ ID NO: 3527868 - DNA, 25 bp, Homo sapien
aaacacatgctttccaatgctgctg

SEQ ID NO: 3527869 - DNA, 25 bp, Homo sapien
cacctcagggctgaaacaagaaata

SEQ ID NO: 3527870 - DNA, 25 bp, Homo sapien
gatgacctaattccatgatggctaa

SEQ ID NO: 3527871 - DNA, 25 bp, Homo sapien
cagcccctgcactaccttaattaaa

SEQ ID NO: 3527872 - DNA, 25 bp, Homo sapien
caccatgtttaatatggaaccagcc

SEQ ID NO: 3527873 - DNA, 25 bp, Homo sapien
ctgggtatgtaagactggcagagct

SEQ ID NO: 3527874 - DNA, 25 bp, Homo sapien
aatgtccactaggagactccccggg

SEQ ID NO: 3527875 - DNA, 25 bp, Homo sapien
tattcaagggatttgcattccagtc

SEQ ID NO: 3527876 - DNA, 25 bp, Homo sapien
gcagagctggaatgttgttcaaccc

SEQ ID NO: 3527877 - DNA, 25 bp, Homo sapien
ccagctcaatgcaattgtgggcaag

SEQ ID NO: 3527878 - DNA, 25 bp, Homo sapien
tggagacagcagacctatgccctag

SEQ ID NO: 3527879 - DNA, 25 bp, Homo sapien
tggaatcacaccaattaattcggcc

SEQ ID NO: 3527880 - DNA, 25 bp, Homo sapien
ttttcaggtgtctgcgaatgactgc

SEQ ID NO: 3527881 - DNA, 25 bp, Homo sapien
gatctggcttaaacacgatcgtgtc

SEQ ID NO: 3527882 - DNA, 25 bp, Homo sapien
gcactgccaagggtccacagttgag

SEQ ID NO: 3527883 - DNA, 25 bp, Homo sapien
ccttcaagatctggcttaaacacga

SEQ ID NO: 3527884 - DNA, 25 bp, Homo sapien
aaacacgatcgtgtctgtgggccct

SEQ ID NO: 3527885 - DNA, 25 bp, Homo sapien
ctattcaagactgttagggcctctt

SEQ ID NO: 3527886 - DNA, 25 bp, Homo sapien
tctgtgatagagaatctagcgatca

SEQ ID NO: 3527887 - DNA, 25 bp, Homo sapien
ccaaagggtggagaagcataaggtt

SEQ ID NO: 3527888 - DNA, 25 bp, Homo sapien
cctctttcaggtagttgtcagtgcc

SEQ ID NO: 3527889 - DNA, 25 bp, Homo sapien
tctgcaagattgacatagtgacgct

SEQ ID NO: 3527890 - DNA, 25 bp, Homo sapien
ctctgggcacatgcagcactcgtta

SEQ ID NO: 3527891 - DNA, 25 bp, Homo sapien
tagtgacgctttgaccaagaggctc

SEQ ID NO: 3527892 - DNA, 25 bp, Homo sapien
gttaacctgacagccgttctgctct

SEQ ID NO: 3527893 - DNA, 25 bp, Homo sapien
tcaccctgggtgctaaagtgccaat

SEQ ID NO: 3527894 - DNA, 25 bp, Homo sapien
tgagatcagagagtacaaccttgcc

SEQ ID NO: 3527895 - DNA, 25 bp, Homo sapien
ctgaggcactgggttaacaagcact

SEQ ID NO: 3527896 - DNA, 25 bp, Homo sapien
caattctagggataaatacgccacc

SEQ ID NO: 3527897 - DNA, 25 bp, Homo sapien
gaaaactttgctacgttctaggaga

SEQ ID NO: 3527898 - DNA, 25 bp, Homo sapien
ctttgctacgttctaggagattatc

SEQ ID NO: 3527899 - DNA, 25 bp, Homo sapien
atgaaaactttgctacgttctagga

SEQ ID NO: 3527900 - DNA, 25 bp, Homo sapien
aactttgctacgttctaggagatta

SEQ ID NO: 3527901 - DNA, 25 bp, Homo sapien
atagacttatcttccccctttgaat

SEQ ID NO: 3527902 - DNA, 25 bp, Homo sapien
ccttatcagttcaggaagaaatttc

SEQ ID NO: 3527903 - DNA, 25 bp, Homo sapien
atcagttcaggaagaaatttctgca

SEQ ID NO: 3527904 - DNA, 25 bp, Homo sapien
tatcagttcaggaagaaatttctgc

SEQ ID NO: 3527905 - DNA, 25 bp, Homo sapien
cttccttatcagttcaggaagaaat

SEQ ID NO: 3527906 - DNA, 25 bp, Homo sapien
aaatatgttcccctagactatgttc

SEQ ID NO: 3527907 - DNA, 25 bp, Homo sapien
cataatatccagatttataggttga

SEQ ID NO: 3527908 - DNA, 25 bp, Homo sapien
tccccaagactatggaccacatttt

SEQ ID NO: 3527909 - DNA, 25 bp, Homo sapien
tagtgggttgtaagactcctttatg

SEQ ID NO: 3527910 - DNA, 25 bp, Homo sapien
tgaaccacagcctgacaaggagaac

SEQ ID NO: 3527911 - DNA, 25 bp, Homo sapien
gtttaaagcaaaccgagcagcctga

SEQ ID NO: 3527912 - DNA, 25 bp, Homo sapien
caaggagaacacattaagctcttga

SEQ ID NO: 3527913 - DNA, 25 bp, Homo sapien
tcaccatctggtcccgtttaaagca

SEQ ID NO: 3527914 - DNA, 25 bp, Homo sapien
aatcttgaacggcacatacagtgtg

SEQ ID NO: 3527915 - DNA, 25 bp, Homo sapien
aaattcgctcgtctctcatgggcct

SEQ ID NO: 3527916 - DNA, 25 bp, Homo sapien
tgaatgtagcaaggcactcaatacc

SEQ ID NO: 3527917 - DNA, 25 bp, Homo sapien
ctgtggtttacaggctagccaaact

SEQ ID NO: 3527918 - DNA, 25 bp, Homo sapien
tgcattctgctaaacccagaaactt

SEQ ID NO: 3527919 - DNA, 25 bp, Homo sapien
ccagaaacttcaaagtttgacactc

SEQ ID NO: 3527920 - DNA, 25 bp, Homo sapien
tagtcaccatccaagattactttta

SEQ ID NO: 3527921 - DNA, 25 bp, Homo sapien
caaagtttgacactcacttggtgtt

SEQ ID NO: 3527922 - DNA, 25 bp, Homo sapien
tagcttccgaccaatctcaaacttg

SEQ ID NO: 3527923 - DNA, 25 bp, Homo sapien
agccttgaagcgacggtctctgtaa

SEQ ID NO: 3527924 - DNA, 25 bp, Homo sapien
ctgtaactaagagtgatttctagag

SEQ ID NO: 3527925 - DNA, 25 bp, Homo sapien
caccaactactttgactgcagcctt

SEQ ID NO: 3527926 - DNA, 25 bp, Homo sapien
gttctctgagtgaaatacaccatcc

SEQ ID NO: 3527927 - DNA, 25 bp, Homo sapien
aagaattgttgtgagccccaaatga

SEQ ID NO: 3527928 - DNA, 25 bp, Homo sapien
gctctctcagaatgtgcaggcaaaa

SEQ ID NO: 3527929 - DNA, 25 bp, Homo sapien
tgttggtctctgtcaaaaggaggca

SEQ ID NO: 3527930 - DNA, 25 bp, Homo sapien
aacatctgacgctttcctgacagag

SEQ ID NO: 3527931 - DNA, 25 bp, Homo sapien
tcaagaacttgaagactgtcagcaa

SEQ ID NO: 3527932 - DNA, 25 bp, Homo sapien
cagaacaagggaaatgtgagcaacc

SEQ ID NO: 3527933 - DNA, 25 bp, Homo sapien
gccattttagaattgcactgcctag

SEQ ID NO: 3527934 - DNA, 25 bp, Homo sapien
agcctagagatcaaattcctggaca

SEQ ID NO: 3527935 - DNA, 25 bp, Homo sapien
gtccactctaacgtgaaaaaatgtg

SEQ ID NO: 3527936 - DNA, 25 bp, Homo sapien
ggaaagccccactcatattcattaa

SEQ ID NO: 3527937 - DNA, 25 bp, Homo sapien
gttcctgaccctttggtcagcctag

SEQ ID NO: 3527938 - DNA, 25 bp, Homo sapien
ttttaaaaccactagcggtatcagc

SEQ ID NO: 3527939 - DNA, 25 bp, Homo sapien
atatcagggttcttattttgatttc

SEQ ID NO: 3527940 - DNA, 25 bp, Homo sapien
actagcggtatcagcaatgcagaac

SEQ ID NO: 3527941 - DNA, 25 bp, Homo sapien
ctgtgaatccttaatatcagggttc

SEQ ID NO: 3527942 - DNA, 25 bp, Homo sapien
cagtccttctggataccaactcgta

SEQ ID NO: 3527943 - DNA, 25 bp, Homo sapien
gtccttctggataccaactcgtaaa

SEQ ID NO: 3527944 - DNA, 25 bp, Homo sapien
tccttctggataccaactcgtaaag

SEQ ID NO: 3527945 - DNA, 25 bp, Homo sapien
agtccttctggataccaactcgtaa

SEQ ID NO: 3527946 - DNA, 25 bp, Homo sapien
ctgagctgtgttttcttggtactga

SEQ ID NO: 3527947 - DNA, 25 bp, Homo sapien
ttgttggaaatacagcaataaggtt

SEQ ID NO: 3527948 - DNA, 25 bp, Homo sapien
tttaaagcatctaaatctgagctgt

SEQ ID NO: 3527949 - DNA, 25 bp, Homo sapien
ttggaaatacagcaataaggtttcc

SEQ ID NO: 3527950 - DNA, 25 bp, Homo sapien
ggtgcaccgtatatcctgaatccct

SEQ ID NO: 3527951 - DNA, 25 bp, Homo sapien
caaggtgcaccgtatatcctgaatc

SEQ ID NO: 3527952 - DNA, 25 bp, Homo sapien
caccgtatatcctgaatcccttcac

SEQ ID NO: 3527953 - DNA, 25 bp, Homo sapien
gtgcaccgtatatcctgaatccctt

SEQ ID NO: 3527954 - DNA, 25 bp, Homo sapien
ctccgaatcttgtaagtaaatactg

SEQ ID NO: 3527955 - DNA, 25 bp, Homo sapien
aagtcctctggtttcaatttggaca

SEQ ID NO: 3527956 - DNA, 25 bp, Homo sapien
tagtcctgtttaacaaggtctgcca

SEQ ID NO: 3527957 - DNA, 25 bp, Homo sapien
aaatactgtttgtcaggagggactg

SEQ ID NO: 3527958 - DNA, 25 bp, Homo sapien
ttcccagcaatcactattttatatt

SEQ ID NO: 3527959 - DNA, 25 bp, Homo sapien
tcagttcatgattcccagcaatcac

SEQ ID NO: 3527960 - DNA, 25 bp, Homo sapien
aaatgtcagttcatgattcccagca

SEQ ID NO: 3527961 - DNA, 25 bp, Homo sapien
tcaaatgtcagttcatgattcccag

SEQ ID NO: 3527962 - DNA, 25 bp, Homo sapien
agtctcaatgatttcattaaggaaa

SEQ ID NO: 3527963 - DNA, 25 bp, Homo sapien
ccagagtctcaatgatttcattaag

SEQ ID NO: 3527964 - DNA, 25 bp, Homo sapien
caagccagagtctcaatgatttcat

SEQ ID NO: 3527965 - DNA, 25 bp, Homo sapien
cagcaagccagagtctcaatgattt

SEQ ID NO: 3527966 - DNA, 25 bp, Homo sapien
gtcacactgtagttgcccagttccc

SEQ ID NO: 3527967 - DNA, 25 bp, Homo sapien
tacaagtcacactgtagttgcccag

SEQ ID NO: 3527968 - DNA, 25 bp, Homo sapien
ctgtacaagtcacactgtagttgcc

SEQ ID NO: 3527969 - DNA, 25 bp, Homo sapien
caagtcacactgtagttgcccagtt

SEQ ID NO: 3527970 - DNA, 25 bp, Homo sapien
ttatgagattgtctgacatattttc

SEQ ID NO: 3527971 - DNA, 25 bp, Homo sapien
gttatgagattgtctgacatatttt

SEQ ID NO: 3527972 - DNA, 25 bp, Homo sapien
tatgagattgtctgacatattttct

SEQ ID NO: 3527973 - DNA, 25 bp, Homo sapien
gctgacaaatctcctgttacttgac

SEQ ID NO: 3527974 - DNA, 25 bp, Homo sapien
cagggcagctgacaaatctcctgtt

SEQ ID NO: 3527975 - DNA, 25 bp, Homo sapien
caaatctcctgttacttgacggcat

SEQ ID NO: 3527976 - DNA, 25 bp, Homo sapien
gggcagctgacaaatctcctgttac

SEQ ID NO: 3527977 - DNA, 25 bp, Homo sapien
gggtcattctacttggccaccattg

SEQ ID NO: 3527978 - DNA, 25 bp, Homo sapien
tgtgacctcagacattcagtggcct

SEQ ID NO: 3527979 - DNA, 25 bp, Homo sapien
tatgagaactctattgtcattgggc

SEQ ID NO: 3527980 - DNA, 25 bp, Homo sapien
gaagatgtcctcatgactagggcca

SEQ ID NO: 3527981 - DNA, 25 bp, Homo sapien
tttattagatatgactgttaggtaa

SEQ ID NO: 3527982 - DNA, 25 bp, Homo sapien
tgattctttgggaagtgccaggtac

SEQ ID NO: 3527983 - DNA, 25 bp, Homo sapien
ttagatatgactgttaggtaatcat

SEQ ID NO: 3527984 - DNA, 25 bp, Homo sapien
tctttgggaagtgccaggtacttta

SEQ ID NO: 3527985 - DNA, 25 bp, Homo sapien
caggtagggccactgtgtcaccgtt

SEQ ID NO: 3527986 - DNA, 25 bp, Homo sapien
tagggccactgtgtcaccgttttct

SEQ ID NO: 3527987 - DNA, 25 bp, Homo sapien
ctatgtaagtttggtctggggtact

SEQ ID NO: 3527988 - DNA, 25 bp, Homo sapien
gccaggtagggccactgtgtcaccg

SEQ ID NO: 3527989 - DNA, 25 bp, Homo sapien
gttgcacaggcagagtgggccacag

SEQ ID NO: 3527990 - DNA, 25 bp, Homo sapien
tgcacaggcagagtgggccacaggc

SEQ ID NO: 3527991 - DNA, 25 bp, Homo sapien
ctgttgcacaggcagagtgggccac

SEQ ID NO: 3527992 - DNA, 25 bp, Homo sapien
gagtgggccacaggccagcaggtcg

SEQ ID NO: 3527993 - DNA, 25 bp, Homo sapien
taaatctttgacaataagaagccac

SEQ ID NO: 3527994 - DNA, 25 bp, Homo sapien
tgtccctctgaccctagactagatg

SEQ ID NO: 3527995 - DNA, 25 bp, Homo sapien
catatactctggcaataaatctttg

SEQ ID NO: 3527996 - DNA, 25 bp, Homo sapien
cacaggttgtctgggcaaatggagg

SEQ ID NO: 3527997 - DNA, 25 bp, Homo sapien
ttaactgctaatagttcatggatga

SEQ ID NO: 3527998 - DNA, 25 bp, Homo sapien
tttaactgctaatagttcatggatg

SEQ ID NO: 3527999 - DNA, 25 bp, Homo sapien
ttttaactgctaatagttcatggat

SEQ ID NO: 3528000 - DNA, 25 bp, Homo sapien
cagaattggattaaagctagacacc

SEQ ID NO: 3528001 - DNA, 25 bp, Homo sapien
gggccgccagaacgcaatcattcct

SEQ ID NO: 3528002 - DNA, 25 bp, Homo sapien
tagacaccaccgcatatcatacgag

SEQ ID NO: 3528003 - DNA, 25 bp, Homo sapien
tcaattaggacgcagtgagtgacac

SEQ ID NO: 3528004 - DNA, 25 bp, Homo sapien
tcccagctcggtgaaatcgcctgtg

SEQ ID NO: 3528005 - DNA, 25 bp, Homo sapien
ggcagtcccagctcggtgaaatcgc

SEQ ID NO: 3528006 - DNA, 25 bp, Homo sapien
agggcagtcccagctcggtgaaatc

SEQ ID NO: 3528007 - DNA, 25 bp, Homo sapien
agctcggtgaaatcgcctgtgtgga

SEQ ID NO: 3528008 - DNA, 25 bp, Homo sapien
tctgagatgcagacaaaccgcgtgt

SEQ ID NO: 3528009 - DNA, 25 bp, Homo sapien
caaaccgcgtgtggcccgctggttt

SEQ ID NO: 3528010 - DNA, 25 bp, Homo sapien
agatgcagacaaaccgcgtgtggcc

SEQ ID NO: 3528011 - DNA, 25 bp, Homo sapien
agtgtgtgtctgagatgcagacaaa

SEQ ID NO: 3528012 - DNA, 25 bp, Homo sapien
ctaaagtagacataacagatcccat

SEQ ID NO: 3528013 - DNA, 25 bp, Homo sapien
tagacataacagatcccataacagt

SEQ ID NO: 3528014 - DNA, 25 bp, Homo sapien
ataacagatcccataacagttaaac

SEQ ID NO: 3528015 - DNA, 25 bp, Homo sapien
aacagatcccataacagttaaacat

SEQ ID NO: 3528016 - DNA, 25 bp, Homo sapien
tgtttatgctgctgagttctcaaat

SEQ ID NO: 3528017 - DNA, 25 bp, Homo sapien
atgctgctgagttctcaaatgacct

SEQ ID NO: 3528018 - DNA, 25 bp, Homo sapien
tatgctgctgagttctcaaatgacc

SEQ ID NO: 3528019 - DNA, 25 bp, Homo sapien
tttatgctgctgagttctcaaatga

SEQ ID NO: 3528020 - DNA, 25 bp, Homo sapien
cctacctgtgtaccaggtaccctgg

SEQ ID NO: 3528021 - DNA, 25 bp, Homo sapien
gatggttccctcaaggattctgcca

SEQ ID NO: 3528022 - DNA, 25 bp, Homo sapien
accaggtaccctggtatgtataaag

SEQ ID NO: 3528023 - DNA, 25 bp, Homo sapien
caataaccatgtcttaagcacctac

SEQ ID NO: 3528024 - DNA, 25 bp, Homo sapien
ctgttccgtggaggcaatgtgattc

SEQ ID NO: 3528025 - DNA, 25 bp, Homo sapien
ctggggctggcgctgttccgtggag

SEQ ID NO: 3528026 - DNA, 25 bp, Homo sapien
ggctggcgctgttccgtggaggcaa

SEQ ID NO: 3528027 - DNA, 25 bp, Homo sapien
tggcgctgttccgtggaggcaatgt

SEQ ID NO: 3528028 - DNA, 25 bp, Homo sapien
aaatgcaataaaatctcccgccagg

SEQ ID NO: 3528029 - DNA, 25 bp, Homo sapien
atgcaataaaatctcccgccaggtc

SEQ ID NO: 3528030 - DNA, 25 bp, Homo sapien
gaaaaaatgcaataaaatctcccgc

SEQ ID NO: 3528031 - DNA, 25 bp, Homo sapien
ccaggtccagttcaggccccttcat

SEQ ID NO: 3528032 - DNA, 25 bp, Homo sapien
gaaggatctagtttcaaagtgcagc

SEQ ID NO: 3528033 - DNA, 25 bp, Homo sapien
ttcaaatagtccacaaacctggtcc

SEQ ID NO: 3528034 - DNA, 25 bp, Homo sapien
gaatctataggaacccaacgggatc

SEQ ID NO: 3528035 - DNA, 25 bp, Homo sapien
ccaaagggcattttgtatcaagcac

SEQ ID NO: 3528036 - DNA, 25 bp, Homo sapien
actcccacaaccaagcaaaaatgca

SEQ ID NO: 3528037 - DNA, 25 bp, Homo sapien
tcccacaaccaagcaaaaatgcaat

SEQ ID NO: 3528038 - DNA, 25 bp, Homo sapien
agcccataaggccagaagatgctgc

SEQ ID NO: 3528039 - DNA, 25 bp, Homo sapien
tggagcccataaggccagaagatgc

SEQ ID NO: 3528040 - DNA, 25 bp, Homo sapien
caaaagagtggtagaaacaggagga

SEQ ID NO: 3528041 - DNA, 25 bp, Homo sapien
tctttcacgtttgggagaagaatca

SEQ ID NO: 3528042 - DNA, 25 bp, Homo sapien
cgtttgggagaagaatcaaacctga

SEQ ID NO: 3528043 - DNA, 25 bp, Homo sapien
tcacgtttgggagaagaatcaaacc

SEQ ID NO: 3528044 - DNA, 25 bp, Homo sapien
ttgggagaagaatcaaacctgatgc

SEQ ID NO: 3528045 - DNA, 25 bp, Homo sapien
taaagtcaagcccaaggtcaggaca

SEQ ID NO: 3528046 - DNA, 25 bp, Homo sapien
catctccctgttgactgaagtctag

SEQ ID NO: 3528047 - DNA, 25 bp, Homo sapien
gacctgctcccggtgctaaagtcaa

SEQ ID NO: 3528048 - DNA, 25 bp, Homo sapien
caaaatagcgtagactgggtagctc

SEQ ID NO: 3528049 - DNA, 25 bp, Homo sapien
tagagaagcttatattcttgatttg

SEQ ID NO: 3528050 - DNA, 25 bp, Homo sapien
agctctgaggcttaataaaaacttg

SEQ ID NO: 3528051 - DNA, 25 bp, Homo sapien
aatcaactagagaagcttatattct

SEQ ID NO: 3528052 - DNA, 25 bp, Homo sapien
tcctctttgcagagttagtgtttcc

SEQ ID NO: 3528053 - DNA, 25 bp, Homo sapien
agcttgtgacttggacatgccccga

SEQ ID NO: 3528054 - DNA, 25 bp, Homo sapien
gactcgctctccagaatatacttgc

SEQ ID NO: 3528055 - DNA, 25 bp, Homo sapien
tcttccaggagtggtaaaaacagtc

SEQ ID NO: 3528056 - DNA, 25 bp, Homo sapien
ctcatagagaatgagcaccaggcct

SEQ ID NO: 3528057 - DNA, 25 bp, Homo sapien
cacgtttcactagcaacaggcaaga

SEQ ID NO: 3528058 - DNA, 25 bp, Homo sapien
tatttcccagctgaatgtaaagggc

SEQ ID NO: 3528059 - DNA, 25 bp, Homo sapien
tgagtcctgtagcatgcagcacacg

SEQ ID NO: 3528060 - DNA, 25 bp, Homo sapien
gtcaggagtctcaggcaaattcgct

SEQ ID NO: 3528061 - DNA, 25 bp, Homo sapien
gttgatgttgtagtgcgtgaatgcc

SEQ ID NO: 3528062 - DNA, 25 bp, Homo sapien
tgatgttgtagtgcgtgaatgcctg

SEQ ID NO: 3528063 - DNA, 25 bp, Homo sapien
gagctgtactcatccaccgttatgg

SEQ ID NO: 3528064 - DNA, 25 bp, Homo sapien
accgttatggtaactttgccttgag

SEQ ID NO: 3528065 - DNA, 25 bp, Homo sapien
aaagatggaagcaggcatggtgcgt

SEQ ID NO: 3528066 - DNA, 25 bp, Homo sapien
aagatggaagcaggcatggtgcgtt

SEQ ID NO: 3528067 - DNA, 25 bp, Homo sapien
tactcatcaataccgctgtgcattt

SEQ ID NO: 3528068 - DNA, 25 bp, Homo sapien
tctactcatcaataccgctgtgcat

SEQ ID NO: 3528069 - DNA, 25 bp, Homo sapien
caaggatctactcatcaataccgct

SEQ ID NO: 3528070 - DNA, 25 bp, Homo sapien
ggatctactcatcaataccgctgtg

SEQ ID NO: 3528071 - DNA, 25 bp, Homo sapien
cgcaaaactgcataattgcgtcgcg

SEQ ID NO: 3528072 - DNA, 25 bp, Homo sapien
taccgagacactactgaagcgcaaa

SEQ ID NO: 3528073 - DNA, 25 bp, Homo sapien
gcagtcctgttctaagtactgtaat

SEQ ID NO: 3528074 - DNA, 25 bp, Homo sapien
tgcataacagtaaaacacaacacct

SEQ ID NO: 3528075 - DNA, 25 bp, Homo sapien
gtttcatcgaaacagtgcacctgca

SEQ ID NO: 3528076 - DNA, 25 bp, Homo sapien
cacaggcccctgtaactctgaaagg

SEQ ID NO: 3528077 - DNA, 25 bp, Homo sapien
aaggctaaatgggtggctggcacct

SEQ ID NO: 3528078 - DNA, 25 bp, Homo sapien
tcttttcatcagcaagcacaggccc

SEQ ID NO: 3528079 - DNA, 25 bp, Homo sapien
gagcctggcgggactttggaacttg

SEQ ID NO: 3528080 - DNA, 25 bp, Homo sapien
agcctggcgggactttggaacttgc

SEQ ID NO: 3528081 - DNA, 25 bp, Homo sapien
cgagcctggcgggactttggaactt

SEQ ID NO: 3528082 - DNA, 25 bp, Homo sapien
tgctccaaatccgccaaatttcgct

SEQ ID NO: 3528083 - DNA, 25 bp, Homo sapien
ctctgccgcgcagatccagtgcgtt

SEQ ID NO: 3528084 - DNA, 25 bp, Homo sapien
agtgcgttcttaattcacgccccta

SEQ ID NO: 3528085 - DNA, 25 bp, Homo sapien
aattcacgcccctactcttttatgc

SEQ ID NO: 3528086 - DNA, 25 bp, Homo sapien
cacattctttcggagagggagggca

SEQ ID NO: 3528087 - DNA, 25 bp, Homo sapien
agagggagggcaagacttttctccg

SEQ ID NO: 3528088 - DNA, 25 bp, Homo sapien
gcggacacccgggtgacacattctt

SEQ ID NO: 3528089 - DNA, 25 bp, Homo sapien
caagacttttctccggagcctctgg

SEQ ID NO: 3528090 - DNA, 25 bp, Homo sapien
cgggctccgctggacgcctatcttt

SEQ ID NO: 3528091 - DNA, 25 bp, Homo sapien
ccctagctctggattgattgatgac

SEQ ID NO: 3528092 - DNA, 25 bp, Homo sapien
gctggacgcctatcttttttctctc

SEQ ID NO: 3528093 - DNA, 25 bp, Homo sapien
gattgatgaccaccggcggccaatg

SEQ ID NO: 3528094 - DNA, 25 bp, Homo sapien
aggccggggcggctcgaacacatca

SEQ ID NO: 3528095 - DNA, 25 bp, Homo sapien
gaacacatcaccccgggactttcta

SEQ ID NO: 3528096 - DNA, 25 bp, Homo sapien
tttctagtaaacagctcgctgagcc

SEQ ID NO: 3528097 - DNA, 25 bp, Homo sapien
atcgggccaacacaatgcacccagg

SEQ ID NO: 3528098 - DNA, 25 bp, Homo sapien
gaggcgcccgctcgtgcggatgtca

SEQ ID NO: 3528099 - DNA, 25 bp, Homo sapien
cgagcgccgaattgcccgggaggcg

SEQ ID NO: 3528100 - DNA, 25 bp, Homo sapien
aaaagaatttgctttcgctcagggg

SEQ ID NO: 3528101 - DNA, 25 bp, Homo sapien
gagtcggagggaagacacctcctaa

SEQ ID NO: 3528102 - DNA, 25 bp, Homo sapien
gcgcgagcgggccagaaccttcgac

SEQ ID NO: 3528103 - DNA, 25 bp, Homo sapien
agcgcccggcgagcaggcgatccat

SEQ ID NO: 3528104 - DNA, 25 bp, Homo sapien
agcaggcgatccatagccgagcggc

SEQ ID NO: 3528105 - DNA, 25 bp, Homo sapien
gagaaaggacccgagcagcctcgat

SEQ ID NO: 3528106 - DNA, 25 bp, Homo sapien
gcaaattggtccttgcatgtctttg

SEQ ID NO: 3528107 - DNA, 25 bp, Homo sapien
atgaaagtgtctagtgtaactagaa

SEQ ID NO: 3528108 - DNA, 25 bp, Homo sapien
actgaagcagtgaactgtgagaaac

SEQ ID NO: 3528109 - DNA, 25 bp, Homo sapien
gaaagtgtctagtgtaactagaaat

SEQ ID NO: 3528110 - DNA, 25 bp, Homo sapien
gcgcttcagcgtgttattactgtct

SEQ ID NO: 3528111 - DNA, 25 bp, Homo sapien
gggtggtctccaatcaaacagagaa

SEQ ID NO: 3528112 - DNA, 25 bp, Homo sapien
tcactgttcagacttgactcgtgat

SEQ ID NO: 3528113 - DNA, 25 bp, Homo sapien
tgactcgtgattggctgctgcgctt

SEQ ID NO: 3528114 - DNA, 25 bp, Homo sapien
caatttctgtattgtcgctgatgaa

SEQ ID NO: 3528115 - DNA, 25 bp, Homo sapien
tgatgaaacagtttaaccactaggg

SEQ ID NO: 3528116 - DNA, 25 bp, Homo sapien
tttctgtattgtcgctgatgaaaca

SEQ ID NO: 3528117 - DNA, 25 bp, Homo sapien
acaatttctgtattgtcgctgatga

SEQ ID NO: 3528118 - DNA, 25 bp, Homo sapien
ccttaagtaatatccaagcctgttc

SEQ ID NO: 3528119 - DNA, 25 bp, Homo sapien
tccttaagtaatatccaagcctgtt

SEQ ID NO: 3528120 - DNA, 25 bp, Homo sapien
tctttccttaagtaatatccaagcc

SEQ ID NO: 3528121 - DNA, 25 bp, Homo sapien
tttccttaagtaatatccaagcctg

SEQ ID NO: 3528122 - DNA, 25 bp, Homo sapien
gaagttcgagcaaggagaggttccc

SEQ ID NO: 3528123 - DNA, 25 bp, Homo sapien
tggtccaggcaaggaagggtctcct

SEQ ID NO: 3528124 - DNA, 25 bp, Homo sapien
tggcacctactctaccaaagggcag

SEQ ID NO: 3528125 - DNA, 25 bp, Homo sapien
gccacacaagcaagggttctacaga

SEQ ID NO: 3528126 - DNA, 25 bp, Homo sapien
tgatatggagcagaacaacacagga

SEQ ID NO: 3528127 - DNA, 25 bp, Homo sapien
taggtaggttattctgatatggagc

SEQ ID NO: 3528128 - DNA, 25 bp, Homo sapien
tgttatttcaggtggattaggtagg

SEQ ID NO: 3528129 - DNA, 25 bp, Homo sapien
cgcctttgtaaagcttcgagtttag

SEQ ID NO: 3528130 - DNA, 25 bp, Homo sapien
tcttgatgaggtgtagattgatatg

SEQ ID NO: 3528131 - DNA, 25 bp, Homo sapien
gtgtagattgatatgactcaaggga

SEQ ID NO: 3528132 - DNA, 25 bp, Homo sapien
cgttgagtttaggatgctcaattgc

SEQ ID NO: 3528133 - DNA, 25 bp, Homo sapien
gagtttaggatgctcaattgcttct

SEQ ID NO: 3528134 - DNA, 25 bp, Homo sapien
ctgggctccctctcatttcgatgag

SEQ ID NO: 3528135 - DNA, 25 bp, Homo sapien
catttcgatgagttgtccaaaccaa

SEQ ID NO: 3528136 - DNA, 25 bp, Homo sapien
tcaagcagaactcgtgctgggctcc

SEQ ID NO: 3528137 - DNA, 25 bp, Homo sapien
cacagccagtcaattccagtttttt

SEQ ID NO: 3528138 - DNA, 25 bp, Homo sapien
gtaaattacccatggttgtcgccat

SEQ ID NO: 3528139 - DNA, 25 bp, Homo sapien
attacccatggttgtcgccataaac

SEQ ID NO: 3528140 - DNA, 25 bp, Homo sapien
ggtaaattacccatggttgtcgcca

SEQ ID NO: 3528141 - DNA, 25 bp, Homo sapien
aaattacccatggttgtcgccataa

SEQ ID NO: 3528142 - DNA, 25 bp, Homo sapien
cgagcgtgcataactccaatttaga

SEQ ID NO: 3528143 - DNA, 25 bp, Homo sapien
tggcagatgatcaaatagagggcac

SEQ ID NO: 3528144 - DNA, 25 bp, Homo sapien
gccatagatattaaccgagcgtgca

SEQ ID NO: 3528145 - DNA, 25 bp, Homo sapien
taagaaactgtcttcgctgttgtcg

SEQ ID NO: 3528146 - DNA, 25 bp, Homo sapien
gggcagtgatttgtggtattgattc

SEQ ID NO: 3528147 - DNA, 25 bp, Homo sapien
tactccatcacggaaggagctggct

SEQ ID NO: 3528148 - DNA, 25 bp, Homo sapien
caactgccttgaccttgaatggaat

SEQ ID NO: 3528149 - DNA, 25 bp, Homo sapien
gaactaagtacagcagaggtccaac

SEQ ID NO: 3528150 - DNA, 25 bp, Homo sapien
cgatttccctctcgacaatttgagg

SEQ ID NO: 3528151 - DNA, 25 bp, Homo sapien
tgagattccttgaatgtgctctcca

SEQ ID NO: 3528152 - DNA, 25 bp, Homo sapien
tcgacaatttgaggattcctgacaa

SEQ ID NO: 3528153 - DNA, 25 bp, Homo sapien
gttatcaccactatcatggccatca

SEQ ID NO: 3528154 - DNA, 25 bp, Homo sapien
taaaaaaggagggtccatcatatat

SEQ ID NO: 3528155 - DNA, 25 bp, Homo sapien
tcccagggcggtgagttactgactt

SEQ ID NO: 3528156 - DNA, 25 bp, Homo sapien
atttctgtagagacgttagtttcca

SEQ ID NO: 3528157 - DNA, 25 bp, Homo sapien
caacaggcctgtgcaagtaattact

SEQ ID NO: 3528158 - DNA, 25 bp, Homo sapien
tcattcttctgggaacatggcacga

SEQ ID NO: 3528159 - DNA, 25 bp, Homo sapien
ttttgcctgaacagccagcctcatc

SEQ ID NO: 3528160 - DNA, 25 bp, Homo sapien
tacttagcttggcacagggatggcc

SEQ ID NO: 3528161 - DNA, 25 bp, Homo sapien
catggcacgatgacaaaacacatcc

SEQ ID NO: 3528162 - DNA, 25 bp, Homo sapien
tagttcaccttgtgacacctgtggc

SEQ ID NO: 3528163 - DNA, 25 bp, Homo sapien
gctgctctatatcagacagcatgtg

SEQ ID NO: 3528164 - DNA, 25 bp, Homo sapien
acctgtggctgctctatatcagaca

SEQ ID NO: 3528165 - DNA, 25 bp, Homo sapien
ttttagttcaccttgtgacacctgt

SEQ ID NO: 3528166 - DNA, 25 bp, Homo sapien
cagaaagctctggtttagtatccca

SEQ ID NO: 3528167 - DNA, 25 bp, Homo sapien
gaatgctgcatagctcacaaagtgc

SEQ ID NO: 3528168 - DNA, 25 bp, Homo sapien
ctcttctaaatttggatcacatgaa

SEQ ID NO: 3528169 - DNA, 25 bp, Homo sapien
gaaggggagctaccatcacatctgt

SEQ ID NO: 3528170 - DNA, 25 bp, Homo sapien
gtaataaacatagaagtcataccac

SEQ ID NO: 3528171 - DNA, 25 bp, Homo sapien
taaacatagaagtcataccaccact

SEQ ID NO: 3528172 - DNA, 25 bp, Homo sapien
taataaacatagaagtcataccacc

SEQ ID NO: 3528173 - DNA, 25 bp, Homo sapien
tttgtaataaacatagaagtcatac

SEQ ID NO: 3528174 - DNA, 25 bp, Homo sapien
gtttcctgagctctttggttctcac

SEQ ID NO: 3528175 - DNA, 25 bp, Homo sapien
ttttatggagccctgcaatagtttt

SEQ ID NO: 3528176 - DNA, 25 bp, Homo sapien
tgatccttgctgcttttatggagcc

SEQ ID NO: 3528177 - DNA, 25 bp, Homo sapien
gctgcttttatggagccctgcaata

SEQ ID NO: 3528178 - DNA, 25 bp, Homo sapien
ctaaaccaaaagcctgttggtcctg

SEQ ID NO: 3528179 - DNA, 25 bp, Homo sapien
tgtacaaatacccatgatctttggt

SEQ ID NO: 3528180 - DNA, 25 bp, Homo sapien
cctcattcacaaggaccacttcatg

SEQ ID NO: 3528181 - DNA, 25 bp, Homo sapien
tgaatgattggctgtacaaataccc

SEQ ID NO: 3528182 - DNA, 25 bp, Homo sapien
ggaccacttcatgagcagtgaatga

SEQ ID NO: 3528183 - DNA, 25 bp, Homo sapien
tcactttaggctatagcttgacata

SEQ ID NO: 3528184 - DNA, 25 bp, Homo sapien
tatatgctcatgagttgttactgca

SEQ ID NO: 3528185 - DNA, 25 bp, Homo sapien
tgttactgcatcaatacaaatcatg

SEQ ID NO: 3528186 - DNA, 25 bp, Homo sapien
tgacatataatttctcagcccagga

SEQ ID NO: 3528187 - DNA, 25 bp, Homo sapien
tcaggacaaggatcaaaatggccca

SEQ ID NO: 3528188 - DNA, 25 bp, Homo sapien
ctgtcctcaattatgctgaaatgag

SEQ ID NO: 3528189 - DNA, 25 bp, Homo sapien
atggcccaacaggagtgcctgagaa

SEQ ID NO: 3528190 - DNA, 25 bp, Homo sapien
cctcaattatgctgaaatgaggaaa

SEQ ID NO: 3528191 - DNA, 25 bp, Homo sapien
atgtaaccatttatgacatcattcc

SEQ ID NO: 3528192 - DNA, 25 bp, Homo sapien
tatttcatgttccagtcattagact

SEQ ID NO: 3528193 - DNA, 25 bp, Homo sapien
aagttcagacatggaattgtatagg

SEQ ID NO: 3528194 - DNA, 25 bp, Homo sapien
catggaattgtataggtagagaagg

SEQ ID NO: 3528195 - DNA, 25 bp, Homo sapien
ggtgagaaaatatgtagccctacga

SEQ ID NO: 3528196 - DNA, 25 bp, Homo sapien
gaacagatgacgagtaggatttgag

SEQ ID NO: 3528197 - DNA, 25 bp, Homo sapien
gaaattcaggacaggctccatagga

SEQ ID NO: 3528198 - DNA, 25 bp, Homo sapien
cctacgagtaaagggagaatgccag

SEQ ID NO: 3528199 - DNA, 25 bp, Homo sapien
tgtgggattacccagaaaagcttaa

SEQ ID NO: 3528200 - DNA, 25 bp, Homo sapien
caacaggcagtaaaggaattgtgag

SEQ ID NO: 3528201 - DNA, 25 bp, Homo sapien
gacatccaaatttctagcagctaat

SEQ ID NO: 3528202 - DNA, 25 bp, Homo sapien
tttcatttccgctcaggaagaatgc

SEQ ID NO: 3528203 - DNA, 25 bp, Homo sapien
tgaggagcttcgtagcaggcagcct

SEQ ID NO: 3528204 - DNA, 25 bp, Homo sapien
tcgactcagaagctacagatgtggg

SEQ ID NO: 3528205 - DNA, 25 bp, Homo sapien
ccctattattggatgtagcacttga

SEQ ID NO: 3528206 - DNA, 25 bp, Homo sapien
tagcacttgattcgagggaggcaga

SEQ ID NO: 3528207 - DNA, 25 bp, Homo sapien
aatccttccacttacaaaggctgct

SEQ ID NO: 3528208 - DNA, 25 bp, Homo sapien
acaatccttccacttacaaaggctg

SEQ ID NO: 3528209 - DNA, 25 bp, Homo sapien
gctgagccttcagtacaatccttcc

SEQ ID NO: 3528210 - DNA, 25 bp, Homo sapien
gagccttcagtacaatccttccact

SEQ ID NO: 3528211 - DNA, 25 bp, Homo sapien
gggcgttgaagtccgagtggtgatg

SEQ ID NO: 3528212 - DNA, 25 bp, Homo sapien
cctgtgggggcgttgaagtccgagt

SEQ ID NO: 3528213 - DNA, 25 bp, Homo sapien
agtccgagtggtgatggagagctgc

SEQ ID NO: 3528214 - DNA, 25 bp, Homo sapien
gcttctggttcagggtatggaagct

SEQ ID NO: 3528215 - DNA, 25 bp, Homo sapien
tttgatcttctacagcattgaaaat

SEQ ID NO: 3528216 - DNA, 25 bp, Homo sapien
ctttgatcttctacagcattgaaaa

SEQ ID NO: 3528217 - DNA, 25 bp, Homo sapien
ttgatcttctacagcattgaaaatc

SEQ ID NO: 3528218 - DNA, 25 bp, Homo sapien
tcgggatattgttttccgagcccca

SEQ ID NO: 3528219 - DNA, 25 bp, Homo sapien
tgaagaccgacagatacaggagaac

SEQ ID NO: 3528220 - DNA, 25 bp, Homo sapien
cagtgaggctggtctgtctaggtcc

SEQ ID NO: 3528221 - DNA, 25 bp, Homo sapien
tgagtcctgaaatagtacagcagcg

SEQ ID NO: 3528222 - DNA, 25 bp, Homo sapien
gcctaaatgatatcacgtagtctgt

SEQ ID NO: 3528223 - DNA, 25 bp, Homo sapien
cattttctgctggcttatgtgtctt

SEQ ID NO: 3528224 - DNA, 25 bp, Homo sapien
gattctaaatctggcctaaatgata

SEQ ID NO: 3528225 - DNA, 25 bp, Homo sapien
tatagatgccctttgtgtcacattt

SEQ ID NO: 3528226 - DNA, 25 bp, Homo sapien
gagcagcaggattctattagaacat

SEQ ID NO: 3528227 - DNA, 25 bp, Homo sapien
catccttggatgcaatttcagaacg

SEQ ID NO: 3528228 - DNA, 25 bp, Homo sapien
tcagaacggtattccatcaaaagga

SEQ ID NO: 3528229 - DNA, 25 bp, Homo sapien
agctacttgacagggtgccacggta

SEQ ID NO: 3528230 - DNA, 25 bp, Homo sapien
acacagttctgtcaccaccaaattt

SEQ ID NO: 3528231 - DNA, 25 bp, Homo sapien
aaacacagttctgtcaccaccaaat

SEQ ID NO: 3528232 - DNA, 25 bp, Homo sapien
acagttctgtcaccaccaaattttc

SEQ ID NO: 3528233 - DNA, 25 bp, Homo sapien
agttctgtcaccaccaaattttcca

SEQ ID NO: 3528234 - DNA, 25 bp, Homo sapien
cttaacctctcagaggctatttcat

SEQ ID NO: 3528235 - DNA, 25 bp, Homo sapien
tgggtagagcggaagctctggtctc

SEQ ID NO: 3528236 - DNA, 25 bp, Homo sapien
gtgggtagagcggaagctctggtct

SEQ ID NO: 3528237 - DNA, 25 bp, Homo sapien
taacctctcagaggctatttcatca

SEQ ID NO: 3528238 - DNA, 25 bp, Homo sapien
tcaatgaatataggattaggtggtt

SEQ ID NO: 3528239 - DNA, 25 bp, Homo sapien
tacgccgggtggatacagttcaact

SEQ ID NO: 3528240 - DNA, 25 bp, Homo sapien
cagttgccatgggtattacgccggg

SEQ ID NO: 3528241 - DNA, 25 bp, Homo sapien
ccaaggctccttcaatgttgagatt

SEQ ID NO: 3528242 - DNA, 25 bp, Homo sapien
tccccaggtaccatagatttctgtg

SEQ ID NO: 3528243 - DNA, 25 bp, Homo sapien
aggtaccatagatttctgtgtctcc

SEQ ID NO: 3528244 - DNA, 25 bp, Homo sapien
caggtaccatagatttctgtgtctc

SEQ ID NO: 3528245 - DNA, 25 bp, Homo sapien
cccaggtaccatagatttctgtgtc

SEQ ID NO: 3528246 - DNA, 25 bp, Homo sapien
tgtgagccccctctttcgcttcatg

SEQ ID NO: 3528247 - DNA, 25 bp, Homo sapien
aatctcctcgttgcttttgttgtaa

SEQ ID NO: 3528248 - DNA, 25 bp, Homo sapien
cctctttcgcttcatgtaatctcct

SEQ ID NO: 3528249 - DNA, 25 bp, Homo sapien
gcttcatgtaatctcctcgttgctt

SEQ ID NO: 3528250 - DNA, 25 bp, Homo sapien
gaactgcttcatgattgcctgtcga

SEQ ID NO: 3528251 - DNA, 25 bp, Homo sapien
taattttggtttgcggctcaggcca

SEQ ID NO: 3528252 - DNA, 25 bp, Homo sapien
ttttatcagtgagcccttgtgggta

SEQ ID NO: 3528253 - DNA, 25 bp, Homo sapien
tgagaagtccagattacgtatcccc

SEQ ID NO: 3528254 - DNA, 25 bp, Homo sapien
cagtcttgagaaatcactgtcaggg

SEQ ID NO: 3528255 - DNA, 25 bp, Homo sapien
tctgtcccactgtgcaaatggagtc

SEQ ID NO: 3528256 - DNA, 25 bp, Homo sapien
gagtcacacgctcactcaattctga

SEQ ID NO: 3528257 - DNA, 25 bp, Homo sapien
ccagagcagtctgttagagttgcat

SEQ ID NO: 3528258 - DNA, 25 bp, Homo sapien
cacagtcttctgtttataagtgggt

SEQ ID NO: 3528259 - DNA, 25 bp, Homo sapien
tcagcgatggaaataattggccttc

SEQ ID NO: 3528260 - DNA, 25 bp, Homo sapien
aaatttagagtcttcagcgatggaa

SEQ ID NO: 3528261 - DNA, 25 bp, Homo sapien
cagtcttctgtttataagtgggtaa

SEQ ID NO: 3528262 - DNA, 25 bp, Homo sapien
tctttactaagactgaccggaaatc

SEQ ID NO: 3528263 - DNA, 25 bp, Homo sapien
gcctgatgtgagttatgaaatctaa

SEQ ID NO: 3528264 - DNA, 25 bp, Homo sapien
tactaagactgaccggaaatctgaa

SEQ ID NO: 3528265 - DNA, 25 bp, Homo sapien
tcaaggcctgatgtgagttatgaaa

SEQ ID NO: 3528266 - DNA, 25 bp, Homo sapien
tctatagagagggtgaagtttgctc

SEQ ID NO: 3528267 - DNA, 25 bp, Homo sapien
agggtgaagtttgctcatctgggcc

SEQ ID NO: 3528268 - DNA, 25 bp, Homo sapien
ctgctctatagagagggtgaagttt

SEQ ID NO: 3528269 - DNA, 25 bp, Homo sapien
gggtgaagtttgctcatctgggcct

SEQ ID NO: 3528270 - DNA, 25 bp, Homo sapien
tgagaagcagtgactcttgtttgga

SEQ ID NO: 3528271 - DNA, 25 bp, Homo sapien
tgtgagaagcagtgactcttgtttg

SEQ ID NO: 3528272 - DNA, 25 bp, Homo sapien
gtgagaagcagtgactcttgtttgg

SEQ ID NO: 3528273 - DNA, 25 bp, Homo sapien
gaaatatgcctcaataattttacat

SEQ ID NO: 3528274 - DNA, 25 bp, Homo sapien
ttgaaatacagctagtctgaattga

SEQ ID NO: 3528275 - DNA, 25 bp, Homo sapien
tggagaccttagaacagtaacaaag

SEQ ID NO: 3528276 - DNA, 25 bp, Homo sapien
aatacacacaggatatggagacctt

SEQ ID NO: 3528277 - DNA, 25 bp, Homo sapien
ttgttgatcttgctttgtagttgct

SEQ ID NO: 3528278 - DNA, 25 bp, Homo sapien
ttacacggtcagtccatttattttc

SEQ ID NO: 3528279 - DNA, 25 bp, Homo sapien
tgtagttgcttatggccacacagcc

SEQ ID NO: 3528280 - DNA, 25 bp, Homo sapien
tctcctgagtggtctttgttgatct

SEQ ID NO: 3528281 - DNA, 25 bp, Homo sapien
ttgagtcattctagggagaggccca

SEQ ID NO: 3528282 - DNA, 25 bp, Homo sapien
tacccagggctagctgtcatctaca

SEQ ID NO: 3528283 - DNA, 25 bp, Homo sapien
ttttgcagcgattaccaagagcccc

SEQ ID NO: 3528284 - DNA, 25 bp, Homo sapien
tatgaactaccaagatacccagggc

SEQ ID NO: 3528285 - DNA, 25 bp, Homo sapien
tgtaccccataaaaggtcctgcact

SEQ ID NO: 3528286 - DNA, 25 bp, Homo sapien
tggaaaatatcgtggctgagccaga

SEQ ID NO: 3528287 - DNA, 25 bp, Homo sapien
ggaattgccaagctttactctcatg

SEQ ID NO: 3528288 - DNA, 25 bp, Homo sapien
ctatgacttttgatcactgggcaca

SEQ ID NO: 3528289 - DNA, 25 bp, Homo sapien
tggaagaaaatccaccgaagatagt

SEQ ID NO: 3528290 - DNA, 25 bp, Homo sapien
tcactaatgactagtagtttccttc

SEQ ID NO: 3528291 - DNA, 25 bp, Homo sapien
cactttatgtaaaatgcggagggta

SEQ ID NO: 3528292 - DNA, 25 bp, Homo sapien
gaacaaacttgaggcatcaaatgtc

SEQ ID NO: 3528293 - DNA, 25 bp, Homo sapien
caaacatgagtatgtgcacatagct

SEQ ID NO: 3528294 - DNA, 25 bp, Homo sapien
aacatgagtatgtgcacatagctat

SEQ ID NO: 3528295 - DNA, 25 bp, Homo sapien
catgagtatgtgcacatagctatac

SEQ ID NO: 3528296 - DNA, 25 bp, Homo sapien
taacaaacatgagtatgtgcacata

SEQ ID NO: 3528297 - DNA, 25 bp, Homo sapien
taggagttaattgtggagatgtgcc

SEQ ID NO: 3528298 - DNA, 25 bp, Homo sapien
atacagcagaaaatccgatggttct

SEQ ID NO: 3528299 - DNA, 25 bp, Homo sapien
agttaattgtggagatgtgccagag

SEQ ID NO: 3528300 - DNA, 25 bp, Homo sapien
ccgatggttctgataggagttaatt

SEQ ID NO: 3528301 - DNA, 25 bp, Homo sapien
tggcataatttgctctgatctccat

SEQ ID NO: 3528302 - DNA, 25 bp, Homo sapien
cgctctatgtcgtcccaggactgaa

SEQ ID NO: 3528303 - DNA, 25 bp, Homo sapien
caggactgaattggctctccactgg

SEQ ID NO: 3528304 - DNA, 25 bp, Homo sapien
tacagtgctctagctgggtgggtca

SEQ ID NO: 3528305 - DNA, 25 bp, Homo sapien
tgtcccatagacacacagatgacca

SEQ ID NO: 3528306 - DNA, 25 bp, Homo sapien
tttgagacgagaggagcagtcttgc

SEQ ID NO: 3528307 - DNA, 25 bp, Homo sapien
ttgagacgagaggagcagtcttgca

SEQ ID NO: 3528308 - DNA, 25 bp, Homo sapien
gagacgagaggagcagtcttgcagc

SEQ ID NO: 3528309 - DNA, 25 bp, Homo sapien
gacgagaggagcagtcttgcagcag

SEQ ID NO: 3528310 - DNA, 25 bp, Homo sapien
gcagactaggtggagaagatctcac

SEQ ID NO: 3528311 - DNA, 25 bp, Homo sapien
tagatgctacaactcacaacaaggc

SEQ ID NO: 3528312 - DNA, 25 bp, Homo sapien
ccaaaatgcaggtgccaagtccaca

SEQ ID NO: 3528313 - DNA, 25 bp, Homo sapien
ccaagtagatgtctagggtcaccaa

SEQ ID NO: 3528314 - DNA, 25 bp, Homo sapien
tcaggtctgcctccatttagataaa

SEQ ID NO: 3528315 - DNA, 25 bp, Homo sapien
gcttgactgctatacgtttggttgc

SEQ ID NO: 3528316 - DNA, 25 bp, Homo sapien
tatacaggttgctcggcttgactgc

SEQ ID NO: 3528317 - DNA, 25 bp, Homo sapien
ttgccccaggcataagtgccatctt

SEQ ID NO: 3528318 - DNA, 25 bp, Homo sapien
caattggactgaaaccacttcttta

SEQ ID NO: 3528319 - DNA, 25 bp, Homo sapien
ctctttttacatattgagacatgcc

SEQ ID NO: 3528320 - DNA, 25 bp, Homo sapien
gaatgtctccattgcaattagtatt

SEQ ID NO: 3528321 - DNA, 25 bp, Homo sapien
tatgtctggcaatcctgactgatta

SEQ ID NO: 3528322 - DNA, 25 bp, Homo sapien
cctgttgagtctgttcggtccagcc

SEQ ID NO: 3528323 - DNA, 25 bp, Homo sapien
tatgtcttataagttccatgagttt

SEQ ID NO: 3528324 - DNA, 25 bp, Homo sapien
tcggtccagcctccttcaaccacca

SEQ ID NO: 3528325 - DNA, 25 bp, Homo sapien
ctgtatgtcttataagttccatgag

SEQ ID NO: 3528326 - DNA, 25 bp, Homo sapien
ggctgacatgccgctactcgccgcc

SEQ ID NO: 3528327 - DNA, 25 bp, Homo sapien
ctggctgacatgccgctactcgccg

SEQ ID NO: 3528328 - DNA, 25 bp, Homo sapien
ggctggctgacatgccgctactcgc

SEQ ID NO: 3528329 - DNA, 25 bp, Homo sapien
gctggctgacatgccgctactcgcc

SEQ ID NO: 3528330 - DNA, 25 bp, Homo sapien
aatcgttccacacaggagcataagc

SEQ ID NO: 3528331 - DNA, 25 bp, Homo sapien
ggccccagccttgcatccatgatat

SEQ ID NO: 3528332 - DNA, 25 bp, Homo sapien
tctttcatatgggagcttcaggctt

SEQ ID NO: 3528333 - DNA, 25 bp, Homo sapien
gataacatgctgatttccacactgg

SEQ ID NO: 3528334 - DNA, 25 bp, Homo sapien
ttatgcttgatatagttcatactga

SEQ ID NO: 3528335 - DNA, 25 bp, Homo sapien
ctcattttgtgtctcatggtatcta

SEQ ID NO: 3528336 - DNA, 25 bp, Homo sapien
cttttaactgtctcattttgtgtct

SEQ ID NO: 3528337 - DNA, 25 bp, Homo sapien
tttaactgtctcattttgtgtctca

SEQ ID NO: 3528338 - DNA, 25 bp, Homo sapien
cattttgtgtctcatggtatctaga

SEQ ID NO: 3528339 - DNA, 25 bp, Homo sapien
tctgtttctctaatttttctgcttt

SEQ ID NO: 3528340 - DNA, 25 bp, Homo sapien
tctgtccttttttagccagttctgt

SEQ ID NO: 3528341 - DNA, 25 bp, Homo sapien
caaaattctgtccttttttagccag

SEQ ID NO: 3528342 - DNA, 25 bp, Homo sapien
tcagccaaaattctgtcctttttta

SEQ ID NO: 3528343 - DNA, 25 bp, Homo sapien
tagaaatggttcaccacaagacacc

SEQ ID NO: 3528344 - DNA, 25 bp, Homo sapien
agaaatggttcaccacaagacaccc

SEQ ID NO: 3528345 - DNA, 25 bp, Homo sapien
ccacaagacacccagatggcaatag

SEQ ID NO: 3528346 - DNA, 25 bp, Homo sapien
cacaagacacccagatggcaatagg

SEQ ID NO: 3528347 - DNA, 25 bp, Homo sapien
tccaaactatcggatgtcacagatt

SEQ ID NO: 3528348 - DNA, 25 bp, Homo sapien
catccaaactatcggatgtcacaga

SEQ ID NO: 3528349 - DNA, 25 bp, Homo sapien
ctatcggatgtcacagattttgcaa

SEQ ID NO: 3528350 - DNA, 25 bp, Homo sapien
ctataccatccaaactatcggatgt

SEQ ID NO: 3528351 - DNA, 25 bp, Homo sapien
tctctggagaaaggattcatctaga

SEQ ID NO: 3528352 - DNA, 25 bp, Homo sapien
tctggagaaaggattcatctagagc

SEQ ID NO: 3528353 - DNA, 25 bp, Homo sapien
ctctggagaaaggattcatctagag

SEQ ID NO: 3528354 - DNA, 25 bp, Homo sapien
catctttggtatatactttggaggc

SEQ ID NO: 3528355 - DNA, 25 bp, Homo sapien
tggcaagcccaagttgttccgtgca

SEQ ID NO: 3528356 - DNA, 25 bp, Homo sapien
tggtatatactttggaggctgctct

SEQ ID NO: 3528357 - DNA, 25 bp, Homo sapien
caaatcacgcaaggtaaagattggg

SEQ ID NO: 3528358 - DNA, 25 bp, Homo sapien
caaagctgggtttgggccttctagc

SEQ ID NO: 3528359 - DNA, 25 bp, Homo sapien
tgtccaagaccataaaagccagctg

SEQ ID NO: 3528360 - DNA, 25 bp, Homo sapien
cacaggcagtaaggatctgacaggc

SEQ ID NO: 3528361 - DNA, 25 bp, Homo sapien
caaggaagtctgcagggtaactcca

SEQ ID NO: 3528362 - DNA, 25 bp, Homo sapien
catccgtaaagacaatagacgtgct

SEQ ID NO: 3528363 - DNA, 25 bp, Homo sapien
gatgcagcttgcgtgcaggtcttca

SEQ ID NO: 3528364 - DNA, 25 bp, Homo sapien
catccccatttttgtatgcaattat

SEQ ID NO: 3528365 - DNA, 25 bp, Homo sapien
ttaacttcccattacgatacccatc

SEQ ID NO: 3528366 - DNA, 25 bp, Homo sapien
caggtagaatggtaaaggtgcatct

SEQ ID NO: 3528367 - DNA, 25 bp, Homo sapien
atgaattggatgagtggagatgaac

SEQ ID NO: 3528368 - DNA, 25 bp, Homo sapien
acttgagtgcaaggcagataatgaa

SEQ ID NO: 3528369 - DNA, 25 bp, Homo sapien
tgttgccatacatgcattagcagag

SEQ ID NO: 3528370 - DNA, 25 bp, Homo sapien
tacagaggaatggaacccctggaag

SEQ ID NO: 3528371 - DNA, 25 bp, Homo sapien
tcatggattgtccacaagccaagca

SEQ ID NO: 3528372 - DNA, 25 bp, Homo sapien
tcttggtgcctgaaatacagaggaa

SEQ ID NO: 3528373 - DNA, 25 bp, Homo sapien
cccttgtaagaagggcttctgagtc

SEQ ID NO: 3528374 - DNA, 25 bp, Homo sapien
cagctccattgttgtacggcttata

SEQ ID NO: 3528375 - DNA, 25 bp, Homo sapien
tgctgatgtaatttccttatccaag

SEQ ID NO: 3528376 - DNA, 25 bp, Homo sapien
tatccaaggcagtgctatgaaaggc

SEQ ID NO: 3528377 - DNA, 25 bp, Homo sapien
gatgtacagacaccagcataatttg

SEQ ID NO: 3528378 - DNA, 25 bp, Homo sapien
cagggttactcacaaggtgaaaggt

SEQ ID NO: 3528379 - DNA, 25 bp, Homo sapien
cagcacaaggtcagggttactcaca

SEQ ID NO: 3528380 - DNA, 25 bp, Homo sapien
ctgccagcacaaggtcagggttact

SEQ ID NO: 3528381 - DNA, 25 bp, Homo sapien
tcttggtcatagacactgccagcac

SEQ ID NO: 3528382 - DNA, 25 bp, Homo sapien
gacggatcaaccaatatcaccatct

SEQ ID NO: 3528383 - DNA, 25 bp, Homo sapien
tgcctctcttttccgtgtcttgaca

SEQ ID NO: 3528384 - DNA, 25 bp, Homo sapien
ggactctgacgtttccaatgacgga

SEQ ID NO: 3528385 - DNA, 25 bp, Homo sapien
ctcttttccgtgtcttgacatgagg

SEQ ID NO: 3528386 - DNA, 25 bp, Homo sapien
tcctggtgtatccagcgctgatgac

SEQ ID NO: 3528387 - DNA, 25 bp, Homo sapien
tgtcttcctggtgtatccagcgctg

SEQ ID NO: 3528388 - DNA, 25 bp, Homo sapien
gctgtcttcctggtgtatccagcgc

SEQ ID NO: 3528389 - DNA, 25 bp, Homo sapien
tcttcctggtgtatccagcgctgat

SEQ ID NO: 3528390 - DNA, 25 bp, Homo sapien
cccaagactagctgaggagcagcat

SEQ ID NO: 3528391 - DNA, 25 bp, Homo sapien
ccacctccatgcctgatcggagatt

SEQ ID NO: 3528392 - DNA, 25 bp, Homo sapien
cttgaacccccaagactagctgagg

SEQ ID NO: 3528393 - DNA, 25 bp, Homo sapien
tgatcggagattgggaccttgaacc

SEQ ID NO: 3528394 - DNA, 25 bp, Homo sapien
atgacaatgcttgtgcaatttacta

SEQ ID NO: 3528395 - DNA, 25 bp, Homo sapien
tgatgacaatgcttgtgcaatttac

SEQ ID NO: 3528396 - DNA, 25 bp, Homo sapien
ctgatgacaatgcttgtgcaattta

SEQ ID NO: 3528397 - DNA, 25 bp, Homo sapien
gatgacaatgcttgtgcaatttact

SEQ ID NO: 3528398 - DNA, 25 bp, Homo sapien
caaagtcatgtgaagtttcctgcca

SEQ ID NO: 3528399 - DNA, 25 bp, Homo sapien
gacaagccttcattcgaagatgagc

SEQ ID NO: 3528400 - DNA, 25 bp, Homo sapien
tttcctgccaggcatacctgggaag

SEQ ID NO: 3528401 - DNA, 25 bp, Homo sapien
gaagatgagctcttacgtgtgaatc

SEQ ID NO: 3528402 - DNA, 25 bp, Homo sapien
gtcataggaccaactgaatcaccca

SEQ ID NO: 3528403 - DNA, 25 bp, Homo sapien
ttccctgactgttgagaaagatgcc

SEQ ID NO: 3528404 - DNA, 25 bp, Homo sapien
tgaaagttcgtggtcaattccctga

SEQ ID NO: 3528405 - DNA, 25 bp, Homo sapien
gactaagaggctagatgacacattc

SEQ ID NO: 3528406 - DNA, 25 bp, Homo sapien
cactggaagcattttccgttgttag

SEQ ID NO: 3528407 - DNA, 25 bp, Homo sapien
cattttccgttgttagaggatcttc

SEQ ID NO: 3528408 - DNA, 25 bp, Homo sapien
gcttgcttccagatacaatgtcact

SEQ ID NO: 3528409 - DNA, 25 bp, Homo sapien
aaattgctacaggtttatgcacagc

SEQ ID NO: 3528410 - DNA, 25 bp, Homo sapien
ttccaaaagtggatgccaagcaggg

SEQ ID NO: 3528411 - DNA, 25 bp, Homo sapien
gctactccaatctgaggcacagcca

SEQ ID NO: 3528412 - DNA, 25 bp, Homo sapien
taagacccaggagttgctgagaatc

SEQ ID NO: 3528413 - DNA, 25 bp, Homo sapien
cagccacgtgaactgggatctggtt

SEQ ID NO: 3528414 - DNA, 25 bp, Homo sapien
tctgattctaggttcctcaggaata

SEQ ID NO: 3528415 - DNA, 25 bp, Homo sapien
gattgatccagagttctccacatga

SEQ ID NO: 3528416 - DNA, 25 bp, Homo sapien
gaattttggcaatgtctgattctag

SEQ ID NO: 3528417 - DNA, 25 bp, Homo sapien
aatggacaggtcaggattgatccag

SEQ ID NO: 3528418 - DNA, 25 bp, Homo sapien
ttcattgtacaatctccgagctgca

SEQ ID NO: 3528419 - DNA, 25 bp, Homo sapien
tcattgtacaatctccgagctgcag

SEQ ID NO: 3528420 - DNA, 25 bp, Homo sapien
tttcattgtacaatctccgagctgc

SEQ ID NO: 3528421 - DNA, 25 bp, Homo sapien
cattgtacaatctccgagctgcaga

SEQ ID NO: 3528422 - DNA, 25 bp, Homo sapien
caaagtctaatttgtcaccaagttc

SEQ ID NO: 3528423 - DNA, 25 bp, Homo sapien
agctccctccaccagagggtagtct

SEQ ID NO: 3528424 - DNA, 25 bp, Homo sapien
ccaccagagggtagtctgtttcaac

SEQ ID NO: 3528425 - DNA, 25 bp, Homo sapien
ccagagggtagtctgtttcaactac

SEQ ID NO: 3528426 - DNA, 25 bp, Homo sapien
ttcccaaacaagcaccggacaagcc

SEQ ID NO: 3528427 - DNA, 25 bp, Homo sapien
ttagcctggttaaacactgaacact

SEQ ID NO: 3528428 - DNA, 25 bp, Homo sapien
ctttgaaacagacgtttttagcctg

SEQ ID NO: 3528429 - DNA, 25 bp, Homo sapien
tgccttcccaaacaagcaccggaca

SEQ ID NO: 3528430 - DNA, 25 bp, Homo sapien
ctgcaaaactctgagtcgcacaggg

SEQ ID NO: 3528431 - DNA, 25 bp, Homo sapien
tgcgttttccgtccaggtgagatat

SEQ ID NO: 3528432 - DNA, 25 bp, Homo sapien
tctggaccaaggatagtaacggatc

SEQ ID NO: 3528433 - DNA, 25 bp, Homo sapien
gggcatatggctctgttgtcttaca

SEQ ID NO: 3528434 - DNA, 25 bp, Homo sapien
ctcggaacaagcagtccttgtattg

SEQ ID NO: 3528435 - DNA, 25 bp, Homo sapien
agcagtccttgtattggccaatcaa

SEQ ID NO: 3528436 - DNA, 25 bp, Homo sapien
gaacaagcagtccttgtattggcca

SEQ ID NO: 3528437 - DNA, 25 bp, Homo sapien
caagcagtccttgtattggccaatc

SEQ ID NO: 3528438 - DNA, 25 bp, Homo sapien
tcttaggccaaaagaccgaaggcat

SEQ ID NO: 3528439 - DNA, 25 bp, Homo sapien
aagcctgtaacatccttcccagtga

SEQ ID NO: 3528440 - DNA, 25 bp, Homo sapien
tggaggtttcttttacaccctgtga

SEQ ID NO: 3528441 - DNA, 25 bp, Homo sapien
tccctcgcgggataatggaaccaca

SEQ ID NO: 3528442 - DNA, 25 bp, Homo sapien
gagcatgtgttcgttttgggagtcc

SEQ ID NO: 3528443 - DNA, 25 bp, Homo sapien
tccttgaatatgaaaatccattgct

SEQ ID NO: 3528444 - DNA, 25 bp, Homo sapien
tggcatggcccgtccaaatggatat

SEQ ID NO: 3528445 - DNA, 25 bp, Homo sapien
ggtagctacttattatcatctctca

SEQ ID NO: 3528446 - DNA, 25 bp, Homo sapien
aattcacaacttttcccccatagag

SEQ ID NO: 3528447 - DNA, 25 bp, Homo sapien
gagtgagaaaataacttgagttcct

SEQ ID NO: 3528448 - DNA, 25 bp, Homo sapien
cttgagttcctctaattttttccag

SEQ ID NO: 3528449 - DNA, 25 bp, Homo sapien
gaagcacaatttttcaattcacaac

SEQ ID NO: 3528450 - DNA, 25 bp, Homo sapien
gaacttaggaaccaagtctatctcc

SEQ ID NO: 3528451 - DNA, 25 bp, Homo sapien
agtttcttgtcaaggaactaacagg

SEQ ID NO: 3528452 - DNA, 25 bp, Homo sapien
tgaaatcagttctcaaagcagctgt

SEQ ID NO: 3528453 - DNA, 25 bp, Homo sapien
ccatttggacaatcagcccagctga

SEQ ID NO: 3528454 - DNA, 25 bp, Homo sapien
caactctagaatgtttccactggcc

SEQ ID NO: 3528455 - DNA, 25 bp, Homo sapien
cactggcctggcttactggttcctt

SEQ ID NO: 3528456 - DNA, 25 bp, Homo sapien
ggaaggacaggccacatgtaggtaa

SEQ ID NO: 3528457 - DNA, 25 bp, Homo sapien
taggtaagcttgttccatagaggat

SEQ ID NO: 3528458 - DNA, 25 bp, Homo sapien
caaacttaatgttgtccagaatagc

SEQ ID NO: 3528459 - DNA, 25 bp, Homo sapien
tgagatcgggtagtgttgacaacta

SEQ ID NO: 3528460 - DNA, 25 bp, Homo sapien
ccagttcgttctatgcataggagca

SEQ ID NO: 3528461 - DNA, 25 bp, Homo sapien
ggtatttgagtcaccaacacaacat

SEQ ID NO: 3528462 - DNA, 25 bp, Homo sapien
gccacagatccaccacaatgcttta

SEQ ID NO: 3528463 - DNA, 25 bp, Homo sapien
caatttcagaatgattaatggagcc

SEQ ID NO: 3528464 - DNA, 25 bp, Homo sapien
gattcacatcccacgactgttaaag

SEQ ID NO: 3528465 - DNA, 25 bp, Homo sapien
gcagtgtctaacaaacatgagggtt

SEQ ID NO: 3528466 - DNA, 25 bp, Homo sapien
gccacatgataagaatggcacagcc

SEQ ID NO: 3528467 - DNA, 25 bp, Homo sapien
tgctttagagccataggtgggagcc

SEQ ID NO: 3528468 - DNA, 25 bp, Homo sapien
gactgagagatgataagagctggac

SEQ ID NO: 3528469 - DNA, 25 bp, Homo sapien
gcaactggacatgtactccactagt

SEQ ID NO: 3528470 - DNA, 25 bp, Homo sapien
gctgttttcgtaaattcttgtcctg

SEQ ID NO: 3528471 - DNA, 25 bp, Homo sapien
tcattgctgttttcgtaaattcttg

SEQ ID NO: 3528472 - DNA, 25 bp, Homo sapien
ttgctgttttcgtaaattcttgtcc

SEQ ID NO: 3528473 - DNA, 25 bp, Homo sapien
tttcatccacttctccaagttcttc

SEQ ID NO: 3528474 - DNA, 25 bp, Homo sapien
cttcaggtctagatgctgtttctct

SEQ ID NO: 3528475 - DNA, 25 bp, Homo sapien
caggtctagatgctgtttctcttgg

SEQ ID NO: 3528476 - DNA, 25 bp, Homo sapien
cagccttcaggtctagatgctgttt

SEQ ID NO: 3528477 - DNA, 25 bp, Homo sapien
agccttcaggtctagatgctgtttc

SEQ ID NO: 3528478 - DNA, 25 bp, Homo sapien
ggatttgcaaactctacccgtgact

SEQ ID NO: 3528479 - DNA, 25 bp, Homo sapien
tctctcatagaagtaaattggcacc

SEQ ID NO: 3528480 - DNA, 25 bp, Homo sapien
tcaaacaaaggtgggcgtaacgtga

SEQ ID NO: 3528481 - DNA, 25 bp, Homo sapien
taacgtgacgttcaatccccaagga

SEQ ID NO: 3528482 - DNA, 25 bp, Homo sapien
acatttggaaacaacgggagaagag

SEQ ID NO: 3528483 - DNA, 25 bp, Homo sapien
catttggaaacaacgggagaagaga

SEQ ID NO: 3528484 - DNA, 25 bp, Homo sapien
caatcttttccacagagatcagatg

SEQ ID NO: 3528485 - DNA, 25 bp, Homo sapien
ccacaatcttttccacagagatcag

SEQ ID NO: 3528486 - DNA, 25 bp, Homo sapien
cttggccacaatcttttccacagag

SEQ ID NO: 3528487 - DNA, 25 bp, Homo sapien
tttccacagagatcagatgattcct

SEQ ID NO: 3528488 - DNA, 25 bp, Homo sapien
ttcatattcaagctttccaggccag

SEQ ID NO: 3528489 - DNA, 25 bp, Homo sapien
tccaagctaggctgcagcaagttct

SEQ ID NO: 3528490 - DNA, 25 bp, Homo sapien
tgagtcatatcctcagcaggtctca

SEQ ID NO: 3528491 - DNA, 25 bp, Homo sapien
tattaccccgttatagctggtgccc

SEQ ID NO: 3528492 - DNA, 25 bp, Homo sapien
tccagggctgcagttaattacatga

SEQ ID NO: 3528493 - DNA, 25 bp, Homo sapien
caagcaggtagtgagtgaagacaaa

SEQ ID NO: 3528494 - DNA, 25 bp, Homo sapien
agcgaggctgagctccactcaacaa

SEQ ID NO: 3528495 - DNA, 25 bp, Homo sapien
tgagcagccttaaggctttctctgc

SEQ ID NO: 3528496 - DNA, 25 bp, Homo sapien
cacaatgttgtcctctacaatgaaa

SEQ ID NO: 3528497 - DNA, 25 bp, Homo sapien
tgaaacacaatgttgtcctctacaa

SEQ ID NO: 3528498 - DNA, 25 bp, Homo sapien
aatcttctctgttgcacatgttctc

SEQ ID NO: 3528499 - DNA, 25 bp, Homo sapien
atcttctctgttgcacatgttctcc

SEQ ID NO: 3528500 - DNA, 25 bp, Homo sapien
aactgtatcgcattgttagtccacc

SEQ ID NO: 3528501 - DNA, 25 bp, Homo sapien
ctgcaccagtaactgtatcgcattg

SEQ ID NO: 3528502 - DNA, 25 bp, Homo sapien
cagtaactgtatcgcattgttagtc

SEQ ID NO: 3528503 - DNA, 25 bp, Homo sapien
gcaccagtaactgtatcgcattgtt

SEQ ID NO: 3528504 - DNA, 25 bp, Homo sapien
cttttggacaacatggttagcccca

SEQ ID NO: 3528505 - DNA, 25 bp, Homo sapien
ggttagccccaacacaatcccattg

SEQ ID NO: 3528506 - DNA, 25 bp, Homo sapien
tgttgcttgctagatcactttctgc

SEQ ID NO: 3528507 - DNA, 25 bp, Homo sapien
tcttctatgttgcttgctagatcac

SEQ ID NO: 3528508 - DNA, 25 bp, Homo sapien
tatttctagcttctcatagtcttta

SEQ ID NO: 3528509 - DNA, 25 bp, Homo sapien
ttcttcacctccatatatttctagc

SEQ ID NO: 3528510 - DNA, 25 bp, Homo sapien
catagtctttaacttttccctccat

SEQ ID NO: 3528511 - DNA, 25 bp, Homo sapien
ttcacctccatatatttctagcttc

SEQ ID NO: 3528512 - DNA, 25 bp, Homo sapien
tagaaacaccattaggatgatgaca

SEQ ID NO: 3528513 - DNA, 25 bp, Homo sapien
tacctttgagtataatagaaacacc

SEQ ID NO: 3528514 - DNA, 25 bp, Homo sapien
gaagggcaccacacagttggtagac

SEQ ID NO: 3528515 - DNA, 25 bp, Homo sapien
tgacattacccaaaagaagggcacc

SEQ ID NO: 3528516 - DNA, 25 bp, Homo sapien
tccttttttgcctggtatgtgccat

SEQ ID NO: 3528517 - DNA, 25 bp, Homo sapien
ggtatgtgccattgatgcaataagc

SEQ ID NO: 3528518 - DNA, 25 bp, Homo sapien
gtatgtgccattgatgcaataagcc

SEQ ID NO: 3528519 - DNA, 25 bp, Homo sapien
tgatgcaataagcctgggcccccag

SEQ ID NO: 3528520 - DNA, 25 bp, Homo sapien
cacggctttgcggatgtctgcctgg

SEQ ID NO: 3528521 - DNA, 25 bp, Homo sapien
tttgccgaagcaagacactgtcagg

SEQ ID NO: 3528522 - DNA, 25 bp, Homo sapien
tgcctgggtgaagccaccactcatg

SEQ ID NO: 3528523 - DNA, 25 bp, Homo sapien
tagagtgcatatgtgccgccaagcc

SEQ ID NO: 3528524 - DNA, 25 bp, Homo sapien
gagaccagtaattcatgagactttt

SEQ ID NO: 3528525 - DNA, 25 bp, Homo sapien
tcatgagacttttgctggtacatac

SEQ ID NO: 3528526 - DNA, 25 bp, Homo sapien
ttcagagaccagtaattcatgagac

SEQ ID NO: 3528527 - DNA, 25 bp, Homo sapien
cagagaccagtaattcatgagactt

SEQ ID NO: 3528528 - DNA, 25 bp, Homo sapien
ggtaggttcgtatgtatctgaaatc

SEQ ID NO: 3528529 - DNA, 25 bp, Homo sapien
agaaagtttaagagacaaagctgct

SEQ ID NO: 3528530 - DNA, 25 bp, Homo sapien
ttctggtaggttcgtatgtatctga

SEQ ID NO: 3528531 - DNA, 25 bp, Homo sapien
aaagtttaagagacaaagctgctga

SEQ ID NO: 3528532 - DNA, 25 bp, Homo sapien
cagttggttagcaatatcaatgatg

SEQ ID NO: 3528533 - DNA, 25 bp, Homo sapien
atgatttacaacatcaaccccaaca

SEQ ID NO: 3528534 - DNA, 25 bp, Homo sapien
ggcaatatagctagaccccattttt

SEQ ID NO: 3528535 - DNA, 25 bp, Homo sapien
tcatgcaagtgacatttctatctac

SEQ ID NO: 3528536 - DNA, 25 bp, Homo sapien
gagcagaagccttaggatgtttctc

SEQ ID NO: 3528537 - DNA, 25 bp, Homo sapien
ctctgagcagaagccttaggatgtt

SEQ ID NO: 3528538 - DNA, 25 bp, Homo sapien
ctgagcagaagccttaggatgtttc

SEQ ID NO: 3528539 - DNA, 25 bp, Homo sapien
gatgtttctcttccagtttcctcac

SEQ ID NO: 3528540 - DNA, 25 bp, Homo sapien
ttgcttcagaccaaggttgctggca

SEQ ID NO: 3528541 - DNA, 25 bp, Homo sapien
agaaccttctggcattaaatgggtg

SEQ ID NO: 3528542 - DNA, 25 bp, Homo sapien
gagggttctggcagttgcttcagac

SEQ ID NO: 3528543 - DNA, 25 bp, Homo sapien
aaatgggtgtctgagggttctggca

SEQ ID NO: 3528544 - DNA, 25 bp, Homo sapien
ttagctcctctaggtaggtcagaac

SEQ ID NO: 3528545 - DNA, 25 bp, Homo sapien
ccatggtgaatgtgatactctgtct

SEQ ID NO: 3528546 - DNA, 25 bp, Homo sapien
tgtctgggtcacatctacttgtgca

SEQ ID NO: 3528547 - DNA, 25 bp, Homo sapien
tacttgtgcatttagctcctctagg

SEQ ID NO: 3528548 - DNA, 25 bp, Homo sapien
aatgcaaccatcagttccaaacacc

SEQ ID NO: 3528549 - DNA, 25 bp, Homo sapien
ctttgaataaatgcaaccatcagtt

SEQ ID NO: 3528550 - DNA, 25 bp, Homo sapien
aaacacccacttctgagagtcatct

SEQ ID NO: 3528551 - DNA, 25 bp, Homo sapien
tcagttccaaacacccacttctgag

SEQ ID NO: 3528552 - DNA, 25 bp, Homo sapien
taacgaaaatgtaatttagagattg

SEQ ID NO: 3528553 - DNA, 25 bp, Homo sapien
acgaaaatgtaatttagagattgac

SEQ ID NO: 3528554 - DNA, 25 bp, Homo sapien
ctgtaacgaaaatgtaatttagaga

SEQ ID NO: 3528555 - DNA, 25 bp, Homo sapien
cgaaaatgtaatttagagattgaca

SEQ ID NO: 3528556 - DNA, 25 bp, Homo sapien
cttctctccacagaaacacttgtag

SEQ ID NO: 3528557 - DNA, 25 bp, Homo sapien
tctccacagaaacacttgtaggttt

SEQ ID NO: 3528558 - DNA, 25 bp, Homo sapien
tctctccacagaaacacttgtaggt

SEQ ID NO: 3528559 - DNA, 25 bp, Homo sapien
tccacagaaacacttgtaggtttta

SEQ ID NO: 3528560 - DNA, 25 bp, Homo sapien
actgcccacactctaccaaagattc

SEQ ID NO: 3528561 - DNA, 25 bp, Homo sapien
gactgcccacactctaccaaagatt

SEQ ID NO: 3528562 - DNA, 25 bp, Homo sapien
gcccacactctaccaaagattctgc

SEQ ID NO: 3528563 - DNA, 25 bp, Homo sapien
tgcccacactctaccaaagattctg

SEQ ID NO: 3528564 - DNA, 25 bp, Homo sapien
caatttccctgctacaatgctctgg

SEQ ID NO: 3528565 - DNA, 25 bp, Homo sapien
aatttccctgctacaatgctctggt

SEQ ID NO: 3528566 - DNA, 25 bp, Homo sapien
tccctaagacaaccaatttccctgc

SEQ ID NO: 3528567 - DNA, 25 bp, Homo sapien
accaatttccctgctacaatgctct

SEQ ID NO: 3528568 - DNA, 25 bp, Homo sapien
gtatatttcttcgagataaatgaaa

SEQ ID NO: 3528569 - DNA, 25 bp, Homo sapien
tttcttcgagataaatgaaatggca

SEQ ID NO: 3528570 - DNA, 25 bp, Homo sapien
aattattgtgagtatatttcttcga

SEQ ID NO: 3528571 - DNA, 25 bp, Homo sapien
ttgtgagtatatttcttcgagataa

SEQ ID NO: 3528572 - DNA, 25 bp, Homo sapien
gcagccttgactctgataggatgac

SEQ ID NO: 3528573 - DNA, 25 bp, Homo sapien
tcgctcggctcaggatcattccagt

SEQ ID NO: 3528574 - DNA, 25 bp, Homo sapien
tatccttctagtgatgttccctcag

SEQ ID NO: 3528575 - DNA, 25 bp, Homo sapien
ccaggcagccctgagttatcgctcg

SEQ ID NO: 3528576 - DNA, 25 bp, Homo sapien
tctcatgtgtttgcagtgtggaaaa

SEQ ID NO: 3528577 - DNA, 25 bp, Homo sapien
tctgtataccagacaccatgcttga

SEQ ID NO: 3528578 - DNA, 25 bp, Homo sapien
catctactggagatttatggcacgt

SEQ ID NO: 3528579 - DNA, 25 bp, Homo sapien
tatgggatctgagaatggaccttcc

SEQ ID NO: 3528580 - DNA, 25 bp, Homo sapien
acaggccacaggatcgatggcgcta

SEQ ID NO: 3528581 - DNA, 25 bp, Homo sapien
gatcgatggcgctatttgactcctg

SEQ ID NO: 3528582 - DNA, 25 bp, Homo sapien
gcttcactgcctgagaaactccact

SEQ ID NO: 3528583 - DNA, 25 bp, Homo sapien
tcactgcctgagaaactccactttc

SEQ ID NO: 3528584 - DNA, 25 bp, Homo sapien
cacccagtattaacaccatgctgtt

SEQ ID NO: 3528585 - DNA, 25 bp, Homo sapien
caccatgctgttcttcaagagatat

SEQ ID NO: 3528586 - DNA, 25 bp, Homo sapien
aagagtgaaggggtcctttgtctct

SEQ ID NO: 3528587 - DNA, 25 bp, Homo sapien
agtgaaggggtcctttgtctctgcc

SEQ ID NO: 3528588 - DNA, 25 bp, Homo sapien
tggaaatccctcacaaacttcccaa

SEQ ID NO: 3528589 - DNA, 25 bp, Homo sapien
ttcaaactggtcaggtatctgttga

SEQ ID NO: 3528590 - DNA, 25 bp, Homo sapien
tacagttgaaattaattggaaatcc

SEQ ID NO: 3528591 - DNA, 25 bp, Homo sapien
attaattggaaatccctcacaaact

SEQ ID NO: 3528592 - DNA, 25 bp, Homo sapien
cagcattaggatccaaaaaggtctt

SEQ ID NO: 3528593 - DNA, 25 bp, Homo sapien
caaaaaggtcttatatgcaaccatg

SEQ ID NO: 3528594 - DNA, 25 bp, Homo sapien
caaatgcactcactcggtcaaaggt

SEQ ID NO: 3528595 - DNA, 25 bp, Homo sapien
tgatatcacctctggcaaatgcact

SEQ ID NO: 3528596 - DNA, 25 bp, Homo sapien
tgtatgctctaccataagagaccca

SEQ ID NO: 3528597 - DNA, 25 bp, Homo sapien
cattcttcagcgaaagtggattctt

SEQ ID NO: 3528598 - DNA, 25 bp, Homo sapien
cattgaagaataattgaggcctggt

SEQ ID NO: 3528599 - DNA, 25 bp, Homo sapien
ggaagaaccttgaagcctttgatga

SEQ ID NO: 3528600 - DNA, 25 bp, Homo sapien
gagatctctccagtgtttttaccat

SEQ ID NO: 3528601 - DNA, 25 bp, Homo sapien
ccgatcccaaatcttttttactgat

SEQ ID NO: 3528602 - DNA, 25 bp, Homo sapien
gtcagtttgaattgggctatccgat

SEQ ID NO: 3528603 - DNA, 25 bp, Homo sapien
tgataccaacagagatctctccagt

SEQ ID NO: 3528604 - DNA, 25 bp, Homo sapien
tgctcagcctgtaattgggggccaa

SEQ ID NO: 3528605 - DNA, 25 bp, Homo sapien
cataagaggagaattgctcctgctc

SEQ ID NO: 3528606 - DNA, 25 bp, Homo sapien
cctcctgggacaagcgtgtttgctg

SEQ ID NO: 3528607 - DNA, 25 bp, Homo sapien
acttttgatagctgtctgcaattca

SEQ ID NO: 3528608 - DNA, 25 bp, Homo sapien
cctttgccgtcattgaaagaatgac

SEQ ID NO: 3528609 - DNA, 25 bp, Homo sapien
tgttcctttgccgtcattgaaagaa

SEQ ID NO: 3528610 - DNA, 25 bp, Homo sapien
ttgccgtcattgaaagaatgacttt

SEQ ID NO: 3528611 - DNA, 25 bp, Homo sapien
ttatggtgttcctttgccgtcattg

SEQ ID NO: 3528612 - DNA, 25 bp, Homo sapien
caatccctatctgagcccttgatgc

SEQ ID NO: 3528613 - DNA, 25 bp, Homo sapien
ccatattagacttagaaagacccat

SEQ ID NO: 3528614 - DNA, 25 bp, Homo sapien
tcctttttgaggtatagttccagac

SEQ ID NO: 3528615 - DNA, 25 bp, Homo sapien
ccaacatgttcttctaaagtgatag

SEQ ID NO: 3528616 - DNA, 25 bp, Homo sapien
tggtcgatggaaggatggcccacat

SEQ ID NO: 3528617 - DNA, 25 bp, Homo sapien
gcctctgatgttgtgctgccctttg

SEQ ID NO: 3528618 - DNA, 25 bp, Homo sapien
cagtgtgtgaacttgtggcccattc

SEQ ID NO: 3528619 - DNA, 25 bp, Homo sapien
tggcccacattcacttggctgctgg

SEQ ID NO: 3528620 - DNA, 25 bp, Homo sapien
ggaaactaccctaggctggaggcca

SEQ ID NO: 3528621 - DNA, 25 bp, Homo sapien
caagccagacatttccctcatggag

SEQ ID NO: 3528622 - DNA, 25 bp, Homo sapien
ggaaacagtggttaacaagccagac

SEQ ID NO: 3528623 - DNA, 25 bp, Homo sapien
ggagacattagagtcacctcgtcca

SEQ ID NO: 3528624 - DNA, 25 bp, Homo sapien
cagctgtgattgcagtacagatttc

SEQ ID NO: 3528625 - DNA, 25 bp, Homo sapien
ttcacacagtgtaattactgcagtg

SEQ ID NO: 3528626 - DNA, 25 bp, Homo sapien
ctgtaagttggcagctgtgattgca

SEQ ID NO: 3528627 - DNA, 25 bp, Homo sapien
tgtaattactgcagtgacactagga

SEQ ID NO: 3528628 - DNA, 25 bp, Homo sapien
aataagagtaccaacactgtggccc

SEQ ID NO: 3528629 - DNA, 25 bp, Homo sapien
gtggccccagcaatcgaaaagtaat

SEQ ID NO: 3528630 - DNA, 25 bp, Homo sapien
taattactatctgctgggtgatgcg

SEQ ID NO: 3528631 - DNA, 25 bp, Homo sapien
cggtattgatcagaaaaggtggcac

SEQ ID NO: 3528632 - DNA, 25 bp, Homo sapien
aaggctctttcctcaggttctatga

SEQ ID NO: 3528633 - DNA, 25 bp, Homo sapien
tcagaacaaggctctttcctcaggt

SEQ ID NO: 3528634 - DNA, 25 bp, Homo sapien
cagaacaaggctctttcctcaggtt

SEQ ID NO: 3528635 - DNA, 25 bp, Homo sapien
aacaaggctctttcctcaggttcta

SEQ ID NO: 3528636 - DNA, 25 bp, Homo sapien
agccaatggccatctcaacaggaac

SEQ ID NO: 3528637 - DNA, 25 bp, Homo sapien
ctccagacatcctatcaacctccat

SEQ ID NO: 3528638 - DNA, 25 bp, Homo sapien
agagccctccagacatcctatcaac

SEQ ID NO: 3528639 - DNA, 25 bp, Homo sapien
aatggccatctcaacaggaaccatc

SEQ ID NO: 3528640 - DNA, 25 bp, Homo sapien
tagagttgccatgcaaaagaccagc

SEQ ID NO: 3528641 - DNA, 25 bp, Homo sapien
gaacctgaagcttcaagggacaacc

SEQ ID NO: 3528642 - DNA, 25 bp, Homo sapien
atacagactgaaggctagagttgcc

SEQ ID NO: 3528643 - DNA, 25 bp, Homo sapien
tcacctaggaacagcttagaacttt

SEQ ID NO: 3528644 - DNA, 25 bp, Homo sapien
tgggttgaatctggcttcaccagaa

SEQ ID NO: 3528645 - DNA, 25 bp, Homo sapien
ctactgggttgaatctggcttcacc

SEQ ID NO: 3528646 - DNA, 25 bp, Homo sapien
ggttgaatctggcttcaccagaagc

SEQ ID NO: 3528647 - DNA, 25 bp, Homo sapien
cagggacttgcagggcagttagagt

SEQ ID NO: 3528648 - DNA, 25 bp, Homo sapien
cacaggagattgaggcttgcctggg

SEQ ID NO: 3528649 - DNA, 25 bp, Homo sapien
ttgagcacaggagattgaggcttgc

SEQ ID NO: 3528650 - DNA, 25 bp, Homo sapien
tgagcacaggagattgaggcttgcc

SEQ ID NO: 3528651 - DNA, 25 bp, Homo sapien
agcacaggagattgaggcttgcctg

SEQ ID NO: 3528652 - DNA, 25 bp, Homo sapien
ccatagttgatctctttagcattgc

SEQ ID NO: 3528653 - DNA, 25 bp, Homo sapien
gtacaatagcacatatccatagttg

SEQ ID NO: 3528654 - DNA, 25 bp, Homo sapien
gcattgctcagacatatcattaact

SEQ ID NO: 3528655 - DNA, 25 bp, Homo sapien
gacaatagcccacaatgatatgcat

SEQ ID NO: 3528656 - DNA, 25 bp, Homo sapien
gtcttacattcaaaataggccacaa

SEQ ID NO: 3528657 - DNA, 25 bp, Homo sapien
tagtcttacattcaaaataggccac

SEQ ID NO: 3528658 - DNA, 25 bp, Homo sapien
ttcaaaataggccacaaatttagcc

SEQ ID NO: 3528659 - DNA, 25 bp, Homo sapien
gccacaaatttagcctttttcatta

SEQ ID NO: 3528660 - DNA, 25 bp, Homo sapien
agtgtttttcaatacactaccaaag

SEQ ID NO: 3528661 - DNA, 25 bp, Homo sapien
ttttcccacaacttcagacataaat

SEQ ID NO: 3528662 - DNA, 25 bp, Homo sapien
aattgcagtgtttttcaatacacta

SEQ ID NO: 3528663 - DNA, 25 bp, Homo sapien
attttcccacaacttcagacataaa

SEQ ID NO: 3528664 - DNA, 25 bp, Homo sapien
atttccatgtaagaagctgccttca

SEQ ID NO: 3528665 - DNA, 25 bp, Homo sapien
gaagctgccttcactttgcccagta

SEQ ID NO: 3528666 - DNA, 25 bp, Homo sapien
gctgccttcactttgcccagtatgc

SEQ ID NO: 3528667 - DNA, 25 bp, Homo sapien
atagaatttccatgtaagaagctgc

SEQ ID NO: 3528668 - DNA, 25 bp, Homo sapien
ccttagagacccaaagtagtcctcg

SEQ ID NO: 3528669 - DNA, 25 bp, Homo sapien
gggccaaaagaactccttggatgta

SEQ ID NO: 3528670 - DNA, 25 bp, Homo sapien
gactttaatcgttggtacagggcca

SEQ ID NO: 3528671 - DNA, 25 bp, Homo sapien
caaagtagtcctcgcaaaggtgtga

SEQ ID NO: 3528672 - DNA, 25 bp, Homo sapien
tagagaggcaattcctgcgttacta

SEQ ID NO: 3528673 - DNA, 25 bp, Homo sapien
gtcttagagaggcaattcctgcgtt

SEQ ID NO: 3528674 - DNA, 25 bp, Homo sapien
gcaattcctgcgttactagtggcca

SEQ ID NO: 3528675 - DNA, 25 bp, Homo sapien
ttcctgcgttactagtggccaccat

SEQ ID NO: 3528676 - DNA, 25 bp, Homo sapien
tctaaaggcgatattcaaaaccact

SEQ ID NO: 3528677 - DNA, 25 bp, Homo sapien
tgattctgaatagggcccatttgca

SEQ ID NO: 3528678 - DNA, 25 bp, Homo sapien
tgtaacagcatggaatctaaaggcg

SEQ ID NO: 3528679 - DNA, 25 bp, Homo sapien
taagagttgccatgttcagggctgg

SEQ ID NO: 3528680 - DNA, 25 bp, Homo sapien
tctttaagaaaggtactgccaaatc

SEQ ID NO: 3528681 - DNA, 25 bp, Homo sapien
ctttaagaaaggtactgccaaatct

SEQ ID NO: 3528682 - DNA, 25 bp, Homo sapien
tgtatgccccttcccagataaatgg

SEQ ID NO: 3528683 - DNA, 25 bp, Homo sapien
tttaagaaaggtactgccaaatctg

SEQ ID NO: 3528684 - DNA, 25 bp, Homo sapien
cttattcatgtcaggtttagctgtg

SEQ ID NO: 3528685 - DNA, 25 bp, Homo sapien
tcttccccgtggaagggccagacat

SEQ ID NO: 3528686 - DNA, 25 bp, Homo sapien
ctgtgtcacttgcaatgctcttccc

SEQ ID NO: 3528687 - DNA, 25 bp, Homo sapien
tgctcttccccgtggaagggccaga

SEQ ID NO: 3528688 - DNA, 25 bp, Homo sapien
taagtgactagggtgctacagactg

SEQ ID NO: 3528689 - DNA, 25 bp, Homo sapien
gaagcacgagtcatgaatccgaatg

SEQ ID NO: 3528690 - DNA, 25 bp, Homo sapien
cacttctgggatacgtgaagcacga

SEQ ID NO: 3528691 - DNA, 25 bp, Homo sapien
tctggcatccatgaagtatcacgtc

SEQ ID NO: 3528692 - DNA, 25 bp, Homo sapien
aaggaaggattctttgtgttacatg

SEQ ID NO: 3528693 - DNA, 25 bp, Homo sapien
taaccttacctaatccttctagata

SEQ ID NO: 3528694 - DNA, 25 bp, Homo sapien
ataatgacactcttattaaccccaa

SEQ ID NO: 3528695 - DNA, 25 bp, Homo sapien
tctagataatgggtaggtatctaca

SEQ ID NO: 3528696 - DNA, 25 bp, Homo sapien
aaatcataaaaatatctggctggta

SEQ ID NO: 3528697 - DNA, 25 bp, Homo sapien
ttcttattgtacaagtatctaaaac

SEQ ID NO: 3528698 - DNA, 25 bp, Homo sapien
tttttctgccatacaaatcataaaa

SEQ ID NO: 3528699 - DNA, 25 bp, Homo sapien
ctggctggtaaatttagattcattc

SEQ ID NO: 3528700 - DNA, 25 bp, Homo sapien
tttaagacaagctaacaagtctgcc

SEQ ID NO: 3528701 - DNA, 25 bp, Homo sapien
aagacaagctaacaagtctgccctt

SEQ ID NO: 3528702 - DNA, 25 bp, Homo sapien
ttaagacaagctaacaagtctgccc

SEQ ID NO: 3528703 - DNA, 25 bp, Homo sapien
taagacaagctaacaagtctgccct

SEQ ID NO: 3528704 - DNA, 25 bp, Homo sapien
taagtgaatacaatggcctgacctg

SEQ ID NO: 3528705 - DNA, 25 bp, Homo sapien
gcatctgtgtaagtgaatacaatgg

SEQ ID NO: 3528706 - DNA, 25 bp, Homo sapien
atctgtgtaagtgaatacaatggcc

SEQ ID NO: 3528707 - DNA, 25 bp, Homo sapien
tggcatctgtgtaagtgaatacaat

SEQ ID NO: 3528708 - DNA, 25 bp, Homo sapien
caaaaactcttcttgcctttctcaa

SEQ ID NO: 3528709 - DNA, 25 bp, Homo sapien
tgaacaaaaactcttcttgcctttc

SEQ ID NO: 3528710 - DNA, 25 bp, Homo sapien
aaactcttcttgcctttctcaacat

SEQ ID NO: 3528711 - DNA, 25 bp, Homo sapien
acaaaaactcttcttgcctttctca

SEQ ID NO: 3528712 - DNA, 25 bp, Homo sapien
aactgtttcgcttggctttcgttct

SEQ ID NO: 3528713 - DNA, 25 bp, Homo sapien
gattatgaggcttcctcagtcatgt

SEQ ID NO: 3528714 - DNA, 25 bp, Homo sapien
taaggtggtcaactacattgtctgt

SEQ ID NO: 3528715 - DNA, 25 bp, Homo sapien
tctgttgttaaaccaactgatatgg

SEQ ID NO: 3528716 - DNA, 25 bp, Homo sapien
taatagtcagccaaagacatgaggg

SEQ ID NO: 3528717 - DNA, 25 bp, Homo sapien
gcaaatgtctccttaccctgcacat

SEQ ID NO: 3528718 - DNA, 25 bp, Homo sapien
tctccaactggtcaaaatgcaaatg

SEQ ID NO: 3528719 - DNA, 25 bp, Homo sapien
tctacaaatagctccctcttatggt

SEQ ID NO: 3528720 - DNA, 25 bp, Homo sapien
taaagaacagaattcggactgaggt

SEQ ID NO: 3528721 - DNA, 25 bp, Homo sapien
ccgtcttttgatatcagtaggaagc

SEQ ID NO: 3528722 - DNA, 25 bp, Homo sapien
gtaggaagcatcaacccattcattg

SEQ ID NO: 3528723 - DNA, 25 bp, Homo sapien
cctgccccatgccattcttaaagaa

SEQ ID NO: 3528724 - DNA, 25 bp, Homo sapien
ttctgaaatgctaccaccagtttct

SEQ ID NO: 3528725 - DNA, 25 bp, Homo sapien
ggttttctgaaatgctaccaccagt

SEQ ID NO: 3528726 - DNA, 25 bp, Homo sapien
ttagatgctggttttctgaaatgct

SEQ ID NO: 3528727 - DNA, 25 bp, Homo sapien
tgaaatgctaccaccagtttcttac

SEQ ID NO: 3528728 - DNA, 25 bp, Homo sapien
tgacataagctgtagcaagctgtct

SEQ ID NO: 3528729 - DNA, 25 bp, Homo sapien
gctctgatagcctgcataaatcatc

SEQ ID NO: 3528730 - DNA, 25 bp, Homo sapien
taagctgtagcaagctgtctgctct

SEQ ID NO: 3528731 - DNA, 25 bp, Homo sapien
ctgtctgctctgatagcctgcataa

SEQ ID NO: 3528732 - DNA, 25 bp, Homo sapien
tctcggcgagaccttgaacccatac

SEQ ID NO: 3528733 - DNA, 25 bp, Homo sapien
ccttgaacccatactgcttaatcat

SEQ ID NO: 3528734 - DNA, 25 bp, Homo sapien
cgagaccttgaacccatactgctta

SEQ ID NO: 3528735 - DNA, 25 bp, Homo sapien
tgtttccacttcttttacagttatc

SEQ ID NO: 3528736 - DNA, 25 bp, Homo sapien
tcccctttggattgttcttgagtct

SEQ ID NO: 3528737 - DNA, 25 bp, Homo sapien
tcaacggcagtaacatccgagttcc

SEQ ID NO: 3528738 - DNA, 25 bp, Homo sapien
ggactgttcttgaatcactaccttg

SEQ ID NO: 3528739 - DNA, 25 bp, Homo sapien
taccttgttgatagttctttcagca

SEQ ID NO: 3528740 - DNA, 25 bp, Homo sapien
cagatacgtgtgacaacttgtatga

SEQ ID NO: 3528741 - DNA, 25 bp, Homo sapien
agtaaagtcagatacgtgtgacaac

SEQ ID NO: 3528742 - DNA, 25 bp, Homo sapien
ctttgttagtaaagtcagatacgtg

SEQ ID NO: 3528743 - DNA, 25 bp, Homo sapien
tgtgacaacttgtatgaaaagcttg

SEQ ID NO: 3528744 - DNA, 25 bp, Homo sapien
gcaagactaaagcagccattggtgt

SEQ ID NO: 3528745 - DNA, 25 bp, Homo sapien
cattggtgtaggcagcactatagcg

SEQ ID NO: 3528746 - DNA, 25 bp, Homo sapien
gattgaattaagtagtggttgccct

SEQ ID NO: 3528747 - DNA, 25 bp, Homo sapien
cacaaaggctggtatctgttttggc

SEQ ID NO: 3528748 - DNA, 25 bp, Homo sapien
gatgtgagtagtgggtcacctattg

SEQ ID NO: 3528749 - DNA, 25 bp, Homo sapien
gaaatattaaggtatgatgtgatgt

SEQ ID NO: 3528750 - DNA, 25 bp, Homo sapien
taaggtatgatgtgatgtgagtagt

SEQ ID NO: 3528751 - DNA, 25 bp, Homo sapien
atgtgatgtgagtagtgggtcacct

SEQ ID NO: 3528752 - DNA, 25 bp, Homo sapien
gccaacattttggtgctaaaagaac

SEQ ID NO: 3528753 - DNA, 25 bp, Homo sapien
ccattgcacaacaccagattttggt

SEQ ID NO: 3528754 - DNA, 25 bp, Homo sapien
gtgggttaagcttgctgatccagca

SEQ ID NO: 3528755 - DNA, 25 bp, Homo sapien
cacagccaaagatacgcagacaaag

SEQ ID NO: 3528756 - DNA, 25 bp, Homo sapien
tgtaaatgcgtaaacattagttttg

SEQ ID NO: 3528757 - DNA, 25 bp, Homo sapien
gctgtaaatgcgtaaacattagttt

SEQ ID NO: 3528758 - DNA, 25 bp, Homo sapien
agctgtaaatgcgtaaacattagtt

SEQ ID NO: 3528759 - DNA, 25 bp, Homo sapien
tgagctgtaaatgcgtaaacattag

SEQ ID NO: 3528760 - DNA, 25 bp, Homo sapien
gacaggatgaaaatcattttttaat

SEQ ID NO: 3528761 - DNA, 25 bp, Homo sapien
aggatgaaaatcattttttaattgc

SEQ ID NO: 3528762 - DNA, 25 bp, Homo sapien
tgaaaatcattttttaattgcaccc

SEQ ID NO: 3528763 - DNA, 25 bp, Homo sapien
gatgaaaatcattttttaattgcac

SEQ ID NO: 3528764 - DNA, 25 bp, Homo sapien
agcaattcagtatgtgtgggggtag

SEQ ID NO: 3528765 - DNA, 25 bp, Homo sapien
cttaagcaattcagtatgtgtgggg

SEQ ID NO: 3528766 - DNA, 25 bp, Homo sapien
caattcagtatgtgtgggggtaggg

SEQ ID NO: 3528767 - DNA, 25 bp, Homo sapien
ttcagtatgtgtgggggtagggtat

SEQ ID NO: 3528768 - DNA, 25 bp, Homo sapien
gagggcttccttgccgtctgccaag

SEQ ID NO: 3528769 - DNA, 25 bp, Homo sapien
tatatcttcaggttcgagggcttcc

SEQ ID NO: 3528770 - DNA, 25 bp, Homo sapien
aacactcgtcttgcggccatgttca

SEQ ID NO: 3528771 - DNA, 25 bp, Homo sapien
gaaacataaacatcggcttcatggg

SEQ ID NO: 3528772 - DNA, 25 bp, Homo sapien
ctggcaaagactgttctagatccat

SEQ ID NO: 3528773 - DNA, 25 bp, Homo sapien
tgagacaatttctgccaattccggg

SEQ ID NO: 3528774 - DNA, 25 bp, Homo sapien
caattccgggctgactgaaatttta

SEQ ID NO: 3528775 - DNA, 25 bp, Homo sapien
gatggttggtacagtaactctggca

SEQ ID NO: 3528776 - DNA, 25 bp, Homo sapien
tgtgtggagcaatcttgaagtcctg

SEQ ID NO: 3528777 - DNA, 25 bp, Homo sapien
tgacccttctgatactgctgctgaa

SEQ ID NO: 3528778 - DNA, 25 bp, Homo sapien
tgctgctgaatgcacgagtctgttg

SEQ ID NO: 3528779 - DNA, 25 bp, Homo sapien
gatgctgatatagaacaagaattgt

SEQ ID NO: 3528780 - DNA, 25 bp, Homo sapien
atatagtctcgtggtgcgccgtttc

SEQ ID NO: 3528781 - DNA, 25 bp, Homo sapien
tgagccaggtgtgggatatagtctc

SEQ ID NO: 3528782 - DNA, 25 bp, Homo sapien
tctgagccaggtgtgggatatagtc

SEQ ID NO: 3528783 - DNA, 25 bp, Homo sapien
tagtctcgtggtgcgccgtttctta

SEQ ID NO: 3528784 - DNA, 25 bp, Homo sapien
caagagggataaggaagactgagat

SEQ ID NO: 3528785 - DNA, 25 bp, Homo sapien
cttcagggctactttgctgtaatac

SEQ ID NO: 3528786 - DNA, 25 bp, Homo sapien
tattcccatccaaagtgccttcagg

SEQ ID NO: 3528787 - DNA, 25 bp, Homo sapien
gatagtgcttctctgtgatcttctg

SEQ ID NO: 3528788 - DNA, 25 bp, Homo sapien
atcttctacattaatcacgctggga

SEQ ID NO: 3528789 - DNA, 25 bp, Homo sapien
tcacccatcttctacattaatcacg

SEQ ID NO: 3528790 - DNA, 25 bp, Homo sapien
ccatcttctacattaatcacgctgg

SEQ ID NO: 3528791 - DNA, 25 bp, Homo sapien
aatcacccatcttctacattaatca

SEQ ID NO: 3528792 - DNA, 25 bp, Homo sapien
tttacattttgattccatcacatca

SEQ ID NO: 3528793 - DNA, 25 bp, Homo sapien
acattttgattccatcacatcaagt

SEQ ID NO: 3528794 - DNA, 25 bp, Homo sapien
ttccatcacatcaagtctctgagag

SEQ ID NO: 3528795 - DNA, 25 bp, Homo sapien
tttgattccatcacatcaagtctct

SEQ ID NO: 3528796 - DNA, 25 bp, Homo sapien
tagtaaacgccactccatagaagcg

SEQ ID NO: 3528797 - DNA, 25 bp, Homo sapien
gccactccatagaagcggtgaccgg

SEQ ID NO: 3528798 - DNA, 25 bp, Homo sapien
taaacgccactccatagaagcggtg

SEQ ID NO: 3528799 - DNA, 25 bp, Homo sapien
ggtagtaaacgccactccatagaag

SEQ ID NO: 3528800 - DNA, 25 bp, Homo sapien
ggaacagtgacttccggcggaagaa

SEQ ID NO: 3528801 - DNA, 25 bp, Homo sapien
ggtagcagcgcctatgtgaagttag

SEQ ID NO: 3528802 - DNA, 25 bp, Homo sapien
gagaagattcccaagtcccgagctt

SEQ ID NO: 3528803 - DNA, 25 bp, Homo sapien
gaaacgcgaacacgtcggaacagtg

SEQ ID NO: 3528804 - DNA, 25 bp, Homo sapien
tcattgaccttggttctttgaactg

SEQ ID NO: 3528805 - DNA, 25 bp, Homo sapien
aaaattcttcattgaccttggttct

SEQ ID NO: 3528806 - DNA, 25 bp, Homo sapien
ttgtctactatccattggcttctca

SEQ ID NO: 3528807 - DNA, 25 bp, Homo sapien
tcttcttgccaaacattaattgtct

SEQ ID NO: 3528808 - DNA, 25 bp, Homo sapien
tgtacattttaggtccacaggaaca

SEQ ID NO: 3528809 - DNA, 25 bp, Homo sapien
ttgtacattttaggtccacaggaac

SEQ ID NO: 3528810 - DNA, 25 bp, Homo sapien
tctgagttgttgtaggagagcccct

SEQ ID NO: 3528811 - DNA, 25 bp, Homo sapien
taggagagcccctctataggatctg

SEQ ID NO: 3528812 - DNA, 25 bp, Homo sapien
cctctataggatctgtatgtgtaca

SEQ ID NO: 3528813 - DNA, 25 bp, Homo sapien
agagcaagagctctgagttgttgta

SEQ ID NO: 3528814 - DNA, 25 bp, Homo sapien
gaatctttgtcccagcctgtatgat

SEQ ID NO: 3528815 - DNA, 25 bp, Homo sapien
taatcctcattgtttgccgtagaat

SEQ ID NO: 3528816 - DNA, 25 bp, Homo sapien
aaataccaggatagcatttgctgtg

SEQ ID NO: 3528817 - DNA, 25 bp, Homo sapien
ctgtgtaaccaaataccaggatagc

SEQ ID NO: 3528818 - DNA, 25 bp, Homo sapien
aaaattgagctctctagtacttggg

SEQ ID NO: 3528819 - DNA, 25 bp, Homo sapien
taaagaccaggataggttaccgaga

SEQ ID NO: 3528820 - DNA, 25 bp, Homo sapien
gagagtttgttataaccaggtcaaa

SEQ ID NO: 3528821 - DNA, 25 bp, Homo sapien
ctttctcgtgtttcatagctccatg

SEQ ID NO: 3528822 - DNA, 25 bp, Homo sapien
ccactgttgagacaatggagccaca

SEQ ID NO: 3528823 - DNA, 25 bp, Homo sapien
taaccacaatggtggacaagcagag

SEQ ID NO: 3528824 - DNA, 25 bp, Homo sapien
gaatttgctgttgccccatccttgg

SEQ ID NO: 3528825 - DNA, 25 bp, Homo sapien
ttgtgaatgacccagcgagagctct

SEQ ID NO: 3528826 - DNA, 25 bp, Homo sapien
gaagtgcataaatctaagtgtgtag

SEQ ID NO: 3528827 - DNA, 25 bp, Homo sapien
tgcataaatctaagtgtgtagcttg

SEQ ID NO: 3528828 - DNA, 25 bp, Homo sapien
taaatctaagtgtgtagcttgatgg

SEQ ID NO: 3528829 - DNA, 25 bp, Homo sapien
ctaagtgtgtagcttgatggatttt

SEQ ID NO: 3528830 - DNA, 25 bp, Homo sapien
tgtgcccatggtactgaataatcag

SEQ ID NO: 3528831 - DNA, 25 bp, Homo sapien
ttttgaaaccagaatccctacagga

SEQ ID NO: 3528832 - DNA, 25 bp, Homo sapien
caccatcatagggtagttttgccag

SEQ ID NO: 3528833 - DNA, 25 bp, Homo sapien
catacagatgtttagacagccacag

SEQ ID NO: 3528834 - DNA, 25 bp, Homo sapien
aatagcttcccagtagattggcagt

SEQ ID NO: 3528835 - DNA, 25 bp, Homo sapien
cagtgtttaatctcccaattctagc

SEQ ID NO: 3528836 - DNA, 25 bp, Homo sapien
gtctataagataccctggaatacag

SEQ ID NO: 3528837 - DNA, 25 bp, Homo sapien
ctatgtgagaagaacaatagcttcc

SEQ ID NO: 3528838 - DNA, 25 bp, Homo sapien
tagtgaggtagttacttacaagtct

SEQ ID NO: 3528839 - DNA, 25 bp, Homo sapien
aagcggaagaagttagcctgatttc

SEQ ID NO: 3528840 - DNA, 25 bp, Homo sapien
gtgtttccaaggatgaagcggaaga

SEQ ID NO: 3528841 - DNA, 25 bp, Homo sapien
actctgcaccttttaagggtattag

SEQ ID NO: 3528842 - DNA, 25 bp, Homo sapien
ccaaagcttgtaaacactgccatct

SEQ ID NO: 3528843 - DNA, 25 bp, Homo sapien
aagtgttgcctccaatcttggtccg

SEQ ID NO: 3528844 - DNA, 25 bp, Homo sapien
tcttggtccgtatttccaaagcttg

SEQ ID NO: 3528845 - DNA, 25 bp, Homo sapien
tgccatgatctcaggtcgctgtaac

SEQ ID NO: 3528846 - DNA, 25 bp, Homo sapien
gcagcctgggctacagagagcaaga

SEQ ID NO: 3528847 - DNA, 25 bp, Homo sapien
ctgcagcctgggctacagagagcaa

SEQ ID NO: 3528848 - DNA, 25 bp, Homo sapien
ggttgtgccactgcactgcagcctg

SEQ ID NO: 3528849 - DNA, 25 bp, Homo sapien
cccaggaggcagagtgagccgaggt

SEQ ID NO: 3528850 - DNA, 25 bp, Homo sapien
taatttcaaatgagtgggctgagca

SEQ ID NO: 3528851 - DNA, 25 bp, Homo sapien
gtcaggttgaacttataaatacgaa

SEQ ID NO: 3528852 - DNA, 25 bp, Homo sapien
ttttatcaaacctggcattgtcagg

SEQ ID NO: 3528853 - DNA, 25 bp, Homo sapien
tacgaatagttactactctgacttg

SEQ ID NO: 3528854 - DNA, 25 bp, Homo sapien
actaacagaacttggcagaatgtgt

SEQ ID NO: 3528855 - DNA, 25 bp, Homo sapien
tattttgaactaacagaacttggca

SEQ ID NO: 3528856 - DNA, 25 bp, Homo sapien
gttgaatattctttacatttaacaa

SEQ ID NO: 3528857 - DNA, 25 bp, Homo sapien
tgtatcataaaatttagatgacttt

SEQ ID NO: 3528858 - DNA, 25 bp, Homo sapien
tttcaacgggagtaataaattcaca

SEQ ID NO: 3528859 - DNA, 25 bp, Homo sapien
caacgggagtaataaattcacatga

SEQ ID NO: 3528860 - DNA, 25 bp, Homo sapien
aacgggagtaataaattcacatgaa

SEQ ID NO: 3528861 - DNA, 25 bp, Homo sapien
tcaacgggagtaataaattcacatg

SEQ ID NO: 3528862 - DNA, 25 bp, Homo sapien
ccattagggctggcacgtaaaaatc

SEQ ID NO: 3528863 - DNA, 25 bp, Homo sapien
tagggctggcacgtaaaaatccaaa

SEQ ID NO: 3528864 - DNA, 25 bp, Homo sapien
cattagggctggcacgtaaaaatcc

SEQ ID NO: 3528865 - DNA, 25 bp, Homo sapien
ttagggctggcacgtaaaaatccaa

SEQ ID NO: 3528866 - DNA, 25 bp, Homo sapien
aatgttatagtatcatcatattccc

SEQ ID NO: 3528867 - DNA, 25 bp, Homo sapien
ccttttctctatgccagataaacac

SEQ ID NO: 3528868 - DNA, 25 bp, Homo sapien
taaaatcaaaatgaggttgaagaca

SEQ ID NO: 3528869 - DNA, 25 bp, Homo sapien
aaacactttctccttactcatcaat

SEQ ID NO: 3528870 - DNA, 25 bp, Homo sapien
tcaccttctaaccaaacatgaccca

SEQ ID NO: 3528871 - DNA, 25 bp, Homo sapien
taaagaagattcgtcctcttattag

SEQ ID NO: 3528872 - DNA, 25 bp, Homo sapien
aagaagattcgtcctcttattagtc

SEQ ID NO: 3528873 - DNA, 25 bp, Homo sapien
cttaaagaagattcgtcctcttatt

SEQ ID NO: 3528874 - DNA, 25 bp, Homo sapien
agaaatgcagcctcttaaagataaa

SEQ ID NO: 3528875 - DNA, 25 bp, Homo sapien
gaatagatacaaatcctaatattgc

SEQ ID NO: 3528876 - DNA, 25 bp, Homo sapien
catgtcattcagaggtagggagaaa

SEQ ID NO: 3528877 - DNA, 25 bp, Homo sapien
tagggagaaatgtcctaaggctctc

SEQ ID NO: 3528878 - DNA, 25 bp, Homo sapien
caaattaactctgcgtttagataca

SEQ ID NO: 3528879 - DNA, 25 bp, Homo sapien
cagaccaaaatgatctatgtatggg

SEQ ID NO: 3528880 - DNA, 25 bp, Homo sapien
cagttgaattattgaccagaccaaa

SEQ ID NO: 3528881 - DNA, 25 bp, Homo sapien
tacgtaagcgattttaagattctgg

SEQ ID NO: 3528882 - DNA, 25 bp, Homo sapien
ctttaatctaacaagatctctataa

SEQ ID NO: 3528883 - DNA, 25 bp, Homo sapien
gatcttttaaaattaaagcaggcat

SEQ ID NO: 3528884 - DNA, 25 bp, Homo sapien
agatcttttaaaattaaagcaggca

SEQ ID NO: 3528885 - DNA, 25 bp, Homo sapien
cacctctataagttgcaggttgagt

SEQ ID NO: 3528886 - DNA, 25 bp, Homo sapien
tgatccacctctataagttgcaggt

SEQ ID NO: 3528887 - DNA, 25 bp, Homo sapien
ttgctgatccacctctataagttgc

SEQ ID NO: 3528888 - DNA, 25 bp, Homo sapien
ctttgctgatccacctctataagtt

SEQ ID NO: 3528889 - DNA, 25 bp, Homo sapien
tacaactaaggctgaaaaccactct

SEQ ID NO: 3528890 - DNA, 25 bp, Homo sapien
catgtgcctcagatatagctaactt

SEQ ID NO: 3528891 - DNA, 25 bp, Homo sapien
cctgagctatgataaaacctaatct

SEQ ID NO: 3528892 - DNA, 25 bp, Homo sapien
tacttcctgagctaggtttacttcc

SEQ ID NO: 3528893 - DNA, 25 bp, Homo sapien
cagttctgggtatctctcaaagcaa

SEQ ID NO: 3528894 - DNA, 25 bp, Homo sapien
tttacccttcctatagtgccagcag

SEQ ID NO: 3528895 - DNA, 25 bp, Homo sapien
caaagtgtggccatattaagatcct

SEQ ID NO: 3528896 - DNA, 25 bp, Homo sapien
caaacgactgatagagcaacgatac

SEQ ID NO: 3528897 - DNA, 25 bp, Homo sapien
ccaactagtcagaatgtaggagatg

SEQ ID NO: 3528898 - DNA, 25 bp, Homo sapien
tggtctcgaacttaaatgggcatgc

SEQ ID NO: 3528899 - DNA, 25 bp, Homo sapien
gggactgaagccagtttataggcct

SEQ ID NO: 3528900 - DNA, 25 bp, Homo sapien
taaattagatgcatactgtacacag

SEQ ID NO: 3528901 - DNA, 25 bp, Homo sapien
cagtggcacgagacggatggcattt

SEQ ID NO: 3528902 - DNA, 25 bp, Homo sapien
tagggctgagcgcatcaaaacactg

SEQ ID NO: 3528903 - DNA, 25 bp, Homo sapien
tagattaccagtagaaaggttgcca

SEQ ID NO: 3528904 - DNA, 25 bp, Homo sapien
tcaaggagggaatagcaaagcatcc

SEQ ID NO: 3528905 - DNA, 25 bp, Homo sapien
aaaatcccatctaacccagtctgga

SEQ ID NO: 3528906 - DNA, 25 bp, Homo sapien
tcctactacatgtgccatacactgg

SEQ ID NO: 3528907 - DNA, 25 bp, Homo sapien
cacgtaacagactaccatgcttggc

SEQ ID NO: 3528908 - DNA, 25 bp, Homo sapien
gaatggccccacagaaactaaataa

SEQ ID NO: 3528909 - DNA, 25 bp, Homo sapien
tccttacactgggaagtcaggtcaa

SEQ ID NO: 3528910 - DNA, 25 bp, Homo sapien
ggaggaaaacactctaacgtccaga

SEQ ID NO: 3528911 - DNA, 25 bp, Homo sapien
tctttagacaacagaaggtttctct

SEQ ID NO: 3528912 - DNA, 25 bp, Homo sapien
tagttggatacaagcactagctgtg

SEQ ID NO: 3528913 - DNA, 25 bp, Homo sapien
agaattgtgttagctatagaatgaa

SEQ ID NO: 3528914 - DNA, 25 bp, Homo sapien
ttgtgttagctatagaatgaaaaag

SEQ ID NO: 3528915 - DNA, 25 bp, Homo sapien
gaattgtgttagctatagaatgaaa

SEQ ID NO: 3528916 - DNA, 25 bp, Homo sapien
tgttagctatagaatgaaaaagtca

SEQ ID NO: 3528917 - DNA, 25 bp, Homo sapien
gaacttcactttagcaaaagagtaa

SEQ ID NO: 3528918 - DNA, 25 bp, Homo sapien
gcagtatgccatgattgattatcct

SEQ ID NO: 3528919 - DNA, 25 bp, Homo sapien
gattatcctaggagccgttgctgag

SEQ ID NO: 3528920 - DNA, 25 bp, Homo sapien
tatcagctgcaatcaaggcattagc

SEQ ID NO: 3528921 - DNA, 25 bp, Homo sapien
ggtaatagaagaccagatggttgac

SEQ ID NO: 3528922 - DNA, 25 bp, Homo sapien
aggatttagtatatcagcagcttat

SEQ ID NO: 3528923 - DNA, 25 bp, Homo sapien
gcagcttataatacacaagcccttt

SEQ ID NO: 3528924 - DNA, 25 bp, Homo sapien
caagtcgcttgtttagatactctag

SEQ ID NO: 3528925 - DNA, 25 bp, Homo sapien
aatgctgacatctatggtaccaaag

SEQ ID NO: 3528926 - DNA, 25 bp, Homo sapien
ccagatatctttggtagccctcaga

SEQ ID NO: 3528927 - DNA, 25 bp, Homo sapien
cactctgctgtggtaatggattact

SEQ ID NO: 3528928 - DNA, 25 bp, Homo sapien
gcaaaagactgctatccactaacca

SEQ ID NO: 3528929 - DNA, 25 bp, Homo sapien
gccattgtcataaggtggtcaggta

SEQ ID NO: 3528930 - DNA, 25 bp, Homo sapien
catcatgcatttacttgggagcaag

SEQ ID NO: 3528931 - DNA, 25 bp, Homo sapien
cagttcagcagcgtggtaggctcca

SEQ ID NO: 3528932 - DNA, 25 bp, Homo sapien
tgggagcaagtttgcagtagaaact

SEQ ID NO: 3528933 - DNA, 25 bp, Homo sapien
atcaactgcgattaaaatgagtccc

SEQ ID NO: 3528934 - DNA, 25 bp, Homo sapien
ggtgttgcaagccatatagtttctg

SEQ ID NO: 3528935 - DNA, 25 bp, Homo sapien
aagaatcttatgctctagatcaggg

SEQ ID NO: 3528936 - DNA, 25 bp, Homo sapien
gaaatagtccaggtgttgcaagcca

SEQ ID NO: 3528937 - DNA, 25 bp, Homo sapien
aactctaaggtttgtggcctgaaca

SEQ ID NO: 3528938 - DNA, 25 bp, Homo sapien
tcttgcaaactaatggatggtagca

SEQ ID NO: 3528939 - DNA, 25 bp, Homo sapien
caattagacatgactctggagttca

SEQ ID NO: 3528940 - DNA, 25 bp, Homo sapien
ccagaaaatcggaagggtataagca

SEQ ID NO: 3528941 - DNA, 25 bp, Homo sapien
gcgactttgacaagaaccatcagtg

SEQ ID NO: 3528942 - DNA, 25 bp, Homo sapien
gcctgctgtgcaaaccaataggaga

SEQ ID NO: 3528943 - DNA, 25 bp, Homo sapien
actgagagttgatcactggagagac

SEQ ID NO: 3528944 - DNA, 25 bp, Homo sapien
tacacaactcttccctataggagga

SEQ ID NO: 3528945 - DNA, 25 bp, Homo sapien
taaggaaagcaaacagcatcttttt

SEQ ID NO: 3528946 - DNA, 25 bp, Homo sapien
caaaataaggaaagcaaacagcatc

SEQ ID NO: 3528947 - DNA, 25 bp, Homo sapien
aaggaaagcaaacagcatctttttt

SEQ ID NO: 3528948 - DNA, 25 bp, Homo sapien
cttcaaaataaggaaagcaaacagc

SEQ ID NO: 3528949 - DNA, 25 bp, Homo sapien
caatgatttttcttagaggatgcag

SEQ ID NO: 3528950 - DNA, 25 bp, Homo sapien
gaaactcatttcgtaaaatattgca

SEQ ID NO: 3528951 - DNA, 25 bp, Homo sapien
ttcgtaaaatattgcaccagtgtgc

SEQ ID NO: 3528952 - DNA, 25 bp, Homo sapien
tcaagatatgaatagcaggatcttc

SEQ ID NO: 3528953 - DNA, 25 bp, Homo sapien
aatatttgattttggatcacttggg

SEQ ID NO: 3528954 - DNA, 25 bp, Homo sapien
tgattttggatcacttgggcttttt

SEQ ID NO: 3528955 - DNA, 25 bp, Homo sapien
tatttgattttggatcacttgggct

SEQ ID NO: 3528956 - DNA, 25 bp, Homo sapien
ttttggatcacttgggctttttgca

SEQ ID NO: 3528957 - DNA, 25 bp, Homo sapien
aattttgaattgtaggctccattga

SEQ ID NO: 3528958 - DNA, 25 bp, Homo sapien
ttgtaggctccattgatggtccaga

SEQ ID NO: 3528959 - DNA, 25 bp, Homo sapien
aatgtcgactaagattttctgcaaa

SEQ ID NO: 3528960 - DNA, 25 bp, Homo sapien
ttggataccataaaaatgtcgacta

SEQ ID NO: 3528961 - DNA, 25 bp, Homo sapien
gctatacagccatattgaatagtat

SEQ ID NO: 3528962 - DNA, 25 bp, Homo sapien
tagtatagccaacaagtcgaaaggt

SEQ ID NO: 3528963 - DNA, 25 bp, Homo sapien
caatgagctatacagccatattgaa

SEQ ID NO: 3528964 - DNA, 25 bp, Homo sapien
agcacaatgagctatacagccatat

SEQ ID NO: 3528965 - DNA, 25 bp, Homo sapien
tctatgtagactctgccaccattgg

SEQ ID NO: 3528966 - DNA, 25 bp, Homo sapien
agttctatgtagactctgccaccat

SEQ ID NO: 3528967 - DNA, 25 bp, Homo sapien
ctatgtagactctgccaccattggc

SEQ ID NO: 3528968 - DNA, 25 bp, Homo sapien
gttctatgtagactctgccaccatt

SEQ ID NO: 3528969 - DNA, 25 bp, Homo sapien
aaaacacacagctacatccaggcac

SEQ ID NO: 3528970 - DNA, 25 bp, Homo sapien
tacatccaggcacagtagagtcaag

SEQ ID NO: 3528971 - DNA, 25 bp, Homo sapien
acacacagctacatccaggcacagt

SEQ ID NO: 3528972 - DNA, 25 bp, Homo sapien
atccaggcacagtagagtcaagatg

SEQ ID NO: 3528973 - DNA, 25 bp, Homo sapien
cagaatacccaaagtcacaagaagt

SEQ ID NO: 3528974 - DNA, 25 bp, Homo sapien
cacctgattgttcaggtctgaaatt

SEQ ID NO: 3528975 - DNA, 25 bp, Homo sapien
gatactacacataaacagaggtggt

SEQ ID NO: 3528976 - DNA, 25 bp, Homo sapien
caaatagaaggcaaaagtcgtcctt

SEQ ID NO: 3528977 - DNA, 25 bp, Homo sapien
tagtcttggcagttacgttgcatac

SEQ ID NO: 3528978 - DNA, 25 bp, Homo sapien
tagtacattaatggtgtgcatcagg

SEQ ID NO: 3528979 - DNA, 25 bp, Homo sapien
tatttcaattccttacagctagaca

SEQ ID NO: 3528980 - DNA, 25 bp, Homo sapien
tagcttagtttgtatatgtcttgca

SEQ ID NO: 3528981 - DNA, 25 bp, Homo sapien
taagtcatatagcttaacataaggt

SEQ ID NO: 3528982 - DNA, 25 bp, Homo sapien
taatttcatagtggctctatagcca

SEQ ID NO: 3528983 - DNA, 25 bp, Homo sapien
tgctgccagttatagcgccaggtgg

SEQ ID NO: 3528984 - DNA, 25 bp, Homo sapien
aaaggattagttctcagttgctgcc

SEQ ID NO: 3528985 - DNA, 25 bp, Homo sapien
cagtgaaggtgttaccgataatccc

SEQ ID NO: 3528986 - DNA, 25 bp, Homo sapien
aaattaatcacagttagcagggcag

SEQ ID NO: 3528987 - DNA, 25 bp, Homo sapien
caaggttccttttcatcccatcctt

SEQ ID NO: 3528988 - DNA, 25 bp, Homo sapien
tttccaaatgactggaagtcgcttc

SEQ ID NO: 3528989 - DNA, 25 bp, Homo sapien
tccaaatgactggaagtcgcttcac

SEQ ID NO: 3528990 - DNA, 25 bp, Homo sapien
tcaccaaggttccttttcatcccat

SEQ ID NO: 3528991 - DNA, 25 bp, Homo sapien
gctgctgttttagccggcagcaaac

SEQ ID NO: 3528992 - DNA, 25 bp, Homo sapien
agctgctgttttagccggcagcaaa

SEQ ID NO: 3528993 - DNA, 25 bp, Homo sapien
ctgctgttttagccggcagcaaact

SEQ ID NO: 3528994 - DNA, 25 bp, Homo sapien
ttgacaagtttgatttgccgacaat

SEQ ID NO: 3528995 - DNA, 25 bp, Homo sapien
gtttgatttgccgacaatttttgag

SEQ ID NO: 3528996 - DNA, 25 bp, Homo sapien
tgatttgccgacaatttttgaggaa

SEQ ID NO: 3528997 - DNA, 25 bp, Homo sapien
caagtttgatttgccgacaattttt

SEQ ID NO: 3528998 - DNA, 25 bp, Homo sapien
ggaagaaagaatacacgattcataa

SEQ ID NO: 3528999 - DNA, 25 bp, Homo sapien
ctctaaggttacaaagatgtatgct

SEQ ID NO: 3529000 - DNA, 25 bp, Homo sapien
tactgcttaggaatacacgtaaagt

SEQ ID NO: 3529001 - DNA, 25 bp, Homo sapien
gaaaagaaagcatatcaagagtttc

SEQ ID NO: 3529002 - DNA, 25 bp, Homo sapien
tagcatagttatacaatgtctaatg

SEQ ID NO: 3529003 - DNA, 25 bp, Homo sapien
tccacactgtgagtactagaaaaca

SEQ ID NO: 3529004 - DNA, 25 bp, Homo sapien
gtcacagacactacagatgaaatcc

SEQ ID NO: 3529005 - DNA, 25 bp, Homo sapien
tgaaggtccatgataggcaagtcac

SEQ ID NO: 3529006 - DNA, 25 bp, Homo sapien
tcttaaagcataggtgggtgatcca

SEQ ID NO: 3529007 - DNA, 25 bp, Homo sapien
aaagcatgtcttaaagcataggtgg

SEQ ID NO: 3529008 - DNA, 25 bp, Homo sapien
cataggtctgttctacaattcattc

SEQ ID NO: 3529009 - DNA, 25 bp, Homo sapien
tgggtgatccacaatttcaggaatc

SEQ ID NO: 3529010 - DNA, 25 bp, Homo sapien
taagtactcttaatgtgacttcact

SEQ ID NO: 3529011 - DNA, 25 bp, Homo sapien
aatgatgaaagtagtgaattttatg

SEQ ID NO: 3529012 - DNA, 25 bp, Homo sapien
gtggcaatgattacacaacattgta

SEQ ID NO: 3529013 - DNA, 25 bp, Homo sapien
gtgacttcacttatacttaaaaatg

SEQ ID NO: 3529014 - DNA, 25 bp, Homo sapien
gaatgaaggcactcaaaaggagaag

SEQ ID NO: 3529015 - DNA, 25 bp, Homo sapien
ctcaaaaggagaagaacgttacgtg

SEQ ID NO: 3529016 - DNA, 25 bp, Homo sapien
gtgaatgaaggcactcaaaaggaga

SEQ ID NO: 3529017 - DNA, 25 bp, Homo sapien
gaagaacgttacgtgatattaccta

SEQ ID NO: 3529018 - DNA, 25 bp, Homo sapien
tcacctgggccccgccgaagtcgac

SEQ ID NO: 3529019 - DNA, 25 bp, Homo sapien
gtcgaccgtcctttcgtagggcgca

SEQ ID NO: 3529020 - DNA, 25 bp, Homo sapien
cctggagaccctcaaccaggacaca

SEQ ID NO: 3529021 - DNA, 25 bp, Homo sapien
cgaccgtcctttcgtagggcgcact

SEQ ID NO: 3529022 - DNA, 25 bp, Homo sapien
tcattttctgttagagagaggatat

SEQ ID NO: 3529023 - DNA, 25 bp, Homo sapien
gtctatctaagatgttaccagtttc

SEQ ID NO: 3529024 - DNA, 25 bp, Homo sapien
aaaggtttgtagtaggccatgcaca

SEQ ID NO: 3529025 - DNA, 25 bp, Homo sapien
gaagtccctttttatgttgctgaat

SEQ ID NO: 3529026 - DNA, 25 bp, Homo sapien
tagtgacattcatcagatcgttggc

SEQ ID NO: 3529027 - DNA, 25 bp, Homo sapien
caattgttgtatacgtggtccatca

SEQ ID NO: 3529028 - DNA, 25 bp, Homo sapien
caaaacgtccctatgcagtgcatga

SEQ ID NO: 3529029 - DNA, 25 bp, Homo sapien
caacataagtgttcatcaagggatg

SEQ ID NO: 3529030 - DNA, 25 bp, Homo sapien
tattccaaatgattgaaactgccat

SEQ ID NO: 3529031 - DNA, 25 bp, Homo sapien
agtgcccttccaagatgtggttgca

SEQ ID NO: 3529032 - DNA, 25 bp, Homo sapien
attgcagtaatagtgacatgtttcc

SEQ ID NO: 3529033 - DNA, 25 bp, Homo sapien
aagcctaaggctgctttagtattat

SEQ ID NO: 3529034 - DNA, 25 bp, Homo sapien
tcccgcctcatgttttgtaagagat

SEQ ID NO: 3529035 - DNA, 25 bp, Homo sapien
taaacagattactccttgaacagga

SEQ ID NO: 3529036 - DNA, 25 bp, Homo sapien
tttgtcagagcgtatcacttcaggc

SEQ ID NO: 3529037 - DNA, 25 bp, Homo sapien
tgttgtcagagtagttcccgcctca

SEQ ID NO: 3529038 - DNA, 25 bp, Homo sapien
tctgatttaccaatcacttgattag

SEQ ID NO: 3529039 - DNA, 25 bp, Homo sapien
tgatttaccaatcacttgattagcc

SEQ ID NO: 3529040 - DNA, 25 bp, Homo sapien
ttaaaatctgatttaccaatcactt

SEQ ID NO: 3529041 - DNA, 25 bp, Homo sapien
aaatctgatttaccaatcacttgat

SEQ ID NO: 3529042 - DNA, 25 bp, Homo sapien
tgccttgggattttgcggaaatttg

SEQ ID NO: 3529043 - DNA, 25 bp, Homo sapien
catctgatattgttgtgccttggga

SEQ ID NO: 3529044 - DNA, 25 bp, Homo sapien
gattcttgtaatattctctcttcat

SEQ ID NO: 3529045 - DNA, 25 bp, Homo sapien
atagttttgcaatccctttgttctc

SEQ ID NO: 3529046 - DNA, 25 bp, Homo sapien
tgtggaaccaacaagcaagtatgag

SEQ ID NO: 3529047 - DNA, 25 bp, Homo sapien
cacttagcctaggatctgacacaga

SEQ ID NO: 3529048 - DNA, 25 bp, Homo sapien
tacttatatgtgagcctaggtttcc

SEQ ID NO: 3529049 - DNA, 25 bp, Homo sapien
gcaagcactcaatagacggtaactg

SEQ ID NO: 3529050 - DNA, 25 bp, Homo sapien
gagaggacaccagggcataagcaga

SEQ ID NO: 3529051 - DNA, 25 bp, Homo sapien
aagaaacatgaacagcatagctagg

SEQ ID NO: 3529052 - DNA, 25 bp, Homo sapien
ggagaggacaccagggcataagcag

SEQ ID NO: 3529053 - DNA, 25 bp, Homo sapien
atgatgcttcctgactgctcagctg

SEQ ID NO: 3529054 - DNA, 25 bp, Homo sapien
gctcagctggaatctggatttgcct

SEQ ID NO: 3529055 - DNA, 25 bp, Homo sapien
tagcagattcaaatttggcaggacc

SEQ ID NO: 3529056 - DNA, 25 bp, Homo sapien
ttctgaagcagtggcaggtcttgtg

SEQ ID NO: 3529057 - DNA, 25 bp, Homo sapien
ctggttcctccaattcgttgggcca

SEQ ID NO: 3529058 - DNA, 25 bp, Homo sapien
ggttcaaagattgtggttctccctc

SEQ ID NO: 3529059 - DNA, 25 bp, Homo sapien
tcctctttgcaagacctggttcctc

SEQ ID NO: 3529060 - DNA, 25 bp, Homo sapien
aagagtgggaataggcatatgtttc

SEQ ID NO: 3529061 - DNA, 25 bp, Homo sapien
tactttctgatgtcagggtacagca

SEQ ID NO: 3529062 - DNA, 25 bp, Homo sapien
gatgcatccacatcatactttctga

SEQ ID NO: 3529063 - DNA, 25 bp, Homo sapien
tctcctgcccacagtggtgtgcctc

SEQ ID NO: 3529064 - DNA, 25 bp, Homo sapien
gctggccttttcacgggctagatgt

SEQ ID NO: 3529065 - DNA, 25 bp, Homo sapien
ttctttcgagccctcatcaaccatg

SEQ ID NO: 3529066 - DNA, 25 bp, Homo sapien
caatcttctttcgagccctcatcaa

SEQ ID NO: 3529067 - DNA, 25 bp, Homo sapien
tcatcaaccatgtgtcctctcccaa

SEQ ID NO: 3529068 - DNA, 25 bp, Homo sapien
atacaatcttctttcgagccctcat

SEQ ID NO: 3529069 - DNA, 25 bp, Homo sapien
gccattagtaccatatagggtgaaa

SEQ ID NO: 3529070 - DNA, 25 bp, Homo sapien
tacacaggaaacacagttgccatta

SEQ ID NO: 3529071 - DNA, 25 bp, Homo sapien
gcttcatccctttcagaaaggctga

SEQ ID NO: 3529072 - DNA, 25 bp, Homo sapien
taccatatagggtgaaaaaatggct

SEQ ID NO: 3529073 - DNA, 25 bp, Homo sapien
gaaccctgggcctgataggactcat

SEQ ID NO: 3529074 - DNA, 25 bp, Homo sapien
cacaacacgccagatgtaacagttt

SEQ ID NO: 3529075 - DNA, 25 bp, Homo sapien
ccaaatggtacttgaatgtgattaa

SEQ ID NO: 3529076 - DNA, 25 bp, Homo sapien
gagatgaagtacttccaaatggtac

SEQ ID NO: 3529077 - DNA, 25 bp, Homo sapien
gacaccgtttgaaatagtctcagag

SEQ ID NO: 3529078 - DNA, 25 bp, Homo sapien
ttgaaagtctctgccgaccagtata

SEQ ID NO: 3529079 - DNA, 25 bp, Homo sapien
gtctcagagtacatcgtttgtgcca

SEQ ID NO: 3529080 - DNA, 25 bp, Homo sapien
gtggacaaacacaattaaaggctgg

SEQ ID NO: 3529081 - DNA, 25 bp, Homo sapien
aataaggcattgatgtgagtccagc

SEQ ID NO: 3529082 - DNA, 25 bp, Homo sapien
tttatcaaatcaccttctggtgcgg

SEQ ID NO: 3529083 - DNA, 25 bp, Homo sapien
tcaaatcaccttctggtgcggccat

SEQ ID NO: 3529084 - DNA, 25 bp, Homo sapien
agcattcacccagagtccgcctttt

SEQ ID NO: 3529085 - DNA, 25 bp, Homo sapien
aaggccgcacagttgttcttttcac

SEQ ID NO: 3529086 - DNA, 25 bp, Homo sapien
aggccgcacagttgttcttttcact

SEQ ID NO: 3529087 - DNA, 25 bp, Homo sapien
caaggccgcacagttgttcttttca

SEQ ID NO: 3529088 - DNA, 25 bp, Homo sapien
ttttcaatggacagccaatgtgcag

SEQ ID NO: 3529089 - DNA, 25 bp, Homo sapien
atgtgcagtgttccagtgctgaaat

SEQ ID NO: 3529090 - DNA, 25 bp, Homo sapien
aatggacagccaatgtgcagtgttc

SEQ ID NO: 3529091 - DNA, 25 bp, Homo sapien
gagcatttttcaatggacagccaat

SEQ ID NO: 3529092 - DNA, 25 bp, Homo sapien
tcgctgtttcacatcgcactgacat

SEQ ID NO: 3529093 - DNA, 25 bp, Homo sapien
gaacctgatctctcgttcttcctcg

SEQ ID NO: 3529094 - DNA, 25 bp, Homo sapien
ggcatgcctggaacctgatctctcg

SEQ ID NO: 3529095 - DNA, 25 bp, Homo sapien
cgttcttcctcgctgtttcacatcg

SEQ ID NO: 3529096 - DNA, 25 bp, Homo sapien
gggattcctccttagtcgctgcatg

SEQ ID NO: 3529097 - DNA, 25 bp, Homo sapien
catgatggccggaggcaagaagcac

SEQ ID NO: 3529098 - DNA, 25 bp, Homo sapien
ccgctcaagcaaaatggatctggca

SEQ ID NO: 3529099 - DNA, 25 bp, Homo sapien
tgtcagacacagtgagccgctcaag

SEQ ID NO: 3529100 - DNA, 25 bp, Homo sapien
taataagtgtacctgggctttccaa

SEQ ID NO: 3529101 - DNA, 25 bp, Homo sapien
tcactgggccggctttgtaaaaata

SEQ ID NO: 3529102 - DNA, 25 bp, Homo sapien
cttgctgaaaaagagatacgaggtc

SEQ ID NO: 3529103 - DNA, 25 bp, Homo sapien
taaataatgttgtgcggatactcca

SEQ ID NO: 3529104 - DNA, 25 bp, Homo sapien
tcttactagtatgagaggcccagag

SEQ ID NO: 3529105 - DNA, 25 bp, Homo sapien
ccatttaagggttaggaggcatagc

SEQ ID NO: 3529106 - DNA, 25 bp, Homo sapien
tgagctgtagcaagaaaccagttgt

SEQ ID NO: 3529107 - DNA, 25 bp, Homo sapien
ttggtgagccaaacatacagagaag

SEQ ID NO: 3529108 - DNA, 25 bp, Homo sapien
gaaggtgtctccaaatgtgcagcaa

SEQ ID NO: 3529109 - DNA, 25 bp, Homo sapien
tctgcaccggcaattgtaccaacag

SEQ ID NO: 3529110 - DNA, 25 bp, Homo sapien
ccctcagggaatgtaggctgcaaaa

SEQ ID NO: 3529111 - DNA, 25 bp, Homo sapien
taccaacagtgcgtatgtgtgctca

SEQ ID NO: 3529112 - DNA, 25 bp, Homo sapien
ttgttgttgtctgttgatgtgtctg

SEQ ID NO: 3529113 - DNA, 25 bp, Homo sapien
tctgcccagattgaaaatgccagtc

SEQ ID NO: 3529114 - DNA, 25 bp, Homo sapien
aattcctagctaatcgcttgttgca

SEQ ID NO: 3529115 - DNA, 25 bp, Homo sapien
taaatggctaactgggaaatgttac

SEQ ID NO: 3529116 - DNA, 25 bp, Homo sapien
tatgttgtgggtataaatgggcaca

SEQ ID NO: 3529117 - DNA, 25 bp, Homo sapien
agcacttttaattgattaggaatga

SEQ ID NO: 3529118 - DNA, 25 bp, Homo sapien
aagcacttttaattgattaggaatg

SEQ ID NO: 3529119 - DNA, 25 bp, Homo sapien
caagcacttttaattgattaggaat

SEQ ID NO: 3529120 - DNA, 25 bp, Homo sapien
caactatatctaagaacaattaact

SEQ ID NO: 3529121 - DNA, 25 bp, Homo sapien
agatgcacaaaatgattggaccgtg

SEQ ID NO: 3529122 - DNA, 25 bp, Homo sapien
aaaaagaaacgtatgattgcatgaa

SEQ ID NO: 3529123 - DNA, 25 bp, Homo sapien
caaaatgattggaccgtgaacagta

SEQ ID NO: 3529124 - DNA, 25 bp, Homo sapien
aaattcgtggcaaagcttgttgatc

SEQ ID NO: 3529125 - DNA, 25 bp, Homo sapien
caaattggattatatcgaagacaca

SEQ ID NO: 3529126 - DNA, 25 bp, Homo sapien
gaagacacactctaccttttagcta

SEQ ID NO: 3529127 - DNA, 25 bp, Homo sapien
cataaatctagtgcatgttgttcca

SEQ ID NO: 3529128 - DNA, 25 bp, Homo sapien
gttccaactgatatcgtgccttctg

SEQ ID NO: 3529129 - DNA, 25 bp, Homo sapien
tgaaagctcaactgttgtgtcccca

SEQ ID NO: 3529130 - DNA, 25 bp, Homo sapien
tccccagtggtacaatacaggacac

SEQ ID NO: 3529131 - DNA, 25 bp, Homo sapien
aggacacaattgtagaactgaagcg

SEQ ID NO: 3529132 - DNA, 25 bp, Homo sapien
tgaattaacacaatatttcctttcc

SEQ ID NO: 3529133 - DNA, 25 bp, Homo sapien
ctgaattaacacaatatttcctttc

SEQ ID NO: 3529134 - DNA, 25 bp, Homo sapien
gacatatcaggttcacttccgggaa

SEQ ID NO: 3529135 - DNA, 25 bp, Homo sapien
taatcttggccagtattgagacata

SEQ ID NO: 3529136 - DNA, 25 bp, Homo sapien
ttcacttccgggaacttgaactgga

SEQ ID NO: 3529137 - DNA, 25 bp, Homo sapien
gaactggaactgacacaccagggga

SEQ ID NO: 3529138 - DNA, 25 bp, Homo sapien
tgaagagagatcgcctctgtgcagc

SEQ ID NO: 3529139 - DNA, 25 bp, Homo sapien
tagtgaagagagatcgcctctgtgc

SEQ ID NO: 3529140 - DNA, 25 bp, Homo sapien
ctagtgaagagagatcgcctctgtg

SEQ ID NO: 3529141 - DNA, 25 bp, Homo sapien
agtgaagagagatcgcctctgtgca

SEQ ID NO: 3529142 - DNA, 25 bp, Homo sapien
cagcatgcaggagtatgaggaggtc

SEQ ID NO: 3529143 - DNA, 25 bp, Homo sapien
tgttgaagtggtgcccgaggtgccc

SEQ ID NO: 3529144 - DNA, 25 bp, Homo sapien
ggtgtaggtatcataactccgccca

SEQ ID NO: 3529145 - DNA, 25 bp, Homo sapien
cccattcaccgaagggctggtgggc

SEQ ID NO: 3529146 - DNA, 25 bp, Homo sapien
cattaaagatgccttcacgtgaagt

SEQ ID NO: 3529147 - DNA, 25 bp, Homo sapien
caaacctgtggttactgaggaacac

SEQ ID NO: 3529148 - DNA, 25 bp, Homo sapien
taaatctaagattgggcctcgagct

SEQ ID NO: 3529149 - DNA, 25 bp, Homo sapien
tcccgaggaactctgccaacaagtc

SEQ ID NO: 3529150 - DNA, 25 bp, Homo sapien
aactgtccagctagatggttgccac

SEQ ID NO: 3529151 - DNA, 25 bp, Homo sapien
gaggaagacacccaccatttgtaaa

SEQ ID NO: 3529152 - DNA, 25 bp, Homo sapien
taaatggatagacaatcgggctcac

SEQ ID NO: 3529153 - DNA, 25 bp, Homo sapien
gaaaactgttgctaccctcgaactg

SEQ ID NO: 3529154 - DNA, 25 bp, Homo sapien
tagtgcgaaaagctctcaagggtgc

SEQ ID NO: 3529155 - DNA, 25 bp, Homo sapien
gactgtctccgacttgactggtcaa

SEQ ID NO: 3529156 - DNA, 25 bp, Homo sapien
tggtcaagccaatcactgtagtgcg

SEQ ID NO: 3529157 - DNA, 25 bp, Homo sapien
agccaatgaggtccgcaggccctga

SEQ ID NO: 3529158 - DNA, 25 bp, Homo sapien
cggcccaacatggagccagatgtga

SEQ ID NO: 3529159 - DNA, 25 bp, Homo sapien
gcataggcggcagagcgctgtaggt

SEQ ID NO: 3529160 - DNA, 25 bp, Homo sapien
gggctgtgtctgttcggcccaacat

SEQ ID NO: 3529161 - DNA, 25 bp, Homo sapien
ggcaggttatttgccatggtgaagc

SEQ ID NO: 3529162 - DNA, 25 bp, Homo sapien
cattgattcgtagtattagtatttc

SEQ ID NO: 3529163 - DNA, 25 bp, Homo sapien
tgagagtcagagcccggagcaaaca

SEQ ID NO: 3529164 - DNA, 25 bp, Homo sapien
gagcaaacaggtttaaagacattga

SEQ ID NO: 3529165 - DNA, 25 bp, Homo sapien
acaggtttaaagacattgattcgta

SEQ ID NO: 3529166 - DNA, 25 bp, Homo sapien
tggcccttcgattagaaaaccatac

SEQ ID NO: 3529167 - DNA, 25 bp, Homo sapien
aggaatatgactaggtgtgttgctg

SEQ ID NO: 3529168 - DNA, 25 bp, Homo sapien
aattggttggtagacactggtgctg

SEQ ID NO: 3529169 - DNA, 25 bp, Homo sapien
tgaaactactgctgataggaatatg

SEQ ID NO: 3529170 - DNA, 25 bp, Homo sapien
catggcagcagagcatttagcagac

SEQ ID NO: 3529171 - DNA, 25 bp, Homo sapien
tagtactctgtacaagcacctctgt

SEQ ID NO: 3529172 - DNA, 25 bp, Homo sapien
agtgtgaaactgcacagtctctcgg

SEQ ID NO: 3529173 - DNA, 25 bp, Homo sapien
tagcactgtgtctacgtcgagccca

SEQ ID NO: 3529174 - DNA, 25 bp, Homo sapien
ctttctcgggcaaacacatctggat

SEQ ID NO: 3529175 - DNA, 25 bp, Homo sapien
tattttggctgctagtctttctcgg

SEQ ID NO: 3529176 - DNA, 25 bp, Homo sapien
ttgcttcaggtagatctattttggc

SEQ ID NO: 3529177 - DNA, 25 bp, Homo sapien
gctagtctttctcgggcaaacacat

SEQ ID NO: 3529178 - DNA, 25 bp, Homo sapien
ttgatttactgcttctctactttga

SEQ ID NO: 3529179 - DNA, 25 bp, Homo sapien
aaggatgttctatttctttgcagct

SEQ ID NO: 3529180 - DNA, 25 bp, Homo sapien
tgaagtcgcatttgagcctcatctg

SEQ ID NO: 3529181 - DNA, 25 bp, Homo sapien
tctgaatcttctccgttggaactga

SEQ ID NO: 3529182 - DNA, 25 bp, Homo sapien
gcctcaatttgctcttgggtaaagg

SEQ ID NO: 3529183 - DNA, 25 bp, Homo sapien
tatgagtgcgcttcgccttgacacc

SEQ ID NO: 3529184 - DNA, 25 bp, Homo sapien
tagaagtgctcgcattgttctgcag

SEQ ID NO: 3529185 - DNA, 25 bp, Homo sapien
tcaccaagaacaggctataattgct

SEQ ID NO: 3529186 - DNA, 25 bp, Homo sapien
ttgacacctattacgagcacagctg

SEQ ID NO: 3529187 - DNA, 25 bp, Homo sapien
gggaagcaggattgcctaaactctg

SEQ ID NO: 3529188 - DNA, 25 bp, Homo sapien
ggattgcctaaactctgactgggcc

SEQ ID NO: 3529189 - DNA, 25 bp, Homo sapien
ggccactacaggctgggtcctgggt

SEQ ID NO: 3529190 - DNA, 25 bp, Homo sapien
cctccagggccactacaggctgggt

SEQ ID NO: 3529191 - DNA, 25 bp, Homo sapien
cctccgtgctatttagggcgcttgg

SEQ ID NO: 3529192 - DNA, 25 bp, Homo sapien
tctgctctgctatcattaatcactg

SEQ ID NO: 3529193 - DNA, 25 bp, Homo sapien
gaagtgtgttaacccctctgctctg

SEQ ID NO: 3529194 - DNA, 25 bp, Homo sapien
atcactgtccgaagagcgggcgcct

SEQ ID NO: 3529195 - DNA, 25 bp, Homo sapien
cgggcacaagcgtctgtgctaattt

SEQ ID NO: 3529196 - DNA, 25 bp, Homo sapien
ggaagaaatgaagcgaccaccccca

SEQ ID NO: 3529197 - DNA, 25 bp, Homo sapien
gtgcgggcacaagcgtctgtgctaa

SEQ ID NO: 3529198 - DNA, 25 bp, Homo sapien
gtgtgcgggcacaagcgtctgtgct

SEQ ID NO: 3529199 - DNA, 25 bp, Homo sapien
ttacacaggcagcacgcgatcgccg

SEQ ID NO: 3529200 - DNA, 25 bp, Homo sapien
gggtttacacaggcagcacgcgatc

SEQ ID NO: 3529201 - DNA, 25 bp, Homo sapien
aggcagcacgcgatcgccgccaggc

SEQ ID NO: 3529202 - DNA, 25 bp, Homo sapien
gtttacacaggcagcacgcgatcgc

SEQ ID NO: 3529203 - DNA, 25 bp, Homo sapien
caggaccatctgacgatgggaatag

SEQ ID NO: 3529204 - DNA, 25 bp, Homo sapien
tctgacgatgggaataggatttgtt

SEQ ID NO: 3529205 - DNA, 25 bp, Homo sapien
ttccagcctaatccgtgagaaagcg

SEQ ID NO: 3529206 - DNA, 25 bp, Homo sapien
gagtgaaagcgcctcccattatccc

SEQ ID NO: 3529207 - DNA, 25 bp, Homo sapien
gatcaaaacattgtagcatctgttg

SEQ ID NO: 3529208 - DNA, 25 bp, Homo sapien
cattgtagcatctgttgaaagagag

SEQ ID NO: 3529209 - DNA, 25 bp, Homo sapien
gagcgcggatcaaaacattgtagca

SEQ ID NO: 3529210 - DNA, 25 bp, Homo sapien
tttcagctctggagcgcggatcaaa

SEQ ID NO: 3529211 - DNA, 25 bp, Homo sapien
tcaaatgcagtctcacccatgacat

SEQ ID NO: 3529212 - DNA, 25 bp, Homo sapien
aatgtggtcgatgtgtcccaggcct

SEQ ID NO: 3529213 - DNA, 25 bp, Homo sapien
cacccatgacattccccaagcatgg

SEQ ID NO: 3529214 - DNA, 25 bp, Homo sapien
tgtcccaggccttcaaatgcagtct

SEQ ID NO: 3529215 - DNA, 25 bp, Homo sapien
gcgtggatggctgcttgggttttac

SEQ ID NO: 3529216 - DNA, 25 bp, Homo sapien
tgcacatatggagagctgcgtggat

SEQ ID NO: 3529217 - DNA, 25 bp, Homo sapien
ctgcgtggatggctgcttgggtttt

SEQ ID NO: 3529218 - DNA, 25 bp, Homo sapien
ggacaggcaaagggatgcacatatg

SEQ ID NO: 3529219 - DNA, 25 bp, Homo sapien
tagtttatcatacatgccgtctgcg

SEQ ID NO: 3529220 - DNA, 25 bp, Homo sapien
gccaggttgcgaagaactctgttta

SEQ ID NO: 3529221 - DNA, 25 bp, Homo sapien
tgttgcttttcgctagccaggttgc

SEQ ID NO: 3529222 - DNA, 25 bp, Homo sapien
ggtctgcccgttcaacatccttagt

SEQ ID NO: 3529223 - DNA, 25 bp, Homo sapien
aaaccaaatggtagtgtctcctgaa

SEQ ID NO: 3529224 - DNA, 25 bp, Homo sapien
gatagctatcactttgggcatggaa

SEQ ID NO: 3529225 - DNA, 25 bp, Homo sapien
tgctttgttaaaagactgcccgaaa

SEQ ID NO: 3529226 - DNA, 25 bp, Homo sapien
tggtgacctaactcacacggttgct

SEQ ID NO: 3529227 - DNA, 25 bp, Homo sapien
ccccaggtacaaaggagacaaatgt

SEQ ID NO: 3529228 - DNA, 25 bp, Homo sapien
ggtgcctccgccctctgttttgcag

SEQ ID NO: 3529229 - DNA, 25 bp, Homo sapien
aatgaagtgaatgactccccacact

SEQ ID NO: 3529230 - DNA, 25 bp, Homo sapien
ggacgaagttacaatctggttctca

SEQ ID NO: 3529231 - DNA, 25 bp, Homo sapien
tctgatggagccagtctcgtaatac

SEQ ID NO: 3529232 - DNA, 25 bp, Homo sapien
ccaagcaaagatggacgggcactcc

SEQ ID NO: 3529233 - DNA, 25 bp, Homo sapien
gggcactcccgcttatactgggcta

SEQ ID NO: 3529234 - DNA, 25 bp, Homo sapien
gtatgttatcgttggtacagacccc

SEQ ID NO: 3529235 - DNA, 25 bp, Homo sapien
tgtccagcacttggacttttgcatc

SEQ ID NO: 3529236 - DNA, 25 bp, Homo sapien
agcacttggacttttgcatctgcat

SEQ ID NO: 3529237 - DNA, 25 bp, Homo sapien
ccagcacttggacttttgcatctgc

SEQ ID NO: 3529238 - DNA, 25 bp, Homo sapien
gttttgattgtccagcacttggact

SEQ ID NO: 3529239 - DNA, 25 bp, Homo sapien
agggcgttgagagtggagggccgcg

SEQ ID NO: 3529240 - DNA, 25 bp, Homo sapien
aagagagggcgttgagagtggaggg

SEQ ID NO: 3529241 - DNA, 25 bp, Homo sapien
gagagggcgttgagagtggagggcc

SEQ ID NO: 3529242 - DNA, 25 bp, Homo sapien
gaagagagggcgttgagagtggagg

SEQ ID NO: 3529243 - DNA, 25 bp, Homo sapien
aaagacaccaccgagctgattcact

SEQ ID NO: 3529244 - DNA, 25 bp, Homo sapien
tctacaatcttctgccgggtggagt

SEQ ID NO: 3529245 - DNA, 25 bp, Homo sapien
ggccccgctgtgagctagctctaca

SEQ ID NO: 3529246 - DNA, 25 bp, Homo sapien
cagaattcgggaaatgtcgcacggc

SEQ ID NO: 3529247 - DNA, 25 bp, Homo sapien
gaggagacaaccacaatgcatcctc

SEQ ID NO: 3529248 - DNA, 25 bp, Homo sapien
ggaggagacaaccacaatgcatcct

SEQ ID NO: 3529249 - DNA, 25 bp, Homo sapien
ccctgctatcgatcaaataaaggac

SEQ ID NO: 3529250 - DNA, 25 bp, Homo sapien
ctgtgccaacctcggcggtcagttc

SEQ ID NO: 3529251 - DNA, 25 bp, Homo sapien
catgccagacatcgggcagcccagt

SEQ ID NO: 3529252 - DNA, 25 bp, Homo sapien
accagccatgccagacatcgggcag

SEQ ID NO: 3529253 - DNA, 25 bp, Homo sapien
tccggccaccgcaagtaaggcttag

SEQ ID NO: 3529254 - DNA, 25 bp, Homo sapien
gggacagtgatagcaaaccttacag

SEQ ID NO: 3529255 - DNA, 25 bp, Homo sapien
tgaacccacaaagcgctaagaaccg

SEQ ID NO: 3529256 - DNA, 25 bp, Homo sapien
cttagagccgggagtcggttcgcac

SEQ ID NO: 3529257 - DNA, 25 bp, Homo sapien
gcagccctcccaggaaaagacgtgg

SEQ ID NO: 3529258 - DNA, 25 bp, Homo sapien
gaaaagacgtggctccctgttcagc

SEQ ID NO: 3529259 - DNA, 25 bp, Homo sapien
tgcagccccgacttagatagcagcc

SEQ ID NO: 3529260 - DNA, 25 bp, Homo sapien
ctcccaggaaaagacgtggctccct

SEQ ID NO: 3529261 - DNA, 25 bp, Homo sapien
cgttttcagggtagccgaaggcttg

SEQ ID NO: 3529262 - DNA, 25 bp, Homo sapien
agccgcgttttcagggtagccgaag

SEQ ID NO: 3529263 - DNA, 25 bp, Homo sapien
ggagccgcgttttcagggtagccga

SEQ ID NO: 3529264 - DNA, 25 bp, Homo sapien
ccttcgaggggagccgcgttttcag

SEQ ID NO: 3529265 - DNA, 25 bp, Homo sapien
ggggacaccgcttctccaacagagc

SEQ ID NO: 3529266 - DNA, 25 bp, Homo sapien
gccttcctttgcttcgcaagttcca

SEQ ID NO: 3529267 - DNA, 25 bp, Homo sapien
caagcagggactttgcggggacacc

SEQ ID NO: 3529268 - DNA, 25 bp, Homo sapien
gggccggagcctcaactcgatgaga

SEQ ID NO: 3529269 - DNA, 25 bp, Homo sapien
actttgagttcagttgagccccgac

SEQ ID NO: 3529270 - DNA, 25 bp, Homo sapien
agctctagactagccctgccgcgta

SEQ ID NO: 3529271 - DNA, 25 bp, Homo sapien
cgtgtgcctcaaccgtaacctcaaa

SEQ ID NO: 3529272 - DNA, 25 bp, Homo sapien
caggctcccaggtcggagctctaga

SEQ ID NO: 3529273 - DNA, 25 bp, Homo sapien
agcacccaccacgaacaggaaggtg

SEQ ID NO: 3529274 - DNA, 25 bp, Homo sapien
cccaccacgaacaggaaggtgggtg

SEQ ID NO: 3529275 - DNA, 25 bp, Homo sapien
ccaccacgaacaggaaggtgggtgg

SEQ ID NO: 3529276 - DNA, 25 bp, Homo sapien
cacccaccacgaacaggaaggtggg

SEQ ID NO: 3529277 - DNA, 25 bp, Homo sapien
aagcaattgcagttgccagggcagg

SEQ ID NO: 3529278 - DNA, 25 bp, Homo sapien
gcctgggactatcaggacccaagca

SEQ ID NO: 3529279 - DNA, 25 bp, Homo sapien
taagtatcaaaagcgctctgggcct

SEQ ID NO: 3529280 - DNA, 25 bp, Homo sapien
aaagcagggaggtacaagggccata

SEQ ID NO: 3529281 - DNA, 25 bp, Homo sapien
agtaaaccgtgctctctcccgcgcc

SEQ ID NO: 3529282 - DNA, 25 bp, Homo sapien
acccagtaaaccgtgctctctcccg

SEQ ID NO: 3529283 - DNA, 25 bp, Homo sapien
cagacccagtaaaccgtgctctctc

SEQ ID NO: 3529284 - DNA, 25 bp, Homo sapien
ccagtaaaccgtgctctctcccgcg

SEQ ID NO: 3529285 - DNA, 25 bp, Homo sapien
tgtaacagcgagtttaccaccccta

SEQ ID NO: 3529286 - DNA, 25 bp, Homo sapien
ctgtaacagcgagtttaccacccct

SEQ ID NO: 3529287 - DNA, 25 bp, Homo sapien
ctcccctgaccctcgggtccgcgca

SEQ ID NO: 3529288 - DNA, 25 bp, Homo sapien
gggcgtcgcgagtccctgtgtcctc

SEQ ID NO: 3529289 - DNA, 25 bp, Homo sapien
cagcgcgggcgtcgcgagtccctgt

SEQ ID NO: 3529290 - DNA, 25 bp, Homo sapien
tgaccctcgggtccgcgcaccccga

SEQ ID NO: 3529291 - DNA, 25 bp, Homo sapien
cgggattccacggggctcgaatatg

SEQ ID NO: 3529292 - DNA, 25 bp, Homo sapien
ttccacggggctcgaatatggggct

SEQ ID NO: 3529293 - DNA, 25 bp, Homo sapien
attccacggggctcgaatatggggc

SEQ ID NO: 3529294 - DNA, 25 bp, Homo sapien
ggattccacggggctcgaatatggg

SEQ ID NO: 3529295 - DNA, 25 bp, Homo sapien
aaataggagttaatcctcgggcagc

SEQ ID NO: 3529296 - DNA, 25 bp, Homo sapien
gaattgatccactcaacctcttggg

SEQ ID NO: 3529297 - DNA, 25 bp, Homo sapien
ctaggacaggagaatctccgttctt

SEQ ID NO: 3529298 - DNA, 25 bp, Homo sapien
cctgcagtgcatacaaaatctaccc

SEQ ID NO: 3529299 - DNA, 25 bp, Homo sapien
tgaaacaaagtactggaatatcccc

SEQ ID NO: 3529300 - DNA, 25 bp, Homo sapien
ctgaaatctcggatgtctgtccact

SEQ ID NO: 3529301 - DNA, 25 bp, Homo sapien
tgtctgtccactctcacaataaaag

SEQ ID NO: 3529302 - DNA, 25 bp, Homo sapien
gcctcacacatctgcgcgcccctag

SEQ ID NO: 3529303 - DNA, 25 bp, Homo sapien
ctctcacaataaaaggcctcacaca

SEQ ID NO: 3529304 - DNA, 25 bp, Homo sapien
aaatcccaacacctggtgagactgg

SEQ ID NO: 3529305 - DNA, 25 bp, Homo sapien
aaaaaagcaaaccaactctgcacct

SEQ ID NO: 3529306 - DNA, 25 bp, Homo sapien
caacacctggtgagactggatcaga

SEQ ID NO: 3529307 - DNA, 25 bp, Homo sapien
aaaaagcaaaccaactctgcacctc

SEQ ID NO: 3529308 - DNA, 25 bp, Homo sapien
ggtggaagctgacagtcctcccgct

SEQ ID NO: 3529309 - DNA, 25 bp, Homo sapien
cagcctccgcaaggcaagggagatg

SEQ ID NO: 3529310 - DNA, 25 bp, Homo sapien
agttttcaagttccgagctcagcgc

SEQ ID NO: 3529311 - DNA, 25 bp, Homo sapien
tctgagctccctcggagcgcgcgtt

SEQ ID NO: 3529312 - DNA, 25 bp, Homo sapien
tcgagtgccggctgactcttctgcg

SEQ ID NO: 3529313 - DNA, 25 bp, Homo sapien
tctctgcgcgttcgctgggcctcgg

SEQ ID NO: 3529314 - DNA, 25 bp, Homo sapien
aagcagccggcagcggttgctctct

SEQ ID NO: 3529315 - DNA, 25 bp, Homo sapien
agagcctcttcgtcttttcccgcgg

SEQ ID NO: 3529316 - DNA, 25 bp, Homo sapien
gagccgcggctgctgtcgcgcctgg

SEQ ID NO: 3529317 - DNA, 25 bp, Homo sapien
ctgctgtcgcgcctggagtctccct

SEQ ID NO: 3529318 - DNA, 25 bp, Homo sapien
gccgctcccgctcgccggcagtcgc

SEQ ID NO: 3529319 - DNA, 25 bp, Homo sapien
agtcgccctccgacgcgggctttcg

SEQ ID NO: 3529320 - DNA, 25 bp, Homo sapien
ttgaagaccacaatggtttgaaatg

SEQ ID NO: 3529321 - DNA, 25 bp, Homo sapien
ttgctggtgagagttttctccacgg

SEQ ID NO: 3529322 - DNA, 25 bp, Homo sapien
tggttgtcacagcttctgtcaagag

SEQ ID NO: 3529323 - DNA, 25 bp, Homo sapien
gtgagagttttctccacggatgttg

SEQ ID NO: 3529324 - DNA, 25 bp, Homo sapien
gtgtgtgagagcaattctcagattc

SEQ ID NO: 3529325 - DNA, 25 bp, Homo sapien
tggtgtgtgagagcaattctcagat

SEQ ID NO: 3529326 - DNA, 25 bp, Homo sapien
ggtgtgtgagagcaattctcagatt

SEQ ID NO: 3529327 - DNA, 25 bp, Homo sapien
caataaaatgggctgtcagcggctg

SEQ ID NO: 3529328 - DNA, 25 bp, Homo sapien
ataaaatgggctgtcagcggctgga

SEQ ID NO: 3529329 - DNA, 25 bp, Homo sapien
ttgacaataaaatgggctgtcagcg

SEQ ID NO: 3529330 - DNA, 25 bp, Homo sapien
tgagagataaagagtgtgggtgagg

SEQ ID NO: 3529331 - DNA, 25 bp, Homo sapien
tcctcactggcccattagcgaagcc

SEQ ID NO: 3529332 - DNA, 25 bp, Homo sapien
cactggcccattagcgaagcctgac

SEQ ID NO: 3529333 - DNA, 25 bp, Homo sapien
ctcactggcccattagcgaagcctg

SEQ ID NO: 3529334 - DNA, 25 bp, Homo sapien
tcactggcccattagcgaagcctga

SEQ ID NO: 3529335 - DNA, 25 bp, Homo sapien
ctcctgcgcctgaaccagagcggga

SEQ ID NO: 3529336 - DNA, 25 bp, Homo sapien
cgcctgaaccagagcgggaaatgag

SEQ ID NO: 3529337 - DNA, 25 bp, Homo sapien
aaatgaggccgagccacggttccct

SEQ ID NO: 3529338 - DNA, 25 bp, Homo sapien
ggaaatgaggccgagccacggttcc

SEQ ID NO: 3529339 - DNA, 25 bp, Homo sapien
taatcactccgcaacatgcaaatgc

SEQ ID NO: 3529340 - DNA, 25 bp, Homo sapien
ccccgcctggtgcaattggtccgtt

SEQ ID NO: 3529341 - DNA, 25 bp, Homo sapien
ggcctcgcgccagccgattggatgc

SEQ ID NO: 3529342 - DNA, 25 bp, Homo sapien
cgggctctggcgctcgcctgcatct

SEQ ID NO: 3529343 - DNA, 25 bp, Homo sapien
cccactccccctaagctggactcgg

SEQ ID NO: 3529344 - DNA, 25 bp, Homo sapien
ccccactccccctaagctggactcg

SEQ ID NO: 3529345 - DNA, 25 bp, Homo sapien
gcgggagcgtcactgggtcctggca

SEQ ID NO: 3529346 - DNA, 25 bp, Homo sapien
gggcgggagcgtcactgggtcctgg

SEQ ID NO: 3529347 - DNA, 25 bp, Homo sapien
aggggcgggagcgtcactgggtcct

SEQ ID NO: 3529348 - DNA, 25 bp, Homo sapien
ctggccccttggaagaagaggaaag

SEQ ID NO: 3529349 - DNA, 25 bp, Homo sapien
cgagaactaaacgaggccagaggcc

SEQ ID NO: 3529350 - DNA, 25 bp, Homo sapien
gaggcccgagtaaacacgccactta

SEQ ID NO: 3529351 - DNA, 25 bp, Homo sapien
aagcctaggccgagaggaggttgcc

SEQ ID NO: 3529352 - DNA, 25 bp, Homo sapien
ttctcctttcggaagccgcggtgcg

SEQ ID NO: 3529353 - DNA, 25 bp, Homo sapien
ctgcttttcgcagcgcccgagagga

SEQ ID NO: 3529354 - DNA, 25 bp, Homo sapien
acttctcccacgtgccatttgttga

SEQ ID NO: 3529355 - DNA, 25 bp, Homo sapien
tgttgactaagtgcggctgcttttc

SEQ ID NO: 3529356 - DNA, 25 bp, Homo sapien
aaaagccctgaagagtcctcaccaa

SEQ ID NO: 3529357 - DNA, 25 bp, Homo sapien
gcggatgaccaatgctgggagggat

SEQ ID NO: 3529358 - DNA, 25 bp, Homo sapien
ggatgaccaatgctgggagggattc

SEQ ID NO: 3529359 - DNA, 25 bp, Homo sapien
gggcggatgaccaatgctgggaggg

SEQ ID NO: 3529360 - DNA, 25 bp, Homo sapien
ggtgggggggcggatgaccaatgct

SEQ ID NO: 3529361 - DNA, 25 bp, Homo sapien
tcagcgtgtgtcgtgtgtgccaccg

SEQ ID NO: 3529362 - DNA, 25 bp, Homo sapien
tgtgtgtgtcccactggcgatgtcg

SEQ ID NO: 3529363 - DNA, 25 bp, Homo sapien
tgaatgccgcacgattaggacacac

SEQ ID NO: 3529364 - DNA, 25 bp, Homo sapien
tctgctcagtccacggaggcagctc

SEQ ID NO: 3529365 - DNA, 25 bp, Homo sapien
ctcagtacactccaaaggcgcccct

SEQ ID NO: 3529366 - DNA, 25 bp, Homo sapien
ctcggagcctgcagttaaggtgaca

SEQ ID NO: 3529367 - DNA, 25 bp, Homo sapien
aaaggcgcccctcggagcctgcagt

SEQ ID NO: 3529368 - DNA, 25 bp, Homo sapien
cctgcagttaaggtgacaggagagc

SEQ ID NO: 3529369 - DNA, 25 bp, Homo sapien
gaaggcctgggctgctgtacacacc

SEQ ID NO: 3529370 - DNA, 25 bp, Homo sapien
caggacagggcgagggggaataggg

SEQ ID NO: 3529371 - DNA, 25 bp, Homo sapien
aggcctgggctgctgtacacacccc

SEQ ID NO: 3529372 - DNA, 25 bp, Homo sapien
tcgggccacggagccgggaaggaga

SEQ ID NO: 3529373 - DNA, 25 bp, Homo sapien
tggcaaacgggtccagtgagcccta

SEQ ID NO: 3529374 - DNA, 25 bp, Homo sapien
tgtagtgccccaaacgtctctcttt

SEQ ID NO: 3529375 - DNA, 25 bp, Homo sapien
cagacacctgcgtcactttgtagtg

SEQ ID NO: 3529376 - DNA, 25 bp, Homo sapien
tcccatccggagttctgacagttct

SEQ ID NO: 3529377 - DNA, 25 bp, Homo sapien
ggatcccatatatttgtcagcgcta

SEQ ID NO: 3529378 - DNA, 25 bp, Homo sapien
cagccagggatcaaaagccgggatc

SEQ ID NO: 3529379 - DNA, 25 bp, Homo sapien
tattagcgacaggagaacagaggcg

SEQ ID NO: 3529380 - DNA, 25 bp, Homo sapien
caaccccagtaagagttaatctgcc

SEQ ID NO: 3529381 - DNA, 25 bp, Homo sapien
ttcccactgcgaagcaggcgacctg

SEQ ID NO: 3529382 - DNA, 25 bp, Homo sapien
cgttttctcgccgtgacagccgaat

SEQ ID NO: 3529383 - DNA, 25 bp, Homo sapien
catctctaatgagggaggaggcccg

SEQ ID NO: 3529384 - DNA, 25 bp, Homo sapien
tgatttatgactggaggagaaggtc

SEQ ID NO: 3529385 - DNA, 25 bp, Homo sapien
aggtgactgagctccgaaggtgctc

SEQ ID NO: 3529386 - DNA, 25 bp, Homo sapien
gaggaacccgcggaggagaggatcc

SEQ ID NO: 3529387 - DNA, 25 bp, Homo sapien
ccaggtaaggcgtgcggccggactg

SEQ ID NO: 3529388 - DNA, 25 bp, Homo sapien
agtcgggcggaggtcccaacacctg

SEQ ID NO: 3529389 - DNA, 25 bp, Homo sapien
tttaagcgctccaggcgcgggtacg

SEQ ID NO: 3529390 - DNA, 25 bp, Homo sapien
tacggactttcccaagcgtggatgt

SEQ ID NO: 3529391 - DNA, 25 bp, Homo sapien
ccgcggcagggtgtctttaagcgct

SEQ ID NO: 3529392 - DNA, 25 bp, Homo sapien
atgtcgtgaactgcgatgcagagga

SEQ ID NO: 3529393 - DNA, 25 bp, Homo sapien
gcgagtggctttagcagacagcagc

SEQ ID NO: 3529394 - DNA, 25 bp, Homo sapien
ctcctgcatttttcgcggtcgcgag

SEQ ID NO: 3529395 - DNA, 25 bp, Homo sapien
gactggaagtccactcttaggagtg

SEQ ID NO: 3529396 - DNA, 25 bp, Homo sapien
ctactcccagctcagggccggactg

SEQ ID NO: 3529397 - DNA, 25 bp, Homo sapien
ggcagcgccggttcccacacttctc

SEQ ID NO: 3529398 - DNA, 25 bp, Homo sapien
tgacagccgcgttctacgcgaggac

SEQ ID NO: 3529399 - DNA, 25 bp, Homo sapien
gaagtggcagatctgacagccgcgt

SEQ ID NO: 3529400 - DNA, 25 bp, Homo sapien
ccacacttctcaccgccgctcggca

SEQ ID NO: 3529401 - DNA, 25 bp, Homo sapien
ccccagagtttaaatgtcaatgata

SEQ ID NO: 3529402 - DNA, 25 bp, Homo sapien
ctgccccagagtttaaatgtcaatg

SEQ ID NO: 3529403 - DNA, 25 bp, Homo sapien
ccagagtttaaatgtcaatgataag

SEQ ID NO: 3529404 - DNA, 25 bp, Homo sapien
tgccccagagtttaaatgtcaatga

SEQ ID NO: 3529405 - DNA, 25 bp, Homo sapien
ggccagtttctgtccgggtctcgct

SEQ ID NO: 3529406 - DNA, 25 bp, Homo sapien
gagtccaggccattaagtgtgcgca

SEQ ID NO: 3529407 - DNA, 25 bp, Homo sapien
tgcaacccagcagggtgctcgagag

SEQ ID NO: 3529408 - DNA, 25 bp, Homo sapien
tcgagagcgactctggaaacgccac

SEQ ID NO: 3529409 - DNA, 25 bp, Homo sapien
tactttagcaaaataaggagagcct

SEQ ID NO: 3529410 - DNA, 25 bp, Homo sapien
gggcaatgagcggaaagatctctca

SEQ ID NO: 3529411 - DNA, 25 bp, Homo sapien
ggccggcttcgatctacaattgtat

SEQ ID NO: 3529412 - DNA, 25 bp, Homo sapien
caaatgctcataaaactcggattcc

SEQ ID NO: 3529413 - DNA, 25 bp, Homo sapien
gattgtgatgcttcgtgctggcaac

SEQ ID NO: 3529414 - DNA, 25 bp, Homo sapien
taaattgtacggataaaacagcaca

SEQ ID NO: 3529415 - DNA, 25 bp, Homo sapien
caccaagattgacacctgccaactg

SEQ ID NO: 3529416 - DNA, 25 bp, Homo sapien
gactgagacgtacaaaaacacacca

SEQ ID NO: 3529417 - DNA, 25 bp, Homo sapien
tttgggcatccgggcttgggcatcc

SEQ ID NO: 3529418 - DNA, 25 bp, Homo sapien
gggcactgacgtaaacacgcgtggg

SEQ ID NO: 3529419 - DNA, 25 bp, Homo sapien
attgctgttacatataagataaggg

SEQ ID NO: 3529420 - DNA, 25 bp, Homo sapien
agccggagggcacccaggtttgcat

SEQ ID NO: 3529421 - DNA, 25 bp, Homo sapien
tgccgccaaggaaccggtcctgtgt

SEQ ID NO: 3529422 - DNA, 25 bp, Homo sapien
tgtcctacctaggaagagctgcttt

SEQ ID NO: 3529423 - DNA, 25 bp, Homo sapien
tgtttctggtacagttcccagggct

SEQ ID NO: 3529424 - DNA, 25 bp, Homo sapien
tccttgacccatgggtaggaacgag

SEQ ID NO: 3529425 - DNA, 25 bp, Homo sapien
gaacttctggtcttagcctactgga

SEQ ID NO: 3529426 - DNA, 25 bp, Homo sapien
caaattaaacaccgcgaaggctttg

SEQ ID NO: 3529427 - DNA, 25 bp, Homo sapien
ctgtcgaggccccaatatgtcacca

SEQ ID NO: 3529428 - DNA, 25 bp, Homo sapien
aatatgtcaccacaaacactcccag

SEQ ID NO: 3529429 - DNA, 25 bp, Homo sapien
ctacagcgggcagccgagcggctgg

SEQ ID NO: 3529430 - DNA, 25 bp, Homo sapien
tttagggggcctacagcgggcagcc

SEQ ID NO: 3529431 - DNA, 25 bp, Homo sapien
gcctacagcgggcagccgagcggct

SEQ ID NO: 3529432 - DNA, 25 bp, Homo sapien
ctcggcttctttagggggcctacag

SEQ ID NO: 3529433 - DNA, 25 bp, Homo sapien
aactcccaaactaccactatgcatt

SEQ ID NO: 3529434 - DNA, 25 bp, Homo sapien
ttcatggatgttgtggctgccaaat

SEQ ID NO: 3529435 - DNA, 25 bp, Homo sapien
ccctgaggttgtcccttaaaagctg

SEQ ID NO: 3529436 - DNA, 25 bp, Homo sapien
tgtgcttctagtcggctctgattct

SEQ ID NO: 3529437 - DNA, 25 bp, Homo sapien
catcctgtgattaaagccaattggc

SEQ ID NO: 3529438 - DNA, 25 bp, Homo sapien
tctcctttgcaattatctctattac

SEQ ID NO: 3529439 - DNA, 25 bp, Homo sapien
tcaataacatcctgtgattaaagcc

SEQ ID NO: 3529440 - DNA, 25 bp, Homo sapien
tactacccataatcttcccaatctt

SEQ ID NO: 3529441 - DNA, 25 bp, Homo sapien
gccctatagcttgtgcttcaagcaa

SEQ ID NO: 3529442 - DNA, 25 bp, Homo sapien
caaagactggtaactgtaatatcac

SEQ ID NO: 3529443 - DNA, 25 bp, Homo sapien
gtaatatcacctgccctatagcttg

SEQ ID NO: 3529444 - DNA, 25 bp, Homo sapien
tcattccttcatgcaatgctgatgg

SEQ ID NO: 3529445 - DNA, 25 bp, Homo sapien
cagagacccagccaagtagaagggt

SEQ ID NO: 3529446 - DNA, 25 bp, Homo sapien
ggcacatcaatatacagtcccagag

SEQ ID NO: 3529447 - DNA, 25 bp, Homo sapien
tgctgactaaacacgcagtgaactg

SEQ ID NO: 3529448 - DNA, 25 bp, Homo sapien
tgttgattcactatctccagcagaa

SEQ ID NO: 3529449 - DNA, 25 bp, Homo sapien
catgatggccactgtagctgggacc

SEQ ID NO: 3529450 - DNA, 25 bp, Homo sapien
atctggggcgtggtcaagagtttca

SEQ ID NO: 3529451 - DNA, 25 bp, Homo sapien
caagagtttcagagtgaggcctagg

SEQ ID NO: 3529452 - DNA, 25 bp, Homo sapien
tgatggccactgtagctgggaccct

SEQ ID NO: 3529453 - DNA, 25 bp, Homo sapien
tttggccacaatgcaaaggcgcctc

SEQ ID NO: 3529454 - DNA, 25 bp, Homo sapien
ctctcggtctcaaggaagctgctgc

SEQ ID NO: 3529455 - DNA, 25 bp, Homo sapien
tgaatagagacccaagcccgaagtc

SEQ ID NO: 3529456 - DNA, 25 bp, Homo sapien
tctgcgcctccgtgaaggcagttct

SEQ ID NO: 3529457 - DNA, 25 bp, Homo sapien
ccaaagggggctttttgctgagcag

SEQ ID NO: 3529458 - DNA, 25 bp, Homo sapien
gcacccaaagggggctttttgctga

SEQ ID NO: 3529459 - DNA, 25 bp, Homo sapien
gcagtgtgtgggtcccgcctccgga

SEQ ID NO: 3529460 - DNA, 25 bp, Homo sapien
cccgcctccggaagaccaggctggt

SEQ ID NO: 3529461 - DNA, 25 bp, Homo sapien
tcaaatgctgcaatttcctaatcag

SEQ ID NO: 3529462 - DNA, 25 bp, Homo sapien
cttgtgcagaggaatgcagtttggc

SEQ ID NO: 3529463 - DNA, 25 bp, Homo sapien
cccttgagttgaatgatgatcgtgg

SEQ ID NO: 3529464 - DNA, 25 bp, Homo sapien
tttggaatgtccacaaagcctcgca

SEQ ID NO: 3529465 - DNA, 25 bp, Homo sapien
catctgtgctcagcccctcttgagg

SEQ ID NO: 3529466 - DNA, 25 bp, Homo sapien
tgtgctcagcccctcttgaggagga

SEQ ID NO: 3529467 - DNA, 25 bp, Homo sapien
tctgtgctcagcccctcttgaggag

SEQ ID NO: 3529468 - DNA, 25 bp, Homo sapien
acatctgtgctcagcccctcttgag

SEQ ID NO: 3529469 - DNA, 25 bp, Homo sapien
gctcaagtgcatggacccagaaaat

SEQ ID NO: 3529470 - DNA, 25 bp, Homo sapien
aatgcccctgcttgagggccaatgt

SEQ ID NO: 3529471 - DNA, 25 bp, Homo sapien
tcaagtgcatggacccagaaaatgc

SEQ ID NO: 3529472 - DNA, 25 bp, Homo sapien
ggccaatgttgaccaaggccctcag

SEQ ID NO: 3529473 - DNA, 25 bp, Homo sapien
gcagagtttggctctatgcttgtac

SEQ ID NO: 3529474 - DNA, 25 bp, Homo sapien
agcagcacctcgcagagggcagagt

SEQ ID NO: 3529475 - DNA, 25 bp, Homo sapien
ctctgtgggagcagcacctcgcaga

SEQ ID NO: 3529476 - DNA, 25 bp, Homo sapien
agcacctcgcagagggcagagtttg

SEQ ID NO: 3529477 - DNA, 25 bp, Homo sapien
cccagttggagcctactgattctca

SEQ ID NO: 3529478 - DNA, 25 bp, Homo sapien
tccatctggatgaaaaggtctgtat

SEQ ID NO: 3529479 - DNA, 25 bp, Homo sapien
gggcctttccaacaattccattgta

SEQ ID NO: 3529480 - DNA, 25 bp, Homo sapien
gctgagctctatggatccatctgga

SEQ ID NO: 3529481 - DNA, 25 bp, Homo sapien
ccagaggcactaggcctgtgaggaa

SEQ ID NO: 3529482 - DNA, 25 bp, Homo sapien
gaggagatgtccttcagagctgtac

SEQ ID NO: 3529483 - DNA, 25 bp, Homo sapien
tcgtcccttagagtgggccagggct

SEQ ID NO: 3529484 - DNA, 25 bp, Homo sapien
taaggtcacaccaactgaagccaga

SEQ ID NO: 3529485 - DNA, 25 bp, Homo sapien
aacagagcctgaggccttggcatct

SEQ ID NO: 3529486 - DNA, 25 bp, Homo sapien
caaaaggcaacagagcctgaggcct

SEQ ID NO: 3529487 - DNA, 25 bp, Homo sapien
tgaagtggatgcaaaaggcaacaga

SEQ ID NO: 3529488 - DNA, 25 bp, Homo sapien
aagtggatgcaaaaggcaacagagc

SEQ ID NO: 3529489 - DNA, 25 bp, Homo sapien
atctctcagaatccttttcattatc

SEQ ID NO: 3529490 - DNA, 25 bp, Homo sapien
cattgtcactaaaagcattcggggt

SEQ ID NO: 3529491 - DNA, 25 bp, Homo sapien
aaagcattcggggttggatcagtga

SEQ ID NO: 3529492 - DNA, 25 bp, Homo sapien
tctctcagaatccttttcattatca

SEQ ID NO: 3529493 - DNA, 25 bp, Homo sapien
tctcggacctgcttgtctagacatg

SEQ ID NO: 3529494 - DNA, 25 bp, Homo sapien
tctacaagaaggcagtctcggacct

SEQ ID NO: 3529495 - DNA, 25 bp, Homo sapien
tgtgccaatcttgggctttcctcca

SEQ ID NO: 3529496 - DNA, 25 bp, Homo sapien
gcgacctgtgggaattctacaagaa

SEQ ID NO: 3529497 - DNA, 25 bp, Homo sapien
gatgtttctctggatcctagctgcc

SEQ ID NO: 3529498 - DNA, 25 bp, Homo sapien
tgagagcaatttctgcagatagcga

SEQ ID NO: 3529499 - DNA, 25 bp, Homo sapien
gatagcgatgccagagtagatgttt

SEQ ID NO: 3529500 - DNA, 25 bp, Homo sapien
gctctagcctggacatataaactga

SEQ ID NO: 3529501 - DNA, 25 bp, Homo sapien
ctgtggtgcctggtgctcagaactt

SEQ ID NO: 3529502 - DNA, 25 bp, Homo sapien
ctggtgctcagaacttggtgaggcc

SEQ ID NO: 3529503 - DNA, 25 bp, Homo sapien
tgcctggtgctcagaacttggtgag

SEQ ID NO: 3529504 - DNA, 25 bp, Homo sapien
tgtggtgcctggtgctcagaacttg

SEQ ID NO: 3529505 - DNA, 25 bp, Homo sapien
attgcatgttgtgttcaaagtgcac

SEQ ID NO: 3529506 - DNA, 25 bp, Homo sapien
tgtttatattgcatgttgtgttcaa

SEQ ID NO: 3529507 - DNA, 25 bp, Homo sapien
tattgcatgttgtgttcaaagtgca

SEQ ID NO: 3529508 - DNA, 25 bp, Homo sapien
taggaaagatgttccacggtacttg

SEQ ID NO: 3529509 - DNA, 25 bp, Homo sapien
ctcctgcaggtagcatcagcactag

SEQ ID NO: 3529510 - DNA, 25 bp, Homo sapien
catgggagaccctagatggcacttc

SEQ ID NO: 3529511 - DNA, 25 bp, Homo sapien
tctgcctgatcttgttgggtaggaa

SEQ ID NO: 3529512 - DNA, 25 bp, Homo sapien
tggtacatgctgcttgttgagtgtc

SEQ ID NO: 3529513 - DNA, 25 bp, Homo sapien
gctatagagagtcacatgcatgttt

SEQ ID NO: 3529514 - DNA, 25 bp, Homo sapien
gaaagccttggtaagctatagagag

SEQ ID NO: 3529515 - DNA, 25 bp, Homo sapien
gaccttgtacaagcatgaaagcctt

SEQ ID NO: 3529516 - DNA, 25 bp, Homo sapien
cagcagaggaagagaagacatttcc

SEQ ID NO: 3529517 - DNA, 25 bp, Homo sapien
ctttatgaacagcagaggaagagaa

SEQ ID NO: 3529518 - DNA, 25 bp, Homo sapien
gaacagcagaggaagagaagacatt

SEQ ID NO: 3529519 - DNA, 25 bp, Homo sapien
tgaacagcagaggaagagaagacat

SEQ ID NO: 3529520 - DNA, 25 bp, Homo sapien
cttgaggaacaagcagaatccacca

SEQ ID NO: 3529521 - DNA, 25 bp, Homo sapien
tgaggaacaagcagaatccaccatc

SEQ ID NO: 3529522 - DNA, 25 bp, Homo sapien
ttgaggaacaagcagaatccaccat

SEQ ID NO: 3529523 - DNA, 25 bp, Homo sapien
ataatgcctccccaaacctccaaag

SEQ ID NO: 3529524 - DNA, 25 bp, Homo sapien
atgcctccccaaacctccaaagtct

SEQ ID NO: 3529525 - DNA, 25 bp, Homo sapien
cataatgcctccccaaacctccaaa

SEQ ID NO: 3529526 - DNA, 25 bp, Homo sapien
cgagagatccctctgtcctcaacaa

SEQ ID NO: 3529527 - DNA, 25 bp, Homo sapien
ttcctcctcgagagatccctctgtc

SEQ ID NO: 3529528 - DNA, 25 bp, Homo sapien
gaacagaacaatgtcctcatactct

SEQ ID NO: 3529529 - DNA, 25 bp, Homo sapien
cctcaacaagatgaacagaacaatg

SEQ ID NO: 3529530 - DNA, 25 bp, Homo sapien
cttttgctgtcttagagccaccctt

SEQ ID NO: 3529531 - DNA, 25 bp, Homo sapien
tgctgtcttagagccacccttgtaa

SEQ ID NO: 3529532 - DNA, 25 bp, Homo sapien
taatcaaagcaaatactccaaggct

SEQ ID NO: 3529533 - DNA, 25 bp, Homo sapien
agccacccttgtaatcaaagcaaat

SEQ ID NO: 3529534 - DNA, 25 bp, Homo sapien
ttttccttctgaatgggccccatga

SEQ ID NO: 3529535 - DNA, 25 bp, Homo sapien
ataactgtgaagacagatacaatgg

SEQ ID NO: 3529536 - DNA, 25 bp, Homo sapien
tttccttctgaatgggccccatgag

SEQ ID NO: 3529537 - DNA, 25 bp, Homo sapien
actgtgaagacagatacaatggcag

SEQ ID NO: 3529538 - DNA, 25 bp, Homo sapien
gtgccatgaacccttgagcattcgg

SEQ ID NO: 3529539 - DNA, 25 bp, Homo sapien
gaagcctcttgaagggcggcaggag

SEQ ID NO: 3529540 - DNA, 25 bp, Homo sapien
tgggccaccttggaccggcaagtcc

SEQ ID NO: 3529541 - DNA, 25 bp, Homo sapien
ttagagagaagcctcttgaagggcg

SEQ ID NO: 3529542 - DNA, 25 bp, Homo sapien
cttggaccggcaagtccacagaggc

SEQ ID NO: 3529543 - DNA, 25 bp, Homo sapien
gcctgagcccatggcccgatgatca

SEQ ID NO: 3529544 - DNA, 25 bp, Homo sapien
agcccatggcccgatgatcacctga

SEQ ID NO: 3529545 - DNA, 25 bp, Homo sapien
cttgtggacagggcctgagcccatg

SEQ ID NO: 3529546 - DNA, 25 bp, Homo sapien
catggcccgatgatcacctgagttt

SEQ ID NO: 3529547 - DNA, 25 bp, Homo sapien
gaggtcagcgtgagtgtaattctga

SEQ ID NO: 3529548 - DNA, 25 bp, Homo sapien
ggtcagcgtgagtgtaattctgaca

SEQ ID NO: 3529549 - DNA, 25 bp, Homo sapien
aaaccaagaggtcagcgtgagtgta

SEQ ID NO: 3529550 - DNA, 25 bp, Homo sapien
caagaggtcagcgtgagtgtaattc

SEQ ID NO: 3529551 - DNA, 25 bp, Homo sapien
ggccagacttgggatgtgcatccat

SEQ ID NO: 3529552 - DNA, 25 bp, Homo sapien
tgaggaaagggtttcatttcaagcc

SEQ ID NO: 3529553 - DNA, 25 bp, Homo sapien
atttgtctgtagattgctccaggga

SEQ ID NO: 3529554 - DNA, 25 bp, Homo sapien
tgggatgtgcatccatcttgatgga

SEQ ID NO: 3529555 - DNA, 25 bp, Homo sapien
ctgctgctagggaagaccagcgtgt

SEQ ID NO: 3529556 - DNA, 25 bp, Homo sapien
gctgtttactgaggtttaactctcc

SEQ ID NO: 3529557 - DNA, 25 bp, Homo sapien
cagggcttgatgacaggaggccacc

SEQ ID NO: 3529558 - DNA, 25 bp, Homo sapien
tctgcagtctctgagcgggtggcac

SEQ ID NO: 3529559 - DNA, 25 bp, Homo sapien
ggcctccagccgacagtgtgcaggg

SEQ ID NO: 3529560 - DNA, 25 bp, Homo sapien
caggcctccagccgacagtgtgcag

SEQ ID NO: 3529561 - DNA, 25 bp, Homo sapien
ggcaggcctccagccgacagtgtgc

SEQ ID NO: 3529562 - DNA, 25 bp, Homo sapien
gcctccagccgacagtgtgcagggc

SEQ ID NO: 3529563 - DNA, 25 bp, Homo sapien
ttgagccttagtctgatgtccctgt

SEQ ID NO: 3529564 - DNA, 25 bp, Homo sapien
gagccttagtctgatgtccctgtgg

SEQ ID NO: 3529565 - DNA, 25 bp, Homo sapien
tcttgagccttagtctgatgtccct

SEQ ID NO: 3529566 - DNA, 25 bp, Homo sapien
ctcttgagccttagtctgatgtccc

SEQ ID NO: 3529567 - DNA, 25 bp, Homo sapien
gtcctggctcggtgctctcccagct

SEQ ID NO: 3529568 - DNA, 25 bp, Homo sapien
agtcctggctcggtgctctcccagc

SEQ ID NO: 3529569 - DNA, 25 bp, Homo sapien
tcctggctcggtgctctcccagctc

SEQ ID NO: 3529570 - DNA, 25 bp, Homo sapien
acagtcctggctcggtgctctccca

SEQ ID NO: 3529571 - DNA, 25 bp, Homo sapien
ttttcgatatcaaagcaaggctgat

SEQ ID NO: 3529572 - DNA, 25 bp, Homo sapien
ctaatgttttccccggaggactgtg

SEQ ID NO: 3529573 - DNA, 25 bp, Homo sapien
gctgataaacacattcaagtcacaa

SEQ ID NO: 3529574 - DNA, 25 bp, Homo sapien
ctgtcttttcgatatcaaagcaagg

SEQ ID NO: 3529575 - DNA, 25 bp, Homo sapien
tcatcagcataaggaagactccact

SEQ ID NO: 3529576 - DNA, 25 bp, Homo sapien
cctggtttcatcttattaacggtca

SEQ ID NO: 3529577 - DNA, 25 bp, Homo sapien
tggctttttctggcctggtttcatc

SEQ ID NO: 3529578 - DNA, 25 bp, Homo sapien
ttaacggtcacttcattcatcagca

SEQ ID NO: 3529579 - DNA, 25 bp, Homo sapien
tggtcaccaagtagcgccaggtgct

SEQ ID NO: 3529580 - DNA, 25 bp, Homo sapien
gacaagcaagatcgagaaagttcac

SEQ ID NO: 3529581 - DNA, 25 bp, Homo sapien
gaagtcagccgactctgggttcgag

SEQ ID NO: 3529582 - DNA, 25 bp, Homo sapien
gaagaacgtttttgggacacagaca

SEQ ID NO: 3529583 - DNA, 25 bp, Homo sapien
cgagctagggttctgagccggatcc

SEQ ID NO: 3529584 - DNA, 25 bp, Homo sapien
gtcattacccgatgggacggtgcca

SEQ ID NO: 3529585 - DNA, 25 bp, Homo sapien
cgacgtgggcccgagctagggttct

SEQ ID NO: 3529586 - DNA, 25 bp, Homo sapien
agctcccctcgtccaccgacgtggg

SEQ ID NO: 3529587 - DNA, 25 bp, Homo sapien
ctgctctccttcagtagccaagcag

SEQ ID NO: 3529588 - DNA, 25 bp, Homo sapien
tgctctccttcagtagccaagcagc

SEQ ID NO: 3529589 - DNA, 25 bp, Homo sapien
agtccctactctcaggaacttatag

SEQ ID NO: 3529590 - DNA, 25 bp, Homo sapien
ttttttgtctgaacctagccatcct

SEQ ID NO: 3529591 - DNA, 25 bp, Homo sapien
gagcatgtgaatcctaatattcgat

SEQ ID NO: 3529592 - DNA, 25 bp, Homo sapien
tgactgctgatttatgtggcatctg

SEQ ID NO: 3529593 - DNA, 25 bp, Homo sapien
tgaatacctttttcagtggttccac

SEQ ID NO: 3529594 - DNA, 25 bp, Homo sapien
ctcctggctcggatgatctagagca

SEQ ID NO: 3529595 - DNA, 25 bp, Homo sapien
gctcggatgatctagagcagtgatt

SEQ ID NO: 3529596 - DNA, 25 bp, Homo sapien
cgcttccaggcttttagcaggcaac

SEQ ID NO: 3529597 - DNA, 25 bp, Homo sapien
cggatgatctagagcagtgattttc

SEQ ID NO: 3529598 - DNA, 25 bp, Homo sapien
gaggagggataatcaagtcaagccc

SEQ ID NO: 3529599 - DNA, 25 bp, Homo sapien
gtcaagccccattgactaggagaat

SEQ ID NO: 3529600 - DNA, 25 bp, Homo sapien
aaatgagttctcagcacgccacagg

SEQ ID NO: 3529601 - DNA, 25 bp, Homo sapien
atgttgcccacatctcctgaagctg

SEQ ID NO: 3529602 - DNA, 25 bp, Homo sapien
attattcagacactcggccttcttc

SEQ ID NO: 3529603 - DNA, 25 bp, Homo sapien
tcattattcagacactcggccttct

SEQ ID NO: 3529604 - DNA, 25 bp, Homo sapien
ttcattattcagacactcggccttc

SEQ ID NO: 3529605 - DNA, 25 bp, Homo sapien
gttcattattcagacactcggcctt

SEQ ID NO: 3529606 - DNA, 25 bp, Homo sapien
catttttcttcactgattcttccag

SEQ ID NO: 3529607 - DNA, 25 bp, Homo sapien
tttcttcactgattcttccagcagt

SEQ ID NO: 3529608 - DNA, 25 bp, Homo sapien
tttttcttcactgattcttccagca

SEQ ID NO: 3529609 - DNA, 25 bp, Homo sapien
tcatttttcttcactgattcttcca

SEQ ID NO: 3529610 - DNA, 25 bp, Homo sapien
cagtagatggcttgcgagagtgtac

SEQ ID NO: 3529611 - DNA, 25 bp, Homo sapien
tgtacaagtggaatctgctatgcct

SEQ ID NO: 3529612 - DNA, 25 bp, Homo sapien
cactggagtgaaagcaacggaaacc

SEQ ID NO: 3529613 - DNA, 25 bp, Homo sapien
cagttgcaatcaaacggcagctggt

SEQ ID NO: 3529614 - DNA, 25 bp, Homo sapien
tagtcatggaattctggattccagg

SEQ ID NO: 3529615 - DNA, 25 bp, Homo sapien
acagggaggactcctagtgttcgta

SEQ ID NO: 3529616 - DNA, 25 bp, Homo sapien
gattccaggacccataagcaggttc

SEQ ID NO: 3529617 - DNA, 25 bp, Homo sapien
cgtagtgttcgacgtctcatagtca

SEQ ID NO: 3529618 - DNA, 25 bp, Homo sapien
ggctactgtatccagccttaggaaa

SEQ ID NO: 3529619 - DNA, 25 bp, Homo sapien
tgggctactgtatccagccttagga

SEQ ID NO: 3529620 - DNA, 25 bp, Homo sapien
gggctactgtatccagccttaggaa

SEQ ID NO: 3529621 - DNA, 25 bp, Homo sapien
tgctccagacaagcctctgggtaac

SEQ ID NO: 3529622 - DNA, 25 bp, Homo sapien
ctccagacaagcctctgggtaactc

SEQ ID NO: 3529623 - DNA, 25 bp, Homo sapien
ccagacaagcctctgggtaactcat

SEQ ID NO: 3529624 - DNA, 25 bp, Homo sapien
ggaggactgctccagacaagcctct

SEQ ID NO: 3529625 - DNA, 25 bp, Homo sapien
tgagatgcagccatgccaagcttct

SEQ ID NO: 3529626 - DNA, 25 bp, Homo sapien
atgagatgcagccatgccaagcttc

SEQ ID NO: 3529627 - DNA, 25 bp, Homo sapien
ggtgcccctcgagaggaagaaggct

SEQ ID NO: 3529628 - DNA, 25 bp, Homo sapien
ttctgggtgcccctcgagaggaaga

SEQ ID NO: 3529629 - DNA, 25 bp, Homo sapien
caaggcccttatagtagcttcagag

SEQ ID NO: 3529630 - DNA, 25 bp, Homo sapien
agatgaacaaccagtaggccaggga

SEQ ID NO: 3529631 - DNA, 25 bp, Homo sapien
ctccctgttagtgtgggtgatgaca

SEQ ID NO: 3529632 - DNA, 25 bp, Homo sapien
taggccagggatcctttagcagcag

SEQ ID NO: 3529633 - DNA, 25 bp, Homo sapien
ctcctctgtcatcaaacacatcagc

SEQ ID NO: 3529634 - DNA, 25 bp, Homo sapien
catcagcaggcatgagttttaccat

SEQ ID NO: 3529635 - DNA, 25 bp, Homo sapien
aagacagaaattcatcatctttccc

SEQ ID NO: 3529636 - DNA, 25 bp, Homo sapien
tccctttatgatttcctcctctgtc

SEQ ID NO: 3529637 - DNA, 25 bp, Homo sapien
cttgattataattcactggagtatt

SEQ ID NO: 3529638 - DNA, 25 bp, Homo sapien
ctggagtattcaagaggatcaggaa

SEQ ID NO: 3529639 - DNA, 25 bp, Homo sapien
gaggatcaggaagttaaatttctct

SEQ ID NO: 3529640 - DNA, 25 bp, Homo sapien
tggagtattcaagaggatcaggaag

SEQ ID NO: 3529641 - DNA, 25 bp, Homo sapien
caaagaagtccgtgatgaatgacac

SEQ ID NO: 3529642 - DNA, 25 bp, Homo sapien
ggatcgagtgttcaatccagcaaca

SEQ ID NO: 3529643 - DNA, 25 bp, Homo sapien
ctcagaagttcggtcaaaaccaagg

SEQ ID NO: 3529644 - DNA, 25 bp, Homo sapien
gaccagggaccggacataatcccag

SEQ ID NO: 3529645 - DNA, 25 bp, Homo sapien
accacgctgggccaagaaatgcttt

SEQ ID NO: 3529646 - DNA, 25 bp, Homo sapien
cattgtctcaaactttcgggaagca

SEQ ID NO: 3529647 - DNA, 25 bp, Homo sapien
gtctcaaactttcgggaagcactta

SEQ ID NO: 3529648 - DNA, 25 bp, Homo sapien
tgaggtcattgtctcaaactttcgg

SEQ ID NO: 3529649 - DNA, 25 bp, Homo sapien
actggcattcagattggagatgtct

SEQ ID NO: 3529650 - DNA, 25 bp, Homo sapien
tgtctgtgggaaacctgagtcactc

SEQ ID NO: 3529651 - DNA, 25 bp, Homo sapien
gctgtaggattcagcaaaaactggc

SEQ ID NO: 3529652 - DNA, 25 bp, Homo sapien
tggtagacacagaaggcaaagtgca

SEQ ID NO: 3529653 - DNA, 25 bp, Homo sapien
tgtgtttccctccatatgctggtga

SEQ ID NO: 3529654 - DNA, 25 bp, Homo sapien
cactgtgtttccctccatatgctgg

SEQ ID NO: 3529655 - DNA, 25 bp, Homo sapien
ctgggagatattgagaagaacactg

SEQ ID NO: 3529656 - DNA, 25 bp, Homo sapien
tgtttccctccatatgctggtgagg

SEQ ID NO: 3529657 - DNA, 25 bp, Homo sapien
ccccatctgggagcaacttccagaa

SEQ ID NO: 3529658 - DNA, 25 bp, Homo sapien
taggtgcttcacatacgttaatttg

SEQ ID NO: 3529659 - DNA, 25 bp, Homo sapien
tttgctaccatttaccaagggtctg

SEQ ID NO: 3529660 - DNA, 25 bp, Homo sapien
gaaattataatcctcagaagacact

SEQ ID NO: 3529661 - DNA, 25 bp, Homo sapien
tcctctggattgtagttgcctcatg

SEQ ID NO: 3529662 - DNA, 25 bp, Homo sapien
gactagaaaatgcaaccaggtccaa

SEQ ID NO: 3529663 - DNA, 25 bp, Homo sapien
gctgttcagtgggacataatgggca

SEQ ID NO: 3529664 - DNA, 25 bp, Homo sapien
gaaagaggcatcaatggctgtggcc

SEQ ID NO: 3529665 - DNA, 25 bp, Homo sapien
gacggagctcctggatcccagcttc

SEQ ID NO: 3529666 - DNA, 25 bp, Homo sapien
gtgacggagctcctggatcccagct

SEQ ID NO: 3529667 - DNA, 25 bp, Homo sapien
tggtgacggagctcctggatcccag

SEQ ID NO: 3529668 - DNA, 25 bp, Homo sapien
ctggtgacggagctcctggatccca

SEQ ID NO: 3529669 - DNA, 25 bp, Homo sapien
tattgttgccacaccaaaacagtgg

SEQ ID NO: 3529670 - DNA, 25 bp, Homo sapien
ctttattgttgccacaccaaaacag

SEQ ID NO: 3529671 - DNA, 25 bp, Homo sapien
ggcctttattgttgccacaccaaaa

SEQ ID NO: 3529672 - DNA, 25 bp, Homo sapien
ttattgttgccacaccaaaacagtg

SEQ ID NO: 3529673 - DNA, 25 bp, Homo sapien
tcagcttaggagttctcactccagg

SEQ ID NO: 3529674 - DNA, 25 bp, Homo sapien
ttcatgtggttgctgtccaatgggc

SEQ ID NO: 3529675 - DNA, 25 bp, Homo sapien
tgtctgtccacatggagacttcatg

SEQ ID NO: 3529676 - DNA, 25 bp, Homo sapien
ggaagattcaaacatctaggtgctg

SEQ ID NO: 3529677 - DNA, 25 bp, Homo sapien
ctgtttccactgaggggtagtcatc

SEQ ID NO: 3529678 - DNA, 25 bp, Homo sapien
tgtttccactgaggggtagtcatca

SEQ ID NO: 3529679 - DNA, 25 bp, Homo sapien
tctatgttctgataataaaacttca

SEQ ID NO: 3529680 - DNA, 25 bp, Homo sapien
tatgttctgataataaaacttcatt

SEQ ID NO: 3529681 - DNA, 25 bp, Homo sapien
atgttctgataataaaacttcatta

SEQ ID NO: 3529682 - DNA, 25 bp, Homo sapien
ctatgttctgataataaaacttcat

SEQ ID NO: 3529683 - DNA, 25 bp, Homo sapien
agatcatccggctgtctgacagcca

SEQ ID NO: 3529684 - DNA, 25 bp, Homo sapien
tctgctgaaacgattagcagtgcgc

SEQ ID NO: 3529685 - DNA, 25 bp, Homo sapien
agtgcgctgcgtcagatcatccggc

SEQ ID NO: 3529686 - DNA, 25 bp, Homo sapien
aacgattagcagtgcgctgcgtcag

SEQ ID NO: 3529687 - DNA, 25 bp, Homo sapien
caggaggctgggctattcatagcca

SEQ ID NO: 3529688 - DNA, 25 bp, Homo sapien
accagtctaccaggagtgaatgaga

SEQ ID NO: 3529689 - DNA, 25 bp, Homo sapien
tcatagccagggtacagccttagct

SEQ ID NO: 3529690 - DNA, 25 bp, Homo sapien
gagacagaatctctccaggcttgga

SEQ ID NO: 3529691 - DNA, 25 bp, Homo sapien
aaagctcttcagtaagcctccagtg

SEQ ID NO: 3529692 - DNA, 25 bp, Homo sapien
gaaacaagtaatgctctgggccttc

SEQ ID NO: 3529693 - DNA, 25 bp, Homo sapien
ctggaaacaagtaatgctctgggcc

SEQ ID NO: 3529694 - DNA, 25 bp, Homo sapien
caaagctcttcagtaagcctccagt

SEQ ID NO: 3529695 - DNA, 25 bp, Homo sapien
gtattgtagtactgctgagaccctg

SEQ ID NO: 3529696 - DNA, 25 bp, Homo sapien
cattcgatggtgctgataactcggc

SEQ ID NO: 3529697 - DNA, 25 bp, Homo sapien
ggtctgctcccgtcacagtgaatgg

SEQ ID NO: 3529698 - DNA, 25 bp, Homo sapien
gaagtgactgagaatccgcctctgt

SEQ ID NO: 3529699 - DNA, 25 bp, Homo sapien
caggtgtgccagttgtgtgcgagtt

SEQ ID NO: 3529700 - DNA, 25 bp, Homo sapien
tgtgtgcgagtttccaaacagacag

SEQ ID NO: 3529701 - DNA, 25 bp, Homo sapien
acagcccgtgcagggggcatgtctt

SEQ ID NO: 3529702 - DNA, 25 bp, Homo sapien
tgtgccagttgtgtgcgagtttcca

SEQ ID NO: 3529703 - DNA, 25 bp, Homo sapien
cctgctgtggcttgaatagatggct

SEQ ID NO: 3529704 - DNA, 25 bp, Homo sapien
tatccggcgacgtttcattaaaagc

SEQ ID NO: 3529705 - DNA, 25 bp, Homo sapien
aaaatgttatccgagctgcagaccc

SEQ ID NO: 3529706 - DNA, 25 bp, Homo sapien
cagataaacagtaagcaaagtgctt

SEQ ID NO: 3529707 - DNA, 25 bp, Homo sapien
ttatccataacaaccctgagtgtgt

SEQ ID NO: 3529708 - DNA, 25 bp, Homo sapien
gagtgtgtttcaagtactttttgtg

SEQ ID NO: 3529709 - DNA, 25 bp, Homo sapien
tggaaaaagtcattgtccgctcttg

SEQ ID NO: 3529710 - DNA, 25 bp, Homo sapien
cttggtaacactggcttgtccagga

SEQ ID NO: 3529711 - DNA, 25 bp, Homo sapien
tccttatccttttgccgaattcgaa

SEQ ID NO: 3529712 - DNA, 25 bp, Homo sapien
gaatagatcttaatcttttcagcac

SEQ ID NO: 3529713 - DNA, 25 bp, Homo sapien
gacattgactcagaacatgcccaac

SEQ ID NO: 3529714 - DNA, 25 bp, Homo sapien
tgtcctaccgtcctcacattctgtg

SEQ ID NO: 3529715 - DNA, 25 bp, Homo sapien
tgacttccacgagacactgaccatc

SEQ ID NO: 3529716 - DNA, 25 bp, Homo sapien
gaaatactgtaggaatgaaagttag

SEQ ID NO: 3529717 - DNA, 25 bp, Homo sapien
gagaaaacgcacaccagggacttca

SEQ ID NO: 3529718 - DNA, 25 bp, Homo sapien
gttcctgctctgcatgatgatatgg

SEQ ID NO: 3529719 - DNA, 25 bp, Homo sapien
gagactttctacgataccatagcgg

SEQ ID NO: 3529720 - DNA, 25 bp, Homo sapien
tgttcatgacactgagactttctac

SEQ ID NO: 3529721 - DNA, 25 bp, Homo sapien
gaaaggtgtggatataaactgttac

SEQ ID NO: 3529722 - DNA, 25 bp, Homo sapien
taccatagcggaagagatgcccatg

SEQ ID NO: 3529723 - DNA, 25 bp, Homo sapien
tgatggcctataaaacctactgtga

SEQ ID NO: 3529724 - DNA, 25 bp, Homo sapien
tctgggcgtcgaagtgcttgtaagc

SEQ ID NO: 3529725 - DNA, 25 bp, Homo sapien
ggagagaagcacagacaaactagcc

SEQ ID NO: 3529726 - DNA, 25 bp, Homo sapien
gatgaaaccttatgctctgggcgtc

SEQ ID NO: 3529727 - DNA, 25 bp, Homo sapien
gatcatgtcccatccagtccagtga

SEQ ID NO: 3529728 - DNA, 25 bp, Homo sapien
caacagcttataccatggaatgagg

SEQ ID NO: 3529729 - DNA, 25 bp, Homo sapien
caaggtgatactctgagctgtggac

SEQ ID NO: 3529730 - DNA, 25 bp, Homo sapien
gaaagtggtatcatcctaggtaagc

SEQ ID NO: 3529731 - DNA, 25 bp, Homo sapien
tcctcagtgggcttaggtggaaata

SEQ ID NO: 3529732 - DNA, 25 bp, Homo sapien
tcacggtgatctacggagggcagct

SEQ ID NO: 3529733 - DNA, 25 bp, Homo sapien
caaggaggtaatgcacactggagtg

SEQ ID NO: 3529734 - DNA, 25 bp, Homo sapien
cagagcatcaaactgtgccagcagg

SEQ ID NO: 3529735 - DNA, 25 bp, Homo sapien
aactatagaatgatcccttaaaata

SEQ ID NO: 3529736 - DNA, 25 bp, Homo sapien
ctatagaatgatcccttaaaatata

SEQ ID NO: 3529737 - DNA, 25 bp, Homo sapien
gaactatagaatgatcccttaaaat

SEQ ID NO: 3529738 - DNA, 25 bp, Homo sapien
tatagaatgatcccttaaaatatag

SEQ ID NO: 3529739 - DNA, 25 bp, Homo sapien
taaatgagtgtcaaaatgacaagaa

SEQ ID NO: 3529740 - DNA, 25 bp, Homo sapien
attgtggtaaatgagtgtcaaaatg

SEQ ID NO: 3529741 - DNA, 25 bp, Homo sapien
ggtaaatgagtgtcaaaatgacaag

SEQ ID NO: 3529742 - DNA, 25 bp, Homo sapien
tgtggtaaatgagtgtcaaaatgac

SEQ ID NO: 3529743 - DNA, 25 bp, Homo sapien
cctacatgccactacttcgagctaa

SEQ ID NO: 3529744 - DNA, 25 bp, Homo sapien
aatcttagtgggcaaaaatggtcat

SEQ ID NO: 3529745 - DNA, 25 bp, Homo sapien
attatttctatcttcctcccaaatg

SEQ ID NO: 3529746 - DNA, 25 bp, Homo sapien
caacaaagtcccaaattgctcatta

SEQ ID NO: 3529747 - DNA, 25 bp, Homo sapien
ggtgactgtcgcctgagatttcgca

SEQ ID NO: 3529748 - DNA, 25 bp, Homo sapien
gatttcgcattctgtctcgcggagg

SEQ ID NO: 3529749 - DNA, 25 bp, Homo sapien
ggctaagcgcttccaggtgactgtc

SEQ ID NO: 3529750 - DNA, 25 bp, Homo sapien
caagcaattgatacggtggcggcac

SEQ ID NO: 3529751 - DNA, 25 bp, Homo sapien
tattcacatggctcaacaaaagagg

SEQ ID NO: 3529752 - DNA, 25 bp, Homo sapien
gctgacaatttagtgcaaaggacca

SEQ ID NO: 3529753 - DNA, 25 bp, Homo sapien
ggaccaagacatatgaacacctgag

SEQ ID NO: 3529754 - DNA, 25 bp, Homo sapien
acagggcggcgcgtttttcactcac

SEQ ID NO: 3529755 - DNA, 25 bp, Homo sapien
gggctggagctgcagaacttgagcg

SEQ ID NO: 3529756 - DNA, 25 bp, Homo sapien
aggggctggagctgcagaacttgag

SEQ ID NO: 3529757 - DNA, 25 bp, Homo sapien
ggctggagctgcagaacttgagcga

SEQ ID NO: 3529758 - DNA, 25 bp, Homo sapien
gctggagctgcagaacttgagcgac

SEQ ID NO: 3529759 - DNA, 25 bp, Homo sapien
cgtggccatactggtcattgtcctg

SEQ ID NO: 3529760 - DNA, 25 bp, Homo sapien
ggtagaggctgataatcgtgtcgaa

SEQ ID NO: 3529761 - DNA, 25 bp, Homo sapien
tacacggcgttgttgacgtggccat

SEQ ID NO: 3529762 - DNA, 25 bp, Homo sapien
tcgaagtagctgtagtacacggcgt

SEQ ID NO: 3529763 - DNA, 25 bp, Homo sapien
gaatgggcattcttaggaaggagct

SEQ ID NO: 3529764 - DNA, 25 bp, Homo sapien
tgatgatgtaaccaaggaatgggca

SEQ ID NO: 3529765 - DNA, 25 bp, Homo sapien
ggtgccaatggtaggcctcaactgt

SEQ ID NO: 3529766 - DNA, 25 bp, Homo sapien
tcaactgtctggtcctttgatgatg

SEQ ID NO: 3529767 - DNA, 25 bp, Homo sapien
gagacttcttggatgcagaagcctg

SEQ ID NO: 3529768 - DNA, 25 bp, Homo sapien
cagaaggttctgatacctgggagac

SEQ ID NO: 3529769 - DNA, 25 bp, Homo sapien
aaagagccgtctgtaagccaaccct

SEQ ID NO: 3529770 - DNA, 25 bp, Homo sapien
cctgactgagagcagaaagagccgt

SEQ ID NO: 3529771 - DNA, 25 bp, Homo sapien
gcagtaaacctttctaacatcacaa

SEQ ID NO: 3529772 - DNA, 25 bp, Homo sapien
ctggaaaacgagtgatttgcaccct

SEQ ID NO: 3529773 - DNA, 25 bp, Homo sapien
atcacaaaaccccaccacttgactt

SEQ ID NO: 3529774 - DNA, 25 bp, Homo sapien
tcccctctgcagtaaacctttctaa

SEQ ID NO: 3529775 - DNA, 25 bp, Homo sapien
cagcaggtgcatcctttccgaccat

SEQ ID NO: 3529776 - DNA, 25 bp, Homo sapien
ggaaagagagttgctggaccgccac

SEQ ID NO: 3529777 - DNA, 25 bp, Homo sapien
tcggcaacttcgctttaactaccat

SEQ ID NO: 3529778 - DNA, 25 bp, Homo sapien
ccatctgctgagctcggcaacttcg

SEQ ID NO: 3529779 - DNA, 25 bp, Homo sapien
agagttgctggaccgccaccaaatc

SEQ ID NO: 3529780 - DNA, 25 bp, Homo sapien
gaatcacgtcggtataatcctcaca

SEQ ID NO: 3529781 - DNA, 25 bp, Homo sapien
aagatacgaatttcactaaggcaca

SEQ ID NO: 3529782 - DNA, 25 bp, Homo sapien
caaactgaatagaatcacgtcggta

SEQ ID NO: 3529783 - DNA, 25 bp, Homo sapien
gactgcctctccaagggcctgaaac

SEQ ID NO: 3529784 - DNA, 25 bp, Homo sapien
tgagcaggcaatacatttcgagaca

SEQ ID NO: 3529785 - DNA, 25 bp, Homo sapien
ctgcagtcatgtggggcttgtggaa

SEQ ID NO: 3529786 - DNA, 25 bp, Homo sapien
cagtcatgtggggcttgtggaaggg

SEQ ID NO: 3529787 - DNA, 25 bp, Homo sapien
tgcagtcatgtggggcttgtggaag

SEQ ID NO: 3529788 - DNA, 25 bp, Homo sapien
gtcatgtggggcttgtggaagggtc

SEQ ID NO: 3529789 - DNA, 25 bp, Homo sapien
atttcctccgtcaatagcctctgtt

SEQ ID NO: 3529790 - DNA, 25 bp, Homo sapien
ccatttcctccgtcaatagcctctg

SEQ ID NO: 3529791 - DNA, 25 bp, Homo sapien
catttcctccgtcaatagcctctgt

SEQ ID NO: 3529792 - DNA, 25 bp, Homo sapien
cacctcatggctccaaagagagtac

SEQ ID NO: 3529793 - DNA, 25 bp, Homo sapien
tccttcctaccaagcaggacagcag

SEQ ID NO: 3529794 - DNA, 25 bp, Homo sapien
gagagtactggacatagaatcctaa

SEQ ID NO: 3529795 - DNA, 25 bp, Homo sapien
gctccaaagagagtactggacatag

SEQ ID NO: 3529796 - DNA, 25 bp, Homo sapien
aggacccccacgacattgctatgct

SEQ ID NO: 3529797 - DNA, 25 bp, Homo sapien
cttctgaaggggttcactgccccac

SEQ ID NO: 3529798 - DNA, 25 bp, Homo sapien
ttctgaaggggttcactgccccact

SEQ ID NO: 3529799 - DNA, 25 bp, Homo sapien
ggacccccacgacattgctatgctt

SEQ ID NO: 3529800 - DNA, 25 bp, Homo sapien
atccacggttgatgatgcagaaggt

SEQ ID NO: 3529801 - DNA, 25 bp, Homo sapien
ggtggaaatcatgtcggtcaaagtt

SEQ ID NO: 3529802 - DNA, 25 bp, Homo sapien
aaattctccttggagtggtggaaat

SEQ ID NO: 3529803 - DNA, 25 bp, Homo sapien
caaagttgtccaaggattcaaacgt

SEQ ID NO: 3529804 - DNA, 25 bp, Homo sapien
gaacagcacattgtctgtggtagga

SEQ ID NO: 3529805 - DNA, 25 bp, Homo sapien
gagcacttggcgtcccgaagaactt

SEQ ID NO: 3529806 - DNA, 25 bp, Homo sapien
ttaacattcagagcacttggcgtcc

SEQ ID NO: 3529807 - DNA, 25 bp, Homo sapien
cttggcgtcccgaagaacttttgtg

SEQ ID NO: 3529808 - DNA, 25 bp, Homo sapien
gaagaacttttgtggcactgtgtac

SEQ ID NO: 3529809 - DNA, 25 bp, Homo sapien
cctgtcgatgccaaatgctgaattt

SEQ ID NO: 3529810 - DNA, 25 bp, Homo sapien
gcctcactggcttttcaacatgcaa

SEQ ID NO: 3529811 - DNA, 25 bp, Homo sapien
ggcttttcaacatgcaacttgatag

SEQ ID NO: 3529812 - DNA, 25 bp, Homo sapien
gaagtcagtggatcttctttctgcc

SEQ ID NO: 3529813 - DNA, 25 bp, Homo sapien
gaatacaagatcatcaaagtgtgtt

SEQ ID NO: 3529814 - DNA, 25 bp, Homo sapien
ccaatgaatacaagatcatcaaagt

SEQ ID NO: 3529815 - DNA, 25 bp, Homo sapien
tacaagatcatcaaagtgtgttatt

SEQ ID NO: 3529816 - DNA, 25 bp, Homo sapien
atgaatacaagatcatcaaagtgtg

SEQ ID NO: 3529817 - DNA, 25 bp, Homo sapien
cctccttctggttctgctgccacat

SEQ ID NO: 3529818 - DNA, 25 bp, Homo sapien
ccctccttctggttctgctgccaca

SEQ ID NO: 3529819 - DNA, 25 bp, Homo sapien
caatccctccttctggttctgctgc

SEQ ID NO: 3529820 - DNA, 25 bp, Homo sapien
atccctccttctggttctgctgcca

SEQ ID NO: 3529821 - DNA, 25 bp, Homo sapien
ccggcccctgactgggcccagttct

SEQ ID NO: 3529822 - DNA, 25 bp, Homo sapien
ggcccctgactgggcccagttctgc

SEQ ID NO: 3529823 - DNA, 25 bp, Homo sapien
cggcccctgactgggcccagttctg

SEQ ID NO: 3529824 - DNA, 25 bp, Homo sapien
gccaacgtccacataaagcgcaaca

SEQ ID NO: 3529825 - DNA, 25 bp, Homo sapien
tgactgtatcccctaggccaacgtc

SEQ ID NO: 3529826 - DNA, 25 bp, Homo sapien
caagaaagacggtgactgtatcccc

SEQ ID NO: 3529827 - DNA, 25 bp, Homo sapien
agaactctgtcatcctcttaggcga

SEQ ID NO: 3529828 - DNA, 25 bp, Homo sapien
tcaactccgtggcaaaagcatccct

SEQ ID NO: 3529829 - DNA, 25 bp, Homo sapien
atccctcctgtgtggcccgcattta

SEQ ID NO: 3529830 - DNA, 25 bp, Homo sapien
gcatttagaactcccagtgtcctct

SEQ ID NO: 3529831 - DNA, 25 bp, Homo sapien
tctgtcatctgtagggctgttggcc

SEQ ID NO: 3529832 - DNA, 25 bp, Homo sapien
agttaatagtgtttgacttgcagag

SEQ ID NO: 3529833 - DNA, 25 bp, Homo sapien
catcaaagccgcttcattaaagtta

SEQ ID NO: 3529834 - DNA, 25 bp, Homo sapien
tcattaaagttaatagtgtttgact

SEQ ID NO: 3529835 - DNA, 25 bp, Homo sapien
atcaaagccgcttcattaaagttaa

SEQ ID NO: 3529836 - DNA, 25 bp, Homo sapien
tttccggcagtaaaggcaccaaatg

SEQ ID NO: 3529837 - DNA, 25 bp, Homo sapien
cggcagtaaaggcaccaaatggatg

SEQ ID NO: 3529838 - DNA, 25 bp, Homo sapien
gtaaaggcaccaaatggatgcaata

SEQ ID NO: 3529839 - DNA, 25 bp, Homo sapien
tatttttccggcagtaaaggcacca

SEQ ID NO: 3529840 - DNA, 25 bp, Homo sapien
tggaggctgccccagggctggccct

SEQ ID NO: 3529841 - DNA, 25 bp, Homo sapien
catcaaccagtgctgtggaggctgc

SEQ ID NO: 3529842 - DNA, 25 bp, Homo sapien
tgccccagggctggccctctctgca

SEQ ID NO: 3529843 - DNA, 25 bp, Homo sapien
cacatcaaccagtgctgtggaggct

SEQ ID NO: 3529844 - DNA, 25 bp, Homo sapien
cttgccatctgtctccagttctctt

SEQ ID NO: 3529845 - DNA, 25 bp, Homo sapien
tgccatctgtctccagttctcttct

SEQ ID NO: 3529846 - DNA, 25 bp, Homo sapien
ttgccatctgtctccagttctcttc

SEQ ID NO: 3529847 - DNA, 25 bp, Homo sapien
gatctacaagccctccgaccaagca

SEQ ID NO: 3529848 - DNA, 25 bp, Homo sapien
tctacaagccctccgaccaagcaca

SEQ ID NO: 3529849 - DNA, 25 bp, Homo sapien
ggacagatctacaagccctccgacc

SEQ ID NO: 3529850 - DNA, 25 bp, Homo sapien
acagatctacaagccctccgaccaa

SEQ ID NO: 3529851 - DNA, 25 bp, Homo sapien
ggatactgtactcctcagatgctat

SEQ ID NO: 3529852 - DNA, 25 bp, Homo sapien
catgatgaaataaggcctagaatag

SEQ ID NO: 3529853 - DNA, 25 bp, Homo sapien
cctttcaaagaggatactgtactcc

SEQ ID NO: 3529854 - DNA, 25 bp, Homo sapien
cagatgctatagatccaaggcatga

SEQ ID NO: 3529855 - DNA, 25 bp, Homo sapien
tccggcgggtacaagtcgcgattga

SEQ ID NO: 3529856 - DNA, 25 bp, Homo sapien
tctgcagcaggcgtcgctggcgcct

SEQ ID NO: 3529857 - DNA, 25 bp, Homo sapien
aacttttgaccctagaggccctgcg

SEQ ID NO: 3529858 - DNA, 25 bp, Homo sapien
tgggcttcaccgcccgcaacttttg

SEQ ID NO: 3529859 - DNA, 25 bp, Homo sapien
tgtccaaccggagtaaatctttgga

SEQ ID NO: 3529860 - DNA, 25 bp, Homo sapien
caaccggagtaaatctttggattct

SEQ ID NO: 3529861 - DNA, 25 bp, Homo sapien
cctggaatgcgggaaaagaaatgct

SEQ ID NO: 3529862 - DNA, 25 bp, Homo sapien
gccactgtttccttcactcatcaaa

SEQ ID NO: 3529863 - DNA, 25 bp, Homo sapien
ttagccactgtttccttcactcatc

SEQ ID NO: 3529864 - DNA, 25 bp, Homo sapien
ccactgtttccttcactcatcaaag

SEQ ID NO: 3529865 - DNA, 25 bp, Homo sapien
tagccactgtttccttcactcatca

SEQ ID NO: 3529866 - DNA, 25 bp, Homo sapien
gacagatacagtcaatacccaatac

SEQ ID NO: 3529867 - DNA, 25 bp, Homo sapien
cctgtcttgatgatcaccttcctca

SEQ ID NO: 3529868 - DNA, 25 bp, Homo sapien
tctctatgccagtccctatgtgctt

SEQ ID NO: 3529869 - DNA, 25 bp, Homo sapien
tggtacccctctctatgccagtccc

SEQ ID NO: 3529870 - DNA, 25 bp, Homo sapien
taagattacttccagtcaacaattc

SEQ ID NO: 3529871 - DNA, 25 bp, Homo sapien
ctgctgatgagaaagatccatgaag

SEQ ID NO: 3529872 - DNA, 25 bp, Homo sapien
agatatatgaattgctgaactgctg

SEQ ID NO: 3529873 - DNA, 25 bp, Homo sapien
aagattagcctcttctgatatctga

SEQ ID NO: 3529874 - DNA, 25 bp, Homo sapien
ttgctttgtgggatcaaatactggt

SEQ ID NO: 3529875 - DNA, 25 bp, Homo sapien
gagtccaagtaacgacatggctgcg

SEQ ID NO: 3529876 - DNA, 25 bp, Homo sapien
tatccacccagataaccacgatctt

SEQ ID NO: 3529877 - DNA, 25 bp, Homo sapien
tactggttcaggatttatgagtcca

SEQ ID NO: 3529878 - DNA, 25 bp, Homo sapien
gtcagggtaccaatgaacagcatag

SEQ ID NO: 3529879 - DNA, 25 bp, Homo sapien
gcagctgcttcgtgtctccacgcaa

SEQ ID NO: 3529880 - DNA, 25 bp, Homo sapien
agaacagggtcagggtaccaatgaa

SEQ ID NO: 3529881 - DNA, 25 bp, Homo sapien
gctgactgctttgggtaagaacagg

SEQ ID NO: 3529882 - DNA, 25 bp, Homo sapien
gcatggtacaccctggtgcattttg

SEQ ID NO: 3529883 - DNA, 25 bp, Homo sapien
tggtacaccctggtgcattttgtca

SEQ ID NO: 3529884 - DNA, 25 bp, Homo sapien
gtacaccctggtgcattttgtcatc

SEQ ID NO: 3529885 - DNA, 25 bp, Homo sapien
ctgcatggtacaccctggtgcattt

SEQ ID NO: 3529886 - DNA, 25 bp, Homo sapien
taaaaaagccttgcgcacatggttg

SEQ ID NO: 3529887 - DNA, 25 bp, Homo sapien
gtgattttagagcagccagtataaa

SEQ ID NO: 3529888 - DNA, 25 bp, Homo sapien
gagcagccagtataaaaaagccttg

SEQ ID NO: 3529889 - DNA, 25 bp, Homo sapien
tataaaaaagccttgcgcacatggt

SEQ ID NO: 3529890 - DNA, 25 bp, Homo sapien
ggccagtgacatttactggcgtcac

SEQ ID NO: 3529891 - DNA, 25 bp, Homo sapien
acatttactggcgtcactccaccta

SEQ ID NO: 3529892 - DNA, 25 bp, Homo sapien
tactggcgtcactccacctactgtg

SEQ ID NO: 3529893 - DNA, 25 bp, Homo sapien
tctggggaacggaggccagtgacat

SEQ ID NO: 3529894 - DNA, 25 bp, Homo sapien
ccatcttccttctcaagccatattt

SEQ ID NO: 3529895 - DNA, 25 bp, Homo sapien
caggggtgttgccatcttccttctc

SEQ ID NO: 3529896 - DNA, 25 bp, Homo sapien
tccttctcaagccatattttctttt

SEQ ID NO: 3529897 - DNA, 25 bp, Homo sapien
tcttccttctcaagccatattttct

SEQ ID NO: 3529898 - DNA, 25 bp, Homo sapien
ctcctcctgcttaaaggaatctttt

SEQ ID NO: 3529899 - DNA, 25 bp, Homo sapien
ctcgggtatttcttctcagggccat

SEQ ID NO: 3529900 - DNA, 25 bp, Homo sapien
tccttgtcttcaagagaaatccctt

SEQ ID NO: 3529901 - DNA, 25 bp, Homo sapien
tcttcaagagaaatcccttcttctt

SEQ ID NO: 3529902 - DNA, 25 bp, Homo sapien
agaaatgtagggtgtatgagagttt

SEQ ID NO: 3529903 - DNA, 25 bp, Homo sapien
aatgtagggtgtatgagagtttgca

SEQ ID NO: 3529904 - DNA, 25 bp, Homo sapien
gaatgccagatttggcgatcaggaa

SEQ ID NO: 3529905 - DNA, 25 bp, Homo sapien
cagatttggcgatcaggaaaagctc

SEQ ID NO: 3529906 - DNA, 25 bp, Homo sapien
gatgatgtatgtcccagctctaagg

SEQ ID NO: 3529907 - DNA, 25 bp, Homo sapien
tcagaggcagcatgtaacagcttcc

SEQ ID NO: 3529908 - DNA, 25 bp, Homo sapien
ctcagaggcagcatgtaacagcttc

SEQ ID NO: 3529909 - DNA, 25 bp, Homo sapien
ccagatttctggatgatgtatgtcc

SEQ ID NO: 3529910 - DNA, 25 bp, Homo sapien
aaatgaagccccaacttccttgtag

SEQ ID NO: 3529911 - DNA, 25 bp, Homo sapien
gaaatgaagccccaacttccttgta

SEQ ID NO: 3529912 - DNA, 25 bp, Homo sapien
ctggaaatgaagccccaacttcctt

SEQ ID NO: 3529913 - DNA, 25 bp, Homo sapien
atgaagccccaacttccttgtagtt

SEQ ID NO: 3529914 - DNA, 25 bp, Homo sapien
gaagggtcagaccaactgcctcaaa

SEQ ID NO: 3529915 - DNA, 25 bp, Homo sapien
actgcctcaaactgagaatttccaa

SEQ ID NO: 3529916 - DNA, 25 bp, Homo sapien
aatccacgcataagagggaagggtc

SEQ ID NO: 3529917 - DNA, 25 bp, Homo sapien
tcgggacccgccatgagaatccacg

SEQ ID NO: 3529918 - DNA, 25 bp, Homo sapien
agggtaggcgggctaagcacctgtg

SEQ ID NO: 3529919 - DNA, 25 bp, Homo sapien
ccagcaagaccgagggtaggcgggc

SEQ ID NO: 3529920 - DNA, 25 bp, Homo sapien
agaccgagggtaggcgggctaagca

SEQ ID NO: 3529921 - DNA, 25 bp, Homo sapien
taggcgggctaagcacctgtggcct

SEQ ID NO: 3529922 - DNA, 25 bp, Homo sapien
ctcccccagcctggttatgggtgaa

SEQ ID NO: 3529923 - DNA, 25 bp, Homo sapien
tcccaggacgctgctaggggagagg

SEQ ID NO: 3529924 - DNA, 25 bp, Homo sapien
cccagcctggttatgggtgaaggca

SEQ ID NO: 3529925 - DNA, 25 bp, Homo sapien
cacaacgagctctccatgagccaga

SEQ ID NO: 3529926 - DNA, 25 bp, Homo sapien
tggccaagtgtcagcatcaccaatg

SEQ ID NO: 3529927 - DNA, 25 bp, Homo sapien
tctttctcctggagcccaactgcct

SEQ ID NO: 3529928 - DNA, 25 bp, Homo sapien
gcaatccttcatggccaagtgtcag

SEQ ID NO: 3529929 - DNA, 25 bp, Homo sapien
cactgcatcaggcaatccttcatgg

SEQ ID NO: 3529930 - DNA, 25 bp, Homo sapien
cttcctggcacatccgttagtccaa

SEQ ID NO: 3529931 - DNA, 25 bp, Homo sapien
cacatccgttagtccaagatcagtg

SEQ ID NO: 3529932 - DNA, 25 bp, Homo sapien
ggcacatccgttagtccaagatcag

SEQ ID NO: 3529933 - DNA, 25 bp, Homo sapien
cctggcacatccgttagtccaagat

SEQ ID NO: 3529934 - DNA, 25 bp, Homo sapien
tggaagtctccccaacttgtggaag

SEQ ID NO: 3529935 - DNA, 25 bp, Homo sapien
gaagtcaccaacataggatctgcca

SEQ ID NO: 3529936 - DNA, 25 bp, Homo sapien
ccatcccaggatagtcaagtgcaaa

SEQ ID NO: 3529937 - DNA, 25 bp, Homo sapien
catgcgtttcttgacccacagtgga

SEQ ID NO: 3529938 - DNA, 25 bp, Homo sapien
gaagctcaattgctgcaaaagttat

SEQ ID NO: 3529939 - DNA, 25 bp, Homo sapien
ttttcagagctgacctgtgaggatg

SEQ ID NO: 3529940 - DNA, 25 bp, Homo sapien
aggctggcaagaagctcaattgctg

SEQ ID NO: 3529941 - DNA, 25 bp, Homo sapien
atttttcagagctgacctgtgagga

SEQ ID NO: 3529942 - DNA, 25 bp, Homo sapien
tggctctttccgactcgctgacgtt

SEQ ID NO: 3529943 - DNA, 25 bp, Homo sapien
tttccgactcgctgacgtttgccat

SEQ ID NO: 3529944 - DNA, 25 bp, Homo sapien
gacctggctctttccgactcgctga

SEQ ID NO: 3529945 - DNA, 25 bp, Homo sapien
ttttgttgtaagacctggctctttc

SEQ ID NO: 3529946 - DNA, 25 bp, Homo sapien
taaattcaattgtactaggtgttca

SEQ ID NO: 3529947 - DNA, 25 bp, Homo sapien
aattcaattgtactaggtgttcagc

SEQ ID NO: 3529948 - DNA, 25 bp, Homo sapien
atatagatctttgctttcacactca

SEQ ID NO: 3529949 - DNA, 25 bp, Homo sapien
gccctcccagtgatgtatctgaact

SEQ ID NO: 3529950 - DNA, 25 bp, Homo sapien
gcctggctgacctcgggaatgttag

SEQ ID NO: 3529951 - DNA, 25 bp, Homo sapien
ggtacaataattccatccccagcga

SEQ ID NO: 3529952 - DNA, 25 bp, Homo sapien
tatcagtggagatcctggaccatcc

SEQ ID NO: 3529953 - DNA, 25 bp, Homo sapien
gaagcaccggtatcttgtcttggaa

SEQ ID NO: 3529954 - DNA, 25 bp, Homo sapien
tttctctgatgcatgttgtgatggc

SEQ ID NO: 3529955 - DNA, 25 bp, Homo sapien
ggccaccgacagctgaagggctttt

SEQ ID NO: 3529956 - DNA, 25 bp, Homo sapien
gatggcggactaattcatctgaccg

SEQ ID NO: 3529957 - DNA, 25 bp, Homo sapien
tctgaccgggcaaactttttctgac

SEQ ID NO: 3529958 - DNA, 25 bp, Homo sapien
agttttacactggaatggtttcaca

SEQ ID NO: 3529959 - DNA, 25 bp, Homo sapien
gtcggaccgggagaactttcgctga

SEQ ID NO: 3529960 - DNA, 25 bp, Homo sapien
gagaactttcgctgacaagttttac

SEQ ID NO: 3529961 - DNA, 25 bp, Homo sapien
ccgggagaactttcgctgacaagtt

SEQ ID NO: 3529962 - DNA, 25 bp, Homo sapien
ctgcacagtaatcttcaaggacctg

SEQ ID NO: 3529963 - DNA, 25 bp, Homo sapien
cttaaccacagaggtccagcttctc

SEQ ID NO: 3529964 - DNA, 25 bp, Homo sapien
cttcaaggacctgcttctgtcttgg

SEQ ID NO: 3529965 - DNA, 25 bp, Homo sapien
gaacaaccattccttaaccacagag

SEQ ID NO: 3529966 - DNA, 25 bp, Homo sapien
ttgagctggtctgaacgagaaaacc

SEQ ID NO: 3529967 - DNA, 25 bp, Homo sapien
gaaaaccttcgttcacagtccttga

SEQ ID NO: 3529968 - DNA, 25 bp, Homo sapien
tgaagtcacactggtatggtttctc

SEQ ID NO: 3529969 - DNA, 25 bp, Homo sapien
ccttcgttcacagtccttgaagtca

SEQ ID NO: 3529970 - DNA, 25 bp, Homo sapien
gagaaactttctcggatgaccttag

SEQ ID NO: 3529971 - DNA, 25 bp, Homo sapien
cctcgaaaccgtgggcacaagcaat

SEQ ID NO: 3529972 - DNA, 25 bp, Homo sapien
tgtgagctggagaagatgttacccc

SEQ ID NO: 3529973 - DNA, 25 bp, Homo sapien
tgaccttagttcaaactgataccct

SEQ ID NO: 3529974 - DNA, 25 bp, Homo sapien
tgatgactatattcccaggccagct

SEQ ID NO: 3529975 - DNA, 25 bp, Homo sapien
ctgacccaagcaggtaagtttttct

SEQ ID NO: 3529976 - DNA, 25 bp, Homo sapien
gatcttgcccatcgacctcctaaaa

SEQ ID NO: 3529977 - DNA, 25 bp, Homo sapien
tctagttgattattactgacccaag

SEQ ID NO: 3529978 - DNA, 25 bp, Homo sapien
gcagcctgggtaagcacacatgaag

SEQ ID NO: 3529979 - DNA, 25 bp, Homo sapien
tctcagatgccgaccgtacaagagt

SEQ ID NO: 3529980 - DNA, 25 bp, Homo sapien
cctgctgtgcatctgtaagtgggac

SEQ ID NO: 3529981 - DNA, 25 bp, Homo sapien
gaaggggcgtttctcactggtctca

SEQ ID NO: 3529982 - DNA, 25 bp, Homo sapien
gggaggctttaagccacatgtgaac

SEQ ID NO: 3529983 - DNA, 25 bp, Homo sapien
ggagagtgagcactggagtatatcc

SEQ ID NO: 3529984 - DNA, 25 bp, Homo sapien
gcagacctaaaaccactcccattca

SEQ ID NO: 3529985 - DNA, 25 bp, Homo sapien
ggcaggtgcagacctaaaaccactc

SEQ ID NO: 3529986 - DNA, 25 bp, Homo sapien
ctggagtatatccaaagaaggggtg

SEQ ID NO: 3529987 - DNA, 25 bp, Homo sapien
cagatcgtccaagtataagtaaata

SEQ ID NO: 3529988 - DNA, 25 bp, Homo sapien
aataacaaggaagaagaagcccctg

SEQ ID NO: 3529989 - DNA, 25 bp, Homo sapien
atcgtccaagtataagtaaataaca

SEQ ID NO: 3529990 - DNA, 25 bp, Homo sapien
ataacaaggaagaagaagcccctgg

SEQ ID NO: 3529991 - DNA, 25 bp, Homo sapien
gatgtctccctaaaccgtcgtcaga

SEQ ID NO: 3529992 - DNA, 25 bp, Homo sapien
taatctcagtaagggtcccggtgaa

SEQ ID NO: 3529993 - DNA, 25 bp, Homo sapien
caagtgagcctgacaaactgggctt

SEQ ID NO: 3529994 - DNA, 25 bp, Homo sapien
ttcatcctagaagcagtgcacatgg

SEQ ID NO: 3529995 - DNA, 25 bp, Homo sapien
ttaggacgcatcttgcgcagcgtca

SEQ ID NO: 3529996 - DNA, 25 bp, Homo sapien
aggagaggacacagccgccttatca

SEQ ID NO: 3529997 - DNA, 25 bp, Homo sapien
tgccagggccaaagagtccatcagt

SEQ ID NO: 3529998 - DNA, 25 bp, Homo sapien
caggtgtccctgatgttaaaggagc

SEQ ID NO: 3529999 - DNA, 25 bp, Homo sapien
tctgtattgggctccgcagaggatg

SEQ ID NO: 3530000 - DNA, 25 bp, Homo sapien
tgggcgttgtgtggttatcgctctc

SEQ ID NO: 3530001 - DNA, 25 bp, Homo sapien
tatcgctctcgtaccctgtgctgtg

SEQ ID NO: 3530002 - DNA, 25 bp, Homo sapien
gcctctgaagacaccgtgcgtgtgt

SEQ ID NO: 3530003 - DNA, 25 bp, Homo sapien
gccagtggattctcctacaaggtcc

SEQ ID NO: 3530004 - DNA, 25 bp, Homo sapien
tgccagtggattctcctacaaggtc

SEQ ID NO: 3530005 - DNA, 25 bp, Homo sapien
tttctccagcgggatgaatgaaatt

SEQ ID NO: 3530006 - DNA, 25 bp, Homo sapien
gacttgaacgactcccagctctttt

SEQ ID NO: 3530007 - DNA, 25 bp, Homo sapien
cacttttatcatcatgagacttgaa

SEQ ID NO: 3530008 - DNA, 25 bp, Homo sapien
tccagcgggatgaatgaaattaggc

SEQ ID NO: 3530009 - DNA, 25 bp, Homo sapien
gtaaatccagtatcacaaagaacaa

SEQ ID NO: 3530010 - DNA, 25 bp, Homo sapien
cagattcaactaaatccagttctgg

SEQ ID NO: 3530011 - DNA, 25 bp, Homo sapien
gaacaatgaccccaacccagattgg

SEQ ID NO: 3530012 - DNA, 25 bp, Homo sapien
aaaagaaagtaaatccagtatcaca

SEQ ID NO: 3530013 - DNA, 25 bp, Homo sapien
ctgtccatttcactgagctggagct

SEQ ID NO: 3530014 - DNA, 25 bp, Homo sapien
ccatttcactgagctggagctccca

SEQ ID NO: 3530015 - DNA, 25 bp, Homo sapien
tgtccatttcactgagctggagctc

SEQ ID NO: 3530016 - DNA, 25 bp, Homo sapien
tccatttcactgagctggagctccc

SEQ ID NO: 3530017 - DNA, 25 bp, Homo sapien
tggttcaaacaggtataagttactg

SEQ ID NO: 3530018 - DNA, 25 bp, Homo sapien
gaggaaagcgttctaatgtcacaga

SEQ ID NO: 3530019 - DNA, 25 bp, Homo sapien
ggaaggaggaaagcgttctaatgtc

SEQ ID NO: 3530020 - DNA, 25 bp, Homo sapien
tcttcataagttctaagcacctttg

SEQ ID NO: 3530021 - DNA, 25 bp, Homo sapien
catgcattcaagctgggatgtcatt

SEQ ID NO: 3530022 - DNA, 25 bp, Homo sapien
tttaaggtggctcctaagttcatct

SEQ ID NO: 3530023 - DNA, 25 bp, Homo sapien
tcatctgattccaggtcatgcattc

SEQ ID NO: 3530024 - DNA, 25 bp, Homo sapien
ttaaggtggctcctaagttcatctg

SEQ ID NO: 3530025 - DNA, 25 bp, Homo sapien
ttccacaaattcttgctgtaaggct

SEQ ID NO: 3530026 - DNA, 25 bp, Homo sapien
cccaacttttattagaagtgccagc

SEQ ID NO: 3530027 - DNA, 25 bp, Homo sapien
tagcagcagcccgtactggtctgtg

SEQ ID NO: 3530028 - DNA, 25 bp, Homo sapien
tgtaaggctggagtaattaattcct

SEQ ID NO: 3530029 - DNA, 25 bp, Homo sapien
tagatgagaactcctccactcttca

SEQ ID NO: 3530030 - DNA, 25 bp, Homo sapien
tcttcaaacgcatgtgtgattcaag

SEQ ID NO: 3530031 - DNA, 25 bp, Homo sapien
catcaagggaatagaaccatctaac

SEQ ID NO: 3530032 - DNA, 25 bp, Homo sapien
tttgtgtcatcaagggaatagaacc

SEQ ID NO: 3530033 - DNA, 25 bp, Homo sapien
gggtcacctctgccacgtagctgct

SEQ ID NO: 3530034 - DNA, 25 bp, Homo sapien
tcacctctgccacgtagctgctggc

SEQ ID NO: 3530035 - DNA, 25 bp, Homo sapien
gtcacctctgccacgtagctgctgg

SEQ ID NO: 3530036 - DNA, 25 bp, Homo sapien
ctggctgagatcagggtcacctctg

SEQ ID NO: 3530037 - DNA, 25 bp, Homo sapien
tgaagtcggtatagtcaaggactgg

SEQ ID NO: 3530038 - DNA, 25 bp, Homo sapien
aagtagccatgaggatcatatgtga

SEQ ID NO: 3530039 - DNA, 25 bp, Homo sapien
caatcagtgtgcatgggaatatttt

SEQ ID NO: 3530040 - DNA, 25 bp, Homo sapien
tttcaaacgcagtgcacagaacttt

SEQ ID NO: 3530041 - DNA, 25 bp, Homo sapien
tagcttcgagtcactgaggcaccag

SEQ ID NO: 3530042 - DNA, 25 bp, Homo sapien
ggtcctctgatggaccccttcctag

SEQ ID NO: 3530043 - DNA, 25 bp, Homo sapien
accagtggtaatgatcgctttttcc

SEQ ID NO: 3530044 - DNA, 25 bp, Homo sapien
gaggcaccagactgcaaggtcttcc

SEQ ID NO: 3530045 - DNA, 25 bp, Homo sapien
gtgacacaccaactgagtccacagg

SEQ ID NO: 3530046 - DNA, 25 bp, Homo sapien
tctctcagcctagtgtgacacacca

SEQ ID NO: 3530047 - DNA, 25 bp, Homo sapien
tcccgcatcaaggtcttctctcagc

SEQ ID NO: 3530048 - DNA, 25 bp, Homo sapien
ctcccatatcgacagtgcccactcc

SEQ ID NO: 3530049 - DNA, 25 bp, Homo sapien
tgtggcagccatagaccgggggcgg

SEQ ID NO: 3530050 - DNA, 25 bp, Homo sapien
gctgtagggcgtcctcagcagcaaa

SEQ ID NO: 3530051 - DNA, 25 bp, Homo sapien
ctgctgtagggcgtcctcagcagca

SEQ ID NO: 3530052 - DNA, 25 bp, Homo sapien
gggcggcaccgagtactgctgctca

SEQ ID NO: 3530053 - DNA, 25 bp, Homo sapien
gagggagacccagtcttgtccttta

SEQ ID NO: 3530054 - DNA, 25 bp, Homo sapien
tctaaggtccttttagatgtcctcc

SEQ ID NO: 3530055 - DNA, 25 bp, Homo sapien
gcctaatttgctgtgggttaggaat

SEQ ID NO: 3530056 - DNA, 25 bp, Homo sapien
gtcctttaaatacagtgccattggg

SEQ ID NO: 3530057 - DNA, 25 bp, Homo sapien
tgtgaccgtagctgggcgtcccgtc

SEQ ID NO: 3530058 - DNA, 25 bp, Homo sapien
cccgtcgaaggtgaccgtgctgtaa

SEQ ID NO: 3530059 - DNA, 25 bp, Homo sapien
ccgcatggtgcgagggcgtgtgacc

SEQ ID NO: 3530060 - DNA, 25 bp, Homo sapien
gcccatgggatcctcatgcttgaat

SEQ ID NO: 3530061 - DNA, 25 bp, Homo sapien
aagcacagtgtcagcggtgctctcg

SEQ ID NO: 3530062 - DNA, 25 bp, Homo sapien
tgtcagcggtgctctcgcaagacgg

SEQ ID NO: 3530063 - DNA, 25 bp, Homo sapien
cagtgggtctgaaccagccacgggc

SEQ ID NO: 3530064 - DNA, 25 bp, Homo sapien
gggcagtgggtctgaaccagccacg

SEQ ID NO: 3530065 - DNA, 25 bp, Homo sapien
cgagggccgtgggtcccgagtcgcg

SEQ ID NO: 3530066 - DNA, 25 bp, Homo sapien
tcggcgggcaaagaccggcctcaaa

SEQ ID NO: 3530067 - DNA, 25 bp, Homo sapien
gcaactgtccgtgcccggcgagggc

SEQ ID NO: 3530068 - DNA, 25 bp, Homo sapien
gtcgcggcacccactctcgagacgt

SEQ ID NO: 3530069 - DNA, 25 bp, Homo sapien
gctgggtaagatggacccatctgtt

SEQ ID NO: 3530070 - DNA, 25 bp, Homo sapien
ttctcacatccaagctgcccaatga

SEQ ID NO: 3530071 - DNA, 25 bp, Homo sapien
gaataaacccagaatctcgagggcc

SEQ ID NO: 3530072 - DNA, 25 bp, Homo sapien
ccaatgagcctcaagggctgggtaa

SEQ ID NO: 3530073 - DNA, 25 bp, Homo sapien
ctcccggctcttgcgaacagtcagg

SEQ ID NO: 3530074 - DNA, 25 bp, Homo sapien
aacagtcaggctcctagctctgcct

SEQ ID NO: 3530075 - DNA, 25 bp, Homo sapien
gctatcctcacggcccttgggaagc

SEQ ID NO: 3530076 - DNA, 25 bp, Homo sapien
cccggaatctctcggactctaaggg

SEQ ID NO: 3530077 - DNA, 25 bp, Homo sapien
cctgattgcgaatagcgggctggct

SEQ ID NO: 3530078 - DNA, 25 bp, Homo sapien
caggtagggcgcgttaggaaacatc

SEQ ID NO: 3530079 - DNA, 25 bp, Homo sapien
tcctggcctggccggatgacgcctg

SEQ ID NO: 3530080 - DNA, 25 bp, Homo sapien
cccgtagcgacaggctccggctgtg

SEQ ID NO: 3530081 - DNA, 25 bp, Homo sapien
cagtgaaggcgctcaggcactgctc

SEQ ID NO: 3530082 - DNA, 25 bp, Homo sapien
ctggccggaaaagtggacagtgaag

SEQ ID NO: 3530083 - DNA, 25 bp, Homo sapien
aggcactgctcctcgtgcggctccg

SEQ ID NO: 3530084 - DNA, 25 bp, Homo sapien
actgctcctcgtgcggctccgcgcc

SEQ ID NO: 3530085 - DNA, 25 bp, Homo sapien
gtaagccgaagcgcccgggggcgca

SEQ ID NO: 3530086 - DNA, 25 bp, Homo sapien
taagccgaagcgcccgggggcgcaa

SEQ ID NO: 3530087 - DNA, 25 bp, Homo sapien
cggcgcccactgcgccgcgccgctc

SEQ ID NO: 3530088 - DNA, 25 bp, Homo sapien
ggcgcccactgcgccgcgccgctca

SEQ ID NO: 3530089 - DNA, 25 bp, Homo sapien
gcgcccactgcgccgcgccgctcac

SEQ ID NO: 3530090 - DNA, 25 bp, Homo sapien
gcgcgttcaggtcccgcacgtcgga

SEQ ID NO: 3530091 - DNA, 25 bp, Homo sapien
gcgttcaggtcccgcacgtcggagc

SEQ ID NO: 3530092 - DNA, 25 bp, Homo sapien
agcagcgcgttcaggtcccgcacgt

SEQ ID NO: 3530093 - DNA, 25 bp, Homo sapien
cagcgcgttcaggtcccgcacgtcg

SEQ ID NO: 3530094 - DNA, 25 bp, Homo sapien
gcggcgcctaacttggcccagatgc

SEQ ID NO: 3530095 - DNA, 25 bp, Homo sapien
gcccggagcggagcgtgtgctgaga

SEQ ID NO: 3530096 - DNA, 25 bp, Homo sapien
tccggccctggagacgttcagcgct

SEQ ID NO: 3530097 - DNA, 25 bp, Homo sapien
agcgtgtgctgagacgccggctccg

SEQ ID NO: 3530098 - DNA, 25 bp, Homo sapien
caggcggtcgggttgcggagagccc

SEQ ID NO: 3530099 - DNA, 25 bp, Homo sapien
ggtgggtgaatgagtaggtgggagg

SEQ ID NO: 3530100 - DNA, 25 bp, Homo sapien
agcggacaggcggtcgggttgcgga

SEQ ID NO: 3530101 - DNA, 25 bp, Homo sapien
cccaaagctcaaataagaggggccg

SEQ ID NO: 3530102 - DNA, 25 bp, Homo sapien
gaagagcttcgctaaatctgactcc

SEQ ID NO: 3530103 - DNA, 25 bp, Homo sapien
cccttcgtctagtctctgtttggca

SEQ ID NO: 3530104 - DNA, 25 bp, Homo sapien
tagtgttcgaatctttgggagctcg

SEQ ID NO: 3530105 - DNA, 25 bp, Homo sapien
cccgcgccccagagcaggtgtttgg

SEQ ID NO: 3530106 - DNA, 25 bp, Homo sapien
ttggtttttagcttgcattgcataa

SEQ ID NO: 3530107 - DNA, 25 bp, Homo sapien
ttctggctgcggacccgaagtgtgt

SEQ ID NO: 3530108 - DNA, 25 bp, Homo sapien
cttgcattgcataaacgttgtcgcc

SEQ ID NO: 3530109 - DNA, 25 bp, Homo sapien
aacgttgtcgccattaaattctggc

SEQ ID NO: 3530110 - DNA, 25 bp, Homo sapien
tcttgggaatgcgcatcccgtaggc

SEQ ID NO: 3530111 - DNA, 25 bp, Homo sapien
cttgggaatgcgcatcccgtaggcg

SEQ ID NO: 3530112 - DNA, 25 bp, Homo sapien
cttcttgggaatgcgcatcccgtag

SEQ ID NO: 3530113 - DNA, 25 bp, Homo sapien
ttcttgggaatgcgcatcccgtagg

SEQ ID NO: 3530114 - DNA, 25 bp, Homo sapien
gaaggcaggtagcaccttcacccgc

SEQ ID NO: 3530115 - DNA, 25 bp, Homo sapien
ggacgataggcgctctcctgtacct

SEQ ID NO: 3530116 - DNA, 25 bp, Homo sapien
tgtacctcctttagctcgcgaggcc

SEQ ID NO: 3530117 - DNA, 25 bp, Homo sapien
gcccttcgcgaggtcccagagaaaa

SEQ ID NO: 3530118 - DNA, 25 bp, Homo sapien
tcagcgccgagatctgtagcagagg

SEQ ID NO: 3530119 - DNA, 25 bp, Homo sapien
ttcttacccctgtcagcgccgagat

SEQ ID NO: 3530120 - DNA, 25 bp, Homo sapien
tcctggtctgaaccaccgattggca

SEQ ID NO: 3530121 - DNA, 25 bp, Homo sapien
tggtctgaaccaccgattggcaaag

SEQ ID NO: 3530122 - DNA, 25 bp, Homo sapien
aataaacaccccaaagcgctgcggt

SEQ ID NO: 3530123 - DNA, 25 bp, Homo sapien
aataaagagtggctcgacctcgctg

SEQ ID NO: 3530124 - DNA, 25 bp, Homo sapien
gcggccgcggacaactgaataaaca

SEQ ID NO: 3530125 - DNA, 25 bp, Homo sapien
gaggaacaagctttcgactagcgcc

SEQ ID NO: 3530126 - DNA, 25 bp, Homo sapien
cagggcaagtgtttaggatggttcc

SEQ ID NO: 3530127 - DNA, 25 bp, Homo sapien
caagtgtttaggatggttcccagcc

SEQ ID NO: 3530128 - DNA, 25 bp, Homo sapien
gggcaagtgtttaggatggttccca

SEQ ID NO: 3530129 - DNA, 25 bp, Homo sapien
ctgcagggcaagtgtttaggatggt

SEQ ID NO: 3530130 - DNA, 25 bp, Homo sapien
tgttctgatgccaccgcgagatggt

SEQ ID NO: 3530131 - DNA, 25 bp, Homo sapien
gctgaccctatctgggagcccggaa

SEQ ID NO: 3530132 - DNA, 25 bp, Homo sapien
gaaccgttaggtactgccgaatgcg

SEQ ID NO: 3530133 - DNA, 25 bp, Homo sapien
gccgaatgcggtgcaaaatttcccc

SEQ ID NO: 3530134 - DNA, 25 bp, Homo sapien
gcattaatgccacagtggggatgga

SEQ ID NO: 3530135 - DNA, 25 bp, Homo sapien
taggcccatgaaattgatgaactga

SEQ ID NO: 3530136 - DNA, 25 bp, Homo sapien
tatatagaggatatgtctcaatttg

SEQ ID NO: 3530137 - DNA, 25 bp, Homo sapien
gccagagcagatacgtaggcccatg

SEQ ID NO: 3530138 - DNA, 25 bp, Homo sapien
gggccttcgtctggcaactgggata

SEQ ID NO: 3530139 - DNA, 25 bp, Homo sapien
tggcaactgggatatgcagccgctg

SEQ ID NO: 3530140 - DNA, 25 bp, Homo sapien
gatatgcagccgctggtcagcagag

SEQ ID NO: 3530141 - DNA, 25 bp, Homo sapien
ctgggccttcgtctggcaactggga

SEQ ID NO: 3530142 - DNA, 25 bp, Homo sapien
ctggctctcaacttgcttacagtct

SEQ ID NO: 3530143 - DNA, 25 bp, Homo sapien
ggacttggtcatcattgaagcagga

SEQ ID NO: 3530144 - DNA, 25 bp, Homo sapien
caggatgtgcaagtacttgtaagaa

SEQ ID NO: 3530145 - DNA, 25 bp, Homo sapien
ggctctcaacttgcttacagtctgg

SEQ ID NO: 3530146 - DNA, 25 bp, Homo sapien
gcaccctttcaggatacataaatga

SEQ ID NO: 3530147 - DNA, 25 bp, Homo sapien
tagaggcaggcagcttgtcacttgg

SEQ ID NO: 3530148 - DNA, 25 bp, Homo sapien
ccaggacacccttcgagggttagag

SEQ ID NO: 3530149 - DNA, 25 bp, Homo sapien
tgtcacttggtccagctttcttctg

SEQ ID NO: 3530150 - DNA, 25 bp, Homo sapien
cacagaacaattggtgacagaaact

SEQ ID NO: 3530151 - DNA, 25 bp, Homo sapien
gaacaattggtgacagaaactcttt

SEQ ID NO: 3530152 - DNA, 25 bp, Homo sapien
ccctgacacagaacaattggtgaca

SEQ ID NO: 3530153 - DNA, 25 bp, Homo sapien
aactcttttgtgagttttaggctca

SEQ ID NO: 3530154 - DNA, 25 bp, Homo sapien
ctaatccgctgaagtcatcgagtcc

SEQ ID NO: 3530155 - DNA, 25 bp, Homo sapien
catcgagtccgaaaacatttgcttc

SEQ ID NO: 3530156 - DNA, 25 bp, Homo sapien
gtcatcgagtccgaaaacatttgct

SEQ ID NO: 3530157 - DNA, 25 bp, Homo sapien
gctgaagtcatcgagtccgaaaaca

SEQ ID NO: 3530158 - DNA, 25 bp, Homo sapien
gatctggtccaagaatagtcctgca

SEQ ID NO: 3530159 - DNA, 25 bp, Homo sapien
caagagaaatatggagcaggcagct

SEQ ID NO: 3530160 - DNA, 25 bp, Homo sapien
cagctgcaggcccattaattaacga

SEQ ID NO: 3530161 - DNA, 25 bp, Homo sapien
ggagctgagcatccaagtggtacca

SEQ ID NO: 3530162 - DNA, 25 bp, Homo sapien
ttgccgctgaacaccaagatggacc

SEQ ID NO: 3530163 - DNA, 25 bp, Homo sapien
gagaatctgcgcaggacagcaacaa

SEQ ID NO: 3530164 - DNA, 25 bp, Homo sapien
aaagggtctgccactattgccgctg

SEQ ID NO: 3530165 - DNA, 25 bp, Homo sapien
agcaacaatgcctgctgtggtaacc

SEQ ID NO: 3530166 - DNA, 25 bp, Homo sapien
gtccatccacgtgcttcttagactg

SEQ ID NO: 3530167 - DNA, 25 bp, Homo sapien
cagtagtccatccacgtgcttctta

SEQ ID NO: 3530168 - DNA, 25 bp, Homo sapien
gaaacagtagtccatccacgtgctt

SEQ ID NO: 3530169 - DNA, 25 bp, Homo sapien
ttacagaaacagtagtccatccacg

SEQ ID NO: 3530170 - DNA, 25 bp, Homo sapien
ttaaactggttgtccgtcagcagcc

SEQ ID NO: 3530171 - DNA, 25 bp, Homo sapien
ggttgtccgtcagcagccgatagaa

SEQ ID NO: 3530172 - DNA, 25 bp, Homo sapien
tgtccgtcagcagccgatagaaggt

SEQ ID NO: 3530173 - DNA, 25 bp, Homo sapien
tcagcagccgatagaaggtgttcat

SEQ ID NO: 3530174 - DNA, 25 bp, Homo sapien
tagtccagtcaggtttatatcataa

SEQ ID NO: 3530175 - DNA, 25 bp, Homo sapien
cttctagtccagtcaggtttatatc

SEQ ID NO: 3530176 - DNA, 25 bp, Homo sapien
gtccagtcaggtttatatcataatt

SEQ ID NO: 3530177 - DNA, 25 bp, Homo sapien
tctagtccagtcaggtttatatcat

SEQ ID NO: 3530178 - DNA, 25 bp, Homo sapien
ctgcagcttcttgccaagttggcca

SEQ ID NO: 3530179 - DNA, 25 bp, Homo sapien
catcatcacctctgtcatagaagca

SEQ ID NO: 3530180 - DNA, 25 bp, Homo sapien
cagatttcgcaaggccattggaagc

SEQ ID NO: 3530181 - DNA, 25 bp, Homo sapien
ggtttgagcataaccctgcagcttc

SEQ ID NO: 3530182 - DNA, 25 bp, Homo sapien
ccagcagttgatggcaaattcacct

SEQ ID NO: 3530183 - DNA, 25 bp, Homo sapien
ctatgctgctatcaatttctccagc

SEQ ID NO: 3530184 - DNA, 25 bp, Homo sapien
ggtcagaggccaaccacagccaatt

SEQ ID NO: 3530185 - DNA, 25 bp, Homo sapien
gtcagaggccaaccacagccaatta

SEQ ID NO: 3530186 - DNA, 25 bp, Homo sapien
ccttccatgacttgtaaatactttc

SEQ ID NO: 3530187 - DNA, 25 bp, Homo sapien
tttcaaaaacgttgatacatgcaca

SEQ ID NO: 3530188 - DNA, 25 bp, Homo sapien
catcctgtgagccaatggtaatggt

SEQ ID NO: 3530189 - DNA, 25 bp, Homo sapien
gtaatggttttgtgaatatccttcc

SEQ ID NO: 3530190 - DNA, 25 bp, Homo sapien
tctttcctgggaaatacttgttgat

SEQ ID NO: 3530191 - DNA, 25 bp, Homo sapien
ctttctcttcaagtcataggcaatt

SEQ ID NO: 3530192 - DNA, 25 bp, Homo sapien
tttctcttcaagtcataggcaattt

SEQ ID NO: 3530193 - DNA, 25 bp, Homo sapien
cccgtctagagggataaggatgttc

SEQ ID NO: 3530194 - DNA, 25 bp, Homo sapien
catcaggagggaaagacccgtctag

SEQ ID NO: 3530195 - DNA, 25 bp, Homo sapien
tcttgttctgtatcaagtcaatccc

SEQ ID NO: 3530196 - DNA, 25 bp, Homo sapien
tcacagtagttgtgccaacccaact

SEQ ID NO: 3530197 - DNA, 25 bp, Homo sapien
atgagaacacttcatgtgggattca

SEQ ID NO: 3530198 - DNA, 25 bp, Homo sapien
catgtgggattcacgagcatcgtgg

SEQ ID NO: 3530199 - DNA, 25 bp, Homo sapien
aacacttcatgtgggattcacgagc

SEQ ID NO: 3530200 - DNA, 25 bp, Homo sapien
ttcggtaggctaaagggaaatgaga

SEQ ID NO: 3530201 - DNA, 25 bp, Homo sapien
gattagaaagcaaaggtcacatggc

SEQ ID NO: 3530202 - DNA, 25 bp, Homo sapien
tagagattagaaagcaaaggtcaca

SEQ ID NO: 3530203 - DNA, 25 bp, Homo sapien
ctgatagagattagaaagcaaaggt

SEQ ID NO: 3530204 - DNA, 25 bp, Homo sapien
gagattagaaagcaaaggtcacatg

SEQ ID NO: 3530205 - DNA, 25 bp, Homo sapien
caaactcttcctgtggccgattgcc

SEQ ID NO: 3530206 - DNA, 25 bp, Homo sapien
aactcttcctgtggccgattgccat

SEQ ID NO: 3530207 - DNA, 25 bp, Homo sapien
aaactcttcctgtggccgattgcca

SEQ ID NO: 3530208 - DNA, 25 bp, Homo sapien
aatgggcatcccacgtcagtgtcag

SEQ ID NO: 3530209 - DNA, 25 bp, Homo sapien
gacctttgaatcaggacacttcaga

SEQ ID NO: 3530210 - DNA, 25 bp, Homo sapien
agtgtcagggctgttgtccggaccc

SEQ ID NO: 3530211 - DNA, 25 bp, Homo sapien
gaagaaacttgggaacaggatctgc

SEQ ID NO: 3530212 - DNA, 25 bp, Homo sapien
tcaatttccagacaataattgccct

SEQ ID NO: 3530213 - DNA, 25 bp, Homo sapien
tgttcaatttccagacaataattgc

SEQ ID NO: 3530214 - DNA, 25 bp, Homo sapien
tccagacaataattgcccttcagaa

SEQ ID NO: 3530215 - DNA, 25 bp, Homo sapien
tctgatgttcaatttccagacaata

SEQ ID NO: 3530216 - DNA, 25 bp, Homo sapien
taacatctccatttaccaaacatgg

SEQ ID NO: 3530217 - DNA, 25 bp, Homo sapien
ggtgagtacctttataacatctcca

SEQ ID NO: 3530218 - DNA, 25 bp, Homo sapien
caaacatggtattaatttggcacat

SEQ ID NO: 3530219 - DNA, 25 bp, Homo sapien
tatttacacagcattggtgagtacc

SEQ ID NO: 3530220 - DNA, 25 bp, Homo sapien
cgcagatcctttattcgaggcaaaa

SEQ ID NO: 3530221 - DNA, 25 bp, Homo sapien
taatgttcttttaacgactgcaggc

SEQ ID NO: 3530222 - DNA, 25 bp, Homo sapien
aaaagttgtaaagcgtccctcagct

SEQ ID NO: 3530223 - DNA, 25 bp, Homo sapien
tcagataccctactaaagaggaagg

SEQ ID NO: 3530224 - DNA, 25 bp, Homo sapien
gagagcagatcaaagtcatatacag

SEQ ID NO: 3530225 - DNA, 25 bp, Homo sapien
ctgagagagcagatcaaagtcatat

SEQ ID NO: 3530226 - DNA, 25 bp, Homo sapien
cagcagcgcagcaaatagggcagca

SEQ ID NO: 3530227 - DNA, 25 bp, Homo sapien
caaagtcatatacagcagcgcagca

SEQ ID NO: 3530228 - DNA, 25 bp, Homo sapien
ggtgttctcagacccctggtggctc

SEQ ID NO: 3530229 - DNA, 25 bp, Homo sapien
ctgaccacccttgcgatgcctggag

SEQ ID NO: 3530230 - DNA, 25 bp, Homo sapien
tcgagggcacagacactgaagtagt

SEQ ID NO: 3530231 - DNA, 25 bp, Homo sapien
tcatcgggggtgtgctcttgtctgc

SEQ ID NO: 3530232 - DNA, 25 bp, Homo sapien
gggcgatgaaataggcatttactaa

SEQ ID NO: 3530233 - DNA, 25 bp, Homo sapien
cctggaggtactgcatctctccaga

SEQ ID NO: 3530234 - DNA, 25 bp, Homo sapien
tccagactaatctcccccgaagttg

SEQ ID NO: 3530235 - DNA, 25 bp, Homo sapien
ggatcatatcttcatgtacctgggt

SEQ ID NO: 3530236 - DNA, 25 bp, Homo sapien
ggtagcaaatgaaacctcctttaca

SEQ ID NO: 3530237 - DNA, 25 bp, Homo sapien
aagaaattcctgctgagtcccctac

SEQ ID NO: 3530238 - DNA, 25 bp, Homo sapien
attcctgctgagtcccctacaggta

SEQ ID NO: 3530239 - DNA, 25 bp, Homo sapien
tacaggtagcaaatgaaacctcctt

SEQ ID NO: 3530240 - DNA, 25 bp, Homo sapien
caggagagtttcaggtctacacaaa

SEQ ID NO: 3530241 - DNA, 25 bp, Homo sapien
ttggtaagacccaacaagcttaaca

SEQ ID NO: 3530242 - DNA, 25 bp, Homo sapien
caaacccatccatacttggtaagac

SEQ ID NO: 3530243 - DNA, 25 bp, Homo sapien
aaggtggacttagggaggcgccagc

SEQ ID NO: 3530244 - DNA, 25 bp, Homo sapien
cgggcctgcaccatgagcgtcccgg

SEQ ID NO: 3530245 - DNA, 25 bp, Homo sapien
ttttccggtcggcgtggtcttgcga

SEQ ID NO: 3530246 - DNA, 25 bp, Homo sapien
ccttcatcgacatcagtgaagaaga

SEQ ID NO: 3530247 - DNA, 25 bp, Homo sapien
ccggaagcagttgcgccagcagcgt

SEQ ID NO: 3530248 - DNA, 25 bp, Homo sapien
ccagctccctggtcggcgtcgggac

SEQ ID NO: 3530249 - DNA, 25 bp, Homo sapien
cgccggccggcggtcccagcgcggg

SEQ ID NO: 3530250 - DNA, 25 bp, Homo sapien
gggcccgacgcttcaccgccagctc

SEQ ID NO: 3530251 - DNA, 25 bp, Homo sapien
agcgcggggcccgacgcttcaccgc

SEQ ID NO: 3530252 - DNA, 25 bp, Homo sapien
tgtgaggcatacacctgatggacca

SEQ ID NO: 3530253 - DNA, 25 bp, Homo sapien
tggtaggagttgaacacgacatcgt

SEQ ID NO: 3530254 - DNA, 25 bp, Homo sapien
cgtttgctctttggtatacagggct

SEQ ID NO: 3530255 - DNA, 25 bp, Homo sapien
ttaaattctgtgaggcatacacctg

SEQ ID NO: 3530256 - DNA, 25 bp, Homo sapien
ggatatcataaacttcgcatggaag

SEQ ID NO: 3530257 - DNA, 25 bp, Homo sapien
tccaaatgattggatatcataaact

SEQ ID NO: 3530258 - DNA, 25 bp, Homo sapien
gattggatatcataaacttcgcatg

SEQ ID NO: 3530259 - DNA, 25 bp, Homo sapien
aaacttcgcatggaagtttacttgt

SEQ ID NO: 3530260 - DNA, 25 bp, Homo sapien
cttctgttcttgtaacatcagtatc

SEQ ID NO: 3530261 - DNA, 25 bp, Homo sapien
taacatcagtatcgctgtagacagt

SEQ ID NO: 3530262 - DNA, 25 bp, Homo sapien
aaagtgaatggaggaagttcttgtc

SEQ ID NO: 3530263 - DNA, 25 bp, Homo sapien
gtcattgatcgtatcttaaagtgtc

SEQ ID NO: 3530264 - DNA, 25 bp, Homo sapien
gcaaacgtggttcaatagttcttag

SEQ ID NO: 3530265 - DNA, 25 bp, Homo sapien
gagaagcatgaagcatgatttctgg

SEQ ID NO: 3530266 - DNA, 25 bp, Homo sapien
tgtatctgtttcctccatagagaag

SEQ ID NO: 3530267 - DNA, 25 bp, Homo sapien
ggtgaaattctcagcttgattagag

SEQ ID NO: 3530268 - DNA, 25 bp, Homo sapien
ctgtatgacacacttaatgcctgga

SEQ ID NO: 3530269 - DNA, 25 bp, Homo sapien
tcacaaactccagaggatatgaagt

SEQ ID NO: 3530270 - DNA, 25 bp, Homo sapien
tagcacacatcggacatttggaaaa

SEQ ID NO: 3530271 - DNA, 25 bp, Homo sapien
cagcagtggcaacaactgtatgaca

SEQ ID NO: 3530272 - DNA, 25 bp, Homo sapien
gattcgtaatgaggctctgccagtc

SEQ ID NO: 3530273 - DNA, 25 bp, Homo sapien
tatttagttgattcgtaatgaggct

SEQ ID NO: 3530274 - DNA, 25 bp, Homo sapien
aagtatttttagtcgtcttgattgc

SEQ ID NO: 3530275 - DNA, 25 bp, Homo sapien
gtaatgaggctctgccagtcatcat

SEQ ID NO: 3530276 - DNA, 25 bp, Homo sapien
gctttgtagtggagttgatatcaga

SEQ ID NO: 3530277 - DNA, 25 bp, Homo sapien
caaatggctttgtagtggagttgat

SEQ ID NO: 3530278 - DNA, 25 bp, Homo sapien
ctgcaaatggctttgtagtggagtt

SEQ ID NO: 3530279 - DNA, 25 bp, Homo sapien
tgtagtggagttgatatcagaggct

SEQ ID NO: 3530280 - DNA, 25 bp, Homo sapien
ttctcttcaaaaggaatactgggcc

SEQ ID NO: 3530281 - DNA, 25 bp, Homo sapien
ttcaaaaggaatactgggccaggca

SEQ ID NO: 3530282 - DNA, 25 bp, Homo sapien
caggagtcgaaaactagcctgagca

SEQ ID NO: 3530283 - DNA, 25 bp, Homo sapien
aaactgaggcgagtggattgcatga

SEQ ID NO: 3530284 - DNA, 25 bp, Homo sapien
gaaatcctatagtcagccactggtc

SEQ ID NO: 3530285 - DNA, 25 bp, Homo sapien
aaagtgtctgcacaggactgctaag

SEQ ID NO: 3530286 - DNA, 25 bp, Homo sapien
gattgctctgtttggctccctccct

SEQ ID NO: 3530287 - DNA, 25 bp, Homo sapien
ttagaatggtaagttcacggctccc

SEQ ID NO: 3530288 - DNA, 25 bp, Homo sapien
tttggtgtatttggcatccaagtac

SEQ ID NO: 3530289 - DNA, 25 bp, Homo sapien
ttccccttaactacccacttgctga

SEQ ID NO: 3530290 - DNA, 25 bp, Homo sapien
ttttggtgtatttggcatccaagta

SEQ ID NO: 3530291 - DNA, 25 bp, Homo sapien
catccaagtacaaattaacagtttc

SEQ ID NO: 3530292 - DNA, 25 bp, Homo sapien
acttgtcctgtttaacttacctgag

SEQ ID NO: 3530293 - DNA, 25 bp, Homo sapien
gagggttctgcagcctaccgcagta

SEQ ID NO: 3530294 - DNA, 25 bp, Homo sapien
cagtgtagattagctaatgtttgcg

SEQ ID NO: 3530295 - DNA, 25 bp, Homo sapien
tgtttgcgcttaacaaaacttgtcc

SEQ ID NO: 3530296 - DNA, 25 bp, Homo sapien
ctaaggtctgctcggcaatattttt

SEQ ID NO: 3530297 - DNA, 25 bp, Homo sapien
aggtctgctcggcaatatttttaat

SEQ ID NO: 3530298 - DNA, 25 bp, Homo sapien
taaggtctgctcggcaatattttta

SEQ ID NO: 3530299 - DNA, 25 bp, Homo sapien
aaggtctgctcggcaatatttttaa

SEQ ID NO: 3530300 - DNA, 25 bp, Homo sapien
gatggatactccagttattcaaagt

SEQ ID NO: 3530301 - DNA, 25 bp, Homo sapien
cccttgggatctggatggatactcc

SEQ ID NO: 3530302 - DNA, 25 bp, Homo sapien
ctcccttgggatctggatggatact

SEQ ID NO: 3530303 - DNA, 25 bp, Homo sapien
aagtgtcagcaactctgttaatgct

SEQ ID NO: 3530304 - DNA, 25 bp, Homo sapien
gaactgctcgctgtttgactttcaa

SEQ ID NO: 3530305 - DNA, 25 bp, Homo sapien
tccagatggctctatgtgaaatgaa

SEQ ID NO: 3530306 - DNA, 25 bp, Homo sapien
gattcctccagctgtccttcactga

SEQ ID NO: 3530307 - DNA, 25 bp, Homo sapien
gaaagatcaaaggttgaccttccgc

SEQ ID NO: 3530308 - DNA, 25 bp, Homo sapien
tcatcaatctgattctttttattgg

SEQ ID NO: 3530309 - DNA, 25 bp, Homo sapien
ctcatcaatctgattctttttattg

SEQ ID NO: 3530310 - DNA, 25 bp, Homo sapien
catcaatctgattctttttattgga

SEQ ID NO: 3530311 - DNA, 25 bp, Homo sapien
atcaatctgattctttttattggaa

SEQ ID NO: 3530312 - DNA, 25 bp, Homo sapien
ggtcgattactatatcacagggaac

SEQ ID NO: 3530313 - DNA, 25 bp, Homo sapien
cagggcttgagttaggtttcaccaa

SEQ ID NO: 3530314 - DNA, 25 bp, Homo sapien
catatgaaacatggtggtcgattac

SEQ ID NO: 3530315 - DNA, 25 bp, Homo sapien
ggcttgtgaagcatgactattctca

SEQ ID NO: 3530316 - DNA, 25 bp, Homo sapien
tctagagacgagtccaaatctgctt

SEQ ID NO: 3530317 - DNA, 25 bp, Homo sapien
ttctgacatggaacaggattttttt

SEQ ID NO: 3530318 - DNA, 25 bp, Homo sapien
gaattccgtaaactatatttctgac

SEQ ID NO: 3530319 - DNA, 25 bp, Homo sapien
aaatctgctttggtttggtcactat

SEQ ID NO: 3530320 - DNA, 25 bp, Homo sapien
tatggtgaacatctaatcctctggt

SEQ ID NO: 3530321 - DNA, 25 bp, Homo sapien
tctagagcatgttctcgagtccctg

SEQ ID NO: 3530322 - DNA, 25 bp, Homo sapien
taactgattttctgttgtccgtaac

SEQ ID NO: 3530323 - DNA, 25 bp, Homo sapien
tgtccgtaacattcgaggtttgtcc

SEQ ID NO: 3530324 - DNA, 25 bp, Homo sapien
gtaaatatcaacatacaaattagaa

SEQ ID NO: 3530325 - DNA, 25 bp, Homo sapien
tactgtaaatatcaacatacaaatt

SEQ ID NO: 3530326 - DNA, 25 bp, Homo sapien
aaatatcaacatacaaattagaaaa

SEQ ID NO: 3530327 - DNA, 25 bp, Homo sapien
ctgtaaatatcaacatacaaattag

SEQ ID NO: 3530328 - DNA, 25 bp, Homo sapien
ttcttgctcagtattatatttctgt

SEQ ID NO: 3530329 - DNA, 25 bp, Homo sapien
tatttctgtataatggtgttttctg

SEQ ID NO: 3530330 - DNA, 25 bp, Homo sapien
tctgtataatggtgttttctgattt

SEQ ID NO: 3530331 - DNA, 25 bp, Homo sapien
ctttttctctgtattcagtatctga

SEQ ID NO: 3530332 - DNA, 25 bp, Homo sapien
tttctttaagggatgataattcatt

SEQ ID NO: 3530333 - DNA, 25 bp, Homo sapien
tgtaacttaatatgagtttctttaa

SEQ ID NO: 3530334 - DNA, 25 bp, Homo sapien
gtttctttaagggatgataattcat

SEQ ID NO: 3530335 - DNA, 25 bp, Homo sapien
cttgtaacttaatatgagtttcttt

SEQ ID NO: 3530336 - DNA, 25 bp, Homo sapien
ttaaacagttttccttatcctgata

SEQ ID NO: 3530337 - DNA, 25 bp, Homo sapien
gttttccttatcctgatagcaccat

SEQ ID NO: 3530338 - DNA, 25 bp, Homo sapien
aacagttttccttatcctgatagca

SEQ ID NO: 3530339 - DNA, 25 bp, Homo sapien
cagttttccttatcctgatagcacc

SEQ ID NO: 3530340 - DNA, 25 bp, Homo sapien
ttctccctttgcagctcattatctc

SEQ ID NO: 3530341 - DNA, 25 bp, Homo sapien
gtgctttttcatgctcattttgaag

SEQ ID NO: 3530342 - DNA, 25 bp, Homo sapien
tgctttttcatgctcattttgaaga

SEQ ID NO: 3530343 - DNA, 25 bp, Homo sapien
cttctccctttgcagctcattatct

SEQ ID NO: 3530344 - DNA, 25 bp, Homo sapien
cttgaatttgttgccgaagtaactg

SEQ ID NO: 3530345 - DNA, 25 bp, Homo sapien
ccatttcagtattagcttgaatttg

SEQ ID NO: 3530346 - DNA, 25 bp, Homo sapien
tattagcttgaatttgttgccgaag

SEQ ID NO: 3530347 - DNA, 25 bp, Homo sapien
tattttcttttagcaccttcaattc

SEQ ID NO: 3530348 - DNA, 25 bp, Homo sapien
gaatatgggtaatctcttcattaat

SEQ ID NO: 3530349 - DNA, 25 bp, Homo sapien
ttgttctttaattgttagattgatg

SEQ ID NO: 3530350 - DNA, 25 bp, Homo sapien
gttagattgatgttttcttctccca

SEQ ID NO: 3530351 - DNA, 25 bp, Homo sapien
taattgttagattgatgttttcttc

SEQ ID NO: 3530352 - DNA, 25 bp, Homo sapien
catgttgagtctttcttgaagttct

SEQ ID NO: 3530353 - DNA, 25 bp, Homo sapien
agtctgaggctgctttttttagttc

SEQ ID NO: 3530354 - DNA, 25 bp, Homo sapien
cttatattgacatgtgactttggac

SEQ ID NO: 3530355 - DNA, 25 bp, Homo sapien
tattgacatgtgactttggacttta

SEQ ID NO: 3530356 - DNA, 25 bp, Homo sapien
ctttggactttatcaagtctgaggc

SEQ ID NO: 3530357 - DNA, 25 bp, Homo sapien
tgccaggtaccagctttataagcat

SEQ ID NO: 3530358 - DNA, 25 bp, Homo sapien
agaagcaaagatgccaggtaccagc

SEQ ID NO: 3530359 - DNA, 25 bp, Homo sapien
gcaaagatgccaggtaccagcttta

SEQ ID NO: 3530360 - DNA, 25 bp, Homo sapien
cagagaagcaaagatgccaggtacc

SEQ ID NO: 3530361 - DNA, 25 bp, Homo sapien
cttctttaaactgcatatttcagct

SEQ ID NO: 3530362 - DNA, 25 bp, Homo sapien
taaactgcatatttcagcttcttgt

SEQ ID NO: 3530363 - DNA, 25 bp, Homo sapien
gctgaaagtcttttgtttgattgta

SEQ ID NO: 3530364 - DNA, 25 bp, Homo sapien
ttaaagctgaaagtcttttgtttga

SEQ ID NO: 3530365 - DNA, 25 bp, Homo sapien
tttctcaatttcactcagttgctta

SEQ ID NO: 3530366 - DNA, 25 bp, Homo sapien
ttagccagaagatgtaactggacct

SEQ ID NO: 3530367 - DNA, 25 bp, Homo sapien
catgattctcttttaccaatccaaa

SEQ ID NO: 3530368 - DNA, 25 bp, Homo sapien
tcttttaccaatccaaattgacctg

SEQ ID NO: 3530369 - DNA, 25 bp, Homo sapien
gttttacaacacagacaccgataaa

SEQ ID NO: 3530370 - DNA, 25 bp, Homo sapien
caatgatggtgaatgtaatgtccta

SEQ ID NO: 3530371 - DNA, 25 bp, Homo sapien
tgtatcaatgaccagatcacaatga

SEQ ID NO: 3530372 - DNA, 25 bp, Homo sapien
gaacctatcaccacctctaaaagaa

SEQ ID NO: 3530373 - DNA, 25 bp, Homo sapien
ctcactttcttctgtaaagagtatt

SEQ ID NO: 3530374 - DNA, 25 bp, Homo sapien
actttcttctgtaaagagtatttag

SEQ ID NO: 3530375 - DNA, 25 bp, Homo sapien
tcttctgtaaagagtatttagaaac

SEQ ID NO: 3530376 - DNA, 25 bp, Homo sapien
cactcactttcttctgtaaagagta

SEQ ID NO: 3530377 - DNA, 25 bp, Homo sapien
atttctgtagcaagttgatattttc

SEQ ID NO: 3530378 - DNA, 25 bp, Homo sapien
ctttatttctgtagcaagttgatat

SEQ ID NO: 3530379 - DNA, 25 bp, Homo sapien
ctgtagtgcttttaatgtttccttc

SEQ ID NO: 3530380 - DNA, 25 bp, Homo sapien
tgtttccttcaatccttctatttct

SEQ ID NO: 3530381 - DNA, 25 bp, Homo sapien
tcttcttccagggcacacatcttca

SEQ ID NO: 3530382 - DNA, 25 bp, Homo sapien
tttcttcttccagggcacacatctt

SEQ ID NO: 3530383 - DNA, 25 bp, Homo sapien
cttttcttcttccagggcacacatc

SEQ ID NO: 3530384 - DNA, 25 bp, Homo sapien
ttcttccagggcacacatcttcatc

SEQ ID NO: 3530385 - DNA, 25 bp, Homo sapien
tgtttccttttgattctgaagagtt

SEQ ID NO: 3530386 - DNA, 25 bp, Homo sapien
gtgttgctctgccaatgtttccttt

SEQ ID NO: 3530387 - DNA, 25 bp, Homo sapien
tgtgttgctctgccaatgtttcctt

SEQ ID NO: 3530388 - DNA, 25 bp, Homo sapien
ttgctctgccaatgtttccttttga

SEQ ID NO: 3530389 - DNA, 25 bp, Homo sapien
ataattttaccaatctgctcttcat

SEQ ID NO: 3530390 - DNA, 25 bp, Homo sapien
atttaagttcctgtgtctccacaat

SEQ ID NO: 3530391 - DNA, 25 bp, Homo sapien
tcctgtgtctccacaataattttac

SEQ ID NO: 3530392 - DNA, 25 bp, Homo sapien
taagttcctgtgtctccacaataat

SEQ ID NO: 3530393 - DNA, 25 bp, Homo sapien
tattatacatgttaatggaagagca

SEQ ID NO: 3530394 - DNA, 25 bp, Homo sapien
gattgcttgctgttggcatatggaa

SEQ ID NO: 3530395 - DNA, 25 bp, Homo sapien
cagtataatactagctcttggtcta

SEQ ID NO: 3530396 - DNA, 25 bp, Homo sapien
ttctcagaataaattggaatagtta

SEQ ID NO: 3530397 - DNA, 25 bp, Homo sapien
ctcagaataaattggaatagttata

SEQ ID NO: 3530398 - DNA, 25 bp, Homo sapien
caagcacagagtttgaaagctaaat

SEQ ID NO: 3530399 - DNA, 25 bp, Homo sapien
gttcttatgaggttatcttgaaaaa

SEQ ID NO: 3530400 - DNA, 25 bp, Homo sapien
aaaatgtgtcagcagagcctatggt

SEQ ID NO: 3530401 - DNA, 25 bp, Homo sapien
tgaaaaaatgtgtcagcagagccta

SEQ ID NO: 3530402 - DNA, 25 bp, Homo sapien
tcttctaatgcctccagtaaacttg

SEQ ID NO: 3530403 - DNA, 25 bp, Homo sapien
atgactcagtattgaagttgctttc

SEQ ID NO: 3530404 - DNA, 25 bp, Homo sapien
ccttctcatacgcaattcttctaat

SEQ ID NO: 3530405 - DNA, 25 bp, Homo sapien
gagtaaaagtagatgatgactcagt

SEQ ID NO: 3530406 - DNA, 25 bp, Homo sapien
cttgcataggcaagaaagagaggaa

SEQ ID NO: 3530407 - DNA, 25 bp, Homo sapien
ggcagcaacttcctcaacacaatgg

SEQ ID NO: 3530408 - DNA, 25 bp, Homo sapien
accctagcacggtggaggacagcaa

SEQ ID NO: 3530409 - DNA, 25 bp, Homo sapien
gcaagaggacacctgtacgaagaca

SEQ ID NO: 3530410 - DNA, 25 bp, Homo sapien
cagggataaatgagcctgtaagatt

SEQ ID NO: 3530411 - DNA, 25 bp, Homo sapien
gataaatgagcctgtaagattttgc

SEQ ID NO: 3530412 - DNA, 25 bp, Homo sapien
ccatgctgttatcaatcatgtacag

SEQ ID NO: 3530413 - DNA, 25 bp, Homo sapien
caatcatgtacagggataaatgagc

SEQ ID NO: 3530414 - DNA, 25 bp, Homo sapien
gcagtctcaatcctgcccaagcaga

SEQ ID NO: 3530415 - DNA, 25 bp, Homo sapien
ccgcagtctcaatcctgcccaagca

SEQ ID NO: 3530416 - DNA, 25 bp, Homo sapien
cagtctcaatcctgcccaagcagag

SEQ ID NO: 3530417 - DNA, 25 bp, Homo sapien
cgcagtctcaatcctgcccaagcag

SEQ ID NO: 3530418 - DNA, 25 bp, Homo sapien
cacttccggcttgaaggtcattagc

SEQ ID NO: 3530419 - DNA, 25 bp, Homo sapien
gggcacttccggcttgaaggtcatt

SEQ ID NO: 3530420 - DNA, 25 bp, Homo sapien
cctagggcacttccggcttgaaggt

SEQ ID NO: 3530421 - DNA, 25 bp, Homo sapien
cgccctagggcacttccggcttgaa

SEQ ID NO: 3530422 - DNA, 25 bp, Homo sapien
gaagatgtactacatacaccatggg

SEQ ID NO: 3530423 - DNA, 25 bp, Homo sapien
tacatgtctcccaaactaggttctc

SEQ ID NO: 3530424 - DNA, 25 bp, Homo sapien
gtaacctcagcgcagtgcttggcac

SEQ ID NO: 3530425 - DNA, 25 bp, Homo sapien
tgatagcaccacaaactgtagttga

SEQ ID NO: 3530426 - DNA, 25 bp, Homo sapien
cagaataaaggagtggatacagaga

SEQ ID NO: 3530427 - DNA, 25 bp, Homo sapien
tgcagaataaaggagtggatacaga

SEQ ID NO: 3530428 - DNA, 25 bp, Homo sapien
ataaaggagtggatacagagacaaa

SEQ ID NO: 3530429 - DNA, 25 bp, Homo sapien
gaataaaggagtggatacagagaca

SEQ ID NO: 3530430 - DNA, 25 bp, Homo sapien
cctgaataacttaggaaaagcatgc

SEQ ID NO: 3530431 - DNA, 25 bp, Homo sapien
ctgaataacttaggaaaagcatgca

SEQ ID NO: 3530432 - DNA, 25 bp, Homo sapien
tgaataacttaggaaaagcatgcat

SEQ ID NO: 3530433 - DNA, 25 bp, Homo sapien
cattgatgtaggtaaccacatgctt

SEQ ID NO: 3530434 - DNA, 25 bp, Homo sapien
tgcaaatacatacagaataacattg

SEQ ID NO: 3530435 - DNA, 25 bp, Homo sapien
tgatgtaggtaaccacatgcttgct

SEQ ID NO: 3530436 - DNA, 25 bp, Homo sapien
catacagaataacattgatgtaggt

SEQ ID NO: 3530437 - DNA, 25 bp, Homo sapien
gacatggactaacagaatcagcaca

SEQ ID NO: 3530438 - DNA, 25 bp, Homo sapien
gtaaggagccttttgcctaatgcta

SEQ ID NO: 3530439 - DNA, 25 bp, Homo sapien
cctaatgctatctaggcccttgagc

SEQ ID NO: 3530440 - DNA, 25 bp, Homo sapien
gactaaagacttctgagtccacagt

SEQ ID NO: 3530441 - DNA, 25 bp, Homo sapien
agcttcatggctgcaatcttaacat

SEQ ID NO: 3530442 - DNA, 25 bp, Homo sapien
tcacagtccttgagtccatcctcat

SEQ ID NO: 3530443 - DNA, 25 bp, Homo sapien
gcttcatggctgcaatcttaacatc

SEQ ID NO: 3530444 - DNA, 25 bp, Homo sapien
ctgtcacagtccttgagtccatcct

SEQ ID NO: 3530445 - DNA, 25 bp, Homo sapien
tcccaggtttgcgcgcgggggccat

SEQ ID NO: 3530446 - DNA, 25 bp, Homo sapien
aggcccttcccaggtttgcgcgcgg

SEQ ID NO: 3530447 - DNA, 25 bp, Homo sapien
ttcccaggtttgcgcgcgggggcca

SEQ ID NO: 3530448 - DNA, 25 bp, Homo sapien
aaatatgtctagactgtaaatgaac

SEQ ID NO: 3530449 - DNA, 25 bp, Homo sapien
tggcctatgaaatctccctagctta

SEQ ID NO: 3530450 - DNA, 25 bp, Homo sapien
ggaatgtttatgtattcccatccaa

SEQ ID NO: 3530451 - DNA, 25 bp, Homo sapien
tattatgaatttgcaaactaagatt

SEQ ID NO: 3530452 - DNA, 25 bp, Homo sapien
gactgtgaatagcacagtcattatt

SEQ ID NO: 3530453 - DNA, 25 bp, Homo sapien
tagtgtcctcgtgcttacactttct

SEQ ID NO: 3530454 - DNA, 25 bp, Homo sapien
ttccaacttttctgcgtcactatgt

SEQ ID NO: 3530455 - DNA, 25 bp, Homo sapien
cttttctgcgtcactatgtttttca

SEQ ID NO: 3530456 - DNA, 25 bp, Homo sapien
tcttctttctcgcaatttttctctc

SEQ ID NO: 3530457 - DNA, 25 bp, Homo sapien
agtatgctgcgggtttggcttctga

SEQ ID NO: 3530458 - DNA, 25 bp, Homo sapien
ggacttagaacttgactcagctgga

SEQ ID NO: 3530459 - DNA, 25 bp, Homo sapien
tactgcttaggaaggattggccagg

SEQ ID NO: 3530460 - DNA, 25 bp, Homo sapien
taaaaaataaggtgtggctgcagta

SEQ ID NO: 3530461 - DNA, 25 bp, Homo sapien
cactgcctcgaattatgaaattcag

SEQ ID NO: 3530462 - DNA, 25 bp, Homo sapien
tcattttgtgtaaagcagttgctct

SEQ ID NO: 3530463 - DNA, 25 bp, Homo sapien
caagcagctgcctagatttgtctac

SEQ ID NO: 3530464 - DNA, 25 bp, Homo sapien
gcttcagaacctgtgagaaccccac

SEQ ID NO: 3530465 - DNA, 25 bp, Homo sapien
ttaaaacatgtgtgacatatatcag

SEQ ID NO: 3530466 - DNA, 25 bp, Homo sapien
tgtgtgacatatatcagtaccttca

SEQ ID NO: 3530467 - DNA, 25 bp, Homo sapien
tctctaacacctcaacagtttaagg

SEQ ID NO: 3530468 - DNA, 25 bp, Homo sapien
ggtaatttagtacacatatatcagt

SEQ ID NO: 3530469 - DNA, 25 bp, Homo sapien
gaacaaaaggatgtaggcgccagga

SEQ ID NO: 3530470 - DNA, 25 bp, Homo sapien
taacccgaagggtcaaatagtgagc

SEQ ID NO: 3530471 - DNA, 25 bp, Homo sapien
ggaaaagggtcctctagcccagcaa

SEQ ID NO: 3530472 - DNA, 25 bp, Homo sapien
tattgcctgcgtaactcactctgag

SEQ ID NO: 3530473 - DNA, 25 bp, Homo sapien
aaatccaccaacatggggcgcagcg

SEQ ID NO: 3530474 - DNA, 25 bp, Homo sapien
atccaccaacatggggcgcagcggc

SEQ ID NO: 3530475 - DNA, 25 bp, Homo sapien
gccagccccgcgagcggcaagcgcg

SEQ ID NO: 3530476 - DNA, 25 bp, Homo sapien
ggaaatccaccaacatggggcgcag

SEQ ID NO: 3530477 - DNA, 25 bp, Homo sapien
ttcgctcggttgcagcgccgcccag

SEQ ID NO: 3530478 - DNA, 25 bp, Homo sapien
tttggggccttcgctcggttgcagc

SEQ ID NO: 3530479 - DNA, 25 bp, Homo sapien
ccaggaaaggccggggatgcgtttg

SEQ ID NO: 3530480 - DNA, 25 bp, Homo sapien
cgcccagaggtctgggccgggcggg

SEQ ID NO: 3530481 - DNA, 25 bp, Homo sapien
tccgtcacctcttgggtcctgggct

SEQ ID NO: 3530482 - DNA, 25 bp, Homo sapien
aagtttgggctcgtggctgaactcg

SEQ ID NO: 3530483 - DNA, 25 bp, Homo sapien
ggcagtggcgatccattgtattgga

SEQ ID NO: 3530484 - DNA, 25 bp, Homo sapien
tgaactcgggatctgtgagacccag

SEQ ID NO: 3530485 - DNA, 25 bp, Homo sapien
tggggtgcagttttggatgttgtaa

SEQ ID NO: 3530486 - DNA, 25 bp, Homo sapien
gtgcagttttggatgttgtaaatac

SEQ ID NO: 3530487 - DNA, 25 bp, Homo sapien
gggtgcagttttggatgttgtaaat

SEQ ID NO: 3530488 - DNA, 25 bp, Homo sapien
cttttggggtgcagttttggatgtt

SEQ ID NO: 3530489 - DNA, 25 bp, Homo sapien
aaggtcatcaagagtctgcagatcc

SEQ ID NO: 3530490 - DNA, 25 bp, Homo sapien
ggaaataagaaggtcatcaagagtc

SEQ ID NO: 3530491 - DNA, 25 bp, Homo sapien
taagaaggtcatcaagagtctgcag

SEQ ID NO: 3530492 - DNA, 25 bp, Homo sapien
gcttgggaaataagaaggtcatcaa

SEQ ID NO: 3530493 - DNA, 25 bp, Homo sapien
cccaggttcaattggttttcatgcc

SEQ ID NO: 3530494 - DNA, 25 bp, Homo sapien
ccaggttcaattggttttcatgcct

SEQ ID NO: 3530495 - DNA, 25 bp, Homo sapien
taacaatacctagggcccatatgga

SEQ ID NO: 3530496 - DNA, 25 bp, Homo sapien
tcatgattgccccagatgtctctca

SEQ ID NO: 3530497 - DNA, 25 bp, Homo sapien
aacttatgcacatgtgtatagcagc

SEQ ID NO: 3530498 - DNA, 25 bp, Homo sapien
ccatatggatgcagagttactagac

SEQ ID NO: 3530499 - DNA, 25 bp, Homo sapien
ggataaggaacatcatcttttggca

SEQ ID NO: 3530500 - DNA, 25 bp, Homo sapien
tttgctagcctctgtgactcccttc

SEQ ID NO: 3530501 - DNA, 25 bp, Homo sapien
catttcaaaatatcgtctgtgggca

SEQ ID NO: 3530502 - DNA, 25 bp, Homo sapien
cactctactggatagaaggatttca

SEQ ID NO: 3530503 - DNA, 25 bp, Homo sapien
tcccatcactttggtagaccgagat

SEQ ID NO: 3530504 - DNA, 25 bp, Homo sapien
tcttcataggcatgcattcctcagc

SEQ ID NO: 3530505 - DNA, 25 bp, Homo sapien
ttagccaggtttgggagtatgcgcc

SEQ ID NO: 3530506 - DNA, 25 bp, Homo sapien
ctacttgggacactgcggctgcagt

SEQ ID NO: 3530507 - DNA, 25 bp, Homo sapien
tgtgacttcagattttaactctatg

SEQ ID NO: 3530508 - DNA, 25 bp, Homo sapien
gaagatggtgattctaaatctcatt

SEQ ID NO: 3530509 - DNA, 25 bp, Homo sapien
caaatgaaaccatgcaggctgttga

SEQ ID NO: 3530510 - DNA, 25 bp, Homo sapien
gatgatatcttagcagctacagcag

SEQ ID NO: 3530511 - DNA, 25 bp, Homo sapien
taccttagtaatgccagttatctca

SEQ ID NO: 3530512 - DNA, 25 bp, Homo sapien
tgaacataccaactgaagcacagtt

SEQ ID NO: 3530513 - DNA, 25 bp, Homo sapien
aacacctgggctcgtaactctccta

SEQ ID NO: 3530514 - DNA, 25 bp, Homo sapien
caggatgctgacaattcaaaatgta

SEQ ID NO: 3530515 - DNA, 25 bp, Homo sapien
tttttctggtgttgggcttcagaat

SEQ ID NO: 3530516 - DNA, 25 bp, Homo sapien
taacgtgcacatgggagagaatcac

SEQ ID NO: 3530517 - DNA, 25 bp, Homo sapien
actgaggccattagattgcattcaa

SEQ ID NO: 3530518 - DNA, 25 bp, Homo sapien
cacagaatgattactccgtagcctt

SEQ ID NO: 3530519 - DNA, 25 bp, Homo sapien
cactgccatgtattcgcaggaagaa

SEQ ID NO: 3530520 - DNA, 25 bp, Homo sapien
gaagtggcagaaaccatatgtttgt

SEQ ID NO: 3530521 - DNA, 25 bp, Homo sapien
gaattggtgcaattctctgactgct

SEQ ID NO: 3530522 - DNA, 25 bp, Homo sapien
ctcttaacatgttcaggaaactgga

SEQ ID NO: 3530523 - DNA, 25 bp, Homo sapien
ttctgactccggctaaacaccagaa

SEQ ID NO: 3530524 - DNA, 25 bp, Homo sapien
ttctgtgtcagtcgcatttgacgca

SEQ ID NO: 3530525 - DNA, 25 bp, Homo sapien
gacgcataactgcacaaatgaacag

SEQ ID NO: 3530526 - DNA, 25 bp, Homo sapien
tagtccagcgttttcatttggtcca

SEQ ID NO: 3530527 - DNA, 25 bp, Homo sapien
tgcatgtgttagcaaatcaccttta

SEQ ID NO: 3530528 - DNA, 25 bp, Homo sapien
tacaaaaatgcctaaatgcccattg

SEQ ID NO: 3530529 - DNA, 25 bp, Homo sapien
actcaaaaactcctgcataccaaag

SEQ ID NO: 3530530 - DNA, 25 bp, Homo sapien
gatatgaaagcagggtctagagata

SEQ ID NO: 3530531 - DNA, 25 bp, Homo sapien
gcaaagcacctgaacacgtatttct

SEQ ID NO: 3530532 - DNA, 25 bp, Homo sapien
tgataatccactcccatcagaccaa

SEQ ID NO: 3530533 - DNA, 25 bp, Homo sapien
tttagcagtggggggctataaacca

SEQ ID NO: 3530534 - DNA, 25 bp, Homo sapien
aaattctgataatccactcccatca

SEQ ID NO: 3530535 - DNA, 25 bp, Homo sapien
agcagtggggggctataaaccaatt

SEQ ID NO: 3530536 - DNA, 25 bp, Homo sapien
gcatcgcgcccgaggaaacttggat

SEQ ID NO: 3530537 - DNA, 25 bp, Homo sapien
tggttgccagagagacacgtgaccg

SEQ ID NO: 3530538 - DNA, 25 bp, Homo sapien
cgcacagttaacagacgggcgctca

SEQ ID NO: 3530539 - DNA, 25 bp, Homo sapien
ttcgaatcccgctggtgtgagccgc

SEQ ID NO: 3530540 - DNA, 25 bp, Homo sapien
ctccgggtaggtgccgaggactgcc

SEQ ID NO: 3530541 - DNA, 25 bp, Homo sapien
ccgggtaggtgccgaggactgccgc

SEQ ID NO: 3530542 - DNA, 25 bp, Homo sapien
gcctccgggtaggtgccgaggactg

SEQ ID NO: 3530543 - DNA, 25 bp, Homo sapien
cctccgggtaggtgccgaggactgc

SEQ ID NO: 3530544 - DNA, 25 bp, Homo sapien
ttttcagaggcaatcgcagtcttca

SEQ ID NO: 3530545 - DNA, 25 bp, Homo sapien
tccatcgtaaatgtgaagagcaaga

SEQ ID NO: 3530546 - DNA, 25 bp, Homo sapien
gttggagaaatactggcccagaact

SEQ ID NO: 3530547 - DNA, 25 bp, Homo sapien
gatcatagacagaggtctgaagtaa

SEQ ID NO: 3530548 - DNA, 25 bp, Homo sapien
tgaggcctgagcaagtaacttggag

SEQ ID NO: 3530549 - DNA, 25 bp, Homo sapien
ctaaaaactcttgatgaggattcaa

SEQ ID NO: 3530550 - DNA, 25 bp, Homo sapien
ggtcaattctataagtgtcacccag

SEQ ID NO: 3530551 - DNA, 25 bp, Homo sapien
tcacatttgtaagcgtggaagctct

SEQ ID NO: 3530552 - DNA, 25 bp, Homo sapien
tgtcacccagacatctttattgagc

SEQ ID NO: 3530553 - DNA, 25 bp, Homo sapien
ccctgagcggtcatcggccatgttt

SEQ ID NO: 3530554 - DNA, 25 bp, Homo sapien
aacgccgactccgtggcaggtgaga

SEQ ID NO: 3530555 - DNA, 25 bp, Homo sapien
tactgaaccccttcggcaagcaggg

SEQ ID NO: 3530556 - DNA, 25 bp, Homo sapien
tttccgtacgaagacatggcgctgc

SEQ ID NO: 3530557 - DNA, 25 bp, Homo sapien
gatttgccctgagtcacattgctag

SEQ ID NO: 3530558 - DNA, 25 bp, Homo sapien
aggaatcaaccctttagcccagtgt

SEQ ID NO: 3530559 - DNA, 25 bp, Homo sapien
gctggataagatcttagcaagctca

SEQ ID NO: 3530560 - DNA, 25 bp, Homo sapien
tactacgtgagatccagaaatctga

SEQ ID NO: 3530561 - DNA, 25 bp, Homo sapien
cttaacaaattgaggtgaagacgtg

SEQ ID NO: 3530562 - DNA, 25 bp, Homo sapien
tctatcatgatcagatacctgtcat

SEQ ID NO: 3530563 - DNA, 25 bp, Homo sapien
caaccctataatttgtatgcagtga

SEQ ID NO: 3530564 - DNA, 25 bp, Homo sapien
gaagacgtgttgtccaccaaattgc

SEQ ID NO: 3530565 - DNA, 25 bp, Homo sapien
gatgcaatcctgagtaagatcctcg

SEQ ID NO: 3530566 - DNA, 25 bp, Homo sapien
tcctgagtaagatcctcgtccgatc

SEQ ID NO: 3530567 - DNA, 25 bp, Homo sapien
caatcctgagtaagatcctcgtccg

SEQ ID NO: 3530568 - DNA, 25 bp, Homo sapien
ctacgatgcaatcctgagtaagatc

SEQ ID NO: 3530569 - DNA, 25 bp, Homo sapien
ttcaagccttgaaagtcaaggagga

SEQ ID NO: 3530570 - DNA, 25 bp, Homo sapien
tatacaaaattactcctgcatctgg

SEQ ID NO: 3530571 - DNA, 25 bp, Homo sapien
aaaatagtttactgtaatgtgaacg

SEQ ID NO: 3530572 - DNA, 25 bp, Homo sapien
gcagttatgacttatgagatctagt

SEQ ID NO: 3530573 - DNA, 25 bp, Homo sapien
accacatagcccttgggagtccgtg

SEQ ID NO: 3530574 - DNA, 25 bp, Homo sapien
agcccttgggagtccgtgcctttag

SEQ ID NO: 3530575 - DNA, 25 bp, Homo sapien
gcactaataggcagtaggccttcca

SEQ ID NO: 3530576 - DNA, 25 bp, Homo sapien
cagtaggccttccaagaccgaaaag

SEQ ID NO: 3530577 - DNA, 25 bp, Homo sapien
ccatgttcaaggatagtgtgctgga

SEQ ID NO: 3530578 - DNA, 25 bp, Homo sapien
atagttaaaaaagatgaggtggcct

SEQ ID NO: 3530579 - DNA, 25 bp, Homo sapien
catagttaaaaaagatgaggtggcc

SEQ ID NO: 3530580 - DNA, 25 bp, Homo sapien
tagttaaaaaagatgaggtggccta

SEQ ID NO: 3530581 - DNA, 25 bp, Homo sapien
catgaagactgacatggcatagatg

SEQ ID NO: 3530582 - DNA, 25 bp, Homo sapien
gcatgaagactgacatggcatagat

SEQ ID NO: 3530583 - DNA, 25 bp, Homo sapien
tagggcactcttcaggtcagcccac

SEQ ID NO: 3530584 - DNA, 25 bp, Homo sapien
aagtaatgaagactagggcactctt

SEQ ID NO: 3530585 - DNA, 25 bp, Homo sapien
tgaagactagggcactcttcaggtc

SEQ ID NO: 3530586 - DNA, 25 bp, Homo sapien
gactagggcactcttcaggtcagcc

SEQ ID NO: 3530587 - DNA, 25 bp, Homo sapien
tgtttgttacaggttgggtacacat

SEQ ID NO: 3530588 - DNA, 25 bp, Homo sapien
gtgtttgttacaggttgggtacaca

SEQ ID NO: 3530589 - DNA, 25 bp, Homo sapien
tgtattcaatgaggtcgtgtctgga

SEQ ID NO: 3530590 - DNA, 25 bp, Homo sapien
cctgccatgagggtacttttaaaga

SEQ ID NO: 3530591 - DNA, 25 bp, Homo sapien
tttcctgccgctccaaggctgaagg

SEQ ID NO: 3530592 - DNA, 25 bp, Homo sapien
tgtgcctggcggttgtatgatcctg

SEQ ID NO: 3530593 - DNA, 25 bp, Homo sapien
aaaatctgaaagaagcagaggaagc

SEQ ID NO: 3530594 - DNA, 25 bp, Homo sapien
tggtattggataaataacataagta

SEQ ID NO: 3530595 - DNA, 25 bp, Homo sapien
taacataagtagttattgtaaataa

SEQ ID NO: 3530596 - DNA, 25 bp, Homo sapien
ttccttgtcctgacatttattttta

SEQ ID NO: 3530597 - DNA, 25 bp, Homo sapien
taaacataccacttgaggcaaaagg

SEQ ID NO: 3530598 - DNA, 25 bp, Homo sapien
caagaaccatgtgatagaggcacca

SEQ ID NO: 3530599 - DNA, 25 bp, Homo sapien
gacaggagttttctgcagaggcgtt

SEQ ID NO: 3530600 - DNA, 25 bp, Homo sapien
caataaggcaggactctacataagc

SEQ ID NO: 3530601 - DNA, 25 bp, Homo sapien
gcttctgctgccgtgctctgtaaat

SEQ ID NO: 3530602 - DNA, 25 bp, Homo sapien
gacggccttggtgagtactgcatta

SEQ ID NO: 3530603 - DNA, 25 bp, Homo sapien
gtaatgatcctcacagcttcctcaa

SEQ ID NO: 3530604 - DNA, 25 bp, Homo sapien
tgaatcctcgttgggccttttgacg

SEQ ID NO: 3530605 - DNA, 25 bp, Homo sapien
tatcttgcatcttcggaaaatttcc

SEQ ID NO: 3530606 - DNA, 25 bp, Homo sapien
tatttggtatcttgcatcttcggaa

SEQ ID NO: 3530607 - DNA, 25 bp, Homo sapien
tgcatcttcggaaaatttccatcag

SEQ ID NO: 3530608 - DNA, 25 bp, Homo sapien
cagttcatccacttgtacaaaagga

SEQ ID NO: 3530609 - DNA, 25 bp, Homo sapien
ccaggtacagggtgtaaacctggag

SEQ ID NO: 3530610 - DNA, 25 bp, Homo sapien
gcaggagggactgggaacactccac

SEQ ID NO: 3530611 - DNA, 25 bp, Homo sapien
cactccaccaggtacagggtgtaaa

SEQ ID NO: 3530612 - DNA, 25 bp, Homo sapien
ctgggaacactccaccaggtacagg

SEQ ID NO: 3530613 - DNA, 25 bp, Homo sapien
caactgggtccggaattatagctgc

SEQ ID NO: 3530614 - DNA, 25 bp, Homo sapien
catctttcagaacaggcactataga

SEQ ID NO: 3530615 - DNA, 25 bp, Homo sapien
gaaatggaatcatctgctgagtgtc

SEQ ID NO: 3530616 - DNA, 25 bp, Homo sapien
ttatagctgctagcttagcacggga

SEQ ID NO: 3530617 - DNA, 25 bp, Homo sapien
ggtgtgagccaccacacctggccac

SEQ ID NO: 3530618 - DNA, 25 bp, Homo sapien
agatgcccgccaccaagcccggcca

SEQ ID NO: 3530619 - DNA, 25 bp, Homo sapien
atgcccgccaccaagcccggccaat

SEQ ID NO: 3530620 - DNA, 25 bp, Homo sapien
caggtgtgagccaccacacctggcc

SEQ ID NO: 3530621 - DNA, 25 bp, Homo sapien
caagacccaggctaaaagagggcag

SEQ ID NO: 3530622 - DNA, 25 bp, Homo sapien
tgaacaggttcaggtgccagatttg

SEQ ID NO: 3530623 - DNA, 25 bp, Homo sapien
taacagtggttttatcagcaagggc

SEQ ID NO: 3530624 - DNA, 25 bp, Homo sapien
catcctaatggtggttggcttaaag

SEQ ID NO: 3530625 - DNA, 25 bp, Homo sapien
ttcaaatgctagaaatcgggcccag

SEQ ID NO: 3530626 - DNA, 25 bp, Homo sapien
tctccactttgagtatactagctag

SEQ ID NO: 3530627 - DNA, 25 bp, Homo sapien
cttctttgaatgctgtaaaccgtct

SEQ ID NO: 3530628 - DNA, 25 bp, Homo sapien
tctatctactagtaaagccgtttct

SEQ ID NO: 3530629 - DNA, 25 bp, Homo sapien
gccatctagctggatattgaaccca

SEQ ID NO: 3530630 - DNA, 25 bp, Homo sapien
taatatttccgctgtaccacttgac

SEQ ID NO: 3530631 - DNA, 25 bp, Homo sapien
ctgtatggtaaaactaacacgagac

SEQ ID NO: 3530632 - DNA, 25 bp, Homo sapien
taccagatatgtggctatcacaaaa

SEQ ID NO: 3530633 - DNA, 25 bp, Homo sapien
gaatgcctctcttaacatgttaata

SEQ ID NO: 3530634 - DNA, 25 bp, Homo sapien
cagaatgcctctcttaacatgttaa

SEQ ID NO: 3530635 - DNA, 25 bp, Homo sapien
taagggaggtgaaaatttcagaatg

SEQ ID NO: 3530636 - DNA, 25 bp, Homo sapien
tttcagaatgcctctcttaacatgt

SEQ ID NO: 3530637 - DNA, 25 bp, Homo sapien
ccagatgttaaaactcgttcaaaca

SEQ ID NO: 3530638 - DNA, 25 bp, Homo sapien
tccagatgttaaaactcgttcaaac

SEQ ID NO: 3530639 - DNA, 25 bp, Homo sapien
cagatgttaaaactcgttcaaacaa

SEQ ID NO: 3530640 - DNA, 25 bp, Homo sapien
ttccagatgttaaaactcgttcaaa

SEQ ID NO: 3530641 - DNA, 25 bp, Homo sapien
cagaggtacaatatctaggttggca

SEQ ID NO: 3530642 - DNA, 25 bp, Homo sapien
ttagctactttaactcttgcagagg

SEQ ID NO: 3530643 - DNA, 25 bp, Homo sapien
tgagtttcttattttgaggcaccag

SEQ ID NO: 3530644 - DNA, 25 bp, Homo sapien
tataacagtgccgtctgaaccaggt

SEQ ID NO: 3530645 - DNA, 25 bp, Homo sapien
cctctatatctggaagtgggaaaat

SEQ ID NO: 3530646 - DNA, 25 bp, Homo sapien
tgacacttcttgctaaactctaagt

SEQ ID NO: 3530647 - DNA, 25 bp, Homo sapien
ttgaatctactactaacaaccactg

SEQ ID NO: 3530648 - DNA, 25 bp, Homo sapien
cagtaacaacaaccattgaatctac

SEQ ID NO: 3530649 - DNA, 25 bp, Homo sapien
ggaagacaatagtgctaacaccaga

SEQ ID NO: 3530650 - DNA, 25 bp, Homo sapien
ggaatattaaatgccccactatctc

SEQ ID NO: 3530651 - DNA, 25 bp, Homo sapien
cctcagaactatgctacagtgaaac

SEQ ID NO: 3530652 - DNA, 25 bp, Homo sapien
taccctctcaacagtcctatgaaag

SEQ ID NO: 3530653 - DNA, 25 bp, Homo sapien
tcaatataggccaggacatactctg

SEQ ID NO: 3530654 - DNA, 25 bp, Homo sapien
gtgagaaagatagtcaatataggcc

SEQ ID NO: 3530655 - DNA, 25 bp, Homo sapien
taggccaggacatactctggaatgt

SEQ ID NO: 3530656 - DNA, 25 bp, Homo sapien
ggacatactctggaatgtctccata

SEQ ID NO: 3530657 - DNA, 25 bp, Homo sapien
tacagtaatattccatgagtgctgc

SEQ ID NO: 3530658 - DNA, 25 bp, Homo sapien
tctgctctccgtgcaaatttcatat

SEQ ID NO: 3530659 - DNA, 25 bp, Homo sapien
tcttccagatttgatgccttctgct

SEQ ID NO: 3530660 - DNA, 25 bp, Homo sapien
tgcagtaacatagacatggtggcgg

SEQ ID NO: 3530661 - DNA, 25 bp, Homo sapien
gaaccttttcatacttcatgcgact

SEQ ID NO: 3530662 - DNA, 25 bp, Homo sapien
tatatactgtgaaccttttcatact

SEQ ID NO: 3530663 - DNA, 25 bp, Homo sapien
aatatcctcaattgccagaagtctg

SEQ ID NO: 3530664 - DNA, 25 bp, Homo sapien
caaggtagggtcaatatcctcaatt

SEQ ID NO: 3530665 - DNA, 25 bp, Homo sapien
cagcttcatcactaaataatttggc

SEQ ID NO: 3530666 - DNA, 25 bp, Homo sapien
agcagcttcatcactaaataatttg

SEQ ID NO: 3530667 - DNA, 25 bp, Homo sapien
tattagcagcttcatcactaaataa

SEQ ID NO: 3530668 - DNA, 25 bp, Homo sapien
catatatattagcagcttcatcact

SEQ ID NO: 3530669 - DNA, 25 bp, Homo sapien
aagcaggcactgttcataagcaaac

SEQ ID NO: 3530670 - DNA, 25 bp, Homo sapien
ggtgatggcccagcacaagcaggca

SEQ ID NO: 3530671 - DNA, 25 bp, Homo sapien
tacttgactgctcaagatactgggc

SEQ ID NO: 3530672 - DNA, 25 bp, Homo sapien
cataccaaatatcagggtgatggcc

SEQ ID NO: 3530673 - DNA, 25 bp, Homo sapien
tgtacgaagagggttgctcttttcc

SEQ ID NO: 3530674 - DNA, 25 bp, Homo sapien
taagggtctgatcctctgtacgaag

SEQ ID NO: 3530675 - DNA, 25 bp, Homo sapien
gcaccgagggagcattacggtccaa

SEQ ID NO: 3530676 - DNA, 25 bp, Homo sapien
tgagcttcttgaggagtattctgag

SEQ ID NO: 3530677 - DNA, 25 bp, Homo sapien
tttgctacacgtctagcattcatat

SEQ ID NO: 3530678 - DNA, 25 bp, Homo sapien
agcattcatataatctctactccga

SEQ ID NO: 3530679 - DNA, 25 bp, Homo sapien
tctctactccgatcttcaatcattt

SEQ ID NO: 3530680 - DNA, 25 bp, Homo sapien
cacgtctagcattcatataatctct

SEQ ID NO: 3530681 - DNA, 25 bp, Homo sapien
gattttctgcataagatcctacagc

SEQ ID NO: 3530682 - DNA, 25 bp, Homo sapien
tgatcatcggattaacacaacctcg

SEQ ID NO: 3530683 - DNA, 25 bp, Homo sapien
acttgttatagtctctccagagctg

SEQ ID NO: 3530684 - DNA, 25 bp, Homo sapien
caacctcgttgataaactcttcgga

SEQ ID NO: 3530685 - DNA, 25 bp, Homo sapien
ttttaggaaattgatgtaatccacc

SEQ ID NO: 3530686 - DNA, 25 bp, Homo sapien
tttaggaaattgatgtaatccaccc

SEQ ID NO: 3530687 - DNA, 25 bp, Homo sapien
ctgataggacataatttccattcca

SEQ ID NO: 3530688 - DNA, 25 bp, Homo sapien
tcaatgtgcaaaaccttcataaggc

SEQ ID NO: 3530689 - DNA, 25 bp, Homo sapien
ggacatatgaaagataacacttcca

SEQ ID NO: 3530690 - DNA, 25 bp, Homo sapien
tgcaaaaccttcataaggcatctct

SEQ ID NO: 3530691 - DNA, 25 bp, Homo sapien
ttacccttggtttctcggacatatg

SEQ ID NO: 3530692 - DNA, 25 bp, Homo sapien
tttcaaccttgtcataatttttagc

SEQ ID NO: 3530693 - DNA, 25 bp, Homo sapien
ttcaaccttgtcataatttttagct

SEQ ID NO: 3530694 - DNA, 25 bp, Homo sapien
ccttgtcataatttttagctttaat

SEQ ID NO: 3530695 - DNA, 25 bp, Homo sapien
caaccttgtcataatttttagcttt

SEQ ID NO: 3530696 - DNA, 25 bp, Homo sapien
cttatctggtacacatactatcata

SEQ ID NO: 3530697 - DNA, 25 bp, Homo sapien
attttcaatgacagaggctcttaat

SEQ ID NO: 3530698 - DNA, 25 bp, Homo sapien
tttgcaaaacttactaagacttgct

SEQ ID NO: 3530699 - DNA, 25 bp, Homo sapien
aatcagtggttaacggccaggtgca

SEQ ID NO: 3530700 - DNA, 25 bp, Homo sapien
gctgagtggcatagatctttctaaa

SEQ ID NO: 3530701 - DNA, 25 bp, Homo sapien
gaaaagtgagtaatttagccagaag

SEQ ID NO: 3530702 - DNA, 25 bp, Homo sapien
ggctcaattggttttgctactctac

SEQ ID NO: 3530703 - DNA, 25 bp, Homo sapien
tgtgtacaatcatttgagacgctcc

SEQ ID NO: 3530704 - DNA, 25 bp, Homo sapien
caccagcaaatgaagtctgcagtgg

SEQ ID NO: 3530705 - DNA, 25 bp, Homo sapien
ggagagcaggcataaaaccactttc

SEQ ID NO: 3530706 - DNA, 25 bp, Homo sapien
aaaaacctgaatggcaagctctggg

SEQ ID NO: 3530707 - DNA, 25 bp, Homo sapien
cagacccttatggtgctgtcattaa

SEQ ID NO: 3530708 - DNA, 25 bp, Homo sapien
gttgagatgcaacataaaaagctta

SEQ ID NO: 3530709 - DNA, 25 bp, Homo sapien
tcctcatgtctaatgttgagatgca

SEQ ID NO: 3530710 - DNA, 25 bp, Homo sapien
gaaatcagagatttggccaacagaa

SEQ ID NO: 3530711 - DNA, 25 bp, Homo sapien
tgtaaaacaggtcagtaagaacatc

SEQ ID NO: 3530712 - DNA, 25 bp, Homo sapien
tttattaacatgactctgggtacag

SEQ ID NO: 3530713 - DNA, 25 bp, Homo sapien
ttcagcaaactgaagagtcaattcc

SEQ ID NO: 3530714 - DNA, 25 bp, Homo sapien
tgtgaagttaccaaccttactgcca

SEQ ID NO: 3530715 - DNA, 25 bp, Homo sapien
tcaaaaatgcatgcgtaacttccac

SEQ ID NO: 3530716 - DNA, 25 bp, Homo sapien
gggtctacaaagttactaccagatg

SEQ ID NO: 3530717 - DNA, 25 bp, Homo sapien
taatccaggcaaatacgtcagtagg

SEQ ID NO: 3530718 - DNA, 25 bp, Homo sapien
actttccaaggtttgctaacaatgc

SEQ ID NO: 3530719 - DNA, 25 bp, Homo sapien
taaggactagtcctccacatacaaa

SEQ ID NO: 3530720 - DNA, 25 bp, Homo sapien
tatataatgcagtaattgtatctgc

SEQ ID NO: 3530721 - DNA, 25 bp, Homo sapien
tctgaataatcacacagacatggac

SEQ ID NO: 3530722 - DNA, 25 bp, Homo sapien
aagcactttcagattatcactcagt

SEQ ID NO: 3530723 - DNA, 25 bp, Homo sapien
aaaggctgcaagctgaagtatagaa

SEQ ID NO: 3530724 - DNA, 25 bp, Homo sapien
gaaactttaaggtatggtcatgggc

SEQ ID NO: 3530725 - DNA, 25 bp, Homo sapien
tcagtactgctgatgaccaaagccc

SEQ ID NO: 3530726 - DNA, 25 bp, Homo sapien
taaatcaggcaactgctagcagctc

SEQ ID NO: 3530727 - DNA, 25 bp, Homo sapien
tacaaagcagcacgggcttcagcat

SEQ ID NO: 3530728 - DNA, 25 bp, Homo sapien
ttaatgttgttgcaactccaaaatg

SEQ ID NO: 3530729 - DNA, 25 bp, Homo sapien
ccaaaatgcaacaatcatcagcttg

SEQ ID NO: 3530730 - DNA, 25 bp, Homo sapien
tgttttaatgttgttgcaactccaa

SEQ ID NO: 3530731 - DNA, 25 bp, Homo sapien
tgttgttgcaactccaaaatgcaac

SEQ ID NO: 3530732 - DNA, 25 bp, Homo sapien
ttggctatgttcctaacttgttttc

SEQ ID NO: 3530733 - DNA, 25 bp, Homo sapien
ttctatcactacagtgaatgctgca

SEQ ID NO: 3530734 - DNA, 25 bp, Homo sapien
ctaattggctatgttcctaacttgt

SEQ ID NO: 3530735 - DNA, 25 bp, Homo sapien
tgaatgctgcaatactgatataaga

SEQ ID NO: 3530736 - DNA, 25 bp, Homo sapien
gggcaacaaggcgttcataagtctt

SEQ ID NO: 3530737 - DNA, 25 bp, Homo sapien
ggaactgggcaacaaggcgttcata

SEQ ID NO: 3530738 - DNA, 25 bp, Homo sapien
aagtcttccgtgctttgtctatagg

SEQ ID NO: 3530739 - DNA, 25 bp, Homo sapien
caaggcgttcataagtcttccgtgc

SEQ ID NO: 3530740 - DNA, 25 bp, Homo sapien
tttacaatgttaggattatgaaaat

SEQ ID NO: 3530741 - DNA, 25 bp, Homo sapien
tagagaaggaaatgtaatcctatat

SEQ ID NO: 3530742 - DNA, 25 bp, Homo sapien
agtgtgattggacccatagagaagg

SEQ ID NO: 3530743 - DNA, 25 bp, Homo sapien
agaaccaagtagtgtgattggaccc

SEQ ID NO: 3530744 - DNA, 25 bp, Homo sapien
tgtgcctctcgaatgagaatgctcc

SEQ ID NO: 3530745 - DNA, 25 bp, Homo sapien
gtgcctctcgaatgagaatgctcca

SEQ ID NO: 3530746 - DNA, 25 bp, Homo sapien
ttgataatatccgagcataaagagg

SEQ ID NO: 3530747 - DNA, 25 bp, Homo sapien
tatccgagcataaagagggaagcac

SEQ ID NO: 3530748 - DNA, 25 bp, Homo sapien
gggaagcactgcccctatcactttt

SEQ ID NO: 3530749 - DNA, 25 bp, Homo sapien
taatatccgagcataaagagggaag

SEQ ID NO: 3530750 - DNA, 25 bp, Homo sapien
gcagggaactgagattgccgccact

SEQ ID NO: 3530751 - DNA, 25 bp, Homo sapien
gaatttcagtcttgagataccgact

SEQ ID NO: 3530752 - DNA, 25 bp, Homo sapien
gtaatcagtgataacaaacacccaa

SEQ ID NO: 3530753 - DNA, 25 bp, Homo sapien
tcatctatacttgaactgctttagg

SEQ ID NO: 3530754 - DNA, 25 bp, Homo sapien
gataccgactataaaatgataacga

SEQ ID NO: 3530755 - DNA, 25 bp, Homo sapien
aaggtatgagttgtcgatttctttt

SEQ ID NO: 3530756 - DNA, 25 bp, Homo sapien
tatgagttgtcgatttcttttagcc

SEQ ID NO: 3530757 - DNA, 25 bp, Homo sapien
ctaaaacatatggtcgtttttctct

SEQ ID NO: 3530758 - DNA, 25 bp, Homo sapien
tttagcctttcagtatcactgaaga

SEQ ID NO: 3530759 - DNA, 25 bp, Homo sapien
agacaagcagaatcactgccaaggt

SEQ ID NO: 3530760 - DNA, 25 bp, Homo sapien
agggaaaggattgtagacaagcaga

SEQ ID NO: 3530761 - DNA, 25 bp, Homo sapien
gaaaggattgtagacaagcagaatc

SEQ ID NO: 3530762 - DNA, 25 bp, Homo sapien
agcagaatcactgccaaggtttact

SEQ ID NO: 3530763 - DNA, 25 bp, Homo sapien
tataatctgtaaaagagaccaactg

SEQ ID NO: 3530764 - DNA, 25 bp, Homo sapien
agagcatagaatctgatatccaacc

SEQ ID NO: 3530765 - DNA, 25 bp, Homo sapien
atataatctgtaaaagagaccaact

SEQ ID NO: 3530766 - DNA, 25 bp, Homo sapien
tagaatctgatatccaaccaagcat

SEQ ID NO: 3530767 - DNA, 25 bp, Homo sapien
gcccttctgaaggtctatctgggat

SEQ ID NO: 3530768 - DNA, 25 bp, Homo sapien
gcagaaaactaggaagggctgttac

SEQ ID NO: 3530769 - DNA, 25 bp, Homo sapien
ggaatgcagtatcacctaacacagt

SEQ ID NO: 3530770 - DNA, 25 bp, Homo sapien
tatgcaccttgactaaaattggcga

SEQ ID NO: 3530771 - DNA, 25 bp, Homo sapien
aaggtgaaatatggctggactcaca

SEQ ID NO: 3530772 - DNA, 25 bp, Homo sapien
aaaggtgaaatatggctggactcac

SEQ ID NO: 3530773 - DNA, 25 bp, Homo sapien
aggtgaaatatggctggactcacac

SEQ ID NO: 3530774 - DNA, 25 bp, Homo sapien
tgggaaacacagtgagacctcgtct

SEQ ID NO: 3530775 - DNA, 25 bp, Homo sapien
ggcaggaggatcacttaagtccagg

SEQ ID NO: 3530776 - DNA, 25 bp, Homo sapien
cctgggaaacacagtgagacctcgt

SEQ ID NO: 3530777 - DNA, 25 bp, Homo sapien
gtaatccaacagtttggaaggctga

SEQ ID NO: 3530778 - DNA, 25 bp, Homo sapien
gacataaagatgaataacatcatct

SEQ ID NO: 3530779 - DNA, 25 bp, Homo sapien
ccttaagagtagtgcacaaggttaa

SEQ ID NO: 3530780 - DNA, 25 bp, Homo sapien
catctcttcaactaaagaagttcaa

SEQ ID NO: 3530781 - DNA, 25 bp, Homo sapien
aataacagcatattaaatgccttaa

SEQ ID NO: 3530782 - DNA, 25 bp, Homo sapien
tgctccgtggctccgtctcctgaca

SEQ ID NO: 3530783 - DNA, 25 bp, Homo sapien
gctccgtggctccgtctcctgacat

SEQ ID NO: 3530784 - DNA, 25 bp, Homo sapien
ctgctccgtggctccgtctcctgac

SEQ ID NO: 3530785 - DNA, 25 bp, Homo sapien
atcagtaaagttaccccctgcccag

SEQ ID NO: 3530786 - DNA, 25 bp, Homo sapien
cgtgcgcactgaccgtcgatgggaa

SEQ ID NO: 3530787 - DNA, 25 bp, Homo sapien
ggcctcagctgattacaacgtgcgc

SEQ ID NO: 3530788 - DNA, 25 bp, Homo sapien
ccgtcgatgggaagctagaaaagaa

SEQ ID NO: 3530789 - DNA, 25 bp, Homo sapien
ggtataattgtttgtagcccagact

SEQ ID NO: 3530790 - DNA, 25 bp, Homo sapien
ttaaatgagattgactgggcgcggt

SEQ ID NO: 3530791 - DNA, 25 bp, Homo sapien
cattaatttttactgccaccgtcga

SEQ ID NO: 3530792 - DNA, 25 bp, Homo sapien
caccgtcgactcttgtgtagaaagc

SEQ ID NO: 3530793 - DNA, 25 bp, Homo sapien
gttctacttgatataatatatacac

SEQ ID NO: 3530794 - DNA, 25 bp, Homo sapien
tcatgcatgtcagagttaaaactgc

SEQ ID NO: 3530795 - DNA, 25 bp, Homo sapien
aaaactgctcataaaaggctgggtg

SEQ ID NO: 3530796 - DNA, 25 bp, Homo sapien
gagttaaaactgctcataaaaggct

SEQ ID NO: 3530797 - DNA, 25 bp, Homo sapien
agaaggagggaaagagaacaaggag

SEQ ID NO: 3530798 - DNA, 25 bp, Homo sapien
tgagaaggagggaaagagaacaagg

SEQ ID NO: 3530799 - DNA, 25 bp, Homo sapien
gcagtgagaaggagggaaagagaac

SEQ ID NO: 3530800 - DNA, 25 bp, Homo sapien
cagtgagaaggagggaaagagaaca

SEQ ID NO: 3530801 - DNA, 25 bp, Homo sapien
cgacagtgccagaatggtgtccact

SEQ ID NO: 3530802 - DNA, 25 bp, Homo sapien
gacccagtaggaaaattaggagcag

SEQ ID NO: 3530803 - DNA, 25 bp, Homo sapien
tagaatgctgcctctggcaatttcc

SEQ ID NO: 3530804 - DNA, 25 bp, Homo sapien
taatgatggtgctgaagactatggc

SEQ ID NO: 3530805 - DNA, 25 bp, Homo sapien
tcaattgagcttctggatgatgtgc

SEQ ID NO: 3530806 - DNA, 25 bp, Homo sapien
aattgagcttctggatgatgtgctt

SEQ ID NO: 3530807 - DNA, 25 bp, Homo sapien
tgtgctttgggatttgggacttaac

SEQ ID NO: 3530808 - DNA, 25 bp, Homo sapien
atgatgtgctttgggatttgggact

SEQ ID NO: 3530809 - DNA, 25 bp, Homo sapien
actgttggcccgcttcttattcacg

SEQ ID NO: 3530810 - DNA, 25 bp, Homo sapien
gcttcttattcacgcccttcttgtt

SEQ ID NO: 3530811 - DNA, 25 bp, Homo sapien
ggcctttttgaggactttgatagac

SEQ ID NO: 3530812 - DNA, 25 bp, Homo sapien
actttgatagacttggcatacagac

SEQ ID NO: 3530813 - DNA, 25 bp, Homo sapien
tctaggagtagcagatactggttct

SEQ ID NO: 3530814 - DNA, 25 bp, Homo sapien
gggccttctaggagtagcagatact

SEQ ID NO: 3530815 - DNA, 25 bp, Homo sapien
tgaactggtgaccaggtaattcttg

SEQ ID NO: 3530816 - DNA, 25 bp, Homo sapien
caggtaattcttgttggggccttct

SEQ ID NO: 3530817 - DNA, 25 bp, Homo sapien
gtagttgatgcttttctctggcagc

SEQ ID NO: 3530818 - DNA, 25 bp, Homo sapien
gcaattcctgtgatgtagttgatgc

SEQ ID NO: 3530819 - DNA, 25 bp, Homo sapien
ttccagttgcaattcctgtgatgta

SEQ ID NO: 3530820 - DNA, 25 bp, Homo sapien
tgtagttgatgcttttctctggcag

SEQ ID NO: 3530821 - DNA, 25 bp, Homo sapien
tatatcaccttagattttccggatg

SEQ ID NO: 3530822 - DNA, 25 bp, Homo sapien
tcttcatgctgcaaaccatatatca

SEQ ID NO: 3530823 - DNA, 25 bp, Homo sapien
agagaagcctcgcttctctccattc

SEQ ID NO: 3530824 - DNA, 25 bp, Homo sapien
ttttccggatgtgccacaactctgg

SEQ ID NO: 3530825 - DNA, 25 bp, Homo sapien
agtggaagcagtggaaatagaaaca

SEQ ID NO: 3530826 - DNA, 25 bp, Homo sapien
gtcaagtggaagcagtggaaataga

SEQ ID NO: 3530827 - DNA, 25 bp, Homo sapien
caagtggaagcagtggaaatagaaa

SEQ ID NO: 3530828 - DNA, 25 bp, Homo sapien
tagtcaagtggaagcagtggaaata

SEQ ID NO: 3530829 - DNA, 25 bp, Homo sapien
tgttctggttccaggaactgctgag

SEQ ID NO: 3530830 - DNA, 25 bp, Homo sapien
gaaagcgggggagcctctgcttcca

SEQ ID NO: 3530831 - DNA, 25 bp, Homo sapien
tcatttccatggtcacgattgctct

SEQ ID NO: 3530832 - DNA, 25 bp, Homo sapien
cacgattgctcttaaggaaagcggg

SEQ ID NO: 3530833 - DNA, 25 bp, Homo sapien
ggcacagtaagggaaagacatttat

SEQ ID NO: 3530834 - DNA, 25 bp, Homo sapien
tatggtaatccataccacagaataa

SEQ ID NO: 3530835 - DNA, 25 bp, Homo sapien
tctataagatttctatgtattaacc

SEQ ID NO: 3530836 - DNA, 25 bp, Homo sapien
aatttattgtagttacaaatgaatc

SEQ ID NO: 3530837 - DNA, 25 bp, Homo sapien
atagttgtcaaaagatatcatttat

SEQ ID NO: 3530838 - DNA, 25 bp, Homo sapien
ctggaacggaaagagggatttgaag

SEQ ID NO: 3530839 - DNA, 25 bp, Homo sapien
tagttgtcaaaagatatcatttatt

SEQ ID NO: 3530840 - DNA, 25 bp, Homo sapien
gtttcatgttctcttacttcatcat

SEQ ID NO: 3530841 - DNA, 25 bp, Homo sapien
tctcttacttcatcatatcctgttt

SEQ ID NO: 3530842 - DNA, 25 bp, Homo sapien
tgttctcttacttcatcatatcctg

SEQ ID NO: 3530843 - DNA, 25 bp, Homo sapien
tcatgttctcttacttcatcatatc

SEQ ID NO: 3530844 - DNA, 25 bp, Homo sapien
gaaatgatcatgatctgacttagct

SEQ ID NO: 3530845 - DNA, 25 bp, Homo sapien
ggcacaggtgaagtagtgattttgt

SEQ ID NO: 3530846 - DNA, 25 bp, Homo sapien
gattttgttggccattgttaggact

SEQ ID NO: 3530847 - DNA, 25 bp, Homo sapien
ggttttgagtagaggagaaatgatc

SEQ ID NO: 3530848 - DNA, 25 bp, Homo sapien
tgggaccaaggatcgcaaagcttct

SEQ ID NO: 3530849 - DNA, 25 bp, Homo sapien
ggtcatgtcacctaaacttcttgga

SEQ ID NO: 3530850 - DNA, 25 bp, Homo sapien
cgattatgtaagctgaaacaggcca

SEQ ID NO: 3530851 - DNA, 25 bp, Homo sapien
caactctgaatgtgaggtattagaa

SEQ ID NO: 3530852 - DNA, 25 bp, Homo sapien
cagccgccaggacaagatggcagcg

SEQ ID NO: 3530853 - DNA, 25 bp, Homo sapien
tcagccgccaggacaagatggcagc

SEQ ID NO: 3530854 - DNA, 25 bp, Homo sapien
ccgccaggacaagatggcagcggcc

SEQ ID NO: 3530855 - DNA, 25 bp, Homo sapien
ccaggacaagatggcagcggccgcg

SEQ ID NO: 3530856 - DNA, 25 bp, Homo sapien
gcggccgcccgaagaggagagagcg

SEQ ID NO: 3530857 - DNA, 25 bp, Homo sapien
gccgcccgaagaggagagagcgcgg

SEQ ID NO: 3530858 - DNA, 25 bp, Homo sapien
ctgcggccgcccgaagaggagagag

SEQ ID NO: 3530859 - DNA, 25 bp, Homo sapien
ggctgcggccgcccgaagaggagag

SEQ ID NO: 3530860 - DNA, 25 bp, Homo sapien
agcgtcgcggagcagcgggtttgca

SEQ ID NO: 3530861 - DNA, 25 bp, Homo sapien
ggagaaatgtgatccgcggctccgc

SEQ ID NO: 3530862 - DNA, 25 bp, Homo sapien
ccgatggccgcgtcccgggctttgt

SEQ ID NO: 3530863 - DNA, 25 bp, Homo sapien
gcagcttgagcaccccagccgatgg

SEQ ID NO: 3530864 - DNA, 25 bp, Homo sapien
tgccggcttctctcgttacggtggc

SEQ ID NO: 3530865 - DNA, 25 bp, Homo sapien
ggctgttgccggcttctctcgttac

SEQ ID NO: 3530866 - DNA, 25 bp, Homo sapien
tcgttacggtggctgccgcccgctt

SEQ ID NO: 3530867 - DNA, 25 bp, Homo sapien
gcttctctcgttacggtggctgccg

SEQ ID NO: 3530868 - DNA, 25 bp, Homo sapien
ggcggaaagactttggatgaaaatg

SEQ ID NO: 3530869 - DNA, 25 bp, Homo sapien
aatggtatgtggctctcggggaatc

SEQ ID NO: 3530870 - DNA, 25 bp, Homo sapien
cttcgccgcactgggagaactggcg

SEQ ID NO: 3530871 - DNA, 25 bp, Homo sapien
gagacggctgttgtaaaatggtatg

SEQ ID NO: 3530872 - DNA, 25 bp, Homo sapien
aatgtgttctctggcctctacttgg

SEQ ID NO: 3530873 - DNA, 25 bp, Homo sapien
gctttttaacatgcccaagtatctg

SEQ ID NO: 3530874 - DNA, 25 bp, Homo sapien
taattgtgcctcttcaagtctaggg

SEQ ID NO: 3530875 - DNA, 25 bp, Homo sapien
taatgagattgctcctactaagctc

SEQ ID NO: 3530876 - DNA, 25 bp, Homo sapien
ccccagcgatgtggattgaagcgca

SEQ ID NO: 3530877 - DNA, 25 bp, Homo sapien
taccactggagaaggtgactatcag

SEQ ID NO: 3530878 - DNA, 25 bp, Homo sapien
ttttcttggtcgaggcacgtttggc

SEQ ID NO: 3530879 - DNA, 25 bp, Homo sapien
tacaaaggtcatagcagctcaggca

SEQ ID NO: 3530880 - DNA, 25 bp, Homo sapien
gaaagaattgcccatttatgtcact

SEQ ID NO: 3530881 - DNA, 25 bp, Homo sapien
aatgttggtaaatgcctgtagtctt

SEQ ID NO: 3530882 - DNA, 25 bp, Homo sapien
taacagcctgatatacctttagtat

SEQ ID NO: 3530883 - DNA, 25 bp, Homo sapien
gctttaggccacgagtttaagatca

SEQ ID NO: 3530884 - DNA, 25 bp, Homo sapien
tctgaagcttcctcccgatttggca

SEQ ID NO: 3530885 - DNA, 25 bp, Homo sapien
cccgtagaaagtgaaaggtggctga

SEQ ID NO: 3530886 - DNA, 25 bp, Homo sapien
cctgagacttgaaacgaacccgtag

SEQ ID NO: 3530887 - DNA, 25 bp, Homo sapien
cataaaatgtgccaggacgagacgc

SEQ ID NO: 3530888 - DNA, 25 bp, Homo sapien
tcctgagcactggagtgtgttcttc

SEQ ID NO: 3530889 - DNA, 25 bp, Homo sapien
agcactggagtgtgttcttctcagc

SEQ ID NO: 3530890 - DNA, 25 bp, Homo sapien
tctcagcatcctggtgagctgacat

SEQ ID NO: 3530891 - DNA, 25 bp, Homo sapien
cttctcagcatcctggtgagctgac

SEQ ID NO: 3530892 - DNA, 25 bp, Homo sapien
ttctaggaagtgtgttgagttcccc

SEQ ID NO: 3530893 - DNA, 25 bp, Homo sapien
agctactttttgcatagacctcaag

SEQ ID NO: 3530894 - DNA, 25 bp, Homo sapien
tccgtcagggacagaaattacatgc

SEQ ID NO: 3530895 - DNA, 25 bp, Homo sapien
tataacgattgccacttcagatagc

SEQ ID NO: 3530896 - DNA, 25 bp, Homo sapien
cacaagtttcagtgtttttagtaat

SEQ ID NO: 3530897 - DNA, 25 bp, Homo sapien
gtgtttttagtaattaattctatgc

SEQ ID NO: 3530898 - DNA, 25 bp, Homo sapien
taattctatgcattttatacaaata

SEQ ID NO: 3530899 - DNA, 25 bp, Homo sapien
aattaattctatgcattttatacaa

SEQ ID NO: 3530900 - DNA, 25 bp, Homo sapien
taatgtttgataaaggtatatccca

SEQ ID NO: 3530901 - DNA, 25 bp, Homo sapien
ttcttaatttagcatattgacaaag

SEQ ID NO: 3530902 - DNA, 25 bp, Homo sapien
cccagttaactacactgctctttaa

SEQ ID NO: 3530903 - DNA, 25 bp, Homo sapien
ctctttaattgcaatcatgggcatt

SEQ ID NO: 3530904 - DNA, 25 bp, Homo sapien
attcatccattcgtttctctgctgt

SEQ ID NO: 3530905 - DNA, 25 bp, Homo sapien
catccattcgtttctctgctgtcag

SEQ ID NO: 3530906 - DNA, 25 bp, Homo sapien
gactgactggtttatcaaggaatca

SEQ ID NO: 3530907 - DNA, 25 bp, Homo sapien
ctggtttatcaaggaatcaaaggaa

SEQ ID NO: 3530908 - DNA, 25 bp, Homo sapien
aaataaaacttagaggatttggcag

SEQ ID NO: 3530909 - DNA, 25 bp, Homo sapien
ctgcgatgtagtacgaaaacgtgta

SEQ ID NO: 3530910 - DNA, 25 bp, Homo sapien
tagtacgaaaacgtgtagatcattt

SEQ ID NO: 3530911 - DNA, 25 bp, Homo sapien
aaacgtgtagatcattttatctcca

SEQ ID NO: 3530912 - DNA, 25 bp, Homo sapien
tgtgcttctctcaccagatacctta

SEQ ID NO: 3530913 - DNA, 25 bp, Homo sapien
tgaatctccctaagttccctctgtg

SEQ ID NO: 3530914 - DNA, 25 bp, Homo sapien
taaggtacaaactccatgccatggc

SEQ ID NO: 3530915 - DNA, 25 bp, Homo sapien
gctctcaacatctgcccgtaacttg

SEQ ID NO: 3530916 - DNA, 25 bp, Homo sapien
gaagtagtgaacaaacagcacaaag

SEQ ID NO: 3530917 - DNA, 25 bp, Homo sapien
gaagagctttcctgccgcttgggca

SEQ ID NO: 3530918 - DNA, 25 bp, Homo sapien
cgcttgggcacgttgaccatgaccc

SEQ ID NO: 3530919 - DNA, 25 bp, Homo sapien
cagctgtccgttgaaccctcggaga

SEQ ID NO: 3530920 - DNA, 25 bp, Homo sapien
gccccctagttctgcaggagccggc

SEQ ID NO: 3530921 - DNA, 25 bp, Homo sapien
aatcgcgccggcgcgcggcgacagg

SEQ ID NO: 3530922 - DNA, 25 bp, Homo sapien
tcgccgccccaatcgcgccggcgcg

SEQ ID NO: 3530923 - DNA, 25 bp, Homo sapien
cagcctcgccccctagttctgcagg

SEQ ID NO: 3530924 - DNA, 25 bp, Homo sapien
cgcacccgccgcggctccatgcggg

SEQ ID NO: 3530925 - DNA, 25 bp, Homo sapien
ggcccctgcgcgggtgaagccgcgg

SEQ ID NO: 3530926 - DNA, 25 bp, Homo sapien
cggctccatgcgggcccggcccctg

SEQ ID NO: 3530927 - DNA, 25 bp, Homo sapien
cccggcccctgcgcgggtgaagccg

SEQ ID NO: 3530928 - DNA, 25 bp, Homo sapien
cgacccgggtaagcgctcggcggcg

SEQ ID NO: 3530929 - DNA, 25 bp, Homo sapien
cgtgggcttggtcgggctgcctggg

SEQ ID NO: 3530930 - DNA, 25 bp, Homo sapien
gccgcgcgctgcacgggtgtgaggg

SEQ ID NO: 3530931 - DNA, 25 bp, Homo sapien
gccggcgcgtcccacgatgcgcccc

SEQ ID NO: 3530932 - DNA, 25 bp, Homo sapien
cacattgtttgggtttagccctggt

SEQ ID NO: 3530933 - DNA, 25 bp, Homo sapien
tgaacctccctgactttccttggct

SEQ ID NO: 3530934 - DNA, 25 bp, Homo sapien
gccagagcctgatttagaggacttc

SEQ ID NO: 3530935 - DNA, 25 bp, Homo sapien
tggctcctctttcagaccgccagag

SEQ ID NO: 3530936 - DNA, 25 bp, Homo sapien
ttggttttctggcacggaaaggtga

SEQ ID NO: 3530937 - DNA, 25 bp, Homo sapien
agacgtcagacctaattttcttgaa

SEQ ID NO: 3530938 - DNA, 25 bp, Homo sapien
acgtcagacctaattttcttgaatg

SEQ ID NO: 3530939 - DNA, 25 bp, Homo sapien
taagacgtcagacctaattttcttg

SEQ ID NO: 3530940 - DNA, 25 bp, Homo sapien
aagtcaccttgacatcttttcgccg

SEQ ID NO: 3530941 - DNA, 25 bp, Homo sapien
ttcaagtggattgtagtctgctgtc

SEQ ID NO: 3530942 - DNA, 25 bp, Homo sapien
ttttcgccgtactcagcacagaggg

SEQ ID NO: 3530943 - DNA, 25 bp, Homo sapien
cacagagggcagaaggtccaatagt

SEQ ID NO: 3530944 - DNA, 25 bp, Homo sapien
cacctgcttttgcttcccaaagtgc

SEQ ID NO: 3530945 - DNA, 25 bp, Homo sapien
ctgcttttgcttcccaaagtgccag

SEQ ID NO: 3530946 - DNA, 25 bp, Homo sapien
atccacctgcttttgcttcccaaag

SEQ ID NO: 3530947 - DNA, 25 bp, Homo sapien
acctgcttttgcttcccaaagtgcc

SEQ ID NO: 3530948 - DNA, 25 bp, Homo sapien
gatggccatgtttgggtcagattct

SEQ ID NO: 3530949 - DNA, 25 bp, Homo sapien
gctagaaaggagctgactccgctca

SEQ ID NO: 3530950 - DNA, 25 bp, Homo sapien
ggtcagattcttgtagcactccgct

SEQ ID NO: 3530951 - DNA, 25 bp, Homo sapien
ctaacggtgttgtgaagccagccct

SEQ ID NO: 3530952 - DNA, 25 bp, Homo sapien
caaatcatctttggtccgaatccta

SEQ ID NO: 3530953 - DNA, 25 bp, Homo sapien
cccgggctttccattgggtgcctct

SEQ ID NO: 3530954 - DNA, 25 bp, Homo sapien
acgtgcacgggccatatggcaacac

SEQ ID NO: 3530955 - DNA, 25 bp, Homo sapien
ggccatatggcaacaccagtgtgca

SEQ ID NO: 3530956 - DNA, 25 bp, Homo sapien
gatgcagttatactttgctgctgct

SEQ ID NO: 3530957 - DNA, 25 bp, Homo sapien
caggatgcagttatactttgctgct

SEQ ID NO: 3530958 - DNA, 25 bp, Homo sapien
ggatgcagttatactttgctgctgc

SEQ ID NO: 3530959 - DNA, 25 bp, Homo sapien
aggatgcagttatactttgctgctg

SEQ ID NO: 3530960 - DNA, 25 bp, Homo sapien
gaacaacacaatagtcagaggttag

SEQ ID NO: 3530961 - DNA, 25 bp, Homo sapien
cagaggttagaaacggtgtgaatga

SEQ ID NO: 3530962 - DNA, 25 bp, Homo sapien
cacaatagtcagaggttagaaacgg

SEQ ID NO: 3530963 - DNA, 25 bp, Homo sapien
tagtcagaggttagaaacggtgtga

SEQ ID NO: 3530964 - DNA, 25 bp, Homo sapien
aaggaggtagcgtttcttccaagat

SEQ ID NO: 3530965 - DNA, 25 bp, Homo sapien
taacagatgacatttgctatcctga

SEQ ID NO: 3530966 - DNA, 25 bp, Homo sapien
gacatttgctatcctgaatatttct

SEQ ID NO: 3530967 - DNA, 25 bp, Homo sapien
tgttctctaaaggaccttttctaga

SEQ ID NO: 3530968 - DNA, 25 bp, Homo sapien
tattaagagaccaagttggagactc

SEQ ID NO: 3530969 - DNA, 25 bp, Homo sapien
tagccgctcacaggatgtcttgtac

SEQ ID NO: 3530970 - DNA, 25 bp, Homo sapien
cgatggatgtaaagcacacaggaca

SEQ ID NO: 3530971 - DNA, 25 bp, Homo sapien
gagggctcttcttgtggttcagcag

SEQ ID NO: 3530972 - DNA, 25 bp, Homo sapien
tagcgtcggatcagtgaaacattct

SEQ ID NO: 3530973 - DNA, 25 bp, Homo sapien
aatgtagcgtcggatcagtgaaaca

SEQ ID NO: 3530974 - DNA, 25 bp, Homo sapien
ctgaaatgtagcgtcggatcagtga

SEQ ID NO: 3530975 - DNA, 25 bp, Homo sapien
gcgtcggatcagtgaaacattctca

SEQ ID NO: 3530976 - DNA, 25 bp, Homo sapien
tttagactgtcttatggagggtgag

SEQ ID NO: 3530977 - DNA, 25 bp, Homo sapien
cagaaaaagaagattagagcaggga

SEQ ID NO: 3530978 - DNA, 25 bp, Homo sapien
gagggtgagaacacctgaatctgtc

SEQ ID NO: 3530979 - DNA, 25 bp, Homo sapien
gtgtaagaattggaatctccaggac

SEQ ID NO: 3530980 - DNA, 25 bp, Homo sapien
gcagtggaaggcgtgaactcaaaca

SEQ ID NO: 3530981 - DNA, 25 bp, Homo sapien
aaggcgtgaactcaaacactgctcc

SEQ ID NO: 3530982 - DNA, 25 bp, Homo sapien
tcctgttgcagtggaaggcgtgaac

SEQ ID NO: 3530983 - DNA, 25 bp, Homo sapien
ccaaggtcctgttgcagtggaaggc

SEQ ID NO: 3530984 - DNA, 25 bp, Homo sapien
tcttggtctgtactgcgcaggtgga

SEQ ID NO: 3530985 - DNA, 25 bp, Homo sapien
ttttgcttatcagttcgtccactga

SEQ ID NO: 3530986 - DNA, 25 bp, Homo sapien
aattagagccatacaatatgtgaac

SEQ ID NO: 3530987 - DNA, 25 bp, Homo sapien
tatcagttcgtccactgatagacat

SEQ ID NO: 3530988 - DNA, 25 bp, Homo sapien
aatgtttcattgtatgtatctagcc

SEQ ID NO: 3530989 - DNA, 25 bp, Homo sapien
agtggtcatgctggccagcaatccc

SEQ ID NO: 3530990 - DNA, 25 bp, Homo sapien
atagcaaaacttgttagaacccagg

SEQ ID NO: 3530991 - DNA, 25 bp, Homo sapien
gccctgaatactgggccagtggtca

SEQ ID NO: 3530992 - DNA, 25 bp, Homo sapien
ggaactgcctcgaaagaatctggca

SEQ ID NO: 3530993 - DNA, 25 bp, Homo sapien
tctcagttggatgagggaccaaggg

SEQ ID NO: 3530994 - DNA, 25 bp, Homo sapien
gatgagggcaccattctttgatatc

SEQ ID NO: 3530995 - DNA, 25 bp, Homo sapien
atcccaaacctctgttgtgggggtg

SEQ ID NO: 3530996 - DNA, 25 bp, Homo sapien
gtgaggaagcgaaaccaagaaggac

SEQ ID NO: 3530997 - DNA, 25 bp, Homo sapien
cagtggaattccagttaggtttggt

SEQ ID NO: 3530998 - DNA, 25 bp, Homo sapien
aaaatactgtatctgaatgatttcc

SEQ ID NO: 3530999 - DNA, 25 bp, Homo sapien
tgattatttgagttaactccacagt

SEQ ID NO: 3531000 - DNA, 25 bp, Homo sapien
ggtttggttccattagaatcataga

SEQ ID NO: 3531001 - DNA, 25 bp, Homo sapien
tcctgaggtccccatagtggaagct

SEQ ID NO: 3531002 - DNA, 25 bp, Homo sapien
cagatgcacagttaccggctgggta

SEQ ID NO: 3531003 - DNA, 25 bp, Homo sapien
tagtttgataccacgaccttcaggg

SEQ ID NO: 3531004 - DNA, 25 bp, Homo sapien
tcaaggatcacggatgagaatctgg

SEQ ID NO: 3531005 - DNA, 25 bp, Homo sapien
gtggtgggctcaaggtagcagagct

SEQ ID NO: 3531006 - DNA, 25 bp, Homo sapien
ttttgccctgtgcagcctcaacaac

SEQ ID NO: 3531007 - DNA, 25 bp, Homo sapien
gataggagaagttctggcatctgtt

SEQ ID NO: 3531008 - DNA, 25 bp, Homo sapien
ctgttgaatggttttgccctgtgca

SEQ ID NO: 3531009 - DNA, 25 bp, Homo sapien
gcctgggcagtatatagtagattcc

SEQ ID NO: 3531010 - DNA, 25 bp, Homo sapien
tatcttcaccgctttctctgcctgg

SEQ ID NO: 3531011 - DNA, 25 bp, Homo sapien
tagaagttccacataggagaaggag

SEQ ID NO: 3531012 - DNA, 25 bp, Homo sapien
taaggcccttggtgaatgactggtt

SEQ ID NO: 3531013 - DNA, 25 bp, Homo sapien
gtaatggtgacaccctgcagtgagc

SEQ ID NO: 3531014 - DNA, 25 bp, Homo sapien
gcaagtgtaccatcctggaagtctg

SEQ ID NO: 3531015 - DNA, 25 bp, Homo sapien
ctgatagaggatggctttattttga

SEQ ID NO: 3531016 - DNA, 25 bp, Homo sapien
aagtctggcttgctcgtttcatacc

SEQ ID NO: 3531017 - DNA, 25 bp, Homo sapien
tccagcttccaatgtgtgaccagga

SEQ ID NO: 3531018 - DNA, 25 bp, Homo sapien
ctttctctggacttggtgctccagc

SEQ ID NO: 3531019 - DNA, 25 bp, Homo sapien
cagtttgagaaacagggctttctct

SEQ ID NO: 3531020 - DNA, 25 bp, Homo sapien
ccaggaacatgagtaggggctgctt

SEQ ID NO: 3531021 - DNA, 25 bp, Homo sapien
gaatatggtgttgagaactctgggt

SEQ ID NO: 3531022 - DNA, 25 bp, Homo sapien
aatatggtgttgagaactctgggtg

SEQ ID NO: 3531023 - DNA, 25 bp, Homo sapien
cagggaatatggtgttgagaactct

SEQ ID NO: 3531024 - DNA, 25 bp, Homo sapien
tcttcagggaatatggtgttgagaa

SEQ ID NO: 3531025 - DNA, 25 bp, Homo sapien
ctgctgtactaaaataggtggagac

SEQ ID NO: 3531026 - DNA, 25 bp, Homo sapien
gcacctgctgtactaaaataggtgg

SEQ ID NO: 3531027 - DNA, 25 bp, Homo sapien
agagcacctgctgtactaaaatagg

SEQ ID NO: 3531028 - DNA, 25 bp, Homo sapien
acctgctgtactaaaataggtggag

SEQ ID NO: 3531029 - DNA, 25 bp, Homo sapien
gatgacatggtatcgattgcaccac

SEQ ID NO: 3531030 - DNA, 25 bp, Homo sapien
gacatggtatcgattgcaccaccac

SEQ ID NO: 3531031 - DNA, 25 bp, Homo sapien
tgatgacatggtatcgattgcacca

SEQ ID NO: 3531032 - DNA, 25 bp, Homo sapien
atggtatcgattgcaccaccacctg

SEQ ID NO: 3531033 - DNA, 25 bp, Homo sapien
tgaaatgcccagagcgcagctcttg

SEQ ID NO: 3531034 - DNA, 25 bp, Homo sapien
tgctggtctagtgcacatcttggct

SEQ ID NO: 3531035 - DNA, 25 bp, Homo sapien
agcagctgctattcatacagtgccg

SEQ ID NO: 3531036 - DNA, 25 bp, Homo sapien
tgctattcatacagtgccggcatct

SEQ ID NO: 3531037 - DNA, 25 bp, Homo sapien
ttccaactctatccccttgtcagca

SEQ ID NO: 3531038 - DNA, 25 bp, Homo sapien
ctctatccccttgtcagcatttcca

SEQ ID NO: 3531039 - DNA, 25 bp, Homo sapien
atggcttccaactctatccccttgt

SEQ ID NO: 3531040 - DNA, 25 bp, Homo sapien
actctatccccttgtcagcatttcc

SEQ ID NO: 3531041 - DNA, 25 bp, Homo sapien
gcttctatcagtgcagtcaacagaa

SEQ ID NO: 3531042 - DNA, 25 bp, Homo sapien
ggtcccaggtgccaaacttcagcac

SEQ ID NO: 3531043 - DNA, 25 bp, Homo sapien
aaagccccaagaggaatcacgttag

SEQ ID NO: 3531044 - DNA, 25 bp, Homo sapien
cctgattccacaaaagattaccaac

SEQ ID NO: 3531045 - DNA, 25 bp, Homo sapien
tgaccttctgggaacggaagcctga

SEQ ID NO: 3531046 - DNA, 25 bp, Homo sapien
gaagcctgacgggtcttggtgattt

SEQ ID NO: 3531047 - DNA, 25 bp, Homo sapien
tcagcatagctgtggctcttagtcc

SEQ ID NO: 3531048 - DNA, 25 bp, Homo sapien
gatttagagccgtgctcagtaatgt

SEQ ID NO: 3531049 - DNA, 25 bp, Homo sapien
gagcccgccccagatctggagatgg

SEQ ID NO: 3531050 - DNA, 25 bp, Homo sapien
ccagtcttctcagaccactctggga

SEQ ID NO: 3531051 - DNA, 25 bp, Homo sapien
gactccttcccacgtggtgcagaga

SEQ ID NO: 3531052 - DNA, 25 bp, Homo sapien
tctgggagagtggagcccgccccag

SEQ ID NO: 3531053 - DNA, 25 bp, Homo sapien
tgaccttgactaagccagcccttgc

SEQ ID NO: 3531054 - DNA, 25 bp, Homo sapien
tgtgaccttgactaagccagccctt

SEQ ID NO: 3531055 - DNA, 25 bp, Homo sapien
gtgaccttgactaagccagcccttg

SEQ ID NO: 3531056 - DNA, 25 bp, Homo sapien
tgtcttgatggcaaactctcaccat

SEQ ID NO: 3531057 - DNA, 25 bp, Homo sapien
acagaactagggctcacgcggactt

SEQ ID NO: 3531058 - DNA, 25 bp, Homo sapien
tacagatgaatgtcacccggactcc

SEQ ID NO: 3531059 - DNA, 25 bp, Homo sapien
ttcatgagcatccaacacctgacgg

SEQ ID NO: 3531060 - DNA, 25 bp, Homo sapien
tttaccaaggaagcggacatagcgc

SEQ ID NO: 3531061 - DNA, 25 bp, Homo sapien
atcaataatatctggcttgcagcag

SEQ ID NO: 3531062 - DNA, 25 bp, Homo sapien
cccatcattacagcaccaaggacga

SEQ ID NO: 3531063 - DNA, 25 bp, Homo sapien
ggacacacaattagcaccacaagtt

SEQ ID NO: 3531064 - DNA, 25 bp, Homo sapien
tgctgtggaccattctgggttgcca

SEQ ID NO: 3531065 - DNA, 25 bp, Homo sapien
aaaccatgagatacctattcacatc

SEQ ID NO: 3531066 - DNA, 25 bp, Homo sapien
tagagaatatacctacaactcaata

SEQ ID NO: 3531067 - DNA, 25 bp, Homo sapien
tatctggtaagtagttaatattcag

SEQ ID NO: 3531068 - DNA, 25 bp, Homo sapien
ttaagcacatgacaagatgctctgc

SEQ ID NO: 3531069 - DNA, 25 bp, Homo sapien
gggaggcagtcagtctttatgctca

SEQ ID NO: 3531070 - DNA, 25 bp, Homo sapien
cagtctttatgctcagccggaccca

SEQ ID NO: 3531071 - DNA, 25 bp, Homo sapien
cagtcagtctttatgctcagccgga

SEQ ID NO: 3531072 - DNA, 25 bp, Homo sapien
tctttatgctcagccggacccacgg

SEQ ID NO: 3531073 - DNA, 25 bp, Homo sapien
gcaaaacggacttccgagcagccag

SEQ ID NO: 3531074 - DNA, 25 bp, Homo sapien
atgggctgagcacggcaaaacggac

SEQ ID NO: 3531075 - DNA, 25 bp, Homo sapien
gctgcttaacccacgctgtagtgtg

SEQ ID NO: 3531076 - DNA, 25 bp, Homo sapien
tttctgtatcgtttcctctttgtcc

SEQ ID NO: 3531077 - DNA, 25 bp, Homo sapien
cagcaggtcgcccagtgagaatggc

SEQ ID NO: 3531078 - DNA, 25 bp, Homo sapien
catcagcaacgaatcagggaagccc

SEQ ID NO: 3531079 - DNA, 25 bp, Homo sapien
gacgctcaccccagaatgtaatggc

SEQ ID NO: 3531080 - DNA, 25 bp, Homo sapien
gaatgtaatggcacagcagaaagtg

SEQ ID NO: 3531081 - DNA, 25 bp, Homo sapien
tctgaccctcagtcgttctttctat

SEQ ID NO: 3531082 - DNA, 25 bp, Homo sapien
cactgggctctgaccctcagtcgtt

SEQ ID NO: 3531083 - DNA, 25 bp, Homo sapien
acagccactgggctctgaccctcag

SEQ ID NO: 3531084 - DNA, 25 bp, Homo sapien
gggctctgaccctcagtcgttcttt

SEQ ID NO: 3531085 - DNA, 25 bp, Homo sapien
agttccatgcactggaggtagttgc

SEQ ID NO: 3531086 - DNA, 25 bp, Homo sapien
gttccatgcactggaggtagttgcc

SEQ ID NO: 3531087 - DNA, 25 bp, Homo sapien
tgaaggaatgttcctggaaagattc

SEQ ID NO: 3531088 - DNA, 25 bp, Homo sapien
aatcatcggcgggttgaaggaatgt

SEQ ID NO: 3531089 - DNA, 25 bp, Homo sapien
gattcctagaacaagaccacagggc

SEQ ID NO: 3531090 - DNA, 25 bp, Homo sapien
gaaagattcctagaacaagaccaca

SEQ ID NO: 3531091 - DNA, 25 bp, Homo sapien
gctgcgtaatggagtggtcccaatt

SEQ ID NO: 3531092 - DNA, 25 bp, Homo sapien
tacagctttggcgtaacagtcaggg

SEQ ID NO: 3531093 - DNA, 25 bp, Homo sapien
taagggtacaaccagcttgttgctc

SEQ ID NO: 3531094 - DNA, 25 bp, Homo sapien
gaatgccctggtgctgcgtaatgga

SEQ ID NO: 3531095 - DNA, 25 bp, Homo sapien
tgtgtcaaacagaagaggtgactcc

SEQ ID NO: 3531096 - DNA, 25 bp, Homo sapien
tagctctgagccaaatacacattag

SEQ ID NO: 3531097 - DNA, 25 bp, Homo sapien
gatgcggtgtctctatttgttgggc

SEQ ID NO: 3531098 - DNA, 25 bp, Homo sapien
aatgggtcacgtttctagctctgag

SEQ ID NO: 3531099 - DNA, 25 bp, Homo sapien
tgttgcccatagaggctggcctaga

SEQ ID NO: 3531100 - DNA, 25 bp, Homo sapien
ttgcccatagaggctggcctagaac

SEQ ID NO: 3531101 - DNA, 25 bp, Homo sapien
gttgcccatagaggctggcctagaa

SEQ ID NO: 3531102 - DNA, 25 bp, Homo sapien
atgttgcccatagaggctggcctag

SEQ ID NO: 3531103 - DNA, 25 bp, Homo sapien
tcctctccgcagcaacttgttcaga

SEQ ID NO: 3531104 - DNA, 25 bp, Homo sapien
tctccgcagcaacttgttcagacat

SEQ ID NO: 3531105 - DNA, 25 bp, Homo sapien
ggctcctctccgcagcaacttgttc

SEQ ID NO: 3531106 - DNA, 25 bp, Homo sapien
tccgcagcaacttgttcagacatct

SEQ ID NO: 3531107 - DNA, 25 bp, Homo sapien
cttccagagctgtgggtagaggaca

SEQ ID NO: 3531108 - DNA, 25 bp, Homo sapien
agaggacatcgcctcacggcactga

SEQ ID NO: 3531109 - DNA, 25 bp, Homo sapien
tgaccatgatgttgcaagttgccct

SEQ ID NO: 3531110 - DNA, 25 bp, Homo sapien
aagcgtatggagttagccagttccc

SEQ ID NO: 3531111 - DNA, 25 bp, Homo sapien
ttccctcgccaagtgtggcagcctg

SEQ ID NO: 3531112 - DNA, 25 bp, Homo sapien
ctctggttccctcgccaagtgtggc

SEQ ID NO: 3531113 - DNA, 25 bp, Homo sapien
tggttccctcgccaagtgtggcagc

SEQ ID NO: 3531114 - DNA, 25 bp, Homo sapien
actctggttccctcgccaagtgtgg

SEQ ID NO: 3531115 - DNA, 25 bp, Homo sapien
ccattgtcctcaacgagtttctttg

SEQ ID NO: 3531116 - DNA, 25 bp, Homo sapien
tcacccatgacccatctagcttcag

SEQ ID NO: 3531117 - DNA, 25 bp, Homo sapien
atctgttggagaatgaggtcctgtc

SEQ ID NO: 3531118 - DNA, 25 bp, Homo sapien
ggagaatgaggtcctgtcctgcttt

SEQ ID NO: 3531119 - DNA, 25 bp, Homo sapien
tccaatggcaaactgccctttctgg

SEQ ID NO: 3531120 - DNA, 25 bp, Homo sapien
gggaggttcaaactgtcaatgcaca

SEQ ID NO: 3531121 - DNA, 25 bp, Homo sapien
tcatggaaccttcaaacaagtctct

SEQ ID NO: 3531122 - DNA, 25 bp, Homo sapien
caagtctcttgttcggatgataata

SEQ ID NO: 3531123 - DNA, 25 bp, Homo sapien
ggcctgcaggcttgtcagtaacaca

SEQ ID NO: 3531124 - DNA, 25 bp, Homo sapien
catgtggcctgcaggcttgtcagta

SEQ ID NO: 3531125 - DNA, 25 bp, Homo sapien
gcctgcaggcttgtcagtaacacat

SEQ ID NO: 3531126 - DNA, 25 bp, Homo sapien
gtggcctgcaggcttgtcagtaaca

SEQ ID NO: 3531127 - DNA, 25 bp, Homo sapien
gagagtgcctccaccctcaatattt

SEQ ID NO: 3531128 - DNA, 25 bp, Homo sapien
tacttggcctgtcggcacagtctgt

SEQ ID NO: 3531129 - DNA, 25 bp, Homo sapien
tccaggcttatatgggcccctgcta

SEQ ID NO: 3531130 - DNA, 25 bp, Homo sapien
tccccatcttcttaagtgagagtgc

SEQ ID NO: 3531131 - DNA, 25 bp, Homo sapien
tggtagcaacaagaacagcggtaaa

SEQ ID NO: 3531132 - DNA, 25 bp, Homo sapien
caagctctggtaggcagctcctcag

SEQ ID NO: 3531133 - DNA, 25 bp, Homo sapien
cactgtatgtgaagtacatgctggt

SEQ ID NO: 3531134 - DNA, 25 bp, Homo sapien
tctaagcactaacacctaaggaggt

SEQ ID NO: 3531135 - DNA, 25 bp, Homo sapien
tgcttggtcttcagtccttgtaact

SEQ ID NO: 3531136 - DNA, 25 bp, Homo sapien
tttcgtcttttagcgccttcaggaa

SEQ ID NO: 3531137 - DNA, 25 bp, Homo sapien
acttttcgtcttttagcgccttcag

SEQ ID NO: 3531138 - DNA, 25 bp, Homo sapien
tcttcagtccttgtaacttttcgtc

SEQ ID NO: 3531139 - DNA, 25 bp, Homo sapien
cagctcgcagagctcctccgggtgg

SEQ ID NO: 3531140 - DNA, 25 bp, Homo sapien
agctctgggagtcgaagccgtcccc

SEQ ID NO: 3531141 - DNA, 25 bp, Homo sapien
gcaactccagctccttaatccggat

SEQ ID NO: 3531142 - DNA, 25 bp, Homo sapien
agtcgaagccgtccccagtgatggt

SEQ ID NO: 3531143 - DNA, 25 bp, Homo sapien
aggggcgaggcaaccacctcaggcc

SEQ ID NO: 3531144 - DNA, 25 bp, Homo sapien
gcggtgagtagaagaagcgcagagg

SEQ ID NO: 3531145 - DNA, 25 bp, Homo sapien
gccccggcggcggtgagtagaagaa

SEQ ID NO: 3531146 - DNA, 25 bp, Homo sapien
ggaccaggggcgaggcaaccacctc

SEQ ID NO: 3531147 - DNA, 25 bp, Homo sapien
agggccaggggcgctcgctggaggg

SEQ ID NO: 3531148 - DNA, 25 bp, Homo sapien
ccgcccactggcgccccgcccgcct

SEQ ID NO: 3531149 - DNA, 25 bp, Homo sapien
tccagatgttgaagtcgctgagcgg

SEQ ID NO: 3531150 - DNA, 25 bp, Homo sapien
agcggggacgaggagatgccgcggt

SEQ ID NO: 3531151 - DNA, 25 bp, Homo sapien
ggggacgaggagatgccgcggtcgt

SEQ ID NO: 3531152 - DNA, 25 bp, Homo sapien
cttcttccagatgttgaagtcgctg

SEQ ID NO: 3531153 - DNA, 25 bp, Homo sapien
cggagccgaccgctggctcatggtg

SEQ ID NO: 3531154 - DNA, 25 bp, Homo sapien
aatagaggggcggagccgaccgctg

SEQ ID NO: 3531155 - DNA, 25 bp, Homo sapien
gagccgaccgctggctcatggtggg

SEQ ID NO: 3531156 - DNA, 25 bp, Homo sapien
aggggcggagccgaccgctggctca

SEQ ID NO: 3531157 - DNA, 25 bp, Homo sapien
ttgaatgagggtctgcgtgggagga

SEQ ID NO: 3531158 - DNA, 25 bp, Homo sapien
tctgcgtgggaggaaccccgcgccg

SEQ ID NO: 3531159 - DNA, 25 bp, Homo sapien
ctgcgtgggaggaaccccgcgccgg

SEQ ID NO: 3531160 - DNA, 25 bp, Homo sapien
cgtttgaatgagggtctgcgtggga

SEQ ID NO: 3531161 - DNA, 25 bp, Homo sapien
cgcgcccacagcaaagaagtctgag

SEQ ID NO: 3531162 - DNA, 25 bp, Homo sapien
ccgcgcccacagcaaagaagtctga

SEQ ID NO: 3531163 - DNA, 25 bp, Homo sapien
ctgcgtaataaactttgtcttctgt

SEQ ID NO: 3531164 - DNA, 25 bp, Homo sapien
aaactttgtcttctgttaatctgtc

SEQ ID NO: 3531165 - DNA, 25 bp, Homo sapien
gtttaattctcaggccccaggctct

SEQ ID NO: 3531166 - DNA, 25 bp, Homo sapien
ttgtcagtttaattctcaggcccca

SEQ ID NO: 3531167 - DNA, 25 bp, Homo sapien
tggaaccaactgagagacacaagtc

SEQ ID NO: 3531168 - DNA, 25 bp, Homo sapien
gaacacccataaactgctgtcagga

SEQ ID NO: 3531169 - DNA, 25 bp, Homo sapien
gggctccaaagcactatgtcaccta

SEQ ID NO: 3531170 - DNA, 25 bp, Homo sapien
tgccccattaagtaccatcctgttg

SEQ ID NO: 3531171 - DNA, 25 bp, Homo sapien
tataagcagtgccagggacaactag

SEQ ID NO: 3531172 - DNA, 25 bp, Homo sapien
taaggaccaagctattctgggaagc

SEQ ID NO: 3531173 - DNA, 25 bp, Homo sapien
gaagctgcttctacgacctgctgag

SEQ ID NO: 3531174 - DNA, 25 bp, Homo sapien
gagggtcgccgattagcatcagagc

SEQ ID NO: 3531175 - DNA, 25 bp, Homo sapien
tgagacagctcatgtaatggaaagc

SEQ ID NO: 3531176 - DNA, 25 bp, Homo sapien
tattggagggctttgagacagctca

SEQ ID NO: 3531177 - DNA, 25 bp, Homo sapien
tgagaatttattggagggctttgag

SEQ ID NO: 3531178 - DNA, 25 bp, Homo sapien
gagggctttgagacagctcatgtaa

SEQ ID NO: 3531179 - DNA, 25 bp, Homo sapien
tctgtaaacctatagccagcttggg

SEQ ID NO: 3531180 - DNA, 25 bp, Homo sapien
gaagtagacttgctgacctgaggag

SEQ ID NO: 3531181 - DNA, 25 bp, Homo sapien
cagagaccagggcaacttcagggat

SEQ ID NO: 3531182 - DNA, 25 bp, Homo sapien
gaaaccgatcacagaaaggcagctc

SEQ ID NO: 3531183 - DNA, 25 bp, Homo sapien
ttactgtcatagtgaagagcttgcc

SEQ ID NO: 3531184 - DNA, 25 bp, Homo sapien
cctttactgtcatagtgaagagctt

SEQ ID NO: 3531185 - DNA, 25 bp, Homo sapien
agcctttactgtcatagtgaagagc

SEQ ID NO: 3531186 - DNA, 25 bp, Homo sapien
tttactgtcatagtgaagagcttgc

SEQ ID NO: 3531187 - DNA, 25 bp, Homo sapien
tcaaactgtaaccacaaagggtgtc

SEQ ID NO: 3531188 - DNA, 25 bp, Homo sapien
tatgttcagggaacggcatcaacag

SEQ ID NO: 3531189 - DNA, 25 bp, Homo sapien
ctgtaactgtgtgtggcaaagccaa

SEQ ID NO: 3531190 - DNA, 25 bp, Homo sapien
ttgatttggacagcttaacagcccc

SEQ ID NO: 3531191 - DNA, 25 bp, Homo sapien
ggatcttgttgtccctgactgacac

SEQ ID NO: 3531192 - DNA, 25 bp, Homo sapien
tcatgccctgctatctggaacactt

SEQ ID NO: 3531193 - DNA, 25 bp, Homo sapien
gcatgcctccatggcaacacgggat

SEQ ID NO: 3531194 - DNA, 25 bp, Homo sapien
tgacacccacatatggaacatttgg

SEQ ID NO: 3531195 - DNA, 25 bp, Homo sapien
gagaacccactcaagctgtcactgc

SEQ ID NO: 3531196 - DNA, 25 bp, Homo sapien
ctggtcttcccaagagcaaaggagg

SEQ ID NO: 3531197 - DNA, 25 bp, Homo sapien
tatgaaagcgttccatgtgagagag

SEQ ID NO: 3531198 - DNA, 25 bp, Homo sapien
caaaggaggaagcatgcaatctagt

SEQ ID NO: 3531199 - DNA, 25 bp, Homo sapien
tgcaaacaggactggtcttcaaagt

SEQ ID NO: 3531200 - DNA, 25 bp, Homo sapien
acaggactggtcttcaaagtctccc

SEQ ID NO: 3531201 - DNA, 25 bp, Homo sapien
cttcaagtggggcttccctgcaaac

SEQ ID NO: 3531202 - DNA, 25 bp, Homo sapien
tcactcttagacttcttccttcaag

SEQ ID NO: 3531203 - DNA, 25 bp, Homo sapien
tcccaacaggatccatttggaaaat

SEQ ID NO: 3531204 - DNA, 25 bp, Homo sapien
tccatttggaaaatatcaagccttt

SEQ ID NO: 3531205 - DNA, 25 bp, Homo sapien
agaaagcggactacgcaggaacggg

SEQ ID NO: 3531206 - DNA, 25 bp, Homo sapien
ttctttcccaacaggatccatttgg

SEQ ID NO: 3531207 - DNA, 25 bp, Homo sapien
ccaggctgctgccagaaatggagtc

SEQ ID NO: 3531208 - DNA, 25 bp, Homo sapien
ttagggatgaaggctccaggctgct

SEQ ID NO: 3531209 - DNA, 25 bp, Homo sapien
ctccaggctgctgccagaaatggag

SEQ ID NO: 3531210 - DNA, 25 bp, Homo sapien
aggctgctgccagaaatggagtcac

SEQ ID NO: 3531211 - DNA, 25 bp, Homo sapien
tgttttctctgataaggatgtccca

SEQ ID NO: 3531212 - DNA, 25 bp, Homo sapien
gttttctctgataaggatgtcccac

SEQ ID NO: 3531213 - DNA, 25 bp, Homo sapien
gtacgttagctcattttccctcaag

SEQ ID NO: 3531214 - DNA, 25 bp, Homo sapien
gacgtcgttgaaattgcaatgctca

SEQ ID NO: 3531215 - DNA, 25 bp, Homo sapien
cctcaagcgggttgtgacgtcgttg

SEQ ID NO: 3531216 - DNA, 25 bp, Homo sapien
ttgcagcagtagtacgttagctcat

SEQ ID NO: 3531217 - DNA, 25 bp, Homo sapien
atgctcaagaatggtcagaaaaaaa

SEQ ID NO: 3531218 - DNA, 25 bp, Homo sapien
gatatatgctcaagaatggtcagaa

SEQ ID NO: 3531219 - DNA, 25 bp, Homo sapien
atatatgctcaagaatggtcagaaa

SEQ ID NO: 3531220 - DNA, 25 bp, Homo sapien
gctcaagaatggtcagaaaaaaacc

SEQ ID NO: 3531221 - DNA, 25 bp, Homo sapien
gagaggattgcctgcggccagcctg

SEQ ID NO: 3531222 - DNA, 25 bp, Homo sapien
tgagaggattgcctgcggccagcct

SEQ ID NO: 3531223 - DNA, 25 bp, Homo sapien
agaggattgcctgcggccagcctgg

SEQ ID NO: 3531224 - DNA, 25 bp, Homo sapien
gtgagaggattgcctgcggccagcc

SEQ ID NO: 3531225 - DNA, 25 bp, Homo sapien
tctgaaactgccattcctcgctggc

SEQ ID NO: 3531226 - DNA, 25 bp, Homo sapien
gaaactgccattcctcgctggcatc

SEQ ID NO: 3531227 - DNA, 25 bp, Homo sapien
aactgccattcctcgctggcatcat

SEQ ID NO: 3531228 - DNA, 25 bp, Homo sapien
tgaaactgccattcctcgctggcat

SEQ ID NO: 3531229 - DNA, 25 bp, Homo sapien
cagttgggttaggacagttgtagca

SEQ ID NO: 3531230 - DNA, 25 bp, Homo sapien
caaaatcagatgaacaattgacggc

SEQ ID NO: 3531231 - DNA, 25 bp, Homo sapien
taatgagacacgcatcaaaatcaga

SEQ ID NO: 3531232 - DNA, 25 bp, Homo sapien
caattgacggctgttttgcagtcag

SEQ ID NO: 3531233 - DNA, 25 bp, Homo sapien
tctaagggactgaccgaatgccagg

SEQ ID NO: 3531234 - DNA, 25 bp, Homo sapien
gatgagttacagtccacacgtgtga

SEQ ID NO: 3531235 - DNA, 25 bp, Homo sapien
caattgatttgatgcgagggaacac

SEQ ID NO: 3531236 - DNA, 25 bp, Homo sapien
cagctgtgcactttaaacccatggg

SEQ ID NO: 3531237 - DNA, 25 bp, Homo sapien
gacaaggtcataacataggaaggag

SEQ ID NO: 3531238 - DNA, 25 bp, Homo sapien
aaagccacgctgtaactcaggacgg

SEQ ID NO: 3531239 - DNA, 25 bp, Homo sapien
gctgtcatacaaccccagacctgta

SEQ ID NO: 3531240 - DNA, 25 bp, Homo sapien
ctcaggacgggctgtaactcaggac

SEQ ID NO: 3531241 - DNA, 25 bp, Homo sapien
agacagccaggacgagcagcagccc

SEQ ID NO: 3531242 - DNA, 25 bp, Homo sapien
caggacgagcagcagcccgaacagg

SEQ ID NO: 3531243 - DNA, 25 bp, Homo sapien
cccgaacaggacagaccctccttgg

SEQ ID NO: 3531244 - DNA, 25 bp, Homo sapien
gagcagcagcccgaacaggacagac

SEQ ID NO: 3531245 - DNA, 25 bp, Homo sapien
caggaacgaacaaatgactgctggt

SEQ ID NO: 3531246 - DNA, 25 bp, Homo sapien
ggaatgtcaggaacgaacaaatgac

SEQ ID NO: 3531247 - DNA, 25 bp, Homo sapien
aggaatgtcaggaacgaacaaatga

SEQ ID NO: 3531248 - DNA, 25 bp, Homo sapien
aggaacgaacaaatgactgctggtt

SEQ ID NO: 3531249 - DNA, 25 bp, Homo sapien
gggagtcaaggcacactgaatccct

SEQ ID NO: 3531250 - DNA, 25 bp, Homo sapien
caaggcacactgaatccctgggcca

SEQ ID NO: 3531251 - DNA, 25 bp, Homo sapien
gagtcaaggcacactgaatccctgg

SEQ ID NO: 3531252 - DNA, 25 bp, Homo sapien
agggggagtcaaggcacactgaatc

SEQ ID NO: 3531253 - DNA, 25 bp, Homo sapien
ttgagtaggctcagtccctataagc

SEQ ID NO: 3531254 - DNA, 25 bp, Homo sapien
taggctcagtccctataagccccag

SEQ ID NO: 3531255 - DNA, 25 bp, Homo sapien
gctcagtccctataagccccagtgt

SEQ ID NO: 3531256 - DNA, 25 bp, Homo sapien
tgtgggaataacactatcttcccca

SEQ ID NO: 3531257 - DNA, 25 bp, Homo sapien
gaaagagagggccacttctcggagc

SEQ ID NO: 3531258 - DNA, 25 bp, Homo sapien
agggccacttctcggagccacagca

SEQ ID NO: 3531259 - DNA, 25 bp, Homo sapien
aagtgaatcagaccaaaggggtgac

SEQ ID NO: 3531260 - DNA, 25 bp, Homo sapien
ttctcggagccacagcactaagtga

SEQ ID NO: 3531261 - DNA, 25 bp, Homo sapien
tgtgaagtaggtctcaactcctaca

SEQ ID NO: 3531262 - DNA, 25 bp, Homo sapien
ctcctacaccaactggtgctaaaga

SEQ ID NO: 3531263 - DNA, 25 bp, Homo sapien
tcaactcctacaccaactggtgcta

SEQ ID NO: 3531264 - DNA, 25 bp, Homo sapien
tactgtgaagtaggtctcaactcct

SEQ ID NO: 3531265 - DNA, 25 bp, Homo sapien
cccaggaggtggaggttgcagtgag

SEQ ID NO: 3531266 - DNA, 25 bp, Homo sapien
ccaagactgtgccactgcactccag

SEQ ID NO: 3531267 - DNA, 25 bp, Homo sapien
ctccagcttgggcaacagagagaga

SEQ ID NO: 3531268 - DNA, 25 bp, Homo sapien
gagacacgagaatcgcttgcaccca

SEQ ID NO: 3531269 - DNA, 25 bp, Homo sapien
ggcgcagtttctctggaccgctaga

SEQ ID NO: 3531270 - DNA, 25 bp, Homo sapien
ttcccttgagacgaaagcgatggca

SEQ ID NO: 3531271 - DNA, 25 bp, Homo sapien
tagataaaatgaagccagcgttcgg

SEQ ID NO: 3531272 - DNA, 25 bp, Homo sapien
tcagactctaagaagggtgcggccc

SEQ ID NO: 3531273 - DNA, 25 bp, Homo sapien
tctgcgctcagcccccgcattcttt

SEQ ID NO: 3531274 - DNA, 25 bp, Homo sapien
gcctcgagccgcttctgcgctcagc

SEQ ID NO: 3531275 - DNA, 25 bp, Homo sapien
tgcgctcagcccccgcattctttcg

SEQ ID NO: 3531276 - DNA, 25 bp, Homo sapien
cagcctcgagccgcttctgcgctca

SEQ ID NO: 3531277 - DNA, 25 bp, Homo sapien
tccagcccgcaaggctccgcccccc

SEQ ID NO: 3531278 - DNA, 25 bp, Homo sapien
gcccctcaggatgcccttgccctcc

SEQ ID NO: 3531279 - DNA, 25 bp, Homo sapien
ccccgcccctcaggatgcccttgcc

SEQ ID NO: 3531280 - DNA, 25 bp, Homo sapien
aggctcccggctcccgcaccgcgca

SEQ ID NO: 3531281 - DNA, 25 bp, Homo sapien
aggttctgagaaggccgggtggcca

SEQ ID NO: 3531282 - DNA, 25 bp, Homo sapien
ctgaaagtttggggcgtcctcctcg

SEQ ID NO: 3531283 - DNA, 25 bp, Homo sapien
cgggtggccaggacccaatgagcac

SEQ ID NO: 3531284 - DNA, 25 bp, Homo sapien
tgagcaccttcaaaaccccagggaa

SEQ ID NO: 3531285 - DNA, 25 bp, Homo sapien
ctatttcagaacaccttgacatgtg

SEQ ID NO: 3531286 - DNA, 25 bp, Homo sapien
ttcatgttccctaatggcagctgct

SEQ ID NO: 3531287 - DNA, 25 bp, Homo sapien
tggcagctgcttagccttgaatgcc

SEQ ID NO: 3531288 - DNA, 25 bp, Homo sapien
aatgacttagtctatttcagaacac

SEQ ID NO: 3531289 - DNA, 25 bp, Homo sapien
gatgactttgagtggacctgctact

SEQ ID NO: 3531290 - DNA, 25 bp, Homo sapien
ggtatgtccattccttagctagaga

SEQ ID NO: 3531291 - DNA, 25 bp, Homo sapien
tagtgtcacatagaacccagggcct

SEQ ID NO: 3531292 - DNA, 25 bp, Homo sapien
tgtctaaggacaaaccactagcgtt

SEQ ID NO: 3531293 - DNA, 25 bp, Homo sapien
agcggcgtctgcgaatgggaacatc

SEQ ID NO: 3531294 - DNA, 25 bp, Homo sapien
gggaacatcaaagactctcctccgt

SEQ ID NO: 3531295 - DNA, 25 bp, Homo sapien
gcgaatgggaacatcaaagactctc

SEQ ID NO: 3531296 - DNA, 25 bp, Homo sapien
ctaaaaaaggcgtgagcagcggcgt

SEQ ID NO: 3531297 - DNA, 25 bp, Homo sapien
ctcagggtgtcaaagacacatgtcc

SEQ ID NO: 3531298 - DNA, 25 bp, Homo sapien
tgttgcagtccgatggtagctggaa

SEQ ID NO: 3531299 - DNA, 25 bp, Homo sapien
tacatggtctcttctgcatgacggc

SEQ ID NO: 3531300 - DNA, 25 bp, Homo sapien
tggtacccgcgcaggatgatccaaa

SEQ ID NO: 3531301 - DNA, 25 bp, Homo sapien
gccgattcgttataagtatatatct

SEQ ID NO: 3531302 - DNA, 25 bp, Homo sapien
aatcacagtgtcactttgccgattc

SEQ ID NO: 3531303 - DNA, 25 bp, Homo sapien
atatatctaagatcaacccacactg

SEQ ID NO: 3531304 - DNA, 25 bp, Homo sapien
gtatatatctaagatcaacccacac

SEQ ID NO: 3531305 - DNA, 25 bp, Homo sapien
cacatttgaagacgcaatgggaggg

SEQ ID NO: 3531306 - DNA, 25 bp, Homo sapien
gcacattactgtttcggaacctcca

SEQ ID NO: 3531307 - DNA, 25 bp, Homo sapien
tctgaacagcaaggacctacttggt

SEQ ID NO: 3531308 - DNA, 25 bp, Homo sapien
tgttacgtgatccaccaccccatta

SEQ ID NO: 3531309 - DNA, 25 bp, Homo sapien
gaccaactaatgcatatcccaagag

SEQ ID NO: 3531310 - DNA, 25 bp, Homo sapien
taagcctacgaattaatcagactgg

SEQ ID NO: 3531311 - DNA, 25 bp, Homo sapien
tcagactggtagaggacgaaaaagc

SEQ ID NO: 3531312 - DNA, 25 bp, Homo sapien
gctggagcctctaaaagtgccccaa

SEQ ID NO: 3531313 - DNA, 25 bp, Homo sapien
tatgtttatttgtggttagaaggaa

SEQ ID NO: 3531314 - DNA, 25 bp, Homo sapien
atatgtttatttgtggttagaagga

SEQ ID NO: 3531315 - DNA, 25 bp, Homo sapien
agaaagaacatagttaagagagagc

SEQ ID NO: 3531316 - DNA, 25 bp, Homo sapien
ctaataagaaagaacatagttaaga

SEQ ID NO: 3531317 - DNA, 25 bp, Homo sapien
caaaggatcaagtcgacccaatagt

SEQ ID NO: 3531318 - DNA, 25 bp, Homo sapien
caagataaaccataattttgggcca

SEQ ID NO: 3531319 - DNA, 25 bp, Homo sapien
gcaagaattcttcggagtcctcaat

SEQ ID NO: 3531320 - DNA, 25 bp, Homo sapien
caatagtaactcaactgcctgccaa

SEQ ID NO: 3531321 - DNA, 25 bp, Homo sapien
tgcaaagcagcaaattcccagtact

SEQ ID NO: 3531322 - DNA, 25 bp, Homo sapien
cctccactgggaagaaatctaaatc

SEQ ID NO: 3531323 - DNA, 25 bp, Homo sapien
tcattccagaagctagagggcattt

SEQ ID NO: 3531324 - DNA, 25 bp, Homo sapien
tagccccagataacttcagtgatga

SEQ ID NO: 3531325 - DNA, 25 bp, Homo sapien
tatttgacattaaattggaagtttg

SEQ ID NO: 3531326 - DNA, 25 bp, Homo sapien
gacattaaattggaagtttgagcaa

SEQ ID NO: 3531327 - DNA, 25 bp, Homo sapien
cattaaattggaagtttgagcaaaa

SEQ ID NO: 3531328 - DNA, 25 bp, Homo sapien
taaattggaagtttgagcaaaaaca

SEQ ID NO: 3531329 - DNA, 25 bp, Homo sapien
tctggttagagactatggagcctca

SEQ ID NO: 3531330 - DNA, 25 bp, Homo sapien
aaaatctctagggttctctggaaca

SEQ ID NO: 3531331 - DNA, 25 bp, Homo sapien
gctgattctactggtctaatgtggt

SEQ ID NO: 3531332 - DNA, 25 bp, Homo sapien
gcagtgttaaccctacaaagtcatg

SEQ ID NO: 3531333 - DNA, 25 bp, Homo sapien
cccgacctgggctgatgattggaaa

SEQ ID NO: 3531334 - DNA, 25 bp, Homo sapien
tatccttccatgtatcctgatgttg

SEQ ID NO: 3531335 - DNA, 25 bp, Homo sapien
cctgatgttgtagagaatgtggtac

SEQ ID NO: 3531336 - DNA, 25 bp, Homo sapien
caatcgggctatagacaccctgaat

SEQ ID NO: 3531337 - DNA, 25 bp, Homo sapien
ccactgcgcttagccctctcaacat

SEQ ID NO: 3531338 - DNA, 25 bp, Homo sapien
tgcgcttagccctctcaacattttt

SEQ ID NO: 3531339 - DNA, 25 bp, Homo sapien
actgcgcttagccctctcaacattt

SEQ ID NO: 3531340 - DNA, 25 bp, Homo sapien
gccactgcgcttagccctctcaaca

SEQ ID NO: 3531341 - DNA, 25 bp, Homo sapien
tgaacttcttccacgtcacccttag

SEQ ID NO: 3531342 - DNA, 25 bp, Homo sapien
gttattctccaatagcgactgtcca

SEQ ID NO: 3531343 - DNA, 25 bp, Homo sapien
gcgactgtccaactgacaggccttc

SEQ ID NO: 3531344 - DNA, 25 bp, Homo sapien
gaagtgcatcttttgacatttcaat

SEQ ID NO: 3531345 - DNA, 25 bp, Homo sapien
ctcctaggctgaagccattcttccg

SEQ ID NO: 3531346 - DNA, 25 bp, Homo sapien
tcagctcctctagtagctggggact

SEQ ID NO: 3531347 - DNA, 25 bp, Homo sapien
ctaggctgaagccattcttccgcct

SEQ ID NO: 3531348 - DNA, 25 bp, Homo sapien
tgacctcctaggctgaagccattct

SEQ ID NO: 3531349 - DNA, 25 bp, Homo sapien
agtaatatccccagttgttgctaca

SEQ ID NO: 3531350 - DNA, 25 bp, Homo sapien
tacacattctggatcgtgaacatat

SEQ ID NO: 3531351 - DNA, 25 bp, Homo sapien
ttctggcagaaacgatgtggaaact

SEQ ID NO: 3531352 - DNA, 25 bp, Homo sapien
gggtggatgtacagagctaagttct

SEQ ID NO: 3531353 - DNA, 25 bp, Homo sapien
catttttgacataagaggtaaacca

SEQ ID NO: 3531354 - DNA, 25 bp, Homo sapien
ttttgacataagaggtaaaccagtc

SEQ ID NO: 3531355 - DNA, 25 bp, Homo sapien
acctgatacaacatttttgacataa

SEQ ID NO: 3531356 - DNA, 25 bp, Homo sapien
atttttgacataagaggtaaaccag

SEQ ID NO: 3531357 - DNA, 25 bp, Homo sapien
gctatgcaaaaataacaacgagggc

SEQ ID NO: 3531358 - DNA, 25 bp, Homo sapien
tgtcagacgagcaccaaactaagag

SEQ ID NO: 3531359 - DNA, 25 bp, Homo sapien
ggttctggagctttatcaaggcagc

SEQ ID NO: 3531360 - DNA, 25 bp, Homo sapien
agtgagctgaaacctaggacctaca

SEQ ID NO: 3531361 - DNA, 25 bp, Homo sapien
atagcagctggatttcgagccattt

SEQ ID NO: 3531362 - DNA, 25 bp, Homo sapien
ataataaacatgtcaatagcagctg

SEQ ID NO: 3531363 - DNA, 25 bp, Homo sapien
cagctggatttcgagccatttggtc

SEQ ID NO: 3531364 - DNA, 25 bp, Homo sapien
taaacatgtcaatagcagctggatt

SEQ ID NO: 3531365 - DNA, 25 bp, Homo sapien
ccagccaaaatttagaattttctat

SEQ ID NO: 3531366 - DNA, 25 bp, Homo sapien
cacacccagccaaaatttagaattt

SEQ ID NO: 3531367 - DNA, 25 bp, Homo sapien
ccacacccagccaaaatttagaatt

SEQ ID NO: 3531368 - DNA, 25 bp, Homo sapien
gtcagaatattaactctagttagag

SEQ ID NO: 3531369 - DNA, 25 bp, Homo sapien
tctatacccattctacaatcctgaa

SEQ ID NO: 3531370 - DNA, 25 bp, Homo sapien
tgggttccatgccattatgtcagaa

SEQ ID NO: 3531371 - DNA, 25 bp, Homo sapien
gagaggtctataactaaaatgcata

SEQ ID NO: 3531372 - DNA, 25 bp, Homo sapien
gcttccactgctatgtactgactca

SEQ ID NO: 3531373 - DNA, 25 bp, Homo sapien
ttaaagggagacagtatttcagtcc

SEQ ID NO: 3531374 - DNA, 25 bp, Homo sapien
tgattagacagtgccatgcttccca

SEQ ID NO: 3531375 - DNA, 25 bp, Homo sapien
tcctccggcagctgtatcgacgtct

SEQ ID NO: 3531376 - DNA, 25 bp, Homo sapien
caaacatgtaatacacggcagtgcc

SEQ ID NO: 3531377 - DNA, 25 bp, Homo sapien
cctattggtcatgtcagttctgggc

SEQ ID NO: 3531378 - DNA, 25 bp, Homo sapien
tagcttaccctatgcaaccagacag

SEQ ID NO: 3531379 - DNA, 25 bp, Homo sapien
gaggagcatacagactcaaacatgt

SEQ ID NO: 3531380 - DNA, 25 bp, Homo sapien
agcatcgaggtcttcctctcgagca

SEQ ID NO: 3531381 - DNA, 25 bp, Homo sapien
aatctgcgcttccacagcatcgagg

SEQ ID NO: 3531382 - DNA, 25 bp, Homo sapien
gataatcgtcaggaagcttgcagcc

SEQ ID NO: 3531383 - DNA, 25 bp, Homo sapien
tgtgaattcggtatgaacatcgata

SEQ ID NO: 3531384 - DNA, 25 bp, Homo sapien
tcagagataaaaccatccgaggaca

SEQ ID NO: 3531385 - DNA, 25 bp, Homo sapien
tttaatagcagcataatggtcaatg

SEQ ID NO: 3531386 - DNA, 25 bp, Homo sapien
atagcagcataatggtcaatgtatc

SEQ ID NO: 3531387 - DNA, 25 bp, Homo sapien
ggacacctgggctccaaatatttct

SEQ ID NO: 3531388 - DNA, 25 bp, Homo sapien
tgaagagagatttccaacactgatt

SEQ ID NO: 3531389 - DNA, 25 bp, Homo sapien
ctatgaagagagatttccaacactg

SEQ ID NO: 3531390 - DNA, 25 bp, Homo sapien
tttccaacactgattcttctgtgtt

SEQ ID NO: 3531391 - DNA, 25 bp, Homo sapien
ttccaacactgattcttctgtgttt

SEQ ID NO: 3531392 - DNA, 25 bp, Homo sapien
gccaagggccagttttcagaagtac

SEQ ID NO: 3531393 - DNA, 25 bp, Homo sapien
gaaacacgggaagatctagcaatac

SEQ ID NO: 3531394 - DNA, 25 bp, Homo sapien
tccagttaataagtgtgggacagcc

SEQ ID NO: 3531395 - DNA, 25 bp, Homo sapien
ccaacatttactagcaggcacgaga

SEQ ID NO: 3531396 - DNA, 25 bp, Homo sapien
cacagcggatcatgacttgatagct

SEQ ID NO: 3531397 - DNA, 25 bp, Homo sapien
gtcttctccacagcggatcatgact

SEQ ID NO: 3531398 - DNA, 25 bp, Homo sapien
cagatatcagccagtattttttgca

SEQ ID NO: 3531399 - DNA, 25 bp, Homo sapien
catgacttgatagctggctaagtct

SEQ ID NO: 3531400 - DNA, 25 bp, Homo sapien
gaaagtccacctatagagggtgcct

SEQ ID NO: 3531401 - DNA, 25 bp, Homo sapien
tggcagtaaccagattcaccgatag

SEQ ID NO: 3531402 - DNA, 25 bp, Homo sapien
caattatgcgcttgcccactggact

SEQ ID NO: 3531403 - DNA, 25 bp, Homo sapien
gaacagtaccgttcagcagtcccgt

SEQ ID NO: 3531404 - DNA, 25 bp, Homo sapien
accgaggcctgggagagagatatct

SEQ ID NO: 3531405 - DNA, 25 bp, Homo sapien
ggtgcggcacgagggccactacctc

SEQ ID NO: 3531406 - DNA, 25 bp, Homo sapien
gagagatatctcgtcgcttctcata

SEQ ID NO: 3531407 - DNA, 25 bp, Homo sapien
tccttctcttgcaagtgggcctcac

SEQ ID NO: 3531408 - DNA, 25 bp, Homo sapien
gaggaagactcagggcgaggccctt

SEQ ID NO: 3531409 - DNA, 25 bp, Homo sapien
aagactcagggcgaggccctttccg

SEQ ID NO: 3531410 - DNA, 25 bp, Homo sapien
gcgtcaccttctggtgtcgcggaag

SEQ ID NO: 3531411 - DNA, 25 bp, Homo sapien
accttctggtgtcgcggaagctcgg

SEQ ID NO: 3531412 - DNA, 25 bp, Homo sapien
ctttccccctgcctcaccgcctcct

SEQ ID NO: 3531413 - DNA, 25 bp, Homo sapien
ctgcctcaccgcctcctctccccat

SEQ ID NO: 3531414 - DNA, 25 bp, Homo sapien
ccctgcctcaccgcctcctctcccc

SEQ ID NO: 3531415 - DNA, 25 bp, Homo sapien
ttccccctgcctcaccgcctcctct

SEQ ID NO: 3531416 - DNA, 25 bp, Homo sapien
tgattagatcccgatagtccaaaaa

SEQ ID NO: 3531417 - DNA, 25 bp, Homo sapien
tcccgatagtccaaaaaggataaga

SEQ ID NO: 3531418 - DNA, 25 bp, Homo sapien
gggcagcgactctagggtcagcggc

SEQ ID NO: 3531419 - DNA, 25 bp, Homo sapien
gatagtccaaaaaggataagatgag

SEQ ID NO: 3531420 - DNA, 25 bp, Homo sapien
ttttctggtaagtcatggtctcctt

SEQ ID NO: 3531421 - DNA, 25 bp, Homo sapien
cccagagctcggcaagtttttcttt

SEQ ID NO: 3531422 - DNA, 25 bp, Homo sapien
ctttggttatatctacccactgaaa

SEQ ID NO: 3531423 - DNA, 25 bp, Homo sapien
tatatctacccactgaaaacaagat

SEQ ID NO: 3531424 - DNA, 25 bp, Homo sapien
tgaatgttgcctcagaacctcaaaa

SEQ ID NO: 3531425 - DNA, 25 bp, Homo sapien
cctttgacatgaggacgatggttga

SEQ ID NO: 3531426 - DNA, 25 bp, Homo sapien
tggcgagtactgaagatctccagtt

SEQ ID NO: 3531427 - DNA, 25 bp, Homo sapien
ttctccaattatagacaggctcctc

SEQ ID NO: 3531428 - DNA, 25 bp, Homo sapien
agcccaagggtagctgaagccgcct

SEQ ID NO: 3531429 - DNA, 25 bp, Homo sapien
ggatcccggtgcctgcaagcccaag

SEQ ID NO: 3531430 - DNA, 25 bp, Homo sapien
tgaagccgcctggagttcaggaacc

SEQ ID NO: 3531431 - DNA, 25 bp, Homo sapien
ccaagctgttggtagtctgctctaa

SEQ ID NO: 3531432 - DNA, 25 bp, Homo sapien
tgaagtgagcaatctgaccaccagg

SEQ ID NO: 3531433 - DNA, 25 bp, Homo sapien
gagtctgcgaatccttgggtcatgg

SEQ ID NO: 3531434 - DNA, 25 bp, Homo sapien
gagaaaccaggtagtgttcttctct

SEQ ID NO: 3531435 - DNA, 25 bp, Homo sapien
aagaccctaagatgtggaactgcct

SEQ ID NO: 3531436 - DNA, 25 bp, Homo sapien
tgcccgtgcgtttcaggagacgtga

SEQ ID NO: 3531437 - DNA, 25 bp, Homo sapien
gagagtgaggtagtgaggacagcca

SEQ ID NO: 3531438 - DNA, 25 bp, Homo sapien
ccaaccacgtgtgcatgaggttcaa

SEQ ID NO: 3531439 - DNA, 25 bp, Homo sapien
ggttcaatgcccgtgcgtttcagga

SEQ ID NO: 3531440 - DNA, 25 bp, Homo sapien
ttgactcccagacagaggattcaag

SEQ ID NO: 3531441 - DNA, 25 bp, Homo sapien
atcttctagatctcggcctggatgc

SEQ ID NO: 3531442 - DNA, 25 bp, Homo sapien
attcaaggccctttatggaatcttc

SEQ ID NO: 3531443 - DNA, 25 bp, Homo sapien
tggaatcttctagatctcggcctgg

SEQ ID NO: 3531444 - DNA, 25 bp, Homo sapien
acctttgtgccatagaatagctcaa

SEQ ID NO: 3531445 - DNA, 25 bp, Homo sapien
ttctgtgcaaacctagcaggcttgt

SEQ ID NO: 3531446 - DNA, 25 bp, Homo sapien
tatatactggatttatgaatcggaa

SEQ ID NO: 3531447 - DNA, 25 bp, Homo sapien
tcttttagaagttggcaagctgaaa

SEQ ID NO: 3531448 - DNA, 25 bp, Homo sapien
tcttatctcacgtcatacagaaaag

SEQ ID NO: 3531449 - DNA, 25 bp, Homo sapien
tggtgttttcaaccgatagtgtggt

SEQ ID NO: 3531450 - DNA, 25 bp, Homo sapien
tagcctttggataggcaaatgtttc

SEQ ID NO: 3531451 - DNA, 25 bp, Homo sapien
gctaaggttatcaaacttctagaag

SEQ ID NO: 3531452 - DNA, 25 bp, Homo sapien
gagatttccataagtggaatgatga

SEQ ID NO: 3531453 - DNA, 25 bp, Homo sapien
gcttgggaagttcatgagagagatt

SEQ ID NO: 3531454 - DNA, 25 bp, Homo sapien
cacagtgctcatggtaccctgagaa

SEQ ID NO: 3531455 - DNA, 25 bp, Homo sapien
caggtctgcaactctcagaggtgtg

SEQ ID NO: 3531456 - DNA, 25 bp, Homo sapien
tttccccagagctatcaagtgtatg

SEQ ID NO: 3531457 - DNA, 25 bp, Homo sapien
tgtagccagggcatccaacaggctg

SEQ ID NO: 3531458 - DNA, 25 bp, Homo sapien
ttgagcagaatacccagcctggtct

SEQ ID NO: 3531459 - DNA, 25 bp, Homo sapien
tgacttgagcagaatacccagcctg

SEQ ID NO: 3531460 - DNA, 25 bp, Homo sapien
ctggattatttcgtgagcctgccat

SEQ ID NO: 3531461 - DNA, 25 bp, Homo sapien
gtgagcctgccatcccactctgtga

SEQ ID NO: 3531462 - DNA, 25 bp, Homo sapien
catcccactctgtgattgctgccga

SEQ ID NO: 3531463 - DNA, 25 bp, Homo sapien
ctctgtgattgctgccgaggtcccc

SEQ ID NO: 3531464 - DNA, 25 bp, Homo sapien
gccgcagcgtccttgtgccctcctt

SEQ ID NO: 3531465 - DNA, 25 bp, Homo sapien
gtcggccgcagcgtccttgtgccct

SEQ ID NO: 3531466 - DNA, 25 bp, Homo sapien
ctggcctgtcggccgcagcgtcctt

SEQ ID NO: 3531467 - DNA, 25 bp, Homo sapien
tggcctgtcggccgcagcgtccttg

SEQ ID NO: 3531468 - DNA, 25 bp, Homo sapien
cctgtgccaaggtggagttcagctt

SEQ ID NO: 3531469 - DNA, 25 bp, Homo sapien
tctggtttccagtcgaatgtgccct

SEQ ID NO: 3531470 - DNA, 25 bp, Homo sapien
caacaatttgtggagtgcctgcgtg

SEQ ID NO: 3531471 - DNA, 25 bp, Homo sapien
catcggcgaagacggcatctcttgt

SEQ ID NO: 3531472 - DNA, 25 bp, Homo sapien
gatacctgtggtaccaaggaaaaca

SEQ ID NO: 3531473 - DNA, 25 bp, Homo sapien
aggaactattgacctgcgtggcata

SEQ ID NO: 3531474 - DNA, 25 bp, Homo sapien
gaaaacaggattcttggccatggat

SEQ ID NO: 3531475 - DNA, 25 bp, Homo sapien
taatggtccaccagatagattgtta

SEQ ID NO: 3531476 - DNA, 25 bp, Homo sapien
tccactgaacacaggctccaagagg

SEQ ID NO: 3531477 - DNA, 25 bp, Homo sapien
agctctggcagccgggactccatcc

SEQ ID NO: 3531478 - DNA, 25 bp, Homo sapien
actggcacggggatgtggcgcacct

SEQ ID NO: 3531479 - DNA, 25 bp, Homo sapien
tgtattgtgcctggggtttttcacc

SEQ ID NO: 3531480 - DNA, 25 bp, Homo sapien
gctcctcaagccagagcaacccact

SEQ ID NO: 3531481 - DNA, 25 bp, Homo sapien
acccactggtgcacaggggaatact

SEQ ID NO: 3531482 - DNA, 25 bp, Homo sapien
tgttgctcctcaagccagagcaacc

SEQ ID NO: 3531483 - DNA, 25 bp, Homo sapien
gcagctgttgctcctcaagccagag

SEQ ID NO: 3531484 - DNA, 25 bp, Homo sapien
gacccattcatgtcgtatttgtcag

SEQ ID NO: 3531485 - DNA, 25 bp, Homo sapien
tagtgtgcctaactggctgctctca

SEQ ID NO: 3531486 - DNA, 25 bp, Homo sapien
agtcaccatatagaacagccccatc

SEQ ID NO: 3531487 - DNA, 25 bp, Homo sapien
tatctctagctcttgacaatcacag

SEQ ID NO: 3531488 - DNA, 25 bp, Homo sapien
cacatctggatctgacttatttcac

SEQ ID NO: 3531489 - DNA, 25 bp, Homo sapien
gcacatctggatctgacttatttca

SEQ ID NO: 3531490 - DNA, 25 bp, Homo sapien
ttcatctttgtgcacatctggatct

SEQ ID NO: 3531491 - DNA, 25 bp, Homo sapien
atctttgtgcacatctggatctgac

SEQ ID NO: 3531492 - DNA, 25 bp, Homo sapien
ttcccctgttgggtgatgctgggtt

SEQ ID NO: 3531493 - DNA, 25 bp, Homo sapien
tcacctgggtttcattataagccat

SEQ ID NO: 3531494 - DNA, 25 bp, Homo sapien
ggtttgtgccttcctgttcacctgg

SEQ ID NO: 3531495 - DNA, 25 bp, Homo sapien
tgttgggtgatgctgggtttgtgcc

SEQ ID NO: 3531496 - DNA, 25 bp, Homo sapien
caagctcttcttgcgaggaacgcgt

SEQ ID NO: 3531497 - DNA, 25 bp, Homo sapien
agcggcaagagtaggctccctgcag

SEQ ID NO: 3531498 - DNA, 25 bp, Homo sapien
ttcatcagacttgcgataggcgtgc

SEQ ID NO: 3531499 - DNA, 25 bp, Homo sapien
tcttagctccggtgtctgtggacag

SEQ ID NO: 3531500 - DNA, 25 bp, Homo sapien
tttcaaagaatacagtccacactcc

SEQ ID NO: 3531501 - DNA, 25 bp, Homo sapien
ctccagcactggactgagtacaggg

SEQ ID NO: 3531502 - DNA, 25 bp, Homo sapien
agggtgcatttcctaataataggga

SEQ ID NO: 3531503 - DNA, 25 bp, Homo sapien
tatcacttgacccaatgatgccctt

SEQ ID NO: 3531504 - DNA, 25 bp, Homo sapien
ccaaagtgcctaagagtgaagacga

SEQ ID NO: 3531505 - DNA, 25 bp, Homo sapien
tgaagacgaagatgccatggagacg

SEQ ID NO: 3531506 - DNA, 25 bp, Homo sapien
tcgcaagcgtcaaagtcacaacaag

SEQ ID NO: 3531507 - DNA, 25 bp, Homo sapien
ttccatcatgatagcacagcgcctg

SEQ ID NO: 3531508 - DNA, 25 bp, Homo sapien
ttgtcacaggatgcgcagagaccgt

SEQ ID NO: 3531509 - DNA, 25 bp, Homo sapien
catctcataggcacgaatccgcttg

SEQ ID NO: 3531510 - DNA, 25 bp, Homo sapien
agaaatgcttctgacaggcggcgca

SEQ ID NO: 3531511 - DNA, 25 bp, Homo sapien
cactcgtagatgtcctgttcgcaca

SEQ ID NO: 3531512 - DNA, 25 bp, Homo sapien
aggctcccaaactctatcatgtcaa

SEQ ID NO: 3531513 - DNA, 25 bp, Homo sapien
tccataagctgcaaagcacatctcc

SEQ ID NO: 3531514 - DNA, 25 bp, Homo sapien
caggaatgcaataaaacgggcattc

SEQ ID NO: 3531515 - DNA, 25 bp, Homo sapien
acatctccccctgattattcgctgg

SEQ ID NO: 3531516 - DNA, 25 bp, Homo sapien
tgttggtcctgggaccagcgacatc

SEQ ID NO: 3531517 - DNA, 25 bp, Homo sapien
ctgggaccagcgacatcagcactgc

SEQ ID NO: 3531518 - DNA, 25 bp, Homo sapien
ctctagtctcagctattaatacttg

SEQ ID NO: 3531519 - DNA, 25 bp, Homo sapien
ctgcctgggaacctgacagaaatac

SEQ ID NO: 3531520 - DNA, 25 bp, Homo sapien
cctgagcaaggatgaacgactgaga

SEQ ID NO: 3531521 - DNA, 25 bp, Homo sapien
tgttttcaaagcaccgcctgggagc

SEQ ID NO: 3531522 - DNA, 25 bp, Homo sapien
tatcccaacgtagcagatggtggag

SEQ ID NO: 3531523 - DNA, 25 bp, Homo sapien
gcaggtaaccgccacattggaggtc

SEQ ID NO: 3531524 - DNA, 25 bp, Homo sapien
gggaaggacaaaggacgaatatgtg

SEQ ID NO: 3531525 - DNA, 25 bp, Homo sapien
gacaaaggacgaatatgtgggagac

SEQ ID NO: 3531526 - DNA, 25 bp, Homo sapien
gaaggacaaaggacgaatatgtggg

SEQ ID NO: 3531527 - DNA, 25 bp, Homo sapien
caaaggacgaatatgtgggagacaa

SEQ ID NO: 3531528 - DNA, 25 bp, Homo sapien
gccttgttaaaagatcctgccagat

SEQ ID NO: 3531529 - DNA, 25 bp, Homo sapien
tcaaacacattagagggcccgttca

SEQ ID NO: 3531530 - DNA, 25 bp, Homo sapien
catgaacagctgctcttgggttccc

SEQ ID NO: 3531531 - DNA, 25 bp, Homo sapien
gaccatccctgacgcaaaagacaat

SEQ ID NO: 3531532 - DNA, 25 bp, Homo sapien
tgaggtctcaacaagcttccatggg

SEQ ID NO: 3531533 - DNA, 25 bp, Homo sapien
cttccatgggttggatggtcctggt

SEQ ID NO: 3531534 - DNA, 25 bp, Homo sapien
gaaaacggagaaatactgacagcta

SEQ ID NO: 3531535 - DNA, 25 bp, Homo sapien
ggaagcatgcttcacagaccctctg

SEQ ID NO: 3531536 - DNA, 25 bp, Homo sapien
cacacagtgctggaaaattcggatg

SEQ ID NO: 3531537 - DNA, 25 bp, Homo sapien
cacagcagctcatcggaaactagaa

SEQ ID NO: 3531538 - DNA, 25 bp, Homo sapien
tagtacattctaggcaaaggctttc

SEQ ID NO: 3531539 - DNA, 25 bp, Homo sapien
ccagagcatgggagatgtcctcagc

SEQ ID NO: 3531540 - DNA, 25 bp, Homo sapien
cgactgcagatgtccatggaccacc

SEQ ID NO: 3531541 - DNA, 25 bp, Homo sapien
tccggcagagcttccggcccagttt

SEQ ID NO: 3531542 - DNA, 25 bp, Homo sapien
cccagtttgtagtagaggcgccgcc

SEQ ID NO: 3531543 - DNA, 25 bp, Homo sapien
ctgagatagtctctccggcagagct

SEQ ID NO: 3531544 - DNA, 25 bp, Homo sapien
cttccggcccagtttgtagtagagg

SEQ ID NO: 3531545 - DNA, 25 bp, Homo sapien
cagccgccgcatgtcagcagggatg

SEQ ID NO: 3531546 - DNA, 25 bp, Homo sapien
cagtcctcgtgccagtactggtcga

SEQ ID NO: 3531547 - DNA, 25 bp, Homo sapien
tggccttcaggaagtagcggtcccc

SEQ ID NO: 3531548 - DNA, 25 bp, Homo sapien
cagaggtcgcagctcaggcagtcct

SEQ ID NO: 3531549 - DNA, 25 bp, Homo sapien
caccgagggtccgagatcgttttgg

SEQ ID NO: 3531550 - DNA, 25 bp, Homo sapien
gagaccagcaccgagggtccgagat

SEQ ID NO: 3531551 - DNA, 25 bp, Homo sapien
tccgagatcgttttgggccagacag

SEQ ID NO: 3531552 - DNA, 25 bp, Homo sapien
ttgggccagacagggcatctcacct

SEQ ID NO: 3531553 - DNA, 25 bp, Homo sapien
taagacgggaaagagccagacctta

SEQ ID NO: 3531554 - DNA, 25 bp, Homo sapien
ggagaagggacaggacaacacatcc

SEQ ID NO: 3531555 - DNA, 25 bp, Homo sapien
gaccttactccctagatgtctaaga

SEQ ID NO: 3531556 - DNA, 25 bp, Homo sapien
caaaggcaattgcaggtggcactgt

SEQ ID NO: 3531557 - DNA, 25 bp, Homo sapien
tccccgctgactctatcttcacaga

SEQ ID NO: 3531558 - DNA, 25 bp, Homo sapien
cactctccccgctgactctatcttc

SEQ ID NO: 3531559 - DNA, 25 bp, Homo sapien
tgactctatcttcacagatctccct

SEQ ID NO: 3531560 - DNA, 25 bp, Homo sapien
ctttttcccactctccccgctgact

SEQ ID NO: 3531561 - DNA, 25 bp, Homo sapien
tgtgtcctaattggtctgtgcccat

SEQ ID NO: 3531562 - DNA, 25 bp, Homo sapien
tgtcctaattggtctgtgcccataa

SEQ ID NO: 3531563 - DNA, 25 bp, Homo sapien
tcctaattggtctgtgcccataaag

SEQ ID NO: 3531564 - DNA, 25 bp, Homo sapien
cttgtgtcctaattggtctgtgccc

SEQ ID NO: 3531565 - DNA, 25 bp, Homo sapien
gaacctggacgcacattggatgtcc

SEQ ID NO: 3531566 - DNA, 25 bp, Homo sapien
cacattggatgtcccgatgttgatg

SEQ ID NO: 3531567 - DNA, 25 bp, Homo sapien
aaaaccactcatggaacctggacgc

SEQ ID NO: 3531568 - DNA, 25 bp, Homo sapien
gtcccgatgttgatgctgccaaagg

SEQ ID NO: 3531569 - DNA, 25 bp, Homo sapien
ggtgagcctccagcagtagatatct

SEQ ID NO: 3531570 - DNA, 25 bp, Homo sapien
cagaactggtgtcttaaccttcaag

SEQ ID NO: 3531571 - DNA, 25 bp, Homo sapien
gaatctgtcttcgttgggcaaatag

SEQ ID NO: 3531572 - DNA, 25 bp, Homo sapien
tgtgttactatgatcttgcccagtc

SEQ ID NO: 3531573 - DNA, 25 bp, Homo sapien
caagaccaaatggacaaagagaaag

SEQ ID NO: 3531574 - DNA, 25 bp, Homo sapien
ggaggccgccacttggaatgttccc

SEQ ID NO: 3531575 - DNA, 25 bp, Homo sapien
agcggctccacctgcggaccgggaa

SEQ ID NO: 3531576 - DNA, 25 bp, Homo sapien
tgcaaactttctggcccgtggtggc

SEQ ID NO: 3531577 - DNA, 25 bp, Homo sapien
cgggacgcgaggccgtggacaccgg

SEQ ID NO: 3531578 - DNA, 25 bp, Homo sapien
ctgcgcctccgcttgctccggcgct

SEQ ID NO: 3531579 - DNA, 25 bp, Homo sapien
gcggcgggggcgctccctttgtggc

SEQ ID NO: 3531580 - DNA, 25 bp, Homo sapien
ctccggcgctccgccggcgagctcg

SEQ ID NO: 3531581 - DNA, 25 bp, Homo sapien
gcccctccgcgctcaaggacagtca

SEQ ID NO: 3531582 - DNA, 25 bp, Homo sapien
cgccaaagagagagagcgaatcacc

SEQ ID NO: 3531583 - DNA, 25 bp, Homo sapien
aagagagagagcgaatcaccgggct

SEQ ID NO: 3531584 - DNA, 25 bp, Homo sapien
caaagagagagagcgaatcaccggg

SEQ ID NO: 3531585 - DNA, 25 bp, Homo sapien
ccaaagagagagagcgaatcaccgg

SEQ ID NO: 3531586 - DNA, 25 bp, Homo sapien
cccggtccctctcgcgcgctgtcgc

SEQ ID NO: 3531587 - DNA, 25 bp, Homo sapien
cgcccggtccctctcgcgcgctgtc

SEQ ID NO: 3531588 - DNA, 25 bp, Homo sapien
accgcccggtccctctcgcgcgctg

SEQ ID NO: 3531589 - DNA, 25 bp, Homo sapien
ggtccctctcgcgcgctgtcgccgg

SEQ ID NO: 3531590 - DNA, 25 bp, Homo sapien
cgcccgcggggatggtgtgcgcccg

SEQ ID NO: 3531591 - DNA, 25 bp, Homo sapien
cggggatggtgtgcgcccgcccggc

SEQ ID NO: 3531592 - DNA, 25 bp, Homo sapien
ccgcggggatggtgtgcgcccgccc

SEQ ID NO: 3531593 - DNA, 25 bp, Homo sapien
gcccgcggggatggtgtgcgcccgc

SEQ ID NO: 3531594 - DNA, 25 bp, Homo sapien
ggaccgtgcgtctctctccgggctt

SEQ ID NO: 3531595 - DNA, 25 bp, Homo sapien
ctcgggaaggtctattttcgctcag

SEQ ID NO: 3531596 - DNA, 25 bp, Homo sapien
gggaccgtgcgtctctctccgggct

SEQ ID NO: 3531597 - DNA, 25 bp, Homo sapien
cctctctcgggaaggtctattttcg

SEQ ID NO: 3531598 - DNA, 25 bp, Homo sapien
ctcctggggattagcaatacaaaca

SEQ ID NO: 3531599 - DNA, 25 bp, Homo sapien
tggggattagcaatacaaacagcag

SEQ ID NO: 3531600 - DNA, 25 bp, Homo sapien
gggattagcaatacaaacagcagca

SEQ ID NO: 3531601 - DNA, 25 bp, Homo sapien
ggctcctggggattagcaatacaaa

SEQ ID NO: 3531602 - DNA, 25 bp, Homo sapien
gctcagcgaacacctctccttggaa

SEQ ID NO: 3531603 - DNA, 25 bp, Homo sapien
ggaggctgggcaaccactaaatcat

SEQ ID NO: 3531604 - DNA, 25 bp, Homo sapien
aaccactaaatcattcttcagggct

SEQ ID NO: 3531605 - DNA, 25 bp, Homo sapien
ccagtgtcggggacggggagagccg

SEQ ID NO: 3531606 - DNA, 25 bp, Homo sapien
taaggcagaaagtaacccacgaaca

SEQ ID NO: 3531607 - DNA, 25 bp, Homo sapien
aaggcagaaagtaacccacgaacag

SEQ ID NO: 3531608 - DNA, 25 bp, Homo sapien
ctcgagcaagcaagaaaagacaaga

SEQ ID NO: 3531609 - DNA, 25 bp, Homo sapien
agaaaagacaagaatgtgaaataag

SEQ ID NO: 3531610 - DNA, 25 bp, Homo sapien
gcaagaaaagacaagaatgtgaaat

SEQ ID NO: 3531611 - DNA, 25 bp, Homo sapien
aaaagacaagaatgtgaaataagca

SEQ ID NO: 3531612 - DNA, 25 bp, Homo sapien
cagaaagcggactcctgcggttaaa

SEQ ID NO: 3531613 - DNA, 25 bp, Homo sapien
ctctcagtcggctggtggcggaatc

SEQ ID NO: 3531614 - DNA, 25 bp, Homo sapien
tagtagtttgcccttccgtggagaa

SEQ ID NO: 3531615 - DNA, 25 bp, Homo sapien
tgccagtagtatcccgaccagagaa

SEQ ID NO: 3531616 - DNA, 25 bp, Homo sapien
ggattctaacccatccttgaccagc

SEQ ID NO: 3531617 - DNA, 25 bp, Homo sapien
acttatcagttagcatgtcctagga

SEQ ID NO: 3531618 - DNA, 25 bp, Homo sapien
tcaatgtggtggttaaacgctggaa

SEQ ID NO: 3531619 - DNA, 25 bp, Homo sapien
tcacagcaggaatttaaactcccag

SEQ ID NO: 3531620 - DNA, 25 bp, Homo sapien
tcaggacatccaccaaagagtgctg

SEQ ID NO: 3531621 - DNA, 25 bp, Homo sapien
gaggcaatcataatgtcaccagggc

SEQ ID NO: 3531622 - DNA, 25 bp, Homo sapien
gaagttcacctaagacctcggcaag

SEQ ID NO: 3531623 - DNA, 25 bp, Homo sapien
agaaataactgcctaccggtgggat

SEQ ID NO: 3531624 - DNA, 25 bp, Homo sapien
gagttaggttcacagaggcctggcc

SEQ ID NO: 3531625 - DNA, 25 bp, Homo sapien
tgggacaggtgagttaggttcacag

SEQ ID NO: 3531626 - DNA, 25 bp, Homo sapien
aggtgagttaggttcacagaggcct

SEQ ID NO: 3531627 - DNA, 25 bp, Homo sapien
acaggtgagttaggttcacagaggc

SEQ ID NO: 3531628 - DNA, 25 bp, Homo sapien
gccattcctggccattggctcttca

SEQ ID NO: 3531629 - DNA, 25 bp, Homo sapien
ccagaagccattcctggccattggc

SEQ ID NO: 3531630 - DNA, 25 bp, Homo sapien
gtgtctctgatctaagccattgcac

SEQ ID NO: 3531631 - DNA, 25 bp, Homo sapien
tctaagccattgcaccctagacagg

SEQ ID NO: 3531632 - DNA, 25 bp, Homo sapien
tgttaatgatgctccctaggaatgc

SEQ ID NO: 3531633 - DNA, 25 bp, Homo sapien
tccagattcttaagcgacaaacctc

SEQ ID NO: 3531634 - DNA, 25 bp, Homo sapien
aaggagtagagctggaatcttgtta

SEQ ID NO: 3531635 - DNA, 25 bp, Homo sapien
aatgcccattgttgagggaggtatc

SEQ ID NO: 3531636 - DNA, 25 bp, Homo sapien
cattaaaaagttctagagctatata

SEQ ID NO: 3531637 - DNA, 25 bp, Homo sapien
acatatgattccaccttaaagagaa

SEQ ID NO: 3531638 - DNA, 25 bp, Homo sapien
cattgagtgatataagccagtcctg

SEQ ID NO: 3531639 - DNA, 25 bp, Homo sapien
cctgagaggacaaagactatatatg

SEQ ID NO: 3531640 - DNA, 25 bp, Homo sapien
cctctccactagctactgcaagttc

SEQ ID NO: 3531641 - DNA, 25 bp, Homo sapien
gcctctccactagctactgcaagtt

SEQ ID NO: 3531642 - DNA, 25 bp, Homo sapien
gagaggaaccctctggtttagacag

SEQ ID NO: 3531643 - DNA, 25 bp, Homo sapien
agaaaatgagaggaaccctctggtt

SEQ ID NO: 3531644 - DNA, 25 bp, Homo sapien
aaatgagaggaaccctctggtttag

SEQ ID NO: 3531645 - DNA, 25 bp, Homo sapien
ctgaaagaaaatgagaggaaccctc

SEQ ID NO: 3531646 - DNA, 25 bp, Homo sapien
aaattcttatcttcagttagagaaa

SEQ ID NO: 3531647 - DNA, 25 bp, Homo sapien
attcttatcttcagttagagaaatg

SEQ ID NO: 3531648 - DNA, 25 bp, Homo sapien
aattcttatcttcagttagagaaat

SEQ ID NO: 3531649 - DNA, 25 bp, Homo sapien
gtggccttgccattgtatgcacctg

SEQ ID NO: 3531650 - DNA, 25 bp, Homo sapien
tatcaggtggccttgccattgtatg

SEQ ID NO: 3531651 - DNA, 25 bp, Homo sapien
aacaggactggtgtatcaggtggcc

SEQ ID NO: 3531652 - DNA, 25 bp, Homo sapien
ttttccaaatgaacaggactggtgt

SEQ ID NO: 3531653 - DNA, 25 bp, Homo sapien
gtgaaaaagggcaggtagcctggtg

SEQ ID NO: 3531654 - DNA, 25 bp, Homo sapien
cgctttgcaaatctcttatccctct

SEQ ID NO: 3531655 - DNA, 25 bp, Homo sapien
tatctgcaactgtttgtgtctcacg

SEQ ID NO: 3531656 - DNA, 25 bp, Homo sapien
aatcccccatgagtgaaaaagggca

SEQ ID NO: 3531657 - DNA, 25 bp, Homo sapien
tgttacgtgggctgataggacctcg

SEQ ID NO: 3531658 - DNA, 25 bp, Homo sapien
catatactccttctgggaagctggc

SEQ ID NO: 3531659 - DNA, 25 bp, Homo sapien
ctggcatatcatctggagctagtct

SEQ ID NO: 3531660 - DNA, 25 bp, Homo sapien
caggatacactatgccctctgagag

SEQ ID NO: 3531661 - DNA, 25 bp, Homo sapien
cccatacttctccacagatattcaa

SEQ ID NO: 3531662 - DNA, 25 bp, Homo sapien
cctgagggaaggactcattaccgtc

SEQ ID NO: 3531663 - DNA, 25 bp, Homo sapien
tgctaggagtgacatattgcaccca

SEQ ID NO: 3531664 - DNA, 25 bp, Homo sapien
tccaccatggttagggcatattgtg

SEQ ID NO: 3531665 - DNA, 25 bp, Homo sapien
cactttcctcatccgccttggtttt

SEQ ID NO: 3531666 - DNA, 25 bp, Homo sapien
tctgtgatggaaggaacttgtagcc

SEQ ID NO: 3531667 - DNA, 25 bp, Homo sapien
caaagtagatgctcccaaatctttg

SEQ ID NO: 3531668 - DNA, 25 bp, Homo sapien
ggcttctctgaagcaccccattaca

SEQ ID NO: 3531669 - DNA, 25 bp, Homo sapien
ccagaggcccttgtgaatagcaaag

SEQ ID NO: 3531670 - DNA, 25 bp, Homo sapien
gcctgccccacggataccttctggg

SEQ ID NO: 3531671 - DNA, 25 bp, Homo sapien
tttgcacctgttccttctcgggagg

SEQ ID NO: 3531672 - DNA, 25 bp, Homo sapien
gatgatgtaatcctggtggcttccc

SEQ ID NO: 3531673 - DNA, 25 bp, Homo sapien
gaggatgttgcaaatccagggtttg

SEQ ID NO: 3531674 - DNA, 25 bp, Homo sapien
tgcgtggaatcctaggccatcaggg

SEQ ID NO: 3531675 - DNA, 25 bp, Homo sapien
caaggcccgttgctgttctttgagg

SEQ ID NO: 3531676 - DNA, 25 bp, Homo sapien
gtctatctgatagggcggagccttc

SEQ ID NO: 3531677 - DNA, 25 bp, Homo sapien
ctcctactcagaatgtggagacttg

SEQ ID NO: 3531678 - DNA, 25 bp, Homo sapien
tcctactcagaatgtggagacttgt

SEQ ID NO: 3531679 - DNA, 25 bp, Homo sapien
tgtgatcctcagtttggacgaattc

SEQ ID NO: 3531680 - DNA, 25 bp, Homo sapien
tcagaccctcatcctcctactcaga

SEQ ID NO: 3531681 - DNA, 25 bp, Homo sapien
gccactataggctctcctttccttg

SEQ ID NO: 3531682 - DNA, 25 bp, Homo sapien
tgttgcagttctctggaatggctgc

SEQ ID NO: 3531683 - DNA, 25 bp, Homo sapien
tgaagtcctggtttgcaatctgctg

SEQ ID NO: 3531684 - DNA, 25 bp, Homo sapien
ggtttgcaatctgctgttgcagttc

SEQ ID NO: 3531685 - DNA, 25 bp, Homo sapien
tgtcagctacctcccccgcatgcat

SEQ ID NO: 3531686 - DNA, 25 bp, Homo sapien
gtctgtcagctacctcccccgcatg

SEQ ID NO: 3531687 - DNA, 25 bp, Homo sapien
gcgcccctgtctgtcagctacctcc

SEQ ID NO: 3531688 - DNA, 25 bp, Homo sapien
ctgtctgtcagctacctcccccgca

SEQ ID NO: 3531689 - DNA, 25 bp, Homo sapien
gacaataaccagaggccaagtgaca

SEQ ID NO: 3531690 - DNA, 25 bp, Homo sapien
agttttccactccattacacccagg

SEQ ID NO: 3531691 - DNA, 25 bp, Homo sapien
aaattcactgtcagagggagccgtg

SEQ ID NO: 3531692 - DNA, 25 bp, Homo sapien
gggagccgtgtatagagttttccac

SEQ ID NO: 3531693 - DNA, 25 bp, Homo sapien
tcttttttatcgccatcatatttac

SEQ ID NO: 3531694 - DNA, 25 bp, Homo sapien
taagcttagcaaattgcccatggca

SEQ ID NO: 3531695 - DNA, 25 bp, Homo sapien
caacttggtgctgacaatctcctct

SEQ ID NO: 3531696 - DNA, 25 bp, Homo sapien
tgcacagcctgttccgggacatcaa

SEQ ID NO: 3531697 - DNA, 25 bp, Homo sapien
gaataccctccatttccacagtgag

SEQ ID NO: 3531698 - DNA, 25 bp, Homo sapien
tggccagtcctcaaacagttaaaca

SEQ ID NO: 3531699 - DNA, 25 bp, Homo sapien
tactagcaggtatatgccccaaaga

SEQ ID NO: 3531700 - DNA, 25 bp, Homo sapien
gatgtgatgaaattggttgaacccc

SEQ ID NO: 3531701 - DNA, 25 bp, Homo sapien
taggtgccacggcatggatgaacct

SEQ ID NO: 3531702 - DNA, 25 bp, Homo sapien
ggtgccataatggaaggccctggaa

SEQ ID NO: 3531703 - DNA, 25 bp, Homo sapien
tctagtcaaatccaaagggttgggc

SEQ ID NO: 3531704 - DNA, 25 bp, Homo sapien
caagagctagaggaatgaacagaca

SEQ ID NO: 3531705 - DNA, 25 bp, Homo sapien
ccatcactgggagtaacgaagacaa

SEQ ID NO: 3531706 - DNA, 25 bp, Homo sapien
cagtatgacttcacaaaacactcaa

SEQ ID NO: 3531707 - DNA, 25 bp, Homo sapien
tgccaactgcgataaaatagagaaa

SEQ ID NO: 3531708 - DNA, 25 bp, Homo sapien
gaagttgaatctgatatttgccaac

SEQ ID NO: 3531709 - DNA, 25 bp, Homo sapien
tcagtatgacttcacaaaacactca

SEQ ID NO: 3531710 - DNA, 25 bp, Homo sapien
aaaggcctggtggaacaactaactg

SEQ ID NO: 3531711 - DNA, 25 bp, Homo sapien
cactgaaggagctgtttgtttccaa

SEQ ID NO: 3531712 - DNA, 25 bp, Homo sapien
gcctggtggaacaactaactgtaag

SEQ ID NO: 3531713 - DNA, 25 bp, Homo sapien
cagcccccactgaaggagctgtttg

SEQ ID NO: 3531714 - DNA, 25 bp, Homo sapien
gcctttagtcaagaatggcttttga

SEQ ID NO: 3531715 - DNA, 25 bp, Homo sapien
catttattccctcatcgtgtgcgtg

SEQ ID NO: 3531716 - DNA, 25 bp, Homo sapien
tctgaacgcctatagcatttattcc

SEQ ID NO: 3531717 - DNA, 25 bp, Homo sapien
cagtgatctcctgttcatctgaacg

SEQ ID NO: 3531718 - DNA, 25 bp, Homo sapien
tcacaattcccttcccgagaggacg

SEQ ID NO: 3531719 - DNA, 25 bp, Homo sapien
cactggctcctttcgagcaatagga

SEQ ID NO: 3531720 - DNA, 25 bp, Homo sapien
aataggacttcctgtctgatcggag

SEQ ID NO: 3531721 - DNA, 25 bp, Homo sapien
aggacgggcgctgatgtgttttctc

SEQ ID NO: 3531722 - DNA, 25 bp, Homo sapien
gccaaacccaacagcattcggcaat

SEQ ID NO: 3531723 - DNA, 25 bp, Homo sapien
taatagaatccagcgaggcctcctg

SEQ ID NO: 3531724 - DNA, 25 bp, Homo sapien
tcctgctccgataaggccagagcca

SEQ ID NO: 3531725 - DNA, 25 bp, Homo sapien
cagggcactgtgtagccatgtaaac

SEQ ID NO: 3531726 - DNA, 25 bp, Homo sapien
aattatcaaaatcttgtctactttt

SEQ ID NO: 3531727 - DNA, 25 bp, Homo sapien
gacaattatcaaaatcttgtctact

SEQ ID NO: 3531728 - DNA, 25 bp, Homo sapien
acaattatcaaaatcttgtctactt

SEQ ID NO: 3531729 - DNA, 25 bp, Homo sapien
caattatcaaaatcttgtctacttt

SEQ ID NO: 3531730 - DNA, 25 bp, Homo sapien
tatatgactgtatgaagacccaaag

SEQ ID NO: 3531731 - DNA, 25 bp, Homo sapien
agccagaagcatcctatatgactgt

SEQ ID NO: 3531732 - DNA, 25 bp, Homo sapien
tggggggatcttgccaaggtcagcc

SEQ ID NO: 3531733 - DNA, 25 bp, Homo sapien
cctatatgactgtatgaagacccaa

SEQ ID NO: 3531734 - DNA, 25 bp, Homo sapien
cagtgggataattccacactttcat

SEQ ID NO: 3531735 - DNA, 25 bp, Homo sapien
gagcccagtgggataattccacact

SEQ ID NO: 3531736 - DNA, 25 bp, Homo sapien
gcccagtgggataattccacacttt

SEQ ID NO: 3531737 - DNA, 25 bp, Homo sapien
ccaagacatttgcagagtggatttg

SEQ ID NO: 3531738 - DNA, 25 bp, Homo sapien
tcccagatgtttgacccaaagccac

SEQ ID NO: 3531739 - DNA, 25 bp, Homo sapien
ctacaactgtgtatctttgggtcct

SEQ ID NO: 3531740 - DNA, 25 bp, Homo sapien
caccagccataaacagtggatgtgg

SEQ ID NO: 3531741 - DNA, 25 bp, Homo sapien
catgtatttgactatctcccagatg

SEQ ID NO: 3531742 - DNA, 25 bp, Homo sapien
gacgccggattcctctttaggagcc

SEQ ID NO: 3531743 - DNA, 25 bp, Homo sapien
ccgacgccggattcctctttaggag

SEQ ID NO: 3531744 - DNA, 25 bp, Homo sapien
ctcgctgatagcagtggccttctaa

SEQ ID NO: 3531745 - DNA, 25 bp, Homo sapien
tggccttctaagagaaaattcctcc

SEQ ID NO: 3531746 - DNA, 25 bp, Homo sapien
ctaggcttcggcaagaatcttttgc

SEQ ID NO: 3531747 - DNA, 25 bp, Homo sapien
tatggtggagcaaggtcgtctacct

SEQ ID NO: 3531748 - DNA, 25 bp, Homo sapien
ggtggagcaaggtcgtctacctcat

SEQ ID NO: 3531749 - DNA, 25 bp, Homo sapien
ctatggtggagcaaggtcgtctacc

SEQ ID NO: 3531750 - DNA, 25 bp, Homo sapien
gagcaaggtcgtctacctcatcaca

SEQ ID NO: 3531751 - DNA, 25 bp, Homo sapien
gtagcggacagaggaagatgaagca

SEQ ID NO: 3531752 - DNA, 25 bp, Homo sapien
gagagatctgactgcatcctccacc

SEQ ID NO: 3531753 - DNA, 25 bp, Homo sapien
cctccacctagagcccctgtcattc

SEQ ID NO: 3531754 - DNA, 25 bp, Homo sapien
ggaatgatgcagctcaggagagatc

SEQ ID NO: 3531755 - DNA, 25 bp, Homo sapien
gcaggtctatataagcattctacca

SEQ ID NO: 3531756 - DNA, 25 bp, Homo sapien
caggtctatataagcattctaccat

SEQ ID NO: 3531757 - DNA, 25 bp, Homo sapien
tctctttacagaactcagatttcaa

SEQ ID NO: 3531758 - DNA, 25 bp, Homo sapien
tcagcaggcatagaggccgagtgcc

SEQ ID NO: 3531759 - DNA, 25 bp, Homo sapien
tagaggccgagtgccagggtgacat

SEQ ID NO: 3531760 - DNA, 25 bp, Homo sapien
caagagcagatgtagcaaactccag

SEQ ID NO: 3531761 - DNA, 25 bp, Homo sapien
tccaaagaacgccaaggaatatgat

SEQ ID NO: 3531762 - DNA, 25 bp, Homo sapien
tgatcttgcaatactatagggctgc

SEQ ID NO: 3531763 - DNA, 25 bp, Homo sapien
gatgttagcacagcattcacgagga

SEQ ID NO: 3531764 - DNA, 25 bp, Homo sapien
cagctctagctccaaagaacgccaa

SEQ ID NO: 3531765 - DNA, 25 bp, Homo sapien
tctctcggcatatttctctcgatat

SEQ ID NO: 3531766 - DNA, 25 bp, Homo sapien
gcacctcgagtttgccgtccttttc

SEQ ID NO: 3531767 - DNA, 25 bp, Homo sapien
tcttctctcggcatatttctctcga

SEQ ID NO: 3531768 - DNA, 25 bp, Homo sapien
cctgaatcagcacctcgagtttgcc

SEQ ID NO: 3531769 - DNA, 25 bp, Homo sapien
gaacagtgggtttggtagaactctc

SEQ ID NO: 3531770 - DNA, 25 bp, Homo sapien
tagcacttaagagttcccagcacac

SEQ ID NO: 3531771 - DNA, 25 bp, Homo sapien
taaccaggatatcttgaggtcggag

SEQ ID NO: 3531772 - DNA, 25 bp, Homo sapien
caccccaaggctggaataattctct

SEQ ID NO: 3531773 - DNA, 25 bp, Homo sapien
ctctctctttcctcccttctccgga

SEQ ID NO: 3531774 - DNA, 25 bp, Homo sapien
tctctctttcctcccttctccggaa

SEQ ID NO: 3531775 - DNA, 25 bp, Homo sapien
ctctctttcctcccttctccggaag

SEQ ID NO: 3531776 - DNA, 25 bp, Homo sapien
agcggcagcaagtcgtccggaccgc

SEQ ID NO: 3531777 - DNA, 25 bp, Homo sapien
tccttgcggtctgaagatgccctcg

SEQ ID NO: 3531778 - DNA, 25 bp, Homo sapien
gctcgctgcgcgttttgtcccgcgt

SEQ ID NO: 3531779 - DNA, 25 bp, Homo sapien
cgtctcctgactggccgctcttgtc

SEQ ID NO: 3531780 - DNA, 25 bp, Homo sapien
ggcgctgtccagaccgaggccatga

SEQ ID NO: 3531781 - DNA, 25 bp, Homo sapien
cgaggccatgaagcagattctcggg

SEQ ID NO: 3531782 - DNA, 25 bp, Homo sapien
gattctcggggtgatcgacaagaaa

SEQ ID NO: 3531783 - DNA, 25 bp, Homo sapien
ggtgatcgacaagaaacttcggaac

SEQ ID NO: 3531784 - DNA, 25 bp, Homo sapien
ccagaaaacgggctcttggaagagg

SEQ ID NO: 3531785 - DNA, 25 bp, Homo sapien
ttcgtctcgggagcgttactaggtc

SEQ ID NO: 3531786 - DNA, 25 bp, Homo sapien
accctggtcgctggagccttcgctt

SEQ ID NO: 3531787 - DNA, 25 bp, Homo sapien
gcgggagcttcgtgcccagaaaacg

SEQ ID NO: 3531788 - DNA, 25 bp, Homo sapien
cgatttctctgacgagggcccaaaa

SEQ ID NO: 3531789 - DNA, 25 bp, Homo sapien
cgtcaggacttcactgtatggtgcc

SEQ ID NO: 3531790 - DNA, 25 bp, Homo sapien
tctttattactcttccgctgtgggt

SEQ ID NO: 3531791 - DNA, 25 bp, Homo sapien
gttaccatgcactcgagacctgtcg

SEQ ID NO: 3531792 - DNA, 25 bp, Homo sapien
ttacagattaagcatacaatttgcc

SEQ ID NO: 3531793 - DNA, 25 bp, Homo sapien
ccaccttagaatttagtccagttca

SEQ ID NO: 3531794 - DNA, 25 bp, Homo sapien
tatggaatgacttaggttggaatgg

SEQ ID NO: 3531795 - DNA, 25 bp, Homo sapien
tagggctagatgaagactagtactg

SEQ ID NO: 3531796 - DNA, 25 bp, Homo sapien
gactattaacattactttgctgcgc

SEQ ID NO: 3531797 - DNA, 25 bp, Homo sapien
gccttgtgttgttaaccttacatgt

SEQ ID NO: 3531798 - DNA, 25 bp, Homo sapien
ctaaattggtaataagctctttgtg

SEQ ID NO: 3531799 - DNA, 25 bp, Homo sapien
ctgcctcggcgtccaaaacttcttg

SEQ ID NO: 3531800 - DNA, 25 bp, Homo sapien
agaatcacccagaagactcaatacc

SEQ ID NO: 3531801 - DNA, 25 bp, Homo sapien
tcaataccaactacaaattgctggg

SEQ ID NO: 3531802 - DNA, 25 bp, Homo sapien
tccaggttctactgggctattacaa

SEQ ID NO: 3531803 - DNA, 25 bp, Homo sapien
tttgaacgagatgagtgtttctcaa

SEQ ID NO: 3531804 - DNA, 25 bp, Homo sapien
tcctgtactggagcctttaactccc

SEQ ID NO: 3531805 - DNA, 25 bp, Homo sapien
ccacctctaccttataggcatgagc

SEQ ID NO: 3531806 - DNA, 25 bp, Homo sapien
gatactggagcctttaactctgggg

SEQ ID NO: 3531807 - DNA, 25 bp, Homo sapien
tttaactccccacaagtagcttgga

SEQ ID NO: 3531808 - DNA, 25 bp, Homo sapien
tacacccagcctggctatgaatttc

SEQ ID NO: 3531809 - DNA, 25 bp, Homo sapien
ttactaagtaattcaagaggagcag

SEQ ID NO: 3531810 - DNA, 25 bp, Homo sapien
tggctactttgtacatggatacaca

SEQ ID NO: 3531811 - DNA, 25 bp, Homo sapien
tctatgtaaaaagatgacaccgatg

SEQ ID NO: 3531812 - DNA, 25 bp, Homo sapien
tcttaaactagaaagtgcgtgggag

SEQ ID NO: 3531813 - DNA, 25 bp, Homo sapien
tggcacttaccatggttccccagac

SEQ ID NO: 3531814 - DNA, 25 bp, Homo sapien
ggatcaatcatgcaccctgctttca

SEQ ID NO: 3531815 - DNA, 25 bp, Homo sapien
cgtgggagaacaaacggtaatgagc

SEQ ID NO: 3531816 - DNA, 25 bp, Homo sapien
ggtttcctctattggccataacatg

SEQ ID NO: 3531817 - DNA, 25 bp, Homo sapien
gcaatgccttttggacctctattag

SEQ ID NO: 3531818 - DNA, 25 bp, Homo sapien
tctgatttgagggaggttaaacatc

SEQ ID NO: 3531819 - DNA, 25 bp, Homo sapien
tttgaatactagtagaaactggcca

SEQ ID NO: 3531820 - DNA, 25 bp, Homo sapien
tctgcatgttctgtcctaagcgtca

SEQ ID NO: 3531821 - DNA, 25 bp, Homo sapien
taagcgtcatcttgagccttgcaca

SEQ ID NO: 3531822 - DNA, 25 bp, Homo sapien
tatgggatgtaatccggatggccgc

SEQ ID NO: 3531823 - DNA, 25 bp, Homo sapien
ttaaattggagcactgaacgttcag

SEQ ID NO: 3531824 - DNA, 25 bp, Homo sapien
caggaattcttccagtaggtgctca

SEQ ID NO: 3531825 - DNA, 25 bp, Homo sapien
tactctgttggaatttgtgctagca

SEQ ID NO: 3531826 - DNA, 25 bp, Homo sapien
gaattctccgtttctcctggaggca

SEQ ID NO: 3531827 - DNA, 25 bp, Homo sapien
ccttagatgcatagggagagtctct

SEQ ID NO: 3531828 - DNA, 25 bp, Homo sapien
gaagtaagttcttcacacagtgacc

SEQ ID NO: 3531829 - DNA, 25 bp, Homo sapien
catgacatttacaatcaggactgaa

SEQ ID NO: 3531830 - DNA, 25 bp, Homo sapien
gcctgggatgtaccacaaccatatg

SEQ ID NO: 3531831 - DNA, 25 bp, Homo sapien
cctagatgatgtatgcttgcagtcc

SEQ ID NO: 3531832 - DNA, 25 bp, Homo sapien
aacacaaatcgttggatccgtcgcg

SEQ ID NO: 3531833 - DNA, 25 bp, Homo sapien
gcaaccgcagtggacatctaggcct

SEQ ID NO: 3531834 - DNA, 25 bp, Homo sapien
cagtgggactaaaatgcgcaaccgc

SEQ ID NO: 3531835 - DNA, 25 bp, Homo sapien
tgaaaaccctggacctacgtgggca

SEQ ID NO: 3531836 - DNA, 25 bp, Homo sapien
ggatgccaagatcggtgtctgtgtt

SEQ ID NO: 3531837 - DNA, 25 bp, Homo sapien
gctgtgccttctctttcggagttgt

SEQ ID NO: 3531838 - DNA, 25 bp, Homo sapien
cgggagggccgggtatggatgccaa

SEQ ID NO: 3531839 - DNA, 25 bp, Homo sapien
gagttgttccgtgctcccacgtgct

SEQ ID NO: 3531840 - DNA, 25 bp, Homo sapien
aatacgcagccgctctcggcgcgtg

SEQ ID NO: 3531841 - DNA, 25 bp, Homo sapien
tgttttccgtggagcttgcccgcag

SEQ ID NO: 3531842 - DNA, 25 bp, Homo sapien
gataaccacctctaagtagtgcctg

SEQ ID NO: 3531843 - DNA, 25 bp, Homo sapien
tcggcgcgtgcttctcgagcgtcct

SEQ ID NO: 3531844 - DNA, 25 bp, Homo sapien
cagttggacacattacatcatggaa

SEQ ID NO: 3531845 - DNA, 25 bp, Homo sapien
gtcccaccatccagaagtagctact

SEQ ID NO: 3531846 - DNA, 25 bp, Homo sapien
gtctgtctgtacaaaggcttcaata

SEQ ID NO: 3531847 - DNA, 25 bp, Homo sapien
cactcccggcgagaacttttgaggt

SEQ ID NO: 3531848 - DNA, 25 bp, Homo sapien
gcctgaggcccttaagtacatcgct

SEQ ID NO: 3531849 - DNA, 25 bp, Homo sapien
ctgttaaaagcaacgagaggccccg

SEQ ID NO: 3531850 - DNA, 25 bp, Homo sapien
tgtgtgtctgtgagctcaacctggc

SEQ ID NO: 3531851 - DNA, 25 bp, Homo sapien
ggcagagtcactcccaaatgggtct

SEQ ID NO: 3531852 - DNA, 25 bp, Homo sapien
ccgcggttaggtgcgccagggtttg

SEQ ID NO: 3531853 - DNA, 25 bp, Homo sapien
ggcatccatggcagcccgcggttag

SEQ ID NO: 3531854 - DNA, 25 bp, Homo sapien
ggtttgctgatgttgtcttgtgctg

SEQ ID NO: 3531855 - DNA, 25 bp, Homo sapien
gaggaactccagtccgtcccggcat

SEQ ID NO: 3531856 - DNA, 25 bp, Homo sapien
ctgtagtttatgtagaatgccacat

SEQ ID NO: 3531857 - DNA, 25 bp, Homo sapien
ggctgcctggtggaatttggaaggt

SEQ ID NO: 3531858 - DNA, 25 bp, Homo sapien
tttcttctggtgggtcttggctgcc

SEQ ID NO: 3531859 - DNA, 25 bp, Homo sapien
ctgcctggtggaatttggaaggtgt

SEQ ID NO: 3531860 - DNA, 25 bp, Homo sapien
ttcttctggtgggtcttggctgcct

SEQ ID NO: 3531861 - DNA, 25 bp, Homo sapien
ttcagataggccagccatgagtgct

SEQ ID NO: 3531862 - DNA, 25 bp, Homo sapien
cttgcgaaatgaattcagataggcc

SEQ ID NO: 3531863 - DNA, 25 bp, Homo sapien
cagagtgacatctgtaaagcttggc

SEQ ID NO: 3531864 - DNA, 25 bp, Homo sapien
ggctgtcttaggaaatgtcacttgc

SEQ ID NO: 3531865 - DNA, 25 bp, Homo sapien
acgggacacaaagggggccgctgag

SEQ ID NO: 3531866 - DNA, 25 bp, Homo sapien
tcccggaggactccggatgaccagg

SEQ ID NO: 3531867 - DNA, 25 bp, Homo sapien
agtcccggaggactccggatgacca

SEQ ID NO: 3531868 - DNA, 25 bp, Homo sapien
actgctcatctggcccggaagtccc

SEQ ID NO: 3531869 - DNA, 25 bp, Homo sapien
ggagccagaatgcaactagatcttg

SEQ ID NO: 3531870 - DNA, 25 bp, Homo sapien
gtggatccctcatctggagccagaa

SEQ ID NO: 3531871 - DNA, 25 bp, Homo sapien
aagagaggaaatggtggatccctca

SEQ ID NO: 3531872 - DNA, 25 bp, Homo sapien
ctggagccagaatgcaactagatct

SEQ ID NO: 3531873 - DNA, 25 bp, Homo sapien
gccactttgaatggcaagtgctggg

SEQ ID NO: 3531874 - DNA, 25 bp, Homo sapien
ggaacttgtggggacgctggacaca

SEQ ID NO: 3531875 - DNA, 25 bp, Homo sapien
tggacacagacccatgaagggcagc

SEQ ID NO: 3531876 - DNA, 25 bp, Homo sapien
tgctggggacggacagcccgctcca

SEQ ID NO: 3531877 - DNA, 25 bp, Homo sapien
ttattgtacagttaaagtatcatac

SEQ ID NO: 3531878 - DNA, 25 bp, Homo sapien
cagtaagtgacaacattattgtaca

SEQ ID NO: 3531879 - DNA, 25 bp, Homo sapien
taaagtatcatacaatattacagca

SEQ ID NO: 3531880 - DNA, 25 bp, Homo sapien
ctttgtacatccagccaagcagcta

SEQ ID NO: 3531881 - DNA, 25 bp, Homo sapien
cagtgtctggtccataaatatgaca

SEQ ID NO: 3531882 - DNA, 25 bp, Homo sapien
agttgcacccagacagactgtgcct

SEQ ID NO: 3531883 - DNA, 25 bp, Homo sapien
agtttttaaggtgcggccagacagc

SEQ ID NO: 3531884 - DNA, 25 bp, Homo sapien
tgagtgccaccttctgaaatgcctg

SEQ ID NO: 3531885 - DNA, 25 bp, Homo sapien
taactgagcaagctggtagtcctga

SEQ ID NO: 3531886 - DNA, 25 bp, Homo sapien
ctgcagaattcgagggcaaggccgt

SEQ ID NO: 3531887 - DNA, 25 bp, Homo sapien
gaagcccaggcaccaaagacaatgg

SEQ ID NO: 3531888 - DNA, 25 bp, Homo sapien
taaaggagccgagagacttgaccag

SEQ ID NO: 3531889 - DNA, 25 bp, Homo sapien
ttttgaattactgcagacgactggg

SEQ ID NO: 3531890 - DNA, 25 bp, Homo sapien
tggggatttgggcagcctttgctat

SEQ ID NO: 3531891 - DNA, 25 bp, Homo sapien
acaagtttggggatttgggcagcct

SEQ ID NO: 3531892 - DNA, 25 bp, Homo sapien
accagcttttgaattactgcagacg

SEQ ID NO: 3531893 - DNA, 25 bp, Homo sapien
ggatggtctgagtttactgaggccc

SEQ ID NO: 3531894 - DNA, 25 bp, Homo sapien
ttcataaggattcctgtacccccag

SEQ ID NO: 3531895 - DNA, 25 bp, Homo sapien
gtctgagtttactgaggccctaggg

SEQ ID NO: 3531896 - DNA, 25 bp, Homo sapien
agccccagttgggatggtctgagtt

SEQ ID NO: 3531897 - DNA, 25 bp, Homo sapien
gctgcccttgagttgcaaactgaga

SEQ ID NO: 3531898 - DNA, 25 bp, Homo sapien
aacctggctccaagagggcctacaa

SEQ ID NO: 3531899 - DNA, 25 bp, Homo sapien
ggaaacagccccgtgaacctggctc

SEQ ID NO: 3531900 - DNA, 25 bp, Homo sapien
accagttagctacatctcccctttg

SEQ ID NO: 3531901 - DNA, 25 bp, Homo sapien
gcagtggatccaggccctgcacttt

SEQ ID NO: 3531902 - DNA, 25 bp, Homo sapien
ccgtagatgagctgccggaaggcat

SEQ ID NO: 3531903 - DNA, 25 bp, Homo sapien
cactttgctgctgcggccgtagatg

SEQ ID NO: 3531904 - DNA, 25 bp, Homo sapien
tgtagacagagtgcacgcgctctgc

SEQ ID NO: 3531905 - DNA, 25 bp, Homo sapien
gaatctgaggaaccaaagacaaggt

SEQ ID NO: 3531906 - DNA, 25 bp, Homo sapien
gaggtaaagccaacgtgacaggatg

SEQ ID NO: 3531907 - DNA, 25 bp, Homo sapien
cagaagactgtgaaggaggtaaagc

SEQ ID NO: 3531908 - DNA, 25 bp, Homo sapien
cagtgctgctgatgtcctagtttgg

SEQ ID NO: 3531909 - DNA, 25 bp, Homo sapien
ttcacggcactctccatgctgaggg

SEQ ID NO: 3531910 - DNA, 25 bp, Homo sapien
agcacaggatctcgcagtgcctctg

SEQ ID NO: 3531911 - DNA, 25 bp, Homo sapien
cttggcatatttgtaggtgttcacg

SEQ ID NO: 3531912 - DNA, 25 bp, Homo sapien
ctgggagcacaggatctcgcagtgc

SEQ ID NO: 3531913 - DNA, 25 bp, Homo sapien
catggccagaccagtggcccagaca

SEQ ID NO: 3531914 - DNA, 25 bp, Homo sapien
agaaagctcccgagtgccgtgtgcc

SEQ ID NO: 3531915 - DNA, 25 bp, Homo sapien
ggcccagacagcaccgaacagaaag

SEQ ID NO: 3531916 - DNA, 25 bp, Homo sapien
tcaggccccactaccttctgatact

SEQ ID NO: 3531917 - DNA, 25 bp, Homo sapien
gttcctccgtagtacagatactgca

SEQ ID NO: 3531918 - DNA, 25 bp, Homo sapien
ggattctgttcctccgtagtacaga

SEQ ID NO: 3531919 - DNA, 25 bp, Homo sapien
gggatctccatggattctgttcctc

SEQ ID NO: 3531920 - DNA, 25 bp, Homo sapien
caggatgtcagtggtggggatctcc

SEQ ID NO: 3531921 - DNA, 25 bp, Homo sapien
aagaggcccatgtgaatgccacgtg

SEQ ID NO: 3531922 - DNA, 25 bp, Homo sapien
gaagaggcccatgtgaatgccacgt

SEQ ID NO: 3531923 - DNA, 25 bp, Homo sapien
gggaagaggcccatgtgaatgccac

SEQ ID NO: 3531924 - DNA, 25 bp, Homo sapien
gtgggaagaggcccatgtgaatgcc

SEQ ID NO: 3531925 - DNA, 25 bp, Homo sapien
gagcctagtgaggttcccagttgga

SEQ ID NO: 3531926 - DNA, 25 bp, Homo sapien
agccggcacagtcgggctctgtcaa

SEQ ID NO: 3531927 - DNA, 25 bp, Homo sapien
caccagagggtctaggagaaggccc

SEQ ID NO: 3531928 - DNA, 25 bp, Homo sapien
tggctggctgaagaaacggctccag

SEQ ID NO: 3531929 - DNA, 25 bp, Homo sapien
cctggcagtccctagcaggatacag

SEQ ID NO: 3531930 - DNA, 25 bp, Homo sapien
tccctagcaggatacaggtcatgtg

SEQ ID NO: 3531931 - DNA, 25 bp, Homo sapien
gagccttgctatgggagctgggcag

SEQ ID NO: 3531932 - DNA, 25 bp, Homo sapien
ctggagccttgctatgggagctggg

SEQ ID NO: 3531933 - DNA, 25 bp, Homo sapien
ctgagtgggccacttggaagctgat

SEQ ID NO: 3531934 - DNA, 25 bp, Homo sapien
tgagtgggccacttggaagctgata

SEQ ID NO: 3531935 - DNA, 25 bp, Homo sapien
gctcaggacccatgtgacaggctct

SEQ ID NO: 3531936 - DNA, 25 bp, Homo sapien
cagaccacctgtccagcggttagag

SEQ ID NO: 3531937 - DNA, 25 bp, Homo sapien
agctgcagccccacaacggatggct

SEQ ID NO: 3531938 - DNA, 25 bp, Homo sapien
gtatctgtccttgcacgtctgtctg

SEQ ID NO: 3531939 - DNA, 25 bp, Homo sapien
cttcatgtcgctgatctcgatggtc

SEQ ID NO: 3531940 - DNA, 25 bp, Homo sapien
gaaaaatgtggtacttcatgtcgct

SEQ ID NO: 3531941 - DNA, 25 bp, Homo sapien
tacttcatgtcgctgatctcgatgg

SEQ ID NO: 3531942 - DNA, 25 bp, Homo sapien
tgtggtacttcatgtcgctgatctc

SEQ ID NO: 3531943 - DNA, 25 bp, Homo sapien
tgtcaccagcaggactttatgtgca

SEQ ID NO: 3531944 - DNA, 25 bp, Homo sapien
ctgtcaccagcaggactttatgtgc

SEQ ID NO: 3531945 - DNA, 25 bp, Homo sapien
agagggatatggctgaggagtcccc

SEQ ID NO: 3531946 - DNA, 25 bp, Homo sapien
gagggatatggctgaggagtcccct

SEQ ID NO: 3531947 - DNA, 25 bp, Homo sapien
tgctggggtttgcttgagtgtgctg

SEQ ID NO: 3531948 - DNA, 25 bp, Homo sapien
ctggggtttgcttgagtgtgctgtg

SEQ ID NO: 3531949 - DNA, 25 bp, Homo sapien
agggtcttccggatctctgggatgc

SEQ ID NO: 3531950 - DNA, 25 bp, Homo sapien
tagcagtgggtgaagatggtagcca

SEQ ID NO: 3531951 - DNA, 25 bp, Homo sapien
ccggcagggtcttccggatctctgg

SEQ ID NO: 3531952 - DNA, 25 bp, Homo sapien
ccatagcagtgggtgaagatggtag

SEQ ID NO: 3531953 - DNA, 25 bp, Homo sapien
cgactgcgagaacgaggtcctcaga

SEQ ID NO: 3531954 - DNA, 25 bp, Homo sapien
tgctggtcttgaggatgtcgaacat

SEQ ID NO: 3531955 - DNA, 25 bp, Homo sapien
tgtcgaacatgagctgcaagccctc

SEQ ID NO: 3531956 - DNA, 25 bp, Homo sapien
cagagactcgatccagatgtgcagc

SEQ ID NO: 3531957 - DNA, 25 bp, Homo sapien
ccgtgctcagcgctgtagtacatgg

SEQ ID NO: 3531958 - DNA, 25 bp, Homo sapien
gctccatggtgatgtccacgtagcc

SEQ ID NO: 3531959 - DNA, 25 bp, Homo sapien
catggcctcctgtagggccttggtg

SEQ ID NO: 3531960 - DNA, 25 bp, Homo sapien
gggacagcacgtccgctttagcctg

SEQ ID NO: 3531961 - DNA, 25 bp, Homo sapien
tgctctggggtacccgagggctcgg

SEQ ID NO: 3531962 - DNA, 25 bp, Homo sapien
gtacccgagggctcggagtttcatg

SEQ ID NO: 3531963 - DNA, 25 bp, Homo sapien
ccgagggctcggagtttcatggtct

SEQ ID NO: 3531964 - DNA, 25 bp, Homo sapien
ctcctgccccgacgggctgctctgg

SEQ ID NO: 3531965 - DNA, 25 bp, Homo sapien
cacagaatgttagaccccacagagg

SEQ ID NO: 3531966 - DNA, 25 bp, Homo sapien
atcaccgtcataggcgatggatcca

SEQ ID NO: 3531967 - DNA, 25 bp, Homo sapien
gatgaactgaagacggatgtcatgt

SEQ ID NO: 3531968 - DNA, 25 bp, Homo sapien
gcttttagcctcgtgagagcccaga

SEQ ID NO: 3531969 - DNA, 25 bp, Homo sapien
tgactgtcccaagggtcctgtgctc

SEQ ID NO: 3531970 - DNA, 25 bp, Homo sapien
caggcaggcagtctccacgcagggt

SEQ ID NO: 3531971 - DNA, 25 bp, Homo sapien
aggtgaactagccacggtgactgtc

SEQ ID NO: 3531972 - DNA, 25 bp, Homo sapien
aggcagtctccacgcagggtgaaga

SEQ ID NO: 3531973 - DNA, 25 bp, Homo sapien
gtggtgatgtgaaagatggcgcctg

SEQ ID NO: 3531974 - DNA, 25 bp, Homo sapien
gatgtgaaagatggcgcctggaggg

SEQ ID NO: 3531975 - DNA, 25 bp, Homo sapien
ggtgatgtgaaagatggcgcctgga

SEQ ID NO: 3531976 - DNA, 25 bp, Homo sapien
ctagaggtggtgatgtgaaagatgg

SEQ ID NO: 3531977 - DNA, 25 bp, Homo sapien
gctatttggacgtccaaggccactt

SEQ ID NO: 3531978 - DNA, 25 bp, Homo sapien
cacagctgagccgtatgctatttgg

SEQ ID NO: 3531979 - DNA, 25 bp, Homo sapien
ggaagcaatgtggtcctgagtgggc

SEQ ID NO: 3531980 - DNA, 25 bp, Homo sapien
gcatctcactgggaaatgggacggt

SEQ ID NO: 3531981 - DNA, 25 bp, Homo sapien
gagggaggagcccatgccgtgggcc

SEQ ID NO: 3531982 - DNA, 25 bp, Homo sapien
gggtcggcgcctcggctcagcaaca

SEQ ID NO: 3531983 - DNA, 25 bp, Homo sapien
ctcggctcagcaacaaactgaccag

SEQ ID NO: 3531984 - DNA, 25 bp, Homo sapien
aagcagttcatgtcctcgtggaggg

SEQ ID NO: 3531985 - DNA, 25 bp, Homo sapien
ctgccgagccctcgacatgggcacc

SEQ ID NO: 3531986 - DNA, 25 bp, Homo sapien
gttcactgccgagccctcgacatgg

SEQ ID NO: 3531987 - DNA, 25 bp, Homo sapien
cgtctccgcatagctgtcctcgccg

SEQ ID NO: 3531988 - DNA, 25 bp, Homo sapien
gtctccgcatagctgtcctcgccgc

SEQ ID NO: 3531989 - DNA, 25 bp, Homo sapien
cactgctcagcgtggcagggagcac

SEQ ID NO: 3531990 - DNA, 25 bp, Homo sapien
gaggagggcactgctcagcgtggca

SEQ ID NO: 3531991 - DNA, 25 bp, Homo sapien
ggagggcactgctcagcgtggcagg

SEQ ID NO: 3531992 - DNA, 25 bp, Homo sapien
gaggaggagggcactgctcagcgtg

SEQ ID NO: 3531993 - DNA, 25 bp, Homo sapien
ggaccacagagatgtgtccatgcag

SEQ ID NO: 3531994 - DNA, 25 bp, Homo sapien
ctggaccacagagatgtgtccatgc

SEQ ID NO: 3531995 - DNA, 25 bp, Homo sapien
tgtgtccatgcagcacagcgaatgt

SEQ ID NO: 3531996 - DNA, 25 bp, Homo sapien
gcacagcgaatgtcagtgaggtcca

SEQ ID NO: 3531997 - DNA, 25 bp, Homo sapien
tggatgtccaagtttgccccagcat

SEQ ID NO: 3531998 - DNA, 25 bp, Homo sapien
aagtttgccccagcatcaatcaaca

SEQ ID NO: 3531999 - DNA, 25 bp, Homo sapien
aacatctggaccatcgcttcgtccc

SEQ ID NO: 3532000 - DNA, 25 bp, Homo sapien
aggcgtacatcagtggcgtcatacc

SEQ ID NO: 3532001 - DNA, 25 bp, Homo sapien
catccatggtgttaaccccatccgg

SEQ ID NO: 3532002 - DNA, 25 bp, Homo sapien
tggcttggttgatgaggtccgtcct

SEQ ID NO: 3532003 - DNA, 25 bp, Homo sapien
tcagtagctgctcgggcatccagcc

SEQ ID NO: 3532004 - DNA, 25 bp, Homo sapien
cccacagttgagcatgcggaaaccc

SEQ ID NO: 3532005 - DNA, 25 bp, Homo sapien
taggtgatggccacgcgcatccact

SEQ ID NO: 3532006 - DNA, 25 bp, Homo sapien
gctgcctgccggatgtcgccgctgt

SEQ ID NO: 3532007 - DNA, 25 bp, Homo sapien
tgcggcggtgctctgcgtaggtgat

SEQ ID NO: 3532008 - DNA, 25 bp, Homo sapien
tgagctgccgaggttcacagtccag

SEQ ID NO: 3532009 - DNA, 25 bp, Homo sapien
gggcagcagagagagggtcaggcct

SEQ ID NO: 3532010 - DNA, 25 bp, Homo sapien
ggcagcagagagagggtcaggcctg

SEQ ID NO: 3532011 - DNA, 25 bp, Homo sapien
tggggcagcagagagagggtcaggc

SEQ ID NO: 3532012 - DNA, 25 bp, Homo sapien
tgtggggcagcagagagagggtcag

SEQ ID NO: 3532013 - DNA, 25 bp, Homo sapien
gctctgcccagaatggacggagctc

SEQ ID NO: 3532014 - DNA, 25 bp, Homo sapien
gaatggacggagctctttccctgct

SEQ ID NO: 3532015 - DNA, 25 bp, Homo sapien
ccagaatggacggagctctttccct

SEQ ID NO: 3532016 - DNA, 25 bp, Homo sapien
tgcccagaatggacggagctctttc

SEQ ID NO: 3532017 - DNA, 25 bp, Homo sapien
ccaggttttcagttatggaccaagt

SEQ ID NO: 3532018 - DNA, 25 bp, Homo sapien
tatagtgtacccaggttttcagtta

SEQ ID NO: 3532019 - DNA, 25 bp, Homo sapien
agtgtacccaggttttcagttatgg

SEQ ID NO: 3532020 - DNA, 25 bp, Homo sapien
tacccaggttttcagttatggacca

SEQ ID NO: 3532021 - DNA, 25 bp, Homo sapien
accgtcaggaacttgcaaagatgcc

SEQ ID NO: 3532022 - DNA, 25 bp, Homo sapien
gacggctccacgaacagacttcttt

SEQ ID NO: 3532023 - DNA, 25 bp, Homo sapien
cctttctcatggatcatgccgtgaa

SEQ ID NO: 3532024 - DNA, 25 bp, Homo sapien
ttcctaagcaagtgacggctccacg

SEQ ID NO: 3532025 - DNA, 25 bp, Homo sapien
tccaggactgttcattaagggctcc

SEQ ID NO: 3532026 - DNA, 25 bp, Homo sapien
taagggctccagagcactctcacga

SEQ ID NO: 3532027 - DNA, 25 bp, Homo sapien
aaaagacagctattgcacaggagag

SEQ ID NO: 3532028 - DNA, 25 bp, Homo sapien
cacaggagagtgttccaaatgcaac

SEQ ID NO: 3532029 - DNA, 25 bp, Homo sapien
ggtggctcaccagagaccacgagct

SEQ ID NO: 3532030 - DNA, 25 bp, Homo sapien
catgtgccagggactcgctttcttc

SEQ ID NO: 3532031 - DNA, 25 bp, Homo sapien
cctgcaagggccaggacatctgcct

SEQ ID NO: 3532032 - DNA, 25 bp, Homo sapien
taggaatcaggcctggttccagggc

SEQ ID NO: 3532033 - DNA, 25 bp, Homo sapien
tgagatgtgctcagggcctactctg

SEQ ID NO: 3532034 - DNA, 25 bp, Homo sapien
tgaaattcttgactggcaagcagtg

SEQ ID NO: 3532035 - DNA, 25 bp, Homo sapien
gcgtgagggctcttgaagcctgata

SEQ ID NO: 3532036 - DNA, 25 bp, Homo sapien
ctgctttgtgcatccacatcacaag

SEQ ID NO: 3532037 - DNA, 25 bp, Homo sapien
tggacaccgcagaaagtagtagagc

SEQ ID NO: 3532038 - DNA, 25 bp, Homo sapien
tgcatggcacgggagaccaagtcac

SEQ ID NO: 3532039 - DNA, 25 bp, Homo sapien
ggtgacgcccctgcatgtggtgcat

SEQ ID NO: 3532040 - DNA, 25 bp, Homo sapien
cgttcattgttcaaggtcattctcg

SEQ ID NO: 3532041 - DNA, 25 bp, Homo sapien
gctccttcggggtcagcttcagcct

SEQ ID NO: 3532042 - DNA, 25 bp, Homo sapien
gacaggaaacggctcatcattgtgt

SEQ ID NO: 3532043 - DNA, 25 bp, Homo sapien
gcacctccgctctaagaaaagcagc

SEQ ID NO: 3532044 - DNA, 25 bp, Homo sapien
attgtgtgaggccacaatgctgaga

SEQ ID NO: 3532045 - DNA, 25 bp, Homo sapien
caaagcatgactgtgcgagggccca

SEQ ID NO: 3532046 - DNA, 25 bp, Homo sapien
acttctcagggacggagatgaaacc

SEQ ID NO: 3532047 - DNA, 25 bp, Homo sapien
gggcccaagacagcccattgtccag

SEQ ID NO: 3532048 - DNA, 25 bp, Homo sapien
ctcagggacggagatgaaaccagaa

SEQ ID NO: 3532049 - DNA, 25 bp, Homo sapien
ggctcgctcgtcatggcccagggac

SEQ ID NO: 3532050 - DNA, 25 bp, Homo sapien
tccagctgggcataggcatcggctc

SEQ ID NO: 3532051 - DNA, 25 bp, Homo sapien
ataggcatcggctcgctcgtcatgg

SEQ ID NO: 3532052 - DNA, 25 bp, Homo sapien
tgggcataggcatcggctcgctcgt

SEQ ID NO: 3532053 - DNA, 25 bp, Homo sapien
ctgaagggcagtgccgccctgagtc

SEQ ID NO: 3532054 - DNA, 25 bp, Homo sapien
ggctgatgtggtgaaggccccctct

SEQ ID NO: 3532055 - DNA, 25 bp, Homo sapien
tggcagcgacccctctcatcacatc

SEQ ID NO: 3532056 - DNA, 25 bp, Homo sapien
gcgacccctctcatcacatccagtg

SEQ ID NO: 3532057 - DNA, 25 bp, Homo sapien
catccagtgctgacttagcaaagca

SEQ ID NO: 3532058 - DNA, 25 bp, Homo sapien
gctgggagagcccagtgcaggcctg

SEQ ID NO: 3532059 - DNA, 25 bp, Homo sapien
agagcccagtgcaggcctgactcct

SEQ ID NO: 3532060 - DNA, 25 bp, Homo sapien
ggagagcccagtgcaggcctgactc

SEQ ID NO: 3532061 - DNA, 25 bp, Homo sapien
ggccaaacagctgggagagcccagt

SEQ ID NO: 3532062 - DNA, 25 bp, Homo sapien
ggtaagggaataggaaattcagctg

SEQ ID NO: 3532063 - DNA, 25 bp, Homo sapien
aaattcagctgatttgtcaaaggat

SEQ ID NO: 3532064 - DNA, 25 bp, Homo sapien
gaaatattatgtcaatggagctagt

SEQ ID NO: 3532065 - DNA, 25 bp, Homo sapien
ctagtaacaggagctgtcagctcca

SEQ ID NO: 3532066 - DNA, 25 bp, Homo sapien
aagactgtaacataactgtcctcca

SEQ ID NO: 3532067 - DNA, 25 bp, Homo sapien
gactgtaacataactgtcctccaaa

SEQ ID NO: 3532068 - DNA, 25 bp, Homo sapien
agactgtaacataactgtcctccaa

SEQ ID NO: 3532069 - DNA, 25 bp, Homo sapien
caagactgtaacataactgtcctcc

SEQ ID NO: 3532070 - DNA, 25 bp, Homo sapien
aacaactgcttaagaagctggcggc

SEQ ID NO: 3532071 - DNA, 25 bp, Homo sapien
tatgggaaaactagggctctcgagt

SEQ ID NO: 3532072 - DNA, 25 bp, Homo sapien
aactagggctctcgagtgctttgca

SEQ ID NO: 3532073 - DNA, 25 bp, Homo sapien
caaaataggaaggtctccctctaag

SEQ ID NO: 3532074 - DNA, 25 bp, Homo sapien
ttctgggggaacgacagagcctgca

SEQ ID NO: 3532075 - DNA, 25 bp, Homo sapien
caacacagccgaggaccgagtggaa

SEQ ID NO: 3532076 - DNA, 25 bp, Homo sapien
agccctcccgactggagcagaggtg

SEQ ID NO: 3532077 - DNA, 25 bp, Homo sapien
ggaccgagtggaaacagtgaatcag

SEQ ID NO: 3532078 - DNA, 25 bp, Homo sapien
gaatcagcctgtttcagcagaacct

SEQ ID NO: 3532079 - DNA, 25 bp, Homo sapien
tggcccatgctctagctctgggaac

SEQ ID NO: 3532080 - DNA, 25 bp, Homo sapien
tgggtggcccatgctctagctctgg

SEQ ID NO: 3532081 - DNA, 25 bp, Homo sapien
gaactgtcacccctgctttgcagct

SEQ ID NO: 3532082 - DNA, 25 bp, Homo sapien
ctatctctgcatggggtgttgctcc

SEQ ID NO: 3532083 - DNA, 25 bp, Homo sapien
tgctctgacgcgttagagcagaagg

SEQ ID NO: 3532084 - DNA, 25 bp, Homo sapien
gaggctgactgctctgacgcgttag

SEQ ID NO: 3532085 - DNA, 25 bp, Homo sapien
gcagaggctgactgctctgacgcgt

SEQ ID NO: 3532086 - DNA, 25 bp, Homo sapien
ctgactgctctgacgcgttagagca

SEQ ID NO: 3532087 - DNA, 25 bp, Homo sapien
tttacagttccctgtgatgactgct

SEQ ID NO: 3532088 - DNA, 25 bp, Homo sapien
catagtccttgcctgcactaacatc

SEQ ID NO: 3532089 - DNA, 25 bp, Homo sapien
ctctttacagttccctgtgatgact

SEQ ID NO: 3532090 - DNA, 25 bp, Homo sapien
gtgatcagagcagggggaccggtga

SEQ ID NO: 3532091 - DNA, 25 bp, Homo sapien
gaagtagcaacaagtgatccatcgc

SEQ ID NO: 3532092 - DNA, 25 bp, Homo sapien
tcagcgctagctaagtgaacactct

SEQ ID NO: 3532093 - DNA, 25 bp, Homo sapien
ggcattaattagctgcaggaggtca

SEQ ID NO: 3532094 - DNA, 25 bp, Homo sapien
gaacactctttgtgccccaggtaag

SEQ ID NO: 3532095 - DNA, 25 bp, Homo sapien
acatcgtggacatcgggtgcaggct

SEQ ID NO: 3532096 - DNA, 25 bp, Homo sapien
tggacagacatcgtggacatcgggt

SEQ ID NO: 3532097 - DNA, 25 bp, Homo sapien
tgggcaagcacagcgcctagcttcc

SEQ ID NO: 3532098 - DNA, 25 bp, Homo sapien
tgtggtctgggcaagcacagcgcct

SEQ ID NO: 3532099 - DNA, 25 bp, Homo sapien
gcccagttctatcaagaggcccctg

SEQ ID NO: 3532100 - DNA, 25 bp, Homo sapien
gttctatcaagaggcccctgctcct

SEQ ID NO: 3532101 - DNA, 25 bp, Homo sapien
tgagcacttgggccgaaatcttcat

SEQ ID NO: 3532102 - DNA, 25 bp, Homo sapien
agtgcccagttctatcaagaggccc

SEQ ID NO: 3532103 - DNA, 25 bp, Homo sapien
catggcatttttgcccggcgatgga

SEQ ID NO: 3532104 - DNA, 25 bp, Homo sapien
accatggcatttttgcccggcgatg

SEQ ID NO: 3532105 - DNA, 25 bp, Homo sapien
gggtggctgaaggagtaggaatgct

SEQ ID NO: 3532106 - DNA, 25 bp, Homo sapien
cagaaagttctagaatagttgtaac

SEQ ID NO: 3532107 - DNA, 25 bp, Homo sapien
cactgacagtccgaatctgggagcc

SEQ ID NO: 3532108 - DNA, 25 bp, Homo sapien
aggaggaaatgcctgccagtggaac

SEQ ID NO: 3532109 - DNA, 25 bp, Homo sapien
aatctgggagcctgataaggaggct

SEQ ID NO: 3532110 - DNA, 25 bp, Homo sapien
ttccaaagatcatcacacccaagat

SEQ ID NO: 3532111 - DNA, 25 bp, Homo sapien
gaatgtctagagcacggttcttcgc

SEQ ID NO: 3532112 - DNA, 25 bp, Homo sapien
cctgaatgtctagagcacggttctt

SEQ ID NO: 3532113 - DNA, 25 bp, Homo sapien
agagcacggttcttcgcagacacac

SEQ ID NO: 3532114 - DNA, 25 bp, Homo sapien
tctagagcacggttcttcgcagaca

SEQ ID NO: 3532115 - DNA, 25 bp, Homo sapien
aacagccccccgctgaaattcacaa

SEQ ID NO: 3532116 - DNA, 25 bp, Homo sapien
tgaagtccagaactgcaaaacagcc

SEQ ID NO: 3532117 - DNA, 25 bp, Homo sapien
ccccgctgaaattcacaaaccactg

SEQ ID NO: 3532118 - DNA, 25 bp, Homo sapien
gagaaaggataggaatttgaagctt

SEQ ID NO: 3532119 - DNA, 25 bp, Homo sapien
caggctgctgtgatatgcctacccc

SEQ ID NO: 3532120 - DNA, 25 bp, Homo sapien
aggttcagcaccgtttcctctccag

SEQ ID NO: 3532121 - DNA, 25 bp, Homo sapien
acactgccaccctggcgagagctga

SEQ ID NO: 3532122 - DNA, 25 bp, Homo sapien
tcatggaggaaatcaccccctacag

SEQ ID NO: 3532123 - DNA, 25 bp, Homo sapien
ccttccaaagcatggtgtttcacaa

SEQ ID NO: 3532124 - DNA, 25 bp, Homo sapien
tccagaccacggcacagcctgcttc

SEQ ID NO: 3532125 - DNA, 25 bp, Homo sapien
gcttctggggctcatacactctgat

SEQ ID NO: 3532126 - DNA, 25 bp, Homo sapien
ctcatacactctgatgtaccctggg

SEQ ID NO: 3532127 - DNA, 25 bp, Homo sapien
agagggtgggggatctcatttgtag

SEQ ID NO: 3532128 - DNA, 25 bp, Homo sapien
gtagagggtgggggatctcatttgt

SEQ ID NO: 3532129 - DNA, 25 bp, Homo sapien
tagagggtgggggatctcatttgta

SEQ ID NO: 3532130 - DNA, 25 bp, Homo sapien
tgccaaatctatgggagcagtcaca

SEQ ID NO: 3532131 - DNA, 25 bp, Homo sapien
cattgaggttgtgggtatttcaact

SEQ ID NO: 3532132 - DNA, 25 bp, Homo sapien
ctatgggagcagtcacaatctgatg

SEQ ID NO: 3532133 - DNA, 25 bp, Homo sapien
tgtgggtatttcaactgccaaatct

SEQ ID NO: 3532134 - DNA, 25 bp, Homo sapien
caaggagaatggctcctcccatatt

SEQ ID NO: 3532135 - DNA, 25 bp, Homo sapien
cagaggcaaggagaatggctcctcc

SEQ ID NO: 3532136 - DNA, 25 bp, Homo sapien
ggcttcttaataggggctggcctgg

SEQ ID NO: 3532137 - DNA, 25 bp, Homo sapien
tctcagaggcaaggagaatggctcc

SEQ ID NO: 3532138 - DNA, 25 bp, Homo sapien
gagctgaaaggaagtcacctgacac

SEQ ID NO: 3532139 - DNA, 25 bp, Homo sapien
ggcccggatggtggttcggagttca

SEQ ID NO: 3532140 - DNA, 25 bp, Homo sapien
gaagtcacctgacacagcatgagcc

SEQ ID NO: 3532141 - DNA, 25 bp, Homo sapien
tggtggttcggagttcatgctccag

SEQ ID NO: 3532142 - DNA, 25 bp, Homo sapien
tctcctgtgccactcccccaaccct

SEQ ID NO: 3532143 - DNA, 25 bp, Homo sapien
ctcctgtgccactcccccaaccctc

SEQ ID NO: 3532144 - DNA, 25 bp, Homo sapien
tgctagggcatctcctgtgccactc

SEQ ID NO: 3532145 - DNA, 25 bp, Homo sapien
ctgtgctagggcatctcctgtgcca

SEQ ID NO: 3532146 - DNA, 25 bp, Homo sapien
tcagtccaagtgatctcctcaatgc

SEQ ID NO: 3532147 - DNA, 25 bp, Homo sapien
aaggctgctctatgccacaccagaa

SEQ ID NO: 3532148 - DNA, 25 bp, Homo sapien
gagagtctgggagaatctccacccc

SEQ ID NO: 3532149 - DNA, 25 bp, Homo sapien
tgtgctagcccctaggtcccctctt

SEQ ID NO: 3532150 - DNA, 25 bp, Homo sapien
cactgttcatgtcggcaactcctgt

SEQ ID NO: 3532151 - DNA, 25 bp, Homo sapien
agcactgttcatgtcggcaactcct

SEQ ID NO: 3532152 - DNA, 25 bp, Homo sapien
ctgttcatgtcggcaactcctgtgg

SEQ ID NO: 3532153 - DNA, 25 bp, Homo sapien
gcactgttcatgtcggcaactcctg

SEQ ID NO: 3532154 - DNA, 25 bp, Homo sapien
ctgttgcagacagacctgcacagct

SEQ ID NO: 3532155 - DNA, 25 bp, Homo sapien
cagaggaagcaaaatgtctgtagtt

SEQ ID NO: 3532156 - DNA, 25 bp, Homo sapien
cattctcccaaggaagggatctttc

SEQ ID NO: 3532157 - DNA, 25 bp, Homo sapien
tccttgtttggcccttgagcttaaa

SEQ ID NO: 3532158 - DNA, 25 bp, Homo sapien
tggcccttgagcttaaaactaccat

SEQ ID NO: 3532159 - DNA, 25 bp, Homo sapien
ctgctggaagggagcaaaactcttc

SEQ ID NO: 3532160 - DNA, 25 bp, Homo sapien
gcaacctcaagcgatttcaacttca

SEQ ID NO: 3532161 - DNA, 25 bp, Homo sapien
aacctcaagcgatttcaacttcaac

SEQ ID NO: 3532162 - DNA, 25 bp, Homo sapien
cctcaagcgatttcaacttcaactc

SEQ ID NO: 3532163 - DNA, 25 bp, Homo sapien
actgcaacctcaagcgatttcaact

SEQ ID NO: 3532164 - DNA, 25 bp, Homo sapien
atttctgttcctgcgtaaaatccaa

SEQ ID NO: 3532165 - DNA, 25 bp, Homo sapien
tatttctgttcctgcgtaaaatcca

SEQ ID NO: 3532166 - DNA, 25 bp, Homo sapien
tttctgttcctgcgtaaaatccaac

SEQ ID NO: 3532167 - DNA, 25 bp, Homo sapien
ctatttctgttcctgcgtaaaatcc

SEQ ID NO: 3532168 - DNA, 25 bp, Homo sapien
tgccgtcggttttatcatctacttg

SEQ ID NO: 3532169 - DNA, 25 bp, Homo sapien
gtcggttttatcatctacttgtggg

SEQ ID NO: 3532170 - DNA, 25 bp, Homo sapien
cactgccgtcggttttatcatctac

SEQ ID NO: 3532171 - DNA, 25 bp, Homo sapien
gtccacactgccgtcggttttatca

SEQ ID NO: 3532172 - DNA, 25 bp, Homo sapien
gtggtggggcatatcactttatatt

SEQ ID NO: 3532173 - DNA, 25 bp, Homo sapien
gaagtgcctgctcttgttagggaag

SEQ ID NO: 3532174 - DNA, 25 bp, Homo sapien
tttgcttggtgaagtctaagtgttc

SEQ ID NO: 3532175 - DNA, 25 bp, Homo sapien
tatgctatgtgtgaggattgaacat

SEQ ID NO: 3532176 - DNA, 25 bp, Homo sapien
ggccctgagagtcaatgaggaacgt

SEQ ID NO: 3532177 - DNA, 25 bp, Homo sapien
ttctcgccatgaaatccccaagggc

SEQ ID NO: 3532178 - DNA, 25 bp, Homo sapien
cgttcagcgcttggaggcttctcgc

SEQ ID NO: 3532179 - DNA, 25 bp, Homo sapien
tgaggaacgtgatcaagtggaacag

SEQ ID NO: 3532180 - DNA, 25 bp, Homo sapien
gggccatcaggagagtctccaaaca

SEQ ID NO: 3532181 - DNA, 25 bp, Homo sapien
tccaaacacatctgatcttctagaa

SEQ ID NO: 3532182 - DNA, 25 bp, Homo sapien
aagggcgagagttttagggccatca

SEQ ID NO: 3532183 - DNA, 25 bp, Homo sapien
tgatcttctagaagcagcttggagg

SEQ ID NO: 3532184 - DNA, 25 bp, Homo sapien
cagaggtctggatacagccagtgtt

SEQ ID NO: 3532185 - DNA, 25 bp, Homo sapien
tggacaggaagaacggtcagaggtc

SEQ ID NO: 3532186 - DNA, 25 bp, Homo sapien
ggattcaatggcagcacatcaggca

SEQ ID NO: 3532187 - DNA, 25 bp, Homo sapien
catccctaggattcaatggcagcac

SEQ ID NO: 3532188 - DNA, 25 bp, Homo sapien
attgaattttaatacgctactgtgc

SEQ ID NO: 3532189 - DNA, 25 bp, Homo sapien
ggtgcttgggctgaaaactctgatg

SEQ ID NO: 3532190 - DNA, 25 bp, Homo sapien
tatttttcttcggtgcttgggctga

SEQ ID NO: 3532191 - DNA, 25 bp, Homo sapien
taatacgctactgtgctccttggag

SEQ ID NO: 3532192 - DNA, 25 bp, Homo sapien
ccttgcttgggccacccatttgcag

SEQ ID NO: 3532193 - DNA, 25 bp, Homo sapien
agatattccttgcttgggccaccca

SEQ ID NO: 3532194 - DNA, 25 bp, Homo sapien
atctgaagatattccttgcttgggc

SEQ ID NO: 3532195 - DNA, 25 bp, Homo sapien
gcttgggccacccatttgcagtagc

SEQ ID NO: 3532196 - DNA, 25 bp, Homo sapien
ctcactgtgtccttgagtcccagga

SEQ ID NO: 3532197 - DNA, 25 bp, Homo sapien
ctttcacaagacacctttgatggaa

SEQ ID NO: 3532198 - DNA, 25 bp, Homo sapien
gactaaattgaacttgatgacaccc

SEQ ID NO: 3532199 - DNA, 25 bp, Homo sapien
caacatggtgattgataatgctccc

SEQ ID NO: 3532200 - DNA, 25 bp, Homo sapien
ttcatggctgagtaacactggcaga

SEQ ID NO: 3532201 - DNA, 25 bp, Homo sapien
gcatttgaccccagacaacagcatc

SEQ ID NO: 3532202 - DNA, 25 bp, Homo sapien
aactgtggccccttgatgggcttca

SEQ ID NO: 3532203 - DNA, 25 bp, Homo sapien
ttctccactggacgaagccagcatt

SEQ ID NO: 3532204 - DNA, 25 bp, Homo sapien
ttgccagccattccagactaagcgg

SEQ ID NO: 3532205 - DNA, 25 bp, Homo sapien
tcttggccgagtgcagtattgcgca

SEQ ID NO: 3532206 - DNA, 25 bp, Homo sapien
gcaaagctgcctcgagagtcctcat

SEQ ID NO: 3532207 - DNA, 25 bp, Homo sapien
tacaggtcattttttcttggccaag

SEQ ID NO: 3532208 - DNA, 25 bp, Homo sapien
tataaacttttgcaatctacagaag

SEQ ID NO: 3532209 - DNA, 25 bp, Homo sapien
actttggggataattagataatcta

SEQ ID NO: 3532210 - DNA, 25 bp, Homo sapien
tgcgcctggctcagattctcctttc

SEQ ID NO: 3532211 - DNA, 25 bp, Homo sapien
aacttttgcaatctacagaaggagc

SEQ ID NO: 3532212 - DNA, 25 bp, Homo sapien
ggacagaatcatgcctaacttccca

SEQ ID NO: 3532213 - DNA, 25 bp, Homo sapien
cagtccttgttaaggcacaagggac

SEQ ID NO: 3532214 - DNA, 25 bp, Homo sapien
cagggcctgtgcttgtcaataacac

SEQ ID NO: 3532215 - DNA, 25 bp, Homo sapien
tccaacacccgggtaggagtgggca

SEQ ID NO: 3532216 - DNA, 25 bp, Homo sapien
tccaagtcggagagactcagtgcca

SEQ ID NO: 3532217 - DNA, 25 bp, Homo sapien
gaaaccccagcaaatgcatgaactg

SEQ ID NO: 3532218 - DNA, 25 bp, Homo sapien
ggaaagtggccaaagatcccagcca

SEQ ID NO: 3532219 - DNA, 25 bp, Homo sapien
tacatacagaaatgcagctccatgg

SEQ ID NO: 3532220 - DNA, 25 bp, Homo sapien
gacacgaagctacatcgcaggatgg

SEQ ID NO: 3532221 - DNA, 25 bp, Homo sapien
tgaaggccagaacccaaatgatttg

SEQ ID NO: 3532222 - DNA, 25 bp, Homo sapien
cacacaagcaggaagaatggcgcag

SEQ ID NO: 3532223 - DNA, 25 bp, Homo sapien
taataaatgcggatgctcaggctca

SEQ ID NO: 3532224 - DNA, 25 bp, Homo sapien
gattggccccaatgtctgagctgcc

SEQ ID NO: 3532225 - DNA, 25 bp, Homo sapien
ggcagcaccaaagcttctattcaga

SEQ ID NO: 3532226 - DNA, 25 bp, Homo sapien
tgagctgccttacagaacctctttg

SEQ ID NO: 3532227 - DNA, 25 bp, Homo sapien
tttgccagagtgaccagaaggattg

SEQ ID NO: 3532228 - DNA, 25 bp, Homo sapien
gagggcttaaacacacataggaaca

SEQ ID NO: 3532229 - DNA, 25 bp, Homo sapien
tggcttccatgaaagctgacgctgg

SEQ ID NO: 3532230 - DNA, 25 bp, Homo sapien
catacttagggtgagttgttgacgg

SEQ ID NO: 3532231 - DNA, 25 bp, Homo sapien
aatgataagagatggacccaagtcc

SEQ ID NO: 3532232 - DNA, 25 bp, Homo sapien
ggtatgttgaatcccaaatccatga

SEQ ID NO: 3532233 - DNA, 25 bp, Homo sapien
gatggccagagatgatcaagaccga

SEQ ID NO: 3532234 - DNA, 25 bp, Homo sapien
gaccgaatgaataagccacgaggaa

SEQ ID NO: 3532235 - DNA, 25 bp, Homo sapien
gtgaaaggatgcatgttccacagtc

SEQ ID NO: 3532236 - DNA, 25 bp, Homo sapien
gaagatacatggaaacgctctgctc

SEQ ID NO: 3532237 - DNA, 25 bp, Homo sapien
gatgacagtgaaggatgaccctcag

SEQ ID NO: 3532238 - DNA, 25 bp, Homo sapien
gacacgaagcatagccttcctctgg

SEQ ID NO: 3532239 - DNA, 25 bp, Homo sapien
tcagccacgtttccaaggtcactct

SEQ ID NO: 3532240 - DNA, 25 bp, Homo sapien
ttcaaatggagaccaacaacatggc

SEQ ID NO: 3532241 - DNA, 25 bp, Homo sapien
gcttttccaattctggcgtcagcac

SEQ ID NO: 3532242 - DNA, 25 bp, Homo sapien
gggtggcaagagctaatctaacaga

SEQ ID NO: 3532243 - DNA, 25 bp, Homo sapien
agaattcttatgcttctaggtccag

SEQ ID NO: 3532244 - DNA, 25 bp, Homo sapien
gacacagcttaaggttgcataggag

SEQ ID NO: 3532245 - DNA, 25 bp, Homo sapien
ttcagggacgtctgcattaatcctc

SEQ ID NO: 3532246 - DNA, 25 bp, Homo sapien
tacagggaacggatctttttagcag

SEQ ID NO: 3532247 - DNA, 25 bp, Homo sapien
aattccagcccttgaacagtttgaa

SEQ ID NO: 3532248 - DNA, 25 bp, Homo sapien
cagcgttgggtagtgggagacgtac

SEQ ID NO: 3532249 - DNA, 25 bp, Homo sapien
aatcagactgcattcagcgttgggt

SEQ ID NO: 3532250 - DNA, 25 bp, Homo sapien
tagtgggagacgtactgaaggcctt

SEQ ID NO: 3532251 - DNA, 25 bp, Homo sapien
gagacgtactgaaggcctttcaatt

SEQ ID NO: 3532252 - DNA, 25 bp, Homo sapien
aatgtaattgggcataatcagagct

SEQ ID NO: 3532253 - DNA, 25 bp, Homo sapien
ttgtcttaggcttgccaaatgtaat

SEQ ID NO: 3532254 - DNA, 25 bp, Homo sapien
catctcatagcgttttcatcttctg

SEQ ID NO: 3532255 - DNA, 25 bp, Homo sapien
taatcagagctcatacatctcatag

SEQ ID NO: 3532256 - DNA, 25 bp, Homo sapien
ttaatctttgccattaatgaggagg

SEQ ID NO: 3532257 - DNA, 25 bp, Homo sapien
taaattggggcaatcagatccacca

SEQ ID NO: 3532258 - DNA, 25 bp, Homo sapien
aacaaagcatgaaggcctagcctca

SEQ ID NO: 3532259 - DNA, 25 bp, Homo sapien
tcagatccaccaacaaagcatgaag

SEQ ID NO: 3532260 - DNA, 25 bp, Homo sapien
gggcaatcagatccaccaacaaagc

SEQ ID NO: 3532261 - DNA, 25 bp, Homo sapien
cctgagcctctggtatgagaaggcc

SEQ ID NO: 3532262 - DNA, 25 bp, Homo sapien
gaaacactgccaagacctgaaatca

SEQ ID NO: 3532263 - DNA, 25 bp, Homo sapien
tgaaatcaagggttgacctgggcct

SEQ ID NO: 3532264 - DNA, 25 bp, Homo sapien
gagagcaggaattcttgccctgagc

SEQ ID NO: 3532265 - DNA, 25 bp, Homo sapien
aagggccactgcgtgtagggtacac

SEQ ID NO: 3532266 - DNA, 25 bp, Homo sapien
gcatgtctccctgaatgaattcgtc

SEQ ID NO: 3532267 - DNA, 25 bp, Homo sapien
taaggacaacccaagtcacctaggc

SEQ ID NO: 3532268 - DNA, 25 bp, Homo sapien
taagaagactcagtaaagggccact

SEQ ID NO: 3532269 - DNA, 25 bp, Homo sapien
taacctgtattaccactacatccta

SEQ ID NO: 3532270 - DNA, 25 bp, Homo sapien
ctaaaatgcttggagaacagctcac

SEQ ID NO: 3532271 - DNA, 25 bp, Homo sapien
acctgtattaccactacatcctaaa

SEQ ID NO: 3532272 - DNA, 25 bp, Homo sapien
tcctaaaatgcttggagaacagctc

SEQ ID NO: 3532273 - DNA, 25 bp, Homo sapien
ccccagcactgagctcttcagcagt

SEQ ID NO: 3532274 - DNA, 25 bp, Homo sapien
cagcactgagctcttcagcagtctc

SEQ ID NO: 3532275 - DNA, 25 bp, Homo sapien
ccagcactgagctcttcagcagtct

SEQ ID NO: 3532276 - DNA, 25 bp, Homo sapien
gcactgagctcttcagcagtctcca

SEQ ID NO: 3532277 - DNA, 25 bp, Homo sapien
gtttgagcagtcaacagaaacgcca

SEQ ID NO: 3532278 - DNA, 25 bp, Homo sapien
tttgagcagtcaacagaaacgccat

SEQ ID NO: 3532279 - DNA, 25 bp, Homo sapien
agtttgagcagtcaacagaaacgcc

SEQ ID NO: 3532280 - DNA, 25 bp, Homo sapien
aaagagtttgagcagtcaacagaaa

SEQ ID NO: 3532281 - DNA, 25 bp, Homo sapien
ctcatatccttagtcccttgcacag

SEQ ID NO: 3532282 - DNA, 25 bp, Homo sapien
tcacctgcatctcatatccttagtc

SEQ ID NO: 3532283 - DNA, 25 bp, Homo sapien
gatggaggataccagtcagacttgt

SEQ ID NO: 3532284 - DNA, 25 bp, Homo sapien
aaggtcctgatggaggataccagtc

SEQ ID NO: 3532285 - DNA, 25 bp, Homo sapien
ggccatgtcgcatgcccaagagatc

SEQ ID NO: 3532286 - DNA, 25 bp, Homo sapien
ggtctcaccagacttgaggctgttc

SEQ ID NO: 3532287 - DNA, 25 bp, Homo sapien
tagatggccatgtcgcatgcccaag

SEQ ID NO: 3532288 - DNA, 25 bp, Homo sapien
caaaaccctcgagggtcatgtggaa

SEQ ID NO: 3532289 - DNA, 25 bp, Homo sapien
ttctgaaatgcgcaggtctccttaa

SEQ ID NO: 3532290 - DNA, 25 bp, Homo sapien
ttcctatcagaaatgacacgagcag

SEQ ID NO: 3532291 - DNA, 25 bp, Homo sapien
tatcagaaatgacacgagcagccac

SEQ ID NO: 3532292 - DNA, 25 bp, Homo sapien
agcccggaggctttactgtggtaag

SEQ ID NO: 3532293 - DNA, 25 bp, Homo sapien
tgggtgtgctcaacatgtattcaat

SEQ ID NO: 3532294 - DNA, 25 bp, Homo sapien
caacctatacaatgtgggtgtgctc

SEQ ID NO: 3532295 - DNA, 25 bp, Homo sapien
gaagatgcttcctacaactacacgg

SEQ ID NO: 3532296 - DNA, 25 bp, Homo sapien
acagataataccctagttacaagct

SEQ ID NO: 3532297 - DNA, 25 bp, Homo sapien
cacgtttgtattgcacactccactc

SEQ ID NO: 3532298 - DNA, 25 bp, Homo sapien
ttttcgccacaattctggacacgtt

SEQ ID NO: 3532299 - DNA, 25 bp, Homo sapien
gattaatttgctattagctacttct

SEQ ID NO: 3532300 - DNA, 25 bp, Homo sapien
ttaagcatcgaaggtcatcaacaga

SEQ ID NO: 3532301 - DNA, 25 bp, Homo sapien
tttcttgttcaacaggtgcatcatt

SEQ ID NO: 3532302 - DNA, 25 bp, Homo sapien
ttgtgtcatcacaaacttgtgtctt

SEQ ID NO: 3532303 - DNA, 25 bp, Homo sapien
tcatcacaaacttgtgtctttcact

SEQ ID NO: 3532304 - DNA, 25 bp, Homo sapien
tgtcatcacaaacttgtgtctttca

SEQ ID NO: 3532305 - DNA, 25 bp, Homo sapien
tgtgtcatcacaaacttgtgtcttt

SEQ ID NO: 3532306 - DNA, 25 bp, Homo sapien
taaacctgacaatcctgcggttgaa

SEQ ID NO: 3532307 - DNA, 25 bp, Homo sapien
gtagagcggccacatgagacaccta

SEQ ID NO: 3532308 - DNA, 25 bp, Homo sapien
cacattggccaactctactggaggg

SEQ ID NO: 3532309 - DNA, 25 bp, Homo sapien
aagcacattggccaactctactgga

SEQ ID NO: 3532310 - DNA, 25 bp, Homo sapien
gcacttccggaacctggcttatttg

SEQ ID NO: 3532311 - DNA, 25 bp, Homo sapien
gaaactgcagcacttccggaacctg

SEQ ID NO: 3532312 - DNA, 25 bp, Homo sapien
aggaaggccccgattctgcgcctgt

SEQ ID NO: 3532313 - DNA, 25 bp, Homo sapien
ggccccgattctgcgcctgtctggg

SEQ ID NO: 3532314 - DNA, 25 bp, Homo sapien
ctgtacatcctcaagagggtccttt

SEQ ID NO: 3532315 - DNA, 25 bp, Homo sapien
gaggttagagccacaagaaccaatg

SEQ ID NO: 3532316 - DNA, 25 bp, Homo sapien
gagccacaagaaccaatggccttaa

SEQ ID NO: 3532317 - DNA, 25 bp, Homo sapien
tggccttaatctccatttccatgaa

SEQ ID NO: 3532318 - DNA, 25 bp, Homo sapien
cttgtgtcaagggtccagaggttag

SEQ ID NO: 3532319 - DNA, 25 bp, Homo sapien
gctgcgtccacacttgatactaaag

SEQ ID NO: 3532320 - DNA, 25 bp, Homo sapien
cacacatccaagctgttggcaagtg

SEQ ID NO: 3532321 - DNA, 25 bp, Homo sapien
tggtcccgctgcgtccacacttgat

SEQ ID NO: 3532322 - DNA, 25 bp, Homo sapien
gatactaaagtcaatttccaacaca

SEQ ID NO: 3532323 - DNA, 25 bp, Homo sapien
ctcggagcatggagctccatgtctc

SEQ ID NO: 3532324 - DNA, 25 bp, Homo sapien
atgtctcggccttcagcattcctgg

SEQ ID NO: 3532325 - DNA, 25 bp, Homo sapien
gcctgtcatcctcagttactctcat

SEQ ID NO: 3532326 - DNA, 25 bp, Homo sapien
ttcagcattcctggcagcctgtcat

SEQ ID NO: 3532327 - DNA, 25 bp, Homo sapien
ctggatctcaccacagtgccggcct

SEQ ID NO: 3532328 - DNA, 25 bp, Homo sapien
cactgaagcatgaggtcggccaaaa

SEQ ID NO: 3532329 - DNA, 25 bp, Homo sapien
gatgcagctgtcaagcactgaagca

SEQ ID NO: 3532330 - DNA, 25 bp, Homo sapien
gtcggccaaaagcatgtagcactca

SEQ ID NO: 3532331 - DNA, 25 bp, Homo sapien
tatgatctgtggctgaggatttggc

SEQ ID NO: 3532332 - DNA, 25 bp, Homo sapien
acaagcagggtccaatatccacagg

SEQ ID NO: 3532333 - DNA, 25 bp, Homo sapien
gggcctggagctttgaatgtgcact

SEQ ID NO: 3532334 - DNA, 25 bp, Homo sapien
ctttgaatgtgcactcttgctgtca

SEQ ID NO: 3532335 - DNA, 25 bp, Homo sapien
ggagatggaaatcccctggccctcc

SEQ ID NO: 3532336 - DNA, 25 bp, Homo sapien
gctgttcccagtgttgatgccacaa

SEQ ID NO: 3532337 - DNA, 25 bp, Homo sapien
ccactggagatggaaatcccctggc

SEQ ID NO: 3532338 - DNA, 25 bp, Homo sapien
agctgctgttcccagtgttgatgcc

SEQ ID NO: 3532339 - DNA, 25 bp, Homo sapien
agggtgaggcacaacaagcagctgt

SEQ ID NO: 3532340 - DNA, 25 bp, Homo sapien
gattcaggactgaccttagctctga

SEQ ID NO: 3532341 - DNA, 25 bp, Homo sapien
catcaactgagattcaggactgacc

SEQ ID NO: 3532342 - DNA, 25 bp, Homo sapien
ggcacaacaagcagctgtgacatca

SEQ ID NO: 3532343 - DNA, 25 bp, Homo sapien
gcccagggcgggatttcttgcctac

SEQ ID NO: 3532344 - DNA, 25 bp, Homo sapien
ccagtagcccagggcgggatttctt

SEQ ID NO: 3532345 - DNA, 25 bp, Homo sapien
agtagcccagggcgggatttcttgc

SEQ ID NO: 3532346 - DNA, 25 bp, Homo sapien
tagcccagggcgggatttcttgcct

SEQ ID NO: 3532347 - DNA, 25 bp, Homo sapien
cagtctgccagtccgaggcccgcgc

SEQ ID NO: 3532348 - DNA, 25 bp, Homo sapien
ccagtctgccagtccgaggcccgcg

SEQ ID NO: 3532349 - DNA, 25 bp, Homo sapien
tcttgccgcagatgagatgctcata

SEQ ID NO: 3532350 - DNA, 25 bp, Homo sapien
tgcgcacggagattcgggtgtccac

SEQ ID NO: 3532351 - DNA, 25 bp, Homo sapien
tgctcatagggctgcaagacgcccc

SEQ ID NO: 3532352 - DNA, 25 bp, Homo sapien
cagagctcggcgtcgttgttgatga

SEQ ID NO: 3532353 - DNA, 25 bp, Homo sapien
ctcaaagcgggtgcacttggcgtgc

SEQ ID NO: 3532354 - DNA, 25 bp, Homo sapien
tcccagctgttgtggcggctgttca

SEQ ID NO: 3532355 - DNA, 25 bp, Homo sapien
gctgttcatggagccggagtagcac

SEQ ID NO: 3532356 - DNA, 25 bp, Homo sapien
aagtcctccagcgtcttcagagtcg

SEQ ID NO: 3532357 - DNA, 25 bp, Homo sapien
cacagagaaggaatcccgggagaac

SEQ ID NO: 3532358 - DNA, 25 bp, Homo sapien
aattcccacaagcagagagtcagtc

SEQ ID NO: 3532359 - DNA, 25 bp, Homo sapien
ggtggccgagatccgtggccagcag

SEQ ID NO: 3532360 - DNA, 25 bp, Homo sapien
cagccggcgagaaagcgctctgcaa

SEQ ID NO: 3532361 - DNA, 25 bp, Homo sapien
gcggcttaccaatcaccggccgcga

SEQ ID NO: 3532362 - DNA, 25 bp, Homo sapien
ggcttaccaatcaccggccgcgatg

SEQ ID NO: 3532363 - DNA, 25 bp, Homo sapien
cgggcggcttaccaatcaccggccg

SEQ ID NO: 3532364 - DNA, 25 bp, Homo sapien
gcttaccaatcaccggccgcgatgg

SEQ ID NO: 3532365 - DNA, 25 bp, Homo sapien
gcgctgccgtctaggctccaataag

SEQ ID NO: 3532366 - DNA, 25 bp, Homo sapien
ggtatctgatcaatggacgggcccc

SEQ ID NO: 3532367 - DNA, 25 bp, Homo sapien
cgcaatccgagatgaaacgctggct

SEQ ID NO: 3532368 - DNA, 25 bp, Homo sapien
tccgtctggttcctttgcgctgccg

SEQ ID NO: 3532369 - DNA, 25 bp, Homo sapien
gtgccggtgggcgagccgtatgccc

SEQ ID NO: 3532370 - DNA, 25 bp, Homo sapien
ttcctccggggtacaatgagtggct

SEQ ID NO: 3532371 - DNA, 25 bp, Homo sapien
gtgtcccaaacggtccgccagagcg

SEQ ID NO: 3532372 - DNA, 25 bp, Homo sapien
ttggttcagcagtcccatgcccggt

SEQ ID NO: 3532373 - DNA, 25 bp, Homo sapien
tgttgacaatcacatcgtccatctg

SEQ ID NO: 3532374 - DNA, 25 bp, Homo sapien
tctgatgtgttgacaatcccaccat

SEQ ID NO: 3532375 - DNA, 25 bp, Homo sapien
catcatggtaaaaatccagtccacc

SEQ ID NO: 3532376 - DNA, 25 bp, Homo sapien
ttagtcagggtatgtgttgacaatc

SEQ ID NO: 3532377 - DNA, 25 bp, Homo sapien
gccttaatctttatacttggtgatg

SEQ ID NO: 3532378 - DNA, 25 bp, Homo sapien
ttatacttggtgatgtcttggtcat

SEQ ID NO: 3532379 - DNA, 25 bp, Homo sapien
aatctttatacttggtgatgtcttg

SEQ ID NO: 3532380 - DNA, 25 bp, Homo sapien
ctttatacttggtgatgtcttggtc

SEQ ID NO: 3532381 - DNA, 25 bp, Homo sapien
tcttctacttgtatgtgcctctggg

SEQ ID NO: 3532382 - DNA, 25 bp, Homo sapien
attctatgtgacacattgtatattc

SEQ ID NO: 3532383 - DNA, 25 bp, Homo sapien
tctacttgtatgtgcctctggggca

SEQ ID NO: 3532384 - DNA, 25 bp, Homo sapien
atattcttctacttgtatgtgcctc

SEQ ID NO: 3532385 - DNA, 25 bp, Homo sapien
tcttctagttgagaacgtttgtctg

SEQ ID NO: 3532386 - DNA, 25 bp, Homo sapien
tcctgaagctctaccgccacttttt

SEQ ID NO: 3532387 - DNA, 25 bp, Homo sapien
atggcagcggatcttctagttgaga

SEQ ID NO: 3532388 - DNA, 25 bp, Homo sapien
tctgatctagatggcagcggatctt

SEQ ID NO: 3532389 - DNA, 25 bp, Homo sapien
ttcaaagggattaggatattgtggc

SEQ ID NO: 3532390 - DNA, 25 bp, Homo sapien
tgttcaaagggattaggatattgtg

SEQ ID NO: 3532391 - DNA, 25 bp, Homo sapien
cttgttcaaagggattaggatattg

SEQ ID NO: 3532392 - DNA, 25 bp, Homo sapien
caaagggattaggatattgtggcat

SEQ ID NO: 3532393 - DNA, 25 bp, Homo sapien
tgtctgagtcatcggtcagattata

SEQ ID NO: 3532394 - DNA, 25 bp, Homo sapien
gagtcatcggtcagattatatactc

SEQ ID NO: 3532395 - DNA, 25 bp, Homo sapien
tcttgtctgagtcatcggtcagatt

SEQ ID NO: 3532396 - DNA, 25 bp, Homo sapien
tcattttcttgtctgagtcatcggt

SEQ ID NO: 3532397 - DNA, 25 bp, Homo sapien
ttatccatccattgctcttgccttc

SEQ ID NO: 3532398 - DNA, 25 bp, Homo sapien
tcagcgtctggtgcagacaagaaca

SEQ ID NO: 3532399 - DNA, 25 bp, Homo sapien
aacatgccatctgggaaggaaagac

SEQ ID NO: 3532400 - DNA, 25 bp, Homo sapien
ctttatccatccattgctcttgcct

SEQ ID NO: 3532401 - DNA, 25 bp, Homo sapien
cagtgtgacattggatatgattctc

SEQ ID NO: 3532402 - DNA, 25 bp, Homo sapien
gcctcagctcctatttcacagtgtg

SEQ ID NO: 3532403 - DNA, 25 bp, Homo sapien
gattctcttttatgcatggggatga

SEQ ID NO: 3532404 - DNA, 25 bp, Homo sapien
tctgcctcagctcctatttcacagt

SEQ ID NO: 3532405 - DNA, 25 bp, Homo sapien
gttgattgacaaatgtggccacgtc

SEQ ID NO: 3532406 - DNA, 25 bp, Homo sapien
atgtggccacgtctaaaaagggatt

SEQ ID NO: 3532407 - DNA, 25 bp, Homo sapien
cttgttgattgacaaatgtggccac

SEQ ID NO: 3532408 - DNA, 25 bp, Homo sapien
gacaaatgtggccacgtctaaaaag

SEQ ID NO: 3532409 - DNA, 25 bp, Homo sapien
ggtcctcctcagagataacggagcg

SEQ ID NO: 3532410 - DNA, 25 bp, Homo sapien
gacacagctgtcaccgagaaatggc

SEQ ID NO: 3532411 - DNA, 25 bp, Homo sapien
tcagcctggagccaacatcgctggg

SEQ ID NO: 3532412 - DNA, 25 bp, Homo sapien
tcagagataacggagcgggaaagat

SEQ ID NO: 3532413 - DNA, 25 bp, Homo sapien
ggcggtgaaagcttgtggaggtgat

SEQ ID NO: 3532414 - DNA, 25 bp, Homo sapien
caactaaacgagaggaggcaacagt

SEQ ID NO: 3532415 - DNA, 25 bp, Homo sapien
tgaaagcttgtggaggtgatggcaa

SEQ ID NO: 3532416 - DNA, 25 bp, Homo sapien
aggtgatggcaactaaacgagagga

SEQ ID NO: 3532417 - DNA, 25 bp, Homo sapien
ccaactacaatgctccctggagcgt

SEQ ID NO: 3532418 - DNA, 25 bp, Homo sapien
tgaccataaacttcgttgaatctgt

SEQ ID NO: 3532419 - DNA, 25 bp, Homo sapien
agccactgctgaatcattctcccaa

SEQ ID NO: 3532420 - DNA, 25 bp, Homo sapien
gaatctgtccatgtagcctagagtc

SEQ ID NO: 3532421 - DNA, 25 bp, Homo sapien
tagggtgctaaagatcaatttgtgg

SEQ ID NO: 3532422 - DNA, 25 bp, Homo sapien
taaagttccacttttatgcccaaga

SEQ ID NO: 3532423 - DNA, 25 bp, Homo sapien
taaagataaatcctagcacctgagg

SEQ ID NO: 3532424 - DNA, 25 bp, Homo sapien
gaggaggtgtagaaatcattcaaac

SEQ ID NO: 3532425 - DNA, 25 bp, Homo sapien
tgaactacatgtatgctgccagtga

SEQ ID NO: 3532426 - DNA, 25 bp, Homo sapien
ctcttgattagctacaggcgcccgc

SEQ ID NO: 3532427 - DNA, 25 bp, Homo sapien
taaaagcagtggattaaccattcac

SEQ ID NO: 3532428 - DNA, 25 bp, Homo sapien
caccttgctaatgttaagccatcag

SEQ ID NO: 3532429 - DNA, 25 bp, Homo sapien
gacactaacttgttatgcagaagga

SEQ ID NO: 3532430 - DNA, 25 bp, Homo sapien
ccttgggaataggaagtaatactgt

SEQ ID NO: 3532431 - DNA, 25 bp, Homo sapien
tggattgcagtgacacgattgcagc

SEQ ID NO: 3532432 - DNA, 25 bp, Homo sapien
gcccagttggaagtgcttatttgaa

SEQ ID NO: 3532433 - DNA, 25 bp, Homo sapien
tccatcaggaatctatgtaggcccc

SEQ ID NO: 3532434 - DNA, 25 bp, Homo sapien
tagataacaaatgaggtaccctggc

SEQ ID NO: 3532435 - DNA, 25 bp, Homo sapien
gaagttctaaccttctgatcgcgtg

SEQ ID NO: 3532436 - DNA, 25 bp, Homo sapien
gtggaccacccttctagctcctgga

SEQ ID NO: 3532437 - DNA, 25 bp, Homo sapien
gcaaatgcaagctagtggcttcaaa

SEQ ID NO: 3532438 - DNA, 25 bp, Homo sapien
gaagataacttgagcaccgtcatgg

SEQ ID NO: 3532439 - DNA, 25 bp, Homo sapien
aagattctcctgtgctagatgtgca

SEQ ID NO: 3532440 - DNA, 25 bp, Homo sapien
gtaacccgctcatcactggatgaag

SEQ ID NO: 3532441 - DNA, 25 bp, Homo sapien
tcagcctgtacagcgattcagtgcc

SEQ ID NO: 3532442 - DNA, 25 bp, Homo sapien
tacagagttgttaggacatttccgg

SEQ ID NO: 3532443 - DNA, 25 bp, Homo sapien
tatagcgcttgaatacacatcaggt

SEQ ID NO: 3532444 - DNA, 25 bp, Homo sapien
cttttgaacctttgggatgggagca

SEQ ID NO: 3532445 - DNA, 25 bp, Homo sapien
gaagcctttcgaatgtctattgcaa

SEQ ID NO: 3532446 - DNA, 25 bp, Homo sapien
tccatagacaacaactctgaatcca

SEQ ID NO: 3532447 - DNA, 25 bp, Homo sapien
ctctgaatccaaatgtaagctgaga

SEQ ID NO: 3532448 - DNA, 25 bp, Homo sapien
gagtttctgctctcaccctccatag

SEQ ID NO: 3532449 - DNA, 25 bp, Homo sapien
tcctgccacccgtgtgcattttttc

SEQ ID NO: 3532450 - DNA, 25 bp, Homo sapien
tgccacccgtgtgcattttttccaa

SEQ ID NO: 3532451 - DNA, 25 bp, Homo sapien
ctgccacccgtgtgcattttttcca

SEQ ID NO: 3532452 - DNA, 25 bp, Homo sapien
ttcctgccacccgtgtgcatttttt

SEQ ID NO: 3532453 - DNA, 25 bp, Homo sapien
cggtcaacccgctccaaaattcctg

SEQ ID NO: 3532454 - DNA, 25 bp, Homo sapien
ttcccattccagaatgccacagttt

SEQ ID NO: 3532455 - DNA, 25 bp, Homo sapien
ttcaggagatagaagcaggtctcgt

SEQ ID NO: 3532456 - DNA, 25 bp, Homo sapien
tttgccagggcttccgatttaacca

SEQ ID NO: 3532457 - DNA, 25 bp, Homo sapien
ggtctcgtacaaattcccatagatg

SEQ ID NO: 3532458 - DNA, 25 bp, Homo sapien
gagatgtacaatttctcactaggtc

SEQ ID NO: 3532459 - DNA, 25 bp, Homo sapien
agatgtacaatttctcactaggtca

SEQ ID NO: 3532460 - DNA, 25 bp, Homo sapien
gttttcaagcagttggaatcagcat

SEQ ID NO: 3532461 - DNA, 25 bp, Homo sapien
tactatgactgtgacagtcttgact

SEQ ID NO: 3532462 - DNA, 25 bp, Homo sapien
agtcttgacttttgatgccacttgt

SEQ ID NO: 3532463 - DNA, 25 bp, Homo sapien
ttgttctactatgactgtgacagtc

SEQ ID NO: 3532464 - DNA, 25 bp, Homo sapien
gatgaaggctgcacattagataggc

SEQ ID NO: 3532465 - DNA, 25 bp, Homo sapien
tagtatgtacactgtcactgctgaa

SEQ ID NO: 3532466 - DNA, 25 bp, Homo sapien
tagataggcctttcacagactgacc

SEQ ID NO: 3532467 - DNA, 25 bp, Homo sapien
tatactgtacaactatccctgctgc

SEQ ID NO: 3532468 - DNA, 25 bp, Homo sapien
cccatcaaactatccattagggttt

SEQ ID NO: 3532469 - DNA, 25 bp, Homo sapien
tgtgcccatcaaactatccattagg

SEQ ID NO: 3532470 - DNA, 25 bp, Homo sapien
tgtcgtcttcatacctccccttgtg

SEQ ID NO: 3532471 - DNA, 25 bp, Homo sapien
ccttgtgcccatcaaactatccatt

SEQ ID NO: 3532472 - DNA, 25 bp, Homo sapien
tataaaaaggctatagcactagggc

SEQ ID NO: 3532473 - DNA, 25 bp, Homo sapien
gctttagatttagacacacctgggt

SEQ ID NO: 3532474 - DNA, 25 bp, Homo sapien
tctataaagatattagcacagggcc

SEQ ID NO: 3532475 - DNA, 25 bp, Homo sapien
cactagggcttgtctcatattggga

SEQ ID NO: 3532476 - DNA, 25 bp, Homo sapien
gcgtgtggtccacgaactggccatt

SEQ ID NO: 3532477 - DNA, 25 bp, Homo sapien
cgagtgatgaaacctggcagaatgc

SEQ ID NO: 3532478 - DNA, 25 bp, Homo sapien
ggtgggtgagatgctacaccccggg

SEQ ID NO: 3532479 - DNA, 25 bp, Homo sapien
ggtgcacctgcttaagcccgtagcg

SEQ ID NO: 3532480 - DNA, 25 bp, Homo sapien
tttggttcatcagcttttcagtatg

SEQ ID NO: 3532481 - DNA, 25 bp, Homo sapien
gtggccttgctttcttcagcgtcat

SEQ ID NO: 3532482 - DNA, 25 bp, Homo sapien
ttgctttcttcagcgtcattaaaaa

SEQ ID NO: 3532483 - DNA, 25 bp, Homo sapien
tttcttcagcgtcattaaaaaagga

SEQ ID NO: 3532484 - DNA, 25 bp, Homo sapien
tcttcagcgtcattaaaaaaggagt

SEQ ID NO: 3532485 - DNA, 25 bp, Homo sapien
cagtgtccccaggttgctaggccct

SEQ ID NO: 3532486 - DNA, 25 bp, Homo sapien
gttgctaggcccttaaatcctactg

SEQ ID NO: 3532487 - DNA, 25 bp, Homo sapien
aggcccttaaatcctactgcaatac

SEQ ID NO: 3532488 - DNA, 25 bp, Homo sapien
tgtccccaggttgctaggcccttaa

SEQ ID NO: 3532489 - DNA, 25 bp, Homo sapien
taccgagctggatggtgctgaggcc

SEQ ID NO: 3532490 - DNA, 25 bp, Homo sapien
ccgagctggatggtgctgaggcctt

SEQ ID NO: 3532491 - DNA, 25 bp, Homo sapien
gagctggatggtgctgaggccttac

SEQ ID NO: 3532492 - DNA, 25 bp, Homo sapien
ctaccgagctggatggtgctgaggc

SEQ ID NO: 3532493 - DNA, 25 bp, Homo sapien
ctccataaaactgccttattctgtg

SEQ ID NO: 3532494 - DNA, 25 bp, Homo sapien
aaactgccttattctgtgtcctgtt

SEQ ID NO: 3532495 - DNA, 25 bp, Homo sapien
taaaactgccttattctgtgtcctg

SEQ ID NO: 3532496 - DNA, 25 bp, Homo sapien
ccataaaactgccttattctgtgtc

SEQ ID NO: 3532497 - DNA, 25 bp, Homo sapien
tctgtgcaaacaagaggcgctgtca

SEQ ID NO: 3532498 - DNA, 25 bp, Homo sapien
gccttcaagcgctcatgatggatga

SEQ ID NO: 3532499 - DNA, 25 bp, Homo sapien
tttgtgcgagcctgttcccttggga

SEQ ID NO: 3532500 - DNA, 25 bp, Homo sapien
aacacaggtctttcggatctccaag

SEQ ID NO: 3532501 - DNA, 25 bp, Homo sapien
actgatgtccagtatgagtcacagg

SEQ ID NO: 3532502 - DNA, 25 bp, Homo sapien
gatgaagtacaggtactcgccgcag

SEQ ID NO: 3532503 - DNA, 25 bp, Homo sapien
catggcgcttagtccagtattcagg

SEQ ID NO: 3532504 - DNA, 25 bp, Homo sapien
tgtactggtcgcagcagaactggag

SEQ ID NO: 3532505 - DNA, 25 bp, Homo sapien
tcctcggcgctctgctttgaagctc

SEQ ID NO: 3532506 - DNA, 25 bp, Homo sapien
ggctttgtgtgcggcctcggcccct

SEQ ID NO: 3532507 - DNA, 25 bp, Homo sapien
tgctctgggtgccatggcaggcctc

SEQ ID NO: 3532508 - DNA, 25 bp, Homo sapien
cacccacagagcggctttgtgtgcg

SEQ ID NO: 3532509 - DNA, 25 bp, Homo sapien
cttctctttggatggaacgtggtcc

SEQ ID NO: 3532510 - DNA, 25 bp, Homo sapien
tctctttggatggaacgtggtcccc

SEQ ID NO: 3532511 - DNA, 25 bp, Homo sapien
gacttctctttggatggaacgtggt

SEQ ID NO: 3532512 - DNA, 25 bp, Homo sapien
cagcgacttctctttggatggaacg

SEQ ID NO: 3532513 - DNA, 25 bp, Homo sapien
ctgagtgcccatcaggcgtcctcct

SEQ ID NO: 3532514 - DNA, 25 bp, Homo sapien
cctcactccccctcgcagaggtctc

SEQ ID NO: 3532515 - DNA, 25 bp, Homo sapien
ctcactccccctcgcagaggtctct

SEQ ID NO: 3532516 - DNA, 25 bp, Homo sapien
tcctcactgagtgcccatcaggcgt

SEQ ID NO: 3532517 - DNA, 25 bp, Homo sapien
ggtttctgggggcaaagctcggctg

SEQ ID NO: 3532518 - DNA, 25 bp, Homo sapien
ccggcatgggattttctcaaggtcc

SEQ ID NO: 3532519 - DNA, 25 bp, Homo sapien
tccctccggcatgggattttctcaa

SEQ ID NO: 3532520 - DNA, 25 bp, Homo sapien
cctccggcatgggattttctcaagg

SEQ ID NO: 3532521 - DNA, 25 bp, Homo sapien
tgctgtgtgtcaccgagtccaacat

SEQ ID NO: 3532522 - DNA, 25 bp, Homo sapien
tgaacagatcagtccacgacatcag

SEQ ID NO: 3532523 - DNA, 25 bp, Homo sapien
tcaaaggcagggtagtactcttcat

SEQ ID NO: 3532524 - DNA, 25 bp, Homo sapien
tgcattaggcaggaaggtgctgtgt

SEQ ID NO: 3532525 - DNA, 25 bp, Homo sapien
ctgtgggagtgaggcagagatggca

SEQ ID NO: 3532526 - DNA, 25 bp, Homo sapien
tgtgggagtgaggcagagatggcat

SEQ ID NO: 3532527 - DNA, 25 bp, Homo sapien
ggaagctgaggtccccagatgcctc

SEQ ID NO: 3532528 - DNA, 25 bp, Homo sapien
ttctgaacccttctcagagctggct

SEQ ID NO: 3532529 - DNA, 25 bp, Homo sapien
agtggcttctgaacccttctcagag

SEQ ID NO: 3532530 - DNA, 25 bp, Homo sapien
tgaggtccccagatgcctccagtgg

SEQ ID NO: 3532531 - DNA, 25 bp, Homo sapien
cagtgtcacacaaatcagaggcagc

SEQ ID NO: 3532532 - DNA, 25 bp, Homo sapien
cagcaataacaggtgtggctcccat

SEQ ID NO: 3532533 - DNA, 25 bp, Homo sapien
tccaccgagttggagggacaggcct

SEQ ID NO: 3532534 - DNA, 25 bp, Homo sapien
cacagagagggtccaccgagttgga

SEQ ID NO: 3532535 - DNA, 25 bp, Homo sapien
caacccggcacccctgctcagcctc

SEQ ID NO: 3532536 - DNA, 25 bp, Homo sapien
ctgagcaacccggcacccctgctca

SEQ ID NO: 3532537 - DNA, 25 bp, Homo sapien
tgagcaacccggcacccctgctcag

SEQ ID NO: 3532538 - DNA, 25 bp, Homo sapien
agcaacccggcacccctgctcagcc

SEQ ID NO: 3532539 - DNA, 25 bp, Homo sapien
gaacacagtggaaaaacgctaacca

SEQ ID NO: 3532540 - DNA, 25 bp, Homo sapien
cattgcttttctggaagcattctct

SEQ ID NO: 3532541 - DNA, 25 bp, Homo sapien
aaaaacgctaaccattgcttttctg

SEQ ID NO: 3532542 - DNA, 25 bp, Homo sapien
agtggaaaaacgctaaccattgctt

SEQ ID NO: 3532543 - DNA, 25 bp, Homo sapien
ccagcgtgcagtggaaataaagaca

SEQ ID NO: 3532544 - DNA, 25 bp, Homo sapien
cacagcccctttgatgacggtgaca

SEQ ID NO: 3532545 - DNA, 25 bp, Homo sapien
tggtttttcaggtttacgcacagcc

SEQ ID NO: 3532546 - DNA, 25 bp, Homo sapien
tggctaggtccaaagaggaggcttt

SEQ ID NO: 3532547 - DNA, 25 bp, Homo sapien
ggatcgtgcgtttggtgaggaattt

SEQ ID NO: 3532548 - DNA, 25 bp, Homo sapien
cccaggggactcagtaaacaagcag

SEQ ID NO: 3532549 - DNA, 25 bp, Homo sapien
cctgggagctgtgcggggatcgtgc

SEQ ID NO: 3532550 - DNA, 25 bp, Homo sapien
caggggactcagtaaacaagcagaa

SEQ ID NO: 3532551 - DNA, 25 bp, Homo sapien
gggccaagttaaaggcagagggcag

SEQ ID NO: 3532552 - DNA, 25 bp, Homo sapien
gccctctgaagtggggaataatttg

SEQ ID NO: 3532553 - DNA, 25 bp, Homo sapien
aggaaggaagcagccacttggtgtt

SEQ ID NO: 3532554 - DNA, 25 bp, Homo sapien
tggctttcaggctgtatccacccca

SEQ ID NO: 3532555 - DNA, 25 bp, Homo sapien
actatctaagcggatgtttttgggc

SEQ ID NO: 3532556 - DNA, 25 bp, Homo sapien
taaactggcgttcaataccaagggc

SEQ ID NO: 3532557 - DNA, 25 bp, Homo sapien
tttttgggctgagcagaaggcacgt

SEQ ID NO: 3532558 - DNA, 25 bp, Homo sapien
ctggagatttggatcggcatcctca

SEQ ID NO: 3532559 - DNA, 25 bp, Homo sapien
ctccagtgtgccgtgcatagctttg

SEQ ID NO: 3532560 - DNA, 25 bp, Homo sapien
ccaagctccagtgtgccgtgcatag

SEQ ID NO: 3532561 - DNA, 25 bp, Homo sapien
tagctttgtgactcccggcattccc

SEQ ID NO: 3532562 - DNA, 25 bp, Homo sapien
agctttgtgactcccggcattccct

SEQ ID NO: 3532563 - DNA, 25 bp, Homo sapien
catgagctaccacggagagagacag

SEQ ID NO: 3532564 - DNA, 25 bp, Homo sapien
agtggctgaagtctccgtgtgctgc

SEQ ID NO: 3532565 - DNA, 25 bp, Homo sapien
gtcagcagagggttaggcaagtctt

SEQ ID NO: 3532566 - DNA, 25 bp, Homo sapien
agacttttgctctgtggtgagtggc

SEQ ID NO: 3532567 - DNA, 25 bp, Homo sapien
caccgaggtggctcccttatctctg

SEQ ID NO: 3532568 - DNA, 25 bp, Homo sapien
aggcaccgaggtggctcccttatct

SEQ ID NO: 3532569 - DNA, 25 bp, Homo sapien
agaaggcaccgaggtggctccctta

SEQ ID NO: 3532570 - DNA, 25 bp, Homo sapien
gaaggcaccgaggtggctcccttat

SEQ ID NO: 3532571 - DNA, 25 bp, Homo sapien
taacgcttcaagatgagccttctct

SEQ ID NO: 3532572 - DNA, 25 bp, Homo sapien
tggtgttcacctctattcatctgag

SEQ ID NO: 3532573 - DNA, 25 bp, Homo sapien
ctgagagctgttgaccgggcccttg

SEQ ID NO: 3532574 - DNA, 25 bp, Homo sapien
tcctctgattttggtgttcacctct

SEQ ID NO: 3532575 - DNA, 25 bp, Homo sapien
tgtgagcgtcctaaacttcagtctc

SEQ ID NO: 3532576 - DNA, 25 bp, Homo sapien
tccagaacttggctaagcaattgct

SEQ ID NO: 3532577 - DNA, 25 bp, Homo sapien
tcaaccgaggtttgctacactcaca

SEQ ID NO: 3532578 - DNA, 25 bp, Homo sapien
ctttggaagagtagttctccctgtg

SEQ ID NO: 3532579 - DNA, 25 bp, Homo sapien
cttacatggctggcaccttcgggct

SEQ ID NO: 3532580 - DNA, 25 bp, Homo sapien
cttgagtggtccagccgtcttggct

SEQ ID NO: 3532581 - DNA, 25 bp, Homo sapien
ggtccagccgtcttggctgcacaaa

SEQ ID NO: 3532582 - DNA, 25 bp, Homo sapien
ggctgcacaaagtccagggatgaca

SEQ ID NO: 3532583 - DNA, 25 bp, Homo sapien
cccagtgacatctttaaatctgcat

SEQ ID NO: 3532584 - DNA, 25 bp, Homo sapien
tctattggcagctgccaggtgtttg

SEQ ID NO: 3532585 - DNA, 25 bp, Homo sapien
cctgagagcaaggtctctgaccgtt

SEQ ID NO: 3532586 - DNA, 25 bp, Homo sapien
tgagagcaaggtctctgaccgtttc

SEQ ID NO: 3532587 - DNA, 25 bp, Homo sapien
gagcaaggtctctgaccgtttcctg

SEQ ID NO: 3532588 - DNA, 25 bp, Homo sapien
caaggtctctgaccgtttcctgcct

SEQ ID NO: 3532589 - DNA, 25 bp, Homo sapien
tcagtcctaccacataaccctgccc

SEQ ID NO: 3532590 - DNA, 25 bp, Homo sapien
ctcagtcctaccacataaccctgcc

SEQ ID NO: 3532591 - DNA, 25 bp, Homo sapien
cagtcctaccacataaccctgccct

SEQ ID NO: 3532592 - DNA, 25 bp, Homo sapien
taacaacactaatggcggtaaacac

SEQ ID NO: 3532593 - DNA, 25 bp, Homo sapien
tgcttggtcgaagcagagcaccttt

SEQ ID NO: 3532594 - DNA, 25 bp, Homo sapien
tgggctgcaacatggccactccaaa

SEQ ID NO: 3532595 - DNA, 25 bp, Homo sapien
tcttgccctggtgctaactcagcca

SEQ ID NO: 3532596 - DNA, 25 bp, Homo sapien
ccttgttataggcatatcatcttct

SEQ ID NO: 3532597 - DNA, 25 bp, Homo sapien
cctccttgttataggcatatcatct

SEQ ID NO: 3532598 - DNA, 25 bp, Homo sapien
ctccttgttataggcatatcatctt

SEQ ID NO: 3532599 - DNA, 25 bp, Homo sapien
ttgttataggcatatcatcttctag

SEQ ID NO: 3532600 - DNA, 25 bp, Homo sapien
taggggatcgtctggatcagcaaga

SEQ ID NO: 3532601 - DNA, 25 bp, Homo sapien
ggcatgtatggagggatgagaaagg

SEQ ID NO: 3532602 - DNA, 25 bp, Homo sapien
atgagaaaggaaaattggtgttagg

SEQ ID NO: 3532603 - DNA, 25 bp, Homo sapien
tgtgggatgaatgtgctgaaggcat

SEQ ID NO: 3532604 - DNA, 25 bp, Homo sapien
ttcagctccctgagttagcagagca

SEQ ID NO: 3532605 - DNA, 25 bp, Homo sapien
gccagctcatgtgccttacaacttt

SEQ ID NO: 3532606 - DNA, 25 bp, Homo sapien
gagttagcagagcattgccccaact

SEQ ID NO: 3532607 - DNA, 25 bp, Homo sapien
actttctgttgccagaagagagccc

SEQ ID NO: 3532608 - DNA, 25 bp, Homo sapien
ccagtgggcagtgagaagtgcagag

SEQ ID NO: 3532609 - DNA, 25 bp, Homo sapien
gccagtgggcagtgagaagtgcaga

SEQ ID NO: 3532610 - DNA, 25 bp, Homo sapien
cagtgggcagtgagaagtgcagagc

SEQ ID NO: 3532611 - DNA, 25 bp, Homo sapien
gtgggcagtgagaagtgcagagctt

SEQ ID NO: 3532612 - DNA, 25 bp, Homo sapien
ggctcctgaatagggtccctggtgc

SEQ ID NO: 3532613 - DNA, 25 bp, Homo sapien
cctttgagtaggactgggctcctga

SEQ ID NO: 3532614 - DNA, 25 bp, Homo sapien
tgtcatttccaagaaagagctgtgg

SEQ ID NO: 3532615 - DNA, 25 bp, Homo sapien
gaaagtcctgacttttacatgaaga

SEQ ID NO: 3532616 - DNA, 25 bp, Homo sapien
ctgtgccacgtacttgcctttctct

SEQ ID NO: 3532617 - DNA, 25 bp, Homo sapien
gtgccacgtacttgcctttctctcc

SEQ ID NO: 3532618 - DNA, 25 bp, Homo sapien
tgtgccacgtacttgcctttctctc

SEQ ID NO: 3532619 - DNA, 25 bp, Homo sapien
cagagaccgcaagccagatgcttgg

SEQ ID NO: 3532620 - DNA, 25 bp, Homo sapien
gcagggatgccagagaccgcaagcc

SEQ ID NO: 3532621 - DNA, 25 bp, Homo sapien
tgccagagaccgcaagccagatgct

SEQ ID NO: 3532622 - DNA, 25 bp, Homo sapien
agatgcttgggatgccaatccttgg

SEQ ID NO: 3532623 - DNA, 25 bp, Homo sapien
gaaagagaggttctgaggggcatct

SEQ ID NO: 3532624 - DNA, 25 bp, Homo sapien
aagagaggttctgaggggcatctgt

SEQ ID NO: 3532625 - DNA, 25 bp, Homo sapien
ctttgaggagaaagagaggttctga

SEQ ID NO: 3532626 - DNA, 25 bp, Homo sapien
gagaaagagaggttctgaggggcat

SEQ ID NO: 3532627 - DNA, 25 bp, Homo sapien
tatgctgacgactaacatgttgcgc

SEQ ID NO: 3532628 - DNA, 25 bp, Homo sapien
tctctcggtaaagcctagtactgtg

SEQ ID NO: 3532629 - DNA, 25 bp, Homo sapien
atgttgcgccctgcctttcttccgg

SEQ ID NO: 3532630 - DNA, 25 bp, Homo sapien
gctcttgggtctttgtctctcggta

SEQ ID NO: 3532631 - DNA, 25 bp, Homo sapien
tttgtagccttatgcaagaagtgac

SEQ ID NO: 3532632 - DNA, 25 bp, Homo sapien
ctttgtagccttatgcaagaagtga

SEQ ID NO: 3532633 - DNA, 25 bp, Homo sapien
cctttgtagccttatgcaagaagtg

SEQ ID NO: 3532634 - DNA, 25 bp, Homo sapien
gaatcaaacgcataacactagtgca

SEQ ID NO: 3532635 - DNA, 25 bp, Homo sapien
cagacattgcaggaatcaaacgcat

SEQ ID NO: 3532636 - DNA, 25 bp, Homo sapien
caggggcgcctggaacatgcttgtc

SEQ ID NO: 3532637 - DNA, 25 bp, Homo sapien
gataatgcccaaacctggttaggca

SEQ ID NO: 3532638 - DNA, 25 bp, Homo sapien
agctgcagaggaaagactttctctt

SEQ ID NO: 3532639 - DNA, 25 bp, Homo sapien
cttccaagatcagaacaaaggacgg

SEQ ID NO: 3532640 - DNA, 25 bp, Homo sapien
tggggatcccaagaaagctgcagag

SEQ ID NO: 3532641 - DNA, 25 bp, Homo sapien
gatgatcacagaagcctcctgagaa

SEQ ID NO: 3532642 - DNA, 25 bp, Homo sapien
gaatgattttccgaagctgtggagg

SEQ ID NO: 3532643 - DNA, 25 bp, Homo sapien
acaggaccctgtttagagaagatct

SEQ ID NO: 3532644 - DNA, 25 bp, Homo sapien
tgaacatctcaggtggtttatgctg

SEQ ID NO: 3532645 - DNA, 25 bp, Homo sapien
tctctcttttcttcgtggactggga

SEQ ID NO: 3532646 - DNA, 25 bp, Homo sapien
gctcagtgatagtgagcaggctcag

SEQ ID NO: 3532647 - DNA, 25 bp, Homo sapien
ctgttttgacgtgaaggctcagtga

SEQ ID NO: 3532648 - DNA, 25 bp, Homo sapien
cgtgaaggctcagtgatagtgagca

SEQ ID NO: 3532649 - DNA, 25 bp, Homo sapien
ttttcctgttttgacgtgaaggctc

SEQ ID NO: 3532650 - DNA, 25 bp, Homo sapien
agggatgttgagagatactcctgca

SEQ ID NO: 3532651 - DNA, 25 bp, Homo sapien
tctaggtctccttgtatattttccc

SEQ ID NO: 3532652 - DNA, 25 bp, Homo sapien
gagagatactcctgcacaaagctgc

SEQ ID NO: 3532653 - DNA, 25 bp, Homo sapien
tgtccaagaaacactcagaatctag

SEQ ID NO: 3532654 - DNA, 25 bp, Homo sapien
atcatgaggcacttttgaatatcta

SEQ ID NO: 3532655 - DNA, 25 bp, Homo sapien
catcatgaggcacttttgaatatct

SEQ ID NO: 3532656 - DNA, 25 bp, Homo sapien
cactgcctgaaatcccaccattagg

SEQ ID NO: 3532657 - DNA, 25 bp, Homo sapien
aagtctggaagactcttattccaca

SEQ ID NO: 3532658 - DNA, 25 bp, Homo sapien
ttgggttagcaaccaagaaagagta

SEQ ID NO: 3532659 - DNA, 25 bp, Homo sapien
tgcctgaaatcccaccattaggatt

SEQ ID NO: 3532660 - DNA, 25 bp, Homo sapien
taagttgaacaggatcagacaggct

SEQ ID NO: 3532661 - DNA, 25 bp, Homo sapien
ggccaaccgccctttgcaaggtgaa

SEQ ID NO: 3532662 - DNA, 25 bp, Homo sapien
aatgaatattcagttggaccaaggc

SEQ ID NO: 3532663 - DNA, 25 bp, Homo sapien
catgggtagatctctttctgggcac

SEQ ID NO: 3532664 - DNA, 25 bp, Homo sapien
tccttcccagtaagggatgagtaca

SEQ ID NO: 3532665 - DNA, 25 bp, Homo sapien
ctgggcctgatgcttgaggatccag

SEQ ID NO: 3532666 - DNA, 25 bp, Homo sapien
aggcctccttcccagtaagggatga

SEQ ID NO: 3532667 - DNA, 25 bp, Homo sapien
cctgatgcttgaggatccagaagtt

SEQ ID NO: 3532668 - DNA, 25 bp, Homo sapien
tgctaggctcctcttgcaacttggg

SEQ ID NO: 3532669 - DNA, 25 bp, Homo sapien
gcttcttctgcgttgctgccatctg

SEQ ID NO: 3532670 - DNA, 25 bp, Homo sapien
gaggattcgtccatgtgcttcttct

SEQ ID NO: 3532671 - DNA, 25 bp, Homo sapien
aatgtttcttctactatgggttctg

SEQ ID NO: 3532672 - DNA, 25 bp, Homo sapien
tatgaggagacccattctttttcac

SEQ ID NO: 3532673 - DNA, 25 bp, Homo sapien
cagggctagtactcataagattatc

SEQ ID NO: 3532674 - DNA, 25 bp, Homo sapien
tctttgaattcccagggctagtact

SEQ ID NO: 3532675 - DNA, 25 bp, Homo sapien
tcttctcctttatgaggagacccat

SEQ ID NO: 3532676 - DNA, 25 bp, Homo sapien
ttaccccactgggcccatgacccag

SEQ ID NO: 3532677 - DNA, 25 bp, Homo sapien
ctgatgccctcccagtaacccctgg

SEQ ID NO: 3532678 - DNA, 25 bp, Homo sapien
gcagcacagcgccaaacctcttggc

SEQ ID NO: 3532679 - DNA, 25 bp, Homo sapien
agacttccaaggaaccggcgcctgc

SEQ ID NO: 3532680 - DNA, 25 bp, Homo sapien
gggctgcagtatcccaggctgaggt

SEQ ID NO: 3532681 - DNA, 25 bp, Homo sapien
gtctctaaggggctgcagtatccca

SEQ ID NO: 3532682 - DNA, 25 bp, Homo sapien
ctaaggggctgcagtatcccaggct

SEQ ID NO: 3532683 - DNA, 25 bp, Homo sapien
ctctaaggggctgcagtatcccagg

SEQ ID NO: 3532684 - DNA, 25 bp, Homo sapien
tgagaactctggtgacccaacctac

SEQ ID NO: 3532685 - DNA, 25 bp, Homo sapien
gactctttttagactgagaagcgga

SEQ ID NO: 3532686 - DNA, 25 bp, Homo sapien
tccgactggtgatcgaatgccttcg

SEQ ID NO: 3532687 - DNA, 25 bp, Homo sapien
tataaagtcagagggtccgactggt

SEQ ID NO: 3532688 - DNA, 25 bp, Homo sapien
tcaaagcctttgaggttgtgattaa

SEQ ID NO: 3532689 - DNA, 25 bp, Homo sapien
agcctttgaggttgtgattaattac

SEQ ID NO: 3532690 - DNA, 25 bp, Homo sapien
caaagcctttgaggttgtgattaat

SEQ ID NO: 3532691 - DNA, 25 bp, Homo sapien
ctcctcaaagcctttgaggttgtga

SEQ ID NO: 3532692 - DNA, 25 bp, Homo sapien
tagaggctctttcgtaggtccctgc

SEQ ID NO: 3532693 - DNA, 25 bp, Homo sapien
tgagtcactagcaggctcacttgtg

SEQ ID NO: 3532694 - DNA, 25 bp, Homo sapien
tataaactagacagtccttggcctt

SEQ ID NO: 3532695 - DNA, 25 bp, Homo sapien
caaactggtgaatcattagctgtca

SEQ ID NO: 3532696 - DNA, 25 bp, Homo sapien
gagtcacgtcaggactttccgggta

SEQ ID NO: 3532697 - DNA, 25 bp, Homo sapien
tccgggtatttgaccgtgatgaaga

SEQ ID NO: 3532698 - DNA, 25 bp, Homo sapien
tgaatgccctcgtccttggagggag

SEQ ID NO: 3532699 - DNA, 25 bp, Homo sapien
agagcgctgtctgccagggttcgcc

SEQ ID NO: 3532700 - DNA, 25 bp, Homo sapien
ttctttccagcataaccaagcttaa

SEQ ID NO: 3532701 - DNA, 25 bp, Homo sapien
gcataaccaagcttaatagcttcca

SEQ ID NO: 3532702 - DNA, 25 bp, Homo sapien
tttccagcataaccaagcttaatag

SEQ ID NO: 3532703 - DNA, 25 bp, Homo sapien
tccagcataaccaagcttaatagct

SEQ ID NO: 3532704 - DNA, 25 bp, Homo sapien
caaactttcctagggccttgtcata

SEQ ID NO: 3532705 - DNA, 25 bp, Homo sapien
cagagctattaacctctaaacttaa

SEQ ID NO: 3532706 - DNA, 25 bp, Homo sapien
tccaaaccctggactcacatgtgat

SEQ ID NO: 3532707 - DNA, 25 bp, Homo sapien
gtccaggaagacagattgactaatt

SEQ ID NO: 3532708 - DNA, 25 bp, Homo sapien
aatatcacttccagggggtttgtag

SEQ ID NO: 3532709 - DNA, 25 bp, Homo sapien
ggtttgtagatgcattctttccatg

SEQ ID NO: 3532710 - DNA, 25 bp, Homo sapien
tgctttctatctgaaaggcactggt

SEQ ID NO: 3532711 - DNA, 25 bp, Homo sapien
gtctggatctcctgctttctatctg

SEQ ID NO: 3532712 - DNA, 25 bp, Homo sapien
acaggttggagagggtgatagggcc

SEQ ID NO: 3532713 - DNA, 25 bp, Homo sapien
gctttgctctgttccccttttcctc

SEQ ID NO: 3532714 - DNA, 25 bp, Homo sapien
tcaagggctctgtgtctgtgcacag

SEQ ID NO: 3532715 - DNA, 25 bp, Homo sapien
gggaccagcacaggactcaactcaa

SEQ ID NO: 3532716 - DNA, 25 bp, Homo sapien
ttttacactttcagaaacctctgaa

SEQ ID NO: 3532717 - DNA, 25 bp, Homo sapien
ttcccactgagtcttttacactttc

SEQ ID NO: 3532718 - DNA, 25 bp, Homo sapien
tttacactttcagaaacctctgaat

SEQ ID NO: 3532719 - DNA, 25 bp, Homo sapien
ttacactttcagaaacctctgaatt

SEQ ID NO: 3532720 - DNA, 25 bp, Homo sapien
tttcaaagtccattgaattgccaag

SEQ ID NO: 3532721 - DNA, 25 bp, Homo sapien
tcaaagtccattgaattgccaagag

SEQ ID NO: 3532722 - DNA, 25 bp, Homo sapien
tccattgaattgccaagagtctctg

SEQ ID NO: 3532723 - DNA, 25 bp, Homo sapien
cattgaattgccaagagtctctgtc

SEQ ID NO: 3532724 - DNA, 25 bp, Homo sapien
tctcttgttaagatcgctctctggt

SEQ ID NO: 3532725 - DNA, 25 bp, Homo sapien
gagttgacgtgacactcatttctgt

SEQ ID NO: 3532726 - DNA, 25 bp, Homo sapien
taccattttgctgccgtttcagccc

SEQ ID NO: 3532727 - DNA, 25 bp, Homo sapien
tcagggataccattttgctgccgtt

SEQ ID NO: 3532728 - DNA, 25 bp, Homo sapien
tactgggaaaccgaacgcggcgctg

SEQ ID NO: 3532729 - DNA, 25 bp, Homo sapien
gcgctgtggctttcagcttgggtaa

SEQ ID NO: 3532730 - DNA, 25 bp, Homo sapien
gaacgcggcgctgtggctttcagct

SEQ ID NO: 3532731 - DNA, 25 bp, Homo sapien
ttcagcttgggtaagccgggtctgc

SEQ ID NO: 3532732 - DNA, 25 bp, Homo sapien
gtcagatactatggccaggaacagc

SEQ ID NO: 3532733 - DNA, 25 bp, Homo sapien
ccatgctggcacatacacggactgt

SEQ ID NO: 3532734 - DNA, 25 bp, Homo sapien
caagagttcgacatcaacggcgagc

SEQ ID NO: 3532735 - DNA, 25 bp, Homo sapien
tactggaccaagtaccaggtgtggg

SEQ ID NO: 3532736 - DNA, 25 bp, Homo sapien
taggcttctcctgataattgaatgg

SEQ ID NO: 3532737 - DNA, 25 bp, Homo sapien
catatatggtttcagtcagtccagg

SEQ ID NO: 3532738 - DNA, 25 bp, Homo sapien
cctagtttaggaagggcacatgaaa

SEQ ID NO: 3532739 - DNA, 25 bp, Homo sapien
aattgaatggatgctgtgaaccctc

SEQ ID NO: 3532740 - DNA, 25 bp, Homo sapien
tgagacacccagtgcctaagaactg

SEQ ID NO: 3532741 - DNA, 25 bp, Homo sapien
tatgtgctctaaaactgagacaccc

SEQ ID NO: 3532742 - DNA, 25 bp, Homo sapien
ttttgctaaatgttggcctcctacc

SEQ ID NO: 3532743 - DNA, 25 bp, Homo sapien
caagatggtataatctaggcctgta

SEQ ID NO: 3532744 - DNA, 25 bp, Homo sapien
ggagacttaccattgagccatgcaa

SEQ ID NO: 3532745 - DNA, 25 bp, Homo sapien
catctgaactgatcccaggtgaacg

SEQ ID NO: 3532746 - DNA, 25 bp, Homo sapien
tcttggagcacacatgaataacttt

SEQ ID NO: 3532747 - DNA, 25 bp, Homo sapien
taatagagcacctaccacagtgtca

SEQ ID NO: 3532748 - DNA, 25 bp, Homo sapien
taaggaggctagatccttcgctgac

SEQ ID NO: 3532749 - DNA, 25 bp, Homo sapien
cattcaagagcaatctttgctaagg

SEQ ID NO: 3532750 - DNA, 25 bp, Homo sapien
tctgcaacctttccattcaagagca

SEQ ID NO: 3532751 - DNA, 25 bp, Homo sapien
gacttcaccattcctcaaacctgta

SEQ ID NO: 3532752 - DNA, 25 bp, Homo sapien
tatgtgcacggcatgggcccatatg

SEQ ID NO: 3532753 - DNA, 25 bp, Homo sapien
tatgaacctctgaaacgtacaagcc

SEQ ID NO: 3532754 - DNA, 25 bp, Homo sapien
gatctcggtagttacgtattgggca

SEQ ID NO: 3532755 - DNA, 25 bp, Homo sapien
ttatgtaggaagcaatagatctcgg

SEQ ID NO: 3532756 - DNA, 25 bp, Homo sapien
cctagacattggtggaagggccgat

SEQ ID NO: 3532757 - DNA, 25 bp, Homo sapien
tggactccatggtgataccacgcaa

SEQ ID NO: 3532758 - DNA, 25 bp, Homo sapien
tcaaagcagagacatcttcagggaa

SEQ ID NO: 3532759 - DNA, 25 bp, Homo sapien
ccgatgtatggaaccagagggacca

SEQ ID NO: 3532760 - DNA, 25 bp, Homo sapien
aagattctgggcctatgctggactc

SEQ ID NO: 3532761 - DNA, 25 bp, Homo sapien
gatgtggattgcaagattctgggcc

SEQ ID NO: 3532762 - DNA, 25 bp, Homo sapien
gattgcaagattctgggcctatgct

SEQ ID NO: 3532763 - DNA, 25 bp, Homo sapien
tgtggattgcaagattctgggccta

SEQ ID NO: 3532764 - DNA, 25 bp, Homo sapien
tctgattctgatcccaacatttgga

SEQ ID NO: 3532765 - DNA, 25 bp, Homo sapien
ggaagactcttctggcaatggaaga

SEQ ID NO: 3532766 - DNA, 25 bp, Homo sapien
ttggaagactcttctggcaatggaa

SEQ ID NO: 3532767 - DNA, 25 bp, Homo sapien
gatcccaacatttggaagactcttc

SEQ ID NO: 3532768 - DNA, 25 bp, Homo sapien
tctttctgagccaatgtcttccatc

SEQ ID NO: 3532769 - DNA, 25 bp, Homo sapien
ggtataatacagcatccgcttccct

SEQ ID NO: 3532770 - DNA, 25 bp, Homo sapien
tgaagagtgagcatggagccagacc

SEQ ID NO: 3532771 - DNA, 25 bp, Homo sapien
cagacctcctttggtataatacagc

SEQ ID NO: 3532772 - DNA, 25 bp, Homo sapien
tcacttgtcagccacctgcactgtg

SEQ ID NO: 3532773 - DNA, 25 bp, Homo sapien
ttgtcagccacctgcactgtgccat

SEQ ID NO: 3532774 - DNA, 25 bp, Homo sapien
tgtcagccacctgcactgtgccatt

SEQ ID NO: 3532775 - DNA, 25 bp, Homo sapien
acttgtcagccacctgcactgtgcc

SEQ ID NO: 3532776 - DNA, 25 bp, Homo sapien
actctcgggtagatgcagcgctgac

SEQ ID NO: 3532777 - DNA, 25 bp, Homo sapien
aaggtgatttttggccgctggcgac

SEQ ID NO: 3532778 - DNA, 25 bp, Homo sapien
gctggcgaccttgtgaccgttggca

SEQ ID NO: 3532779 - DNA, 25 bp, Homo sapien
taggcggaaactggttcccatccaa

SEQ ID NO: 3532780 - DNA, 25 bp, Homo sapien
aaggccttgatgagatagttatctg

SEQ ID NO: 3532781 - DNA, 25 bp, Homo sapien
tgagatagttatctgcatagtccag

SEQ ID NO: 3532782 - DNA, 25 bp, Homo sapien
ccacacatgtcaaggccttgatgag

SEQ ID NO: 3532783 - DNA, 25 bp, Homo sapien
gtccacacatgtcaaggccttgatg

SEQ ID NO: 3532784 - DNA, 25 bp, Homo sapien
atcatcttccttaatctcaccactt

SEQ ID NO: 3532785 - DNA, 25 bp, Homo sapien
tcttccttaatctcaccacttccct

SEQ ID NO: 3532786 - DNA, 25 bp, Homo sapien
catcatcttccttaatctcaccact

SEQ ID NO: 3532787 - DNA, 25 bp, Homo sapien
catcttccttaatctcaccacttcc

SEQ ID NO: 3532788 - DNA, 25 bp, Homo sapien
agtttatagtctgaaacaaagacat

SEQ ID NO: 3532789 - DNA, 25 bp, Homo sapien
tttatagtctgaaacaaagacatct

SEQ ID NO: 3532790 - DNA, 25 bp, Homo sapien
tatagtctgaaacaaagacatctac

SEQ ID NO: 3532791 - DNA, 25 bp, Homo sapien
ctaagagtttatagtctgaaacaaa

SEQ ID NO: 3532792 - DNA, 25 bp, Homo sapien
tccagatgtaggattctctagagca

SEQ ID NO: 3532793 - DNA, 25 bp, Homo sapien
tacagcaggtcgagtgttgatgaat

SEQ ID NO: 3532794 - DNA, 25 bp, Homo sapien
ccagtactttgaatgtgtcgtgtaa

SEQ ID NO: 3532795 - DNA, 25 bp, Homo sapien
tctagagcatttcttttacagcagg

SEQ ID NO: 3532796 - DNA, 25 bp, Homo sapien
tccttagcttgctgctccaagttct

SEQ ID NO: 3532797 - DNA, 25 bp, Homo sapien
tagtttcaagttcctcaacccctgc

SEQ ID NO: 3532798 - DNA, 25 bp, Homo sapien
gcttgactctttagtttcaagttcc

SEQ ID NO: 3532799 - DNA, 25 bp, Homo sapien
caagttcttcaggcttgactcttta

SEQ ID NO: 3532800 - DNA, 25 bp, Homo sapien
ttcagcagtaccctactcttggtac

SEQ ID NO: 3532801 - DNA, 25 bp, Homo sapien
gcagtaccctactcttggtaccaat

SEQ ID NO: 3532802 - DNA, 25 bp, Homo sapien
cagcagtaccctactcttggtacca

SEQ ID NO: 3532803 - DNA, 25 bp, Homo sapien
tttgggctaagccatttagcaagtc

SEQ ID NO: 3532804 - DNA, 25 bp, Homo sapien
cagatttgccagaaagtgttccagc

SEQ ID NO: 3532805 - DNA, 25 bp, Homo sapien
gactgtgattacattacggacacca

SEQ ID NO: 3532806 - DNA, 25 bp, Homo sapien
caggaacatgtacttggcgtcagat

SEQ ID NO: 3532807 - DNA, 25 bp, Homo sapien
cacaggagagctactttatacagga

SEQ ID NO: 3532808 - DNA, 25 bp, Homo sapien
tatttccataattctgagtcagagt

SEQ ID NO: 3532809 - DNA, 25 bp, Homo sapien
tcctccctagcagggcagtatggtg

SEQ ID NO: 3532810 - DNA, 25 bp, Homo sapien
tgcaatggttaggtgaatagattct

SEQ ID NO: 3532811 - DNA, 25 bp, Homo sapien
cagtatggtgcaatggttaggtgaa

SEQ ID NO: 3532812 - DNA, 25 bp, Homo sapien
tcaatgggcccattatgtatggcta

SEQ ID NO: 3532813 - DNA, 25 bp, Homo sapien
agtgcctgctgcctgattcaatggg

SEQ ID NO: 3532814 - DNA, 25 bp, Homo sapien
ggtctaggcccaactcctctatctg

SEQ ID NO: 3532815 - DNA, 25 bp, Homo sapien
tggctaattccacagtagaacactg

SEQ ID NO: 3532816 - DNA, 25 bp, Homo sapien
gttttagagtcagtacattgtgttt

SEQ ID NO: 3532817 - DNA, 25 bp, Homo sapien
ttttagagtcagtacattgtgtttg

SEQ ID NO: 3532818 - DNA, 25 bp, Homo sapien
gccagaagcctatgaccttggtcat

SEQ ID NO: 3532819 - DNA, 25 bp, Homo sapien
ccttcagccagaggggattgctcta

SEQ ID NO: 3532820 - DNA, 25 bp, Homo sapien
ttgctctagggccagaagcctatga

SEQ ID NO: 3532821 - DNA, 25 bp, Homo sapien
tctagggccagaagcctatgacctt

SEQ ID NO: 3532822 - DNA, 25 bp, Homo sapien
caacctgaggccattcagaggtcac

SEQ ID NO: 3532823 - DNA, 25 bp, Homo sapien
tcagcccccaacctgaggccattca

SEQ ID NO: 3532824 - DNA, 25 bp, Homo sapien
cccaacctgaggccattcagaggtc

SEQ ID NO: 3532825 - DNA, 25 bp, Homo sapien
cccccaacctgaggccattcagagg

SEQ ID NO: 3532826 - DNA, 25 bp, Homo sapien
tctcattgtagacagccccttcttg

SEQ ID NO: 3532827 - DNA, 25 bp, Homo sapien
cctcaagaggctggatcggaatgtc

SEQ ID NO: 3532828 - DNA, 25 bp, Homo sapien
gccagccctccgctttcaggaaaga

SEQ ID NO: 3532829 - DNA, 25 bp, Homo sapien
gaccaaggtttgtgacagcatatct

SEQ ID NO: 3532830 - DNA, 25 bp, Homo sapien
ggtgtcagtctagcccattgaggag

SEQ ID NO: 3532831 - DNA, 25 bp, Homo sapien
ttagttgccgggacacctgaaggag

SEQ ID NO: 3532832 - DNA, 25 bp, Homo sapien
gaagaagggtgttggtcctcaattc

SEQ ID NO: 3532833 - DNA, 25 bp, Homo sapien
ggtttaagtaagactgagcccatct

SEQ ID NO: 3532834 - DNA, 25 bp, Homo sapien
tgaaggtgaatccaaaggtactgct

SEQ ID NO: 3532835 - DNA, 25 bp, Homo sapien
aggctttctttatctggcagtggag

SEQ ID NO: 3532836 - DNA, 25 bp, Homo sapien
tgtgctatgactggccacgactggc

SEQ ID NO: 3532837 - DNA, 25 bp, Homo sapien
cagtggagttgggtcctggcacctc

SEQ ID NO: 3532838 - DNA, 25 bp, Homo sapien
tgtgctcgccctcccgaaaggagtt

SEQ ID NO: 3532839 - DNA, 25 bp, Homo sapien
gaaaacctcagtcctagggtgtgaa

SEQ ID NO: 3532840 - DNA, 25 bp, Homo sapien
tagtggctgagcacatgagcgacac

SEQ ID NO: 3532841 - DNA, 25 bp, Homo sapien
tctgtcataagtcctgtgagggatc

SEQ ID NO: 3532842 - DNA, 25 bp, Homo sapien
gctggtgatgacttgatcaacatcc

SEQ ID NO: 3532843 - DNA, 25 bp, Homo sapien
caaacaatgcaagcctaaatgagca

SEQ ID NO: 3532844 - DNA, 25 bp, Homo sapien
gatgcaattaaacctgaaactgaca

SEQ ID NO: 3532845 - DNA, 25 bp, Homo sapien
gaacagatcctaactgtctagtggg

SEQ ID NO: 3532846 - DNA, 25 bp, Homo sapien
ccaacattaaaacaagagaatgctc

SEQ ID NO: 3532847 - DNA, 25 bp, Homo sapien
tattttctgacaccaacattaaaac

SEQ ID NO: 3532848 - DNA, 25 bp, Homo sapien
tctgacaccaacattaaaacaagag

SEQ ID NO: 3532849 - DNA, 25 bp, Homo sapien
aaacaagagaatgctcattccacaa

SEQ ID NO: 3532850 - DNA, 25 bp, Homo sapien
gtatataattagactttcttttggc

SEQ ID NO: 3532851 - DNA, 25 bp, Homo sapien
tccaatgtcagaagagattcagggt

SEQ ID NO: 3532852 - DNA, 25 bp, Homo sapien
agcaaataacatccaatgtcagaag

SEQ ID NO: 3532853 - DNA, 25 bp, Homo sapien
taagaggaattctctgagagtatat

SEQ ID NO: 3532854 - DNA, 25 bp, Homo sapien
ggagctgtgaaggatcaagtcctac

SEQ ID NO: 3532855 - DNA, 25 bp, Homo sapien
tccaactgggagctgtgaaggatca

SEQ ID NO: 3532856 - DNA, 25 bp, Homo sapien
tactttcttcattgatacggcaata

SEQ ID NO: 3532857 - DNA, 25 bp, Homo sapien
tcaaataaatagtcataacactcac

SEQ ID NO: 3532858 - DNA, 25 bp, Homo sapien
gctcatccaatcaatacttcttcat

SEQ ID NO: 3532859 - DNA, 25 bp, Homo sapien
tagagccttgccaaacaacagctca

SEQ ID NO: 3532860 - DNA, 25 bp, Homo sapien
caaacaacagctcatccaatcaata

SEQ ID NO: 3532861 - DNA, 25 bp, Homo sapien
caacagctcatccaatcaatacttc

SEQ ID NO: 3532862 - DNA, 25 bp, Homo sapien
ccttcacatttagcgggtggtaact

SEQ ID NO: 3532863 - DNA, 25 bp, Homo sapien
tcacatttagcgggtggtaacttgt

SEQ ID NO: 3532864 - DNA, 25 bp, Homo sapien
cttcacatttagcgggtggtaactt

SEQ ID NO: 3532865 - DNA, 25 bp, Homo sapien
cacatttagcgggtggtaacttgtt

SEQ ID NO: 3532866 - DNA, 25 bp, Homo sapien
acacatatactccatgacgtctgac

SEQ ID NO: 3532867 - DNA, 25 bp, Homo sapien
tctgaccagtactgcacaggagtct

SEQ ID NO: 3532868 - DNA, 25 bp, Homo sapien
actccatgacgtctgaccagtactg

SEQ ID NO: 3532869 - DNA, 25 bp, Homo sapien
gacgtctgaccagtactgcacagga

SEQ ID NO: 3532870 - DNA, 25 bp, Homo sapien
tcctcaggtgtattctcaataatgg

SEQ ID NO: 3532871 - DNA, 25 bp, Homo sapien
tctcctcaggtgtattctcaataat

SEQ ID NO: 3532872 - DNA, 25 bp, Homo sapien
ctttctcctcaggtgtattctcaat

SEQ ID NO: 3532873 - DNA, 25 bp, Homo sapien
ctcaggtgtattctcaataatgggt

SEQ ID NO: 3532874 - DNA, 25 bp, Homo sapien
gaatgtggcaggcttggtctaatcc

SEQ ID NO: 3532875 - DNA, 25 bp, Homo sapien
gtctaatcctaagcctaagtggtgg

SEQ ID NO: 3532876 - DNA, 25 bp, Homo sapien
tcaagtaaccagttagacatgctgt

SEQ ID NO: 3532877 - DNA, 25 bp, Homo sapien
tgtttccttgaagcagggacaatca

SEQ ID NO: 3532878 - DNA, 25 bp, Homo sapien
tctcagtgcactagtttaaacatgc

SEQ ID NO: 3532879 - DNA, 25 bp, Homo sapien
ctggcaccgttttcctctaaacaag

SEQ ID NO: 3532880 - DNA, 25 bp, Homo sapien
aacaaggcaaggtagaatcaagccc

SEQ ID NO: 3532881 - DNA, 25 bp, Homo sapien
gaaatgcttagcttgtccctgaaca

SEQ ID NO: 3532882 - DNA, 25 bp, Homo sapien
cccgtcctggaaagagaagtgtggc

SEQ ID NO: 3532883 - DNA, 25 bp, Homo sapien
aactcccgtcctggaaagagaagtg

SEQ ID NO: 3532884 - DNA, 25 bp, Homo sapien
ctcccgtcctggaaagagaagtgtg

SEQ ID NO: 3532885 - DNA, 25 bp, Homo sapien
cgtcctggaaagagaagtgtggcca

SEQ ID NO: 3532886 - DNA, 25 bp, Homo sapien
atggcgaaggtccacttatgtcctt

SEQ ID NO: 3532887 - DNA, 25 bp, Homo sapien
tggcgaaggtccacttatgtccttt

SEQ ID NO: 3532888 - DNA, 25 bp, Homo sapien
gatggcgaaggtccacttatgtcct

SEQ ID NO: 3532889 - DNA, 25 bp, Homo sapien
caatctgattattccaccagcctga

SEQ ID NO: 3532890 - DNA, 25 bp, Homo sapien
aagacactgaggttaaagaatccca

SEQ ID NO: 3532891 - DNA, 25 bp, Homo sapien
ccagcctgataaagatcgtagtgtt

SEQ ID NO: 3532892 - DNA, 25 bp, Homo sapien
gggtattattctggcattaacacag

SEQ ID NO: 3532893 - DNA, 25 bp, Homo sapien
ccttttgcactcctgaaggagcaat

SEQ ID NO: 3532894 - DNA, 25 bp, Homo sapien
taaacctgtaggcttggaaccgata

SEQ ID NO: 3532895 - DNA, 25 bp, Homo sapien
attttcactgtggtaagcaagggcc

SEQ ID NO: 3532896 - DNA, 25 bp, Homo sapien
aatgcactgttagctgcacgcgagc

SEQ ID NO: 3532897 - DNA, 25 bp, Homo sapien
taaagggacattcctctgcaaccag

SEQ ID NO: 3532898 - DNA, 25 bp, Homo sapien
tgaggaatacagattagcaggcact

SEQ ID NO: 3532899 - DNA, 25 bp, Homo sapien
taatcctgtattggaaatccttgaa

SEQ ID NO: 3532900 - DNA, 25 bp, Homo sapien
gcatactgccgttcttttgattcaa

SEQ ID NO: 3532901 - DNA, 25 bp, Homo sapien
taatgatacaggtgcttagaaagca

SEQ ID NO: 3532902 - DNA, 25 bp, Homo sapien
tctgggatcaggtatcttggatgct

SEQ ID NO: 3532903 - DNA, 25 bp, Homo sapien
tgggatcaggtatcttggatgctcc

SEQ ID NO: 3532904 - DNA, 25 bp, Homo sapien
agttctgggatcaggtatcttggat

SEQ ID NO: 3532905 - DNA, 25 bp, Homo sapien
gatcaggtatcttggatgctccttg

SEQ ID NO: 3532906 - DNA, 25 bp, Homo sapien
tatgaagatacgtgtttatgagtgt

SEQ ID NO: 3532907 - DNA, 25 bp, Homo sapien
ttacatgttcaacacatactctgtg

SEQ ID NO: 3532908 - DNA, 25 bp, Homo sapien
ctctgtgtgttggttcaattgtatt

SEQ ID NO: 3532909 - DNA, 25 bp, Homo sapien
acttgcttaacccattttatgaaga

SEQ ID NO: 3532910 - DNA, 25 bp, Homo sapien
atgaattccattttgggcagtataa

SEQ ID NO: 3532911 - DNA, 25 bp, Homo sapien
attccattttgggcagtataatata

SEQ ID NO: 3532912 - DNA, 25 bp, Homo sapien
gaattccattttgggcagtataata

SEQ ID NO: 3532913 - DNA, 25 bp, Homo sapien
tgaattccattttgggcagtataat

SEQ ID NO: 3532914 - DNA, 25 bp, Homo sapien
ccttgaacttcaattttgatagcca

SEQ ID NO: 3532915 - DNA, 25 bp, Homo sapien
agaagtgagcgccaaagccagaatg

SEQ ID NO: 3532916 - DNA, 25 bp, Homo sapien
ccagaatgttcctgaaggtattgca

SEQ ID NO: 3532917 - DNA, 25 bp, Homo sapien
tgcaaaactctggtgaccttgaact

SEQ ID NO: 3532918 - DNA, 25 bp, Homo sapien
tattagagggcccatggaaaaccag

SEQ ID NO: 3532919 - DNA, 25 bp, Homo sapien
gatgagcaacatgcctcctgtagca

SEQ ID NO: 3532920 - DNA, 25 bp, Homo sapien
tagacaaccctgactggaacaccag

SEQ ID NO: 3532921 - DNA, 25 bp, Homo sapien
tctcacagatggtccagcaagactg

SEQ ID NO: 3532922 - DNA, 25 bp, Homo sapien
catctggagtcatccctaattgagg

SEQ ID NO: 3532923 - DNA, 25 bp, Homo sapien
gtctagtctggattacgggcttccc

SEQ ID NO: 3532924 - DNA, 25 bp, Homo sapien
ggaaattctatagccagaggtctag

SEQ ID NO: 3532925 - DNA, 25 bp, Homo sapien
gatttaactgaaagagcagactggg

SEQ ID NO: 3532926 - DNA, 25 bp, Homo sapien
tagaaggcgctccataaaactgttg

SEQ ID NO: 3532927 - DNA, 25 bp, Homo sapien
ctatctctgagcgtgtagaaggcgc

SEQ ID NO: 3532928 - DNA, 25 bp, Homo sapien
acatgcagcgtgagggtggatttcc

SEQ ID NO: 3532929 - DNA, 25 bp, Homo sapien
aaatgaccgaaaactacatgcagcg

SEQ ID NO: 3532930 - DNA, 25 bp, Homo sapien
gcacagctccggttcggcaaacgtc

SEQ ID NO: 3532931 - DNA, 25 bp, Homo sapien
cggttcggcaaacgtctcccgagtg

SEQ ID NO: 3532932 - DNA, 25 bp, Homo sapien
caaacgtctcccgagtgccaaacgt

SEQ ID NO: 3532933 - DNA, 25 bp, Homo sapien
tcaaaggcaaagcgctggcagctga

SEQ ID NO: 3532934 - DNA, 25 bp, Homo sapien
cgcatctccgggaacaacagtctcc

SEQ ID NO: 3532935 - DNA, 25 bp, Homo sapien
gcgccgcatctccgggaacaacagt

SEQ ID NO: 3532936 - DNA, 25 bp, Homo sapien
tgcgcgccgcatctccgggaacaac

SEQ ID NO: 3532937 - DNA, 25 bp, Homo sapien
gtctccctcccgagcatcacagcca

SEQ ID NO: 3532938 - DNA, 25 bp, Homo sapien
cggctttgcgcgcggcgcttagcct

SEQ ID NO: 3532939 - DNA, 25 bp, Homo sapien
gatacggcagcgaggccgcaaatgc

SEQ ID NO: 3532940 - DNA, 25 bp, Homo sapien
gcaaatgcaatcaggcggcgctgag

SEQ ID NO: 3532941 - DNA, 25 bp, Homo sapien
cgcttagcctgggatacggcagcga

SEQ ID NO: 3532942 - DNA, 25 bp, Homo sapien
taagccgcggagctaattggagatg

SEQ ID NO: 3532943 - DNA, 25 bp, Homo sapien
cggctgctgcgttatcttgtgggct

SEQ ID NO: 3532944 - DNA, 25 bp, Homo sapien
tgagagacctaaaggcaccgctagc

SEQ ID NO: 3532945 - DNA, 25 bp, Homo sapien
cttcccgggaggcaaggccaacgtg

SEQ ID NO: 3532946 - DNA, 25 bp, Homo sapien
cgaagctggaagattgctagagccc

SEQ ID NO: 3532947 - DNA, 25 bp, Homo sapien
aaaaatgtgcacgtagtggctcacg

SEQ ID NO: 3532948 - DNA, 25 bp, Homo sapien
tggatataatctaggaagagtgctc

SEQ ID NO: 3532949 - DNA, 25 bp, Homo sapien
cagaggaagtaccataaatggtcac

SEQ ID NO: 3532950 - DNA, 25 bp, Homo sapien
ttgaatgtaaccctggacggtggat

SEQ ID NO: 3532951 - DNA, 25 bp, Homo sapien
tatcacgaagccataggaaatctcc

SEQ ID NO: 3532952 - DNA, 25 bp, Homo sapien
ccccagttgaattgtggtatgcaac

SEQ ID NO: 3532953 - DNA, 25 bp, Homo sapien
tgtaatctaaaagccatggtgctct

SEQ ID NO: 3532954 - DNA, 25 bp, Homo sapien
cattaacttagcagtgggacctcac

SEQ ID NO: 3532955 - DNA, 25 bp, Homo sapien
taaggtgaaagcatttgacccaggg

SEQ ID NO: 3532956 - DNA, 25 bp, Homo sapien
agagaatcctatccgacttgcctag

SEQ ID NO: 3532957 - DNA, 25 bp, Homo sapien
gaagtgatcttcaaagagatggcca

SEQ ID NO: 3532958 - DNA, 25 bp, Homo sapien
ggtaaaccgcttgccttcatcttga

SEQ ID NO: 3532959 - DNA, 25 bp, Homo sapien
cttcatcttgagtcggaatatattt

SEQ ID NO: 3532960 - DNA, 25 bp, Homo sapien
catcttgagtcggaatatatttaaa

SEQ ID NO: 3532961 - DNA, 25 bp, Homo sapien
tttctaggtaaaccgcttgccttca

SEQ ID NO: 3532962 - DNA, 25 bp, Homo sapien
gaatgtttgaggtgtggaagccaac

SEQ ID NO: 3532963 - DNA, 25 bp, Homo sapien
cacctgctagtaccatgtagctctt

SEQ ID NO: 3532964 - DNA, 25 bp, Homo sapien
ggaagccaacttactcacctgctag

SEQ ID NO: 3532965 - DNA, 25 bp, Homo sapien
ttcatgaattgcatagctcccacag

SEQ ID NO: 3532966 - DNA, 25 bp, Homo sapien
acatactctgtgcttgtcttaagga

SEQ ID NO: 3532967 - DNA, 25 bp, Homo sapien
cctgaggcacagacctccatgggct

SEQ ID NO: 3532968 - DNA, 25 bp, Homo sapien
tccatgggctcatgtgcatcgtcac

SEQ ID NO: 3532969 - DNA, 25 bp, Homo sapien
caaacaccgttaatgggccagagtg

SEQ ID NO: 3532970 - DNA, 25 bp, Homo sapien
tgagctggaacagcattagcacttt

SEQ ID NO: 3532971 - DNA, 25 bp, Homo sapien
ctgagctggaacagcattagcactt

SEQ ID NO: 3532972 - DNA, 25 bp, Homo sapien
ttctaatggctttcccgagacgagg

SEQ ID NO: 3532973 - DNA, 25 bp, Homo sapien
gctttcccgagacgaggtgtctgct

SEQ ID NO: 3532974 - DNA, 25 bp, Homo sapien
tgtgtcagacagaaaacctagagtt

SEQ ID NO: 3532975 - DNA, 25 bp, Homo sapien
tcagacagaaaacctagagttagta

SEQ ID NO: 3532976 - DNA, 25 bp, Homo sapien
acagaaaacctagagttagtaccat

SEQ ID NO: 3532977 - DNA, 25 bp, Homo sapien
ctgtgtcagacagaaaacctagagt

SEQ ID NO: 3532978 - DNA, 25 bp, Homo sapien
gaaaaggagcttgcgctccgccgaa

SEQ ID NO: 3532979 - DNA, 25 bp, Homo sapien
ccgccgaagagctttggttgcctca

SEQ ID NO: 3532980 - DNA, 25 bp, Homo sapien
gaattaatgcacttggtaacatgcc

SEQ ID NO: 3532981 - DNA, 25 bp, Homo sapien
gaatagcagctcctcagtgaaataa

SEQ ID NO: 3532982 - DNA, 25 bp, Homo sapien
tctaacccaatttgtcttcaccctg

SEQ ID NO: 3532983 - DNA, 25 bp, Homo sapien
tattctaacccaatttgtcttcacc

SEQ ID NO: 3532984 - DNA, 25 bp, Homo sapien
catgggttattctaacccaatttgt

SEQ ID NO: 3532985 - DNA, 25 bp, Homo sapien
gttattctaacccaatttgtcttca

SEQ ID NO: 3532986 - DNA, 25 bp, Homo sapien
tatgccaggtgctagtctaagactt

SEQ ID NO: 3532987 - DNA, 25 bp, Homo sapien
tagtctaagactttgaaagggtgga

SEQ ID NO: 3532988 - DNA, 25 bp, Homo sapien
gatttgatacgttgaatcttaatag

SEQ ID NO: 3532989 - DNA, 25 bp, Homo sapien
gaaagggtggatttgatacgttgaa

SEQ ID NO: 3532990 - DNA, 25 bp, Homo sapien
tcaggttcagtggacctttttgaag

SEQ ID NO: 3532991 - DNA, 25 bp, Homo sapien
tcagcggataactctggcatgggca

SEQ ID NO: 3532992 - DNA, 25 bp, Homo sapien
agagggtcagcggataactctggca

SEQ ID NO: 3532993 - DNA, 25 bp, Homo sapien
agtgcagaagagtgtgacccattct

SEQ ID NO: 3532994 - DNA, 25 bp, Homo sapien
gggattagtgacagcatgggaaagt

SEQ ID NO: 3532995 - DNA, 25 bp, Homo sapien
agcatgggaaagtgacatcaaatcc

SEQ ID NO: 3532996 - DNA, 25 bp, Homo sapien
aaagtgacatcaaatccagctggaa

SEQ ID NO: 3532997 - DNA, 25 bp, Homo sapien
gggaaagtgacatcaaatccagctg

SEQ ID NO: 3532998 - DNA, 25 bp, Homo sapien
cattgtcctgtagtcaagagacctg

SEQ ID NO: 3532999 - DNA, 25 bp, Homo sapien
tgtgtgagagaagcacattgtcctg

SEQ ID NO: 3533000 - DNA, 25 bp, Homo sapien
gaggaagtggaagtagctatcatca

SEQ ID NO: 3533001 - DNA, 25 bp, Homo sapien
tcaggtcctttctagctcagaaaag

SEQ ID NO: 3533002 - DNA, 25 bp, Homo sapien
ttgtagctggtgagatagcaacgga

SEQ ID NO: 3533003 - DNA, 25 bp, Homo sapien
caaatggcgatgcaaatcagtggaa

SEQ ID NO: 3533004 - DNA, 25 bp, Homo sapien
tcaaccgggtcctagagcacaaaaa

SEQ ID NO: 3533005 - DNA, 25 bp, Homo sapien
gccaaactccatgtacaaatggcga

SEQ ID NO: 3533006 - DNA, 25 bp, Homo sapien
caccagcttccattcccaccttgtt

SEQ ID NO: 3533007 - DNA, 25 bp, Homo sapien
ccaccagcttccattcccaccttgt

SEQ ID NO: 3533008 - DNA, 25 bp, Homo sapien
agcttccattcccaccttgttctac

SEQ ID NO: 3533009 - DNA, 25 bp, Homo sapien
tccattcccaccttgttctacagcc

SEQ ID NO: 3533010 - DNA, 25 bp, Homo sapien
tgtgttccccacttggtatccatag

SEQ ID NO: 3533011 - DNA, 25 bp, Homo sapien
gagaagaaagccctccaagatcctc

SEQ ID NO: 3533012 - DNA, 25 bp, Homo sapien
gcttcattggtatttgtaagaggat

SEQ ID NO: 3533013 - DNA, 25 bp, Homo sapien
actggcagaggtgcaaaaatgcttc

SEQ ID NO: 3533014 - DNA, 25 bp, Homo sapien
ctaggaaatctaaagcattgggttc

SEQ ID NO: 3533015 - DNA, 25 bp, Homo sapien
tccccacgtagtggaaacatgatga

SEQ ID NO: 3533016 - DNA, 25 bp, Homo sapien
ccagacagaggtgcttgctctgatc

SEQ ID NO: 3533017 - DNA, 25 bp, Homo sapien
agggcaaccgtggatcttctaggaa

SEQ ID NO: 3533018 - DNA, 25 bp, Homo sapien
gactgccagtagcacattggcttgg

SEQ ID NO: 3533019 - DNA, 25 bp, Homo sapien
tgtggggccttcttgactgccagta

SEQ ID NO: 3533020 - DNA, 25 bp, Homo sapien
cttgactgccagtagcacattggct

SEQ ID NO: 3533021 - DNA, 25 bp, Homo sapien
cttcttgactgccagtagcacattg

SEQ ID NO: 3533022 - DNA, 25 bp, Homo sapien
agtgtgtgatgacggcatttgccat

SEQ ID NO: 3533023 - DNA, 25 bp, Homo sapien
tcaagccttttagggaagcaacgtc

SEQ ID NO: 3533024 - DNA, 25 bp, Homo sapien
ctcatttggtacgtggcatagggca

SEQ ID NO: 3533025 - DNA, 25 bp, Homo sapien
caacgtcaatcagctgatgttcagg

SEQ ID NO: 3533026 - DNA, 25 bp, Homo sapien
tactggtgacaagactcttgattct

SEQ ID NO: 3533027 - DNA, 25 bp, Homo sapien
ggtactggtgacaagactcttgatt

SEQ ID NO: 3533028 - DNA, 25 bp, Homo sapien
tgtggtactggtgacaagactcttg

SEQ ID NO: 3533029 - DNA, 25 bp, Homo sapien
ctctgtggtactggtgacaagactc

SEQ ID NO: 3533030 - DNA, 25 bp, Homo sapien
gaaaggtgcattggtctcaagggct

SEQ ID NO: 3533031 - DNA, 25 bp, Homo sapien
gatcaccttcgtgggataacacaga

SEQ ID NO: 3533032 - DNA, 25 bp, Homo sapien
gaagtttgggaggttcccacatggc

SEQ ID NO: 3533033 - DNA, 25 bp, Homo sapien
tggatcatactggacaagcagcagc

SEQ ID NO: 3533034 - DNA, 25 bp, Homo sapien
aagaaaaatgctcccgccttatgca

SEQ ID NO: 3533035 - DNA, 25 bp, Homo sapien
gccttatgcaatgggtgcagtctgt

SEQ ID NO: 3533036 - DNA, 25 bp, Homo sapien
cagctgtaagactggggtccggcat

SEQ ID NO: 3533037 - DNA, 25 bp, Homo sapien
tcctccttggtgcacattgaagacc

SEQ ID NO: 3533038 - DNA, 25 bp, Homo sapien
cggatccagtcctttttaggatcac

SEQ ID NO: 3533039 - DNA, 25 bp, Homo sapien
gatcaccggatccagccctttttag

SEQ ID NO: 3533040 - DNA, 25 bp, Homo sapien
tttttaggatcaccggatccagccc

SEQ ID NO: 3533041 - DNA, 25 bp, Homo sapien
cagccctttttaggtaggagtgcgg

SEQ ID NO: 3533042 - DNA, 25 bp, Homo sapien
gcactgagctcacaactccactgct

SEQ ID NO: 3533043 - DNA, 25 bp, Homo sapien
tatttgtattcatggcattgcacat

SEQ ID NO: 3533044 - DNA, 25 bp, Homo sapien
tcaccctgtcagtactgtctgggac

SEQ ID NO: 3533045 - DNA, 25 bp, Homo sapien
tgtctgggactgtttcttccatcaa

SEQ ID NO: 3533046 - DNA, 25 bp, Homo sapien
cctctagatgaccatatttgtattc

SEQ ID NO: 3533047 - DNA, 25 bp, Homo sapien
gcagatgtatcgagtccacctagca

SEQ ID NO: 3533048 - DNA, 25 bp, Homo sapien
ccccatttcccacaggactagtgtg

SEQ ID NO: 3533049 - DNA, 25 bp, Homo sapien
gggtgtaagattgggccagatcccc

SEQ ID NO: 3533050 - DNA, 25 bp, Homo sapien
cttctaatgcagatgtatcgagtcc

SEQ ID NO: 3533051 - DNA, 25 bp, Homo sapien
gatgtcaaatattaatcatcagtgt

SEQ ID NO: 3533052 - DNA, 25 bp, Homo sapien
ggcctgcaagggtgcacaagagctg

SEQ ID NO: 3533053 - DNA, 25 bp, Homo sapien
ttaccactgcctcatgctacagaca

SEQ ID NO: 3533054 - DNA, 25 bp, Homo sapien
ctcatcacagtgaactaagcagtca

SEQ ID NO: 3533055 - DNA, 25 bp, Homo sapien
tacaggatttgatgctaagcccagt

SEQ ID NO: 3533056 - DNA, 25 bp, Homo sapien
ggagccttatgcctgtacgttagag

SEQ ID NO: 3533057 - DNA, 25 bp, Homo sapien
tacgttagagcccagaatttctacc

SEQ ID NO: 3533058 - DNA, 25 bp, Homo sapien
tacagaaggtgtccattaaattccc

SEQ ID NO: 3533059 - DNA, 25 bp, Homo sapien
tcgaatcagtcctgggcatgggaag

SEQ ID NO: 3533060 - DNA, 25 bp, Homo sapien
gattgctttaggtgtctactacggg

SEQ ID NO: 3533061 - DNA, 25 bp, Homo sapien
tcctcatggaggtgtattgctgccc

SEQ ID NO: 3533062 - DNA, 25 bp, Homo sapien
gaatggactagaacaagaaacccga

SEQ ID NO: 3533063 - DNA, 25 bp, Homo sapien
ctgctccttgtcctgtattcttgtg

SEQ ID NO: 3533064 - DNA, 25 bp, Homo sapien
gaggttgcatgaggtgaaaaaagct

SEQ ID NO: 3533065 - DNA, 25 bp, Homo sapien
ttgcatgaggtgaaaaaagctgctc

SEQ ID NO: 3533066 - DNA, 25 bp, Homo sapien
gctccttgtcctgtattcttgtgca

SEQ ID NO: 3533067 - DNA, 25 bp, Homo sapien
gtttcctcacatgagtagggactga

SEQ ID NO: 3533068 - DNA, 25 bp, Homo sapien
tggtttcctcacatgagtagggact

SEQ ID NO: 3533069 - DNA, 25 bp, Homo sapien
tcctcacatgagtagggactgaagc

SEQ ID NO: 3533070 - DNA, 25 bp, Homo sapien
gctggtttcctcacatgagtaggga

SEQ ID NO: 3533071 - DNA, 25 bp, Homo sapien
agtaacaactttttcctgcggactg

SEQ ID NO: 3533072 - DNA, 25 bp, Homo sapien
tcttcattccagacgggcggctctt

SEQ ID NO: 3533073 - DNA, 25 bp, Homo sapien
gagtcatggcatgccagcttctgag

SEQ ID NO: 3533074 - DNA, 25 bp, Homo sapien
tgggagttacgggtcactgtcttca

SEQ ID NO: 3533075 - DNA, 25 bp, Homo sapien
gatttttcagtcccaaacactcttc

SEQ ID NO: 3533076 - DNA, 25 bp, Homo sapien
cagacaaggatttttcagtcccaaa

SEQ ID NO: 3533077 - DNA, 25 bp, Homo sapien
caaggatttttcagtcccaaacact

SEQ ID NO: 3533078 - DNA, 25 bp, Homo sapien
tagatccagacaaggatttttcagt

SEQ ID NO: 3533079 - DNA, 25 bp, Homo sapien
cctttgaggcctgcctcaaatatca

SEQ ID NO: 3533080 - DNA, 25 bp, Homo sapien
ctccaggagagagtgtgactccctt

SEQ ID NO: 3533081 - DNA, 25 bp, Homo sapien
gtgttctccaggagagagtgtgact

SEQ ID NO: 3533082 - DNA, 25 bp, Homo sapien
tgaggcctgcctcaaatatcacttc

SEQ ID NO: 3533083 - DNA, 25 bp, Homo sapien
tgccacagccactgataatcacttt

SEQ ID NO: 3533084 - DNA, 25 bp, Homo sapien
cttgccacagccactgataatcact

SEQ ID NO: 3533085 - DNA, 25 bp, Homo sapien
cacagccactgataatcactttcat

SEQ ID NO: 3533086 - DNA, 25 bp, Homo sapien
gccacagccactgataatcactttc

SEQ ID NO: 3533087 - DNA, 25 bp, Homo sapien
cctctctttaagatctgctgggtag

SEQ ID NO: 3533088 - DNA, 25 bp, Homo sapien
taaatactgcgtttgatttccaaac

SEQ ID NO: 3533089 - DNA, 25 bp, Homo sapien
tctgtgtaactcaccaggcaagaag

SEQ ID NO: 3533090 - DNA, 25 bp, Homo sapien
ggcaagaagtccatgcagatttact

SEQ ID NO: 3533091 - DNA, 25 bp, Homo sapien
cagggctgggatttgcgctaaaccg

SEQ ID NO: 3533092 - DNA, 25 bp, Homo sapien
tcccggatgcgcacagtcgttgtct

SEQ ID NO: 3533093 - DNA, 25 bp, Homo sapien
gacaagttttggtggcacgcagcct

SEQ ID NO: 3533094 - DNA, 25 bp, Homo sapien
cagcacatggcagaaagtaaccgtt

SEQ ID NO: 3533095 - DNA, 25 bp, Homo sapien
cgctgtggaagcttgaaccagctct

SEQ ID NO: 3533096 - DNA, 25 bp, Homo sapien
cactgccaccttagcgctgtggaag

SEQ ID NO: 3533097 - DNA, 25 bp, Homo sapien
tgtcactgccaccttagcgctgtgg

SEQ ID NO: 3533098 - DNA, 25 bp, Homo sapien
cagtgtcactgccaccttagcgctg

SEQ ID NO: 3533099 - DNA, 25 bp, Homo sapien
catcttctgctttgtctttgggcat

SEQ ID NO: 3533100 - DNA, 25 bp, Homo sapien
cagtgccatcttctgctttgtcttt

SEQ ID NO: 3533101 - DNA, 25 bp, Homo sapien
gccatcttctgctttgtctttgggc

SEQ ID NO: 3533102 - DNA, 25 bp, Homo sapien
gtgccatcttctgctttgtctttgg

SEQ ID NO: 3533103 - DNA, 25 bp, Homo sapien
acaggcctcatgtttggtctacccc

SEQ ID NO: 3533104 - DNA, 25 bp, Homo sapien
catgtttggtctaccccaaacagtg

SEQ ID NO: 3533105 - DNA, 25 bp, Homo sapien
ggtctaccccaaacagtgagctcac

SEQ ID NO: 3533106 - DNA, 25 bp, Homo sapien
caggcctcatgtttggtctacccca

SEQ ID NO: 3533107 - DNA, 25 bp, Homo sapien
cgctggggacatctggctaaagaca

SEQ ID NO: 3533108 - DNA, 25 bp, Homo sapien
catctgtttgtttgcggctttggtg

SEQ ID NO: 3533109 - DNA, 25 bp, Homo sapien
gctaaagacagggttactagatagt

SEQ ID NO: 3533110 - DNA, 25 bp, Homo sapien
tgcctgctgtgaccgctggggacat

SEQ ID NO: 3533111 - DNA, 25 bp, Homo sapien
gcccttggttccagggtcttctctc

SEQ ID NO: 3533112 - DNA, 25 bp, Homo sapien
ccttggttccagggtcttctctcca

SEQ ID NO: 3533113 - DNA, 25 bp, Homo sapien
tggttccagggtcttctctccaccg

SEQ ID NO: 3533114 - DNA, 25 bp, Homo sapien
caggcccttggttccagggtcttct

SEQ ID NO: 3533115 - DNA, 25 bp, Homo sapien
aaaccagctgacgtcagctccgcag

SEQ ID NO: 3533116 - DNA, 25 bp, Homo sapien
gctgacgtcagctccgcagccacca

SEQ ID NO: 3533117 - DNA, 25 bp, Homo sapien
caggaaaccagctgacgtcagctcc

SEQ ID NO: 3533118 - DNA, 25 bp, Homo sapien
ggaaaccagctgacgtcagctccgc

SEQ ID NO: 3533119 - DNA, 25 bp, Homo sapien
gtgtttgaacaagggccagacttcc

SEQ ID NO: 3533120 - DNA, 25 bp, Homo sapien
gcatcatctaagaaatcatctcttc

SEQ ID NO: 3533121 - DNA, 25 bp, Homo sapien
cttggctggcatcatctaagaaatc

SEQ ID NO: 3533122 - DNA, 25 bp, Homo sapien
cactcaggataagtgtgagggataa

SEQ ID NO: 3533123 - DNA, 25 bp, Homo sapien
tctgcccactcaggataagtgtgag

SEQ ID NO: 3533124 - DNA, 25 bp, Homo sapien
ttcctccctagaagcgcaagcttgg

SEQ ID NO: 3533125 - DNA, 25 bp, Homo sapien
gaagcgcaagcttggaatttcttgg

SEQ ID NO: 3533126 - DNA, 25 bp, Homo sapien
tggttgccaatgaggtgccagcttc

SEQ ID NO: 3533127 - DNA, 25 bp, Homo sapien
ttttcattctgagaagtttggagtt

SEQ ID NO: 3533128 - DNA, 25 bp, Homo sapien
ggattacaaggcagttagtgcccat

SEQ ID NO: 3533129 - DNA, 25 bp, Homo sapien
gactggcattgtgcaccctgtgaat

SEQ ID NO: 3533130 - DNA, 25 bp, Homo sapien
cagttagtgcccattggagtgtgac

SEQ ID NO: 3533131 - DNA, 25 bp, Homo sapien
ataagcttctttgagtaacagggaa

SEQ ID NO: 3533132 - DNA, 25 bp, Homo sapien
tctggctgagggcatgatacaaata

SEQ ID NO: 3533133 - DNA, 25 bp, Homo sapien
tgtgaatactcaagacagggccctt

SEQ ID NO: 3533134 - DNA, 25 bp, Homo sapien
tccaaagagtgtggcagaaatgcgc

SEQ ID NO: 3533135 - DNA, 25 bp, Homo sapien
tcaaactcaaatagggcatctgcct

SEQ ID NO: 3533136 - DNA, 25 bp, Homo sapien
tcactggctatgaatggcttgctca

SEQ ID NO: 3533137 - DNA, 25 bp, Homo sapien
tctataggaaagctctagctgctca

SEQ ID NO: 3533138 - DNA, 25 bp, Homo sapien
tgctggtggatgtacgcctctttct

SEQ ID NO: 3533139 - DNA, 25 bp, Homo sapien
tattccagccctaacagattgggtg

SEQ ID NO: 3533140 - DNA, 25 bp, Homo sapien
tacaagactgatattcacagacact

SEQ ID NO: 3533141 - DNA, 25 bp, Homo sapien
gtaccctagaatgcttatagcctaa

SEQ ID NO: 3533142 - DNA, 25 bp, Homo sapien
taatagtcacagtaccctagaatgc

SEQ ID NO: 3533143 - DNA, 25 bp, Homo sapien
tgatttccacagtggtacggacaga

SEQ ID NO: 3533144 - DNA, 25 bp, Homo sapien
ggtggatgctcttatacaggaaaaa

SEQ ID NO: 3533145 - DNA, 25 bp, Homo sapien
aacattgcctactggttaaccatgg

SEQ ID NO: 3533146 - DNA, 25 bp, Homo sapien
cctcatattgtagtgcgtaatgcaa

SEQ ID NO: 3533147 - DNA, 25 bp, Homo sapien
gcaagaaggctgttggacaaatacc

SEQ ID NO: 3533148 - DNA, 25 bp, Homo sapien
cagaccagtttatgacagctgatga

SEQ ID NO: 3533149 - DNA, 25 bp, Homo sapien
tgagacaaggaacctgcagaatgtg

SEQ ID NO: 3533150 - DNA, 25 bp, Homo sapien
accgttggaaacataaccattacag

SEQ ID NO: 3533151 - DNA, 25 bp, Homo sapien
gagtcgtcagaaactccagaccagt

SEQ ID NO: 3533152 - DNA, 25 bp, Homo sapien
cctcgggtgtgctatggatggcttc

SEQ ID NO: 3533153 - DNA, 25 bp, Homo sapien
cccaaagggtgaagctatttatctg

SEQ ID NO: 3533154 - DNA, 25 bp, Homo sapien
tggaggcctttcatccctcgggtgt

SEQ ID NO: 3533155 - DNA, 25 bp, Homo sapien
gatcgttccagttcccacttggagg

SEQ ID NO: 3533156 - DNA, 25 bp, Homo sapien
tgcatctataaagcaacggctcctg

SEQ ID NO: 3533157 - DNA, 25 bp, Homo sapien
gtttgcatgacctgttatccctggg

SEQ ID NO: 3533158 - DNA, 25 bp, Homo sapien
cagtcagggtgtccgattggtccta

SEQ ID NO: 3533159 - DNA, 25 bp, Homo sapien
tatgaccaaacaagagagtactggc

SEQ ID NO: 3533160 - DNA, 25 bp, Homo sapien
tgaaaagcaacaagccactccagga

SEQ ID NO: 3533161 - DNA, 25 bp, Homo sapien
tcaacggagagctggccaagtcttc

SEQ ID NO: 3533162 - DNA, 25 bp, Homo sapien
tctcaagggcgtaactctggaagca

SEQ ID NO: 3533163 - DNA, 25 bp, Homo sapien
ggaagcacagcttgactacacgtca

SEQ ID NO: 3533164 - DNA, 25 bp, Homo sapien
tagaaactgagtccttccgcctgac

SEQ ID NO: 3533165 - DNA, 25 bp, Homo sapien
aatgtgttcatctgtcaagccaagg

SEQ ID NO: 3533166 - DNA, 25 bp, Homo sapien
tctctgccctgttgataatgcgccc

SEQ ID NO: 3533167 - DNA, 25 bp, Homo sapien
gaaggtgggcatccttgcactcaag

SEQ ID NO: 3533168 - DNA, 25 bp, Homo sapien
gggaatgggaatggaactgggttgc

SEQ ID NO: 3533169 - DNA, 25 bp, Homo sapien
cttagtggggagtgggaatgggaat

SEQ ID NO: 3533170 - DNA, 25 bp, Homo sapien
gagtgggaatgggaatggaactggg

SEQ ID NO: 3533171 - DNA, 25 bp, Homo sapien
gggagtgggaatgggaatggaactg

SEQ ID NO: 3533172 - DNA, 25 bp, Homo sapien
actagggccagtgccttaggtggca

SEQ ID NO: 3533173 - DNA, 25 bp, Homo sapien
cacagttcacgctctttgcaggtat

SEQ ID NO: 3533174 - DNA, 25 bp, Homo sapien
ttctttgacgtacagaacactggca

SEQ ID NO: 3533175 - DNA, 25 bp, Homo sapien
gtttatgacattgtgcctggaagga

SEQ ID NO: 3533176 - DNA, 25 bp, Homo sapien
tcagggaattcgctccatgggtcca

SEQ ID NO: 3533177 - DNA, 25 bp, Homo sapien
tcagggttccctatagcacatggct

SEQ ID NO: 3533178 - DNA, 25 bp, Homo sapien
gaaacagtgccccagaaggagtgag

SEQ ID NO: 3533179 - DNA, 25 bp, Homo sapien
gatgtatatcctcaccagctaaggg

SEQ ID NO: 3533180 - DNA, 25 bp, Homo sapien
gctggaaactcactctatgctagga

SEQ ID NO: 3533181 - DNA, 25 bp, Homo sapien
taatacattgggctcatagggctgg

SEQ ID NO: 3533182 - DNA, 25 bp, Homo sapien
cagggtatggtaacttccgcagaca

SEQ ID NO: 3533183 - DNA, 25 bp, Homo sapien
catgtatatagatcccaaagctggc

SEQ ID NO: 3533184 - DNA, 25 bp, Homo sapien
tacaccaggtgaaggcaaaccgaac

SEQ ID NO: 3533185 - DNA, 25 bp, Homo sapien
tgaggacagtaaaatgaccaggctt

SEQ ID NO: 3533186 - DNA, 25 bp, Homo sapien
tgttggctgcctactgcatgcaagg

SEQ ID NO: 3533187 - DNA, 25 bp, Homo sapien
taacaaggcgagacatggagaacac

SEQ ID NO: 3533188 - DNA, 25 bp, Homo sapien
tctcacgtttccaaggttcttcctc

SEQ ID NO: 3533189 - DNA, 25 bp, Homo sapien
ctgaaaataattatcatcaacatcc

SEQ ID NO: 3533190 - DNA, 25 bp, Homo sapien
gaaaataattatcatcaacatccag

SEQ ID NO: 3533191 - DNA, 25 bp, Homo sapien
tgaaaataattatcatcaacatcca

SEQ ID NO: 3533192 - DNA, 25 bp, Homo sapien
tagaatatggagacgtgacaaacgc

SEQ ID NO: 3533193 - DNA, 25 bp, Homo sapien
tcatgaccacatacaacatgctagg

SEQ ID NO: 3533194 - DNA, 25 bp, Homo sapien
cccaagtggaagtgaaatgcatgca

SEQ ID NO: 3533195 - DNA, 25 bp, Homo sapien
tgtctgtcctcaacgtcatgtgcaa

SEQ ID NO: 3533196 - DNA, 25 bp, Homo sapien
cctcaggtgcttgatgtccttcaaa

SEQ ID NO: 3533197 - DNA, 25 bp, Homo sapien
tccacgcccacaccttctttttcaa

SEQ ID NO: 3533198 - DNA, 25 bp, Homo sapien
aaaatattaagaggcctcttgagaa

SEQ ID NO: 3533199 - DNA, 25 bp, Homo sapien
gagaaattccaaaagggccatacgc

SEQ ID NO: 3533200 - DNA, 25 bp, Homo sapien
ggactacttgtgctaggtacatcag

SEQ ID NO: 3533201 - DNA, 25 bp, Homo sapien
tatatgatatatagcaaggaggact

SEQ ID NO: 3533202 - DNA, 25 bp, Homo sapien
ttgtgctaggtacatcagatgatgc

SEQ ID NO: 3533203 - DNA, 25 bp, Homo sapien
tatagcaaggaggactacttgtgct

SEQ ID NO: 3533204 - DNA, 25 bp, Homo sapien
catcacatggacgaaataagcaact

SEQ ID NO: 3533205 - DNA, 25 bp, Homo sapien
tacaagtctcgatatccatgaatgg

SEQ ID NO: 3533206 - DNA, 25 bp, Homo sapien
tgggactcacagaagcttgggttac

SEQ ID NO: 3533207 - DNA, 25 bp, Homo sapien
caataatacatgcagggctttacgg

SEQ ID NO: 3533208 - DNA, 25 bp, Homo sapien
gtgatagactatcccagccccaaaa

SEQ ID NO: 3533209 - DNA, 25 bp, Homo sapien
catctactatgacagagttgtgtgc

SEQ ID NO: 3533210 - DNA, 25 bp, Homo sapien
aatatcttcatgcactcgatgctgg

SEQ ID NO: 3533211 - DNA, 25 bp, Homo sapien
tgcagcatagacacattgattagag

SEQ ID NO: 3533212 - DNA, 25 bp, Homo sapien
gtctttcgcgttgccctcaagagct

SEQ ID NO: 3533213 - DNA, 25 bp, Homo sapien
ctttgggtctggacgctgtgtgtca

SEQ ID NO: 3533214 - DNA, 25 bp, Homo sapien
caggaaaccctgtctttcgcgttgc

SEQ ID NO: 3533215 - DNA, 25 bp, Homo sapien
atctttgggtctggacgctgtgtgt

SEQ ID NO: 3533216 - DNA, 25 bp, Homo sapien
gaccgagttacttcacactgagtca

SEQ ID NO: 3533217 - DNA, 25 bp, Homo sapien
gagaggggcttgaccgagttacttc

SEQ ID NO: 3533218 - DNA, 25 bp, Homo sapien
acaagtaccaaggtactctctctca

SEQ ID NO: 3533219 - DNA, 25 bp, Homo sapien
ggaaatgtgaaatcgtctggaactc

SEQ ID NO: 3533220 - DNA, 25 bp, Homo sapien
actctcagctgccttgtctgaacag

SEQ ID NO: 3533221 - DNA, 25 bp, Homo sapien
ccaatataggacacagagaataacc

SEQ ID NO: 3533222 - DNA, 25 bp, Homo sapien
tgtcatgagaaaggctgtcccttgg

SEQ ID NO: 3533223 - DNA, 25 bp, Homo sapien
ccttgtctgaacagatgtcatgaga

SEQ ID NO: 3533224 - DNA, 25 bp, Homo sapien
gaatgaggagcatggtgaccagccc

SEQ ID NO: 3533225 - DNA, 25 bp, Homo sapien
tgttggcaggcccacggctgtcaga

SEQ ID NO: 3533226 - DNA, 25 bp, Homo sapien
gcgccgacgcttgccagggtggctg

SEQ ID NO: 3533227 - DNA, 25 bp, Homo sapien
cccacggctgtcagaatgaggagca

SEQ ID NO: 3533228 - DNA, 25 bp, Homo sapien
ggctataaagatggcggctaccgct

SEQ ID NO: 3533229 - DNA, 25 bp, Homo sapien
tcttccaggcaacgaaaggtgacag

SEQ ID NO: 3533230 - DNA, 25 bp, Homo sapien
gctccaacaggaaggacgaatctag

SEQ ID NO: 3533231 - DNA, 25 bp, Homo sapien
ggctaccgcttcataaagggctgta

SEQ ID NO: 3533232 - DNA, 25 bp, Homo sapien
gaaagagagagacagggttatgtcc

SEQ ID NO: 3533233 - DNA, 25 bp, Homo sapien
aaagagagagacagggttatgtcca

SEQ ID NO: 3533234 - DNA, 25 bp, Homo sapien
aagtcaggggtctgtctcatgcctc

SEQ ID NO: 3533235 - DNA, 25 bp, Homo sapien
tgatttcaagtcaggggtctgtctc

SEQ ID NO: 3533236 - DNA, 25 bp, Homo sapien
ttcaagtcaggggtctgtctcatgc

SEQ ID NO: 3533237 - DNA, 25 bp, Homo sapien
gtcaggggtctgtctcatgcctcct

SEQ ID NO: 3533238 - DNA, 25 bp, Homo sapien
ctgggccctttcgaagggttgccag

SEQ ID NO: 3533239 - DNA, 25 bp, Homo sapien
atgactgctcagttgtggttggtgg

SEQ ID NO: 3533240 - DNA, 25 bp, Homo sapien
gttggtggccaggattctcgattgc

SEQ ID NO: 3533241 - DNA, 25 bp, Homo sapien
caggacaccaggactggtatgagat

SEQ ID NO: 3533242 - DNA, 25 bp, Homo sapien
tttgtaaggatgtttgtcacagccc

SEQ ID NO: 3533243 - DNA, 25 bp, Homo sapien
gggatcatcatacaaccttgcagag

SEQ ID NO: 3533244 - DNA, 25 bp, Homo sapien
ccagagctggtaagcaagcagggat

SEQ ID NO: 3533245 - DNA, 25 bp, Homo sapien
gaacaattcacaaggcaggcgaaag

SEQ ID NO: 3533246 - DNA, 25 bp, Homo sapien
tggtcactacaaagtaaatcaaggg

SEQ ID NO: 3533247 - DNA, 25 bp, Homo sapien
gttgcctagcaaccacttctaagtc

SEQ ID NO: 3533248 - DNA, 25 bp, Homo sapien
gatgaggcctatgatcactgttacc

SEQ ID NO: 3533249 - DNA, 25 bp, Homo sapien
tgatccaagcttggaaaatgccagc

SEQ ID NO: 3533250 - DNA, 25 bp, Homo sapien
cacaacccgaaaatctaggtgtcat

SEQ ID NO: 3533251 - DNA, 25 bp, Homo sapien
ttaagcactatggtgagagctgcac

SEQ ID NO: 3533252 - DNA, 25 bp, Homo sapien
taggtgtcattattgcaacgtggca

SEQ ID NO: 3533253 - DNA, 25 bp, Homo sapien
attccctcacttaatgcttaccaca

SEQ ID NO: 3533254 - DNA, 25 bp, Homo sapien
tctcctggacgatgtttggtcaccc

SEQ ID NO: 3533255 - DNA, 25 bp, Homo sapien
gtggtccctgtgctcattgcaatga

SEQ ID NO: 3533256 - DNA, 25 bp, Homo sapien
gataatattggtaacagcaaacagc

SEQ ID NO: 3533257 - DNA, 25 bp, Homo sapien
ccatgttgtacttgcaagtgagccc

SEQ ID NO: 3533258 - DNA, 25 bp, Homo sapien
tccccatagcgatgccaaaagcaat

SEQ ID NO: 3533259 - DNA, 25 bp, Homo sapien
cttccccatagcgatgccaaaagca

SEQ ID NO: 3533260 - DNA, 25 bp, Homo sapien
cccatcttccccatagcgatgccaa

SEQ ID NO: 3533261 - DNA, 25 bp, Homo sapien
atcttccccatagcgatgccaaaag

SEQ ID NO: 3533262 - DNA, 25 bp, Homo sapien
gagtagtgagttgtgttgaaactcc

SEQ ID NO: 3533263 - DNA, 25 bp, Homo sapien
gaacgggggtgttgcatctgaacaa

SEQ ID NO: 3533264 - DNA, 25 bp, Homo sapien
aaaaccctcttggacttggccgctg

SEQ ID NO: 3533265 - DNA, 25 bp, Homo sapien
actccccagtagagccaaaggtcct

SEQ ID NO: 3533266 - DNA, 25 bp, Homo sapien
ggtggtgcaaccaggactttcttcg

SEQ ID NO: 3533267 - DNA, 25 bp, Homo sapien
gataaccatcttagtctcctccggc

SEQ ID NO: 3533268 - DNA, 25 bp, Homo sapien
tcagtcacagtctcgttcaacagag

SEQ ID NO: 3533269 - DNA, 25 bp, Homo sapien
aacagcgctggttgcgttggcctcc

SEQ ID NO: 3533270 - DNA, 25 bp, Homo sapien
tccatctgggcaccaagagtgccag

SEQ ID NO: 3533271 - DNA, 25 bp, Homo sapien
ggctcagctggaaatctccatctgg

SEQ ID NO: 3533272 - DNA, 25 bp, Homo sapien
cactggacaggggtatcacaggctg

SEQ ID NO: 3533273 - DNA, 25 bp, Homo sapien
tgggctccttctagagccaggctca

SEQ ID NO: 3533274 - DNA, 25 bp, Homo sapien
cgggatgtgttctagcctatgctgg

SEQ ID NO: 3533275 - DNA, 25 bp, Homo sapien
tgcgggatgtgttctagcctatgct

SEQ ID NO: 3533276 - DNA, 25 bp, Homo sapien
tgttctagcctatgctggccttggg

SEQ ID NO: 3533277 - DNA, 25 bp, Homo sapien
cggggtgtgcgggatgtgttctagc

SEQ ID NO: 3533278 - DNA, 25 bp, Homo sapien
gtaatacaccatggctctcgtgccc

SEQ ID NO: 3533279 - DNA, 25 bp, Homo sapien
cttgggattgcctggatggatagcc

SEQ ID NO: 3533280 - DNA, 25 bp, Homo sapien
ggatagccaagaccagaatgacccc

SEQ ID NO: 3533281 - DNA, 25 bp, Homo sapien
gaagagatttcgaataaggtccagg

SEQ ID NO: 3533282 - DNA, 25 bp, Homo sapien
tttagcatcctcatgagtatatccc

SEQ ID NO: 3533283 - DNA, 25 bp, Homo sapien
tgattaagctggagatgattagagg

SEQ ID NO: 3533284 - DNA, 25 bp, Homo sapien
ggaaggctattaacataaccacatc

SEQ ID NO: 3533285 - DNA, 25 bp, Homo sapien
tcatgagtatatcccctgggaaggc

SEQ ID NO: 3533286 - DNA, 25 bp, Homo sapien
cgtcagggtgagcagcagattcttc

SEQ ID NO: 3533287 - DNA, 25 bp, Homo sapien
gactgtcgtgcattcgcacttccac

SEQ ID NO: 3533288 - DNA, 25 bp, Homo sapien
caaacaccgtcagggtgagcagcag

SEQ ID NO: 3533289 - DNA, 25 bp, Homo sapien
tctgagccaagatgactgtcgtgca

SEQ ID NO: 3533290 - DNA, 25 bp, Homo sapien
cagagattagagagactggcacctc

SEQ ID NO: 3533291 - DNA, 25 bp, Homo sapien
actagtaggaacctctccaggcaca

SEQ ID NO: 3533292 - DNA, 25 bp, Homo sapien
ggcacctcccctatacagtttcagg

SEQ ID NO: 3533293 - DNA, 25 bp, Homo sapien
ttcaggggctcgactagtaggaacc

SEQ ID NO: 3533294 - DNA, 25 bp, Homo sapien
gagacatataacacccatcaacttc

SEQ ID NO: 3533295 - DNA, 25 bp, Homo sapien
catataacacccatcaacttcatga

SEQ ID NO: 3533296 - DNA, 25 bp, Homo sapien
agaagagacatataacacccatcaa

SEQ ID NO: 3533297 - DNA, 25 bp, Homo sapien
taacacccatcaacttcatgacaag

SEQ ID NO: 3533298 - DNA, 25 bp, Homo sapien
tcatgcaaatccacgtgagtcctgg

SEQ ID NO: 3533299 - DNA, 25 bp, Homo sapien
tgactcagaagggaacgtgtaatgg

SEQ ID NO: 3533300 - DNA, 25 bp, Homo sapien
caatgccttaatgttggaagttcca

SEQ ID NO: 3533301 - DNA, 25 bp, Homo sapien
caagctcagcttatcgtgcaaatca

SEQ ID NO: 3533302 - DNA, 25 bp, Homo sapien
gcctaaaagcaactggtgtgtttct

SEQ ID NO: 3533303 - DNA, 25 bp, Homo sapien
aataggctcattagatgtggtgttg

SEQ ID NO: 3533304 - DNA, 25 bp, Homo sapien
tgccaatagcctgtaataataggct

SEQ ID NO: 3533305 - DNA, 25 bp, Homo sapien
cagtgtcaccttagctggcaccaaa

SEQ ID NO: 3533306 - DNA, 25 bp, Homo sapien
gctgacatctaacctctcctccctg

SEQ ID NO: 3533307 - DNA, 25 bp, Homo sapien
gattgccctactggaagacactagg

SEQ ID NO: 3533308 - DNA, 25 bp, Homo sapien
ccctactggaagacactaggtcacc

SEQ ID NO: 3533309 - DNA, 25 bp, Homo sapien
cagagattgccctactggaagacac

SEQ ID NO: 3533310 - DNA, 25 bp, Homo sapien
gatgtccagagattgccctactgga

SEQ ID NO: 3533311 - DNA, 25 bp, Homo sapien
tcttccagtccattcgaggggctgg

SEQ ID NO: 3533312 - DNA, 25 bp, Homo sapien
agaatacagtgtatagctatcctga

SEQ ID NO: 3533313 - DNA, 25 bp, Homo sapien
tacagtgtatagctatcctgaatca

SEQ ID NO: 3533314 - DNA, 25 bp, Homo sapien
ttcgaggggctggttaaagaataca

SEQ ID NO: 3533315 - DNA, 25 bp, Homo sapien
gccaaagaagaagtttgtggccttc

SEQ ID NO: 3533316 - DNA, 25 bp, Homo sapien
tggccaaagaagaagtttgtggcct

SEQ ID NO: 3533317 - DNA, 25 bp, Homo sapien
caaagaagaagtttgtggccttcat

SEQ ID NO: 3533318 - DNA, 25 bp, Homo sapien
ccaaagaagaagtttgtggccttca

SEQ ID NO: 3533319 - DNA, 25 bp, Homo sapien
aatgattatctggtctagtggcccc

SEQ ID NO: 3533320 - DNA, 25 bp, Homo sapien
tggacttggaaaaactggtcagccc

SEQ ID NO: 3533321 - DNA, 25 bp, Homo sapien
tcatggaaccctagaatttctggac

SEQ ID NO: 3533322 - DNA, 25 bp, Homo sapien
gacatcgacactgaacatttggcca

SEQ ID NO: 3533323 - DNA, 25 bp, Homo sapien
acatatgctgcttcctaggtcctga

SEQ ID NO: 3533324 - DNA, 25 bp, Homo sapien
taactaataacatgcacagctggga

SEQ ID NO: 3533325 - DNA, 25 bp, Homo sapien
cagcatggagctaggcattgtcaca

SEQ ID NO: 3533326 - DNA, 25 bp, Homo sapien
gatccttccgtaaagacacagcaag

SEQ ID NO: 3533327 - DNA, 25 bp, Homo sapien
tgtaagtgtactggagttcactggg

SEQ ID NO: 3533328 - DNA, 25 bp, Homo sapien
tccataattcgcaccatttcagatg

SEQ ID NO: 3533329 - DNA, 25 bp, Homo sapien
tgcatcttcactccaataatctttg

SEQ ID NO: 3533330 - DNA, 25 bp, Homo sapien
gcgtgtctgcacaaaacagcaggaa

SEQ ID NO: 3533331 - DNA, 25 bp, Homo sapien
aaactgtcctatcgactgctgtcat

SEQ ID NO: 3533332 - DNA, 25 bp, Homo sapien
gagaaaaagctgtcagctgctttaa

SEQ ID NO: 3533333 - DNA, 25 bp, Homo sapien
ctcaaagacatcaaaaactgtccta

SEQ ID NO: 3533334 - DNA, 25 bp, Homo sapien
gaaaaagctgtcagctgctttaaag

SEQ ID NO: 3533335 - DNA, 25 bp, Homo sapien
accattctctcggctccaggaacgt

SEQ ID NO: 3533336 - DNA, 25 bp, Homo sapien
ccattctctcggctccaggaacgtg

SEQ ID NO: 3533337 - DNA, 25 bp, Homo sapien
cattctctcggctccaggaacgtgc

SEQ ID NO: 3533338 - DNA, 25 bp, Homo sapien
ctgaccattctctcggctccaggaa

SEQ ID NO: 3533339 - DNA, 25 bp, Homo sapien
ggacacggaggtgtacaaggcaggc

SEQ ID NO: 3533340 - DNA, 25 bp, Homo sapien
acacggaggtgtacaaggcaggcta

SEQ ID NO: 3533341 - DNA, 25 bp, Homo sapien
aggacacggaggtgtacaaggcagg

SEQ ID NO: 3533342 - DNA, 25 bp, Homo sapien
gacacggaggtgtacaaggcaggct

SEQ ID NO: 3533343 - DNA, 25 bp, Homo sapien
gtggcaggggcaccggcagaaagag

SEQ ID NO: 3533344 - DNA, 25 bp, Homo sapien
caccaaagacaagagcttagcaggt

SEQ ID NO: 3533345 - DNA, 25 bp, Homo sapien
ccaaagacaagagcttagcaggtgg

SEQ ID NO: 3533346 - DNA, 25 bp, Homo sapien
aaagacaagagcttagcaggtggca

SEQ ID NO: 3533347 - DNA, 25 bp, Homo sapien
ctgacactaagaacaccatatgtgt

SEQ ID NO: 3533348 - DNA, 25 bp, Homo sapien
tctgacactaagaacaccatatgtg

SEQ ID NO: 3533349 - DNA, 25 bp, Homo sapien
tgctctgacactaagaacaccatat

SEQ ID NO: 3533350 - DNA, 25 bp, Homo sapien
gctctgacactaagaacaccatatg

SEQ ID NO: 3533351 - DNA, 25 bp, Homo sapien
tccttaccagatgccttgaggctct

SEQ ID NO: 3533352 - DNA, 25 bp, Homo sapien
cttaccagatgccttgaggctctct

SEQ ID NO: 3533353 - DNA, 25 bp, Homo sapien
taccagatgccttgaggctctctcc

SEQ ID NO: 3533354 - DNA, 25 bp, Homo sapien
caagctccaggttccttaccagatg

SEQ ID NO: 3533355 - DNA, 25 bp, Homo sapien
ccatttctgccagggtacagacagt

SEQ ID NO: 3533356 - DNA, 25 bp, Homo sapien
gtcccaaagggtggcatcttcctct

SEQ ID NO: 3533357 - DNA, 25 bp, Homo sapien
tgccagggtacagacagtcccaaag

SEQ ID NO: 3533358 - DNA, 25 bp, Homo sapien
ctcatctgtgttcactttggtccag

SEQ ID NO: 3533359 - DNA, 25 bp, Homo sapien
gtttcccattgtttcatttgcctct

SEQ ID NO: 3533360 - DNA, 25 bp, Homo sapien
gaatgagcaggccaagtgtcttcat

SEQ ID NO: 3533361 - DNA, 25 bp, Homo sapien
gcacattgatggaagctgctaggaa

SEQ ID NO: 3533362 - DNA, 25 bp, Homo sapien
gctggtactataaccactgaggaat

SEQ ID NO: 3533363 - DNA, 25 bp, Homo sapien
tggctgacaggcagaatggtaaagc

SEQ ID NO: 3533364 - DNA, 25 bp, Homo sapien
tgctacagaagccatattaccttcc

SEQ ID NO: 3533365 - DNA, 25 bp, Homo sapien
tgaggaggctcccatgtaaatggct

SEQ ID NO: 3533366 - DNA, 25 bp, Homo sapien
ggcaagaacatcccctacttttcca

SEQ ID NO: 3533367 - DNA, 25 bp, Homo sapien
cactgtgaccttgcttgctacagaa

SEQ ID NO: 3533368 - DNA, 25 bp, Homo sapien
gatttgaaccattgccagtctgacc

SEQ ID NO: 3533369 - DNA, 25 bp, Homo sapien
tgaattctaccactgtagcagggag

SEQ ID NO: 3533370 - DNA, 25 bp, Homo sapien
aacaaataccgctcaggtgtgacca

SEQ ID NO: 3533371 - DNA, 25 bp, Homo sapien
ttgtgaacccctaaaagagcattgg

SEQ ID NO: 3533372 - DNA, 25 bp, Homo sapien
ttttgaatctcttgatttaggctag

SEQ ID NO: 3533373 - DNA, 25 bp, Homo sapien
ggctatttttgaatctcttgattta

SEQ ID NO: 3533374 - DNA, 25 bp, Homo sapien
tctcttgatttaggctagaagtcca

SEQ ID NO: 3533375 - DNA, 25 bp, Homo sapien
aagtccaatgcgctatccattgcac

SEQ ID NO: 3533376 - DNA, 25 bp, Homo sapien
tgctgctcagtcaccaccgggatct

SEQ ID NO: 3533377 - DNA, 25 bp, Homo sapien
ccacgtgtggagggatcaaagacac

SEQ ID NO: 3533378 - DNA, 25 bp, Homo sapien
gacacatcaaaacgggtctccaaag

SEQ ID NO: 3533379 - DNA, 25 bp, Homo sapien
cacgtgccttcagccacgtgtggag

SEQ ID NO: 3533380 - DNA, 25 bp, Homo sapien
tatacctgagccacagtcttagacg

SEQ ID NO: 3533381 - DNA, 25 bp, Homo sapien
ccactaaagactgtccaagggagca

SEQ ID NO: 3533382 - DNA, 25 bp, Homo sapien
gagtttgccccgtggaggactgaaa

SEQ ID NO: 3533383 - DNA, 25 bp, Homo sapien
cctaaagcttccatactgggtggga

SEQ ID NO: 3533384 - DNA, 25 bp, Homo sapien
atgaggacgaggacccaggacccgc

SEQ ID NO: 3533385 - DNA, 25 bp, Homo sapien
ccaggacccgctggtgaatggcaac

SEQ ID NO: 3533386 - DNA, 25 bp, Homo sapien
gaatggcaactgctgtcaactcact

SEQ ID NO: 3533387 - DNA, 25 bp, Homo sapien
aatcttgttcgaaccccgctgatga

SEQ ID NO: 3533388 - DNA, 25 bp, Homo sapien
tccagagagctggtccccggttgtt

SEQ ID NO: 3533389 - DNA, 25 bp, Homo sapien
tccaggtcacttggaatgtaaacaa

SEQ ID NO: 3533390 - DNA, 25 bp, Homo sapien
gaaagaggtaatttgccctctcgct

SEQ ID NO: 3533391 - DNA, 25 bp, Homo sapien
cccggttgttactccaggtcacttg

SEQ ID NO: 3533392 - DNA, 25 bp, Homo sapien
agttccactcaacaagtgctcagta

SEQ ID NO: 3533393 - DNA, 25 bp, Homo sapien
gttccactcaacaagtgctcagtaa

SEQ ID NO: 3533394 - DNA, 25 bp, Homo sapien
ttccactcaacaagtgctcagtaaa

SEQ ID NO: 3533395 - DNA, 25 bp, Homo sapien
gagttccactcaacaagtgctcagt

SEQ ID NO: 3533396 - DNA, 25 bp, Homo sapien
cctcctcttcagcactatccggcag

SEQ ID NO: 3533397 - DNA, 25 bp, Homo sapien
tctggggaacgccccctcctcttca

SEQ ID NO: 3533398 - DNA, 25 bp, Homo sapien
cccctcctcttcagcactatccggc

SEQ ID NO: 3533399 - DNA, 25 bp, Homo sapien
gccccctcctcttcagcactatccg

SEQ ID NO: 3533400 - DNA, 25 bp, Homo sapien
ggatttgcaggcgatccctctctat

SEQ ID NO: 3533401 - DNA, 25 bp, Homo sapien
tttcgtcgagagctgacatcacccg

SEQ ID NO: 3533402 - DNA, 25 bp, Homo sapien
gagggattgcaaggtttagccccgc

SEQ ID NO: 3533403 - DNA, 25 bp, Homo sapien
gtatttaagaggagcctctgcccgc

SEQ ID NO: 3533404 - DNA, 25 bp, Homo sapien
ccaaactcacaggcaggcacaccca

SEQ ID NO: 3533405 - DNA, 25 bp, Homo sapien
cccaaactcacaggcaggcacaccc

SEQ ID NO: 3533406 - DNA, 25 bp, Homo sapien
caaactcacaggcaggcacacccac

SEQ ID NO: 3533407 - DNA, 25 bp, Homo sapien
ccccaaactcacaggcaggcacacc

SEQ ID NO: 3533408 - DNA, 25 bp, Homo sapien
agtcgagcggctgaaacacgcgggt

SEQ ID NO: 3533409 - DNA, 25 bp, Homo sapien
aacacgcgggtggtgcagcctaaac

SEQ ID NO: 3533410 - DNA, 25 bp, Homo sapien
gtgcagcctaaacgcggcccagctg

SEQ ID NO: 3533411 - DNA, 25 bp, Homo sapien
gggtcccaggtccagcggagtcgag

SEQ ID NO: 3533412 - DNA, 25 bp, Homo sapien
ggtgccggctgagaaggcgcggaga

SEQ ID NO: 3533413 - DNA, 25 bp, Homo sapien
gagaggtcggcctcgtgggtgccgg

SEQ ID NO: 3533414 - DNA, 25 bp, Homo sapien
tgagtggcgggggacggttctccac

SEQ ID NO: 3533415 - DNA, 25 bp, Homo sapien
agaaggcgcggagagttggccgagg

SEQ ID NO: 3533416 - DNA, 25 bp, Homo sapien
gagagttcgagccttccggacgcct

SEQ ID NO: 3533417 - DNA, 25 bp, Homo sapien
aatgacgagacctgtgcagctttga

SEQ ID NO: 3533418 - DNA, 25 bp, Homo sapien
gcctttgcataaaaatgacgagacc

SEQ ID NO: 3533419 - DNA, 25 bp, Homo sapien
tggaatactgcaggaacctagggtc

SEQ ID NO: 3533420 - DNA, 25 bp, Homo sapien
tttcctcgtctaggcaatggaaccc

SEQ ID NO: 3533421 - DNA, 25 bp, Homo sapien
ttcctcgtctaggcaatggaaccca

SEQ ID NO: 3533422 - DNA, 25 bp, Homo sapien
cacaggagaattaaacagactctct

SEQ ID NO: 3533423 - DNA, 25 bp, Homo sapien
tgctggaccttgttagacgatggaa

SEQ ID NO: 3533424 - DNA, 25 bp, Homo sapien
gtagacgatcttcggatttgcgctg

SEQ ID NO: 3533425 - DNA, 25 bp, Homo sapien
gatggaacgcgaccggccacgtgca

SEQ ID NO: 3533426 - DNA, 25 bp, Homo sapien
aatctgaatccaaacgtcatcttcc

SEQ ID NO: 3533427 - DNA, 25 bp, Homo sapien
aaatctgaatccaaacgtcatcttc

SEQ ID NO: 3533428 - DNA, 25 bp, Homo sapien
cctgtctgcaccattagaataatca

SEQ ID NO: 3533429 - DNA, 25 bp, Homo sapien
ctgtctgcaccattagaataatcat

SEQ ID NO: 3533430 - DNA, 25 bp, Homo sapien
gccaatttaccagataatgaagctg

SEQ ID NO: 3533431 - DNA, 25 bp, Homo sapien
gctgaggtagagaagcttagtactt

SEQ ID NO: 3533432 - DNA, 25 bp, Homo sapien
gaagcttagtacttgcccaaaatca

SEQ ID NO: 3533433 - DNA, 25 bp, Homo sapien
tatgccaatttaccagataatgaag

SEQ ID NO: 3533434 - DNA, 25 bp, Homo sapien
gaaacttacttcttgcaagccctgg

SEQ ID NO: 3533435 - DNA, 25 bp, Homo sapien
gaccagactgtactgtggccatgta

SEQ ID NO: 3533436 - DNA, 25 bp, Homo sapien
tgtcctagtagtggacgcggcatca

SEQ ID NO: 3533437 - DNA, 25 bp, Homo sapien
cacaggcagctctctagaacttgag

SEQ ID NO: 3533438 - DNA, 25 bp, Homo sapien
gagcctgtggctgcatgttttatca

SEQ ID NO: 3533439 - DNA, 25 bp, Homo sapien
ggaagtgctgagatcccgactggca

SEQ ID NO: 3533440 - DNA, 25 bp, Homo sapien
gcgcagtgtgtcgttcttgaagcca

SEQ ID NO: 3533441 - DNA, 25 bp, Homo sapien
tacgggccttgtctaggagcttcag

SEQ ID NO: 3533442 - DNA, 25 bp, Homo sapien
caggtcagtaacacagtgggcagcc

SEQ ID NO: 3533443 - DNA, 25 bp, Homo sapien
agtgatgttctcaattttcccgcag

SEQ ID NO: 3533444 - DNA, 25 bp, Homo sapien
caacccttgggtctttggagcagtg

SEQ ID NO: 3533445 - DNA, 25 bp, Homo sapien
taggaaccacgctcccttgtgtagg

SEQ ID NO: 3533446 - DNA, 25 bp, Homo sapien
tctgcttgctgaaggccgctgagta

SEQ ID NO: 3533447 - DNA, 25 bp, Homo sapien
gtatagctggtgtaatggtgtctcc

SEQ ID NO: 3533448 - DNA, 25 bp, Homo sapien
tgagatgcactcatactggagctgg

SEQ ID NO: 3533449 - DNA, 25 bp, Homo sapien
tatcccatgggcagatctccaaagg

SEQ ID NO: 3533450 - DNA, 25 bp, Homo sapien
cctgcatcggaagaactctccttct

SEQ ID NO: 3533451 - DNA, 25 bp, Homo sapien
cttgactgaacctgcatcggaagaa

SEQ ID NO: 3533452 - DNA, 25 bp, Homo sapien
gaacctgcatcggaagaactctcct

SEQ ID NO: 3533453 - DNA, 25 bp, Homo sapien
tgactgaacctgcatcggaagaact

SEQ ID NO: 3533454 - DNA, 25 bp, Homo sapien
gaaggtcgcttctggctaaagtcta

SEQ ID NO: 3533455 - DNA, 25 bp, Homo sapien
tatccggataatctaggacaaggac

SEQ ID NO: 3533456 - DNA, 25 bp, Homo sapien
tctccaaggacatatgtgacaccgt

SEQ ID NO: 3533457 - DNA, 25 bp, Homo sapien
caggcagccaacattcatctaatta

SEQ ID NO: 3533458 - DNA, 25 bp, Homo sapien
cctccataggctggcagggatgatg

SEQ ID NO: 3533459 - DNA, 25 bp, Homo sapien
tgcatatattaaactcagccctgtc

SEQ ID NO: 3533460 - DNA, 25 bp, Homo sapien
gatgttaacctgaagcaactagtga

SEQ ID NO: 3533461 - DNA, 25 bp, Homo sapien
gtgagaaactatgcatccccactgc

SEQ ID NO: 3533462 - DNA, 25 bp, Homo sapien
cttcatcaatgtccgtagacttcag

SEQ ID NO: 3533463 - DNA, 25 bp, Homo sapien
catcaatgtccgtagacttcagaaa

SEQ ID NO: 3533464 - DNA, 25 bp, Homo sapien
atcaatgtccgtagacttcagaaac

SEQ ID NO: 3533465 - DNA, 25 bp, Homo sapien
tcatcaatgtccgtagacttcagaa

SEQ ID NO: 3533466 - DNA, 25 bp, Homo sapien
tattttctggtacccattgactggg

SEQ ID NO: 3533467 - DNA, 25 bp, Homo sapien
tgccactaagaacataggagttgtt

SEQ ID NO: 3533468 - DNA, 25 bp, Homo sapien
ccaattttagcatggcgtccgttga

SEQ ID NO: 3533469 - DNA, 25 bp, Homo sapien
tacaaaagaaagacaccacggtgcc

SEQ ID NO: 3533470 - DNA, 25 bp, Homo sapien
cagacaatgaatcttctgacgcctt

SEQ ID NO: 3533471 - DNA, 25 bp, Homo sapien
gacaatgaatcttctgacgccttga

SEQ ID NO: 3533472 - DNA, 25 bp, Homo sapien
caatgaatcttctgacgccttgatc

SEQ ID NO: 3533473 - DNA, 25 bp, Homo sapien
aatgaatcttctgacgccttgatct

SEQ ID NO: 3533474 - DNA, 25 bp, Homo sapien
gagtttattcactagactctaatgg

SEQ ID NO: 3533475 - DNA, 25 bp, Homo sapien
tccctgccaagtgtctaaatctagc

SEQ ID NO: 3533476 - DNA, 25 bp, Homo sapien
gttaagtacctatcaagcaaaatgg

SEQ ID NO: 3533477 - DNA, 25 bp, Homo sapien
tttatgtgttcccatagtctcacca

SEQ ID NO: 3533478 - DNA, 25 bp, Homo sapien
ggccaccaccctgtacttcatatgt

SEQ ID NO: 3533479 - DNA, 25 bp, Homo sapien
atatctaggagatttttgtccccct

SEQ ID NO: 3533480 - DNA, 25 bp, Homo sapien
atctaggagatttttgtccccctag

SEQ ID NO: 3533481 - DNA, 25 bp, Homo sapien
tatctaggagatttttgtcccccta

SEQ ID NO: 3533482 - DNA, 25 bp, Homo sapien
agatgaccaggtccataaattctat

SEQ ID NO: 3533483 - DNA, 25 bp, Homo sapien
tatgtgactgtcatactcgacataa

SEQ ID NO: 3533484 - DNA, 25 bp, Homo sapien
tgtcatactcgacataaaagtagct

SEQ ID NO: 3533485 - DNA, 25 bp, Homo sapien
ctcgacataaaagtagctgagatga

SEQ ID NO: 3533486 - DNA, 25 bp, Homo sapien
tcttagcatactcttggcatccgcc

SEQ ID NO: 3533487 - DNA, 25 bp, Homo sapien
ggcatccgcccattgtcacttgtca

SEQ ID NO: 3533488 - DNA, 25 bp, Homo sapien
gataccacctgagctaaaaaccaag

SEQ ID NO: 3533489 - DNA, 25 bp, Homo sapien
tgtcatctaactggtagtaagggcc

SEQ ID NO: 3533490 - DNA, 25 bp, Homo sapien
gaataatgacaccaactggtgatgt

SEQ ID NO: 3533491 - DNA, 25 bp, Homo sapien
ccaactggtgatgtaatccccactg

SEQ ID NO: 3533492 - DNA, 25 bp, Homo sapien
gtcttcaccaaccaggaataatgac

SEQ ID NO: 3533493 - DNA, 25 bp, Homo sapien
tgtgtctctggaccaaaccaaatat

SEQ ID NO: 3533494 - DNA, 25 bp, Homo sapien
caggcacacttgtaagatccagcct

SEQ ID NO: 3533495 - DNA, 25 bp, Homo sapien
gcacgtgccgtcatggaaacaaggg

SEQ ID NO: 3533496 - DNA, 25 bp, Homo sapien
agccttgtcaaggacgcacgtgccg

SEQ ID NO: 3533497 - DNA, 25 bp, Homo sapien
ttttcacagcgctgcccagtatagc

SEQ ID NO: 3533498 - DNA, 25 bp, Homo sapien
tgtagagagcacctgctgagagttc

SEQ ID NO: 3533499 - DNA, 25 bp, Homo sapien
ctgcacagctccacagggggcaggc

SEQ ID NO: 3533500 - DNA, 25 bp, Homo sapien
cacctgctgagagttcctgtaggca

SEQ ID NO: 3533501 - DNA, 25 bp, Homo sapien
gcaggcacagagactgtagagagca

SEQ ID NO: 3533502 - DNA, 25 bp, Homo sapien
cttctttcctgagactttcatgtca

SEQ ID NO: 3533503 - DNA, 25 bp, Homo sapien
tctttcctgagactttcatgtcata

SEQ ID NO: 3533504 - DNA, 25 bp, Homo sapien
tttcctgagactttcatgtcatacc

SEQ ID NO: 3533505 - DNA, 25 bp, Homo sapien
ctttcctgagactttcatgtcatac

SEQ ID NO: 3533506 - DNA, 25 bp, Homo sapien
tcataaatggcatggaaaccgtcaa

SEQ ID NO: 3533507 - DNA, 25 bp, Homo sapien
tcaaaattcttggagccatcggagt

SEQ ID NO: 3533508 - DNA, 25 bp, Homo sapien
tatgctctggataggagctggccgc

SEQ ID NO: 3533509 - DNA, 25 bp, Homo sapien
tgatctggccatcgcggttgtctcc

SEQ ID NO: 3533510 - DNA, 25 bp, Homo sapien
gatagctttccaacaaaatctgacc

SEQ ID NO: 3533511 - DNA, 25 bp, Homo sapien
aacccaggtttagcatgaatggtcc

SEQ ID NO: 3533512 - DNA, 25 bp, Homo sapien
gagcatttaggggatagctttccaa

SEQ ID NO: 3533513 - DNA, 25 bp, Homo sapien
ctttggggctcgcagaacctggcca

SEQ ID NO: 3533514 - DNA, 25 bp, Homo sapien
cagatgcccgatccctggccatgtg

SEQ ID NO: 3533515 - DNA, 25 bp, Homo sapien
tgctggaccacctgttcctgtagcc

SEQ ID NO: 3533516 - DNA, 25 bp, Homo sapien
gtgaaatgctggaccacctgttcct

SEQ ID NO: 3533517 - DNA, 25 bp, Homo sapien
ccgatccctggccatgtgaaatgct

SEQ ID NO: 3533518 - DNA, 25 bp, Homo sapien
tcttcttaatgaggttcctttcact

SEQ ID NO: 3533519 - DNA, 25 bp, Homo sapien
cacaacaagagatctattgtttcct

SEQ ID NO: 3533520 - DNA, 25 bp, Homo sapien
tccttgcttgttcacaacaagagat

SEQ ID NO: 3533521 - DNA, 25 bp, Homo sapien
tgtttcctttgattgcaaacgccct

SEQ ID NO: 3533522 - DNA, 25 bp, Homo sapien
tggttgttctcttgaatgtagatct

SEQ ID NO: 3533523 - DNA, 25 bp, Homo sapien
tatgattgatgagttctttaacaac

SEQ ID NO: 3533524 - DNA, 25 bp, Homo sapien
aacataaaatcctctgcaaagattt

SEQ ID NO: 3533525 - DNA, 25 bp, Homo sapien
catccttctataccttcaccagaag

SEQ ID NO: 3533526 - DNA, 25 bp, Homo sapien
ggagggaaggtctttcacatccttc

SEQ ID NO: 3533527 - DNA, 25 bp, Homo sapien
tggcattctgggtcgctcttgggcc

SEQ ID NO: 3533528 - DNA, 25 bp, Homo sapien
tgccatgccagctagaagtgtggca

SEQ ID NO: 3533529 - DNA, 25 bp, Homo sapien
gccagctagaagtgtggcattctgg

SEQ ID NO: 3533530 - DNA, 25 bp, Homo sapien
ttctgggtcgctcttgggccctcct

SEQ ID NO: 3533531 - DNA, 25 bp, Homo sapien
ttttttgatggccaaggaactcagc

SEQ ID NO: 3533532 - DNA, 25 bp, Homo sapien
cttttttgatggccaaggaactcag

SEQ ID NO: 3533533 - DNA, 25 bp, Homo sapien
cccaggtcagcccagttgaaatcag

SEQ ID NO: 3533534 - DNA, 25 bp, Homo sapien
tcctttgagattgttagttacccag

SEQ ID NO: 3533535 - DNA, 25 bp, Homo sapien
catcccctgatggttgctgtccctt

SEQ ID NO: 3533536 - DNA, 25 bp, Homo sapien
tcagtggaatgcctgccaactcaca

SEQ ID NO: 3533537 - DNA, 25 bp, Homo sapien
caaggagataaattttggtccattg

SEQ ID NO: 3533538 - DNA, 25 bp, Homo sapien
ccaaaactcagattccaaggagata

SEQ ID NO: 3533539 - DNA, 25 bp, Homo sapien
agctgagactttaagacagtgtgca

SEQ ID NO: 3533540 - DNA, 25 bp, Homo sapien
gtaagctgagactttaagacagtgt

SEQ ID NO: 3533541 - DNA, 25 bp, Homo sapien
agcctgctcggcactctgcacagta

SEQ ID NO: 3533542 - DNA, 25 bp, Homo sapien
gctcggcactctgcacagtagaacc

SEQ ID NO: 3533543 - DNA, 25 bp, Homo sapien
tgcacagtagaaccccttcacatag

SEQ ID NO: 3533544 - DNA, 25 bp, Homo sapien
aggtacccccccatgagccatttcg

SEQ ID NO: 3533545 - DNA, 25 bp, Homo sapien
gatcatattcacagcactcccgaca

SEQ ID NO: 3533546 - DNA, 25 bp, Homo sapien
cctcattcctgcagcaagggatggt

SEQ ID NO: 3533547 - DNA, 25 bp, Homo sapien
gatggtataacccacgacttccctc

SEQ ID NO: 3533548 - DNA, 25 bp, Homo sapien
gggcagacgcactcaatctgatcat

SEQ ID NO: 3533549 - DNA, 25 bp, Homo sapien
ctgaaatggaaaaccagcaggtgag

SEQ ID NO: 3533550 - DNA, 25 bp, Homo sapien
tgaaatggaaaaccagcaggtgagg

SEQ ID NO: 3533551 - DNA, 25 bp, Homo sapien
taaagagaaaaaccatctggcaaaa

SEQ ID NO: 3533552 - DNA, 25 bp, Homo sapien
cttcagtaaagagaaaaaccatctg

SEQ ID NO: 3533553 - DNA, 25 bp, Homo sapien
tcagtaaagagaaaaaccatctggc

SEQ ID NO: 3533554 - DNA, 25 bp, Homo sapien
cagtaaagagaaaaaccatctggca

SEQ ID NO: 3533555 - DNA, 25 bp, Homo sapien
gatgttttactgacaaagtgaatga

SEQ ID NO: 3533556 - DNA, 25 bp, Homo sapien
tgtctctgatgttttactgacaaag

SEQ ID NO: 3533557 - DNA, 25 bp, Homo sapien
ttagctgcgcttcccatgtctctga

SEQ ID NO: 3533558 - DNA, 25 bp, Homo sapien
tgcgcttcccatgtctctgatgttt

SEQ ID NO: 3533559 - DNA, 25 bp, Homo sapien
gatgtatgttcgttccactctctga

SEQ ID NO: 3533560 - DNA, 25 bp, Homo sapien
gtacagatgtatgttcgttccactc

SEQ ID NO: 3533561 - DNA, 25 bp, Homo sapien
tctgaacagcgaatatgcccatggg

SEQ ID NO: 3533562 - DNA, 25 bp, Homo sapien
ttccactctctgaacagcgaatatg

SEQ ID NO: 3533563 - DNA, 25 bp, Homo sapien
ctgtttactctatagataagatcca

SEQ ID NO: 3533564 - DNA, 25 bp, Homo sapien
tgtttactctatagataagatccat

SEQ ID NO: 3533565 - DNA, 25 bp, Homo sapien
ccattactgtttactctatagataa

SEQ ID NO: 3533566 - DNA, 25 bp, Homo sapien
ctccattactgtttactctatagat

SEQ ID NO: 3533567 - DNA, 25 bp, Homo sapien
tagcatgtgccttagggtagtctta

SEQ ID NO: 3533568 - DNA, 25 bp, Homo sapien
aaagggtagctttgctggatgccat

SEQ ID NO: 3533569 - DNA, 25 bp, Homo sapien
tgttgtcagacaaattggagcttct

SEQ ID NO: 3533570 - DNA, 25 bp, Homo sapien
tggatgccatattcttgggtggcag

SEQ ID NO: 3533571 - DNA, 25 bp, Homo sapien
acttgtagttttgccagctactgga

SEQ ID NO: 3533572 - DNA, 25 bp, Homo sapien
taccttgtcggtgcttcccaatgaa

SEQ ID NO: 3533573 - DNA, 25 bp, Homo sapien
agaactcatagaccccacactggga

SEQ ID NO: 3533574 - DNA, 25 bp, Homo sapien
cagtgaacaagcctcctacttagga

SEQ ID NO: 3533575 - DNA, 25 bp, Homo sapien
cctggctggatctcaacctcggtga

SEQ ID NO: 3533576 - DNA, 25 bp, Homo sapien
ctggctggatctcaacctcggtgac

SEQ ID NO: 3533577 - DNA, 25 bp, Homo sapien
taaaactttcaatggatttgctaga

SEQ ID NO: 3533578 - DNA, 25 bp, Homo sapien
acagctgctcctgttaacagcatac

SEQ ID NO: 3533579 - DNA, 25 bp, Homo sapien
aaaactttcaatggatttgctagaa

SEQ ID NO: 3533580 - DNA, 25 bp, Homo sapien
tgctcctgttaacagcatactgaca

SEQ ID NO: 3533581 - DNA, 25 bp, Homo sapien
ttcccacttgtctaaagatgaaaga

SEQ ID NO: 3533582 - DNA, 25 bp, Homo sapien
gatgaaagataataatcctgacttc

SEQ ID NO: 3533583 - DNA, 25 bp, Homo sapien
atgtaaagctgtactttgcactggt

SEQ ID NO: 3533584 - DNA, 25 bp, Homo sapien
gtaaagctgtactttgcactggttc

SEQ ID NO: 3533585 - DNA, 25 bp, Homo sapien
gaaaccttgccacggcatttcccta

SEQ ID NO: 3533586 - DNA, 25 bp, Homo sapien
gatcttctgggctatactctgaacc

SEQ ID NO: 3533587 - DNA, 25 bp, Homo sapien
ctgaacccacatccatggaatctgc

SEQ ID NO: 3533588 - DNA, 25 bp, Homo sapien
tgctggacaaccacggacaagaaac

SEQ ID NO: 3533589 - DNA, 25 bp, Homo sapien
aaatgcatatttgtcagacattacc

SEQ ID NO: 3533590 - DNA, 25 bp, Homo sapien
caaaagggaggctgaacaccattga

SEQ ID NO: 3533591 - DNA, 25 bp, Homo sapien
tgaacaccattgagaagcaggcagt

SEQ ID NO: 3533592 - DNA, 25 bp, Homo sapien
ccaaaagggaggctgaacaccattg

SEQ ID NO: 3533593 - DNA, 25 bp, Homo sapien
gcctggcacccctgtttcctctagg

SEQ ID NO: 3533594 - DNA, 25 bp, Homo sapien
gagcaaggtacatgacaccatggac

SEQ ID NO: 3533595 - DNA, 25 bp, Homo sapien
agaaactggttggacttttggtctg

SEQ ID NO: 3533596 - DNA, 25 bp, Homo sapien
tggacttttggtctgcctggcaccc

SEQ ID NO: 3533597 - DNA, 25 bp, Homo sapien
ggccctgagtctgtctcatagacaa

SEQ ID NO: 3533598 - DNA, 25 bp, Homo sapien
caacccacgtgggccctgagtctgt

SEQ ID NO: 3533599 - DNA, 25 bp, Homo sapien
cgtgggccctgagtctgtctcatag

SEQ ID NO: 3533600 - DNA, 25 bp, Homo sapien
ccacgtgggccctgagtctgtctca

SEQ ID NO: 3533601 - DNA, 25 bp, Homo sapien
gggaacgctgatgtaaccctgagga

SEQ ID NO: 3533602 - DNA, 25 bp, Homo sapien
gatgtaaccctgaggaatcaaatcc

SEQ ID NO: 3533603 - DNA, 25 bp, Homo sapien
aacgctgatgtaaccctgaggaatc

SEQ ID NO: 3533604 - DNA, 25 bp, Homo sapien
agcaggggaacgctgatgtaaccct

SEQ ID NO: 3533605 - DNA, 25 bp, Homo sapien
tggtccaccgacaccatgcaaaggc

SEQ ID NO: 3533606 - DNA, 25 bp, Homo sapien
aggtcctctggagctggtccaccga

SEQ ID NO: 3533607 - DNA, 25 bp, Homo sapien
tctggagctggtccaccgacaccat

SEQ ID NO: 3533608 - DNA, 25 bp, Homo sapien
acaccatgcaaaggcgaagatgaag

SEQ ID NO: 3533609 - DNA, 25 bp, Homo sapien
ggcaaggacgagatgagaaggagct

SEQ ID NO: 3533610 - DNA, 25 bp, Homo sapien
ctcttggcaaggacgagatgagaag

SEQ ID NO: 3533611 - DNA, 25 bp, Homo sapien
agccccaactgcgtccagcaaccca

SEQ ID NO: 3533612 - DNA, 25 bp, Homo sapien
cccaactgcgtccagcaacccagct

SEQ ID NO: 3533613 - DNA, 25 bp, Homo sapien
ccttgccgcggctggtgcccgagcg

SEQ ID NO: 3533614 - DNA, 25 bp, Homo sapien
gccgcggctggtgcccgagcgtcta

SEQ ID NO: 3533615 - DNA, 25 bp, Homo sapien
cttgccgcggctggtgcccgagcgt

SEQ ID NO: 3533616 - DNA, 25 bp, Homo sapien
ttgccgcggctggtgcccgagcgtc

SEQ ID NO: 3533617 - DNA, 25 bp, Homo sapien
ctggggagggagaggagggacccag

SEQ ID NO: 3533618 - DNA, 25 bp, Homo sapien
tgtggccacgcctggagacccgcgg

SEQ ID NO: 3533619 - DNA, 25 bp, Homo sapien
tgctgccttaacccttgcggggccc

SEQ ID NO: 3533620 - DNA, 25 bp, Homo sapien
tcagccagagcgacgtcagcccaaa

SEQ ID NO: 3533621 - DNA, 25 bp, Homo sapien
gagctcgggtttcagctcgccaggc

SEQ ID NO: 3533622 - DNA, 25 bp, Homo sapien
ctcaggtgaggccgggagatcttcc

SEQ ID NO: 3533623 - DNA, 25 bp, Homo sapien
ctgagacgggagctggctttgccct

SEQ ID NO: 3533624 - DNA, 25 bp, Homo sapien
gccataggaccctgggcgggagcag

SEQ ID NO: 3533625 - DNA, 25 bp, Homo sapien
gagatcttcctacgggaggctgaga

SEQ ID NO: 3533626 - DNA, 25 bp, Homo sapien
gaagaagatgacttagttcccaaat

SEQ ID NO: 3533627 - DNA, 25 bp, Homo sapien
gggaagaagatgacttagttcccaa

SEQ ID NO: 3533628 - DNA, 25 bp, Homo sapien
tgctggccaaccagtcctggtcctt

SEQ ID NO: 3533629 - DNA, 25 bp, Homo sapien
cttgttgctggccaaccagtcctgg

SEQ ID NO: 3533630 - DNA, 25 bp, Homo sapien
taccactgcttgcttcggggagaat

SEQ ID NO: 3533631 - DNA, 25 bp, Homo sapien
cactgcttgcttcggggagaataaa

SEQ ID NO: 3533632 - DNA, 25 bp, Homo sapien
tcctaccactgcttgcttcggggag

SEQ ID NO: 3533633 - DNA, 25 bp, Homo sapien
ccactgcttgcttcggggagaataa

SEQ ID NO: 3533634 - DNA, 25 bp, Homo sapien
gatgccagtccttcacaagaatgcc

SEQ ID NO: 3533635 - DNA, 25 bp, Homo sapien
ggcaagggtgctacctaccactgct

SEQ ID NO: 3533636 - DNA, 25 bp, Homo sapien
tgccaatgtccacggcaagggtgct

SEQ ID NO: 3533637 - DNA, 25 bp, Homo sapien
gagttggcaatgcttgcctcccagc

SEQ ID NO: 3533638 - DNA, 25 bp, Homo sapien
tgctcactcggtactgaagtgcttc

SEQ ID NO: 3533639 - DNA, 25 bp, Homo sapien
ctcactcggtactgaagtgcttctc

SEQ ID NO: 3533640 - DNA, 25 bp, Homo sapien
cagagcagaggaattctctccatcc

SEQ ID NO: 3533641 - DNA, 25 bp, Homo sapien
gggctgctcactcggtactgaagtg

SEQ ID NO: 3533642 - DNA, 25 bp, Homo sapien
aggagattgtaaactcaatctccaa

SEQ ID NO: 3533643 - DNA, 25 bp, Homo sapien
caaggagattgtaaactcaatctcc

SEQ ID NO: 3533644 - DNA, 25 bp, Homo sapien
aaggagattgtaaactcaatctcca

SEQ ID NO: 3533645 - DNA, 25 bp, Homo sapien
tcttcttttgcttggccgtgggact

SEQ ID NO: 3533646 - DNA, 25 bp, Homo sapien
ttgcctcaataaaagaacaggtcat

SEQ ID NO: 3533647 - DNA, 25 bp, Homo sapien
gccgtgggactaattgcctcaataa

SEQ ID NO: 3533648 - DNA, 25 bp, Homo sapien
gactccactagagagtgaggagcct

SEQ ID NO: 3533649 - DNA, 25 bp, Homo sapien
tcatgttgaatgccccaaggacaga

SEQ ID NO: 3533650 - DNA, 25 bp, Homo sapien
taagggccagatgggttcctgaaga

SEQ ID NO: 3533651 - DNA, 25 bp, Homo sapien
taggcgtaccctcccagattataca

SEQ ID NO: 3533652 - DNA, 25 bp, Homo sapien
ggacagttcttgatgggctccattc

SEQ ID NO: 3533653 - DNA, 25 bp, Homo sapien
agcatcgctatttccctgagacctc

SEQ ID NO: 3533654 - DNA, 25 bp, Homo sapien
gaagaggctggtatagcctttaact

SEQ ID NO: 3533655 - DNA, 25 bp, Homo sapien
cttgaagcatcgctatttccctgag

SEQ ID NO: 3533656 - DNA, 25 bp, Homo sapien
agcctttaactctcttgaagcatcg

SEQ ID NO: 3533657 - DNA, 25 bp, Homo sapien
gttgattagtacttcagtggagagg

SEQ ID NO: 3533658 - DNA, 25 bp, Homo sapien
gatttaagagttaaccagtcatgtg

SEQ ID NO: 3533659 - DNA, 25 bp, Homo sapien
ctttggctccatgggtacgttgata

SEQ ID NO: 3533660 - DNA, 25 bp, Homo sapien
agaggtttgtctagcacgatttaag

SEQ ID NO: 3533661 - DNA, 25 bp, Homo sapien
gccacaacaagcttcaagggagact

SEQ ID NO: 3533662 - DNA, 25 bp, Homo sapien
tgatgcctgaaagcacctatggagt

SEQ ID NO: 3533663 - DNA, 25 bp, Homo sapien
cctctagctgattagccatgatgcc

SEQ ID NO: 3533664 - DNA, 25 bp, Homo sapien
catggccacaacaagcttcaaggga

SEQ ID NO: 3533665 - DNA, 25 bp, Homo sapien
ttactctctgattgctagttgattt

SEQ ID NO: 3533666 - DNA, 25 bp, Homo sapien
aaattttgcccaagaggatgggtag

SEQ ID NO: 3533667 - DNA, 25 bp, Homo sapien
ccaagaggatgggtaggttactctc

SEQ ID NO: 3533668 - DNA, 25 bp, Homo sapien
tcaatgcctactcagttgctgccct

SEQ ID NO: 3533669 - DNA, 25 bp, Homo sapien
ggtttaaatgcttttcgatagcact

SEQ ID NO: 3533670 - DNA, 25 bp, Homo sapien
tttaaatgcttttcgatagcactga

SEQ ID NO: 3533671 - DNA, 25 bp, Homo sapien
taaatgcttttcgatagcactgagc

SEQ ID NO: 3533672 - DNA, 25 bp, Homo sapien
aaatgcttttcgatagcactgagca

SEQ ID NO: 3533673 - DNA, 25 bp, Homo sapien
ctataatccttttgtcattttggac

SEQ ID NO: 3533674 - DNA, 25 bp, Homo sapien
ggaaagattggagggtagcccatgg

SEQ ID NO: 3533675 - DNA, 25 bp, Homo sapien
tggagggtagcccatgggaaccaat

SEQ ID NO: 3533676 - DNA, 25 bp, Homo sapien
cactgagacactttaggagttgtta

SEQ ID NO: 3533677 - DNA, 25 bp, Homo sapien
tagcccatgggaaccaatactgcct

SEQ ID NO: 3533678 - DNA, 25 bp, Homo sapien
gcagctgcaaaatgagagctcccat

SEQ ID NO: 3533679 - DNA, 25 bp, Homo sapien
acacaccaatgccttctctccatgc

SEQ ID NO: 3533680 - DNA, 25 bp, Homo sapien
acaccaatgccttctctccatgctg

SEQ ID NO: 3533681 - DNA, 25 bp, Homo sapien
cttctgcagctgcaaaatgagagct

SEQ ID NO: 3533682 - DNA, 25 bp, Homo sapien
tgtcatttttgcggaaaaataacaa

SEQ ID NO: 3533683 - DNA, 25 bp, Homo sapien
tcttttgtttactccaccctctggc

SEQ ID NO: 3533684 - DNA, 25 bp, Homo sapien
tctcagctatagctgcattgaaggg

SEQ ID NO: 3533685 - DNA, 25 bp, Homo sapien
tcatgtcttttgtttactccaccct

SEQ ID NO: 3533686 - DNA, 25 bp, Homo sapien
tgctggttctcagctatagctgcat

SEQ ID NO: 3533687 - DNA, 25 bp, Homo sapien
gaatgccctctgtgtcatgcactcc

SEQ ID NO: 3533688 - DNA, 25 bp, Homo sapien
tgtaacaacgattgagaatgccctc

SEQ ID NO: 3533689 - DNA, 25 bp, Homo sapien
tcttgtaacaacgattgagaatgcc

SEQ ID NO: 3533690 - DNA, 25 bp, Homo sapien
ctccaagtgctacaaataaacgaac

SEQ ID NO: 3533691 - DNA, 25 bp, Homo sapien
caatgacaccagagcccctctgggt

SEQ ID NO: 3533692 - DNA, 25 bp, Homo sapien
gtctgtggccctccacatgtctgct

SEQ ID NO: 3533693 - DNA, 25 bp, Homo sapien
ggtctgtggccctccacatgtctgc

SEQ ID NO: 3533694 - DNA, 25 bp, Homo sapien
ttgttcaatgacaccagagcccctc

SEQ ID NO: 3533695 - DNA, 25 bp, Homo sapien
gacagtgccatttccaggattgcca

SEQ ID NO: 3533696 - DNA, 25 bp, Homo sapien
agagtcccctttgctaattcaccag

SEQ ID NO: 3533697 - DNA, 25 bp, Homo sapien
cagtaaatgggcttgggcttaatca

SEQ ID NO: 3533698 - DNA, 25 bp, Homo sapien
gaaagacgacgtgcaggtactaagg

SEQ ID NO: 3533699 - DNA, 25 bp, Homo sapien
ggaatatattttcatttggagttaa

SEQ ID NO: 3533700 - DNA, 25 bp, Homo sapien
tattttcatttggagttaaagcatc

SEQ ID NO: 3533701 - DNA, 25 bp, Homo sapien
ttttcatttggagttaaagcatcca

SEQ ID NO: 3533702 - DNA, 25 bp, Homo sapien
taaaaagcagcaaaggaatatattt

SEQ ID NO: 3533703 - DNA, 25 bp, Homo sapien
tcagtcctatggctataggcaaagg

SEQ ID NO: 3533704 - DNA, 25 bp, Homo sapien
gactgaggtgattaactatgctacc

SEQ ID NO: 3533705 - DNA, 25 bp, Homo sapien
cctgttctggtacatgatgcattca

SEQ ID NO: 3533706 - DNA, 25 bp, Homo sapien
caggaggcaccattacatgaaccag

SEQ ID NO: 3533707 - DNA, 25 bp, Homo sapien
gtgaatcgcgcccaccggagggtct

SEQ ID NO: 3533708 - DNA, 25 bp, Homo sapien
cggagggtctcacagcgaaatacaa

SEQ ID NO: 3533709 - DNA, 25 bp, Homo sapien
gcccaccggagggtctcacagcgaa

SEQ ID NO: 3533710 - DNA, 25 bp, Homo sapien
tggtccgggcgcctgtgaatcgcgc

SEQ ID NO: 3533711 - DNA, 25 bp, Homo sapien
gcctgggctcggcttgaagcggcgg

SEQ ID NO: 3533712 - DNA, 25 bp, Homo sapien
cgcccgaagaccgactcccacggcg

SEQ ID NO: 3533713 - DNA, 25 bp, Homo sapien
cggagcccacaaactgccgggcccg

SEQ ID NO: 3533714 - DNA, 25 bp, Homo sapien
gccgcggaccgagctgcccgcctcc

SEQ ID NO: 3533715 - DNA, 25 bp, Homo sapien
gatattttgcccctgcgcacaccag

SEQ ID NO: 3533716 - DNA, 25 bp, Homo sapien
ctatccgtgagtcatggaccatgca

SEQ ID NO: 3533717 - DNA, 25 bp, Homo sapien
aagatcgctgatcccaagtggtaga

SEQ ID NO: 3533718 - DNA, 25 bp, Homo sapien
ccatgcaagcctaagcgctgatatt

SEQ ID NO: 3533719 - DNA, 25 bp, Homo sapien
catcatagggtgatttgtttgctcc

SEQ ID NO: 3533720 - DNA, 25 bp, Homo sapien
tagggtgatttgtttgctcccaggt

SEQ ID NO: 3533721 - DNA, 25 bp, Homo sapien
ccaggtccctgtacatttctttggg

SEQ ID NO: 3533722 - DNA, 25 bp, Homo sapien
gctcccaggtccctgtacatttctt

SEQ ID NO: 3533723 - DNA, 25 bp, Homo sapien
aagcattaagcttactggcgtactg

SEQ ID NO: 3533724 - DNA, 25 bp, Homo sapien
tattggcccttagcttggcacacag

SEQ ID NO: 3533725 - DNA, 25 bp, Homo sapien
tgaaggcatcactacgtaaaaagga

SEQ ID NO: 3533726 - DNA, 25 bp, Homo sapien
gaagcaactaagtcaacactgcatg

SEQ ID NO: 3533727 - DNA, 25 bp, Homo sapien
cagccacgtaacagctgacacctgt

SEQ ID NO: 3533728 - DNA, 25 bp, Homo sapien
gctgacacctgtttattcaggaata

SEQ ID NO: 3533729 - DNA, 25 bp, Homo sapien
caggaatacactatttctggaagtc

SEQ ID NO: 3533730 - DNA, 25 bp, Homo sapien
ttaaaagacttaagggctatcagcc

SEQ ID NO: 3533731 - DNA, 25 bp, Homo sapien
gctgagcgtcttggagatgccttag

SEQ ID NO: 3533732 - DNA, 25 bp, Homo sapien
tgctgagcgtcttggagatgcctta

SEQ ID NO: 3533733 - DNA, 25 bp, Homo sapien
ctgagcgtcttggagatgccttaga

SEQ ID NO: 3533734 - DNA, 25 bp, Homo sapien
gcctctggagtgggcgcggccttcg

SEQ ID NO: 3533735 - DNA, 25 bp, Homo sapien
gggcgcggccttcgaggaactgcct

SEQ ID NO: 3533736 - DNA, 25 bp, Homo sapien
gcgcggccttcgaggaactgcctca

SEQ ID NO: 3533737 - DNA, 25 bp, Homo sapien
agtgggcgcggccttcgaggaactg

SEQ ID NO: 3533738 - DNA, 25 bp, Homo sapien
gaagtgtgccgagaatgcggcttct

SEQ ID NO: 3533739 - DNA, 25 bp, Homo sapien
tactgccgccgccatgccgaggcgc

SEQ ID NO: 3533740 - DNA, 25 bp, Homo sapien
gacggcacgtgtgacgagtgcgagc

SEQ ID NO: 3533741 - DNA, 25 bp, Homo sapien
agtgcgagcccgacgaggctccggg

SEQ ID NO: 3533742 - DNA, 25 bp, Homo sapien
gaggccgaagaagacaaccaagaag

SEQ ID NO: 3533743 - DNA, 25 bp, Homo sapien
ggaggtcaaggtggagcaggagagg

SEQ ID NO: 3533744 - DNA, 25 bp, Homo sapien
gtgaagaagacagcgaggaagaaat

SEQ ID NO: 3533745 - DNA, 25 bp, Homo sapien
ggagagggagatagaaagcgaggca

SEQ ID NO: 3533746 - DNA, 25 bp, Homo sapien
tcttgacttgctgcgtaagctagga

SEQ ID NO: 3533747 - DNA, 25 bp, Homo sapien
tagatgttctttattaagtggagga

SEQ ID NO: 3533748 - DNA, 25 bp, Homo sapien
taagtgtgttgttggctgtaggtaa

SEQ ID NO: 3533749 - DNA, 25 bp, Homo sapien
catcttagcgggaaagccttgagtt

SEQ ID NO: 3533750 - DNA, 25 bp, Homo sapien
tggagtagtctccttaacaccttgc

SEQ ID NO: 3533751 - DNA, 25 bp, Homo sapien
gcttgtaggactgttaccaaatagg

SEQ ID NO: 3533752 - DNA, 25 bp, Homo sapien
caaactctatttcatgcagtctaca

SEQ ID NO: 3533753 - DNA, 25 bp, Homo sapien
cagggcgagtccatatagtgaaatg

SEQ ID NO: 3533754 - DNA, 25 bp, Homo sapien
tgaaagattttggacttactttgta

SEQ ID NO: 3533755 - DNA, 25 bp, Homo sapien
tgagaacaaatcatgaagtagagca

SEQ ID NO: 3533756 - DNA, 25 bp, Homo sapien
catagacctgggctgaatgagaaca

SEQ ID NO: 3533757 - DNA, 25 bp, Homo sapien
gaagtagagcataaagcaggccaga

SEQ ID NO: 3533758 - DNA, 25 bp, Homo sapien
gtctcctttgctagcattcttttca

SEQ ID NO: 3533759 - DNA, 25 bp, Homo sapien
ctgcttggatcattatgcctgtgtc

SEQ ID NO: 3533760 - DNA, 25 bp, Homo sapien
tgcttggatcattatgcctgtgtct

SEQ ID NO: 3533761 - DNA, 25 bp, Homo sapien
tagcattcttttcacacagccactt

SEQ ID NO: 3533762 - DNA, 25 bp, Homo sapien
tgtgaagttcagagtcgatgagtgc

SEQ ID NO: 3533763 - DNA, 25 bp, Homo sapien
aaaccatgaggcaaattcatgtgcc

SEQ ID NO: 3533764 - DNA, 25 bp, Homo sapien
catgctggcagcatatgctggtgga

SEQ ID NO: 3533765 - DNA, 25 bp, Homo sapien
aactggagtaccctaaatggtgagg

SEQ ID NO: 3533766 - DNA, 25 bp, Homo sapien
ttctttgttgaatgtcaacaagcag

SEQ ID NO: 3533767 - DNA, 25 bp, Homo sapien
gtcaacaagcagtttgtctgagaag

SEQ ID NO: 3533768 - DNA, 25 bp, Homo sapien
acttctctccccagacaggtaaaca

SEQ ID NO: 3533769 - DNA, 25 bp, Homo sapien
ggcttgccaggaaagtgcctaaggt

SEQ ID NO: 3533770 - DNA, 25 bp, Homo sapien
cactgttcaccaagtggcaggtgca

SEQ ID NO: 3533771 - DNA, 25 bp, Homo sapien
cagcaggagaggcaagcagtttaat

SEQ ID NO: 3533772 - DNA, 25 bp, Homo sapien
tcagctgccattgcctcttctgaaa

SEQ ID NO: 3533773 - DNA, 25 bp, Homo sapien
gcaggtgcaggccaactgttaccat

SEQ ID NO: 3533774 - DNA, 25 bp, Homo sapien
cagggaatcatctcggatttcttgc

SEQ ID NO: 3533775 - DNA, 25 bp, Homo sapien
cggatttcttgcaggatgcagggaa

SEQ ID NO: 3533776 - DNA, 25 bp, Homo sapien
ctcggatttcttgcaggatgcaggg

SEQ ID NO: 3533777 - DNA, 25 bp, Homo sapien
aacagggaatcatctcggatttctt

SEQ ID NO: 3533778 - DNA, 25 bp, Homo sapien
gaaactcataacaagaacacttact

SEQ ID NO: 3533779 - DNA, 25 bp, Homo sapien
agcttttggaatattgaggttggaa

SEQ ID NO: 3533780 - DNA, 25 bp, Homo sapien
gcttttggaatattgaggttggaat

SEQ ID NO: 3533781 - DNA, 25 bp, Homo sapien
agggaaactcataacaagaacactt

SEQ ID NO: 3533782 - DNA, 25 bp, Homo sapien
aaagagggagccctagcctctgctt

SEQ ID NO: 3533783 - DNA, 25 bp, Homo sapien
tactcatctgagaagacatgctggc

SEQ ID NO: 3533784 - DNA, 25 bp, Homo sapien
taggcataagacacctcatagtttc

SEQ ID NO: 3533785 - DNA, 25 bp, Homo sapien
gacaagtgagtctggctttgacaaa

SEQ ID NO: 3533786 - DNA, 25 bp, Homo sapien
taaatgagtgagaccttggtgcctc

SEQ ID NO: 3533787 - DNA, 25 bp, Homo sapien
tagagcagtgatgtgtcagaccacc

SEQ ID NO: 3533788 - DNA, 25 bp, Homo sapien
tacatgactgtttgctggagcccac

SEQ ID NO: 3533789 - DNA, 25 bp, Homo sapien
tgaaaccaatatctgacccaacgag

SEQ ID NO: 3533790 - DNA, 25 bp, Homo sapien
ggttgctgttaacccagggcctaga

SEQ ID NO: 3533791 - DNA, 25 bp, Homo sapien
tgcctgtgacctgtgtacgtattac

SEQ ID NO: 3533792 - DNA, 25 bp, Homo sapien
tattacaggctttaggaccagctga

SEQ ID NO: 3533793 - DNA, 25 bp, Homo sapien
gaccagctgattgttatgcttgcag

SEQ ID NO: 3533794 - DNA, 25 bp, Homo sapien
aacttagccgccagtgtactctgtg

SEQ ID NO: 3533795 - DNA, 25 bp, Homo sapien
gaggatgtggcaattcaaagtccag

SEQ ID NO: 3533796 - DNA, 25 bp, Homo sapien
tgtgtgctgaccatcccaatttatg

SEQ ID NO: 3533797 - DNA, 25 bp, Homo sapien
cacagttatagttagggctcagaaa

SEQ ID NO: 3533798 - DNA, 25 bp, Homo sapien
tgcagaattcatgaccttgtagttg

SEQ ID NO: 3533799 - DNA, 25 bp, Homo sapien
tgtggcagggtctaggaagtcctct

SEQ ID NO: 3533800 - DNA, 25 bp, Homo sapien
taactgcacgtttactgtgtgctga

SEQ ID NO: 3533801 - DNA, 25 bp, Homo sapien
tggctgtgcaatacatgcttctcaa

SEQ ID NO: 3533802 - DNA, 25 bp, Homo sapien
tgcttatgaagccccctaccctgtc

SEQ ID NO: 3533803 - DNA, 25 bp, Homo sapien
ctcaggcagttcttgattctggagg

SEQ ID NO: 3533804 - DNA, 25 bp, Homo sapien
actcaggcagttcttgattctggag

SEQ ID NO: 3533805 - DNA, 25 bp, Homo sapien
agccccctaccctgtcccattccag

SEQ ID NO: 3533806 - DNA, 25 bp, Homo sapien
taatgcccatatccagaggtactcc

SEQ ID NO: 3533807 - DNA, 25 bp, Homo sapien
ttcatgttgcccctcactgagctgc

SEQ ID NO: 3533808 - DNA, 25 bp, Homo sapien
tacatctaccccagaatgagtgtcc

SEQ ID NO: 3533809 - DNA, 25 bp, Homo sapien
tgatgacaaagtcgcctgacagagt

SEQ ID NO: 3533810 - DNA, 25 bp, Homo sapien
gattcctgtcatagtacctgctaca

SEQ ID NO: 3533811 - DNA, 25 bp, Homo sapien
ttagattcctgtcatagtacctgct

SEQ ID NO: 3533812 - DNA, 25 bp, Homo sapien
tagattcctgtcatagtacctgcta

SEQ ID NO: 3533813 - DNA, 25 bp, Homo sapien
tttagattcctgtcatagtacctgc

SEQ ID NO: 3533814 - DNA, 25 bp, Homo sapien
ttagaaaggaactgcccatgggccc

SEQ ID NO: 3533815 - DNA, 25 bp, Homo sapien
gagagccctgcaaaatcgatcacca

SEQ ID NO: 3533816 - DNA, 25 bp, Homo sapien
cttcacagcctaagaatgcagaggg

SEQ ID NO: 3533817 - DNA, 25 bp, Homo sapien
caaacgtgttccaaaggttgagagc

SEQ ID NO: 3533818 - DNA, 25 bp, Homo sapien
tggtggtagtggtgacctcaacctc

SEQ ID NO: 3533819 - DNA, 25 bp, Homo sapien
ggtggtagtggtgacctcaacctcc

SEQ ID NO: 3533820 - DNA, 25 bp, Homo sapien
agtggtgacctcaacctccagcttg

SEQ ID NO: 3533821 - DNA, 25 bp, Homo sapien
atctgcagggcatagtgggcctcca

SEQ ID NO: 3533822 - DNA, 25 bp, Homo sapien
cttaatattcaacagggcctcatac

SEQ ID NO: 3533823 - DNA, 25 bp, Homo sapien
ctcatactccttggcctggcgctgt

SEQ ID NO: 3533824 - DNA, 25 bp, Homo sapien
gcagggcatagtgggcctccacctc

SEQ ID NO: 3533825 - DNA, 25 bp, Homo sapien
gagatctgggggcatctggctccac

SEQ ID NO: 3533826 - DNA, 25 bp, Homo sapien
cgtacatctcagctccatgagtgtc

SEQ ID NO: 3533827 - DNA, 25 bp, Homo sapien
gaccgtacatctcagctccatgagt

SEQ ID NO: 3533828 - DNA, 25 bp, Homo sapien
cctctaggttcttctgagccaactt

SEQ ID NO: 3533829 - DNA, 25 bp, Homo sapien
atcaatgaccctgcggagtttatgg

SEQ ID NO: 3533830 - DNA, 25 bp, Homo sapien
aatgaccctgcggagtttatggatg

SEQ ID NO: 3533831 - DNA, 25 bp, Homo sapien
tgtcatcaatgaccctgcggagttt

SEQ ID NO: 3533832 - DNA, 25 bp, Homo sapien
tgaccctgcggagtttatggatgtc

SEQ ID NO: 3533833 - DNA, 25 bp, Homo sapien
tctgcagaatgatgtgggcgttgtc

SEQ ID NO: 3533834 - DNA, 25 bp, Homo sapien
gtcgatctgcagaatgatgtgggcg

SEQ ID NO: 3533835 - DNA, 25 bp, Homo sapien
cgatctgcagaatgatgtgggcgtt

SEQ ID NO: 3533836 - DNA, 25 bp, Homo sapien
atctgcagaatgatgtgggcgttgt

SEQ ID NO: 3533837 - DNA, 25 bp, Homo sapien
cagtttccggctctcagtctccagc

SEQ ID NO: 3533838 - DNA, 25 bp, Homo sapien
tttgctctccagtttccggctctca

SEQ ID NO: 3533839 - DNA, 25 bp, Homo sapien
tgtgaagatctgagcccttaagtcc

SEQ ID NO: 3533840 - DNA, 25 bp, Homo sapien
tgctctccagtttccggctctcagt

SEQ ID NO: 3533841 - DNA, 25 bp, Homo sapien
gtggagcgggacacagagatccggg

SEQ ID NO: 3533842 - DNA, 25 bp, Homo sapien
gccaggcccccaggcccatgccacc

SEQ ID NO: 3533843 - DNA, 25 bp, Homo sapien
acccccagccatccccgcagccagg

SEQ ID NO: 3533844 - DNA, 25 bp, Homo sapien
ggcccccaggcccatgccaccctgg

SEQ ID NO: 3533845 - DNA, 25 bp, Homo sapien
ccagccgggtgccgtagctgggcac

SEQ ID NO: 3533846 - DNA, 25 bp, Homo sapien
tggccgcgctgctgaccagccgggt

SEQ ID NO: 3533847 - DNA, 25 bp, Homo sapien
agagcccagggaccggcagctggtg

SEQ ID NO: 3533848 - DNA, 25 bp, Homo sapien
cgctgctgaccagccgggtgccgta

SEQ ID NO: 3533849 - DNA, 25 bp, Homo sapien
actgaagttccttgctagacactga

SEQ ID NO: 3533850 - DNA, 25 bp, Homo sapien
ttcaagacccagaaacctctagtgg

SEQ ID NO: 3533851 - DNA, 25 bp, Homo sapien
tgctctaagcatggctctctgttcc

SEQ ID NO: 3533852 - DNA, 25 bp, Homo sapien
gctagcccagactgcaccttctaag

SEQ ID NO: 3533853 - DNA, 25 bp, Homo sapien
aggtaagtgcatgccagccgcacaa

SEQ ID NO: 3533854 - DNA, 25 bp, Homo sapien
tatcgttttgtgcagcaaatccaca

SEQ ID NO: 3533855 - DNA, 25 bp, Homo sapien
gcacaacgtaagagtgacgcccagt

SEQ ID NO: 3533856 - DNA, 25 bp, Homo sapien
gaagtttatgcttctggcgcctcat

SEQ ID NO: 3533857 - DNA, 25 bp, Homo sapien
tggtggacccgagggaaacatacag

SEQ ID NO: 3533858 - DNA, 25 bp, Homo sapien
gttgtggtgtcagtgatggtatttt

SEQ ID NO: 3533859 - DNA, 25 bp, Homo sapien
gtttttgagcatctggttgtggtgt

SEQ ID NO: 3533860 - DNA, 25 bp, Homo sapien
agcatctggttgtggtgtcagtgat

SEQ ID NO: 3533861 - DNA, 25 bp, Homo sapien
tgtccatgttaactccctcgcctct

SEQ ID NO: 3533862 - DNA, 25 bp, Homo sapien
catgttaactccctcgcctctccac

SEQ ID NO: 3533863 - DNA, 25 bp, Homo sapien
gtccatgttaactccctcgcctctc

SEQ ID NO: 3533864 - DNA, 25 bp, Homo sapien
tccatgttaactccctcgcctctcc

SEQ ID NO: 3533865 - DNA, 25 bp, Homo sapien
acagtacaaagtccccaggcattca

SEQ ID NO: 3533866 - DNA, 25 bp, Homo sapien
tggacgatattatctccttggcatc

SEQ ID NO: 3533867 - DNA, 25 bp, Homo sapien
tctctggacgatattatctccttgg

SEQ ID NO: 3533868 - DNA, 25 bp, Homo sapien
tcacagacagtacaaagtccccagg

SEQ ID NO: 3533869 - DNA, 25 bp, Homo sapien
gaatgacccaaattctttatgtccg

SEQ ID NO: 3533870 - DNA, 25 bp, Homo sapien
tacactgtagccaaaattcaaccaa

SEQ ID NO: 3533871 - DNA, 25 bp, Homo sapien
ccaatgaggcagactggaaaggcag

SEQ ID NO: 3533872 - DNA, 25 bp, Homo sapien
aaattgcttctcactataaatagct

SEQ ID NO: 3533873 - DNA, 25 bp, Homo sapien
catgtccctacagatgtacaatctt

SEQ ID NO: 3533874 - DNA, 25 bp, Homo sapien
ggccatgtccctacagatgtacaat

SEQ ID NO: 3533875 - DNA, 25 bp, Homo sapien
gatggccatgtccctacagatgtac

SEQ ID NO: 3533876 - DNA, 25 bp, Homo sapien
aatttcttatggactgacttctgag

SEQ ID NO: 3533877 - DNA, 25 bp, Homo sapien
gaaatggggctagccagccaaaggt

SEQ ID NO: 3533878 - DNA, 25 bp, Homo sapien
ctggccaaatgtcttcatcgaccct

SEQ ID NO: 3533879 - DNA, 25 bp, Homo sapien
tggccaaatgtcttcatcgaccctc

SEQ ID NO: 3533880 - DNA, 25 bp, Homo sapien
tgctgagaaatggggctagccagcc

SEQ ID NO: 3533881 - DNA, 25 bp, Homo sapien
aaaactgtcaggtttttgatggaca

SEQ ID NO: 3533882 - DNA, 25 bp, Homo sapien
tgataaacgtaaagggacaatagcc

SEQ ID NO: 3533883 - DNA, 25 bp, Homo sapien
gctgacggcagtgaactgcccctct

SEQ ID NO: 3533884 - DNA, 25 bp, Homo sapien
gctaatggctctaaaagcatatgtt

SEQ ID NO: 3533885 - DNA, 25 bp, Homo sapien
gatccagcgtctcttgttctcgtcc

SEQ ID NO: 3533886 - DNA, 25 bp, Homo sapien
tttagacattgattgattcgagggc

SEQ ID NO: 3533887 - DNA, 25 bp, Homo sapien
gactgtgttctcaaacccgtgttcc

SEQ ID NO: 3533888 - DNA, 25 bp, Homo sapien
gggctcaagcactgtcctcaagatc

SEQ ID NO: 3533889 - DNA, 25 bp, Homo sapien
acacacatagatcctcttacgatga

SEQ ID NO: 3533890 - DNA, 25 bp, Homo sapien
aatcaaaagtggtcagaagaaccat

SEQ ID NO: 3533891 - DNA, 25 bp, Homo sapien
gatcctcttacgatgatgctccatg

SEQ ID NO: 3533892 - DNA, 25 bp, Homo sapien
tcttacgatgatgctccatggaaac

SEQ ID NO: 3533893 - DNA, 25 bp, Homo sapien
ctctcagtcccattttgcccaggtc

SEQ ID NO: 3533894 - DNA, 25 bp, Homo sapien
tttgcccaggtccattttctcagcc

SEQ ID NO: 3533895 - DNA, 25 bp, Homo sapien
tgcccaggtccattttctcagccat

SEQ ID NO: 3533896 - DNA, 25 bp, Homo sapien
ctcagtcccattttgcccaggtcca

SEQ ID NO: 3533897 - DNA, 25 bp, Homo sapien
gcctggcggccacaccttaaatttc

SEQ ID NO: 3533898 - DNA, 25 bp, Homo sapien
cctctgaattggagtgatggtgata

SEQ ID NO: 3533899 - DNA, 25 bp, Homo sapien
ggtgataaaggcaaaaatgggattc

SEQ ID NO: 3533900 - DNA, 25 bp, Homo sapien
taaatttctggggtgactcagcccc

SEQ ID NO: 3533901 - DNA, 25 bp, Homo sapien
tttgctctgttccaaaccttcctta

SEQ ID NO: 3533902 - DNA, 25 bp, Homo sapien
attcacaggatgcaaggtggcaccc

SEQ ID NO: 3533903 - DNA, 25 bp, Homo sapien
cttccttaagaattgtgcttccacc

SEQ ID NO: 3533904 - DNA, 25 bp, Homo sapien
ttcacaggatgcaaggtggcaccca

SEQ ID NO: 3533905 - DNA, 25 bp, Homo sapien
agagacctgagaaccggactctcct

SEQ ID NO: 3533906 - DNA, 25 bp, Homo sapien
gagacctgagaaccggactctcctt

SEQ ID NO: 3533907 - DNA, 25 bp, Homo sapien
tcatgacaggcagttaagaggcggt

SEQ ID NO: 3533908 - DNA, 25 bp, Homo sapien
tagaaggcagtgagcgtcagccatg

SEQ ID NO: 3533909 - DNA, 25 bp, Homo sapien
ccgtggctcagcgtatagaaggcag

SEQ ID NO: 3533910 - DNA, 25 bp, Homo sapien
ttggcatggcatgaacgtccaggcc

SEQ ID NO: 3533911 - DNA, 25 bp, Homo sapien
tctggggccgtcatcaggactaagt

SEQ ID NO: 3533912 - DNA, 25 bp, Homo sapien
cctctggggccgtcatcaggactaa

SEQ ID NO: 3533913 - DNA, 25 bp, Homo sapien
ctctggggccgtcatcaggactaag

SEQ ID NO: 3533914 - DNA, 25 bp, Homo sapien
gagcagactgtaaaagtcttctgag

SEQ ID NO: 3533915 - DNA, 25 bp, Homo sapien
aggaatgtctgggaagttactctca

SEQ ID NO: 3533916 - DNA, 25 bp, Homo sapien
tggtgccttgcagcactgttgatgg

SEQ ID NO: 3533917 - DNA, 25 bp, Homo sapien
cactgttgatgggtaatgtccttac

SEQ ID NO: 3533918 - DNA, 25 bp, Homo sapien
caaggtttcatgtccgggtgcacca

SEQ ID NO: 3533919 - DNA, 25 bp, Homo sapien
tgcaccatgccagagttgtggctgt

SEQ ID NO: 3533920 - DNA, 25 bp, Homo sapien
gtggctgtatttaagttcaagggaa

SEQ ID NO: 3533921 - DNA, 25 bp, Homo sapien
tcttggaagtgattagtagacttag

SEQ ID NO: 3533922 - DNA, 25 bp, Homo sapien
gatgtccaaacactgtatgagcata

SEQ ID NO: 3533923 - DNA, 25 bp, Homo sapien
tatgagcataaacttcacgcaaagc

SEQ ID NO: 3533924 - DNA, 25 bp, Homo sapien
acacttctatccaggcttttaatgc

SEQ ID NO: 3533925 - DNA, 25 bp, Homo sapien
agccaaattctcaggtgaaatcctg

SEQ ID NO: 3533926 - DNA, 25 bp, Homo sapien
cactggattgaaggaataattttct

SEQ ID NO: 3533927 - DNA, 25 bp, Homo sapien
gatcatctcgaattttcctcttgac

SEQ ID NO: 3533928 - DNA, 25 bp, Homo sapien
agcaggcagcccttgttcttccttg

SEQ ID NO: 3533929 - DNA, 25 bp, Homo sapien
gatgtgagcatcaaatgcttagagc

SEQ ID NO: 3533930 - DNA, 25 bp, Homo sapien
tcttttgccctacattctgagtctc

SEQ ID NO: 3533931 - DNA, 25 bp, Homo sapien
aatgtaagcattgcctctgaattct

SEQ ID NO: 3533932 - DNA, 25 bp, Homo sapien
tcccgaggtgtgttgagttcatgca

SEQ ID NO: 3533933 - DNA, 25 bp, Homo sapien
cacgttactgagaggagtcctgggc

SEQ ID NO: 3533934 - DNA, 25 bp, Homo sapien
ggtggagtatgccatctctccctgg

SEQ ID NO: 3533935 - DNA, 25 bp, Homo sapien
tctaagcatggggtggagtatgcca

SEQ ID NO: 3533936 - DNA, 25 bp, Homo sapien
tacaggcctggtattttctgtccag

SEQ ID NO: 3533937 - DNA, 25 bp, Homo sapien
ctttatagagaggatacaggcctgg

SEQ ID NO: 3533938 - DNA, 25 bp, Homo sapien
tggttaggtgtggagcctaactctg

SEQ ID NO: 3533939 - DNA, 25 bp, Homo sapien
gcttctgtgaccccaccaactttta

SEQ ID NO: 3533940 - DNA, 25 bp, Homo sapien
ccaacttttaaggagtgaagccagc

SEQ ID NO: 3533941 - DNA, 25 bp, Homo sapien
ccagttgtggacttcatttcgtaag

SEQ ID NO: 3533942 - DNA, 25 bp, Homo sapien
tagaaaaggaagtcgatttcagtag

SEQ ID NO: 3533943 - DNA, 25 bp, Homo sapien
tgcagtttgccaaagtcgcattggc

SEQ ID NO: 3533944 - DNA, 25 bp, Homo sapien
ctttcgacaggaaccagctgtagcc

SEQ ID NO: 3533945 - DNA, 25 bp, Homo sapien
cgcattggcaggatagacttggaaa

SEQ ID NO: 3533946 - DNA, 25 bp, Homo sapien
ctgctcagcacaggctgagaacaca

SEQ ID NO: 3533947 - DNA, 25 bp, Homo sapien
tcaccagtgttgtttcctcggctgt

SEQ ID NO: 3533948 - DNA, 25 bp, Homo sapien
ttggccgtgtagcctgggagtcgga

SEQ ID NO: 3533949 - DNA, 25 bp, Homo sapien
tctttgggccttccatcaccagtgt

SEQ ID NO: 3533950 - DNA, 25 bp, Homo sapien
ctgggagtcggagctctttgggcct

SEQ ID NO: 3533951 - DNA, 25 bp, Homo sapien
gcagttagtcctacgttcagggcca

SEQ ID NO: 3533952 - DNA, 25 bp, Homo sapien
tgcagcagttagtcctacgttcagg

SEQ ID NO: 3533953 - DNA, 25 bp, Homo sapien
tagtcctacgttcagggccaagttg

SEQ ID NO: 3533954 - DNA, 25 bp, Homo sapien
gggttgcagcagttagtcctacgtt

SEQ ID NO: 3533955 - DNA, 25 bp, Homo sapien
gtgtgccttttaaaaatccactcaa

SEQ ID NO: 3533956 - DNA, 25 bp, Homo sapien
tgtgccttttaaaaatccactcaag

SEQ ID NO: 3533957 - DNA, 25 bp, Homo sapien
ggtgtgccttttaaaaatccactca

SEQ ID NO: 3533958 - DNA, 25 bp, Homo sapien
cttttaaaaatccactcaagggcat

SEQ ID NO: 3533959 - DNA, 25 bp, Homo sapien
ttgccccacagtctgtcatccccct

SEQ ID NO: 3533960 - DNA, 25 bp, Homo sapien
gccccacagtctgtcatcccccttc

SEQ ID NO: 3533961 - DNA, 25 bp, Homo sapien
cttgccccacagtctgtcatccccc

SEQ ID NO: 3533962 - DNA, 25 bp, Homo sapien
tgccccacagtctgtcatccccctt

SEQ ID NO: 3533963 - DNA, 25 bp, Homo sapien
cttagatttcacaaatttgtcatgt

SEQ ID NO: 3533964 - DNA, 25 bp, Homo sapien
attccttagatttcacaaatttgtc

SEQ ID NO: 3533965 - DNA, 25 bp, Homo sapien
aatggcgacagcttcttccaacaac

SEQ ID NO: 3533966 - DNA, 25 bp, Homo sapien
tccttagatttcacaaatttgtcat

SEQ ID NO: 3533967 - DNA, 25 bp, Homo sapien
tacatggctgttaatagctaaatta

SEQ ID NO: 3533968 - DNA, 25 bp, Homo sapien
gagggagctgcttttgaccattgcc

SEQ ID NO: 3533969 - DNA, 25 bp, Homo sapien
gaccattgcctctcttcttacatca

SEQ ID NO: 3533970 - DNA, 25 bp, Homo sapien
tccctcgtaagcttctttggttaca

SEQ ID NO: 3533971 - DNA, 25 bp, Homo sapien
gaagcttctgattagttaggagtcc

SEQ ID NO: 3533972 - DNA, 25 bp, Homo sapien
tgtgagaggccatttcataagcagg

SEQ ID NO: 3533973 - DNA, 25 bp, Homo sapien
tacctcagagataccatgggttcag

SEQ ID NO: 3533974 - DNA, 25 bp, Homo sapien
gagctgattcagacgtgtggcccct

SEQ ID NO: 3533975 - DNA, 25 bp, Homo sapien
ccttgagggctttgcagaaaccctt

SEQ ID NO: 3533976 - DNA, 25 bp, Homo sapien
ggtcagtttcactataatccttaga

SEQ ID NO: 3533977 - DNA, 25 bp, Homo sapien
tggtcagtttcactataatccttag

SEQ ID NO: 3533978 - DNA, 25 bp, Homo sapien
gtcagtttcactataatccttagac

SEQ ID NO: 3533979 - DNA, 25 bp, Homo sapien
ttttgcagacatacccagagggcca

SEQ ID NO: 3533980 - DNA, 25 bp, Homo sapien
accttttttgcagacatacccagag

SEQ ID NO: 3533981 - DNA, 25 bp, Homo sapien
tgcagacatacccagagggccaatc

SEQ ID NO: 3533982 - DNA, 25 bp, Homo sapien
gacatacccagagggccaatcttgg

SEQ ID NO: 3533983 - DNA, 25 bp, Homo sapien
ggcatcaactttatccaaggtacac

SEQ ID NO: 3533984 - DNA, 25 bp, Homo sapien
catcaactttatccaaggtacacct

SEQ ID NO: 3533985 - DNA, 25 bp, Homo sapien
atcaactttatccaaggtacacctc

SEQ ID NO: 3533986 - DNA, 25 bp, Homo sapien
gcatcaactttatccaaggtacacc

SEQ ID NO: 3533987 - DNA, 25 bp, Homo sapien
ccagagttgaatggcttgcagcaga

SEQ ID NO: 3533988 - DNA, 25 bp, Homo sapien
gcatgtgttgtcactccttcctgtg

SEQ ID NO: 3533989 - DNA, 25 bp, Homo sapien
tcatcccttcaacgactagagtcag

SEQ ID NO: 3533990 - DNA, 25 bp, Homo sapien
agctggtgttgcatgattctgttcc

SEQ ID NO: 3533991 - DNA, 25 bp, Homo sapien
aggccccattgataccctcagctaa

SEQ ID NO: 3533992 - DNA, 25 bp, Homo sapien
ctggagaggagcacgtgcgatcatc

SEQ ID NO: 3533993 - DNA, 25 bp, Homo sapien
gcacgtgcgatcatctcaaaggccc

SEQ ID NO: 3533994 - DNA, 25 bp, Homo sapien
tcaaaggccccattgataccctcag

SEQ ID NO: 3533995 - DNA, 25 bp, Homo sapien
gcatctgccttgctccagatgtcga

SEQ ID NO: 3533996 - DNA, 25 bp, Homo sapien
ttgctccagatgtcgactattcccc

SEQ ID NO: 3533997 - DNA, 25 bp, Homo sapien
tgccttgctccagatgtcgactatt

SEQ ID NO: 3533998 - DNA, 25 bp, Homo sapien
gctccagatgtcgactattcccctt

SEQ ID NO: 3533999 - DNA, 25 bp, Homo sapien
taaattagaacctgcttctgggacc

SEQ ID NO: 3534000 - DNA, 25 bp, Homo sapien
ggacccatctgagatcaccctctgg

SEQ ID NO: 3534001 - DNA, 25 bp, Homo sapien
ctttgcaattatatctactggccgg

SEQ ID NO: 3534002 - DNA, 25 bp, Homo sapien
tagggaggctggttaatcatgtttc

SEQ ID NO: 3534003 - DNA, 25 bp, Homo sapien
aactcatatctgtggctacttctac

SEQ ID NO: 3534004 - DNA, 25 bp, Homo sapien
actgctgaaatgtccatcctttccc

SEQ ID NO: 3534005 - DNA, 25 bp, Homo sapien
tactgctgaaatgtccatcctttcc

SEQ ID NO: 3534006 - DNA, 25 bp, Homo sapien
agttaatttccttatcttggcagtg

SEQ ID NO: 3534007 - DNA, 25 bp, Homo sapien
ctgaagagttaatttccttatcttg

SEQ ID NO: 3534008 - DNA, 25 bp, Homo sapien
atttccttatcttggcagtgcttcc

SEQ ID NO: 3534009 - DNA, 25 bp, Homo sapien
agagttaatttccttatcttggcag

SEQ ID NO: 3534010 - DNA, 25 bp, Homo sapien
ggatctggttgtctatcctggtcac

SEQ ID NO: 3534011 - DNA, 25 bp, Homo sapien
gtattaaatcaaatgcttccaaacc

SEQ ID NO: 3534012 - DNA, 25 bp, Homo sapien
gacgaactccctttgcaggatctgg

SEQ ID NO: 3534013 - DNA, 25 bp, Homo sapien
aggcagggctttgacgaactccctt

SEQ ID NO: 3534014 - DNA, 25 bp, Homo sapien
tgtgtgctgaggtgttccttccacg

SEQ ID NO: 3534015 - DNA, 25 bp, Homo sapien
ctgttgctgaactgtgggcctgtga

SEQ ID NO: 3534016 - DNA, 25 bp, Homo sapien
gtcctgttgctgaactgtgggcctg

SEQ ID NO: 3534017 - DNA, 25 bp, Homo sapien
tgtgctgaggtgttccttccacgcc

SEQ ID NO: 3534018 - DNA, 25 bp, Homo sapien
gctgttttgtgggaacacaagaagc

SEQ ID NO: 3534019 - DNA, 25 bp, Homo sapien
ctttgcgtgtttacacaagtttggg

SEQ ID NO: 3534020 - DNA, 25 bp, Homo sapien
gaagtttgaacagaagctgttttgt

SEQ ID NO: 3534021 - DNA, 25 bp, Homo sapien
tgcgtgtttacacaagtttgggatt

SEQ ID NO: 3534022 - DNA, 25 bp, Homo sapien
tcttccaggaggtgggttgtaggat

SEQ ID NO: 3534023 - DNA, 25 bp, Homo sapien
cttccaggaggtgggttgtaggata

SEQ ID NO: 3534024 - DNA, 25 bp, Homo sapien
ctcatcttccaggaggtgggttgta

SEQ ID NO: 3534025 - DNA, 25 bp, Homo sapien
catcttccaggaggtgggttgtagg

SEQ ID NO: 3534026 - DNA, 25 bp, Homo sapien
ttccaggcgcccttgaatgagctcg

SEQ ID NO: 3534027 - DNA, 25 bp, Homo sapien
gactccagcactcttgttccaggcg

SEQ ID NO: 3534028 - DNA, 25 bp, Homo sapien
ccttgaatgagctcgtctgttttcc

SEQ ID NO: 3534029 - DNA, 25 bp, Homo sapien
ccagcagaaatcgtggcctgatgcc

SEQ ID NO: 3534030 - DNA, 25 bp, Homo sapien
ctggaagacccagtagcatggaaat

SEQ ID NO: 3534031 - DNA, 25 bp, Homo sapien
tccagagcaggctgtaagtgtgagc

SEQ ID NO: 3534032 - DNA, 25 bp, Homo sapien
ccagtagcatggaaataggagtcca

SEQ ID NO: 3534033 - DNA, 25 bp, Homo sapien
gagggcaagtgagatttggagagac

SEQ ID NO: 3534034 - DNA, 25 bp, Homo sapien
tgtggaaggtggctcataagagctt

SEQ ID NO: 3534035 - DNA, 25 bp, Homo sapien
ggaaggtggctcataagagctttta

SEQ ID NO: 3534036 - DNA, 25 bp, Homo sapien
tggaaggtggctcataagagctttt

SEQ ID NO: 3534037 - DNA, 25 bp, Homo sapien
gtggaaggtggctcataagagcttt

SEQ ID NO: 3534038 - DNA, 25 bp, Homo sapien
taaagggcttgtgcctttgcctgct

SEQ ID NO: 3534039 - DNA, 25 bp, Homo sapien
tccagtagtaaagggcttgtgcctt

SEQ ID NO: 3534040 - DNA, 25 bp, Homo sapien
ctctccagtagtaaagggcttgtgc

SEQ ID NO: 3534041 - DNA, 25 bp, Homo sapien
agtaaagggcttgtgcctttgcctg

SEQ ID NO: 3534042 - DNA, 25 bp, Homo sapien
cactgtgttgcagctgtcactattc

SEQ ID NO: 3534043 - DNA, 25 bp, Homo sapien
acactgtgttgcagctgtcactatt

SEQ ID NO: 3534044 - DNA, 25 bp, Homo sapien
actgtgttgcagctgtcactattcc

SEQ ID NO: 3534045 - DNA, 25 bp, Homo sapien
cacactgtgttgcagctgtcactat

SEQ ID NO: 3534046 - DNA, 25 bp, Homo sapien
aggccaaagttagggtgctaatggt

SEQ ID NO: 3534047 - DNA, 25 bp, Homo sapien
aaaggccaaagttagggtgctaatg

SEQ ID NO: 3534048 - DNA, 25 bp, Homo sapien
ccaaagttagggtgctaatggtttg

SEQ ID NO: 3534049 - DNA, 25 bp, Homo sapien
agttagggtgctaatggtttgggat

SEQ ID NO: 3534050 - DNA, 25 bp, Homo sapien
gccagaggtacccatgatcctgaat

SEQ ID NO: 3534051 - DNA, 25 bp, Homo sapien
gacaaatcttgcagttgaagttcat

SEQ ID NO: 3534052 - DNA, 25 bp, Homo sapien
gaagttcattatgtacgatcccagt

SEQ ID NO: 3534053 - DNA, 25 bp, Homo sapien
tatgtacgatcccagttgccagagg

SEQ ID NO: 3534054 - DNA, 25 bp, Homo sapien
cagaagctcttgacttcagtgcctt

SEQ ID NO: 3534055 - DNA, 25 bp, Homo sapien
aggtctgaccggcagccagcccttg

SEQ ID NO: 3534056 - DNA, 25 bp, Homo sapien
agcaagcgcttgcaaaagttcttcc

SEQ ID NO: 3534057 - DNA, 25 bp, Homo sapien
acagaaggcataggaggatggctcc

SEQ ID NO: 3534058 - DNA, 25 bp, Homo sapien
cttcttttagggtcataggcagtgt

SEQ ID NO: 3534059 - DNA, 25 bp, Homo sapien
tcctgctgcagaattgcacaccatc

SEQ ID NO: 3534060 - DNA, 25 bp, Homo sapien
aattgcacaccatcttcttttaggg

SEQ ID NO: 3534061 - DNA, 25 bp, Homo sapien
gctccatccatcagttgttcctgct

SEQ ID NO: 3534062 - DNA, 25 bp, Homo sapien
gggaagtgcacaggacagatgtctc

SEQ ID NO: 3534063 - DNA, 25 bp, Homo sapien
ttcgccccaaactcagacagccttg

SEQ ID NO: 3534064 - DNA, 25 bp, Homo sapien
cagtttgatgggaaccgaatgggaa

SEQ ID NO: 3534065 - DNA, 25 bp, Homo sapien
ggcttagacccagaaggcccatctt

SEQ ID NO: 3534066 - DNA, 25 bp, Homo sapien
tctaatctggccaattttcccgctc

SEQ ID NO: 3534067 - DNA, 25 bp, Homo sapien
cacagttgcagtgacgtttccaggg

SEQ ID NO: 3534068 - DNA, 25 bp, Homo sapien
gtgccgccagccttattgactctca

SEQ ID NO: 3534069 - DNA, 25 bp, Homo sapien
tatcagaacaagatttcacagttgc

SEQ ID NO: 3534070 - DNA, 25 bp, Homo sapien
ctgacattcaagtatgtttgttccc

SEQ ID NO: 3534071 - DNA, 25 bp, Homo sapien
ctgctgatggccagaaaagaacatt

SEQ ID NO: 3534072 - DNA, 25 bp, Homo sapien
tacaaccagtctttgatggagaaag

SEQ ID NO: 3534073 - DNA, 25 bp, Homo sapien
ggattttacaaccagtctttgatgg

SEQ ID NO: 3534074 - DNA, 25 bp, Homo sapien
ctaccagaagtctcacctataccaa

SEQ ID NO: 3534075 - DNA, 25 bp, Homo sapien
agtctcacctataccaaaccacaca

SEQ ID NO: 3534076 - DNA, 25 bp, Homo sapien
cagaagtctcacctataccaaacca

SEQ ID NO: 3534077 - DNA, 25 bp, Homo sapien
gtctcacctataccaaaccacacac

SEQ ID NO: 3534078 - DNA, 25 bp, Homo sapien
tcaccaatgagtgcaacataccagg

SEQ ID NO: 3534079 - DNA, 25 bp, Homo sapien
ccctgctgttgctgtgccgtctgac

SEQ ID NO: 3534080 - DNA, 25 bp, Homo sapien
gctgcctgactgcttcgacaagagt

SEQ ID NO: 3534081 - DNA, 25 bp, Homo sapien
tgcagcaatggacggtgcatcccgg

SEQ ID NO: 3534082 - DNA, 25 bp, Homo sapien
gcttgctgcaagctggtggttttgt

SEQ ID NO: 3534083 - DNA, 25 bp, Homo sapien
tgctgcaagctggtggttttgtgcc

SEQ ID NO: 3534084 - DNA, 25 bp, Homo sapien
ctgcaagctggtggttttgtgcctc

SEQ ID NO: 3534085 - DNA, 25 bp, Homo sapien
tgcaagctggtggttttgtgcctct

SEQ ID NO: 3534086 - DNA, 25 bp, Homo sapien
ccgtggtgtcaaatgatcctgctcc

SEQ ID NO: 3534087 - DNA, 25 bp, Homo sapien
ccctgccctgcagaggtgtatttct

SEQ ID NO: 3534088 - DNA, 25 bp, Homo sapien
gtgtcaaatgatcctgctccctgcc

SEQ ID NO: 3534089 - DNA, 25 bp, Homo sapien
cctgcagaggtgtatttctcttcct

SEQ ID NO: 3534090 - DNA, 25 bp, Homo sapien
cctgtgtggttgtcctcctgggtgc

SEQ ID NO: 3534091 - DNA, 25 bp, Homo sapien
tgccctgtgtggttgtcctcctggg

SEQ ID NO: 3534092 - DNA, 25 bp, Homo sapien
ccctgtgtggttgtcctcctgggtg

SEQ ID NO: 3534093 - DNA, 25 bp, Homo sapien
ggtgccctgtgtggttgtcctcctg

SEQ ID NO: 3534094 - DNA, 25 bp, Homo sapien
aggccacgtggcctgtctgacagga

SEQ ID NO: 3534095 - DNA, 25 bp, Homo sapien
tgactggacgatggttcctggctct

SEQ ID NO: 3534096 - DNA, 25 bp, Homo sapien
tgccttgagaccacatgactggacg

SEQ ID NO: 3534097 - DNA, 25 bp, Homo sapien
ctttgggcaccaggccacgtggcct

SEQ ID NO: 3534098 - DNA, 25 bp, Homo sapien
gccgagtctgttgacgcatgggaac

SEQ ID NO: 3534099 - DNA, 25 bp, Homo sapien
aatttggggccgagtctgttgacgc

SEQ ID NO: 3534100 - DNA, 25 bp, Homo sapien
ctgttgacgcatgggaacgggcact

SEQ ID NO: 3534101 - DNA, 25 bp, Homo sapien
aacatatttctgaccagaatttggg

SEQ ID NO: 3534102 - DNA, 25 bp, Homo sapien
atccaaggggtcccatatccccagt

SEQ ID NO: 3534103 - DNA, 25 bp, Homo sapien
ctctgaaactggtccttcgcccatc

SEQ ID NO: 3534104 - DNA, 25 bp, Homo sapien
aaactggtccttcgcccatccaagg

SEQ ID NO: 3534105 - DNA, 25 bp, Homo sapien
tgaaactggtccttcgcccatccaa

SEQ ID NO: 3534106 - DNA, 25 bp, Homo sapien
gcttgttgcatatgatctttctgaa

SEQ ID NO: 3534107 - DNA, 25 bp, Homo sapien
tttctgaattgatcactatacacac

SEQ ID NO: 3534108 - DNA, 25 bp, Homo sapien
aatatttcatactgcttgttgcata

SEQ ID NO: 3534109 - DNA, 25 bp, Homo sapien
gaattgatcactatacacactgaat

SEQ ID NO: 3534110 - DNA, 25 bp, Homo sapien
aaacggctgatgtggaatttctgcc

SEQ ID NO: 3534111 - DNA, 25 bp, Homo sapien
ctgattctttggagcaactgggtac

SEQ ID NO: 3534112 - DNA, 25 bp, Homo sapien
cgcctcggagaggtgattacttcaa

SEQ ID NO: 3534113 - DNA, 25 bp, Homo sapien
ttcaagtgccctgtggagctttggc

SEQ ID NO: 3534114 - DNA, 25 bp, Homo sapien
ttcataggatggatagagcttgctg

SEQ ID NO: 3534115 - DNA, 25 bp, Homo sapien
cagctgtttctctagggcacctaat

SEQ ID NO: 3534116 - DNA, 25 bp, Homo sapien
tctggaaatcaggaagctttcatag

SEQ ID NO: 3534117 - DNA, 25 bp, Homo sapien
tctagggcacctaatgccggctcca

SEQ ID NO: 3534118 - DNA, 25 bp, Homo sapien
aatgaaataactctgagctgggggg

SEQ ID NO: 3534119 - DNA, 25 bp, Homo sapien
ccccacttccagagagcttcattat

SEQ ID NO: 3534120 - DNA, 25 bp, Homo sapien
ttcattccatctcgccagtcttctt

SEQ ID NO: 3534121 - DNA, 25 bp, Homo sapien
ctctgcttgcaaggggagaatctta

SEQ ID NO: 3534122 - DNA, 25 bp, Homo sapien
gaattccagagtagaccggtatgcc

SEQ ID NO: 3534123 - DNA, 25 bp, Homo sapien
attccagagtagaccggtatgccat

SEQ ID NO: 3534124 - DNA, 25 bp, Homo sapien
aattccagagtagaccggtatgcca

SEQ ID NO: 3534125 - DNA, 25 bp, Homo sapien
gtgaattccagagtagaccggtatg

SEQ ID NO: 3534126 - DNA, 25 bp, Homo sapien
tactttaaaggtcgatgatagccac

SEQ ID NO: 3534127 - DNA, 25 bp, Homo sapien
tcaggatgccttggtgaaacctttc

SEQ ID NO: 3534128 - DNA, 25 bp, Homo sapien
tagatatcacctttcatgcagttgg

SEQ ID NO: 3534129 - DNA, 25 bp, Homo sapien
caaagaatatgccacggaagcgagg

SEQ ID NO: 3534130 - DNA, 25 bp, Homo sapien
cagacagattgggagctacaggcat

SEQ ID NO: 3534131 - DNA, 25 bp, Homo sapien
gtctgattagctgacttcatggctg

SEQ ID NO: 3534132 - DNA, 25 bp, Homo sapien
gctcttttgtatgattgctgcctgg

SEQ ID NO: 3534133 - DNA, 25 bp, Homo sapien
agcaagcccatgctgaagtttccat

SEQ ID NO: 3534134 - DNA, 25 bp, Homo sapien
gagccttctatacaaggcctggaca

SEQ ID NO: 3534135 - DNA, 25 bp, Homo sapien
ccttctatacaaggcctggacagtt

SEQ ID NO: 3534136 - DNA, 25 bp, Homo sapien
gggaagagccttctatacaaggcct

SEQ ID NO: 3534137 - DNA, 25 bp, Homo sapien
tatacaaggcctggacagttctgct

SEQ ID NO: 3534138 - DNA, 25 bp, Homo sapien
cctcttgtctgctgcgacatggtgg

SEQ ID NO: 3534139 - DNA, 25 bp, Homo sapien
catggtgggcaaacagcatgtttca

SEQ ID NO: 3534140 - DNA, 25 bp, Homo sapien
tgggcaaacagcatgtttcagccct

SEQ ID NO: 3534141 - DNA, 25 bp, Homo sapien
tctgctgcgacatggtgggcaaaca

SEQ ID NO: 3534142 - DNA, 25 bp, Homo sapien
gcaatgggtttgaggactgtcccga

SEQ ID NO: 3534143 - DNA, 25 bp, Homo sapien
ctgtgccagcggcatccattgcatc

SEQ ID NO: 3534144 - DNA, 25 bp, Homo sapien
cattgcatcattggtcgcttccggt

SEQ ID NO: 3534145 - DNA, 25 bp, Homo sapien
agaactgcagtaagtgctgcgcact

SEQ ID NO: 3534146 - DNA, 25 bp, Homo sapien
tttccttgcagcttagcagtcttgc

SEQ ID NO: 3534147 - DNA, 25 bp, Homo sapien
tccttgccttggatacatgcagatc

SEQ ID NO: 3534148 - DNA, 25 bp, Homo sapien
caatgactttgcgtacagcagcctc

SEQ ID NO: 3534149 - DNA, 25 bp, Homo sapien
tcgcctttaatactggcccagctcg

SEQ ID NO: 3534150 - DNA, 25 bp, Homo sapien
tgacaggtgtcaataggcaagccaa

SEQ ID NO: 3534151 - DNA, 25 bp, Homo sapien
taaaatcctcgagtccttagagcct

SEQ ID NO: 3534152 - DNA, 25 bp, Homo sapien
gaatgcggctgtacataggctacgt

SEQ ID NO: 3534153 - DNA, 25 bp, Homo sapien
gaagttccatgtgcagaatgcggct

SEQ ID NO: 3534154 - DNA, 25 bp, Homo sapien
caaggttgagtcattacaacagaga

SEQ ID NO: 3534155 - DNA, 25 bp, Homo sapien
ctttgtgacacaatggcaaggttga

SEQ ID NO: 3534156 - DNA, 25 bp, Homo sapien
gagacaaaagaccaaacagctacca

SEQ ID NO: 3534157 - DNA, 25 bp, Homo sapien
gataggaacagttagccagccctgg

SEQ ID NO: 3534158 - DNA, 25 bp, Homo sapien
gcaaataatggcttcagtaaacatt

SEQ ID NO: 3534159 - DNA, 25 bp, Homo sapien
taattttgcaaataatggcttcagt

SEQ ID NO: 3534160 - DNA, 25 bp, Homo sapien
tttgcaaataatggcttcagtaaac

SEQ ID NO: 3534161 - DNA, 25 bp, Homo sapien
caaataatggcttcagtaaacattt

SEQ ID NO: 3534162 - DNA, 25 bp, Homo sapien
gagaagagtatatagctggaagtga

SEQ ID NO: 3534163 - DNA, 25 bp, Homo sapien
agtatatagctggaagtgaaattcc

SEQ ID NO: 3534164 - DNA, 25 bp, Homo sapien
gaagagtatatagctggaagtgaaa

SEQ ID NO: 3534165 - DNA, 25 bp, Homo sapien
gagtatatagctggaagtgaaattc

SEQ ID NO: 3534166 - DNA, 25 bp, Homo sapien
gagtgtggcacgtcatcaccagtga

SEQ ID NO: 3534167 - DNA, 25 bp, Homo sapien
caattgcctgattacatccttggcc

SEQ ID NO: 3534168 - DNA, 25 bp, Homo sapien
cacgtatgtggcgtttttccttgga

SEQ ID NO: 3534169 - DNA, 25 bp, Homo sapien
cctaggtggacgtaccaatttgcac

SEQ ID NO: 3534170 - DNA, 25 bp, Homo sapien
gacacaagggtttggagagctgcct

SEQ ID NO: 3534171 - DNA, 25 bp, Homo sapien
ccatctcggttttggctgaagtcag

SEQ ID NO: 3534172 - DNA, 25 bp, Homo sapien
taagcttatgaacgccccgtcttgg

SEQ ID NO: 3534173 - DNA, 25 bp, Homo sapien
tgtgttcacaacacctcagcgaagc

SEQ ID NO: 3534174 - DNA, 25 bp, Homo sapien
ttattggggcaatccaggttgtttc

SEQ ID NO: 3534175 - DNA, 25 bp, Homo sapien
actgtgttacatactgtcatgttac

SEQ ID NO: 3534176 - DNA, 25 bp, Homo sapien
tcaaaactgtaatatgccccaactg

SEQ ID NO: 3534177 - DNA, 25 bp, Homo sapien
ttttctgagacaacgctttattggg

SEQ ID NO: 3534178 - DNA, 25 bp, Homo sapien
atgccatctattgtaagagctatca

SEQ ID NO: 3534179 - DNA, 25 bp, Homo sapien
agacaaaggcacgtaccaaattttg

SEQ ID NO: 3534180 - DNA, 25 bp, Homo sapien
taaaatgccatctattgtaagagct

SEQ ID NO: 3534181 - DNA, 25 bp, Homo sapien
ccatctattgtaagagctatcatta

SEQ ID NO: 3534182 - DNA, 25 bp, Homo sapien
tgcaactgtcgatggcagaggctgc

SEQ ID NO: 3534183 - DNA, 25 bp, Homo sapien
gattcgaacattgagcagaggtatg

SEQ ID NO: 3534184 - DNA, 25 bp, Homo sapien
cagaggtatgtggtctgggattccc

SEQ ID NO: 3534185 - DNA, 25 bp, Homo sapien
cctgtgaaatcagccccagagcctt

SEQ ID NO: 3534186 - DNA, 25 bp, Homo sapien
cttatggcctaagaaggccaagtcc

SEQ ID NO: 3534187 - DNA, 25 bp, Homo sapien
cttccttatggcctaagaaggccaa

SEQ ID NO: 3534188 - DNA, 25 bp, Homo sapien
ccttatggcctaagaaggccaagtc

SEQ ID NO: 3534189 - DNA, 25 bp, Homo sapien
tccttatggcctaagaaggccaagt

SEQ ID NO: 3534190 - DNA, 25 bp, Homo sapien
gagtcttctcattatcctgagtgtt

SEQ ID NO: 3534191 - DNA, 25 bp, Homo sapien
tcttctcattatcctgagtgtttaa

SEQ ID NO: 3534192 - DNA, 25 bp, Homo sapien
ctcattatcctgagtgtttaaaatg

SEQ ID NO: 3534193 - DNA, 25 bp, Homo sapien
ctgagtcttctcattatcctgagtg

SEQ ID NO: 3534194 - DNA, 25 bp, Homo sapien
cacttcttgaaaaacgccgttgctg

SEQ ID NO: 3534195 - DNA, 25 bp, Homo sapien
acttcttgaaaaacgccgttgctgc

SEQ ID NO: 3534196 - DNA, 25 bp, Homo sapien
tcttgaaaaacgccgttgctgccgc

SEQ ID NO: 3534197 - DNA, 25 bp, Homo sapien
cttcttgaaaaacgccgttgctgcc

SEQ ID NO: 3534198 - DNA, 25 bp, Homo sapien
ttttatgtgcgtcttggaaggctgg

SEQ ID NO: 3534199 - DNA, 25 bp, Homo sapien
atccctccgggaaaatggagacagc

SEQ ID NO: 3534200 - DNA, 25 bp, Homo sapien
tggaagcggatgcatccctccggga

SEQ ID NO: 3534201 - DNA, 25 bp, Homo sapien
agagaaagcagggatcgaattttta

SEQ ID NO: 3534202 - DNA, 25 bp, Homo sapien
gcagatgcatattcaccagtgaggc

SEQ ID NO: 3534203 - DNA, 25 bp, Homo sapien
aggcacaacgcgctgtctccggcag

SEQ ID NO: 3534204 - DNA, 25 bp, Homo sapien
ctgtgagcctgtgaacctgttcccc

SEQ ID NO: 3534205 - DNA, 25 bp, Homo sapien
cattgattaaacacgtactatgtgg

SEQ ID NO: 3534206 - DNA, 25 bp, Homo sapien
taagaactgctacatggcagcaagg

SEQ ID NO: 3534207 - DNA, 25 bp, Homo sapien
aatgtccgatgaaagtaagaactgc

SEQ ID NO: 3534208 - DNA, 25 bp, Homo sapien
tccatcagtgataagagatggcaaa

SEQ ID NO: 3534209 - DNA, 25 bp, Homo sapien
tgtatgtttctcataaccttttctc

SEQ ID NO: 3534210 - DNA, 25 bp, Homo sapien
gcctccgtgcctggaacaagtcaga

SEQ ID NO: 3534211 - DNA, 25 bp, Homo sapien
gaagctctgcctcaaaatgttgcca

SEQ ID NO: 3534212 - DNA, 25 bp, Homo sapien
aaactttgtttggagagagcccgct

SEQ ID NO: 3534213 - DNA, 25 bp, Homo sapien
gtctccccagagtggatcacagctg

SEQ ID NO: 3534214 - DNA, 25 bp, Homo sapien
cagcaatagtagcatgtggccacct

SEQ ID NO: 3534215 - DNA, 25 bp, Homo sapien
tgcctttaagaagctgagccagcaa

SEQ ID NO: 3534216 - DNA, 25 bp, Homo sapien
tctgctgattcgaggtagagccttg

SEQ ID NO: 3534217 - DNA, 25 bp, Homo sapien
gagccttgcgatgtgtcagaagtcc

SEQ ID NO: 3534218 - DNA, 25 bp, Homo sapien
aaaaaagaccgccagtagttggcag

SEQ ID NO: 3534219 - DNA, 25 bp, Homo sapien
agattgaatccaaagcagcttgtga

SEQ ID NO: 3534220 - DNA, 25 bp, Homo sapien
ccaagtttgttcgtatagccagctc

SEQ ID NO: 3534221 - DNA, 25 bp, Homo sapien
gcacgatccccaactgaagagctgt

SEQ ID NO: 3534222 - DNA, 25 bp, Homo sapien
ccattgttagcatgagctgaaagaa

SEQ ID NO: 3534223 - DNA, 25 bp, Homo sapien
gccattgttagcatgagctgaaaga

SEQ ID NO: 3534224 - DNA, 25 bp, Homo sapien
agctgaaagaagttgggtctcccaa

SEQ ID NO: 3534225 - DNA, 25 bp, Homo sapien
gaaagaagttgggtctcccaaggca

SEQ ID NO: 3534226 - DNA, 25 bp, Homo sapien
cagaagatctacgtccttgaaatat

SEQ ID NO: 3534227 - DNA, 25 bp, Homo sapien
cacacagccttctcttagaggggag

SEQ ID NO: 3534228 - DNA, 25 bp, Homo sapien
tcaacactcacaccctgatgtggca

SEQ ID NO: 3534229 - DNA, 25 bp, Homo sapien
cttgaaatatacacagattgggttt

SEQ ID NO: 3534230 - DNA, 25 bp, Homo sapien
gaaggcaacataaatcaagctggta

SEQ ID NO: 3534231 - DNA, 25 bp, Homo sapien
tttctccacacaaagtacattcagg

SEQ ID NO: 3534232 - DNA, 25 bp, Homo sapien
agtcactgccttttcggatctggtt

SEQ ID NO: 3534233 - DNA, 25 bp, Homo sapien
gagaacgtgtgtatgtcagtcactg

SEQ ID NO: 3534234 - DNA, 25 bp, Homo sapien
ccagttgtgatcaatagggtagcct

SEQ ID NO: 3534235 - DNA, 25 bp, Homo sapien
cattagccagggagtatcgaccaaa

SEQ ID NO: 3534236 - DNA, 25 bp, Homo sapien
agggtagcctccacaaagcaagcaa

SEQ ID NO: 3534237 - DNA, 25 bp, Homo sapien
tgtggagcattagctggacccctgc

SEQ ID NO: 3534238 - DNA, 25 bp, Homo sapien
tttgcaggcctaggagatttgctcc

SEQ ID NO: 3534239 - DNA, 25 bp, Homo sapien
tgttgaagctcttgcagacccctaa

SEQ ID NO: 3534240 - DNA, 25 bp, Homo sapien
ggaatgttgccactcaccttcagtt

SEQ ID NO: 3534241 - DNA, 25 bp, Homo sapien
gacccctaatagtgcatgctaccgt

SEQ ID NO: 3534242 - DNA, 25 bp, Homo sapien
tctaatctacggttaagtgggtcca

SEQ ID NO: 3534243 - DNA, 25 bp, Homo sapien
tgcaaggccaaggtatacaatccat

SEQ ID NO: 3534244 - DNA, 25 bp, Homo sapien
tacaatccatgagaaggccatccat

SEQ ID NO: 3534245 - DNA, 25 bp, Homo sapien
gacaggttcctaggagtactaccag

SEQ ID NO: 3534246 - DNA, 25 bp, Homo sapien
gaagtcacgcttttgcattccgttt

SEQ ID NO: 3534247 - DNA, 25 bp, Homo sapien
gtcagtgtgcgatgatttccatagg

SEQ ID NO: 3534248 - DNA, 25 bp, Homo sapien
tgcagcccgtgaagtcacgcttttg

SEQ ID NO: 3534249 - DNA, 25 bp, Homo sapien
cattccgtttgtaggacaagttgtc

SEQ ID NO: 3534250 - DNA, 25 bp, Homo sapien
aatggggtagcagtttaaacatatc

SEQ ID NO: 3534251 - DNA, 25 bp, Homo sapien
aaatggggtagcagtttaaacatat

SEQ ID NO: 3534252 - DNA, 25 bp, Homo sapien
catctatttgcaaggctacctcctg

SEQ ID NO: 3534253 - DNA, 25 bp, Homo sapien
tcctggcacctgcttagagcctcca

SEQ ID NO: 3534254 - DNA, 25 bp, Homo sapien
tccatctatttgcaaggctacctcc

SEQ ID NO: 3534255 - DNA, 25 bp, Homo sapien
cctccaggtaccttacagtgtattc

SEQ ID NO: 3534256 - DNA, 25 bp, Homo sapien
gatgtgcaaattggatccagaggct

SEQ ID NO: 3534257 - DNA, 25 bp, Homo sapien
gatccagaggctttatggctgtgtc

SEQ ID NO: 3534258 - DNA, 25 bp, Homo sapien
ctgatgtgcaaattggatccagagg

SEQ ID NO: 3534259 - DNA, 25 bp, Homo sapien
attggatccagaggctttatggctg

SEQ ID NO: 3534260 - DNA, 25 bp, Homo sapien
tattgtggctcttttcgtgctcccc

SEQ ID NO: 3534261 - DNA, 25 bp, Homo sapien
cgtgctcccctctgcgtcttgaaaa

SEQ ID NO: 3534262 - DNA, 25 bp, Homo sapien
tgaatgccccaaggcagcttacagc

SEQ ID NO: 3534263 - DNA, 25 bp, Homo sapien
ttccaaggagtaggacagtcaccgg

SEQ ID NO: 3534264 - DNA, 25 bp, Homo sapien
ggtggacatacctttggagggacac

SEQ ID NO: 3534265 - DNA, 25 bp, Homo sapien
tcaacttcgcatggcctttgccctt

SEQ ID NO: 3534266 - DNA, 25 bp, Homo sapien
taaagctctctctaattcagaatga

SEQ ID NO: 3534267 - DNA, 25 bp, Homo sapien
gacactcatcattggatctaaagct

SEQ ID NO: 3534268 - DNA, 25 bp, Homo sapien
cactccagactaacctgtgtgccag

SEQ ID NO: 3534269 - DNA, 25 bp, Homo sapien
gacacatgggcaagagacaatttgg

SEQ ID NO: 3534270 - DNA, 25 bp, Homo sapien
gagagccatgttcaatacctccagc

SEQ ID NO: 3534271 - DNA, 25 bp, Homo sapien
cgctgagccccgtgataacaagtca

SEQ ID NO: 3534272 - DNA, 25 bp, Homo sapien
aggatgttacagaaaagctagccac

SEQ ID NO: 3534273 - DNA, 25 bp, Homo sapien
aaagaacttttgatgacagccagaa

SEQ ID NO: 3534274 - DNA, 25 bp, Homo sapien
gaatgtgttagaactctggctgaac

SEQ ID NO: 3534275 - DNA, 25 bp, Homo sapien
gtttggcaagaaaccacactgactg

SEQ ID NO: 3534276 - DNA, 25 bp, Homo sapien
aatgtaaccatgggcattatatggt

SEQ ID NO: 3534277 - DNA, 25 bp, Homo sapien
tcagacaatgtaaccatgggcatta

SEQ ID NO: 3534278 - DNA, 25 bp, Homo sapien
caatgtaaccatgggcattatatgg

SEQ ID NO: 3534279 - DNA, 25 bp, Homo sapien
gaggctctcagtctgggcacatacc

SEQ ID NO: 3534280 - DNA, 25 bp, Homo sapien
ggcagtaaacaaccacagactgtgg

SEQ ID NO: 3534281 - DNA, 25 bp, Homo sapien
ccagggtttcggctcacatgacttt

SEQ ID NO: 3534282 - DNA, 25 bp, Homo sapien
ctggaccccagagggtgttttggca

SEQ ID NO: 3534283 - DNA, 25 bp, Homo sapien
gggaggattctgaagatagtatctc

SEQ ID NO: 3534284 - DNA, 25 bp, Homo sapien
tctgaagatagtatctcaataggcc

SEQ ID NO: 3534285 - DNA, 25 bp, Homo sapien
tagtatctcaataggccttatatct

SEQ ID NO: 3534286 - DNA, 25 bp, Homo sapien
caataggccttatatcttgactaaa

SEQ ID NO: 3534287 - DNA, 25 bp, Homo sapien
tttccttgatgaacgcaaaccacac

SEQ ID NO: 3534288 - DNA, 25 bp, Homo sapien
gccgcgtctgacaagggtgatctgt

SEQ ID NO: 3534289 - DNA, 25 bp, Homo sapien
gcaaaccacactgcaattagagtga

SEQ ID NO: 3534290 - DNA, 25 bp, Homo sapien
caattagagtgatgaagcgggatgc

SEQ ID NO: 3534291 - DNA, 25 bp, Homo sapien
ggggactttcttggattgtactcca

SEQ ID NO: 3534292 - DNA, 25 bp, Homo sapien
gggactttcttggattgtactccat

SEQ ID NO: 3534293 - DNA, 25 bp, Homo sapien
tccatctggaactagatcgaatgct

SEQ ID NO: 3534294 - DNA, 25 bp, Homo sapien
agctcttccatctggaactagatcg

SEQ ID NO: 3534295 - DNA, 25 bp, Homo sapien
tagatcgaatgctcagtgtggccat

SEQ ID NO: 3534296 - DNA, 25 bp, Homo sapien
tctggaactagatcgaatgctcagt

SEQ ID NO: 3534297 - DNA, 25 bp, Homo sapien
gagagtgctccacaaggatagctgg

SEQ ID NO: 3534298 - DNA, 25 bp, Homo sapien
tctgtcccaaggtcaacaattgttg

SEQ ID NO: 3534299 - DNA, 25 bp, Homo sapien
tccaagctagccctgaggactgcga

SEQ ID NO: 3534300 - DNA, 25 bp, Homo sapien
tagctggaggcgtaggctccaatcc

SEQ ID NO: 3534301 - DNA, 25 bp, Homo sapien
caggacacgtgtgtagtgaggccca

SEQ ID NO: 3534302 - DNA, 25 bp, Homo sapien
tggatggagtacagagcttccgcag

SEQ ID NO: 3534303 - DNA, 25 bp, Homo sapien
ggaggactatccgtgcagcttccac

SEQ ID NO: 3534304 - DNA, 25 bp, Homo sapien
tcttcgtcggcagcaaggttcagag

SEQ ID NO: 3534305 - DNA, 25 bp, Homo sapien
catgagttggaggttccagccagac

SEQ ID NO: 3534306 - DNA, 25 bp, Homo sapien
ccatgagttggaggttccagccaga

SEQ ID NO: 3534307 - DNA, 25 bp, Homo sapien
gcccatgagttggaggttccagcca

SEQ ID NO: 3534308 - DNA, 25 bp, Homo sapien
aggcccatgagttggaggttccagc

SEQ ID NO: 3534309 - DNA, 25 bp, Homo sapien
ttcctgcagtcagttctgagccctt

SEQ ID NO: 3534310 - DNA, 25 bp, Homo sapien
gaattcctgcagtcagttctgagcc

SEQ ID NO: 3534311 - DNA, 25 bp, Homo sapien
tgaatgagcgtgaattcctgcagtc

SEQ ID NO: 3534312 - DNA, 25 bp, Homo sapien
gagcgtgaattcctgcagtcagttc

SEQ ID NO: 3534313 - DNA, 25 bp, Homo sapien
gctgggccagtaggacatgttcact

SEQ ID NO: 3534314 - DNA, 25 bp, Homo sapien
ggcagctaaaggctcaattgaggtc

SEQ ID NO: 3534315 - DNA, 25 bp, Homo sapien
cgtagacgcttctcattcagaggga

SEQ ID NO: 3534316 - DNA, 25 bp, Homo sapien
cagggcaaatagtcctgccgctgct

SEQ ID NO: 3534317 - DNA, 25 bp, Homo sapien
gaccacagagcttgactaatgacta

SEQ ID NO: 3534318 - DNA, 25 bp, Homo sapien
gaacgatcagtatttggaagccaac

SEQ ID NO: 3534319 - DNA, 25 bp, Homo sapien
tgaacaaagtaacggagagcctctc

SEQ ID NO: 3534320 - DNA, 25 bp, Homo sapien
taatgactattggacatggtgccca

SEQ ID NO: 3534321 - DNA, 25 bp, Homo sapien
catgccaagggcaagtctgatccac

SEQ ID NO: 3534322 - DNA, 25 bp, Homo sapien
tggatgctccaataacctcagaagg

SEQ ID NO: 3534323 - DNA, 25 bp, Homo sapien
tactgcgagagcacttgtcggaacg

SEQ ID NO: 3534324 - DNA, 25 bp, Homo sapien
cactgactgaggagcactgacaaca

SEQ ID NO: 3534325 - DNA, 25 bp, Homo sapien
ctcctgtttctagggttctgtgagc

SEQ ID NO: 3534326 - DNA, 25 bp, Homo sapien
catgtggccctacgtggcatgccat

SEQ ID NO: 3534327 - DNA, 25 bp, Homo sapien
gatggcctctccgactgcagatgag

SEQ ID NO: 3534328 - DNA, 25 bp, Homo sapien
caagcctggtccgtcctgatgaata

SEQ ID NO: 3534329 - DNA, 25 bp, Homo sapien
tagaggaaatgtccaactgcccaga

SEQ ID NO: 3534330 - DNA, 25 bp, Homo sapien
gacaaatctgagctcaactggaggg

SEQ ID NO: 3534331 - DNA, 25 bp, Homo sapien
taatgagaccatttaccagcagatg

SEQ ID NO: 3534332 - DNA, 25 bp, Homo sapien
tctcaacttggaagtagcgggctgg

SEQ ID NO: 3534333 - DNA, 25 bp, Homo sapien
tacacaaactagcagagaagctgcc

SEQ ID NO: 3534334 - DNA, 25 bp, Homo sapien
ttaatctgtggatttacctcctcca

SEQ ID NO: 3534335 - DNA, 25 bp, Homo sapien
aacaaagcactccaagagcaggctg

SEQ ID NO: 3534336 - DNA, 25 bp, Homo sapien
ggaatcttcacacatggagtccctg

SEQ ID NO: 3534337 - DNA, 25 bp, Homo sapien
gaaagtggtgcgattcaattgcctg

SEQ ID NO: 3534338 - DNA, 25 bp, Homo sapien
ggtactggccaaaagcttcaacttg

SEQ ID NO: 3534339 - DNA, 25 bp, Homo sapien
tcatgtcacaccatgggtcaagggc

SEQ ID NO: 3534340 - DNA, 25 bp, Homo sapien
tgttctacgtaacaggtgaaaacac

SEQ ID NO: 3534341 - DNA, 25 bp, Homo sapien
acctgtccgattccctccatgtgtt

SEQ ID NO: 3534342 - DNA, 25 bp, Homo sapien
aagagggccctggtttcatgaagaa

SEQ ID NO: 3534343 - DNA, 25 bp, Homo sapien
aagggaattagcacccatttcagac

SEQ ID NO: 3534344 - DNA, 25 bp, Homo sapien
acttcttcacctaggagtggctgca

SEQ ID NO: 3534345 - DNA, 25 bp, Homo sapien
gaatttctcaaacagctatgcagag

SEQ ID NO: 3534346 - DNA, 25 bp, Homo sapien
taaacttacttattggataggctgc

SEQ ID NO: 3534347 - DNA, 25 bp, Homo sapien
gaaatgaactaattagagctaatgt

SEQ ID NO: 3534348 - DNA, 25 bp, Homo sapien
cagctgacgatgcaaatgttccctc

SEQ ID NO: 3534349 - DNA, 25 bp, Homo sapien
ggtggtaattaagttgcactcagga

SEQ ID NO: 3534350 - DNA, 25 bp, Homo sapien
atggtggtaattaagttgcactcag

SEQ ID NO: 3534351 - DNA, 25 bp, Homo sapien
taattaagttgcactcaggagcttt

SEQ ID NO: 3534352 - DNA, 25 bp, Homo sapien
ggtaattaagttgcactcaggagct

SEQ ID NO: 3534353 - DNA, 25 bp, Homo sapien
ttcttcccaatccaactgtaacttc

SEQ ID NO: 3534354 - DNA, 25 bp, Homo sapien
actgtaacttctggatggcagtagc

SEQ ID NO: 3534355 - DNA, 25 bp, Homo sapien
aatccaactgtaacttctggatggc

SEQ ID NO: 3534356 - DNA, 25 bp, Homo sapien
tggatggcagtagccccctgctgtc

SEQ ID NO: 3534357 - DNA, 25 bp, Homo sapien
cctgcatatggggagacatttatca

SEQ ID NO: 3534358 - DNA, 25 bp, Homo sapien
gacatttatcactcatgagcagctg

SEQ ID NO: 3534359 - DNA, 25 bp, Homo sapien
agctgcaagggcagcctgcatatgg

SEQ ID NO: 3534360 - DNA, 25 bp, Homo sapien
agcagctgggtcatggcagtggccc

SEQ ID NO: 3534361 - DNA, 25 bp, Homo sapien
tgcggcccaggccatctaacatggt

SEQ ID NO: 3534362 - DNA, 25 bp, Homo sapien
agtgtttctttgctcagctccacgg

SEQ ID NO: 3534363 - DNA, 25 bp, Homo sapien
tgtctccgcataggctgggatcttc

SEQ ID NO: 3534364 - DNA, 25 bp, Homo sapien
tgagatggagggtttgtctccgcat

SEQ ID NO: 3534365 - DNA, 25 bp, Homo sapien
cggccatgcggctgatgctgtctga

SEQ ID NO: 3534366 - DNA, 25 bp, Homo sapien
tctgaggaggttttgatatccactc

SEQ ID NO: 3534367 - DNA, 25 bp, Homo sapien
tctccagtccagatcgaccaggcgt

SEQ ID NO: 3534368 - DNA, 25 bp, Homo sapien
ccagatcgaccaggcgtggcagaga

SEQ ID NO: 3534369 - DNA, 25 bp, Homo sapien
cattggtctatgcagcaagtctctg

SEQ ID NO: 3534370 - DNA, 25 bp, Homo sapien
tcatgccgcccgtgtttaccaagca

SEQ ID NO: 3534371 - DNA, 25 bp, Homo sapien
tattgtacgacaggcggctctgagg

SEQ ID NO: 3534372 - DNA, 25 bp, Homo sapien
agacagataaacaaagcccgagacc

SEQ ID NO: 3534373 - DNA, 25 bp, Homo sapien
gatttgcctgggcttcggttctcca

SEQ ID NO: 3534374 - DNA, 25 bp, Homo sapien
tctgatttgcctgggcttcggttct

SEQ ID NO: 3534375 - DNA, 25 bp, Homo sapien
ctgggcttcggttctccaagtagac

SEQ ID NO: 3534376 - DNA, 25 bp, Homo sapien
ttgcctgggcttcggttctccaagt

SEQ ID NO: 3534377 - DNA, 25 bp, Homo sapien
caccagcctagtgaggcggtgcaga

SEQ ID NO: 3534378 - DNA, 25 bp, Homo sapien
gaaagagagccagaattgcctcggc

SEQ ID NO: 3534379 - DNA, 25 bp, Homo sapien
ggacaggtcacggaatgccaccagc

SEQ ID NO: 3534380 - DNA, 25 bp, Homo sapien
agccagaattgcctcggcagaggac

SEQ ID NO: 3534381 - DNA, 25 bp, Homo sapien
tgcaagataaacggaaccacctgta

SEQ ID NO: 3534382 - DNA, 25 bp, Homo sapien
gcaagataaacggaaccacctgtag

SEQ ID NO: 3534383 - DNA, 25 bp, Homo sapien
ctgcaagataaacggaaccacctgt

SEQ ID NO: 3534384 - DNA, 25 bp, Homo sapien
ctttagaagacagatgcagctccct

SEQ ID NO: 3534385 - DNA, 25 bp, Homo sapien
tgctttagaagacagatgcagctcc

SEQ ID NO: 3534386 - DNA, 25 bp, Homo sapien
tagaagacagatgcagctccctgac

SEQ ID NO: 3534387 - DNA, 25 bp, Homo sapien
gttgctttagaagacagatgcagct

SEQ ID NO: 3534388 - DNA, 25 bp, Homo sapien
taagcaacactgcattggtccaagg

SEQ ID NO: 3534389 - DNA, 25 bp, Homo sapien
tatgtgtggctacaggctcctttcg

SEQ ID NO: 3534390 - DNA, 25 bp, Homo sapien
ccctggtaacctgagagcagtgcaa

SEQ ID NO: 3534391 - DNA, 25 bp, Homo sapien
tccaaggctctggactgagaggact

SEQ ID NO: 3534392 - DNA, 25 bp, Homo sapien
gaaccgtgacacaagataccggctc

SEQ ID NO: 3534393 - DNA, 25 bp, Homo sapien
ctgaaccgtgacacaagataccggc

SEQ ID NO: 3534394 - DNA, 25 bp, Homo sapien
tgaaccgtgacacaagataccggct

SEQ ID NO: 3534395 - DNA, 25 bp, Homo sapien
gggtcttgaatccagggtggtagga

SEQ ID NO: 3534396 - DNA, 25 bp, Homo sapien
gagtgagggtcttgaatccagggtg

SEQ ID NO: 3534397 - DNA, 25 bp, Homo sapien
ctgtggagtgagggtcttgaatcca

SEQ ID NO: 3534398 - DNA, 25 bp, Homo sapien
gggtggtaggattcatgtcctttcc

SEQ ID NO: 3534399 - DNA, 25 bp, Homo sapien
gttaccttaatctccctcttggcta

SEQ ID NO: 3534400 - DNA, 25 bp, Homo sapien
agttaccttaatctccctcttggct

SEQ ID NO: 3534401 - DNA, 25 bp, Homo sapien
ttaccttaatctccctcttggctac

SEQ ID NO: 3534402 - DNA, 25 bp, Homo sapien
ggtgagctgaggagaaggggacctt

SEQ ID NO: 3534403 - DNA, 25 bp, Homo sapien
tcaggtgagctgaggagaaggggac

SEQ ID NO: 3534404 - DNA, 25 bp, Homo sapien
ctgagatcaggtgagctgaggagaa

SEQ ID NO: 3534405 - DNA, 25 bp, Homo sapien
tgagatcaggtgagctgaggagaag

SEQ ID NO: 3534406 - DNA, 25 bp, Homo sapien
aaagctttcttgacacagctgtctg

SEQ ID NO: 3534407 - DNA, 25 bp, Homo sapien
acatgtaacatccaagagttttttc

SEQ ID NO: 3534408 - DNA, 25 bp, Homo sapien
tgtctgacaacatctttcgaggagg

SEQ ID NO: 3534409 - DNA, 25 bp, Homo sapien
gacaagctggaacatgtaacatcca

SEQ ID NO: 3534410 - DNA, 25 bp, Homo sapien
tgtattattccatttatacggcatt

SEQ ID NO: 3534411 - DNA, 25 bp, Homo sapien
acagagaacaagcagcagagttgtg

SEQ ID NO: 3534412 - DNA, 25 bp, Homo sapien
cagcagagttgtggctccaaaccag

SEQ ID NO: 3534413 - DNA, 25 bp, Homo sapien
aagacgcaacgatttgcctgggatc

SEQ ID NO: 3534414 - DNA, 25 bp, Homo sapien
agctcagaaagacgcaacgatttgc

SEQ ID NO: 3534415 - DNA, 25 bp, Homo sapien
aatgctccgctgtcagggcagccat

SEQ ID NO: 3534416 - DNA, 25 bp, Homo sapien
tctggagtgctgcaaaatgctccgc

SEQ ID NO: 3534417 - DNA, 25 bp, Homo sapien
caaaatgctccgctgtcagggcagc

SEQ ID NO: 3534418 - DNA, 25 bp, Homo sapien
tgctgcaaaatgctccgctgtcagg

SEQ ID NO: 3534419 - DNA, 25 bp, Homo sapien
acccagggaagcgaggtcacgtggc

SEQ ID NO: 3534420 - DNA, 25 bp, Homo sapien
tcacatgaccgtggcacccagggaa

SEQ ID NO: 3534421 - DNA, 25 bp, Homo sapien
tcacgtggctgtcgctgttgtcgcg

SEQ ID NO: 3534422 - DNA, 25 bp, Homo sapien
cttgccgaagtcacatgaccgtggc

SEQ ID NO: 3534423 - DNA, 25 bp, Homo sapien
tgcaagcttggcaggcgccttggaa

SEQ ID NO: 3534424 - DNA, 25 bp, Homo sapien
tttcccttgacccatgtgggtgggc

SEQ ID NO: 3534425 - DNA, 25 bp, Homo sapien
tgttcaggagtgatcggcgtaccag

SEQ ID NO: 3534426 - DNA, 25 bp, Homo sapien
ccttggaaacgtagttgttcaggag

SEQ ID NO: 3534427 - DNA, 25 bp, Homo sapien
cagaagcagctagtaacacaacagc

SEQ ID NO: 3534428 - DNA, 25 bp, Homo sapien
caatggccccgaatgacactttacc

SEQ ID NO: 3534429 - DNA, 25 bp, Homo sapien
gagcagccgctgtaacaatggcccc

SEQ ID NO: 3534430 - DNA, 25 bp, Homo sapien
gtccccaggagtaacacagaagcag

SEQ ID NO: 3534431 - DNA, 25 bp, Homo sapien
cattcagcaattgggatgtccagtc

SEQ ID NO: 3534432 - DNA, 25 bp, Homo sapien
tcatttcccacgttaagcttccatc

SEQ ID NO: 3534433 - DNA, 25 bp, Homo sapien
tctcctctggcttactgatgattct

SEQ ID NO: 3534434 - DNA, 25 bp, Homo sapien
cagtcccagggaatcagccagatct

SEQ ID NO: 3534435 - DNA, 25 bp, Homo sapien
ttgagcatcagaggcgtcaaggctc

SEQ ID NO: 3534436 - DNA, 25 bp, Homo sapien
agatgaagggcagaaccgaagccct

SEQ ID NO: 3534437 - DNA, 25 bp, Homo sapien
gatgaagggcagaaccgaagccctg

SEQ ID NO: 3534438 - DNA, 25 bp, Homo sapien
agccttgagtgatgtgacgtatgca

SEQ ID NO: 3534439 - DNA, 25 bp, Homo sapien
gatgtgacgtatgcacctgtctgtg

SEQ ID NO: 3534440 - DNA, 25 bp, Homo sapien
gaagcccttgatccttgggcctctt

SEQ ID NO: 3534441 - DNA, 25 bp, Homo sapien
cctgtctgtgtttcacaagaagccc

SEQ ID NO: 3534442 - DNA, 25 bp, Homo sapien
ttgaaatgagggacactgtggccca

SEQ ID NO: 3534443 - DNA, 25 bp, Homo sapien
gaaatgagggacactgtggcccagg

SEQ ID NO: 3534444 - DNA, 25 bp, Homo sapien
tggcccaggagggtcctcgcagcat

SEQ ID NO: 3534445 - DNA, 25 bp, Homo sapien
tgtggcccaggagggtcctcgcagc

SEQ ID NO: 3534446 - DNA, 25 bp, Homo sapien
ctcagttatataccaactctctggg

SEQ ID NO: 3534447 - DNA, 25 bp, Homo sapien
tcagttatataccaactctctgggg

SEQ ID NO: 3534448 - DNA, 25 bp, Homo sapien
cctcagttatataccaactctctgg

SEQ ID NO: 3534449 - DNA, 25 bp, Homo sapien
ttttgggctgttagctttgtagtaa

SEQ ID NO: 3534450 - DNA, 25 bp, Homo sapien
tcctttcatcagtgacacattagaa

SEQ ID NO: 3534451 - DNA, 25 bp, Homo sapien
aaaatctgaacttctttttgggctg

SEQ ID NO: 3534452 - DNA, 25 bp, Homo sapien
gctttgtagtaatttcctttcatca

SEQ ID NO: 3534453 - DNA, 25 bp, Homo sapien
tccttccaaccctgaaacttggtga

SEQ ID NO: 3534454 - DNA, 25 bp, Homo sapien
gccagttggtgttcgtttgggctca

SEQ ID NO: 3534455 - DNA, 25 bp, Homo sapien
agtcctgccagttggtgttcgtttg

SEQ ID NO: 3534456 - DNA, 25 bp, Homo sapien
ttggtgttcgtttgggctcattttc

SEQ ID NO: 3534457 - DNA, 25 bp, Homo sapien
gcttctagcatatgtcctctcaagg

SEQ ID NO: 3534458 - DNA, 25 bp, Homo sapien
aaattgtgtccctagaggttgggca

SEQ ID NO: 3534459 - DNA, 25 bp, Homo sapien
tcaaggctcatttgcccaggttagg

SEQ ID NO: 3534460 - DNA, 25 bp, Homo sapien
taggtcatgaatccactgcagaaag

SEQ ID NO: 3534461 - DNA, 25 bp, Homo sapien
tgcccatacagcatgcctgagaata

SEQ ID NO: 3534462 - DNA, 25 bp, Homo sapien
gcccatacagcatgcctgagaatac

SEQ ID NO: 3534463 - DNA, 25 bp, Homo sapien
ccatacagcatgcctgagaatacag

SEQ ID NO: 3534464 - DNA, 25 bp, Homo sapien
cccatacagcatgcctgagaataca

SEQ ID NO: 3534465 - DNA, 25 bp, Homo sapien
tccaaccagggtgccaaaggtagca

SEQ ID NO: 3534466 - DNA, 25 bp, Homo sapien
atcaacttgggttcatcgtctctgc

SEQ ID NO: 3534467 - DNA, 25 bp, Homo sapien
ggtagcagggttgagcatcaacttg

SEQ ID NO: 3534468 - DNA, 25 bp, Homo sapien
caaccagggtgccaaaggtagcagg

SEQ ID NO: 3534469 - DNA, 25 bp, Homo sapien
cattcaccccgcttgaaatgctttc

SEQ ID NO: 3534470 - DNA, 25 bp, Homo sapien
ccatgattctttcccgtaattgctg

SEQ ID NO: 3534471 - DNA, 25 bp, Homo sapien
gaaatgacttctgacgtggcactct

SEQ ID NO: 3534472 - DNA, 25 bp, Homo sapien
tgctttcttgcttgacatccaagct

SEQ ID NO: 3534473 - DNA, 25 bp, Homo sapien
ctaaatgactgcacccaacttcttc

SEQ ID NO: 3534474 - DNA, 25 bp, Homo sapien
tctcaacctctggtctctccctcct

SEQ ID NO: 3534475 - DNA, 25 bp, Homo sapien
tctctgagctctcaacctctggtct

SEQ ID NO: 3534476 - DNA, 25 bp, Homo sapien
gactgcacccaacttcttctctgag

SEQ ID NO: 3534477 - DNA, 25 bp, Homo sapien
tacagcacagttgctgccatccagt

SEQ ID NO: 3534478 - DNA, 25 bp, Homo sapien
tgtttctgtgtacagctttgatctc

SEQ ID NO: 3534479 - DNA, 25 bp, Homo sapien
ttctgtgtacagctttgatctcatc

SEQ ID NO: 3534480 - DNA, 25 bp, Homo sapien
catccagtgcacagctgtgtttctg

SEQ ID NO: 3534481 - DNA, 25 bp, Homo sapien
tcaatacagagaatggaatttgtgt

SEQ ID NO: 3534482 - DNA, 25 bp, Homo sapien
tacagagaatggaatttgtgtctct

SEQ ID NO: 3534483 - DNA, 25 bp, Homo sapien
ctctcaatacagagaatggaatttg

SEQ ID NO: 3534484 - DNA, 25 bp, Homo sapien
atacagagaatggaatttgtgtctc

SEQ ID NO: 3534485 - DNA, 25 bp, Homo sapien
ccctgtgctgcagagtccacaacat

SEQ ID NO: 3534486 - DNA, 25 bp, Homo sapien
ggcctttatgccaatatccacggtg

SEQ ID NO: 3534487 - DNA, 25 bp, Homo sapien
tgccaatatccacggtggtcgccca

SEQ ID NO: 3534488 - DNA, 25 bp, Homo sapien
gagtccacaacatgataaatggagc

SEQ ID NO: 3534489 - DNA, 25 bp, Homo sapien
gatgatcataggattccagaccaga

SEQ ID NO: 3534490 - DNA, 25 bp, Homo sapien
ggtacttcgatatgccaggtgctgt

SEQ ID NO: 3534491 - DNA, 25 bp, Homo sapien
tggacaagcctctagcatacatagt

SEQ ID NO: 3534492 - DNA, 25 bp, Homo sapien
ccagaccagagtgctttgagagtga

SEQ ID NO: 3534493 - DNA, 25 bp, Homo sapien
atgggacatgccgtcacagtaagca

SEQ ID NO: 3534494 - DNA, 25 bp, Homo sapien
tggagctcaatgggacatgccgtca

SEQ ID NO: 3534495 - DNA, 25 bp, Homo sapien
gggacatgccgtcacagtaagcaga

SEQ ID NO: 3534496 - DNA, 25 bp, Homo sapien
gagctcaatgggacatgccgtcaca

SEQ ID NO: 3534497 - DNA, 25 bp, Homo sapien
tgagagccagtgcttaatggctctg

SEQ ID NO: 3534498 - DNA, 25 bp, Homo sapien
gagaacaggagaaacgaagagacaa

SEQ ID NO: 3534499 - DNA, 25 bp, Homo sapien
gaccctttcatgcaaggtggaggtt

SEQ ID NO: 3534500 - DNA, 25 bp, Homo sapien
ggggaccctttcatgcaaggtggag

SEQ ID NO: 3534501 - DNA, 25 bp, Homo sapien
gggaccctttcatgcaaggtggagg

SEQ ID NO: 3534502 - DNA, 25 bp, Homo sapien
ggaccctttcatgcaaggtggaggt

SEQ ID NO: 3534503 - DNA, 25 bp, Homo sapien
ggcagtagggtgattattcattttt

SEQ ID NO: 3534504 - DNA, 25 bp, Homo sapien
attggcagtagggtgattattcatt

SEQ ID NO: 3534505 - DNA, 25 bp, Homo sapien
gggattggcagtagggtgattattc

SEQ ID NO: 3534506 - DNA, 25 bp, Homo sapien
gagaaaaagggtgggattggcagta

SEQ ID NO: 3534507 - DNA, 25 bp, Homo sapien
cgcctcttccgaccatgtgtttatc

SEQ ID NO: 3534508 - DNA, 25 bp, Homo sapien
ccgcctcttccgaccatgtgtttat

SEQ ID NO: 3534509 - DNA, 25 bp, Homo sapien
aaatgaatctcaggtgattgggtca

SEQ ID NO: 3534510 - DNA, 25 bp, Homo sapien
cagatgccttatgcaaattcaggag

SEQ ID NO: 3534511 - DNA, 25 bp, Homo sapien
cattccgtgaggctaagttcattca

SEQ ID NO: 3534512 - DNA, 25 bp, Homo sapien
tgttgtaagccataggcattccgtg

SEQ ID NO: 3534513 - DNA, 25 bp, Homo sapien
taatttccagtaggacgaacaggaa

SEQ ID NO: 3534514 - DNA, 25 bp, Homo sapien
aagaatgccaagaagcaatcggctg

SEQ ID NO: 3534515 - DNA, 25 bp, Homo sapien
acccctcccacaagaatgccaagaa

SEQ ID NO: 3534516 - DNA, 25 bp, Homo sapien
gaagcaatcggctgttaatttccag

SEQ ID NO: 3534517 - DNA, 25 bp, Homo sapien
ggcccattttccttgaggccgccgc

SEQ ID NO: 3534518 - DNA, 25 bp, Homo sapien
tgtgtgcttgctaactgtgcttcag

SEQ ID NO: 3534519 - DNA, 25 bp, Homo sapien
ctcgctgcacgcagggggcgctcta

SEQ ID NO: 3534520 - DNA, 25 bp, Homo sapien
caggaatccgctctgggatgccttc

SEQ ID NO: 3534521 - DNA, 25 bp, Homo sapien
tttgtttgtcagcagttaggcggtg

SEQ ID NO: 3534522 - DNA, 25 bp, Homo sapien
gagtatttatagacgccacggcagt

SEQ ID NO: 3534523 - DNA, 25 bp, Homo sapien
cagttaggcggtgagtatttataga

SEQ ID NO: 3534524 - DNA, 25 bp, Homo sapien
ggagcccgcgttttgtttgtcagca

SEQ ID NO: 3534525 - DNA, 25 bp, Homo sapien
caaggtttcaattactgcgatgcgc

SEQ ID NO: 3534526 - DNA, 25 bp, Homo sapien
tgcgccccacaagacgaaaggttca

SEQ ID NO: 3534527 - DNA, 25 bp, Homo sapien
gatgacccatgctaaggaccaaagg

SEQ ID NO: 3534528 - DNA, 25 bp, Homo sapien
gagacccgcgtggaaaaagctctgg

SEQ ID NO: 3534529 - DNA, 25 bp, Homo sapien
gattccaagcagctcggcaggctct

SEQ ID NO: 3534530 - DNA, 25 bp, Homo sapien
tctgcccgtcgagttccacaagatg

SEQ ID NO: 3534531 - DNA, 25 bp, Homo sapien
tctggtcctagaggtgaagctgaac

SEQ ID NO: 3534532 - DNA, 25 bp, Homo sapien
cgagggcattcggaaccttctggtc

SEQ ID NO: 3534533 - DNA, 25 bp, Homo sapien
gggctgccaagggccatggcaggga

SEQ ID NO: 3534534 - DNA, 25 bp, Homo sapien
agggctgccaagggccatggcaggg

SEQ ID NO: 3534535 - DNA, 25 bp, Homo sapien
cgggggctgactgagcttctgctga

SEQ ID NO: 3534536 - DNA, 25 bp, Homo sapien
ggggctgactgagcttctgctgatt

SEQ ID NO: 3534537 - DNA, 25 bp, Homo sapien
gggggctgactgagcttctgctgat

SEQ ID NO: 3534538 - DNA, 25 bp, Homo sapien
ccgggggctgactgagcttctgctg

SEQ ID NO: 3534539 - DNA, 25 bp, Homo sapien
gacagttgcactggaatttacggtc

SEQ ID NO: 3534540 - DNA, 25 bp, Homo sapien
cactggaatttacggtcactattca

SEQ ID NO: 3534541 - DNA, 25 bp, Homo sapien
cagttgcactggaatttacggtcac

SEQ ID NO: 3534542 - DNA, 25 bp, Homo sapien
gttgcactggaatttacggtcacta

SEQ ID NO: 3534543 - DNA, 25 bp, Homo sapien
ggctggcctgcgagaaattcttcca

SEQ ID NO: 3534544 - DNA, 25 bp, Homo sapien
agcctgtaaggctggcctgcgagaa

SEQ ID NO: 3534545 - DNA, 25 bp, Homo sapien
ccggtacacctcacacgagtggaca

SEQ ID NO: 3534546 - DNA, 25 bp, Homo sapien
acacgagtggacatgtgaggagcct

SEQ ID NO: 3534547 - DNA, 25 bp, Homo sapien
aagcttccctgtgaagacagtggct

SEQ ID NO: 3534548 - DNA, 25 bp, Homo sapien
caagcttccctgtgaagacagtggc

SEQ ID NO: 3534549 - DNA, 25 bp, Homo sapien
cctgtgaagacagtggctgtgaaag

SEQ ID NO: 3534550 - DNA, 25 bp, Homo sapien
gtgaagacagtggctgtgaaagaac

SEQ ID NO: 3534551 - DNA, 25 bp, Homo sapien
caggtccatgcagtttcctgcgatc

SEQ ID NO: 3534552 - DNA, 25 bp, Homo sapien
tcctgcgatcagatcccactggctg

SEQ ID NO: 3534553 - DNA, 25 bp, Homo sapien
catttggaatctcccaggtccatgc

SEQ ID NO: 3534554 - DNA, 25 bp, Homo sapien
tgccatttggaatctcccaggtcca

SEQ ID NO: 3534555 - DNA, 25 bp, Homo sapien
cagcagggccgccagcgaggtgagg

SEQ ID NO: 3534556 - DNA, 25 bp, Homo sapien
agggccgccagcgaggtgagggagg

SEQ ID NO: 3534557 - DNA, 25 bp, Homo sapien
ggccgccagcgaggtgagggaggaa

SEQ ID NO: 3534558 - DNA, 25 bp, Homo sapien
gcagggccgccagcgaggtgaggga

SEQ ID NO: 3534559 - DNA, 25 bp, Homo sapien
tgcttttgagtcctttcgcctttgg

SEQ ID NO: 3534560 - DNA, 25 bp, Homo sapien
ggctgcttttgagtcctttcgcctt

SEQ ID NO: 3534561 - DNA, 25 bp, Homo sapien
tgagtcctttcgcctttggtcttcc

SEQ ID NO: 3534562 - DNA, 25 bp, Homo sapien
ggcttgcaagaaagcgggggctgct

SEQ ID NO: 3534563 - DNA, 25 bp, Homo sapien
tctatgccctgaacgaaaacatcag

SEQ ID NO: 3534564 - DNA, 25 bp, Homo sapien
cttgcaaagcaacgagctctatgcc

SEQ ID NO: 3534565 - DNA, 25 bp, Homo sapien
tcagactgctgtgatcaacgttttc

SEQ ID NO: 3534566 - DNA, 25 bp, Homo sapien
acatcaggtatgtggcaggccagac

SEQ ID NO: 3534567 - DNA, 25 bp, Homo sapien
agttcgggctgattctgggagtctt

SEQ ID NO: 3534568 - DNA, 25 bp, Homo sapien
aggcatcccaatcaacaattctggc

SEQ ID NO: 3534569 - DNA, 25 bp, Homo sapien
ctcaatggggtgttagtgcggtttt

SEQ ID NO: 3534570 - DNA, 25 bp, Homo sapien
ttccatctgccagagttcgggctga

SEQ ID NO: 3534571 - DNA, 25 bp, Homo sapien
ttagtaagtgggctgcaagagccac

SEQ ID NO: 3534572 - DNA, 25 bp, Homo sapien
tagtaagtgggctgcaagagccaca

SEQ ID NO: 3534573 - DNA, 25 bp, Homo sapien
acacagagctggcattatccagatt

SEQ ID NO: 3534574 - DNA, 25 bp, Homo sapien
gccacacagagctggcattatccag

SEQ ID NO: 3534575 - DNA, 25 bp, Homo sapien
gattccagcttttagtaatgcctcc

SEQ ID NO: 3534576 - DNA, 25 bp, Homo sapien
tctctgtgtgcaaggcagactgact

SEQ ID NO: 3534577 - DNA, 25 bp, Homo sapien
catcgtctttaacctcatgtgggaa

SEQ ID NO: 3534578 - DNA, 25 bp, Homo sapien
gacaagcagcgggattttgccacct

SEQ ID NO: 3534579 - DNA, 25 bp, Homo sapien
ggaagttgagttgacaagacggtga

SEQ ID NO: 3534580 - DNA, 25 bp, Homo sapien
gacggtgaggcgtgagatcgcaggt

SEQ ID NO: 3534581 - DNA, 25 bp, Homo sapien
ttgagttgacaagacggtgaggcgt

SEQ ID NO: 3534582 - DNA, 25 bp, Homo sapien
tgacaagacggtgaggcgtgagatc

SEQ ID NO: 3534583 - DNA, 25 bp, Homo sapien
gctggagttttcaagacccagggct

SEQ ID NO: 3534584 - DNA, 25 bp, Homo sapien
tatacttgtaggaagatgcgagaag

SEQ ID NO: 3534585 - DNA, 25 bp, Homo sapien
ggaaatgctagtgtggctatacttg

SEQ ID NO: 3534586 - DNA, 25 bp, Homo sapien
tgggtcctcaatcccagtgtaggaa

SEQ ID NO: 3534587 - DNA, 25 bp, Homo sapien
tattacaccatcatagatccctcct

SEQ ID NO: 3534588 - DNA, 25 bp, Homo sapien
caggagtgtgtccatagttttttat

SEQ ID NO: 3534589 - DNA, 25 bp, Homo sapien
aattattacaccatcatagatccct

SEQ ID NO: 3534590 - DNA, 25 bp, Homo sapien
accatcatagatccctcctccgtgc

SEQ ID NO: 3534591 - DNA, 25 bp, Homo sapien
tcttcctgtttcaaagcctccgtcc

SEQ ID NO: 3534592 - DNA, 25 bp, Homo sapien
tgtttcaaagcctccgtccacttgg

SEQ ID NO: 3534593 - DNA, 25 bp, Homo sapien
aaagcctccgtccacttggggctgc

SEQ ID NO: 3534594 - DNA, 25 bp, Homo sapien
tcctgtttcaaagcctccgtccact

SEQ ID NO: 3534595 - DNA, 25 bp, Homo sapien
gcacgctttaactatggctgaaaca

SEQ ID NO: 3534596 - DNA, 25 bp, Homo sapien
ttttaaggccccaatgcacgcttta

SEQ ID NO: 3534597 - DNA, 25 bp, Homo sapien
ttgtttatctaggaaggcatccagg

SEQ ID NO: 3534598 - DNA, 25 bp, Homo sapien
tccaggttcacaggagatgtgcaca

SEQ ID NO: 3534599 - DNA, 25 bp, Homo sapien
gaaatggaatccactcgagtgccag

SEQ ID NO: 3534600 - DNA, 25 bp, Homo sapien
tggaaatggaatccactcgagtgcc

SEQ ID NO: 3534601 - DNA, 25 bp, Homo sapien
ccaggcactccccttgctagatgtt

SEQ ID NO: 3534602 - DNA, 25 bp, Homo sapien
tagatgttgaatgtggatagtcgag

SEQ ID NO: 3534603 - DNA, 25 bp, Homo sapien
tagaacacaagtgcctagaactctg

SEQ ID NO: 3534604 - DNA, 25 bp, Homo sapien
ctaagggcctctaggacactgggtg

SEQ ID NO: 3534605 - DNA, 25 bp, Homo sapien
taaactccgaggcacggctagaaca

SEQ ID NO: 3534606 - DNA, 25 bp, Homo sapien
cactgggtgtcaacaatagcgaatt

SEQ ID NO: 3534607 - DNA, 25 bp, Homo sapien
ctcttttggcagaaccagcttcttg

SEQ ID NO: 3534608 - DNA, 25 bp, Homo sapien
tctggagttgtccaaattcttatgt

SEQ ID NO: 3534609 - DNA, 25 bp, Homo sapien
tcttttggcagaaccagcttcttgc

SEQ ID NO: 3534610 - DNA, 25 bp, Homo sapien
cagcctaatgaaccgtagatcaaac

SEQ ID NO: 3534611 - DNA, 25 bp, Homo sapien
ctaatgaaccgtagatcaaacttac

SEQ ID NO: 3534612 - DNA, 25 bp, Homo sapien
tgctccagcctaatgaaccgtagat

SEQ ID NO: 3534613 - DNA, 25 bp, Homo sapien
tctgctccagcctaatgaaccgtag

SEQ ID NO: 3534614 - DNA, 25 bp, Homo sapien
taggtgtcatgtcatcatccttttg

SEQ ID NO: 3534615 - DNA, 25 bp, Homo sapien
ttccagatccagacttattaggtgt

SEQ ID NO: 3534616 - DNA, 25 bp, Homo sapien
attccctgggaaagacacgagtgtg

SEQ ID NO: 3534617 - DNA, 25 bp, Homo sapien
cctgggaaagacacgagtgtgtcca

SEQ ID NO: 3534618 - DNA, 25 bp, Homo sapien
tctctgagtctcttctagtcttaga

SEQ ID NO: 3534619 - DNA, 25 bp, Homo sapien
tctgagtctcttctagtcttagagt

SEQ ID NO: 3534620 - DNA, 25 bp, Homo sapien
gacaggatgaacaaagttcatccaa

SEQ ID NO: 3534621 - DNA, 25 bp, Homo sapien
agaaatggggctagacaggatgaac

SEQ ID NO: 3534622 - DNA, 25 bp, Homo sapien
tctctgcgtgacaagccagcattca

SEQ ID NO: 3534623 - DNA, 25 bp, Homo sapien
agccagcattcacggctttcaggtg

SEQ ID NO: 3534624 - DNA, 25 bp, Homo sapien
tcaggatactgtagcttctctgcgt

SEQ ID NO: 3534625 - DNA, 25 bp, Homo sapien
gcattcacggctttcaggtgccagc

SEQ ID NO: 3534626 - DNA, 25 bp, Homo sapien
acaatggccttattatggcggtcgc

SEQ ID NO: 3534627 - DNA, 25 bp, Homo sapien
tggccttattatggcggtcgctccg

SEQ ID NO: 3534628 - DNA, 25 bp, Homo sapien
cttattatggcggtcgctccggtgg

SEQ ID NO: 3534629 - DNA, 25 bp, Homo sapien
ggtcacaatggccttattatggcgg

SEQ ID NO: 3534630 - DNA, 25 bp, Homo sapien
ccgaggacggccttatccaggcttt

SEQ ID NO: 3534631 - DNA, 25 bp, Homo sapien
tggctccggtgcaggggatgaatgc

SEQ ID NO: 3534632 - DNA, 25 bp, Homo sapien
gagctgctcttgctggctccggtgc

SEQ ID NO: 3534633 - DNA, 25 bp, Homo sapien
tgaatgccagtgttcagcagggctc

SEQ ID NO: 3534634 - DNA, 25 bp, Homo sapien
cccagtggggacacagctgacgcac

SEQ ID NO: 3534635 - DNA, 25 bp, Homo sapien
ctcccagtggggacacagctgacgc

SEQ ID NO: 3534636 - DNA, 25 bp, Homo sapien
tcccagtggggacacagctgacgca

SEQ ID NO: 3534637 - DNA, 25 bp, Homo sapien
ttgggaatgaaaacattccacccag

SEQ ID NO: 3534638 - DNA, 25 bp, Homo sapien
acagccttgcggtccctgtggtcct

SEQ ID NO: 3534639 - DNA, 25 bp, Homo sapien
gcgggaacttagcaaggaaacgctg

SEQ ID NO: 3534640 - DNA, 25 bp, Homo sapien
tgcccacacccaatcttgggaatga

SEQ ID NO: 3534641 - DNA, 25 bp, Homo sapien
aggtacacaagtgtgctgggctcaa

SEQ ID NO: 3534642 - DNA, 25 bp, Homo sapien
tgggctcaagcccctgttgggggcc

SEQ ID NO: 3534643 - DNA, 25 bp, Homo sapien
gtacacaagtgtgctgggctcaagc

SEQ ID NO: 3534644 - DNA, 25 bp, Homo sapien
atgcatggaggtacacaagtgtgct

SEQ ID NO: 3534645 - DNA, 25 bp, Homo sapien
tcatttcctacaaagatgctgcatg

SEQ ID NO: 3534646 - DNA, 25 bp, Homo sapien
tgggacctgcggaaatcatctgacg

SEQ ID NO: 3534647 - DNA, 25 bp, Homo sapien
tgtgtctgccaagcaagttgatttc

SEQ ID NO: 3534648 - DNA, 25 bp, Homo sapien
cagcattttgcatgtacaggtagta

SEQ ID NO: 3534649 - DNA, 25 bp, Homo sapien
ggctccagcccattctgccacactt

SEQ ID NO: 3534650 - DNA, 25 bp, Homo sapien
tttcctcgctgctggcctcgctggc

SEQ ID NO: 3534651 - DNA, 25 bp, Homo sapien
cacacttctgcccaaggaagcttcc

SEQ ID NO: 3534652 - DNA, 25 bp, Homo sapien
tccctggctttcctcgctgctggcc

SEQ ID NO: 3534653 - DNA, 25 bp, Homo sapien
ataaccgcagtcagccggccactga

SEQ ID NO: 3534654 - DNA, 25 bp, Homo sapien
tccccaataacagtctttgctgatt

SEQ ID NO: 3534655 - DNA, 25 bp, Homo sapien
gtcctgaactatgcctccccgataa

SEQ ID NO: 3534656 - DNA, 25 bp, Homo sapien
gcactccagggtccggcccaaggtg

SEQ ID NO: 3534657 - DNA, 25 bp, Homo sapien
tgacagagcaggagggggaagccta

SEQ ID NO: 3534658 - DNA, 25 bp, Homo sapien
gacagagcaggagggggaagcctac

SEQ ID NO: 3534659 - DNA, 25 bp, Homo sapien
ctgacagagcaggagggggaagcct

SEQ ID NO: 3534660 - DNA, 25 bp, Homo sapien
catggccaccatgatgcactcgggc

SEQ ID NO: 3534661 - DNA, 25 bp, Homo sapien
ccaatgcccactcggacatccagct

SEQ ID NO: 3534662 - DNA, 25 bp, Homo sapien
ggcggcacacggtggccaatgccca

SEQ ID NO: 3534663 - DNA, 25 bp, Homo sapien
agaagtgtggcagcgtgcggcggca

SEQ ID NO: 3534664 - DNA, 25 bp, Homo sapien
gcagtgagaacaagtgcctgctcct

SEQ ID NO: 3534665 - DNA, 25 bp, Homo sapien
cagtgagaacaagtgcctgctcctg

SEQ ID NO: 3534666 - DNA, 25 bp, Homo sapien
aggccagcagtgagaacaagtgcct

SEQ ID NO: 3534667 - DNA, 25 bp, Homo sapien
ctgttttgcaaccaggatgaggacc

SEQ ID NO: 3534668 - DNA, 25 bp, Homo sapien
ggctcggagctgaactgtgcttccc

SEQ ID NO: 3534669 - DNA, 25 bp, Homo sapien
ctgacaaccctgacggactggagga

SEQ ID NO: 3534670 - DNA, 25 bp, Homo sapien
ggcagtgctccagtgagcccaacat

SEQ ID NO: 3534671 - DNA, 25 bp, Homo sapien
ccaattgtagtgaccagttgcctaa

SEQ ID NO: 3534672 - DNA, 25 bp, Homo sapien
gtgaaaatagcctgaagcccctact

SEQ ID NO: 3534673 - DNA, 25 bp, Homo sapien
cagggctctgggaatgtgccttcct

SEQ ID NO: 3534674 - DNA, 25 bp, Homo sapien
tccgatgttggactgcctgatgctc

SEQ ID NO: 3534675 - DNA, 25 bp, Homo sapien
ttggcttttgacccaggagggccgc

SEQ ID NO: 3534676 - DNA, 25 bp, Homo sapien
ctttcattgagccttagcatttccc

SEQ ID NO: 3534677 - DNA, 25 bp, Homo sapien
gctgccctgtctttcattgagcctt

SEQ ID NO: 3534678 - DNA, 25 bp, Homo sapien
ttttgacccaggagggccgcgaggc

SEQ ID NO: 3534679 - DNA, 25 bp, Homo sapien
tctcatttcagaaacggactttctc

SEQ ID NO: 3534680 - DNA, 25 bp, Homo sapien
tctctcatttcagaaacggactttc

SEQ ID NO: 3534681 - DNA, 25 bp, Homo sapien
ctctcatttcagaaacggactttct

SEQ ID NO: 3534682 - DNA, 25 bp, Homo sapien
ctctctcatttcagaaacggacttt

SEQ ID NO: 3534683 - DNA, 25 bp, Homo sapien
gaaaggccagccatgggatgtactg

SEQ ID NO: 3534684 - DNA, 25 bp, Homo sapien
tcagctggactgaagatttctgtgg

SEQ ID NO: 3534685 - DNA, 25 bp, Homo sapien
ccagccatgggatgtactgtggagc

SEQ ID NO: 3534686 - DNA, 25 bp, Homo sapien
gtctccatccctcctcagctggact

SEQ ID NO: 3534687 - DNA, 25 bp, Homo sapien
ccactgccatcagtcagatcctttc

SEQ ID NO: 3534688 - DNA, 25 bp, Homo sapien
tgacagttgggacagaagatttcca

SEQ ID NO: 3534689 - DNA, 25 bp, Homo sapien
taggtgatctcaggtgttcatccac

SEQ ID NO: 3534690 - DNA, 25 bp, Homo sapien
gaagtttaacattgtgaggcctggg

SEQ ID NO: 3534691 - DNA, 25 bp, Homo sapien
tctaattcgaagctgatttggcggc

SEQ ID NO: 3534692 - DNA, 25 bp, Homo sapien
tatttgagtgtgtgcaacgtgccag

SEQ ID NO: 3534693 - DNA, 25 bp, Homo sapien
cagttgtattgacctgatggaggcc

SEQ ID NO: 3534694 - DNA, 25 bp, Homo sapien
tgggacagcacctaccttcagagct

SEQ ID NO: 3534695 - DNA, 25 bp, Homo sapien
caacttccccatcttaaaggcaggg

SEQ ID NO: 3534696 - DNA, 25 bp, Homo sapien
gaacagcagcagtgtaggtttccct

SEQ ID NO: 3534697 - DNA, 25 bp, Homo sapien
tactaatggtggcacgggaaacaag

SEQ ID NO: 3534698 - DNA, 25 bp, Homo sapien
ttctcaggcgctggttggaaggcac

SEQ ID NO: 3534699 - DNA, 25 bp, Homo sapien
caaaggcttgtatacccaactgagt

SEQ ID NO: 3534700 - DNA, 25 bp, Homo sapien
tgatctagaacgctggctggcgact

SEQ ID NO: 3534701 - DNA, 25 bp, Homo sapien
gaacctgcagttgttaggctacagc

SEQ ID NO: 3534702 - DNA, 25 bp, Homo sapien
cttatactagttgcgggtctccctg

SEQ ID NO: 3534703 - DNA, 25 bp, Homo sapien
taactcttctcgagggcactagcac

SEQ ID NO: 3534704 - DNA, 25 bp, Homo sapien
gatattacatatttcccgtggcttg

SEQ ID NO: 3534705 - DNA, 25 bp, Homo sapien
gattcccaggaaaaaactgcctcag

SEQ ID NO: 3534706 - DNA, 25 bp, Homo sapien
taactggcaaaatagctgctgcaac

SEQ ID NO: 3534707 - DNA, 25 bp, Homo sapien
aaagcatggaacgtgtggattccca

SEQ ID NO: 3534708 - DNA, 25 bp, Homo sapien
tgcacagtttgtacccgggtttgcc

SEQ ID NO: 3534709 - DNA, 25 bp, Homo sapien
cccgggtttgccagtgtagaatcca

SEQ ID NO: 3534710 - DNA, 25 bp, Homo sapien
ttgtacccgggtttgccagtgtaga

SEQ ID NO: 3534711 - DNA, 25 bp, Homo sapien
ctcccggatttgatggtcttgtctt

SEQ ID NO: 3534712 - DNA, 25 bp, Homo sapien
ttccggacctctgagatatacccag

SEQ ID NO: 3534713 - DNA, 25 bp, Homo sapien
gctcaaactatgaacagcctgggcc

SEQ ID NO: 3534714 - DNA, 25 bp, Homo sapien
ctgagatatacccagagtcgggtat

SEQ ID NO: 3534715 - DNA, 25 bp, Homo sapien
ctggaaattccggacctctgagata

SEQ ID NO: 3534716 - DNA, 25 bp, Homo sapien
gttctcttgtaggtggcgtgccaag

SEQ ID NO: 3534717 - DNA, 25 bp, Homo sapien
tgtaggtggcgtgccaagtgattcc

SEQ ID NO: 3534718 - DNA, 25 bp, Homo sapien
cttgtaggtggcgtgccaagtgatt

SEQ ID NO: 3534719 - DNA, 25 bp, Homo sapien
tctcttgtaggtggcgtgccaagtg

SEQ ID NO: 3534720 - DNA, 25 bp, Homo sapien
taaatgttacctgacctgttgcgac

SEQ ID NO: 3534721 - DNA, 25 bp, Homo sapien
gttgcgacaccccagagattttact

SEQ ID NO: 3534722 - DNA, 25 bp, Homo sapien
gccttaggctgggaatagataccgt

SEQ ID NO: 3534723 - DNA, 25 bp, Homo sapien
cagattcttgatccaatgaggcgac

SEQ ID NO: 3534724 - DNA, 25 bp, Homo sapien
gcaaccaaaagtactgaatgtgcat

SEQ ID NO: 3534725 - DNA, 25 bp, Homo sapien
ggctgtagggcagtctagatcataa

SEQ ID NO: 3534726 - DNA, 25 bp, Homo sapien
cagtctagatcataatgattaggca

SEQ ID NO: 3534727 - DNA, 25 bp, Homo sapien
ggcaaccaaaagtactgaatgtgca

SEQ ID NO: 3534728 - DNA, 25 bp, Homo sapien
tctgatgagtatagtattgcagtat

SEQ ID NO: 3534729 - DNA, 25 bp, Homo sapien
ctgatgagtatagtattgcagtatt

SEQ ID NO: 3534730 - DNA, 25 bp, Homo sapien
tggacatcatctgccgaggctatac

SEQ ID NO: 3534731 - DNA, 25 bp, Homo sapien
ccttttatcctgaggtggtacacct

SEQ ID NO: 3534732 - DNA, 25 bp, Homo sapien
cagtttctcatatgccccagaaggg

SEQ ID NO: 3534733 - DNA, 25 bp, Homo sapien
tctttaaaagagcagggtagtatat

SEQ ID NO: 3534734 - DNA, 25 bp, Homo sapien
tatctactgctaaccccctcaagta

SEQ ID NO: 3534735 - DNA, 25 bp, Homo sapien
ttatctactgctaaccccctcaagt

SEQ ID NO: 3534736 - DNA, 25 bp, Homo sapien
tactgctaaccccctcaagtacaca

SEQ ID NO: 3534737 - DNA, 25 bp, Homo sapien
tgctaaccccctcaagtacacattt

SEQ ID NO: 3534738 - DNA, 25 bp, Homo sapien
tcaaatgccattgatgcagcacagt

SEQ ID NO: 3534739 - DNA, 25 bp, Homo sapien
caaatgccattgatgcagcacagtt

SEQ ID NO: 3534740 - DNA, 25 bp, Homo sapien
aaatgccattgatgcagcacagttg

SEQ ID NO: 3534741 - DNA, 25 bp, Homo sapien
caatccataagagcaaactcacaat

SEQ ID NO: 3534742 - DNA, 25 bp, Homo sapien
tcaactggacatttgtgacctgcat

SEQ ID NO: 3534743 - DNA, 25 bp, Homo sapien
ttcattgtcaactggacatttgtga

SEQ ID NO: 3534744 - DNA, 25 bp, Homo sapien
tgtcaactggacatttgtgacctgc

SEQ ID NO: 3534745 - DNA, 25 bp, Homo sapien
cattgtcaactggacatttgtgacc

SEQ ID NO: 3534746 - DNA, 25 bp, Homo sapien
atcatcttttgttacagcgctacag

SEQ ID NO: 3534747 - DNA, 25 bp, Homo sapien
tcatcttttgttacagcgctacagg

SEQ ID NO: 3534748 - DNA, 25 bp, Homo sapien
gactggctggatccacagctgtttt

SEQ ID NO: 3534749 - DNA, 25 bp, Homo sapien
tggatccacagctgttttcacagtt

SEQ ID NO: 3534750 - DNA, 25 bp, Homo sapien
ggccacacagcagtcactttcagac

SEQ ID NO: 3534751 - DNA, 25 bp, Homo sapien
agtcactttcagactggctggatcc

SEQ ID NO: 3534752 - DNA, 25 bp, Homo sapien
tttgtgcaaatcacttggagcacac

SEQ ID NO: 3534753 - DNA, 25 bp, Homo sapien
ttgtgcaaatcacttggagcacaca

SEQ ID NO: 3534754 - DNA, 25 bp, Homo sapien
tgtgcaaatcacttggagcacacaa

SEQ ID NO: 3534755 - DNA, 25 bp, Homo sapien
gtgcaaatcacttggagcacacaaa

SEQ ID NO: 3534756 - DNA, 25 bp, Homo sapien
ttgctccaaggagcggacaactgca

SEQ ID NO: 3534757 - DNA, 25 bp, Homo sapien
cggacaactgcaggaggcaatttcc

SEQ ID NO: 3534758 - DNA, 25 bp, Homo sapien
gtttgctccaaggagcggacaactg

SEQ ID NO: 3534759 - DNA, 25 bp, Homo sapien
gagcggacaactgcaggaggcaatt

SEQ ID NO: 3534760 - DNA, 25 bp, Homo sapien
gcgaggttgagtaaggcgacgcggg

SEQ ID NO: 3534761 - DNA, 25 bp, Homo sapien
gggagcgaggttgagtaaggcgacg

SEQ ID NO: 3534762 - DNA, 25 bp, Homo sapien
gaaaaagcggagttgaggggagcga

SEQ ID NO: 3534763 - DNA, 25 bp, Homo sapien
tagggggtggaatgagcgaggaaga

SEQ ID NO: 3534764 - DNA, 25 bp, Homo sapien
agcgtggggacagaggctgcgtccc

SEQ ID NO: 3534765 - DNA, 25 bp, Homo sapien
tgtgggaagcgtggggacagaggct

SEQ ID NO: 3534766 - DNA, 25 bp, Homo sapien
ctgtgggaagcgtggggacagaggc

SEQ ID NO: 3534767 - DNA, 25 bp, Homo sapien
gtggggacagaggctgcgtcccgac

SEQ ID NO: 3534768 - DNA, 25 bp, Homo sapien
gcagggaacggtgtcctcgaccagc

SEQ ID NO: 3534769 - DNA, 25 bp, Homo sapien
acggtgtcctcgaccagcgggaagc

SEQ ID NO: 3534770 - DNA, 25 bp, Homo sapien
tgtcctcgaccagcgggaagcgaga

SEQ ID NO: 3534771 - DNA, 25 bp, Homo sapien
gaacggtgtcctcgaccagcgggaa

SEQ ID NO: 3534772 - DNA, 25 bp, Homo sapien
tgtgaaaagcgaagggacaggggag

SEQ ID NO: 3534773 - DNA, 25 bp, Homo sapien
aggcgtccccgactggtgggaagcg

SEQ ID NO: 3534774 - DNA, 25 bp, Homo sapien
ggcgtccccgactggtgggaagcga

SEQ ID NO: 3534775 - DNA, 25 bp, Homo sapien
ctgtgaaaagcgaagggacagggga

SEQ ID NO: 3534776 - DNA, 25 bp, Homo sapien
gtccctgaccgctgggaagcgaggc

SEQ ID NO: 3534777 - DNA, 25 bp, Homo sapien
ctgaccgctgggaagcgaggcggcg

SEQ ID NO: 3534778 - DNA, 25 bp, Homo sapien
gcgtccctgaccgctgggaagcgag

SEQ ID NO: 3534779 - DNA, 25 bp, Homo sapien
tccctgaccgctgggaagcgaggcg

SEQ ID NO: 3534780 - DNA, 25 bp, Homo sapien
ttctagtgcgcggggaggccgaacc

SEQ ID NO: 3534781 - DNA, 25 bp, Homo sapien
ctagtgcgcggggaggccgaaccag

SEQ ID NO: 3534782 - DNA, 25 bp, Homo sapien
tctagtgcgcggggaggccgaacca

SEQ ID NO: 3534783 - DNA, 25 bp, Homo sapien
cgttctagtgcgcggggaggccgaa

SEQ ID NO: 3534784 - DNA, 25 bp, Homo sapien
aggcgctggtagaggacggacacag

SEQ ID NO: 3534785 - DNA, 25 bp, Homo sapien
cggacacagacactgcgcgccgaga

SEQ ID NO: 3534786 - DNA, 25 bp, Homo sapien
tccgctcagccaaggcgctggtaga

SEQ ID NO: 3534787 - DNA, 25 bp, Homo sapien
aggctgcttggacggcaaactctgg

SEQ ID NO: 3534788 - DNA, 25 bp, Homo sapien
agggagtcagcccttgccttaaata

SEQ ID NO: 3534789 - DNA, 25 bp, Homo sapien
gaacaccagcgctttgtctttctct

SEQ ID NO: 3534790 - DNA, 25 bp, Homo sapien
ttcatccggtccaagggagtcagcc

SEQ ID NO: 3534791 - DNA, 25 bp, Homo sapien
ggtccaagggagtcagcccttgcct

SEQ ID NO: 3534792 - DNA, 25 bp, Homo sapien
gattccacaaggtgtgagaaaagag

SEQ ID NO: 3534793 - DNA, 25 bp, Homo sapien
cagacatgagtatttaggagtcccc

SEQ ID NO: 3534794 - DNA, 25 bp, Homo sapien
acatgatatgatggtctgttgtttt

SEQ ID NO: 3534795 - DNA, 25 bp, Homo sapien
tccggtttccacatgacatgatatg

SEQ ID NO: 3534796 - DNA, 25 bp, Homo sapien
cctgtaccccacacggctttactgc

SEQ ID NO: 3534797 - DNA, 25 bp, Homo sapien
tgatgccctgtaccccacacggctt

SEQ ID NO: 3534798 - DNA, 25 bp, Homo sapien
ctctgatgccctgtaccccacacgg

SEQ ID NO: 3534799 - DNA, 25 bp, Homo sapien
ccacacggctttactgcctctgctg

SEQ ID NO: 3534800 - DNA, 25 bp, Homo sapien
agttagaagtgcagcttgggcacag

SEQ ID NO: 3534801 - DNA, 25 bp, Homo sapien
cctgctcttgactgagttagaagtg

SEQ ID NO: 3534802 - DNA, 25 bp, Homo sapien
ctgagttagaagtgcagcttgggca

SEQ ID NO: 3534803 - DNA, 25 bp, Homo sapien
tcttgactgagttagaagtgcagct

SEQ ID NO: 3534804 - DNA, 25 bp, Homo sapien
ctcttgtttggcctctctcttccat

SEQ ID NO: 3534805 - DNA, 25 bp, Homo sapien
cagcctctctcttgtttggcctctc

SEQ ID NO: 3534806 - DNA, 25 bp, Homo sapien
gcctctctcttgtttggcctctctc

SEQ ID NO: 3534807 - DNA, 25 bp, Homo sapien
ctctcttgtttggcctctctcttcc

SEQ ID NO: 3534808 - DNA, 25 bp, Homo sapien
ggcactccctagtgacaggaacccg

SEQ ID NO: 3534809 - DNA, 25 bp, Homo sapien
tcttaagccggtctgaaaagcgcaa

SEQ ID NO: 3534810 - DNA, 25 bp, Homo sapien
ctagtgacaggaacccggtacctca

SEQ ID NO: 3534811 - DNA, 25 bp, Homo sapien
cggtgcgcgcacacactggcctgcg

SEQ ID NO: 3534812 - DNA, 25 bp, Homo sapien
cagtcctggacaaggctgatggtca

SEQ ID NO: 3534813 - DNA, 25 bp, Homo sapien
tgatggtcagaagccagtcccaact

SEQ ID NO: 3534814 - DNA, 25 bp, Homo sapien
gaaatttaagctgttccgggtgaga

SEQ ID NO: 3534815 - DNA, 25 bp, Homo sapien
ttctcaggtacctcagccagcatgg

SEQ ID NO: 3534816 - DNA, 25 bp, Homo sapien
ttcaggtaccaggatgcaatggatt

SEQ ID NO: 3534817 - DNA, 25 bp, Homo sapien
attcaggtaccaggatgcaatggat

SEQ ID NO: 3534818 - DNA, 25 bp, Homo sapien
ttatggttattgtcagcaattttat

SEQ ID NO: 3534819 - DNA, 25 bp, Homo sapien
aatattatggttattgtcagcaatt

SEQ ID NO: 3534820 - DNA, 25 bp, Homo sapien
gtactccagcgtttcatctcttgca

SEQ ID NO: 3534821 - DNA, 25 bp, Homo sapien
tttataatattcactggcagcaatc

SEQ ID NO: 3534822 - DNA, 25 bp, Homo sapien
ggcagcaatctccacatgttaacta

SEQ ID NO: 3534823 - DNA, 25 bp, Homo sapien
tagtttcatcctagcgagtgtctaa

SEQ ID NO: 3534824 - DNA, 25 bp, Homo sapien
catctgtaaagctatgagaaactaa

SEQ ID NO: 3534825 - DNA, 25 bp, Homo sapien
aactaacttgttcatgggcataatc

SEQ ID NO: 3534826 - DNA, 25 bp, Homo sapien
taagttttggccaactgccgaattg

SEQ ID NO: 3534827 - DNA, 25 bp, Homo sapien
cactaatgtgggatgtagtagatct

SEQ ID NO: 3534828 - DNA, 25 bp, Homo sapien
catacctcgatgattattactgctt

SEQ ID NO: 3534829 - DNA, 25 bp, Homo sapien
tctttattggctaaatttgtcataa

SEQ ID NO: 3534830 - DNA, 25 bp, Homo sapien
aaatcagatcagaaatcctcagtga

SEQ ID NO: 3534831 - DNA, 25 bp, Homo sapien
gttatttgttaccaagacttatata

SEQ ID NO: 3534832 - DNA, 25 bp, Homo sapien
tttctggcccttaattcatgtaact

SEQ ID NO: 3534833 - DNA, 25 bp, Homo sapien
cacttttttctggcccttaattcat

SEQ ID NO: 3534834 - DNA, 25 bp, Homo sapien
aaaattccatacacctgaatctgaa

SEQ ID NO: 3534835 - DNA, 25 bp, Homo sapien
gattcaaaaattccatacacctgaa

SEQ ID NO: 3534836 - DNA, 25 bp, Homo sapien
tagaaggcatgtatgagcgtcctcc

SEQ ID NO: 3534837 - DNA, 25 bp, Homo sapien
tgcccatccccatgagagcagtaga

SEQ ID NO: 3534838 - DNA, 25 bp, Homo sapien
gctcagttgaatagaatggtaccca

SEQ ID NO: 3534839 - DNA, 25 bp, Homo sapien
ctctgtgcagcgaaaagtaaccttt

SEQ ID NO: 3534840 - DNA, 25 bp, Homo sapien
gtttctgatggtacgtagatttttg

SEQ ID NO: 3534841 - DNA, 25 bp, Homo sapien
tttctgatggtacgtagatttttgt

SEQ ID NO: 3534842 - DNA, 25 bp, Homo sapien
agtttctgatggtacgtagattttt

SEQ ID NO: 3534843 - DNA, 25 bp, Homo sapien
tgacccgataggaagcacaactgct

SEQ ID NO: 3534844 - DNA, 25 bp, Homo sapien
ccggagcggtgtcgggcaaaccgct

SEQ ID NO: 3534845 - DNA, 25 bp, Homo sapien
tcctggggacttttgaacaggtgac

SEQ ID NO: 3534846 - DNA, 25 bp, Homo sapien
ttctgttggagtgcggttacctgga

SEQ ID NO: 3534847 - DNA, 25 bp, Homo sapien
ttaacgagtgcactttgaaggtcct

SEQ ID NO: 3534848 - DNA, 25 bp, Homo sapien
ggttcctaaacacatcttcttttca

SEQ ID NO: 3534849 - DNA, 25 bp, Homo sapien
cagttattaggttttaacgagtgca

SEQ ID NO: 3534850 - DNA, 25 bp, Homo sapien
gagaaggttcctaaacacatcttct

SEQ ID NO: 3534851 - DNA, 25 bp, Homo sapien
gtgtttgcagtgtgatgtcctgtgc

SEQ ID NO: 3534852 - DNA, 25 bp, Homo sapien
tacactccgtgtttgcagtgtgatg

SEQ ID NO: 3534853 - DNA, 25 bp, Homo sapien
ggaatacactccgtgtttgcagtgt

SEQ ID NO: 3534854 - DNA, 25 bp, Homo sapien
actccgtgtttgcagtgtgatgtcc

SEQ ID NO: 3534855 - DNA, 25 bp, Homo sapien
gaataaacaggaacattgaaagtgt

SEQ ID NO: 3534856 - DNA, 25 bp, Homo sapien
gaaattttgctttatcaacttgaat

SEQ ID NO: 3534857 - DNA, 25 bp, Homo sapien
ataaacaggaacattgaaagtgttt

SEQ ID NO: 3534858 - DNA, 25 bp, Homo sapien
tttaaccagatgatgtatgcattta

SEQ ID NO: 3534859 - DNA, 25 bp, Homo sapien
cactgttaatcaggtttgaggcata

SEQ ID NO: 3534860 - DNA, 25 bp, Homo sapien
ggccagagaacgatttatgtacgaa

SEQ ID NO: 3534861 - DNA, 25 bp, Homo sapien
taaatcttgctgatccgtgctggcc

SEQ ID NO: 3534862 - DNA, 25 bp, Homo sapien
gattaataatagtgctctaaaggcc

SEQ ID NO: 3534863 - DNA, 25 bp, Homo sapien
tgctcacgcctctctgaatctttgc

SEQ ID NO: 3534864 - DNA, 25 bp, Homo sapien
caggtattaattgtcagcacttggg

SEQ ID NO: 3534865 - DNA, 25 bp, Homo sapien
tctttgccgctaaaccaggtattaa

SEQ ID NO: 3534866 - DNA, 25 bp, Homo sapien
cgcctctctgaatctttgccgctaa

SEQ ID NO: 3534867 - DNA, 25 bp, Homo sapien
gctgactgtaaagagagtgtgtatg

SEQ ID NO: 3534868 - DNA, 25 bp, Homo sapien
tgtggcaagcagaaggctgactgta

SEQ ID NO: 3534869 - DNA, 25 bp, Homo sapien
agtgtgtatgtgtgcctacagatgt

SEQ ID NO: 3534870 - DNA, 25 bp, Homo sapien
cagaaggctgactgtaaagagagtg

SEQ ID NO: 3534871 - DNA, 25 bp, Homo sapien
cacattcagcttttcttaaaagttc

SEQ ID NO: 3534872 - DNA, 25 bp, Homo sapien
ttcccacattcagcttttcttaaaa

SEQ ID NO: 3534873 - DNA, 25 bp, Homo sapien
attcttcccacattcagcttttctt

SEQ ID NO: 3534874 - DNA, 25 bp, Homo sapien
tcagcttttcttaaaagttcttcga

SEQ ID NO: 3534875 - DNA, 25 bp, Homo sapien
gcagtagattcttactgagcagaag

SEQ ID NO: 3534876 - DNA, 25 bp, Homo sapien
gtatagcagtagattcttactgagc

SEQ ID NO: 3534877 - DNA, 25 bp, Homo sapien
ttcttactgagcagaagattaccat

SEQ ID NO: 3534878 - DNA, 25 bp, Homo sapien
ttcagtatagcagtagattcttact

SEQ ID NO: 3534879 - DNA, 25 bp, Homo sapien
gaagttgacgtatcatcttggtccc

SEQ ID NO: 3534880 - DNA, 25 bp, Homo sapien
taaatttccatgagggtgcaaagag

SEQ ID NO: 3534881 - DNA, 25 bp, Homo sapien
tgaaaccggtgacagcacataaaac

SEQ ID NO: 3534882 - DNA, 25 bp, Homo sapien
aatccttgctgtgtagccttttgca

SEQ ID NO: 3534883 - DNA, 25 bp, Homo sapien
cagccaatgggtcaggtagataatg

SEQ ID NO: 3534884 - DNA, 25 bp, Homo sapien
cgtgggtccctcaccagatttgtac

SEQ ID NO: 3534885 - DNA, 25 bp, Homo sapien
cacatttgaactgacgtttgcgctg

SEQ ID NO: 3534886 - DNA, 25 bp, Homo sapien
gttttcatgtcgagaggcccaagcc

SEQ ID NO: 3534887 - DNA, 25 bp, Homo sapien
tccagagtccgctccaagttattgg

SEQ ID NO: 3534888 - DNA, 25 bp, Homo sapien
gaagtaggcagcatcatccagagtc

SEQ ID NO: 3534889 - DNA, 25 bp, Homo sapien
caagtcatgcttgttattaatcact

SEQ ID NO: 3534890 - DNA, 25 bp, Homo sapien
tgctgccatttgcagcagtcaagtc

SEQ ID NO: 3534891 - DNA, 25 bp, Homo sapien
catcagttgtctgtgatgcatccat

SEQ ID NO: 3534892 - DNA, 25 bp, Homo sapien
tctgcttctaattgtttttttgtcc

SEQ ID NO: 3534893 - DNA, 25 bp, Homo sapien
tgcttctgagaagtaaccaggtggt

SEQ ID NO: 3534894 - DNA, 25 bp, Homo sapien
taccacagacgatgaaagctggaga

SEQ ID NO: 3534895 - DNA, 25 bp, Homo sapien
ttttcagaaaatccgaggtggctgt

SEQ ID NO: 3534896 - DNA, 25 bp, Homo sapien
tcttgtggccagctgacagttaaca

SEQ ID NO: 3534897 - DNA, 25 bp, Homo sapien
ttttcagaagtcgaattggattgcc

SEQ ID NO: 3534898 - DNA, 25 bp, Homo sapien
gaaggctgggtctgtgtaacttggg

SEQ ID NO: 3534899 - DNA, 25 bp, Homo sapien
tgtcaggcaaggtggccgtttgagg

SEQ ID NO: 3534900 - DNA, 25 bp, Homo sapien
tgccaaacagcttgctcaactgcct

SEQ ID NO: 3534901 - DNA, 25 bp, Homo sapien
aaccaagctgaggttgtgggtctgt

SEQ ID NO: 3534902 - DNA, 25 bp, Homo sapien
ttttcagggttgtgattttgatcat

SEQ ID NO: 3534903 - DNA, 25 bp, Homo sapien
ccccataaaccaagctgaggttgtg

SEQ ID NO: 3534904 - DNA, 25 bp, Homo sapien
gctcatttttcagggttgtgatttt

SEQ ID NO: 3534905 - DNA, 25 bp, Homo sapien
aggaggacccgatgctgtggttaaa

SEQ ID NO: 3534906 - DNA, 25 bp, Homo sapien
tcattgtgatgccccgacaaggaca

SEQ ID NO: 3534907 - DNA, 25 bp, Homo sapien
aggacacccaggaggacccgatgct

SEQ ID NO: 3534908 - DNA, 25 bp, Homo sapien
tgctgtggttaaagcctcgtaaagg

SEQ ID NO: 3534909 - DNA, 25 bp, Homo sapien
ctggaatagaaaagcaagtaggagg

SEQ ID NO: 3534910 - DNA, 25 bp, Homo sapien
gaaaagcaagtaggaggggctccca

SEQ ID NO: 3534911 - DNA, 25 bp, Homo sapien
tggaatagaaaagcaagtaggaggg

SEQ ID NO: 3534912 - DNA, 25 bp, Homo sapien
agtaggaggggctcccagtgaaaag

SEQ ID NO: 3534913 - DNA, 25 bp, Homo sapien
tctgagtgattctcaaatgagatac

SEQ ID NO: 3534914 - DNA, 25 bp, Homo sapien
gaaatctgagtgattctcaaatgag

SEQ ID NO: 3534915 - DNA, 25 bp, Homo sapien
gcagaaatctgagtgattctcaaat

SEQ ID NO: 3534916 - DNA, 25 bp, Homo sapien
gtgttttccttttggcagaaatctg

SEQ ID NO: 3534917 - DNA, 25 bp, Homo sapien
tcagggaattgttggatcctggaaa

SEQ ID NO: 3534918 - DNA, 25 bp, Homo sapien
ctcagggaattgttggatcctggaa

SEQ ID NO: 3534919 - DNA, 25 bp, Homo sapien
tccatttgggtacagccagttggtt

SEQ ID NO: 3534920 - DNA, 25 bp, Homo sapien
gtacagccagttggttttgtccctg

SEQ ID NO: 3534921 - DNA, 25 bp, Homo sapien
gagtctgtttaatgccttcagccat

SEQ ID NO: 3534922 - DNA, 25 bp, Homo sapien
cagagtctgtttaatgccttcagcc

SEQ ID NO: 3534923 - DNA, 25 bp, Homo sapien
tgtttgaaattgcacctcctgggcc

SEQ ID NO: 3534924 - DNA, 25 bp, Homo sapien
aactgagacctaaccaagtcacgga

SEQ ID NO: 3534925 - DNA, 25 bp, Homo sapien
gagaagattagaggcaactgagacc

SEQ ID NO: 3534926 - DNA, 25 bp, Homo sapien
tcattagcctgtccctggaaatgct

SEQ ID NO: 3534927 - DNA, 25 bp, Homo sapien
gaaaccccttgattatccatggagg

SEQ ID NO: 3534928 - DNA, 25 bp, Homo sapien
ttaaggtgctcgataatgtaaagct

SEQ ID NO: 3534929 - DNA, 25 bp, Homo sapien
acccgaaaccccttgattatccatg

SEQ ID NO: 3534930 - DNA, 25 bp, Homo sapien
tggggtgtaggaatccagaacccga

SEQ ID NO: 3534931 - DNA, 25 bp, Homo sapien
ttggtccctgatgcaggctttttct

SEQ ID NO: 3534932 - DNA, 25 bp, Homo sapien
acctggtccctctgacttgggtgaa

SEQ ID NO: 3534933 - DNA, 25 bp, Homo sapien
cctagtgtccaagtgtccataatgc

SEQ ID NO: 3534934 - DNA, 25 bp, Homo sapien
caaacagctttatgggctctctgct

SEQ ID NO: 3534935 - DNA, 25 bp, Homo sapien
caactgttgaggtgcacctggtccc

SEQ ID NO: 3534936 - DNA, 25 bp, Homo sapien
ttgtccttccaagccaagggaggag

SEQ ID NO: 3534937 - DNA, 25 bp, Homo sapien
gctggaggtgatattacaaagtgcc

SEQ ID NO: 3534938 - DNA, 25 bp, Homo sapien
ggtactcctcacgtaaatctggtgc

SEQ ID NO: 3534939 - DNA, 25 bp, Homo sapien
tgcttgcaagctccctggttccttg

SEQ ID NO: 3534940 - DNA, 25 bp, Homo sapien
ccccattggttagttttggttgatg

SEQ ID NO: 3534941 - DNA, 25 bp, Homo sapien
tagttttggttgatgcgggtatttg

SEQ ID NO: 3534942 - DNA, 25 bp, Homo sapien
ctcagtgctgcccgcgttttctata

SEQ ID NO: 3534943 - DNA, 25 bp, Homo sapien
tgcccgcgttttctataccccattg

SEQ ID NO: 3534944 - DNA, 25 bp, Homo sapien
tacagaattctcactttgctgtgtg

SEQ ID NO: 3534945 - DNA, 25 bp, Homo sapien
aattctcactttgctgtgtgatatc

SEQ ID NO: 3534946 - DNA, 25 bp, Homo sapien
cagaattctcactttgctgtgtgat

SEQ ID NO: 3534947 - DNA, 25 bp, Homo sapien
atacagaattctcactttgctgtgt

SEQ ID NO: 3534948 - DNA, 25 bp, Homo sapien
tgcaagtcctggaagcctcggagtc

SEQ ID NO: 3534949 - DNA, 25 bp, Homo sapien
caagtcctggaagcctcggagtcag

SEQ ID NO: 3534950 - DNA, 25 bp, Homo sapien
tcctggaagcctcggagtcagagtg

SEQ ID NO: 3534951 - DNA, 25 bp, Homo sapien
gaagcctcggagtcagagtgtctga

SEQ ID NO: 3534952 - DNA, 25 bp, Homo sapien
caggtgggtccttgtgtagatgcag

SEQ ID NO: 3534953 - DNA, 25 bp, Homo sapien
aggtgggtccttgtgtagatgcagc

SEQ ID NO: 3534954 - DNA, 25 bp, Homo sapien
gtgtagatgcagctggtgaatataa

SEQ ID NO: 3534955 - DNA, 25 bp, Homo sapien
ggtgggtccttgtgtagatgcagct

SEQ ID NO: 3534956 - DNA, 25 bp, Homo sapien
gcaacttctcatagactaaattcag

SEQ ID NO: 3534957 - DNA, 25 bp, Homo sapien
atttactctcacaggcctcaaagtg

SEQ ID NO: 3534958 - DNA, 25 bp, Homo sapien
gcagggaccaggtgacatttccctt

SEQ ID NO: 3534959 - DNA, 25 bp, Homo sapien
ttagacattaaaattagcgctaatt

SEQ ID NO: 3534960 - DNA, 25 bp, Homo sapien
tcaagctgccatctgatactgagca

SEQ ID NO: 3534961 - DNA, 25 bp, Homo sapien
tctgatactgagcaggttcccacag

SEQ ID NO: 3534962 - DNA, 25 bp, Homo sapien
tactgagcaggttcccacagacact

SEQ ID NO: 3534963 - DNA, 25 bp, Homo sapien
tgccatctgatactgagcaggttcc

SEQ ID NO: 3534964 - DNA, 25 bp, Homo sapien
tctccttgctatttacagtctccat

SEQ ID NO: 3534965 - DNA, 25 bp, Homo sapien
ctctccttgctatttacagtctcca

SEQ ID NO: 3534966 - DNA, 25 bp, Homo sapien
gcgcaggggacttgattttcttggc

SEQ ID NO: 3534967 - DNA, 25 bp, Homo sapien
aaggggcagtgatgttcaaaggcat

SEQ ID NO: 3534968 - DNA, 25 bp, Homo sapien
ctggcgcaggggacttgattttctt

SEQ ID NO: 3534969 - DNA, 25 bp, Homo sapien
tcttggcgtaggtacctttctccac

SEQ ID NO: 3534970 - DNA, 25 bp, Homo sapien
ccatgggcagttgaaactttatcac

SEQ ID NO: 3534971 - DNA, 25 bp, Homo sapien
tcataaaagctaacccagagacaag

SEQ ID NO: 3534972 - DNA, 25 bp, Homo sapien
gaattaatgaacatatcaccaccat

SEQ ID NO: 3534973 - DNA, 25 bp, Homo sapien
tgaaatatctatgtaccattttcca

SEQ ID NO: 3534974 - DNA, 25 bp, Homo sapien
caacttggagacattggtaggcaga

SEQ ID NO: 3534975 - DNA, 25 bp, Homo sapien
tagttcagcgagtccaatgctcttg

SEQ ID NO: 3534976 - DNA, 25 bp, Homo sapien
gggctccgtgctaagcgcttgattt

SEQ ID NO: 3534977 - DNA, 25 bp, Homo sapien
cattcagtgcaagctggaccaagca

SEQ ID NO: 3534978 - DNA, 25 bp, Homo sapien
tttggaggacatcttcttaaactgt

SEQ ID NO: 3534979 - DNA, 25 bp, Homo sapien
ggaggacatcttcttaaactgtcat

SEQ ID NO: 3534980 - DNA, 25 bp, Homo sapien
ttaaactgtcattcccttgtgtatt

SEQ ID NO: 3534981 - DNA, 25 bp, Homo sapien
actgtcattcccttgtgtattctcc

SEQ ID NO: 3534982 - DNA, 25 bp, Homo sapien
tctataaccgaatctgcaatttctg

SEQ ID NO: 3534983 - DNA, 25 bp, Homo sapien
gacaaatctataaccgaatctgcaa

SEQ ID NO: 3534984 - DNA, 25 bp, Homo sapien
ctgtttttcttaagctgcacttgtg

SEQ ID NO: 3534985 - DNA, 25 bp, Homo sapien
cttgtgaatggacccctgttcctcc

SEQ ID NO: 3534986 - DNA, 25 bp, Homo sapien
agcctgattttctggacgttctcca

SEQ ID NO: 3534987 - DNA, 25 bp, Homo sapien
gcttgcaaatcaaccaattctttct

SEQ ID NO: 3534988 - DNA, 25 bp, Homo sapien
tttctgcttgcaaatcaaccaattc

SEQ ID NO: 3534989 - DNA, 25 bp, Homo sapien
ctcatttatctcttgtaaatctttc

SEQ ID NO: 3534990 - DNA, 25 bp, Homo sapien
tctgcggattatgttcagaaccatc

SEQ ID NO: 3534991 - DNA, 25 bp, Homo sapien
acttgatcgtgtgctacctcctgga

SEQ ID NO: 3534992 - DNA, 25 bp, Homo sapien
ccagtcttgaacgtggctttgggca

SEQ ID NO: 3534993 - DNA, 25 bp, Homo sapien
tactagcaactttctggtacccatc

SEQ ID NO: 3534994 - DNA, 25 bp, Homo sapien
ctgtaggatggtgggtccattgctc

SEQ ID NO: 3534995 - DNA, 25 bp, Homo sapien
tttgatcactggtttggacttcacg

SEQ ID NO: 3534996 - DNA, 25 bp, Homo sapien
cttgaaagacaatgcatgaaatact

SEQ ID NO: 3534997 - DNA, 25 bp, Homo sapien
gatatgtatgttgtgcttgaaagac

SEQ ID NO: 3534998 - DNA, 25 bp, Homo sapien
gattgctttgcctgaaatttagcta

SEQ ID NO: 3534999 - DNA, 25 bp, Homo sapien
gaatccattccctgcaccaaatctg

SEQ ID NO: 3535000 - DNA, 25 bp, Homo sapien
ttcaaagcaatgagcatgtactgga

SEQ ID NO: 3535001 - DNA, 25 bp, Homo sapien
aacaatgttcagtaacttcaaagca

SEQ ID NO: 3535002 - DNA, 25 bp, Homo sapien
attgttcctggtaatttggattggt

SEQ ID NO: 3535003 - DNA, 25 bp, Homo sapien
cctggtaatttggattggtttgaag

SEQ ID NO: 3535004 - DNA, 25 bp, Homo sapien
tcctggtaatttggattggtttgaa

SEQ ID NO: 3535005 - DNA, 25 bp, Homo sapien
ttcctggtaatttggattggtttga

SEQ ID NO: 3535006 - DNA, 25 bp, Homo sapien
gaaacagcagtagaaatcttgtagt

SEQ ID NO: 3535007 - DNA, 25 bp, Homo sapien
tgggaaacagcagtagaaatcttgt

SEQ ID NO: 3535008 - DNA, 25 bp, Homo sapien
agttgaagggtgtatcagagttttc

SEQ ID NO: 3535009 - DNA, 25 bp, Homo sapien
tcttgtagttgaagggtgtatcaga

SEQ ID NO: 3535010 - DNA, 25 bp, Homo sapien
gccatagtcgtattgcagctgtgtc

SEQ ID NO: 3535011 - DNA, 25 bp, Homo sapien
ccatagtcgtattgcagctgtgtcc

SEQ ID NO: 3535012 - DNA, 25 bp, Homo sapien
agccatagtcgtattgcagctgtgt

SEQ ID NO: 3535013 - DNA, 25 bp, Homo sapien
aagccatagtcgtattgcagctgtg

SEQ ID NO: 3535014 - DNA, 25 bp, Homo sapien
gaaatgatttatcggtaaaacttga

SEQ ID NO: 3535015 - DNA, 25 bp, Homo sapien
ggattggaaagggtcttacagagga

SEQ ID NO: 3535016 - DNA, 25 bp, Homo sapien
agggattggaaagggtcttacagag

SEQ ID NO: 3535017 - DNA, 25 bp, Homo sapien
ctctccctgaaatgatttatcggta

SEQ ID NO: 3535018 - DNA, 25 bp, Homo sapien
gtttttcagatacctgattgggcag

SEQ ID NO: 3535019 - DNA, 25 bp, Homo sapien
gaagagtcagcactccagtttgcac

SEQ ID NO: 3535020 - DNA, 25 bp, Homo sapien
gacaacacacaaaatccagagcagc

SEQ ID NO: 3535021 - DNA, 25 bp, Homo sapien
tccttgaattcactgcagattctga

SEQ ID NO: 3535022 - DNA, 25 bp, Homo sapien
gtagttcccgttggctccaggttga

SEQ ID NO: 3535023 - DNA, 25 bp, Homo sapien
tcccgttggctccaggttgaaagac

SEQ ID NO: 3535024 - DNA, 25 bp, Homo sapien
tggctccaggttgaaagacttgatc

SEQ ID NO: 3535025 - DNA, 25 bp, Homo sapien
ttattgaagtagttcccgttggctc

SEQ ID NO: 3535026 - DNA, 25 bp, Homo sapien
gagctgcggctgtttggcaagggaa

SEQ ID NO: 3535027 - DNA, 25 bp, Homo sapien
tgcgagctgcggctgtttggcaagg

SEQ ID NO: 3535028 - DNA, 25 bp, Homo sapien
ctatttggctgattcaagcttcatg

SEQ ID NO: 3535029 - DNA, 25 bp, Homo sapien
tgattcaagcttcatgtgtctttct

SEQ ID NO: 3535030 - DNA, 25 bp, Homo sapien
aagtcatggagctttaattcttgat

SEQ ID NO: 3535031 - DNA, 25 bp, Homo sapien
tggagctttaattcttgatgggcag

SEQ ID NO: 3535032 - DNA, 25 bp, Homo sapien
gagttttgggcttcagccacatgaa

SEQ ID NO: 3535033 - DNA, 25 bp, Homo sapien
tgttaagagttttgggcttcagcca

SEQ ID NO: 3535034 - DNA, 25 bp, Homo sapien
ttttcctcttagactgagctctttt

SEQ ID NO: 3535035 - DNA, 25 bp, Homo sapien
gactgagctcttttatgctggtatc

SEQ ID NO: 3535036 - DNA, 25 bp, Homo sapien
agctcttttatgctggtatctcaca

SEQ ID NO: 3535037 - DNA, 25 bp, Homo sapien
tactttttcctcttagactgagctc

SEQ ID NO: 3535038 - DNA, 25 bp, Homo sapien
gtggcccagggatttagcaatttca

SEQ ID NO: 3535039 - DNA, 25 bp, Homo sapien
ggcccagggatttagcaatttcatt

SEQ ID NO: 3535040 - DNA, 25 bp, Homo sapien
ttgtggcccagggatttagcaattt

SEQ ID NO: 3535041 - DNA, 25 bp, Homo sapien
agcaatttcattgttgcattgtctc

SEQ ID NO: 3535042 - DNA, 25 bp, Homo sapien
gtcagctaacgtaggcttcacacaa

SEQ ID NO: 3535043 - DNA, 25 bp, Homo sapien
tgaatgaagacatttgtcagctaac

SEQ ID NO: 3535044 - DNA, 25 bp, Homo sapien
gacatttgtcagctaacgtaggctt

SEQ ID NO: 3535045 - DNA, 25 bp, Homo sapien
tgaagacatttgtcagctaacgtag

SEQ ID NO: 3535046 - DNA, 25 bp, Homo sapien
ctgggctgactttgacatcaggcat

SEQ ID NO: 3535047 - DNA, 25 bp, Homo sapien
actttgacatcaggcatctgcgtca

SEQ ID NO: 3535048 - DNA, 25 bp, Homo sapien
tgactttgacatcaggcatctgcgt

SEQ ID NO: 3535049 - DNA, 25 bp, Homo sapien
gctgactttgacatcaggcatctgc

SEQ ID NO: 3535050 - DNA, 25 bp, Homo sapien
gtttgtgccagtcctatcacgtaag

SEQ ID NO: 3535051 - DNA, 25 bp, Homo sapien
tatcacgtaagaatgcaccatatgc

SEQ ID NO: 3535052 - DNA, 25 bp, Homo sapien
cagtcctatcacgtaagaatgcacc

SEQ ID NO: 3535053 - DNA, 25 bp, Homo sapien
tccacgtctgtttgtgccagtccta

SEQ ID NO: 3535054 - DNA, 25 bp, Homo sapien
tcatggttgaaggcatatagggcta

SEQ ID NO: 3535055 - DNA, 25 bp, Homo sapien
catggttgaaggcatatagggctac

SEQ ID NO: 3535056 - DNA, 25 bp, Homo sapien
tctgaccattcttcaggctactcct

SEQ ID NO: 3535057 - DNA, 25 bp, Homo sapien
gctactccttttatagacggttcca

SEQ ID NO: 3535058 - DNA, 25 bp, Homo sapien
ggtcagcaggtcttttttgagtttc

SEQ ID NO: 3535059 - DNA, 25 bp, Homo sapien
gccaataagaactgttttctgacca

SEQ ID NO: 3535060 - DNA, 25 bp, Homo sapien
ctgtcccctcagaacaaattctcat

SEQ ID NO: 3535061 - DNA, 25 bp, Homo sapien
ccacaagctgtgatctactgtgtgc

SEQ ID NO: 3535062 - DNA, 25 bp, Homo sapien
acaagctgtgatctactgtgtgcta

SEQ ID NO: 3535063 - DNA, 25 bp, Homo sapien
ctaccacaagctgtgatctactgtg

SEQ ID NO: 3535064 - DNA, 25 bp, Homo sapien
aagctgtgatctactgtgtgctagc

SEQ ID NO: 3535065 - DNA, 25 bp, Homo sapien
aaacatctgctattggggggtcagt

SEQ ID NO: 3535066 - DNA, 25 bp, Homo sapien
tcaatgatccaaaacatctgctatt

SEQ ID NO: 3535067 - DNA, 25 bp, Homo sapien
aattccagcatatattccgaaacag

SEQ ID NO: 3535068 - DNA, 25 bp, Homo sapien
ggtcagtgtgtgcagttttgctctt

SEQ ID NO: 3535069 - DNA, 25 bp, Homo sapien
cttagactctggtagaagcgtaggt

SEQ ID NO: 3535070 - DNA, 25 bp, Homo sapien
tctggtagaagcgtaggttcccttc

SEQ ID NO: 3535071 - DNA, 25 bp, Homo sapien
aggttcccttcaacatatctattca

SEQ ID NO: 3535072 - DNA, 25 bp, Homo sapien
tagaagcgtaggttcccttcaacat

SEQ ID NO: 3535073 - DNA, 25 bp, Homo sapien
agagaaaacagtgccaaccaattat

SEQ ID NO: 3535074 - DNA, 25 bp, Homo sapien
cagtgccaaccaattatgttaccaa

SEQ ID NO: 3535075 - DNA, 25 bp, Homo sapien
tatgttaccaaactttgaaaggtca

SEQ ID NO: 3535076 - DNA, 25 bp, Homo sapien
gaaaggtcagtgatgtacaggctat

SEQ ID NO: 3535077 - DNA, 25 bp, Homo sapien
gctgtggccgcccaagcacaagtct

SEQ ID NO: 3535078 - DNA, 25 bp, Homo sapien
caagatccctctctgaaccatgatt

SEQ ID NO: 3535079 - DNA, 25 bp, Homo sapien
tcatgatgtgcccagctgtggccgc

SEQ ID NO: 3535080 - DNA, 25 bp, Homo sapien
tctgaaccatgattcatgatgtgcc

SEQ ID NO: 3535081 - DNA, 25 bp, Homo sapien
caagctccaatactggggcggcaga

SEQ ID NO: 3535082 - DNA, 25 bp, Homo sapien
tggcaattgcaagttatatagccaa

SEQ ID NO: 3535083 - DNA, 25 bp, Homo sapien
gtcactccctcacgtactttacatt

SEQ ID NO: 3535084 - DNA, 25 bp, Homo sapien
taaacctggtgcactgtcactccct

SEQ ID NO: 3535085 - DNA, 25 bp, Homo sapien
tataaggcctatttctatcagtttc

SEQ ID NO: 3535086 - DNA, 25 bp, Homo sapien
aaggcctatttctatcagtttcctt

SEQ ID NO: 3535087 - DNA, 25 bp, Homo sapien
gttataaggcctatttctatcagtt

SEQ ID NO: 3535088 - DNA, 25 bp, Homo sapien
taaggcctatttctatcagtttcct

SEQ ID NO: 3535089 - DNA, 25 bp, Homo sapien
aactccccgaagagatacccctcat

SEQ ID NO: 3535090 - DNA, 25 bp, Homo sapien
aggggtagctgttactggcagccat

SEQ ID NO: 3535091 - DNA, 25 bp, Homo sapien
gagatacccctcatctctgctggat

SEQ ID NO: 3535092 - DNA, 25 bp, Homo sapien
taaatgaggggtagctgttactggc

SEQ ID NO: 3535093 - DNA, 25 bp, Homo sapien
aagagagcagatggctataagtttc

SEQ ID NO: 3535094 - DNA, 25 bp, Homo sapien
ctataagtttcaagccatgaatcat

SEQ ID NO: 3535095 - DNA, 25 bp, Homo sapien
gctataagtttcaagccatgaatca

SEQ ID NO: 3535096 - DNA, 25 bp, Homo sapien
tgtcctttaagtcccagctgtcgga

SEQ ID NO: 3535097 - DNA, 25 bp, Homo sapien
ccagctgtcggatcgctgagtagcg

SEQ ID NO: 3535098 - DNA, 25 bp, Homo sapien
tgtcggatcgctgagtagcgttcat

SEQ ID NO: 3535099 - DNA, 25 bp, Homo sapien
taagtcccagctgtcggatcgctga

SEQ ID NO: 3535100 - DNA, 25 bp, Homo sapien
tgtcttatgtccacctcttactatg

SEQ ID NO: 3535101 - DNA, 25 bp, Homo sapien
acagccgtctgtgtcttatgtccac

SEQ ID NO: 3535102 - DNA, 25 bp, Homo sapien
gtctgtgtcttatgtccacctctta

SEQ ID NO: 3535103 - DNA, 25 bp, Homo sapien
gccgtctgtgtcttatgtccacctc

SEQ ID NO: 3535104 - DNA, 25 bp, Homo sapien
caataatgttgtccaggtgatgtct

SEQ ID NO: 3535105 - DNA, 25 bp, Homo sapien
tatgggcttttgttgcattggagaa

SEQ ID NO: 3535106 - DNA, 25 bp, Homo sapien
cataagaatattatggaagagcttc

SEQ ID NO: 3535107 - DNA, 25 bp, Homo sapien
ggagaatgggttgatatagctgtaa

SEQ ID NO: 3535108 - DNA, 25 bp, Homo sapien
gggtaaaaagcagatgggtaaatca

SEQ ID NO: 3535109 - DNA, 25 bp, Homo sapien
ctctctgtttttcttcttttgacat

SEQ ID NO: 3535110 - DNA, 25 bp, Homo sapien
ttctctctgtttttcttcttttgac

SEQ ID NO: 3535111 - DNA, 25 bp, Homo sapien
tgtaatactgagtttttttctctct

SEQ ID NO: 3535112 - DNA, 25 bp, Homo sapien
cttgtaatactgagtttttttctct

SEQ ID NO: 3535113 - DNA, 25 bp, Homo sapien
tcagagtgcgaatgtcttaaaatcc

SEQ ID NO: 3535114 - DNA, 25 bp, Homo sapien
aagataggtatcaacttactagcag

SEQ ID NO: 3535115 - DNA, 25 bp, Homo sapien
tgtcaatcatgatcacatccagttg

SEQ ID NO: 3535116 - DNA, 25 bp, Homo sapien
gatggtctcttcaaggttacagcct

SEQ ID NO: 3535117 - DNA, 25 bp, Homo sapien
cattaaaggttggaagatcttcatc

SEQ ID NO: 3535118 - DNA, 25 bp, Homo sapien
ctattcattaaaggttggaagatct

SEQ ID NO: 3535119 - DNA, 25 bp, Homo sapien
attcattaaaggttggaagatcttc

SEQ ID NO: 3535120 - DNA, 25 bp, Homo sapien
tcattaaaggttggaagatcttcat

SEQ ID NO: 3535121 - DNA, 25 bp, Homo sapien
gaatcatttctgaatcaaacagagt

SEQ ID NO: 3535122 - DNA, 25 bp, Homo sapien
gaatcaaacagagtaacaaatacca

SEQ ID NO: 3535123 - DNA, 25 bp, Homo sapien
gattttagaatcatttctgaatcaa

SEQ ID NO: 3535124 - DNA, 25 bp, Homo sapien
tgaatcaaacagagtaacaaatacc

SEQ ID NO: 3535125 - DNA, 25 bp, Homo sapien
gcacggtatagttgttcccatttgg

SEQ ID NO: 3535126 - DNA, 25 bp, Homo sapien
cacggtatagttgttcccatttggt

SEQ ID NO: 3535127 - DNA, 25 bp, Homo sapien
tgcacggtatagttgttcccatttg

SEQ ID NO: 3535128 - DNA, 25 bp, Homo sapien
ctgcacggtatagttgttcccattt

SEQ ID NO: 3535129 - DNA, 25 bp, Homo sapien
ttacatttacagaaacaggttttgc

SEQ ID NO: 3535130 - DNA, 25 bp, Homo sapien
cttacatttacagaaacaggttttg

SEQ ID NO: 3535131 - DNA, 25 bp, Homo sapien
tacatttacagaaacaggttttgcc

SEQ ID NO: 3535132 - DNA, 25 bp, Homo sapien
tattgacactcaggaaaggtgtcca

SEQ ID NO: 3535133 - DNA, 25 bp, Homo sapien
cactcaggaaaggtgtccattttga

SEQ ID NO: 3535134 - DNA, 25 bp, Homo sapien
ggaaaggtgtccattttgatcccac

SEQ ID NO: 3535135 - DNA, 25 bp, Homo sapien
ggtaaaatatattgacactcaggaa

SEQ ID NO: 3535136 - DNA, 25 bp, Homo sapien
aaaatatgagcagcagggtttatag

SEQ ID NO: 3535137 - DNA, 25 bp, Homo sapien
ttggaaaatatgagcagcagggttt

SEQ ID NO: 3535138 - DNA, 25 bp, Homo sapien
gttttgctgttggtggcagaagcat

SEQ ID NO: 3535139 - DNA, 25 bp, Homo sapien
gggttttgctgttggtggcagaagc

SEQ ID NO: 3535140 - DNA, 25 bp, Homo sapien
ccagagtatttgtggctttaatgca

SEQ ID NO: 3535141 - DNA, 25 bp, Homo sapien
caaaaatgcaatgctgccagagtat

SEQ ID NO: 3535142 - DNA, 25 bp, Homo sapien
acacaaaaatgcaatgctgccagag

SEQ ID NO: 3535143 - DNA, 25 bp, Homo sapien
tgcaaccatactctaacttagcttc

SEQ ID NO: 3535144 - DNA, 25 bp, Homo sapien
tcatgtggaagtgttcatttcaccc

SEQ ID NO: 3535145 - DNA, 25 bp, Homo sapien
tggaagtgttcatttcacccgacac

SEQ ID NO: 3535146 - DNA, 25 bp, Homo sapien
tgtggaagtgttcatttcacccgac

SEQ ID NO: 3535147 - DNA, 25 bp, Homo sapien
catgtggaagtgttcatttcacccg

SEQ ID NO: 3535148 - DNA, 25 bp, Homo sapien
tatcttatatgggtctaatagtgaa

SEQ ID NO: 3535149 - DNA, 25 bp, Homo sapien
tgaatatcttatatgggtctaatag

SEQ ID NO: 3535150 - DNA, 25 bp, Homo sapien
tatatgggtctaatagtgaagctac

SEQ ID NO: 3535151 - DNA, 25 bp, Homo sapien
tgtagttactttgaatatcttatat

SEQ ID NO: 3535152 - DNA, 25 bp, Homo sapien
gcaacactcaaagctacccaactat

SEQ ID NO: 3535153 - DNA, 25 bp, Homo sapien
aagagatttctccttaacgctgtct

SEQ ID NO: 3535154 - DNA, 25 bp, Homo sapien
ttcagaaggactagcaacactcaaa

SEQ ID NO: 3535155 - DNA, 25 bp, Homo sapien
gagatttctccttaacgctgtcttc

SEQ ID NO: 3535156 - DNA, 25 bp, Homo sapien
tggtgtgtggaaagatcatttgcca

SEQ ID NO: 3535157 - DNA, 25 bp, Homo sapien
atggtgtgtggaaagatcatttgcc

SEQ ID NO: 3535158 - DNA, 25 bp, Homo sapien
tccaacactgaagttatagcaggtc

SEQ ID NO: 3535159 - DNA, 25 bp, Homo sapien
tttcttcctcagagtagttgctgat

SEQ ID NO: 3535160 - DNA, 25 bp, Homo sapien
tcttcctcagagtagttgctgatct

SEQ ID NO: 3535161 - DNA, 25 bp, Homo sapien
tcctcagagtagttgctgatctgtg

SEQ ID NO: 3535162 - DNA, 25 bp, Homo sapien
cctcagagtagttgctgatctgtgg

SEQ ID NO: 3535163 - DNA, 25 bp, Homo sapien
tccccattcttctccgacgagtgaa

SEQ ID NO: 3535164 - DNA, 25 bp, Homo sapien
cattcttctccgacgagtgaagtct

SEQ ID NO: 3535165 - DNA, 25 bp, Homo sapien
tctccgacgagtgaagtcttcatta

SEQ ID NO: 3535166 - DNA, 25 bp, Homo sapien
tcttctccgacgagtgaagtcttca

SEQ ID NO: 3535167 - DNA, 25 bp, Homo sapien
tcaaagcaagtaaagcggacaaaac

SEQ ID NO: 3535168 - DNA, 25 bp, Homo sapien
tgtccaatcaaagcaagtaaagcgg

SEQ ID NO: 3535169 - DNA, 25 bp, Homo sapien
tggaaatatctcttatacagatcat

SEQ ID NO: 3535170 - DNA, 25 bp, Homo sapien
caatcaaagcaagtaaagcggacaa

SEQ ID NO: 3535171 - DNA, 25 bp, Homo sapien
tgcaaagatctacttgtagcagaag

SEQ ID NO: 3535172 - DNA, 25 bp, Homo sapien
gacatacagtttgtgacttgatcgg

SEQ ID NO: 3535173 - DNA, 25 bp, Homo sapien
gattgatgatggtgcaaagatctac

SEQ ID NO: 3535174 - DNA, 25 bp, Homo sapien
tgaagaatgaacctgacccctggat

SEQ ID NO: 3535175 - DNA, 25 bp, Homo sapien
tgtggtcagtttcttatccagacac

SEQ ID NO: 3535176 - DNA, 25 bp, Homo sapien
cgtacatcagttactttgccaaaaa

SEQ ID NO: 3535177 - DNA, 25 bp, Homo sapien
tgatgtggtcagtttcttatccaga

SEQ ID NO: 3535178 - DNA, 25 bp, Homo sapien
tacatcagttactttgccaaaaatc

SEQ ID NO: 3535179 - DNA, 25 bp, Homo sapien
tcattgactcggacatctttctgtg

SEQ ID NO: 3535180 - DNA, 25 bp, Homo sapien
aaagctgctgggacggttgttagaa

SEQ ID NO: 3535181 - DNA, 25 bp, Homo sapien
tactcgttactttgcctggtccttc

SEQ ID NO: 3535182 - DNA, 25 bp, Homo sapien
tgaaagtcacccaatgatcaccagg

SEQ ID NO: 3535183 - DNA, 25 bp, Homo sapien
ttagagcatagtgatactctgaaac

SEQ ID NO: 3535184 - DNA, 25 bp, Homo sapien
cttagagcatagtgatactctgaaa

SEQ ID NO: 3535185 - DNA, 25 bp, Homo sapien
tcatttgcttcgctgtctgcctgtt

SEQ ID NO: 3535186 - DNA, 25 bp, Homo sapien
atttgcttcgctgtctgcctgtttc

SEQ ID NO: 3535187 - DNA, 25 bp, Homo sapien
ttgcttcgctgtctgcctgtttctg

SEQ ID NO: 3535188 - DNA, 25 bp, Homo sapien
cttcatttgcttcgctgtctgcctg

SEQ ID NO: 3535189 - DNA, 25 bp, Homo sapien
caaaatcgtgcatataaacagacat

SEQ ID NO: 3535190 - DNA, 25 bp, Homo sapien
taaatcaccagatgatagaaggagg

SEQ ID NO: 3535191 - DNA, 25 bp, Homo sapien
ggacaaaatcgtgcatataaacaga

SEQ ID NO: 3535192 - DNA, 25 bp, Homo sapien
tgatagaaggaggacaaaatcgtgc

SEQ ID NO: 3535193 - DNA, 25 bp, Homo sapien
ggtagtctcttatgaacaactacgg

SEQ ID NO: 3535194 - DNA, 25 bp, Homo sapien
tgcacggtagtctcttatgaacaac

SEQ ID NO: 3535195 - DNA, 25 bp, Homo sapien
gatgtgcacggtagtctcttatgaa

SEQ ID NO: 3535196 - DNA, 25 bp, Homo sapien
atgatgtgcacggtagtctcttatg

SEQ ID NO: 3535197 - DNA, 25 bp, Homo sapien
ggcttggcttggttgaggccaccta

SEQ ID NO: 3535198 - DNA, 25 bp, Homo sapien
actgcccactggtagattataaatg

SEQ ID NO: 3535199 - DNA, 25 bp, Homo sapien
tgtgctatgccagaataactgccca

SEQ ID NO: 3535200 - DNA, 25 bp, Homo sapien
ctgaagtctacagattctttttggc

SEQ ID NO: 3535201 - DNA, 25 bp, Homo sapien
tctttggcgtttccctgctccaatt

SEQ ID NO: 3535202 - DNA, 25 bp, Homo sapien
ctactttctttggcgtttccctgct

SEQ ID NO: 3535203 - DNA, 25 bp, Homo sapien
acagttctggcagagttatctttct

SEQ ID NO: 3535204 - DNA, 25 bp, Homo sapien
tataggtgcccaatatcaactactt

SEQ ID NO: 3535205 - DNA, 25 bp, Homo sapien
tcctgtccgagaccttcgccagcag

SEQ ID NO: 3535206 - DNA, 25 bp, Homo sapien
ggcagaagctagcaatatccttcca

SEQ ID NO: 3535207 - DNA, 25 bp, Homo sapien
agctagcaatatccttccattcagg

SEQ ID NO: 3535208 - DNA, 25 bp, Homo sapien
gaagctagcaatatccttccattca

SEQ ID NO: 3535209 - DNA, 25 bp, Homo sapien
caggctttagttattttcccataga

SEQ ID NO: 3535210 - DNA, 25 bp, Homo sapien
tggtctccgggattcccaggcttta

SEQ ID NO: 3535211 - DNA, 25 bp, Homo sapien
tgatacggccctatttttcttggtc

SEQ ID NO: 3535212 - DNA, 25 bp, Homo sapien
tgtctggcttataatccactaggtt

SEQ ID NO: 3535213 - DNA, 25 bp, Homo sapien
gatattgccttggttctgtagcagg

SEQ ID NO: 3535214 - DNA, 25 bp, Homo sapien
tattgccttggttctgtagcaggta

SEQ ID NO: 3535215 - DNA, 25 bp, Homo sapien
tgatattgccttggttctgtagcag

SEQ ID NO: 3535216 - DNA, 25 bp, Homo sapien
atattgccttggttctgtagcaggt

SEQ ID NO: 3535217 - DNA, 25 bp, Homo sapien
tcacaggcttgactaccctaaaggt

SEQ ID NO: 3535218 - DNA, 25 bp, Homo sapien
tctgtcagttcttaggcttattcca

SEQ ID NO: 3535219 - DNA, 25 bp, Homo sapien
gacagtttctttgaaccaagtgtag

SEQ ID NO: 3535220 - DNA, 25 bp, Homo sapien
tagaagagtcggaagaacctttgac

SEQ ID NO: 3535221 - DNA, 25 bp, Homo sapien
gccaccatcactccttccactctga

SEQ ID NO: 3535222 - DNA, 25 bp, Homo sapien
ggaaggactttctatattgtgtttc

SEQ ID NO: 3535223 - DNA, 25 bp, Homo sapien
ctggaaggactttctatattgtgtt

SEQ ID NO: 3535224 - DNA, 25 bp, Homo sapien
tgttgcttaattttgccaccatcac

SEQ ID NO: 3535225 - DNA, 25 bp, Homo sapien
ctctccaccacgctccatggcacag

SEQ ID NO: 3535226 - DNA, 25 bp, Homo sapien
aacctctccaccacgctccatggca

SEQ ID NO: 3535227 - DNA, 25 bp, Homo sapien
ctccaccacgctccatggcacagtc

SEQ ID NO: 3535228 - DNA, 25 bp, Homo sapien
caaacctctccaccacgctccatgg

SEQ ID NO: 3535229 - DNA, 25 bp, Homo sapien
gctcaatcatgcaaccttcactggg

SEQ ID NO: 3535230 - DNA, 25 bp, Homo sapien
gttgcactcttgtggatcacttctc

SEQ ID NO: 3535231 - DNA, 25 bp, Homo sapien
cacttctctgagtaagctatctgct

SEQ ID NO: 3535232 - DNA, 25 bp, Homo sapien
aaaaagcagctcaatcatgcaacct

SEQ ID NO: 3535233 - DNA, 25 bp, Homo sapien
tgatccccaaagtcaagtttttcca

SEQ ID NO: 3535234 - DNA, 25 bp, Homo sapien
tatcataacatcacagtataccctg

SEQ ID NO: 3535235 - DNA, 25 bp, Homo sapien
ccaaaatgaatgtgcgggtcactta

SEQ ID NO: 3535236 - DNA, 25 bp, Homo sapien
cccagagtcaccagtgaatggatca

SEQ ID NO: 3535237 - DNA, 25 bp, Homo sapien
gggtcacttatcttccagccaacta

SEQ ID NO: 3535238 - DNA, 25 bp, Homo sapien
taaccattgcctgacatagctaaga

SEQ ID NO: 3535239 - DNA, 25 bp, Homo sapien
tctctgcattaagggtaaactggta

SEQ ID NO: 3535240 - DNA, 25 bp, Homo sapien
gtccattgaagtgacaagagctcca

SEQ ID NO: 3535241 - DNA, 25 bp, Homo sapien
acaagttctataccaagtccctgtg

SEQ ID NO: 3535242 - DNA, 25 bp, Homo sapien
tggatggccactcttcgtcctgctc

SEQ ID NO: 3535243 - DNA, 25 bp, Homo sapien
cagccgccgccaaattcctggatgg

SEQ ID NO: 3535244 - DNA, 25 bp, Homo sapien
tgagctctgaactccactgtcgacg

SEQ ID NO: 3535245 - DNA, 25 bp, Homo sapien
caactggttgttaaaatgccctgct

SEQ ID NO: 3535246 - DNA, 25 bp, Homo sapien
actggttgctttcgcctgctttgaa

SEQ ID NO: 3535247 - DNA, 25 bp, Homo sapien
cccagtgccgtcagctcactttgat

SEQ ID NO: 3535248 - DNA, 25 bp, Homo sapien
gatcgtttgaactctagatcctcta

SEQ ID NO: 3535249 - DNA, 25 bp, Homo sapien
tgccgttaaagtaaagatcgtttga

SEQ ID NO: 3535250 - DNA, 25 bp, Homo sapien
tgtagtactgaatcttgcatgtgta

SEQ ID NO: 3535251 - DNA, 25 bp, Homo sapien
tatagcacaatttggggataggcag

SEQ ID NO: 3535252 - DNA, 25 bp, Homo sapien
tcaccatgtagtactgaatcttgca

SEQ ID NO: 3535253 - DNA, 25 bp, Homo sapien
gggataggcagcaatgaggccctgg

SEQ ID NO: 3535254 - DNA, 25 bp, Homo sapien
ttatgccaccaattaggtagccaaa

SEQ ID NO: 3535255 - DNA, 25 bp, Homo sapien
taggtagccaaatgtctgtacagca

SEQ ID NO: 3535256 - DNA, 25 bp, Homo sapien
caccaattaggtagccaaatgtctg

SEQ ID NO: 3535257 - DNA, 25 bp, Homo sapien
caaatgtctgtacagcaaccaccat

SEQ ID NO: 3535258 - DNA, 25 bp, Homo sapien
tgtctctgcgcattgatgtcatgga

SEQ ID NO: 3535259 - DNA, 25 bp, Homo sapien
cacataagcacaacagcaggtgtgg

SEQ ID NO: 3535260 - DNA, 25 bp, Homo sapien
caggtgtggattatagcagcgagtt

SEQ ID NO: 3535261 - DNA, 25 bp, Homo sapien
gactcccgcagatagcacataagca

SEQ ID NO: 3535262 - DNA, 25 bp, Homo sapien
tgctaatccatgatttggtgtgcac

SEQ ID NO: 3535263 - DNA, 25 bp, Homo sapien
ggtccactgccttcatagaaaatgt

SEQ ID NO: 3535264 - DNA, 25 bp, Homo sapien
tgatttgctaatccatgatttggtg

SEQ ID NO: 3535265 - DNA, 25 bp, Homo sapien
atgtgatttgctaatccatgatttg

SEQ ID NO: 3535266 - DNA, 25 bp, Homo sapien
ctagaatgcagaatcttttatacta

SEQ ID NO: 3535267 - DNA, 25 bp, Homo sapien
gaatcttttatactattcccaggaa

SEQ ID NO: 3535268 - DNA, 25 bp, Homo sapien
aatgaaagtgtttgaccactccctg

SEQ ID NO: 3535269 - DNA, 25 bp, Homo sapien
cctgtgtagatctttacctctttct

SEQ ID NO: 3535270 - DNA, 25 bp, Homo sapien
ccatttgctctcctatcagtttcat

SEQ ID NO: 3535271 - DNA, 25 bp, Homo sapien
cagcagcaaaatgtgccgactgtct

SEQ ID NO: 3535272 - DNA, 25 bp, Homo sapien
aaaatgtgccgactgtctgtgttgc

SEQ ID NO: 3535273 - DNA, 25 bp, Homo sapien
gcagcaaaatgtgccgactgtctgt

SEQ ID NO: 3535274 - DNA, 25 bp, Homo sapien
attctcaggtaaattccgacccaca

SEQ ID NO: 3535275 - DNA, 25 bp, Homo sapien
aaatgtgaagtattccagcattctc

SEQ ID NO: 3535276 - DNA, 25 bp, Homo sapien
tgaaaatgtgaagtattccagcatt

SEQ ID NO: 3535277 - DNA, 25 bp, Homo sapien
caggtaaattccgacccacaggcat

SEQ ID NO: 3535278 - DNA, 25 bp, Homo sapien
taagattttgggctacagcaacacc

SEQ ID NO: 3535279 - DNA, 25 bp, Homo sapien
tggctggccacgtaaatgatagttg

SEQ ID NO: 3535280 - DNA, 25 bp, Homo sapien
gcaacacctgctacagtgatgctcc

SEQ ID NO: 3535281 - DNA, 25 bp, Homo sapien
tctagcatctctgccatatggtcgt

SEQ ID NO: 3535282 - DNA, 25 bp, Homo sapien
aacaacaaagactgtgtgagccagg

SEQ ID NO: 3535283 - DNA, 25 bp, Homo sapien
ccaaatgagacccagaatagtacac

SEQ ID NO: 3535284 - DNA, 25 bp, Homo sapien
tacatggtggcttgccttttaggga

SEQ ID NO: 3535285 - DNA, 25 bp, Homo sapien
gatgaacatcagtcatacaccaggc

SEQ ID NO: 3535286 - DNA, 25 bp, Homo sapien
gtgctaggtgtgcaaaaataactgt

SEQ ID NO: 3535287 - DNA, 25 bp, Homo sapien
ggtgtactaaatgctaagcactgtg

SEQ ID NO: 3535288 - DNA, 25 bp, Homo sapien
gctgaagtgtaacggctcagtctcg

SEQ ID NO: 3535289 - DNA, 25 bp, Homo sapien
tgtccctggctgttctagcaagtat

SEQ ID NO: 3535290 - DNA, 25 bp, Homo sapien
gtggaagtcccttatctgcaagctt

SEQ ID NO: 3535291 - DNA, 25 bp, Homo sapien
tatctgcaagctttggtgggggtac

SEQ ID NO: 3535292 - DNA, 25 bp, Homo sapien
tctgcaagctttggtgggggtacaa

SEQ ID NO: 3535293 - DNA, 25 bp, Homo sapien
ttatctgcaagctttggtgggggta

SEQ ID NO: 3535294 - DNA, 25 bp, Homo sapien
aaattacccctgtgccaaatactct

SEQ ID NO: 3535295 - DNA, 25 bp, Homo sapien
gcaaaattacccctgtgccaaatac

SEQ ID NO: 3535296 - DNA, 25 bp, Homo sapien
caaaattacccctgtgccaaatact

SEQ ID NO: 3535297 - DNA, 25 bp, Homo sapien
accaaagggtgactggggagatatt

SEQ ID NO: 3535298 - DNA, 25 bp, Homo sapien
taaccaaagggtgactggggagata

SEQ ID NO: 3535299 - DNA, 25 bp, Homo sapien
ccaaagggtgactggggagatattt

SEQ ID NO: 3535300 - DNA, 25 bp, Homo sapien
ctaaccaaagggtgactggggagat

SEQ ID NO: 3535301 - DNA, 25 bp, Homo sapien
ccacattcaagtaatccacttggcc

SEQ ID NO: 3535302 - DNA, 25 bp, Homo sapien
caagtaatccacttggcccaaaagt

SEQ ID NO: 3535303 - DNA, 25 bp, Homo sapien
cattcaagtaatccacttggcccaa

SEQ ID NO: 3535304 - DNA, 25 bp, Homo sapien
cacttggcccaaaagtcctttatat

SEQ ID NO: 3535305 - DNA, 25 bp, Homo sapien
gctctcccaccctttgcccctcacc

SEQ ID NO: 3535306 - DNA, 25 bp, Homo sapien
taatgctctcccaccctttgcccct

SEQ ID NO: 3535307 - DNA, 25 bp, Homo sapien
ccctttgcccctcaccctctgacca

SEQ ID NO: 3535308 - DNA, 25 bp, Homo sapien
cccaccctttgcccctcaccctctg

SEQ ID NO: 3535309 - DNA, 25 bp, Homo sapien
cagggccttagaactgatgacccag

SEQ ID NO: 3535310 - DNA, 25 bp, Homo sapien
cctctgcagtataatctccaagcct

SEQ ID NO: 3535311 - DNA, 25 bp, Homo sapien
tccaagccttggctccatggacagg

SEQ ID NO: 3535312 - DNA, 25 bp, Homo sapien
cagtactttaacaactggaactggg

SEQ ID NO: 3535313 - DNA, 25 bp, Homo sapien
caaatattcgtatacttatgatatt

SEQ ID NO: 3535314 - DNA, 25 bp, Homo sapien
gatcaaatattcgtatacttatgat

SEQ ID NO: 3535315 - DNA, 25 bp, Homo sapien
tcaaatattcgtatacttatgatat

SEQ ID NO: 3535316 - DNA, 25 bp, Homo sapien
cagatcaaatattcgtatacttatg

SEQ ID NO: 3535317 - DNA, 25 bp, Homo sapien
tatacagataggatacccaaaggga

SEQ ID NO: 3535318 - DNA, 25 bp, Homo sapien
ccctgtaagaaataggagtgcaaga

SEQ ID NO: 3535319 - DNA, 25 bp, Homo sapien
ggtgaacactaatgcagatatacag

SEQ ID NO: 3535320 - DNA, 25 bp, Homo sapien
tctccatgtgcacaagattatggca

SEQ ID NO: 3535321 - DNA, 25 bp, Homo sapien
tgatatttgataaatgtagcaaaag

SEQ ID NO: 3535322 - DNA, 25 bp, Homo sapien
tgtgatatttgataaatgtagcaaa

SEQ ID NO: 3535323 - DNA, 25 bp, Homo sapien
tcttcctcaacatcaattgtgatat

SEQ ID NO: 3535324 - DNA, 25 bp, Homo sapien
cctcaacatcaattgtgatatttga

SEQ ID NO: 3535325 - DNA, 25 bp, Homo sapien
gctgaccacgctgaatgttgagaat

SEQ ID NO: 3535326 - DNA, 25 bp, Homo sapien
ctcaaattgccaggtttactactgc

SEQ ID NO: 3535327 - DNA, 25 bp, Homo sapien
ttgggttgccctcaaattgccaggt

SEQ ID NO: 3535328 - DNA, 25 bp, Homo sapien
gtttactactgctgaccacgctgaa

SEQ ID NO: 3535329 - DNA, 25 bp, Homo sapien
ttcctttgcacaggttctctgggct

SEQ ID NO: 3535330 - DNA, 25 bp, Homo sapien
gtgtgcacaactatccatgaggaac

SEQ ID NO: 3535331 - DNA, 25 bp, Homo sapien
caggcagtatccttaggcaggggtg

SEQ ID NO: 3535332 - DNA, 25 bp, Homo sapien
caactatccatgaggaacacaggaa

SEQ ID NO: 3535333 - DNA, 25 bp, Homo sapien
caggggtgggaatacttgtagacaa

SEQ ID NO: 3535334 - DNA, 25 bp, Homo sapien
tgcttggagcatgacagaatacatc

SEQ ID NO: 3535335 - DNA, 25 bp, Homo sapien
gctgcttggagcatgacagaataca

SEQ ID NO: 3535336 - DNA, 25 bp, Homo sapien
ctgcttggagcatgacagaatacat

SEQ ID NO: 3535337 - DNA, 25 bp, Homo sapien
aggcaccttactccccaggacaaca

SEQ ID NO: 3535338 - DNA, 25 bp, Homo sapien
caggacaacacccattgctctttgg

SEQ ID NO: 3535339 - DNA, 25 bp, Homo sapien
gggctatcattcttaactgacacta

SEQ ID NO: 3535340 - DNA, 25 bp, Homo sapien
tctctctttgacctttttcaggaac

SEQ ID NO: 3535341 - DNA, 25 bp, Homo sapien
tcttgtactagtttcagaaagccca

SEQ ID NO: 3535342 - DNA, 25 bp, Homo sapien
tttgaccacagggatatagaaggct

SEQ ID NO: 3535343 - DNA, 25 bp, Homo sapien
ttgaccacagggatatagaaggctg

SEQ ID NO: 3535344 - DNA, 25 bp, Homo sapien
atttgaccacagggatatagaaggc

SEQ ID NO: 3535345 - DNA, 25 bp, Homo sapien
tatccagttggaaacataatgttca

SEQ ID NO: 3535346 - DNA, 25 bp, Homo sapien
tggctgcatataacataaggttgaa

SEQ ID NO: 3535347 - DNA, 25 bp, Homo sapien
gctctccaaatgtttgtggcactgt

SEQ ID NO: 3535348 - DNA, 25 bp, Homo sapien
tctgctcagacagcatgaaagctct

SEQ ID NO: 3535349 - DNA, 25 bp, Homo sapien
gaaatgttgacactttgtcattaac

SEQ ID NO: 3535350 - DNA, 25 bp, Homo sapien
gcccttccatttgtatgccgactta

SEQ ID NO: 3535351 - DNA, 25 bp, Homo sapien
ttccatttgtatgccgacttacgct

SEQ ID NO: 3535352 - DNA, 25 bp, Homo sapien
catttgtatgccgacttacgcttca

SEQ ID NO: 3535353 - DNA, 25 bp, Homo sapien
ccttccatttgtatgccgacttacg

SEQ ID NO: 3535354 - DNA, 25 bp, Homo sapien
caagtatgattcaagaagaacatcc

SEQ ID NO: 3535355 - DNA, 25 bp, Homo sapien
tcaaccagtggggttcctttcaaga

SEQ ID NO: 3535356 - DNA, 25 bp, Homo sapien
tttgcagatagaatatataacagtg

SEQ ID NO: 3535357 - DNA, 25 bp, Homo sapien
tactggatacacattggaagcattt

SEQ ID NO: 3535358 - DNA, 25 bp, Homo sapien
gaggaaagcttgtgattttgcacag

SEQ ID NO: 3535359 - DNA, 25 bp, Homo sapien
tatcgattatgatgggagttcactc

SEQ ID NO: 3535360 - DNA, 25 bp, Homo sapien
ttttctttgtatcgattatgatggg

SEQ ID NO: 3535361 - DNA, 25 bp, Homo sapien
gcttgtctattatctgtgtagagga

SEQ ID NO: 3535362 - DNA, 25 bp, Homo sapien
tctgccactgaagagcacaggagat

SEQ ID NO: 3535363 - DNA, 25 bp, Homo sapien
cttctgccactgaagagcacaggag

SEQ ID NO: 3535364 - DNA, 25 bp, Homo sapien
cactgaagagcacaggagatatcct

SEQ ID NO: 3535365 - DNA, 25 bp, Homo sapien
aagagcacaggagatatccttcagc

SEQ ID NO: 3535366 - DNA, 25 bp, Homo sapien
tttggaatttattgttgccccatga

SEQ ID NO: 3535367 - DNA, 25 bp, Homo sapien
tggaatttattgttgccccatgaat

SEQ ID NO: 3535368 - DNA, 25 bp, Homo sapien
tttattgttgccccatgaataaccc

SEQ ID NO: 3535369 - DNA, 25 bp, Homo sapien
gaatttattgttgccccatgaataa

SEQ ID NO: 3535370 - DNA, 25 bp, Homo sapien
gctgtcaggtttgtagccatccatc

SEQ ID NO: 3535371 - DNA, 25 bp, Homo sapien
cagcccttggtacagtcggagagag

SEQ ID NO: 3535372 - DNA, 25 bp, Homo sapien
ggacagctgcgattattgtgacaaa

SEQ ID NO: 3535373 - DNA, 25 bp, Homo sapien
gacaaattgtatcctcagcccttgg

SEQ ID NO: 3535374 - DNA, 25 bp, Homo sapien
ttcatctcatctcccaaattcttcc

SEQ ID NO: 3535375 - DNA, 25 bp, Homo sapien
tcacttttagcttcatctcatctcc

SEQ ID NO: 3535376 - DNA, 25 bp, Homo sapien
gcttcatctcatctcccaaattctt

SEQ ID NO: 3535377 - DNA, 25 bp, Homo sapien
ttgtcacttttagcttcatctcatc

SEQ ID NO: 3535378 - DNA, 25 bp, Homo sapien
gttttacatggtgaccgtgcttcca

SEQ ID NO: 3535379 - DNA, 25 bp, Homo sapien
tggccctgaaatctgataacttggt

SEQ ID NO: 3535380 - DNA, 25 bp, Homo sapien
ttattattatcaaggatagcctgag

SEQ ID NO: 3535381 - DNA, 25 bp, Homo sapien
gcttccagaaataaaactcctgtcc

SEQ ID NO: 3535382 - DNA, 25 bp, Homo sapien
tgtttttcaggttaagcaactgaat

SEQ ID NO: 3535383 - DNA, 25 bp, Homo sapien
taattcacagaaacaccatcttccc

SEQ ID NO: 3535384 - DNA, 25 bp, Homo sapien
tcttccccatcttcattccggggat

SEQ ID NO: 3535385 - DNA, 25 bp, Homo sapien
ccatcttccccatcttcattccggg

SEQ ID NO: 3535386 - DNA, 25 bp, Homo sapien
ttaattcacagaaacaccatcttcc

SEQ ID NO: 3535387 - DNA, 25 bp, Homo sapien
aagaattccatagggaatctttagg

SEQ ID NO: 3535388 - DNA, 25 bp, Homo sapien
gagccagaagtctttagtaagaatt

SEQ ID NO: 3535389 - DNA, 25 bp, Homo sapien
tctttagtaagaattccatagggaa

SEQ ID NO: 3535390 - DNA, 25 bp, Homo sapien
gaactttggactttgctgcataata

SEQ ID NO: 3535391 - DNA, 25 bp, Homo sapien
tgtgcatagagcaactgatttactg

SEQ ID NO: 3535392 - DNA, 25 bp, Homo sapien
ttctaaaagaatgggcctatgtggg

SEQ ID NO: 3535393 - DNA, 25 bp, Homo sapien
ggaagtagacatccatccaagttct

SEQ ID NO: 3535394 - DNA, 25 bp, Homo sapien
cctatgtgggaagtgaagcattgac

SEQ ID NO: 3535395 - DNA, 25 bp, Homo sapien
caggcttcacataaagcgtgtaata

SEQ ID NO: 3535396 - DNA, 25 bp, Homo sapien
acacaggcttcacataaagcgtgta

SEQ ID NO: 3535397 - DNA, 25 bp, Homo sapien
acaggcttcacataaagcgtgtaat

SEQ ID NO: 3535398 - DNA, 25 bp, Homo sapien
cacaggcttcacataaagcgtgtaa

SEQ ID NO: 3535399 - DNA, 25 bp, Homo sapien
tatcacgtttattgacttgtggata

SEQ ID NO: 3535400 - DNA, 25 bp, Homo sapien
cacgtttattgacttgtggatatta

SEQ ID NO: 3535401 - DNA, 25 bp, Homo sapien
acgtttattgacttgtggatattaa

SEQ ID NO: 3535402 - DNA, 25 bp, Homo sapien
ctaggagctttgaacgcttcctgtt

SEQ ID NO: 3535403 - DNA, 25 bp, Homo sapien
gagctttgaacgcttcctgttgcta

SEQ ID NO: 3535404 - DNA, 25 bp, Homo sapien
aacgcttcctgttgctacattttga

SEQ ID NO: 3535405 - DNA, 25 bp, Homo sapien
gctttgaacgcttcctgttgctaca

SEQ ID NO: 3535406 - DNA, 25 bp, Homo sapien
aaaccaaactaattgtgtgaatgcc

SEQ ID NO: 3535407 - DNA, 25 bp, Homo sapien
tcaggcctgaccaaatatccctatg

SEQ ID NO: 3535408 - DNA, 25 bp, Homo sapien
taaagaataatgaggtgactgagac

SEQ ID NO: 3535409 - DNA, 25 bp, Homo sapien
tgactgagaccagagtacacctgcc

SEQ ID NO: 3535410 - DNA, 25 bp, Homo sapien
gagttgactgatgactgttcttttt

SEQ ID NO: 3535411 - DNA, 25 bp, Homo sapien
tggtgtaagaagttgaaataatgca

SEQ ID NO: 3535412 - DNA, 25 bp, Homo sapien
tgtgcttcgacttccagagtagctg

SEQ ID NO: 3535413 - DNA, 25 bp, Homo sapien
acaaaatgctatggtgtaagaagtt

SEQ ID NO: 3535414 - DNA, 25 bp, Homo sapien
gaaataacgccgcatatctacaact

SEQ ID NO: 3535415 - DNA, 25 bp, Homo sapien
gcccgcatcgccaagtcaatcctaa

SEQ ID NO: 3535416 - DNA, 25 bp, Homo sapien
agccctcagaaataacgccgcatat

SEQ ID NO: 3535417 - DNA, 25 bp, Homo sapien
aataacgccgcatatctacaactat

SEQ ID NO: 3535418 - DNA, 25 bp, Homo sapien
aagttttcttcaggtagttgacact

SEQ ID NO: 3535419 - DNA, 25 bp, Homo sapien
cttcaggtagttgacacttcttgtt

SEQ ID NO: 3535420 - DNA, 25 bp, Homo sapien
gtttcctccatattctgactttcac

SEQ ID NO: 3535421 - DNA, 25 bp, Homo sapien
ttcttgtttcctccatattctgact

SEQ ID NO: 3535422 - DNA, 25 bp, Homo sapien
ctgttatgtgagagaagagacatgg

SEQ ID NO: 3535423 - DNA, 25 bp, Homo sapien
gagaagagacatggtgccagtgaaa

SEQ ID NO: 3535424 - DNA, 25 bp, Homo sapien
gccagtgaaatttaggctctcataa

SEQ ID NO: 3535425 - DNA, 25 bp, Homo sapien
ccagtgaaatttaggctctcataaa

SEQ ID NO: 3535426 - DNA, 25 bp, Homo sapien
ttattttctggcattgtcctactgc

SEQ ID NO: 3535427 - DNA, 25 bp, Homo sapien
tattttctggcattgtcctactgct

SEQ ID NO: 3535428 - DNA, 25 bp, Homo sapien
ttttctggcattgtcctactgctgc

SEQ ID NO: 3535429 - DNA, 25 bp, Homo sapien
attttctggcattgtcctactgctg

SEQ ID NO: 3535430 - DNA, 25 bp, Homo sapien
caataagttctcaaaatgttagtac

SEQ ID NO: 3535431 - DNA, 25 bp, Homo sapien
tgccccatcactgtcaaatgtgctt

SEQ ID NO: 3535432 - DNA, 25 bp, Homo sapien
tctttccgaacttgatttctctttc

SEQ ID NO: 3535433 - DNA, 25 bp, Homo sapien
ttgtaagctgtcttcaaatttgaag

SEQ ID NO: 3535434 - DNA, 25 bp, Homo sapien
cagcgtaccaggcattttccttggg

SEQ ID NO: 3535435 - DNA, 25 bp, Homo sapien
tgtgtaccctccaccatgctgtaag

SEQ ID NO: 3535436 - DNA, 25 bp, Homo sapien
gaatgtgtaccctccaccatgctgt

SEQ ID NO: 3535437 - DNA, 25 bp, Homo sapien
atgctgtaagtttcagcgtaccagg

SEQ ID NO: 3535438 - DNA, 25 bp, Homo sapien
caaaaatctatcatcggtgataatg

SEQ ID NO: 3535439 - DNA, 25 bp, Homo sapien
agaaatgtggtaaagggctattata

SEQ ID NO: 3535440 - DNA, 25 bp, Homo sapien
ggcagaagctaaaacccataattta

SEQ ID NO: 3535441 - DNA, 25 bp, Homo sapien
atactaaagatgtcaaggagttttc

SEQ ID NO: 3535442 - DNA, 25 bp, Homo sapien
tgttccacgttgtctttaaaggcat

SEQ ID NO: 3535443 - DNA, 25 bp, Homo sapien
aatcaccatcacactaaaacaatgt

SEQ ID NO: 3535444 - DNA, 25 bp, Homo sapien
cactaaaacaatgttccacgttgtc

SEQ ID NO: 3535445 - DNA, 25 bp, Homo sapien
caaaaacattgtatgaggcaataat

SEQ ID NO: 3535446 - DNA, 25 bp, Homo sapien
acaagatccatttctgcaacatcaa

SEQ ID NO: 3535447 - DNA, 25 bp, Homo sapien
gagtacactaactacaagatccatt

SEQ ID NO: 3535448 - DNA, 25 bp, Homo sapien
tagaaaatgtgagtacactaactac

SEQ ID NO: 3535449 - DNA, 25 bp, Homo sapien
caagatccatttctgcaacatcaac

SEQ ID NO: 3535450 - DNA, 25 bp, Homo sapien
ctgtttccagatcgtagaaccggca

SEQ ID NO: 3535451 - DNA, 25 bp, Homo sapien
gtttccagatcgtagaaccggcaca

SEQ ID NO: 3535452 - DNA, 25 bp, Homo sapien
cactgtttccagatcgtagaaccgg

SEQ ID NO: 3535453 - DNA, 25 bp, Homo sapien
tgtttccagatcgtagaaccggcac

SEQ ID NO: 3535454 - DNA, 25 bp, Homo sapien
atacattgataacaattgccagatt

SEQ ID NO: 3535455 - DNA, 25 bp, Homo sapien
gctgtccctaggtccatctgttttt

SEQ ID NO: 3535456 - DNA, 25 bp, Homo sapien
ctcagactccagctgtccctaggtc

SEQ ID NO: 3535457 - DNA, 25 bp, Homo sapien
gaaatacattgataacaattgccag

SEQ ID NO: 3535458 - DNA, 25 bp, Homo sapien
catatactgtgcagcacgaagctta

SEQ ID NO: 3535459 - DNA, 25 bp, Homo sapien
atatactgtgcagcacgaagcttac

SEQ ID NO: 3535460 - DNA, 25 bp, Homo sapien
ggtgaaattttgacatactcggcac

SEQ ID NO: 3535461 - DNA, 25 bp, Homo sapien
gacatactcggcacctgcaaacact

SEQ ID NO: 3535462 - DNA, 25 bp, Homo sapien
ggcacctgcaaacacttggaaaatt

SEQ ID NO: 3535463 - DNA, 25 bp, Homo sapien
gcaaacacttggaaaatttgccaag

SEQ ID NO: 3535464 - DNA, 25 bp, Homo sapien
cagctgaaggttgttgcttaaagag

SEQ ID NO: 3535465 - DNA, 25 bp, Homo sapien
tctgaaccaaataaagtcctgacat

SEQ ID NO: 3535466 - DNA, 25 bp, Homo sapien
ctctgaaccaaataaagtcctgaca

SEQ ID NO: 3535467 - DNA, 25 bp, Homo sapien
tttgtagagaaatcctagcttcagc

SEQ ID NO: 3535468 - DNA, 25 bp, Homo sapien
gaactatcacttgagccaactctga

SEQ ID NO: 3535469 - DNA, 25 bp, Homo sapien
gcatgtgcaatggtgtattcagcca

SEQ ID NO: 3535470 - DNA, 25 bp, Homo sapien
taagtgaggccaacagagctctgag

SEQ ID NO: 3535471 - DNA, 25 bp, Homo sapien
tgaagccatctagctgcatgtgcaa

SEQ ID NO: 3535472 - DNA, 25 bp, Homo sapien
ccgaggcaatggagagcataaaaag

SEQ ID NO: 3535473 - DNA, 25 bp, Homo sapien
tgaggctccatacaggttccttggc

SEQ ID NO: 3535474 - DNA, 25 bp, Homo sapien
agtgctttcaaggtgctgaggctcc

SEQ ID NO: 3535475 - DNA, 25 bp, Homo sapien
taagaataagagctaacagataggg

SEQ ID NO: 3535476 - DNA, 25 bp, Homo sapien
tataggatacgtgtggagacagacc

SEQ ID NO: 3535477 - DNA, 25 bp, Homo sapien
tacacccacgccttacagttcagaa

SEQ ID NO: 3535478 - DNA, 25 bp, Homo sapien
agaccaggtcctatgtaccccttga

SEQ ID NO: 3535479 - DNA, 25 bp, Homo sapien
gagataagtttctcgctcagctaaa

SEQ ID NO: 3535480 - DNA, 25 bp, Homo sapien
atacagagaaaaatatgtgaaacac

SEQ ID NO: 3535481 - DNA, 25 bp, Homo sapien
aatacagagaaaaatatgtgaaaca

SEQ ID NO: 3535482 - DNA, 25 bp, Homo sapien
aaatacagagaaaaatatgtgaaac

SEQ ID NO: 3535483 - DNA, 25 bp, Homo sapien
ttaaatacagagaaaaatatgtgaa

SEQ ID NO: 3535484 - DNA, 25 bp, Homo sapien
catcataggagttgacatcctccac

SEQ ID NO: 3535485 - DNA, 25 bp, Homo sapien
ttgtttaggagtcgcaccaagggcc

SEQ ID NO: 3535486 - DNA, 25 bp, Homo sapien
gaaacaagataggagatgccatcat

SEQ ID NO: 3535487 - DNA, 25 bp, Homo sapien
caggtttctggccagacgaaccaac

SEQ ID NO: 3535488 - DNA, 25 bp, Homo sapien
gcaaggccccggaaacgcggcacca

SEQ ID NO: 3535489 - DNA, 25 bp, Homo sapien
gtgtaccggcatttccgcaaggccc

SEQ ID NO: 3535490 - DNA, 25 bp, Homo sapien
ctctcaaaggccgagaggtgtaccg

SEQ ID NO: 3535491 - DNA, 25 bp, Homo sapien
ggactataagggatgatgtgcgggt

SEQ ID NO: 3535492 - DNA, 25 bp, Homo sapien
aagggccggaagttcgagcgtgcca

SEQ ID NO: 3535493 - DNA, 25 bp, Homo sapien
gaagttcgagcgtgccagaggccga

SEQ ID NO: 3535494 - DNA, 25 bp, Homo sapien
ggccggaagttcgagcgtgccagag

SEQ ID NO: 3535495 - DNA, 25 bp, Homo sapien
tccaagggccggaagttcgagcgtg

SEQ ID NO: 3535496 - DNA, 25 bp, Homo sapien
ctctgcgagtactttttccgtgaca

SEQ ID NO: 3535497 - DNA, 25 bp, Homo sapien
tctgcgagtactttttccgtgacaa

SEQ ID NO: 3535498 - DNA, 25 bp, Homo sapien
cgagtactttttccgtgacaatata

SEQ ID NO: 3535499 - DNA, 25 bp, Homo sapien
tgcgagtactttttccgtgacaata

SEQ ID NO: 3535500 - DNA, 25 bp, Homo sapien
aatcaggaatccagctattttcagg

SEQ ID NO: 3535501 - DNA, 25 bp, Homo sapien
taaatgtactccaccaaccatcatc

SEQ ID NO: 3535502 - DNA, 25 bp, Homo sapien
ccagctattttcagggtagccttct

SEQ ID NO: 3535503 - DNA, 25 bp, Homo sapien
cccactcctgtgtggattcctagtt

SEQ ID NO: 3535504 - DNA, 25 bp, Homo sapien
attgatgaaaagtcaccagtaagtg

SEQ ID NO: 3535505 - DNA, 25 bp, Homo sapien
aactgttatgcctttctgagtcaat

SEQ ID NO: 3535506 - DNA, 25 bp, Homo sapien
caccagtaagtgaattggcagaatt

SEQ ID NO: 3535507 - DNA, 25 bp, Homo sapien
ctgagtcaatattaaataccaacac

SEQ ID NO: 3535508 - DNA, 25 bp, Homo sapien
tgggaaattcccgtctacatcagga

SEQ ID NO: 3535509 - DNA, 25 bp, Homo sapien
gacttcttaatgtagcacagcccag

SEQ ID NO: 3535510 - DNA, 25 bp, Homo sapien
tactttcaggaatatgctcacccca

SEQ ID NO: 3535511 - DNA, 25 bp, Homo sapien
gcatcactgtctaactcaagccctg

SEQ ID NO: 3535512 - DNA, 25 bp, Homo sapien
cagttctgtttaattgggaaatgtc

SEQ ID NO: 3535513 - DNA, 25 bp, Homo sapien
gatctgcaagtgtatttctgccatg

SEQ ID NO: 3535514 - DNA, 25 bp, Homo sapien
tatatccctccaggattttgacagg

SEQ ID NO: 3535515 - DNA, 25 bp, Homo sapien
tggaacaagttcctccatcatgtgc

SEQ ID NO: 3535516 - DNA, 25 bp, Homo sapien
gcatggccaggttgtttgactcctt

SEQ ID NO: 3535517 - DNA, 25 bp, Homo sapien
tcttctctggaacgcaattgcatct

SEQ ID NO: 3535518 - DNA, 25 bp, Homo sapien
tgcattaacacctctcatggttccc

SEQ ID NO: 3535519 - DNA, 25 bp, Homo sapien
gaagtgagtgatcagaacatctact

SEQ ID NO: 3535520 - DNA, 25 bp, Homo sapien
ttactttctagtttgcctgcgtgga

SEQ ID NO: 3535521 - DNA, 25 bp, Homo sapien
tgcataaatccagctggcagaagtt

SEQ ID NO: 3535522 - DNA, 25 bp, Homo sapien
cctgcgtggattgattttgcacaaa

SEQ ID NO: 3535523 - DNA, 25 bp, Homo sapien
caagtggtaatagctactctggagg

SEQ ID NO: 3535524 - DNA, 25 bp, Homo sapien
tgattctcatctgctcctctttctc

SEQ ID NO: 3535525 - DNA, 25 bp, Homo sapien
tcttttctttgattctcatctgctc

SEQ ID NO: 3535526 - DNA, 25 bp, Homo sapien
tttctttgattctcatctgctcctc

SEQ ID NO: 3535527 - DNA, 25 bp, Homo sapien
tttgattctcatctgctcctctttc

SEQ ID NO: 3535528 - DNA, 25 bp, Homo sapien
tttatgtagcgtgaatatattgttc

SEQ ID NO: 3535529 - DNA, 25 bp, Homo sapien
tgattactaagctgcacaaacagga

SEQ ID NO: 3535530 - DNA, 25 bp, Homo sapien
acttctttatgtagcgtgaatatat

SEQ ID NO: 3535531 - DNA, 25 bp, Homo sapien
tcttgtgtgattactaagctgcaca

SEQ ID NO: 3535532 - DNA, 25 bp, Homo sapien
agctgaccagggaagagtagccaag

SEQ ID NO: 3535533 - DNA, 25 bp, Homo sapien
aaagctgaccagggaagagtagcca

SEQ ID NO: 3535534 - DNA, 25 bp, Homo sapien
cacaaaagctgaccagggaagagta

SEQ ID NO: 3535535 - DNA, 25 bp, Homo sapien
aagctgaccagggaagagtagccaa

SEQ ID NO: 3535536 - DNA, 25 bp, Homo sapien
tccacttagatccaattcctttctc

SEQ ID NO: 3535537 - DNA, 25 bp, Homo sapien
tctacacatcttccacttagatcca

SEQ ID NO: 3535538 - DNA, 25 bp, Homo sapien
tcttccactggaactttgtgatcat

SEQ ID NO: 3535539 - DNA, 25 bp, Homo sapien
ctcttccactggaactttgtgatca

SEQ ID NO: 3535540 - DNA, 25 bp, Homo sapien
ttttgtcattgaattgtgtccgtgt

SEQ ID NO: 3535541 - DNA, 25 bp, Homo sapien
taggagatgctcctagtacaacaac

SEQ ID NO: 3535542 - DNA, 25 bp, Homo sapien
tccgtgtagtgttaggagatgctcc

SEQ ID NO: 3535543 - DNA, 25 bp, Homo sapien
gaattgtgtccgtgtagtgttagga

SEQ ID NO: 3535544 - DNA, 25 bp, Homo sapien
ctggccaatagtcttgccacaggga

SEQ ID NO: 3535545 - DNA, 25 bp, Homo sapien
tgccacagggacagtgtcgctgaat

SEQ ID NO: 3535546 - DNA, 25 bp, Homo sapien
tggccaatagtcttgccacagggac

SEQ ID NO: 3535547 - DNA, 25 bp, Homo sapien
cacagggacagtgtcgctgaatcat

SEQ ID NO: 3535548 - DNA, 25 bp, Homo sapien
gcagatgtggctgtaataccagact

SEQ ID NO: 3535549 - DNA, 25 bp, Homo sapien
agaacaccagcatgaccccaaaata

SEQ ID NO: 3535550 - DNA, 25 bp, Homo sapien
tacttgccagaattggtgtccctgg

SEQ ID NO: 3535551 - DNA, 25 bp, Homo sapien
ccggctgagatctgggccagcagat

SEQ ID NO: 3535552 - DNA, 25 bp, Homo sapien
aacagttttgagctctgctagtagt

SEQ ID NO: 3535553 - DNA, 25 bp, Homo sapien
cagaaacaaccagtttgtaggtcat

SEQ ID NO: 3535554 - DNA, 25 bp, Homo sapien
tgaaccaaggaagtagcggcagctt

SEQ ID NO: 3535555 - DNA, 25 bp, Homo sapien
ggaagctgtgacattgtcgcccttg

SEQ ID NO: 3535556 - DNA, 25 bp, Homo sapien
catctcagaaactctgtagcttcta

SEQ ID NO: 3535557 - DNA, 25 bp, Homo sapien
tcatctcagaaactctgtagcttct

SEQ ID NO: 3535558 - DNA, 25 bp, Homo sapien
ctcagaaactctgtagcttctaaat

SEQ ID NO: 3535559 - DNA, 25 bp, Homo sapien
agaaactctgtagcttctaaatcac

SEQ ID NO: 3535560 - DNA, 25 bp, Homo sapien
cattaggtaacctccatattctgaa

SEQ ID NO: 3535561 - DNA, 25 bp, Homo sapien
ctaactctttgtgtcacccattagg

SEQ ID NO: 3535562 - DNA, 25 bp, Homo sapien
taagcctagatccagggactgtaga

SEQ ID NO: 3535563 - DNA, 25 bp, Homo sapien
caataagcctagatccagggactgt

SEQ ID NO: 3535564 - DNA, 25 bp, Homo sapien
tcttttgacttctttattctctgca

SEQ ID NO: 3535565 - DNA, 25 bp, Homo sapien
tctttattctctgcagtgcattggt

SEQ ID NO: 3535566 - DNA, 25 bp, Homo sapien
ctttattctctgcagtgcattggtg

SEQ ID NO: 3535567 - DNA, 25 bp, Homo sapien
tgacttctttattctctgcagtgca

SEQ ID NO: 3535568 - DNA, 25 bp, Homo sapien
tggagccacttggaccatttgattg

SEQ ID NO: 3535569 - DNA, 25 bp, Homo sapien
gaagtagttatatggtcattagtca

SEQ ID NO: 3535570 - DNA, 25 bp, Homo sapien
catttgattgctaaggcattgggta

SEQ ID NO: 3535571 - DNA, 25 bp, Homo sapien
ggcattgggtagagaagtagttata

SEQ ID NO: 3535572 - DNA, 25 bp, Homo sapien
aaagcggtcagctaatccccaggtg

SEQ ID NO: 3535573 - DNA, 25 bp, Homo sapien
tggatctcaatggacagtggatgac

SEQ ID NO: 3535574 - DNA, 25 bp, Homo sapien
ggatgacgatgctcatggacagcca

SEQ ID NO: 3535575 - DNA, 25 bp, Homo sapien
tccccaggtgccattgtggatctca

SEQ ID NO: 3535576 - DNA, 25 bp, Homo sapien
gggtatttatttctagcttagccaa

SEQ ID NO: 3535577 - DNA, 25 bp, Homo sapien
tgggggtatttatttctagcttagc

SEQ ID NO: 3535578 - DNA, 25 bp, Homo sapien
tatttatttctagcttagccaagtt

SEQ ID NO: 3535579 - DNA, 25 bp, Homo sapien
tttatttctagcttagccaagttaa

SEQ ID NO: 3535580 - DNA, 25 bp, Homo sapien
tctttgccatgtgttgaagcataaa

SEQ ID NO: 3535581 - DNA, 25 bp, Homo sapien
tgacttaaggaagccttcactatcc

SEQ ID NO: 3535582 - DNA, 25 bp, Homo sapien
tcactatccgcattaccaaaaacag

SEQ ID NO: 3535583 - DNA, 25 bp, Homo sapien
gcataaaattgggatgcaaatctct

SEQ ID NO: 3535584 - DNA, 25 bp, Homo sapien
ctgacattctgtggtactgaacttt

SEQ ID NO: 3535585 - DNA, 25 bp, Homo sapien
tctgtggtactgaactttgtctcta

SEQ ID NO: 3535586 - DNA, 25 bp, Homo sapien
ctttgtctctatggggacatttccc

SEQ ID NO: 3535587 - DNA, 25 bp, Homo sapien
tggtactgaactttgtctctatggg

SEQ ID NO: 3535588 - DNA, 25 bp, Homo sapien
gtaagctctcagcatgctcccctgt

SEQ ID NO: 3535589 - DNA, 25 bp, Homo sapien
atgctgccggccatgcaagacacca

SEQ ID NO: 3535590 - DNA, 25 bp, Homo sapien
caccatgtgtaagctctcagcatgc

SEQ ID NO: 3535591 - DNA, 25 bp, Homo sapien
atctgtatgctgccggccatgcaag

SEQ ID NO: 3535592 - DNA, 25 bp, Homo sapien
tatgctctcggccatcaccatggtc

SEQ ID NO: 3535593 - DNA, 25 bp, Homo sapien
tctttctgtcaacgggctccatcct

SEQ ID NO: 3535594 - DNA, 25 bp, Homo sapien
caaatcgtatactttagcctctgca

SEQ ID NO: 3535595 - DNA, 25 bp, Homo sapien
gcctctgcattaggtaaggtcttca

SEQ ID NO: 3535596 - DNA, 25 bp, Homo sapien
gcagtgatatttccccgcaagttgt

SEQ ID NO: 3535597 - DNA, 25 bp, Homo sapien
agtagcagtgatatttccccgcaag

SEQ ID NO: 3535598 - DNA, 25 bp, Homo sapien
tagcagtgatatttccccgcaagtt

SEQ ID NO: 3535599 - DNA, 25 bp, Homo sapien
acagtagcagtgatatttccccgca

SEQ ID NO: 3535600 - DNA, 25 bp, Homo sapien
atgcatgtacctttaatttccaggt

SEQ ID NO: 3535601 - DNA, 25 bp, Homo sapien
catgcatgtacctttaatttccagg

SEQ ID NO: 3535602 - DNA, 25 bp, Homo sapien
tgcatgtacctttaatttccaggtt

SEQ ID NO: 3535603 - DNA, 25 bp, Homo sapien
gaagcgtttggcagattgaacggaa

SEQ ID NO: 3535604 - DNA, 25 bp, Homo sapien
tctctgtgaagcgtttggcagattg

SEQ ID NO: 3535605 - DNA, 25 bp, Homo sapien
gcgtttggcagattgaacggaatca

SEQ ID NO: 3535606 - DNA, 25 bp, Homo sapien
ctgtgaagcgtttggcagattgaac

SEQ ID NO: 3535607 - DNA, 25 bp, Homo sapien
ctttgagtccaatagttcaaatttc

SEQ ID NO: 3535608 - DNA, 25 bp, Homo sapien
ctcaaataatctcagcttgctttcc

SEQ ID NO: 3535609 - DNA, 25 bp, Homo sapien
agtcacccaactttgagtccaatag

SEQ ID NO: 3535610 - DNA, 25 bp, Homo sapien
tcatatgctctcaaataatctcagc

SEQ ID NO: 3535611 - DNA, 25 bp, Homo sapien
tgaggtctgcattcctaaaaggatt

SEQ ID NO: 3535612 - DNA, 25 bp, Homo sapien
tctgcattcctaaaaggattttgca

SEQ ID NO: 3535613 - DNA, 25 bp, Homo sapien
aaatggtggccatctttttgaggtc

SEQ ID NO: 3535614 - DNA, 25 bp, Homo sapien
cttgggagaaaaaatggtggccatc

SEQ ID NO: 3535615 - DNA, 25 bp, Homo sapien
gaaggaatcaaacctccagaaactg

SEQ ID NO: 3535616 - DNA, 25 bp, Homo sapien
cccataccctctatgactctctcga

SEQ ID NO: 3535617 - DNA, 25 bp, Homo sapien
gagaaaggaaggaatcaaacctcca

SEQ ID NO: 3535618 - DNA, 25 bp, Homo sapien
ccaatcccataccctctatgactct

SEQ ID NO: 3535619 - DNA, 25 bp, Homo sapien
aaccacattatttgacttgacctca

SEQ ID NO: 3535620 - DNA, 25 bp, Homo sapien
ttacctgactacacataaagcaaag

SEQ ID NO: 3535621 - DNA, 25 bp, Homo sapien
tctgtgtcagagtattctattacct

SEQ ID NO: 3535622 - DNA, 25 bp, Homo sapien
tccctgtgtttgatcaatagagtaa

SEQ ID NO: 3535623 - DNA, 25 bp, Homo sapien
accaggcctgccttaaagggctcct

SEQ ID NO: 3535624 - DNA, 25 bp, Homo sapien
agaattttcaacccagaatttcata

SEQ ID NO: 3535625 - DNA, 25 bp, Homo sapien
gcctgccttaaagggctcctgaagg

SEQ ID NO: 3535626 - DNA, 25 bp, Homo sapien
ccaatattcaacatttctaaaggaa

SEQ ID NO: 3535627 - DNA, 25 bp, Homo sapien
tggagcataacccttttttccacca

SEQ ID NO: 3535628 - DNA, 25 bp, Homo sapien
aaaacacattgccattaaaacacac

SEQ ID NO: 3535629 - DNA, 25 bp, Homo sapien
ttaggtcgctggagcataacccttt

SEQ ID NO: 3535630 - DNA, 25 bp, Homo sapien
gccattaaaacacactgccattaaa

SEQ ID NO: 3535631 - DNA, 25 bp, Homo sapien
tttacatgaattaccatcttttctg

SEQ ID NO: 3535632 - DNA, 25 bp, Homo sapien
catgaattaccatcttttctgatgt

SEQ ID NO: 3535633 - DNA, 25 bp, Homo sapien
tgaattaccatcttttctgatgttt

SEQ ID NO: 3535634 - DNA, 25 bp, Homo sapien
tttttacatgaattaccatcttttc

SEQ ID NO: 3535635 - DNA, 25 bp, Homo sapien
attctgggattcagggtgatggaag

SEQ ID NO: 3535636 - DNA, 25 bp, Homo sapien
gtaatgttcgtgtggcaattctggg

SEQ ID NO: 3535637 - DNA, 25 bp, Homo sapien
ctgaatatccagtaatgttcgtgtg

SEQ ID NO: 3535638 - DNA, 25 bp, Homo sapien
gattcagggtgatggaagttctgct

SEQ ID NO: 3535639 - DNA, 25 bp, Homo sapien
tagaaccagctctgttgaaactgct

SEQ ID NO: 3535640 - DNA, 25 bp, Homo sapien
agatcccacactggctgaagataaa

SEQ ID NO: 3535641 - DNA, 25 bp, Homo sapien
ctatagaaccagctctgttgaaact

SEQ ID NO: 3535642 - DNA, 25 bp, Homo sapien
tcccacactggctgaagataaacct

SEQ ID NO: 3535643 - DNA, 25 bp, Homo sapien
gtagaaatagacgtacatcccaagg

SEQ ID NO: 3535644 - DNA, 25 bp, Homo sapien
gcaggcttcaaccagtttcacacag

SEQ ID NO: 3535645 - DNA, 25 bp, Homo sapien
tgcagtatccaactccacgcaggct

SEQ ID NO: 3535646 - DNA, 25 bp, Homo sapien
caaggtccctggcaaatccccttag

SEQ ID NO: 3535647 - DNA, 25 bp, Homo sapien
ttccggatctccaaacatgcatttt

SEQ ID NO: 3535648 - DNA, 25 bp, Homo sapien
cctgcactaagatggagtggtgcca

SEQ ID NO: 3535649 - DNA, 25 bp, Homo sapien
gcctgagaagatattatggcctcag

SEQ ID NO: 3535650 - DNA, 25 bp, Homo sapien
agtggtgccaaataggacaatagtt

SEQ ID NO: 3535651 - DNA, 25 bp, Homo sapien
agcacaacttcctttgcatcgtttt

SEQ ID NO: 3535652 - DNA, 25 bp, Homo sapien
caacttcctttgcatcgttttttgg

SEQ ID NO: 3535653 - DNA, 25 bp, Homo sapien
ttggctttgacatcagacataagag

SEQ ID NO: 3535654 - DNA, 25 bp, Homo sapien
gacatcagacataagagcgtaagaa

SEQ ID NO: 3535655 - DNA, 25 bp, Homo sapien
tagtgtttgatccttctattatacc

SEQ ID NO: 3535656 - DNA, 25 bp, Homo sapien
gtttgatccttctattataccctta

SEQ ID NO: 3535657 - DNA, 25 bp, Homo sapien
ccaatagtgtttgatccttctatta

SEQ ID NO: 3535658 - DNA, 25 bp, Homo sapien
tgttagcacaaatggtctggatctc

SEQ ID NO: 3535659 - DNA, 25 bp, Homo sapien
ttgtcctcatccctatttttctgat

SEQ ID NO: 3535660 - DNA, 25 bp, Homo sapien
catgatattgtcctcatccctattt

SEQ ID NO: 3535661 - DNA, 25 bp, Homo sapien
atattgtcctcatccctatttttct

SEQ ID NO: 3535662 - DNA, 25 bp, Homo sapien
tgtcctcatccctatttttctgatt

SEQ ID NO: 3535663 - DNA, 25 bp, Homo sapien
taagcacagagtcctttgggatgat

SEQ ID NO: 3535664 - DNA, 25 bp, Homo sapien
ataagcacagagtcctttgggatga

SEQ ID NO: 3535665 - DNA, 25 bp, Homo sapien
cataagcacagagtcctttgggatg

SEQ ID NO: 3535666 - DNA, 25 bp, Homo sapien
aagcacagagtcctttgggatgatc

SEQ ID NO: 3535667 - DNA, 25 bp, Homo sapien
tgcagctacggttctgatgggccaa

SEQ ID NO: 3535668 - DNA, 25 bp, Homo sapien
caaaagagtgttcgagactaaggtc

SEQ ID NO: 3535669 - DNA, 25 bp, Homo sapien
tctgtatcccgatggagcatgagaa

SEQ ID NO: 3535670 - DNA, 25 bp, Homo sapien
cctggagaccacaaaaccatggagt

SEQ ID NO: 3535671 - DNA, 25 bp, Homo sapien
aaaatatggcaatcagggaagggag

SEQ ID NO: 3535672 - DNA, 25 bp, Homo sapien
tgagcattctacaaagggtaagcct

SEQ ID NO: 3535673 - DNA, 25 bp, Homo sapien
aatagactggatctcaccactagaa

SEQ ID NO: 3535674 - DNA, 25 bp, Homo sapien
ttttgaaacagtagatttagcccag

SEQ ID NO: 3535675 - DNA, 25 bp, Homo sapien
tctagtcggcgcaaagaaggaattc

SEQ ID NO: 3535676 - DNA, 25 bp, Homo sapien
caagaagttgaagagccagcagcac

SEQ ID NO: 3535677 - DNA, 25 bp, Homo sapien
tccagagtgttgaggttcgccagac

SEQ ID NO: 3535678 - DNA, 25 bp, Homo sapien
caagtatacaaaagctccattcggg

SEQ ID NO: 3535679 - DNA, 25 bp, Homo sapien
tcataatttatctggtgttggtcct

SEQ ID NO: 3535680 - DNA, 25 bp, Homo sapien
tcaatgctgcatatagcctcaagtc

SEQ ID NO: 3535681 - DNA, 25 bp, Homo sapien
aaagggacttcttcagaggcctcat

SEQ ID NO: 3535682 - DNA, 25 bp, Homo sapien
tattgccccatagatcatttgtgag

SEQ ID NO: 3535683 - DNA, 25 bp, Homo sapien
cccttaagttaggagtggaacacag

SEQ ID NO: 3535684 - DNA, 25 bp, Homo sapien
catggaaacagtgctacagaaggta

SEQ ID NO: 3535685 - DNA, 25 bp, Homo sapien
taaagggccaactacagctcatagg

SEQ ID NO: 3535686 - DNA, 25 bp, Homo sapien
gctcataggtgccaagtaggtaaga

SEQ ID NO: 3535687 - DNA, 25 bp, Homo sapien
ggaaaccgtctaattgatgggctca

SEQ ID NO: 3535688 - DNA, 25 bp, Homo sapien
gtaagtaggcagtgcgtttgccaat

SEQ ID NO: 3535689 - DNA, 25 bp, Homo sapien
gggtctctatgctgtaagtaggcag

SEQ ID NO: 3535690 - DNA, 25 bp, Homo sapien
tctccactgggggtctctatgctgt

SEQ ID NO: 3535691 - DNA, 25 bp, Homo sapien
tctatgctgtaagtaggcagtgcgt

SEQ ID NO: 3535692 - DNA, 25 bp, Homo sapien
aaggatccggtacctcatcacaaga

SEQ ID NO: 3535693 - DNA, 25 bp, Homo sapien
gaattgcagaaggatccggtacctc

SEQ ID NO: 3535694 - DNA, 25 bp, Homo sapien
ttgcagaaggatccggtacctcatc

SEQ ID NO: 3535695 - DNA, 25 bp, Homo sapien
cagaaggatccggtacctcatcaca

SEQ ID NO: 3535696 - DNA, 25 bp, Homo sapien
agccagacatcatttccggtgccag

SEQ ID NO: 3535697 - DNA, 25 bp, Homo sapien
cattagctcataggcatcacagctg

SEQ ID NO: 3535698 - DNA, 25 bp, Homo sapien
gctgcaaacgctcaaacattttggc

SEQ ID NO: 3535699 - DNA, 25 bp, Homo sapien
cagggacttagtctgcttgaccttc

SEQ ID NO: 3535700 - DNA, 25 bp, Homo sapien
tggagactgtctcatcaaggcagac

SEQ ID NO: 3535701 - DNA, 25 bp, Homo sapien
gacacactatatgcaaaggctggct

SEQ ID NO: 3535702 - DNA, 25 bp, Homo sapien
ccctattgatccacagtctgcagca

SEQ ID NO: 3535703 - DNA, 25 bp, Homo sapien
taaataattccaaagcaccacagcc

SEQ ID NO: 3535704 - DNA, 25 bp, Homo sapien
ttcttctccccggagactgagtgct

SEQ ID NO: 3535705 - DNA, 25 bp, Homo sapien
gagactgagtgcttctcaagggcag

SEQ ID NO: 3535706 - DNA, 25 bp, Homo sapien
taggcacagagatcaggacccccgc

SEQ ID NO: 3535707 - DNA, 25 bp, Homo sapien
tccccggagactgagtgcttctcaa

SEQ ID NO: 3535708 - DNA, 25 bp, Homo sapien
ctgagaaagaccctgaagattaacc

SEQ ID NO: 3535709 - DNA, 25 bp, Homo sapien
ccacacgatattggcaccactgaga

SEQ ID NO: 3535710 - DNA, 25 bp, Homo sapien
cctgaagattaaccagcccagccat

SEQ ID NO: 3535711 - DNA, 25 bp, Homo sapien
aaggagcagcccagtttcaagcacc

SEQ ID NO: 3535712 - DNA, 25 bp, Homo sapien
tgcaatctagaaagtaaggatttct

SEQ ID NO: 3535713 - DNA, 25 bp, Homo sapien
ctgaggatgcaatctagaaagtaag

SEQ ID NO: 3535714 - DNA, 25 bp, Homo sapien
ggatttcttgaataagcaaatagtt

SEQ ID NO: 3535715 - DNA, 25 bp, Homo sapien
ctcatgtgtctagcctgagtcagag

SEQ ID NO: 3535716 - DNA, 25 bp, Homo sapien
gtctaccttctaatccaaattctcc

SEQ ID NO: 3535717 - DNA, 25 bp, Homo sapien
taggactttccgtagaataagtcta

SEQ ID NO: 3535718 - DNA, 25 bp, Homo sapien
ccatcgctaattttgagtcacacaa

SEQ ID NO: 3535719 - DNA, 25 bp, Homo sapien
caaattctcccatcgctaattttga

SEQ ID NO: 3535720 - DNA, 25 bp, Homo sapien
ttctctcttacttggattttggtct

SEQ ID NO: 3535721 - DNA, 25 bp, Homo sapien
cccgtagggatatgttgtgtgacca

SEQ ID NO: 3535722 - DNA, 25 bp, Homo sapien
gaagatattcagttatgcctattaa

SEQ ID NO: 3535723 - DNA, 25 bp, Homo sapien
tatttggctaacatgatggcactga

SEQ ID NO: 3535724 - DNA, 25 bp, Homo sapien
tgaagatgattgttatgatgatgac

SEQ ID NO: 3535725 - DNA, 25 bp, Homo sapien
agtaggtgatgctcctttgaagatg

SEQ ID NO: 3535726 - DNA, 25 bp, Homo sapien
tttagcctacctgtatctctattct

SEQ ID NO: 3535727 - DNA, 25 bp, Homo sapien
tgatgatgacagtttttagcctacc

SEQ ID NO: 3535728 - DNA, 25 bp, Homo sapien
tcatgcattctgcagagcaacatct

SEQ ID NO: 3535729 - DNA, 25 bp, Homo sapien
gccaactgactataaggatttgata

SEQ ID NO: 3535730 - DNA, 25 bp, Homo sapien
gcagagcaacatctgccaactgact

SEQ ID NO: 3535731 - DNA, 25 bp, Homo sapien
gactataaggatttgatagcaaagc

SEQ ID NO: 3535732 - DNA, 25 bp, Homo sapien
tccaggggtcatccttcacattata

SEQ ID NO: 3535733 - DNA, 25 bp, Homo sapien
caggggtcatccttcacattatatc

SEQ ID NO: 3535734 - DNA, 25 bp, Homo sapien
ccaggggtcatccttcacattatat

SEQ ID NO: 3535735 - DNA, 25 bp, Homo sapien
atccaggggtcatccttcacattat

SEQ ID NO: 3535736 - DNA, 25 bp, Homo sapien
gatctcattactttgtccttttgct

SEQ ID NO: 3535737 - DNA, 25 bp, Homo sapien
ttgccttgtgcatttatgtgcggac

SEQ ID NO: 3535738 - DNA, 25 bp, Homo sapien
catttatgtgcggactttcccgtgt

SEQ ID NO: 3535739 - DNA, 25 bp, Homo sapien
cattatcttcttgggatgactgatc

SEQ ID NO: 3535740 - DNA, 25 bp, Homo sapien
caattttgccctgctttctaaatcc

SEQ ID NO: 3535741 - DNA, 25 bp, Homo sapien
ttattattgcagctgttgaagtaac

SEQ ID NO: 3535742 - DNA, 25 bp, Homo sapien
aaatgggctctaagaatatacatac

SEQ ID NO: 3535743 - DNA, 25 bp, Homo sapien
tgttgaagtaacttaaatgggctct

SEQ ID NO: 3535744 - DNA, 25 bp, Homo sapien
tgagcatactgacatttgagcacct

SEQ ID NO: 3535745 - DNA, 25 bp, Homo sapien
gatattcatacacgaaaggatagga

SEQ ID NO: 3535746 - DNA, 25 bp, Homo sapien
tattccttcctgagtaaggtggcta

SEQ ID NO: 3535747 - DNA, 25 bp, Homo sapien
cctccttacaatgaggtagaggtga

SEQ ID NO: 3535748 - DNA, 25 bp, Homo sapien
tgatggcgctgtgccggcaaagcac

SEQ ID NO: 3535749 - DNA, 25 bp, Homo sapien
aaggctctaatgagacccatttcac

SEQ ID NO: 3535750 - DNA, 25 bp, Homo sapien
tctgtcccttcttggcttcagtgaa

SEQ ID NO: 3535751 - DNA, 25 bp, Homo sapien
catgccgggatatgaaaggctctaa

SEQ ID NO: 3535752 - DNA, 25 bp, Homo sapien
tcaattaacatatcgccacaacacc

SEQ ID NO: 3535753 - DNA, 25 bp, Homo sapien
tcgccacaacaccaaccattataat

SEQ ID NO: 3535754 - DNA, 25 bp, Homo sapien
tctgcacttgcctggagcgattcaa

SEQ ID NO: 3535755 - DNA, 25 bp, Homo sapien
gcctggagcgattcaattaacatat

SEQ ID NO: 3535756 - DNA, 25 bp, Homo sapien
aatcaatgcctcaatctgccgcggt

SEQ ID NO: 3535757 - DNA, 25 bp, Homo sapien
ccattgcgttcggttccaggagaaa

SEQ ID NO: 3535758 - DNA, 25 bp, Homo sapien
catttgtgttaagatccagggctca

SEQ ID NO: 3535759 - DNA, 25 bp, Homo sapien
cattcttgaatgctccctgtgtgca

SEQ ID NO: 3535760 - DNA, 25 bp, Homo sapien
atttttgatttcagccacccggcca

SEQ ID NO: 3535761 - DNA, 25 bp, Homo sapien
tccgtcagctgtcaagaagaaaccc

SEQ ID NO: 3535762 - DNA, 25 bp, Homo sapien
tccatcagccggtagtggctccggg

SEQ ID NO: 3535763 - DNA, 25 bp, Homo sapien
taatctcacgttaaatggagtgcgg

SEQ ID NO: 3535764 - DNA, 25 bp, Homo sapien
cacaagttggttcccgttggcgcag

SEQ ID NO: 3535765 - DNA, 25 bp, Homo sapien
cagctgcgttgggtacattttggag

SEQ ID NO: 3535766 - DNA, 25 bp, Homo sapien
gttggcgcagaccttcccgatgtct

SEQ ID NO: 3535767 - DNA, 25 bp, Homo sapien
tcctctgcgaggagacgcgttctcg

SEQ ID NO: 3535768 - DNA, 25 bp, Homo sapien
caatgccacgtcctgacgcttaggg

SEQ ID NO: 3535769 - DNA, 25 bp, Homo sapien
tccacttcggtttgaactctcttcc

SEQ ID NO: 3535770 - DNA, 25 bp, Homo sapien
gacgcttagggtcctagcttccaaa

SEQ ID NO: 3535771 - DNA, 25 bp, Homo sapien
aggctttctctcgaccaatgccacg

SEQ ID NO: 3535772 - DNA, 25 bp, Homo sapien
gtttaataagtgctctggatttctg

SEQ ID NO: 3535773 - DNA, 25 bp, Homo sapien
aataagtgctctggatttctgcaga

SEQ ID NO: 3535774 - DNA, 25 bp, Homo sapien
gatttctgcagatacttctttatac

SEQ ID NO: 3535775 - DNA, 25 bp, Homo sapien
caaagaagtttaataagtgctctgg

SEQ ID NO: 3535776 - DNA, 25 bp, Homo sapien
gacagtttgccacagattattctca

SEQ ID NO: 3535777 - DNA, 25 bp, Homo sapien
agcatcaagggtcccaaccagacag

SEQ ID NO: 3535778 - DNA, 25 bp, Homo sapien
tataggtgcctagtccaaggacact

SEQ ID NO: 3535779 - DNA, 25 bp, Homo sapien
gggaccttgtaatcatttgatggga

SEQ ID NO: 3535780 - DNA, 25 bp, Homo sapien
gaaggaagaactctctggacggcag

SEQ ID NO: 3535781 - DNA, 25 bp, Homo sapien
ctggataggaattttgggttgtctt

SEQ ID NO: 3535782 - DNA, 25 bp, Homo sapien
ctatgcctggataggaattttgggt

SEQ ID NO: 3535783 - DNA, 25 bp, Homo sapien
gcctggataggaattttgggttgtc

SEQ ID NO: 3535784 - DNA, 25 bp, Homo sapien
tatgcctggataggaattttgggtt

SEQ ID NO: 3535785 - DNA, 25 bp, Homo sapien
atggggccagccacaaaaactatta

SEQ ID NO: 3535786 - DNA, 25 bp, Homo sapien
tggggccagccacaaaaactattac

SEQ ID NO: 3535787 - DNA, 25 bp, Homo sapien
gtgatggggccagccacaaaaacta

SEQ ID NO: 3535788 - DNA, 25 bp, Homo sapien
gatggggccagccacaaaaactatt

SEQ ID NO: 3535789 - DNA, 25 bp, Homo sapien
aaattttatggttgagtgacacagc

SEQ ID NO: 3535790 - DNA, 25 bp, Homo sapien
gcattttattaacacactcatggta

SEQ ID NO: 3535791 - DNA, 25 bp, Homo sapien
cacagcatcatcgtgtgagtaagga

SEQ ID NO: 3535792 - DNA, 25 bp, Homo sapien
taatctgctaactgagctagatgga

SEQ ID NO: 3535793 - DNA, 25 bp, Homo sapien
gacatcacacttctgtcggtgttta

SEQ ID NO: 3535794 - DNA, 25 bp, Homo sapien
cctgccatgaataatctctgtttaa

SEQ ID NO: 3535795 - DNA, 25 bp, Homo sapien
gtatggctggcattaatttagacat

SEQ ID NO: 3535796 - DNA, 25 bp, Homo sapien
taatctctgtttaaacagtaaagca

SEQ ID NO: 3535797 - DNA, 25 bp, Homo sapien
tgtatgtaggaagatctacaccaac

SEQ ID NO: 3535798 - DNA, 25 bp, Homo sapien
ttccattcacaaatctgatgtatgt

SEQ ID NO: 3535799 - DNA, 25 bp, Homo sapien
tttcttccattcacaaatctgatgt

SEQ ID NO: 3535800 - DNA, 25 bp, Homo sapien
gtatgtaggaagatctacaccaaca

SEQ ID NO: 3535801 - DNA, 25 bp, Homo sapien
cattctgtattagaagttccagtgg

SEQ ID NO: 3535802 - DNA, 25 bp, Homo sapien
caacattctgtattagaagttccag

SEQ ID NO: 3535803 - DNA, 25 bp, Homo sapien
gccaacattctgtattagaagttcc

SEQ ID NO: 3535804 - DNA, 25 bp, Homo sapien
ctgtattagaagttccagtgggtgc

SEQ ID NO: 3535805 - DNA, 25 bp, Homo sapien
taggcatggagacccttggtatcca

SEQ ID NO: 3535806 - DNA, 25 bp, Homo sapien
gcctttgtaatagggcctccagcca

SEQ ID NO: 3535807 - DNA, 25 bp, Homo sapien
cacagcagaatggttggcagttcaa

SEQ ID NO: 3535808 - DNA, 25 bp, Homo sapien
gacagctgtctggtggcctttgtaa

SEQ ID NO: 3535809 - DNA, 25 bp, Homo sapien
cagctccataaaaaccgacactgag

SEQ ID NO: 3535810 - DNA, 25 bp, Homo sapien
ttgtcataggatgtcacaccattaa

SEQ ID NO: 3535811 - DNA, 25 bp, Homo sapien
cataaaaaccgacactgagatgcat

SEQ ID NO: 3535812 - DNA, 25 bp, Homo sapien
cgacactgagatgcattgatctgtg

SEQ ID NO: 3535813 - DNA, 25 bp, Homo sapien
gattccactctatgtcaaaaactct

SEQ ID NO: 3535814 - DNA, 25 bp, Homo sapien
tctaagttgggcatcagctctttca

SEQ ID NO: 3535815 - DNA, 25 bp, Homo sapien
tctagttatttgcatatcatcaggt

SEQ ID NO: 3535816 - DNA, 25 bp, Homo sapien
agttatttgcatatcatcaggtgaa

SEQ ID NO: 3535817 - DNA, 25 bp, Homo sapien
cacatatgattttctcccatgtgta

SEQ ID NO: 3535818 - DNA, 25 bp, Homo sapien
tctgagatttgacttgagttgaaag

SEQ ID NO: 3535819 - DNA, 25 bp, Homo sapien
tcatagaatttttcgattgtgtgaa

SEQ ID NO: 3535820 - DNA, 25 bp, Homo sapien
tcacacattctttacacacatatga

SEQ ID NO: 3535821 - DNA, 25 bp, Homo sapien
catattctttatacccacatgaggt

SEQ ID NO: 3535822 - DNA, 25 bp, Homo sapien
cccatatgactatgatcatgtgtcc

SEQ ID NO: 3535823 - DNA, 25 bp, Homo sapien
tcttgggacatgagagctgactgat

SEQ ID NO: 3535824 - DNA, 25 bp, Homo sapien
ccacatgaggtctctcccatatgac

SEQ ID NO: 3535825 - DNA, 25 bp, Homo sapien
gtcaacagccacatctttaccaatc

SEQ ID NO: 3535826 - DNA, 25 bp, Homo sapien
tttccctgggcacattctctttttg

SEQ ID NO: 3535827 - DNA, 25 bp, Homo sapien
tcatccagccagaaaagctgcctct

SEQ ID NO: 3535828 - DNA, 25 bp, Homo sapien
acattataaagccaattcatccagc

SEQ ID NO: 3535829 - DNA, 25 bp, Homo sapien
tgattacattataaagccaattcat

SEQ ID NO: 3535830 - DNA, 25 bp, Homo sapien
caaattcagatccagttttaagaca

SEQ ID NO: 3535831 - DNA, 25 bp, Homo sapien
gagagtaacaacacctacaaggacg

SEQ ID NO: 3535832 - DNA, 25 bp, Homo sapien
tacatacatagcaaggacatagact

SEQ ID NO: 3535833 - DNA, 25 bp, Homo sapien
cctggtggagatgaatgcccttgcc

SEQ ID NO: 3535834 - DNA, 25 bp, Homo sapien
gctggaaggaagagccacatacagg

SEQ ID NO: 3535835 - DNA, 25 bp, Homo sapien
cataagtcaggccaataactagggt

SEQ ID NO: 3535836 - DNA, 25 bp, Homo sapien
cagagccctctgtctccttaaggca

SEQ ID NO: 3535837 - DNA, 25 bp, Homo sapien
tacaggaatgcactacagagccctc

SEQ ID NO: 3535838 - DNA, 25 bp, Homo sapien
tacatttcagtgcacgtaggctggg

SEQ ID NO: 3535839 - DNA, 25 bp, Homo sapien
ctgtaaaagaccatagggaatgggc

SEQ ID NO: 3535840 - DNA, 25 bp, Homo sapien
ctgagacaacaacggccaatgcttg

SEQ ID NO: 3535841 - DNA, 25 bp, Homo sapien
caatgcttggcgaagtgtgagtacc

SEQ ID NO: 3535842 - DNA, 25 bp, Homo sapien
caaagggtattgattaaggacagac

SEQ ID NO: 3535843 - DNA, 25 bp, Homo sapien
gaacacgttgacatcgcagtcagcc

SEQ ID NO: 3535844 - DNA, 25 bp, Homo sapien
gcacttgaacacgttgacatcgcag

SEQ ID NO: 3535845 - DNA, 25 bp, Homo sapien
gtaaagagggcttaaggaacgctga

SEQ ID NO: 3535846 - DNA, 25 bp, Homo sapien
cttaaggaacgctgagctagcaaat

SEQ ID NO: 3535847 - DNA, 25 bp, Homo sapien
catccattttgctccggacttgtgg

SEQ ID NO: 3535848 - DNA, 25 bp, Homo sapien
tgcatccattttgctccggacttgt

SEQ ID NO: 3535849 - DNA, 25 bp, Homo sapien
ttgctccggacttgtggaacagagg

SEQ ID NO: 3535850 - DNA, 25 bp, Homo sapien
cattttgctccggacttgtggaaca

SEQ ID NO: 3535851 - DNA, 25 bp, Homo sapien
gacttgcttcctgtgcttcagtcat

SEQ ID NO: 3535852 - DNA, 25 bp, Homo sapien
aagacttgcttcctgtgcttcagtc

SEQ ID NO: 3535853 - DNA, 25 bp, Homo sapien
tgccaagacttgcttcctgtgcttc

SEQ ID NO: 3535854 - DNA, 25 bp, Homo sapien
ccaagacttgcttcctgtgcttcag

SEQ ID NO: 3535855 - DNA, 25 bp, Homo sapien
cccaagtctcttcccataggtccaa

SEQ ID NO: 3535856 - DNA, 25 bp, Homo sapien
tcccataggtccaacttggtttctg

SEQ ID NO: 3535857 - DNA, 25 bp, Homo sapien
tctcttcccataggtccaacttggt

SEQ ID NO: 3535858 - DNA, 25 bp, Homo sapien
caagtctcttcccataggtccaact

SEQ ID NO: 3535859 - DNA, 25 bp, Homo sapien
cagggttcttgctggtttgcctccg

SEQ ID NO: 3535860 - DNA, 25 bp, Homo sapien
tgcgaatagttatttccttaggtac

SEQ ID NO: 3535861 - DNA, 25 bp, Homo sapien
agagtttgttagctgtgactctgac

SEQ ID NO: 3535862 - DNA, 25 bp, Homo sapien
tgactttcctgtcaaggcgttttta

SEQ ID NO: 3535863 - DNA, 25 bp, Homo sapien
cccatagacagctgatgtttcaaat

SEQ ID NO: 3535864 - DNA, 25 bp, Homo sapien
gatgtttcaaatgtaaagcttggtg

SEQ ID NO: 3535865 - DNA, 25 bp, Homo sapien
gtttcaaatgtaaagcttggtgcca

SEQ ID NO: 3535866 - DNA, 25 bp, Homo sapien
ctggcttcgggaacccatagacagc

SEQ ID NO: 3535867 - DNA, 25 bp, Homo sapien
tattggtaatctgttctgttgttcc

SEQ ID NO: 3535868 - DNA, 25 bp, Homo sapien
caagtcctattggtaatctgttctg

SEQ ID NO: 3535869 - DNA, 25 bp, Homo sapien
gctatcaagtcctattggtaatctg

SEQ ID NO: 3535870 - DNA, 25 bp, Homo sapien
cactgctatcaagtcctattggtaa

SEQ ID NO: 3535871 - DNA, 25 bp, Homo sapien
tgccaagagcaatatttttccagag

SEQ ID NO: 3535872 - DNA, 25 bp, Homo sapien
caagagcaatatttttccagagctc

SEQ ID NO: 3535873 - DNA, 25 bp, Homo sapien
tttttgccaagagcaatatttttcc

SEQ ID NO: 3535874 - DNA, 25 bp, Homo sapien
tagctttattttttgccaagagcaa

SEQ ID NO: 3535875 - DNA, 25 bp, Homo sapien
catcagataaggagatgacaggtca

SEQ ID NO: 3535876 - DNA, 25 bp, Homo sapien
gatggctgagagtccgattgctgca

SEQ ID NO: 3535877 - DNA, 25 bp, Homo sapien
tacactaggagtccacagtgcagag

SEQ ID NO: 3535878 - DNA, 25 bp, Homo sapien
gagagtccgattgctgcagccatag

SEQ ID NO: 3535879 - DNA, 25 bp, Homo sapien
tttttggttgattgggtgatttctc

SEQ ID NO: 3535880 - DNA, 25 bp, Homo sapien
ttggttgattgggtgatttctctcc

SEQ ID NO: 3535881 - DNA, 25 bp, Homo sapien
tgaacacaggtattttttggttgat

SEQ ID NO: 3535882 - DNA, 25 bp, Homo sapien
ttttggttgattgggtgatttctct

SEQ ID NO: 3535883 - DNA, 25 bp, Homo sapien
aacttcagccatgcaggtcccctcg

SEQ ID NO: 3535884 - DNA, 25 bp, Homo sapien
tcttcaacttcagccatgcaggtcc

SEQ ID NO: 3535885 - DNA, 25 bp, Homo sapien
tcaacttcagccatgcaggtcccct

SEQ ID NO: 3535886 - DNA, 25 bp, Homo sapien
cttcagccatgcaggtcccctcgac

SEQ ID NO: 3535887 - DNA, 25 bp, Homo sapien
tattgtagagggcagactaagttcc

SEQ ID NO: 3535888 - DNA, 25 bp, Homo sapien
caggagatatgcagactaatatgtc

SEQ ID NO: 3535889 - DNA, 25 bp, Homo sapien
ttcctcttacatattcactggacag

SEQ ID NO: 3535890 - DNA, 25 bp, Homo sapien
ctggacagtctgttatgtggaaaac

SEQ ID NO: 3535891 - DNA, 25 bp, Homo sapien
tgcaaatttgtcaaacccattaccc

SEQ ID NO: 3535892 - DNA, 25 bp, Homo sapien
tctgcaaatttgtcaaacccattac

SEQ ID NO: 3535893 - DNA, 25 bp, Homo sapien
ctttctgcaaatttgtcaaacccat

SEQ ID NO: 3535894 - DNA, 25 bp, Homo sapien
ttctgcaaatttgtcaaacccatta

SEQ ID NO: 3535895 - DNA, 25 bp, Homo sapien
cctggaagattccaactcattcaca

SEQ ID NO: 3535896 - DNA, 25 bp, Homo sapien
gattataggcatcacgaggttctct

SEQ ID NO: 3535897 - DNA, 25 bp, Homo sapien
tcattcacagcctctgtattttgat

SEQ ID NO: 3535898 - DNA, 25 bp, Homo sapien
gcatcacgaggttctcttttgtcct

SEQ ID NO: 3535899 - DNA, 25 bp, Homo sapien
agtaattccttcttgctgtcaaaag

SEQ ID NO: 3535900 - DNA, 25 bp, Homo sapien
ctgtcaaaagataaaggcttacaat

SEQ ID NO: 3535901 - DNA, 25 bp, Homo sapien
gaaatgtgtacaataccttgtaaat

SEQ ID NO: 3535902 - DNA, 25 bp, Homo sapien
ttgtgaacatgtaatcatctcttga

SEQ ID NO: 3535903 - DNA, 25 bp, Homo sapien
tatttaggcccctaagctggggctc

SEQ ID NO: 3535904 - DNA, 25 bp, Homo sapien
tttaggcccctaagctggggctcac

SEQ ID NO: 3535905 - DNA, 25 bp, Homo sapien
aggaactatttaggcccctaagctg

SEQ ID NO: 3535906 - DNA, 25 bp, Homo sapien
ctatttaggcccctaagctggggct

SEQ ID NO: 3535907 - DNA, 25 bp, Homo sapien
ttcagcgtcttgttgaggaggtgca

SEQ ID NO: 3535908 - DNA, 25 bp, Homo sapien
gccaggtagcttccataaagcctac

SEQ ID NO: 3535909 - DNA, 25 bp, Homo sapien
acagcagcctaaggctaatcagcca

SEQ ID NO: 3535910 - DNA, 25 bp, Homo sapien
tagagagagggttatgttcagcgtc

SEQ ID NO: 3535911 - DNA, 25 bp, Homo sapien
gatgcagacaaggaaagccagagac

SEQ ID NO: 3535912 - DNA, 25 bp, Homo sapien
ccagagaccagggcttatgcaccat

SEQ ID NO: 3535913 - DNA, 25 bp, Homo sapien
gaggatgcagacaaggaaagccaga

SEQ ID NO: 3535914 - DNA, 25 bp, Homo sapien
ggatgcagacaaggaaagccagaga

SEQ ID NO: 3535915 - DNA, 25 bp, Homo sapien
tctgcctgagctactttatttttaa

SEQ ID NO: 3535916 - DNA, 25 bp, Homo sapien
cactctgcctgagctactttatttt

SEQ ID NO: 3535917 - DNA, 25 bp, Homo sapien
taccactgccagctatttgtttctt

SEQ ID NO: 3535918 - DNA, 25 bp, Homo sapien
actaccactgccagctatttgtttc

SEQ ID NO: 3535919 - DNA, 25 bp, Homo sapien
gaacagaagccttgaagactgtgcc

SEQ ID NO: 3535920 - DNA, 25 bp, Homo sapien
ggaaacagctttactccaacattga

SEQ ID NO: 3535921 - DNA, 25 bp, Homo sapien
tactatgaaactagcaggcattgca

SEQ ID NO: 3535922 - DNA, 25 bp, Homo sapien
taaagtctgctgttcagaggagcaa

SEQ ID NO: 3535923 - DNA, 25 bp, Homo sapien
caaacttctcttagcctagagttaa

SEQ ID NO: 3535924 - DNA, 25 bp, Homo sapien
tccgcctcagcaattctcagcaatt

SEQ ID NO: 3535925 - DNA, 25 bp, Homo sapien
tagcctagagttaagacatgacatc

SEQ ID NO: 3535926 - DNA, 25 bp, Homo sapien
gcgcctggccatcacctatttcaaa

SEQ ID NO: 3535927 - DNA, 25 bp, Homo sapien
ccctcaaaatatagctgagatgagt

SEQ ID NO: 3535928 - DNA, 25 bp, Homo sapien
tagcagtgattggacaacgttgtaa

SEQ ID NO: 3535929 - DNA, 25 bp, Homo sapien
tcaacccataacagagaaataactc

SEQ ID NO: 3535930 - DNA, 25 bp, Homo sapien
tatttatgttggaagtgaacacaag

SEQ ID NO: 3535931 - DNA, 25 bp, Homo sapien
ctgtacctctgacaggacatgggag

SEQ ID NO: 3535932 - DNA, 25 bp, Homo sapien
ctttaaacaaacagttctcagcgta

SEQ ID NO: 3535933 - DNA, 25 bp, Homo sapien
tctcagcgtaactcattacaatggg

SEQ ID NO: 3535934 - DNA, 25 bp, Homo sapien
aatctggaggcaacaaaatattcaa

SEQ ID NO: 3535935 - DNA, 25 bp, Homo sapien
gacacgtaactagcacaagggcagg

SEQ ID NO: 3535936 - DNA, 25 bp, Homo sapien
tgaggaaactcggatgtagacacgt

SEQ ID NO: 3535937 - DNA, 25 bp, Homo sapien
tgactcaaagtccagtgcacaaccc

SEQ ID NO: 3535938 - DNA, 25 bp, Homo sapien
gcacaacccaccaaaagattacgag

SEQ ID NO: 3535939 - DNA, 25 bp, Homo sapien
tttcaagcagtgctttgatgacccc

SEQ ID NO: 3535940 - DNA, 25 bp, Homo sapien
agcagtgctttgatgaccccattcc

SEQ ID NO: 3535941 - DNA, 25 bp, Homo sapien
tcaagcagtgctttgatgaccccat

SEQ ID NO: 3535942 - DNA, 25 bp, Homo sapien
caagcagtgctttgatgaccccatt

SEQ ID NO: 3535943 - DNA, 25 bp, Homo sapien
tgtcactctgcagggttcagtcccc

SEQ ID NO: 3535944 - DNA, 25 bp, Homo sapien
tgggccccaccttcaatacctgagg

SEQ ID NO: 3535945 - DNA, 25 bp, Homo sapien
tgtttaggctcaacggtcactttgc

SEQ ID NO: 3535946 - DNA, 25 bp, Homo sapien
gaaatttgcccgtatgatccagtca

SEQ ID NO: 3535947 - DNA, 25 bp, Homo sapien
catgtgccactatgcccggcaaatt

SEQ ID NO: 3535948 - DNA, 25 bp, Homo sapien
atgtgccactatgcccggcaaattt

SEQ ID NO: 3535949 - DNA, 25 bp, Homo sapien
tacagaggcatagcctctttctaac

SEQ ID NO: 3535950 - DNA, 25 bp, Homo sapien
acagaggcatagcctctttctaacc

SEQ ID NO: 3535951 - DNA, 25 bp, Homo sapien
ctacagaggcatagcctctttctaa

SEQ ID NO: 3535952 - DNA, 25 bp, Homo sapien
aagtagatacggacactaacatggg

SEQ ID NO: 3535953 - DNA, 25 bp, Homo sapien
gaagataggcatatgattatggcca

SEQ ID NO: 3535954 - DNA, 25 bp, Homo sapien
ccctggttcaaagtagatacggaca

SEQ ID NO: 3535955 - DNA, 25 bp, Homo sapien
ccaagtctctaatctgagaagatag

SEQ ID NO: 3535956 - DNA, 25 bp, Homo sapien
atgttacaaactctctataaaccag

SEQ ID NO: 3535957 - DNA, 25 bp, Homo sapien
cactaaataggcaaaagctaggagc

SEQ ID NO: 3535958 - DNA, 25 bp, Homo sapien
cacgtgattatgtcaatagaggcaa

SEQ ID NO: 3535959 - DNA, 25 bp, Homo sapien
tgaatcagcacaagacagaatgccc

SEQ ID NO: 3535960 - DNA, 25 bp, Homo sapien
agtctcccgcaactggtaaccagag

SEQ ID NO: 3535961 - DNA, 25 bp, Homo sapien
gatctccccggattgtgcactaaca

SEQ ID NO: 3535962 - DNA, 25 bp, Homo sapien
gttttaggcccaatagctgagatcc

SEQ ID NO: 3535963 - DNA, 25 bp, Homo sapien
tctaaaggtaatcaggatctccccg

SEQ ID NO: 3535964 - DNA, 25 bp, Homo sapien
tactgatgctatttgcctgcctcct

SEQ ID NO: 3535965 - DNA, 25 bp, Homo sapien
gcattactgatgctatttgcctgcc

SEQ ID NO: 3535966 - DNA, 25 bp, Homo sapien
ctgatgctatttgcctgcctcctag

SEQ ID NO: 3535967 - DNA, 25 bp, Homo sapien
tccaaggcattactgatgctatttg

SEQ ID NO: 3535968 - DNA, 25 bp, Homo sapien
gtcatccttgtatggtggtcatgct

SEQ ID NO: 3535969 - DNA, 25 bp, Homo sapien
agtacgtattcagcctaagtgagca

SEQ ID NO: 3535970 - DNA, 25 bp, Homo sapien
aactttagtacgtattcagcctaag

SEQ ID NO: 3535971 - DNA, 25 bp, Homo sapien
ccttgtatggtggtcatgctagtct

SEQ ID NO: 3535972 - DNA, 25 bp, Homo sapien
tacaggtaacgcaattgcttccagc

SEQ ID NO: 3535973 - DNA, 25 bp, Homo sapien
cagcacctatggttgtgggacacca

SEQ ID NO: 3535974 - DNA, 25 bp, Homo sapien
catttggatacaggtaacgcaattg

SEQ ID NO: 3535975 - DNA, 25 bp, Homo sapien
attgcttccagcacctatggttgtg

SEQ ID NO: 3535976 - DNA, 25 bp, Homo sapien
tgcgtatagatacttttggttttgc

SEQ ID NO: 3535977 - DNA, 25 bp, Homo sapien
gttaggttgtgcgtatagatacttt

SEQ ID NO: 3535978 - DNA, 25 bp, Homo sapien
ttaagttaggttgtgcgtatagata

SEQ ID NO: 3535979 - DNA, 25 bp, Homo sapien
cgtatagatacttttggttttgcaa

SEQ ID NO: 3535980 - DNA, 25 bp, Homo sapien
gctttgcttctcgatccccctaaat

SEQ ID NO: 3535981 - DNA, 25 bp, Homo sapien
tggaatacccaatgtaactaatctt

SEQ ID NO: 3535982 - DNA, 25 bp, Homo sapien
cccaatgtaactaatcttctgaata

SEQ ID NO: 3535983 - DNA, 25 bp, Homo sapien
aaaacctgatgcttttcacccataa

SEQ ID NO: 3535984 - DNA, 25 bp, Homo sapien
catcttccacgtgatgactcaaaga

SEQ ID NO: 3535985 - DNA, 25 bp, Homo sapien
ccatcttccacgtgatgactcaaag

SEQ ID NO: 3535986 - DNA, 25 bp, Homo sapien
gccatcttccacgtgatgactcaaa

SEQ ID NO: 3535987 - DNA, 25 bp, Homo sapien
ttgtctggtcttgggggcacactga

SEQ ID NO: 3535988 - DNA, 25 bp, Homo sapien
gacctttgtctggtcttgggggcac

SEQ ID NO: 3535989 - DNA, 25 bp, Homo sapien
tcttgggggcacactgatattaagt

SEQ ID NO: 3535990 - DNA, 25 bp, Homo sapien
tggtcttgggggcacactgatatta

SEQ ID NO: 3535991 - DNA, 25 bp, Homo sapien
attcctacaggcatctttatgaaac

SEQ ID NO: 3535992 - DNA, 25 bp, Homo sapien
tacagaagctaaattatgcaccatc

SEQ ID NO: 3535993 - DNA, 25 bp, Homo sapien
aatgtttaacccagcacaattcagc

SEQ ID NO: 3535994 - DNA, 25 bp, Homo sapien
taaattcctcgctctactatgcagg

SEQ ID NO: 3535995 - DNA, 25 bp, Homo sapien
tttgccaagtaacaccctcagtata

SEQ ID NO: 3535996 - DNA, 25 bp, Homo sapien
taatggcagctttggatactttcta

SEQ ID NO: 3535997 - DNA, 25 bp, Homo sapien
tggaagccaatttcaccgtggttgc

SEQ ID NO: 3535998 - DNA, 25 bp, Homo sapien
gcattcagggcaaaattcagacttt

SEQ ID NO: 3535999 - DNA, 25 bp, Homo sapien
ttccatcaaggccaaacctatctgg

SEQ ID NO: 3536000 - DNA, 25 bp, Homo sapien
tgttgccctgatcacttgtccttcc

SEQ ID NO: 3536001 - DNA, 25 bp, Homo sapien
gatgcattggctaaacaacggtaaa

SEQ ID NO: 3536002 - DNA, 25 bp, Homo sapien
caacggtaaaatgacgtatgctcgg

SEQ ID NO: 3536003 - DNA, 25 bp, Homo sapien
aatgacgtatgctcggctgcgtaca

SEQ ID NO: 3536004 - DNA, 25 bp, Homo sapien
caatgcggatgcattggctaaacaa

SEQ ID NO: 3536005 - DNA, 25 bp, Homo sapien
tgtgttcgtctacacttgcatacac

SEQ ID NO: 3536006 - DNA, 25 bp, Homo sapien
gcaaaccagatacttgatgtttaaa

SEQ ID NO: 3536007 - DNA, 25 bp, Homo sapien
ttgtgttcgtctacacttgcataca

SEQ ID NO: 3536008 - DNA, 25 bp, Homo sapien
gtgttcgtctacacttgcatacaca

SEQ ID NO: 3536009 - DNA, 25 bp, Homo sapien
ctaaatccagatattgtcggcatct

SEQ ID NO: 3536010 - DNA, 25 bp, Homo sapien
agatattgtcggcatctatttctct

SEQ ID NO: 3536011 - DNA, 25 bp, Homo sapien
ctgaatatgaacataaggctctaaa

SEQ ID NO: 3536012 - DNA, 25 bp, Homo sapien
atgaacataaggctctaaatccaga

SEQ ID NO: 3536013 - DNA, 25 bp, Homo sapien
cagacaaacgtcttccttttataag

SEQ ID NO: 3536014 - DNA, 25 bp, Homo sapien
aacgtcttccttttataagtagctg

SEQ ID NO: 3536015 - DNA, 25 bp, Homo sapien
gaccttttctcagacaaacgtcttc

SEQ ID NO: 3536016 - DNA, 25 bp, Homo sapien
tcttccttttataagtagctgtggg

SEQ ID NO: 3536017 - DNA, 25 bp, Homo sapien
tcacccggtgttgaccttattcagc

SEQ ID NO: 3536018 - DNA, 25 bp, Homo sapien
cacccggtgttgaccttattcagct

SEQ ID NO: 3536019 - DNA, 25 bp, Homo sapien
atcacccggtgttgaccttattcag

SEQ ID NO: 3536020 - DNA, 25 bp, Homo sapien
agatgaagtttcagagatgcaattc

SEQ ID NO: 3536021 - DNA, 25 bp, Homo sapien
ccagatgaagtttcagagatgcaat

SEQ ID NO: 3536022 - DNA, 25 bp, Homo sapien
cagatgaagtttcagagatgcaatt

SEQ ID NO: 3536023 - DNA, 25 bp, Homo sapien
tatgaaatacccctctccaagggag

SEQ ID NO: 3536024 - DNA, 25 bp, Homo sapien
tctactgcacatgccagacagaggc

SEQ ID NO: 3536025 - DNA, 25 bp, Homo sapien
cagaacaggcatcatagggacctat

SEQ ID NO: 3536026 - DNA, 25 bp, Homo sapien
catacaactagtaaggaagggctca

SEQ ID NO: 3536027 - DNA, 25 bp, Homo sapien
tgatatcccaagaaaattgagatga

SEQ ID NO: 3536028 - DNA, 25 bp, Homo sapien
aaagcagatatgttgatatcccaag

SEQ ID NO: 3536029 - DNA, 25 bp, Homo sapien
gaaaattgagatgatttaatgggta

SEQ ID NO: 3536030 - DNA, 25 bp, Homo sapien
tcatcagaagtcatatattggttta

SEQ ID NO: 3536031 - DNA, 25 bp, Homo sapien
cagattacgtctctgactttgtgaa

SEQ ID NO: 3536032 - DNA, 25 bp, Homo sapien
ttacgtctctgactttgtgaacttg

SEQ ID NO: 3536033 - DNA, 25 bp, Homo sapien
tgaataaaacagattacgtctctga

SEQ ID NO: 3536034 - DNA, 25 bp, Homo sapien
aaaacagattacgtctctgactttg

SEQ ID NO: 3536035 - DNA, 25 bp, Homo sapien
gcactctggcatcatactgtggcac

SEQ ID NO: 3536036 - DNA, 25 bp, Homo sapien
tagggcacgctacatcttaagaact

SEQ ID NO: 3536037 - DNA, 25 bp, Homo sapien
agcaggctgactttccatacagaca

SEQ ID NO: 3536038 - DNA, 25 bp, Homo sapien
tcaactggcatagagacaaattcct

SEQ ID NO: 3536039 - DNA, 25 bp, Homo sapien
aagggatgggttactgagctctctg

SEQ ID NO: 3536040 - DNA, 25 bp, Homo sapien
gggatgggttactgagctctctgtt

SEQ ID NO: 3536041 - DNA, 25 bp, Homo sapien
agggatgggttactgagctctctgt

SEQ ID NO: 3536042 - DNA, 25 bp, Homo sapien
caagggatgggttactgagctctct

SEQ ID NO: 3536043 - DNA, 25 bp, Homo sapien
catgacagacatttgcccaccagat

SEQ ID NO: 3536044 - DNA, 25 bp, Homo sapien
gatccttgtacaactggtatggaga

SEQ ID NO: 3536045 - DNA, 25 bp, Homo sapien
aagtcacaattcttgtacatcacag

SEQ ID NO: 3536046 - DNA, 25 bp, Homo sapien
tgctgctactctgtctctgtagttt

SEQ ID NO: 3536047 - DNA, 25 bp, Homo sapien
tcctcttcatcaaatacggataatg

SEQ ID NO: 3536048 - DNA, 25 bp, Homo sapien
ttactccacattagacggtcttgaa

SEQ ID NO: 3536049 - DNA, 25 bp, Homo sapien
ggcattcactcttgattactccaca

SEQ ID NO: 3536050 - DNA, 25 bp, Homo sapien
cattagacggtcttgaacaaattat

SEQ ID NO: 3536051 - DNA, 25 bp, Homo sapien
tcagtatagttcaaatagttaaaat

SEQ ID NO: 3536052 - DNA, 25 bp, Homo sapien
atatattggacacatattttcccga

SEQ ID NO: 3536053 - DNA, 25 bp, Homo sapien
ttcccgaagtactatgtcatcagta

SEQ ID NO: 3536054 - DNA, 25 bp, Homo sapien
catattttcccgaagtactatgtca

SEQ ID NO: 3536055 - DNA, 25 bp, Homo sapien
actgaagcatctaaaagctctcgtt

SEQ ID NO: 3536056 - DNA, 25 bp, Homo sapien
tccttcactgaagcatctaaaagct

SEQ ID NO: 3536057 - DNA, 25 bp, Homo sapien
gaagcatctaaaagctctcgtttct

SEQ ID NO: 3536058 - DNA, 25 bp, Homo sapien
ccttcactgaagcatctaaaagctc

SEQ ID NO: 3536059 - DNA, 25 bp, Homo sapien
tacagttctagttgctggaatcctc

SEQ ID NO: 3536060 - DNA, 25 bp, Homo sapien
cagaacatgagttccaaggtcaggg

SEQ ID NO: 3536061 - DNA, 25 bp, Homo sapien
gctaaattagctccagttgcctgaa

SEQ ID NO: 3536062 - DNA, 25 bp, Homo sapien
taggtaactgcagctatccacagac

SEQ ID NO: 3536063 - DNA, 25 bp, Homo sapien
tgtgctcagtgcaagcccagtcagt

SEQ ID NO: 3536064 - DNA, 25 bp, Homo sapien
aaaaatgacggcagaaagcaagggc

SEQ ID NO: 3536065 - DNA, 25 bp, Homo sapien
tatcaacaagtcaatggagagtcag

SEQ ID NO: 3536066 - DNA, 25 bp, Homo sapien
tggcgaccggtctatcttttgaaag

SEQ ID NO: 3536067 - DNA, 25 bp, Homo sapien
atcacacccatttgtgctacaggca

SEQ ID NO: 3536068 - DNA, 25 bp, Homo sapien
tgtgctacaggcatgcagtgggtca

SEQ ID NO: 3536069 - DNA, 25 bp, Homo sapien
tttttcatgagataatcacacccat

SEQ ID NO: 3536070 - DNA, 25 bp, Homo sapien
aaatttttcatgagataatcacacc

SEQ ID NO: 3536071 - DNA, 25 bp, Homo sapien
cttggggtctgcctcttaggtgcct

SEQ ID NO: 3536072 - DNA, 25 bp, Homo sapien
cccacttaaaaaggcagggtctgct

SEQ ID NO: 3536073 - DNA, 25 bp, Homo sapien
aataaaaccgtaccattgcagtggg

SEQ ID NO: 3536074 - DNA, 25 bp, Homo sapien
tcagccttcagagagtatgaaggga

SEQ ID NO: 3536075 - DNA, 25 bp, Homo sapien
tctccatgtccttctagtatagaaa

SEQ ID NO: 3536076 - DNA, 25 bp, Homo sapien
aataaatcttgacacttgtctccta

SEQ ID NO: 3536077 - DNA, 25 bp, Homo sapien
gatgcaggttttaaacggttccaca

SEQ ID NO: 3536078 - DNA, 25 bp, Homo sapien
ttccacacttgtcagataatcaaag

SEQ ID NO: 3536079 - DNA, 25 bp, Homo sapien
ttctctgattcactattctcattca

SEQ ID NO: 3536080 - DNA, 25 bp, Homo sapien
tgtcttctctgattcactattctca

SEQ ID NO: 3536081 - DNA, 25 bp, Homo sapien
tctgtgtcttctctgattcactatt

SEQ ID NO: 3536082 - DNA, 25 bp, Homo sapien
gtgtcttctctgattcactattctc

SEQ ID NO: 3536083 - DNA, 25 bp, Homo sapien
tctataacggtgactagaaatgtgt

SEQ ID NO: 3536084 - DNA, 25 bp, Homo sapien
ccatttggtatgactccagttcaga

SEQ ID NO: 3536085 - DNA, 25 bp, Homo sapien
ttgtagatcctctataacggtgact

SEQ ID NO: 3536086 - DNA, 25 bp, Homo sapien
ttcaaaccatttggtatgactccag

SEQ ID NO: 3536087 - DNA, 25 bp, Homo sapien
tcaaatgatttgtcctaaagaaaga

SEQ ID NO: 3536088 - DNA, 25 bp, Homo sapien
ccaatggaactcactcttttcagaa

SEQ ID NO: 3536089 - DNA, 25 bp, Homo sapien
taattgagtcataatgcacactgtc

SEQ ID NO: 3536090 - DNA, 25 bp, Homo sapien
caatacgatccatggctatttatgg

SEQ ID NO: 3536091 - DNA, 25 bp, Homo sapien
taaagttttgatgttagtgagttgc

SEQ ID NO: 3536092 - DNA, 25 bp, Homo sapien
tgttagtgagttgctaaaagctttg

SEQ ID NO: 3536093 - DNA, 25 bp, Homo sapien
gagttgctaaaagctttgttgtcaa

SEQ ID NO: 3536094 - DNA, 25 bp, Homo sapien
aaagctttgttgtcaaattgatggg

SEQ ID NO: 3536095 - DNA, 25 bp, Homo sapien
taaacaaagtctgtaagtacttgga

SEQ ID NO: 3536096 - DNA, 25 bp, Homo sapien
ggcacaaatcggtaacattttccga

SEQ ID NO: 3536097 - DNA, 25 bp, Homo sapien
cacatcaaatggcacaaatcggtaa

SEQ ID NO: 3536098 - DNA, 25 bp, Homo sapien
atgcacatcaaatggcacaaatcgg

SEQ ID NO: 3536099 - DNA, 25 bp, Homo sapien
tcggtaacattttccgataaattgc

SEQ ID NO: 3536100 - DNA, 25 bp, Homo sapien
aacacagccttgttgcatgtgggct

SEQ ID NO: 3536101 - DNA, 25 bp, Homo sapien
gcatgtgggctgagcaaacagacac

SEQ ID NO: 3536102 - DNA, 25 bp, Homo sapien
aaacacagccttgttgcatgtgggc

SEQ ID NO: 3536103 - DNA, 25 bp, Homo sapien
tgtgggctgagcaaacagacaccat

SEQ ID NO: 3536104 - DNA, 25 bp, Homo sapien
tcagctgggctgatggtaacagcat

SEQ ID NO: 3536105 - DNA, 25 bp, Homo sapien
ctgctgcagaactcagctgggctga

SEQ ID NO: 3536106 - DNA, 25 bp, Homo sapien
ttggctgctgcagaactcagctggg

SEQ ID NO: 3536107 - DNA, 25 bp, Homo sapien
ccagagacttggctgctgcagaact

SEQ ID NO: 3536108 - DNA, 25 bp, Homo sapien
tgagaacctaaagccacatgatgcc

SEQ ID NO: 3536109 - DNA, 25 bp, Homo sapien
tgcaaatgacttccatgagaaccta

SEQ ID NO: 3536110 - DNA, 25 bp, Homo sapien
tgttctctggcagtcttgaggccgc

SEQ ID NO: 3536111 - DNA, 25 bp, Homo sapien
ggccgcttgtctgacagcatgcaaa

SEQ ID NO: 3536112 - DNA, 25 bp, Homo sapien
tatggctccgtctggtatttggctg

SEQ ID NO: 3536113 - DNA, 25 bp, Homo sapien
gttctctttggcctatggctccgtc

SEQ ID NO: 3536114 - DNA, 25 bp, Homo sapien
tggcctatggctccgtctggtattt

SEQ ID NO: 3536115 - DNA, 25 bp, Homo sapien
tctggtatttggctgttccacattc

SEQ ID NO: 3536116 - DNA, 25 bp, Homo sapien
tatttctcacgttatgtccagcacc

SEQ ID NO: 3536117 - DNA, 25 bp, Homo sapien
tccagattgaaagcttatgactcca

SEQ ID NO: 3536118 - DNA, 25 bp, Homo sapien
aatgcagccacaccaagtgagtatc

SEQ ID NO: 3536119 - DNA, 25 bp, Homo sapien
gatcttgactcataataggtctgca

SEQ ID NO: 3536120 - DNA, 25 bp, Homo sapien
tgtgtcgttcacttgcacaccaagc

SEQ ID NO: 3536121 - DNA, 25 bp, Homo sapien
tgatgattgtgtcgttcacttgcac

SEQ ID NO: 3536122 - DNA, 25 bp, Homo sapien
gcctttgattcgttttgatgattgt

SEQ ID NO: 3536123 - DNA, 25 bp, Homo sapien
agccctagatcagaagtgtttcctc

SEQ ID NO: 3536124 - DNA, 25 bp, Homo sapien
ttggatcgtggacttctagtgccat

SEQ ID NO: 3536125 - DNA, 25 bp, Homo sapien
taaaccttagactcacatacaatac

SEQ ID NO: 3536126 - DNA, 25 bp, Homo sapien
ctcttctacattttggatcgtggac

SEQ ID NO: 3536127 - DNA, 25 bp, Homo sapien
tctctgttaggtggttcagaccacc

SEQ ID NO: 3536128 - DNA, 25 bp, Homo sapien
ttaatcctccatccttcaacttgac

SEQ ID NO: 3536129 - DNA, 25 bp, Homo sapien
ttttggcatgactttaatcctccat

SEQ ID NO: 3536130 - DNA, 25 bp, Homo sapien
actttaatcctccatccttcaactt

SEQ ID NO: 3536131 - DNA, 25 bp, Homo sapien
tttggcatgactttaatcctccatc

SEQ ID NO: 3536132 - DNA, 25 bp, Homo sapien
tgtccatcatgatgtcacatctctg

SEQ ID NO: 3536133 - DNA, 25 bp, Homo sapien
cctgtccatcatgatgtcacatctc

SEQ ID NO: 3536134 - DNA, 25 bp, Homo sapien
ccatcatgatgtcacatctctgcat

SEQ ID NO: 3536135 - DNA, 25 bp, Homo sapien
ctgtccatcatgatgtcacatctct

SEQ ID NO: 3536136 - DNA, 25 bp, Homo sapien
tgtacaagtgtttaacctggactta

SEQ ID NO: 3536137 - DNA, 25 bp, Homo sapien
tgaatgccactgtagattaactgtt

SEQ ID NO: 3536138 - DNA, 25 bp, Homo sapien
tatttcaatatattagcagctttcc

SEQ ID NO: 3536139 - DNA, 25 bp, Homo sapien
cacaaccatttaacagagctgatct

SEQ ID NO: 3536140 - DNA, 25 bp, Homo sapien
taatgtcgctcatattgtttacggg

SEQ ID NO: 3536141 - DNA, 25 bp, Homo sapien
gaagaggcaaaaactgttggcaaac

SEQ ID NO: 3536142 - DNA, 25 bp, Homo sapien
tcatattgtttacgggaaccatctg

SEQ ID NO: 3536143 - DNA, 25 bp, Homo sapien
tgctcaatggatctgtgacaccaaa

SEQ ID NO: 3536144 - DNA, 25 bp, Homo sapien
gccttaaaagcatagactctggagt

SEQ ID NO: 3536145 - DNA, 25 bp, Homo sapien
actttttatgcatctgactgtggag

SEQ ID NO: 3536146 - DNA, 25 bp, Homo sapien
ttcactgcactattagaaaggaggg

SEQ ID NO: 3536147 - DNA, 25 bp, Homo sapien
tgcaaagaggcactctagggagcct

SEQ ID NO: 3536148 - DNA, 25 bp, Homo sapien
aaatctctggattaaggctactttc

SEQ ID NO: 3536149 - DNA, 25 bp, Homo sapien
gatgtacaaaatctctggattaagg

SEQ ID NO: 3536150 - DNA, 25 bp, Homo sapien
cttgtaaggcttaatgactaccatc

SEQ ID NO: 3536151 - DNA, 25 bp, Homo sapien
caaacatattcctgtccagttgaaa

SEQ ID NO: 3536152 - DNA, 25 bp, Homo sapien
gcgaatgcctctttcaggtttccgg

SEQ ID NO: 3536153 - DNA, 25 bp, Homo sapien
tgcctctttcaggtttccgggtcac

SEQ ID NO: 3536154 - DNA, 25 bp, Homo sapien
ctgaagaacagcagggcgaatgcct

SEQ ID NO: 3536155 - DNA, 25 bp, Homo sapien
tgaagaacagcagggcgaatgcctc

SEQ ID NO: 3536156 - DNA, 25 bp, Homo sapien
caaggagcctgccatatttgtgaca

SEQ ID NO: 3536157 - DNA, 25 bp, Homo sapien
gatacgtgtggcatgatagcgctca

SEQ ID NO: 3536158 - DNA, 25 bp, Homo sapien
tgcccagggtcagtaccagccttgt

SEQ ID NO: 3536159 - DNA, 25 bp, Homo sapien
tttcaatgaaatacagcaggtcctc

SEQ ID NO: 3536160 - DNA, 25 bp, Homo sapien
gcttctttgcttgatactgggtggc

SEQ ID NO: 3536161 - DNA, 25 bp, Homo sapien
tgagcttctttgcttgatactgggt

SEQ ID NO: 3536162 - DNA, 25 bp, Homo sapien
tctttgcttgatactgggtggctga

SEQ ID NO: 3536163 - DNA, 25 bp, Homo sapien
ttgcttgatactgggtggctgattc

SEQ ID NO: 3536164 - DNA, 25 bp, Homo sapien
tcatgttcccttgggacttctcagg

SEQ ID NO: 3536165 - DNA, 25 bp, Homo sapien
tggcatcctggactccgactgagaa

SEQ ID NO: 3536166 - DNA, 25 bp, Homo sapien
tcccttgggacttctcaggctgctt

SEQ ID NO: 3536167 - DNA, 25 bp, Homo sapien
gactccgactgagaacagttattac

SEQ ID NO: 3536168 - DNA, 25 bp, Homo sapien
agtcttatattttaggaccacagca

SEQ ID NO: 3536169 - DNA, 25 bp, Homo sapien
cagcagcaaactgacagcaatgtat

SEQ ID NO: 3536170 - DNA, 25 bp, Homo sapien
tctgtgctgaaacatcaccatgcaa

SEQ ID NO: 3536171 - DNA, 25 bp, Homo sapien
cgtgttttggttgcttgtacagccc

SEQ ID NO: 3536172 - DNA, 25 bp, Homo sapien
tgcctattttcctaacatattcctg

SEQ ID NO: 3536173 - DNA, 25 bp, Homo sapien
gcctattttcctaacatattcctgt

SEQ ID NO: 3536174 - DNA, 25 bp, Homo sapien
ttttcctaacatattcctgttccat

SEQ ID NO: 3536175 - DNA, 25 bp, Homo sapien
tattttcctaacatattcctgttcc

SEQ ID NO: 3536176 - DNA, 25 bp, Homo sapien
aatcctggtgtaatgagaccaaaat

SEQ ID NO: 3536177 - DNA, 25 bp, Homo sapien
aatcaaatcctggtgtaatgagacc

SEQ ID NO: 3536178 - DNA, 25 bp, Homo sapien
cttcattaaaatcaaatcctggtgt

SEQ ID NO: 3536179 - DNA, 25 bp, Homo sapien
gagaccaaaatcagggctggcatca

SEQ ID NO: 3536180 - DNA, 25 bp, Homo sapien
gtctgataatgtacagaaatcttac

SEQ ID NO: 3536181 - DNA, 25 bp, Homo sapien
tgtctgataatgtacagaaatctta

SEQ ID NO: 3536182 - DNA, 25 bp, Homo sapien
cagcctccactgtctgataatgtac

SEQ ID NO: 3536183 - DNA, 25 bp, Homo sapien
cctccactgtctgataatgtacaga

SEQ ID NO: 3536184 - DNA, 25 bp, Homo sapien
tgtggcataatcatcacagagagcc

SEQ ID NO: 3536185 - DNA, 25 bp, Homo sapien
tctttcacaacattcacttctactt

SEQ ID NO: 3536186 - DNA, 25 bp, Homo sapien
gcataatcatcacagagagcctctt

SEQ ID NO: 3536187 - DNA, 25 bp, Homo sapien
taatcatcacagagagcctctttca

SEQ ID NO: 3536188 - DNA, 25 bp, Homo sapien
tgctgcagatggtacggctcgctgt

SEQ ID NO: 3536189 - DNA, 25 bp, Homo sapien
cagtgagcccaagtgcctagagaat

SEQ ID NO: 3536190 - DNA, 25 bp, Homo sapien
tgtcagtagtaacctccaagagctg

SEQ ID NO: 3536191 - DNA, 25 bp, Homo sapien
gcaaaaacgtgtccaagagactccg

SEQ ID NO: 3536192 - DNA, 25 bp, Homo sapien
tctcactaaggaccgggaagcctag

SEQ ID NO: 3536193 - DNA, 25 bp, Homo sapien
gcaagtccattagtgtaacctacag

SEQ ID NO: 3536194 - DNA, 25 bp, Homo sapien
aagataaaacctgttcctgtgcaag

SEQ ID NO: 3536195 - DNA, 25 bp, Homo sapien
ctagtttcccaataaaactatctct

SEQ ID NO: 3536196 - DNA, 25 bp, Homo sapien
gcttcaagaattggctgggattctt

SEQ ID NO: 3536197 - DNA, 25 bp, Homo sapien
ttcaagaattggctgggattcttcc

SEQ ID NO: 3536198 - DNA, 25 bp, Homo sapien
agcttcaagaattggctgggattct

SEQ ID NO: 3536199 - DNA, 25 bp, Homo sapien
ctcctccatggaatgggctcttagt

SEQ ID NO: 3536200 - DNA, 25 bp, Homo sapien
tgttggagtgtaattgtaggtaccg

SEQ ID NO: 3536201 - DNA, 25 bp, Homo sapien
gctcttagtttgaagtgagttccat

SEQ ID NO: 3536202 - DNA, 25 bp, Homo sapien
gtaggtaccgttggctgcatctaaa

SEQ ID NO: 3536203 - DNA, 25 bp, Homo sapien
ctggccatgaaggtggtattttcat

SEQ ID NO: 3536204 - DNA, 25 bp, Homo sapien
tgtgatttccatgcatcagtctctc

SEQ ID NO: 3536205 - DNA, 25 bp, Homo sapien
atctgtgatttccatgcatcagtct

SEQ ID NO: 3536206 - DNA, 25 bp, Homo sapien
ggccatgaaggtggtattttcatct

SEQ ID NO: 3536207 - DNA, 25 bp, Homo sapien
tggacagtatgggtgcacttaattt

SEQ ID NO: 3536208 - DNA, 25 bp, Homo sapien
tttctgtgagtccaaaggcaattaa

SEQ ID NO: 3536209 - DNA, 25 bp, Homo sapien
gtccaaaggcaattaatggaaccat

SEQ ID NO: 3536210 - DNA, 25 bp, Homo sapien
gacagtatgggtgcacttaatttct

SEQ ID NO: 3536211 - DNA, 25 bp, Homo sapien
cactttgaaagtcttgcacaagcaa

SEQ ID NO: 3536212 - DNA, 25 bp, Homo sapien
tgaaagtcttgcacaagcaacctgg

SEQ ID NO: 3536213 - DNA, 25 bp, Homo sapien
tcttcacttccatccacaccatgcc

SEQ ID NO: 3536214 - DNA, 25 bp, Homo sapien
aagtcttgcacaagcaacctggaac

SEQ ID NO: 3536215 - DNA, 25 bp, Homo sapien
ttaaaaggcttgtagtcaggctgtc

SEQ ID NO: 3536216 - DNA, 25 bp, Homo sapien
aacattactccgatatgaaccagag

SEQ ID NO: 3536217 - DNA, 25 bp, Homo sapien
cagaaacattactccgatatgaacc

SEQ ID NO: 3536218 - DNA, 25 bp, Homo sapien
ctgcagaaacattactccgatatga

SEQ ID NO: 3536219 - DNA, 25 bp, Homo sapien
ctttctgatagcaaggaagtccttc

SEQ ID NO: 3536220 - DNA, 25 bp, Homo sapien
gagccttatgggtctcaactgagtc

SEQ ID NO: 3536221 - DNA, 25 bp, Homo sapien
gacaccccaattatcttagttgtgg

SEQ ID NO: 3536222 - DNA, 25 bp, Homo sapien
tcatccaggcaaggcgagtgggagg

SEQ ID NO: 3536223 - DNA, 25 bp, Homo sapien
caaatattgtgaagcgccccagaga

SEQ ID NO: 3536224 - DNA, 25 bp, Homo sapien
cacatcagtgtagatctcagtctcc

SEQ ID NO: 3536225 - DNA, 25 bp, Homo sapien
gcttccactgcaacatgaggtccat

SEQ ID NO: 3536226 - DNA, 25 bp, Homo sapien
gagaccctgcagaggaacttcaacc

SEQ ID NO: 3536227 - DNA, 25 bp, Homo sapien
aacgggacttttgccacagcctgag

SEQ ID NO: 3536228 - DNA, 25 bp, Homo sapien
tacgactgccaagaccaaagcacct

SEQ ID NO: 3536229 - DNA, 25 bp, Homo sapien
agtagtagctttccggttgctgcca

SEQ ID NO: 3536230 - DNA, 25 bp, Homo sapien
acagcctgagcgacttcatacaagg

SEQ ID NO: 3536231 - DNA, 25 bp, Homo sapien
aattgttacatatctgaagctgtgg

SEQ ID NO: 3536232 - DNA, 25 bp, Homo sapien
ttataagatagatttaggtattttc

SEQ ID NO: 3536233 - DNA, 25 bp, Homo sapien
caggttataagatagatttaggtat

SEQ ID NO: 3536234 - DNA, 25 bp, Homo sapien
cctcaggaacgggaatagtgtcctt

SEQ ID NO: 3536235 - DNA, 25 bp, Homo sapien
ggacaatcaatctgtcagcatcttg

SEQ ID NO: 3536236 - DNA, 25 bp, Homo sapien
gatattagaatgtaggaccttctgg

SEQ ID NO: 3536237 - DNA, 25 bp, Homo sapien
tgttatgagaatggagccctcagga

SEQ ID NO: 3536238 - DNA, 25 bp, Homo sapien
tcagtttcacacaagacgtaacttc

SEQ ID NO: 3536239 - DNA, 25 bp, Homo sapien
gagggaacccctacgatgaacttca

SEQ ID NO: 3536240 - DNA, 25 bp, Homo sapien
tccaaagagaagtgcgagggaaccc

SEQ ID NO: 3536241 - DNA, 25 bp, Homo sapien
ggtaactgatgtctctccaaatgac

SEQ ID NO: 3536242 - DNA, 25 bp, Homo sapien
ctatcaattttggatattgcccacc

SEQ ID NO: 3536243 - DNA, 25 bp, Homo sapien
actctacttgtctttgctgagtagt

SEQ ID NO: 3536244 - DNA, 25 bp, Homo sapien
tgcccaccagtggttaattgacttt

SEQ ID NO: 3536245 - DNA, 25 bp, Homo sapien
ttggatattgcccaccagtggttaa

SEQ ID NO: 3536246 - DNA, 25 bp, Homo sapien
gtgggaaaacaagactctcacttgc

SEQ ID NO: 3536247 - DNA, 25 bp, Homo sapien
taaacacttgatcaatgggcaatgg

SEQ ID NO: 3536248 - DNA, 25 bp, Homo sapien
caatggtagctggtgggtaaatttt

SEQ ID NO: 3536249 - DNA, 25 bp, Homo sapien
tcttcttgagacagtttatatgatt

SEQ ID NO: 3536250 - DNA, 25 bp, Homo sapien
ctgataagagttagcttgataacat

SEQ ID NO: 3536251 - DNA, 25 bp, Homo sapien
taagagttagcttgataacatatcc

SEQ ID NO: 3536252 - DNA, 25 bp, Homo sapien
gagttagcttgataacatatcctca

SEQ ID NO: 3536253 - DNA, 25 bp, Homo sapien
gataagagttagcttgataacatat

SEQ ID NO: 3536254 - DNA, 25 bp, Homo sapien
catctgcaatatgacagggtcagtg

SEQ ID NO: 3536255 - DNA, 25 bp, Homo sapien
gaaggcatctgcaatatgacagggt

SEQ ID NO: 3536256 - DNA, 25 bp, Homo sapien
tctgcaatatgacagggtcagtgtt

SEQ ID NO: 3536257 - DNA, 25 bp, Homo sapien
ggcatctgcaatatgacagggtcag

SEQ ID NO: 3536258 - DNA, 25 bp, Homo sapien
ctgaatcatactgtagcagaagagt

SEQ ID NO: 3536259 - DNA, 25 bp, Homo sapien
cagctgcctcggcttgcgaggaggt

SEQ ID NO: 3536260 - DNA, 25 bp, Homo sapien
ctgcggccccgcattcagagcggct

SEQ ID NO: 3536261 - DNA, 25 bp, Homo sapien
ttgtgggccagcgccagttcctggt

SEQ ID NO: 3536262 - DNA, 25 bp, Homo sapien
gttgtgcttgatttctcgccaggcc

SEQ ID NO: 3536263 - DNA, 25 bp, Homo sapien
ttaaccaaattgacgaatacggctg

SEQ ID NO: 3536264 - DNA, 25 bp, Homo sapien
taaacttggcatgggcccacatggc

SEQ ID NO: 3536265 - DNA, 25 bp, Homo sapien
cgaatacggctgtttaaacttggca

SEQ ID NO: 3536266 - DNA, 25 bp, Homo sapien
gctgtttaaacttggcatgggccca

SEQ ID NO: 3536267 - DNA, 25 bp, Homo sapien
aacgcgatcctgctgaacacggacc

SEQ ID NO: 3536268 - DNA, 25 bp, Homo sapien
tcctgctgaacacggaccacaaagg

SEQ ID NO: 3536269 - DNA, 25 bp, Homo sapien
tgaatggtggtcgcaggagacaacc

SEQ ID NO: 3536270 - DNA, 25 bp, Homo sapien
ctggatgtgtctgccagtaggtgaa

SEQ ID NO: 3536271 - DNA, 25 bp, Homo sapien
ttgtgtccccacaggaaccaagctc

SEQ ID NO: 3536272 - DNA, 25 bp, Homo sapien
gtgtccccacaggaaccaagctctt

SEQ ID NO: 3536273 - DNA, 25 bp, Homo sapien
ttttgtgtccccacaggaaccaagc

SEQ ID NO: 3536274 - DNA, 25 bp, Homo sapien
atgcaagtggccccgaacccatgct

SEQ ID NO: 3536275 - DNA, 25 bp, Homo sapien
gggtttttcacatgttcctcattca

SEQ ID NO: 3536276 - DNA, 25 bp, Homo sapien
cctagggtctattgtctaagtcagc

SEQ ID NO: 3536277 - DNA, 25 bp, Homo sapien
ctcggttattatttactcttctaag

SEQ ID NO: 3536278 - DNA, 25 bp, Homo sapien
tgcaaggccaggacaattgcgggct

SEQ ID NO: 3536279 - DNA, 25 bp, Homo sapien
ctttcatagatccatttgtcttccc

SEQ ID NO: 3536280 - DNA, 25 bp, Homo sapien
tttcatagatccatttgtcttcccc

SEQ ID NO: 3536281 - DNA, 25 bp, Homo sapien
tcatagatccatttgtcttccccat

SEQ ID NO: 3536282 - DNA, 25 bp, Homo sapien
ttcatagatccatttgtcttcccca

SEQ ID NO: 3536283 - DNA, 25 bp, Homo sapien
gggttttaactcactaggtagctga

SEQ ID NO: 3536284 - DNA, 25 bp, Homo sapien
gctgaataattagggccgaaaggcc

SEQ ID NO: 3536285 - DNA, 25 bp, Homo sapien
taactgttacagacatgggtacgtt

SEQ ID NO: 3536286 - DNA, 25 bp, Homo sapien
tgctactgtgactaactaaatctgt

SEQ ID NO: 3536287 - DNA, 25 bp, Homo sapien
aacatgtgcttccttgtgaaaatct

SEQ ID NO: 3536288 - DNA, 25 bp, Homo sapien
tctccatcagagcaactttctccat

SEQ ID NO: 3536289 - DNA, 25 bp, Homo sapien
tgtgcttccttgtgaaaatctctct

SEQ ID NO: 3536290 - DNA, 25 bp, Homo sapien
catcagagcaactttctccatctgc

SEQ ID NO: 3536291 - DNA, 25 bp, Homo sapien
catgtcatcatgtaatacagagatg

SEQ ID NO: 3536292 - DNA, 25 bp, Homo sapien
taatacagagatggaagatgtcacc

SEQ ID NO: 3536293 - DNA, 25 bp, Homo sapien
cttgacatgtcatcatgtaatacag

SEQ ID NO: 3536294 - DNA, 25 bp, Homo sapien
tcatcatgtaatacagagatggaag

SEQ ID NO: 3536295 - DNA, 25 bp, Homo sapien
ttccagtgtcagctgtagaaataaa

SEQ ID NO: 3536296 - DNA, 25 bp, Homo sapien
cagtgtcagctgtagaaataaagac

SEQ ID NO: 3536297 - DNA, 25 bp, Homo sapien
agagagatctctttgaaactgctcc

SEQ ID NO: 3536298 - DNA, 25 bp, Homo sapien
acagcgtgctgagcctacagagaga

SEQ ID NO: 3536299 - DNA, 25 bp, Homo sapien
ttggtttacatagggacatcacctg

SEQ ID NO: 3536300 - DNA, 25 bp, Homo sapien
tcacctggaacatgttcacttctag

SEQ ID NO: 3536301 - DNA, 25 bp, Homo sapien
tttacatagggacatcacctggaac

SEQ ID NO: 3536302 - DNA, 25 bp, Homo sapien
gaacatgttcacttctagatgatct

SEQ ID NO: 3536303 - DNA, 25 bp, Homo sapien
gaatgcgggtgtggttctcaagcca

SEQ ID NO: 3536304 - DNA, 25 bp, Homo sapien
catctgctctggtgaacacacgagg

SEQ ID NO: 3536305 - DNA, 25 bp, Homo sapien
gtttagtgttgattggtgtgcagcc

SEQ ID NO: 3536306 - DNA, 25 bp, Homo sapien
cagccttggatattagcatctgctc

SEQ ID NO: 3536307 - DNA, 25 bp, Homo sapien
tcagctttttgaaagcttcatgggt

SEQ ID NO: 3536308 - DNA, 25 bp, Homo sapien
cagctttttgaaagcttcatgggta

SEQ ID NO: 3536309 - DNA, 25 bp, Homo sapien
agctttttgaaagcttcatgggtag

SEQ ID NO: 3536310 - DNA, 25 bp, Homo sapien
gcctttattgagggtcctttgttgc

SEQ ID NO: 3536311 - DNA, 25 bp, Homo sapien
gccagttatcaacaaagtgattttt

SEQ ID NO: 3536312 - DNA, 25 bp, Homo sapien
tttgttgagatcaggcctttattga

SEQ ID NO: 3536313 - DNA, 25 bp, Homo sapien
gagggtcctttgttgccagttatca

SEQ ID NO: 3536314 - DNA, 25 bp, Homo sapien
ctcttccaacaggtaactttagttg

SEQ ID NO: 3536315 - DNA, 25 bp, Homo sapien
catactcttccaacaggtaacttta

SEQ ID NO: 3536316 - DNA, 25 bp, Homo sapien
atactcttccaacaggtaactttag

SEQ ID NO: 3536317 - DNA, 25 bp, Homo sapien
tcatactcttccaacaggtaacttt

SEQ ID NO: 3536318 - DNA, 25 bp, Homo sapien
tgctgatcactccattcaagctgct

SEQ ID NO: 3536319 - DNA, 25 bp, Homo sapien
ggtgagataattctgctgaactcca

SEQ ID NO: 3536320 - DNA, 25 bp, Homo sapien
aggccagcgacagcagggatgacta

SEQ ID NO: 3536321 - DNA, 25 bp, Homo sapien
tagtccttccaaggtcacaggccag

SEQ ID NO: 3536322 - DNA, 25 bp, Homo sapien
agagatccagccatgtacagagtag

SEQ ID NO: 3536323 - DNA, 25 bp, Homo sapien
gagatccagccatgtacagagtagc

SEQ ID NO: 3536324 - DNA, 25 bp, Homo sapien
tccagccatgtacagagtagcagtg

SEQ ID NO: 3536325 - DNA, 25 bp, Homo sapien
gatccagccatgtacagagtagcag

SEQ ID NO: 3536326 - DNA, 25 bp, Homo sapien
ctgctttccagtacgtgtgaacctg

SEQ ID NO: 3536327 - DNA, 25 bp, Homo sapien
aacctgctgcttccgttgtggtggc

SEQ ID NO: 3536328 - DNA, 25 bp, Homo sapien
cttccgttgtggtggctggcatctg

SEQ ID NO: 3536329 - DNA, 25 bp, Homo sapien
agtacgtgtgaacctgctgcttccg

SEQ ID NO: 3536330 - DNA, 25 bp, Homo sapien
ttcagggatgaggagcttgcaagcc

SEQ ID NO: 3536331 - DNA, 25 bp, Homo sapien
caggtgatgatgacggaaaactcca

SEQ ID NO: 3536332 - DNA, 25 bp, Homo sapien
gaaaactccaggctcaatagtgact

SEQ ID NO: 3536333 - DNA, 25 bp, Homo sapien
tcgatcttaaaccagcccatgctag

SEQ ID NO: 3536334 - DNA, 25 bp, Homo sapien
gaagtggcaattcacagtcttgtcg

SEQ ID NO: 3536335 - DNA, 25 bp, Homo sapien
tcagagaagtggcaattcacagtct

SEQ ID NO: 3536336 - DNA, 25 bp, Homo sapien
gagaagtggcaattcacagtcttgt

SEQ ID NO: 3536337 - DNA, 25 bp, Homo sapien
agtggcaattcacagtcttgtcgtc

SEQ ID NO: 3536338 - DNA, 25 bp, Homo sapien
gagtctcagtcctactttatcccca

SEQ ID NO: 3536339 - DNA, 25 bp, Homo sapien
cccaccagatcttaagggtctcctt

SEQ ID NO: 3536340 - DNA, 25 bp, Homo sapien
cagttttagtgcctatgagtctcag

SEQ ID NO: 3536341 - DNA, 25 bp, Homo sapien
caagagccaactatcatgtatctgg

SEQ ID NO: 3536342 - DNA, 25 bp, Homo sapien
gcctaacaagctgtcagtcaccatc

SEQ ID NO: 3536343 - DNA, 25 bp, Homo sapien
tgaggccgttgggttcaattagacc

SEQ ID NO: 3536344 - DNA, 25 bp, Homo sapien
ttagacctctgcctaacaagctgtc

SEQ ID NO: 3536345 - DNA, 25 bp, Homo sapien
gcacttggcattcacttatgaggcc

SEQ ID NO: 3536346 - DNA, 25 bp, Homo sapien
ggtgcatattgcataaccctctgct

SEQ ID NO: 3536347 - DNA, 25 bp, Homo sapien
ttgacttggtgcatattgcataacc

SEQ ID NO: 3536348 - DNA, 25 bp, Homo sapien
gatttcaaggagttgacttggtgca

SEQ ID NO: 3536349 - DNA, 25 bp, Homo sapien
gaaacctgtgagcaggatttcaagg

SEQ ID NO: 3536350 - DNA, 25 bp, Homo sapien
ggcttcgatgccatggcagtgtcta

SEQ ID NO: 3536351 - DNA, 25 bp, Homo sapien
ggagacactcgtcatcctagtgaaa

SEQ ID NO: 3536352 - DNA, 25 bp, Homo sapien
tcacacaattggtaagaagaactgg

SEQ ID NO: 3536353 - DNA, 25 bp, Homo sapien
tgtttacaactgacgtcccagtggg

SEQ ID NO: 3536354 - DNA, 25 bp, Homo sapien
tcagtgtcgctgtgacaactaaatg

SEQ ID NO: 3536355 - DNA, 25 bp, Homo sapien
ctcctgggggaagcctacaagcctg

SEQ ID NO: 3536356 - DNA, 25 bp, Homo sapien
gggggaagcctacaagcctgtcagt

SEQ ID NO: 3536357 - DNA, 25 bp, Homo sapien
tgcttgtcagtgtcgctgtgacaac

SEQ ID NO: 3536358 - DNA, 25 bp, Homo sapien
gttagaaacaactcattactgggag

SEQ ID NO: 3536359 - DNA, 25 bp, Homo sapien
tcttcaaaaccagctaatgagctga

SEQ ID NO: 3536360 - DNA, 25 bp, Homo sapien
agtgcctgtgatgtggataaagtta

SEQ ID NO: 3536361 - DNA, 25 bp, Homo sapien
accagctaatgagctgagtgcctgt

SEQ ID NO: 3536362 - DNA, 25 bp, Homo sapien
tcacattgatgccatcagtagggat

SEQ ID NO: 3536363 - DNA, 25 bp, Homo sapien
cagtagggatgaaatgcagtcttga

SEQ ID NO: 3536364 - DNA, 25 bp, Homo sapien
tcttgaggcagctgccgaaattcta

SEQ ID NO: 3536365 - DNA, 25 bp, Homo sapien
cagactcatttttgcatgcttcaca

SEQ ID NO: 3536366 - DNA, 25 bp, Homo sapien
gtaggagtcagaggttgtcacagct

SEQ ID NO: 3536367 - DNA, 25 bp, Homo sapien
aggagtcagaggttgtcacagctgg

SEQ ID NO: 3536368 - DNA, 25 bp, Homo sapien
tgtaggagtcagaggttgtcacagc

SEQ ID NO: 3536369 - DNA, 25 bp, Homo sapien
ctttgtaggagtcagaggttgtcac

SEQ ID NO: 3536370 - DNA, 25 bp, Homo sapien
gtctgtggggtcgaacttcaaacag

SEQ ID NO: 3536371 - DNA, 25 bp, Homo sapien
tgtggggtcgaacttcaaacagaag

SEQ ID NO: 3536372 - DNA, 25 bp, Homo sapien
tggggtcgaacttcaaacagaagtc

SEQ ID NO: 3536373 - DNA, 25 bp, Homo sapien
taagtctgtggggtcgaacttcaaa

SEQ ID NO: 3536374 - DNA, 25 bp, Homo sapien
gaggtattgagccaaccaagcacac

SEQ ID NO: 3536375 - DNA, 25 bp, Homo sapien
gaccttggtccaatgactctttgaa

SEQ ID NO: 3536376 - DNA, 25 bp, Homo sapien
gatactacaatgtcaacaactggcc

SEQ ID NO: 3536377 - DNA, 25 bp, Homo sapien
tctagccaggtttctttgatgcagg

SEQ ID NO: 3536378 - DNA, 25 bp, Homo sapien
gaaggacttgaaagcacgttttcat

SEQ ID NO: 3536379 - DNA, 25 bp, Homo sapien
tccttcagacacatttcttttatct

SEQ ID NO: 3536380 - DNA, 25 bp, Homo sapien
ctgccttcgcagagataaataagag

SEQ ID NO: 3536381 - DNA, 25 bp, Homo sapien
agagccttcaaccccggtttcagca

SEQ ID NO: 3536382 - DNA, 25 bp, Homo sapien
tctgtcagaacctaagtcactcctt

SEQ ID NO: 3536383 - DNA, 25 bp, Homo sapien
cttctgtcagaacctaagtcactcc

SEQ ID NO: 3536384 - DNA, 25 bp, Homo sapien
gtcagaacctaagtcactccttgct

SEQ ID NO: 3536385 - DNA, 25 bp, Homo sapien
tgtcagaacctaagtcactccttgc

SEQ ID NO: 3536386 - DNA, 25 bp, Homo sapien
ggaacaacatgaggataaccagccc

SEQ ID NO: 3536387 - DNA, 25 bp, Homo sapien
agttcaaggtgagatctgcatgggg

SEQ ID NO: 3536388 - DNA, 25 bp, Homo sapien
ctagatcgatttaacaatttcatca

SEQ ID NO: 3536389 - DNA, 25 bp, Homo sapien
tgttaactagatcgatttaacaatt

SEQ ID NO: 3536390 - DNA, 25 bp, Homo sapien
cagtctaacgccccttcaaatttat

SEQ ID NO: 3536391 - DNA, 25 bp, Homo sapien
cacagtctaacgccccttcaaattt

SEQ ID NO: 3536392 - DNA, 25 bp, Homo sapien
tgccacagtctaacgccccttcaaa

SEQ ID NO: 3536393 - DNA, 25 bp, Homo sapien
gccacagtctaacgccccttcaaat

SEQ ID NO: 3536394 - DNA, 25 bp, Homo sapien
tgatgatgacactgataataaacat

SEQ ID NO: 3536395 - DNA, 25 bp, Homo sapien
ttcacatcttagaaatgttagaatg

SEQ ID NO: 3536396 - DNA, 25 bp, Homo sapien
caaggatctactctaatcagaaaca

SEQ ID NO: 3536397 - DNA, 25 bp, Homo sapien
tgttacaccattactcacttatgca

SEQ ID NO: 3536398 - DNA, 25 bp, Homo sapien
aataagtttttctcgatcacatctc

SEQ ID NO: 3536399 - DNA, 25 bp, Homo sapien
taagtttttctcgatcacatctcat

SEQ ID NO: 3536400 - DNA, 25 bp, Homo sapien
agactgactctgacaaaataattcc

SEQ ID NO: 3536401 - DNA, 25 bp, Homo sapien
ccttaataagtttttctcgatcaca

SEQ ID NO: 3536402 - DNA, 25 bp, Homo sapien
ttgtatcaagtaactgatcatgttt

SEQ ID NO: 3536403 - DNA, 25 bp, Homo sapien
tgtatcaagtaactgatcatgtttt

SEQ ID NO: 3536404 - DNA, 25 bp, Homo sapien
gtatcaagtaactgatcatgttttg

SEQ ID NO: 3536405 - DNA, 25 bp, Homo sapien
gtgaataagtggatgtccaaacaaa

SEQ ID NO: 3536406 - DNA, 25 bp, Homo sapien
tggatgtccaaacaaacaggataac

SEQ ID NO: 3536407 - DNA, 25 bp, Homo sapien
tgtccaaacaaacaggataacccaa

SEQ ID NO: 3536408 - DNA, 25 bp, Homo sapien
taagtggatgtccaaacaaacagga

SEQ ID NO: 3536409 - DNA, 25 bp, Homo sapien
ctgttccttccatctaaggtggttt

SEQ ID NO: 3536410 - DNA, 25 bp, Homo sapien
cactgttccttccatctaaggtggt

SEQ ID NO: 3536411 - DNA, 25 bp, Homo sapien
cttcctgtcttcacagatttgttca

SEQ ID NO: 3536412 - DNA, 25 bp, Homo sapien
tccttcctgtcttcacagatttgtt

SEQ ID NO: 3536413 - DNA, 25 bp, Homo sapien
ctcagtgtgttgcttgtcttctcaa

SEQ ID NO: 3536414 - DNA, 25 bp, Homo sapien
gattcattttcaatagcatgtctca

SEQ ID NO: 3536415 - DNA, 25 bp, Homo sapien
cagtgtgttgcttgtcttctcaaag

SEQ ID NO: 3536416 - DNA, 25 bp, Homo sapien
caatagcatgtctcagtgtgttgct

SEQ ID NO: 3536417 - DNA, 25 bp, Homo sapien
tagccattcaagcagtaatcttagc

SEQ ID NO: 3536418 - DNA, 25 bp, Homo sapien
aacttcatagacaaccttgtgtaaa

SEQ ID NO: 3536419 - DNA, 25 bp, Homo sapien
tcaattccggtcctgatagccattc

SEQ ID NO: 3536420 - DNA, 25 bp, Homo sapien
tagccatcagcaaaacttcatagac

SEQ ID NO: 3536421 - DNA, 25 bp, Homo sapien
tgaatggtcactgtatgacaggatt

SEQ ID NO: 3536422 - DNA, 25 bp, Homo sapien
gaatggtcactgtatgacaggatta

SEQ ID NO: 3536423 - DNA, 25 bp, Homo sapien
gaaagtaggatgctgtcttcccctg

SEQ ID NO: 3536424 - DNA, 25 bp, Homo sapien
tgctgacaacatacccactgactgc

SEQ ID NO: 3536425 - DNA, 25 bp, Homo sapien
tgagggtggacactcagctagccac

SEQ ID NO: 3536426 - DNA, 25 bp, Homo sapien
gctagccactggactctgctgacaa

SEQ ID NO: 3536427 - DNA, 25 bp, Homo sapien
acaaataaatcatagcctgtgacac

SEQ ID NO: 3536428 - DNA, 25 bp, Homo sapien
aaataaatcatagcctgtgacacca

SEQ ID NO: 3536429 - DNA, 25 bp, Homo sapien
caaataaatcatagcctgtgacacc

SEQ ID NO: 3536430 - DNA, 25 bp, Homo sapien
gacaaataaatcatagcctgtgaca

SEQ ID NO: 3536431 - DNA, 25 bp, Homo sapien
gtcttgcctgaatgacaactcccag

SEQ ID NO: 3536432 - DNA, 25 bp, Homo sapien
gcctgaatgacaactcccagaagaa

SEQ ID NO: 3536433 - DNA, 25 bp, Homo sapien
tgacaactcccagaagaagaagaat

SEQ ID NO: 3536434 - DNA, 25 bp, Homo sapien
ggccagtgtcttgcctgaatgacaa

SEQ ID NO: 3536435 - DNA, 25 bp, Homo sapien
gaatcaggttaataagttgtgctga

SEQ ID NO: 3536436 - DNA, 25 bp, Homo sapien
gtcgaatcaggttaataagttgtgc

SEQ ID NO: 3536437 - DNA, 25 bp, Homo sapien
caccatgtcgaatcaggttaataag

SEQ ID NO: 3536438 - DNA, 25 bp, Homo sapien
catgtcgaatcaggttaataagttg

SEQ ID NO: 3536439 - DNA, 25 bp, Homo sapien
gatatgtcacttttaatagctgttc

SEQ ID NO: 3536440 - DNA, 25 bp, Homo sapien
ttcttcaaaatagggattgaaagcc

SEQ ID NO: 3536441 - DNA, 25 bp, Homo sapien
taatagctgttcattgaaatgttct

SEQ ID NO: 3536442 - DNA, 25 bp, Homo sapien
gccaggtgcctaatttgtttgtata

SEQ ID NO: 3536443 - DNA, 25 bp, Homo sapien
tttccacctgccagtactctcccat

SEQ ID NO: 3536444 - DNA, 25 bp, Homo sapien
gaagttttccacctgccagtactct

SEQ ID NO: 3536445 - DNA, 25 bp, Homo sapien
ctgctataagcaggtcttcaaagaa

SEQ ID NO: 3536446 - DNA, 25 bp, Homo sapien
agcaggtcttcaaagaagttttcca

SEQ ID NO: 3536447 - DNA, 25 bp, Homo sapien
attgtcaggagccagatctggtgat

SEQ ID NO: 3536448 - DNA, 25 bp, Homo sapien
gacaagtaagcaagtgttgcaatga

SEQ ID NO: 3536449 - DNA, 25 bp, Homo sapien
gatctggtgataggaggacaagtaa

SEQ ID NO: 3536450 - DNA, 25 bp, Homo sapien
gaggacaagtaagcaagtgttgcaa

SEQ ID NO: 3536451 - DNA, 25 bp, Homo sapien
tttctgagcttctaactcacgtgtc

SEQ ID NO: 3536452 - DNA, 25 bp, Homo sapien
ttttataattcaactcaaagtcagc

SEQ ID NO: 3536453 - DNA, 25 bp, Homo sapien
actcacgtgtctatctggttcctgg

SEQ ID NO: 3536454 - DNA, 25 bp, Homo sapien
gcttctaactcacgtgtctatctgg

SEQ ID NO: 3536455 - DNA, 25 bp, Homo sapien
cctgtcatgtctgttgaagttatgc

SEQ ID NO: 3536456 - DNA, 25 bp, Homo sapien
ctgtcatgtctgttgaagttatgcc

SEQ ID NO: 3536457 - DNA, 25 bp, Homo sapien
tccaactttaaatgccccactgtac

SEQ ID NO: 3536458 - DNA, 25 bp, Homo sapien
ttccaactttaaatgccccactgta

SEQ ID NO: 3536459 - DNA, 25 bp, Homo sapien
tgcttccaccgatgaaatattttca

SEQ ID NO: 3536460 - DNA, 25 bp, Homo sapien
cccatataattaggatgccataatc

SEQ ID NO: 3536461 - DNA, 25 bp, Homo sapien
ttcttctttaggtcccagatctacc

SEQ ID NO: 3536462 - DNA, 25 bp, Homo sapien
gccataatcgggtcactgcttccac

SEQ ID NO: 3536463 - DNA, 25 bp, Homo sapien
gattagggctcactctaaagcttcc

SEQ ID NO: 3536464 - DNA, 25 bp, Homo sapien
tcagcaggattagttcatcccaagg

SEQ ID NO: 3536465 - DNA, 25 bp, Homo sapien
tcctgaaaccacagcctcatggata

SEQ ID NO: 3536466 - DNA, 25 bp, Homo sapien
tatgcaaggtcatgatttcagcagg

SEQ ID NO: 3536467 - DNA, 25 bp, Homo sapien
aaactttcctgatttagaccatggg

SEQ ID NO: 3536468 - DNA, 25 bp, Homo sapien
gggtccacaattgagcccacaaggc

SEQ ID NO: 3536469 - DNA, 25 bp, Homo sapien
tcatgtctgcatggctgaatctacc

SEQ ID NO: 3536470 - DNA, 25 bp, Homo sapien
ttctatggcaagtgggcagttttcc

SEQ ID NO: 3536471 - DNA, 25 bp, Homo sapien
gccaaacatctaaatccaagtcctt

SEQ ID NO: 3536472 - DNA, 25 bp, Homo sapien
gactgccattttgtggagctataga

SEQ ID NO: 3536473 - DNA, 25 bp, Homo sapien
cagcatggacaagtacaaggatgac

SEQ ID NO: 3536474 - DNA, 25 bp, Homo sapien
taagagaaacatagtcctaattctg

SEQ ID NO: 3536475 - DNA, 25 bp, Homo sapien
ccctttgataaagaagatcgaaata

SEQ ID NO: 3536476 - DNA, 25 bp, Homo sapien
tcttaggatatgtgtatgttcaact

SEQ ID NO: 3536477 - DNA, 25 bp, Homo sapien
agatcgaaataactggctcttagga

SEQ ID NO: 3536478 - DNA, 25 bp, Homo sapien
actggctcttaggatatgtgtatgt

SEQ ID NO: 3536479 - DNA, 25 bp, Homo sapien
ggttctgggagggttatcttccaga

SEQ ID NO: 3536480 - DNA, 25 bp, Homo sapien
ttgttgaattcctcttgtatcctcg

SEQ ID NO: 3536481 - DNA, 25 bp, Homo sapien
tgggagggttatcttccagattgca

SEQ ID NO: 3536482 - DNA, 25 bp, Homo sapien
ttgtatcctcgcatagcagaaagaa

SEQ ID NO: 3536483 - DNA, 25 bp, Homo sapien
tgagaaacatacaatactcatgtac

SEQ ID NO: 3536484 - DNA, 25 bp, Homo sapien
gatctaagtgaattgagaaacatac

SEQ ID NO: 3536485 - DNA, 25 bp, Homo sapien
ggtttaatacagagtacaagatttg

SEQ ID NO: 3536486 - DNA, 25 bp, Homo sapien
tactggaatactcaatattgctaag

SEQ ID NO: 3536487 - DNA, 25 bp, Homo sapien
ccacgttaagcaaatgttggatttt

SEQ ID NO: 3536488 - DNA, 25 bp, Homo sapien
taatcaagctccagaatacattctt

SEQ ID NO: 3536489 - DNA, 25 bp, Homo sapien
gagagcatggagtacataataaaca

SEQ ID NO: 3536490 - DNA, 25 bp, Homo sapien
tcctataattgtaaacccatccacg

SEQ ID NO: 3536491 - DNA, 25 bp, Homo sapien
taagcccctctaaatggaaggatgg

SEQ ID NO: 3536492 - DNA, 25 bp, Homo sapien
caagggaacaccagtcagatggtct

SEQ ID NO: 3536493 - DNA, 25 bp, Homo sapien
ggcaaacttgtactccttggagtcg

SEQ ID NO: 3536494 - DNA, 25 bp, Homo sapien
gaaggtcgtcagctaagaacaagtg

SEQ ID NO: 3536495 - DNA, 25 bp, Homo sapien
ttcttatactggagagagattattc

SEQ ID NO: 3536496 - DNA, 25 bp, Homo sapien
cttcttatactggagagagattatt

SEQ ID NO: 3536497 - DNA, 25 bp, Homo sapien
ttctggcatggctaagagaaaagcc

SEQ ID NO: 3536498 - DNA, 25 bp, Homo sapien
tctccttggcgctgttagatacaca

SEQ ID NO: 3536499 - DNA, 25 bp, Homo sapien
ttataaaagctagtagcggcctgtg

SEQ ID NO: 3536500 - DNA, 25 bp, Homo sapien
tatggctccagcattgcctaaggga

SEQ ID NO: 3536501 - DNA, 25 bp, Homo sapien
agatggttgcatcttcgagtagtgg

SEQ ID NO: 3536502 - DNA, 25 bp, Homo sapien
gctgtgaccaggcagatggttgcat

SEQ ID NO: 3536503 - DNA, 25 bp, Homo sapien
ggaaaaaagtggctgtgaccaggca

SEQ ID NO: 3536504 - DNA, 25 bp, Homo sapien
tagtggggataaggcacaattttcc

SEQ ID NO: 3536505 - DNA, 25 bp, Homo sapien
acggcatctgtgtagcaaatgggaa

SEQ ID NO: 3536506 - DNA, 25 bp, Homo sapien
ggaaggatgagacggcatctgtgta

SEQ ID NO: 3536507 - DNA, 25 bp, Homo sapien
gcatctgtgtagcaaatgggaaata

SEQ ID NO: 3536508 - DNA, 25 bp, Homo sapien
ctggaaggatgagacggcatctgtg

SEQ ID NO: 3536509 - DNA, 25 bp, Homo sapien
ctttgcagaaatcagtctaagcagc

SEQ ID NO: 3536510 - DNA, 25 bp, Homo sapien
atgaaaatgcctgtgcactttgcag

SEQ ID NO: 3536511 - DNA, 25 bp, Homo sapien
cagctctggacatgaaagtgaagca

SEQ ID NO: 3536512 - DNA, 25 bp, Homo sapien
aagcagctctggacatgaaagtgaa

SEQ ID NO: 3536513 - DNA, 25 bp, Homo sapien
tcacaatttagttccaatatagtaa

SEQ ID NO: 3536514 - DNA, 25 bp, Homo sapien
cacaatttagttccaatatagtaac

SEQ ID NO: 3536515 - DNA, 25 bp, Homo sapien
cccactcttacaatggccactagag

SEQ ID NO: 3536516 - DNA, 25 bp, Homo sapien
tcagcaacttctcagacgggagtgg

SEQ ID NO: 3536517 - DNA, 25 bp, Homo sapien
cactagagcactaggaaatgggacc

SEQ ID NO: 3536518 - DNA, 25 bp, Homo sapien
ggagtggggccttgatccacatccc

SEQ ID NO: 3536519 - DNA, 25 bp, Homo sapien
aattgtatcattgtgttccacatca

SEQ ID NO: 3536520 - DNA, 25 bp, Homo sapien
caaaattgtatcattgtgttccaca

SEQ ID NO: 3536521 - DNA, 25 bp, Homo sapien
tcaaaattgtatcattgtgttccac

SEQ ID NO: 3536522 - DNA, 25 bp, Homo sapien
tgtatcattgtgttccacatcaaca

SEQ ID NO: 3536523 - DNA, 25 bp, Homo sapien
gcacttgaaattggttcaatgggag

SEQ ID NO: 3536524 - DNA, 25 bp, Homo sapien
tgattcttaagagcctctagcaatc

SEQ ID NO: 3536525 - DNA, 25 bp, Homo sapien
tctaaatccactggttccatcaggg

SEQ ID NO: 3536526 - DNA, 25 bp, Homo sapien
atgcacttgaaattggttcaatggg

SEQ ID NO: 3536527 - DNA, 25 bp, Homo sapien
tgtccaatacaaagaatcctaccaa

SEQ ID NO: 3536528 - DNA, 25 bp, Homo sapien
tactgggtccactaattctgccttg

SEQ ID NO: 3536529 - DNA, 25 bp, Homo sapien
taattctgccttgtccaatacaaag

SEQ ID NO: 3536530 - DNA, 25 bp, Homo sapien
actttgctctggcttgacctcttac

SEQ ID NO: 3536531 - DNA, 25 bp, Homo sapien
aatgtggttctctgtcatgcaactc

SEQ ID NO: 3536532 - DNA, 25 bp, Homo sapien
gcaactcttgcacagcccattgata

SEQ ID NO: 3536533 - DNA, 25 bp, Homo sapien
aaactgctggtttgtgctgtcccct

SEQ ID NO: 3536534 - DNA, 25 bp, Homo sapien
tgtaagccaaacttcagaccaagtg

SEQ ID NO: 3536535 - DNA, 25 bp, Homo sapien
tggtgctgattctaactgaaggatt

SEQ ID NO: 3536536 - DNA, 25 bp, Homo sapien
cccagcatgagtctcgctaaacata

SEQ ID NO: 3536537 - DNA, 25 bp, Homo sapien
ctaactgaaggatttgtgatctttc

SEQ ID NO: 3536538 - DNA, 25 bp, Homo sapien
gcatgagtctcgctaaacatatcca

SEQ ID NO: 3536539 - DNA, 25 bp, Homo sapien
ttcataacctgaatccattaggtcc

SEQ ID NO: 3536540 - DNA, 25 bp, Homo sapien
caaaaaaggaataatgggccagtcg

SEQ ID NO: 3536541 - DNA, 25 bp, Homo sapien
gagtttcctgccacaatcaaaaaag

SEQ ID NO: 3536542 - DNA, 25 bp, Homo sapien
aaaggaagcattactaacagatgaa

SEQ ID NO: 3536543 - DNA, 25 bp, Homo sapien
catggaagcagcgatttttgtaaaa

SEQ ID NO: 3536544 - DNA, 25 bp, Homo sapien
tttcatggaagcagcgatttttgta

SEQ ID NO: 3536545 - DNA, 25 bp, Homo sapien
gctttgatgcgaaatgcaagtttcc

SEQ ID NO: 3536546 - DNA, 25 bp, Homo sapien
agtttccatctggttggctttcatg

SEQ ID NO: 3536547 - DNA, 25 bp, Homo sapien
caacacaagcttcatgtaccttcct

SEQ ID NO: 3536548 - DNA, 25 bp, Homo sapien
gagtctgcgtgcatgccaacacaag

SEQ ID NO: 3536549 - DNA, 25 bp, Homo sapien
tcaaactcaatcacatgagtctgcg

SEQ ID NO: 3536550 - DNA, 25 bp, Homo sapien
tcacatgagtctgcgtgcatgccaa

SEQ ID NO: 3536551 - DNA, 25 bp, Homo sapien
ttttgcacgccaatgatgaatcttt

SEQ ID NO: 3536552 - DNA, 25 bp, Homo sapien
ccttttgcacgccaatgatgaatct

SEQ ID NO: 3536553 - DNA, 25 bp, Homo sapien
tgatgaatctttcccaaagactgac

SEQ ID NO: 3536554 - DNA, 25 bp, Homo sapien
ttcccaaagactgacactaacagcc

SEQ ID NO: 3536555 - DNA, 25 bp, Homo sapien
agcgcagctagatcttcaaagtttc

SEQ ID NO: 3536556 - DNA, 25 bp, Homo sapien
gaagcgcagctagatcttcaaagtt

SEQ ID NO: 3536557 - DNA, 25 bp, Homo sapien
ccaagaagcgcagctagatcttcaa

SEQ ID NO: 3536558 - DNA, 25 bp, Homo sapien
cgcagctagatcttcaaagtttctc

SEQ ID NO: 3536559 - DNA, 25 bp, Homo sapien
cactggagtcaaatacagccacggg

SEQ ID NO: 3536560 - DNA, 25 bp, Homo sapien
caaatacagccacgggattgcagcg

SEQ ID NO: 3536561 - DNA, 25 bp, Homo sapien
cgggattgcagcgaaagcaccaggc

SEQ ID NO: 3536562 - DNA, 25 bp, Homo sapien
aaaacacactggagtcaaatacagc

SEQ ID NO: 3536563 - DNA, 25 bp, Homo sapien
ttttaatctgtgtagacatactaac

SEQ ID NO: 3536564 - DNA, 25 bp, Homo sapien
gacatactaacttccttaaataagc

SEQ ID NO: 3536565 - DNA, 25 bp, Homo sapien
aagctaaagccctagttttaatctg

SEQ ID NO: 3536566 - DNA, 25 bp, Homo sapien
gctaaagccctagttttaatctgtg

SEQ ID NO: 3536567 - DNA, 25 bp, Homo sapien
gcactttttgctcatgttcagccat

SEQ ID NO: 3536568 - DNA, 25 bp, Homo sapien
gggctgcactttttgctcatgttca

SEQ ID NO: 3536569 - DNA, 25 bp, Homo sapien
atgcaataggctgggtaagtggact

SEQ ID NO: 3536570 - DNA, 25 bp, Homo sapien
ttttccaatgcaataggctgggtaa

SEQ ID NO: 3536571 - DNA, 25 bp, Homo sapien
tgcattgtcaattgccgatcaagtg

SEQ ID NO: 3536572 - DNA, 25 bp, Homo sapien
gccgatcaagtgtatcccttgcttt

SEQ ID NO: 3536573 - DNA, 25 bp, Homo sapien
ctctgagcaccacatgagtggagct

SEQ ID NO: 3536574 - DNA, 25 bp, Homo sapien
tctgagcaccacatgagtggagctc

SEQ ID NO: 3536575 - DNA, 25 bp, Homo sapien
agaaatgaggatgctgtgacacttt

SEQ ID NO: 3536576 - DNA, 25 bp, Homo sapien
tgaggatgctgtgacactttgccct

SEQ ID NO: 3536577 - DNA, 25 bp, Homo sapien
atgctgtgacactttgccctcctgg

SEQ ID NO: 3536578 - DNA, 25 bp, Homo sapien
ggacgctggttgtcttgatgagctg

SEQ ID NO: 3536579 - DNA, 25 bp, Homo sapien
catcagaggatggctattcagctgc

SEQ ID NO: 3536580 - DNA, 25 bp, Homo sapien
cacgtgaaactttcggaaatgccga

SEQ ID NO: 3536581 - DNA, 25 bp, Homo sapien
aactttcggaaatgccgagttcctg

SEQ ID NO: 3536582 - DNA, 25 bp, Homo sapien
tcggaaatgccgagttcctgatgta

SEQ ID NO: 3536583 - DNA, 25 bp, Homo sapien
ctgaaaagtccacgtgaaactttcg

SEQ ID NO: 3536584 - DNA, 25 bp, Homo sapien
gttgaataaggaacatgcatgagca

SEQ ID NO: 3536585 - DNA, 25 bp, Homo sapien
tctctgtgctctaccatgagaagag

SEQ ID NO: 3536586 - DNA, 25 bp, Homo sapien
gcaatggaaatgcaacactcctctt

SEQ ID NO: 3536587 - DNA, 25 bp, Homo sapien
acagttgaataaggaacatgcatga

SEQ ID NO: 3536588 - DNA, 25 bp, Homo sapien
tgaaacctcgcagtctaagatgtga

SEQ ID NO: 3536589 - DNA, 25 bp, Homo sapien
cagtctaagatgtgagtgggaatgc

SEQ ID NO: 3536590 - DNA, 25 bp, Homo sapien
tgtgagtgggaatgcaaccctccat

SEQ ID NO: 3536591 - DNA, 25 bp, Homo sapien
aatgctgatgaaacctcgcagtcta

SEQ ID NO: 3536592 - DNA, 25 bp, Homo sapien
cctttgtataaatgaaggtcaaatg

SEQ ID NO: 3536593 - DNA, 25 bp, Homo sapien
cttatctcctttgtataaatgaagg

SEQ ID NO: 3536594 - DNA, 25 bp, Homo sapien
ttgaaaccaacttatctcctttgta

SEQ ID NO: 3536595 - DNA, 25 bp, Homo sapien
gaaaccaacttatctcctttgtata

SEQ ID NO: 3536596 - DNA, 25 bp, Homo sapien
ttccaggatcccttctgtccaagag

SEQ ID NO: 3536597 - DNA, 25 bp, Homo sapien
gaatatatctgcctttgcactctgt

SEQ ID NO: 3536598 - DNA, 25 bp, Homo sapien
gattctctgctcctatgccccttgg

SEQ ID NO: 3536599 - DNA, 25 bp, Homo sapien
ccttggtgcagttacaattggggta

SEQ ID NO: 3536600 - DNA, 25 bp, Homo sapien
ttaaggctgctagccctctctaggc

SEQ ID NO: 3536601 - DNA, 25 bp, Homo sapien
tctttcccattgaggctccttaagg

SEQ ID NO: 3536602 - DNA, 25 bp, Homo sapien
ggtccctgctggaggtcactcggat

SEQ ID NO: 3536603 - DNA, 25 bp, Homo sapien
tgccccatggaaacattcggatgct

SEQ ID NO: 3536604 - DNA, 25 bp, Homo sapien
gattgagtgcaggttctctctgtct

SEQ ID NO: 3536605 - DNA, 25 bp, Homo sapien
ggattgagtgcaggttctctctgtc

SEQ ID NO: 3536606 - DNA, 25 bp, Homo sapien
attttcctaggcttctcccaaggat

SEQ ID NO: 3536607 - DNA, 25 bp, Homo sapien
gctgcattcataggtgtggaatcca

SEQ ID NO: 3536608 - DNA, 25 bp, Homo sapien
cgtaagggctggagctgcattcata

SEQ ID NO: 3536609 - DNA, 25 bp, Homo sapien
ctgcattcataggtgtggaatccat

SEQ ID NO: 3536610 - DNA, 25 bp, Homo sapien
aagggctggagctgcattcataggt

SEQ ID NO: 3536611 - DNA, 25 bp, Homo sapien
tccttgatggtgggtaatatctgtg

SEQ ID NO: 3536612 - DNA, 25 bp, Homo sapien
agttccttgatggtgggtaatatct

SEQ ID NO: 3536613 - DNA, 25 bp, Homo sapien
ttccttgatggtgggtaatatctgt

SEQ ID NO: 3536614 - DNA, 25 bp, Homo sapien
cccatgcttgcacagttccttgatg

SEQ ID NO: 3536615 - DNA, 25 bp, Homo sapien
tacacgggaactatttgggtacata

SEQ ID NO: 3536616 - DNA, 25 bp, Homo sapien
tctgatacacgggaactatttgggt

SEQ ID NO: 3536617 - DNA, 25 bp, Homo sapien
ttagcttccagcttctgatacacgg

SEQ ID NO: 3536618 - DNA, 25 bp, Homo sapien
attagcttccagcttctgatacacg

SEQ ID NO: 3536619 - DNA, 25 bp, Homo sapien
aagatacttgatgcttgaagtcaag

SEQ ID NO: 3536620 - DNA, 25 bp, Homo sapien
tcaagatacttgatgcttgaagtca

SEQ ID NO: 3536621 - DNA, 25 bp, Homo sapien
gatacttgatgcttgaagtcaagga

SEQ ID NO: 3536622 - DNA, 25 bp, Homo sapien
tacttgatgcttgaagtcaaggaac

SEQ ID NO: 3536623 - DNA, 25 bp, Homo sapien
caacataatggctctgtggagctga

SEQ ID NO: 3536624 - DNA, 25 bp, Homo sapien
taagctggcatccaaaggataacat

SEQ ID NO: 3536625 - DNA, 25 bp, Homo sapien
cagctaagctggcatccaaaggata

SEQ ID NO: 3536626 - DNA, 25 bp, Homo sapien
gatgacagagggtaacggaagaaac

SEQ ID NO: 3536627 - DNA, 25 bp, Homo sapien
tttcaaggcccgatacaatcatcat

SEQ ID NO: 3536628 - DNA, 25 bp, Homo sapien
tgtgcctaaatcctaaccacctttc

SEQ ID NO: 3536629 - DNA, 25 bp, Homo sapien
tcaccccattccctatgtgcctaaa

SEQ ID NO: 3536630 - DNA, 25 bp, Homo sapien
ctttcaaggcccgatacaatcatca

SEQ ID NO: 3536631 - DNA, 25 bp, Homo sapien
cagactgagaaatcttcggtctctc

SEQ ID NO: 3536632 - DNA, 25 bp, Homo sapien
agaaatcttcggtctctcttcctgg

SEQ ID NO: 3536633 - DNA, 25 bp, Homo sapien
tatctgccaagctctgtacctctcc

SEQ ID NO: 3536634 - DNA, 25 bp, Homo sapien
tcccatccctctgaaactcagcttc

SEQ ID NO: 3536635 - DNA, 25 bp, Homo sapien
ccactggatactggaaggttattaa

SEQ ID NO: 3536636 - DNA, 25 bp, Homo sapien
ttccactggatactggaaggttatt

SEQ ID NO: 3536637 - DNA, 25 bp, Homo sapien
tcttttcttccactggatactggaa

SEQ ID NO: 3536638 - DNA, 25 bp, Homo sapien
tcttccactggatactggaaggtta

SEQ ID NO: 3536639 - DNA, 25 bp, Homo sapien
tcagaatttattctccctttagttg

SEQ ID NO: 3536640 - DNA, 25 bp, Homo sapien
cagaatttattctccctttagttgg

SEQ ID NO: 3536641 - DNA, 25 bp, Homo sapien
ctgcttcagaatttattctcccttt

SEQ ID NO: 3536642 - DNA, 25 bp, Homo sapien
gcttcagaatttattctccctttag

SEQ ID NO: 3536643 - DNA, 25 bp, Homo sapien
cagaaggtcatccacatgaggatta

SEQ ID NO: 3536644 - DNA, 25 bp, Homo sapien
agtccctttctcacttagacttgag

SEQ ID NO: 3536645 - DNA, 25 bp, Homo sapien
gggatacagtcactagtggagaggg

SEQ ID NO: 3536646 - DNA, 25 bp, Homo sapien
caaaccccttcagagaagtatctgg

SEQ ID NO: 3536647 - DNA, 25 bp, Homo sapien
ttcacatgtcattagaggggtgggt

SEQ ID NO: 3536648 - DNA, 25 bp, Homo sapien
tgtttcacatgtcattagaggggtg

SEQ ID NO: 3536649 - DNA, 25 bp, Homo sapien
gattgccacagaggttcccactctg

SEQ ID NO: 3536650 - DNA, 25 bp, Homo sapien
tgccagaggccttctgcaccatagt

SEQ ID NO: 3536651 - DNA, 25 bp, Homo sapien
gatggacccacagtaatgaagctgt

SEQ ID NO: 3536652 - DNA, 25 bp, Homo sapien
gcagtactgagagctgtttggccat

SEQ ID NO: 3536653 - DNA, 25 bp, Homo sapien
tgctaagtgaaggatggacccacag

SEQ ID NO: 3536654 - DNA, 25 bp, Homo sapien
tgatggaagatggtctgctgctaag

SEQ ID NO: 3536655 - DNA, 25 bp, Homo sapien
tcagattctagagcatcaccctttg

SEQ ID NO: 3536656 - DNA, 25 bp, Homo sapien
atcatcttctcctgatgggccagtg

SEQ ID NO: 3536657 - DNA, 25 bp, Homo sapien
gccccaatgatggtgaatcttcaga

SEQ ID NO: 3536658 - DNA, 25 bp, Homo sapien
tctgaatggctttaagggccagtcg

SEQ ID NO: 3536659 - DNA, 25 bp, Homo sapien
attgctctcttccacatctagatca

SEQ ID NO: 3536660 - DNA, 25 bp, Homo sapien
ccccttctttcaggctgtcattgct

SEQ ID NO: 3536661 - DNA, 25 bp, Homo sapien
tgtcattgctctcttccacatctag

SEQ ID NO: 3536662 - DNA, 25 bp, Homo sapien
cgaaagtatccccttctttcaggct

SEQ ID NO: 3536663 - DNA, 25 bp, Homo sapien
tgcagttttggggacagctgccctt

SEQ ID NO: 3536664 - DNA, 25 bp, Homo sapien
ctatgcagttttggggacagctgcc

SEQ ID NO: 3536665 - DNA, 25 bp, Homo sapien
gcagttttggggacagctgcccttc

SEQ ID NO: 3536666 - DNA, 25 bp, Homo sapien
tatgcagttttggggacagctgccc

SEQ ID NO: 3536667 - DNA, 25 bp, Homo sapien
cacagatgtgctaggatcaggcaca

SEQ ID NO: 3536668 - DNA, 25 bp, Homo sapien
acagatgtgctaggatcaggcacag

SEQ ID NO: 3536669 - DNA, 25 bp, Homo sapien
ccacagatgtgctaggatcaggcac

SEQ ID NO: 3536670 - DNA, 25 bp, Homo sapien
tcagagagttgcacaaccgacagtg

SEQ ID NO: 3536671 - DNA, 25 bp, Homo sapien
ctgtagggttttcatgtaggcagcc

SEQ ID NO: 3536672 - DNA, 25 bp, Homo sapien
aacatcagctgatagtacctgggca

SEQ ID NO: 3536673 - DNA, 25 bp, Homo sapien
aaatggcaagagcttaggcaccgac

SEQ ID NO: 3536674 - DNA, 25 bp, Homo sapien
atttcaatttcacagatgactggca

SEQ ID NO: 3536675 - DNA, 25 bp, Homo sapien
ataatatttctgtttgcaatttcaa

SEQ ID NO: 3536676 - DNA, 25 bp, Homo sapien
ctcagtttccactgtggatgaaaat

SEQ ID NO: 3536677 - DNA, 25 bp, Homo sapien
ttccactgtggatgaaaatataata

SEQ ID NO: 3536678 - DNA, 25 bp, Homo sapien
ctgacccactgccagttgagtctta

SEQ ID NO: 3536679 - DNA, 25 bp, Homo sapien
cctgtctgcagtctcattagttgcc

SEQ ID NO: 3536680 - DNA, 25 bp, Homo sapien
tgtctgcagtctcattagttgccat

SEQ ID NO: 3536681 - DNA, 25 bp, Homo sapien
ctgtctgcagtctcattagttgcca

SEQ ID NO: 3536682 - DNA, 25 bp, Homo sapien
cctttgcatctaacccaaccttgag

SEQ ID NO: 3536683 - DNA, 25 bp, Homo sapien
tctgattccttgtgttccctttgca

SEQ ID NO: 3536684 - DNA, 25 bp, Homo sapien
gccacacttctgatggcagaggaag

SEQ ID NO: 3536685 - DNA, 25 bp, Homo sapien
tatggtcccttgaacaatttttctc

SEQ ID NO: 3536686 - DNA, 25 bp, Homo sapien
gctgaggataaaaattgtccctggc

SEQ ID NO: 3536687 - DNA, 25 bp, Homo sapien
ttgcacgctcgaggcattggctgag

SEQ ID NO: 3536688 - DNA, 25 bp, Homo sapien
tttctttgcacgctcgaggcattgg

SEQ ID NO: 3536689 - DNA, 25 bp, Homo sapien
cagcttttctttgcacgctcgaggc

SEQ ID NO: 3536690 - DNA, 25 bp, Homo sapien
ctgattatgctctccgggaagaact

SEQ ID NO: 3536691 - DNA, 25 bp, Homo sapien
tatgctctccgggaagaactctctt

SEQ ID NO: 3536692 - DNA, 25 bp, Homo sapien
cacaatgaacactccttccctggag

SEQ ID NO: 3536693 - DNA, 25 bp, Homo sapien
gctctccgggaagaactctcttgtc

SEQ ID NO: 3536694 - DNA, 25 bp, Homo sapien
tcattctgcttatataccacctgat

SEQ ID NO: 3536695 - DNA, 25 bp, Homo sapien
cattctgcttatataccacctgatt

SEQ ID NO: 3536696 - DNA, 25 bp, Homo sapien
tttcattctgcttatataccacctg

SEQ ID NO: 3536697 - DNA, 25 bp, Homo sapien
gtctttcattctgcttatataccac

SEQ ID NO: 3536698 - DNA, 25 bp, Homo sapien
ttgacgtctctaatgtgaccaaaga

SEQ ID NO: 3536699 - DNA, 25 bp, Homo sapien
gctgttcagtgtcgctgaggagatg

SEQ ID NO: 3536700 - DNA, 25 bp, Homo sapien
tcagtgtcgctgaggagatgtgcaa

SEQ ID NO: 3536701 - DNA, 25 bp, Homo sapien
ttcttgacgtctctaatgtgaccaa

SEQ ID NO: 3536702 - DNA, 25 bp, Homo sapien
gagccagaccaaaattccgaacatt

SEQ ID NO: 3536703 - DNA, 25 bp, Homo sapien
tcaaaagactttgtgcaagcaactg

SEQ ID NO: 3536704 - DNA, 25 bp, Homo sapien
ctcaaaagactttgtgcaagcaact

SEQ ID NO: 3536705 - DNA, 25 bp, Homo sapien
gctcaaaagactttgtgcaagcaac

SEQ ID NO: 3536706 - DNA, 25 bp, Homo sapien
caatgttaagtcccctgttcgtgga

SEQ ID NO: 3536707 - DNA, 25 bp, Homo sapien
tgtctaccatgtgcaatgttaagtc

SEQ ID NO: 3536708 - DNA, 25 bp, Homo sapien
tgttaagtcccctgttcgtggagaa

SEQ ID NO: 3536709 - DNA, 25 bp, Homo sapien
tctaccatgtgcaatgttaagtccc

SEQ ID NO: 3536710 - DNA, 25 bp, Homo sapien
atgatccaggaggaaacaaggggct

SEQ ID NO: 3536711 - DNA, 25 bp, Homo sapien
aggaaacctgctacaaactctagaa

SEQ ID NO: 3536712 - DNA, 25 bp, Homo sapien
gccaggaaacctgctacaaactcta

SEQ ID NO: 3536713 - DNA, 25 bp, Homo sapien
atccaggaggaaacaaggggctgat

SEQ ID NO: 3536714 - DNA, 25 bp, Homo sapien
aatagagtgagcagcacggatgtga

SEQ ID NO: 3536715 - DNA, 25 bp, Homo sapien
cagaatagagtgagcagcacggatg

SEQ ID NO: 3536716 - DNA, 25 bp, Homo sapien
gcacggatgtgagctgtgagaggcc

SEQ ID NO: 3536717 - DNA, 25 bp, Homo sapien
ggtcagaatagagtgagcagcacgg

SEQ ID NO: 3536718 - DNA, 25 bp, Homo sapien
tctttacgatgatgaacgtccaatt

SEQ ID NO: 3536719 - DNA, 25 bp, Homo sapien
aatcattatctttacgatgatgaac

SEQ ID NO: 3536720 - DNA, 25 bp, Homo sapien
gatgatgaacgtccaattagcattt

SEQ ID NO: 3536721 - DNA, 25 bp, Homo sapien
cattatctttacgatgatgaacgtc

SEQ ID NO: 3536722 - DNA, 25 bp, Homo sapien
tcctccaacccaagccttcacacag

SEQ ID NO: 3536723 - DNA, 25 bp, Homo sapien
cttcctccaacccaagccttcacac

SEQ ID NO: 3536724 - DNA, 25 bp, Homo sapien
ttcctccaacccaagccttcacaca

SEQ ID NO: 3536725 - DNA, 25 bp, Homo sapien
gctagatgacatgctgattagatcc

SEQ ID NO: 3536726 - DNA, 25 bp, Homo sapien
tctacgttagggcaaaattctgggc

SEQ ID NO: 3536727 - DNA, 25 bp, Homo sapien
tagccaaaccgtgacatctacgtta

SEQ ID NO: 3536728 - DNA, 25 bp, Homo sapien
tggtaatgctctcccttgatcagca

SEQ ID NO: 3536729 - DNA, 25 bp, Homo sapien
caactactggaacagatttatcctc

SEQ ID NO: 3536730 - DNA, 25 bp, Homo sapien
gagttctgcctgaacagatcacccc

SEQ ID NO: 3536731 - DNA, 25 bp, Homo sapien
agatcaccccacgtccatagaagag

SEQ ID NO: 3536732 - DNA, 25 bp, Homo sapien
agtatgttcttgacgcacagagttc

SEQ ID NO: 3536733 - DNA, 25 bp, Homo sapien
ttctttaccaaagttgctgtggatc

SEQ ID NO: 3536734 - DNA, 25 bp, Homo sapien
tggatctggttctttaccaaagttg

SEQ ID NO: 3536735 - DNA, 25 bp, Homo sapien
ccaaagttgctgtggatctgcttct

SEQ ID NO: 3536736 - DNA, 25 bp, Homo sapien
gatctggttctttaccaaagttgct

SEQ ID NO: 3536737 - DNA, 25 bp, Homo sapien
gctggagggtaaacataaagttgat

SEQ ID NO: 3536738 - DNA, 25 bp, Homo sapien
gagggtaaacataaagttgatagcc

SEQ ID NO: 3536739 - DNA, 25 bp, Homo sapien
ggtaaacataaagttgatagcccat

SEQ ID NO: 3536740 - DNA, 25 bp, Homo sapien
cccagctggagggtaaacataaagt

SEQ ID NO: 3536741 - DNA, 25 bp, Homo sapien
tggttccaaatttgccattgacagc

SEQ ID NO: 3536742 - DNA, 25 bp, Homo sapien
ttggttccaaatttgccattgacag

SEQ ID NO: 3536743 - DNA, 25 bp, Homo sapien
ggttccaaatttgccattgacagct

SEQ ID NO: 3536744 - DNA, 25 bp, Homo sapien
ctaagctaaaatctcagggaaatct

SEQ ID NO: 3536745 - DNA, 25 bp, Homo sapien
gacgtaggaaaagagttcatagcca

SEQ ID NO: 3536746 - DNA, 25 bp, Homo sapien
catggtcttttaagtggacgtagga

SEQ ID NO: 3536747 - DNA, 25 bp, Homo sapien
gctcttctgataatgtgccagtcag

SEQ ID NO: 3536748 - DNA, 25 bp, Homo sapien
cttgactgtagcactgagtctgcgc

SEQ ID NO: 3536749 - DNA, 25 bp, Homo sapien
gagtctgcgccttgcagttctgctt

SEQ ID NO: 3536750 - DNA, 25 bp, Homo sapien
agcactgagtctgcgccttgcagtt

SEQ ID NO: 3536751 - DNA, 25 bp, Homo sapien
tgtagcactgagtctgcgccttgca

SEQ ID NO: 3536752 - DNA, 25 bp, Homo sapien
ctagcactagaacaattaggcactg

SEQ ID NO: 3536753 - DNA, 25 bp, Homo sapien
aacaccagtagcctagcactagaac

SEQ ID NO: 3536754 - DNA, 25 bp, Homo sapien
gcaaggtggtcactaacaccagtag

SEQ ID NO: 3536755 - DNA, 25 bp, Homo sapien
gccatcaacctcagcaaggtggtca

SEQ ID NO: 3536756 - DNA, 25 bp, Homo sapien
ccaaaatagccttcaagggcttctt

SEQ ID NO: 3536757 - DNA, 25 bp, Homo sapien
caaaatagccttcaagggcttcttg

SEQ ID NO: 3536758 - DNA, 25 bp, Homo sapien
ttcctagcaccctggattctcaatt

SEQ ID NO: 3536759 - DNA, 25 bp, Homo sapien
cttgtgttcattcctagcaccctgg

SEQ ID NO: 3536760 - DNA, 25 bp, Homo sapien
caaatatcttgctggtgctccccgg

SEQ ID NO: 3536761 - DNA, 25 bp, Homo sapien
tcaaatatcttgctggtgctccccg

SEQ ID NO: 3536762 - DNA, 25 bp, Homo sapien
tggtctcccctggagcaaaatagct

SEQ ID NO: 3536763 - DNA, 25 bp, Homo sapien
taatgcaaatgagctaatggtctcc

SEQ ID NO: 3536764 - DNA, 25 bp, Homo sapien
taaatagctgtagtgtcctgaggca

SEQ ID NO: 3536765 - DNA, 25 bp, Homo sapien
tgaggcatcaggaaaggatcaacac

SEQ ID NO: 3536766 - DNA, 25 bp, Homo sapien
catactggttttgctgcctctctct

SEQ ID NO: 3536767 - DNA, 25 bp, Homo sapien
tttctcatactggttttgctgcctc

SEQ ID NO: 3536768 - DNA, 25 bp, Homo sapien
tcaacagggacaaaaagccagcact

SEQ ID NO: 3536769 - DNA, 25 bp, Homo sapien
ttctcaacagggacaaaaagccagc

SEQ ID NO: 3536770 - DNA, 25 bp, Homo sapien
ctgacagtgtcacaggaaggctttt

SEQ ID NO: 3536771 - DNA, 25 bp, Homo sapien
tggctgctacccgggagcctgacag

SEQ ID NO: 3536772 - DNA, 25 bp, Homo sapien
tgctacccgggagcctgacagtgtc

SEQ ID NO: 3536773 - DNA, 25 bp, Homo sapien
acccgggagcctgacagtgtcacag

SEQ ID NO: 3536774 - DNA, 25 bp, Homo sapien
ctgagatcaggtgttgttgttggaa

SEQ ID NO: 3536775 - DNA, 25 bp, Homo sapien
gagatcaggtgttgttgttggaata

SEQ ID NO: 3536776 - DNA, 25 bp, Homo sapien
actgagatcaggtgttgttgttgga

SEQ ID NO: 3536777 - DNA, 25 bp, Homo sapien
gatcaggtgttgttgttggaatatc

SEQ ID NO: 3536778 - DNA, 25 bp, Homo sapien
caaggctctctggtatccagacatt

SEQ ID NO: 3536779 - DNA, 25 bp, Homo sapien
cactgcaccagttctgtcccgtaag

SEQ ID NO: 3536780 - DNA, 25 bp, Homo sapien
ctgtcccgtaagacttccacagagc

SEQ ID NO: 3536781 - DNA, 25 bp, Homo sapien
tctctggtatccagacattcatcca

SEQ ID NO: 3536782 - DNA, 25 bp, Homo sapien
tctggtcctctcctattgcatcgtc

SEQ ID NO: 3536783 - DNA, 25 bp, Homo sapien
ctaattagcatcgtatggcctctgg

SEQ ID NO: 3536784 - DNA, 25 bp, Homo sapien
tattgcatcgtccatcacactgcca

SEQ ID NO: 3536785 - DNA, 25 bp, Homo sapien
ttagcatcgtatggcctctggtcct

SEQ ID NO: 3536786 - DNA, 25 bp, Homo sapien
gtaacatgtttaaacctctcccatc

SEQ ID NO: 3536787 - DNA, 25 bp, Homo sapien
agtaacatgtttaaacctctcccat

SEQ ID NO: 3536788 - DNA, 25 bp, Homo sapien
tcatttactcaatgtagtaacatgt

SEQ ID NO: 3536789 - DNA, 25 bp, Homo sapien
ttactcaatgtagtaacatgtttaa

SEQ ID NO: 3536790 - DNA, 25 bp, Homo sapien
cttcttgggcttctcccctgcaccc

SEQ ID NO: 3536791 - DNA, 25 bp, Homo sapien
ttcttgggcttctcccctgcaccct

SEQ ID NO: 3536792 - DNA, 25 bp, Homo sapien
gcttctcccctgcacccttcgccat

SEQ ID NO: 3536793 - DNA, 25 bp, Homo sapien
tgggcttctcccctgcacccttcgc

SEQ ID NO: 3536794 - DNA, 25 bp, Homo sapien
acattgttgcccctgacatttctgg

SEQ ID NO: 3536795 - DNA, 25 bp, Homo sapien
caaggcttgggctaggacagtgagg

SEQ ID NO: 3536796 - DNA, 25 bp, Homo sapien
tactgggggctgatgaaacaactca

SEQ ID NO: 3536797 - DNA, 25 bp, Homo sapien
gacagtgaggagattggctggacca

SEQ ID NO: 3536798 - DNA, 25 bp, Homo sapien
gcaaaaaagaaacgaggtgcatcag

SEQ ID NO: 3536799 - DNA, 25 bp, Homo sapien
gccacagtagcactgctggcaaaaa

SEQ ID NO: 3536800 - DNA, 25 bp, Homo sapien
ccacagtagcactgctggcaaaaaa

SEQ ID NO: 3536801 - DNA, 25 bp, Homo sapien
gaaacgaggtgcatcagagaaatct

SEQ ID NO: 3536802 - DNA, 25 bp, Homo sapien
ctcctctaagaggcccaaaccagtt

SEQ ID NO: 3536803 - DNA, 25 bp, Homo sapien
gaagtacgttgaggagcatgcagta

SEQ ID NO: 3536804 - DNA, 25 bp, Homo sapien
tctacagtggatttacttgcacagg

SEQ ID NO: 3536805 - DNA, 25 bp, Homo sapien
tcttctggtagaggtcaagcagcat

SEQ ID NO: 3536806 - DNA, 25 bp, Homo sapien
tataaatgaggcacggaaagagatt

SEQ ID NO: 3536807 - DNA, 25 bp, Homo sapien
cagtgcctaagatgtagtaagtgct

SEQ ID NO: 3536808 - DNA, 25 bp, Homo sapien
gtaatcttggaactagaacagtgcc

SEQ ID NO: 3536809 - DNA, 25 bp, Homo sapien
catacatacccatgatgcagcttaa

SEQ ID NO: 3536810 - DNA, 25 bp, Homo sapien
gctctctcagagtcaatgtatcaca

SEQ ID NO: 3536811 - DNA, 25 bp, Homo sapien
tctcagagtcaatgtatcacaagag

SEQ ID NO: 3536812 - DNA, 25 bp, Homo sapien
cagagtcaatgtatcacaagagctc

SEQ ID NO: 3536813 - DNA, 25 bp, Homo sapien
ctgctctctcagagtcaatgtatca

SEQ ID NO: 3536814 - DNA, 25 bp, Homo sapien
tagcctggagacttgctgtattttg

SEQ ID NO: 3536815 - DNA, 25 bp, Homo sapien
tgctatggtattgtagcctggagac

SEQ ID NO: 3536816 - DNA, 25 bp, Homo sapien
caagagttgagttggtgagtgctat

SEQ ID NO: 3536817 - DNA, 25 bp, Homo sapien
tggtgagtgctatggtattgtagcc

SEQ ID NO: 3536818 - DNA, 25 bp, Homo sapien
caacattagtttttgcaagcccttc

SEQ ID NO: 3536819 - DNA, 25 bp, Homo sapien
aaaaaatccgctcattctactgctg

SEQ ID NO: 3536820 - DNA, 25 bp, Homo sapien
tttccggaaaactgcttcatactgt

SEQ ID NO: 3536821 - DNA, 25 bp, Homo sapien
taaaatgatcgtatagggttaacac

SEQ ID NO: 3536822 - DNA, 25 bp, Homo sapien
catcagccattctgatgcactccat

SEQ ID NO: 3536823 - DNA, 25 bp, Homo sapien
ccactgtccgctgcataggaataat

SEQ ID NO: 3536824 - DNA, 25 bp, Homo sapien
tccgctgcataggaataattatatc

SEQ ID NO: 3536825 - DNA, 25 bp, Homo sapien
taggtccaccatatgagccactgtc

SEQ ID NO: 3536826 - DNA, 25 bp, Homo sapien
caccctgactggtagacattctgtc

SEQ ID NO: 3536827 - DNA, 25 bp, Homo sapien
ggtggtcatcagacaacattgtaaa

SEQ ID NO: 3536828 - DNA, 25 bp, Homo sapien
gccatgccatgtaaccatctccagg

SEQ ID NO: 3536829 - DNA, 25 bp, Homo sapien
ggaggtggtcctcaacaaggactca

SEQ ID NO: 3536830 - DNA, 25 bp, Homo sapien
catgaaaattgggattataagtctg

SEQ ID NO: 3536831 - DNA, 25 bp, Homo sapien
tatgcactctacaactccatagtct

SEQ ID NO: 3536832 - DNA, 25 bp, Homo sapien
atcctctgtaggagactcagatata

SEQ ID NO: 3536833 - DNA, 25 bp, Homo sapien
attataagtctgtgcacatcctctg

SEQ ID NO: 3536834 - DNA, 25 bp, Homo sapien
gattgttgtttgagtgttcccttga

SEQ ID NO: 3536835 - DNA, 25 bp, Homo sapien
cagcatgcacttggggccattgccc

SEQ ID NO: 3536836 - DNA, 25 bp, Homo sapien
attcccggaaaagcttgattgttgt

SEQ ID NO: 3536837 - DNA, 25 bp, Homo sapien
acagcctcaattcgcaatcaaagtt

SEQ ID NO: 3536838 - DNA, 25 bp, Homo sapien
ccaatcactgtccaagcattcttgc

SEQ ID NO: 3536839 - DNA, 25 bp, Homo sapien
ctggctctgtagtctatacagaaag

SEQ ID NO: 3536840 - DNA, 25 bp, Homo sapien
accctggctctgtagtctatacaga

SEQ ID NO: 3536841 - DNA, 25 bp, Homo sapien
gaaccctggctctgtagtctataca

SEQ ID NO: 3536842 - DNA, 25 bp, Homo sapien
aacacaacgcataattcaaccatca

SEQ ID NO: 3536843 - DNA, 25 bp, Homo sapien
caacgcataattcaaccatcagtgt

SEQ ID NO: 3536844 - DNA, 25 bp, Homo sapien
tgaaacacaacgcataattcaacca

SEQ ID NO: 3536845 - DNA, 25 bp, Homo sapien
cacaacgcataattcaaccatcagt

SEQ ID NO: 3536846 - DNA, 25 bp, Homo sapien
ttaccaaattcaccactggtttcag

SEQ ID NO: 3536847 - DNA, 25 bp, Homo sapien
catttaccaaattcaccactggttt

SEQ ID NO: 3536848 - DNA, 25 bp, Homo sapien
ctgcaaggcatttaccaaattcacc

SEQ ID NO: 3536849 - DNA, 25 bp, Homo sapien
accaaattcaccactggtttcagtg

SEQ ID NO: 3536850 - DNA, 25 bp, Homo sapien
tggatacagtggataattagaggct

SEQ ID NO: 3536851 - DNA, 25 bp, Homo sapien
accaattattcctgatccaggctga

SEQ ID NO: 3536852 - DNA, 25 bp, Homo sapien
gtggataattagaggctgccccagt

SEQ ID NO: 3536853 - DNA, 25 bp, Homo sapien
caattattcctgatccaggctgagg

SEQ ID NO: 3536854 - DNA, 25 bp, Homo sapien
gagccttaagtaaaggcacttggaa

SEQ ID NO: 3536855 - DNA, 25 bp, Homo sapien
aatctgtagggagcagatgtcgcca

SEQ ID NO: 3536856 - DNA, 25 bp, Homo sapien
gagagagagccttaagtaaaggcac

SEQ ID NO: 3536857 - DNA, 25 bp, Homo sapien
ggaatttgttcaggccaatctgtag

SEQ ID NO: 3536858 - DNA, 25 bp, Homo sapien
cagagaagccaatctcggaggccac

SEQ ID NO: 3536859 - DNA, 25 bp, Homo sapien
agccaatctcggaggccacaggctg

SEQ ID NO: 3536860 - DNA, 25 bp, Homo sapien
gaagccaatctcggaggccacaggc

SEQ ID NO: 3536861 - DNA, 25 bp, Homo sapien
ccaatctcggaggccacaggctgcg

SEQ ID NO: 3536862 - DNA, 25 bp, Homo sapien
ctgagagcacagcaggccggggagc

SEQ ID NO: 3536863 - DNA, 25 bp, Homo sapien
gagcacagcaggccggggagcgagc

SEQ ID NO: 3536864 - DNA, 25 bp, Homo sapien
gcacagcaggccggggagcgagcgg

SEQ ID NO: 3536865 - DNA, 25 bp, Homo sapien
gagagcacagcaggccggggagcga

SEQ ID NO: 3536866 - DNA, 25 bp, Homo sapien
cttgtgggcaggcactctgtcgtat

SEQ ID NO: 3536867 - DNA, 25 bp, Homo sapien
gggtaattgactaccgtgaatgaac

SEQ ID NO: 3536868 - DNA, 25 bp, Homo sapien
ggaaaacctcgccaataacaccaga

SEQ ID NO: 3536869 - DNA, 25 bp, Homo sapien
tgtgcccagcacatttggaaaacct

SEQ ID NO: 3536870 - DNA, 25 bp, Homo sapien
ctgcttccatatagaggtcacatgt

SEQ ID NO: 3536871 - DNA, 25 bp, Homo sapien
tgcttccatatagaggtcacatgtc

SEQ ID NO: 3536872 - DNA, 25 bp, Homo sapien
ctctgggccttgcgggacattccca

SEQ ID NO: 3536873 - DNA, 25 bp, Homo sapien
tctgggccttgcgggacattcccat

SEQ ID NO: 3536874 - DNA, 25 bp, Homo sapien
ttggatacttgcgtacttctaagtc

SEQ ID NO: 3536875 - DNA, 25 bp, Homo sapien
cctcttggatacttgcgtacttcta

SEQ ID NO: 3536876 - DNA, 25 bp, Homo sapien
gatacttgcgtacttctaagtctag

SEQ ID NO: 3536877 - DNA, 25 bp, Homo sapien
ctcctcttggatacttgcgtacttc

SEQ ID NO: 3536878 - DNA, 25 bp, Homo sapien
ccctcctgcgcaaatgcattgagag

SEQ ID NO: 3536879 - DNA, 25 bp, Homo sapien
gagaacctcggaaaggtctggacag

SEQ ID NO: 3536880 - DNA, 25 bp, Homo sapien
tcccgtgaggtgttgatgtgctgct

SEQ ID NO: 3536881 - DNA, 25 bp, Homo sapien
tttagaggccactcccaacggtgac

SEQ ID NO: 3536882 - DNA, 25 bp, Homo sapien
tacataatgggatcatcttatacct

SEQ ID NO: 3536883 - DNA, 25 bp, Homo sapien
cctcctatgtgcatataattcttct

SEQ ID NO: 3536884 - DNA, 25 bp, Homo sapien
gttttacataatgggatcatcttat

SEQ ID NO: 3536885 - DNA, 25 bp, Homo sapien
tgcctcctatgtgcatataattctt

SEQ ID NO: 3536886 - DNA, 25 bp, Homo sapien
gctgtgcgcggtgactggcggctgc

SEQ ID NO: 3536887 - DNA, 25 bp, Homo sapien
acaaaaaccgcggaggcgcattggg

SEQ ID NO: 3536888 - DNA, 25 bp, Homo sapien
tcctccaggctgtagagggcgacaa

SEQ ID NO: 3536889 - DNA, 25 bp, Homo sapien
cccgacgtgcgcgtctttacgtaga

SEQ ID NO: 3536890 - DNA, 25 bp, Homo sapien
cgcaattatggcatcctggccgatg

SEQ ID NO: 3536891 - DNA, 25 bp, Homo sapien
catgccgacagtagaggagctttac

SEQ ID NO: 3536892 - DNA, 25 bp, Homo sapien
caagtgggccaggtgagttgagtcc

SEQ ID NO: 3536893 - DNA, 25 bp, Homo sapien
gctccgcggcctttcgaaagcgctt

SEQ ID NO: 3536894 - DNA, 25 bp, Homo sapien
gtcagaatacttgatgctgtagcgc

SEQ ID NO: 3536895 - DNA, 25 bp, Homo sapien
gagatgactggtatcattacctgca

SEQ ID NO: 3536896 - DNA, 25 bp, Homo sapien
gccccttcgtagatcacctattgag

SEQ ID NO: 3536897 - DNA, 25 bp, Homo sapien
catgaacttattgaagccccttcgt

SEQ ID NO: 3536898 - DNA, 25 bp, Homo sapien
tccttggcaaaggtggtagctatcc

SEQ ID NO: 3536899 - DNA, 25 bp, Homo sapien
tcgaggttacggtcagctgcagtca

SEQ ID NO: 3536900 - DNA, 25 bp, Homo sapien
cctgtctgggcgatgagatcatgtc

SEQ ID NO: 3536901 - DNA, 25 bp, Homo sapien
tgtacagttttcaccagttgggccg

SEQ ID NO: 3536902 - DNA, 25 bp, Homo sapien
aatgttcttttcaagaatctgtaag

SEQ ID NO: 3536903 - DNA, 25 bp, Homo sapien
ttcttttcaagaatctgtaagttat

SEQ ID NO: 3536904 - DNA, 25 bp, Homo sapien
ctgcatgcagatgagaaaatgttct

SEQ ID NO: 3536905 - DNA, 25 bp, Homo sapien
aaaatgttcttttcaagaatctgta

SEQ ID NO: 3536906 - DNA, 25 bp, Homo sapien
tcttataagagcacagtaacactat

SEQ ID NO: 3536907 - DNA, 25 bp, Homo sapien
taagagcacagtaacactatcctgg

SEQ ID NO: 3536908 - DNA, 25 bp, Homo sapien
ctccttcttataagagcacagtaac

SEQ ID NO: 3536909 - DNA, 25 bp, Homo sapien
gagcacagtaacactatcctggaaa

SEQ ID NO: 3536910 - DNA, 25 bp, Homo sapien
gtccctttaaacagactgctgcctt

SEQ ID NO: 3536911 - DNA, 25 bp, Homo sapien
gctgccttcagctaaaaacttaatg

SEQ ID NO: 3536912 - DNA, 25 bp, Homo sapien
tgtaacagaccatggttgtgtccaa

SEQ ID NO: 3536913 - DNA, 25 bp, Homo sapien
tgtatgacctacttttgtaacagac

SEQ ID NO: 3536914 - DNA, 25 bp, Homo sapien
ctcagaactgagcagaagtgacttt

SEQ ID NO: 3536915 - DNA, 25 bp, Homo sapien
tacaagtgagcaaaagttggtcagc

SEQ ID NO: 3536916 - DNA, 25 bp, Homo sapien
cagagatagatcagccagtggccca

SEQ ID NO: 3536917 - DNA, 25 bp, Homo sapien
tgagctgaacctaaactcccttgga

SEQ ID NO: 3536918 - DNA, 25 bp, Homo sapien
agaatgtgcaggtctaaaaagctcc

SEQ ID NO: 3536919 - DNA, 25 bp, Homo sapien
aatatgtataccagtcacctgaggc

SEQ ID NO: 3536920 - DNA, 25 bp, Homo sapien
tgctgaccagtacgttagccacatg

SEQ ID NO: 3536921 - DNA, 25 bp, Homo sapien
tgacatatctagcaagaagctggca

SEQ ID NO: 3536922 - DNA, 25 bp, Homo sapien
accgcgacctcggactccctgcatt

SEQ ID NO: 3536923 - DNA, 25 bp, Homo sapien
gaggtggcaccgcgacctcggactc

SEQ ID NO: 3536924 - DNA, 25 bp, Homo sapien
tcggactccctgcattcggaccagg

SEQ ID NO: 3536925 - DNA, 25 bp, Homo sapien
acagggaggtggcaccgcgacctcg

SEQ ID NO: 3536926 - DNA, 25 bp, Homo sapien
cacctggagaggtcatggtggttat

SEQ ID NO: 3536927 - DNA, 25 bp, Homo sapien
cactaatttgctaggcatctgccaa

SEQ ID NO: 3536928 - DNA, 25 bp, Homo sapien
cagtttgtccaagacctttgcttca

SEQ ID NO: 3536929 - DNA, 25 bp, Homo sapien
actgagattctgactttgtttatgc

SEQ ID NO: 3536930 - DNA, 25 bp, Homo sapien
gagttcacaggacaactgttgcact

SEQ ID NO: 3536931 - DNA, 25 bp, Homo sapien
ccagcattaatgaaatccgagcttt

SEQ ID NO: 3536932 - DNA, 25 bp, Homo sapien
gaggaataacgctgattacaatggc

SEQ ID NO: 3536933 - DNA, 25 bp, Homo sapien
ggtggattcaccaatgaacttgaag

SEQ ID NO: 3536934 - DNA, 25 bp, Homo sapien
ggtccttctagtgcaaactcaaggg

SEQ ID NO: 3536935 - DNA, 25 bp, Homo sapien
gggaaagatgcaggctcaagataga

SEQ ID NO: 3536936 - DNA, 25 bp, Homo sapien
caagaatggatgtcacgtgggcagt

SEQ ID NO: 3536937 - DNA, 25 bp, Homo sapien
aaagccatgagactagataaaacag

SEQ ID NO: 3536938 - DNA, 25 bp, Homo sapien
gcaaattgcatagttcagtgctggg

SEQ ID NO: 3536939 - DNA, 25 bp, Homo sapien
cataggtcacctcattcatgaaggc

SEQ ID NO: 3536940 - DNA, 25 bp, Homo sapien
cagggtgtacaggagagagttaatc

SEQ ID NO: 3536941 - DNA, 25 bp, Homo sapien
agccagcgggctctgtgtaaacaga

SEQ ID NO: 3536942 - DNA, 25 bp, Homo sapien
ttcatagtgaatacaaggtgctcag

SEQ ID NO: 3536943 - DNA, 25 bp, Homo sapien
gcatcttctcgcaacactgtggtct

SEQ ID NO: 3536944 - DNA, 25 bp, Homo sapien
taatagttctttcagagggagctca

SEQ ID NO: 3536945 - DNA, 25 bp, Homo sapien
actggtccaggaaactaataacttg

SEQ ID NO: 3536946 - DNA, 25 bp, Homo sapien
taatatctattccaatgtgcagatg

SEQ ID NO: 3536947 - DNA, 25 bp, Homo sapien
aggtgttcctgtaattgtctgcaag

SEQ ID NO: 3536948 - DNA, 25 bp, Homo sapien
cagactttaatgtttaggtgttcct

SEQ ID NO: 3536949 - DNA, 25 bp, Homo sapien
tcattgcctgtagttttagtctgtg

SEQ ID NO: 3536950 - DNA, 25 bp, Homo sapien
aaagcgctatacagaactaaagttc

SEQ ID NO: 3536951 - DNA, 25 bp, Homo sapien
ctactgttcgtaaattcctataata

SEQ ID NO: 3536952 - DNA, 25 bp, Homo sapien
tacgaaggatattaataaacagagc

SEQ ID NO: 3536953 - DNA, 25 bp, Homo sapien
gcctattccattataactccttcag

SEQ ID NO: 3536954 - DNA, 25 bp, Homo sapien
ccaaattactgagataacaaggtgt

SEQ ID NO: 3536955 - DNA, 25 bp, Homo sapien
aattactgagataacaaggtgtgag

SEQ ID NO: 3536956 - DNA, 25 bp, Homo sapien
ttaggacgacaggcacggaccatgc

SEQ ID NO: 3536957 - DNA, 25 bp, Homo sapien
ttactgagataacaaggtgtgagcc

SEQ ID NO: 3536958 - DNA, 25 bp, Homo sapien
tgtcaagtctgcatacaatacgcca

SEQ ID NO: 3536959 - DNA, 25 bp, Homo sapien
cttaatgagcatttaattgtgcagc

SEQ ID NO: 3536960 - DNA, 25 bp, Homo sapien
gaaattctactccttggtatctact

SEQ ID NO: 3536961 - DNA, 25 bp, Homo sapien
tgaacatatgcatatcccgtggccc

SEQ ID NO: 3536962 - DNA, 25 bp, Homo sapien
tttctcagtttcagatcctctgcta

SEQ ID NO: 3536963 - DNA, 25 bp, Homo sapien
tctcagtttcagatcctctgctatt

SEQ ID NO: 3536964 - DNA, 25 bp, Homo sapien
cagtttcagatcctctgctatttta

SEQ ID NO: 3536965 - DNA, 25 bp, Homo sapien
ttttctcagtttcagatcctctgct

SEQ ID NO: 3536966 - DNA, 25 bp, Homo sapien
tccacgtccttttcgtcactttcag

SEQ ID NO: 3536967 - DNA, 25 bp, Homo sapien
tgctgaataccccatactacttctt

SEQ ID NO: 3536968 - DNA, 25 bp, Homo sapien
tccttcgtgccctcgcccagtgggt

SEQ ID NO: 3536969 - DNA, 25 bp, Homo sapien
ctaaattgttgctgaataccccata

SEQ ID NO: 3536970 - DNA, 25 bp, Homo sapien
tctgagagccgaagcgaggctcctc

SEQ ID NO: 3536971 - DNA, 25 bp, Homo sapien
gagagccgaagcgaggctcctccaa

SEQ ID NO: 3536972 - DNA, 25 bp, Homo sapien
gagccgaagcgaggctcctccaagg

SEQ ID NO: 3536973 - DNA, 25 bp, Homo sapien
cagggactccttttagagcccccat

SEQ ID NO: 3536974 - DNA, 25 bp, Homo sapien
gttgcaggcaaccagattcaacata

SEQ ID NO: 3536975 - DNA, 25 bp, Homo sapien
gacagtgtggcatggaaggtactac

SEQ ID NO: 3536976 - DNA, 25 bp, Homo sapien
tctgaaggacgtcctgaaattccta

SEQ ID NO: 3536977 - DNA, 25 bp, Homo sapien
gggaatgcagctatctgcccggact

SEQ ID NO: 3536978 - DNA, 25 bp, Homo sapien
tgttttactgcaacctgggcccagc

SEQ ID NO: 3536979 - DNA, 25 bp, Homo sapien
tcttgcattccacgcatgggaggag

SEQ ID NO: 3536980 - DNA, 25 bp, Homo sapien
ggcatgagcaagaatccagcgtcct

SEQ ID NO: 3536981 - DNA, 25 bp, Homo sapien
tccccaagggatgaggcggttcaaa

SEQ ID NO: 3536982 - DNA, 25 bp, Homo sapien
tcaaatgcttgtctgaatttcagat

SEQ ID NO: 3536983 - DNA, 25 bp, Homo sapien
gaatttcagattctgcagagaaaac

SEQ ID NO: 3536984 - DNA, 25 bp, Homo sapien
ttttctcccattaatgtaattatac

SEQ ID NO: 3536985 - DNA, 25 bp, Homo sapien
gcttgtctgaatttcagattctgca

SEQ ID NO: 3536986 - DNA, 25 bp, Homo sapien
acaacatctgaacgggccaggtggg

SEQ ID NO: 3536987 - DNA, 25 bp, Homo sapien
tgaggacaacatctgaacgggccag

SEQ ID NO: 3536988 - DNA, 25 bp, Homo sapien
aaggccttcgaatgccaagccttgg

SEQ ID NO: 3536989 - DNA, 25 bp, Homo sapien
ccagtacagattaacacgaattccc

SEQ ID NO: 3536990 - DNA, 25 bp, Homo sapien
aatatgacgagggttctttggactg

SEQ ID NO: 3536991 - DNA, 25 bp, Homo sapien
ctgaaggagtaaggtagtggctttt

SEQ ID NO: 3536992 - DNA, 25 bp, Homo sapien
tagttgagaagaccatctgagcggg

SEQ ID NO: 3536993 - DNA, 25 bp, Homo sapien
agatgagcctggaaatatgacgagg

SEQ ID NO: 3536994 - DNA, 25 bp, Homo sapien
ccacagcccggaaagcatcaggttt

SEQ ID NO: 3536995 - DNA, 25 bp, Homo sapien
ttccacagcccggaaagcatcaggt

SEQ ID NO: 3536996 - DNA, 25 bp, Homo sapien
acagcccggaaagcatcaggtttct

SEQ ID NO: 3536997 - DNA, 25 bp, Homo sapien
ggatggagagtcttccacagcccgg

SEQ ID NO: 3536998 - DNA, 25 bp, Homo sapien
cactggaattctgtacgcatgggct

SEQ ID NO: 3536999 - DNA, 25 bp, Homo sapien
tacacaagttgcacgctcctgaagt

SEQ ID NO: 3537000 - DNA, 25 bp, Homo sapien
ccccgtctgtgtagtcataggctta

SEQ ID NO: 3537001 - DNA, 25 bp, Homo sapien
ccaacattgtgggacaggaacgatg

SEQ ID NO: 3537002 - DNA, 25 bp, Homo sapien
gaccaccacatcttgagtattaata

SEQ ID NO: 3537003 - DNA, 25 bp, Homo sapien
cctgaccaccacatcttgagtatta

SEQ ID NO: 3537004 - DNA, 25 bp, Homo sapien
acatcttgagtattaataaccagag

SEQ ID NO: 3537005 - DNA, 25 bp, Homo sapien
caccacatcttgagtattaataacc

SEQ ID NO: 3537006 - DNA, 25 bp, Homo sapien
ctgaaagcagaaccgggtccaggtc

SEQ ID NO: 3537007 - DNA, 25 bp, Homo sapien
tgaaagcagaaccgggtccaggtcc

SEQ ID NO: 3537008 - DNA, 25 bp, Homo sapien
cctcggtgtgagtggaagcatgctt

SEQ ID NO: 3537009 - DNA, 25 bp, Homo sapien
tcctcggtgtgagtggaagcatgct

SEQ ID NO: 3537010 - DNA, 25 bp, Homo sapien
gtgagtggaagcatgcttggatgca

SEQ ID NO: 3537011 - DNA, 25 bp, Homo sapien
ggtgtgagtggaagcatgcttggat

SEQ ID NO: 3537012 - DNA, 25 bp, Homo sapien
agtacattacctactggcatttttc

SEQ ID NO: 3537013 - DNA, 25 bp, Homo sapien
tagacttcctccctgagggacttcc

SEQ ID NO: 3537014 - DNA, 25 bp, Homo sapien
acattacctactggcatttttcgtg

SEQ ID NO: 3537015 - DNA, 25 bp, Homo sapien
ttacctactggcatttttcgtggtg

SEQ ID NO: 3537016 - DNA, 25 bp, Homo sapien
agaggagaatctgcacgtgacgtca

SEQ ID NO: 3537017 - DNA, 25 bp, Homo sapien
tctccagccccctcgtagtgaatta

SEQ ID NO: 3537018 - DNA, 25 bp, Homo sapien
aaaggagactcaaggcggctgctcc

SEQ ID NO: 3537019 - DNA, 25 bp, Homo sapien
ccgcgctgccttcatgagtctattt

SEQ ID NO: 3537020 - DNA, 25 bp, Homo sapien
tttgtgcatgctccggggttctttt

SEQ ID NO: 3537021 - DNA, 25 bp, Homo sapien
tataatgaatttggggctgcatgca

SEQ ID NO: 3537022 - DNA, 25 bp, Homo sapien
aagaggatagtgggactgactaggg

SEQ ID NO: 3537023 - DNA, 25 bp, Homo sapien
gctgcatgcaaagaaaccgagagag

SEQ ID NO: 3537024 - DNA, 25 bp, Homo sapien
tgagctcggttttctcgatggcccc

SEQ ID NO: 3537025 - DNA, 25 bp, Homo sapien
tctctcgcgttatgggtcggcgctg

SEQ ID NO: 3537026 - DNA, 25 bp, Homo sapien
tcggcgctgttgagctcggttttct

SEQ ID NO: 3537027 - DNA, 25 bp, Homo sapien
tctctgaatcaatagctgctgcaac

SEQ ID NO: 3537028 - DNA, 25 bp, Homo sapien
taatggagactgtgcaatatagatc

SEQ ID NO: 3537029 - DNA, 25 bp, Homo sapien
tttaatgggccatatctctgagaga

SEQ ID NO: 3537030 - DNA, 25 bp, Homo sapien
gatggccagacacgatttaatgggc

SEQ ID NO: 3537031 - DNA, 25 bp, Homo sapien
gggaaaaatctctactcctttgaca

SEQ ID NO: 3537032 - DNA, 25 bp, Homo sapien
acggaagataggtgctgaaaatgcc

SEQ ID NO: 3537033 - DNA, 25 bp, Homo sapien
caagactcggttgctgtccacggaa

SEQ ID NO: 3537034 - DNA, 25 bp, Homo sapien
tcagtgagttcagttccgtgcgcca

SEQ ID NO: 3537035 - DNA, 25 bp, Homo sapien
gttggcgccagctgcggttagcccc

SEQ ID NO: 3537036 - DNA, 25 bp, Homo sapien
tgttcaaagggatagtcgtgacttc

SEQ ID NO: 3537037 - DNA, 25 bp, Homo sapien
gcaggagagggatacggggacgaga

SEQ ID NO: 3537038 - DNA, 25 bp, Homo sapien
aaagggatagtcgtgacttcggtga

SEQ ID NO: 3537039 - DNA, 25 bp, Homo sapien
ttaaggatgttcaaagggatagtcg

SEQ ID NO: 3537040 - DNA, 25 bp, Homo sapien
gcactatccgggtctccattcccag

SEQ ID NO: 3537041 - DNA, 25 bp, Homo sapien
gcaccttcccgccagtgggtttgaa

SEQ ID NO: 3537042 - DNA, 25 bp, Homo sapien
aggccaggcactatccgggtctcca

SEQ ID NO: 3537043 - DNA, 25 bp, Homo sapien
gcagaggccaggcactatccgggtc

SEQ ID NO: 3537044 - DNA, 25 bp, Homo sapien
ccggagggagcgggccggcaggaga

SEQ ID NO: 3537045 - DNA, 25 bp, Homo sapien
ctttgccgccgggcaaacacccgtg

SEQ ID NO: 3537046 - DNA, 25 bp, Homo sapien
ggagggagcgggccggcaggagagg

SEQ ID NO: 3537047 - DNA, 25 bp, Homo sapien
ctggaagaacccgctttgccgccgg

SEQ ID NO: 3537048 - DNA, 25 bp, Homo sapien
tgcagtgcggacgggaccggcgcgc

SEQ ID NO: 3537049 - DNA, 25 bp, Homo sapien
agtgcggacgggaccggcgcgctcc

SEQ ID NO: 3537050 - DNA, 25 bp, Homo sapien
aaggagcagggagtcggcgcccggg

SEQ ID NO: 3537051 - DNA, 25 bp, Homo sapien
gcgcgctcccgtggcccccagaccg

SEQ ID NO: 3537052 - DNA, 25 bp, Homo sapien
ctgttcagagatccgcgaccttgca

SEQ ID NO: 3537053 - DNA, 25 bp, Homo sapien
tcagagatccgcgaccttgcagccg

SEQ ID NO: 3537054 - DNA, 25 bp, Homo sapien
agagatccgcgaccttgcagccggg

SEQ ID NO: 3537055 - DNA, 25 bp, Homo sapien
gttcagagatccgcgaccttgcagc

SEQ ID NO: 3537056 - DNA, 25 bp, Homo sapien
gatagggagatagagggataggaca

SEQ ID NO: 3537057 - DNA, 25 bp, Homo sapien
ctgatagggagatagagggatagga

SEQ ID NO: 3537058 - DNA, 25 bp, Homo sapien
tgatagggagatagagggataggac

SEQ ID NO: 3537059 - DNA, 25 bp, Homo sapien
ctccagggttcggagacatcctggg

SEQ ID NO: 3537060 - DNA, 25 bp, Homo sapien
ccagggttcggagacatcctgggct

SEQ ID NO: 3537061 - DNA, 25 bp, Homo sapien
agggttcggagacatcctgggctga

SEQ ID NO: 3537062 - DNA, 25 bp, Homo sapien
tccagggttcggagacatcctgggc

SEQ ID NO: 3537063 - DNA, 25 bp, Homo sapien
cataactcaatagccggaagccctt

SEQ ID NO: 3537064 - DNA, 25 bp, Homo sapien
cgaagaagccggcatattctgccct

SEQ ID NO: 3537065 - DNA, 25 bp, Homo sapien
tctgcccttcgcgaatctttttgcg

SEQ ID NO: 3537066 - DNA, 25 bp, Homo sapien
atctttttgcggtctgggcttgctg

SEQ ID NO: 3537067 - DNA, 25 bp, Homo sapien
aaaaagcatttgcggagggcgcact

SEQ ID NO: 3537068 - DNA, 25 bp, Homo sapien
agccatccagcgatcgccgaagccc

SEQ ID NO: 3537069 - DNA, 25 bp, Homo sapien
gcgcactcgtcgagaagacggcagc

SEQ ID NO: 3537070 - DNA, 25 bp, Homo sapien
gccgaagcccgcaccttcccgaagc

SEQ ID NO: 3537071 - DNA, 25 bp, Homo sapien
cttgcatgtgatgccaacctctgga

SEQ ID NO: 3537072 - DNA, 25 bp, Homo sapien
ctcgccttttgaaccaggggcctga

SEQ ID NO: 3537073 - DNA, 25 bp, Homo sapien
cgccttttgaaccaggggcctgatg

SEQ ID NO: 3537074 - DNA, 25 bp, Homo sapien
catgtgatgccaacctctggaggcc

SEQ ID NO: 3537075 - DNA, 25 bp, Homo sapien
ttattagtgaatccgtttcttgagc

SEQ ID NO: 3537076 - DNA, 25 bp, Homo sapien
tagtgaatccgtttcttgagctggg

SEQ ID NO: 3537077 - DNA, 25 bp, Homo sapien
aagctgattcgctcttcttgcatcc

SEQ ID NO: 3537078 - DNA, 25 bp, Homo sapien
ttttcctgccaaactcgatctcggt

SEQ ID NO: 3537079 - DNA, 25 bp, Homo sapien
gcagttcagcgaggatattaattcc

SEQ ID NO: 3537080 - DNA, 25 bp, Homo sapien
ctattcgaaattccacaggatcttg

SEQ ID NO: 3537081 - DNA, 25 bp, Homo sapien
aacagaattggttggaattagccac

SEQ ID NO: 3537082 - DNA, 25 bp, Homo sapien
taaagtaacatccaggagggtggga

SEQ ID NO: 3537083 - DNA, 25 bp, Homo sapien
tagtaggcttgctcttccaaaactg

SEQ ID NO: 3537084 - DNA, 25 bp, Homo sapien
gttgatttactggtagcaaagctgg

SEQ ID NO: 3537085 - DNA, 25 bp, Homo sapien
gagatggttttagtagaccggaagc

SEQ ID NO: 3537086 - DNA, 25 bp, Homo sapien
gaccggaagcctttagtaggcttgc

SEQ ID NO: 3537087 - DNA, 25 bp, Homo sapien
aaagcctgctttcttgccgtgatgg

SEQ ID NO: 3537088 - DNA, 25 bp, Homo sapien
taggtgcaacaattggccgttggga

SEQ ID NO: 3537089 - DNA, 25 bp, Homo sapien
cattgtgggagttgtcgtaaaagcc

SEQ ID NO: 3537090 - DNA, 25 bp, Homo sapien
tgcacactgggagttgtaggccgcg

SEQ ID NO: 3537091 - DNA, 25 bp, Homo sapien
ggcctgtagcggctgcagggtcggt

SEQ ID NO: 3537092 - DNA, 25 bp, Homo sapien
aaggggcctgtagcggctgcagggt

SEQ ID NO: 3537093 - DNA, 25 bp, Homo sapien
tgtagcggctgcagggtcggtgagg

SEQ ID NO: 3537094 - DNA, 25 bp, Homo sapien
gctgcagggtcggtgagggttccca

SEQ ID NO: 3537095 - DNA, 25 bp, Homo sapien
tagcgcatttggctctgtccatatg

SEQ ID NO: 3537096 - DNA, 25 bp, Homo sapien
tatgaacgtgtccatgatcgtgtgg

SEQ ID NO: 3537097 - DNA, 25 bp, Homo sapien
gatcgtgtggttggctttcccttgc

SEQ ID NO: 3537098 - DNA, 25 bp, Homo sapien
tttgaaatatctgggtggccggcgc

SEQ ID NO: 3537099 - DNA, 25 bp, Homo sapien
tgtagtagagggttaaaatgaagac

SEQ ID NO: 3537100 - DNA, 25 bp, Homo sapien
tctacttgaggtagaagaattctaa

SEQ ID NO: 3537101 - DNA, 25 bp, Homo sapien
ttttatccgtgcaaaagatttgagg

SEQ ID NO: 3537102 - DNA, 25 bp, Homo sapien
cacataggattctgtaattgtttca

SEQ ID NO: 3537103 - DNA, 25 bp, Homo sapien
aacaatcatcttacaattctatagg

SEQ ID NO: 3537104 - DNA, 25 bp, Homo sapien
gtgcacattcctggtctcctggacc

SEQ ID NO: 3537105 - DNA, 25 bp, Homo sapien
gaatgccaacatggatctcactggg

SEQ ID NO: 3537106 - DNA, 25 bp, Homo sapien
caaattactgcagattagtggctta

SEQ ID NO: 3537107 - DNA, 25 bp, Homo sapien
aattttgaggctagaagtccaaaat

SEQ ID NO: 3537108 - DNA, 25 bp, Homo sapien
ttagagttgatgcaaatttctcagg

SEQ ID NO: 3537109 - DNA, 25 bp, Homo sapien
ttaattgtttagagttgatgcaaat

SEQ ID NO: 3537110 - DNA, 25 bp, Homo sapien
gtttagagttgatgcaaatttctca

SEQ ID NO: 3537111 - DNA, 25 bp, Homo sapien
ttgtttagagttgatgcaaatttct

SEQ ID NO: 3537112 - DNA, 25 bp, Homo sapien
tgcatcctggatgacgtcctgtgtc

SEQ ID NO: 3537113 - DNA, 25 bp, Homo sapien
taatgtctatgcaaacatcaggctc

SEQ ID NO: 3537114 - DNA, 25 bp, Homo sapien
cctttgcacccttccttggatgcat

SEQ ID NO: 3537115 - DNA, 25 bp, Homo sapien
ctgtttctgatgtcacctcctttgc

SEQ ID NO: 3537116 - DNA, 25 bp, Homo sapien
agcctccagggccttgcttgtgcag

SEQ ID NO: 3537117 - DNA, 25 bp, Homo sapien
gcctccagggccttgcttgtgcaga

SEQ ID NO: 3537118 - DNA, 25 bp, Homo sapien
cattcagaccgtaacagagatgatg

SEQ ID NO: 3537119 - DNA, 25 bp, Homo sapien
cctgctagtaccatcaccttgtggg

SEQ ID NO: 3537120 - DNA, 25 bp, Homo sapien
gctttagtggctaccatggcttgga

SEQ ID NO: 3537121 - DNA, 25 bp, Homo sapien
tactgagtagctacttgagggccca

SEQ ID NO: 3537122 - DNA, 25 bp, Homo sapien
ctccaatgggttgaactcatcgttc

SEQ ID NO: 3537123 - DNA, 25 bp, Homo sapien
tcactccaatgggttgaactcatcg

SEQ ID NO: 3537124 - DNA, 25 bp, Homo sapien
aactcatcgttcttacttccctgtg

SEQ ID NO: 3537125 - DNA, 25 bp, Homo sapien
aatgggttgaactcatcgttcttac

SEQ ID NO: 3537126 - DNA, 25 bp, Homo sapien
caaggccaatcaatatgtgttgtat

SEQ ID NO: 3537127 - DNA, 25 bp, Homo sapien
gaactcaataaaggcatgttgtaga

SEQ ID NO: 3537128 - DNA, 25 bp, Homo sapien
gaatatttggccattgctttgatta

SEQ ID NO: 3537129 - DNA, 25 bp, Homo sapien
tactgttgcagcgtaacaaaccacc

SEQ ID NO: 3537130 - DNA, 25 bp, Homo sapien
tggtcaaagcagtcatgaatctgcc

SEQ ID NO: 3537131 - DNA, 25 bp, Homo sapien
tttgataagggagtggcatggtaac

SEQ ID NO: 3537132 - DNA, 25 bp, Homo sapien
caatctgccagtttataagctatat

SEQ ID NO: 3537133 - DNA, 25 bp, Homo sapien
gaatagactctaccatttgataagg

SEQ ID NO: 3537134 - DNA, 25 bp, Homo sapien
tcgagtaagcatgggaaacgttact

SEQ ID NO: 3537135 - DNA, 25 bp, Homo sapien
agatcgagtaagcatgggaaacgtt

SEQ ID NO: 3537136 - DNA, 25 bp, Homo sapien
catgatagatcgagtaagcatggga

SEQ ID NO: 3537137 - DNA, 25 bp, Homo sapien
agtaagcatgggaaacgttactggg

SEQ ID NO: 3537138 - DNA, 25 bp, Homo sapien
tcagaaattcacgttacagcctcgg

SEQ ID NO: 3537139 - DNA, 25 bp, Homo sapien
acacaattggtactgcctggcatgg

SEQ ID NO: 3537140 - DNA, 25 bp, Homo sapien
gcttaagtcatcttggtaggcagga

SEQ ID NO: 3537141 - DNA, 25 bp, Homo sapien
cacagagtgatgtaccaggcgagtc

SEQ ID NO: 3537142 - DNA, 25 bp, Homo sapien
tctacccgtcattcaggatctgagg

SEQ ID NO: 3537143 - DNA, 25 bp, Homo sapien
ttctagggtcttggagttctctgca

SEQ ID NO: 3537144 - DNA, 25 bp, Homo sapien
ggtaagctacctgctgaaacatgcc

SEQ ID NO: 3537145 - DNA, 25 bp, Homo sapien
tcagaagctatgactgaacctgaca

SEQ ID NO: 3537146 - DNA, 25 bp, Homo sapien
acagcagagtcctttatcatgatcc

SEQ ID NO: 3537147 - DNA, 25 bp, Homo sapien
tagggccaactgactatcgctaaac

SEQ ID NO: 3537148 - DNA, 25 bp, Homo sapien
gtatctccattgagtaacagcagag

SEQ ID NO: 3537149 - DNA, 25 bp, Homo sapien
tctagaactatagcctagggccaac

SEQ ID NO: 3537150 - DNA, 25 bp, Homo sapien
tctgaggttgcgtccacatttgaaa

SEQ ID NO: 3537151 - DNA, 25 bp, Homo sapien
tgcatttctagtctgaggttgcgtc

SEQ ID NO: 3537152 - DNA, 25 bp, Homo sapien
gatgggctgtcacattcacctctat

SEQ ID NO: 3537153 - DNA, 25 bp, Homo sapien
gcaccaagaggatgcttgttctgtt

SEQ ID NO: 3537154 - DNA, 25 bp, Homo sapien
gttgctgtcttggcaataacaaaaa

SEQ ID NO: 3537155 - DNA, 25 bp, Homo sapien
cttaagtatccctgtttttgtgtgg

SEQ ID NO: 3537156 - DNA, 25 bp, Homo sapien
gtcttggcaataacaaaaaaaatca

SEQ ID NO: 3537157 - DNA, 25 bp, Homo sapien
cacttaagtatccctgtttttgtgt

SEQ ID NO: 3537158 - DNA, 25 bp, Homo sapien
caaagtgtacattgagactggcagc

SEQ ID NO: 3537159 - DNA, 25 bp, Homo sapien
tgagttttcagcaccagtagatttg

SEQ ID NO: 3537160 - DNA, 25 bp, Homo sapien
gaactaatattgtcgggaacaccta

SEQ ID NO: 3537161 - DNA, 25 bp, Homo sapien
cataacttgtatggagaactcacca

SEQ ID NO: 3537162 - DNA, 25 bp, Homo sapien
tgattttggtgtagtaacactcatt

SEQ ID NO: 3537163 - DNA, 25 bp, Homo sapien
tggaggatgaagcatcccaccaaca

SEQ ID NO: 3537164 - DNA, 25 bp, Homo sapien
cagattctctcctagaaattctgga

SEQ ID NO: 3537165 - DNA, 25 bp, Homo sapien
cacaaaccaaggaatatcagtagcc

SEQ ID NO: 3537166 - DNA, 25 bp, Homo sapien
cagtgcaggaatctcaggcttggtt

SEQ ID NO: 3537167 - DNA, 25 bp, Homo sapien
ggctggcactgctctaaccccagtg

SEQ ID NO: 3537168 - DNA, 25 bp, Homo sapien
agtgggttttgccattatccccaag

SEQ ID NO: 3537169 - DNA, 25 bp, Homo sapien
tgttgctttcaccaacctggagctg

SEQ ID NO: 3537170 - DNA, 25 bp, Homo sapien
aggtattgtacttttcgtgtctgga

SEQ ID NO: 3537171 - DNA, 25 bp, Homo sapien
tctttcaaattcacaaatcctacta

SEQ ID NO: 3537172 - DNA, 25 bp, Homo sapien
tagggtatagtctgctgttaaatcc

SEQ ID NO: 3537173 - DNA, 25 bp, Homo sapien
taatttccaattcttggaggccgag

SEQ ID NO: 3537174 - DNA, 25 bp, Homo sapien
cagtcctcagctctcatgtttgaga

SEQ ID NO: 3537175 - DNA, 25 bp, Homo sapien
catcggtctccagtgtcttcaaaga

SEQ ID NO: 3537176 - DNA, 25 bp, Homo sapien
tcctctagtagagatgccagtacct

SEQ ID NO: 3537177 - DNA, 25 bp, Homo sapien
cctaagttatggtggagtaatggct

SEQ ID NO: 3537178 - DNA, 25 bp, Homo sapien
gatagttccagtaatctaataatct

SEQ ID NO: 3537179 - DNA, 25 bp, Homo sapien
tgatagttccagtaatctaataatc

SEQ ID NO: 3537180 - DNA, 25 bp, Homo sapien
tgtttctgctgactcttgctaatgg

SEQ ID NO: 3537181 - DNA, 25 bp, Homo sapien
gctgactcttgctaatggtgcttta

SEQ ID NO: 3537182 - DNA, 25 bp, Homo sapien
ttgcccttagccagaacctcagttc

SEQ ID NO: 3537183 - DNA, 25 bp, Homo sapien
gaagcagaccttcaaaccagcactg

SEQ ID NO: 3537184 - DNA, 25 bp, Homo sapien
tactggacacaaagtaccaagaggc

SEQ ID NO: 3537185 - DNA, 25 bp, Homo sapien
ccttgtgtaagcattcacaccctga

SEQ ID NO: 3537186 - DNA, 25 bp, Homo sapien
aaccaggggacccaactcaatggtg

SEQ ID NO: 3537187 - DNA, 25 bp, Homo sapien
ctcatcatctccagtaaaaccaggg

SEQ ID NO: 3537188 - DNA, 25 bp, Homo sapien
ggcctcatcatctccagtaaaacca

SEQ ID NO: 3537189 - DNA, 25 bp, Homo sapien
ttaataattaagtgctgccacttgg

SEQ ID NO: 3537190 - DNA, 25 bp, Homo sapien
tgcgtaacgtcgagaggaagtgcct

SEQ ID NO: 3537191 - DNA, 25 bp, Homo sapien
caccttcggtgattaggccctccag

SEQ ID NO: 3537192 - DNA, 25 bp, Homo sapien
tcactcttaaggttccgatcacaga

SEQ ID NO: 3537193 - DNA, 25 bp, Homo sapien
ctgaggactgcgcaccggaagtagt

SEQ ID NO: 3537194 - DNA, 25 bp, Homo sapien
agagtccagtctcctctagcttcag

SEQ ID NO: 3537195 - DNA, 25 bp, Homo sapien
gagtccagtctcctctagcttcagc

SEQ ID NO: 3537196 - DNA, 25 bp, Homo sapien
agtccagtctcctctagcttcagca

SEQ ID NO: 3537197 - DNA, 25 bp, Homo sapien
gtccagtctcctctagcttcagcat

SEQ ID NO: 3537198 - DNA, 25 bp, Homo sapien
acctgaatctctgcgggcatccaca

SEQ ID NO: 3537199 - DNA, 25 bp, Homo sapien
tccacaagccaacagtgcctgttat

SEQ ID NO: 3537200 - DNA, 25 bp, Homo sapien
tgttataccacaggcggtcacttgg

SEQ ID NO: 3537201 - DNA, 25 bp, Homo sapien
tctgtactctagcatcgaatttttt

SEQ ID NO: 3537202 - DNA, 25 bp, Homo sapien
aattctcgggaacgtactttgcaca

SEQ ID NO: 3537203 - DNA, 25 bp, Homo sapien
ctgaattctcgggaacgtactttgc

SEQ ID NO: 3537204 - DNA, 25 bp, Homo sapien
gtttattttgtccagaagaactcac

SEQ ID NO: 3537205 - DNA, 25 bp, Homo sapien
actcactgaattctcgggaacgtac

SEQ ID NO: 3537206 - DNA, 25 bp, Homo sapien
cataaaaactgacggctgtaaccca

SEQ ID NO: 3537207 - DNA, 25 bp, Homo sapien
taaagtactcgagatttctgggaga

SEQ ID NO: 3537208 - DNA, 25 bp, Homo sapien
gctcccaagtacaatctaaggtcag

SEQ ID NO: 3537209 - DNA, 25 bp, Homo sapien
taagtcttctgtagttgatggctca

SEQ ID NO: 3537210 - DNA, 25 bp, Homo sapien
cattgaaagagtatagggaagcctc

SEQ ID NO: 3537211 - DNA, 25 bp, Homo sapien
gatcccttaggagttggagtcctca

SEQ ID NO: 3537212 - DNA, 25 bp, Homo sapien
tgtctcaagctagaatccatgccct

SEQ ID NO: 3537213 - DNA, 25 bp, Homo sapien
taaggtggcctgtggatcataaatg

SEQ ID NO: 3537214 - DNA, 25 bp, Homo sapien
tgaaacagtctagacctcagctggg

SEQ ID NO: 3537215 - DNA, 25 bp, Homo sapien
ggttctcaagggcaaggcaacacca

SEQ ID NO: 3537216 - DNA, 25 bp, Homo sapien
gaccagcgggctagagaaatctctt

SEQ ID NO: 3537217 - DNA, 25 bp, Homo sapien
gaaacttgcccatgtattacctgcg

SEQ ID NO: 3537218 - DNA, 25 bp, Homo sapien
tacaactcatggttagagctctgaa

SEQ ID NO: 3537219 - DNA, 25 bp, Homo sapien
tcatcgcagtgggagactgctagct

SEQ ID NO: 3537220 - DNA, 25 bp, Homo sapien
actgctagcttggactaaggtggca

SEQ ID NO: 3537221 - DNA, 25 bp, Homo sapien
tgaacatgacaaacatagtccctgc

SEQ ID NO: 3537222 - DNA, 25 bp, Homo sapien
agagaataaaaaagggagcggccag

SEQ ID NO: 3537223 - DNA, 25 bp, Homo sapien
cccaagatggcttagacaactattt

SEQ ID NO: 3537224 - DNA, 25 bp, Homo sapien
actatttgttgaatgtggaatcgaa

SEQ ID NO: 3537225 - DNA, 25 bp, Homo sapien
caagtgtatagtgctgactgtgcct

SEQ ID NO: 3537226 - DNA, 25 bp, Homo sapien
cccctatagcgtgaaggctttcctg

SEQ ID NO: 3537227 - DNA, 25 bp, Homo sapien
ggttgctccattctactaagttatc

SEQ ID NO: 3537228 - DNA, 25 bp, Homo sapien
tttgctttccccgaggcttgctctc

SEQ ID NO: 3537229 - DNA, 25 bp, Homo sapien
tcactgttcccgtatggttgctcca

SEQ ID NO: 3537230 - DNA, 25 bp, Homo sapien
atcaactggagcctttatgcacagc

SEQ ID NO: 3537231 - DNA, 25 bp, Homo sapien
tcttgcttcagttgaagggtggctc

SEQ ID NO: 3537232 - DNA, 25 bp, Homo sapien
gccttttatctgactcctaagtgga

SEQ ID NO: 3537233 - DNA, 25 bp, Homo sapien
gctctgtgttgcattagtaggatcc

SEQ ID NO: 3537234 - DNA, 25 bp, Homo sapien
tacagcctaaattaaggagccttgg

SEQ ID NO: 3537235 - DNA, 25 bp, Homo sapien
cacttgtgaggtggattcctgcttc

SEQ ID NO: 3537236 - DNA, 25 bp, Homo sapien
tggtcagtgcactccctccggatat

SEQ ID NO: 3537237 - DNA, 25 bp, Homo sapien
tagattaagcccatgttgcactctc

SEQ ID NO: 3537238 - DNA, 25 bp, Homo sapien
tggaggagccacactaccagttaat

SEQ ID NO: 3537239 - DNA, 25 bp, Homo sapien
caagccagagctccctttgagaaaa

SEQ ID NO: 3537240 - DNA, 25 bp, Homo sapien
cctaagtgtacaggagtcgtgatcc

SEQ ID NO: 3537241 - DNA, 25 bp, Homo sapien
gacagcactgttttggtcaagccag

SEQ ID NO: 3537242 - DNA, 25 bp, Homo sapien
tcatgcctctctttggtctcatcca

SEQ ID NO: 3537243 - DNA, 25 bp, Homo sapien
gcctctctttggtctcatccattta

SEQ ID NO: 3537244 - DNA, 25 bp, Homo sapien
tctcatgcctctctttggtctcatc

SEQ ID NO: 3537245 - DNA, 25 bp, Homo sapien
atgcctctctttggtctcatccatt

SEQ ID NO: 3537246 - DNA, 25 bp, Homo sapien
agggacctttctccacaagacttca

SEQ ID NO: 3537247 - DNA, 25 bp, Homo sapien
agaagggacctttctccacaagact

SEQ ID NO: 3537248 - DNA, 25 bp, Homo sapien
cttcagaggtgctggcatagcacag

SEQ ID NO: 3537249 - DNA, 25 bp, Homo sapien
atatcaatggacttgtgcctctggg

SEQ ID NO: 3537250 - DNA, 25 bp, Homo sapien
tgattttgttctaagcagttttcct

SEQ ID NO: 3537251 - DNA, 25 bp, Homo sapien
acacgccccgccttcatttgaagaa

SEQ ID NO: 3537252 - DNA, 25 bp, Homo sapien
ttgttctaagcagttttcctcctgc

SEQ ID NO: 3537253 - DNA, 25 bp, Homo sapien
gatataaatatgcgtcagggactct

SEQ ID NO: 3537254 - DNA, 25 bp, Homo sapien
tctggagccttccgtaggcagacag

SEQ ID NO: 3537255 - DNA, 25 bp, Homo sapien
ctctggagccttccgtaggcagaca

SEQ ID NO: 3537256 - DNA, 25 bp, Homo sapien
gagatataaatatgcgtcagggact

SEQ ID NO: 3537257 - DNA, 25 bp, Homo sapien
acacactcaagacaggttacaggcc

SEQ ID NO: 3537258 - DNA, 25 bp, Homo sapien
gcagaaggcctgctcatgacagctg

SEQ ID NO: 3537259 - DNA, 25 bp, Homo sapien
gttacaggcctccaaataaagagtg

SEQ ID NO: 3537260 - DNA, 25 bp, Homo sapien
caagtcagatagaagtgggagcagc

SEQ ID NO: 3537261 - DNA, 25 bp, Homo sapien
gccctatgactaacgctctcttctg

SEQ ID NO: 3537262 - DNA, 25 bp, Homo sapien
gtagccctatgactaacgctctctt

SEQ ID NO: 3537263 - DNA, 25 bp, Homo sapien
tatgactaacgctctcttctgactc

SEQ ID NO: 3537264 - DNA, 25 bp, Homo sapien
tcagtagccctatgactaacgctct

SEQ ID NO: 3537265 - DNA, 25 bp, Homo sapien
cactgacttttagctctggatgcaa

SEQ ID NO: 3537266 - DNA, 25 bp, Homo sapien
atgtggacacgccttcactgctctg

SEQ ID NO: 3537267 - DNA, 25 bp, Homo sapien
ggctgagcccactgacttttagctc

SEQ ID NO: 3537268 - DNA, 25 bp, Homo sapien
caggaatgtggacacgccttcactg

SEQ ID NO: 3537269 - DNA, 25 bp, Homo sapien
tgaccgtgttgtgaggtgctgctcc

SEQ ID NO: 3537270 - DNA, 25 bp, Homo sapien
cctgagggccttgtgaccgtgttgt

SEQ ID NO: 3537271 - DNA, 25 bp, Homo sapien
gtgggcgcctgagggccttgtgacc

SEQ ID NO: 3537272 - DNA, 25 bp, Homo sapien
tggccaggtagtgggaggaggcggt

SEQ ID NO: 3537273 - DNA, 25 bp, Homo sapien
caggcccctcgcaccctgggaggcc

SEQ ID NO: 3537274 - DNA, 25 bp, Homo sapien
acccaggcccctcgcaccctgggag

SEQ ID NO: 3537275 - DNA, 25 bp, Homo sapien
gcacccaggcccctcgcaccctggg

SEQ ID NO: 3537276 - DNA, 25 bp, Homo sapien
aaggcacccaggcccctcgcaccct

SEQ ID NO: 3537277 - DNA, 25 bp, Homo sapien
cttcgtgaaagtcgtctttgcaggt

SEQ ID NO: 3537278 - DNA, 25 bp, Homo sapien
ggcttcgtgaaagtcgtctttgcag

SEQ ID NO: 3537279 - DNA, 25 bp, Homo sapien
caaggcttcgtgaaagtcgtctttg

SEQ ID NO: 3537280 - DNA, 25 bp, Homo sapien
tttggtgcccaaccacagtagtaaa

SEQ ID NO: 3537281 - DNA, 25 bp, Homo sapien
agaaggcataaaaaggcaacggcgg

SEQ ID NO: 3537282 - DNA, 25 bp, Homo sapien
cagagaaggcataaaaaggcaacgg

SEQ ID NO: 3537283 - DNA, 25 bp, Homo sapien
ggaggagtggtcctggccctaggga

SEQ ID NO: 3537284 - DNA, 25 bp, Homo sapien
aggagtggtcctggccctagggaca

SEQ ID NO: 3537285 - DNA, 25 bp, Homo sapien
ccccgcagacgccggaggcgccatg

SEQ ID NO: 3537286 - DNA, 25 bp, Homo sapien
cgcccggccccgcagacgccggagg

SEQ ID NO: 3537287 - DNA, 25 bp, Homo sapien
gccccgcagacgccggaggcgccat

SEQ ID NO: 3537288 - DNA, 25 bp, Homo sapien
ccggccccgcagacgccggaggcgc

SEQ ID NO: 3537289 - DNA, 25 bp, Homo sapien
aagaagtcgttcctgcagagcctgg

SEQ ID NO: 3537290 - DNA, 25 bp, Homo sapien
ttcggtcaccggaacgaggttgcgc

SEQ ID NO: 3537291 - DNA, 25 bp, Homo sapien
caaactacatttggttgagccgggc

SEQ ID NO: 3537292 - DNA, 25 bp, Homo sapien
tccacggagtgggaggaacttcctc

SEQ ID NO: 3537293 - DNA, 25 bp, Homo sapien
tggtgaggccttgagaagcttccac

SEQ ID NO: 3537294 - DNA, 25 bp, Homo sapien
gttggccacatgcttcccctcgtag

SEQ ID NO: 3537295 - DNA, 25 bp, Homo sapien
acaatgttgcacaattggtttccca

SEQ ID NO: 3537296 - DNA, 25 bp, Homo sapien
cttcccctcgtaggacaatgttgca

SEQ ID NO: 3537297 - DNA, 25 bp, Homo sapien
ttcaggctgcctttcccgttggcca

SEQ ID NO: 3537298 - DNA, 25 bp, Homo sapien
aggtccctttgctgcagagccttgc

SEQ ID NO: 3537299 - DNA, 25 bp, Homo sapien
gccttgctgttggtggctgccagca

SEQ ID NO: 3537300 - DNA, 25 bp, Homo sapien
cctttgctgcagagccttgctgttg

SEQ ID NO: 3537301 - DNA, 25 bp, Homo sapien
acatccaggtccctttgctgcagag

SEQ ID NO: 3537302 - DNA, 25 bp, Homo sapien
ttgggggtggagtcttccacactct

SEQ ID NO: 3537303 - DNA, 25 bp, Homo sapien
gttgggggtggagtcttccacactc

SEQ ID NO: 3537304 - DNA, 25 bp, Homo sapien
ttttcagtgtgtgttggctgatttt

SEQ ID NO: 3537305 - DNA, 25 bp, Homo sapien
cttttcagtgtgtgttggctgattt

SEQ ID NO: 3537306 - DNA, 25 bp, Homo sapien
tttcagtgtgtgttggctgattttt

SEQ ID NO: 3537307 - DNA, 25 bp, Homo sapien
ggaatgacccactctttggaagaag

SEQ ID NO: 3537308 - DNA, 25 bp, Homo sapien
tggggtgaatctggacccccaggaa

SEQ ID NO: 3537309 - DNA, 25 bp, Homo sapien
ctgcacccgggtggggtgaatctgg

SEQ ID NO: 3537310 - DNA, 25 bp, Homo sapien
ccccaggaatgacccactctttgga

SEQ ID NO: 3537311 - DNA, 25 bp, Homo sapien
tggcagcagccagtagcagggagct

SEQ ID NO: 3537312 - DNA, 25 bp, Homo sapien
gagctgttcccccaggccttggagg

SEQ ID NO: 3537313 - DNA, 25 bp, Homo sapien
cctctggcagcagccagtagcaggg

SEQ ID NO: 3537314 - DNA, 25 bp, Homo sapien
gcagccagtagcagggagctgttcc

SEQ ID NO: 3537315 - DNA, 25 bp, Homo sapien
gaaacggcctaatacattgtggtcc

SEQ ID NO: 3537316 - DNA, 25 bp, Homo sapien
cagtgccgggagcatggtaaatact

SEQ ID NO: 3537317 - DNA, 25 bp, Homo sapien
gacatatacccttcatagtgccaaa

SEQ ID NO: 3537318 - DNA, 25 bp, Homo sapien
tgatatatgaacagggtctagcaca

SEQ ID NO: 3537319 - DNA, 25 bp, Homo sapien
tgaggttcctgcaccttgtttttct

SEQ ID NO: 3537320 - DNA, 25 bp, Homo sapien
gacccagatgtcagtccggctcccc

SEQ ID NO: 3537321 - DNA, 25 bp, Homo sapien
tggccttagaacttctgagatctgg

SEQ ID NO: 3537322 - DNA, 25 bp, Homo sapien
gctgaggttcctgcaccttgttttt

SEQ ID NO: 3537323 - DNA, 25 bp, Homo sapien
gctggcctgagttttctgcactagg

SEQ ID NO: 3537324 - DNA, 25 bp, Homo sapien
gtttagcgacccctcttggcaaatc

SEQ ID NO: 3537325 - DNA, 25 bp, Homo sapien
caaatccgtgttacagctgctgtag

SEQ ID NO: 3537326 - DNA, 25 bp, Homo sapien
cctgagttttctgcactaggcaaga

SEQ ID NO: 3537327 - DNA, 25 bp, Homo sapien
tgggagcttcaaaatctttggcatc

SEQ ID NO: 3537328 - DNA, 25 bp, Homo sapien
gagcttcaaaatctttggcatctcc

SEQ ID NO: 3537329 - DNA, 25 bp, Homo sapien
tgatgggagcttcaaaatctttggc

SEQ ID NO: 3537330 - DNA, 25 bp, Homo sapien
gatgggagcttcaaaatctttggca

SEQ ID NO: 3537331 - DNA, 25 bp, Homo sapien
cagtgaaagcaactgatgggaggcc

SEQ ID NO: 3537332 - DNA, 25 bp, Homo sapien
gagattactatgagcccaacctgca

SEQ ID NO: 3537333 - DNA, 25 bp, Homo sapien
tgatgtctgacattccgaggtggga

SEQ ID NO: 3537334 - DNA, 25 bp, Homo sapien
tacactcttagggtctccagccatg

SEQ ID NO: 3537335 - DNA, 25 bp, Homo sapien
ttttgagccgagttctaggactgcg

SEQ ID NO: 3537336 - DNA, 25 bp, Homo sapien
gctgtacaccagcaactcaggcaat

SEQ ID NO: 3537337 - DNA, 25 bp, Homo sapien
tggctgagcatgtcagcaacccagg

SEQ ID NO: 3537338 - DNA, 25 bp, Homo sapien
tttgcatagtccttagcaggcaggg

SEQ ID NO: 3537339 - DNA, 25 bp, Homo sapien
tcatgtaaagggtacccagacctca

SEQ ID NO: 3537340 - DNA, 25 bp, Homo sapien
ggaagactttgtggcatgctccaga

SEQ ID NO: 3537341 - DNA, 25 bp, Homo sapien
gacctacttggatcttggcatgcac

SEQ ID NO: 3537342 - DNA, 25 bp, Homo sapien
gttcttctcgaaaatgccaagtgga

SEQ ID NO: 3537343 - DNA, 25 bp, Homo sapien
gtataaacttaacattagccaggga

SEQ ID NO: 3537344 - DNA, 25 bp, Homo sapien
cagagggtctgtactagccatgcaa

SEQ ID NO: 3537345 - DNA, 25 bp, Homo sapien
ggttctggctaacgttaaatgctgc

SEQ ID NO: 3537346 - DNA, 25 bp, Homo sapien
catgcaaggagtcgctctagctggt

SEQ ID NO: 3537347 - DNA, 25 bp, Homo sapien
tggactgttagggatgcccagcttc

SEQ ID NO: 3537348 - DNA, 25 bp, Homo sapien
tatcttggcagaggaaagtcaggca

SEQ ID NO: 3537349 - DNA, 25 bp, Homo sapien
gagggcattgtaagctcaagccaca

SEQ ID NO: 3537350 - DNA, 25 bp, Homo sapien
aatttccggctcaccattgctggca

SEQ ID NO: 3537351 - DNA, 25 bp, Homo sapien
gaactggctatttgtggagagccta

SEQ ID NO: 3537352 - DNA, 25 bp, Homo sapien
agtttgccgtcagccctattttggg

SEQ ID NO: 3537353 - DNA, 25 bp, Homo sapien
tcttctcacttgtgcacatacacag

SEQ ID NO: 3537354 - DNA, 25 bp, Homo sapien
ccattgtcttctggcgctaacttgc

SEQ ID NO: 3537355 - DNA, 25 bp, Homo sapien
tcatcctaggagctgacacggcagt

SEQ ID NO: 3537356 - DNA, 25 bp, Homo sapien
gcatagcaatgaaccacgtggcagg

SEQ ID NO: 3537357 - DNA, 25 bp, Homo sapien
tgtctttgagctaacctggccaccg

SEQ ID NO: 3537358 - DNA, 25 bp, Homo sapien
gctacggttcacaaagaggtctgac

SEQ ID NO: 3537359 - DNA, 25 bp, Homo sapien
cctcagacttggggcggctgaaagt

SEQ ID NO: 3537360 - DNA, 25 bp, Homo sapien
gggcctcagacttggggcggctgaa

SEQ ID NO: 3537361 - DNA, 25 bp, Homo sapien
tccacggggcctcagacttggggcg

SEQ ID NO: 3537362 - DNA, 25 bp, Homo sapien
cagcagtccacggggcctcagactt

SEQ ID NO: 3537363 - DNA, 25 bp, Homo sapien
aaaacatgggcgtggcccatggtgt

SEQ ID NO: 3537364 - DNA, 25 bp, Homo sapien
gaggaaagtcgagtgggaggctggg

SEQ ID NO: 3537365 - DNA, 25 bp, Homo sapien
cgtggcccatggtgtcccgaggtgg

SEQ ID NO: 3537366 - DNA, 25 bp, Homo sapien
ttcctaagaggaaagtcgagtggga

SEQ ID NO: 3537367 - DNA, 25 bp, Homo sapien
catgtggcccaggaaatggccgcac

SEQ ID NO: 3537368 - DNA, 25 bp, Homo sapien
tcatgtggcccaggaaatggccgca

SEQ ID NO: 3537369 - DNA, 25 bp, Homo sapien
tgagctcgtagccattgaggcctgg

SEQ ID NO: 3537370 - DNA, 25 bp, Homo sapien
tccttggccttcatgcggagggccg

SEQ ID NO: 3537371 - DNA, 25 bp, Homo sapien
cgcgatgctcgaggtcttgcggtcc

SEQ ID NO: 3537372 - DNA, 25 bp, Homo sapien
tgccgagccaggacgggttctgaat

SEQ ID NO: 3537373 - DNA, 25 bp, Homo sapien
ggcttttacaccttggcatctctgt

SEQ ID NO: 3537374 - DNA, 25 bp, Homo sapien
tcagttctaaagagtgacctcaggc

SEQ ID NO: 3537375 - DNA, 25 bp, Homo sapien
acctcaggcttcattaagggtccag

SEQ ID NO: 3537376 - DNA, 25 bp, Homo sapien
tagccttgatggacatccagatacc

SEQ ID NO: 3537377 - DNA, 25 bp, Homo sapien
tgcctcaggagtggacagccagatc

SEQ ID NO: 3537378 - DNA, 25 bp, Homo sapien
taaacctctcagaaaccaagggtca

SEQ ID NO: 3537379 - DNA, 25 bp, Homo sapien
ttccagggcctgaactaggaggctt

SEQ ID NO: 3537380 - DNA, 25 bp, Homo sapien
tgggcggcagggacctaaacctctc

SEQ ID NO: 3537381 - DNA, 25 bp, Homo sapien
tctggagcacactcgagggaggcat

SEQ ID NO: 3537382 - DNA, 25 bp, Homo sapien
cagcttatgcacacgggattcctgg

SEQ ID NO: 3537383 - DNA, 25 bp, Homo sapien
gagacccgggaacctctcagcttat

SEQ ID NO: 3537384 - DNA, 25 bp, Homo sapien
gattcctggtaacctcatgtgggct

SEQ ID NO: 3537385 - DNA, 25 bp, Homo sapien
ctccaggcctgtgccctgccctcct

SEQ ID NO: 3537386 - DNA, 25 bp, Homo sapien
ctgccctcctgccccatgaatcctg

SEQ ID NO: 3537387 - DNA, 25 bp, Homo sapien
caggcctgtgccctgccctcctgcc

SEQ ID NO: 3537388 - DNA, 25 bp, Homo sapien
gccctcctgccccatgaatcctggg

SEQ ID NO: 3537389 - DNA, 25 bp, Homo sapien
ccagagaccatttgctagcacagaa

SEQ ID NO: 3537390 - DNA, 25 bp, Homo sapien
gagccagagaccatttgctagcaca

SEQ ID NO: 3537391 - DNA, 25 bp, Homo sapien
gccagagaccatttgctagcacaga

SEQ ID NO: 3537392 - DNA, 25 bp, Homo sapien
gagagccagagaccatttgctagca

SEQ ID NO: 3537393 - DNA, 25 bp, Homo sapien
ggcgcccgtgctactggctggctgc

SEQ ID NO: 3537394 - DNA, 25 bp, Homo sapien
cgcccgtgctactggctggctgctg

SEQ ID NO: 3537395 - DNA, 25 bp, Homo sapien
actggctggctgctgagcagggcca

SEQ ID NO: 3537396 - DNA, 25 bp, Homo sapien
tggctggctgctgagcagggccagg

SEQ ID NO: 3537397 - DNA, 25 bp, Homo sapien
gccagaatgaggcctgagcaggtag

SEQ ID NO: 3537398 - DNA, 25 bp, Homo sapien
atgaggcctgagcaggtagggagca

SEQ ID NO: 3537399 - DNA, 25 bp, Homo sapien
aatgaggcctgagcaggtagggagc

SEQ ID NO: 3537400 - DNA, 25 bp, Homo sapien
agaatgaggcctgagcaggtaggga

SEQ ID NO: 3537401 - DNA, 25 bp, Homo sapien
gatgtgactcaatacttctcatccc

SEQ ID NO: 3537402 - DNA, 25 bp, Homo sapien
catgtgcctgatgtgactcaatact

SEQ ID NO: 3537403 - DNA, 25 bp, Homo sapien
tgtgactcaatacttctcatccctt

SEQ ID NO: 3537404 - DNA, 25 bp, Homo sapien
gcctgatgtgactcaatacttctca

SEQ ID NO: 3537405 - DNA, 25 bp, Homo sapien
ggttccgatgcccacagcaaaagtg

SEQ ID NO: 3537406 - DNA, 25 bp, Homo sapien
caacttggccacgagtcctggagat

SEQ ID NO: 3537407 - DNA, 25 bp, Homo sapien
gaatttagaccttacaactgcctga

SEQ ID NO: 3537408 - DNA, 25 bp, Homo sapien
gagctggaaagataacctaagtccc

SEQ ID NO: 3537409 - DNA, 25 bp, Homo sapien
gggcctcccacactctggtataaac

SEQ ID NO: 3537410 - DNA, 25 bp, Homo sapien
tctggtataaacaggcacacccctg

SEQ ID NO: 3537411 - DNA, 25 bp, Homo sapien
tcccacactctggtataaacaggca

SEQ ID NO: 3537412 - DNA, 25 bp, Homo sapien
ctctggtataaacaggcacacccct

SEQ ID NO: 3537413 - DNA, 25 bp, Homo sapien
gatcggtggcggcagctcagggcgg

SEQ ID NO: 3537414 - DNA, 25 bp, Homo sapien
gctggggatcggtggcggcagctca

SEQ ID NO: 3537415 - DNA, 25 bp, Homo sapien
ggcggcagctcagggcgggacttac

SEQ ID NO: 3537416 - DNA, 25 bp, Homo sapien
gtggcggcagctcagggcgggactt

SEQ ID NO: 3537417 - DNA, 25 bp, Homo sapien
gcatctgcccaaaacgctcccgctt

SEQ ID NO: 3537418 - DNA, 25 bp, Homo sapien
tgggcgtagttctcagctcgggtga

SEQ ID NO: 3537419 - DNA, 25 bp, Homo sapien
ggcagctcatatgcagtggagaagt

SEQ ID NO: 3537420 - DNA, 25 bp, Homo sapien
gaagtgggttcgaacctgctgcatc

SEQ ID NO: 3537421 - DNA, 25 bp, Homo sapien
tgcagtccaagaatgtttagagtac

SEQ ID NO: 3537422 - DNA, 25 bp, Homo sapien
ggaaatgcagtccaagaatgtttag

SEQ ID NO: 3537423 - DNA, 25 bp, Homo sapien
gtccaagaatgtttagagtacttcc

SEQ ID NO: 3537424 - DNA, 25 bp, Homo sapien
catagtcgcagcaggggagatagat

SEQ ID NO: 3537425 - DNA, 25 bp, Homo sapien
gttgctctctgagtcggccttctcc

SEQ ID NO: 3537426 - DNA, 25 bp, Homo sapien
gctggtgaaggtggtccggttccgc

SEQ ID NO: 3537427 - DNA, 25 bp, Homo sapien
gttcccgcgcatacacgtctgggta

SEQ ID NO: 3537428 - DNA, 25 bp, Homo sapien
cacgcgggcctcagtgaggtctgtc

SEQ ID NO: 3537429 - DNA, 25 bp, Homo sapien
tcctctctctagagggattccctgc

SEQ ID NO: 3537430 - DNA, 25 bp, Homo sapien
gagggattccctgcatcaggacttt

SEQ ID NO: 3537431 - DNA, 25 bp, Homo sapien
tcaggacttttctggggcccgagaa

SEQ ID NO: 3537432 - DNA, 25 bp, Homo sapien
tctagagggattccctgcatcagga

SEQ ID NO: 3537433 - DNA, 25 bp, Homo sapien
acaaatagggagagcggggtagttg

SEQ ID NO: 3537434 - DNA, 25 bp, Homo sapien
ctacaaatagggagagcggggtagt

SEQ ID NO: 3537435 - DNA, 25 bp, Homo sapien
atagggagagcggggtagttgaggg

SEQ ID NO: 3537436 - DNA, 25 bp, Homo sapien
aaatagggagagcggggtagttgag

SEQ ID NO: 3537437 - DNA, 25 bp, Homo sapien
cagcagccaggactgtccctgagga

SEQ ID NO: 3537438 - DNA, 25 bp, Homo sapien
agcagccaggactgtccctgaggac

SEQ ID NO: 3537439 - DNA, 25 bp, Homo sapien
agagccttggggcacctcgtgctgg

SEQ ID NO: 3537440 - DNA, 25 bp, Homo sapien
caccacactggggtagagaagaccg

SEQ ID NO: 3537441 - DNA, 25 bp, Homo sapien
ccacactggggtagagaagaccgcc

SEQ ID NO: 3537442 - DNA, 25 bp, Homo sapien
acactggggtagagaagaccgccag

SEQ ID NO: 3537443 - DNA, 25 bp, Homo sapien
catgctattgaaagggcactgacta

SEQ ID NO: 3537444 - DNA, 25 bp, Homo sapien
ttcatgctattgaaagggcactgac

SEQ ID NO: 3537445 - DNA, 25 bp, Homo sapien
tgaaagggcactgactaaacccact

SEQ ID NO: 3537446 - DNA, 25 bp, Homo sapien
ctattgaaagggcactgactaaacc

SEQ ID NO: 3537447 - DNA, 25 bp, Homo sapien
gagctgctcccacatatcacatggg

SEQ ID NO: 3537448 - DNA, 25 bp, Homo sapien
cacatatcacatgggggtcctgggc

SEQ ID NO: 3537449 - DNA, 25 bp, Homo sapien
aggagctgctcccacatatcacatg

SEQ ID NO: 3537450 - DNA, 25 bp, Homo sapien
ggctggcctggttctcaggatggct

SEQ ID NO: 3537451 - DNA, 25 bp, Homo sapien
aatttctgtgacctgttggtcactg

SEQ ID NO: 3537452 - DNA, 25 bp, Homo sapien
caaatgtgtccttgagctgaatttc

SEQ ID NO: 3537453 - DNA, 25 bp, Homo sapien
tgaatttctgtgacctgttggtcac

SEQ ID NO: 3537454 - DNA, 25 bp, Homo sapien
ctccaggtcccggaaaacaaatgtg

SEQ ID NO: 3537455 - DNA, 25 bp, Homo sapien
gtgggacagggccaaagtgccattc

SEQ ID NO: 3537456 - DNA, 25 bp, Homo sapien
ggacagggccaaagtgccattcaac

SEQ ID NO: 3537457 - DNA, 25 bp, Homo sapien
gggcagacacactacctctctccat

SEQ ID NO: 3537458 - DNA, 25 bp, Homo sapien
ggatgtacggggcagacacactacc

SEQ ID NO: 3537459 - DNA, 25 bp, Homo sapien
tagccgggtcctcgcagtgttggtt

SEQ ID NO: 3537460 - DNA, 25 bp, Homo sapien
cccggacggtatcatcacatagccg

SEQ ID NO: 3537461 - DNA, 25 bp, Homo sapien
ggacggtcggcttccactcgaattc

SEQ ID NO: 3537462 - DNA, 25 bp, Homo sapien
tctagtggcaccacaggacggtcgg

SEQ ID NO: 3537463 - DNA, 25 bp, Homo sapien
gggcaccttccttgccgagaggcaa

SEQ ID NO: 3537464 - DNA, 25 bp, Homo sapien
ccagcagagactggaggcggcttcc

SEQ ID NO: 3537465 - DNA, 25 bp, Homo sapien
caactctttccgcaacccggtccag

SEQ ID NO: 3537466 - DNA, 25 bp, Homo sapien
cccgcactccctcggcttggcccag

SEQ ID NO: 3537467 - DNA, 25 bp, Homo sapien
aaggcctccgggtatgtgctcagga

SEQ ID NO: 3537468 - DNA, 25 bp, Homo sapien
caaggcctccgggtatgtgctcagg

SEQ ID NO: 3537469 - DNA, 25 bp, Homo sapien
cctccgggtatgtgctcaggactcc

SEQ ID NO: 3537470 - DNA, 25 bp, Homo sapien
ggcctccgggtatgtgctcaggact

SEQ ID NO: 3537471 - DNA, 25 bp, Homo sapien
cagggaacctgcaaggccgcgctgt

SEQ ID NO: 3537472 - DNA, 25 bp, Homo sapien
tttgaggctgccgtccgggggcgtc

SEQ ID NO: 3537473 - DNA, 25 bp, Homo sapien
cgtagcagggaacctgcaaggccgc

SEQ ID NO: 3537474 - DNA, 25 bp, Homo sapien
gtccgggggcgtcttgcaggcgcct

SEQ ID NO: 3537475 - DNA, 25 bp, Homo sapien
agtaaagatgcggttgcgcgggcgg

SEQ ID NO: 3537476 - DNA, 25 bp, Homo sapien
ctgcaagtaaagatgcggttgcgcg

SEQ ID NO: 3537477 - DNA, 25 bp, Homo sapien
aaagatgcggttgcgcgggcggctg

SEQ ID NO: 3537478 - DNA, 25 bp, Homo sapien
gctgcggggtcgacggctggggctg

SEQ ID NO: 3537479 - DNA, 25 bp, Homo sapien
tgttaaaggagccccgcgccccagc

SEQ ID NO: 3537480 - DNA, 25 bp, Homo sapien
taaaggagccccgcgccccagctcc

SEQ ID NO: 3537481 - DNA, 25 bp, Homo sapien
ttaaaggagccccgcgccccagctc

SEQ ID NO: 3537482 - DNA, 25 bp, Homo sapien
aaggagccccgcgccccagctccac

SEQ ID NO: 3537483 - DNA, 25 bp, Homo sapien
tctccaggggtgtcgccaggtcctg

SEQ ID NO: 3537484 - DNA, 25 bp, Homo sapien
atccctgtgctttggcggcggccga

SEQ ID NO: 3537485 - DNA, 25 bp, Homo sapien
tgtcgcctccgggaaatgccctaaa

SEQ ID NO: 3537486 - DNA, 25 bp, Homo sapien
caggaaagttgtgccgaacttgtcg

SEQ ID NO: 3537487 - DNA, 25 bp, Homo sapien
taagagacgcaagtctcagcattca

SEQ ID NO: 3537488 - DNA, 25 bp, Homo sapien
gtagtaggcgtccatggcagcggcc

SEQ ID NO: 3537489 - DNA, 25 bp, Homo sapien
cagcggccggcgactcgcagtaaga

SEQ ID NO: 3537490 - DNA, 25 bp, Homo sapien
cgggctgtagtaggcgtccatggca

SEQ ID NO: 3537491 - DNA, 25 bp, Homo sapien
cgcgaggacgccaccgcgcgccttg

SEQ ID NO: 3537492 - DNA, 25 bp, Homo sapien
gcggggacgcgagcgagggcgcgag

SEQ ID NO: 3537493 - DNA, 25 bp, Homo sapien
cgagggcgcgaggacgccaccgcgc

SEQ ID NO: 3537494 - DNA, 25 bp, Homo sapien
ggcgcgaggacgccaccgcgcgcct

SEQ ID NO: 3537495 - DNA, 25 bp, Homo sapien
cttgcccggcctgctcgctctccct

SEQ ID NO: 3537496 - DNA, 25 bp, Homo sapien
gaggcgaggaggctgtggctgtgca

SEQ ID NO: 3537497 - DNA, 25 bp, Homo sapien
gaggctgtggctgtgcactccttgc

SEQ ID NO: 3537498 - DNA, 25 bp, Homo sapien
tgtggctgtgcactccttgcccggc

SEQ ID NO: 3537499 - DNA, 25 bp, Homo sapien
ctgcctgtaggcacccagaaggtgg

SEQ ID NO: 3537500 - DNA, 25 bp, Homo sapien
gccagccgcctactccagtctcctg

SEQ ID NO: 3537501 - DNA, 25 bp, Homo sapien
agaaggtggtggcaatacccccgct

SEQ ID NO: 3537502 - DNA, 25 bp, Homo sapien
aggtggtggcaatacccccgcttct

SEQ ID NO: 3537503 - DNA, 25 bp, Homo sapien
aacccgagcctccagtcggatagag

SEQ ID NO: 3537504 - DNA, 25 bp, Homo sapien
aatctccccggaatgcggacgccgc

SEQ ID NO: 3537505 - DNA, 25 bp, Homo sapien
cagcatcggccctgggcaccggtcc

SEQ ID NO: 3537506 - DNA, 25 bp, Homo sapien
tgcccacgacgagtgctctccaggc

SEQ ID NO: 3537507 - DNA, 25 bp, Homo sapien
catattcgcttccaggctctgcatc

SEQ ID NO: 3537508 - DNA, 25 bp, Homo sapien
tttgccctgcatattcgcttccagg

SEQ ID NO: 3537509 - DNA, 25 bp, Homo sapien
gggttctcgcctgaaggcgaagtcc

SEQ ID NO: 3537510 - DNA, 25 bp, Homo sapien
cgaagtccgcgtgcgcgatggaacc

SEQ ID NO: 3537511 - DNA, 25 bp, Homo sapien
aaaacctggctcgaaagccctggag

SEQ ID NO: 3537512 - DNA, 25 bp, Homo sapien
cctggaggcgagctctccaccgtgt

SEQ ID NO: 3537513 - DNA, 25 bp, Homo sapien
cggaaaacctggctcgaaagccctg

SEQ ID NO: 3537514 - DNA, 25 bp, Homo sapien
caccgtgttcggtggccaccttaat

SEQ ID NO: 3537515 - DNA, 25 bp, Homo sapien
cttctcctttcttcctggccacaat

SEQ ID NO: 3537516 - DNA, 25 bp, Homo sapien
agtgttttcgctgtgctggcagcca

SEQ ID NO: 3537517 - DNA, 25 bp, Homo sapien
tgggcagttcgtaatccgtccctag

SEQ ID NO: 3537518 - DNA, 25 bp, Homo sapien
ccagggcagggcgttgagggagtcg

SEQ ID NO: 3537519 - DNA, 25 bp, Homo sapien
gcagccagcgttgggcagttcgtaa

SEQ ID NO: 3537520 - DNA, 25 bp, Homo sapien
taaacgatattgctgatggcgtagc

SEQ ID NO: 3537521 - DNA, 25 bp, Homo sapien
ctgatggcgtagccaaaagctgtgg

SEQ ID NO: 3537522 - DNA, 25 bp, Homo sapien
gctgatggcgtagccaaaagctgtg

SEQ ID NO: 3537523 - DNA, 25 bp, Homo sapien
ttaaacgatattgctgatggcgtag

SEQ ID NO: 3537524 - DNA, 25 bp, Homo sapien
gaaggcatgtgacaatccatttgtg

SEQ ID NO: 3537525 - DNA, 25 bp, Homo sapien
aaggcatgtgacaatccatttgtga

SEQ ID NO: 3537526 - DNA, 25 bp, Homo sapien
tgaaggcatgtgacaatccatttgt

SEQ ID NO: 3537527 - DNA, 25 bp, Homo sapien
aggcatgtgacaatccatttgtgaa

SEQ ID NO: 3537528 - DNA, 25 bp, Homo sapien
gtacttttttgcgttcatgttcagc

SEQ ID NO: 3537529 - DNA, 25 bp, Homo sapien
tgagccccggctcgagagaaaagta

SEQ ID NO: 3537530 - DNA, 25 bp, Homo sapien
catgttcagcaacaaaattcacgtc

SEQ ID NO: 3537531 - DNA, 25 bp, Homo sapien
cattttagagtagacctgagccccg

SEQ ID NO: 3537532 - DNA, 25 bp, Homo sapien
caggtggccaaagcgctgagcctgg

SEQ ID NO: 3537533 - DNA, 25 bp, Homo sapien
cttctcctggttggagaagagtgat

SEQ ID NO: 3537534 - DNA, 25 bp, Homo sapien
ttggagaagagtgatggtgccacca

SEQ ID NO: 3537535 - DNA, 25 bp, Homo sapien
ggagaagagtgatggtgccaccatt

SEQ ID NO: 3537536 - DNA, 25 bp, Homo sapien
gttgtcaataccctctaggccaagg

SEQ ID NO: 3537537 - DNA, 25 bp, Homo sapien
ggtactgctgccagctaggctgagc

SEQ ID NO: 3537538 - DNA, 25 bp, Homo sapien
ggtcctctttcccagtggggcagtg

SEQ ID NO: 3537539 - DNA, 25 bp, Homo sapien
cagctaggctgagcctggaatctgg

SEQ ID NO: 3537540 - DNA, 25 bp, Homo sapien
gctggtcgccttctgcctctgaact

SEQ ID NO: 3537541 - DNA, 25 bp, Homo sapien
tcatttttgcccactttagatactc

SEQ ID NO: 3537542 - DNA, 25 bp, Homo sapien
tgcccactttagatactctatatcc

SEQ ID NO: 3537543 - DNA, 25 bp, Homo sapien
gatactctatatcctcctctccttt

SEQ ID NO: 3537544 - DNA, 25 bp, Homo sapien
ttagatactctatatcctcctctcc

SEQ ID NO: 3537545 - DNA, 25 bp, Homo sapien
gagtttgacttaaatgccgccctgt

SEQ ID NO: 3537546 - DNA, 25 bp, Homo sapien
aaatccagccgagggaggcgattcc

SEQ ID NO: 3537547 - DNA, 25 bp, Homo sapien
tgtcggccggctcgctgccttgttg

SEQ ID NO: 3537548 - DNA, 25 bp, Homo sapien
tgtgtttctcattagtaacgctgcc

SEQ ID NO: 3537549 - DNA, 25 bp, Homo sapien
cgatcaccgccacactctgagccat

SEQ ID NO: 3537550 - DNA, 25 bp, Homo sapien
cctggcgacctggacctgggggttg

SEQ ID NO: 3537551 - DNA, 25 bp, Homo sapien
tgagacaagagcttgagctaacgac

SEQ ID NO: 3537552 - DNA, 25 bp, Homo sapien
ttgagctaacgaccttgaagtgggg

SEQ ID NO: 3537553 - DNA, 25 bp, Homo sapien
ctctgagatgtactcaactctttca

SEQ ID NO: 3537554 - DNA, 25 bp, Homo sapien
gaaggaggagatgtccccagcccca

SEQ ID NO: 3537555 - DNA, 25 bp, Homo sapien
aggtccttgtttgtcgggtgatggt

SEQ ID NO: 3537556 - DNA, 25 bp, Homo sapien
ttgtttgtcgggtgatggttggaga

SEQ ID NO: 3537557 - DNA, 25 bp, Homo sapien
ccttgtttgtcgggtgatggttgga

SEQ ID NO: 3537558 - DNA, 25 bp, Homo sapien
gtccttgtttgtcgggtgatggttg

SEQ ID NO: 3537559 - DNA, 25 bp, Homo sapien
ttaccacacgaaggcaagctggccg

SEQ ID NO: 3537560 - DNA, 25 bp, Homo sapien
acacgaaggcaagctggccgggagc

SEQ ID NO: 3537561 - DNA, 25 bp, Homo sapien
accacacgaaggcaagctggccggg

SEQ ID NO: 3537562 - DNA, 25 bp, Homo sapien
acgaaggcaagctggccgggagcag

SEQ ID NO: 3537563 - DNA, 25 bp, Homo sapien
tgcagtgtgggatttcccaggaaca

SEQ ID NO: 3537564 - DNA, 25 bp, Homo sapien
ctggaactgccctgcacgggttact

SEQ ID NO: 3537565 - DNA, 25 bp, Homo sapien
cttgcgtgtgccttcttggtgcagt

SEQ ID NO: 3537566 - DNA, 25 bp, Homo sapien
gccatacagccaaaaagggcctgga

SEQ ID NO: 3537567 - DNA, 25 bp, Homo sapien
aatagtgtcagacctcaacttgctc

SEQ ID NO: 3537568 - DNA, 25 bp, Homo sapien
cttaatagtgtcagacctcaacttg

SEQ ID NO: 3537569 - DNA, 25 bp, Homo sapien
taatagtgtcagacctcaacttgct

SEQ ID NO: 3537570 - DNA, 25 bp, Homo sapien
ttaatagtgtcagacctcaacttgc

SEQ ID NO: 3537571 - DNA, 25 bp, Homo sapien
cagggctccattagggctgtttgct

SEQ ID NO: 3537572 - DNA, 25 bp, Homo sapien
tagtgtgagtttgaccactggcttc

SEQ ID NO: 3537573 - DNA, 25 bp, Homo sapien
ctttccagtgggaacattgctgatg

SEQ ID NO: 3537574 - DNA, 25 bp, Homo sapien
cagggggtagcatgtatgccctgca

SEQ ID NO: 3537575 - DNA, 25 bp, Homo sapien
ttcctgttctctttctatttctagg

SEQ ID NO: 3537576 - DNA, 25 bp, Homo sapien
cctgttctctttctatttctaggcc

SEQ ID NO: 3537577 - DNA, 25 bp, Homo sapien
tgttctctttctatttctaggccca

SEQ ID NO: 3537578 - DNA, 25 bp, Homo sapien
gttctctttctatttctaggcccat

SEQ ID NO: 3537579 - DNA, 25 bp, Homo sapien
agtagcagccccaaatactcggggt

SEQ ID NO: 3537580 - DNA, 25 bp, Homo sapien
gtagcagccccaaatactcggggta

SEQ ID NO: 3537581 - DNA, 25 bp, Homo sapien
tagcagccccaaatactcggggtac

SEQ ID NO: 3537582 - DNA, 25 bp, Homo sapien
gacataacaaaactgtaccctggac

SEQ ID NO: 3537583 - DNA, 25 bp, Homo sapien
tacggttcggctttcggatgtggat

SEQ ID NO: 3537584 - DNA, 25 bp, Homo sapien
tggctgggtcctgcttgcccgtaga

SEQ ID NO: 3537585 - DNA, 25 bp, Homo sapien
ggatgtggatttagtgtccaccagg

SEQ ID NO: 3537586 - DNA, 25 bp, Homo sapien
ctgacgctggcccacttcacaggat

SEQ ID NO: 3537587 - DNA, 25 bp, Homo sapien
tgtgggacctttcacgtggcaccag

SEQ ID NO: 3537588 - DNA, 25 bp, Homo sapien
cccgagtagtgtgggacctttcacg

SEQ ID NO: 3537589 - DNA, 25 bp, Homo sapien
ctctgagtgtgaagccgtttccccg

SEQ ID NO: 3537590 - DNA, 25 bp, Homo sapien
ctaagtcattgaggcatgtgactgc

SEQ ID NO: 3537591 - DNA, 25 bp, Homo sapien
aagtcattgaggcatgtgactgcac

SEQ ID NO: 3537592 - DNA, 25 bp, Homo sapien
catgtgactgcacatggggggtccc

SEQ ID NO: 3537593 - DNA, 25 bp, Homo sapien
cattgaggcatgtgactgcacatgg

SEQ ID NO: 3537594 - DNA, 25 bp, Homo sapien
tttttggcattcagagagtcccccc

SEQ ID NO: 3537595 - DNA, 25 bp, Homo sapien
caagggctgctcagaggttgtggcc

SEQ ID NO: 3537596 - DNA, 25 bp, Homo sapien
cagattctggaacgcctggtgccct

SEQ ID NO: 3537597 - DNA, 25 bp, Homo sapien
tatctggagccttgaaggatttttg

SEQ ID NO: 3537598 - DNA, 25 bp, Homo sapien
taaactcagcaacagcctataatcc

SEQ ID NO: 3537599 - DNA, 25 bp, Homo sapien
cagctttacgagaacaggcttgtaa

SEQ ID NO: 3537600 - DNA, 25 bp, Homo sapien
ggcctgctatggtaatagacactca

SEQ ID NO: 3537601 - DNA, 25 bp, Homo sapien
agtctggcagctttacgagaacagg

SEQ ID NO: 3537602 - DNA, 25 bp, Homo sapien
tctggagaagtccaggcgtgataaa

SEQ ID NO: 3537603 - DNA, 25 bp, Homo sapien
caggcgtgataaactgagggttggt

SEQ ID NO: 3537604 - DNA, 25 bp, Homo sapien
ccaggcgtgataaactgagggttgg

SEQ ID NO: 3537605 - DNA, 25 bp, Homo sapien
ttctggagaagtccaggcgtgataa

SEQ ID NO: 3537606 - DNA, 25 bp, Homo sapien
cagaggcctggcaccgtctagagag

SEQ ID NO: 3537607 - DNA, 25 bp, Homo sapien
aatagcccgaccacaagacaggaag

SEQ ID NO: 3537608 - DNA, 25 bp, Homo sapien
tggcggctgtcagcactgagcagaa

SEQ ID NO: 3537609 - DNA, 25 bp, Homo sapien
gaaaggcattccgaggcacaagaat

SEQ ID NO: 3537610 - DNA, 25 bp, Homo sapien
gtgggtggtggcaaggaagtgccat

SEQ ID NO: 3537611 - DNA, 25 bp, Homo sapien
tgggtggtggcaaggaagtgccatt

SEQ ID NO: 3537612 - DNA, 25 bp, Homo sapien
ttcatgtgaccacctgtcagaagat

SEQ ID NO: 3537613 - DNA, 25 bp, Homo sapien
tcatgtgaccacctgtcagaagatg

SEQ ID NO: 3537614 - DNA, 25 bp, Homo sapien
caccattgttcccagggacgatgta

SEQ ID NO: 3537615 - DNA, 25 bp, Homo sapien
tgttcccagggacgatgtatatcac

SEQ ID NO: 3537616 - DNA, 25 bp, Homo sapien
ccagggacgatgtatatcacaagca

SEQ ID NO: 3537617 - DNA, 25 bp, Homo sapien
ccattgttcccagggacgatgtata

SEQ ID NO: 3537618 - DNA, 25 bp, Homo sapien
gcatcgagcaccttctacgtgtgta

SEQ ID NO: 3537619 - DNA, 25 bp, Homo sapien
cacattccagctgacatgcagagac

SEQ ID NO: 3537620 - DNA, 25 bp, Homo sapien
ccaaaatagggccacaccctggaca

SEQ ID NO: 3537621 - DNA, 25 bp, Homo sapien
ctcctcagcggaacatccagcacct

SEQ ID NO: 3537622 - DNA, 25 bp, Homo sapien
agcctcgatagtcccgcttctcaga

SEQ ID NO: 3537623 - DNA, 25 bp, Homo sapien
tctgagcctcgatagtcccgcttct

SEQ ID NO: 3537624 - DNA, 25 bp, Homo sapien
gccactctgagcctcgatagtcccg

SEQ ID NO: 3537625 - DNA, 25 bp, Homo sapien
actctgagcctcgatagtcccgctt

SEQ ID NO: 3537626 - DNA, 25 bp, Homo sapien
cgttcactggcggatttttctctgt

SEQ ID NO: 3537627 - DNA, 25 bp, Homo sapien
gagagctgcgttcactggcggattt

SEQ ID NO: 3537628 - DNA, 25 bp, Homo sapien
tggtcccctttaggccaacaggatg

SEQ ID NO: 3537629 - DNA, 25 bp, Homo sapien
ctctgtattgtatgtgggggcatga

SEQ ID NO: 3537630 - DNA, 25 bp, Homo sapien
gatctcgactcggagcttcttgccc

SEQ ID NO: 3537631 - DNA, 25 bp, Homo sapien
ttgctgtgtgatctcgactcggagc

SEQ ID NO: 3537632 - DNA, 25 bp, Homo sapien
tgcgggttaccatccgcgggtggga

SEQ ID NO: 3537633 - DNA, 25 bp, Homo sapien
cctgcgggttaccatccgcgggtgg

SEQ ID NO: 3537634 - DNA, 25 bp, Homo sapien
gagtgtgtccaaggtgtggtctccc

SEQ ID NO: 3537635 - DNA, 25 bp, Homo sapien
catgccagcgcagaagagtgtgtcc

SEQ ID NO: 3537636 - DNA, 25 bp, Homo sapien
ttcatttcgccgtccctcagagagg

SEQ ID NO: 3537637 - DNA, 25 bp, Homo sapien
taggaacctacgcagctccatgtgt

SEQ ID NO: 3537638 - DNA, 25 bp, Homo sapien
cttttccaacttggcaatgcaagcc

SEQ ID NO: 3537639 - DNA, 25 bp, Homo sapien
ggcaatgcaagccatagatttggga

SEQ ID NO: 3537640 - DNA, 25 bp, Homo sapien
tgccttttccaacttggcaatgcaa

SEQ ID NO: 3537641 - DNA, 25 bp, Homo sapien
gcaatgcaagccatagatttgggac

SEQ ID NO: 3537642 - DNA, 25 bp, Homo sapien
ctccccagtgacgacggatatcatc

SEQ ID NO: 3537643 - DNA, 25 bp, Homo sapien
tccccagtgacgacggatatcatca

SEQ ID NO: 3537644 - DNA, 25 bp, Homo sapien
gataatgcaatcagagacccacatt

SEQ ID NO: 3537645 - DNA, 25 bp, Homo sapien
ttgataatgcaatcagagacccaca

SEQ ID NO: 3537646 - DNA, 25 bp, Homo sapien
taatgcaatcagagacccacatttt

SEQ ID NO: 3537647 - DNA, 25 bp, Homo sapien
tgcaatcagagacccacattttaca

SEQ ID NO: 3537648 - DNA, 25 bp, Homo sapien
catttcacaaagcggctgaggtcac

SEQ ID NO: 3537649 - DNA, 25 bp, Homo sapien
cacaaagcggctgaggtcacttttg

SEQ ID NO: 3537650 - DNA, 25 bp, Homo sapien
aagcggctgaggtcacttttgggct

SEQ ID NO: 3537651 - DNA, 25 bp, Homo sapien
gccttttcttaacagaggggattca

SEQ ID NO: 3537652 - DNA, 25 bp, Homo sapien
ggccactttcttccccctgcgcttc

SEQ ID NO: 3537653 - DNA, 25 bp, Homo sapien
cactttcttccccctgcgcttcttt

SEQ ID NO: 3537654 - DNA, 25 bp, Homo sapien
ttccccctgcgcttctttcctcttg

SEQ ID NO: 3537655 - DNA, 25 bp, Homo sapien
ttggtctcctgcttctccatgacag

SEQ ID NO: 3537656 - DNA, 25 bp, Homo sapien
ccattcttctcatcactacagtcat

SEQ ID NO: 3537657 - DNA, 25 bp, Homo sapien
caccatcacacttcaccattcttct

SEQ ID NO: 3537658 - DNA, 25 bp, Homo sapien
ttcaccattcttctcatcactacag

SEQ ID NO: 3537659 - DNA, 25 bp, Homo sapien
ctcaccatcacacttcaccattctt

SEQ ID NO: 3537660 - DNA, 25 bp, Homo sapien
ccaggcaggtcacaaaaatgaggga

SEQ ID NO: 3537661 - DNA, 25 bp, Homo sapien
gctccccggattgcaaactcagttc

SEQ ID NO: 3537662 - DNA, 25 bp, Homo sapien
tcttcccgctaaggtctgtgtggcc

SEQ ID NO: 3537663 - DNA, 25 bp, Homo sapien
gaattcagccagtattgctccccgg

SEQ ID NO: 3537664 - DNA, 25 bp, Homo sapien
tgttggtttgaagtgaatatcaatt

SEQ ID NO: 3537665 - DNA, 25 bp, Homo sapien
tcatatttttttcgaaggagggatg

SEQ ID NO: 3537666 - DNA, 25 bp, Homo sapien
tcaatttgacaagcctcagaagact

SEQ ID NO: 3537667 - DNA, 25 bp, Homo sapien
tatgaacttgggatcatattgaagt

SEQ ID NO: 3537668 - DNA, 25 bp, Homo sapien
caaaaggtttgcctgttgccatgtg

SEQ ID NO: 3537669 - DNA, 25 bp, Homo sapien
tgcccaaccagcaaggtgaccttgg

SEQ ID NO: 3537670 - DNA, 25 bp, Homo sapien
taggctctgggatcagtgtgcaagc

SEQ ID NO: 3537671 - DNA, 25 bp, Homo sapien
ggtgcctaatgtcaccccagagtgt

SEQ ID NO: 3537672 - DNA, 25 bp, Homo sapien
tgtgccgctgtggcctgaagatggg

SEQ ID NO: 3537673 - DNA, 25 bp, Homo sapien
ccgctgtggcctgaagatggggaag

SEQ ID NO: 3537674 - DNA, 25 bp, Homo sapien
cagcaccaggcacgatgtctgtgcc

SEQ ID NO: 3537675 - DNA, 25 bp, Homo sapien
tttatcagaaaaggcgcagtggctc

SEQ ID NO: 3537676 - DNA, 25 bp, Homo sapien
tccattccgaagactacagcaaggt

SEQ ID NO: 3537677 - DNA, 25 bp, Homo sapien
agcaaggtccccaagtactgaggca

SEQ ID NO: 3537678 - DNA, 25 bp, Homo sapien
tgccctcaagggtgtgtatattgta

SEQ ID NO: 3537679 - DNA, 25 bp, Homo sapien
gcgcaggtgggctggacttctacct

SEQ ID NO: 3537680 - DNA, 25 bp, Homo sapien
tagacagctcagattagcctaggcc

SEQ ID NO: 3537681 - DNA, 25 bp, Homo sapien
gttagataaggcactctgggctgtc

SEQ ID NO: 3537682 - DNA, 25 bp, Homo sapien
actgcctactgggtgggtcaactta

SEQ ID NO: 3537683 - DNA, 25 bp, Homo sapien
cacagagctggtcctgtattctcca

SEQ ID NO: 3537684 - DNA, 25 bp, Homo sapien
agtcacgggtgatggcaacgcagga

SEQ ID NO: 3537685 - DNA, 25 bp, Homo sapien
tgggtgactctgtcaggattctgcc

SEQ ID NO: 3537686 - DNA, 25 bp, Homo sapien
ttaggtgcgggtcacacagcacccc

SEQ ID NO: 3537687 - DNA, 25 bp, Homo sapien
gtccatcagcgtggttgtgactgtg

SEQ ID NO: 3537688 - DNA, 25 bp, Homo sapien
tttcccaaaggcaatctgaagggcc

SEQ ID NO: 3537689 - DNA, 25 bp, Homo sapien
gaatgccccaatgcatgaggcccta

SEQ ID NO: 3537690 - DNA, 25 bp, Homo sapien
gaattagccccatgcaatgcacgtg

SEQ ID NO: 3537691 - DNA, 25 bp, Homo sapien
gccataggttcataaacggttctcc

SEQ ID NO: 3537692 - DNA, 25 bp, Homo sapien
gcaaggtgctcagcatagtgactgg

SEQ ID NO: 3537693 - DNA, 25 bp, Homo sapien
aaggctcacgagtgagggccctttt

SEQ ID NO: 3537694 - DNA, 25 bp, Homo sapien
caaggtgctcagcatagtgactggc

SEQ ID NO: 3537695 - DNA, 25 bp, Homo sapien
ctggcacatggcgaaggctcacgag

SEQ ID NO: 3537696 - DNA, 25 bp, Homo sapien
gtcttaagtccacgcagtctgctat

SEQ ID NO: 3537697 - DNA, 25 bp, Homo sapien
tctgctatacttccttcccgcgtgt

SEQ ID NO: 3537698 - DNA, 25 bp, Homo sapien
cggaagttgtcttaagtccacgcag

SEQ ID NO: 3537699 - DNA, 25 bp, Homo sapien
agtctgctatacttccttcccgcgt

SEQ ID NO: 3537700 - DNA, 25 bp, Homo sapien
atatgagaaaggcatcccagctggg

SEQ ID NO: 3537701 - DNA, 25 bp, Homo sapien
ggcactggggacccaaatatgagaa

SEQ ID NO: 3537702 - DNA, 25 bp, Homo sapien
gcatagacccccctgtctatacagc

SEQ ID NO: 3537703 - DNA, 25 bp, Homo sapien
ggttgccaatgcatagacccccctg

SEQ ID NO: 3537704 - DNA, 25 bp, Homo sapien
gcattctttcaactcgcctttctgg

SEQ ID NO: 3537705 - DNA, 25 bp, Homo sapien
cagctccgtctcctcgcaagttgag

SEQ ID NO: 3537706 - DNA, 25 bp, Homo sapien
tatagaaattacaaccagttggagc

SEQ ID NO: 3537707 - DNA, 25 bp, Homo sapien
ttgagttgaccgaatgaaaggcacc

SEQ ID NO: 3537708 - DNA, 25 bp, Homo sapien
gcttcccttcttcttacagtccacc

SEQ ID NO: 3537709 - DNA, 25 bp, Homo sapien
agacaaaaatatggcctttgccctg

SEQ ID NO: 3537710 - DNA, 25 bp, Homo sapien
ttcccttcttcttacagtccaccaa

SEQ ID NO: 3537711 - DNA, 25 bp, Homo sapien
ttacagtccaccaacttcatcattt

SEQ ID NO: 3537712 - DNA, 25 bp, Homo sapien
ggttgaggccagagtacagaagttc

SEQ ID NO: 3537713 - DNA, 25 bp, Homo sapien
tgaaggttttggaccaggccagtgg

SEQ ID NO: 3537714 - DNA, 25 bp, Homo sapien
tgttctgtcattaggagtctgaagg

SEQ ID NO: 3537715 - DNA, 25 bp, Homo sapien
gaagttcttgaatgctgaatttgga

SEQ ID NO: 3537716 - DNA, 25 bp, Homo sapien
tcagaccacagctgtgatgatggac

SEQ ID NO: 3537717 - DNA, 25 bp, Homo sapien
cagaccacagctgtgatgatggaca

SEQ ID NO: 3537718 - DNA, 25 bp, Homo sapien
gaccacagctgtgatgatggacaga

SEQ ID NO: 3537719 - DNA, 25 bp, Homo sapien
accacagctgtgatgatggacagac

SEQ ID NO: 3537720 - DNA, 25 bp, Homo sapien
cagcataggagtgagtgacatgtac

SEQ ID NO: 3537721 - DNA, 25 bp, Homo sapien
gggtctatgcggttctcaggtgtca

SEQ ID NO: 3537722 - DNA, 25 bp, Homo sapien
taactgctgattatccatattcgta

SEQ ID NO: 3537723 - DNA, 25 bp, Homo sapien
tgttagtttggcacttgggtctatg

SEQ ID NO: 3537724 - DNA, 25 bp, Homo sapien
catattcgtataagatttgcatttc

SEQ ID NO: 3537725 - DNA, 25 bp, Homo sapien
tctggggcagtcagggccaccctgt

SEQ ID NO: 3537726 - DNA, 25 bp, Homo sapien
tgtgtttagggttggatgctcgctc

SEQ ID NO: 3537727 - DNA, 25 bp, Homo sapien
caggtttcagggatgttgccgtctc

SEQ ID NO: 3537728 - DNA, 25 bp, Homo sapien
tagacaaggccatttcacggatcct

SEQ ID NO: 3537729 - DNA, 25 bp, Homo sapien
catgcagctatctccttacaggttt

SEQ ID NO: 3537730 - DNA, 25 bp, Homo sapien
ctgtttggtttgagccttggcttca

SEQ ID NO: 3537731 - DNA, 25 bp, Homo sapien
cctgggagttcatgggctttggacc

SEQ ID NO: 3537732 - DNA, 25 bp, Homo sapien
taagcattgggtgtcttgcacaggt

SEQ ID NO: 3537733 - DNA, 25 bp, Homo sapien
tggcttcaaccttactcatgtttcc

SEQ ID NO: 3537734 - DNA, 25 bp, Homo sapien
cccgaatccggttcagttctcttat

SEQ ID NO: 3537735 - DNA, 25 bp, Homo sapien
aaatctagctttgaaatcttcatgg

SEQ ID NO: 3537736 - DNA, 25 bp, Homo sapien
gaggactgcatcattctgatcccga

SEQ ID NO: 3537737 - DNA, 25 bp, Homo sapien
aatcttcatggaggactgcatcatt

SEQ ID NO: 3537738 - DNA, 25 bp, Homo sapien
ggtattgccacaggtaagtccacaa

SEQ ID NO: 3537739 - DNA, 25 bp, Homo sapien
ggctggtattgccacaggtaagtcc

SEQ ID NO: 3537740 - DNA, 25 bp, Homo sapien
attgccacaggtaagtccacaaggc

SEQ ID NO: 3537741 - DNA, 25 bp, Homo sapien
ttgccacaggtaagtccacaaggcc

SEQ ID NO: 3537742 - DNA, 25 bp, Homo sapien
ctgcggcaggggccccggaaaggtg

SEQ ID NO: 3537743 - DNA, 25 bp, Homo sapien
ggccccggaaaggtggtctgagctg

SEQ ID NO: 3537744 - DNA, 25 bp, Homo sapien
cccggaaaggtggtctgagctgaat

SEQ ID NO: 3537745 - DNA, 25 bp, Homo sapien
gaaaggtggtctgagctgaatgcat

SEQ ID NO: 3537746 - DNA, 25 bp, Homo sapien
ggggctccggcagctcaaaggtcat

SEQ ID NO: 3537747 - DNA, 25 bp, Homo sapien
ctcccatgagaatggcttgggcagg

SEQ ID NO: 3537748 - DNA, 25 bp, Homo sapien
ccatgagaatggcttgggcaggcct

SEQ ID NO: 3537749 - DNA, 25 bp, Homo sapien
tcccatgagaatggcttgggcaggc

SEQ ID NO: 3537750 - DNA, 25 bp, Homo sapien
cctcccatgagaatggcttgggcag

SEQ ID NO: 3537751 - DNA, 25 bp, Homo sapien
ctgcaacagcttctcgggatgcaaa

SEQ ID NO: 3537752 - DNA, 25 bp, Homo sapien
gcaacagcttctcgggatgcaaact

SEQ ID NO: 3537753 - DNA, 25 bp, Homo sapien
gcttctcgggatgcaaactcctctg

SEQ ID NO: 3537754 - DNA, 25 bp, Homo sapien
acagcttctcgggatgcaaactcct

SEQ ID NO: 3537755 - DNA, 25 bp, Homo sapien
gcctcgatgggcgatcagctcgact

SEQ ID NO: 3537756 - DNA, 25 bp, Homo sapien
gatgggcgatcagctcgacttcctc

SEQ ID NO: 3537757 - DNA, 25 bp, Homo sapien
aggcccctggcctcgatgggcgatc

SEQ ID NO: 3537758 - DNA, 25 bp, Homo sapien
cctggcctcgatgggcgatcagctc

SEQ ID NO: 3537759 - DNA, 25 bp, Homo sapien
tagttcatcccaagcaagcacggct

SEQ ID NO: 3537760 - DNA, 25 bp, Homo sapien
cacacgagcattattcaggcaggag

SEQ ID NO: 3537761 - DNA, 25 bp, Homo sapien
tcagcagtaaaatcaaatgcgcgcc

SEQ ID NO: 3537762 - DNA, 25 bp, Homo sapien
caagcaagaacataaacacggaggg

SEQ ID NO: 3537763 - DNA, 25 bp, Homo sapien
tacaggtcagcggagagtggacaca

SEQ ID NO: 3537764 - DNA, 25 bp, Homo sapien
ggtaggttgcacaccatctctaagc

SEQ ID NO: 3537765 - DNA, 25 bp, Homo sapien
gctttggagtcaggccagatggctt

SEQ ID NO: 3537766 - DNA, 25 bp, Homo sapien
taagcccagttcaattacaggtcag

SEQ ID NO: 3537767 - DNA, 25 bp, Homo sapien
tcttgtaaggacctgtatgccttta

SEQ ID NO: 3537768 - DNA, 25 bp, Homo sapien
taaggacctgtatgcctttagttca

SEQ ID NO: 3537769 - DNA, 25 bp, Homo sapien
tgtatgcctttagttcaaggccagg

SEQ ID NO: 3537770 - DNA, 25 bp, Homo sapien
agattcttgtaaggacctgtatgcc

SEQ ID NO: 3537771 - DNA, 25 bp, Homo sapien
tgcctttccccagatcaccagtttg

SEQ ID NO: 3537772 - DNA, 25 bp, Homo sapien
tctgctgggctcacatgacagggtg

SEQ ID NO: 3537773 - DNA, 25 bp, Homo sapien
ttccccagatcaccagtttggctgc

SEQ ID NO: 3537774 - DNA, 25 bp, Homo sapien
ctttccccagatcaccagtttggct

SEQ ID NO: 3537775 - DNA, 25 bp, Homo sapien
agagggtggcttcactctgacccgc

SEQ ID NO: 3537776 - DNA, 25 bp, Homo sapien
agggtggcttcactctgacccgcgc

SEQ ID NO: 3537777 - DNA, 25 bp, Homo sapien
agcagagagggtggcttcactctga

SEQ ID NO: 3537778 - DNA, 25 bp, Homo sapien
gtggcttcactctgacccgcgccat

SEQ ID NO: 3537779 - DNA, 25 bp, Homo sapien
tttgattgcatttgtctgggagccc

SEQ ID NO: 3537780 - DNA, 25 bp, Homo sapien
tccgcaagcccgggccatgagatgt

SEQ ID NO: 3537781 - DNA, 25 bp, Homo sapien
ctttgaggttgtgggaggctcttcc

SEQ ID NO: 3537782 - DNA, 25 bp, Homo sapien
tcccaggagacatgtctcctttgat

SEQ ID NO: 3537783 - DNA, 25 bp, Homo sapien
ggctgtggtgacatgtgctttctgg

SEQ ID NO: 3537784 - DNA, 25 bp, Homo sapien
ggaggtcctgtggtctgtaggaggc

SEQ ID NO: 3537785 - DNA, 25 bp, Homo sapien
cctgtagaggttgggttccagcaag

SEQ ID NO: 3537786 - DNA, 25 bp, Homo sapien
gtggcgatggtgagtcttggaggtc

SEQ ID NO: 3537787 - DNA, 25 bp, Homo sapien
aggtagggaggccagtcccagccca

SEQ ID NO: 3537788 - DNA, 25 bp, Homo sapien
gattgaaggggaggtagggaggcca

SEQ ID NO: 3537789 - DNA, 25 bp, Homo sapien
gggaggtagggaggccagtcccagc

SEQ ID NO: 3537790 - DNA, 25 bp, Homo sapien
ctggattgaaggggaggtagggagg

SEQ ID NO: 3537791 - DNA, 25 bp, Homo sapien
gtctggatgagagagaaggccagga

SEQ ID NO: 3537792 - DNA, 25 bp, Homo sapien
gaggctggagatgtttcagagaccc

SEQ ID NO: 3537793 - DNA, 25 bp, Homo sapien
ctgaggctggagatgtttcagagac

SEQ ID NO: 3537794 - DNA, 25 bp, Homo sapien
ggctgaggctggagatgtttcagag

SEQ ID NO: 3537795 - DNA, 25 bp, Homo sapien
gacaagtcacctcgcctctgtctga

SEQ ID NO: 3537796 - DNA, 25 bp, Homo sapien
ggttccaatcttggcttcaccactc

SEQ ID NO: 3537797 - DNA, 25 bp, Homo sapien
tcctttgtccttccaagctggattg

SEQ ID NO: 3537798 - DNA, 25 bp, Homo sapien
cttccaagctggattgcctgggttc

SEQ ID NO: 3537799 - DNA, 25 bp, Homo sapien
ccttaggcaaatgggatgcaaaccc

SEQ ID NO: 3537800 - DNA, 25 bp, Homo sapien
gcttcagctcaatggaaactccatg

SEQ ID NO: 3537801 - DNA, 25 bp, Homo sapien
tactcaagtcatgcccaggccttgg

SEQ ID NO: 3537802 - DNA, 25 bp, Homo sapien
taagcagatgggttagaaaagcctg

SEQ ID NO: 3537803 - DNA, 25 bp, Homo sapien
gaaaatgtacgtatcaggccccaag

SEQ ID NO: 3537804 - DNA, 25 bp, Homo sapien
taacggcccagtgatagtgagacag

SEQ ID NO: 3537805 - DNA, 25 bp, Homo sapien
tgatcacagtgagtgacgccccaga

SEQ ID NO: 3537806 - DNA, 25 bp, Homo sapien
gataagaagactgccccaagttggt

SEQ ID NO: 3537807 - DNA, 25 bp, Homo sapien
gaacaagataaatccgcagcaagcc

SEQ ID NO: 3537808 - DNA, 25 bp, Homo sapien
tgtattcaacaagcacacactgagc

SEQ ID NO: 3537809 - DNA, 25 bp, Homo sapien
ccagggcacagagggattacagatg

SEQ ID NO: 3537810 - DNA, 25 bp, Homo sapien
gcagcgccacggagtgcagtttcgt

SEQ ID NO: 3537811 - DNA, 25 bp, Homo sapien
cctgctgcaaagattcaggtggacc

SEQ ID NO: 3537812 - DNA, 25 bp, Homo sapien
agggacactcggagccacagcctag

SEQ ID NO: 3537813 - DNA, 25 bp, Homo sapien
tcagtgttaccaaattcgcccttta

SEQ ID NO: 3537814 - DNA, 25 bp, Homo sapien
tttaacagcttgctctggcaacccc

SEQ ID NO: 3537815 - DNA, 25 bp, Homo sapien
caagccacccagtattttgtgagca

SEQ ID NO: 3537816 - DNA, 25 bp, Homo sapien
tcactattagaggattaggcctggc

SEQ ID NO: 3537817 - DNA, 25 bp, Homo sapien
aggtcaccccaaacggagcgtagag

SEQ ID NO: 3537818 - DNA, 25 bp, Homo sapien
tccaagctgtacgtctgtcttccag

SEQ ID NO: 3537819 - DNA, 25 bp, Homo sapien
actgcccattggcggcaccacctgt

SEQ ID NO: 3537820 - DNA, 25 bp, Homo sapien
tcagatgggggattgaggcttcggc

SEQ ID NO: 3537821 - DNA, 25 bp, Homo sapien
gcccattggcggcaccacctgtggg

SEQ ID NO: 3537822 - DNA, 25 bp, Homo sapien
cagatgggggattgaggcttcggcc

SEQ ID NO: 3537823 - DNA, 25 bp, Homo sapien
gggcatccgctgtaaccatggtggt

SEQ ID NO: 3537824 - DNA, 25 bp, Homo sapien
attctgctctgccacgtttaccaag

SEQ ID NO: 3537825 - DNA, 25 bp, Homo sapien
cacgtttaccaagcagagtctcggg

SEQ ID NO: 3537826 - DNA, 25 bp, Homo sapien
tcagggtccagcctcccattctgct

SEQ ID NO: 3537827 - DNA, 25 bp, Homo sapien
cagggcttgggctcgccacttccgg

SEQ ID NO: 3537828 - DNA, 25 bp, Homo sapien
ggctgtacctatagacaccctccag

SEQ ID NO: 3537829 - DNA, 25 bp, Homo sapien
cactctatgccaggatgggaagcga

SEQ ID NO: 3537830 - DNA, 25 bp, Homo sapien
gccagagcgggctgtacctatagac

SEQ ID NO: 3537831 - DNA, 25 bp, Homo sapien
tgctgagttggagggccacctgatc

SEQ ID NO: 3537832 - DNA, 25 bp, Homo sapien
gaggtggcctgctgaaatgtttcta

SEQ ID NO: 3537833 - DNA, 25 bp, Homo sapien
ccttggctgggctatgaaggcgcac

SEQ ID NO: 3537834 - DNA, 25 bp, Homo sapien
acaggacttctagctgggagaggac

SEQ ID NO: 3537835 - DNA, 25 bp, Homo sapien
gtcttcggccgacttggtaatagta

SEQ ID NO: 3537836 - DNA, 25 bp, Homo sapien
tgatgacgacaaaaaggaggcggct

SEQ ID NO: 3537837 - DNA, 25 bp, Homo sapien
tcggccgacttggtaatagtagtaa

SEQ ID NO: 3537838 - DNA, 25 bp, Homo sapien
aatagtagtaaatgctgatgacgac

SEQ ID NO: 3537839 - DNA, 25 bp, Homo sapien
gagtccagcaaggccacagggtcag

SEQ ID NO: 3537840 - DNA, 25 bp, Homo sapien
agtccagcaaggccacagggtcaga

SEQ ID NO: 3537841 - DNA, 25 bp, Homo sapien
tgggagagagtccagcaaggccaca

SEQ ID NO: 3537842 - DNA, 25 bp, Homo sapien
ctgtgggagagagtccagcaaggcc

SEQ ID NO: 3537843 - DNA, 25 bp, Homo sapien
tctcagccgtgtagagagcgttcca

SEQ ID NO: 3537844 - DNA, 25 bp, Homo sapien
ccaagaactggaccccgaaatagca

SEQ ID NO: 3537845 - DNA, 25 bp, Homo sapien
ccatcgaatgatgaccttctcagcc

SEQ ID NO: 3537846 - DNA, 25 bp, Homo sapien
tagagagcgttccacatgatcaggg

SEQ ID NO: 3537847 - DNA, 25 bp, Homo sapien
gcattgagactcgatctctttataa

SEQ ID NO: 3537848 - DNA, 25 bp, Homo sapien
gtcacttccccgcattgagactcga

SEQ ID NO: 3537849 - DNA, 25 bp, Homo sapien
tgcccatgtccggttctgtcaggag

SEQ ID NO: 3537850 - DNA, 25 bp, Homo sapien
ccatgtccggttctgtcaggaggat

SEQ ID NO: 3537851 - DNA, 25 bp, Homo sapien
tcttttacacggactcccagacaga

SEQ ID NO: 3537852 - DNA, 25 bp, Homo sapien
tgagcccggtaaggactcgctttaa

SEQ ID NO: 3537853 - DNA, 25 bp, Homo sapien
cagacagaaaacctgagcccggtaa

SEQ ID NO: 3537854 - DNA, 25 bp, Homo sapien
ctggtcctatgattgggttttcttt

SEQ ID NO: 3537855 - DNA, 25 bp, Homo sapien
tactttttagcagaagaccactgac

SEQ ID NO: 3537856 - DNA, 25 bp, Homo sapien
tttagcagaagaccactgacttggc

SEQ ID NO: 3537857 - DNA, 25 bp, Homo sapien
gggatgaaccatactttttagcaga

SEQ ID NO: 3537858 - DNA, 25 bp, Homo sapien
cactgacttggcctctagcaggccc

SEQ ID NO: 3537859 - DNA, 25 bp, Homo sapien
gctgtgaattcctagaggctgggcc

SEQ ID NO: 3537860 - DNA, 25 bp, Homo sapien
ccaaatcctaacgtgtgcatctcag

SEQ ID NO: 3537861 - DNA, 25 bp, Homo sapien
tccccagcagagagcttcatcagag

SEQ ID NO: 3537862 - DNA, 25 bp, Homo sapien
tgcacacacttatgagcgctccttg

SEQ ID NO: 3537863 - DNA, 25 bp, Homo sapien
aagaccgcatcatagagctggtcag

SEQ ID NO: 3537864 - DNA, 25 bp, Homo sapien
gctccatcaaagaccgcatcataga

SEQ ID NO: 3537865 - DNA, 25 bp, Homo sapien
gagggcaccgccgtagaggcggatg

SEQ ID NO: 3537866 - DNA, 25 bp, Homo sapien
catcaaagaccgcatcatagagctg

SEQ ID NO: 3537867 - DNA, 25 bp, Homo sapien
agagcacagcagagacgaactgcca

SEQ ID NO: 3537868 - DNA, 25 bp, Homo sapien
gaagagcacagcagagacgaactgc

SEQ ID NO: 3537869 - DNA, 25 bp, Homo sapien
agaagagcacagcagagacgaactg

SEQ ID NO: 3537870 - DNA, 25 bp, Homo sapien
gagaagagcacagcagagacgaact

SEQ ID NO: 3537871 - DNA, 25 bp, Homo sapien
aacttgatttcattgcctaagacct

SEQ ID NO: 3537872 - DNA, 25 bp, Homo sapien
tcccgaatggtaaacttgatttcat

SEQ ID NO: 3537873 - DNA, 25 bp, Homo sapien
aaggctcccgaatggtaaacttgat

SEQ ID NO: 3537874 - DNA, 25 bp, Homo sapien
cttgatttcattgcctaagacctgg

SEQ ID NO: 3537875 - DNA, 25 bp, Homo sapien
ttggagcgatgcacctccccgtcgt

SEQ ID NO: 3537876 - DNA, 25 bp, Homo sapien
acgccgaggatcttgcgggtcttca

SEQ ID NO: 3537877 - DNA, 25 bp, Homo sapien
gcccacgccgaggatcttgcgggtc

SEQ ID NO: 3537878 - DNA, 25 bp, Homo sapien
ccacgccgaggatcttgcgggtctt

SEQ ID NO: 3537879 - DNA, 25 bp, Homo sapien
tcaggccacagttcctacccagctt

SEQ ID NO: 3537880 - DNA, 25 bp, Homo sapien
tgaggggagacaccggcctcaggcc

SEQ ID NO: 3537881 - DNA, 25 bp, Homo sapien
gagacaccggcctcaggccacagtt

SEQ ID NO: 3537882 - DNA, 25 bp, Homo sapien
acagttcctacccagcttccagacc

SEQ ID NO: 3537883 - DNA, 25 bp, Homo sapien
ccctgtgctgggcaactgagatgca

SEQ ID NO: 3537884 - DNA, 25 bp, Homo sapien
agcccctgtgctgggcaactgagat

SEQ ID NO: 3537885 - DNA, 25 bp, Homo sapien
tgagatgcagaaagaagctgagtac

SEQ ID NO: 3537886 - DNA, 25 bp, Homo sapien
gccagcccctgtgctgggcaactga

SEQ ID NO: 3537887 - DNA, 25 bp, Homo sapien
ctgtcgcgtcctcagtcagccaaat

SEQ ID NO: 3537888 - DNA, 25 bp, Homo sapien
cagcagtgtaaacggggtgaggtga

SEQ ID NO: 3537889 - DNA, 25 bp, Homo sapien
cggggtgaggtgaagcctcagaggc

SEQ ID NO: 3537890 - DNA, 25 bp, Homo sapien
gaggagacagcagtgtaaacggggt

SEQ ID NO: 3537891 - DNA, 25 bp, Homo sapien
tcagaggctggctccggggtggccc

SEQ ID NO: 3537892 - DNA, 25 bp, Homo sapien
tattgacggccacgctgcaaatgag

SEQ ID NO: 3537893 - DNA, 25 bp, Homo sapien
catttttgagcctcctggtgtctta

SEQ ID NO: 3537894 - DNA, 25 bp, Homo sapien
ccaaggtgaataacggtcgtgccac

SEQ ID NO: 3537895 - DNA, 25 bp, Homo sapien
taaagcacccgaacaaatatcagaa

SEQ ID NO: 3537896 - DNA, 25 bp, Homo sapien
gagctgctacaaacccgcgtttctg

SEQ ID NO: 3537897 - DNA, 25 bp, Homo sapien
ggctggctcctgtcattgagcagaa

SEQ ID NO: 3537898 - DNA, 25 bp, Homo sapien
ttatccattcggtcactgaaggcca

SEQ ID NO: 3537899 - DNA, 25 bp, Homo sapien
ctgtgtgtatcaagagtccgctcct

SEQ ID NO: 3537900 - DNA, 25 bp, Homo sapien
ggccttgtgctctgagtctcggttt

SEQ ID NO: 3537901 - DNA, 25 bp, Homo sapien
tgtgtggccttgtgctctgagtctc

SEQ ID NO: 3537902 - DNA, 25 bp, Homo sapien
tgtggccttgtgctctgagtctcgg

SEQ ID NO: 3537903 - DNA, 25 bp, Homo sapien
gtggccttgtgctctgagtctcggt

SEQ ID NO: 3537904 - DNA, 25 bp, Homo sapien
ggcttgtactgtgctcctccgtgta

SEQ ID NO: 3537905 - DNA, 25 bp, Homo sapien
ggactctcacgggtctcagtgtctg

SEQ ID NO: 3537906 - DNA, 25 bp, Homo sapien
ttcacggcagtttgactccccaaga

SEQ ID NO: 3537907 - DNA, 25 bp, Homo sapien
ttcctccaggctatcttgcacacag

SEQ ID NO: 3537908 - DNA, 25 bp, Homo sapien
caggcactttgtcaacacaggtgga

SEQ ID NO: 3537909 - DNA, 25 bp, Homo sapien
ttgtcaacacaggtggaatgagcag

SEQ ID NO: 3537910 - DNA, 25 bp, Homo sapien
taagcccaaccagcacactcagaag

SEQ ID NO: 3537911 - DNA, 25 bp, Homo sapien
actcagaagcccacaggttagacgt

SEQ ID NO: 3537912 - DNA, 25 bp, Homo sapien
ccagacttgtgggcagcgggaactc

SEQ ID NO: 3537913 - DNA, 25 bp, Homo sapien
gagacccaggcctcagcgccggtgt

SEQ ID NO: 3537914 - DNA, 25 bp, Homo sapien
accccagaaggtcgggccagacttg

SEQ ID NO: 3537915 - DNA, 25 bp, Homo sapien
tgagctccgagccgttaggcggccc

SEQ ID NO: 3537916 - DNA, 25 bp, Homo sapien
actgggggaactcgcaagtttgcgc

SEQ ID NO: 3537917 - DNA, 25 bp, Homo sapien
aactcgcaagtttgcgccgcgcact

SEQ ID NO: 3537918 - DNA, 25 bp, Homo sapien
gggaactcgcaagtttgcgccgcgc

SEQ ID NO: 3537919 - DNA, 25 bp, Homo sapien
caaagactgggggaactcgcaagtt

SEQ ID NO: 3537920 - DNA, 25 bp, Homo sapien
ggcgctgggctacgtggagctgatg

SEQ ID NO: 3537921 - DNA, 25 bp, Homo sapien
tgccggcgctgggctacgtggagct

SEQ ID NO: 3537922 - DNA, 25 bp, Homo sapien
ggctacgtggagctgatgccaggcg

SEQ ID NO: 3537923 - DNA, 25 bp, Homo sapien
gctgggctacgtggagctgatgcca

SEQ ID NO: 3537924 - DNA, 25 bp, Homo sapien
gccgggccgggcagtgcagggcagg

SEQ ID NO: 3537925 - DNA, 25 bp, Homo sapien
atcgcgccgcccgtgccgggccggg

SEQ ID NO: 3537926 - DNA, 25 bp, Homo sapien
gcccgtgccgggccgggcagtgcag

SEQ ID NO: 3537927 - DNA, 25 bp, Homo sapien
cgccgcccgtgccgggccgggcagt

SEQ ID NO: 3537928 - DNA, 25 bp, Homo sapien
gcgcggcgccctgcgcggccggggc

SEQ ID NO: 3537929 - DNA, 25 bp, Homo sapien
gcgcgcggcgccctgcgcggccggg

SEQ ID NO: 3537930 - DNA, 25 bp, Homo sapien
ctggactgcgcgcggcgccctgcgc

SEQ ID NO: 3537931 - DNA, 25 bp, Homo sapien
gcggcgccctgcgcggccggggctt

SEQ ID NO: 3537932 - DNA, 25 bp, Homo sapien
ttaaatagccttgcggtgtctcccg

SEQ ID NO: 3537933 - DNA, 25 bp, Homo sapien
ggttccgcgcacaagccaatggcgc

SEQ ID NO: 3537934 - DNA, 25 bp, Homo sapien
tgggacgatcaacgtagatgggcaa

SEQ ID NO: 3537935 - DNA, 25 bp, Homo sapien
caagttctgcagacggtgccccttt

SEQ ID NO: 3537936 - DNA, 25 bp, Homo sapien
acctctgttgctacaccaggaccag

SEQ ID NO: 3537937 - DNA, 25 bp, Homo sapien
caggaccaggaaatgtcaagcagtt

SEQ ID NO: 3537938 - DNA, 25 bp, Homo sapien
gctacaccaggaccaggaaatgtca

SEQ ID NO: 3537939 - DNA, 25 bp, Homo sapien
tgttgctacaccaggaccaggaaat

SEQ ID NO: 3537940 - DNA, 25 bp, Homo sapien
atcaggccacgtgctctgggatggt

SEQ ID NO: 3537941 - DNA, 25 bp, Homo sapien
gcttcatgggaactactatcttctg

SEQ ID NO: 3537942 - DNA, 25 bp, Homo sapien
gctccaaggagcctaacacatcttc

SEQ ID NO: 3537943 - DNA, 25 bp, Homo sapien
tctgccacactgcttcatgggaact

SEQ ID NO: 3537944 - DNA, 25 bp, Homo sapien
gcaggtgcagccttcgtggtacctc

SEQ ID NO: 3537945 - DNA, 25 bp, Homo sapien
gattcgggttcctccaatgggctgc

SEQ ID NO: 3537946 - DNA, 25 bp, Homo sapien
ttcgtggtacctctctgaatggcct

SEQ ID NO: 3537947 - DNA, 25 bp, Homo sapien
tggctgatgcctcctgcatgaaatc

SEQ ID NO: 3537948 - DNA, 25 bp, Homo sapien
tgggccccaaggctccggagactca

SEQ ID NO: 3537949 - DNA, 25 bp, Homo sapien
ggccccaaggctccggagactcagg

SEQ ID NO: 3537950 - DNA, 25 bp, Homo sapien
ggctccggagactcaggtgggccat

SEQ ID NO: 3537951 - DNA, 25 bp, Homo sapien
cccaaggctccggagactcaggtgg

SEQ ID NO: 3537952 - DNA, 25 bp, Homo sapien
tcaaagtcctttgcaggtacggcac

SEQ ID NO: 3537953 - DNA, 25 bp, Homo sapien
tatgggtcacgtcactcctgggtat

SEQ ID NO: 3537954 - DNA, 25 bp, Homo sapien
tctgtacagcatcccggaaaggtgc

SEQ ID NO: 3537955 - DNA, 25 bp, Homo sapien
cagcaccgcacatgtgatggccaac

SEQ ID NO: 3537956 - DNA, 25 bp, Homo sapien
gaaatagagttgtagccgtgcacgc

SEQ ID NO: 3537957 - DNA, 25 bp, Homo sapien
tgtgcaccccagattgaggctggct

SEQ ID NO: 3537958 - DNA, 25 bp, Homo sapien
tctagggaccagaaatgagggacga

SEQ ID NO: 3537959 - DNA, 25 bp, Homo sapien
tcagatgacggcctggcagaagcat

SEQ ID NO: 3537960 - DNA, 25 bp, Homo sapien
caggtgcgtgtccactatatctggc

SEQ ID NO: 3537961 - DNA, 25 bp, Homo sapien
ctacaggtgcgtgtccactatatct

SEQ ID NO: 3537962 - DNA, 25 bp, Homo sapien
aggtgcgtgtccactatatctggct

SEQ ID NO: 3537963 - DNA, 25 bp, Homo sapien
caaccaaaattcctgctccagctga

SEQ ID NO: 3537964 - DNA, 25 bp, Homo sapien
ccagagggtaaggtccatggcaact

SEQ ID NO: 3537965 - DNA, 25 bp, Homo sapien
gagcccagggttcattgtatcagga

SEQ ID NO: 3537966 - DNA, 25 bp, Homo sapien
gctcgccaggatcctagcaaccaaa

SEQ ID NO: 3537967 - DNA, 25 bp, Homo sapien
tgacccttggtcagtagagcgcacc

SEQ ID NO: 3537968 - DNA, 25 bp, Homo sapien
taaagttcctatcgcagtccagcac

SEQ ID NO: 3537969 - DNA, 25 bp, Homo sapien
tcaggatatggaggttcccttcccc

SEQ ID NO: 3537970 - DNA, 25 bp, Homo sapien
acccagacgaatgcccaggtggaca

SEQ ID NO: 3537971 - DNA, 25 bp, Homo sapien
caaaatccaccaaggagctatccat

SEQ ID NO: 3537972 - DNA, 25 bp, Homo sapien
agcaaaggggtctgcaaaatccacc

SEQ ID NO: 3537973 - DNA, 25 bp, Homo sapien
cagtcctgactccagtccaacacag

SEQ ID NO: 3537974 - DNA, 25 bp, Homo sapien
gggtctgcaaaatccaccaaggagc

SEQ ID NO: 3537975 - DNA, 25 bp, Homo sapien
tgacatagtttgagcacctggatcc

SEQ ID NO: 3537976 - DNA, 25 bp, Homo sapien
catctcggttgggagggccatactc

SEQ ID NO: 3537977 - DNA, 25 bp, Homo sapien
gatgtcatcttggacgaaacccagg

SEQ ID NO: 3537978 - DNA, 25 bp, Homo sapien
tactgtgagtcttgtccctgaaaac

SEQ ID NO: 3537979 - DNA, 25 bp, Homo sapien
agggcttaggaccacctgtaggtga

SEQ ID NO: 3537980 - DNA, 25 bp, Homo sapien
taggtgagacaagcaggctacggaa

SEQ ID NO: 3537981 - DNA, 25 bp, Homo sapien
tattgggacacatccagggcttagg

SEQ ID NO: 3537982 - DNA, 25 bp, Homo sapien
gctacggaaagcatggagccgcctt

SEQ ID NO: 3537983 - DNA, 25 bp, Homo sapien
tctgggtgatacactcatgtttgga

SEQ ID NO: 3537984 - DNA, 25 bp, Homo sapien
catctctgggtgatacactcatgtt

SEQ ID NO: 3537985 - DNA, 25 bp, Homo sapien
gtgatacactcatgtttggaggtgc

SEQ ID NO: 3537986 - DNA, 25 bp, Homo sapien
ccacatctctgggtgatacactcat

SEQ ID NO: 3537987 - DNA, 25 bp, Homo sapien
ctgctgattggctggtgagatcacc

SEQ ID NO: 3537988 - DNA, 25 bp, Homo sapien
gctgattggctggtgagatcaccct

SEQ ID NO: 3537989 - DNA, 25 bp, Homo sapien
gattggctggtgagatcaccctgag

SEQ ID NO: 3537990 - DNA, 25 bp, Homo sapien
ggctggtgagatcaccctgagcagc

SEQ ID NO: 3537991 - DNA, 25 bp, Homo sapien
tgggcatcctcacgtgcaggtctga

SEQ ID NO: 3537992 - DNA, 25 bp, Homo sapien
gttctttttagcacagcaactgggt

SEQ ID NO: 3537993 - DNA, 25 bp, Homo sapien
actgggttctaagagtggatgtcgc

SEQ ID NO: 3537994 - DNA, 25 bp, Homo sapien
tctgcccataatgcctgaggcgccg

SEQ ID NO: 3537995 - DNA, 25 bp, Homo sapien
caggtgactatctcagggtctgatg

SEQ ID NO: 3537996 - DNA, 25 bp, Homo sapien
gataagtgccacgttagcacaccag

SEQ ID NO: 3537997 - DNA, 25 bp, Homo sapien
gggtctgatggaagctcaaagtcca

SEQ ID NO: 3537998 - DNA, 25 bp, Homo sapien
aagtccagatgctctgctcagccca

SEQ ID NO: 3537999 - DNA, 25 bp, Homo sapien
tccccatgatgcagcagcttgaggg

SEQ ID NO: 3538000 - DNA, 25 bp, Homo sapien
gtgggatccccgtgtctccccatga

SEQ ID NO: 3538001 - DNA, 25 bp, Homo sapien
tggccttggtccaattgggcccctg

SEQ ID NO: 3538002 - DNA, 25 bp, Homo sapien
gacctgctcaagtaccaggccaggt

SEQ ID NO: 3538003 - DNA, 25 bp, Homo sapien
tgatggaagatgaagatttatcttt

SEQ ID NO: 3538004 - DNA, 25 bp, Homo sapien
atgaagatttatctttcttacaatc

SEQ ID NO: 3538005 - DNA, 25 bp, Homo sapien
tgtgatggaagatgaagatttatct

SEQ ID NO: 3538006 - DNA, 25 bp, Homo sapien
agatgaagatttatctttcttacaa

SEQ ID NO: 3538007 - DNA, 25 bp, Homo sapien
cagctggcccaactgaagggtggaa

SEQ ID NO: 3538008 - DNA, 25 bp, Homo sapien
tggaatggccatgtgaacactcagt

SEQ ID NO: 3538009 - DNA, 25 bp, Homo sapien
cttgggcccgtggaaatcgctagtc

SEQ ID NO: 3538010 - DNA, 25 bp, Homo sapien
cagttaaggttctgcttgagagaca

SEQ ID NO: 3538011 - DNA, 25 bp, Homo sapien
ataaatatgctcaaggacttaaaga

SEQ ID NO: 3538012 - DNA, 25 bp, Homo sapien
tgcaatagaaccactcatgtcaaag

SEQ ID NO: 3538013 - DNA, 25 bp, Homo sapien
tgaggctctactggatttgtttatc

SEQ ID NO: 3538014 - DNA, 25 bp, Homo sapien
tagcacagggaatttaaagcagact

SEQ ID NO: 3538015 - DNA, 25 bp, Homo sapien
cccttagctaacatcttttaacata

SEQ ID NO: 3538016 - DNA, 25 bp, Homo sapien
tctaatgaaggatatctacaaaaac

SEQ ID NO: 3538017 - DNA, 25 bp, Homo sapien
aacataaactagtgaatgcttttcc

SEQ ID NO: 3538018 - DNA, 25 bp, Homo sapien
aaagcatataatcatcttgatagat

SEQ ID NO: 3538019 - DNA, 25 bp, Homo sapien
cagggaaagggcacactctgcttct

SEQ ID NO: 3538020 - DNA, 25 bp, Homo sapien
agggaaagggcacactctgcttctc

SEQ ID NO: 3538021 - DNA, 25 bp, Homo sapien
tcactgcaggacacatgtccaacac

SEQ ID NO: 3538022 - DNA, 25 bp, Homo sapien
tggaggatgggaccactcccctcct

SEQ ID NO: 3538023 - DNA, 25 bp, Homo sapien
tacgttgacgcctcgaggtctttgc

SEQ ID NO: 3538024 - DNA, 25 bp, Homo sapien
tggcaatgccatcctaccattggtg

SEQ ID NO: 3538025 - DNA, 25 bp, Homo sapien
cggttcgcgattgcccgcgaagcgt

SEQ ID NO: 3538026 - DNA, 25 bp, Homo sapien
cgtcctttgggatgcgacgaagcct

SEQ ID NO: 3538027 - DNA, 25 bp, Homo sapien
tgcgacgaagccttctccatcgcgg

SEQ ID NO: 3538028 - DNA, 25 bp, Homo sapien
gatgaaggtgggaggcgtcctttgg

SEQ ID NO: 3538029 - DNA, 25 bp, Homo sapien
aatgtcttgggcgatgctggtgaaa

SEQ ID NO: 3538030 - DNA, 25 bp, Homo sapien
tctctccggtcaaggccagcgtgct

SEQ ID NO: 3538031 - DNA, 25 bp, Homo sapien
ttagcggccaatgacctctctccgg

SEQ ID NO: 3538032 - DNA, 25 bp, Homo sapien
ggcgagtcgctgcaaagagaatacc

SEQ ID NO: 3538033 - DNA, 25 bp, Homo sapien
cagatggtacgttccccatccttac

SEQ ID NO: 3538034 - DNA, 25 bp, Homo sapien
caaaatgactggcttgtagagtaca

SEQ ID NO: 3538035 - DNA, 25 bp, Homo sapien
aggcatagctggcaaaatgactggc

SEQ ID NO: 3538036 - DNA, 25 bp, Homo sapien
ctggcttgtagagtacagatggtac

SEQ ID NO: 3538037 - DNA, 25 bp, Homo sapien
aacattgactcgaggtccctgctca

SEQ ID NO: 3538038 - DNA, 25 bp, Homo sapien
tgtagcataggatattccaggaaag

SEQ ID NO: 3538039 - DNA, 25 bp, Homo sapien
tctggatagtatatgattcagtgaa

SEQ ID NO: 3538040 - DNA, 25 bp, Homo sapien
tccctgctcatctggatagtatatg

SEQ ID NO: 3538041 - DNA, 25 bp, Homo sapien
tgccctactagagctgcaggaacgt

SEQ ID NO: 3538042 - DNA, 25 bp, Homo sapien
cagtccagagccgtgttcagggaaa

SEQ ID NO: 3538043 - DNA, 25 bp, Homo sapien
gctggccatggcagaactctcttgt

SEQ ID NO: 3538044 - DNA, 25 bp, Homo sapien
aacgtggactggtgggctgtcaaat

SEQ ID NO: 3538045 - DNA, 25 bp, Homo sapien
gacttgccatagagcgagggcctcc

SEQ ID NO: 3538046 - DNA, 25 bp, Homo sapien
gctgtacccgacttggttggtccca

SEQ ID NO: 3538047 - DNA, 25 bp, Homo sapien
aactcatgacttgccatagagcgag

SEQ ID NO: 3538048 - DNA, 25 bp, Homo sapien
tctgctgtacccgacttggttggtc

SEQ ID NO: 3538049 - DNA, 25 bp, Homo sapien
tccgctaacatcctggtggaggctg

SEQ ID NO: 3538050 - DNA, 25 bp, Homo sapien
gaatgcagcgggcaatcggatttca

SEQ ID NO: 3538051 - DNA, 25 bp, Homo sapien
cagtctgcgtggctccggacttggt

SEQ ID NO: 3538052 - DNA, 25 bp, Homo sapien
gctttgtcccgctgtccgctaacat

SEQ ID NO: 3538053 - DNA, 25 bp, Homo sapien
caggtttcccggctgtcaatgaggt

SEQ ID NO: 3538054 - DNA, 25 bp, Homo sapien
gtggctgcggatttgatctcccttg

SEQ ID NO: 3538055 - DNA, 25 bp, Homo sapien
tgtcaatgaggttcgttgtggctgc

SEQ ID NO: 3538056 - DNA, 25 bp, Homo sapien
atccttcaggcaggtttcccggctg

SEQ ID NO: 3538057 - DNA, 25 bp, Homo sapien
gtgggtggtactgctcccagctgtc

SEQ ID NO: 3538058 - DNA, 25 bp, Homo sapien
ggagtgggtggtactgctcccagct

SEQ ID NO: 3538059 - DNA, 25 bp, Homo sapien
gggaacagaggcaaattccctctcc

SEQ ID NO: 3538060 - DNA, 25 bp, Homo sapien
ttgggccctggcagttgcagttact

SEQ ID NO: 3538061 - DNA, 25 bp, Homo sapien
gaagccaccccttgatgatgtcact

SEQ ID NO: 3538062 - DNA, 25 bp, Homo sapien
tgtgtccacggaatacagctatgtc

SEQ ID NO: 3538063 - DNA, 25 bp, Homo sapien
ccagtgagagttcctcagggcagca

SEQ ID NO: 3538064 - DNA, 25 bp, Homo sapien
tcacggttttagagcctaggaagtc

SEQ ID NO: 3538065 - DNA, 25 bp, Homo sapien
tgctgagttcagagggaccaaggag

SEQ ID NO: 3538066 - DNA, 25 bp, Homo sapien
tgagttcagagggaccaaggagttg

SEQ ID NO: 3538067 - DNA, 25 bp, Homo sapien
ggccttgtaccacaatgctcagagc

SEQ ID NO: 3538068 - DNA, 25 bp, Homo sapien
tcaaaggccttgtaccacaatgctc

SEQ ID NO: 3538069 - DNA, 25 bp, Homo sapien
atgtcccgggggtcttgcctggcct

SEQ ID NO: 3538070 - DNA, 25 bp, Homo sapien
ccaactggatgaggtgagccctgct

SEQ ID NO: 3538071 - DNA, 25 bp, Homo sapien
ctctgctgatgtcccgggggtcttg

SEQ ID NO: 3538072 - DNA, 25 bp, Homo sapien
tcagacgagaccaaagccaactgga

SEQ ID NO: 3538073 - DNA, 25 bp, Homo sapien
ctagaggacggcgtgtggtcaggcc

SEQ ID NO: 3538074 - DNA, 25 bp, Homo sapien
ggctctagaggacggcgtgtggtca

SEQ ID NO: 3538075 - DNA, 25 bp, Homo sapien
tggtcaggccgttgggatgcaggga

SEQ ID NO: 3538076 - DNA, 25 bp, Homo sapien
gcagggaccgctcgggctgctcact

SEQ ID NO: 3538077 - DNA, 25 bp, Homo sapien
tctgtgctattgcttttaaggcgcc

SEQ ID NO: 3538078 - DNA, 25 bp, Homo sapien
gctttgcccatagaaccgaatctgt

SEQ ID NO: 3538079 - DNA, 25 bp, Homo sapien
tgctcagtttggaccccaagcctgt

SEQ ID NO: 3538080 - DNA, 25 bp, Homo sapien
cagtgtagtttttgcaccgaggcac

SEQ ID NO: 3538081 - DNA, 25 bp, Homo sapien
caccgtttcggacaggaggctttag

SEQ ID NO: 3538082 - DNA, 25 bp, Homo sapien
tgtccatgtgccagtgcactttagg

SEQ ID NO: 3538083 - DNA, 25 bp, Homo sapien
ccctaaaagtaagcgagaagttctg

SEQ ID NO: 3538084 - DNA, 25 bp, Homo sapien
gaagggcatgcatgcacgaaaccac

SEQ ID NO: 3538085 - DNA, 25 bp, Homo sapien
actaccggtatacctcgcaagggag

SEQ ID NO: 3538086 - DNA, 25 bp, Homo sapien
tcagtggcaggtagtgtcaatgcaa

SEQ ID NO: 3538087 - DNA, 25 bp, Homo sapien
ggtcctccttttgcaacaaggctga

SEQ ID NO: 3538088 - DNA, 25 bp, Homo sapien
caaggctgataacatgctacatggt

SEQ ID NO: 3538089 - DNA, 25 bp, Homo sapien
cctccagtacctggctcaagagaga

SEQ ID NO: 3538090 - DNA, 25 bp, Homo sapien
ggcctgaccaggcaccagatgatgg

SEQ ID NO: 3538091 - DNA, 25 bp, Homo sapien
tggactagacccacggccaggggat

SEQ ID NO: 3538092 - DNA, 25 bp, Homo sapien
gacccagaagcccatttgctcgcag

SEQ ID NO: 3538093 - DNA, 25 bp, Homo sapien
tttatagtacctgtgtgacgggacc

SEQ ID NO: 3538094 - DNA, 25 bp, Homo sapien
tctctccggaagaaccagcagtctg

SEQ ID NO: 3538095 - DNA, 25 bp, Homo sapien
tgacgggacctagaacactggatac

SEQ ID NO: 3538096 - DNA, 25 bp, Homo sapien
cccacgctgctgaaccattttcatg

SEQ ID NO: 3538097 - DNA, 25 bp, Homo sapien
gagatggaggcgcctatctgggaga

SEQ ID NO: 3538098 - DNA, 25 bp, Homo sapien
gatggaggcgcctatctgggagaaa

SEQ ID NO: 3538099 - DNA, 25 bp, Homo sapien
ctagagatggaggcgcctatctggg

SEQ ID NO: 3538100 - DNA, 25 bp, Homo sapien
caaggtaggggtcttcttctctggc

SEQ ID NO: 3538101 - DNA, 25 bp, Homo sapien
catggcagtggctcataagtgctta

SEQ ID NO: 3538102 - DNA, 25 bp, Homo sapien
ggcagtggctcataagtgcttatca

SEQ ID NO: 3538103 - DNA, 25 bp, Homo sapien
atggcagtggctcataagtgcttat

SEQ ID NO: 3538104 - DNA, 25 bp, Homo sapien
tggcagtggctcataagtgcttatc

SEQ ID NO: 3538105 - DNA, 25 bp, Homo sapien
catctaagatgttctgtggcggaac

SEQ ID NO: 3538106 - DNA, 25 bp, Homo sapien
tgctcactggcatcacacaaggtgt

SEQ ID NO: 3538107 - DNA, 25 bp, Homo sapien
acagattaatgagggcagactcccg

SEQ ID NO: 3538108 - DNA, 25 bp, Homo sapien
taatccctgctaagtgaggtcaagg

SEQ ID NO: 3538109 - DNA, 25 bp, Homo sapien
atggtactataaggcagctgcacag

SEQ ID NO: 3538110 - DNA, 25 bp, Homo sapien
ttgatggtactataaggcagctgca

SEQ ID NO: 3538111 - DNA, 25 bp, Homo sapien
tgatggtactataaggcagctgcac

SEQ ID NO: 3538112 - DNA, 25 bp, Homo sapien
gatggtactataaggcagctgcaca

SEQ ID NO: 3538113 - DNA, 25 bp, Homo sapien
gcaatgtcaacaacagaacccagga

SEQ ID NO: 3538114 - DNA, 25 bp, Homo sapien
tttttagccagagagtgcctacagg

SEQ ID NO: 3538115 - DNA, 25 bp, Homo sapien
taatgaccacaggttataaggctcc

SEQ ID NO: 3538116 - DNA, 25 bp, Homo sapien
gctcagattctcagggagaggccaa

SEQ ID NO: 3538117 - DNA, 25 bp, Homo sapien
cctgaagtgactggaacgctgagaa

SEQ ID NO: 3538118 - DNA, 25 bp, Homo sapien
gaagggaccggtctatctcagagtc

SEQ ID NO: 3538119 - DNA, 25 bp, Homo sapien
gcacaaaattcagtccaagagcagg

SEQ ID NO: 3538120 - DNA, 25 bp, Homo sapien
tgggcttcgaccaggaataccgact

SEQ ID NO: 3538121 - DNA, 25 bp, Homo sapien
ctaggagttgatccaggatactttc

SEQ ID NO: 3538122 - DNA, 25 bp, Homo sapien
aggcataggaactgtatttaataag

SEQ ID NO: 3538123 - DNA, 25 bp, Homo sapien
aacaggcataggaactgtatttaat

SEQ ID NO: 3538124 - DNA, 25 bp, Homo sapien
tataaaacaggcataggaactgtat

SEQ ID NO: 3538125 - DNA, 25 bp, Homo sapien
ctataaaacaggcataggaactgta

SEQ ID NO: 3538126 - DNA, 25 bp, Homo sapien
tgacccgcatattccatttcctgct

SEQ ID NO: 3538127 - DNA, 25 bp, Homo sapien
agtgtgacccgcatattccatttcc

SEQ ID NO: 3538128 - DNA, 25 bp, Homo sapien
cagtgtgacccgcatattccatttc

SEQ ID NO: 3538129 - DNA, 25 bp, Homo sapien
tgtgacccgcatattccatttcctg

SEQ ID NO: 3538130 - DNA, 25 bp, Homo sapien
ctaagaaacaagagtatgatgagag

SEQ ID NO: 3538131 - DNA, 25 bp, Homo sapien
gtatgatgagagagccatcccagcc

SEQ ID NO: 3538132 - DNA, 25 bp, Homo sapien
aaaggaggttgcagaggacgggtca

SEQ ID NO: 3538133 - DNA, 25 bp, Homo sapien
cgggtcagggctgtccaagaaggga

SEQ ID NO: 3538134 - DNA, 25 bp, Homo sapien
atctgccggcgagggtttttgagca

SEQ ID NO: 3538135 - DNA, 25 bp, Homo sapien
cacatggcaatctgccggcgagggt

SEQ ID NO: 3538136 - DNA, 25 bp, Homo sapien
caatctgccggcgagggtttttgag

SEQ ID NO: 3538137 - DNA, 25 bp, Homo sapien
ggtgccacatggcaatctgccggcg

SEQ ID NO: 3538138 - DNA, 25 bp, Homo sapien
acatgatcatctcgttccacacggg

SEQ ID NO: 3538139 - DNA, 25 bp, Homo sapien
tcgtcaggcagctcaaacatgatca

SEQ ID NO: 3538140 - DNA, 25 bp, Homo sapien
tcttcttcagcttccgagcctggtg

SEQ ID NO: 3538141 - DNA, 25 bp, Homo sapien
gagcctggtgcttcaaggtcacctt

SEQ ID NO: 3538142 - DNA, 25 bp, Homo sapien
ggttcttggctttaatcagcaccac

SEQ ID NO: 3538143 - DNA, 25 bp, Homo sapien
gtagctgatggatagtaggacctct

SEQ ID NO: 3538144 - DNA, 25 bp, Homo sapien
gatggatagtaggacctctccagct

SEQ ID NO: 3538145 - DNA, 25 bp, Homo sapien
aggcggttggcagccgggaggtagc

SEQ ID NO: 3538146 - DNA, 25 bp, Homo sapien
gcagatatggggaaatcatcttgag

SEQ ID NO: 3538147 - DNA, 25 bp, Homo sapien
agaagacccttctttcccacttgtg

SEQ ID NO: 3538148 - DNA, 25 bp, Homo sapien
tgtcctggcgcatgggaaacaatga

SEQ ID NO: 3538149 - DNA, 25 bp, Homo sapien
ccaagggtcccctctcttgagggct

SEQ ID NO: 3538150 - DNA, 25 bp, Homo sapien
tattggccacactcccttggacgta

SEQ ID NO: 3538151 - DNA, 25 bp, Homo sapien
tccacagagccggtcctattggcca

SEQ ID NO: 3538152 - DNA, 25 bp, Homo sapien
ttctttagggctgtctgagcctcca

SEQ ID NO: 3538153 - DNA, 25 bp, Homo sapien
gcctccgtcgtggttgctggtcaca

SEQ ID NO: 3538154 - DNA, 25 bp, Homo sapien
cttccaggcgagtcacaaacaattc

SEQ ID NO: 3538155 - DNA, 25 bp, Homo sapien
tctgccttctgacagtcatagtcca

SEQ ID NO: 3538156 - DNA, 25 bp, Homo sapien
catagtccaggcagtagtggagttt

SEQ ID NO: 3538157 - DNA, 25 bp, Homo sapien
tccaggcgagtcacaaacaattctg

SEQ ID NO: 3538158 - DNA, 25 bp, Homo sapien
ctgtgacctgcctcttgaggcgact

SEQ ID NO: 3538159 - DNA, 25 bp, Homo sapien
cctcttgaggcgactgtcattcggg

SEQ ID NO: 3538160 - DNA, 25 bp, Homo sapien
tagtctgcatagttgatgacctctg

SEQ ID NO: 3538161 - DNA, 25 bp, Homo sapien
ctcagtgaatagtctgcatagttga

SEQ ID NO: 3538162 - DNA, 25 bp, Homo sapien
ctgtccctgggacctttggctgctt

SEQ ID NO: 3538163 - DNA, 25 bp, Homo sapien
gtccctgggacctttggctgcttgc

SEQ ID NO: 3538164 - DNA, 25 bp, Homo sapien
gcttgctccccccactgtgtccaac

SEQ ID NO: 3538165 - DNA, 25 bp, Homo sapien
ccactgtgtccaaccagctgtccat

SEQ ID NO: 3538166 - DNA, 25 bp, Homo sapien
gcaacactgatttgcctgctaggcc

SEQ ID NO: 3538167 - DNA, 25 bp, Homo sapien
gcaccagggtcctctacgtcttgcc

SEQ ID NO: 3538168 - DNA, 25 bp, Homo sapien
tgaagaattgtgaagccatgtgccc

SEQ ID NO: 3538169 - DNA, 25 bp, Homo sapien
ccatgtgcccttaggcaaatccaca

SEQ ID NO: 3538170 - DNA, 25 bp, Homo sapien
gcttccagtccaggcggcgcagtgt

SEQ ID NO: 3538171 - DNA, 25 bp, Homo sapien
ttgaagaggaggcttggcttccagt

SEQ ID NO: 3538172 - DNA, 25 bp, Homo sapien
aggcttggcttccagtccaggcggc

SEQ ID NO: 3538173 - DNA, 25 bp, Homo sapien
agtccaggcggcgcagtgtttccat

SEQ ID NO: 3538174 - DNA, 25 bp, Homo sapien
gtggagcccacaggctttccagctt

SEQ ID NO: 3538175 - DNA, 25 bp, Homo sapien
tgtggagcccacaggctttccagct

SEQ ID NO: 3538176 - DNA, 25 bp, Homo sapien
aggctttccagcttggccccatcct

SEQ ID NO: 3538177 - DNA, 25 bp, Homo sapien
taatgtcatgtgaatttcacctgaa

SEQ ID NO: 3538178 - DNA, 25 bp, Homo sapien
tctatggtctacaatgccctgctca

SEQ ID NO: 3538179 - DNA, 25 bp, Homo sapien
tatcagtacgtagctcaatgcccct

SEQ ID NO: 3538180 - DNA, 25 bp, Homo sapien
tactaaatggcattgatcctacact

SEQ ID NO: 3538181 - DNA, 25 bp, Homo sapien
tcatctgggccagtggctgaatgaa

SEQ ID NO: 3538182 - DNA, 25 bp, Homo sapien
cttttctctatttacttcatctggg

SEQ ID NO: 3538183 - DNA, 25 bp, Homo sapien
tctctatttacttcatctgggccag

SEQ ID NO: 3538184 - DNA, 25 bp, Homo sapien
catctgggccagtggctgaatgaat

SEQ ID NO: 3538185 - DNA, 25 bp, Homo sapien
catgtgccgacacaggcaggtgacc

SEQ ID NO: 3538186 - DNA, 25 bp, Homo sapien
cccgcacaacgcgaggatgctggtg

SEQ ID NO: 3538187 - DNA, 25 bp, Homo sapien
ctgttgtgcagacccgagcaagctg

SEQ ID NO: 3538188 - DNA, 25 bp, Homo sapien
agcgcgatcacaggcaccgacagca

SEQ ID NO: 3538189 - DNA, 25 bp, Homo sapien
ggtgcccgctcccggcgaggggctg

SEQ ID NO: 3538190 - DNA, 25 bp, Homo sapien
gatccgggcgagccagcagctctcc

SEQ ID NO: 3538191 - DNA, 25 bp, Homo sapien
ggatccgggcgagccagcagctctc

SEQ ID NO: 3538192 - DNA, 25 bp, Homo sapien
tccaggcagctcccgggatccgggc

SEQ ID NO: 3538193 - DNA, 25 bp, Homo sapien
tcatgaaggctttgtcaaatacggc

SEQ ID NO: 3538194 - DNA, 25 bp, Homo sapien
catgaaggctttgtcaaatacggcc

SEQ ID NO: 3538195 - DNA, 25 bp, Homo sapien
atgaaggctttgtcaaatacggcca

SEQ ID NO: 3538196 - DNA, 25 bp, Homo sapien
tgaaggctttgtcaaatacggccac

SEQ ID NO: 3538197 - DNA, 25 bp, Homo sapien
ccagaatgacatctcgaagcacctg

SEQ ID NO: 3538198 - DNA, 25 bp, Homo sapien
agagttatccaacacaggatccagg

SEQ ID NO: 3538199 - DNA, 25 bp, Homo sapien
tctgccacgatgcaacctcaagaca

SEQ ID NO: 3538200 - DNA, 25 bp, Homo sapien
agcgagcctggcgtccctgttctag

SEQ ID NO: 3538201 - DNA, 25 bp, Homo sapien
tgggacatcccagccaaagggtgaa

SEQ ID NO: 3538202 - DNA, 25 bp, Homo sapien
ctgggacatcccagccaaagggtga

SEQ ID NO: 3538203 - DNA, 25 bp, Homo sapien
ggacatcccagccaaagggtgaaca

SEQ ID NO: 3538204 - DNA, 25 bp, Homo sapien
gacatcccagccaaagggtgaacat

SEQ ID NO: 3538205 - DNA, 25 bp, Homo sapien
tgccaggctctagcacaagccaaga

SEQ ID NO: 3538206 - DNA, 25 bp, Homo sapien
ccctcttgtggttccttattcctgg

SEQ ID NO: 3538207 - DNA, 25 bp, Homo sapien
tccctcttgtggttccttattcctg

SEQ ID NO: 3538208 - DNA, 25 bp, Homo sapien
ctccctcttgtggttccttattcct

SEQ ID NO: 3538209 - DNA, 25 bp, Homo sapien
tcaatcccaaacaccgaagtgaggg

SEQ ID NO: 3538210 - DNA, 25 bp, Homo sapien
ttgtaatgacaacacgcgccaccag

SEQ ID NO: 3538211 - DNA, 25 bp, Homo sapien
cagcctctcgttgatagccttgtaa

SEQ ID NO: 3538212 - DNA, 25 bp, Homo sapien
caacgtctcgcaccaggaagacggg

SEQ ID NO: 3538213 - DNA, 25 bp, Homo sapien
aggacaatgctgaacacgaccccgt

SEQ ID NO: 3538214 - DNA, 25 bp, Homo sapien
gccaggacaatgctgaacacgaccc

SEQ ID NO: 3538215 - DNA, 25 bp, Homo sapien
ctgccaggacaatgctgaacacgac

SEQ ID NO: 3538216 - DNA, 25 bp, Homo sapien
caatgctgaacacgaccccgtgcat

SEQ ID NO: 3538217 - DNA, 25 bp, Homo sapien
ctgacagagccgctcgaaggctctg

SEQ ID NO: 3538218 - DNA, 25 bp, Homo sapien
ttccactggacccagccaccaccca

SEQ ID NO: 3538219 - DNA, 25 bp, Homo sapien
tccactggacccagccaccacccac

SEQ ID NO: 3538220 - DNA, 25 bp, Homo sapien
cattccactggacccagccaccacc

SEQ ID NO: 3538221 - DNA, 25 bp, Homo sapien
ccattccactggacccagccaccac

SEQ ID NO: 3538222 - DNA, 25 bp, Homo sapien
gctgtctggtaaactttcctcctgt

SEQ ID NO: 3538223 - DNA, 25 bp, Homo sapien
ctgtctggtaaactttcctcctgtt

SEQ ID NO: 3538224 - DNA, 25 bp, Homo sapien
gctgccttgaaggaccaacccagat

SEQ ID NO: 3538225 - DNA, 25 bp, Homo sapien
caaagagacctgtttcactggaggc

SEQ ID NO: 3538226 - DNA, 25 bp, Homo sapien
gttaaccgtccacacaatgcaaggg

SEQ ID NO: 3538227 - DNA, 25 bp, Homo sapien
tttgtgttccgaccagtgcccggga

SEQ ID NO: 3538228 - DNA, 25 bp, Homo sapien
catcaataacaatgcgggtcccaat

SEQ ID NO: 3538229 - DNA, 25 bp, Homo sapien
cagggtcccttcacactgtctatca

SEQ ID NO: 3538230 - DNA, 25 bp, Homo sapien
tcccaatggagatccttgtccccag

SEQ ID NO: 3538231 - DNA, 25 bp, Homo sapien
gagtcctaaatgtccctctgtagaa

SEQ ID NO: 3538232 - DNA, 25 bp, Homo sapien
caggggacaactgaggggtcctaga

SEQ ID NO: 3538233 - DNA, 25 bp, Homo sapien
gacaactgaggggtcctagacagga

SEQ ID NO: 3538234 - DNA, 25 bp, Homo sapien
ggggacaactgaggggtcctagaca

SEQ ID NO: 3538235 - DNA, 25 bp, Homo sapien
ggacaactgaggggtcctagacagg

SEQ ID NO: 3538236 - DNA, 25 bp, Homo sapien
tcggctgccctgaaccctgcttgat

SEQ ID NO: 3538237 - DNA, 25 bp, Homo sapien
gggcaccagggaaaagcgaatcaca

SEQ ID NO: 3538238 - DNA, 25 bp, Homo sapien
ggagaatgatgtcggctgccctgaa

SEQ ID NO: 3538239 - DNA, 25 bp, Homo sapien
ggcagcacattcgtggtgaggctgg

SEQ ID NO: 3538240 - DNA, 25 bp, Homo sapien
acagaggactccgaagggcgctgcc

SEQ ID NO: 3538241 - DNA, 25 bp, Homo sapien
ggtctgccgaaaggcatggaggtgc

SEQ ID NO: 3538242 - DNA, 25 bp, Homo sapien
ggtggagaaggtctgccgaaaggca

SEQ ID NO: 3538243 - DNA, 25 bp, Homo sapien
cttgagggacacgtggacattgatg

SEQ ID NO: 3538244 - DNA, 25 bp, Homo sapien
aggattttggactttgtcccacagg

SEQ ID NO: 3538245 - DNA, 25 bp, Homo sapien
tctgataccaaaggattttggactt

SEQ ID NO: 3538246 - DNA, 25 bp, Homo sapien
gctgggaagggttctgataccaaag

SEQ ID NO: 3538247 - DNA, 25 bp, Homo sapien
gccagctgggaagggttctgatacc

SEQ ID NO: 3538248 - DNA, 25 bp, Homo sapien
accagcagttcttgaccatccgcag

SEQ ID NO: 3538249 - DNA, 25 bp, Homo sapien
gttcttgaccatccgcagtaactgg

SEQ ID NO: 3538250 - DNA, 25 bp, Homo sapien
ggcctagtcagtgcctggctgccca

SEQ ID NO: 3538251 - DNA, 25 bp, Homo sapien
tccgcagtaactggcctagtcagtg

SEQ ID NO: 3538252 - DNA, 25 bp, Homo sapien
tctcagcataccatacagagctctc

SEQ ID NO: 3538253 - DNA, 25 bp, Homo sapien
cgttcatctcagcataccatacaga

SEQ ID NO: 3538254 - DNA, 25 bp, Homo sapien
catacagagctctcatcgtccttgc

SEQ ID NO: 3538255 - DNA, 25 bp, Homo sapien
gcataccatacagagctctcatcgt

SEQ ID NO: 3538256 - DNA, 25 bp, Homo sapien
tctcagtggactaaaaaactcttaa

SEQ ID NO: 3538257 - DNA, 25 bp, Homo sapien
tttctaagatccagatcagctatgg

SEQ ID NO: 3538258 - DNA, 25 bp, Homo sapien
tgggaataggataaagtgaaggtct

SEQ ID NO: 3538259 - DNA, 25 bp, Homo sapien
cagatcagctatgggcaaattcact

SEQ ID NO: 3538260 - DNA, 25 bp, Homo sapien
tgtacctgtttgaaaggctcccgct

SEQ ID NO: 3538261 - DNA, 25 bp, Homo sapien
tttgattgaacaaacactggctggg

SEQ ID NO: 3538262 - DNA, 25 bp, Homo sapien
taattgtgtgcctgtcaacggtaca

SEQ ID NO: 3538263 - DNA, 25 bp, Homo sapien
tagagtccgcaggatgggtcacaag

SEQ ID NO: 3538264 - DNA, 25 bp, Homo sapien
caggtgaaagaatggtctggcagcc

SEQ ID NO: 3538265 - DNA, 25 bp, Homo sapien
gactagcaatgtatgtatgaggcac

SEQ ID NO: 3538266 - DNA, 25 bp, Homo sapien
ccaataagggcgctaacgggacctg

SEQ ID NO: 3538267 - DNA, 25 bp, Homo sapien
tgaggcacttatgggttagaaacac

SEQ ID NO: 3538268 - DNA, 25 bp, Homo sapien
tgcagagggtgtaaagtcctctcca

SEQ ID NO: 3538269 - DNA, 25 bp, Homo sapien
caaggctcagacctctgggggcccg

SEQ ID NO: 3538270 - DNA, 25 bp, Homo sapien
ggtactagtaatggggcaaggctca

SEQ ID NO: 3538271 - DNA, 25 bp, Homo sapien
cagagggtgtaaagtcctctccagc

SEQ ID NO: 3538272 - DNA, 25 bp, Homo sapien
atcctcaggggtccttctaccctgt

SEQ ID NO: 3538273 - DNA, 25 bp, Homo sapien
cccatcccgcttggcccagatcctc

SEQ ID NO: 3538274 - DNA, 25 bp, Homo sapien
gatcctcaggggtccttctaccctg

SEQ ID NO: 3538275 - DNA, 25 bp, Homo sapien
caaagctgttaacgagacctctttc

SEQ ID NO: 3538276 - DNA, 25 bp, Homo sapien
agctgttaacgagacctctttccag

SEQ ID NO: 3538277 - DNA, 25 bp, Homo sapien
aagctgttaacgagacctctttcca

SEQ ID NO: 3538278 - DNA, 25 bp, Homo sapien
gctgttaacgagacctctttccagg

SEQ ID NO: 3538279 - DNA, 25 bp, Homo sapien
ggttgacctgcatagggtcacctcc

SEQ ID NO: 3538280 - DNA, 25 bp, Homo sapien
tgggggttgacctgcatagggtcac

SEQ ID NO: 3538281 - DNA, 25 bp, Homo sapien
ctgggggttgacctgcatagggtca

SEQ ID NO: 3538282 - DNA, 25 bp, Homo sapien
ggggttgacctgcatagggtcacct

SEQ ID NO: 3538283 - DNA, 25 bp, Homo sapien
ttgcatggtatgcaagaaacatcaa

SEQ ID NO: 3538284 - DNA, 25 bp, Homo sapien
gcatggtatgcaagaaacatcaaga

SEQ ID NO: 3538285 - DNA, 25 bp, Homo sapien
aaacatcaagaaaaacgccctcatc

SEQ ID NO: 3538286 - DNA, 25 bp, Homo sapien
agaaaaacgccctcatcctctggtc

SEQ ID NO: 3538287 - DNA, 25 bp, Homo sapien
gtaccccatcagctggaatcaaggg

SEQ ID NO: 3538288 - DNA, 25 bp, Homo sapien
aataccccggtgtgagttacatgcc

SEQ ID NO: 3538289 - DNA, 25 bp, Homo sapien
aaactttgccgtggctgtatccttt

SEQ ID NO: 3538290 - DNA, 25 bp, Homo sapien
ctaagtcattgcagcctcgggcctg

SEQ ID NO: 3538291 - DNA, 25 bp, Homo sapien
tgtatcctttgcttagaagacccac

SEQ ID NO: 3538292 - DNA, 25 bp, Homo sapien
gggagttactctcagccttacaaac

SEQ ID NO: 3538293 - DNA, 25 bp, Homo sapien
tccccaaactccagtcatgtagaag

SEQ ID NO: 3538294 - DNA, 25 bp, Homo sapien
gctgcccgagtgctagacaactgtt

SEQ ID NO: 3538295 - DNA, 25 bp, Homo sapien
tttttgtgagccgaaatgccagcca

SEQ ID NO: 3538296 - DNA, 25 bp, Homo sapien
gaccacagactttgaagccaagctg

SEQ ID NO: 3538297 - DNA, 25 bp, Homo sapien
gaatagtccctacatatctcagagg

SEQ ID NO: 3538298 - DNA, 25 bp, Homo sapien
tgatgaagcgaggtggctaagacca

SEQ ID NO: 3538299 - DNA, 25 bp, Homo sapien
gaaaagccgtacctcttccactcag

SEQ ID NO: 3538300 - DNA, 25 bp, Homo sapien
tcacagacccagaaatggaggtgca

SEQ ID NO: 3538301 - DNA, 25 bp, Homo sapien
tcaaatacacaggagctcaaaggag

SEQ ID NO: 3538302 - DNA, 25 bp, Homo sapien
aagtcatctatcatggctggtcagg

SEQ ID NO: 3538303 - DNA, 25 bp, Homo sapien
ggacagctaccatggaagagcctta

SEQ ID NO: 3538304 - DNA, 25 bp, Homo sapien
gtgagccttgtgcccagccaggatt

SEQ ID NO: 3538305 - DNA, 25 bp, Homo sapien
agccttgtgcccagccaggattttc

SEQ ID NO: 3538306 - DNA, 25 bp, Homo sapien
aggagtgagccttgtgcccagccag

SEQ ID NO: 3538307 - DNA, 25 bp, Homo sapien
attttctttttaacctgtcaatctg

SEQ ID NO: 3538308 - DNA, 25 bp, Homo sapien
gtggctttccgatttgggcagccca

SEQ ID NO: 3538309 - DNA, 25 bp, Homo sapien
ggagtttgaacgttgtcgtatacca

SEQ ID NO: 3538310 - DNA, 25 bp, Homo sapien
cgaaagtatctttaatcaacctgga

SEQ ID NO: 3538311 - DNA, 25 bp, Homo sapien
tataccattaatgcttgtctgccca

SEQ ID NO: 3538312 - DNA, 25 bp, Homo sapien
gaagattcactcagtactggagccc

SEQ ID NO: 3538313 - DNA, 25 bp, Homo sapien
cacaagctgaattagcagggaaaga

SEQ ID NO: 3538314 - DNA, 25 bp, Homo sapien
gggagcctcttacacaggtaccaac

SEQ ID NO: 3538315 - DNA, 25 bp, Homo sapien
gcaaccttgggtactgaagattcac

SEQ ID NO: 3538316 - DNA, 25 bp, Homo sapien
taacaggcttggagatagtgagact

SEQ ID NO: 3538317 - DNA, 25 bp, Homo sapien
ggcagcacatggcacatcagatggt

SEQ ID NO: 3538318 - DNA, 25 bp, Homo sapien
ggcatagccaggcttatccatgctc

SEQ ID NO: 3538319 - DNA, 25 bp, Homo sapien
tatctcattgaccacactgatgttg

SEQ ID NO: 3538320 - DNA, 25 bp, Homo sapien
tattcttatgatcagttaatctcta

SEQ ID NO: 3538321 - DNA, 25 bp, Homo sapien
gcaggacccgcatctgattggctca

SEQ ID NO: 3538322 - DNA, 25 bp, Homo sapien
ttgggttccctaggtgagctcagaa

SEQ ID NO: 3538323 - DNA, 25 bp, Homo sapien
gacaggggacctaacacacaaggaa

SEQ ID NO: 3538324 - DNA, 25 bp, Homo sapien
ggaagcccacacgggaagatcgcct

SEQ ID NO: 3538325 - DNA, 25 bp, Homo sapien
ttgggaagcccacacgggaagatcg

SEQ ID NO: 3538326 - DNA, 25 bp, Homo sapien
tgggaagcccacacgggaagatcgc

SEQ ID NO: 3538327 - DNA, 25 bp, Homo sapien
tttgggaagcccacacgggaagatc

SEQ ID NO: 3538328 - DNA, 25 bp, Homo sapien
tggagtcccatgaggtgaaaacagc

SEQ ID NO: 3538329 - DNA, 25 bp, Homo sapien
gagtagctacagagtaaggacctag

SEQ ID NO: 3538330 - DNA, 25 bp, Homo sapien
tgtcatatacccatgtggagtccca

SEQ ID NO: 3538331 - DNA, 25 bp, Homo sapien
ggccctggcctgattgagtagctac

SEQ ID NO: 3538332 - DNA, 25 bp, Homo sapien
cacgctcgacagattcctcaatatc

SEQ ID NO: 3538333 - DNA, 25 bp, Homo sapien
ggcaaatgggggcagtcatcacaga

SEQ ID NO: 3538334 - DNA, 25 bp, Homo sapien
agattcctcaatatctccgagcctc

SEQ ID NO: 3538335 - DNA, 25 bp, Homo sapien
aatgggggcagtcatcacagatctc

SEQ ID NO: 3538336 - DNA, 25 bp, Homo sapien
cacccacactccaagctgccaacag

SEQ ID NO: 3538337 - DNA, 25 bp, Homo sapien
agccagactcagtggagacaggcca

SEQ ID NO: 3538338 - DNA, 25 bp, Homo sapien
cagcaggcaagggtagttgagataa

SEQ ID NO: 3538339 - DNA, 25 bp, Homo sapien
ggtagttgagataatgatgaggaac

SEQ ID NO: 3538340 - DNA, 25 bp, Homo sapien
ctgaagatcgtcttggtcttgacct

SEQ ID NO: 3538341 - DNA, 25 bp, Homo sapien
aatgggggcagtcatcaccgatctc

SEQ ID NO: 3538342 - DNA, 25 bp, Homo sapien
ctggcaaatgggggcagtcatcacc

SEQ ID NO: 3538343 - DNA, 25 bp, Homo sapien
cctgaagatcgtcttggtcttgacc

SEQ ID NO: 3538344 - DNA, 25 bp, Homo sapien
ttcaaagtgtgtggatgtgctctgg

SEQ ID NO: 3538345 - DNA, 25 bp, Homo sapien
tgctctgggagcagtagagaggctg

SEQ ID NO: 3538346 - DNA, 25 bp, Homo sapien
tcaaggtcagggttcaaagtgtgtg

SEQ ID NO: 3538347 - DNA, 25 bp, Homo sapien
gagcttcaaggtcagggttcaaagt

SEQ ID NO: 3538348 - DNA, 25 bp, Homo sapien
aggccaaggcagaagaatcttttga

SEQ ID NO: 3538349 - DNA, 25 bp, Homo sapien
ccaaggcagaagaatcttttgagtc

SEQ ID NO: 3538350 - DNA, 25 bp, Homo sapien
ctttcaatcctgggccaggtgtggt

SEQ ID NO: 3538351 - DNA, 25 bp, Homo sapien
ggctcatgcttgtaatcccagcact

SEQ ID NO: 3538352 - DNA, 25 bp, Homo sapien
tcctcctgtaatggctgggctgatc

SEQ ID NO: 3538353 - DNA, 25 bp, Homo sapien
ttggatcctcctgtaatggctgggc

SEQ ID NO: 3538354 - DNA, 25 bp, Homo sapien
gtcccctttggatcctcctgtaatg

SEQ ID NO: 3538355 - DNA, 25 bp, Homo sapien
cctgtaatggctgggctgatcaatg

SEQ ID NO: 3538356 - DNA, 25 bp, Homo sapien
ctgggcgaatgaggccgagggccca

SEQ ID NO: 3538357 - DNA, 25 bp, Homo sapien
gggcccagagcgccctggcctggca

SEQ ID NO: 3538358 - DNA, 25 bp, Homo sapien
ccgagggcccagagcgccctggcct

SEQ ID NO: 3538359 - DNA, 25 bp, Homo sapien
ctgctgggcgaatgaggccgagggc

SEQ ID NO: 3538360 - DNA, 25 bp, Homo sapien
cagattcaattgggcccagggagat

SEQ ID NO: 3538361 - DNA, 25 bp, Homo sapien
ttcagattcaattgggcccagggag

SEQ ID NO: 3538362 - DNA, 25 bp, Homo sapien
tcagattcaattgggcccagggaga

SEQ ID NO: 3538363 - DNA, 25 bp, Homo sapien
tttcagattcaattgggcccaggga

SEQ ID NO: 3538364 - DNA, 25 bp, Homo sapien
tgtattaatctcaatgatgctcctc

SEQ ID NO: 3538365 - DNA, 25 bp, Homo sapien
gttgggggttgtattaatctcaatg

SEQ ID NO: 3538366 - DNA, 25 bp, Homo sapien
attaatctcaatgatgctcctctcg

SEQ ID NO: 3538367 - DNA, 25 bp, Homo sapien
gggttgtattaatctcaatgatgct

SEQ ID NO: 3538368 - DNA, 25 bp, Homo sapien
agtccccgcagaccacataactgag

SEQ ID NO: 3538369 - DNA, 25 bp, Homo sapien
gttggttatcaaggagtaagaggca

SEQ ID NO: 3538370 - DNA, 25 bp, Homo sapien
gggtcagtgagtccccgcagaccac

SEQ ID NO: 3538371 - DNA, 25 bp, Homo sapien
gagaacatcagggtactgttggtta

SEQ ID NO: 3538372 - DNA, 25 bp, Homo sapien
aagaacagctcactgggaccggtga

SEQ ID NO: 3538373 - DNA, 25 bp, Homo sapien
tcaggataagggtggaatcgacccc

SEQ ID NO: 3538374 - DNA, 25 bp, Homo sapien
gaagcgcaggactccagagggaaat

SEQ ID NO: 3538375 - DNA, 25 bp, Homo sapien
ggagcaaactcctgcttaggaagcg

SEQ ID NO: 3538376 - DNA, 25 bp, Homo sapien
cttgggcagattcaagaagggagcc

SEQ ID NO: 3538377 - DNA, 25 bp, Homo sapien
tgggcagattcaagaagggagccca

SEQ ID NO: 3538378 - DNA, 25 bp, Homo sapien
tagcaagtgaaatgatccagagcat

SEQ ID NO: 3538379 - DNA, 25 bp, Homo sapien
tcttagcaagtgaaatgatccagag

SEQ ID NO: 3538380 - DNA, 25 bp, Homo sapien
atgagcaaaattacagagctggatg

SEQ ID NO: 3538381 - DNA, 25 bp, Homo sapien
agcaaaattacagagctggatggtg

SEQ ID NO: 3538382 - DNA, 25 bp, Homo sapien
gagcaaaattacagagctggatggt

SEQ ID NO: 3538383 - DNA, 25 bp, Homo sapien
tgagcaaaattacagagctggatgg

SEQ ID NO: 3538384 - DNA, 25 bp, Homo sapien
cagtgtagacaccagtaaacctgta

SEQ ID NO: 3538385 - DNA, 25 bp, Homo sapien
tcttccagttggctaggacccctgg

SEQ ID NO: 3538386 - DNA, 25 bp, Homo sapien
aacctgctagattgccacgaaggga

SEQ ID NO: 3538387 - DNA, 25 bp, Homo sapien
tagtcaaatacttccaggtctgtgg

SEQ ID NO: 3538388 - DNA, 25 bp, Homo sapien
attgcactcttttatttacagaaaa

SEQ ID NO: 3538389 - DNA, 25 bp, Homo sapien
ttatttacagaaaacacagataaag

SEQ ID NO: 3538390 - DNA, 25 bp, Homo sapien
ttttatttacagaaaacacagataa

SEQ ID NO: 3538391 - DNA, 25 bp, Homo sapien
atttacagaaaacacagataaagca

SEQ ID NO: 3538392 - DNA, 25 bp, Homo sapien
tggaccccgagatcaatcagaagct

SEQ ID NO: 3538393 - DNA, 25 bp, Homo sapien
aaatatcacagatggaccccgagat

SEQ ID NO: 3538394 - DNA, 25 bp, Homo sapien
cagaagctcataagattcatcagtc

SEQ ID NO: 3538395 - DNA, 25 bp, Homo sapien
gctcataagattcatcagtcatcac

SEQ ID NO: 3538396 - DNA, 25 bp, Homo sapien
gatggacaccattcataaattagag

SEQ ID NO: 3538397 - DNA, 25 bp, Homo sapien
tcacagtaaaaacctgcctcaccga

SEQ ID NO: 3538398 - DNA, 25 bp, Homo sapien
caaaaactagatacccgaccactca

SEQ ID NO: 3538399 - DNA, 25 bp, Homo sapien
taccttgaatagtaagacagtgcaa

SEQ ID NO: 3538400 - DNA, 25 bp, Homo sapien
tccaagacgtagtgcaaatttcaga

SEQ ID NO: 3538401 - DNA, 25 bp, Homo sapien
tcaaaagcttgagaagtcgcctcgc

SEQ ID NO: 3538402 - DNA, 25 bp, Homo sapien
tgtaaacattgtcaccgtccgcaca

SEQ ID NO: 3538403 - DNA, 25 bp, Homo sapien
tttatcaaaaccgacaccttgcgcc

SEQ ID NO: 3538404 - DNA, 25 bp, Homo sapien
tcttcatagggttccgagccaggtc

SEQ ID NO: 3538405 - DNA, 25 bp, Homo sapien
tcaaacaggtagaagacgtccaggt

SEQ ID NO: 3538406 - DNA, 25 bp, Homo sapien
tagaggtcgcagtcgtagaggctcc

SEQ ID NO: 3538407 - DNA, 25 bp, Homo sapien
tacgtgtcgcggaaggtctcgctgc

SEQ ID NO: 3538408 - DNA, 25 bp, Homo sapien
aggccagggcaaggaggaggacggc

SEQ ID NO: 3538409 - DNA, 25 bp, Homo sapien
gatggcaatggaggccagggcaagg

SEQ ID NO: 3538410 - DNA, 25 bp, Homo sapien
ctggatggcaatggaggccagggca

SEQ ID NO: 3538411 - DNA, 25 bp, Homo sapien
gaggccagggcaaggaggaggacgg

SEQ ID NO: 3538412 - DNA, 25 bp, Homo sapien
accttcatggggctgcttctccaag

SEQ ID NO: 3538413 - DNA, 25 bp, Homo sapien
caccttcatggggctgcttctccaa

SEQ ID NO: 3538414 - DNA, 25 bp, Homo sapien
gggcaccttcatggggctgcttctc

SEQ ID NO: 3538415 - DNA, 25 bp, Homo sapien
gcaccttcatggggctgcttctcca

SEQ ID NO: 3538416 - DNA, 25 bp, Homo sapien
gccagcgtctcccacccccacgagc

SEQ ID NO: 3538417 - DNA, 25 bp, Homo sapien
gcgtctcccacccccacgagctggc

SEQ ID NO: 3538418 - DNA, 25 bp, Homo sapien
ccccacgagctggcgcccagttctc

SEQ ID NO: 3538419 - DNA, 25 bp, Homo sapien
cagcgtctcccacccccacgagctg

SEQ ID NO: 3538420 - DNA, 25 bp, Homo sapien
caggccatggaggtgacataatccc

SEQ ID NO: 3538421 - DNA, 25 bp, Homo sapien
gggtctgctgagaggcaacccttcc

SEQ ID NO: 3538422 - DNA, 25 bp, Homo sapien
tcctggtctctagggacaagggtcc

SEQ ID NO: 3538423 - DNA, 25 bp, Homo sapien
gagcagagacagatgtccagggtct

SEQ ID NO: 3538424 - DNA, 25 bp, Homo sapien
ggcagtcccagccagtgcggcagcc

SEQ ID NO: 3538425 - DNA, 25 bp, Homo sapien
agctggcagtcccagccagtgcggc

SEQ ID NO: 3538426 - DNA, 25 bp, Homo sapien
caagctggggagtccacagccacca

SEQ ID NO: 3538427 - DNA, 25 bp, Homo sapien
caaagagggactgctccaagctggg

SEQ ID NO: 3538428 - DNA, 25 bp, Homo sapien
cccgagggccaggcaataagggctc

SEQ ID NO: 3538429 - DNA, 25 bp, Homo sapien
caggcaataagggctctgcctgctc

SEQ ID NO: 3538430 - DNA, 25 bp, Homo sapien
agggccaggcaataagggctctgcc

SEQ ID NO: 3538431 - DNA, 25 bp, Homo sapien
ccaggcaataagggctctgcctgct

SEQ ID NO: 3538432 - DNA, 25 bp, Homo sapien
aaaattcaacttgtgcagcgattcc

SEQ ID NO: 3538433 - DNA, 25 bp, Homo sapien
gcagcgattccccaggaagtgggtt

SEQ ID NO: 3538434 - DNA, 25 bp, Homo sapien
cagcgattccccaggaagtgggtta

SEQ ID NO: 3538435 - DNA, 25 bp, Homo sapien
aacttgtgcagcgattccccaggaa

SEQ ID NO: 3538436 - DNA, 25 bp, Homo sapien
agctggggagaaagtcttcttccaa

SEQ ID NO: 3538437 - DNA, 25 bp, Homo sapien
tcgaaagggcgcctccgggaatgca

SEQ ID NO: 3538438 - DNA, 25 bp, Homo sapien
aaccacaccgaagtgacaccagcta

SEQ ID NO: 3538439 - DNA, 25 bp, Homo sapien
tccaaccacaccgaagtgacaccag

SEQ ID NO: 3538440 - DNA, 25 bp, Homo sapien
gagccaccgcagtggctttcctgct

SEQ ID NO: 3538441 - DNA, 25 bp, Homo sapien
tagtgaccacatcctgcggtgcagc

SEQ ID NO: 3538442 - DNA, 25 bp, Homo sapien
gtgcagcctcgtagtcccgtcatcg

SEQ ID NO: 3538443 - DNA, 25 bp, Homo sapien
cgtagtcccgtcatcgctgctgtat

SEQ ID NO: 3538444 - DNA, 25 bp, Homo sapien
cagggcaagaacctgaacatcgtct

SEQ ID NO: 3538445 - DNA, 25 bp, Homo sapien
ggcagggcaagaacctgaacatcgt

SEQ ID NO: 3538446 - DNA, 25 bp, Homo sapien
atcgtctttccggacaaactcagga

SEQ ID NO: 3538447 - DNA, 25 bp, Homo sapien
gggcaagaacctgaacatcgtcttt

SEQ ID NO: 3538448 - DNA, 25 bp, Homo sapien
gtgaggtctatggaccctctctcca

SEQ ID NO: 3538449 - DNA, 25 bp, Homo sapien
tgaaacactgtgaggtctatggacc

SEQ ID NO: 3538450 - DNA, 25 bp, Homo sapien
ctcaacttgaaacactgtgaggtct

SEQ ID NO: 3538451 - DNA, 25 bp, Homo sapien
cactgtgaggtctatggaccctctc

SEQ ID NO: 3538452 - DNA, 25 bp, Homo sapien
catatggccaaccagatgagtgtct

SEQ ID NO: 3538453 - DNA, 25 bp, Homo sapien
tggcggcctagcaccatggtatgac

SEQ ID NO: 3538454 - DNA, 25 bp, Homo sapien
gctgctcatatacagtggcggccta

SEQ ID NO: 3538455 - DNA, 25 bp, Homo sapien
ggttcatatgcgagtgaggtcctca

SEQ ID NO: 3538456 - DNA, 25 bp, Homo sapien
caatcagtggtaccttcagaatgtc

SEQ ID NO: 3538457 - DNA, 25 bp, Homo sapien
tgtgtcttaaatggctaggagcagc

SEQ ID NO: 3538458 - DNA, 25 bp, Homo sapien
ttctcaggtactcaggtgaagggag

SEQ ID NO: 3538459 - DNA, 25 bp, Homo sapien
cagcataaacagagggtgaaaccca

SEQ ID NO: 3538460 - DNA, 25 bp, Homo sapien
ctagggagtccgctgccgaagagca

SEQ ID NO: 3538461 - DNA, 25 bp, Homo sapien
tcctagggagtccgctgccgaagag

SEQ ID NO: 3538462 - DNA, 25 bp, Homo sapien
cagttttaagtccaccaagaggaag

SEQ ID NO: 3538463 - DNA, 25 bp, Homo sapien
cttcctagggagtccgctgccgaag

SEQ ID NO: 3538464 - DNA, 25 bp, Homo sapien
acccctccgctcaccgccggtagct

SEQ ID NO: 3538465 - DNA, 25 bp, Homo sapien
cccctccgctcaccgccggtagctg

SEQ ID NO: 3538466 - DNA, 25 bp, Homo sapien
cttcctgcgcccaacacgccgccgt

SEQ ID NO: 3538467 - DNA, 25 bp, Homo sapien
caacacgccgccgttcctcgccgcc

SEQ ID NO: 3538468 - DNA, 25 bp, Homo sapien
cggggacgcgccgggagcagctgca

SEQ ID NO: 3538469 - DNA, 25 bp, Homo sapien
gctgcagcgcccagcgccggctcca

SEQ ID NO: 3538470 - DNA, 25 bp, Homo sapien
ctggtcggggacgcgccgggagcag

SEQ ID NO: 3538471 - DNA, 25 bp, Homo sapien
ctgcagcgcccagcgccggctccat

SEQ ID NO: 3538472 - DNA, 25 bp, Homo sapien
agtgcgttctctccggccggacgcg

SEQ ID NO: 3538473 - DNA, 25 bp, Homo sapien
gtccccgagccaagagcagcggcgg

SEQ ID NO: 3538474 - DNA, 25 bp, Homo sapien
cggctcgagcagctgagtgcgttct

SEQ ID NO: 3538475 - DNA, 25 bp, Homo sapien
gctacagctccgagcgagcggcagg

SEQ ID NO: 3538476 - DNA, 25 bp, Homo sapien
gtggtctccaccttactgtcactgc

SEQ ID NO: 3538477 - DNA, 25 bp, Homo sapien
ctccatgggtcagcaggcaaaccca

SEQ ID NO: 3538478 - DNA, 25 bp, Homo sapien
ccatgcagcccagtggtctccacct

SEQ ID NO: 3538479 - DNA, 25 bp, Homo sapien
tgggtcagcaggcaaacccagccca

SEQ ID NO: 3538480 - DNA, 25 bp, Homo sapien
tcggtggccaacttatcaggagaac

SEQ ID NO: 3538481 - DNA, 25 bp, Homo sapien
gtgtattcccattaggccctatagg

SEQ ID NO: 3538482 - DNA, 25 bp, Homo sapien
tcaggagaacgctaccaaaatcagc

SEQ ID NO: 3538483 - DNA, 25 bp, Homo sapien
ctgtgagtattcatgaaggtggccc

SEQ ID NO: 3538484 - DNA, 25 bp, Homo sapien
ctgagggacagtcataaagagtgct

SEQ ID NO: 3538485 - DNA, 25 bp, Homo sapien
ggcttccctctgacaccgtgcatgt

SEQ ID NO: 3538486 - DNA, 25 bp, Homo sapien
gaaagttcactgtagacttggtgca

SEQ ID NO: 3538487 - DNA, 25 bp, Homo sapien
ttttcacaagagtaagaaagttcac

SEQ ID NO: 3538488 - DNA, 25 bp, Homo sapien
caaacacagcaaccccaggtcttct

SEQ ID NO: 3538489 - DNA, 25 bp, Homo sapien
tccagcttccacaggatccatggtc

SEQ ID NO: 3538490 - DNA, 25 bp, Homo sapien
agatccagaatcaaacacagcaacc

SEQ ID NO: 3538491 - DNA, 25 bp, Homo sapien
ccagttctgcttccaaagatccaga

SEQ ID NO: 3538492 - DNA, 25 bp, Homo sapien
ggtgactgcccaggaattctgacca

SEQ ID NO: 3538493 - DNA, 25 bp, Homo sapien
tcggagtctctgagcatcgcagctg

SEQ ID NO: 3538494 - DNA, 25 bp, Homo sapien
cttcatcggagtctctgagcatcgc

SEQ ID NO: 3538495 - DNA, 25 bp, Homo sapien
ggcgtaaggtgactgcccaggaatt

SEQ ID NO: 3538496 - DNA, 25 bp, Homo sapien
gaccctgcttctgagtcgatgtctt

SEQ ID NO: 3538497 - DNA, 25 bp, Homo sapien
tgccaaccacaagaacagacttcag

SEQ ID NO: 3538498 - DNA, 25 bp, Homo sapien
tcaccctggccatgtgatacttcca

SEQ ID NO: 3538499 - DNA, 25 bp, Homo sapien
gaggcaaagtgaggatcaccctggc

SEQ ID NO: 3538500 - DNA, 25 bp, Homo sapien
catcctgctgggagtagttacataa

SEQ ID NO: 3538501 - DNA, 25 bp, Homo sapien
gagatcgttgtccttgtcctgccgg

SEQ ID NO: 3538502 - DNA, 25 bp, Homo sapien
gtactgcctcgagccaactgggtgt

SEQ ID NO: 3538503 - DNA, 25 bp, Homo sapien
tcaggacacatctaggctgggagat

SEQ ID NO: 3538504 - DNA, 25 bp, Homo sapien
tatatgcctaacatcacagtcgtgt

SEQ ID NO: 3538505 - DNA, 25 bp, Homo sapien
tctcatggagataaacatgggagct

SEQ ID NO: 3538506 - DNA, 25 bp, Homo sapien
tcttcacatgcctaatatatgccta

SEQ ID NO: 3538507 - DNA, 25 bp, Homo sapien
ggcatttgacactccctctcgtgca

SEQ ID NO: 3538508 - DNA, 25 bp, Homo sapien
tcttcagcatggaacacagcctcct

SEQ ID NO: 3538509 - DNA, 25 bp, Homo sapien
ggatggtacgtccaccatatgttct

SEQ ID NO: 3538510 - DNA, 25 bp, Homo sapien
aagctcccttcccagatagttagga

SEQ ID NO: 3538511 - DNA, 25 bp, Homo sapien
gataactcccatgtagccacgaagc

SEQ ID NO: 3538512 - DNA, 25 bp, Homo sapien
ttaacactctcagctgagtccccag

SEQ ID NO: 3538513 - DNA, 25 bp, Homo sapien
tacctccagtctacgtcataagaag

SEQ ID NO: 3538514 - DNA, 25 bp, Homo sapien
ggtgcccttccatgagaagcccaag

SEQ ID NO: 3538515 - DNA, 25 bp, Homo sapien
gccacgtctagggactccagttaac

SEQ ID NO: 3538516 - DNA, 25 bp, Homo sapien
tgtgaaaaggtgttggcttcacact

SEQ ID NO: 3538517 - DNA, 25 bp, Homo sapien
tggcttcacacttggatagtcctgg

SEQ ID NO: 3538518 - DNA, 25 bp, Homo sapien
gactgggcccagtattcccttgttg

SEQ ID NO: 3538519 - DNA, 25 bp, Homo sapien
tatgttctggagcattgctgtgaga

SEQ ID NO: 3538520 - DNA, 25 bp, Homo sapien
ggctttattgatcacaggtctggga

SEQ ID NO: 3538521 - DNA, 25 bp, Homo sapien
tagggcttggttgccatcgactgac

SEQ ID NO: 3538522 - DNA, 25 bp, Homo sapien
gggtaagttacagtcccctctcaga

SEQ ID NO: 3538523 - DNA, 25 bp, Homo sapien
tggcaatggcacaggtacaagagag

SEQ ID NO: 3538524 - DNA, 25 bp, Homo sapien
gcatctctgagaccaggacctctgg

SEQ ID NO: 3538525 - DNA, 25 bp, Homo sapien
cataagcctgattctggtaccctgg

SEQ ID NO: 3538526 - DNA, 25 bp, Homo sapien
gacctctggtctctcgtgggagtaa

SEQ ID NO: 3538527 - DNA, 25 bp, Homo sapien
gctgggagcctttattaggacacct

SEQ ID NO: 3538528 - DNA, 25 bp, Homo sapien
tatccacataacattgtggtcctgc

SEQ ID NO: 3538529 - DNA, 25 bp, Homo sapien
cacgctggcattatatatagtcgca

SEQ ID NO: 3538530 - DNA, 25 bp, Homo sapien
agtacgtttccaggtgtcaccagaa

SEQ ID NO: 3538531 - DNA, 25 bp, Homo sapien
tatagtcgcagtcaatatccacata

SEQ ID NO: 3538532 - DNA, 25 bp, Homo sapien
cattctgaagaggactgtgatggac

SEQ ID NO: 3538533 - DNA, 25 bp, Homo sapien
tgtgagtggctccatagcccaggtc

SEQ ID NO: 3538534 - DNA, 25 bp, Homo sapien
tgttaataaacatgccggtttcacc

SEQ ID NO: 3538535 - DNA, 25 bp, Homo sapien
caccaagttgttctcagtagggcct

SEQ ID NO: 3538536 - DNA, 25 bp, Homo sapien
ccccagagggaagctggagccctgt

SEQ ID NO: 3538537 - DNA, 25 bp, Homo sapien
ccagagggaagctggagccctgtgg

SEQ ID NO: 3538538 - DNA, 25 bp, Homo sapien
ctaagaacagtggtgcccccagagg

SEQ ID NO: 3538539 - DNA, 25 bp, Homo sapien
gcccccagagggaagctggagccct

SEQ ID NO: 3538540 - DNA, 25 bp, Homo sapien
aggactcctcggtatgctccgcaat

SEQ ID NO: 3538541 - DNA, 25 bp, Homo sapien
aacaggtcaaggtctggtctcacga

SEQ ID NO: 3538542 - DNA, 25 bp, Homo sapien
atccagagcgccaaacggaacaggt

SEQ ID NO: 3538543 - DNA, 25 bp, Homo sapien
ggtctcacgattgactttgtagact

SEQ ID NO: 3538544 - DNA, 25 bp, Homo sapien
ttggccccactgttagtccagcgag

SEQ ID NO: 3538545 - DNA, 25 bp, Homo sapien
tatcctcaatggtagaagcacaaac

SEQ ID NO: 3538546 - DNA, 25 bp, Homo sapien
ctatatcaaaatgccgtaggccggg

SEQ ID NO: 3538547 - DNA, 25 bp, Homo sapien
tcaagaggccagcagattcggactc

SEQ ID NO: 3538548 - DNA, 25 bp, Homo sapien
tcaaagtctcatttgttatcggaat

SEQ ID NO: 3538549 - DNA, 25 bp, Homo sapien
aagtctcatttgttatcggaattaa

SEQ ID NO: 3538550 - DNA, 25 bp, Homo sapien
ttcaaagtctcatttgttatcggaa

SEQ ID NO: 3538551 - DNA, 25 bp, Homo sapien
caaagtctcatttgttatcggaatt

SEQ ID NO: 3538552 - DNA, 25 bp, Homo sapien
ggaatgtggctccataccatcccaa

SEQ ID NO: 3538553 - DNA, 25 bp, Homo sapien
tgcgtaagctacttcttggccaaga

SEQ ID NO: 3538554 - DNA, 25 bp, Homo sapien
gaccatatatctccactaacgtggg

SEQ ID NO: 3538555 - DNA, 25 bp, Homo sapien
cagttgtggctatgaactctagctc

SEQ ID NO: 3538556 - DNA, 25 bp, Homo sapien
cagacacaaggctcgaggttatggc

SEQ ID NO: 3538557 - DNA, 25 bp, Homo sapien
tgaacagaacgtagtggtaggaccc

SEQ ID NO: 3538558 - DNA, 25 bp, Homo sapien
caccgggcagagatagagcgagcat

SEQ ID NO: 3538559 - DNA, 25 bp, Homo sapien
taggaccctagctgggattctggca

SEQ ID NO: 3538560 - DNA, 25 bp, Homo sapien
tccaagtagagattacacccagaac

SEQ ID NO: 3538561 - DNA, 25 bp, Homo sapien
agtccaagtagagattacacccaga

SEQ ID NO: 3538562 - DNA, 25 bp, Homo sapien
tgccaggggcagttggcaaaagtcc

SEQ ID NO: 3538563 - DNA, 25 bp, Homo sapien
aagtagagattacacccagaacacc

SEQ ID NO: 3538564 - DNA, 25 bp, Homo sapien
gagagctgcctttagagtccaactg

SEQ ID NO: 3538565 - DNA, 25 bp, Homo sapien
tcctcacgtgtatcattaagctggc

SEQ ID NO: 3538566 - DNA, 25 bp, Homo sapien
cactagaaatgtcccatcatcgtgg

SEQ ID NO: 3538567 - DNA, 25 bp, Homo sapien
tgtagctgtccatcacactgacagg

SEQ ID NO: 3538568 - DNA, 25 bp, Homo sapien
gggttttggtaagcctgagcctgaa

SEQ ID NO: 3538569 - DNA, 25 bp, Homo sapien
gagcctgaatgaagctgtcggccac

SEQ ID NO: 3538570 - DNA, 25 bp, Homo sapien
tcttgagtaagtttgtgctgtcgtc

SEQ ID NO: 3538571 - DNA, 25 bp, Homo sapien
aatcttgtgggaggcctgggaacca

SEQ ID NO: 3538572 - DNA, 25 bp, Homo sapien
tctttggagctaagataactttgct

SEQ ID NO: 3538573 - DNA, 25 bp, Homo sapien
aagagggagttgtcctttacatcca

SEQ ID NO: 3538574 - DNA, 25 bp, Homo sapien
gcttctctctaataatggctttggg

SEQ ID NO: 3538575 - DNA, 25 bp, Homo sapien
gttccctagctgaggcaggtctaca

SEQ ID NO: 3538576 - DNA, 25 bp, Homo sapien
gagtcgatgtcggatttagggcggg

SEQ ID NO: 3538577 - DNA, 25 bp, Homo sapien
gggggccgtggcttcagcaccgcgg

SEQ ID NO: 3538578 - DNA, 25 bp, Homo sapien
agggacaaagcccacaccggccacg

SEQ ID NO: 3538579 - DNA, 25 bp, Homo sapien
gcactaagcccaaccggagggacaa

SEQ ID NO: 3538580 - DNA, 25 bp, Homo sapien
gaacccgacgtccatttctccaaga

SEQ ID NO: 3538581 - DNA, 25 bp, Homo sapien
cgtgcttcggagactacagtgacga

SEQ ID NO: 3538582 - DNA, 25 bp, Homo sapien
gagagtgactctgccaccgtctatg

SEQ ID NO: 3538583 - DNA, 25 bp, Homo sapien
ctatgagtcggccatcggagaggaa

SEQ ID NO: 3538584 - DNA, 25 bp, Homo sapien
tccaggctgaagactactggtacga

SEQ ID NO: 3538585 - DNA, 25 bp, Homo sapien
aagtggatgaccctctgctagtgga

SEQ ID NO: 3538586 - DNA, 25 bp, Homo sapien
tgtgcctcgacacgaagacgaactt

SEQ ID NO: 3538587 - DNA, 25 bp, Homo sapien
tgccgaatttctcacctgtccttgc

SEQ ID NO: 3538588 - DNA, 25 bp, Homo sapien
ccaagttgggcagccagggattgtg

SEQ ID NO: 3538589 - DNA, 25 bp, Homo sapien
tttcacgatcaagcaaagtgaggcc

SEQ ID NO: 3538590 - DNA, 25 bp, Homo sapien
ctgggtggaccagttccgggtgaag

SEQ ID NO: 3538591 - DNA, 25 bp, Homo sapien
caattcacgcttgctttccagccct

SEQ ID NO: 3538592 - DNA, 25 bp, Homo sapien
agagaaggatgtccgttccaggagc

SEQ ID NO: 3538593 - DNA, 25 bp, Homo sapien
tctggcagagaaggatgtccgttcc

SEQ ID NO: 3538594 - DNA, 25 bp, Homo sapien
tggcactgcttgaggaggggcacct

SEQ ID NO: 3538595 - DNA, 25 bp, Homo sapien
tagattcatctatggagggcagagt

SEQ ID NO: 3538596 - DNA, 25 bp, Homo sapien
ccgtgtcctgccttgatgaagcctg

SEQ ID NO: 3538597 - DNA, 25 bp, Homo sapien
ctgtggcaggcctaggacctcaggc

SEQ ID NO: 3538598 - DNA, 25 bp, Homo sapien
gcaacacgtggaggtgaagtccctg

SEQ ID NO: 3538599 - DNA, 25 bp, Homo sapien
ctgtcccagcagaagagggaggctt

SEQ ID NO: 3538600 - DNA, 25 bp, Homo sapien
ccttgggtcataggtgtgcatcata

SEQ ID NO: 3538601 - DNA, 25 bp, Homo sapien
catagtaatactcggcaaggtcggg

SEQ ID NO: 3538602 - DNA, 25 bp, Homo sapien
aggtcgggcccgtcccgcttgcgct

SEQ ID NO: 3538603 - DNA, 25 bp, Homo sapien
cgctgctgggccctagacaggaggg

SEQ ID NO: 3538604 - DNA, 25 bp, Homo sapien
ctcttaggggcgtctccactgtcag

SEQ ID NO: 3538605 - DNA, 25 bp, Homo sapien
tccactgtcagggatgggtagggga

SEQ ID NO: 3538606 - DNA, 25 bp, Homo sapien
ctccactgtcagggatgggtagggg

SEQ ID NO: 3538607 - DNA, 25 bp, Homo sapien
cttaggggcgtctccactgtcaggg

SEQ ID NO: 3538608 - DNA, 25 bp, Homo sapien
aatgcctcaggaacagaccgctgag

SEQ ID NO: 3538609 - DNA, 25 bp, Homo sapien
catccaccaggccggaaagtggctg

SEQ ID NO: 3538610 - DNA, 25 bp, Homo sapien
ccggaaagtggctgcgagagttcca

SEQ ID NO: 3538611 - DNA, 25 bp, Homo sapien
tccaggggggcggaaaatgcctcag

SEQ ID NO: 3538612 - DNA, 25 bp, Homo sapien
tcagaggctgggagcgaagcagtgc

SEQ ID NO: 3538613 - DNA, 25 bp, Homo sapien
gagcgaagcagtgccactgccagga

SEQ ID NO: 3538614 - DNA, 25 bp, Homo sapien
agcagtgccactgccaggatgaggt

SEQ ID NO: 3538615 - DNA, 25 bp, Homo sapien
ctgggagcgaagcagtgccactgcc

SEQ ID NO: 3538616 - DNA, 25 bp, Homo sapien
tggacagttctaccggtttcaagcc

SEQ ID NO: 3538617 - DNA, 25 bp, Homo sapien
tggaatatttacaaacacagacccc

SEQ ID NO: 3538618 - DNA, 25 bp, Homo sapien
tgctatgttcagtttggccccgacc

SEQ ID NO: 3538619 - DNA, 25 bp, Homo sapien
tgcaggctgtctaccgaaaaactgg

SEQ ID NO: 3538620 - DNA, 25 bp, Homo sapien
tgccacttgcgtgggagccaggctc

SEQ ID NO: 3538621 - DNA, 25 bp, Homo sapien
gatgcagggcttaaagtgccacttg

SEQ ID NO: 3538622 - DNA, 25 bp, Homo sapien
tcaaccgaggatgcagggcttaaag

SEQ ID NO: 3538623 - DNA, 25 bp, Homo sapien
aagccttttactctcaaccgaggat

SEQ ID NO: 3538624 - DNA, 25 bp, Homo sapien
agggaggctggcaacgccatggcct

SEQ ID NO: 3538625 - DNA, 25 bp, Homo sapien
gaggctggcaacgccatggcctggg

SEQ ID NO: 3538626 - DNA, 25 bp, Homo sapien
gggaggctggcaacgccatggcctg

SEQ ID NO: 3538627 - DNA, 25 bp, Homo sapien
ggaggctggcaacgccatggcctgg

SEQ ID NO: 3538628 - DNA, 25 bp, Homo sapien
acgctgggcagcgttcagccatcac

SEQ ID NO: 3538629 - DNA, 25 bp, Homo sapien
gacggagggccccagccagaagaca

SEQ ID NO: 3538630 - DNA, 25 bp, Homo sapien
gttcagccatcacccgggttcaggc

SEQ ID NO: 3538631 - DNA, 25 bp, Homo sapien
agccagaagacacgctgggcagcgt

SEQ ID NO: 3538632 - DNA, 25 bp, Homo sapien
agtcaccgctttctgtgggagagga

SEQ ID NO: 3538633 - DNA, 25 bp, Homo sapien
gagcctggatcccactcctagtgaa

SEQ ID NO: 3538634 - DNA, 25 bp, Homo sapien
tgaaggcttcttggcccagcagtga

SEQ ID NO: 3538635 - DNA, 25 bp, Homo sapien
tgttcgctcctatggctgccgaggc

SEQ ID NO: 3538636 - DNA, 25 bp, Homo sapien
cagtggcatcgtcacaggagagcgc

SEQ ID NO: 3538637 - DNA, 25 bp, Homo sapien
tgcagtggcatcgtcacaggagagc

SEQ ID NO: 3538638 - DNA, 25 bp, Homo sapien
gtggcatcgtcacaggagagcgcag

SEQ ID NO: 3538639 - DNA, 25 bp, Homo sapien
ctgcagtggcatcgtcacaggagag

SEQ ID NO: 3538640 - DNA, 25 bp, Homo sapien
ggggcctggccggtaggcacggaga

SEQ ID NO: 3538641 - DNA, 25 bp, Homo sapien
gtaggcacggagaggccgcacgctg

SEQ ID NO: 3538642 - DNA, 25 bp, Homo sapien
ctggccggtaggcacggagaggccg

SEQ ID NO: 3538643 - DNA, 25 bp, Homo sapien
aggaacgctggtggcgaccagggct

SEQ ID NO: 3538644 - DNA, 25 bp, Homo sapien
tattagggaagaggggctccctgcc

SEQ ID NO: 3538645 - DNA, 25 bp, Homo sapien
cggagtcagttttattagggaagag

SEQ ID NO: 3538646 - DNA, 25 bp, Homo sapien
tgccggagtcagttttattagggaa

SEQ ID NO: 3538647 - DNA, 25 bp, Homo sapien
ttattagggaagaggggctccctgc

SEQ ID NO: 3538648 - DNA, 25 bp, Homo sapien
tcagccccaactgtagaagtagatt

SEQ ID NO: 3538649 - DNA, 25 bp, Homo sapien
caactgtagaagtagattttctgcc

SEQ ID NO: 3538650 - DNA, 25 bp, Homo sapien
agtagattttctgccaggtgggcaa

SEQ ID NO: 3538651 - DNA, 25 bp, Homo sapien
gtgggcaagtaatccatgagcggcc

SEQ ID NO: 3538652 - DNA, 25 bp, Homo sapien
ttgtgaccaggccaacgccagggac

SEQ ID NO: 3538653 - DNA, 25 bp, Homo sapien
tgaccaggccaacgccagggacgtg

SEQ ID NO: 3538654 - DNA, 25 bp, Homo sapien
gggacgtggtcggccagcaactgga

SEQ ID NO: 3538655 - DNA, 25 bp, Homo sapien
ccaggccaacgccagggacgtggtc

SEQ ID NO: 3538656 - DNA, 25 bp, Homo sapien
ccgggagccttgtctgcctcacagt

SEQ ID NO: 3538657 - DNA, 25 bp, Homo sapien
ccagcctatgccagtttttaagcta

SEQ ID NO: 3538658 - DNA, 25 bp, Homo sapien
ctattattaggtcctagacaaaggg

SEQ ID NO: 3538659 - DNA, 25 bp, Homo sapien
tgtggaagaactagtcccaagctgc

SEQ ID NO: 3538660 - DNA, 25 bp, Homo sapien
cacacagtgcttggtgaaccctgga

SEQ ID NO: 3538661 - DNA, 25 bp, Homo sapien
agtgcctctcctgccaaccaatgtt

SEQ ID NO: 3538662 - DNA, 25 bp, Homo sapien
accaatgtttaagttcctgctcaag

SEQ ID NO: 3538663 - DNA, 25 bp, Homo sapien
aagaagtggaaatgagctagaggcc

SEQ ID NO: 3538664 - DNA, 25 bp, Homo sapien
tcatagaaaggagagcgcagcaggt

SEQ ID NO: 3538665 - DNA, 25 bp, Homo sapien
cgggtcaggccctttctgtcactca

SEQ ID NO: 3538666 - DNA, 25 bp, Homo sapien
ccctttctgtcactcaggaggctca

SEQ ID NO: 3538667 - DNA, 25 bp, Homo sapien
agcagcaggatggtccggcgccgca

SEQ ID NO: 3538668 - DNA, 25 bp, Homo sapien
agggaggacatggtcagggccaggg

SEQ ID NO: 3538669 - DNA, 25 bp, Homo sapien
ggaggacatggtcagggccaggggc

SEQ ID NO: 3538670 - DNA, 25 bp, Homo sapien
gcagggaggacatggtcagggccag

SEQ ID NO: 3538671 - DNA, 25 bp, Homo sapien
cagggaggacatggtcagggccagg

SEQ ID NO: 3538672 - DNA, 25 bp, Homo sapien
ccaagagccagggtttccacgacct

SEQ ID NO: 3538673 - DNA, 25 bp, Homo sapien
ctggtcacgtccacaacaccagcca

SEQ ID NO: 3538674 - DNA, 25 bp, Homo sapien
gtcacgtccacaacaccagccaaga

SEQ ID NO: 3538675 - DNA, 25 bp, Homo sapien
aagagccagggtttccacgacctct

SEQ ID NO: 3538676 - DNA, 25 bp, Homo sapien
ccaaggcgtcaaggatgtctccagc

SEQ ID NO: 3538677 - DNA, 25 bp, Homo sapien
ggccaaggcgtcaaggatgtctcca

SEQ ID NO: 3538678 - DNA, 25 bp, Homo sapien
gacggccaaggcgtcaaggatgtct

SEQ ID NO: 3538679 - DNA, 25 bp, Homo sapien
acagtgccagccctatcctgccccg

SEQ ID NO: 3538680 - DNA, 25 bp, Homo sapien
agcagcggccgggcaatgtacaaaa

SEQ ID NO: 3538681 - DNA, 25 bp, Homo sapien
gcactcagctcctcgtgatgctgct

SEQ ID NO: 3538682 - DNA, 25 bp, Homo sapien
aactctgcgatggtctcctgcagcc

SEQ ID NO: 3538683 - DNA, 25 bp, Homo sapien
caatgtacaaaaactctgcgatggt

SEQ ID NO: 3538684 - DNA, 25 bp, Homo sapien
tcgcaccacccggtttgaccgcttc

SEQ ID NO: 3538685 - DNA, 25 bp, Homo sapien
tgttctggagggttcgcaccacccg

SEQ ID NO: 3538686 - DNA, 25 bp, Homo sapien
ttgaccgcttccccacgtaggactg

SEQ ID NO: 3538687 - DNA, 25 bp, Homo sapien
cccacgtaggactgctcatggttgc

SEQ ID NO: 3538688 - DNA, 25 bp, Homo sapien
cagcaggagcatccgcagtacagcc

SEQ ID NO: 3538689 - DNA, 25 bp, Homo sapien
tctgtccagtggaacgatagggggt

SEQ ID NO: 3538690 - DNA, 25 bp, Homo sapien
agagcagcaggagcatccgcagtac

SEQ ID NO: 3538691 - DNA, 25 bp, Homo sapien
aagtctggaggccagccttgaacca

SEQ ID NO: 3538692 - DNA, 25 bp, Homo sapien
atgaacacctccacgcactccagca

SEQ ID NO: 3538693 - DNA, 25 bp, Homo sapien
ttggccagctggacgagggcgatga

SEQ ID NO: 3538694 - DNA, 25 bp, Homo sapien
gatgacaagccagcggcccacttca

SEQ ID NO: 3538695 - DNA, 25 bp, Homo sapien
tggacgagggcgatgacaagccagc

SEQ ID NO: 3538696 - DNA, 25 bp, Homo sapien
tccttccgtaggatcccgtcattga

SEQ ID NO: 3538697 - DNA, 25 bp, Homo sapien
gaagctccttccgtaggatcccgtc

SEQ ID NO: 3538698 - DNA, 25 bp, Homo sapien
ccgtaggatcccgtcattgagcagc

SEQ ID NO: 3538699 - DNA, 25 bp, Homo sapien
tttccgaagctccttccgtaggatc

SEQ ID NO: 3538700 - DNA, 25 bp, Homo sapien
aaaacccagtgcattctttcaggac

SEQ ID NO: 3538701 - DNA, 25 bp, Homo sapien
gcagtcactgggcaaacactcttga

SEQ ID NO: 3538702 - DNA, 25 bp, Homo sapien
tacaatctgggaatcctggaatctg

SEQ ID NO: 3538703 - DNA, 25 bp, Homo sapien
cactcttgaggtagttacaatctgg

SEQ ID NO: 3538704 - DNA, 25 bp, Homo sapien
caggggccaggcagccgatccccca

SEQ ID NO: 3538705 - DNA, 25 bp, Homo sapien
gggccaggcagccgatcccccatcc

SEQ ID NO: 3538706 - DNA, 25 bp, Homo sapien
aggggccaggcagccgatcccccat

SEQ ID NO: 3538707 - DNA, 25 bp, Homo sapien
gccaggcagccgatcccccatcccc

SEQ ID NO: 3538708 - DNA, 25 bp, Homo sapien
cagctctgacagctcgtgcgaatcg

SEQ ID NO: 3538709 - DNA, 25 bp, Homo sapien
ctgacagctcgtgcgaatcggcgaa

SEQ ID NO: 3538710 - DNA, 25 bp, Homo sapien
ctctgacagctcgtgcgaatcggcg

SEQ ID NO: 3538711 - DNA, 25 bp, Homo sapien
cagctcgtgcgaatcggcgaatcga

SEQ ID NO: 3538712 - DNA, 25 bp, Homo sapien
caggtaactgaagccccgcactgct

SEQ ID NO: 3538713 - DNA, 25 bp, Homo sapien
gccgtggcggccgggtgacgagtca

SEQ ID NO: 3538714 - DNA, 25 bp, Homo sapien
ctgaagccccgcactgctgtctcca

SEQ ID NO: 3538715 - DNA, 25 bp, Homo sapien
ggcggccgggtgacgagtcacgtac

SEQ ID NO: 3538716 - DNA, 25 bp, Homo sapien
tcctggtagcggaggcccaggagcc

SEQ ID NO: 3538717 - DNA, 25 bp, Homo sapien
ggcccaggagccgcagcttctccat

SEQ ID NO: 3538718 - DNA, 25 bp, Homo sapien
cctggtagcggaggcccaggagccg

SEQ ID NO: 3538719 - DNA, 25 bp, Homo sapien
ggaggcccaggagccgcagcttctc

SEQ ID NO: 3538720 - DNA, 25 bp, Homo sapien
acagaaggaccgtacgacaggctgc

SEQ ID NO: 3538721 - DNA, 25 bp, Homo sapien
tgaggacttgaagaaccggtgaacc

SEQ ID NO: 3538722 - DNA, 25 bp, Homo sapien
caagtcattggttagcacgctctcc

SEQ ID NO: 3538723 - DNA, 25 bp, Homo sapien
gttgcttaacttccgcgggccagaa

SEQ ID NO: 3538724 - DNA, 25 bp, Homo sapien
tgcgcagttaaagctccggtaaagc

SEQ ID NO: 3538725 - DNA, 25 bp, Homo sapien
cgggcggcagtcagagcagttcatt

SEQ ID NO: 3538726 - DNA, 25 bp, Homo sapien
gaatcgatctcagctttctggccct

SEQ ID NO: 3538727 - DNA, 25 bp, Homo sapien
ggagccccgagtctttccaatggaa

SEQ ID NO: 3538728 - DNA, 25 bp, Homo sapien
acatcaaagaacgaagacccaggga

SEQ ID NO: 3538729 - DNA, 25 bp, Homo sapien
ccaagttgctatgaactgttcacag

SEQ ID NO: 3538730 - DNA, 25 bp, Homo sapien
tagagaccaggtctaagcatcacac

SEQ ID NO: 3538731 - DNA, 25 bp, Homo sapien
gcatcgtcgacatcatttctggcca

SEQ ID NO: 3538732 - DNA, 25 bp, Homo sapien
gaatcacagtacctggcgtctgtcc

SEQ ID NO: 3538733 - DNA, 25 bp, Homo sapien
aagtgcgaggtaggtgcgcgcggcc

SEQ ID NO: 3538734 - DNA, 25 bp, Homo sapien
tggggcgcacctcgaacgtgcagct

SEQ ID NO: 3538735 - DNA, 25 bp, Homo sapien
ggacatctgcgggaatcacagtacc

SEQ ID NO: 3538736 - DNA, 25 bp, Homo sapien
tgacgccgtggccagaaacatcctg

SEQ ID NO: 3538737 - DNA, 25 bp, Homo sapien
actgcacctccacttggtgactgac

SEQ ID NO: 3538738 - DNA, 25 bp, Homo sapien
gagacgctcttccacacatggatgg

SEQ ID NO: 3538739 - DNA, 25 bp, Homo sapien
gaaacatcctggagacgctcttcca

SEQ ID NO: 3538740 - DNA, 25 bp, Homo sapien
gccttgctggatgcgggcactctct

SEQ ID NO: 3538741 - DNA, 25 bp, Homo sapien
tatgaaccctacgtggtggtgccac

SEQ ID NO: 3538742 - DNA, 25 bp, Homo sapien
caatgggcggccaactatgaaccct

SEQ ID NO: 3538743 - DNA, 25 bp, Homo sapien
ctgctgcacaggtaccacgagtggc

SEQ ID NO: 3538744 - DNA, 25 bp, Homo sapien
tagcagaatctgagaagaccacggg

SEQ ID NO: 3538745 - DNA, 25 bp, Homo sapien
ccaagtggaactggagagccctgct

SEQ ID NO: 3538746 - DNA, 25 bp, Homo sapien
ggaccacgccctataagagaatgaa

SEQ ID NO: 3538747 - DNA, 25 bp, Homo sapien
cgagcgtatgtctcaggtggtcaca

SEQ ID NO: 3538748 - DNA, 25 bp, Homo sapien
taccttgatcttaatttaagtaaca

SEQ ID NO: 3538749 - DNA, 25 bp, Homo sapien
tttaagtaacactaggaagacctca

SEQ ID NO: 3538750 - DNA, 25 bp, Homo sapien
tacaatgtttcttaccttgatctta

SEQ ID NO: 3538751 - DNA, 25 bp, Homo sapien
taagtaacactaggaagacctcaat

SEQ ID NO: 3538752 - DNA, 25 bp, Homo sapien
ggataaccacggagatgcgcgactc

SEQ ID NO: 3538753 - DNA, 25 bp, Homo sapien
gctcggcaagtaaggatctgaaacc

SEQ ID NO: 3538754 - DNA, 25 bp, Homo sapien
tgcccgaacgatgacacaaggactc

SEQ ID NO: 3538755 - DNA, 25 bp, Homo sapien
tctacctaaacaaacggctcggcaa

SEQ ID NO: 3538756 - DNA, 25 bp, Homo sapien
ttacagttcgctgtgcagctctggg

SEQ ID NO: 3538757 - DNA, 25 bp, Homo sapien
gatgaggcgaatcagctgttttacc

SEQ ID NO: 3538758 - DNA, 25 bp, Homo sapien
gggagctgtgcatctccttctgccg

SEQ ID NO: 3538759 - DNA, 25 bp, Homo sapien
tggcctcagagtctacaggtttgga

SEQ ID NO: 3538760 - DNA, 25 bp, Homo sapien
ccatgagggctgaggtcacttcact

SEQ ID NO: 3538761 - DNA, 25 bp, Homo sapien
gagtgggcggctaccacctaaggaa

SEQ ID NO: 3538762 - DNA, 25 bp, Homo sapien
caacacacaggagtactaacgctta

SEQ ID NO: 3538763 - DNA, 25 bp, Homo sapien
cagcatttaggaggatcgaagcccc

SEQ ID NO: 3538764 - DNA, 25 bp, Homo sapien
ttccaatacttgtctctagaaagcc

SEQ ID NO: 3538765 - DNA, 25 bp, Homo sapien
ccaatacttgtctctagaaagcccg

SEQ ID NO: 3538766 - DNA, 25 bp, Homo sapien
caatacttgtctctagaaagcccgc

SEQ ID NO: 3538767 - DNA, 25 bp, Homo sapien
tccaatacttgtctctagaaagccc

SEQ ID NO: 3538768 - DNA, 25 bp, Homo sapien
cggatgggcccactcgctcaggtga

SEQ ID NO: 3538769 - DNA, 25 bp, Homo sapien
ggccgtacggatgggcccactcgct

SEQ ID NO: 3538770 - DNA, 25 bp, Homo sapien
ctggtcaggaaaaccgggaaatgca

SEQ ID NO: 3538771 - DNA, 25 bp, Homo sapien
aatgcaatcagcatggtgtggaaga

SEQ ID NO: 3538772 - DNA, 25 bp, Homo sapien
tactgttacgtatattggaaaggcc

SEQ ID NO: 3538773 - DNA, 25 bp, Homo sapien
actggccgcctgtacctgaggtctg

SEQ ID NO: 3538774 - DNA, 25 bp, Homo sapien
cacacactgtcaggaatacgcaggg

SEQ ID NO: 3538775 - DNA, 25 bp, Homo sapien
gttacagagcttgggtaaggcacca

SEQ ID NO: 3538776 - DNA, 25 bp, Homo sapien
gctctagttgttctcgttcttgttt

SEQ ID NO: 3538777 - DNA, 25 bp, Homo sapien
ctctagttgttctcgttcttgtttt

SEQ ID NO: 3538778 - DNA, 25 bp, Homo sapien
ctccatttaagtaacttctgtttct

SEQ ID NO: 3538779 - DNA, 25 bp, Homo sapien
gaatgaacaattgctaaagttccag

SEQ ID NO: 3538780 - DNA, 25 bp, Homo sapien
tgtaggcaatataggaatgaacaat

SEQ ID NO: 3538781 - DNA, 25 bp, Homo sapien
tttgtaggcaatataggaatgaaca

SEQ ID NO: 3538782 - DNA, 25 bp, Homo sapien
caattgctaaagttccaggccatgg

SEQ ID NO: 3538783 - DNA, 25 bp, Homo sapien
tggcagtttcgtccttgacctgaca

SEQ ID NO: 3538784 - DNA, 25 bp, Homo sapien
tcctctatgtaacagctagcagtgg

SEQ ID NO: 3538785 - DNA, 25 bp, Homo sapien
caattttagatttcgatgtccctca

SEQ ID NO: 3538786 - DNA, 25 bp, Homo sapien
tggtagcagtgttgcaaaaccctgg

SEQ ID NO: 3538787 - DNA, 25 bp, Homo sapien
tgtgtcgcacatcagtaactggcca

SEQ ID NO: 3538788 - DNA, 25 bp, Homo sapien
gggacagatccacatgcccttggga

SEQ ID NO: 3538789 - DNA, 25 bp, Homo sapien
tctgcaaacgctgcaaaaatcctca

SEQ ID NO: 3538790 - DNA, 25 bp, Homo sapien
gatatacacgggaacatgtgtcgca

SEQ ID NO: 3538791 - DNA, 25 bp, Homo sapien
aaattggaagaggagaacatagccc

SEQ ID NO: 3538792 - DNA, 25 bp, Homo sapien
tgacccagcaagtcaagccaatgtg

SEQ ID NO: 3538793 - DNA, 25 bp, Homo sapien
ggacctacaatttcactccaaggga

SEQ ID NO: 3538794 - DNA, 25 bp, Homo sapien
taaagaggtcttttccagagagtca

SEQ ID NO: 3538795 - DNA, 25 bp, Homo sapien
tcagacaatccaaacggagaggcat

SEQ ID NO: 3538796 - DNA, 25 bp, Homo sapien
gctgtgatgccctgataatgaccca

SEQ ID NO: 3538797 - DNA, 25 bp, Homo sapien
tactgagaacgaaagccacaaagcc

SEQ ID NO: 3538798 - DNA, 25 bp, Homo sapien
tccagggttagtcaagaaggtgcaa

SEQ ID NO: 3538799 - DNA, 25 bp, Homo sapien
caaaccccagcactgcattgtattt

SEQ ID NO: 3538800 - DNA, 25 bp, Homo sapien
aaccccagcactgcattgtattttg

SEQ ID NO: 3538801 - DNA, 25 bp, Homo sapien
ccccagcactgcattgtattttgga

SEQ ID NO: 3538802 - DNA, 25 bp, Homo sapien
accccagcactgcattgtattttgg

SEQ ID NO: 3538803 - DNA, 25 bp, Homo sapien
agagggggaaaatgatcttacatac

SEQ ID NO: 3538804 - DNA, 25 bp, Homo sapien
tatataccaagagaagggaacaaaa

SEQ ID NO: 3538805 - DNA, 25 bp, Homo sapien
ctatataccaagagaagggaacaaa

SEQ ID NO: 3538806 - DNA, 25 bp, Homo sapien
gagagggggaaaatgatcttacata

SEQ ID NO: 3538807 - DNA, 25 bp, Homo sapien
gagtgatcaaaagtatatgcccaac

SEQ ID NO: 3538808 - DNA, 25 bp, Homo sapien
tacagaaagtctaggtcagccactc

SEQ ID NO: 3538809 - DNA, 25 bp, Homo sapien
ccacatatctaagtcagggcccttg

SEQ ID NO: 3538810 - DNA, 25 bp, Homo sapien
gagagacctgatttgtgtaagagca

SEQ ID NO: 3538811 - DNA, 25 bp, Homo sapien
ccagggtgcattgtgctgtttaggt

SEQ ID NO: 3538812 - DNA, 25 bp, Homo sapien
ccgggtcccagggtgcattgtgctg

SEQ ID NO: 3538813 - DNA, 25 bp, Homo sapien
gctgtttaggtatgtcactgcactc

SEQ ID NO: 3538814 - DNA, 25 bp, Homo sapien
gtgctgtttaggtatgtcactgcac

SEQ ID NO: 3538815 - DNA, 25 bp, Homo sapien
ttgagggttgaaggaggaaaggtga

SEQ ID NO: 3538816 - DNA, 25 bp, Homo sapien
tgagtagtgtggttattactaatac

SEQ ID NO: 3538817 - DNA, 25 bp, Homo sapien
ctgttgagtagtgtggttattacta

SEQ ID NO: 3538818 - DNA, 25 bp, Homo sapien
tggttattactaatactggcacaag

SEQ ID NO: 3538819 - DNA, 25 bp, Homo sapien
tagtgtggttattactaatactggc

SEQ ID NO: 3538820 - DNA, 25 bp, Homo sapien
gactgctccactgtagaccggattt

SEQ ID NO: 3538821 - DNA, 25 bp, Homo sapien
tgctccactgtagaccggatttgct

SEQ ID NO: 3538822 - DNA, 25 bp, Homo sapien
tagaccggatttgctgttgttcttc

SEQ ID NO: 3538823 - DNA, 25 bp, Homo sapien
cactgtagaccggatttgctgttgt

SEQ ID NO: 3538824 - DNA, 25 bp, Homo sapien
cttctagatggtcatgtgttaccaa

SEQ ID NO: 3538825 - DNA, 25 bp, Homo sapien
tctagatggtcatgtgttaccaacc

SEQ ID NO: 3538826 - DNA, 25 bp, Homo sapien
ttctagatggtcatgtgttaccaac

SEQ ID NO: 3538827 - DNA, 25 bp, Homo sapien
cagtctgggttctcacaaagccaat

SEQ ID NO: 3538828 - DNA, 25 bp, Homo sapien
tctgggttctcacaaagccaattgc

SEQ ID NO: 3538829 - DNA, 25 bp, Homo sapien
gaagaatatgcttcagtctgggttc

SEQ ID NO: 3538830 - DNA, 25 bp, Homo sapien
tcagtctgggttctcacaaagccaa

SEQ ID NO: 3538831 - DNA, 25 bp, Homo sapien
cctttgatagggaaattttgctcaa

SEQ ID NO: 3538832 - DNA, 25 bp, Homo sapien
tcctttgatagggaaattttgctca

SEQ ID NO: 3538833 - DNA, 25 bp, Homo sapien
gatggtgcggctctctgtttgtttc

SEQ ID NO: 3538834 - DNA, 25 bp, Homo sapien
gtgatggtgcggctctctgtttgtt

SEQ ID NO: 3538835 - DNA, 25 bp, Homo sapien
tggtgcggctctctgtttgtttctc

SEQ ID NO: 3538836 - DNA, 25 bp, Homo sapien
ggtgcggctctctgtttgtttctca

SEQ ID NO: 3538837 - DNA, 25 bp, Homo sapien
cccacggttgctggaatttgcaact

SEQ ID NO: 3538838 - DNA, 25 bp, Homo sapien
aagaatccaaaaactctgcacaaac

SEQ ID NO: 3538839 - DNA, 25 bp, Homo sapien
atctcctcttcgaacccacggttgc

SEQ ID NO: 3538840 - DNA, 25 bp, Homo sapien
tcttcgaacccacggttgctggaat

SEQ ID NO: 3538841 - DNA, 25 bp, Homo sapien
tcaccaacaggtgttagccccattt

SEQ ID NO: 3538842 - DNA, 25 bp, Homo sapien
atttcatcaccaacaggtgttagcc

SEQ ID NO: 3538843 - DNA, 25 bp, Homo sapien
catcaccaacaggtgttagccccat

SEQ ID NO: 3538844 - DNA, 25 bp, Homo sapien
ttcatcaccaacaggtgttagcccc

SEQ ID NO: 3538845 - DNA, 25 bp, Homo sapien
taactgtgaacaggtgtgaacaggt

SEQ ID NO: 3538846 - DNA, 25 bp, Homo sapien
gatacgaagtaagagaatcctgaga

SEQ ID NO: 3538847 - DNA, 25 bp, Homo sapien
gagtctctgctgatcgggctcggta

SEQ ID NO: 3538848 - DNA, 25 bp, Homo sapien
gatctatgagatctcttactggcta

SEQ ID NO: 3538849 - DNA, 25 bp, Homo sapien
aatttccacatcagaaccaccaggg

SEQ ID NO: 3538850 - DNA, 25 bp, Homo sapien
tctgtgcttactgacggagggcagc

SEQ ID NO: 3538851 - DNA, 25 bp, Homo sapien
ttctgtttactacctcatctgtgct

SEQ ID NO: 3538852 - DNA, 25 bp, Homo sapien
tattgggccgaaactaacatggcgt

SEQ ID NO: 3538853 - DNA, 25 bp, Homo sapien
gcagtctgcccattgacgacacgga

SEQ ID NO: 3538854 - DNA, 25 bp, Homo sapien
cagcgagtctggtccctggagtagc

SEQ ID NO: 3538855 - DNA, 25 bp, Homo sapien
ttggtcagcatgacgggcctctgga

SEQ ID NO: 3538856 - DNA, 25 bp, Homo sapien
cctctggataagctgaggagctgcg

SEQ ID NO: 3538857 - DNA, 25 bp, Homo sapien
ggaagaaagtttggacgtggagtga

SEQ ID NO: 3538858 - DNA, 25 bp, Homo sapien
aaagtttggacgtggagtgagtcta

SEQ ID NO: 3538859 - DNA, 25 bp, Homo sapien
gataaactgtggtactttgatgggc

SEQ ID NO: 3538860 - DNA, 25 bp, Homo sapien
aactgtggtactttgatgggctgag

SEQ ID NO: 3538861 - DNA, 25 bp, Homo sapien
cacctaatggagaacatagcaggct

SEQ ID NO: 3538862 - DNA, 25 bp, Homo sapien
cctggataagcggtgaaccttcact

SEQ ID NO: 3538863 - DNA, 25 bp, Homo sapien
gaaatccagcaggagcctagaaggg

SEQ ID NO: 3538864 - DNA, 25 bp, Homo sapien
ttatcagggagttttcaccaaggca

SEQ ID NO: 3538865 - DNA, 25 bp, Homo sapien
tctgactgttgatggcggtcaccat

SEQ ID NO: 3538866 - DNA, 25 bp, Homo sapien
tttgccacaatttggacagcctctg

SEQ ID NO: 3538867 - DNA, 25 bp, Homo sapien
gaggttgactggtgtgttctgcaca

SEQ ID NO: 3538868 - DNA, 25 bp, Homo sapien
cagtgaccttactagacgtctggag

SEQ ID NO: 3538869 - DNA, 25 bp, Homo sapien
caagacgagaggtagtgtctttgtg

SEQ ID NO: 3538870 - DNA, 25 bp, Homo sapien
aatcatagaagctgtagttacagtc

SEQ ID NO: 3538871 - DNA, 25 bp, Homo sapien
cgagaggtagtgtctttgtggtaat

SEQ ID NO: 3538872 - DNA, 25 bp, Homo sapien
ttgctgctttcaagacgagaggtag

SEQ ID NO: 3538873 - DNA, 25 bp, Homo sapien
gaagggaaactcacataaggattag

SEQ ID NO: 3538874 - DNA, 25 bp, Homo sapien
tttgcactgtctgatttggcagcca

SEQ ID NO: 3538875 - DNA, 25 bp, Homo sapien
aaaggaaattaattggccaggcgca

SEQ ID NO: 3538876 - DNA, 25 bp, Homo sapien
taaggattagcatgtcgcctctgag

SEQ ID NO: 3538877 - DNA, 25 bp, Homo sapien
gagtaccttggactaaaggcaggtg

SEQ ID NO: 3538878 - DNA, 25 bp, Homo sapien
aaggtgtcaaacgacaaattattat

SEQ ID NO: 3538879 - DNA, 25 bp, Homo sapien
tggactaaaggcaggtgctaccaca

SEQ ID NO: 3538880 - DNA, 25 bp, Homo sapien
cattctcctgagtaccttggactaa

SEQ ID NO: 3538881 - DNA, 25 bp, Homo sapien
tgcctaatttccaaatagccttggg

SEQ ID NO: 3538882 - DNA, 25 bp, Homo sapien
ggctgtcctagctatctgatttaca

SEQ ID NO: 3538883 - DNA, 25 bp, Homo sapien
tacagaagagtagttgaatggacct

SEQ ID NO: 3538884 - DNA, 25 bp, Homo sapien
gatcaacctgtactttggaaagaga

SEQ ID NO: 3538885 - DNA, 25 bp, Homo sapien
actgatcctggaatagctctatgcc

SEQ ID NO: 3538886 - DNA, 25 bp, Homo sapien
tatctggtcccaagagcactgatcc

SEQ ID NO: 3538887 - DNA, 25 bp, Homo sapien
gacaggacccagttctatatgacca

SEQ ID NO: 3538888 - DNA, 25 bp, Homo sapien
ccagaagaggtcaagtcacaaactt

SEQ ID NO: 3538889 - DNA, 25 bp, Homo sapien
ctgtgaagcagtcaggttgggagag

SEQ ID NO: 3538890 - DNA, 25 bp, Homo sapien
ctgcagctgactgctgggcgtggtg

SEQ ID NO: 3538891 - DNA, 25 bp, Homo sapien
gaggctgcagctgactgctgggcgt

SEQ ID NO: 3538892 - DNA, 25 bp, Homo sapien
cagtcaggttgggagaggctgcagc

SEQ ID NO: 3538893 - DNA, 25 bp, Homo sapien
gctgtatttggaacttgtccggttg

SEQ ID NO: 3538894 - DNA, 25 bp, Homo sapien
tatcaggttcttccgtagctgttca

SEQ ID NO: 3538895 - DNA, 25 bp, Homo sapien
aatggctgtatttggaacttgtccg

SEQ ID NO: 3538896 - DNA, 25 bp, Homo sapien
tactatcaggttcttccgtagctgt

SEQ ID NO: 3538897 - DNA, 25 bp, Homo sapien
taaactttggacaaaaacagcacag

SEQ ID NO: 3538898 - DNA, 25 bp, Homo sapien
tattgcttggtgactgctagaacat

SEQ ID NO: 3538899 - DNA, 25 bp, Homo sapien
tattctgctagcactgcctctctga

SEQ ID NO: 3538900 - DNA, 25 bp, Homo sapien
taacgaactagctaacgtgcagcat

SEQ ID NO: 3538901 - DNA, 25 bp, Homo sapien
gaagagttcacagagcctctgacac

SEQ ID NO: 3538902 - DNA, 25 bp, Homo sapien
agggcttgttcaggcagaagagttc

SEQ ID NO: 3538903 - DNA, 25 bp, Homo sapien
tcaatattgtgacattcagcgatac

SEQ ID NO: 3538904 - DNA, 25 bp, Homo sapien
gtttccaagacaggtagtcacggtg

SEQ ID NO: 3538905 - DNA, 25 bp, Homo sapien
cacagtttaaactagtgttcactcc

SEQ ID NO: 3538906 - DNA, 25 bp, Homo sapien
tacactgacacctcaatactgtcga

SEQ ID NO: 3538907 - DNA, 25 bp, Homo sapien
tgcctgtctattcagcacaaccttc

SEQ ID NO: 3538908 - DNA, 25 bp, Homo sapien
cactcctgatgctgtacattccatg

SEQ ID NO: 3538909 - DNA, 25 bp, Homo sapien
tgagataagcccacattgatataac

SEQ ID NO: 3538910 - DNA, 25 bp, Homo sapien
ggtccattgacagcacactagatat

SEQ ID NO: 3538911 - DNA, 25 bp, Homo sapien
tgtacttagccaatgcacctgtaga

SEQ ID NO: 3538912 - DNA, 25 bp, Homo sapien
tctattccgataaagtattgccatg

SEQ ID NO: 3538913 - DNA, 25 bp, Homo sapien
gaaaatacagagcagagttccacac

SEQ ID NO: 3538914 - DNA, 25 bp, Homo sapien
tgaaagctactccatgggtcaaagg

SEQ ID NO: 3538915 - DNA, 25 bp, Homo sapien
gacccagatttgcttcagtagagaa

SEQ ID NO: 3538916 - DNA, 25 bp, Homo sapien
catatccgggacactatggaccaca

SEQ ID NO: 3538917 - DNA, 25 bp, Homo sapien
cataatccctagtcctgagctgttc

SEQ ID NO: 3538918 - DNA, 25 bp, Homo sapien
ccctaaagcaaaatagtggatgtcc

SEQ ID NO: 3538919 - DNA, 25 bp, Homo sapien
gggacccatgataaaccacttctac

SEQ ID NO: 3538920 - DNA, 25 bp, Homo sapien
tgagctgttcattactaccggaaag

SEQ ID NO: 3538921 - DNA, 25 bp, Homo sapien
actaagtgggaatgaaccaggtcca

SEQ ID NO: 3538922 - DNA, 25 bp, Homo sapien
cagccctaagatgtggccaatccag

SEQ ID NO: 3538923 - DNA, 25 bp, Homo sapien
ggtaagcatgtacaccacgccaaaa

SEQ ID NO: 3538924 - DNA, 25 bp, Homo sapien
taccatacccctgaacaagttctgg

SEQ ID NO: 3538925 - DNA, 25 bp, Homo sapien
gcccaaaaggtagttactattctga

SEQ ID NO: 3538926 - DNA, 25 bp, Homo sapien
taagagcctctctctaattgcatcc

SEQ ID NO: 3538927 - DNA, 25 bp, Homo sapien
aaacaggctagttttggtacctctg

SEQ ID NO: 3538928 - DNA, 25 bp, Homo sapien
ttggtacctctgaatccctaagagc

SEQ ID NO: 3538929 - DNA, 25 bp, Homo sapien
agctcatgacaggtctcccagtggc

SEQ ID NO: 3538930 - DNA, 25 bp, Homo sapien
ggctatctatggctgtgctactcgc

SEQ ID NO: 3538931 - DNA, 25 bp, Homo sapien
tacggtgactatccagctcatgaca

SEQ ID NO: 3538932 - DNA, 25 bp, Homo sapien
cttccacactccaagataaaaagaa

SEQ ID NO: 3538933 - DNA, 25 bp, Homo sapien
tagcccaccaccacagtttcaaata

SEQ ID NO: 3538934 - DNA, 25 bp, Homo sapien
acagtttcaaatacagaagcggaaa

SEQ ID NO: 3538935 - DNA, 25 bp, Homo sapien
tcaaatacagaagcggaaatagtca

SEQ ID NO: 3538936 - DNA, 25 bp, Homo sapien
atagcccaccaccacagtttcaaat

SEQ ID NO: 3538937 - DNA, 25 bp, Homo sapien
atacacacaaatgctttttagaata

SEQ ID NO: 3538938 - DNA, 25 bp, Homo sapien
actgaattttctcaatacacacaaa

SEQ ID NO: 3538939 - DNA, 25 bp, Homo sapien
tttgtaactgaattttctcaataca

SEQ ID NO: 3538940 - DNA, 25 bp, Homo sapien
gtaactgaattttctcaatacacac

SEQ ID NO: 3538941 - DNA, 25 bp, Homo sapien
gtacaggtcctacccaatttgttgc

SEQ ID NO: 3538942 - DNA, 25 bp, Homo sapien
ttatagccaggccaaaataacctgc

SEQ ID NO: 3538943 - DNA, 25 bp, Homo sapien
gcatactccatacatgaagacccag

SEQ ID NO: 3538944 - DNA, 25 bp, Homo sapien
ggcactgtgcgtacttctttcgagc

SEQ ID NO: 3538945 - DNA, 25 bp, Homo sapien
taagaggccattaggtcacgagggc

SEQ ID NO: 3538946 - DNA, 25 bp, Homo sapien
cagggacacgttataagactggact

SEQ ID NO: 3538947 - DNA, 25 bp, Homo sapien
taaaccagaagatcctagaagcagc

SEQ ID NO: 3538948 - DNA, 25 bp, Homo sapien
taaactgggagctagaatttgacgg

SEQ ID NO: 3538949 - DNA, 25 bp, Homo sapien
agcctccagagttgtaagcaatgaa

SEQ ID NO: 3538950 - DNA, 25 bp, Homo sapien
atgccttgaacgtggacatcccagc

SEQ ID NO: 3538951 - DNA, 25 bp, Homo sapien
ctgctgatgccttgaacgtggacat

SEQ ID NO: 3538952 - DNA, 25 bp, Homo sapien
gcctccagagttgtaagcaatgaat

SEQ ID NO: 3538953 - DNA, 25 bp, Homo sapien
tctggataaagaaaccgagacaaaa

SEQ ID NO: 3538954 - DNA, 25 bp, Homo sapien
tgcccaagagataggaaatattcct

SEQ ID NO: 3538955 - DNA, 25 bp, Homo sapien
tagttaggaagcattattatctcca

SEQ ID NO: 3538956 - DNA, 25 bp, Homo sapien
aaggtgaatgacttttctagtcaca

SEQ ID NO: 3538957 - DNA, 25 bp, Homo sapien
tccagggaggtgcatattctaaaca

SEQ ID NO: 3538958 - DNA, 25 bp, Homo sapien
cagtataaggccttttgtcattggc

SEQ ID NO: 3538959 - DNA, 25 bp, Homo sapien
tgtgaaaactctgggtaaacaatgg

SEQ ID NO: 3538960 - DNA, 25 bp, Homo sapien
gaaaatatgggttctcctagccagt

SEQ ID NO: 3538961 - DNA, 25 bp, Homo sapien
ctgtctgttagggaatggctaaact

SEQ ID NO: 3538962 - DNA, 25 bp, Homo sapien
caacagggatgacaatgcttcacac

SEQ ID NO: 3538963 - DNA, 25 bp, Homo sapien
taattgaagctagaccacagaaggg

SEQ ID NO: 3538964 - DNA, 25 bp, Homo sapien
cagcttgtgttactgacaacaggga

SEQ ID NO: 3538965 - DNA, 25 bp, Homo sapien
acacagctgcaagtgacaaagagca

SEQ ID NO: 3538966 - DNA, 25 bp, Homo sapien
agagcagccgctgtcctactcaggg

SEQ ID NO: 3538967 - DNA, 25 bp, Homo sapien
ttgccagcatgctcccttgcaaaca

SEQ ID NO: 3538968 - DNA, 25 bp, Homo sapien
gcatgctcccttgcaaacacagctg

SEQ ID NO: 3538969 - DNA, 25 bp, Homo sapien
aaaacaacgttaagactatccagca

SEQ ID NO: 3538970 - DNA, 25 bp, Homo sapien
aattacacacccattagagtcacga

SEQ ID NO: 3538971 - DNA, 25 bp, Homo sapien
tccagcaaacagtaaaaagcaacag

SEQ ID NO: 3538972 - DNA, 25 bp, Homo sapien
gcaaactgctgtctatatccaacaa

SEQ ID NO: 3538973 - DNA, 25 bp, Homo sapien
ctaataccactgggtcttgttgaag

SEQ ID NO: 3538974 - DNA, 25 bp, Homo sapien
tcttgttgaagaaaagtggccggct

SEQ ID NO: 3538975 - DNA, 25 bp, Homo sapien
gtggccggcttactttgatcaactg

SEQ ID NO: 3538976 - DNA, 25 bp, Homo sapien
ggtgtgctgatcagtgtgatttccc

SEQ ID NO: 3538977 - DNA, 25 bp, Homo sapien
cttcctggttaatttggcagtaaca

SEQ ID NO: 3538978 - DNA, 25 bp, Homo sapien
tggcagtaacataatttgtaactcc

SEQ ID NO: 3538979 - DNA, 25 bp, Homo sapien
atcttcctcccgttcttcttcctgg

SEQ ID NO: 3538980 - DNA, 25 bp, Homo sapien
cagtaacataatttgtaactccctt

SEQ ID NO: 3538981 - DNA, 25 bp, Homo sapien
gtaaattgctttggacgttattgcc

SEQ ID NO: 3538982 - DNA, 25 bp, Homo sapien
gtattgctgaggttatctaccaggg

SEQ ID NO: 3538983 - DNA, 25 bp, Homo sapien
tcctgtccaacctaaactggctgtt

SEQ ID NO: 3538984 - DNA, 25 bp, Homo sapien
caatgtctctcaataatggctcaaa

SEQ ID NO: 3538985 - DNA, 25 bp, Homo sapien
catcttgatcgtgatgacggtttca

SEQ ID NO: 3538986 - DNA, 25 bp, Homo sapien
gaatgtggagcagctagaactctca

SEQ ID NO: 3538987 - DNA, 25 bp, Homo sapien
tgagcgagacgaccaagaacacttc

SEQ ID NO: 3538988 - DNA, 25 bp, Homo sapien
gcctgttctgacttgcacattagca

SEQ ID NO: 3538989 - DNA, 25 bp, Homo sapien
gacgaagggatttatgttgtgacag

SEQ ID NO: 3538990 - DNA, 25 bp, Homo sapien
tctatgctgttagaggtaacaaagg

SEQ ID NO: 3538991 - DNA, 25 bp, Homo sapien
cacaggcaacattagtctatgctgt

SEQ ID NO: 3538992 - DNA, 25 bp, Homo sapien
ggatatagtctcataaacatgttga

SEQ ID NO: 3538993 - DNA, 25 bp, Homo sapien
ttctcactcaaagctgtgattttgg

SEQ ID NO: 3538994 - DNA, 25 bp, Homo sapien
caaagctgtgattttggcttggagt

SEQ ID NO: 3538995 - DNA, 25 bp, Homo sapien
cactcaaagctgtgattttggcttg

SEQ ID NO: 3538996 - DNA, 25 bp, Homo sapien
ctgtttctcactcaaagctgtgatt

SEQ ID NO: 3538997 - DNA, 25 bp, Homo sapien
tctaaacccttataacctgaagatc

SEQ ID NO: 3538998 - DNA, 25 bp, Homo sapien
actcaaaccaattaatatgacacca

SEQ ID NO: 3538999 - DNA, 25 bp, Homo sapien
ttctctaaaatactcaaaccaatta

SEQ ID NO: 3539000 - DNA, 25 bp, Homo sapien
taacctgaagatcaatgtattaaaa

SEQ ID NO: 3539001 - DNA, 25 bp, Homo sapien
tcctgcttcatttgagcaaccagtt

SEQ ID NO: 3539002 - DNA, 25 bp, Homo sapien
taagctgacattgtgttaacaaagt

SEQ ID NO: 3539003 - DNA, 25 bp, Homo sapien
gccagaatgcggcaatatttcttga

SEQ ID NO: 3539004 - DNA, 25 bp, Homo sapien
caaatccctagtaactttaagctga

SEQ ID NO: 3539005 - DNA, 25 bp, Homo sapien
agttaggttactttccgccagaatg

SEQ ID NO: 3539006 - DNA, 25 bp, Homo sapien
tttaagagcctcctgtagagtctgc

SEQ ID NO: 3539007 - DNA, 25 bp, Homo sapien
acctgaatttccactttaagagcct

SEQ ID NO: 3539008 - DNA, 25 bp, Homo sapien
ctggtgaacctgaatttccacttta

SEQ ID NO: 3539009 - DNA, 25 bp, Homo sapien
gagcctcctgtagagtctgcaactc

SEQ ID NO: 3539010 - DNA, 25 bp, Homo sapien
aattctatagtttcttcagcctctg

SEQ ID NO: 3539011 - DNA, 25 bp, Homo sapien
tcttcagcctctgtttaaagtaaca

SEQ ID NO: 3539012 - DNA, 25 bp, Homo sapien
gctaattctatagtttcttcagcct

SEQ ID NO: 3539013 - DNA, 25 bp, Homo sapien
ctttctctgctaattctatagtttc

SEQ ID NO: 3539014 - DNA, 25 bp, Homo sapien
tactatccacgaacttatgatgtgg

SEQ ID NO: 3539015 - DNA, 25 bp, Homo sapien
gccactgcgctgagccaaaatcata

SEQ ID NO: 3539016 - DNA, 25 bp, Homo sapien
ggatgggttcttactctacataaaa

SEQ ID NO: 3539017 - DNA, 25 bp, Homo sapien
gtttctcggaggttaacgaatgcca

SEQ ID NO: 3539018 - DNA, 25 bp, Homo sapien
tgcttctcagagatacacaaaggca

SEQ ID NO: 3539019 - DNA, 25 bp, Homo sapien
tcaagttaatgaggagccgatggct

SEQ ID NO: 3539020 - DNA, 25 bp, Homo sapien
tattcagcaaggactctaaatgcca

SEQ ID NO: 3539021 - DNA, 25 bp, Homo sapien
tgtaaatgtcaaagagtgcctcgca

SEQ ID NO: 3539022 - DNA, 25 bp, Homo sapien
tagtgggctccctgtcattagaagt

SEQ ID NO: 3539023 - DNA, 25 bp, Homo sapien
ggctccctgtcattagaagtattca

SEQ ID NO: 3539024 - DNA, 25 bp, Homo sapien
tgaggtagtgggctccctgtcatta

SEQ ID NO: 3539025 - DNA, 25 bp, Homo sapien
tcattagaagtattcaagaatgctg

SEQ ID NO: 3539026 - DNA, 25 bp, Homo sapien
ccactctgcacatatactaaggcca

SEQ ID NO: 3539027 - DNA, 25 bp, Homo sapien
tatcagacatgaagctaactaatcc

SEQ ID NO: 3539028 - DNA, 25 bp, Homo sapien
gttaaattaacctaagccactctgc

SEQ ID NO: 3539029 - DNA, 25 bp, Homo sapien
atgtaaataaacacgagtcccaaat

SEQ ID NO: 3539030 - DNA, 25 bp, Homo sapien
gctagcatcaggatcaggcacacga

SEQ ID NO: 3539031 - DNA, 25 bp, Homo sapien
gcaggcctagctgtattagcagaaa

SEQ ID NO: 3539032 - DNA, 25 bp, Homo sapien
ttatcgaacggtggaacatgcaggc

SEQ ID NO: 3539033 - DNA, 25 bp, Homo sapien
ggcacacgatgtctacctagtcaaa

SEQ ID NO: 3539034 - DNA, 25 bp, Homo sapien
tttggggaaactggctctccttcag

SEQ ID NO: 3539035 - DNA, 25 bp, Homo sapien
ctggctctccttcagctctctagcc

SEQ ID NO: 3539036 - DNA, 25 bp, Homo sapien
ggctctccttcagctctctagcccc

SEQ ID NO: 3539037 - DNA, 25 bp, Homo sapien
caattttggggaaactggctctcct

SEQ ID NO: 3539038 - DNA, 25 bp, Homo sapien
atggtctcaaactcctgaccttgtg

SEQ ID NO: 3539039 - DNA, 25 bp, Homo sapien
gatggtctcaaactcctgaccttgt

SEQ ID NO: 3539040 - DNA, 25 bp, Homo sapien
tcactacaacctctgactcctgtgt

SEQ ID NO: 3539041 - DNA, 25 bp, Homo sapien
actacaacctctgactcctgtgttc

SEQ ID NO: 3539042 - DNA, 25 bp, Homo sapien
gagttctcaagggttaaatacacat

SEQ ID NO: 3539043 - DNA, 25 bp, Homo sapien
catcaatatcttggtgctggtctca

SEQ ID NO: 3539044 - DNA, 25 bp, Homo sapien
taagagacctactataaactgcatc

SEQ ID NO: 3539045 - DNA, 25 bp, Homo sapien
caatggactgaccagctgatgagta

SEQ ID NO: 3539046 - DNA, 25 bp, Homo sapien
ggcgtagtggcggacacctctataa

SEQ ID NO: 3539047 - DNA, 25 bp, Homo sapien
tatcaaactttctagcatccccaaa

SEQ ID NO: 3539048 - DNA, 25 bp, Homo sapien
tgtattactttctcaactgatatgg

SEQ ID NO: 3539049 - DNA, 25 bp, Homo sapien
aaaaactatagtgtccagggtgcac

SEQ ID NO: 3539050 - DNA, 25 bp, Homo sapien
ccaagggccagaatccttatactat

SEQ ID NO: 3539051 - DNA, 25 bp, Homo sapien
tcatcaacacaagactaattcccct

SEQ ID NO: 3539052 - DNA, 25 bp, Homo sapien
cccactcatcaacacaagactaatt

SEQ ID NO: 3539053 - DNA, 25 bp, Homo sapien
gcaatcgcacatctactttgtacag

SEQ ID NO: 3539054 - DNA, 25 bp, Homo sapien
tgggcagccaagcaatgtcagtcaa

SEQ ID NO: 3539055 - DNA, 25 bp, Homo sapien
ggatggacccttcaaagctaaaaga

SEQ ID NO: 3539056 - DNA, 25 bp, Homo sapien
tttatcttgctgtagcacctcctgc

SEQ ID NO: 3539057 - DNA, 25 bp, Homo sapien
gtaataagtagcaagaccctcaaaa

SEQ ID NO: 3539058 - DNA, 25 bp, Homo sapien
aaatgtagtaacagtttccaacaat

SEQ ID NO: 3539059 - DNA, 25 bp, Homo sapien
atagtatttccagtaaaaatgtagt

SEQ ID NO: 3539060 - DNA, 25 bp, Homo sapien
aatgtagtaacagtttccaacaatg

SEQ ID NO: 3539061 - DNA, 25 bp, Homo sapien
aaatgaataatagtatttccagtaa

SEQ ID NO: 3539062 - DNA, 25 bp, Homo sapien
tgaaaacaaaacctgccgaccatta

SEQ ID NO: 3539063 - DNA, 25 bp, Homo sapien
tatgaccggaatatgatgacaccag

SEQ ID NO: 3539064 - DNA, 25 bp, Homo sapien
caatgtggacgtgcagagtgagatc

SEQ ID NO: 3539065 - DNA, 25 bp, Homo sapien
gagcatctacattcctgacaccgac

SEQ ID NO: 3539066 - DNA, 25 bp, Homo sapien
agaaatcctaacagcaccgctcagc

SEQ ID NO: 3539067 - DNA, 25 bp, Homo sapien
catcgcgaacgtggtcaggggaaaa

SEQ ID NO: 3539068 - DNA, 25 bp, Homo sapien
aaaaagaaatcctaacagcaccgct

SEQ ID NO: 3539069 - DNA, 25 bp, Homo sapien
aaagaaatcctaacagcaccgctca

SEQ ID NO: 3539070 - DNA, 25 bp, Homo sapien
taagcggaatttccccaacgctgct

SEQ ID NO: 3539071 - DNA, 25 bp, Homo sapien
gtgcaggcagactctccggaataac

SEQ ID NO: 3539072 - DNA, 25 bp, Homo sapien
gccacccaagacaaatgcaccaaca

SEQ ID NO: 3539073 - DNA, 25 bp, Homo sapien
tcaacaaacaagatggttttccaaa

SEQ ID NO: 3539074 - DNA, 25 bp, Homo sapien
ctggcagctggaggcaggaactctg

SEQ ID NO: 3539075 - DNA, 25 bp, Homo sapien
tgctggctggctgtcccccctggca

SEQ ID NO: 3539076 - DNA, 25 bp, Homo sapien
gctggctggctgtcccccctggcag

SEQ ID NO: 3539077 - DNA, 25 bp, Homo sapien
ggaggcaggaactctgagcaggaga

SEQ ID NO: 3539078 - DNA, 25 bp, Homo sapien
aggagggaactcttcttcatgggga

SEQ ID NO: 3539079 - DNA, 25 bp, Homo sapien
ggagggaactcttcttcatggggag

SEQ ID NO: 3539080 - DNA, 25 bp, Homo sapien
gaggagggaactcttcttcatgggg

SEQ ID NO: 3539081 - DNA, 25 bp, Homo sapien
gggcctctcgcactttttagatatt

SEQ ID NO: 3539082 - DNA, 25 bp, Homo sapien
tgtgttaagatggtaggttgttccc

SEQ ID NO: 3539083 - DNA, 25 bp, Homo sapien
taagatggtaggttgttcccttctc

SEQ ID NO: 3539084 - DNA, 25 bp, Homo sapien
tgctctgggcctctcgcacttttta

SEQ ID NO: 3539085 - DNA, 25 bp, Homo sapien
ggggaggaactggatcctcctcctc

SEQ ID NO: 3539086 - DNA, 25 bp, Homo sapien
atcgggaggggggaatcagagcagc

SEQ ID NO: 3539087 - DNA, 25 bp, Homo sapien
tcctccaggagggacacacacaggc

SEQ ID NO: 3539088 - DNA, 25 bp, Homo sapien
cacacaggccccgggccggaatcgg

SEQ ID NO: 3539089 - DNA, 25 bp, Homo sapien
aacaagcccaactcttcatcctcct

SEQ ID NO: 3539090 - DNA, 25 bp, Homo sapien
gacaaacaagcccaactcttcatcc

SEQ ID NO: 3539091 - DNA, 25 bp, Homo sapien
caaacaagcccaactcttcatcctc

SEQ ID NO: 3539092 - DNA, 25 bp, Homo sapien
gagacaaacaagcccaactcttcat

SEQ ID NO: 3539093 - DNA, 25 bp, Homo sapien
agtctcttgccttccccaggttgtg

SEQ ID NO: 3539094 - DNA, 25 bp, Homo sapien
tatactcggcgggtttccctgctct

SEQ ID NO: 3539095 - DNA, 25 bp, Homo sapien
cccaggttgtgtttcccggtcatat

SEQ ID NO: 3539096 - DNA, 25 bp, Homo sapien
catcattcgggggacacaacagcga

SEQ ID NO: 3539097 - DNA, 25 bp, Homo sapien
tttccctcaggattttgatgcctca

SEQ ID NO: 3539098 - DNA, 25 bp, Homo sapien
gatacgtaggcctgagtgggacctt

SEQ ID NO: 3539099 - DNA, 25 bp, Homo sapien
attgagcagtctgaggcaattctga

SEQ ID NO: 3539100 - DNA, 25 bp, Homo sapien
ttgttcttggcgctcaatggaccct

SEQ ID NO: 3539101 - DNA, 25 bp, Homo sapien
caagcttgttggctttcggtgagca

SEQ ID NO: 3539102 - DNA, 25 bp, Homo sapien
tctgcggaccctgcagtttctgtcc

SEQ ID NO: 3539103 - DNA, 25 bp, Homo sapien
cttcagtgatgtcccgaagttcctg

SEQ ID NO: 3539104 - DNA, 25 bp, Homo sapien
tgggattccacagggcaagcttgtt

SEQ ID NO: 3539105 - DNA, 25 bp, Homo sapien
cacaaaggactggaaaaatcagcta

SEQ ID NO: 3539106 - DNA, 25 bp, Homo sapien
tcacaaaggactggaaaaatcagct

SEQ ID NO: 3539107 - DNA, 25 bp, Homo sapien
caaaggactggaaaaatcagctatc

SEQ ID NO: 3539108 - DNA, 25 bp, Homo sapien
acaaaggactggaaaaatcagctat

SEQ ID NO: 3539109 - DNA, 25 bp, Homo sapien
ggaagaactttgtcccctgtctgca

SEQ ID NO: 3539110 - DNA, 25 bp, Homo sapien
caggaagaactttgtcccctgtctg

SEQ ID NO: 3539111 - DNA, 25 bp, Homo sapien
aggaagaactttgtcccctgtctgc

SEQ ID NO: 3539112 - DNA, 25 bp, Homo sapien
cacaggaagaactttgtcccctgtc

SEQ ID NO: 3539113 - DNA, 25 bp, Homo sapien
tgtgttagacactgcactagttgca

SEQ ID NO: 3539114 - DNA, 25 bp, Homo sapien
gttgatagccttgtgggacattgag

SEQ ID NO: 3539115 - DNA, 25 bp, Homo sapien
gcaattgagtgcaataaaagacacc

SEQ ID NO: 3539116 - DNA, 25 bp, Homo sapien
tatcactctcaaggagttgatagcc

SEQ ID NO: 3539117 - DNA, 25 bp, Homo sapien
aattctgcacccaagtggctactgg

SEQ ID NO: 3539118 - DNA, 25 bp, Homo sapien
tcagactgtgaatggtacaaccact

SEQ ID NO: 3539119 - DNA, 25 bp, Homo sapien
tggaagacttactttcacacaaggg

SEQ ID NO: 3539120 - DNA, 25 bp, Homo sapien
tgctcagtctcacctgttaacaggg

SEQ ID NO: 3539121 - DNA, 25 bp, Homo sapien
tgacctattaaaggcgaattccact

SEQ ID NO: 3539122 - DNA, 25 bp, Homo sapien
gctgaaaattgagtagaagaggaag

SEQ ID NO: 3539123 - DNA, 25 bp, Homo sapien
cgaattgagtcttacttaagatgac

SEQ ID NO: 3539124 - DNA, 25 bp, Homo sapien
ggaaggcttctcagacgaattgagt

SEQ ID NO: 3539125 - DNA, 25 bp, Homo sapien
tcctgaaggctcaagcctctcccct

SEQ ID NO: 3539126 - DNA, 25 bp, Homo sapien
caggccatcctgaaggctcaagcct

SEQ ID NO: 3539127 - DNA, 25 bp, Homo sapien
catcctgaaggctcaagcctctccc

SEQ ID NO: 3539128 - DNA, 25 bp, Homo sapien
ggccatcctgaaggctcaagcctct

SEQ ID NO: 3539129 - DNA, 25 bp, Homo sapien
gactcacatcttgagttctggagga

SEQ ID NO: 3539130 - DNA, 25 bp, Homo sapien
gcggcccagggacacttcactcggc

SEQ ID NO: 3539131 - DNA, 25 bp, Homo sapien
actcggccagatagcggaacaggga

SEQ ID NO: 3539132 - DNA, 25 bp, Homo sapien
ggcgttcttgaaaaggtgactcaca

SEQ ID NO: 3539133 - DNA, 25 bp, Homo sapien
tgacagcaaacgagctggtccggac

SEQ ID NO: 3539134 - DNA, 25 bp, Homo sapien
acaataatcgggtcaacacgcggcg

SEQ ID NO: 3539135 - DNA, 25 bp, Homo sapien
tcttgagagtggctctccaccgctg

SEQ ID NO: 3539136 - DNA, 25 bp, Homo sapien
caagccgagaggcatggcaaaacag

SEQ ID NO: 3539137 - DNA, 25 bp, Homo sapien
gcggcccgaggcgcctcttgccagc

SEQ ID NO: 3539138 - DNA, 25 bp, Homo sapien
gcgcctcttgccagcggcccgacct

SEQ ID NO: 3539139 - DNA, 25 bp, Homo sapien
aggctccccgcacgtgcaggcccgg

SEQ ID NO: 3539140 - DNA, 25 bp, Homo sapien
agggtcccagcgcggcccgaggcgc

SEQ ID NO: 3539141 - DNA, 25 bp, Homo sapien
ggttactgataaggacgcgagctct

SEQ ID NO: 3539142 - DNA, 25 bp, Homo sapien
taataacgaccacagccatagtagc

SEQ ID NO: 3539143 - DNA, 25 bp, Homo sapien
cacctagctggaaaatggacgagac

SEQ ID NO: 3539144 - DNA, 25 bp, Homo sapien
tcatgtcaacccactaaggacggga

SEQ ID NO: 3539145 - DNA, 25 bp, Homo sapien
taataaagcagacgaagtccagttc

SEQ ID NO: 3539146 - DNA, 25 bp, Homo sapien
ccttcagggcccttgccattaataa

SEQ ID NO: 3539147 - DNA, 25 bp, Homo sapien
atcgaacccagctgattccttcagg

SEQ ID NO: 3539148 - DNA, 25 bp, Homo sapien
tgtacttgggaagagaaatcgaacc

SEQ ID NO: 3539149 - DNA, 25 bp, Homo sapien
tatcttcctagaaaccctggcagcc

SEQ ID NO: 3539150 - DNA, 25 bp, Homo sapien
agtttgcaacgctgttctgggagtt

SEQ ID NO: 3539151 - DNA, 25 bp, Homo sapien
tggcagcccgaccggctgcttgctg

SEQ ID NO: 3539152 - DNA, 25 bp, Homo sapien
tgctgtctgatgcaacagtttgcaa

SEQ ID NO: 3539153 - DNA, 25 bp, Homo sapien
ggcctttggattcggcgtccctctc

SEQ ID NO: 3539154 - DNA, 25 bp, Homo sapien
gacttgggcctttggattcggcgtc

SEQ ID NO: 3539155 - DNA, 25 bp, Homo sapien
ccagacttgggcctttggattcggc

SEQ ID NO: 3539156 - DNA, 25 bp, Homo sapien
ttggattcggcgtccctctcctgcg

SEQ ID NO: 3539157 - DNA, 25 bp, Homo sapien
acagctcggaagcacagtcaagcct

SEQ ID NO: 3539158 - DNA, 25 bp, Homo sapien
tgtccaggatccacagctcggaagc

SEQ ID NO: 3539159 - DNA, 25 bp, Homo sapien
gcacagtcaagcctcgcgggtctgg

SEQ ID NO: 3539160 - DNA, 25 bp, Homo sapien
acagtcaagcctcgcgggtctgggc

SEQ ID NO: 3539161 - DNA, 25 bp, Homo sapien
agccagtaggccaaattggaactca

SEQ ID NO: 3539162 - DNA, 25 bp, Homo sapien
taggccaaattggaactcagccgtg

SEQ ID NO: 3539163 - DNA, 25 bp, Homo sapien
caaattggaactcagccgtgccagt

SEQ ID NO: 3539164 - DNA, 25 bp, Homo sapien
gaactcagccgtgccagttggctcg

SEQ ID NO: 3539165 - DNA, 25 bp, Homo sapien
cctggtaccccagactggaaggaga

SEQ ID NO: 3539166 - DNA, 25 bp, Homo sapien
tctcctaccgcagctgtggatcaag

SEQ ID NO: 3539167 - DNA, 25 bp, Homo sapien
ggaaggagacagtcacggtcctcgt

SEQ ID NO: 3539168 - DNA, 25 bp, Homo sapien
tggatcaaggcagtctcactgggca

SEQ ID NO: 3539169 - DNA, 25 bp, Homo sapien
tggtgcaatctcggcatctcggctc

SEQ ID NO: 3539170 - DNA, 25 bp, Homo sapien
gtgcaatctcggcatctcggctcac

SEQ ID NO: 3539171 - DNA, 25 bp, Homo sapien
ctgggattataggcgcccacgacca

SEQ ID NO: 3539172 - DNA, 25 bp, Homo sapien
agctgggattataggcgcccacgac

SEQ ID NO: 3539173 - DNA, 25 bp, Homo sapien
acctcaggacccaagacggctgttc

SEQ ID NO: 3539174 - DNA, 25 bp, Homo sapien
tcagtgaccatcagggactagactc

SEQ ID NO: 3539175 - DNA, 25 bp, Homo sapien
ggctgttcatatccacactccggaa

SEQ ID NO: 3539176 - DNA, 25 bp, Homo sapien
taatttcgctctctagtaagtgaca

SEQ ID NO: 3539177 - DNA, 25 bp, Homo sapien
ctgtgcgtcattgactgcgttggga

SEQ ID NO: 3539178 - DNA, 25 bp, Homo sapien
cctctttctcctgtgcgtcattgac

SEQ ID NO: 3539179 - DNA, 25 bp, Homo sapien
gactgcgttgggatgcctttatgca

SEQ ID NO: 3539180 - DNA, 25 bp, Homo sapien
cattgactgcgttgggatgccttta

SEQ ID NO: 3539181 - DNA, 25 bp, Homo sapien
ttatgaagttagtgcgggctttgct

SEQ ID NO: 3539182 - DNA, 25 bp, Homo sapien
tatgaagttagtgcgggctttgctg

SEQ ID NO: 3539183 - DNA, 25 bp, Homo sapien
atgaagttagtgcgggctttgctgc

SEQ ID NO: 3539184 - DNA, 25 bp, Homo sapien
tcttttcgtgtacagcgggaaggag

SEQ ID NO: 3539185 - DNA, 25 bp, Homo sapien
acaaacgtttattgtgcgcccgccg

SEQ ID NO: 3539186 - DNA, 25 bp, Homo sapien
tgcctgaaccgtgaaagccgtattc

SEQ ID NO: 3539187 - DNA, 25 bp, Homo sapien
tcttgcaggcgtcattgcacaaacg

SEQ ID NO: 3539188 - DNA, 25 bp, Homo sapien
tacttcttgccggaactatcagtct

SEQ ID NO: 3539189 - DNA, 25 bp, Homo sapien
tctggattagctggttttacacccc

SEQ ID NO: 3539190 - DNA, 25 bp, Homo sapien
ggacccgcttatcctctggcctggt

SEQ ID NO: 3539191 - DNA, 25 bp, Homo sapien
tgaccctaaggattgggcagccagg

SEQ ID NO: 3539192 - DNA, 25 bp, Homo sapien
gggacaggctgccaaaaccatccct

SEQ ID NO: 3539193 - DNA, 25 bp, Homo sapien
gggtgagggacaggctgccaaaacc

SEQ ID NO: 3539194 - DNA, 25 bp, Homo sapien
tgagggacaggctgccaaaaccatc

SEQ ID NO: 3539195 - DNA, 25 bp, Homo sapien
gacaggctgccaaaaccatccctgg

SEQ ID NO: 3539196 - DNA, 25 bp, Homo sapien
gagaggaagtgcgttcagttaccaa

SEQ ID NO: 3539197 - DNA, 25 bp, Homo sapien
caaactaggacttgctcagcagagg

SEQ ID NO: 3539198 - DNA, 25 bp, Homo sapien
ccttagacctcgttcccaagctgag

SEQ ID NO: 3539199 - DNA, 25 bp, Homo sapien
tcataacggctgtctcaggctgcag

SEQ ID NO: 3539200 - DNA, 25 bp, Homo sapien
gagaccgagggacagccattttgct

SEQ ID NO: 3539201 - DNA, 25 bp, Homo sapien
gaagacactgtcacgcagagctgcg

SEQ ID NO: 3539202 - DNA, 25 bp, Homo sapien
ccttgaaactagcacagggcgtgag

SEQ ID NO: 3539203 - DNA, 25 bp, Homo sapien
tctatggtgggtgtaggccctgcca

SEQ ID NO: 3539204 - DNA, 25 bp, Homo sapien
ctgtggtgaggattacacgagatga

SEQ ID NO: 3539205 - DNA, 25 bp, Homo sapien
tgttcgttattattccctatctggt

SEQ ID NO: 3539206 - DNA, 25 bp, Homo sapien
ccagggcctgtcacgtagcaggtgt

SEQ ID NO: 3539207 - DNA, 25 bp, Homo sapien
acacgagatgataaagtacttagcc

SEQ ID NO: 3539208 - DNA, 25 bp, Homo sapien
taggcggtcacctctgcgtcaactt

SEQ ID NO: 3539209 - DNA, 25 bp, Homo sapien
actgacttgccgtggactctaggcg

SEQ ID NO: 3539210 - DNA, 25 bp, Homo sapien
ccgtggactctaggcggtcacctct

SEQ ID NO: 3539211 - DNA, 25 bp, Homo sapien
tccacactgacttgccgtggactct

SEQ ID NO: 3539212 - DNA, 25 bp, Homo sapien
tggtctgctttgagtggggcactat

SEQ ID NO: 3539213 - DNA, 25 bp, Homo sapien
gcgctctccacccatgcctgctgtc

SEQ ID NO: 3539214 - DNA, 25 bp, Homo sapien
tggggtcataagagcactgccctga

SEQ ID NO: 3539215 - DNA, 25 bp, Homo sapien
ttttgggggagacccagcgctctcc

SEQ ID NO: 3539216 - DNA, 25 bp, Homo sapien
gctgccagcggttaggatgcatccc

SEQ ID NO: 3539217 - DNA, 25 bp, Homo sapien
tgcctaattaatgccagccttcagg

SEQ ID NO: 3539218 - DNA, 25 bp, Homo sapien
tgaagctgctcaagacctgcagggc

SEQ ID NO: 3539219 - DNA, 25 bp, Homo sapien
caaatcagtgcagtgtatggaagga

SEQ ID NO: 3539220 - DNA, 25 bp, Homo sapien
caaagcatgagttcaggatgggtcc

SEQ ID NO: 3539221 - DNA, 25 bp, Homo sapien
ccactgttaggagaggtagggcaca

SEQ ID NO: 3539222 - DNA, 25 bp, Homo sapien
tgtgaagaagggtaggcagggctga

SEQ ID NO: 3539223 - DNA, 25 bp, Homo sapien
caggtgggagctaggatgatgccca

SEQ ID NO: 3539224 - DNA, 25 bp, Homo sapien
cgtttggaattgtgagtatgggggc

SEQ ID NO: 3539225 - DNA, 25 bp, Homo sapien
gcgtttggaattgtgagtatggggg

SEQ ID NO: 3539226 - DNA, 25 bp, Homo sapien
ctgtgcagcgtttggaattgtgagt

SEQ ID NO: 3539227 - DNA, 25 bp, Homo sapien
tgcagcgtttggaattgtgagtatg

SEQ ID NO: 3539228 - DNA, 25 bp, Homo sapien
gcagtcgagcaccagaaagttctta

SEQ ID NO: 3539229 - DNA, 25 bp, Homo sapien
tcaggagcagagtcagaagggtttc

SEQ ID NO: 3539230 - DNA, 25 bp, Homo sapien
tttggcccaagcctattgtcacggc

SEQ ID NO: 3539231 - DNA, 25 bp, Homo sapien
gcacttcagacatacaggcacgcac

SEQ ID NO: 3539232 - DNA, 25 bp, Homo sapien
tatagcttggtttgctccatgtccc

SEQ ID NO: 3539233 - DNA, 25 bp, Homo sapien
taggcccagagctctgtagattctg

SEQ ID NO: 3539234 - DNA, 25 bp, Homo sapien
tccagggctccctagggtgcaatgg

SEQ ID NO: 3539235 - DNA, 25 bp, Homo sapien
caacagctgtaaacgtgggctcccc

SEQ ID NO: 3539236 - DNA, 25 bp, Homo sapien
caaccgcctgccatggagactttct

SEQ ID NO: 3539237 - DNA, 25 bp, Homo sapien
ctcctcctcactggcacagcggcgc

SEQ ID NO: 3539238 - DNA, 25 bp, Homo sapien
ccacaggcaaggcccggcgtcgctc

SEQ ID NO: 3539239 - DNA, 25 bp, Homo sapien
gctgcctcctgagttgcggggtgag

SEQ ID NO: 3539240 - DNA, 25 bp, Homo sapien
atcctggcgtgcgggggcgacggca

SEQ ID NO: 3539241 - DNA, 25 bp, Homo sapien
gcggatcctggcgtgcgggggcgac

SEQ ID NO: 3539242 - DNA, 25 bp, Homo sapien
cctggcgtgcgggggcgacggcacg

SEQ ID NO: 3539243 - DNA, 25 bp, Homo sapien
cctgcggatcctggcgtgcgggggc

SEQ ID NO: 3539244 - DNA, 25 bp, Homo sapien
ggtactggcaacgacttggcccgaa

SEQ ID NO: 3539245 - DNA, 25 bp, Homo sapien
gaccagctacgcctgaagccgccac

SEQ ID NO: 3539246 - DNA, 25 bp, Homo sapien
cccctgggtactggcaacgacttgg

SEQ ID NO: 3539247 - DNA, 25 bp, Homo sapien
gggctggatcctctccaccctggac

SEQ ID NO: 3539248 - DNA, 25 bp, Homo sapien
ctgaggaccgagatgaaggcgccac

SEQ ID NO: 3539249 - DNA, 25 bp, Homo sapien
gggaacgtggtacagctggaccgct

SEQ ID NO: 3539250 - DNA, 25 bp, Homo sapien
tggtacagctggaccgctgggacct

SEQ ID NO: 3539251 - DNA, 25 bp, Homo sapien
acgctgagcccaaccccgaggcagg

SEQ ID NO: 3539252 - DNA, 25 bp, Homo sapien
ttgacgcccacgtcaccctggagtt

SEQ ID NO: 3539253 - DNA, 25 bp, Homo sapien
ttcagcctgggctttgacgcccacg

SEQ ID NO: 3539254 - DNA, 25 bp, Homo sapien
agcctgggctttgacgcccacgtca

SEQ ID NO: 3539255 - DNA, 25 bp, Homo sapien
accctggagttccacgagtctcgag

SEQ ID NO: 3539256 - DNA, 25 bp, Homo sapien
cagccgctttcggaataagatgttc

SEQ ID NO: 3539257 - DNA, 25 bp, Homo sapien
tcggaataagatgttctacgccggg

SEQ ID NO: 3539258 - DNA, 25 bp, Homo sapien
cccagagaaattcaacagccgcttt

SEQ ID NO: 3539259 - DNA, 25 bp, Homo sapien
ggccaacccagagaaattcaacagc

SEQ ID NO: 3539260 - DNA, 25 bp, Homo sapien
caaggacctggccaagcacatccga

SEQ ID NO: 3539261 - DNA, 25 bp, Homo sapien
cctggccaagcacatccgagtggtg

SEQ ID NO: 3539262 - DNA, 25 bp, Homo sapien
aggacctggccaagcacatccgagt

SEQ ID NO: 3539263 - DNA, 25 bp, Homo sapien
gacctggccaagcacatccgagtgg

SEQ ID NO: 3539264 - DNA, 25 bp, Homo sapien
tgatggaatggacttgactcccaag

SEQ ID NO: 3539265 - DNA, 25 bp, Homo sapien
gaatggacttgactcccaagatcca

SEQ ID NO: 3539266 - DNA, 25 bp, Homo sapien
actcccaagatccaggacctgaaac

SEQ ID NO: 3539267 - DNA, 25 bp, Homo sapien
tggaatggacttgactcccaagatc

SEQ ID NO: 3539268 - DNA, 25 bp, Homo sapien
agcggcatgacgacggctacctcga

SEQ ID NO: 3539269 - DNA, 25 bp, Homo sapien
cgacggctacctcgaggtcattggc

SEQ ID NO: 3539270 - DNA, 25 bp, Homo sapien
gggagcaccacgactttgagcccca

SEQ ID NO: 3539271 - DNA, 25 bp, Homo sapien
actttgagccccagcggcatgacga

SEQ ID NO: 3539272 - DNA, 25 bp, Homo sapien
caaggccatcccggtgcaggtggat

SEQ ID NO: 3539273 - DNA, 25 bp, Homo sapien
gcgagcggctgacgcagtgtcgcga

SEQ ID NO: 3539274 - DNA, 25 bp, Homo sapien
cgcgaggtggtgctcaccacatcca

SEQ ID NO: 3539275 - DNA, 25 bp, Homo sapien
ccgcgctgcaggtgggcggacacgg

SEQ ID NO: 3539276 - DNA, 25 bp, Homo sapien
gcatgcacgactatgaggccctgca

SEQ ID NO: 3539277 - DNA, 25 bp, Homo sapien
cgtcagcatgcacgactatgaggcc

SEQ ID NO: 3539278 - DNA, 25 bp, Homo sapien
atgaggccctgcactacgacaagga

SEQ ID NO: 3539279 - DNA, 25 bp, Homo sapien
cctgcactacgacaaggagcagctc

SEQ ID NO: 3539280 - DNA, 25 bp, Homo sapien
caggagacagtgacctagagctctg

SEQ ID NO: 3539281 - DNA, 25 bp, Homo sapien
tctgccgtgcccacattgagagact

SEQ ID NO: 3539282 - DNA, 25 bp, Homo sapien
acagtgacctagagctctgccgtgc

SEQ ID NO: 3539283 - DNA, 25 bp, Homo sapien
tgcccacattgagagactccagcag

SEQ ID NO: 3539284 - DNA, 25 bp, Homo sapien
gtcccccaagtggtgcttcctggac

SEQ ID NO: 3539285 - DNA, 25 bp, Homo sapien
agtccccgacatgccagaaactgtc

SEQ ID NO: 3539286 - DNA, 25 bp, Homo sapien
tgtcccccaagtggtgcttcctgga

SEQ ID NO: 3539287 - DNA, 25 bp, Homo sapien
ccaagtccccgacatgccagaaact

SEQ ID NO: 3539288 - DNA, 25 bp, Homo sapien
cttctacaggatcgaccgagcccag

SEQ ID NO: 3539289 - DNA, 25 bp, Homo sapien
tgccagccgcttctacaggatcgac

SEQ ID NO: 3539290 - DNA, 25 bp, Homo sapien
actgccagccgcttctacaggatcg

SEQ ID NO: 3539291 - DNA, 25 bp, Homo sapien
gccgcttctacaggatcgaccgagc

SEQ ID NO: 3539292 - DNA, 25 bp, Homo sapien
tgactgagatcgcacaggatgagat

SEQ ID NO: 3539293 - DNA, 25 bp, Homo sapien
gagatttatatcctggaccctgagc

SEQ ID NO: 3539294 - DNA, 25 bp, Homo sapien
gagcacctcaactatgtgactgaga

SEQ ID NO: 3539295 - DNA, 25 bp, Homo sapien
gatcgcacaggatgagatttatatc

SEQ ID NO: 3539296 - DNA, 25 bp, Homo sapien
gtcactgcaaggggatgctgcaccc

SEQ ID NO: 3539297 - DNA, 25 bp, Homo sapien
caaggggatgctgcaccccctcaag

SEQ ID NO: 3539298 - DNA, 25 bp, Homo sapien
tcactgcaaggggatgctgcacccc

SEQ ID NO: 3539299 - DNA, 25 bp, Homo sapien
ctgcaaggggatgctgcaccccctc

SEQ ID NO: 3539300 - DNA, 25 bp, Homo sapien
gaggctgccaagaggaacgacttct

SEQ ID NO: 3539301 - DNA, 25 bp, Homo sapien
gtgaagagctgattgaggctgccaa

SEQ ID NO: 3539302 - DNA, 25 bp, Homo sapien
ggctgccaagaggaacgacttctgt

SEQ ID NO: 3539303 - DNA, 25 bp, Homo sapien
tgccaagaggaacgacttctgtaag

SEQ ID NO: 3539304 - DNA, 25 bp, Homo sapien
ggatgtggtccgctacctgctggac

SEQ ID NO: 3539305 - DNA, 25 bp, Homo sapien
cagcactggcagcaaggatgtggtc

SEQ ID NO: 3539306 - DNA, 25 bp, Homo sapien
agacgagcagagtcgcacgctcctg

SEQ ID NO: 3539307 - DNA, 25 bp, Homo sapien
gggcgacctcatgcaccgagacgag

SEQ ID NO: 3539308 - DNA, 25 bp, Homo sapien
agatccttgatgcggtggaggaaaa

SEQ ID NO: 3539309 - DNA, 25 bp, Homo sapien
cagagatccttgatgcggtggagga

SEQ ID NO: 3539310 - DNA, 25 bp, Homo sapien
cccagagatccttgatgcggtggag

SEQ ID NO: 3539311 - DNA, 25 bp, Homo sapien
gagatccttgatgcggtggaggaaa

SEQ ID NO: 3539312 - DNA, 25 bp, Homo sapien
tctgccactacatcgtggaggccgg

SEQ ID NO: 3539313 - DNA, 25 bp, Homo sapien
gcaccatctgccactacatcgtgga

SEQ ID NO: 3539314 - DNA, 25 bp, Homo sapien
ctgtttgcaccaagcagcggccctg

SEQ ID NO: 3539315 - DNA, 25 bp, Homo sapien
tgtttgcaccaagcagcggccctgg

SEQ ID NO: 3539316 - DNA, 25 bp, Homo sapien
gaaccggcagcactaccagatgatc

SEQ ID NO: 3539317 - DNA, 25 bp, Homo sapien
cgagctggccgcctacctggagaac

SEQ ID NO: 3539318 - DNA, 25 bp, Homo sapien
accaggagacggctgtgtagcgggc

SEQ ID NO: 3539319 - DNA, 25 bp, Homo sapien
taaggagccgcccagacctagggct

SEQ ID NO: 3539320 - DNA, 25 bp, Homo sapien
ctcccggaaactcagcgcctgctgc

SEQ ID NO: 3539321 - DNA, 25 bp, Homo sapien
acagggaacaagacacggctgggtt

SEQ ID NO: 3539322 - DNA, 25 bp, Homo sapien
gaggccttcgggaagaggcttcctg

SEQ ID NO: 3539323 - DNA, 25 bp, Homo sapien
cggctgggttggatatgcctttgcc

SEQ ID NO: 3539324 - DNA, 25 bp, Homo sapien
catcaagtcacctaagcctttcggt

SEQ ID NO: 3539325 - DNA, 25 bp, Homo sapien
tgaaagggtgctccccatcaagtca

SEQ ID NO: 3539326 - DNA, 25 bp, Homo sapien
cagccaatcaggaaggttctaccca

SEQ ID NO: 3539327 - DNA, 25 bp, Homo sapien
gggaagggaacctggctgactcact

SEQ ID NO: 3539328 - DNA, 25 bp, Homo sapien
tcatggaaacccgagtgagccacca

SEQ ID NO: 3539329 - DNA, 25 bp, Homo sapien
agcctcaccctgactcgatgtgtga

SEQ ID NO: 3539330 - DNA, 25 bp, Homo sapien
cgagtgagccaccaggttgacccct

SEQ ID NO: 3539331 - DNA, 25 bp, Homo sapien
cctgactcgatgtgtgacctgggac

SEQ ID NO: 3539332 - DNA, 25 bp, Homo sapien
tctgaatacgtggaccactcacggc

SEQ ID NO: 3539333 - DNA, 25 bp, Homo sapien
aatacgtggaccactcacggctcag

SEQ ID NO: 3539334 - DNA, 25 bp, Homo sapien
gtcttctgaatacgtggaccactca

SEQ ID NO: 3539335 - DNA, 25 bp, Homo sapien
gggctgtcttctgaatacgtggacc

SEQ ID NO: 3539336 - DNA, 25 bp, Homo sapien
cagaggagatttctgcccctggagt

SEQ ID NO: 3539337 - DNA, 25 bp, Homo sapien
ccacccagaacctggctaagtagct

SEQ ID NO: 3539338 - DNA, 25 bp, Homo sapien
gaaagcaccgattacagcagaatgg

SEQ ID NO: 3539339 - DNA, 25 bp, Homo sapien
ttaatgtgacaagggcagtgctgct

SEQ ID NO: 3539340 - DNA, 25 bp, Homo sapien
tctggtctctgaatgcagccacaga

SEQ ID NO: 3539341 - DNA, 25 bp, Homo sapien
gcagctcgctgaagcagggccacag

SEQ ID NO: 3539342 - DNA, 25 bp, Homo sapien
caaacgtgaacgcagaatggtgcct

SEQ ID NO: 3539343 - DNA, 25 bp, Homo sapien
cacagcaagtgagccgtgtggtccc

SEQ ID NO: 3539344 - DNA, 25 bp, Homo sapien
gatgttccgatactggcacagcagc

SEQ ID NO: 3539345 - DNA, 25 bp, Homo sapien
tggaagtgtccttatcagccacggg

SEQ ID NO: 3539346 - DNA, 25 bp, Homo sapien
cagcaggtgccggaaggtcttttta

SEQ ID NO: 3539347 - DNA, 25 bp, Homo sapien
tgaagcactggttgtcgggcaccgt

SEQ ID NO: 3539348 - DNA, 25 bp, Homo sapien
gaaaagcatgaactacaggagggaa

SEQ ID NO: 3539349 - DNA, 25 bp, Homo sapien
aatgggggagtcatctggaggtaca

SEQ ID NO: 3539350 - DNA, 25 bp, Homo sapien
aaagcatgaactacaggagggaatg

SEQ ID NO: 3539351 - DNA, 25 bp, Homo sapien
gagaaaagcatgaactacaggaggg

SEQ ID NO: 3539352 - DNA, 25 bp, Homo sapien
aagcgatgtcttgtcttctcccaga

SEQ ID NO: 3539353 - DNA, 25 bp, Homo sapien
tgttaactgcgtgtcaggaacccct

SEQ ID NO: 3539354 - DNA, 25 bp, Homo sapien
taaagtccaaggtgctactgctcag

SEQ ID NO: 3539355 - DNA, 25 bp, Homo sapien
gatggccggtgattaagtcctgctc

SEQ ID NO: 3539356 - DNA, 25 bp, Homo sapien
cacaagcaaatgcagggccgagagt

SEQ ID NO: 3539357 - DNA, 25 bp, Homo sapien
gccaggagcctgcatcgggattgca

SEQ ID NO: 3539358 - DNA, 25 bp, Homo sapien
ggtgaccggtcacattccaaacgcc

SEQ ID NO: 3539359 - DNA, 25 bp, Homo sapien
ttagctgtccgcctgagcgcgtaga

SEQ ID NO: 3539360 - DNA, 25 bp, Homo sapien
ctgcgacgggccacctaactttggg

SEQ ID NO: 3539361 - DNA, 25 bp, Homo sapien
tagcctctgactgacatctgtcgag

SEQ ID NO: 3539362 - DNA, 25 bp, Homo sapien
actcccctaagaggcgttattgcca

SEQ ID NO: 3539363 - DNA, 25 bp, Homo sapien
gcccagaggtgtccaagtccttaaa

SEQ ID NO: 3539364 - DNA, 25 bp, Homo sapien
ctgtgaccaaagtggggacccagtt

SEQ ID NO: 3539365 - DNA, 25 bp, Homo sapien
ctgtctagcccctgtgaccaaagtg

SEQ ID NO: 3539366 - DNA, 25 bp, Homo sapien
agaggcactgtctagcccctgtgac

SEQ ID NO: 3539367 - DNA, 25 bp, Homo sapien
gtctagcccctgtgaccaaagtggg

SEQ ID NO: 3539368 - DNA, 25 bp, Homo sapien
taggtcttcggttcttgggcattca

SEQ ID NO: 3539369 - DNA, 25 bp, Homo sapien
aagcccctagcacgcagttcctgca

SEQ ID NO: 3539370 - DNA, 25 bp, Homo sapien
ccatgtctccgccgtggtcgaagga

SEQ ID NO: 3539371 - DNA, 25 bp, Homo sapien
ggcactgtgtttcccgagtcctcga

SEQ ID NO: 3539372 - DNA, 25 bp, Homo sapien
cggggctcaaggtcgtagatggagg

SEQ ID NO: 3539373 - DNA, 25 bp, Homo sapien
tccgtcggggctcaaggtcgtagat

SEQ ID NO: 3539374 - DNA, 25 bp, Homo sapien
ggctcaaggtcgtagatggaggact

SEQ ID NO: 3539375 - DNA, 25 bp, Homo sapien
ttccgtcggggctcaaggtcgtaga

SEQ ID NO: 3539376 - DNA, 25 bp, Homo sapien
acttttccccgagccgcgtgatgtc

SEQ ID NO: 3539377 - DNA, 25 bp, Homo sapien
gactcgcgctcacgctcgcactttt

SEQ ID NO: 3539378 - DNA, 25 bp, Homo sapien
cacgaggaagcagccaatcgtggcg

SEQ ID NO: 3539379 - DNA, 25 bp, Homo sapien
ggtcaacacccgaggcgtcggagac

SEQ ID NO: 3539380 - DNA, 25 bp, Homo sapien
ccctgcgtggccccgctggcggttt

SEQ ID NO: 3539381 - DNA, 25 bp, Homo sapien
cgctggcggtttggccgcgaggcgc

SEQ ID NO: 3539382 - DNA, 25 bp, Homo sapien
cgtggccccgctggcggtttggccg

SEQ ID NO: 3539383 - DNA, 25 bp, Homo sapien
gccccgctggcggtttggccgcgag

SEQ ID NO: 3539384 - DNA, 25 bp, Homo sapien
cgccagggatccgtcggggtcgagg

SEQ ID NO: 3539385 - DNA, 25 bp, Homo sapien
gccgccagggatccgtcggggtcga

SEQ ID NO: 3539386 - DNA, 25 bp, Homo sapien
cgccgccagggatccgtcggggtcg

SEQ ID NO: 3539387 - DNA, 25 bp, Homo sapien
ccgccagggatccgtcggggtcgag

SEQ ID NO: 3539388 - DNA, 25 bp, Homo sapien
aaggtggccccagtctgtagcaggc

SEQ ID NO: 3539389 - DNA, 25 bp, Homo sapien
gcactggaaggtggccccagtctgt

SEQ ID NO: 3539390 - DNA, 25 bp, Homo sapien
cctggcactggaaggtggccccagt

SEQ ID NO: 3539391 - DNA, 25 bp, Homo sapien
tggaaggtggccccagtctgtagca

SEQ ID NO: 3539392 - DNA, 25 bp, Homo sapien
tggtggcgtacagagaagtggtatg

SEQ ID NO: 3539393 - DNA, 25 bp, Homo sapien
ggcgtacagagaagtggtatgaagc

SEQ ID NO: 3539394 - DNA, 25 bp, Homo sapien
ggaagtggtggcgtacagagaagtg

SEQ ID NO: 3539395 - DNA, 25 bp, Homo sapien
cctgaccagctctggcgaaggggtc

SEQ ID NO: 3539396 - DNA, 25 bp, Homo sapien
gtaatactgacacccacaggcgctg

SEQ ID NO: 3539397 - DNA, 25 bp, Homo sapien
cgtacagttaagagtccacatgcaa

SEQ ID NO: 3539398 - DNA, 25 bp, Homo sapien
taagacgacgaagagaggctgaagc

SEQ ID NO: 3539399 - DNA, 25 bp, Homo sapien
ttagtaaatgccgaagtccctgtcc

SEQ ID NO: 3539400 - DNA, 25 bp, Homo sapien
gcctctgtccaggatgattggccca

SEQ ID NO: 3539401 - DNA, 25 bp, Homo sapien
gcaaagctgcctcgcgggcctctgt

SEQ ID NO: 3539402 - DNA, 25 bp, Homo sapien
ctgtccaggatgattggcccagatc

SEQ ID NO: 3539403 - DNA, 25 bp, Homo sapien
ccaacaggtggacagggcaaagctg

SEQ ID NO: 3539404 - DNA, 25 bp, Homo sapien
tggaaggttctagttccccgaggca

SEQ ID NO: 3539405 - DNA, 25 bp, Homo sapien
cttgtgcccactgactgatcttcct

SEQ ID NO: 3539406 - DNA, 25 bp, Homo sapien
ttgtgcccactgactgatcttcctc

SEQ ID NO: 3539407 - DNA, 25 bp, Homo sapien
gggaggcaccagtgcaacgtttgtc

SEQ ID NO: 3539408 - DNA, 25 bp, Homo sapien
tcagctgtgaggtccggtttctgct

SEQ ID NO: 3539409 - DNA, 25 bp, Homo sapien
ggaggcaccagtgcaacgtttgtct

SEQ ID NO: 3539410 - DNA, 25 bp, Homo sapien
tccggtttctgcttggcggttcgag

SEQ ID NO: 3539411 - DNA, 25 bp, Homo sapien
tccgtggttctcccctagggcctgc

SEQ ID NO: 3539412 - DNA, 25 bp, Homo sapien
cgtggttctcccctagggcctgcag

SEQ ID NO: 3539413 - DNA, 25 bp, Homo sapien
ctcccctagggcctgcagcgtcccc

SEQ ID NO: 3539414 - DNA, 25 bp, Homo sapien
ggttctcccctagggcctgcagcgt

SEQ ID NO: 3539415 - DNA, 25 bp, Homo sapien
ggtggttgttattggtcaactcgca

SEQ ID NO: 3539416 - DNA, 25 bp, Homo sapien
cagaaggtggttgttattggtcaac

SEQ ID NO: 3539417 - DNA, 25 bp, Homo sapien
tattggtcaactcgcagtggagggt

SEQ ID NO: 3539418 - DNA, 25 bp, Homo sapien
aactcgcagtggagggttggtccct

SEQ ID NO: 3539419 - DNA, 25 bp, Homo sapien
gagggcagggttggctgggttggct

SEQ ID NO: 3539420 - DNA, 25 bp, Homo sapien
aagagggcagggttggctgggttgg

SEQ ID NO: 3539421 - DNA, 25 bp, Homo sapien
gcagggttggctgggttggctcccg

SEQ ID NO: 3539422 - DNA, 25 bp, Homo sapien
gggcagggttggctgggttggctcc

SEQ ID NO: 3539423 - DNA, 25 bp, Homo sapien
tgccagttgcccggcctctgggagc

SEQ ID NO: 3539424 - DNA, 25 bp, Homo sapien
tccgggggcttaggcctcgctctgc

SEQ ID NO: 3539425 - DNA, 25 bp, Homo sapien
cctctgggagcagtccccgagaggt

SEQ ID NO: 3539426 - DNA, 25 bp, Homo sapien
tcgctctgccagttgcccggcctct

SEQ ID NO: 3539427 - DNA, 25 bp, Homo sapien
ctggggtgaggaggtgtgggcggca

SEQ ID NO: 3539428 - DNA, 25 bp, Homo sapien
tggggtgaggaggtgtgggcggcac

SEQ ID NO: 3539429 - DNA, 25 bp, Homo sapien
agctgcggtgaatgcggtggctgac

SEQ ID NO: 3539430 - DNA, 25 bp, Homo sapien
caggttcagtgcccgtctgagagct

SEQ ID NO: 3539431 - DNA, 25 bp, Homo sapien
cccgtctgagagctgcggtgaatgc

SEQ ID NO: 3539432 - DNA, 25 bp, Homo sapien
cagtgcccgtctgagagctgcggtg

SEQ ID NO: 3539433 - DNA, 25 bp, Homo sapien
ggatcctgctgagcgcatcttctcc

SEQ ID NO: 3539434 - DNA, 25 bp, Homo sapien
ctctggatcctgctgagcgcatctt

SEQ ID NO: 3539435 - DNA, 25 bp, Homo sapien
gctcccgctgcaccacggctgtcat

SEQ ID NO: 3539436 - DNA, 25 bp, Homo sapien
tgcaccacggctgtcatgccgccct

SEQ ID NO: 3539437 - DNA, 25 bp, Homo sapien
tcactgtagcttagcctcttgggtg

SEQ ID NO: 3539438 - DNA, 25 bp, Homo sapien
ttttctggacaacccctgataaagc

SEQ ID NO: 3539439 - DNA, 25 bp, Homo sapien
gcccagccccagtcttagacgatct

SEQ ID NO: 3539440 - DNA, 25 bp, Homo sapien
gcttttctggacaacccctgataaa

SEQ ID NO: 3539441 - DNA, 25 bp, Homo sapien
gccagggtaggatcaacaagttccc

SEQ ID NO: 3539442 - DNA, 25 bp, Homo sapien
gagcaactgaggagagctggcacat

SEQ ID NO: 3539443 - DNA, 25 bp, Homo sapien
tcttcaagagaaaaaataccagggc

SEQ ID NO: 3539444 - DNA, 25 bp, Homo sapien
tatgagctatgcttccctcctggga

SEQ ID NO: 3539445 - DNA, 25 bp, Homo sapien
cagccatggtgctctccaaatagtg

SEQ ID NO: 3539446 - DNA, 25 bp, Homo sapien
tctccaaatagtggggcacagccat

SEQ ID NO: 3539447 - DNA, 25 bp, Homo sapien
gcacagccatggtgctctccaaata

SEQ ID NO: 3539448 - DNA, 25 bp, Homo sapien
gccatggtgctctccaaatagtggg

SEQ ID NO: 3539449 - DNA, 25 bp, Homo sapien
gcaagctagggaggcactgtcatca

SEQ ID NO: 3539450 - DNA, 25 bp, Homo sapien
tttcgagctatgctcttggccagca

SEQ ID NO: 3539451 - DNA, 25 bp, Homo sapien
taattccatgcttgccctgaatgcc

SEQ ID NO: 3539452 - DNA, 25 bp, Homo sapien
tgtcatcagtgctggaagccaacgg

SEQ ID NO: 3539453 - DNA, 25 bp, Homo sapien
ctgtgtttcggcattctgcagctga

SEQ ID NO: 3539454 - DNA, 25 bp, Homo sapien
ctgaggcggctgtccctggctccgg

SEQ ID NO: 3539455 - DNA, 25 bp, Homo sapien
ctggctccggcacctccctctcagt

SEQ ID NO: 3539456 - DNA, 25 bp, Homo sapien
agcccaatggcattcatcagcccca

SEQ ID NO: 3539457 - DNA, 25 bp, Homo sapien
gaccgtctcgttcagctggtcccag

SEQ ID NO: 3539458 - DNA, 25 bp, Homo sapien
cagtgaagaccgtctcgttcagctg

SEQ ID NO: 3539459 - DNA, 25 bp, Homo sapien
ggtcccagtagtactcaacaccaga

SEQ ID NO: 3539460 - DNA, 25 bp, Homo sapien
tcagctggtcccagtagtactcaac

SEQ ID NO: 3539461 - DNA, 25 bp, Homo sapien
tcgaatgctttccatccaggcagca

SEQ ID NO: 3539462 - DNA, 25 bp, Homo sapien
ccttggctactgactgaagaggtcc

SEQ ID NO: 3539463 - DNA, 25 bp, Homo sapien
tggaattcttgctagccagggctgg

SEQ ID NO: 3539464 - DNA, 25 bp, Homo sapien
tggccaaaaggtcccctcgaatgct

SEQ ID NO: 3539465 - DNA, 25 bp, Homo sapien
ggcatttgccaacctgacccaagaa

SEQ ID NO: 3539466 - DNA, 25 bp, Homo sapien
tctgtcatctgttaggaggcctcag

SEQ ID NO: 3539467 - DNA, 25 bp, Homo sapien
catgtttggctgaggtgactgtgac

SEQ ID NO: 3539468 - DNA, 25 bp, Homo sapien
taatgccatcttactcagggaagag

SEQ ID NO: 3539469 - DNA, 25 bp, Homo sapien
caagacagaattgttgttagagatc

SEQ ID NO: 3539470 - DNA, 25 bp, Homo sapien
tcggctattagagatcagtggctta

SEQ ID NO: 3539471 - DNA, 25 bp, Homo sapien
cactagtataagctagagctccaag

SEQ ID NO: 3539472 - DNA, 25 bp, Homo sapien
gttagagatcagttagagatcggct

SEQ ID NO: 3539473 - DNA, 25 bp, Homo sapien
ccctttaaggagtggcgctgagaat

SEQ ID NO: 3539474 - DNA, 25 bp, Homo sapien
ctaatcctaccagcccctgtgggaa

SEQ ID NO: 3539475 - DNA, 25 bp, Homo sapien
gatatctatgcttttgactgcaggg

SEQ ID NO: 3539476 - DNA, 25 bp, Homo sapien
tctaaaagaccccagttggtgaata

SEQ ID NO: 3539477 - DNA, 25 bp, Homo sapien
ctggctcaggcagccaacgggcaga

SEQ ID NO: 3539478 - DNA, 25 bp, Homo sapien
ccaacgggcagagttgatactgaca

SEQ ID NO: 3539479 - DNA, 25 bp, Homo sapien
gatactgacatgtctccgctggtcg

SEQ ID NO: 3539480 - DNA, 25 bp, Homo sapien
atgtctccgctggtcggcaggcatg

SEQ ID NO: 3539481 - DNA, 25 bp, Homo sapien
ggacggactgcccataactttcctc

SEQ ID NO: 3539482 - DNA, 25 bp, Homo sapien
aggccaaccagtgagcatcagcctt

SEQ ID NO: 3539483 - DNA, 25 bp, Homo sapien
tcagccttggctggtagtcctgtta

SEQ ID NO: 3539484 - DNA, 25 bp, Homo sapien
ataactttcctctgaccaggccaac

SEQ ID NO: 3539485 - DNA, 25 bp, Homo sapien
agaagataaccaatggtttctgtcc

SEQ ID NO: 3539486 - DNA, 25 bp, Homo sapien
tccaacctatagactttatggttaa

SEQ ID NO: 3539487 - DNA, 25 bp, Homo sapien
gtttctgtccaacctatagacttta

SEQ ID NO: 3539488 - DNA, 25 bp, Homo sapien
agataaccaatggtttctgtccaac

SEQ ID NO: 3539489 - DNA, 25 bp, Homo sapien
cattgaataaacttatagccaaaaa

SEQ ID NO: 3539490 - DNA, 25 bp, Homo sapien
tttgcattgaataaacttatagcca

SEQ ID NO: 3539491 - DNA, 25 bp, Homo sapien
attggagaggattcttttgcattga

SEQ ID NO: 3539492 - DNA, 25 bp, Homo sapien
ttttgcattgaataaacttatagcc

SEQ ID NO: 3539493 - DNA, 25 bp, Homo sapien
cttttgcattgaataaacttatagc

SEQ ID NO: 3539494 - DNA, 25 bp, Homo sapien
aattggagaggattcttttgcattg

SEQ ID NO: 3539495 - DNA, 25 bp, Homo sapien
ggctataagtttattcaatgcaaaa

SEQ ID NO: 3539496 - DNA, 25 bp, Homo sapien
caatgcaaaagaatcctctccaatt

SEQ ID NO: 3539497 - DNA, 25 bp, Homo sapien
ttttggctataagtttattcaatgc

SEQ ID NO: 3539498 - DNA, 25 bp, Homo sapien
gctataagtttattcaatgcaaaag

SEQ ID NO: 3539499 - DNA, 25 bp, Homo sapien
tttttggctataagtttattcaatg

SEQ ID NO: 3539500 - DNA, 25 bp, Homo sapien
tcaatgcaaaagaatcctctccaat

SEQ ID NO: 3539501 - DNA, 25 bp, Homo sapien
gcggatttggtcgtggacgtggtca

SEQ ID NO: 3539502 - DNA, 25 bp, Homo sapien
aggcggatttggtcgtggacgtggt

SEQ ID NO: 3539503 - DNA, 25 bp, Homo sapien
agaggcggatttggtcgtggacgtg

SEQ ID NO: 3539504 - DNA, 25 bp, Homo sapien
ggcggatttggtcgtggacgtggtc

SEQ ID NO: 3539505 - DNA, 25 bp, Homo sapien
gaggcggatttggtcgtggacgtgg

SEQ ID NO: 3539506 - DNA, 25 bp, Homo sapien
tagaggcggatttggtcgtggacgt

SEQ ID NO: 3539507 - DNA, 25 bp, Homo sapien
gaccacgtccacgaccaaatccgcc

SEQ ID NO: 3539508 - DNA, 25 bp, Homo sapien
acgtccacgaccaaatccgcctcta

SEQ ID NO: 3539509 - DNA, 25 bp, Homo sapien
accacgtccacgaccaaatccgcct

SEQ ID NO: 3539510 - DNA, 25 bp, Homo sapien
ccacgtccacgaccaaatccgcctc

SEQ ID NO: 3539511 - DNA, 25 bp, Homo sapien
cacgtccacgaccaaatccgcctct

SEQ ID NO: 3539512 - DNA, 25 bp, Homo sapien
tgaccacgtccacgaccaaatccgc

SEQ ID NO: 3539513 - DNA, 25 bp, Homo sapien
cagacggagtgctgtgccacctggt

SEQ ID NO: 3539514 - DNA, 25 bp, Homo sapien
tgcgagactcacaagaggggaagct

SEQ ID NO: 3539515 - DNA, 25 bp, Homo sapien
cctacagacggagtgctgtgccacc

SEQ ID NO: 3539516 - DNA, 25 bp, Homo sapien
gtgctgtgccacctggtgccgacaa

SEQ ID NO: 3539517 - DNA, 25 bp, Homo sapien
tgagcgacctgcgagactcacaaga

SEQ ID NO: 3539518 - DNA, 25 bp, Homo sapien
gctgacagagatacctacagacgga

SEQ ID NO: 3539519 - DNA, 25 bp, Homo sapien
gtcagcttcccctcttgtgagtctc

SEQ ID NO: 3539520 - DNA, 25 bp, Homo sapien
ttgtcggcaccaggtggcacagcac

SEQ ID NO: 3539521 - DNA, 25 bp, Homo sapien
tcttgtgagtctcgcaggtcgctca

SEQ ID NO: 3539522 - DNA, 25 bp, Homo sapien
tccgtctgtaggtatctctgtcagc

SEQ ID NO: 3539523 - DNA, 25 bp, Homo sapien
agcttcccctcttgtgagtctcgca

SEQ ID NO: 3539524 - DNA, 25 bp, Homo sapien
caggtggcacagcactccgtctgta

SEQ ID NO: 3539525 - DNA, 25 bp, Homo sapien
tcctacgccgtagccgtccagagac

SEQ ID NO: 3539526 - DNA, 25 bp, Homo sapien
ccatcctacgccgtagccgtccaga

SEQ ID NO: 3539527 - DNA, 25 bp, Homo sapien
gattgtgcctgccatcctacgccgt

SEQ ID NO: 3539528 - DNA, 25 bp, Homo sapien
attgtgcctgccatcctacgccgta

SEQ ID NO: 3539529 - DNA, 25 bp, Homo sapien
atcctacgccgtagccgtccagaga

SEQ ID NO: 3539530 - DNA, 25 bp, Homo sapien
catcctacgccgtagccgtccagag

SEQ ID NO: 3539531 - DNA, 25 bp, Homo sapien
acggcgtaggatggcaggcacaatc

SEQ ID NO: 3539532 - DNA, 25 bp, Homo sapien
ctctggacggctacggcgtaggatg

SEQ ID NO: 3539533 - DNA, 25 bp, Homo sapien
tctggacggctacggcgtaggatgg

SEQ ID NO: 3539534 - DNA, 25 bp, Homo sapien
tacggcgtaggatggcaggcacaat

SEQ ID NO: 3539535 - DNA, 25 bp, Homo sapien
tctctggacggctacggcgtaggat

SEQ ID NO: 3539536 - DNA, 25 bp, Homo sapien
gtctctggacggctacggcgtagga

SEQ ID NO: 3539537 - DNA, 25 bp, Homo sapien
gcctaagaagaaccggattgccatt

SEQ ID NO: 3539538 - DNA, 25 bp, Homo sapien
taagaagaaccggattgccatttat

SEQ ID NO: 3539539 - DNA, 25 bp, Homo sapien
agaagaaccggattgccatttatga

SEQ ID NO: 3539540 - DNA, 25 bp, Homo sapien
aagaagaaccggattgccatttatg

SEQ ID NO: 3539541 - DNA, 25 bp, Homo sapien
gaaccggattgccatttatgaactc

SEQ ID NO: 3539542 - DNA, 25 bp, Homo sapien
tgcctaagaagaaccggattgccat

SEQ ID NO: 3539543 - DNA, 25 bp, Homo sapien
gagttcataaatggcaatccggttc

SEQ ID NO: 3539544 - DNA, 25 bp, Homo sapien
atggcaatccggttcttcttaggca

SEQ ID NO: 3539545 - DNA, 25 bp, Homo sapien
cataaatggcaatccggttcttctt

SEQ ID NO: 3539546 - DNA, 25 bp, Homo sapien
tggcaatccggttcttcttaggcat

SEQ ID NO: 3539547 - DNA, 25 bp, Homo sapien
tcataaatggcaatccggttcttct

SEQ ID NO: 3539548 - DNA, 25 bp, Homo sapien
aatggcaatccggttcttcttaggc

SEQ ID NO: 3539549 - DNA, 25 bp, Homo sapien
tacaaaattactgatgaaaccagaa

SEQ ID NO: 3539550 - DNA, 25 bp, Homo sapien
taaggattagtgctttcaacactgg

SEQ ID NO: 3539551 - DNA, 25 bp, Homo sapien
gattgtaggcacataagtggtttag

SEQ ID NO: 3539552 - DNA, 25 bp, Homo sapien
tagtggcaacttgcacagtataata

SEQ ID NO: 3539553 - DNA, 25 bp, Homo sapien
gctagggcattttgagctagaaagc

SEQ ID NO: 3539554 - DNA, 25 bp, Homo sapien
accaggcacagtattgtaacagaga

SEQ ID NO: 3539555 - DNA, 25 bp, Homo sapien
caccgatttctgagtagcgataggg

SEQ ID NO: 3539556 - DNA, 25 bp, Homo sapien
tccccacacaccgatttctgagtag

SEQ ID NO: 3539557 - DNA, 25 bp, Homo sapien
taggcgaagattgtccgagggagag

SEQ ID NO: 3539558 - DNA, 25 bp, Homo sapien
ccgctggtaggcgaagattgtccga

SEQ ID NO: 3539559 - DNA, 25 bp, Homo sapien
gttcgagttccatcggctcccatcc

SEQ ID NO: 3539560 - DNA, 25 bp, Homo sapien
atcggctcccatccgggctatcctg

SEQ ID NO: 3539561 - DNA, 25 bp, Homo sapien
gcccctatcgctactcagaaatcgg

SEQ ID NO: 3539562 - DNA, 25 bp, Homo sapien
ggatgggagccgatggaactcgaac

SEQ ID NO: 3539563 - DNA, 25 bp, Homo sapien
cgctactcagaaatcggtgtgtggg

SEQ ID NO: 3539564 - DNA, 25 bp, Homo sapien
caggatagcccggatgggagccgat

SEQ ID NO: 3539565 - DNA, 25 bp, Homo sapien
cctatcgctactcagaaatcggtgt

SEQ ID NO: 3539566 - DNA, 25 bp, Homo sapien
tcggacaatcttcgcctaccagcgg

SEQ ID NO: 3539567 - DNA, 25 bp, Homo sapien
tctctgttacaatactgtgcctggt

SEQ ID NO: 3539568 - DNA, 25 bp, Homo sapien
tacaatccccacttattgggaggtg

SEQ ID NO: 3539569 - DNA, 25 bp, Homo sapien
tattatactgtgcaagttgccacta

SEQ ID NO: 3539570 - DNA, 25 bp, Homo sapien
aggcttctgcccctattcctaagta

SEQ ID NO: 3539571 - DNA, 25 bp, Homo sapien
gctttctagctcaaaatgccctagc

SEQ ID NO: 3539572 - DNA, 25 bp, Homo sapien
ccagtgttgaaagcactaatcctta

SEQ ID NO: 3539573 - DNA, 25 bp, Homo sapien
gagtcagtctcaggtctacttgcca

SEQ ID NO: 3539574 - DNA, 25 bp, Homo sapien
tgttgggccaacagacattcccagg

SEQ ID NO: 3539575 - DNA, 25 bp, Homo sapien
gctttagtgggtaatgggcctgtcc

SEQ ID NO: 3539576 - DNA, 25 bp, Homo sapien
tgtttatcgtgctagtcctcccagt

SEQ ID NO: 3539577 - DNA, 25 bp, Homo sapien
tgattcccttctgcttgagccagag

SEQ ID NO: 3539578 - DNA, 25 bp, Homo sapien
catttgcgattcctccagactggat

SEQ ID NO: 3539579 - DNA, 25 bp, Homo sapien
ttgacattagagatggagacaccca

SEQ ID NO: 3539580 - DNA, 25 bp, Homo sapien
gaagcactgatccagaagtctgaag

SEQ ID NO: 3539581 - DNA, 25 bp, Homo sapien
cattaaaactgggaggactagcacg

SEQ ID NO: 3539582 - DNA, 25 bp, Homo sapien
gcacatacagctattcaagggagaa

SEQ ID NO: 3539583 - DNA, 25 bp, Homo sapien
caatggcaagtagacctgagactga

SEQ ID NO: 3539584 - DNA, 25 bp, Homo sapien
gagagtagcatatccagtctggagg

SEQ ID NO: 3539585 - DNA, 25 bp, Homo sapien
gtttaatgggacagtacagcatctc

SEQ ID NO: 3539586 - DNA, 25 bp, Homo sapien
tgtatcaccgtttaaggcaagaagt

SEQ ID NO: 3539587 - DNA, 25 bp, Homo sapien
cagcaaatgtccctgaattcagtga

SEQ ID NO: 3539588 - DNA, 25 bp, Homo sapien
tttggatagctgtgctgtatcaccg

SEQ ID NO: 3539589 - DNA, 25 bp, Homo sapien
caagggtttaatgggacagtacagc

SEQ ID NO: 3539590 - DNA, 25 bp, Homo sapien
gaagacaccagcttttttggatagc

SEQ ID NO: 3539591 - DNA, 25 bp, Homo sapien
gagatgctgtactgtcccattaaac

SEQ ID NO: 3539592 - DNA, 25 bp, Homo sapien
acttcttgccttaaacggtgataca

SEQ ID NO: 3539593 - DNA, 25 bp, Homo sapien
tcactgaattcagggacatttgctg

SEQ ID NO: 3539594 - DNA, 25 bp, Homo sapien
tatccaaaaaagctggtgtcttccc

SEQ ID NO: 3539595 - DNA, 25 bp, Homo sapien
cggtgatacagcacagctatccaaa

SEQ ID NO: 3539596 - DNA, 25 bp, Homo sapien
tgtactgtcccattaaacccttgct

SEQ ID NO: 3539597 - DNA, 25 bp, Homo sapien
ggctgtcctgccaagggtctcaagg

SEQ ID NO: 3539598 - DNA, 25 bp, Homo sapien
gaatctgatgttggtagctctgaca

SEQ ID NO: 3539599 - DNA, 25 bp, Homo sapien
caggatcaaggcatctcaacaaggt

SEQ ID NO: 3539600 - DNA, 25 bp, Homo sapien
tggtgactggagctactactactgc

SEQ ID NO: 3539601 - DNA, 25 bp, Homo sapien
gctgaagtacctagaaagttcccat

SEQ ID NO: 3539602 - DNA, 25 bp, Homo sapien
gattctcagtaggtaccatctgcca

SEQ ID NO: 3539603 - DNA, 25 bp, Homo sapien
gagaggtctgtcagagctaccaaca

SEQ ID NO: 3539604 - DNA, 25 bp, Homo sapien
gcagtagtagtagctccagtcacca

SEQ ID NO: 3539605 - DNA, 25 bp, Homo sapien
gccttgagacccttggcaggacagc

SEQ ID NO: 3539606 - DNA, 25 bp, Homo sapien
tgccagccccatatgtgacaacaga

SEQ ID NO: 3539607 - DNA, 25 bp, Homo sapien
tcaaaaaaggttcaccaggcagcct

SEQ ID NO: 3539608 - DNA, 25 bp, Homo sapien
aacgattattccacaattaggccgg

SEQ ID NO: 3539609 - DNA, 25 bp, Homo sapien
tctactaagtgtcaggttccgcatg

SEQ ID NO: 3539610 - DNA, 25 bp, Homo sapien
tcagtgtagttggacagaggatatc

SEQ ID NO: 3539611 - DNA, 25 bp, Homo sapien
ccacagaaagtaaaaagcttgcagg

SEQ ID NO: 3539612 - DNA, 25 bp, Homo sapien
tagcacaaggaacgagtgatcaatt

SEQ ID NO: 3539613 - DNA, 25 bp, Homo sapien
tacagtgaaggcacaagcaatggca

SEQ ID NO: 3539614 - DNA, 25 bp, Homo sapien
gccatacagtgaaggcacaagcaat

SEQ ID NO: 3539615 - DNA, 25 bp, Homo sapien
gggagctgccatacagtgaaggcac

SEQ ID NO: 3539616 - DNA, 25 bp, Homo sapien
tgaaggcacaagcaatggcactcac

SEQ ID NO: 3539617 - DNA, 25 bp, Homo sapien
caggctcaccgaaatggcattggga

SEQ ID NO: 3539618 - DNA, 25 bp, Homo sapien
catggaggtctctccaccatgggcc

SEQ ID NO: 3539619 - DNA, 25 bp, Homo sapien
tatctgcccattggggacaggctca

SEQ ID NO: 3539620 - DNA, 25 bp, Homo sapien
tgcagcaggatccttcgtgaggcca

SEQ ID NO: 3539621 - DNA, 25 bp, Homo sapien
tgtagagcatttcgcccaggttatg

SEQ ID NO: 3539622 - DNA, 25 bp, Homo sapien
tatggggggccagggagtacactgc

SEQ ID NO: 3539623 - DNA, 25 bp, Homo sapien
caaatcgcttggtgtagagcatttc

SEQ ID NO: 3539624 - DNA, 25 bp, Homo sapien
cgcttggtgtagagcatttcgccca

SEQ ID NO: 3539625 - DNA, 25 bp, Homo sapien
tagtattggcaatgttactggccac

SEQ ID NO: 3539626 - DNA, 25 bp, Homo sapien
ccactggagccggtaggtagtattg

SEQ ID NO: 3539627 - DNA, 25 bp, Homo sapien
ttagtgaagtcccaccactggagcc

SEQ ID NO: 3539628 - DNA, 25 bp, Homo sapien
gaggtcaaacttagtgaagtcccac

SEQ ID NO: 3539629 - DNA, 25 bp, Homo sapien
gattcttcagtatcacctagtcttc

SEQ ID NO: 3539630 - DNA, 25 bp, Homo sapien
atggacaatttcatacccagattct

SEQ ID NO: 3539631 - DNA, 25 bp, Homo sapien
ttcttcagtatcacctagtcttcct

SEQ ID NO: 3539632 - DNA, 25 bp, Homo sapien
tggacaatttcatacccagattctt

SEQ ID NO: 3539633 - DNA, 25 bp, Homo sapien
cataactaggtagcgtgcacacaaa

SEQ ID NO: 3539634 - DNA, 25 bp, Homo sapien
ctctacaggaaagtagtaaggtctg

SEQ ID NO: 3539635 - DNA, 25 bp, Homo sapien
taacctcttgatctgtcatggccag

SEQ ID NO: 3539636 - DNA, 25 bp, Homo sapien
ggtctgatgggagaatataacctct

SEQ ID NO: 3539637 - DNA, 25 bp, Homo sapien
ttttagatactgtccagccatggga

SEQ ID NO: 3539638 - DNA, 25 bp, Homo sapien
ggaatgtcaccattggccttagaaa

SEQ ID NO: 3539639 - DNA, 25 bp, Homo sapien
gattagaatattcccatccataaac

SEQ ID NO: 3539640 - DNA, 25 bp, Homo sapien
aaggaatgtcaccattggccttaga

SEQ ID NO: 3539641 - DNA, 25 bp, Homo sapien
tcatgtttaccagaagtctagggcc

SEQ ID NO: 3539642 - DNA, 25 bp, Homo sapien
ttataagcagggaacaaccaggcag

SEQ ID NO: 3539643 - DNA, 25 bp, Homo sapien
gacaggtatattggaaaccctcaca

SEQ ID NO: 3539644 - DNA, 25 bp, Homo sapien
cataatggcctcaatcagggctaga

SEQ ID NO: 3539645 - DNA, 25 bp, Homo sapien
catgcccagctaacttaaacttttt

SEQ ID NO: 3539646 - DNA, 25 bp, Homo sapien
ctaggattacaggcccaaactacca

SEQ ID NO: 3539647 - DNA, 25 bp, Homo sapien
tggcctcgggcaatcctcctaactt

SEQ ID NO: 3539648 - DNA, 25 bp, Homo sapien
tcctggcctcgggcaatcctcctaa

SEQ ID NO: 3539649 - DNA, 25 bp, Homo sapien
cctatgtctaggaaaccagggtcca

SEQ ID NO: 3539650 - DNA, 25 bp, Homo sapien
gaaatacagggctatatcctagaaa

SEQ ID NO: 3539651 - DNA, 25 bp, Homo sapien
tgagttgcttctgttcaaggagctc

SEQ ID NO: 3539652 - DNA, 25 bp, Homo sapien
taaatgatgccacgggtacaggttc

SEQ ID NO: 3539653 - DNA, 25 bp, Homo sapien
taacaacaagcagaaacttagtggc

SEQ ID NO: 3539654 - DNA, 25 bp, Homo sapien
tctataggcctgaagtcaaacaaag

SEQ ID NO: 3539655 - DNA, 25 bp, Homo sapien
tgaagccaaatagcctgccaaatgc

SEQ ID NO: 3539656 - DNA, 25 bp, Homo sapien
gactcattgggctagaagaaaggtg

SEQ ID NO: 3539657 - DNA, 25 bp, Homo sapien
gaacggatcttgattttccgcaaac

SEQ ID NO: 3539658 - DNA, 25 bp, Homo sapien
ttgttgatgattctgaatggctttg

SEQ ID NO: 3539659 - DNA, 25 bp, Homo sapien
tgaagactcatttggcactacagta

SEQ ID NO: 3539660 - DNA, 25 bp, Homo sapien
tccgcaaacccatttttgttgatga

SEQ ID NO: 3539661 - DNA, 25 bp, Homo sapien
gattttcctcagcaagcaccactgg

SEQ ID NO: 3539662 - DNA, 25 bp, Homo sapien
ggtggtttagagactactggctcca

SEQ ID NO: 3539663 - DNA, 25 bp, Homo sapien
taaaacaactacgaggaggcggatc

SEQ ID NO: 3539664 - DNA, 25 bp, Homo sapien
tacttcttagctgcattactctggg

SEQ ID NO: 3539665 - DNA, 25 bp, Homo sapien
tcagaacacagtcacgtcatgcctc

SEQ ID NO: 3539666 - DNA, 25 bp, Homo sapien
gactgaccagaagcaatagcacaca

SEQ ID NO: 3539667 - DNA, 25 bp, Homo sapien
gtgacagggaaacaacctttgccac

SEQ ID NO: 3539668 - DNA, 25 bp, Homo sapien
taaatttataagtcggcagtggagg

SEQ ID NO: 3539669 - DNA, 25 bp, Homo sapien
tctgttctgtggagatttctgagcc

SEQ ID NO: 3539670 - DNA, 25 bp, Homo sapien
ctgttctgtggagatttctgagcca

SEQ ID NO: 3539671 - DNA, 25 bp, Homo sapien
agctccaagggcgtctccctctttt

SEQ ID NO: 3539672 - DNA, 25 bp, Homo sapien
gctccaagggcgtctccctcttttc

SEQ ID NO: 3539673 - DNA, 25 bp, Homo sapien
gctccttggcccttcacattttcaa

SEQ ID NO: 3539674 - DNA, 25 bp, Homo sapien
ggcccttcacattttcaaaagccaa

SEQ ID NO: 3539675 - DNA, 25 bp, Homo sapien
tctggctccttggcccttcacattt

SEQ ID NO: 3539676 - DNA, 25 bp, Homo sapien
tggctccttggcccttcacattttc

SEQ ID NO: 3539677 - DNA, 25 bp, Homo sapien
taaggcaagtactcaggcagcaaga

SEQ ID NO: 3539678 - DNA, 25 bp, Homo sapien
ccagcataaggcaagtactcaggca

SEQ ID NO: 3539679 - DNA, 25 bp, Homo sapien
aaatcccagcataaggcaagtactc

SEQ ID NO: 3539680 - DNA, 25 bp, Homo sapien
caagtactcaggcagcaagaaacgc

SEQ ID NO: 3539681 - DNA, 25 bp, Homo sapien
tgggacaaagcgtccaagcgaaggt

SEQ ID NO: 3539682 - DNA, 25 bp, Homo sapien
cagacatccgggcattgcgtggagc

SEQ ID NO: 3539683 - DNA, 25 bp, Homo sapien
gcgaaggtgcagacatccgggcatt

SEQ ID NO: 3539684 - DNA, 25 bp, Homo sapien
gtccaagcgaaggtgcagacatccg

SEQ ID NO: 3539685 - DNA, 25 bp, Homo sapien
tatccagacgcctgctgtgggagga

SEQ ID NO: 3539686 - DNA, 25 bp, Homo sapien
catttaattcttctggctaggccac

SEQ ID NO: 3539687 - DNA, 25 bp, Homo sapien
tacagagaagcggacgaaagaccag

SEQ ID NO: 3539688 - DNA, 25 bp, Homo sapien
gagataatcttcaaactggccctga

SEQ ID NO: 3539689 - DNA, 25 bp, Homo sapien
gatacaaggtcgacatcaagccaag

SEQ ID NO: 3539690 - DNA, 25 bp, Homo sapien
cgtgctgatacaaggtcgacatcaa

SEQ ID NO: 3539691 - DNA, 25 bp, Homo sapien
ttccgtgctgatacaaggtcgacat

SEQ ID NO: 3539692 - DNA, 25 bp, Homo sapien
tgctgatacaaggtcgacatcaagc

SEQ ID NO: 3539693 - DNA, 25 bp, Homo sapien
tgcaaggcacgcaagacaaagatct

SEQ ID NO: 3539694 - DNA, 25 bp, Homo sapien
tgcctatgggataaagttcatctcc

SEQ ID NO: 3539695 - DNA, 25 bp, Homo sapien
gaataagccctgtaaatctcctgtc

SEQ ID NO: 3539696 - DNA, 25 bp, Homo sapien
tagccacagatctattcagggtccc

SEQ ID NO: 3539697 - DNA, 25 bp, Homo sapien
gtttgataaacacaaggaccctgca

SEQ ID NO: 3539698 - DNA, 25 bp, Homo sapien
tcctgtttgtgcagtttgataaaca

SEQ ID NO: 3539699 - DNA, 25 bp, Homo sapien
gatgtcctgtttgtgcagtttgata

SEQ ID NO: 3539700 - DNA, 25 bp, Homo sapien
tggatgtcctgtttgtgcagtttga

SEQ ID NO: 3539701 - DNA, 25 bp, Homo sapien
tgtagacagagatgaatggcaggag

SEQ ID NO: 3539702 - DNA, 25 bp, Homo sapien
cccagcaataagattggctagctta

SEQ ID NO: 3539703 - DNA, 25 bp, Homo sapien
ggaatcaaaatgagccaaatgttca

SEQ ID NO: 3539704 - DNA, 25 bp, Homo sapien
aatggctagaaaggtcagaagcagc

SEQ ID NO: 3539705 - DNA, 25 bp, Homo sapien
gatgagagaatgcaaaacccagcaa

SEQ ID NO: 3539706 - DNA, 25 bp, Homo sapien
aagcccaaagaagcaagaaatcatt

SEQ ID NO: 3539707 - DNA, 25 bp, Homo sapien
tcctttagcgcatcctcccatggct

SEQ ID NO: 3539708 - DNA, 25 bp, Homo sapien
catttctcaacccaccacattaatt

SEQ ID NO: 3539709 - DNA, 25 bp, Homo sapien
tggggctgaccctgctcctttagcg

SEQ ID NO: 3539710 - DNA, 25 bp, Homo sapien
ggatcttaaagagtcagtctgatca

SEQ ID NO: 3539711 - DNA, 25 bp, Homo sapien
caaaaaagtttaggcaatggagtag

SEQ ID NO: 3539712 - DNA, 25 bp, Homo sapien
ggcaatggagtaggatcttaaagag

SEQ ID NO: 3539713 - DNA, 25 bp, Homo sapien
ggagtaggatcttaaagagtcagtc

SEQ ID NO: 3539714 - DNA, 25 bp, Homo sapien
tatttcagaacgaagacaacatctc

SEQ ID NO: 3539715 - DNA, 25 bp, Homo sapien
gctactctgcttaggagaaaaaaca

SEQ ID NO: 3539716 - DNA, 25 bp, Homo sapien
tccacagctactctgcttaggagaa

SEQ ID NO: 3539717 - DNA, 25 bp, Homo sapien
agtatttcagaacgaagacaacatc

SEQ ID NO: 3539718 - DNA, 25 bp, Homo sapien
gagttgggagcaagaacatccacca

SEQ ID NO: 3539719 - DNA, 25 bp, Homo sapien
gtgctctgggcatcttaaccctctg

SEQ ID NO: 3539720 - DNA, 25 bp, Homo sapien
tcgcgcgccagtgaatcagcaaagc

SEQ ID NO: 3539721 - DNA, 25 bp, Homo sapien
caatgggaggtctctgtcctcgcgc

SEQ ID NO: 3539722 - DNA, 25 bp, Homo sapien
caagtcggttccctctactgatgga

SEQ ID NO: 3539723 - DNA, 25 bp, Homo sapien
caaagtcctcaaattccaagtcggt

SEQ ID NO: 3539724 - DNA, 25 bp, Homo sapien
catcctctgggcgtagtatgcagca

SEQ ID NO: 3539725 - DNA, 25 bp, Homo sapien
gcgaatactgtctctccgtgagaga

SEQ ID NO: 3539726 - DNA, 25 bp, Homo sapien
ggaatactatgaaaggcagttaatc

SEQ ID NO: 3539727 - DNA, 25 bp, Homo sapien
aaaggcagttaatccagctctccca

SEQ ID NO: 3539728 - DNA, 25 bp, Homo sapien
cagagatggacaaacacaaactagc

SEQ ID NO: 3539729 - DNA, 25 bp, Homo sapien
gatggacaaacacaaactagcacta

SEQ ID NO: 3539730 - DNA, 25 bp, Homo sapien
acctgaaccacctgtctcaaaactg

SEQ ID NO: 3539731 - DNA, 25 bp, Homo sapien
cacctgaaccacctgtctcaaaact

SEQ ID NO: 3539732 - DNA, 25 bp, Homo sapien
cctgaaccacctgtctcaaaactgt

SEQ ID NO: 3539733 - DNA, 25 bp, Homo sapien
tgggtaaattgggtgctctctggat

SEQ ID NO: 3539734 - DNA, 25 bp, Homo sapien
gtaaattgggtgctctctggatcct

SEQ ID NO: 3539735 - DNA, 25 bp, Homo sapien
ctcgctgggtctgggtaaattgggt

SEQ ID NO: 3539736 - DNA, 25 bp, Homo sapien
ggtctgggtaaattgggtgctctct

SEQ ID NO: 3539737 - DNA, 25 bp, Homo sapien
ataatgaaatgagggaagattccag

SEQ ID NO: 3539738 - DNA, 25 bp, Homo sapien
aatgagggaagattccagcagcctc

SEQ ID NO: 3539739 - DNA, 25 bp, Homo sapien
tgaaatgagggaagattccagcagc

SEQ ID NO: 3539740 - DNA, 25 bp, Homo sapien
aacgggataatgaaatgagggaaga

SEQ ID NO: 3539741 - DNA, 25 bp, Homo sapien
gcatatgtattcaatggagactgac

SEQ ID NO: 3539742 - DNA, 25 bp, Homo sapien
tgcaagaccttccacggtccaggca

SEQ ID NO: 3539743 - DNA, 25 bp, Homo sapien
ccaggtaataggtaatactgagcac

SEQ ID NO: 3539744 - DNA, 25 bp, Homo sapien
taaagtgtatcactctgtggcacat

SEQ ID NO: 3539745 - DNA, 25 bp, Homo sapien
gcatgtctgacatggtgcttcccaa

SEQ ID NO: 3539746 - DNA, 25 bp, Homo sapien
gcaggataaggacagcagctaccaa

SEQ ID NO: 3539747 - DNA, 25 bp, Homo sapien
cacgtataataaacacggcccaggg

SEQ ID NO: 3539748 - DNA, 25 bp, Homo sapien
ggtctcagagaggaacgcatattgt

SEQ ID NO: 3539749 - DNA, 25 bp, Homo sapien
gtgagccaagatagcgccgctgtac

SEQ ID NO: 3539750 - DNA, 25 bp, Homo sapien
gccaagatagcgccgctgtactcca

SEQ ID NO: 3539751 - DNA, 25 bp, Homo sapien
gatagcgccgctgtactccagccta

SEQ ID NO: 3539752 - DNA, 25 bp, Homo sapien
tgagccaagatagcgccgctgtact

SEQ ID NO: 3539753 - DNA, 25 bp, Homo sapien
catgaaattgtcataaacgacacct

SEQ ID NO: 3539754 - DNA, 25 bp, Homo sapien
cccgttcccaaaaagattcgcacat

SEQ ID NO: 3539755 - DNA, 25 bp, Homo sapien
gacacctaaagtacaattagtagag

SEQ ID NO: 3539756 - DNA, 25 bp, Homo sapien
gagaaactgcaatttccactctcct

SEQ ID NO: 3539757 - DNA, 25 bp, Homo sapien
cactgaagctcatggcgaatgctgc

SEQ ID NO: 3539758 - DNA, 25 bp, Homo sapien
tggcaagcacgacagcgattcaggt

SEQ ID NO: 3539759 - DNA, 25 bp, Homo sapien
tgaagccggtcatactccagaaaga

SEQ ID NO: 3539760 - DNA, 25 bp, Homo sapien
gaaagaagcgtctcaggtcacactg

SEQ ID NO: 3539761 - DNA, 25 bp, Homo sapien
aactcgagtgccagagcagcggctg

SEQ ID NO: 3539762 - DNA, 25 bp, Homo sapien
caaggtgctggcagcactcagctgt

SEQ ID NO: 3539763 - DNA, 25 bp, Homo sapien
ctgtcctggtgtggcaagagggaag

SEQ ID NO: 3539764 - DNA, 25 bp, Homo sapien
agcactcagctgtggggtaactgac

SEQ ID NO: 3539765 - DNA, 25 bp, Homo sapien
ctgtcggagcctgatgtaagcggaa

SEQ ID NO: 3539766 - DNA, 25 bp, Homo sapien
tcggagcctgatgtaagcggaagtc

SEQ ID NO: 3539767 - DNA, 25 bp, Homo sapien
gagcctgatgtaagcggaagtcctg

SEQ ID NO: 3539768 - DNA, 25 bp, Homo sapien
agcctgatgtaagcggaagtcctgg

SEQ ID NO: 3539769 - DNA, 25 bp, Homo sapien
tgggggtgagggggtagcagaatct

SEQ ID NO: 3539770 - DNA, 25 bp, Homo sapien
tgagggggtagcagaatcttgcact

SEQ ID NO: 3539771 - DNA, 25 bp, Homo sapien
ggtagcagaatcttgcactgtgctt

SEQ ID NO: 3539772 - DNA, 25 bp, Homo sapien
gggtagcagaatcttgcactgtgct

SEQ ID NO: 3539773 - DNA, 25 bp, Homo sapien
ggagggcacgctgacggtagtggga

SEQ ID NO: 3539774 - DNA, 25 bp, Homo sapien
gtgggataattctgttccatctatg

SEQ ID NO: 3539775 - DNA, 25 bp, Homo sapien
ctggatgccagaagagcgggaggac

SEQ ID NO: 3539776 - DNA, 25 bp, Homo sapien
gtccggcgaactggctgtgattgca

SEQ ID NO: 3539777 - DNA, 25 bp, Homo sapien
caattgctgtgagtaagtagtgtcc

SEQ ID NO: 3539778 - DNA, 25 bp, Homo sapien
tgattagaggggttaacaattgctg

SEQ ID NO: 3539779 - DNA, 25 bp, Homo sapien
taagtagtgtccaagtggatcaaat

SEQ ID NO: 3539780 - DNA, 25 bp, Homo sapien
gggttaacaattgctgtgagtaagt

SEQ ID NO: 3539781 - DNA, 25 bp, Homo sapien
ggacccgttccatctcactagctgt

SEQ ID NO: 3539782 - DNA, 25 bp, Homo sapien
agctgagccgtagggtggaaagcca

SEQ ID NO: 3539783 - DNA, 25 bp, Homo sapien
tcttcaccacagcaaagggttcccg

SEQ ID NO: 3539784 - DNA, 25 bp, Homo sapien
tggcattgttgctatctgtgaacca

SEQ ID NO: 3539785 - DNA, 25 bp, Homo sapien
tattatggttcacatgggtggaggc

SEQ ID NO: 3539786 - DNA, 25 bp, Homo sapien
cagccagaagcaataaggcctgaga

SEQ ID NO: 3539787 - DNA, 25 bp, Homo sapien
agtacggcggtgtccaatcagggaa

SEQ ID NO: 3539788 - DNA, 25 bp, Homo sapien
gatgaaaagtgacacaccatggagt

SEQ ID NO: 3539789 - DNA, 25 bp, Homo sapien
ctagaaaatcaaagagtagaactga

SEQ ID NO: 3539790 - DNA, 25 bp, Homo sapien
tattgatgctacctgccaatcccaa

SEQ ID NO: 3539791 - DNA, 25 bp, Homo sapien
gaagcatgtggaagggtaaccaatc

SEQ ID NO: 3539792 - DNA, 25 bp, Homo sapien
agggtaaccaatcttatcaactttg

SEQ ID NO: 3539793 - DNA, 25 bp, Homo sapien
gacttggaagatcaagccaggccaa

SEQ ID NO: 3539794 - DNA, 25 bp, Homo sapien
actggtgagctgtatcacacaggca

SEQ ID NO: 3539795 - DNA, 25 bp, Homo sapien
tggaaaaaccatcataccactggtg

SEQ ID NO: 3539796 - DNA, 25 bp, Homo sapien
gagactttagggactgacttggaag

SEQ ID NO: 3539797 - DNA, 25 bp, Homo sapien
gagcgtggactatccggcagttcta

SEQ ID NO: 3539798 - DNA, 25 bp, Homo sapien
aaggtagagcgtggactatccggca

SEQ ID NO: 3539799 - DNA, 25 bp, Homo sapien
tgaaggccaataagaaggtagagcg

SEQ ID NO: 3539800 - DNA, 25 bp, Homo sapien
tgtctgggctgaaggccaataagaa

SEQ ID NO: 3539801 - DNA, 25 bp, Homo sapien
tcatccaccgggttttatcttctac

SEQ ID NO: 3539802 - DNA, 25 bp, Homo sapien
ccatttcatccaccgggttttatct

SEQ ID NO: 3539803 - DNA, 25 bp, Homo sapien
ttcatccaccgggttttatcttcta

SEQ ID NO: 3539804 - DNA, 25 bp, Homo sapien
caccgggttttatcttctaccagct

SEQ ID NO: 3539805 - DNA, 25 bp, Homo sapien
gcccccagagtatccggacagcatt

SEQ ID NO: 3539806 - DNA, 25 bp, Homo sapien
cgttctcgcccccagagtatccgga

SEQ ID NO: 3539807 - DNA, 25 bp, Homo sapien
cagagtatccggacagcattctttt

SEQ ID NO: 3539808 - DNA, 25 bp, Homo sapien
atggcccgagcaccccgttctcgcc

SEQ ID NO: 3539809 - DNA, 25 bp, Homo sapien
gcaagtaacagctccaacacactga

SEQ ID NO: 3539810 - DNA, 25 bp, Homo sapien
taacagctccaacacactgaagcag

SEQ ID NO: 3539811 - DNA, 25 bp, Homo sapien
gaaggagcaagtaacagctccaaca

SEQ ID NO: 3539812 - DNA, 25 bp, Homo sapien
aggaaatgaaggagcaagtaacagc

SEQ ID NO: 3539813 - DNA, 25 bp, Homo sapien
ctaaaatgaggccatacaggtcctt

SEQ ID NO: 3539814 - DNA, 25 bp, Homo sapien
aaaatgaggccatacaggtccttgt

SEQ ID NO: 3539815 - DNA, 25 bp, Homo sapien
ccttgtaagttgtcctcatggaaat

SEQ ID NO: 3539816 - DNA, 25 bp, Homo sapien
tacaggtccttgtaagttgtcctca

SEQ ID NO: 3539817 - DNA, 25 bp, Homo sapien
gaatcattatcatgtgttcttttgg

SEQ ID NO: 3539818 - DNA, 25 bp, Homo sapien
ctatgctgctattcaaaagtctggg

SEQ ID NO: 3539819 - DNA, 25 bp, Homo sapien
gcccaagttgtatagctagtaagca

SEQ ID NO: 3539820 - DNA, 25 bp, Homo sapien
aactggcatatacagcacctagtgc

SEQ ID NO: 3539821 - DNA, 25 bp, Homo sapien
taaggatgctatgactgaagactct

SEQ ID NO: 3539822 - DNA, 25 bp, Homo sapien
gactctaatccctgtaaatacccag

SEQ ID NO: 3539823 - DNA, 25 bp, Homo sapien
tcaaatacctatactccccactgga

SEQ ID NO: 3539824 - DNA, 25 bp, Homo sapien
gattcgtgattccaacttttcaagg

SEQ ID NO: 3539825 - DNA, 25 bp, Homo sapien
cttacattacattggcaggctgcca

SEQ ID NO: 3539826 - DNA, 25 bp, Homo sapien
caaaataactctaccaaggctgagg

SEQ ID NO: 3539827 - DNA, 25 bp, Homo sapien
tctcaggtagtaaacctagggctta

SEQ ID NO: 3539828 - DNA, 25 bp, Homo sapien
ggctgccacatactactggacacat

SEQ ID NO: 3539829 - DNA, 25 bp, Homo sapien
ttagcattcattaggagccaatgag

SEQ ID NO: 3539830 - DNA, 25 bp, Homo sapien
gcacattcttagcttaacttcccaa

SEQ ID NO: 3539831 - DNA, 25 bp, Homo sapien
gccaatgagatagtccttataactc

SEQ ID NO: 3539832 - DNA, 25 bp, Homo sapien
tacgcagaacttatcaattcccagt

SEQ ID NO: 3539833 - DNA, 25 bp, Homo sapien
ttgcagtccagcgaacgggctgagc

SEQ ID NO: 3539834 - DNA, 25 bp, Homo sapien
cagacgggagctcggtttgcagtcc

SEQ ID NO: 3539835 - DNA, 25 bp, Homo sapien
agacatcaagcaagaagacggcgca

SEQ ID NO: 3539836 - DNA, 25 bp, Homo sapien
tccgttctaccgaccggcaggagaa

SEQ ID NO: 3539837 - DNA, 25 bp, Homo sapien
gatagtcccagtttgtcgggcgcag

SEQ ID NO: 3539838 - DNA, 25 bp, Homo sapien
tctaccttacctgctcctagggagg

SEQ ID NO: 3539839 - DNA, 25 bp, Homo sapien
caaagatcactgcaagtatggttac

SEQ ID NO: 3539840 - DNA, 25 bp, Homo sapien
ttccaaaggcctagagccacaggtg

SEQ ID NO: 3539841 - DNA, 25 bp, Homo sapien
tatttgcaacgctgagtctagactg

SEQ ID NO: 3539842 - DNA, 25 bp, Homo sapien
ggcagagttgcacctttacagataa

SEQ ID NO: 3539843 - DNA, 25 bp, Homo sapien
cacctgaaagttcggcaaagattta

SEQ ID NO: 3539844 - DNA, 25 bp, Homo sapien
gagaccatggaaagggtggcttatt

SEQ ID NO: 3539845 - DNA, 25 bp, Homo sapien
gaaatcaggtttgaccctagcgtga

SEQ ID NO: 3539846 - DNA, 25 bp, Homo sapien
tgaagatcatcctgggctgtacccc

SEQ ID NO: 3539847 - DNA, 25 bp, Homo sapien
gaagaccagtcaggccttgaacagc

SEQ ID NO: 3539848 - DNA, 25 bp, Homo sapien
gacacacttgcctaggagacttgcc

SEQ ID NO: 3539849 - DNA, 25 bp, Homo sapien
gcatatccaaggtctagcaccagaa

SEQ ID NO: 3539850 - DNA, 25 bp, Homo sapien
gacaagtcagaggtatcacatggtg

SEQ ID NO: 3539851 - DNA, 25 bp, Homo sapien
gaaatgatccaagaggacaagtcag

SEQ ID NO: 3539852 - DNA, 25 bp, Homo sapien
caaaggcaagaggtaggaaatgatc

SEQ ID NO: 3539853 - DNA, 25 bp, Homo sapien
atttagcctctaactccgagtcagg

SEQ ID NO: 3539854 - DNA, 25 bp, Homo sapien
tccaattattgcagacaggctaaag

SEQ ID NO: 3539855 - DNA, 25 bp, Homo sapien
gatctaggtccaagtcacagtccaa

SEQ ID NO: 3539856 - DNA, 25 bp, Homo sapien
tactaatgtcagaagatcattcccc

SEQ ID NO: 3539857 - DNA, 25 bp, Homo sapien
agagttcactggatagtagggagcc

SEQ ID NO: 3539858 - DNA, 25 bp, Homo sapien
tgaactcctgacctttactatgact

SEQ ID NO: 3539859 - DNA, 25 bp, Homo sapien
aatgtttgcaaccactgagctttca

SEQ ID NO: 3539860 - DNA, 25 bp, Homo sapien
tagtggtactcaacctagagttcac

SEQ ID NO: 3539861 - DNA, 25 bp, Homo sapien
atcaagatattctggcatagcccca

SEQ ID NO: 3539862 - DNA, 25 bp, Homo sapien
tgctagatgatggaactgtgtaaaa

SEQ ID NO: 3539863 - DNA, 25 bp, Homo sapien
gaaagtctgtcacaactcctgggaa

SEQ ID NO: 3539864 - DNA, 25 bp, Homo sapien
ctgtatactcagtcatgctagatga

SEQ ID NO: 3539865 - DNA, 25 bp, Homo sapien
tcctgtcattggagaggaccaaaca

SEQ ID NO: 3539866 - DNA, 25 bp, Homo sapien
gagcattagctcctgacgaatacgg

SEQ ID NO: 3539867 - DNA, 25 bp, Homo sapien
cagagggttcggaaagtcttctcaa

SEQ ID NO: 3539868 - DNA, 25 bp, Homo sapien
tctctggtgagtactgcagtgcccc

SEQ ID NO: 3539869 - DNA, 25 bp, Homo sapien
agaagccagctatctttgtgcatac

SEQ ID NO: 3539870 - DNA, 25 bp, Homo sapien
ccagaagccagctatctttgtgcat

SEQ ID NO: 3539871 - DNA, 25 bp, Homo sapien
cagaagccagctatctttgtgcata

SEQ ID NO: 3539872 - DNA, 25 bp, Homo sapien
ttggcaacacaacgactcatagacg

SEQ ID NO: 3539873 - DNA, 25 bp, Homo sapien
aaactgactactgagggaagactgc

SEQ ID NO: 3539874 - DNA, 25 bp, Homo sapien
ggtgaccacggccatatagcaagag

SEQ ID NO: 3539875 - DNA, 25 bp, Homo sapien
gaactgccgtggaaacccatacatg

SEQ ID NO: 3539876 - DNA, 25 bp, Homo sapien
accacagttaaatggctctgccatt

SEQ ID NO: 3539877 - DNA, 25 bp, Homo sapien
aaccacagttaaatggctctgccat

SEQ ID NO: 3539878 - DNA, 25 bp, Homo sapien
gatgttggtgcaagaacgtattttt

SEQ ID NO: 3539879 - DNA, 25 bp, Homo sapien
tggtgcaagaacgtatttttaagaa

SEQ ID NO: 3539880 - DNA, 25 bp, Homo sapien
ccgcggctgccaggttaccagccac

SEQ ID NO: 3539881 - DNA, 25 bp, Homo sapien
tccgcggctgccaggttaccagcca

SEQ ID NO: 3539882 - DNA, 25 bp, Homo sapien
ctccgcggctgccaggttaccagcc

SEQ ID NO: 3539883 - DNA, 25 bp, Homo sapien
ctctccgcggctgccaggttaccag

SEQ ID NO: 3539884 - DNA, 25 bp, Homo sapien
cgctgccgcggctacctgcggttca

SEQ ID NO: 3539885 - DNA, 25 bp, Homo sapien
gctacctgcggttcatctccgcaca

SEQ ID NO: 3539886 - DNA, 25 bp, Homo sapien
ggcaccgccccttccgcgtcagcgc

SEQ ID NO: 3539887 - DNA, 25 bp, Homo sapien
cggcgcgcaacagcggcaccgcccc

SEQ ID NO: 3539888 - DNA, 25 bp, Homo sapien
tcagaggttatataccattctggca

SEQ ID NO: 3539889 - DNA, 25 bp, Homo sapien
gttatataccattctggcaaaacag

SEQ ID NO: 3539890 - DNA, 25 bp, Homo sapien
aacaggttatggaaacctggagaag

SEQ ID NO: 3539891 - DNA, 25 bp, Homo sapien
cctggagaagaggaattccgctgag

SEQ ID NO: 3539892 - DNA, 25 bp, Homo sapien
tgcagtgggcagtggtcataccact

SEQ ID NO: 3539893 - DNA, 25 bp, Homo sapien
ggctgcagtgggcagtggtcatacc

SEQ ID NO: 3539894 - DNA, 25 bp, Homo sapien
gcagtgggcagtggtcataccactg

SEQ ID NO: 3539895 - DNA, 25 bp, Homo sapien
gctgcagtgggcagtggtcatacca

SEQ ID NO: 3539896 - DNA, 25 bp, Homo sapien
tggattcacacagtacaagcacccg

SEQ ID NO: 3539897 - DNA, 25 bp, Homo sapien
aaatagatccgaaaggctccccagt

SEQ ID NO: 3539898 - DNA, 25 bp, Homo sapien
ggagagcccagcgaagttatgccca

SEQ ID NO: 3539899 - DNA, 25 bp, Homo sapien
gccagtgtgactccgtaacagacag

SEQ ID NO: 3539900 - DNA, 25 bp, Homo sapien
ccgaaaacaacagccaggttagtgt

SEQ ID NO: 3539901 - DNA, 25 bp, Homo sapien
cacagcaggttagggccgaaaacaa

SEQ ID NO: 3539902 - DNA, 25 bp, Homo sapien
gaacagctccccttggtgatccaga

SEQ ID NO: 3539903 - DNA, 25 bp, Homo sapien
ccagaaggaacttggtgaaggtgtt

SEQ ID NO: 3539904 - DNA, 25 bp, Homo sapien
aggacctgcagtgtcgctggcaccc

SEQ ID NO: 3539905 - DNA, 25 bp, Homo sapien
gaagcacctggtagttctcctcggg

SEQ ID NO: 3539906 - DNA, 25 bp, Homo sapien
aagcagtcaggaaacgaagcacctg

SEQ ID NO: 3539907 - DNA, 25 bp, Homo sapien
tctcctcgggcagcgtctggaggac

SEQ ID NO: 3539908 - DNA, 25 bp, Homo sapien
ctcccggaggaaggtcttgaggatg

SEQ ID NO: 3539909 - DNA, 25 bp, Homo sapien
caccacatgggggtagaggtcaaag

SEQ ID NO: 3539910 - DNA, 25 bp, Homo sapien
gaggaaggtcttgaggatgactgct

SEQ ID NO: 3539911 - DNA, 25 bp, Homo sapien
ccggaggaaggtcttgaggatgact

SEQ ID NO: 3539912 - DNA, 25 bp, Homo sapien
gcgtgagagaagctcggcacagcct

SEQ ID NO: 3539913 - DNA, 25 bp, Homo sapien
gcagcgtgagagaagctcggcacag

SEQ ID NO: 3539914 - DNA, 25 bp, Homo sapien
gtgagagaagctcggcacagcctga

SEQ ID NO: 3539915 - DNA, 25 bp, Homo sapien
agcgtgagagaagctcggcacagcc

SEQ ID NO: 3539916 - DNA, 25 bp, Homo sapien
gtgttggccgacctccggaagatgc

SEQ ID NO: 3539917 - DNA, 25 bp, Homo sapien
ctgcacttcccggaccacttgggtg

SEQ ID NO: 3539918 - DNA, 25 bp, Homo sapien
cctccggaagatgccctcggtggtg

SEQ ID NO: 3539919 - DNA, 25 bp, Homo sapien
gaccacttgggtgttggccgacctc

SEQ ID NO: 3539920 - DNA, 25 bp, Homo sapien
cctgtaagtaggcaacagtctccct

SEQ ID NO: 3539921 - DNA, 25 bp, Homo sapien
cgtgggcctgtaagtaggcaacagt

SEQ ID NO: 3539922 - DNA, 25 bp, Homo sapien
aacagtctccctgagtacaatggga

SEQ ID NO: 3539923 - DNA, 25 bp, Homo sapien
tgtaagtaggcaacagtctccctga

SEQ ID NO: 3539924 - DNA, 25 bp, Homo sapien
cagcgagactccaaactgctggttg

SEQ ID NO: 3539925 - DNA, 25 bp, Homo sapien
gctgtcgcggggctcttctgtgtgg

SEQ ID NO: 3539926 - DNA, 25 bp, Homo sapien
gtcgcggggctcttctgtgtggatt

SEQ ID NO: 3539927 - DNA, 25 bp, Homo sapien
ctgcagcgagactccaaactgctgg

SEQ ID NO: 3539928 - DNA, 25 bp, Homo sapien
tgagcacttggcgagggatccccag

SEQ ID NO: 3539929 - DNA, 25 bp, Homo sapien
cagcttcacgtgctcgctcagctcg

SEQ ID NO: 3539930 - DNA, 25 bp, Homo sapien
agctcgctcaggtaattcacataga

SEQ ID NO: 3539931 - DNA, 25 bp, Homo sapien
agaagatcttctgcccgaacttgaa

SEQ ID NO: 3539932 - DNA, 25 bp, Homo sapien
acatggttggatgcacgatgtacaa

SEQ ID NO: 3539933 - DNA, 25 bp, Homo sapien
gggcttgaagaggatgagcagagtt

SEQ ID NO: 3539934 - DNA, 25 bp, Homo sapien
tggttggatgcacgatgtacaaggc

SEQ ID NO: 3539935 - DNA, 25 bp, Homo sapien
gatgcacgatgtacaaggccttgat

SEQ ID NO: 3539936 - DNA, 25 bp, Homo sapien
gagacagaatggacaactcaggagc

SEQ ID NO: 3539937 - DNA, 25 bp, Homo sapien
aggtgccacgctagggtcccagtgc

SEQ ID NO: 3539938 - DNA, 25 bp, Homo sapien
aatggacaactcaggagcaggcgtg

SEQ ID NO: 3539939 - DNA, 25 bp, Homo sapien
acaggtgccacgctagggtcccagt

SEQ ID NO: 3539940 - DNA, 25 bp, Homo sapien
acagaagtgtgtagtcactctccac

SEQ ID NO: 3539941 - DNA, 25 bp, Homo sapien
ctggtcaggccgtggtgcagataca

SEQ ID NO: 3539942 - DNA, 25 bp, Homo sapien
acgtactggtccagggtgtgcttca

SEQ ID NO: 3539943 - DNA, 25 bp, Homo sapien
tcaaactcccggtaggcatcacgga

SEQ ID NO: 3539944 - DNA, 25 bp, Homo sapien
tcatccactgatggaggttatggcc

SEQ ID NO: 3539945 - DNA, 25 bp, Homo sapien
tacaaagagctgtcgcataaagaga

SEQ ID NO: 3539946 - DNA, 25 bp, Homo sapien
gacagagtatgctcaagactggccc

SEQ ID NO: 3539947 - DNA, 25 bp, Homo sapien
tagagccctctttctagttggccaa

SEQ ID NO: 3539948 - DNA, 25 bp, Homo sapien
ttatgtaagatacaaaaccaggctg

SEQ ID NO: 3539949 - DNA, 25 bp, Homo sapien
tatgtaagatacaaaaccaggctgg

SEQ ID NO: 3539950 - DNA, 25 bp, Homo sapien
gttatgtaagatacaaaaccaggct

SEQ ID NO: 3539951 - DNA, 25 bp, Homo sapien
ctcaggcactttctatttcaacctc

SEQ ID NO: 3539952 - DNA, 25 bp, Homo sapien
gcgctcaggcactttctatttcaac

SEQ ID NO: 3539953 - DNA, 25 bp, Homo sapien
cgctcaggcactttctatttcaacc

SEQ ID NO: 3539954 - DNA, 25 bp, Homo sapien
gctcaggcactttctatttcaacct

SEQ ID NO: 3539955 - DNA, 25 bp, Homo sapien
tgaatcaggacatgtctggaccggc

SEQ ID NO: 3539956 - DNA, 25 bp, Homo sapien
tcacttattatctgggcaggaggct

SEQ ID NO: 3539957 - DNA, 25 bp, Homo sapien
ggaccggccagagctattacatatg

SEQ ID NO: 3539958 - DNA, 25 bp, Homo sapien
tcctagatgacgctggaagactcag

SEQ ID NO: 3539959 - DNA, 25 bp, Homo sapien
aaacacaatgatcttccgcccatac

SEQ ID NO: 3539960 - DNA, 25 bp, Homo sapien
tggggggcattcgacaggcactaaa

SEQ ID NO: 3539961 - DNA, 25 bp, Homo sapien
gatcttccgcccatacttgtcatct

SEQ ID NO: 3539962 - DNA, 25 bp, Homo sapien
caggagcttgctgtggtcgagctgg

SEQ ID NO: 3539963 - DNA, 25 bp, Homo sapien
taagaggtagcaactggttagggaa

SEQ ID NO: 3539964 - DNA, 25 bp, Homo sapien
gcactttgtaagtgggaagctttgg

SEQ ID NO: 3539965 - DNA, 25 bp, Homo sapien
cagggctccaccaatgtgctcagca

SEQ ID NO: 3539966 - DNA, 25 bp, Homo sapien
aaccagggctccaccaatgtgctca

SEQ ID NO: 3539967 - DNA, 25 bp, Homo sapien
ctgggccccctcaggctcatcgtag

SEQ ID NO: 3539968 - DNA, 25 bp, Homo sapien
gctgggccccctcaggctcatcgta

SEQ ID NO: 3539969 - DNA, 25 bp, Homo sapien
tgggccccctcaggctcatcgtagt

SEQ ID NO: 3539970 - DNA, 25 bp, Homo sapien
ctagggaaatagaaacaaattgcag

SEQ ID NO: 3539971 - DNA, 25 bp, Homo sapien
tagggaaatagaaacaaattgcagc

SEQ ID NO: 3539972 - DNA, 25 bp, Homo sapien
agggaaatagaaacaaattgcagct

SEQ ID NO: 3539973 - DNA, 25 bp, Homo sapien
gaagggaaggctacttattcaaggc

SEQ ID NO: 3539974 - DNA, 25 bp, Homo sapien
tgggctaggccctgacatgcattca

SEQ ID NO: 3539975 - DNA, 25 bp, Homo sapien
tttctgacttcaaagccactaggcc

SEQ ID NO: 3539976 - DNA, 25 bp, Homo sapien
cagtaactgatagggtggaaaagcc

SEQ ID NO: 3539977 - DNA, 25 bp, Homo sapien
acgatctggtgccgggcgatgtcat

SEQ ID NO: 3539978 - DNA, 25 bp, Homo sapien
ccgggcgatgtcatagtatgggtca

SEQ ID NO: 3539979 - DNA, 25 bp, Homo sapien
catagtatgggtcatcccacttcag

SEQ ID NO: 3539980 - DNA, 25 bp, Homo sapien
gatgtcatagtatgggtcatcccac

SEQ ID NO: 3539981 - DNA, 25 bp, Homo sapien
ttctcatcgatggaggccagcttca

SEQ ID NO: 3539982 - DNA, 25 bp, Homo sapien
gcttcagctggttcagagcctcgct

SEQ ID NO: 3539983 - DNA, 25 bp, Homo sapien
ggtgtcatccaaggtcagatcatcc

SEQ ID NO: 3539984 - DNA, 25 bp, Homo sapien
catttcatccgagggccagttcttc

SEQ ID NO: 3539985 - DNA, 25 bp, Homo sapien
ttgccctgcagaaccttaagagaaa

SEQ ID NO: 3539986 - DNA, 25 bp, Homo sapien
gccttgccctgcagaaccttaagag

SEQ ID NO: 3539987 - DNA, 25 bp, Homo sapien
ccttgccctgcagaaccttaagaga

SEQ ID NO: 3539988 - DNA, 25 bp, Homo sapien
tgccctgcagaaccttaagagaaac

SEQ ID NO: 3539989 - DNA, 25 bp, Homo sapien
ttcaccttctgcgacctccaccgcg

SEQ ID NO: 3539990 - DNA, 25 bp, Homo sapien
cttttcaccttctgcgacctccacc

SEQ ID NO: 3539991 - DNA, 25 bp, Homo sapien
accttctgcgacctccaccgcgtgc

SEQ ID NO: 3539992 - DNA, 25 bp, Homo sapien
ttctgcgacctccaccgcgtgccct

SEQ ID NO: 3539993 - DNA, 25 bp, Homo sapien
taagaatctaaggaacatgctgggc

SEQ ID NO: 3539994 - DNA, 25 bp, Homo sapien
tgttgtaagaatctaaggaacatgc

SEQ ID NO: 3539995 - DNA, 25 bp, Homo sapien
gtaagaatctaaggaacatgctggg

SEQ ID NO: 3539996 - DNA, 25 bp, Homo sapien
ttgtaagaatctaaggaacatgctg

SEQ ID NO: 3539997 - DNA, 25 bp, Homo sapien
gggatgtggaatcgcctgccagtca

SEQ ID NO: 3539998 - DNA, 25 bp, Homo sapien
tgcaggctcctaggggcgtccaagc

SEQ ID NO: 3539999 - DNA, 25 bp, Homo sapien
tgcagacagtctgcaggctcctagg

SEQ ID NO: 3540000 - DNA, 25 bp, Homo sapien
cctgccagtcattgcagacagtctg

SEQ ID NO: 3540001 - DNA, 25 bp, Homo sapien
cagtttcaaggtggaaaggttgacg

SEQ ID NO: 3540002 - DNA, 25 bp, Homo sapien
aggttgacggccctaaggattggag

SEQ ID NO: 3540003 - DNA, 25 bp, Homo sapien
gaaagggggatgctcgtgatgtctg

SEQ ID NO: 3540004 - DNA, 25 bp, Homo sapien
ccctaaggattggagggcgcagatg

SEQ ID NO: 3540005 - DNA, 25 bp, Homo sapien
gcagactcgaccaccaagctgggtt

SEQ ID NO: 3540006 - DNA, 25 bp, Homo sapien
tctgaggccacttgacaacctcctg

SEQ ID NO: 3540007 - DNA, 25 bp, Homo sapien
tggagccccaaaactgacatatatg

SEQ ID NO: 3540008 - DNA, 25 bp, Homo sapien
cagggcagataaggagagcagacaa

SEQ ID NO: 3540009 - DNA, 25 bp, Homo sapien
agagacatctttctgcacaaagtag

SEQ ID NO: 3540010 - DNA, 25 bp, Homo sapien
acctacagctatcccagagacatct

SEQ ID NO: 3540011 - DNA, 25 bp, Homo sapien
gagctggattatcatcctgcctaag

SEQ ID NO: 3540012 - DNA, 25 bp, Homo sapien
ggcaatggcgcctcccagaaatata

SEQ ID NO: 3540013 - DNA, 25 bp, Homo sapien
ctgctcttctatgctgtcagttctt

SEQ ID NO: 3540014 - DNA, 25 bp, Homo sapien
tgactgctcttctatgctgtcagtt

SEQ ID NO: 3540015 - DNA, 25 bp, Homo sapien
ctcttctatgctgtcagttcttcca

SEQ ID NO: 3540016 - DNA, 25 bp, Homo sapien
gctcttctatgctgtcagttcttcc

SEQ ID NO: 3540017 - DNA, 25 bp, Homo sapien
cttctgagcctggaagttaaactcc

SEQ ID NO: 3540018 - DNA, 25 bp, Homo sapien
acttctgagcctggaagttaaactc

SEQ ID NO: 3540019 - DNA, 25 bp, Homo sapien
aaggctcggcaaacatccggctccg

SEQ ID NO: 3540020 - DNA, 25 bp, Homo sapien
ctcttctatccccaaccatttccgc

SEQ ID NO: 3540021 - DNA, 25 bp, Homo sapien
gcctgtcaaggctcggcaaacatcc

SEQ ID NO: 3540022 - DNA, 25 bp, Homo sapien
tgccacgcctgtcaaggctcggcaa

SEQ ID NO: 3540023 - DNA, 25 bp, Homo sapien
cctgtgtgtctgcccgacagggaga

SEQ ID NO: 3540024 - DNA, 25 bp, Homo sapien
gtgtctgcccgacagggagacggca

SEQ ID NO: 3540025 - DNA, 25 bp, Homo sapien
gttgccttcagtgactacattcacc

SEQ ID NO: 3540026 - DNA, 25 bp, Homo sapien
ttcagtgactacattcaccctgtgt

SEQ ID NO: 3540027 - DNA, 25 bp, Homo sapien
ctgcccattgtggagcggccggtct

SEQ ID NO: 3540028 - DNA, 25 bp, Homo sapien
gacgtggacagccaacgttggtaag

SEQ ID NO: 3540029 - DNA, 25 bp, Homo sapien
acccggatccgcatcactgacaaca

SEQ ID NO: 3540030 - DNA, 25 bp, Homo sapien
ctgcaggtggtgaacctgcccattg

SEQ ID NO: 3540031 - DNA, 25 bp, Homo sapien
atccacccggcttgggcatgagcca

SEQ ID NO: 3540032 - DNA, 25 bp, Homo sapien
tctgcctgttgggtggagaatagac

SEQ ID NO: 3540033 - DNA, 25 bp, Homo sapien
agaatgaaggaaactagtgggttca

SEQ ID NO: 3540034 - DNA, 25 bp, Homo sapien
gaatagactgtaggtgggcaaagaa

SEQ ID NO: 3540035 - DNA, 25 bp, Homo sapien
cagtgggggaccctttgtcatgaag

SEQ ID NO: 3540036 - DNA, 25 bp, Homo sapien
aagggaaacgaggggatgcctgtga

SEQ ID NO: 3540037 - DNA, 25 bp, Homo sapien
gtgacagtgggggaccctttgtcat

SEQ ID NO: 3540038 - DNA, 25 bp, Homo sapien
gggaccctttgtcatgaaggtaagc

SEQ ID NO: 3540039 - DNA, 25 bp, Homo sapien
gctggtatcaaatgggcatcgtctc

SEQ ID NO: 3540040 - DNA, 25 bp, Homo sapien
taacaaccgctggtatcaaatgggc

SEQ ID NO: 3540041 - DNA, 25 bp, Homo sapien
tatcaaatgggcatcgtctcatggg

SEQ ID NO: 3540042 - DNA, 25 bp, Homo sapien
caaccgctggtatcaaatgggcatc

SEQ ID NO: 3540043 - DNA, 25 bp, Homo sapien
agtggatacagaaggtcattgatca

SEQ ID NO: 3540044 - DNA, 25 bp, Homo sapien
cctggaaccaatcccgtgaaagaat

SEQ ID NO: 3540045 - DNA, 25 bp, Homo sapien
cagaaggtcattgatcagtttggag

SEQ ID NO: 3540046 - DNA, 25 bp, Homo sapien
tcagtttggagagtagggggccact

SEQ ID NO: 3540047 - DNA, 25 bp, Homo sapien
tgttttcttccgacatagcggtcag

SEQ ID NO: 3540048 - DNA, 25 bp, Homo sapien
taattccagacaggagtacagccac

SEQ ID NO: 3540049 - DNA, 25 bp, Homo sapien
ttacttgtgacatgcaggacctgct

SEQ ID NO: 3540050 - DNA, 25 bp, Homo sapien
tttggttctggttgactgaaaggca

SEQ ID NO: 3540051 - DNA, 25 bp, Homo sapien
gggccacctgaaaacgatgactgga

SEQ ID NO: 3540052 - DNA, 25 bp, Homo sapien
ccatgttcccactataaaggagaga

SEQ ID NO: 3540053 - DNA, 25 bp, Homo sapien
gatgactggaacctttacaggatta

SEQ ID NO: 3540054 - DNA, 25 bp, Homo sapien
caagtttaatttcaggaggctccgg

SEQ ID NO: 3540055 - DNA, 25 bp, Homo sapien
gagggaggtcctgtggaatttattc

SEQ ID NO: 3540056 - DNA, 25 bp, Homo sapien
gggaggtcctgtggaatttattcca

SEQ ID NO: 3540057 - DNA, 25 bp, Homo sapien
ggtcctgtggaatttattccagagg

SEQ ID NO: 3540058 - DNA, 25 bp, Homo sapien
gaggtcctgtggaatttattccaga

SEQ ID NO: 3540059 - DNA, 25 bp, Homo sapien
caaatctagttgtagtgtgagaacc

SEQ ID NO: 3540060 - DNA, 25 bp, Homo sapien
caagagcttcttgaaacgactggtg

SEQ ID NO: 3540061 - DNA, 25 bp, Homo sapien
aatctctgggcgcaatcttgtgtgc

SEQ ID NO: 3540062 - DNA, 25 bp, Homo sapien
tcagcaaagtggtaggatgcccaag

SEQ ID NO: 3540063 - DNA, 25 bp, Homo sapien
cagtgacccttcagggcgacagaga

SEQ ID NO: 3540064 - DNA, 25 bp, Homo sapien
tccacggacagtcttctagagcagc

SEQ ID NO: 3540065 - DNA, 25 bp, Homo sapien
taaactaaagctgcagggtgccggg

SEQ ID NO: 3540066 - DNA, 25 bp, Homo sapien
tttgtatacactaggcctgctgagg

SEQ ID NO: 3540067 - DNA, 25 bp, Homo sapien
tgtctgtggaagaggcgacagtagg

SEQ ID NO: 3540068 - DNA, 25 bp, Homo sapien
acagtaggaactgctggtttggaga

SEQ ID NO: 3540069 - DNA, 25 bp, Homo sapien
caagtcgtctatgttagctgtggag

SEQ ID NO: 3540070 - DNA, 25 bp, Homo sapien
gctcccgtgactcccggagctgaga

SEQ ID NO: 3540071 - DNA, 25 bp, Homo sapien
ttgtctaaggtcaggtcaagcaggt

SEQ ID NO: 3540072 - DNA, 25 bp, Homo sapien
caagatgcagctccagaactacagc

SEQ ID NO: 3540073 - DNA, 25 bp, Homo sapien
tgcttgtgactaccctccctgaact

SEQ ID NO: 3540074 - DNA, 25 bp, Homo sapien
gaactacagcaagactaagccactt

SEQ ID NO: 3540075 - DNA, 25 bp, Homo sapien
ttgtgttgtccagaccacatcgctg

SEQ ID NO: 3540076 - DNA, 25 bp, Homo sapien
tgggcgtgggcacacatgtgacttc

SEQ ID NO: 3540077 - DNA, 25 bp, Homo sapien
tcgctgtcggaggatctttagcctt

SEQ ID NO: 3540078 - DNA, 25 bp, Homo sapien
gtgttacctatggaggacactgtgc

SEQ ID NO: 3540079 - DNA, 25 bp, Homo sapien
caacaattatctaaagagggcatag

SEQ ID NO: 3540080 - DNA, 25 bp, Homo sapien
gatcaatattctggcaggagagagg

SEQ ID NO: 3540081 - DNA, 25 bp, Homo sapien
gaactggagtgtctgtaaccctacc

SEQ ID NO: 3540082 - DNA, 25 bp, Homo sapien
caaggtgtccaaggctatggtgtat

SEQ ID NO: 3540083 - DNA, 25 bp, Homo sapien
ctccatctcaatcacccgaaggcct

SEQ ID NO: 3540084 - DNA, 25 bp, Homo sapien
aggcctctttcgacatagctctgga

SEQ ID NO: 3540085 - DNA, 25 bp, Homo sapien
ttcagaaatggttcaatgtcagcat

SEQ ID NO: 3540086 - DNA, 25 bp, Homo sapien
ccgaaggcctctttcgacatagctc

SEQ ID NO: 3540087 - DNA, 25 bp, Homo sapien
aaagcagacccctattctgcttaac

SEQ ID NO: 3540088 - DNA, 25 bp, Homo sapien
cataaagcagacccctattctgctt

SEQ ID NO: 3540089 - DNA, 25 bp, Homo sapien
agcagacccctattctgcttaaccc

SEQ ID NO: 3540090 - DNA, 25 bp, Homo sapien
taaagcagacccctattctgcttaa

SEQ ID NO: 3540091 - DNA, 25 bp, Homo sapien
tttctttagagccaatcttcttaaa

SEQ ID NO: 3540092 - DNA, 25 bp, Homo sapien
ttctttagagccaatcttcttaaaa

SEQ ID NO: 3540093 - DNA, 25 bp, Homo sapien
ttgttgtcgatcatcgttaggtggt

SEQ ID NO: 3540094 - DNA, 25 bp, Homo sapien
tgtgcttcatcatccggcagagatg

SEQ ID NO: 3540095 - DNA, 25 bp, Homo sapien
ctccagctcagactcgtttttgttg

SEQ ID NO: 3540096 - DNA, 25 bp, Homo sapien
ttcatcatccggcagagatgggcct

SEQ ID NO: 3540097 - DNA, 25 bp, Homo sapien
tgtagcagggtctttagggtcctta

SEQ ID NO: 3540098 - DNA, 25 bp, Homo sapien
gatggtatcaggcaacagtcgaacc

SEQ ID NO: 3540099 - DNA, 25 bp, Homo sapien
ggaaattcacttttgcattgcttca

SEQ ID NO: 3540100 - DNA, 25 bp, Homo sapien
gggaagaccttcatgaaaatgtgga

SEQ ID NO: 3540101 - DNA, 25 bp, Homo sapien
gttgctagcaggctgtcttggagca

SEQ ID NO: 3540102 - DNA, 25 bp, Homo sapien
actggctgttgctagcaggctgtct

SEQ ID NO: 3540103 - DNA, 25 bp, Homo sapien
gctgttgctagcaggctgtcttgga

SEQ ID NO: 3540104 - DNA, 25 bp, Homo sapien
gaactggctgttgctagcaggctgt

SEQ ID NO: 3540105 - DNA, 25 bp, Homo sapien
aatccagcattaaggtgatgaggcc

SEQ ID NO: 3540106 - DNA, 25 bp, Homo sapien
ccaccaagaggttcacagagcggat

SEQ ID NO: 3540107 - DNA, 25 bp, Homo sapien
gatcttcaatccgagaatccagcat

SEQ ID NO: 3540108 - DNA, 25 bp, Homo sapien
ggtcttttagtactccagtggaggc

SEQ ID NO: 3540109 - DNA, 25 bp, Homo sapien
attatttactgttatgccaaatttg

SEQ ID NO: 3540110 - DNA, 25 bp, Homo sapien
aaatttgtaatttctggctagttgg

SEQ ID NO: 3540111 - DNA, 25 bp, Homo sapien
ggctagttggtgtcattaagtccac

SEQ ID NO: 3540112 - DNA, 25 bp, Homo sapien
tgtcattaagtccacccttttagcc

SEQ ID NO: 3540113 - DNA, 25 bp, Homo sapien
gagtgtagccaaacatccaatggaa

SEQ ID NO: 3540114 - DNA, 25 bp, Homo sapien
aaaattctaccaagtgacacaggac

SEQ ID NO: 3540115 - DNA, 25 bp, Homo sapien
gaaactggccggaagaagctaggta

SEQ ID NO: 3540116 - DNA, 25 bp, Homo sapien
tgtggaaaggcagctatggcctacc

SEQ ID NO: 3540117 - DNA, 25 bp, Homo sapien
gctatacaacttgatgatctcgtcc

SEQ ID NO: 3540118 - DNA, 25 bp, Homo sapien
ccatgtgtgtgttgtagatgagtct

SEQ ID NO: 3540119 - DNA, 25 bp, Homo sapien
aactgatcaatatggccggacatgg

SEQ ID NO: 3540120 - DNA, 25 bp, Homo sapien
tgagtcttagctgcataaaagtggc

SEQ ID NO: 3540121 - DNA, 25 bp, Homo sapien
tttccaagcttcatacttctaaaat

SEQ ID NO: 3540122 - DNA, 25 bp, Homo sapien
catacttctaaaatagcggaagaca

SEQ ID NO: 3540123 - DNA, 25 bp, Homo sapien
tattagcaaagtacttctaaagtct

SEQ ID NO: 3540124 - DNA, 25 bp, Homo sapien
gcggaagacactatatgaaacttct

SEQ ID NO: 3540125 - DNA, 25 bp, Homo sapien
gctgtattactgtgcatgtcatcga

SEQ ID NO: 3540126 - DNA, 25 bp, Homo sapien
tgcatgtcatcgaagtgtggagaaa

SEQ ID NO: 3540127 - DNA, 25 bp, Homo sapien
taatgaaattgattgtggatgctgt

SEQ ID NO: 3540128 - DNA, 25 bp, Homo sapien
tgtcagagcttggatacttgtgttg

SEQ ID NO: 3540129 - DNA, 25 bp, Homo sapien
tctggcatttcacatcggactgtac

SEQ ID NO: 3540130 - DNA, 25 bp, Homo sapien
tagatccagctggaattctcggcgg

SEQ ID NO: 3540131 - DNA, 25 bp, Homo sapien
cagtttgtgctgaacaagttctggc

SEQ ID NO: 3540132 - DNA, 25 bp, Homo sapien
gatgcccactcatgcttcgggcttg

SEQ ID NO: 3540133 - DNA, 25 bp, Homo sapien
ttacctgccaagttataagtatttg

SEQ ID NO: 3540134 - DNA, 25 bp, Homo sapien
tcactaaagccaacaaaccttgtat

SEQ ID NO: 3540135 - DNA, 25 bp, Homo sapien
gccaagttataagtatttgttctag

SEQ ID NO: 3540136 - DNA, 25 bp, Homo sapien
ttgttctagttcactaaagccaaca

SEQ ID NO: 3540137 - DNA, 25 bp, Homo sapien
gaagacatgtcctcagctggtccct

SEQ ID NO: 3540138 - DNA, 25 bp, Homo sapien
cattggagcttatgttctgtgcacg

SEQ ID NO: 3540139 - DNA, 25 bp, Homo sapien
cctgttttattggtgcagcagaggg

SEQ ID NO: 3540140 - DNA, 25 bp, Homo sapien
ctggtcccttgcgtaacatgttggc

SEQ ID NO: 3540141 - DNA, 25 bp, Homo sapien
caccgttacaatggtgttgagtgca

SEQ ID NO: 3540142 - DNA, 25 bp, Homo sapien
gtttgaacacctgatccccatgtac

SEQ ID NO: 3540143 - DNA, 25 bp, Homo sapien
cacggtctcctatgtgaacagctat

SEQ ID NO: 3540144 - DNA, 25 bp, Homo sapien
gcattgcgtacagcattgtcacggt

SEQ ID NO: 3540145 - DNA, 25 bp, Homo sapien
tgtatcacctgataccatggctcca

SEQ ID NO: 3540146 - DNA, 25 bp, Homo sapien
gcctgtatcacctgataccatggct

SEQ ID NO: 3540147 - DNA, 25 bp, Homo sapien
gtatcacctgataccatggctccac

SEQ ID NO: 3540148 - DNA, 25 bp, Homo sapien
ctgtatcacctgataccatggctcc

SEQ ID NO: 3540149 - DNA, 25 bp, Homo sapien
tcaggatggcacgaacatctttacg

SEQ ID NO: 3540150 - DNA, 25 bp, Homo sapien
catctttacgaatgacatcctttgg

SEQ ID NO: 3540151 - DNA, 25 bp, Homo sapien
taaagggaaacatcttgctagctgg

SEQ ID NO: 3540152 - DNA, 25 bp, Homo sapien
tagacaaggcacatccggttcagga

SEQ ID NO: 3540153 - DNA, 25 bp, Homo sapien
gatgcttcattctcagtaagatgat

SEQ ID NO: 3540154 - DNA, 25 bp, Homo sapien
tcatcaggacgcttgtattggtgtc

SEQ ID NO: 3540155 - DNA, 25 bp, Homo sapien
acctcagggtaagccactttaagat

SEQ ID NO: 3540156 - DNA, 25 bp, Homo sapien
agataagatccaggcaaccaataac

SEQ ID NO: 3540157 - DNA, 25 bp, Homo sapien
catgtatatttatctattgcagact

SEQ ID NO: 3540158 - DNA, 25 bp, Homo sapien
ctaccaaataacaagacagctctaa

SEQ ID NO: 3540159 - DNA, 25 bp, Homo sapien
catagggctcggtatttttacatgt

SEQ ID NO: 3540160 - DNA, 25 bp, Homo sapien
tctacttccaagtcatgcaaacttc

SEQ ID NO: 3540161 - DNA, 25 bp, Homo sapien
agtctgagtgaaacatctcatcttg

SEQ ID NO: 3540162 - DNA, 25 bp, Homo sapien
gacatttgagtctttagttgctcaa

SEQ ID NO: 3540163 - DNA, 25 bp, Homo sapien
tttgttatgatgctgaaagtctgag

SEQ ID NO: 3540164 - DNA, 25 bp, Homo sapien
ttagccacacagctagacatttgag

SEQ ID NO: 3540165 - DNA, 25 bp, Homo sapien
aaaataggcccggatttgtcttcat

SEQ ID NO: 3540166 - DNA, 25 bp, Homo sapien
aaataggcccggatttgtcttcatc

SEQ ID NO: 3540167 - DNA, 25 bp, Homo sapien
taggcccggatttgtcttcatcctc

SEQ ID NO: 3540168 - DNA, 25 bp, Homo sapien
aataggcccggatttgtcttcatcc

SEQ ID NO: 3540169 - DNA, 25 bp, Homo sapien
aaaatactgcaaaacactcgtgatc

SEQ ID NO: 3540170 - DNA, 25 bp, Homo sapien
taattcactgaggagttaaagggcc

SEQ ID NO: 3540171 - DNA, 25 bp, Homo sapien
aattatggcattaagaacggagtca

SEQ ID NO: 3540172 - DNA, 25 bp, Homo sapien
gaaaggccctagagtgtgtactcca

SEQ ID NO: 3540173 - DNA, 25 bp, Homo sapien
gagcaggatgtctccgttttaggac

SEQ ID NO: 3540174 - DNA, 25 bp, Homo sapien
agagcaggatgtctccgttttagga

SEQ ID NO: 3540175 - DNA, 25 bp, Homo sapien
agcaggatgtctccgttttaggacc

SEQ ID NO: 3540176 - DNA, 25 bp, Homo sapien
gagagcaggatgtctccgttttagg

SEQ ID NO: 3540177 - DNA, 25 bp, Homo sapien
tgctggaaatacaatcttcagcagg

SEQ ID NO: 3540178 - DNA, 25 bp, Homo sapien
tgctttagaggataatcctggagct

SEQ ID NO: 3540179 - DNA, 25 bp, Homo sapien
gataatcctggagctttggcctttt

SEQ ID NO: 3540180 - DNA, 25 bp, Homo sapien
ctggaaatacaatcttcagcaggtg

SEQ ID NO: 3540181 - DNA, 25 bp, Homo sapien
ctggaatttggctggagcggaccct

SEQ ID NO: 3540182 - DNA, 25 bp, Homo sapien
ctttagtgggtggagcaggcttggc

SEQ ID NO: 3540183 - DNA, 25 bp, Homo sapien
ttggctggagcggaccctcccattg

SEQ ID NO: 3540184 - DNA, 25 bp, Homo sapien
cctcccattggtttagaagttgctt

SEQ ID NO: 3540185 - DNA, 25 bp, Homo sapien
atggccaatacctgatctttagaag

SEQ ID NO: 3540186 - DNA, 25 bp, Homo sapien
gcatggccaatacctgatctttaga

SEQ ID NO: 3540187 - DNA, 25 bp, Homo sapien
tggccaatacctgatctttagaagt

SEQ ID NO: 3540188 - DNA, 25 bp, Homo sapien
catggccaatacctgatctttagaa

SEQ ID NO: 3540189 - DNA, 25 bp, Homo sapien
agcttatgaacaaatcctctgtcaa

SEQ ID NO: 3540190 - DNA, 25 bp, Homo sapien
aagcttatgaacaaatcctctgtca

SEQ ID NO: 3540191 - DNA, 25 bp, Homo sapien
aaagcttatgaacaaatcctctgtc

SEQ ID NO: 3540192 - DNA, 25 bp, Homo sapien
gcttatgaacaaatcctctgtcaaa

SEQ ID NO: 3540193 - DNA, 25 bp, Homo sapien
tgaggaacacaaaggataaggtctg

SEQ ID NO: 3540194 - DNA, 25 bp, Homo sapien
tctccatttcgatcttctaggcagg

SEQ ID NO: 3540195 - DNA, 25 bp, Homo sapien
ggcatcttgggccttctttcgcaca

SEQ ID NO: 3540196 - DNA, 25 bp, Homo sapien
tggaacgaagagtaggtagtttctc

SEQ ID NO: 3540197 - DNA, 25 bp, Homo sapien
ggatatgtcaaatgccttttttgca

SEQ ID NO: 3540198 - DNA, 25 bp, Homo sapien
aatcatgaatgcatgttggatatgt

SEQ ID NO: 3540199 - DNA, 25 bp, Homo sapien
tgttatctgtagaggttgttatgca

SEQ ID NO: 3540200 - DNA, 25 bp, Homo sapien
ctggccctcaccattaagtttcatg

SEQ ID NO: 3540201 - DNA, 25 bp, Homo sapien
cattcacagtcgctagggcagcagc

SEQ ID NO: 3540202 - DNA, 25 bp, Homo sapien
caagcattcacagtcgctagggcag

SEQ ID NO: 3540203 - DNA, 25 bp, Homo sapien
ttcatgccagtctgttctgcccaag

SEQ ID NO: 3540204 - DNA, 25 bp, Homo sapien
gttctgcccaagcattcacagtcgc

SEQ ID NO: 3540205 - DNA, 25 bp, Homo sapien
gatagggatgcctaaattttttaca

SEQ ID NO: 3540206 - DNA, 25 bp, Homo sapien
aatatttgggcccatggctactgcc

SEQ ID NO: 3540207 - DNA, 25 bp, Homo sapien
actgccagttgttgcaggatattca

SEQ ID NO: 3540208 - DNA, 25 bp, Homo sapien
caaggactgtgatgatagggatgcc

SEQ ID NO: 3540209 - DNA, 25 bp, Homo sapien
ttcttatcaccaatcttagatacca

SEQ ID NO: 3540210 - DNA, 25 bp, Homo sapien
aattttgcgtcattaataatacctg

SEQ ID NO: 3540211 - DNA, 25 bp, Homo sapien
tggaagttcacctatattcggttgg

SEQ ID NO: 3540212 - DNA, 25 bp, Homo sapien
gaatcattgagtcgacccttcaagg

SEQ ID NO: 3540213 - DNA, 25 bp, Homo sapien
aagatcaacgacatcattgctcccg

SEQ ID NO: 3540214 - DNA, 25 bp, Homo sapien
ctgatctccgtcctcggcaaaagat

SEQ ID NO: 3540215 - DNA, 25 bp, Homo sapien
cattgctcccgtcatctggttcatc

SEQ ID NO: 3540216 - DNA, 25 bp, Homo sapien
tcctctggttggagcaggtggactt

SEQ ID NO: 3540217 - DNA, 25 bp, Homo sapien
tacctagattacaattttgagacca

SEQ ID NO: 3540218 - DNA, 25 bp, Homo sapien
cacagtaggtaatttgactactacc

SEQ ID NO: 3540219 - DNA, 25 bp, Homo sapien
caaaacctactagaaggcagggtgt

SEQ ID NO: 3540220 - DNA, 25 bp, Homo sapien
ggaacaaacaaattagagagggtgc

SEQ ID NO: 3540221 - DNA, 25 bp, Homo sapien
cttccatggatactttattgtgcat

SEQ ID NO: 3540222 - DNA, 25 bp, Homo sapien
ggatactttattgtgcataaaagca

SEQ ID NO: 3540223 - DNA, 25 bp, Homo sapien
catcaatttcttatgaactcttcca

SEQ ID NO: 3540224 - DNA, 25 bp, Homo sapien
caagcccggccaaaatcatcaattt

SEQ ID NO: 3540225 - DNA, 25 bp, Homo sapien
tctgtgtggcctaggcttgagtaca

SEQ ID NO: 3540226 - DNA, 25 bp, Homo sapien
ctctgtgtggcctaggcttgagtac

SEQ ID NO: 3540227 - DNA, 25 bp, Homo sapien
aaaggtctctctgtgtggcctaggc

SEQ ID NO: 3540228 - DNA, 25 bp, Homo sapien
agaaaaggtctctctgtgtggccta

SEQ ID NO: 3540229 - DNA, 25 bp, Homo sapien
gggctcagggggtcctcctgccttg

SEQ ID NO: 3540230 - DNA, 25 bp, Homo sapien
attacaggcatgaaccactgcacct

SEQ ID NO: 3540231 - DNA, 25 bp, Homo sapien
acaggcatgaaccactgcacctggc

SEQ ID NO: 3540232 - DNA, 25 bp, Homo sapien
ttttgtagagaaggtctcattttgt

SEQ ID NO: 3540233 - DNA, 25 bp, Homo sapien
aaacatctgcacttaagcaatcctc

SEQ ID NO: 3540234 - DNA, 25 bp, Homo sapien
ccttgggcaactggtggtctcagct

SEQ ID NO: 3540235 - DNA, 25 bp, Homo sapien
cctgggaggtcacaatactaatgct

SEQ ID NO: 3540236 - DNA, 25 bp, Homo sapien
cagtttacctctccttgggcaactg

SEQ ID NO: 3540237 - DNA, 25 bp, Homo sapien
attctcaagtccactaacagattgt

SEQ ID NO: 3540238 - DNA, 25 bp, Homo sapien
gattctcaagtccactaacagattg

SEQ ID NO: 3540239 - DNA, 25 bp, Homo sapien
tgagattctcaagtccactaacaga

SEQ ID NO: 3540240 - DNA, 25 bp, Homo sapien
gagattctcaagtccactaacagat

SEQ ID NO: 3540241 - DNA, 25 bp, Homo sapien
gggttatggcagcagtcctcacagc

SEQ ID NO: 3540242 - DNA, 25 bp, Homo sapien
caaattctgcatctatctgggatag

SEQ ID NO: 3540243 - DNA, 25 bp, Homo sapien
tacatcacgccaagcagggttatgg

SEQ ID NO: 3540244 - DNA, 25 bp, Homo sapien
tcatcctcaaagaacattcgcaaag

SEQ ID NO: 3540245 - DNA, 25 bp, Homo sapien
cattgctaatgaaagctttgacatt

SEQ ID NO: 3540246 - DNA, 25 bp, Homo sapien
gctaatgaaagctttgacattcaac

SEQ ID NO: 3540247 - DNA, 25 bp, Homo sapien
ttgctaatgaaagctttgacattca

SEQ ID NO: 3540248 - DNA, 25 bp, Homo sapien
tgctaatgaaagctttgacattcaa

SEQ ID NO: 3540249 - DNA, 25 bp, Homo sapien
cttagagactgacagaacatttaac

SEQ ID NO: 3540250 - DNA, 25 bp, Homo sapien
ttccacttgatttcgttctgactta

SEQ ID NO: 3540251 - DNA, 25 bp, Homo sapien
gactgacagaacatttaactatttt

SEQ ID NO: 3540252 - DNA, 25 bp, Homo sapien
tccacttgatttcgttctgacttac

SEQ ID NO: 3540253 - DNA, 25 bp, Homo sapien
tgggattcttttgtgagaaagccat

SEQ ID NO: 3540254 - DNA, 25 bp, Homo sapien
gggattcttttgtgagaaagccatt

SEQ ID NO: 3540255 - DNA, 25 bp, Homo sapien
gttcagcagtccatggtaacataca

SEQ ID NO: 3540256 - DNA, 25 bp, Homo sapien
catctaatacaacctgagctgacgt

SEQ ID NO: 3540257 - DNA, 25 bp, Homo sapien
caggcttcggctattgctgtcatag

SEQ ID NO: 3540258 - DNA, 25 bp, Homo sapien
tcttgtccacaaggccatctaatac

SEQ ID NO: 3540259 - DNA, 25 bp, Homo sapien
ttaatttaggtgacaaatactccca

SEQ ID NO: 3540260 - DNA, 25 bp, Homo sapien
aatttaggtgacaaatactcccatt

SEQ ID NO: 3540261 - DNA, 25 bp, Homo sapien
acagattaatttaggtgacaaatac

SEQ ID NO: 3540262 - DNA, 25 bp, Homo sapien
gattaatttaggtgacaaatactcc

SEQ ID NO: 3540263 - DNA, 25 bp, Homo sapien
atgtaattatcttgggtgggacttc

SEQ ID NO: 3540264 - DNA, 25 bp, Homo sapien
gggacttctgcaattgtggagtcaa

SEQ ID NO: 3540265 - DNA, 25 bp, Homo sapien
caaatcaacttatctcacaactctg

SEQ ID NO: 3540266 - DNA, 25 bp, Homo sapien
taaggcttgtaacatacaagaacca

SEQ ID NO: 3540267 - DNA, 25 bp, Homo sapien
cattaagttaaccaaggagagagtc

SEQ ID NO: 3540268 - DNA, 25 bp, Homo sapien
gagacagatcacattggttcaaggc

SEQ ID NO: 3540269 - DNA, 25 bp, Homo sapien
tctgactgaccttcaagaccttgct

SEQ ID NO: 3540270 - DNA, 25 bp, Homo sapien
gaaaagggccctaatctctgactga

SEQ ID NO: 3540271 - DNA, 25 bp, Homo sapien
tggctagcatcctcactaatgcctg

SEQ ID NO: 3540272 - DNA, 25 bp, Homo sapien
cagttcggtccattagctcaacagc

SEQ ID NO: 3540273 - DNA, 25 bp, Homo sapien
gcctggcatggcatttcagttcggt

SEQ ID NO: 3540274 - DNA, 25 bp, Homo sapien
tccatccaggtttcttggctagcat

SEQ ID NO: 3540275 - DNA, 25 bp, Homo sapien
agtcccacctcatctttaatgccat

SEQ ID NO: 3540276 - DNA, 25 bp, Homo sapien
ggttataaaacacagcaattaggac

SEQ ID NO: 3540277 - DNA, 25 bp, Homo sapien
cgtgttcaccggttataaaacacag

SEQ ID NO: 3540278 - DNA, 25 bp, Homo sapien
tcattcatcaatttcgctgcttcca

SEQ ID NO: 3540279 - DNA, 25 bp, Homo sapien
gtcaagaagctgtatacaggtaggg

SEQ ID NO: 3540280 - DNA, 25 bp, Homo sapien
tgctgtcaagaagctgtatacaggt

SEQ ID NO: 3540281 - DNA, 25 bp, Homo sapien
ggaactcttccatacaagccagcct

SEQ ID NO: 3540282 - DNA, 25 bp, Homo sapien
cttctggaactcttccatacaagcc

SEQ ID NO: 3540283 - DNA, 25 bp, Homo sapien
agaacgtaaacatactccagccaaa

SEQ ID NO: 3540284 - DNA, 25 bp, Homo sapien
ggaattgcttaagggaacagatgac

SEQ ID NO: 3540285 - DNA, 25 bp, Homo sapien
tagaattaggaattgcttaagggaa

SEQ ID NO: 3540286 - DNA, 25 bp, Homo sapien
gtaaacatactccagccaaaactaa

SEQ ID NO: 3540287 - DNA, 25 bp, Homo sapien
ccactatttctttagtctccagtcc

SEQ ID NO: 3540288 - DNA, 25 bp, Homo sapien
ccagtattccctgcgcctcctggtg

SEQ ID NO: 3540289 - DNA, 25 bp, Homo sapien
ttggttccagtattccctgcgcctc

SEQ ID NO: 3540290 - DNA, 25 bp, Homo sapien
caggctccactatttctttagtctc

SEQ ID NO: 3540291 - DNA, 25 bp, Homo sapien
catgtcatatcgacagtatggtttt

SEQ ID NO: 3540292 - DNA, 25 bp, Homo sapien
atgtcatatcgacagtatggttttg

SEQ ID NO: 3540293 - DNA, 25 bp, Homo sapien
catgaaaagcattacggcaatggat

SEQ ID NO: 3540294 - DNA, 25 bp, Homo sapien
tacagattgccacctgcacatgaaa

SEQ ID NO: 3540295 - DNA, 25 bp, Homo sapien
aaaagttaagacagaccaggcacgg

SEQ ID NO: 3540296 - DNA, 25 bp, Homo sapien
tatggtggcaagtccctgtcatcct

SEQ ID NO: 3540297 - DNA, 25 bp, Homo sapien
gcagcagtccttccaggcagaggtt

SEQ ID NO: 3540298 - DNA, 25 bp, Homo sapien
ccttcttatcagcagctagtccagc

SEQ ID NO: 3540299 - DNA, 25 bp, Homo sapien
ctggtttgggtgcagaaatgtcctt

SEQ ID NO: 3540300 - DNA, 25 bp, Homo sapien
tcagcagctagtccagctttcttac

SEQ ID NO: 3540301 - DNA, 25 bp, Homo sapien
cagtacccaatgcttcaaatgcggc

SEQ ID NO: 3540302 - DNA, 25 bp, Homo sapien
cttcaggagcagaatcattgatgtg

SEQ ID NO: 3540303 - DNA, 25 bp, Homo sapien
cttatcaagcttgagtttgtccaca

SEQ ID NO: 3540304 - DNA, 25 bp, Homo sapien
tgtccacatcagctaggaatgggtt

SEQ ID NO: 3540305 - DNA, 25 bp, Homo sapien
ctctttggcagggtagaagcagtgc

SEQ ID NO: 3540306 - DNA, 25 bp, Homo sapien
cagtggcggaaacttcttgcaataa

SEQ ID NO: 3540307 - DNA, 25 bp, Homo sapien
tgcaataaaaagagatgtctgctgc

SEQ ID NO: 3540308 - DNA, 25 bp, Homo sapien
gcacaaaagggctttagcaagctct

SEQ ID NO: 3540309 - DNA, 25 bp, Homo sapien
agtaaggaagattgcatcaattgcc

SEQ ID NO: 3540310 - DNA, 25 bp, Homo sapien
cagggcttgtaccacttgaggtttc

SEQ ID NO: 3540311 - DNA, 25 bp, Homo sapien
aaggaagattgcatcaattgcctcc

SEQ ID NO: 3540312 - DNA, 25 bp, Homo sapien
tgcagggcttgtaccacttgaggtt

SEQ ID NO: 3540313 - DNA, 25 bp, Homo sapien
atttctccaagatggttggcacaac

SEQ ID NO: 3540314 - DNA, 25 bp, Homo sapien
gaatttctccaagatggttggcaca

SEQ ID NO: 3540315 - DNA, 25 bp, Homo sapien
aatttctccaagatggttggcacaa

SEQ ID NO: 3540316 - DNA, 25 bp, Homo sapien
tgacattggtgtcctttccaacaac

SEQ ID NO: 3540317 - DNA, 25 bp, Homo sapien
aaagccaccaacatgacattggtgt

SEQ ID NO: 3540318 - DNA, 25 bp, Homo sapien
atttcttccttagcccaacagccag

SEQ ID NO: 3540319 - DNA, 25 bp, Homo sapien
aacagccaggccagtaagacatttt

SEQ ID NO: 3540320 - DNA, 25 bp, Homo sapien
gcttttactaaatctgcataatcgc

SEQ ID NO: 3540321 - DNA, 25 bp, Homo sapien
ttttattagtacttctacagactcc

SEQ ID NO: 3540322 - DNA, 25 bp, Homo sapien
tagtacttctacagactccagggcc

SEQ ID NO: 3540323 - DNA, 25 bp, Homo sapien
ctgcataatcgccagcttccagttt

SEQ ID NO: 3540324 - DNA, 25 bp, Homo sapien
cataagcatctatttgtggcacctc

SEQ ID NO: 3540325 - DNA, 25 bp, Homo sapien
aaagctcataagcatctatttgtgg

SEQ ID NO: 3540326 - DNA, 25 bp, Homo sapien
cttctaaaagctcataagcatctat

SEQ ID NO: 3540327 - DNA, 25 bp, Homo sapien
gcatctatttgtggcacctcatcac

SEQ ID NO: 3540328 - DNA, 25 bp, Homo sapien
ttgttggcagtttgacccattcttc

SEQ ID NO: 3540329 - DNA, 25 bp, Homo sapien
gttccaatttagcttctagttcttg

SEQ ID NO: 3540330 - DNA, 25 bp, Homo sapien
atctccaccagcagactgttgttgt

SEQ ID NO: 3540331 - DNA, 25 bp, Homo sapien
gaagaaatcgagtaggtctaggagc

SEQ ID NO: 3540332 - DNA, 25 bp, Homo sapien
ggctctaccagggcaaacaagaaag

SEQ ID NO: 3540333 - DNA, 25 bp, Homo sapien
gtggctctaccagggcaaacaagaa

SEQ ID NO: 3540334 - DNA, 25 bp, Homo sapien
tggctctaccagggcaaacaagaaa

SEQ ID NO: 3540335 - DNA, 25 bp, Homo sapien
aaggacagaatatcaacaacgatag

SEQ ID NO: 3540336 - DNA, 25 bp, Homo sapien
ttcatattaaccttgtgcgaaagca

SEQ ID NO: 3540337 - DNA, 25 bp, Homo sapien
atcaacaacgataggaagaaaatat

SEQ ID NO: 3540338 - DNA, 25 bp, Homo sapien
gaatatcaacaacgataggaagaaa

SEQ ID NO: 3540339 - DNA, 25 bp, Homo sapien
cagccttctctcgagactcaaagag

SEQ ID NO: 3540340 - DNA, 25 bp, Homo sapien
taaatctccacagcaattagtttgg

SEQ ID NO: 3540341 - DNA, 25 bp, Homo sapien
gagcatcccgaatccatctgtaaat

SEQ ID NO: 3540342 - DNA, 25 bp, Homo sapien
caacactttgataattggcttaagc

SEQ ID NO: 3540343 - DNA, 25 bp, Homo sapien
tatacaggccactatgatcttggga

SEQ ID NO: 3540344 - DNA, 25 bp, Homo sapien
tttcctcagtgtctctatacaggcc

SEQ ID NO: 3540345 - DNA, 25 bp, Homo sapien
tgaacaccttacttacaacacctga

SEQ ID NO: 3540346 - DNA, 25 bp, Homo sapien
cataagacagatctctatgcccagc

SEQ ID NO: 3540347 - DNA, 25 bp, Homo sapien
tcagggcctcttcatacccacttaa

SEQ ID NO: 3540348 - DNA, 25 bp, Homo sapien
ttggaatcagtgacaaattttttga

SEQ ID NO: 3540349 - DNA, 25 bp, Homo sapien
taatcctttcaattgaaccactgca

SEQ ID NO: 3540350 - DNA, 25 bp, Homo sapien
taaacaagtgcagcttctaatcctt

SEQ ID NO: 3540351 - DNA, 25 bp, Homo sapien
ggaatgccgatcatataaatcagag

SEQ ID NO: 3540352 - DNA, 25 bp, Homo sapien
gacactgaaaatcgaattccagaag

SEQ ID NO: 3540353 - DNA, 25 bp, Homo sapien
gataatctgaaaggatgcccaccaa

SEQ ID NO: 3540354 - DNA, 25 bp, Homo sapien
ctgagggtaaatattggaatgccga

SEQ ID NO: 3540355 - DNA, 25 bp, Homo sapien
tgatcaactggcagtttcaaccact

SEQ ID NO: 3540356 - DNA, 25 bp, Homo sapien
catttctgatcaactggcagtttca

SEQ ID NO: 3540357 - DNA, 25 bp, Homo sapien
ctggcagtttcaaccactcactgtc

SEQ ID NO: 3540358 - DNA, 25 bp, Homo sapien
cacatttctgatcaactggcagttt

SEQ ID NO: 3540359 - DNA, 25 bp, Homo sapien
caagtgttatcctcttgccggagta

SEQ ID NO: 3540360 - DNA, 25 bp, Homo sapien
tatttcccattaacaaggacaagtg

SEQ ID NO: 3540361 - DNA, 25 bp, Homo sapien
gagtattctgcattaccaggcggcc

SEQ ID NO: 3540362 - DNA, 25 bp, Homo sapien
ggacagtggcgtcccacaaattcct

SEQ ID NO: 3540363 - DNA, 25 bp, Homo sapien
tgtttacgctctttcgccgccttag

SEQ ID NO: 3540364 - DNA, 25 bp, Homo sapien
cactggagccggcattgtttacgct

SEQ ID NO: 3540365 - DNA, 25 bp, Homo sapien
aggccagcaaagtccccagtactgt

SEQ ID NO: 3540366 - DNA, 25 bp, Homo sapien
ggatgcttgccctttgcccgtggtt

SEQ ID NO: 3540367 - DNA, 25 bp, Homo sapien
agcagcattggtgctgcggtccgct

SEQ ID NO: 3540368 - DNA, 25 bp, Homo sapien
ggatcagcaggaatacccggcaggc

SEQ ID NO: 3540369 - DNA, 25 bp, Homo sapien
caggatcagcaggaatacccggcag

SEQ ID NO: 3540370 - DNA, 25 bp, Homo sapien
atcagcaggaatacccggcaggcgg

SEQ ID NO: 3540371 - DNA, 25 bp, Homo sapien
cgacttccggggctctggcaaaact

SEQ ID NO: 3540372 - DNA, 25 bp, Homo sapien
tgcgcctggtcttataaagaaaatt

SEQ ID NO: 3540373 - DNA, 25 bp, Homo sapien
ctgcgcctggtcttataaagaaaat

SEQ ID NO: 3540374 - DNA, 25 bp, Homo sapien
tcgcgacctttgtgatcaagctaac

SEQ ID NO: 3540375 - DNA, 25 bp, Homo sapien
tattttacagctttcgtttcgcgac

SEQ ID NO: 3540376 - DNA, 25 bp, Homo sapien
ccaagcaggctgaaattgtgcatag

SEQ ID NO: 3540377 - DNA, 25 bp, Homo sapien
aattgatttaaagaaccaagcaggc

SEQ ID NO: 3540378 - DNA, 25 bp, Homo sapien
gggcttcagattggcatctgagttg

SEQ ID NO: 3540379 - DNA, 25 bp, Homo sapien
gcttcagattggcatctgagttggg

SEQ ID NO: 3540380 - DNA, 25 bp, Homo sapien
ctggggcttcagattggcatctgag

SEQ ID NO: 3540381 - DNA, 25 bp, Homo sapien
tggggcttcagattggcatctgagt

SEQ ID NO: 3540382 - DNA, 25 bp, Homo sapien
tgtccactgctgaagaactacttgc

SEQ ID NO: 3540383 - DNA, 25 bp, Homo sapien
ctgaagaactacttgcttggtgtgt

SEQ ID NO: 3540384 - DNA, 25 bp, Homo sapien
cactgctgaagaactacttgcttgg

SEQ ID NO: 3540385 - DNA, 25 bp, Homo sapien
tgctgaagaactacttgcttggtgt

SEQ ID NO: 3540386 - DNA, 25 bp, Homo sapien
gagagtataagataaacttattaaa

SEQ ID NO: 3540387 - DNA, 25 bp, Homo sapien
tgagagtataagataaacttattaa

SEQ ID NO: 3540388 - DNA, 25 bp, Homo sapien
agagtataagataaacttattaaag

SEQ ID NO: 3540389 - DNA, 25 bp, Homo sapien
gcggcctgctctaagccgtttgaaa

SEQ ID NO: 3540390 - DNA, 25 bp, Homo sapien
ttattggtcctcgacggaccgccca

SEQ ID NO: 3540391 - DNA, 25 bp, Homo sapien
ggcaagtctgccgactccagaaaga

SEQ ID NO: 3540392 - DNA, 25 bp, Homo sapien
gaaagaatgtgtgtagacccgggca

SEQ ID NO: 3540393 - DNA, 25 bp, Homo sapien
tgtgcacccggttgatcaaagattg

SEQ ID NO: 3540394 - DNA, 25 bp, Homo sapien
tactcaaagtaaggattaggcggct

SEQ ID NO: 3540395 - DNA, 25 bp, Homo sapien
taacaaaggatgtttgtgcagtccg

SEQ ID NO: 3540396 - DNA, 25 bp, Homo sapien
taggtgcagccctactttaaggtga

SEQ ID NO: 3540397 - DNA, 25 bp, Homo sapien
gagttggagctttgactagacatca

SEQ ID NO: 3540398 - DNA, 25 bp, Homo sapien
tagggacctcattagaagactatca

SEQ ID NO: 3540399 - DNA, 25 bp, Homo sapien
tgtaggctgtccaagaactttgacc

SEQ ID NO: 3540400 - DNA, 25 bp, Homo sapien
tgagctctgctagcctctgcagctg

SEQ ID NO: 3540401 - DNA, 25 bp, Homo sapien
catgaaattctacatcgggcgttga

SEQ ID NO: 3540402 - DNA, 25 bp, Homo sapien
cagatctgggactggaattagccct

SEQ ID NO: 3540403 - DNA, 25 bp, Homo sapien
gatatcacatccagagaacctgaga

SEQ ID NO: 3540404 - DNA, 25 bp, Homo sapien
taagatcaaacagagctagtggcag

SEQ ID NO: 3540405 - DNA, 25 bp, Homo sapien
tcttcccattgggtgcgaataggcc

SEQ ID NO: 3540406 - DNA, 25 bp, Homo sapien
tcaaggaactctggcctcgacctgt

SEQ ID NO: 3540407 - DNA, 25 bp, Homo sapien
tcagagtcagcactcaagaggaaac

SEQ ID NO: 3540408 - DNA, 25 bp, Homo sapien
tcgacctgtcttctccagatgagct

SEQ ID NO: 3540409 - DNA, 25 bp, Homo sapien
actgtgcccacatccacaaaggact

SEQ ID NO: 3540410 - DNA, 25 bp, Homo sapien
ggaacctcacactctttattgctct

SEQ ID NO: 3540411 - DNA, 25 bp, Homo sapien
ttaaaagtgatgtctgtaagcaggt

SEQ ID NO: 3540412 - DNA, 25 bp, Homo sapien
ccacaaaggacttaaaagtgatgtc

SEQ ID NO: 3540413 - DNA, 25 bp, Homo sapien
catgactccaagccaggcaaggtga

SEQ ID NO: 3540414 - DNA, 25 bp, Homo sapien
aggtgcaggattagtcatgactcca

SEQ ID NO: 3540415 - DNA, 25 bp, Homo sapien
agtcatgactccaagccaggcaagg

SEQ ID NO: 3540416 - DNA, 25 bp, Homo sapien
caggtgcaggattagtcatgactcc

SEQ ID NO: 3540417 - DNA, 25 bp, Homo sapien
tactaacacacttgaggctggaggt

SEQ ID NO: 3540418 - DNA, 25 bp, Homo sapien
cacgtgccctttgtgtgaatgagca

SEQ ID NO: 3540419 - DNA, 25 bp, Homo sapien
tgataccaggctgagacacgtgccc

SEQ ID NO: 3540420 - DNA, 25 bp, Homo sapien
taagcgagcacaaggactagacgtc

SEQ ID NO: 3540421 - DNA, 25 bp, Homo sapien
gagagcctcgtctttctggagtggc

SEQ ID NO: 3540422 - DNA, 25 bp, Homo sapien
tggtgtagttatggtcaggccctcc

SEQ ID NO: 3540423 - DNA, 25 bp, Homo sapien
tatggacgctgctacactcagactg

SEQ ID NO: 3540424 - DNA, 25 bp, Homo sapien
tgcatacatgatcccggaggaggcc

SEQ ID NO: 3540425 - DNA, 25 bp, Homo sapien
gtttggggattgcttcaatcttcac

SEQ ID NO: 3540426 - DNA, 25 bp, Homo sapien
cagctggttgtacatggctggtttg

SEQ ID NO: 3540427 - DNA, 25 bp, Homo sapien
tcctgtgtggatgttcggtaggagg

SEQ ID NO: 3540428 - DNA, 25 bp, Homo sapien
ccattccaggatcagtgaacttgga

SEQ ID NO: 3540429 - DNA, 25 bp, Homo sapien
aagctgtaaactgagtctggtaggc

SEQ ID NO: 3540430 - DNA, 25 bp, Homo sapien
ggtactcatgcccttaagaatcccc

SEQ ID NO: 3540431 - DNA, 25 bp, Homo sapien
ggtgatgagaaattagtcgagatct

SEQ ID NO: 3540432 - DNA, 25 bp, Homo sapien
cagcctctaagatgatcccagtgac

SEQ ID NO: 3540433 - DNA, 25 bp, Homo sapien
caccaatggcgtagctgatatgaag

SEQ ID NO: 3540434 - DNA, 25 bp, Homo sapien
gagtccaccaatggcgtagctgata

SEQ ID NO: 3540435 - DNA, 25 bp, Homo sapien
tccaccaatggcgtagctgatatga

SEQ ID NO: 3540436 - DNA, 25 bp, Homo sapien
caatggcgtagctgatatgaagtcc

SEQ ID NO: 3540437 - DNA, 25 bp, Homo sapien
ggaacagtggggtactcagggctta

SEQ ID NO: 3540438 - DNA, 25 bp, Homo sapien
cggaacagtggggtactcagggctt

SEQ ID NO: 3540439 - DNA, 25 bp, Homo sapien
tccggaacagtggggtactcagggc

SEQ ID NO: 3540440 - DNA, 25 bp, Homo sapien
gaacagtggggtactcagggcttac

SEQ ID NO: 3540441 - DNA, 25 bp, Homo sapien
tcattggaacgtgcacagaggccca

SEQ ID NO: 3540442 - DNA, 25 bp, Homo sapien
agcaggaacagcgtcattggaacgt

SEQ ID NO: 3540443 - DNA, 25 bp, Homo sapien
gaacagcgtcattggaacgtgcaca

SEQ ID NO: 3540444 - DNA, 25 bp, Homo sapien
cagcgtcattggaacgtgcacagag

SEQ ID NO: 3540445 - DNA, 25 bp, Homo sapien
ttgaagaatacaaggtggtaggtgg

SEQ ID NO: 3540446 - DNA, 25 bp, Homo sapien
ctcctccagagacgtgcgggtccgg

SEQ ID NO: 3540447 - DNA, 25 bp, Homo sapien
tttcactcatgccagtagccctagg

SEQ ID NO: 3540448 - DNA, 25 bp, Homo sapien
taggtggtgtgttgggtagcactgg

SEQ ID NO: 3540449 - DNA, 25 bp, Homo sapien
aagtccgaggctctggcaaagcaga

SEQ ID NO: 3540450 - DNA, 25 bp, Homo sapien
gacaggcacatacgaagtccgaggc

SEQ ID NO: 3540451 - DNA, 25 bp, Homo sapien
tatcaggttcgtcaggacaggcaca

SEQ ID NO: 3540452 - DNA, 25 bp, Homo sapien
agcagggccggctatcaggttcgtc

SEQ ID NO: 3540453 - DNA, 25 bp, Homo sapien
tctgtccagtagatccacctgtctt

SEQ ID NO: 3540454 - DNA, 25 bp, Homo sapien
ttgtcaacacgctggattgacttgg

SEQ ID NO: 3540455 - DNA, 25 bp, Homo sapien
cgctgaggggaaaccacgatgatat

SEQ ID NO: 3540456 - DNA, 25 bp, Homo sapien
ctgtctccttgttccggcctgagta

SEQ ID NO: 3540457 - DNA, 25 bp, Homo sapien
tgggaccgcagcattaggattaact

SEQ ID NO: 3540458 - DNA, 25 bp, Homo sapien
taatctctatagtcagggcctagga

SEQ ID NO: 3540459 - DNA, 25 bp, Homo sapien
tggctagatgcctcaaaactctggc

SEQ ID NO: 3540460 - DNA, 25 bp, Homo sapien
aagtgagctccctatgcccagatgc

SEQ ID NO: 3540461 - DNA, 25 bp, Homo sapien
ggtgggacacatggctgaccaagac

SEQ ID NO: 3540462 - DNA, 25 bp, Homo sapien
ccgcagtttcccattgaggtcagca

SEQ ID NO: 3540463 - DNA, 25 bp, Homo sapien
gtccagatgcgcatccacccagtag

SEQ ID NO: 3540464 - DNA, 25 bp, Homo sapien
ttgaggtcagcactctcgatccggt

SEQ ID NO: 3540465 - DNA, 25 bp, Homo sapien
tatcatagtccagggtaaggccatt

SEQ ID NO: 3540466 - DNA, 25 bp, Homo sapien
ggccattgggccaacccaggtctgt

SEQ ID NO: 3540467 - DNA, 25 bp, Homo sapien
gaaccatccaagtttgcccgttcga

SEQ ID NO: 3540468 - DNA, 25 bp, Homo sapien
tctgtgttgatgaggaccttccgct

SEQ ID NO: 3540469 - DNA, 25 bp, Homo sapien
gatcagtactttgcggcaggaacca

SEQ ID NO: 3540470 - DNA, 25 bp, Homo sapien
ggctcatccaggctattgttgatca

SEQ ID NO: 3540471 - DNA, 25 bp, Homo sapien
cctggacgcctcaatggtatttcga

SEQ ID NO: 3540472 - DNA, 25 bp, Homo sapien
tgccagcccgtcagtggtcttcagc

SEQ ID NO: 3540473 - DNA, 25 bp, Homo sapien
gaccaggtatctatgagtacattcc

SEQ ID NO: 3540474 - DNA, 25 bp, Homo sapien
taactggaccccactgaactgtaag

SEQ ID NO: 3540475 - DNA, 25 bp, Homo sapien
cccagtgttggatgagcaaccagac

SEQ ID NO: 3540476 - DNA, 25 bp, Homo sapien
ccagactgacccagaatagagtaga

SEQ ID NO: 3540477 - DNA, 25 bp, Homo sapien
tgacattgttgagctcaggaacagg

SEQ ID NO: 3540478 - DNA, 25 bp, Homo sapien
gccatttctcgagccgcacttgtta

SEQ ID NO: 3540479 - DNA, 25 bp, Homo sapien
tccagtgagatacgccggatggagc

SEQ ID NO: 3540480 - DNA, 25 bp, Homo sapien
caggaacagggacatgcacatcggt

SEQ ID NO: 3540481 - DNA, 25 bp, Homo sapien
acaaaggtcccagttgtttgtggct

SEQ ID NO: 3540482 - DNA, 25 bp, Homo sapien
tggaacatcatctgaatcttacaaa

SEQ ID NO: 3540483 - DNA, 25 bp, Homo sapien
cctggaacatcatctgaatcttaca

SEQ ID NO: 3540484 - DNA, 25 bp, Homo sapien
ctggaacatcatctgaatcttacaa

SEQ ID NO: 3540485 - DNA, 25 bp, Homo sapien
gattggcaccattcaggtcagcagc

SEQ ID NO: 3540486 - DNA, 25 bp, Homo sapien
tccagtagatataggagtcgagcag

SEQ ID NO: 3540487 - DNA, 25 bp, Homo sapien
tgccagtacccttgtcagcacggtg

SEQ ID NO: 3540488 - DNA, 25 bp, Homo sapien
ggatgctccgagtctgccagtcagt

SEQ ID NO: 3540489 - DNA, 25 bp, Homo sapien
gggaagcagcagggacacggctctc

SEQ ID NO: 3540490 - DNA, 25 bp, Homo sapien
tgggaagcagcagggacacggctct

SEQ ID NO: 3540491 - DNA, 25 bp, Homo sapien
cattccggaccgctctaacttggca

SEQ ID NO: 3540492 - DNA, 25 bp, Homo sapien
cgcggtctgagccatccattccgga

SEQ ID NO: 3540493 - DNA, 25 bp, Homo sapien
ccttgtccacagtcagtccattggg

SEQ ID NO: 3540494 - DNA, 25 bp, Homo sapien
ccattgggccatcctaggttgttgt

SEQ ID NO: 3540495 - DNA, 25 bp, Homo sapien
caggttgcccacttcaatccggttt

SEQ ID NO: 3540496 - DNA, 25 bp, Homo sapien
tccagtatactttccggccaatggc

SEQ ID NO: 3540497 - DNA, 25 bp, Homo sapien
tcatggtacagtacgatggcccggg

SEQ ID NO: 3540498 - DNA, 25 bp, Homo sapien
actttccgcatggacccgtccaggt

SEQ ID NO: 3540499 - DNA, 25 bp, Homo sapien
tggcacgactgatcctgtgcagtgt

SEQ ID NO: 3540500 - DNA, 25 bp, Homo sapien
agccatccagattggcacgactgat

SEQ ID NO: 3540501 - DNA, 25 bp, Homo sapien
tcctgtgcagtgtgctgtcagacca

SEQ ID NO: 3540502 - DNA, 25 bp, Homo sapien
tccagattggcacgactgatcctgt

SEQ ID NO: 3540503 - DNA, 25 bp, Homo sapien
gggtctactccaatggcaatggtgt

SEQ ID NO: 3540504 - DNA, 25 bp, Homo sapien
tccagggagaccatgcgaatgtcta

SEQ ID NO: 3540505 - DNA, 25 bp, Homo sapien
tatcctcctggcgaagatgaggaaa

SEQ ID NO: 3540506 - DNA, 25 bp, Homo sapien
ttggtaccaccacatcagcaaaata

SEQ ID NO: 3540507 - DNA, 25 bp, Homo sapien
cattctccatagcacatggtgtaga

SEQ ID NO: 3540508 - DNA, 25 bp, Homo sapien
ttggggacctaagacacaggtggct

SEQ ID NO: 3540509 - DNA, 25 bp, Homo sapien
tccgcttggatttggggacctaaga

SEQ ID NO: 3540510 - DNA, 25 bp, Homo sapien
gcaggtacagctgaatccgcttgga

SEQ ID NO: 3540511 - DNA, 25 bp, Homo sapien
tagatgcgctctccatagagggtca

SEQ ID NO: 3540512 - DNA, 25 bp, Homo sapien
tgccagtcagtccaatagatgcgct

SEQ ID NO: 3540513 - DNA, 25 bp, Homo sapien
tgtcagccggtcagcgctctgtatg

SEQ ID NO: 3540514 - DNA, 25 bp, Homo sapien
gccggcggcggtggaagacatggat

SEQ ID NO: 3540515 - DNA, 25 bp, Homo sapien
ccatgccagctcgttcaatcttggg

SEQ ID NO: 3540516 - DNA, 25 bp, Homo sapien
caatagctaacccattaggccaggt

SEQ ID NO: 3540517 - DNA, 25 bp, Homo sapien
tagaagagataatgacttggcggcc

SEQ ID NO: 3540518 - DNA, 25 bp, Homo sapien
cgctgggacccataatcaatagcta

SEQ ID NO: 3540519 - DNA, 25 bp, Homo sapien
aggttctcccagatgagtactgttc

SEQ ID NO: 3540520 - DNA, 25 bp, Homo sapien
tgggttccaccacgatgtcccgagg

SEQ ID NO: 3540521 - DNA, 25 bp, Homo sapien
tgtcccgaggacgatcaaggttctc

SEQ ID NO: 3540522 - DNA, 25 bp, Homo sapien
gttggctacttcaatccggtctgta

SEQ ID NO: 3540523 - DNA, 25 bp, Homo sapien
ccagtacagtttgttggtgacccaa

SEQ ID NO: 3540524 - DNA, 25 bp, Homo sapien
tggtgacccaatcaatggccaggcc

SEQ ID NO: 3540525 - DNA, 25 bp, Homo sapien
gggctctccaaactggtatccacta

SEQ ID NO: 3540526 - DNA, 25 bp, Homo sapien
ctgcatctgtccagtacagtttgtt

SEQ ID NO: 3540527 - DNA, 25 bp, Homo sapien
tgtccagtacacgtggtcatcccgg

SEQ ID NO: 3540528 - DNA, 25 bp, Homo sapien
tcaaagctgattcgacggatgtcca

SEQ ID NO: 3540529 - DNA, 25 bp, Homo sapien
gtcatcccgggagtcccagtcaagg

SEQ ID NO: 3540530 - DNA, 25 bp, Homo sapien
gatgtccatccttcgggcaaaaagc

SEQ ID NO: 3540531 - DNA, 25 bp, Homo sapien
aaagaaagtcttcaacagggtgacg

SEQ ID NO: 3540532 - DNA, 25 bp, Homo sapien
ggacccgcttacacagaacatcatc

SEQ ID NO: 3540533 - DNA, 25 bp, Homo sapien
cacatatttatccaggacccgctta

SEQ ID NO: 3540534 - DNA, 25 bp, Homo sapien
atttatccaggacccgcttacacag

SEQ ID NO: 3540535 - DNA, 25 bp, Homo sapien
ccatggaggctggtgttgcagaccc

SEQ ID NO: 3540536 - DNA, 25 bp, Homo sapien
cctccatggaggctggtgttgcaga

SEQ ID NO: 3540537 - DNA, 25 bp, Homo sapien
agcctccatggaggctggtgttgca

SEQ ID NO: 3540538 - DNA, 25 bp, Homo sapien
aggctggtgttgcagacccacttac

SEQ ID NO: 3540539 - DNA, 25 bp, Homo sapien
tctgggcacaggcgtggctgctgat

SEQ ID NO: 3540540 - DNA, 25 bp, Homo sapien
ctgggcacaggcgtggctgctgatc

SEQ ID NO: 3540541 - DNA, 25 bp, Homo sapien
tgggcacaggcgtggctgctgatct

SEQ ID NO: 3540542 - DNA, 25 bp, Homo sapien
ctgatcttgcggaagccagtggggc

SEQ ID NO: 3540543 - DNA, 25 bp, Homo sapien
acaggtgcgtgcagcctccgttgtt

SEQ ID NO: 3540544 - DNA, 25 bp, Homo sapien
ggcagacacaggtgcgtgcagcctc

SEQ ID NO: 3540545 - DNA, 25 bp, Homo sapien
ctccgttgttgtccccacagcggtt

SEQ ID NO: 3540546 - DNA, 25 bp, Homo sapien
tgcgtgcagcctccgttgttgtccc

SEQ ID NO: 3540547 - DNA, 25 bp, Homo sapien
gagtttgttgcgaatgatttcctgg

SEQ ID NO: 3540548 - DNA, 25 bp, Homo sapien
gtccagtacaggctgtcttcaaaca

SEQ ID NO: 3540549 - DNA, 25 bp, Homo sapien
cgctattgatgctcttggtgtgcca

SEQ ID NO: 3540550 - DNA, 25 bp, Homo sapien
ccgtaaatttgttagcgctattgat

SEQ ID NO: 3540551 - DNA, 25 bp, Homo sapien
ctgtgatggcgaagggatgcgggag

SEQ ID NO: 3540552 - DNA, 25 bp, Homo sapien
tgtgatggcgaagggatgcgggagg

SEQ ID NO: 3540553 - DNA, 25 bp, Homo sapien
gtgatggcgaagggatgcgggaggc

SEQ ID NO: 3540554 - DNA, 25 bp, Homo sapien
tatcggcaatgatgcggcgtccaga

SEQ ID NO: 3540555 - DNA, 25 bp, Homo sapien
gattggccctctcgatgacatggtg

SEQ ID NO: 3540556 - DNA, 25 bp, Homo sapien
tacggcgcccggcatagtcgatggt

SEQ ID NO: 3540557 - DNA, 25 bp, Homo sapien
gacatggtgcttagcatccacccag

SEQ ID NO: 3540558 - DNA, 25 bp, Homo sapien
ccagttattacagagccaggaccta

SEQ ID NO: 3540559 - DNA, 25 bp, Homo sapien
agccaggacctagactcaagtgtgt

SEQ ID NO: 3540560 - DNA, 25 bp, Homo sapien
ccacacagccagttattacagagcc

SEQ ID NO: 3540561 - DNA, 25 bp, Homo sapien
gacagagcccatgttattaacatca

SEQ ID NO: 3540562 - DNA, 25 bp, Homo sapien
gtcccgagaggttgcaagaaagttc

SEQ ID NO: 3540563 - DNA, 25 bp, Homo sapien
gagctgtcccgagaggttgcaagaa

SEQ ID NO: 3540564 - DNA, 25 bp, Homo sapien
gttgcaagaaagttcgggagcctga

SEQ ID NO: 3540565 - DNA, 25 bp, Homo sapien
aagttcgggagcctgagatacaact

SEQ ID NO: 3540566 - DNA, 25 bp, Homo sapien
gattggccacctcaatcctcgaggt

SEQ ID NO: 3540567 - DNA, 25 bp, Homo sapien
ccacagcaacactttccggtgggcc

SEQ ID NO: 3540568 - DNA, 25 bp, Homo sapien
tgtcatggacccaatccacagccag

SEQ ID NO: 3540569 - DNA, 25 bp, Homo sapien
tccggtgggccccatccagattggc

SEQ ID NO: 3540570 - DNA, 25 bp, Homo sapien
gaaatcaagggcaatggcattctcc

SEQ ID NO: 3540571 - DNA, 25 bp, Homo sapien
cacgttgctgccgttgaggttggca

SEQ ID NO: 3540572 - DNA, 25 bp, Homo sapien
gcacctgccggatgtcgatgcgatt

SEQ ID NO: 3540573 - DNA, 25 bp, Homo sapien
tactcagagcggtgtggcagcacct

SEQ ID NO: 3540574 - DNA, 25 bp, Homo sapien
ttcacaccagcattggaaagcccct

SEQ ID NO: 3540575 - DNA, 25 bp, Homo sapien
tgcgccggtcgggccgtagttcata

SEQ ID NO: 3540576 - DNA, 25 bp, Homo sapien
tagttcatagcctgtttcacaccag

SEQ ID NO: 3540577 - DNA, 25 bp, Homo sapien
aaagccccttcgctgttggtgcagc

SEQ ID NO: 3540578 - DNA, 25 bp, Homo sapien
agccggtagcctgtgtggcaggtac

SEQ ID NO: 3540579 - DNA, 25 bp, Homo sapien
tgcccatcctctgtgagccggtagc

SEQ ID NO: 3540580 - DNA, 25 bp, Homo sapien
cccgcaccatctggcacttctgggc

SEQ ID NO: 3540581 - DNA, 25 bp, Homo sapien
accgttgttaacattgcagttctcc

SEQ ID NO: 3540582 - DNA, 25 bp, Homo sapien
ttcctctgcccaatgcagcgcccat

SEQ ID NO: 3540583 - DNA, 25 bp, Homo sapien
gtcgttgaccccgttgcacagcttc

SEQ ID NO: 3540584 - DNA, 25 bp, Homo sapien
tggtccaaggcacattgggggcttc

SEQ ID NO: 3540585 - DNA, 25 bp, Homo sapien
gctgtgggctttcgtcgctgttgtc

SEQ ID NO: 3540586 - DNA, 25 bp, Homo sapien
acagcgccaggacaggcggacacag

SEQ ID NO: 3540587 - DNA, 25 bp, Homo sapien
ttctcttcatcgctgttgtctgcac

SEQ ID NO: 3540588 - DNA, 25 bp, Homo sapien
ccatcacagcgccaggacaggcgga

SEQ ID NO: 3540589 - DNA, 25 bp, Homo sapien
cggacacagcggcctgagtgacagc

SEQ ID NO: 3540590 - DNA, 25 bp, Homo sapien
tggtcatcacagtccgcgtcaccat

SEQ ID NO: 3540591 - DNA, 25 bp, Homo sapien
tgcagttgcgctcatcagactggtc

SEQ ID NO: 3540592 - DNA, 25 bp, Homo sapien
tcagactggtcatcacagtccgcgt

SEQ ID NO: 3540593 - DNA, 25 bp, Homo sapien
tgcgctcatcagactggtcatcaca

SEQ ID NO: 3540594 - DNA, 25 bp, Homo sapien
ttgatgcacaggccactgtcacaca

SEQ ID NO: 3540595 - DNA, 25 bp, Homo sapien
tgcattgatgcacaggccactgtca

SEQ ID NO: 3540596 - DNA, 25 bp, Homo sapien
cattgatgcacaggccactgtcaca

SEQ ID NO: 3540597 - DNA, 25 bp, Homo sapien
gatgcacaggccactgtcacacatg

SEQ ID NO: 3540598 - DNA, 25 bp, Homo sapien
gtcagactcgtctgaccagtctcca

SEQ ID NO: 3540599 - DNA, 25 bp, Homo sapien
catcgcagtggtagatgtcgaggat

SEQ ID NO: 3540600 - DNA, 25 bp, Homo sapien
gtcatcgtcgccatcgcagtggtag

SEQ ID NO: 3540601 - DNA, 25 bp, Homo sapien
gaggatgcagcgtccataggcacac

SEQ ID NO: 3540602 - DNA, 25 bp, Homo sapien
tcaccgtcgcagtaccaatgctcag

SEQ ID NO: 3540603 - DNA, 25 bp, Homo sapien
aatgcagcttccgtcactacagcgg

SEQ ID NO: 3540604 - DNA, 25 bp, Homo sapien
acagcggaactccttgtcggagcac

SEQ ID NO: 3540605 - DNA, 25 bp, Homo sapien
catctttgcagtcggtgtcaccgtc

SEQ ID NO: 3540606 - DNA, 25 bp, Homo sapien
ctggggggatgcgatgggacagcag

SEQ ID NO: 3540607 - DNA, 25 bp, Homo sapien
ggggggatgcgatgggacagcagtt

SEQ ID NO: 3540608 - DNA, 25 bp, Homo sapien
tggggggatgcgatgggacagcagt

SEQ ID NO: 3540609 - DNA, 25 bp, Homo sapien
tgctcatcgctgttgtcgccacagt

SEQ ID NO: 3540610 - DNA, 25 bp, Homo sapien
ttctggcagggaaactcgtcctcct

SEQ ID NO: 3540611 - DNA, 25 bp, Homo sapien
tcattgtcaccatcgcagtgccaca

SEQ ID NO: 3540612 - DNA, 25 bp, Homo sapien
cagactccggatgcagtagccattc

SEQ ID NO: 3540613 - DNA, 25 bp, Homo sapien
cgagtcatcctcacagtcgttgtcc

SEQ ID NO: 3540614 - DNA, 25 bp, Homo sapien
ccaggagcggcggatgcacttgcca

SEQ ID NO: 3540615 - DNA, 25 bp, Homo sapien
aggagcggcggatgcacttgccatt

SEQ ID NO: 3540616 - DNA, 25 bp, Homo sapien
acagtcctgctcatccgagtcatcc

SEQ ID NO: 3540617 - DNA, 25 bp, Homo sapien
actgggcagggatgcaggtacactc

SEQ ID NO: 3540618 - DNA, 25 bp, Homo sapien
aagtggctccgaccacaagcacact

SEQ ID NO: 3540619 - DNA, 25 bp, Homo sapien
ggatgcaggtacactctccaagagc

SEQ ID NO: 3540620 - DNA, 25 bp, Homo sapien
cactgcacatgtgaagtggctccga

SEQ ID NO: 3540621 - DNA, 25 bp, Homo sapien
tctcgtttgcaaggcagcctctttg

SEQ ID NO: 3540622 - DNA, 25 bp, Homo sapien
gtttgcaaggcagcctctttgtcct

SEQ ID NO: 3540623 - DNA, 25 bp, Homo sapien
gaatcttctcgtttgcaaggcagcc

SEQ ID NO: 3540624 - DNA, 25 bp, Homo sapien
aacaggaatcttctcgtttgcaagg

SEQ ID NO: 3540625 - DNA, 25 bp, Homo sapien
tgtattatccggctgtgaaactgac

SEQ ID NO: 3540626 - DNA, 25 bp, Homo sapien
ttctcctacaagagttcctttcacc

SEQ ID NO: 3540627 - DNA, 25 bp, Homo sapien
ttcaccagctgtattatccggctgt

SEQ ID NO: 3540628 - DNA, 25 bp, Homo sapien
cctacaagagttcctttcaccagct

SEQ ID NO: 3540629 - DNA, 25 bp, Homo sapien
ttttattcccgattcctagaggcca

SEQ ID NO: 3540630 - DNA, 25 bp, Homo sapien
attcctagaggccagcttaacttgg

SEQ ID NO: 3540631 - DNA, 25 bp, Homo sapien
tagaggccagcttaacttggttggt

SEQ ID NO: 3540632 - DNA, 25 bp, Homo sapien
tcccgattcctagaggccagcttaa

SEQ ID NO: 3540633 - DNA, 25 bp, Homo sapien
ttctcctcagtggcccgtttcgaaa

SEQ ID NO: 3540634 - DNA, 25 bp, Homo sapien
ctcctcagtggcccgtttcgaaagg

SEQ ID NO: 3540635 - DNA, 25 bp, Homo sapien
cagtggcccgtttcgaaagggacat

SEQ ID NO: 3540636 - DNA, 25 bp, Homo sapien
tcagtggcccgtttcgaaagggaca

SEQ ID NO: 3540637 - DNA, 25 bp, Homo sapien
caagctaccgctcttcggagagaaa

SEQ ID NO: 3540638 - DNA, 25 bp, Homo sapien
cgctagagaggacgcggaaaaaagc

SEQ ID NO: 3540639 - DNA, 25 bp, Homo sapien
tggtgggaagaacagctacattcct

SEQ ID NO: 3540640 - DNA, 25 bp, Homo sapien
aaagagctcagtccgcgctagagag

SEQ ID NO: 3540641 - DNA, 25 bp, Homo sapien
aacgagtgcctagacatctccacgc

SEQ ID NO: 3540642 - DNA, 25 bp, Homo sapien
gcactgactttttccacacgagctg

SEQ ID NO: 3540643 - DNA, 25 bp, Homo sapien
taaaacgagtgcctagacatctcca

SEQ ID NO: 3540644 - DNA, 25 bp, Homo sapien
gccaggcaagttcggaaatctgcac

SEQ ID NO: 3540645 - DNA, 25 bp, Homo sapien
tgatgcccccgctcggactgctgga

SEQ ID NO: 3540646 - DNA, 25 bp, Homo sapien
ccgaacccgcggaagcgcctccgct

SEQ ID NO: 3540647 - DNA, 25 bp, Homo sapien
gcggaagcgcctccgctgatgcccc

SEQ ID NO: 3540648 - DNA, 25 bp, Homo sapien
gatgcccccgctcggactgctggag

SEQ ID NO: 3540649 - DNA, 25 bp, Homo sapien
agagcagggcgccaagcagcagcgc

SEQ ID NO: 3540650 - DNA, 25 bp, Homo sapien
tgtgcgcagagcagggcgccaagca

SEQ ID NO: 3540651 - DNA, 25 bp, Homo sapien
cgtgtgcgcagagcagggcgccaag

SEQ ID NO: 3540652 - DNA, 25 bp, Homo sapien
cagggcgccaagcagcagcgcgccc

SEQ ID NO: 3540653 - DNA, 25 bp, Homo sapien
gattcggcccatacagacttagttc

SEQ ID NO: 3540654 - DNA, 25 bp, Homo sapien
tcctgagatggttgtctgggtcctg

SEQ ID NO: 3540655 - DNA, 25 bp, Homo sapien
tctttgtaaatcactgttgttagcc

SEQ ID NO: 3540656 - DNA, 25 bp, Homo sapien
gttgttagcctcttcaccttctttg

SEQ ID NO: 3540657 - DNA, 25 bp, Homo sapien
gatgacatcttgttcttatttagcc

SEQ ID NO: 3540658 - DNA, 25 bp, Homo sapien
tacaaattgctccagagatgacatc

SEQ ID NO: 3540659 - DNA, 25 bp, Homo sapien
gaaaaacctacaaattgctccagag

SEQ ID NO: 3540660 - DNA, 25 bp, Homo sapien
tcggatttttatggaagggatggaa

SEQ ID NO: 3540661 - DNA, 25 bp, Homo sapien
gggatagagctgcattagggcccat

SEQ ID NO: 3540662 - DNA, 25 bp, Homo sapien
ctgggacagtcccattggcccaaag

SEQ ID NO: 3540663 - DNA, 25 bp, Homo sapien
catctggcggggatagagctgcatt

SEQ ID NO: 3540664 - DNA, 25 bp, Homo sapien
gacagtcccattggcccaaagtaaa

SEQ ID NO: 3540665 - DNA, 25 bp, Homo sapien
ggctccatggttctcatgccccaaa

SEQ ID NO: 3540666 - DNA, 25 bp, Homo sapien
tcttcggctttgcttgtcaaatgga

SEQ ID NO: 3540667 - DNA, 25 bp, Homo sapien
gcttgtcaaatggagaggctgccag

SEQ ID NO: 3540668 - DNA, 25 bp, Homo sapien
aggctgccagaaccggtcggctcca

SEQ ID NO: 3540669 - DNA, 25 bp, Homo sapien
aaaacagacaggtacaggctttcct

SEQ ID NO: 3540670 - DNA, 25 bp, Homo sapien
aaacagacaggtacaggctttccta

SEQ ID NO: 3540671 - DNA, 25 bp, Homo sapien
tagggttgttgagcattggtgcctg

SEQ ID NO: 3540672 - DNA, 25 bp, Homo sapien
agggttgttgagcattggtgcctgt

SEQ ID NO: 3540673 - DNA, 25 bp, Homo sapien
ctagggttgttgagcattggtgcct

SEQ ID NO: 3540674 - DNA, 25 bp, Homo sapien
aacagaacctttgttaggctttcag

SEQ ID NO: 3540675 - DNA, 25 bp, Homo sapien
agcaaagctgtttatgaacggtggc

SEQ ID NO: 3540676 - DNA, 25 bp, Homo sapien
agaacctttgttaggctttcagcaa

SEQ ID NO: 3540677 - DNA, 25 bp, Homo sapien
aagctgtttatgaacggtggcttac

SEQ ID NO: 3540678 - DNA, 25 bp, Homo sapien
ttcctgtgctgtgtgcttccatttt

SEQ ID NO: 3540679 - DNA, 25 bp, Homo sapien
tcctgtgctgtgtgcttccattttg

SEQ ID NO: 3540680 - DNA, 25 bp, Homo sapien
cctgtgctgtgtgcttccattttgt

SEQ ID NO: 3540681 - DNA, 25 bp, Homo sapien
ctgtcactccttggttgttggtgtt

SEQ ID NO: 3540682 - DNA, 25 bp, Homo sapien
ctatgctgtctgtcactccttggtt

SEQ ID NO: 3540683 - DNA, 25 bp, Homo sapien
ctgtctgtcactccttggttgttgg

SEQ ID NO: 3540684 - DNA, 25 bp, Homo sapien
tatgctgtctgtcactccttggttg

SEQ ID NO: 3540685 - DNA, 25 bp, Homo sapien
cagctagctgcagtttggtgctctg

SEQ ID NO: 3540686 - DNA, 25 bp, Homo sapien
gtttggtgctctgatcaaaaggcct

SEQ ID NO: 3540687 - DNA, 25 bp, Homo sapien
aagaatgggcagcttgagttacagc

SEQ ID NO: 3540688 - DNA, 25 bp, Homo sapien
taattcctgccatataagaatgggc

SEQ ID NO: 3540689 - DNA, 25 bp, Homo sapien
tgtgactaaactcagcttcagtagc

SEQ ID NO: 3540690 - DNA, 25 bp, Homo sapien
tgactaaactcagcttcagtagcag

SEQ ID NO: 3540691 - DNA, 25 bp, Homo sapien
gcagaagaaaatagtacagacaggg

SEQ ID NO: 3540692 - DNA, 25 bp, Homo sapien
actaaactcagcttcagtagcagaa

SEQ ID NO: 3540693 - DNA, 25 bp, Homo sapien
acagcacgtctgtgttcatgtcccc

SEQ ID NO: 3540694 - DNA, 25 bp, Homo sapien
ggacagcacgtctgtgttcatgtcc

SEQ ID NO: 3540695 - DNA, 25 bp, Homo sapien
gacagcacgtctgtgttcatgtccc

SEQ ID NO: 3540696 - DNA, 25 bp, Homo sapien
aggacagcacgtctgtgttcatgtc

SEQ ID NO: 3540697 - DNA, 25 bp, Homo sapien
ctgctgagtgtcatgtcaaccacca

SEQ ID NO: 3540698 - DNA, 25 bp, Homo sapien
gctgagtgtcatgtcaaccaccacc

SEQ ID NO: 3540699 - DNA, 25 bp, Homo sapien
aggcgctcatggcttcctgcatcaa

SEQ ID NO: 3540700 - DNA, 25 bp, Homo sapien
ggcttcctgcatcaacttcttgctc

SEQ ID NO: 3540701 - DNA, 25 bp, Homo sapien
ttcctgcatcaacttcttgctcatg

SEQ ID NO: 3540702 - DNA, 25 bp, Homo sapien
ggcgctcatggcttcctgcatcaac

SEQ ID NO: 3540703 - DNA, 25 bp, Homo sapien
ccttctcaaagaactcactgggcag

SEQ ID NO: 3540704 - DNA, 25 bp, Homo sapien
gttttccttctcaaagaactcactg

SEQ ID NO: 3540705 - DNA, 25 bp, Homo sapien
tttccttctcaaagaactcactggg

SEQ ID NO: 3540706 - DNA, 25 bp, Homo sapien
ttccttctcaaagaactcactgggc

SEQ ID NO: 3540707 - DNA, 25 bp, Homo sapien
ggctggggtcaatttccacagtgaa

SEQ ID NO: 3540708 - DNA, 25 bp, Homo sapien
tcaatttccacagtgaagaggttgt

SEQ ID NO: 3540709 - DNA, 25 bp, Homo sapien
gggtcaatttccacagtgaagaggt

SEQ ID NO: 3540710 - DNA, 25 bp, Homo sapien
tgaagaggttgtcagagcctttgac

SEQ ID NO: 3540711 - DNA, 25 bp, Homo sapien
ttcatgcccttttgatagctggatg

SEQ ID NO: 3540712 - DNA, 25 bp, Homo sapien
catgcccttttgatagctggatggc

SEQ ID NO: 3540713 - DNA, 25 bp, Homo sapien
ttttgatagctggatggccaggctg

SEQ ID NO: 3540714 - DNA, 25 bp, Homo sapien
gcccttttgatagctggatggccag

SEQ ID NO: 3540715 - DNA, 25 bp, Homo sapien
gtcgcacccagttggctgctgttcc

SEQ ID NO: 3540716 - DNA, 25 bp, Homo sapien
gctttggtgcaagggtgcagtcagt

SEQ ID NO: 3540717 - DNA, 25 bp, Homo sapien
tgcagtcagtcgcacccagttggct

SEQ ID NO: 3540718 - DNA, 25 bp, Homo sapien
gtggcagccaaggattccctgttct

SEQ ID NO: 3540719 - DNA, 25 bp, Homo sapien
gaagactcgctcttcttggcagcat

SEQ ID NO: 3540720 - DNA, 25 bp, Homo sapien
catttagtccctggcacaaatgaag

SEQ ID NO: 3540721 - DNA, 25 bp, Homo sapien
cctggcacaaatgaagactcgctct

SEQ ID NO: 3540722 - DNA, 25 bp, Homo sapien
aatgaagactcgctcttcttggcag

SEQ ID NO: 3540723 - DNA, 25 bp, Homo sapien
gatgtcatgggtctaagatcacaca

SEQ ID NO: 3540724 - DNA, 25 bp, Homo sapien
gttgaaactcactgatttgatgtca

SEQ ID NO: 3540725 - DNA, 25 bp, Homo sapien
gaagaggagctcagatttcgatctg

SEQ ID NO: 3540726 - DNA, 25 bp, Homo sapien
tttcgatctgtctaactgcagagcc

SEQ ID NO: 3540727 - DNA, 25 bp, Homo sapien
cagaaaactcagattaataggctgt

SEQ ID NO: 3540728 - DNA, 25 bp, Homo sapien
gcagcggatggtgtgcagtcgggat

SEQ ID NO: 3540729 - DNA, 25 bp, Homo sapien
tgtatactcaggcacaccagaaaac

SEQ ID NO: 3540730 - DNA, 25 bp, Homo sapien
cagtcgggatgtttgcaagagccaa

SEQ ID NO: 3540731 - DNA, 25 bp, Homo sapien
ccaggcaggtcatataagaagcata

SEQ ID NO: 3540732 - DNA, 25 bp, Homo sapien
gaaaattcagatgccaacactggcc

SEQ ID NO: 3540733 - DNA, 25 bp, Homo sapien
tattcggtggtaaactggcaacagc

SEQ ID NO: 3540734 - DNA, 25 bp, Homo sapien
ccagctgattgtggtcatgcaggaa

SEQ ID NO: 3540735 - DNA, 25 bp, Homo sapien
tttcctcgacttctcgtctgggtga

SEQ ID NO: 3540736 - DNA, 25 bp, Homo sapien
ttcctcgacttctcgtctgggtgag

SEQ ID NO: 3540737 - DNA, 25 bp, Homo sapien
tcctcgacttctcgtctgggtgaga

SEQ ID NO: 3540738 - DNA, 25 bp, Homo sapien
cttggtgccccagggattggaaggg

SEQ ID NO: 3540739 - DNA, 25 bp, Homo sapien
ggtggtgtggtcatgccccgaacta

SEQ ID NO: 3540740 - DNA, 25 bp, Homo sapien
gccttggtgccccagggattggaag

SEQ ID NO: 3540741 - DNA, 25 bp, Homo sapien
gtggtgtggtcatgccccgaactat

SEQ ID NO: 3540742 - DNA, 25 bp, Homo sapien
ccagcacagtggtcccccagcccat

SEQ ID NO: 3540743 - DNA, 25 bp, Homo sapien
ctgccaggtagaagagtggctggca

SEQ ID NO: 3540744 - DNA, 25 bp, Homo sapien
gagagaccacggtgtggccaccagc

SEQ ID NO: 3540745 - DNA, 25 bp, Homo sapien
gatgagagaccacggtgtggccacc

SEQ ID NO: 3540746 - DNA, 25 bp, Homo sapien
caaatgcaggctgcagaagctaggg

SEQ ID NO: 3540747 - DNA, 25 bp, Homo sapien
taccttgttcatcataatggggagc

SEQ ID NO: 3540748 - DNA, 25 bp, Homo sapien
agctagggggactgctaccttgttc

SEQ ID NO: 3540749 - DNA, 25 bp, Homo sapien
tagggtgaactggtgcccaaatgca

SEQ ID NO: 3540750 - DNA, 25 bp, Homo sapien
caagcctgagaccacgagtggcaat

SEQ ID NO: 3540751 - DNA, 25 bp, Homo sapien
gagtggcaatgactccctcccttga

SEQ ID NO: 3540752 - DNA, 25 bp, Homo sapien
ggagagtgccacaaaaccatcttga

SEQ ID NO: 3540753 - DNA, 25 bp, Homo sapien
cctttgacctatattgacgctgagt

SEQ ID NO: 3540754 - DNA, 25 bp, Homo sapien
gcaggaggaagcatcgtagccagtc

SEQ ID NO: 3540755 - DNA, 25 bp, Homo sapien
agcatcgtagccagtccatatcaat

SEQ ID NO: 3540756 - DNA, 25 bp, Homo sapien
ttgacagacacctcagacctttctg

SEQ ID NO: 3540757 - DNA, 25 bp, Homo sapien
tagaggcctgctgtttgacagacac

SEQ ID NO: 3540758 - DNA, 25 bp, Homo sapien
atgtgtgcgtaaaagaatgtaatcc

SEQ ID NO: 3540759 - DNA, 25 bp, Homo sapien
agctggaagccggagcctgttcagg

SEQ ID NO: 3540760 - DNA, 25 bp, Homo sapien
gatgatgtgtgcgtaaaagaatgta

SEQ ID NO: 3540761 - DNA, 25 bp, Homo sapien
tgtgatgatgtgtgcgtaaaagaat

SEQ ID NO: 3540762 - DNA, 25 bp, Homo sapien
caggctgtctacagggaagcagcag

SEQ ID NO: 3540763 - DNA, 25 bp, Homo sapien
cttccagtccttctgcgggcagctg

SEQ ID NO: 3540764 - DNA, 25 bp, Homo sapien
gcgggcagctgctctaacaaacact

SEQ ID NO: 3540765 - DNA, 25 bp, Homo sapien
gttccagagtaatgacaccttcagg

SEQ ID NO: 3540766 - DNA, 25 bp, Homo sapien
tcgtgtcatcgctgcttctctcatg

SEQ ID NO: 3540767 - DNA, 25 bp, Homo sapien
aaggtaaccagacatcgtgtcatcg

SEQ ID NO: 3540768 - DNA, 25 bp, Homo sapien
taaccagacatcgtgtcatcgctgc

SEQ ID NO: 3540769 - DNA, 25 bp, Homo sapien
ctggagaaggtaaccagacatcgtg

SEQ ID NO: 3540770 - DNA, 25 bp, Homo sapien
tgtgctctcatggaagatgtgtggc

SEQ ID NO: 3540771 - DNA, 25 bp, Homo sapien
ctgtggagtccagcaagctccccag

SEQ ID NO: 3540772 - DNA, 25 bp, Homo sapien
cagactcttcacgtgtagaatggaa

SEQ ID NO: 3540773 - DNA, 25 bp, Homo sapien
tggaaataataagacccacctgtag

SEQ ID NO: 3540774 - DNA, 25 bp, Homo sapien
gacttgaggagtccaaagggtcctg

SEQ ID NO: 3540775 - DNA, 25 bp, Homo sapien
tgaagagacagacgagtcggagact

SEQ ID NO: 3540776 - DNA, 25 bp, Homo sapien
ccaggcctggtcaactcggtcacag

SEQ ID NO: 3540777 - DNA, 25 bp, Homo sapien
tggagacctctccatcattcccgaa

SEQ ID NO: 3540778 - DNA, 25 bp, Homo sapien
ggccctgcaggggctttattttgac

SEQ ID NO: 3540779 - DNA, 25 bp, Homo sapien
aggccctgcaggggctttattttga

SEQ ID NO: 3540780 - DNA, 25 bp, Homo sapien
tgttgccgtcaccatcgtaagcctg

SEQ ID NO: 3540781 - DNA, 25 bp, Homo sapien
caagggtctccggtctgatcccaaa

SEQ ID NO: 3540782 - DNA, 25 bp, Homo sapien
gacaagagtctaacacacggagggt

SEQ ID NO: 3540783 - DNA, 25 bp, Homo sapien
gacccaaggcctcgaactagaagaa

SEQ ID NO: 3540784 - DNA, 25 bp, Homo sapien
ggcacccgacaacagggaagccctg

SEQ ID NO: 3540785 - DNA, 25 bp, Homo sapien
aagagcggtacaggtgacaaggcca

SEQ ID NO: 3540786 - DNA, 25 bp, Homo sapien
acagcccggtgaggcaggagtccac

SEQ ID NO: 3540787 - DNA, 25 bp, Homo sapien
cacagaggcatcttggagaggcccg

SEQ ID NO: 3540788 - DNA, 25 bp, Homo sapien
gtccgctgtaggcagcacgttcccc

SEQ ID NO: 3540789 - DNA, 25 bp, Homo sapien
agacttgacaccctgcttaaactgg

SEQ ID NO: 3540790 - DNA, 25 bp, Homo sapien
agcacgttccccagagatacacttc

SEQ ID NO: 3540791 - DNA, 25 bp, Homo sapien
gacttgacaccctgcttaaactggg

SEQ ID NO: 3540792 - DNA, 25 bp, Homo sapien
caaagaggtctgaagagctgatggc

SEQ ID NO: 3540793 - DNA, 25 bp, Homo sapien
agaggtctgaagagctgatggcact

SEQ ID NO: 3540794 - DNA, 25 bp, Homo sapien
aagaggtctgaagagctgatggcac

SEQ ID NO: 3540795 - DNA, 25 bp, Homo sapien
ccaaagaggtctgaagagctgatgg

SEQ ID NO: 3540796 - DNA, 25 bp, Homo sapien
gcgaatttctgacgcgcctcactag

SEQ ID NO: 3540797 - DNA, 25 bp, Homo sapien
ggctttggctcctgcgaatttctga

SEQ ID NO: 3540798 - DNA, 25 bp, Homo sapien
gaacatgtcagatgagatggctttg

SEQ ID NO: 3540799 - DNA, 25 bp, Homo sapien
tagactcgaggcctgagctccggct

SEQ ID NO: 3540800 - DNA, 25 bp, Homo sapien
aatatctcggactcctcccattatc

SEQ ID NO: 3540801 - DNA, 25 bp, Homo sapien
cggactcctcccattatcatcaggg

SEQ ID NO: 3540802 - DNA, 25 bp, Homo sapien
tttggtgatgggttaccaggtccca

SEQ ID NO: 3540803 - DNA, 25 bp, Homo sapien
tgatgggttaccaggtcccattctg

SEQ ID NO: 3540804 - DNA, 25 bp, Homo sapien
gatgcttgagatggtcacttctggc

SEQ ID NO: 3540805 - DNA, 25 bp, Homo sapien
gcttgagatggtcacttctggctcc

SEQ ID NO: 3540806 - DNA, 25 bp, Homo sapien
taggccggatgcttgagatggtcac

SEQ ID NO: 3540807 - DNA, 25 bp, Homo sapien
ctttctgaaataggccggatgcttg

SEQ ID NO: 3540808 - DNA, 25 bp, Homo sapien
taccaacatcgtcaaacaagtccag

SEQ ID NO: 3540809 - DNA, 25 bp, Homo sapien
tgcatctcagacagcacggagtggg

SEQ ID NO: 3540810 - DNA, 25 bp, Homo sapien
agcgagaggattttgcactcactgg

SEQ ID NO: 3540811 - DNA, 25 bp, Homo sapien
gtccagaggcgaaagtaccaacatc

SEQ ID NO: 3540812 - DNA, 25 bp, Homo sapien
tattccacgtaggagttccctggcc

SEQ ID NO: 3540813 - DNA, 25 bp, Homo sapien
caggcatgagaccaaaggataggca

SEQ ID NO: 3540814 - DNA, 25 bp, Homo sapien
ttccctggccagtgacggtttgcct

SEQ ID NO: 3540815 - DNA, 25 bp, Homo sapien
tgtggtgacctgtgaagcacacctc

SEQ ID NO: 3540816 - DNA, 25 bp, Homo sapien
aagcacctcaaagcacaaagactgg

SEQ ID NO: 3540817 - DNA, 25 bp, Homo sapien
agaattgctgtctcgtttctcaaag

SEQ ID NO: 3540818 - DNA, 25 bp, Homo sapien
gactggccttatgcactaagaccta

SEQ ID NO: 3540819 - DNA, 25 bp, Homo sapien
acctcaaagcacaaagactggcctt

SEQ ID NO: 3540820 - DNA, 25 bp, Homo sapien
cttcgggataccaagcccatgccca

SEQ ID NO: 3540821 - DNA, 25 bp, Homo sapien
ttcgggataccaagcccatgcccaa

SEQ ID NO: 3540822 - DNA, 25 bp, Homo sapien
tcgggataccaagcccatgcccaac

SEQ ID NO: 3540823 - DNA, 25 bp, Homo sapien
cctctttcttacgatcaatctggag

SEQ ID NO: 3540824 - DNA, 25 bp, Homo sapien
ctttctgcctgctctcgcttcttcc

SEQ ID NO: 3540825 - DNA, 25 bp, Homo sapien
tttcctctttcttacgatcaatctg

SEQ ID NO: 3540826 - DNA, 25 bp, Homo sapien
tggagctcctggtaggccagacgca

SEQ ID NO: 3540827 - DNA, 25 bp, Homo sapien
gctgctcacggagcttctctgccac

SEQ ID NO: 3540828 - DNA, 25 bp, Homo sapien
tgcttcttggcatcggctgcctgct

SEQ ID NO: 3540829 - DNA, 25 bp, Homo sapien
agcctgccgctcaatctcactgaag

SEQ ID NO: 3540830 - DNA, 25 bp, Homo sapien
cttctgggcccctaggcctttcttg

SEQ ID NO: 3540831 - DNA, 25 bp, Homo sapien
gaacagaatcatgtaaggggccttc

SEQ ID NO: 3540832 - DNA, 25 bp, Homo sapien
gtaaggggccttcccaatcacactc

SEQ ID NO: 3540833 - DNA, 25 bp, Homo sapien
caggcactgtagccacacccacaag

SEQ ID NO: 3540834 - DNA, 25 bp, Homo sapien
cagaatcatgtaaggggccttccca

SEQ ID NO: 3540835 - DNA, 25 bp, Homo sapien
cacaggcgaggttcggagaaacaca

SEQ ID NO: 3540836 - DNA, 25 bp, Homo sapien
aaggagtgaacccaggtagcctgca

SEQ ID NO: 3540837 - DNA, 25 bp, Homo sapien
aagcactccgccaagcactagatgt

SEQ ID NO: 3540838 - DNA, 25 bp, Homo sapien
caaagtcatatagctggtaagtggt

SEQ ID NO: 3540839 - DNA, 25 bp, Homo sapien
gcttcttcttgccaatgatggagct

SEQ ID NO: 3540840 - DNA, 25 bp, Homo sapien
cctttcttagctgctgctggcttct

SEQ ID NO: 3540841 - DNA, 25 bp, Homo sapien
cttcttgccaatgatggagcttttc

SEQ ID NO: 3540842 - DNA, 25 bp, Homo sapien
ttgccaatgatggagcttttcagtt

SEQ ID NO: 3540843 - DNA, 25 bp, Homo sapien
gtccgaagcaccagagacgtccaaa

SEQ ID NO: 3540844 - DNA, 25 bp, Homo sapien
ctgaagcaccagagacgtccgaagc

SEQ ID NO: 3540845 - DNA, 25 bp, Homo sapien
gaagcaccagagacgtccaaattcc

SEQ ID NO: 3540846 - DNA, 25 bp, Homo sapien
agagacgtccgaagcaccagagacg

SEQ ID NO: 3540847 - DNA, 25 bp, Homo sapien
ccaggctccgcttctaaagcaggaa

SEQ ID NO: 3540848 - DNA, 25 bp, Homo sapien
ggcagggagcatatggtgagcacca

SEQ ID NO: 3540849 - DNA, 25 bp, Homo sapien
caaaacaaagactgcgaggcaggga

SEQ ID NO: 3540850 - DNA, 25 bp, Homo sapien
ggctccgcttctaaagcaggaagct

SEQ ID NO: 3540851 - DNA, 25 bp, Homo sapien
caggaagggcccctttagctgacag

SEQ ID NO: 3540852 - DNA, 25 bp, Homo sapien
gaagggcccctttagctgacagata

SEQ ID NO: 3540853 - DNA, 25 bp, Homo sapien
gcccctttagctgacagatacacgg

SEQ ID NO: 3540854 - DNA, 25 bp, Homo sapien
cctttagctgacagatacacggact

SEQ ID NO: 3540855 - DNA, 25 bp, Homo sapien
gaaacagacttgtggctaacaagag

SEQ ID NO: 3540856 - DNA, 25 bp, Homo sapien
taacaagaggcccaccccagagcct

SEQ ID NO: 3540857 - DNA, 25 bp, Homo sapien
gaggagaaacagacttgtggctaac

SEQ ID NO: 3540858 - DNA, 25 bp, Homo sapien
cagacttgtggctaacaagaggccc

SEQ ID NO: 3540859 - DNA, 25 bp, Homo sapien
ctttgggtgaggtgccaagcaggtc

SEQ ID NO: 3540860 - DNA, 25 bp, Homo sapien
tgaggtgccaagcaggtctgtgttg

SEQ ID NO: 3540861 - DNA, 25 bp, Homo sapien
ccagtgaggctttgggtgaggtgcc

SEQ ID NO: 3540862 - DNA, 25 bp, Homo sapien
tctgtgttggggccatgctccggct

SEQ ID NO: 3540863 - DNA, 25 bp, Homo sapien
ctcagtggctggcgcatcccaggca

SEQ ID NO: 3540864 - DNA, 25 bp, Homo sapien
gctgggtccctgaaggctcagtggc

SEQ ID NO: 3540865 - DNA, 25 bp, Homo sapien
atcacagatgcctcggtgagccact

SEQ ID NO: 3540866 - DNA, 25 bp, Homo sapien
agatcacagatgcctcggtgagcca

SEQ ID NO: 3540867 - DNA, 25 bp, Homo sapien
gatcacagatgcctcggtgagccac

SEQ ID NO: 3540868 - DNA, 25 bp, Homo sapien
cagatcacagatgcctcggtgagcc

SEQ ID NO: 3540869 - DNA, 25 bp, Homo sapien
aagaagcaccaagacctacaagcac

SEQ ID NO: 3540870 - DNA, 25 bp, Homo sapien
ggcaccggacacctcttgaaacttc

SEQ ID NO: 3540871 - DNA, 25 bp, Homo sapien
tccccgccagcccaatttataggag

SEQ ID NO: 3540872 - DNA, 25 bp, Homo sapien
gcctttcttataggggaagaatcca

SEQ ID NO: 3540873 - DNA, 25 bp, Homo sapien
caatttataggagtcgatttctaag

SEQ ID NO: 3540874 - DNA, 25 bp, Homo sapien
ggtgtccaagacatcacatcaaagc

SEQ ID NO: 3540875 - DNA, 25 bp, Homo sapien
tacaaccatgatcacagaaggcctg

SEQ ID NO: 3540876 - DNA, 25 bp, Homo sapien
ggcctgggccttggtaaattgcctg

SEQ ID NO: 3540877 - DNA, 25 bp, Homo sapien
ctgtcaagaacaactgggaaaacgg

SEQ ID NO: 3540878 - DNA, 25 bp, Homo sapien
gtgaagaaatcagagtccttcttct

SEQ ID NO: 3540879 - DNA, 25 bp, Homo sapien
tgaagaaatcagagtccttcttctc

SEQ ID NO: 3540880 - DNA, 25 bp, Homo sapien
gggagtgattaggaacggcactact

SEQ ID NO: 3540881 - DNA, 25 bp, Homo sapien
ttaggaacggcactactcatgttgt

SEQ ID NO: 3540882 - DNA, 25 bp, Homo sapien
tgcatccatgttggcgaaaaaaagc

SEQ ID NO: 3540883 - DNA, 25 bp, Homo sapien
ttctcccggtacatctgggcagctc

SEQ ID NO: 3540884 - DNA, 25 bp, Homo sapien
tgggcagctcggctattatatttgg

SEQ ID NO: 3540885 - DNA, 25 bp, Homo sapien
atcagtgccatgcctagccagggcc

SEQ ID NO: 3540886 - DNA, 25 bp, Homo sapien
tgatatgactgaagtccaggcccca

SEQ ID NO: 3540887 - DNA, 25 bp, Homo sapien
gatgatacacgctactgacaccggt

SEQ ID NO: 3540888 - DNA, 25 bp, Homo sapien
cagcgcgtgctacgggtgattctca

SEQ ID NO: 3540889 - DNA, 25 bp, Homo sapien
tgaacagggaaaacgacagggcctc

SEQ ID NO: 3540890 - DNA, 25 bp, Homo sapien
tggaaccagttccagttggaatcca

SEQ ID NO: 3540891 - DNA, 25 bp, Homo sapien
ggaaccagttccagttggaatccaa

SEQ ID NO: 3540892 - DNA, 25 bp, Homo sapien
ggtgcaccccggaacagtcaatgca

SEQ ID NO: 3540893 - DNA, 25 bp, Homo sapien
ccaactcggattcttggcgccgcag

SEQ ID NO: 3540894 - DNA, 25 bp, Homo sapien
atgaagctcagatggacgcccaggg

SEQ ID NO: 3540895 - DNA, 25 bp, Homo sapien
gtacgtgatgctggcccaactcgga

SEQ ID NO: 3540896 - DNA, 25 bp, Homo sapien
ctcaggccccagcgggacgagagac

SEQ ID NO: 3540897 - DNA, 25 bp, Homo sapien
agcgggacgagagactccgcgcgcc

SEQ ID NO: 3540898 - DNA, 25 bp, Homo sapien
aggccccagcgggacgagagactcc

SEQ ID NO: 3540899 - DNA, 25 bp, Homo sapien
ccagcgggacgagagactccgcgcg

SEQ ID NO: 3540900 - DNA, 25 bp, Homo sapien
cttgttggttggaactgcgcgaagc

SEQ ID NO: 3540901 - DNA, 25 bp, Homo sapien
tttcggtcttgttcggctccgccgc

SEQ ID NO: 3540902 - DNA, 25 bp, Homo sapien
cctcttaaaaagagtctggatttcg

SEQ ID NO: 3540903 - DNA, 25 bp, Homo sapien
actgcgcgaagcctcttaaaaagag

SEQ ID NO: 3540904 - DNA, 25 bp, Homo sapien
cccgccgcgggccaatccacggcgg

SEQ ID NO: 3540905 - DNA, 25 bp, Homo sapien
cctcagcggtgcctgggccagccga

SEQ ID NO: 3540906 - DNA, 25 bp, Homo sapien
accaggccggcctcagcggtgcctg

SEQ ID NO: 3540907 - DNA, 25 bp, Homo sapien
ccagacacaaccgcggctgacgggt

SEQ ID NO: 3540908 - DNA, 25 bp, Homo sapien
gcaggtaccaagcaggcaaaccctt

SEQ ID NO: 3540909 - DNA, 25 bp, Homo sapien
aaaatgcacatgagcccgacagtgg

SEQ ID NO: 3540910 - DNA, 25 bp, Homo sapien
gaacaagccacaagagggtgctgct

SEQ ID NO: 3540911 - DNA, 25 bp, Homo sapien
tcgatgaataaggattaggctgccc

SEQ ID NO: 3540912 - DNA, 25 bp, Homo sapien
gtacaggccaatgcggccactctgc

SEQ ID NO: 3540913 - DNA, 25 bp, Homo sapien
ggccaatgcggccactctgcaactg

SEQ ID NO: 3540914 - DNA, 25 bp, Homo sapien
cagggtacaggccaatgcggccact

SEQ ID NO: 3540915 - DNA, 25 bp, Homo sapien
gccaatgcggccactctgcaactgg

SEQ ID NO: 3540916 - DNA, 25 bp, Homo sapien
cagcgtagtcatagagtgccctcac

SEQ ID NO: 3540917 - DNA, 25 bp, Homo sapien
agcttcctggccagcgtagtcatag

SEQ ID NO: 3540918 - DNA, 25 bp, Homo sapien
cctggccagcgtagtcatagagtgc

SEQ ID NO: 3540919 - DNA, 25 bp, Homo sapien
gccagcgtagtcatagagtgccctc

SEQ ID NO: 3540920 - DNA, 25 bp, Homo sapien
catctgaccactcctcatcctgccc

SEQ ID NO: 3540921 - DNA, 25 bp, Homo sapien
tgaccactcctcatcctgccccgtg

SEQ ID NO: 3540922 - DNA, 25 bp, Homo sapien
ccggtggcagccttccggggactct

SEQ ID NO: 3540923 - DNA, 25 bp, Homo sapien
ttccggggactctcttcatctgacc

SEQ ID NO: 3540924 - DNA, 25 bp, Homo sapien
ggtgcggtgccatctcttgtaggca

SEQ ID NO: 3540925 - DNA, 25 bp, Homo sapien
cacccttctctttccggctgattgt

SEQ ID NO: 3540926 - DNA, 25 bp, Homo sapien
cacaatgctggtcagggtaacctca

SEQ ID NO: 3540927 - DNA, 25 bp, Homo sapien
agggtaacctcatcagggctccggc

SEQ ID NO: 3540928 - DNA, 25 bp, Homo sapien
tgcctcaatgccctggtgcaagtca

SEQ ID NO: 3540929 - DNA, 25 bp, Homo sapien
cagcgcagatcctcttcgtcactgg

SEQ ID NO: 3540930 - DNA, 25 bp, Homo sapien
atggccatgcctggcccgtgggtgc

SEQ ID NO: 3540931 - DNA, 25 bp, Homo sapien
caagtcacggtggagttcatggaac

SEQ ID NO: 3540932 - DNA, 25 bp, Homo sapien
cccagatctccatgcccaccaggca

SEQ ID NO: 3540933 - DNA, 25 bp, Homo sapien
agatctccatgcccaccaggcagtt

SEQ ID NO: 3540934 - DNA, 25 bp, Homo sapien
tccatgcccaccaggcagttcatac

SEQ ID NO: 3540935 - DNA, 25 bp, Homo sapien
ctccatgcccaccaggcagttcata

SEQ ID NO: 3540936 - DNA, 25 bp, Homo sapien
tgtcctccatgtagcgtggagtgta

SEQ ID NO: 3540937 - DNA, 25 bp, Homo sapien
ttgaagaaaagaagccgctggcgct

SEQ ID NO: 3540938 - DNA, 25 bp, Homo sapien
tccatgtagcgtggagtgtagcgat

SEQ ID NO: 3540939 - DNA, 25 bp, Homo sapien
tctgccagcgtctgctcatactgag

SEQ ID NO: 3540940 - DNA, 25 bp, Homo sapien
agcgttccacccgttcctgcagttt

SEQ ID NO: 3540941 - DNA, 25 bp, Homo sapien
ggctgcgtggtagcttttcttggaa

SEQ ID NO: 3540942 - DNA, 25 bp, Homo sapien
tttgcgtggctctccctcgtctggg

SEQ ID NO: 3540943 - DNA, 25 bp, Homo sapien
tcttctcatccttccgggctgcgtg

SEQ ID NO: 3540944 - DNA, 25 bp, Homo sapien
tgccaggcgcgcacccgctcactgt

SEQ ID NO: 3540945 - DNA, 25 bp, Homo sapien
ggccttgcggaagccgtcctcggcc

SEQ ID NO: 3540946 - DNA, 25 bp, Homo sapien
cgctcagccgccgtgaaaaaggcat

SEQ ID NO: 3540947 - DNA, 25 bp, Homo sapien
tgaaaaaggcatgccaggccttctc

SEQ ID NO: 3540948 - DNA, 25 bp, Homo sapien
tccacccgctgtaccgtgcgcctgt

SEQ ID NO: 3540949 - DNA, 25 bp, Homo sapien
cccctccactttcgggcccagtcag

SEQ ID NO: 3540950 - DNA, 25 bp, Homo sapien
cagtcagccaactgctgggcataag

SEQ ID NO: 3540951 - DNA, 25 bp, Homo sapien
ataagccttctcgatgcgggcgcgc

SEQ ID NO: 3540952 - DNA, 25 bp, Homo sapien
ctaaggcctcccctccagcgtcctc

SEQ ID NO: 3540953 - DNA, 25 bp, Homo sapien
ctgccccctaaggcctcccctccag

SEQ ID NO: 3540954 - DNA, 25 bp, Homo sapien
cctccagcgtcctcttctggagcca

SEQ ID NO: 3540955 - DNA, 25 bp, Homo sapien
tcccctccagcgtcctcttctggag

SEQ ID NO: 3540956 - DNA, 25 bp, Homo sapien
tgtccccgcagcacggaatggtggc

SEQ ID NO: 3540957 - DNA, 25 bp, Homo sapien
cagcacggaatggtggcggatttgg

SEQ ID NO: 3540958 - DNA, 25 bp, Homo sapien
ggtgtccccgcagcacggaatggtg

SEQ ID NO: 3540959 - DNA, 25 bp, Homo sapien
cgcagcacggaatggtggcggattt

SEQ ID NO: 3540960 - DNA, 25 bp, Homo sapien
agaggggtaagcaggaaagctggac

SEQ ID NO: 3540961 - DNA, 25 bp, Homo sapien
ggtaagcaggaaagctggacattat

SEQ ID NO: 3540962 - DNA, 25 bp, Homo sapien
agcaggaaagctggacattatgttt

SEQ ID NO: 3540963 - DNA, 25 bp, Homo sapien
ggcagaggggtaagcaggaaagctg

SEQ ID NO: 3540964 - DNA, 25 bp, Homo sapien
aaggagtcatcagagctaggactta

SEQ ID NO: 3540965 - DNA, 25 bp, Homo sapien
ggagtcatcagagctaggacttagc

SEQ ID NO: 3540966 - DNA, 25 bp, Homo sapien
caaggagtcatcagagctaggactt

SEQ ID NO: 3540967 - DNA, 25 bp, Homo sapien
gagtcatcagagctaggacttagca

SEQ ID NO: 3540968 - DNA, 25 bp, Homo sapien
gggcctagagatcacttcaaggacc

SEQ ID NO: 3540969 - DNA, 25 bp, Homo sapien
gggtgtccaactctcaatgctgcca

SEQ ID NO: 3540970 - DNA, 25 bp, Homo sapien
tcaaggacccgggtgtccaactctc

SEQ ID NO: 3540971 - DNA, 25 bp, Homo sapien
aactctcaatgctgccaccgtgact

SEQ ID NO: 3540972 - DNA, 25 bp, Homo sapien
acgcaccagaaatacgaggggccct

SEQ ID NO: 3540973 - DNA, 25 bp, Homo sapien
cacggaagatactcatctcactcca

SEQ ID NO: 3540974 - DNA, 25 bp, Homo sapien
actgagggcccgcaaggctccgtgg

SEQ ID NO: 3540975 - DNA, 25 bp, Homo sapien
tacgaggggccctgcagtcacggaa

SEQ ID NO: 3540976 - DNA, 25 bp, Homo sapien
ttcagccggggtgtataacccatgg

SEQ ID NO: 3540977 - DNA, 25 bp, Homo sapien
ctgtagccccgggtgacccttcagc

SEQ ID NO: 3540978 - DNA, 25 bp, Homo sapien
acaggacagtgtctatcttcagtca

SEQ ID NO: 3540979 - DNA, 25 bp, Homo sapien
caggattctgatttgtgtgtcccca

SEQ ID NO: 3540980 - DNA, 25 bp, Homo sapien
gctctagacttcttggccaaacttg

SEQ ID NO: 3540981 - DNA, 25 bp, Homo sapien
ctgcttccagatgacgcactccgaa

SEQ ID NO: 3540982 - DNA, 25 bp, Homo sapien
agctgcataactcggagcccgtgga

SEQ ID NO: 3540983 - DNA, 25 bp, Homo sapien
ggcctagccaccgaagctctagact

SEQ ID NO: 3540984 - DNA, 25 bp, Homo sapien
tccggccacgctccggcccgagtcc

SEQ ID NO: 3540985 - DNA, 25 bp, Homo sapien
ggcccgagtcctgccgctcctgggc

SEQ ID NO: 3540986 - DNA, 25 bp, Homo sapien
ggccacgctccggcccgagtcctgc

SEQ ID NO: 3540987 - DNA, 25 bp, Homo sapien
gtccggccacgctccggcccgagtc

SEQ ID NO: 3540988 - DNA, 25 bp, Homo sapien
tttccagattttgtaccacgattca

SEQ ID NO: 3540989 - DNA, 25 bp, Homo sapien
tctaaggcctgagacgaacacgcgg

SEQ ID NO: 3540990 - DNA, 25 bp, Homo sapien
tgggacaaaaaggcctaagctcctc

SEQ ID NO: 3540991 - DNA, 25 bp, Homo sapien
tcccgctccgagttcttatttccag

SEQ ID NO: 3540992 - DNA, 25 bp, Homo sapien
aaaattgttgacttaagcatcctgc

SEQ ID NO: 3540993 - DNA, 25 bp, Homo sapien
aattgttgacttaagcatcctgcaa

SEQ ID NO: 3540994 - DNA, 25 bp, Homo sapien
ttaaaattgttgacttaagcatcct

SEQ ID NO: 3540995 - DNA, 25 bp, Homo sapien
aaattgttgacttaagcatcctgca

SEQ ID NO: 3540996 - DNA, 25 bp, Homo sapien
ttttccagggattttatgttgcggc

SEQ ID NO: 3540997 - DNA, 25 bp, Homo sapien
ccagggattttatgttgcggcttgt

SEQ ID NO: 3540998 - DNA, 25 bp, Homo sapien
tttatgttgcggcttgttagggtga

SEQ ID NO: 3540999 - DNA, 25 bp, Homo sapien
gattttatgttgcggcttgttaggg

SEQ ID NO: 3541000 - DNA, 25 bp, Homo sapien
ggctgctgcgtggcttcctgaccga

SEQ ID NO: 3541001 - DNA, 25 bp, Homo sapien
gcgtggcttcctgaccgactttttc

SEQ ID NO: 3541002 - DNA, 25 bp, Homo sapien
gctgcgtggcttcctgaccgacttt

SEQ ID NO: 3541003 - DNA, 25 bp, Homo sapien
tgctgcgtggcttcctgaccgactt

SEQ ID NO: 3541004 - DNA, 25 bp, Homo sapien
cagcgagagtgaacagcagtgagtc

SEQ ID NO: 3541005 - DNA, 25 bp, Homo sapien
tcagcgagagtgaacagcagtgagt

SEQ ID NO: 3541006 - DNA, 25 bp, Homo sapien
ctcagcgagagtgaacagcagtgag

SEQ ID NO: 3541007 - DNA, 25 bp, Homo sapien
gaccatgagcatgaccctgaataat

SEQ ID NO: 3541008 - DNA, 25 bp, Homo sapien
gtttctttgatctgcaaaacaatat

SEQ ID NO: 3541009 - DNA, 25 bp, Homo sapien
catgaccctgaataatgccagtttc

SEQ ID NO: 3541010 - DNA, 25 bp, Homo sapien
ctggggatagcaaaccaaggtctca

SEQ ID NO: 3541011 - DNA, 25 bp, Homo sapien
ggtagctgtggttcttgttggtgaa

SEQ ID NO: 3541012 - DNA, 25 bp, Homo sapien
gccacattgtactgatatgatacag

SEQ ID NO: 3541013 - DNA, 25 bp, Homo sapien
tttgcccacatattgtcatttccag

SEQ ID NO: 3541014 - DNA, 25 bp, Homo sapien
tataaagcgactgtgaacattcacg

SEQ ID NO: 3541015 - DNA, 25 bp, Homo sapien
tggctggattatagagtaggaatgt

SEQ ID NO: 3541016 - DNA, 25 bp, Homo sapien
tcgaatagctatgagcacaggtgtg

SEQ ID NO: 3541017 - DNA, 25 bp, Homo sapien
tctcgaatagctatgagcacaggtg

SEQ ID NO: 3541018 - DNA, 25 bp, Homo sapien
ctcgaatagctatgagcacaggtgt

SEQ ID NO: 3541019 - DNA, 25 bp, Homo sapien
cctctcgaatagctatgagcacagg

SEQ ID NO: 3541020 - DNA, 25 bp, Homo sapien
aatatacaatttagccatgcgtggt

SEQ ID NO: 3541021 - DNA, 25 bp, Homo sapien
taaaaatatacaatttagccatgcg

SEQ ID NO: 3541022 - DNA, 25 bp, Homo sapien
aaaatatacaatttagccatgcgtg

SEQ ID NO: 3541023 - DNA, 25 bp, Homo sapien
ctaaaaatatacaatttagccatgc

SEQ ID NO: 3541024 - DNA, 25 bp, Homo sapien
tctgtgacggcgcagcatgtgtgcc

SEQ ID NO: 3541025 - DNA, 25 bp, Homo sapien
tcaatggagggaacaactaggctgc

SEQ ID NO: 3541026 - DNA, 25 bp, Homo sapien
tctaagcttaggtgtagttccggca

SEQ ID NO: 3541027 - DNA, 25 bp, Homo sapien
gcatcactgggctgaagtttaaccc

SEQ ID NO: 3541028 - DNA, 25 bp, Homo sapien
gatcctgctgaacatggacggcaaa

SEQ ID NO: 3541029 - DNA, 25 bp, Homo sapien
gcaaagaggtgcgttctccgaggtc

SEQ ID NO: 3541030 - DNA, 25 bp, Homo sapien
gaaagtgacgcatgtggccctgaac

SEQ ID NO: 3541031 - DNA, 25 bp, Homo sapien
tcaacgcaggtgtgatatcccagac

SEQ ID NO: 3541032 - DNA, 25 bp, Homo sapien
agtatacttaaagcacttggcccca

SEQ ID NO: 3541033 - DNA, 25 bp, Homo sapien
tgtcccagtttgtatctagccaggt

SEQ ID NO: 3541034 - DNA, 25 bp, Homo sapien
gaatactagtctctaactgataggg

SEQ ID NO: 3541035 - DNA, 25 bp, Homo sapien
tagccaggtgtcgtaagtcattaca

SEQ ID NO: 3541036 - DNA, 25 bp, Homo sapien
gacagtggtctctatagccaaggcc

SEQ ID NO: 3541037 - DNA, 25 bp, Homo sapien
tacttcccaaggttcagtgcgggcc

SEQ ID NO: 3541038 - DNA, 25 bp, Homo sapien
catcagttcggtgaggcttgggtcc

SEQ ID NO: 3541039 - DNA, 25 bp, Homo sapien
tctgtgtttaccctcatggccggcc

SEQ ID NO: 3541040 - DNA, 25 bp, Homo sapien
cataccgactgagcttctgcgtgga

SEQ ID NO: 3541041 - DNA, 25 bp, Homo sapien
gggcccctctgtatctagcctggaa

SEQ ID NO: 3541042 - DNA, 25 bp, Homo sapien
caaattgtaggtttgcgggccagcc

SEQ ID NO: 3541043 - DNA, 25 bp, Homo sapien
catgggatcaagtcctgcaagcaga

SEQ ID NO: 3541044 - DNA, 25 bp, Homo sapien
taggtcctgagtgaacactgactgc

SEQ ID NO: 3541045 - DNA, 25 bp, Homo sapien
tgattcgtgtgacaagcaactccct

SEQ ID NO: 3541046 - DNA, 25 bp, Homo sapien
cacagcacttggtaaacatcaggca

SEQ ID NO: 3541047 - DNA, 25 bp, Homo sapien
gggtgacaacgattcctgaagcatt

SEQ ID NO: 3541048 - DNA, 25 bp, Homo sapien
tgggcctgcatccggaagaggacgg

SEQ ID NO: 3541049 - DNA, 25 bp, Homo sapien
tgaggagcagcactatgaggaggaa

SEQ ID NO: 3541050 - DNA, 25 bp, Homo sapien
ccatctgcgacgtggcggtagccag

SEQ ID NO: 3541051 - DNA, 25 bp, Homo sapien
gaggatggagccacatacagccaag

SEQ ID NO: 3541052 - DNA, 25 bp, Homo sapien
ctgtgtctgcaggaccgcttgccag

SEQ ID NO: 3541053 - DNA, 25 bp, Homo sapien
tctgtgaggcgaaggaagtcctgca

SEQ ID NO: 3541054 - DNA, 25 bp, Homo sapien
tgctgccaatccttgggcacgacgg

SEQ ID NO: 3541055 - DNA, 25 bp, Homo sapien
ctctcgttccgaaagtacatctcca

SEQ ID NO: 3541056 - DNA, 25 bp, Homo sapien
ccatttgcagggcaaccagggtagt

SEQ ID NO: 3541057 - DNA, 25 bp, Homo sapien
gcgtagggggcttgttcaccattgt

SEQ ID NO: 3541058 - DNA, 25 bp, Homo sapien
cagaatcttcctggtacagttcaaa

SEQ ID NO: 3541059 - DNA, 25 bp, Homo sapien
tttgcagggcaaccagggtagtgtc

SEQ ID NO: 3541060 - DNA, 25 bp, Homo sapien
aatccagctccttgcctgacacagc

SEQ ID NO: 3541061 - DNA, 25 bp, Homo sapien
gcattgttccccacacccgcaggaa

SEQ ID NO: 3541062 - DNA, 25 bp, Homo sapien
cacccgcaggaaccgaacagagaag

SEQ ID NO: 3541063 - DNA, 25 bp, Homo sapien
tgcccgtcagcattgttccccacac

SEQ ID NO: 3541064 - DNA, 25 bp, Homo sapien
gaggtggtcgccattagggtcaggt

SEQ ID NO: 3541065 - DNA, 25 bp, Homo sapien
tgggaggtggtcgccattagggtca

SEQ ID NO: 3541066 - DNA, 25 bp, Homo sapien
ggtggtcgccattagggtcaggttc

SEQ ID NO: 3541067 - DNA, 25 bp, Homo sapien
tggtcgccattagggtcaggttctt

SEQ ID NO: 3541068 - DNA, 25 bp, Homo sapien
aaagtccccggtgttgctggctaca

SEQ ID NO: 3541069 - DNA, 25 bp, Homo sapien
tcatagggaccatgtaagaactctg

SEQ ID NO: 3541070 - DNA, 25 bp, Homo sapien
tgggcctcatcacctacacggagaa

SEQ ID NO: 3541071 - DNA, 25 bp, Homo sapien
gagaactctttagtgtcatagggac

SEQ ID NO: 3541072 - DNA, 25 bp, Homo sapien
ctgaagtcctttagccggctgagac

SEQ ID NO: 3541073 - DNA, 25 bp, Homo sapien
gctgaagtcctttagccggctgaga

SEQ ID NO: 3541074 - DNA, 25 bp, Homo sapien
tgaagtcctttagccggctgagacg

SEQ ID NO: 3541075 - DNA, 25 bp, Homo sapien
gcggcaggcgcagcccgtgcgtttg

SEQ ID NO: 3541076 - DNA, 25 bp, Homo sapien
tggggtgaggcccagggcggcaggc

SEQ ID NO: 3541077 - DNA, 25 bp, Homo sapien
ctgcatggtttggggtgaggcccag

SEQ ID NO: 3541078 - DNA, 25 bp, Homo sapien
gtgaggcccagggcggcaggcgcag

SEQ ID NO: 3541079 - DNA, 25 bp, Homo sapien
ggttagcgccccaggcctaggccag

SEQ ID NO: 3541080 - DNA, 25 bp, Homo sapien
gcaggcaggttagcgccccaggcct

SEQ ID NO: 3541081 - DNA, 25 bp, Homo sapien
gggcagctctcttccctagtgggaa

SEQ ID NO: 3541082 - DNA, 25 bp, Homo sapien
cagcaggcaggttagcgccccaggc

SEQ ID NO: 3541083 - DNA, 25 bp, Homo sapien
tgtcacccatgagggaagttcccgt

SEQ ID NO: 3541084 - DNA, 25 bp, Homo sapien
gcgtgacggtatcaggcactgtgtt

SEQ ID NO: 3541085 - DNA, 25 bp, Homo sapien
tgttctaccgtcctggtgacctggg

SEQ ID NO: 3541086 - DNA, 25 bp, Homo sapien
ctggaaccagtagacatggcaggcg

SEQ ID NO: 3541087 - DNA, 25 bp, Homo sapien
catagacattccagacggtctccag

SEQ ID NO: 3541088 - DNA, 25 bp, Homo sapien
tctccagtgtcaggtctgtaagccc

SEQ ID NO: 3541089 - DNA, 25 bp, Homo sapien
taagccctgtctcgttggccaccat

SEQ ID NO: 3541090 - DNA, 25 bp, Homo sapien
cagaagagtgtgtcatagacattcc

SEQ ID NO: 3541091 - DNA, 25 bp, Homo sapien
tgaaaaatggatcagggtctcagtc

SEQ ID NO: 3541092 - DNA, 25 bp, Homo sapien
gaaaaatggatcagggtctcagtcc

SEQ ID NO: 3541093 - DNA, 25 bp, Homo sapien
tatgaaaaatggatcagggtctcag

SEQ ID NO: 3541094 - DNA, 25 bp, Homo sapien
gcattccgagaactctcattctgat

SEQ ID NO: 3541095 - DNA, 25 bp, Homo sapien
acatgggcccaacgggaacttcagc

SEQ ID NO: 3541096 - DNA, 25 bp, Homo sapien
tgcagctgctcataacggggacatg

SEQ ID NO: 3541097 - DNA, 25 bp, Homo sapien
attctgatactctggtgtctgccgg

SEQ ID NO: 3541098 - DNA, 25 bp, Homo sapien
aataggctgccacgagatgttcggg

SEQ ID NO: 3541099 - DNA, 25 bp, Homo sapien
cggtcaaagtctgtgcttcgcacat

SEQ ID NO: 3541100 - DNA, 25 bp, Homo sapien
tcagcactcatgagagtccggtcaa

SEQ ID NO: 3541101 - DNA, 25 bp, Homo sapien
ttgaagcgctgcatcccgttgggag

SEQ ID NO: 3541102 - DNA, 25 bp, Homo sapien
gcccagttcccagtgctgtagcatc

SEQ ID NO: 3541103 - DNA, 25 bp, Homo sapien
ttaggaagccgtgatagcgctgccg

SEQ ID NO: 3541104 - DNA, 25 bp, Homo sapien
tggcccagttcccagtgctgtagca

SEQ ID NO: 3541105 - DNA, 25 bp, Homo sapien
tcttgccggtgataagaggtgttta

SEQ ID NO: 3541106 - DNA, 25 bp, Homo sapien
gtgaacggtctccatggcggtacag

SEQ ID NO: 3541107 - DNA, 25 bp, Homo sapien
ttcactggtgaacggtctccatggc

SEQ ID NO: 3541108 - DNA, 25 bp, Homo sapien
ctggtgaacggtctccatggcggta

SEQ ID NO: 3541109 - DNA, 25 bp, Homo sapien
ctgataggggtccttgggatatgtc

SEQ ID NO: 3541110 - DNA, 25 bp, Homo sapien
ttcagggaagtctttggtgagccca

SEQ ID NO: 3541111 - DNA, 25 bp, Homo sapien
ggaagtctttggtgagcccatctct

SEQ ID NO: 3541112 - DNA, 25 bp, Homo sapien
cagggaagtctttggtgagcccatc

SEQ ID NO: 3541113 - DNA, 25 bp, Homo sapien
aagtctttggtgagcccatctctca

SEQ ID NO: 3541114 - DNA, 25 bp, Homo sapien
caaggtaacgaagcgcagactccgg

SEQ ID NO: 3541115 - DNA, 25 bp, Homo sapien
ccaccaggttcacgccgagaaggag

SEQ ID NO: 3541116 - DNA, 25 bp, Homo sapien
gctggaggagagccgcccggctcca

SEQ ID NO: 3541117 - DNA, 25 bp, Homo sapien
ggctccagccggaccgcttgcccgc

SEQ ID NO: 3541118 - DNA, 25 bp, Homo sapien
caccgttgtaatctatgcagcaaac

SEQ ID NO: 3541119 - DNA, 25 bp, Homo sapien
accgttgtaatctatgcagcaaaca

SEQ ID NO: 3541120 - DNA, 25 bp, Homo sapien
ttgtaatctatgcagcaaacaagct

SEQ ID NO: 3541121 - DNA, 25 bp, Homo sapien
cgttgtaatctatgcagcaaacaag

SEQ ID NO: 3541122 - DNA, 25 bp, Homo sapien
cagttctcccatacgctggaccagt

SEQ ID NO: 3541123 - DNA, 25 bp, Homo sapien
cgtgcttgcgccttatttttggcta

SEQ ID NO: 3541124 - DNA, 25 bp, Homo sapien
ttggctagaatttggagaaacacgt

SEQ ID NO: 3541125 - DNA, 25 bp, Homo sapien
tgagcttgcaaggtcactgcctggg

SEQ ID NO: 3541126 - DNA, 25 bp, Homo sapien
gatgtcatatcgctctctggttcct

SEQ ID NO: 3541127 - DNA, 25 bp, Homo sapien
agagatgtcatatcgctctctggtt

SEQ ID NO: 3541128 - DNA, 25 bp, Homo sapien
gtcatatcgctctctggttcctgtg

SEQ ID NO: 3541129 - DNA, 25 bp, Homo sapien
cagcagagatgtcatatcgctctct

SEQ ID NO: 3541130 - DNA, 25 bp, Homo sapien
gaatccaaagggttggttagcatgg

SEQ ID NO: 3541131 - DNA, 25 bp, Homo sapien
aagggttggttagcatggctatttc

SEQ ID NO: 3541132 - DNA, 25 bp, Homo sapien
gacgaatccaaagggttggttagca

SEQ ID NO: 3541133 - DNA, 25 bp, Homo sapien
ccaaagggttggttagcatggctat

SEQ ID NO: 3541134 - DNA, 25 bp, Homo sapien
gagctgatggtgatgtcggacttca

SEQ ID NO: 3541135 - DNA, 25 bp, Homo sapien
gatgtcggacttcagcagatagata

SEQ ID NO: 3541136 - DNA, 25 bp, Homo sapien
tgatggtgatgtcggacttcagcag

SEQ ID NO: 3541137 - DNA, 25 bp, Homo sapien
cggacttcagcagatagatatgcat

SEQ ID NO: 3541138 - DNA, 25 bp, Homo sapien
gaaccagaggctctacgttagtaaa

SEQ ID NO: 3541139 - DNA, 25 bp, Homo sapien
aggaaccagaggctctacgttagta

SEQ ID NO: 3541140 - DNA, 25 bp, Homo sapien
accagaggctctacgttagtaaaca

SEQ ID NO: 3541141 - DNA, 25 bp, Homo sapien
ccagaggctctacgttagtaaacat

SEQ ID NO: 3541142 - DNA, 25 bp, Homo sapien
tatcactatcaaaagccagaattag

SEQ ID NO: 3541143 - DNA, 25 bp, Homo sapien
tatatggcgtgctcagaaacctggt

SEQ ID NO: 3541144 - DNA, 25 bp, Homo sapien
tggtggtgttctagagatatcacta

SEQ ID NO: 3541145 - DNA, 25 bp, Homo sapien
gaattaggacgaagtacaaactaca

SEQ ID NO: 3541146 - DNA, 25 bp, Homo sapien
tgcttgtactcttcagccgcataac

SEQ ID NO: 3541147 - DNA, 25 bp, Homo sapien
gtgcttgcttgtactcttcagccgc

SEQ ID NO: 3541148 - DNA, 25 bp, Homo sapien
gaagatagcaaccatcagtttctca

SEQ ID NO: 3541149 - DNA, 25 bp, Homo sapien
agccgcataactgtgaagatagcaa

SEQ ID NO: 3541150 - DNA, 25 bp, Homo sapien
gtataaatccggtatttctgtgttg

SEQ ID NO: 3541151 - DNA, 25 bp, Homo sapien
ctcttattgttattacataattact

SEQ ID NO: 3541152 - DNA, 25 bp, Homo sapien
tgtagtataaatccggtatttctgt

SEQ ID NO: 3541153 - DNA, 25 bp, Homo sapien
aatgtagtataaatccggtatttct

SEQ ID NO: 3541154 - DNA, 25 bp, Homo sapien
aatctgttagtttaatagagattcc

SEQ ID NO: 3541155 - DNA, 25 bp, Homo sapien
tgttagtttaatagagattccctta

SEQ ID NO: 3541156 - DNA, 25 bp, Homo sapien
tcccattctctactggcttgtaaag

SEQ ID NO: 3541157 - DNA, 25 bp, Homo sapien
tctgttagtttaatagagattccct

SEQ ID NO: 3541158 - DNA, 25 bp, Homo sapien
ctgcgccgcttgggttcaagctttt

SEQ ID NO: 3541159 - DNA, 25 bp, Homo sapien
cctgcgccgcttgggttcaagcttt

SEQ ID NO: 3541160 - DNA, 25 bp, Homo sapien
acctgcgccgcttgggttcaagctt

SEQ ID NO: 3541161 - DNA, 25 bp, Homo sapien
gactgggcgcctggagcagtttcac

SEQ ID NO: 3541162 - DNA, 25 bp, Homo sapien
tgactgcagtggagcggcgaattcc

SEQ ID NO: 3541163 - DNA, 25 bp, Homo sapien
cactctgtgaggagtgagggaaccc

SEQ ID NO: 3541164 - DNA, 25 bp, Homo sapien
tctgtgacccggcatgactgggcgc

SEQ ID NO: 3541165 - DNA, 25 bp, Homo sapien
cccagacattgtttcttgaggccac

SEQ ID NO: 3541166 - DNA, 25 bp, Homo sapien
cacacatacatccaacagtagggag

SEQ ID NO: 3541167 - DNA, 25 bp, Homo sapien
agtctgtgcaacacccactcaggac

SEQ ID NO: 3541168 - DNA, 25 bp, Homo sapien
taaacattgggaagacatagcaggc

SEQ ID NO: 3541169 - DNA, 25 bp, Homo sapien
ctggccatccccaggagccagcctg

SEQ ID NO: 3541170 - DNA, 25 bp, Homo sapien
tggccatccccaggagccagcctgg

SEQ ID NO: 3541171 - DNA, 25 bp, Homo sapien
gtggcagggtccgtgcccttgcagc

SEQ ID NO: 3541172 - DNA, 25 bp, Homo sapien
gaagctattgcccatctgggcgtgg

SEQ ID NO: 3541173 - DNA, 25 bp, Homo sapien
agccttctggaagctattgcccatc

SEQ ID NO: 3541174 - DNA, 25 bp, Homo sapien
tgcttggccgaggacaacggagcaa

SEQ ID NO: 3541175 - DNA, 25 bp, Homo sapien
actccctgcttgctgaacatgcgga

SEQ ID NO: 3541176 - DNA, 25 bp, Homo sapien
ggtccaggccattcttgaaccagga

SEQ ID NO: 3541177 - DNA, 25 bp, Homo sapien
gaacatgcggaagcgggcgtcttct

SEQ ID NO: 3541178 - DNA, 25 bp, Homo sapien
ccgtgcctcgccctgtaagttggtg

SEQ ID NO: 3541179 - DNA, 25 bp, Homo sapien
cacagcagagcatagcagtgtagcc

SEQ ID NO: 3541180 - DNA, 25 bp, Homo sapien
agcagtgtagcccgcgatgaccgag

SEQ ID NO: 3541181 - DNA, 25 bp, Homo sapien
ttggggcctcggagaagtccagggc

SEQ ID NO: 3541182 - DNA, 25 bp, Homo sapien
cagggccttatagttgggtggctca

SEQ ID NO: 3541183 - DNA, 25 bp, Homo sapien
ttggtaccgagagggccacacaaag

SEQ ID NO: 3541184 - DNA, 25 bp, Homo sapien
gtgacaggacttggtaccgagaggg

SEQ ID NO: 3541185 - DNA, 25 bp, Homo sapien
acaggacttggtaccgagagggcca

SEQ ID NO: 3541186 - DNA, 25 bp, Homo sapien
ccgagagggccacacaaagctaggc

SEQ ID NO: 3541187 - DNA, 25 bp, Homo sapien
cgcggaagtagtagccattgccaat

SEQ ID NO: 3541188 - DNA, 25 bp, Homo sapien
tgcggcggtaatgctccaagacggt

SEQ ID NO: 3541189 - DNA, 25 bp, Homo sapien
gctctgtcactaaagccaaccatat

SEQ ID NO: 3541190 - DNA, 25 bp, Homo sapien
catattctggctgaagacgcggaag

SEQ ID NO: 3541191 - DNA, 25 bp, Homo sapien
gccacattaagaccccaggcgtcag

SEQ ID NO: 3541192 - DNA, 25 bp, Homo sapien
caggcgtcagtcacccggagatcct

SEQ ID NO: 3541193 - DNA, 25 bp, Homo sapien
cagagctccgtgttgccgacatcct

SEQ ID NO: 3541194 - DNA, 25 bp, Homo sapien
tgtcggctttctgcactgtgtaccc

SEQ ID NO: 3541195 - DNA, 25 bp, Homo sapien
gctgttgcggatgctcacctcctcg

SEQ ID NO: 3541196 - DNA, 25 bp, Homo sapien
gcggcccggatgaacaggatggtgt

SEQ ID NO: 3541197 - DNA, 25 bp, Homo sapien
tcaatgcgcaccgtcacctggtaag

SEQ ID NO: 3541198 - DNA, 25 bp, Homo sapien
taagtgcctgaatgcacgcggcgag

SEQ ID NO: 3541199 - DNA, 25 bp, Homo sapien
gatgagaaggttcacaggctccccg

SEQ ID NO: 3541200 - DNA, 25 bp, Homo sapien
tctgaatggtctggcgcaggtgcct

SEQ ID NO: 3541201 - DNA, 25 bp, Homo sapien
aggctccccgaccttcttctgaatg

SEQ ID NO: 3541202 - DNA, 25 bp, Homo sapien
ttctgaatggtctggcgcaggtgcc

SEQ ID NO: 3541203 - DNA, 25 bp, Homo sapien
tgggtatagagtgggtagctaagtg

SEQ ID NO: 3541204 - DNA, 25 bp, Homo sapien
tagagtgggtagctaagtgagggcc

SEQ ID NO: 3541205 - DNA, 25 bp, Homo sapien
tgggtagctaagtgagggcccgcca

SEQ ID NO: 3541206 - DNA, 25 bp, Homo sapien
gtagctaagtgagggcccgccacag

SEQ ID NO: 3541207 - DNA, 25 bp, Homo sapien
tggcgggtcttgtgactgcacaaag

SEQ ID NO: 3541208 - DNA, 25 bp, Homo sapien
tgtgactgcacaaaggggcactcac

SEQ ID NO: 3541209 - DNA, 25 bp, Homo sapien
tgtcaatggcgggtcttgtgactgc

SEQ ID NO: 3541210 - DNA, 25 bp, Homo sapien
tcaatggcgggtcttgtgactgcac

SEQ ID NO: 3541211 - DNA, 25 bp, Homo sapien
ttcaccagtatcgatgtgtgctctg

SEQ ID NO: 3541212 - DNA, 25 bp, Homo sapien
tgccatattgtgtgcccgcactcgg

SEQ ID NO: 3541213 - DNA, 25 bp, Homo sapien
caggtccttcaccagtatcgatgtg

SEQ ID NO: 3541214 - DNA, 25 bp, Homo sapien
tcaccggctccgtggtggtaacagg

SEQ ID NO: 3541215 - DNA, 25 bp, Homo sapien
gagacgtcctctactgccaggtggg

SEQ ID NO: 3541216 - DNA, 25 bp, Homo sapien
ccacttgagggagaccgtggtgtca

SEQ ID NO: 3541217 - DNA, 25 bp, Homo sapien
tctgggcagtactccacgctgtagc

SEQ ID NO: 3541218 - DNA, 25 bp, Homo sapien
ggcagtactccacgctgtagccatc

SEQ ID NO: 3541219 - DNA, 25 bp, Homo sapien
tgaccgcgtagacgcgcatctcgta

SEQ ID NO: 3541220 - DNA, 25 bp, Homo sapien
tcatgcgccgcgcttcatgactcag

SEQ ID NO: 3541221 - DNA, 25 bp, Homo sapien
cctggacatgccgatggcgttgacc

SEQ ID NO: 3541222 - DNA, 25 bp, Homo sapien
tcaggtcgaagttcagccgcatcca

SEQ ID NO: 3541223 - DNA, 25 bp, Homo sapien
cctccatccggtgcccttgcactca

SEQ ID NO: 3541224 - DNA, 25 bp, Homo sapien
acctccatccggtgcccttgcactc

SEQ ID NO: 3541225 - DNA, 25 bp, Homo sapien
cttccctcggatctgtttggcgccc

SEQ ID NO: 3541226 - DNA, 25 bp, Homo sapien
ctcggatctgtttggcgccctcaca

SEQ ID NO: 3541227 - DNA, 25 bp, Homo sapien
tgcccgccatcgtaggcaggcggct

SEQ ID NO: 3541228 - DNA, 25 bp, Homo sapien
aggcggctcccactgtactgtgcag

SEQ ID NO: 3541229 - DNA, 25 bp, Homo sapien
ggggccgcaggtgcgtctggcacgt

SEQ ID NO: 3541230 - DNA, 25 bp, Homo sapien
tcccactgtactgtgcaggagtcct

SEQ ID NO: 3541231 - DNA, 25 bp, Homo sapien
tgcccatattcacccctgtcctggc

SEQ ID NO: 3541232 - DNA, 25 bp, Homo sapien
aaggcttctcactgcccatattcac

SEQ ID NO: 3541233 - DNA, 25 bp, Homo sapien
ccagtcctctcctgacatgtttcat

SEQ ID NO: 3541234 - DNA, 25 bp, Homo sapien
catttctgatcatgtcgccagccct

SEQ ID NO: 3541235 - DNA, 25 bp, Homo sapien
tgtacagcagtgtcgcaggaaatct

SEQ ID NO: 3541236 - DNA, 25 bp, Homo sapien
aaaaacctgtcctgttgccgctcgg

SEQ ID NO: 3541237 - DNA, 25 bp, Homo sapien
ccgtgatgtttgtcgagtggctgaa

SEQ ID NO: 3541238 - DNA, 25 bp, Homo sapien
ctgaatgagcgaacggatgggccct

SEQ ID NO: 3541239 - DNA, 25 bp, Homo sapien
tgtgaggttgacctggtcctcgccc

SEQ ID NO: 3541240 - DNA, 25 bp, Homo sapien
cacagggttcttcactgtgaccgtg

SEQ ID NO: 3541241 - DNA, 25 bp, Homo sapien
tgtgaccgtgtagacgccctcatct

SEQ ID NO: 3541242 - DNA, 25 bp, Homo sapien
aagatgctgcggtccttggtggtct

SEQ ID NO: 3541243 - DNA, 25 bp, Homo sapien
acccactcatcgctgtcacctgtgt

SEQ ID NO: 3541244 - DNA, 25 bp, Homo sapien
acacccactcatcgctgtcacctgt

SEQ ID NO: 3541245 - DNA, 25 bp, Homo sapien
aaacacccactcatcgctgtcacct

SEQ ID NO: 3541246 - DNA, 25 bp, Homo sapien
aacacccactcatcgctgtcacctg

SEQ ID NO: 3541247 - DNA, 25 bp, Homo sapien
cacaatggtgtctggtatgcggcct

SEQ ID NO: 3541248 - DNA, 25 bp, Homo sapien
tccccagagatagggacgtccagac

SEQ ID NO: 3541249 - DNA, 25 bp, Homo sapien
tgcgtgatagccttctgccagatca

SEQ ID NO: 3541250 - DNA, 25 bp, Homo sapien
acgtccagacgtagcttatttccag

SEQ ID NO: 3541251 - DNA, 25 bp, Homo sapien
aacaaagcaaagcagtctggacgca

SEQ ID NO: 3541252 - DNA, 25 bp, Homo sapien
aggttccctggccaaataaatcagg

SEQ ID NO: 3541253 - DNA, 25 bp, Homo sapien
ggttccctggccaaataaatcagga

SEQ ID NO: 3541254 - DNA, 25 bp, Homo sapien
aaagcaaagcagtctggacgcagtg

SEQ ID NO: 3541255 - DNA, 25 bp, Homo sapien
cctgcctgggtacgaagtcaatctt

SEQ ID NO: 3541256 - DNA, 25 bp, Homo sapien
aaagctgtagtcagcctcgtcggca

SEQ ID NO: 3541257 - DNA, 25 bp, Homo sapien
gctgacaggttgcaggcgaagccct

SEQ ID NO: 3541258 - DNA, 25 bp, Homo sapien
gaagccctcgggcacaaagctgtag

SEQ ID NO: 3541259 - DNA, 25 bp, Homo sapien
cgtcggcaggtgtgacgtcgtcaat

SEQ ID NO: 3541260 - DNA, 25 bp, Homo sapien
acctttatgcggctgtcgggcacca

SEQ ID NO: 3541261 - DNA, 25 bp, Homo sapien
tcacatttgaacaccgcctggtcct

SEQ ID NO: 3541262 - DNA, 25 bp, Homo sapien
ctgcgatgctctggtacacctccag

SEQ ID NO: 3541263 - DNA, 25 bp, Homo sapien
tttgcgcccaccatcaggtctgcga

SEQ ID NO: 3541264 - DNA, 25 bp, Homo sapien
ctcgttgatgatcaggtggtgtctc

SEQ ID NO: 3541265 - DNA, 25 bp, Homo sapien
tatttgaaggtctcctcccgggtca

SEQ ID NO: 3541266 - DNA, 25 bp, Homo sapien
tgaaccggtatttgaaggtctcctc

SEQ ID NO: 3541267 - DNA, 25 bp, Homo sapien
tagtgcacagtgcatagtgccccgc

SEQ ID NO: 3541268 - DNA, 25 bp, Homo sapien
tcacactcaaactccacccgctgcc

SEQ ID NO: 3541269 - DNA, 25 bp, Homo sapien
tggtcctccaaggggcgcgtgatga

SEQ ID NO: 3541270 - DNA, 25 bp, Homo sapien
tccaaggggcgcgtgatgagcacag

SEQ ID NO: 3541271 - DNA, 25 bp, Homo sapien
tcctccaaggggcgcgtgatgagca

SEQ ID NO: 3541272 - DNA, 25 bp, Homo sapien
ctgatggtcagggtacgcttggcac

SEQ ID NO: 3541273 - DNA, 25 bp, Homo sapien
cacgcactggtaggctgcgtcgtcc

SEQ ID NO: 3541274 - DNA, 25 bp, Homo sapien
aaagagctccgtgctacacttctcg

SEQ ID NO: 3541275 - DNA, 25 bp, Homo sapien
tgcgtcgtccgccaatgagcactgg

SEQ ID NO: 3541276 - DNA, 25 bp, Homo sapien
tttgctcacctggtaggccggctcc

SEQ ID NO: 3541277 - DNA, 25 bp, Homo sapien
cttgagccatttgacctcagcgtca

SEQ ID NO: 3541278 - DNA, 25 bp, Homo sapien
tggcctttgctcacctggtaggccg

SEQ ID NO: 3541279 - DNA, 25 bp, Homo sapien
tcagccagttccacggtcagccgga

SEQ ID NO: 3541280 - DNA, 25 bp, Homo sapien
ccctgtggggaagggctaacctatg

SEQ ID NO: 3541281 - DNA, 25 bp, Homo sapien
tgtggggaagggctaacctatgccc

SEQ ID NO: 3541282 - DNA, 25 bp, Homo sapien
tggggaagggctaacctatgccctc

SEQ ID NO: 3541283 - DNA, 25 bp, Homo sapien
cctgtggggaagggctaacctatgc

SEQ ID NO: 3541284 - DNA, 25 bp, Homo sapien
gggtgcctgccgtaggatctcccac

SEQ ID NO: 3541285 - DNA, 25 bp, Homo sapien
ttgagcctctttagcatgccgcgca

SEQ ID NO: 3541286 - DNA, 25 bp, Homo sapien
aaggcgatgcgctcgtactcagatg

SEQ ID NO: 3541287 - DNA, 25 bp, Homo sapien
gcaggtcagtgacgccgtactggaa

SEQ ID NO: 3541288 - DNA, 25 bp, Homo sapien
cagaatcccagtgtcctcatggcta

SEQ ID NO: 3541289 - DNA, 25 bp, Homo sapien
gctgaagtccagaatcccagtgtcc

SEQ ID NO: 3541290 - DNA, 25 bp, Homo sapien
tccagaatcccagtgtcctcatggc

SEQ ID NO: 3541291 - DNA, 25 bp, Homo sapien
agtccagaatcccagtgtcctcatg

SEQ ID NO: 3541292 - DNA, 25 bp, Homo sapien
ccgccgaccacctccagccaggctc

SEQ ID NO: 3541293 - DNA, 25 bp, Homo sapien
ctgatccgccgaccacctccagcca

SEQ ID NO: 3541294 - DNA, 25 bp, Homo sapien
tccgccgaccacctccagccaggct

SEQ ID NO: 3541295 - DNA, 25 bp, Homo sapien
gatccgccgaccacctccagccagg

SEQ ID NO: 3541296 - DNA, 25 bp, Homo sapien
aggtccaggtctccggtgcccatgg

SEQ ID NO: 3541297 - DNA, 25 bp, Homo sapien
aaggctgataggaggtccaggtctc

SEQ ID NO: 3541298 - DNA, 25 bp, Homo sapien
ctgataggaggtccaggtctccggt

SEQ ID NO: 3541299 - DNA, 25 bp, Homo sapien
tgcggcggaaggctgataggaggtc

SEQ ID NO: 3541300 - DNA, 25 bp, Homo sapien
ggcatcggtgatgtgcagctcgaac

SEQ ID NO: 3541301 - DNA, 25 bp, Homo sapien
cggtagctgccagtgaaggcaggct

SEQ ID NO: 3541302 - DNA, 25 bp, Homo sapien
gttggagcagtcaaatttgtccttg

SEQ ID NO: 3541303 - DNA, 25 bp, Homo sapien
ggtgatgtgcagctcgaacagatag

SEQ ID NO: 3541304 - DNA, 25 bp, Homo sapien
tcaggtccacccatttgcccttgaa

SEQ ID NO: 3541305 - DNA, 25 bp, Homo sapien
cacttgaccacaggcggcttcagga

SEQ ID NO: 3541306 - DNA, 25 bp, Homo sapien
ggcgcggtcgtagctgtcgtgcagc

SEQ ID NO: 3541307 - DNA, 25 bp, Homo sapien
ccttgaaccacttgaccacaggcgg

SEQ ID NO: 3541308 - DNA, 25 bp, Homo sapien
tgtggccgcatcacgaagaggccaa

SEQ ID NO: 3541309 - DNA, 25 bp, Homo sapien
tcgccatcctgtggccgcatcacga

SEQ ID NO: 3541310 - DNA, 25 bp, Homo sapien
atcctgtggccgcatcacgaagagg

SEQ ID NO: 3541311 - DNA, 25 bp, Homo sapien
gccgcatcacgaagaggccaatggg

SEQ ID NO: 3541312 - DNA, 25 bp, Homo sapien
gtaggaccattgagagctgctgagc

SEQ ID NO: 3541313 - DNA, 25 bp, Homo sapien
ctccaggggtaggaccattgagagc

SEQ ID NO: 3541314 - DNA, 25 bp, Homo sapien
ggaccattgagagctgctgagcttg

SEQ ID NO: 3541315 - DNA, 25 bp, Homo sapien
tccaggggtaggaccattgagagct

SEQ ID NO: 3541316 - DNA, 25 bp, Homo sapien
actttctcccagctcagcggctggg

SEQ ID NO: 3541317 - DNA, 25 bp, Homo sapien
ggacttggggcactttctcccagct

SEQ ID NO: 3541318 - DNA, 25 bp, Homo sapien
ttgggacttggggcactttctccca

SEQ ID NO: 3541319 - DNA, 25 bp, Homo sapien
ccaggggctccagtggcctcagcag

SEQ ID NO: 3541320 - DNA, 25 bp, Homo sapien
taagatccctggtcggcagggccca

SEQ ID NO: 3541321 - DNA, 25 bp, Homo sapien
tcagcgtatgccgtgtgccctctgt

SEQ ID NO: 3541322 - DNA, 25 bp, Homo sapien
ggaggagccagcaatgactgcgtaa

SEQ ID NO: 3541323 - DNA, 25 bp, Homo sapien
ccaggccgtacttgttgctggcgct

SEQ ID NO: 3541324 - DNA, 25 bp, Homo sapien
ctggcttcttccccggctcaggcat

SEQ ID NO: 3541325 - DNA, 25 bp, Homo sapien
agagacgtcacaccaggcacgaagc

SEQ ID NO: 3541326 - DNA, 25 bp, Homo sapien
cctgagagacgtcacaccaggcacg

SEQ ID NO: 3541327 - DNA, 25 bp, Homo sapien
gacgtcacaccaggcacgaagcagg

SEQ ID NO: 3541328 - DNA, 25 bp, Homo sapien
gtcacaccaggcacgaagcaggcac

SEQ ID NO: 3541329 - DNA, 25 bp, Homo sapien
ttctccgctcagcttggtctgtttc

SEQ ID NO: 3541330 - DNA, 25 bp, Homo sapien
gcttctccgctcagcttggtctgtt

SEQ ID NO: 3541331 - DNA, 25 bp, Homo sapien
aggcttctccgctcagcttggtctg

SEQ ID NO: 3541332 - DNA, 25 bp, Homo sapien
tctccgctcagcttggtctgtttct

SEQ ID NO: 3541333 - DNA, 25 bp, Homo sapien
gctgaagagtatcctcttccagata

SEQ ID NO: 3541334 - DNA, 25 bp, Homo sapien
tgggcgtgcagctcgtgagaaccct

SEQ ID NO: 3541335 - DNA, 25 bp, Homo sapien
tgagaaccctttgcggcccacagga

SEQ ID NO: 3541336 - DNA, 25 bp, Homo sapien
tgtcctcggaatgctgaagagtatc

SEQ ID NO: 3541337 - DNA, 25 bp, Homo sapien
tctgacgcccagctggcgtccggga

SEQ ID NO: 3541338 - DNA, 25 bp, Homo sapien
agtaccccgggtcgtcctctgcaag

SEQ ID NO: 3541339 - DNA, 25 bp, Homo sapien
cgagggcttaatgctatggccagcg

SEQ ID NO: 3541340 - DNA, 25 bp, Homo sapien
gatttacatacggacttgagactcc

SEQ ID NO: 3541341 - DNA, 25 bp, Homo sapien
ggcgggtggcgccgctcggccaggc

SEQ ID NO: 3541342 - DNA, 25 bp, Homo sapien
gcgggtggcgccgctcggccaggcc

SEQ ID NO: 3541343 - DNA, 25 bp, Homo sapien
cgggtggcgccgctcggccaggccc

SEQ ID NO: 3541344 - DNA, 25 bp, Homo sapien
gggtggcgccgctcggccaggcccc

SEQ ID NO: 3541345 - DNA, 25 bp, Homo sapien
tgtccttcatgtcgccgctgcggag

SEQ ID NO: 3541346 - DNA, 25 bp, Homo sapien
gcctccttgtgcttggacgagaact

SEQ ID NO: 3541347 - DNA, 25 bp, Homo sapien
gtcttgccgtagttgcgcagcgcgc

SEQ ID NO: 3541348 - DNA, 25 bp, Homo sapien
gtaggtcatcttcttgcggttgccc

SEQ ID NO: 3541349 - DNA, 25 bp, Homo sapien
ccccaccgccttgcgtacgcacagg

SEQ ID NO: 3541350 - DNA, 25 bp, Homo sapien
ccttgcgtacgcacaggggcccggg

SEQ ID NO: 3541351 - DNA, 25 bp, Homo sapien
cgcccccaccgccttgcgtacgcac

SEQ ID NO: 3541352 - DNA, 25 bp, Homo sapien
accgccttgcgtacgcacaggggcc

SEQ ID NO: 3541353 - DNA, 25 bp, Homo sapien
cctcgccgtcagacacctccagtgg

SEQ ID NO: 3541354 - DNA, 25 bp, Homo sapien
tgggtactggaggcacatccggggc

SEQ ID NO: 3541355 - DNA, 25 bp, Homo sapien
caggccatccgcctcgccgtcagac

SEQ ID NO: 3541356 - DNA, 25 bp, Homo sapien
ggggacagggatgggtactggaggc

SEQ ID NO: 3541357 - DNA, 25 bp, Homo sapien
ctggtggccaagactgggatggggt

SEQ ID NO: 3541358 - DNA, 25 bp, Homo sapien
tggtggccaagactgggatggggtg

SEQ ID NO: 3541359 - DNA, 25 bp, Homo sapien
gtggccaagactgggatggggtggc

SEQ ID NO: 3541360 - DNA, 25 bp, Homo sapien
ggccaagactgggatggggtggcac

SEQ ID NO: 3541361 - DNA, 25 bp, Homo sapien
tatcgaggacgtgcatctgctccag

SEQ ID NO: 3541362 - DNA, 25 bp, Homo sapien
tctcgaactcgctgtgcacgtggtg

SEQ ID NO: 3541363 - DNA, 25 bp, Homo sapien
gctccgtgaagttgttctcggcgaa

SEQ ID NO: 3541364 - DNA, 25 bp, Homo sapien
gctgcacgctctggagctccgtgaa

SEQ ID NO: 3541365 - DNA, 25 bp, Homo sapien
aaaaaaagcctggattagcacttga

SEQ ID NO: 3541366 - DNA, 25 bp, Homo sapien
tctcttaacaaaaaagtattcagtg

SEQ ID NO: 3541367 - DNA, 25 bp, Homo sapien
acaaaaaagtattcagtgtgcaggg

SEQ ID NO: 3541368 - DNA, 25 bp, Homo sapien
cttaacaaaaaagtattcagtgtgc

SEQ ID NO: 3541369 - DNA, 25 bp, Homo sapien
ctgagttccggatgaatctggggcc

SEQ ID NO: 3541370 - DNA, 25 bp, Homo sapien
ccagtctgagttccggatgaatctg

SEQ ID NO: 3541371 - DNA, 25 bp, Homo sapien
gcttccagtctgagttccggatgaa

SEQ ID NO: 3541372 - DNA, 25 bp, Homo sapien
ggcttccagtctgagttccggatga

SEQ ID NO: 3541373 - DNA, 25 bp, Homo sapien
ggtaatactcgtgcgtttggcgttg

SEQ ID NO: 3541374 - DNA, 25 bp, Homo sapien
atccgtgtcatagggcaccaggtct

SEQ ID NO: 3541375 - DNA, 25 bp, Homo sapien
tcactgctgagataggggtaatact

SEQ ID NO: 3541376 - DNA, 25 bp, Homo sapien
ggcgttggtatagatccgtgtcata

SEQ ID NO: 3541377 - DNA, 25 bp, Homo sapien
catggtgggagaccccagccaggcc

SEQ ID NO: 3541378 - DNA, 25 bp, Homo sapien
cctgcagcacccccgcacgctgggt

SEQ ID NO: 3541379 - DNA, 25 bp, Homo sapien
caggcctgcagcacccccgcacgct

SEQ ID NO: 3541380 - DNA, 25 bp, Homo sapien
gcagcacccccgcacgctgggtccc

SEQ ID NO: 3541381 - DNA, 25 bp, Homo sapien
gggtcacccaggcagacttaggggc

SEQ ID NO: 3541382 - DNA, 25 bp, Homo sapien
gtcacccaggcagacttaggggccg

SEQ ID NO: 3541383 - DNA, 25 bp, Homo sapien
acccaggcagacttaggggccgagc

SEQ ID NO: 3541384 - DNA, 25 bp, Homo sapien
tcacccaggcagacttaggggccga

SEQ ID NO: 3541385 - DNA, 25 bp, Homo sapien
tcttgcgctacatacaggaagtctc

SEQ ID NO: 3541386 - DNA, 25 bp, Homo sapien
ctgtaacatccagccgggctccgag

SEQ ID NO: 3541387 - DNA, 25 bp, Homo sapien
cctgattttatcgaagggcctgccg

SEQ ID NO: 3541388 - DNA, 25 bp, Homo sapien
cccttgacattgcagggccagcaca

SEQ ID NO: 3541389 - DNA, 25 bp, Homo sapien
tgtagccaacagtcacctcattggg

SEQ ID NO: 3541390 - DNA, 25 bp, Homo sapien
aaatccctagggctctgtttccagc

SEQ ID NO: 3541391 - DNA, 25 bp, Homo sapien
gggaggcttttgctctaacccaaca

SEQ ID NO: 3541392 - DNA, 25 bp, Homo sapien
tgatctagcaggctatcaggcctgg

SEQ ID NO: 3541393 - DNA, 25 bp, Homo sapien
gcgttgtttcgcatatgataatgtc

SEQ ID NO: 3541394 - DNA, 25 bp, Homo sapien
tgcgttgtttcgcatatgataatgt

SEQ ID NO: 3541395 - DNA, 25 bp, Homo sapien
gttgtttcgcatatgataatgtcct

SEQ ID NO: 3541396 - DNA, 25 bp, Homo sapien
cgttgtttcgcatatgataatgtcc

SEQ ID NO: 3541397 - DNA, 25 bp, Homo sapien
ttctggcccagtgatctctggtgag

SEQ ID NO: 3541398 - DNA, 25 bp, Homo sapien
ggcccagtgatctctggtgagtccc

SEQ ID NO: 3541399 - DNA, 25 bp, Homo sapien
cttcagagagttcctgatcttttct

SEQ ID NO: 3541400 - DNA, 25 bp, Homo sapien
gtttttctggcccagtgatctctgg

SEQ ID NO: 3541401 - DNA, 25 bp, Homo sapien
ttgtatctgcacttgggactctcca

SEQ ID NO: 3541402 - DNA, 25 bp, Homo sapien
gacaggttggcttggcatcagttcc

SEQ ID NO: 3541403 - DNA, 25 bp, Homo sapien
gacaggcctgccttcttgccagtgg

SEQ ID NO: 3541404 - DNA, 25 bp, Homo sapien
taaattcccactccactaagacagg

SEQ ID NO: 3541405 - DNA, 25 bp, Homo sapien
tagtgtacattgtgccctttaagta

SEQ ID NO: 3541406 - DNA, 25 bp, Homo sapien
cattgtttcgcttatgataatggcc

SEQ ID NO: 3541407 - DNA, 25 bp, Homo sapien
tctcatccctcaccatgcctcccca

SEQ ID NO: 3541408 - DNA, 25 bp, Homo sapien
aatagtgtacattgtgccctttaag

SEQ ID NO: 3541409 - DNA, 25 bp, Homo sapien
gcatctggccaaaaggtagttctgt

SEQ ID NO: 3541410 - DNA, 25 bp, Homo sapien
cctttggttagatactcagtgagat

SEQ ID NO: 3541411 - DNA, 25 bp, Homo sapien
tggttagatactcagtgagattgct

SEQ ID NO: 3541412 - DNA, 25 bp, Homo sapien
ttttcctttggttagatactcagtg

SEQ ID NO: 3541413 - DNA, 25 bp, Homo sapien
tttttattgagtgtcttccatggtc

SEQ ID NO: 3541414 - DNA, 25 bp, Homo sapien
attgagtgtcttccatggtctgggc

SEQ ID NO: 3541415 - DNA, 25 bp, Homo sapien
tattgagtgtcttccatggtctggg

SEQ ID NO: 3541416 - DNA, 25 bp, Homo sapien
tttattgagtgtcttccatggtctg

SEQ ID NO: 3541417 - DNA, 25 bp, Homo sapien
taattcaaattcttgggaatagtag

SEQ ID NO: 3541418 - DNA, 25 bp, Homo sapien
atagtaggacccagattccaagaac

SEQ ID NO: 3541419 - DNA, 25 bp, Homo sapien
cgtggtaattcaaattcttgggaat

SEQ ID NO: 3541420 - DNA, 25 bp, Homo sapien
tccataacctcacggttagtagttc

SEQ ID NO: 3541421 - DNA, 25 bp, Homo sapien
cctcaggcgaaaaagaggagagcag

SEQ ID NO: 3541422 - DNA, 25 bp, Homo sapien
gaaacaggacaagaggtgaggaggc

SEQ ID NO: 3541423 - DNA, 25 bp, Homo sapien
acagaggagggacaacgaggaggtt

SEQ ID NO: 3541424 - DNA, 25 bp, Homo sapien
tctgggtgcttccaccctatgatct

SEQ ID NO: 3541425 - DNA, 25 bp, Homo sapien
ggtcagcaggtgcatcgtgctggaa

SEQ ID NO: 3541426 - DNA, 25 bp, Homo sapien
ccaaaaatcttggacgctctaggga

SEQ ID NO: 3541427 - DNA, 25 bp, Homo sapien
tcattctggtcagcaggaaattggt

SEQ ID NO: 3541428 - DNA, 25 bp, Homo sapien
tctggtcagcaggaaattggtttga

SEQ ID NO: 3541429 - DNA, 25 bp, Homo sapien
ttatttataactgggcctccgtggc

SEQ ID NO: 3541430 - DNA, 25 bp, Homo sapien
tagaccatggatgccgaggtactgc

SEQ ID NO: 3541431 - DNA, 25 bp, Homo sapien
tcttgtggagccgtcgtcttgaacc

SEQ ID NO: 3541432 - DNA, 25 bp, Homo sapien
tctgggcagttgcaacctgtggtca

SEQ ID NO: 3541433 - DNA, 25 bp, Homo sapien
ctgctgtgggggaaaactcgggcca

SEQ ID NO: 3541434 - DNA, 25 bp, Homo sapien
aaggccggcgcctgagaaaacagga

SEQ ID NO: 3541435 - DNA, 25 bp, Homo sapien
agctgcccctgtttccacatcggca

SEQ ID NO: 3541436 - DNA, 25 bp, Homo sapien
ctgggcccacgtaggcccctctggg

SEQ ID NO: 3541437 - DNA, 25 bp, Homo sapien
acagcggcccagagaaacgctccgg

SEQ ID NO: 3541438 - DNA, 25 bp, Homo sapien
ctactttggccacccttaaatcaga

SEQ ID NO: 3541439 - DNA, 25 bp, Homo sapien
catttctctgacctagtgtttggcg

SEQ ID NO: 3541440 - DNA, 25 bp, Homo sapien
cgggaactctgtgcccaaccttcag

SEQ ID NO: 3541441 - DNA, 25 bp, Homo sapien
aggagacaggagtctagggaggctg

SEQ ID NO: 3541442 - DNA, 25 bp, Homo sapien
ggagacaggagtctagggaggctga

SEQ ID NO: 3541443 - DNA, 25 bp, Homo sapien
agacaggagtctagggaggctgaag

SEQ ID NO: 3541444 - DNA, 25 bp, Homo sapien
gagacaggagtctagggaggctgaa

SEQ ID NO: 3541445 - DNA, 25 bp, Homo sapien
gagcagagcatttcatggctataat

SEQ ID NO: 3541446 - DNA, 25 bp, Homo sapien
ggaagtcgaagcaagagaaataaca

SEQ ID NO: 3541447 - DNA, 25 bp, Homo sapien
ttcatggctataataaatcaaaggg

SEQ ID NO: 3541448 - DNA, 25 bp, Homo sapien
cagatctctcttcaggcctaggtac

SEQ ID NO: 3541449 - DNA, 25 bp, Homo sapien
ctcttctgttcccttttatcttctt

SEQ ID NO: 3541450 - DNA, 25 bp, Homo sapien
ttctcttctgttcccttttatcttc

SEQ ID NO: 3541451 - DNA, 25 bp, Homo sapien
tctcttctgttcccttttatcttct

SEQ ID NO: 3541452 - DNA, 25 bp, Homo sapien
taaggcctggaggtcctagacatgg

SEQ ID NO: 3541453 - DNA, 25 bp, Homo sapien
catcagtgcccctgattagttaagg

SEQ ID NO: 3541454 - DNA, 25 bp, Homo sapien
tggagccccgctggcttcatcagtg

SEQ ID NO: 3541455 - DNA, 25 bp, Homo sapien
aggtcctagacatgggcatctctgc

SEQ ID NO: 3541456 - DNA, 25 bp, Homo sapien
gggagctgggacctgtcagctcttc

SEQ ID NO: 3541457 - DNA, 25 bp, Homo sapien
ggagctgggacctgtcagctcttca

SEQ ID NO: 3541458 - DNA, 25 bp, Homo sapien
gagctgggacctgtcagctcttcac

SEQ ID NO: 3541459 - DNA, 25 bp, Homo sapien
agctgggacctgtcagctcttcacc

SEQ ID NO: 3541460 - DNA, 25 bp, Homo sapien
atctgctgcccgaagcctgggccta

SEQ ID NO: 3541461 - DNA, 25 bp, Homo sapien
tccagccttgcaggcccagaaagag

SEQ ID NO: 3541462 - DNA, 25 bp, Homo sapien
agccacccatatccagccttgcagg

SEQ ID NO: 3541463 - DNA, 25 bp, Homo sapien
gctgctcagcttcgccctgggggga

SEQ ID NO: 3541464 - DNA, 25 bp, Homo sapien
tgagagcagcccaaggatccagggt

SEQ ID NO: 3541465 - DNA, 25 bp, Homo sapien
tgtgtgcgcgagaccgacactgtga

SEQ ID NO: 3541466 - DNA, 25 bp, Homo sapien
tagtgagctgggaggcgcttcctaa

SEQ ID NO: 3541467 - DNA, 25 bp, Homo sapien
tcacctcccggagtaagcagcgagg

SEQ ID NO: 3541468 - DNA, 25 bp, Homo sapien
ccatcttttattgcgcacttcagcc

SEQ ID NO: 3541469 - DNA, 25 bp, Homo sapien
aaccatcttttattgcgcacttcag

SEQ ID NO: 3541470 - DNA, 25 bp, Homo sapien
accatcttttattgcgcacttcagc

SEQ ID NO: 3541471 - DNA, 25 bp, Homo sapien
tgtagtcctcgtgggtgagctccgt

SEQ ID NO: 3541472 - DNA, 25 bp, Homo sapien
tggcacccctgcgcagtgcgatcat

SEQ ID NO: 3541473 - DNA, 25 bp, Homo sapien
tccatgtagtcctcgtgggtgagct

SEQ ID NO: 3541474 - DNA, 25 bp, Homo sapien
tgccttccatgtagtcctcgtgggt

SEQ ID NO: 3541475 - DNA, 25 bp, Homo sapien
tcagccgtctccaccagccaaatgc

SEQ ID NO: 3541476 - DNA, 25 bp, Homo sapien
aggtctgaacgcctgaatgccttcc

SEQ ID NO: 3541477 - DNA, 25 bp, Homo sapien
cagagtctaggtctgaacgcctgaa

SEQ ID NO: 3541478 - DNA, 25 bp, Homo sapien
gccgggacaaacagagtctaggtct

SEQ ID NO: 3541479 - DNA, 25 bp, Homo sapien
ccagctcctcgtagttcacgtcagg

SEQ ID NO: 3541480 - DNA, 25 bp, Homo sapien
cagctcctcgtagttcacgtcagga

SEQ ID NO: 3541481 - DNA, 25 bp, Homo sapien
gccagctcctcgtagttcacgtcag

SEQ ID NO: 3541482 - DNA, 25 bp, Homo sapien
ctcctcattgggcatcgggaactct

SEQ ID NO: 3541483 - DNA, 25 bp, Homo sapien
atcttgcggtcaaggcggcccgagc

SEQ ID NO: 3541484 - DNA, 25 bp, Homo sapien
ctcattgggcatcgggaactctatc

SEQ ID NO: 3541485 - DNA, 25 bp, Homo sapien
gggaactctatcttgcggtcaaggc

SEQ ID NO: 3541486 - DNA, 25 bp, Homo sapien
agccatccagctggttcagaagctc

SEQ ID NO: 3541487 - DNA, 25 bp, Homo sapien
gaagctccagcattgtcctctgcac

SEQ ID NO: 3541488 - DNA, 25 bp, Homo sapien
tggttcagaagctccagcattgtcc

SEQ ID NO: 3541489 - DNA, 25 bp, Homo sapien
cttaacttgggtgttgggctggaag

SEQ ID NO: 3541490 - DNA, 25 bp, Homo sapien
gtccccagccttctcactgtcaaag

SEQ ID NO: 3541491 - DNA, 25 bp, Homo sapien
cccggtccccagccttctcactgtc

SEQ ID NO: 3541492 - DNA, 25 bp, Homo sapien
cggtccccagccttctcactgtcaa

SEQ ID NO: 3541493 - DNA, 25 bp, Homo sapien
ctcccggtccccagccttctcactg

SEQ ID NO: 3541494 - DNA, 25 bp, Homo sapien
ggcaaccaaccagtggagaacaggg

SEQ ID NO: 3541495 - DNA, 25 bp, Homo sapien
taggcaaccaaccagtggagaacag

SEQ ID NO: 3541496 - DNA, 25 bp, Homo sapien
caaccaaccagtggagaacagggta

SEQ ID NO: 3541497 - DNA, 25 bp, Homo sapien
gcaaccaaccagtggagaacagggt

SEQ ID NO: 3541498 - DNA, 25 bp, Homo sapien
gccgatggcatccaactcatcaatg

SEQ ID NO: 3541499 - DNA, 25 bp, Homo sapien
gtgccgatggcatccaactcatcaa

SEQ ID NO: 3541500 - DNA, 25 bp, Homo sapien
cgcttggtgccgatggcatccaact

SEQ ID NO: 3541501 - DNA, 25 bp, Homo sapien
ccgatggcatccaactcatcaatga

SEQ ID NO: 3541502 - DNA, 25 bp, Homo sapien
tcattggcaagacaatggcctccac

SEQ ID NO: 3541503 - DNA, 25 bp, Homo sapien
tagtctgtgcggcacaggcccgggc

SEQ ID NO: 3541504 - DNA, 25 bp, Homo sapien
tccctgggggcccatacatcagcac

SEQ ID NO: 3541505 - DNA, 25 bp, Homo sapien
cagcaccccttttggaggttggatc

SEQ ID NO: 3541506 - DNA, 25 bp, Homo sapien
ggatctgcttgtccaaacccccaat

SEQ ID NO: 3541507 - DNA, 25 bp, Homo sapien
cccaatgtcactgtattgctccgtg

SEQ ID NO: 3541508 - DNA, 25 bp, Homo sapien
tcactgtattgctccgtgggcctct

SEQ ID NO: 3541509 - DNA, 25 bp, Homo sapien
gtattgctccgtgggcctctcgtct

SEQ ID NO: 3541510 - DNA, 25 bp, Homo sapien
ttcacccgcgagtcatactctgtgg

SEQ ID NO: 3541511 - DNA, 25 bp, Homo sapien
cacccgcgagtcatactctgtgggc

SEQ ID NO: 3541512 - DNA, 25 bp, Homo sapien
gcagcgtctccaggatcagatagga

SEQ ID NO: 3541513 - DNA, 25 bp, Homo sapien
cgtctccaggatcagataggagtct

SEQ ID NO: 3541514 - DNA, 25 bp, Homo sapien
agcatccaccaacccaatcacagga

SEQ ID NO: 3541515 - DNA, 25 bp, Homo sapien
acccaatcacaggaaggaagtacgt

SEQ ID NO: 3541516 - DNA, 25 bp, Homo sapien
caacccaatcacaggaaggaagtac

SEQ ID NO: 3541517 - DNA, 25 bp, Homo sapien
gcatccaccaacccaatcacaggaa

SEQ ID NO: 3541518 - DNA, 25 bp, Homo sapien
tctgggagtccaggtcaatattggc

SEQ ID NO: 3541519 - DNA, 25 bp, Homo sapien
tcgtgtagaggttttgatcacagca

SEQ ID NO: 3541520 - DNA, 25 bp, Homo sapien
aatattggcaccatcctcctcttgg

SEQ ID NO: 3541521 - DNA, 25 bp, Homo sapien
ggtcattaggatcaacatccaggag

SEQ ID NO: 3541522 - DNA, 25 bp, Homo sapien
caaggtacggcagggtcttgttcac

SEQ ID NO: 3541523 - DNA, 25 bp, Homo sapien
gacaaggtacggcagggtcttgttc

SEQ ID NO: 3541524 - DNA, 25 bp, Homo sapien
ggagacaaggtacggcagggtcttg

SEQ ID NO: 3541525 - DNA, 25 bp, Homo sapien
ttggagacaaggtacggcagggtct

SEQ ID NO: 3541526 - DNA, 25 bp, Homo sapien
cgtgtgcgctggatgatctcctccg

SEQ ID NO: 3541527 - DNA, 25 bp, Homo sapien
tccagcagccgtgtgcgctggatga

SEQ ID NO: 3541528 - DNA, 25 bp, Homo sapien
cagcagccgtgtgcgctggatgatc

SEQ ID NO: 3541529 - DNA, 25 bp, Homo sapien
cagccgtgtgcgctggatgatctcc

SEQ ID NO: 3541530 - DNA, 25 bp, Homo sapien
ttgagcacctcctccccaattccat

SEQ ID NO: 3541531 - DNA, 25 bp, Homo sapien
cttgagcacctcctccccaattcca

SEQ ID NO: 3541532 - DNA, 25 bp, Homo sapien
ttccctcttgtcaatggcgtctccc

SEQ ID NO: 3541533 - DNA, 25 bp, Homo sapien
ccttccctcttgtcaatggcgtctc

SEQ ID NO: 3541534 - DNA, 25 bp, Homo sapien
ctccttccctcttgtcaatggcgtc

SEQ ID NO: 3541535 - DNA, 25 bp, Homo sapien
tccctcttgtcaatggcgtctccct

SEQ ID NO: 3541536 - DNA, 25 bp, Homo sapien
cggcctcatcccacacggtcgccat

SEQ ID NO: 3541537 - DNA, 25 bp, Homo sapien
tcttctcctgccgagtcactggact

SEQ ID NO: 3541538 - DNA, 25 bp, Homo sapien
tcatcccacacggtcgccatcttct

SEQ ID NO: 3541539 - DNA, 25 bp, Homo sapien
ggactctcaatattcggcagcagat

SEQ ID NO: 3541540 - DNA, 25 bp, Homo sapien
gaatctgcctctccgattccaaaga

SEQ ID NO: 3541541 - DNA, 25 bp, Homo sapien
cttaaagccttctcttgaccagtgg

SEQ ID NO: 3541542 - DNA, 25 bp, Homo sapien
tgctgcggagcagcgaatctgcctc

SEQ ID NO: 3541543 - DNA, 25 bp, Homo sapien
cgggagccgcaacgggagattaata

SEQ ID NO: 3541544 - DNA, 25 bp, Homo sapien
gtgaggacgacctggcagctgcccc

SEQ ID NO: 3541545 - DNA, 25 bp, Homo sapien
ctatggtgaggacgacctggcagct

SEQ ID NO: 3541546 - DNA, 25 bp, Homo sapien
ccttggctatggtgaggacgacctg

SEQ ID NO: 3541547 - DNA, 25 bp, Homo sapien
aggccttggctatggtgaggacgac

SEQ ID NO: 3541548 - DNA, 25 bp, Homo sapien
gcttcatggatgagcggcggcagtt

SEQ ID NO: 3541549 - DNA, 25 bp, Homo sapien
tccgggtcccgttgttctgcaggca

SEQ ID NO: 3541550 - DNA, 25 bp, Homo sapien
gagcggcggcagttgggacagctcc

SEQ ID NO: 3541551 - DNA, 25 bp, Homo sapien
cagttgggacagctccgggtcccgt

SEQ ID NO: 3541552 - DNA, 25 bp, Homo sapien
ctgaggcctgtccttccctccgggc

SEQ ID NO: 3541553 - DNA, 25 bp, Homo sapien
aagggccctgtccactcccctgagg

SEQ ID NO: 3541554 - DNA, 25 bp, Homo sapien
tggccctggacgtccgacctaatga

SEQ ID NO: 3541555 - DNA, 25 bp, Homo sapien
cgtccgacctaatgacctttgaggg

SEQ ID NO: 3541556 - DNA, 25 bp, Homo sapien
gttcttctcgcctatggactcgccg

SEQ ID NO: 3541557 - DNA, 25 bp, Homo sapien
cactcgtggaacctcacaacgtgcg

SEQ ID NO: 3541558 - DNA, 25 bp, Homo sapien
aggccgcagtagagctccgtctcct

SEQ ID NO: 3541559 - DNA, 25 bp, Homo sapien
aatgctctcgctcagacagtgcagc

SEQ ID NO: 3541560 - DNA, 25 bp, Homo sapien
atttcagaatatgggctgccaaagc

SEQ ID NO: 3541561 - DNA, 25 bp, Homo sapien
caatttcagaatatgggctgccaaa

SEQ ID NO: 3541562 - DNA, 25 bp, Homo sapien
gtattgttccaatttcagaatatgg

SEQ ID NO: 3541563 - DNA, 25 bp, Homo sapien
cagaatatgggctgccaaagcaagc

SEQ ID NO: 3541564 - DNA, 25 bp, Homo sapien
ttgggcccttgaccccagatccagg

SEQ ID NO: 3541565 - DNA, 25 bp, Homo sapien
ccaagctatgaaacttctgccctgc

SEQ ID NO: 3541566 - DNA, 25 bp, Homo sapien
gaattctgctatcctccaagctatg

SEQ ID NO: 3541567 - DNA, 25 bp, Homo sapien
gctcatgacgtgagtaggctcagga

SEQ ID NO: 3541568 - DNA, 25 bp, Homo sapien
atcctgggctctctcgatggcatcc

SEQ ID NO: 3541569 - DNA, 25 bp, Homo sapien
tcctgggctctctcgatggcatcca

SEQ ID NO: 3541570 - DNA, 25 bp, Homo sapien
cagcaggaagagactagggcacagt

SEQ ID NO: 3541571 - DNA, 25 bp, Homo sapien
ggctgtgtgggcaagtgacctcctg

SEQ ID NO: 3541572 - DNA, 25 bp, Homo sapien
caggaatgtcctggcctcgtaggat

SEQ ID NO: 3541573 - DNA, 25 bp, Homo sapien
gctgtgggtcctagggcaagtgatg

SEQ ID NO: 3541574 - DNA, 25 bp, Homo sapien
atgctcatggcggagtcgtacctgg

SEQ ID NO: 3541575 - DNA, 25 bp, Homo sapien
catgatgctcatggcggagtcgtac

SEQ ID NO: 3541576 - DNA, 25 bp, Homo sapien
tgccccaggcggtttccgatctcgg

SEQ ID NO: 3541577 - DNA, 25 bp, Homo sapien
tccgatctcggtcatgatgctcatg

SEQ ID NO: 3541578 - DNA, 25 bp, Homo sapien
tcaggctgtatcaggcctgtgcccc

SEQ ID NO: 3541579 - DNA, 25 bp, Homo sapien
agagcgcctgcagtggccggtcccc

SEQ ID NO: 3541580 - DNA, 25 bp, Homo sapien
gctgcagcgcgatcttcatagactc

SEQ ID NO: 3541581 - DNA, 25 bp, Homo sapien
ctccggtggatgtcagcgaagcaga

SEQ ID NO: 3541582 - DNA, 25 bp, Homo sapien
gcagagcgcctgcagtggccggtcc

SEQ ID NO: 3541583 - DNA, 25 bp, Homo sapien
gccagtggctcaggcctactcctct

SEQ ID NO: 3541584 - DNA, 25 bp, Homo sapien
ctgcgagggaggccagtggctcagg

SEQ ID NO: 3541585 - DNA, 25 bp, Homo sapien
aggccagtggctcaggcctactcct

SEQ ID NO: 3541586 - DNA, 25 bp, Homo sapien
gcgagggaggccagtggctcaggcc

SEQ ID NO: 3541587 - DNA, 25 bp, Homo sapien
gccacggccatgtggtactggctca

SEQ ID NO: 3541588 - DNA, 25 bp, Homo sapien
tgttgacaagctctgccgccttgca

SEQ ID NO: 3541589 - DNA, 25 bp, Homo sapien
aggcggcccagcaggcgataggcca

SEQ ID NO: 3541590 - DNA, 25 bp, Homo sapien
atggcccggtacttcaggctccagc

SEQ ID NO: 3541591 - DNA, 25 bp, Homo sapien
atagcgcagggccttctcgaagctc

SEQ ID NO: 3541592 - DNA, 25 bp, Homo sapien
tcatcattgttgtgggcatagcgca

SEQ ID NO: 3541593 - DNA, 25 bp, Homo sapien
tgcgtgccaggttcaggtagctctc

SEQ ID NO: 3541594 - DNA, 25 bp, Homo sapien
gaaactcgcacagcttctcgttgct

SEQ ID NO: 3541595 - DNA, 25 bp, Homo sapien
tctccgagtgggctgtgaccaggca

SEQ ID NO: 3541596 - DNA, 25 bp, Homo sapien
ttctctgtctggttggactggtaca

SEQ ID NO: 3541597 - DNA, 25 bp, Homo sapien
agcatctccttgtagcggcccatct

SEQ ID NO: 3541598 - DNA, 25 bp, Homo sapien
tttgtccacacctgcaatgccttct

SEQ ID NO: 3541599 - DNA, 25 bp, Homo sapien
aggcgccaccctgggaacaaagctg

SEQ ID NO: 3541600 - DNA, 25 bp, Homo sapien
atccctggtggctccgtgcctctag

SEQ ID NO: 3541601 - DNA, 25 bp, Homo sapien
actcatggggcaggaatcacagtgc

SEQ ID NO: 3541602 - DNA, 25 bp, Homo sapien
tgggaacaaaagcagcgtcgggtgg

SEQ ID NO: 3541603 - DNA, 25 bp, Homo sapien
ggaaccaactgcggacacagtggga

SEQ ID NO: 3541604 - DNA, 25 bp, Homo sapien
gaaccaactgcggacacagtgggat

SEQ ID NO: 3541605 - DNA, 25 bp, Homo sapien
aaccaactgcggacacagtgggatc

SEQ ID NO: 3541606 - DNA, 25 bp, Homo sapien
accaactgcggacacagtgggatct

SEQ ID NO: 3541607 - DNA, 25 bp, Homo sapien
gagcccagggcatagtaacttaaaa

SEQ ID NO: 3541608 - DNA, 25 bp, Homo sapien
gaagtgctatgtagactctaaataa

SEQ ID NO: 3541609 - DNA, 25 bp, Homo sapien
tgtacccagatggaagggagcccag

SEQ ID NO: 3541610 - DNA, 25 bp, Homo sapien
taaataaggaagcagtagatacctg

SEQ ID NO: 3541611 - DNA, 25 bp, Homo sapien
ttcctttgaaacacatactcccttg

SEQ ID NO: 3541612 - DNA, 25 bp, Homo sapien
ttcactacacaaactctgtgattag

SEQ ID NO: 3541613 - DNA, 25 bp, Homo sapien
gaaacacatactcccttgctccaaa

SEQ ID NO: 3541614 - DNA, 25 bp, Homo sapien
cagatttaggttccccattgggaca

SEQ ID NO: 3541615 - DNA, 25 bp, Homo sapien
catttctacggctgaatcacgactg

SEQ ID NO: 3541616 - DNA, 25 bp, Homo sapien
tgaatcccgttgttgctgcagaaca

SEQ ID NO: 3541617 - DNA, 25 bp, Homo sapien
tcacgactgagttgattgaatcccg

SEQ ID NO: 3541618 - DNA, 25 bp, Homo sapien
cagagcggccttgggcataatacca

SEQ ID NO: 3541619 - DNA, 25 bp, Homo sapien
cacaggcaaacgctctaagggcaat

SEQ ID NO: 3541620 - DNA, 25 bp, Homo sapien
tcgctccagggaagaaccacaaaag

SEQ ID NO: 3541621 - DNA, 25 bp, Homo sapien
tcctacgggtgattgggagcgccct

SEQ ID NO: 3541622 - DNA, 25 bp, Homo sapien
tggaggccacacgaagtgacagtct

SEQ ID NO: 3541623 - DNA, 25 bp, Homo sapien
tcagcagtcgttctagcaaaaccaa

SEQ ID NO: 3541624 - DNA, 25 bp, Homo sapien
accacgcggtatgtgctagtagggc

SEQ ID NO: 3541625 - DNA, 25 bp, Homo sapien
gttcaggtgctctccgcagttgaga

SEQ ID NO: 3541626 - DNA, 25 bp, Homo sapien
cctagaaacggactggctgtgtgtt

SEQ ID NO: 3541627 - DNA, 25 bp, Homo sapien
tacttgacgccacatcgacatgctt

SEQ ID NO: 3541628 - DNA, 25 bp, Homo sapien
agagacagggatttggacgatgtac

SEQ ID NO: 3541629 - DNA, 25 bp, Homo sapien
gcacaacgatgaacaaacggcagga

SEQ ID NO: 3541630 - DNA, 25 bp, Homo sapien
tgagagttcaagcatcagagaagct

SEQ ID NO: 3541631 - DNA, 25 bp, Homo sapien
gagctgagccctttcacacgtgaga

SEQ ID NO: 3541632 - DNA, 25 bp, Homo sapien
catgaagcacccaactcctaagaga

SEQ ID NO: 3541633 - DNA, 25 bp, Homo sapien
gacagaacagaaggctagggagcac

SEQ ID NO: 3541634 - DNA, 25 bp, Homo sapien
tgctgtgctaactcactgggcaggg

SEQ ID NO: 3541635 - DNA, 25 bp, Homo sapien
gaatttcaagtttacgtggttcagc

SEQ ID NO: 3541636 - DNA, 25 bp, Homo sapien
aaaatcccatcatgaccctggaagc

SEQ ID NO: 3541637 - DNA, 25 bp, Homo sapien
gaacagctgtcccagcttcaatggg

SEQ ID NO: 3541638 - DNA, 25 bp, Homo sapien
gtatgtttcacgttccttagaggac

SEQ ID NO: 3541639 - DNA, 25 bp, Homo sapien
gctgtaaacgtcctgatgtcacctc

SEQ ID NO: 3541640 - DNA, 25 bp, Homo sapien
tgcccaggtgtacattcccaacagc

SEQ ID NO: 3541641 - DNA, 25 bp, Homo sapien
tcaattcatgtggaggctgtaaacg

SEQ ID NO: 3541642 - DNA, 25 bp, Homo sapien
tgaagtaagacctgcaagaggcggc

SEQ ID NO: 3541643 - DNA, 25 bp, Homo sapien
tatttcccagaaggtagctgtacag

SEQ ID NO: 3541644 - DNA, 25 bp, Homo sapien
tcgtaatgggtgatgccgccctgct

SEQ ID NO: 3541645 - DNA, 25 bp, Homo sapien
catatgtcaggctaacaggtgcttt

SEQ ID NO: 3541646 - DNA, 25 bp, Homo sapien
ggcaaggccaatccaatactgactg

SEQ ID NO: 3541647 - DNA, 25 bp, Homo sapien
caaacttgtcctctgtacgaagcga

SEQ ID NO: 3541648 - DNA, 25 bp, Homo sapien
cagtagccgagtcttcagggcaagc

SEQ ID NO: 3541649 - DNA, 25 bp, Homo sapien
gcgaaactcccacagaaggcagtag

SEQ ID NO: 3541650 - DNA, 25 bp, Homo sapien
tgtacgaagcgaaactcccacagaa

SEQ ID NO: 3541651 - DNA, 25 bp, Homo sapien
gcctcagggcttcgaatcattaagg

SEQ ID NO: 3541652 - DNA, 25 bp, Homo sapien
tcgaatcattaagggtgctcctccc

SEQ ID NO: 3541653 - DNA, 25 bp, Homo sapien
tgcgagagtggcagggatcagggtc

SEQ ID NO: 3541654 - DNA, 25 bp, Homo sapien
gagtggcagggatcagggtccaggg

SEQ ID NO: 3541655 - DNA, 25 bp, Homo sapien
actccagtctcagaggggagcacgc

SEQ ID NO: 3541656 - DNA, 25 bp, Homo sapien
tctcactccagtctcagaggggagc

SEQ ID NO: 3541657 - DNA, 25 bp, Homo sapien
tcactccagtctcagaggggagcac

SEQ ID NO: 3541658 - DNA, 25 bp, Homo sapien
cagaagaccctctcactccagtctc

SEQ ID NO: 3541659 - DNA, 25 bp, Homo sapien
aatctgaaagccgttcatggactgg

SEQ ID NO: 3541660 - DNA, 25 bp, Homo sapien
tgctgtcattcttcgaacgtttgag

SEQ ID NO: 3541661 - DNA, 25 bp, Homo sapien
cagcttgggccgaaacaggattgtc

SEQ ID NO: 3541662 - DNA, 25 bp, Homo sapien
gagctgcactttaagccgcttcatg

SEQ ID NO: 3541663 - DNA, 25 bp, Homo sapien
cttggcagacacgacattcccaaag

SEQ ID NO: 3541664 - DNA, 25 bp, Homo sapien
ttggcagacacgacattcccaaagg

SEQ ID NO: 3541665 - DNA, 25 bp, Homo sapien
ccttggcagacacgacattcccaaa

SEQ ID NO: 3541666 - DNA, 25 bp, Homo sapien
cattctgcataaaatgcagtgcctc

SEQ ID NO: 3541667 - DNA, 25 bp, Homo sapien
tcagggaacattgctgcctcagggc

SEQ ID NO: 3541668 - DNA, 25 bp, Homo sapien
tgcttaaatgtcaatctagagagac

SEQ ID NO: 3541669 - DNA, 25 bp, Homo sapien
ttctctagattcaggcatgacttgc

SEQ ID NO: 3541670 - DNA, 25 bp, Homo sapien
cagcatattgctggatacccgagta

SEQ ID NO: 3541671 - DNA, 25 bp, Homo sapien
tactctgctgtgtcagaagattctg

SEQ ID NO: 3541672 - DNA, 25 bp, Homo sapien
tggtgctcccggtgccattggaaag

SEQ ID NO: 3541673 - DNA, 25 bp, Homo sapien
tgagtgagggcctccatggtgctcc

SEQ ID NO: 3541674 - DNA, 25 bp, Homo sapien
gggttgacagaattactgctgctag

SEQ ID NO: 3541675 - DNA, 25 bp, Homo sapien
ctgctgctagagctaggtgaggacc

SEQ ID NO: 3541676 - DNA, 25 bp, Homo sapien
tgacagaattactgctgctagagct

SEQ ID NO: 3541677 - DNA, 25 bp, Homo sapien
gaattactgctgctagagctaggtg

SEQ ID NO: 3541678 - DNA, 25 bp, Homo sapien
gagagcattggtaccacttggtgtg

SEQ ID NO: 3541679 - DNA, 25 bp, Homo sapien
actgctggatgtagtgagagcattg

SEQ ID NO: 3541680 - DNA, 25 bp, Homo sapien
gatgtagtgagagcattggtaccac

SEQ ID NO: 3541681 - DNA, 25 bp, Homo sapien
ggtaccacttggtgtgttctgagct

SEQ ID NO: 3541682 - DNA, 25 bp, Homo sapien
tacaacatccaaagcaagagattag

SEQ ID NO: 3541683 - DNA, 25 bp, Homo sapien
acatccaaagcaagagattagccag

SEQ ID NO: 3541684 - DNA, 25 bp, Homo sapien
ctacaacatccaaagcaagagatta

SEQ ID NO: 3541685 - DNA, 25 bp, Homo sapien
caacatccaaagcaagagattagcc

SEQ ID NO: 3541686 - DNA, 25 bp, Homo sapien
gaaaaactgcctaccatagggccag

SEQ ID NO: 3541687 - DNA, 25 bp, Homo sapien
gggaacacgcagaaaacatggcaga

SEQ ID NO: 3541688 - DNA, 25 bp, Homo sapien
aagacttccaagtagagcccagaca

SEQ ID NO: 3541689 - DNA, 25 bp, Homo sapien
gaatctaaactgtgctgtcgctgct

SEQ ID NO: 3541690 - DNA, 25 bp, Homo sapien
ggctgctcagggtgttgaggttccc

SEQ ID NO: 3541691 - DNA, 25 bp, Homo sapien
aggctgctcagggtgttgaggttcc

SEQ ID NO: 3541692 - DNA, 25 bp, Homo sapien
gctgctcagggtgttgaggttccca

SEQ ID NO: 3541693 - DNA, 25 bp, Homo sapien
ctgctcagggtgttgaggttcccag

SEQ ID NO: 3541694 - DNA, 25 bp, Homo sapien
aactggtggacggtgaatactgtac

SEQ ID NO: 3541695 - DNA, 25 bp, Homo sapien
accttgggctatgtgttcagtccta

SEQ ID NO: 3541696 - DNA, 25 bp, Homo sapien
caaatgagattagctcttagggcag

SEQ ID NO: 3541697 - DNA, 25 bp, Homo sapien
gatgtactatcacacagtccactag

SEQ ID NO: 3541698 - DNA, 25 bp, Homo sapien
tagacaaccttcttttggctcacga

SEQ ID NO: 3541699 - DNA, 25 bp, Homo sapien
tgtaacatatacactgcagacctag

SEQ ID NO: 3541700 - DNA, 25 bp, Homo sapien
tctcaagtccgctgaaagaaacatt

SEQ ID NO: 3541701 - DNA, 25 bp, Homo sapien
cctctttgactcacaaatgggtggt

SEQ ID NO: 3541702 - DNA, 25 bp, Homo sapien
gatgcatgtccagagatacatatat

SEQ ID NO: 3541703 - DNA, 25 bp, Homo sapien
agcaaaagcctcaagatataaccag

SEQ ID NO: 3541704 - DNA, 25 bp, Homo sapien
gagactaacaggactaaaagaaata

SEQ ID NO: 3541705 - DNA, 25 bp, Homo sapien
gagagaaagagactaacaggactaa

SEQ ID NO: 3541706 - DNA, 25 bp, Homo sapien
cagctgggagcttgcacagtctgca

SEQ ID NO: 3541707 - DNA, 25 bp, Homo sapien
gagcttgcacagtctgcagaaagca

SEQ ID NO: 3541708 - DNA, 25 bp, Homo sapien
agtctgcagaaagcaaaccacaaag

SEQ ID NO: 3541709 - DNA, 25 bp, Homo sapien
tgtttgttggctagggacagcagaa

SEQ ID NO: 3541710 - DNA, 25 bp, Homo sapien
acagatgctgcgctgatttgctgca

SEQ ID NO: 3541711 - DNA, 25 bp, Homo sapien
gagtatttagaccagcaaggtttcc

SEQ ID NO: 3541712 - DNA, 25 bp, Homo sapien
ttaccaccatgggtgatgagcaacc

SEQ ID NO: 3541713 - DNA, 25 bp, Homo sapien
gggtccaagagtatttagaccagca

SEQ ID NO: 3541714 - DNA, 25 bp, Homo sapien
ctgtgaaaagaccataacgaaaggg

SEQ ID NO: 3541715 - DNA, 25 bp, Homo sapien
cgtctgtgccatggctcttgttgta

SEQ ID NO: 3541716 - DNA, 25 bp, Homo sapien
cattgccttgatagccgtctgtgcc

SEQ ID NO: 3541717 - DNA, 25 bp, Homo sapien
ccatggctcttgttgtaaaagtcac

SEQ ID NO: 3541718 - DNA, 25 bp, Homo sapien
gatagccgtctgtgccatggctctt

SEQ ID NO: 3541719 - DNA, 25 bp, Homo sapien
cgaagagaacatgactcggatgtca

SEQ ID NO: 3541720 - DNA, 25 bp, Homo sapien
tcaggtccccgcaatatccggcatt

SEQ ID NO: 3541721 - DNA, 25 bp, Homo sapien
aatctgtccaaacgaagagaacatg

SEQ ID NO: 3541722 - DNA, 25 bp, Homo sapien
gatgtcattttcagtgcacttcttg

SEQ ID NO: 3541723 - DNA, 25 bp, Homo sapien
ggtttcatctgtatagggtgatgca

SEQ ID NO: 3541724 - DNA, 25 bp, Homo sapien
gtttcatctgtatagggtgatgcat

SEQ ID NO: 3541725 - DNA, 25 bp, Homo sapien
ccatttactagtgggagctttctta

SEQ ID NO: 3541726 - DNA, 25 bp, Homo sapien
tccatttactagtgggagctttctt

SEQ ID NO: 3541727 - DNA, 25 bp, Homo sapien
catttactagtgggagctttcttac

SEQ ID NO: 3541728 - DNA, 25 bp, Homo sapien
gactttcatgttgtgaagagcattc

SEQ ID NO: 3541729 - DNA, 25 bp, Homo sapien
ctgggaggactttcatgttgtgaag

SEQ ID NO: 3541730 - DNA, 25 bp, Homo sapien
gaggactttcatgttgtgaagagca

SEQ ID NO: 3541731 - DNA, 25 bp, Homo sapien
gtgaagagcattctgagcttctaat

SEQ ID NO: 3541732 - DNA, 25 bp, Homo sapien
gctctgaggcgggttttggctccta

SEQ ID NO: 3541733 - DNA, 25 bp, Homo sapien
tagcatcaagatctggttggtctgg

SEQ ID NO: 3541734 - DNA, 25 bp, Homo sapien
caccatactgttcgaagagttcccg

SEQ ID NO: 3541735 - DNA, 25 bp, Homo sapien
agagttcccgcaagtccttttcaga

SEQ ID NO: 3541736 - DNA, 25 bp, Homo sapien
tgaagatccttaagaatgctgaatc

SEQ ID NO: 3541737 - DNA, 25 bp, Homo sapien
gctgaatctatgaaagtagctcacc

SEQ ID NO: 3541738 - DNA, 25 bp, Homo sapien
tccaccattgctatcttctgaatag

SEQ ID NO: 3541739 - DNA, 25 bp, Homo sapien
cacccagccaatgtgctagttctct

SEQ ID NO: 3541740 - DNA, 25 bp, Homo sapien
taacacctttgaacataatcgggct

SEQ ID NO: 3541741 - DNA, 25 bp, Homo sapien
taattgccacaggattaatacgcct

SEQ ID NO: 3541742 - DNA, 25 bp, Homo sapien
gtatccggttcaaagtaagcactca

SEQ ID NO: 3541743 - DNA, 25 bp, Homo sapien
taaacacactgggtatagtatccgg

SEQ ID NO: 3541744 - DNA, 25 bp, Homo sapien
tcgtctaccttgatttctgctgaaa

SEQ ID NO: 3541745 - DNA, 25 bp, Homo sapien
aaattcaggacaagaggttacttcg

SEQ ID NO: 3541746 - DNA, 25 bp, Homo sapien
agagacacacgagggaacaaaaaag

SEQ ID NO: 3541747 - DNA, 25 bp, Homo sapien
tctgctgccattattaagaatgagc

SEQ ID NO: 3541748 - DNA, 25 bp, Homo sapien
tctgtaagactgagcaatatgtgcc

SEQ ID NO: 3541749 - DNA, 25 bp, Homo sapien
gatactacacactatagggctctgt

SEQ ID NO: 3541750 - DNA, 25 bp, Homo sapien
ccaatactgaggaattttgggccag

SEQ ID NO: 3541751 - DNA, 25 bp, Homo sapien
gaaggctcttgcataaactagtacc

SEQ ID NO: 3541752 - DNA, 25 bp, Homo sapien
gttcctaaaatcacgtgctgagctg

SEQ ID NO: 3541753 - DNA, 25 bp, Homo sapien
taaacacactgactgtagctaccag

SEQ ID NO: 3541754 - DNA, 25 bp, Homo sapien
gaattggagctagcacacttgagct

SEQ ID NO: 3541755 - DNA, 25 bp, Homo sapien
caaggtccaggattgcactttgtat

SEQ ID NO: 3541756 - DNA, 25 bp, Homo sapien
ggaaatccaacttaaacgcagccat

SEQ ID NO: 3541757 - DNA, 25 bp, Homo sapien
gaaggaaatccaacttaaacgcagc

SEQ ID NO: 3541758 - DNA, 25 bp, Homo sapien
aagagcaatgatccaccatcatttc

SEQ ID NO: 3541759 - DNA, 25 bp, Homo sapien
ctggaattcaaagagcaatgatcca

SEQ ID NO: 3541760 - DNA, 25 bp, Homo sapien
caatgatattaacttgctgcacttg

SEQ ID NO: 3541761 - DNA, 25 bp, Homo sapien
ttaacttgctgcacttgtctgatcc

SEQ ID NO: 3541762 - DNA, 25 bp, Homo sapien
cttgctgcacttgtctgatccacaa

SEQ ID NO: 3541763 - DNA, 25 bp, Homo sapien
gatattaacttgctgcacttgtctg

SEQ ID NO: 3541764 - DNA, 25 bp, Homo sapien
tcagggaaaccagcaataagtgcca

SEQ ID NO: 3541765 - DNA, 25 bp, Homo sapien
aaaccaagactagtgagtgcacaca

SEQ ID NO: 3541766 - DNA, 25 bp, Homo sapien
taatggttcctcatctgggtgaaag

SEQ ID NO: 3541767 - DNA, 25 bp, Homo sapien
tggatatacttagcagtcaaggcag

SEQ ID NO: 3541768 - DNA, 25 bp, Homo sapien
cactcattagatggcacagggaaat

SEQ ID NO: 3541769 - DNA, 25 bp, Homo sapien
cacttcacccaagctcagttcacaa

SEQ ID NO: 3541770 - DNA, 25 bp, Homo sapien
cttcacccaagctcagttcacaaca

SEQ ID NO: 3541771 - DNA, 25 bp, Homo sapien
ttcacccaagctcagttcacaacac

SEQ ID NO: 3541772 - DNA, 25 bp, Homo sapien
acttcacccaagctcagttcacaac

SEQ ID NO: 3541773 - DNA, 25 bp, Homo sapien
ctgtagctttacacttccctctctg

SEQ ID NO: 3541774 - DNA, 25 bp, Homo sapien
tccctctctggactatgtcttcact

SEQ ID NO: 3541775 - DNA, 25 bp, Homo sapien
acttccctctctggactatgtcttc

SEQ ID NO: 3541776 - DNA, 25 bp, Homo sapien
tgtagctttacacttccctctctgg

SEQ ID NO: 3541777 - DNA, 25 bp, Homo sapien
taaaccagaggtcgtctcacctgag

SEQ ID NO: 3541778 - DNA, 25 bp, Homo sapien
cagataaaaggatcaagcgggaagc

SEQ ID NO: 3541779 - DNA, 25 bp, Homo sapien
gataaacattttctcgtaagcagcc

SEQ ID NO: 3541780 - DNA, 25 bp, Homo sapien
tagctcaataagtaagttaggcccc

SEQ ID NO: 3541781 - DNA, 25 bp, Homo sapien
aaaatctatgtctgaggatgatggc

SEQ ID NO: 3541782 - DNA, 25 bp, Homo sapien
ggatgatggcttatataaccagaag

SEQ ID NO: 3541783 - DNA, 25 bp, Homo sapien
ggttattctccattcgagtgaacaa

SEQ ID NO: 3541784 - DNA, 25 bp, Homo sapien
ccttgctgctttcagaatgaaggtc

SEQ ID NO: 3541785 - DNA, 25 bp, Homo sapien
tatcaagatagcgtttgggacatgc

SEQ ID NO: 3541786 - DNA, 25 bp, Homo sapien
catgctttaatgtgggcccagtcaa

SEQ ID NO: 3541787 - DNA, 25 bp, Homo sapien
gacaggacaccagagtatgaaagac

SEQ ID NO: 3541788 - DNA, 25 bp, Homo sapien
catatgtgcaatgtgggcgacaaca

SEQ ID NO: 3541789 - DNA, 25 bp, Homo sapien
ctccttagttcaaactactctcctg

SEQ ID NO: 3541790 - DNA, 25 bp, Homo sapien
cgcctccttagttcaaactactctc

SEQ ID NO: 3541791 - DNA, 25 bp, Homo sapien
ctccgcctccttagttcaaactact

SEQ ID NO: 3541792 - DNA, 25 bp, Homo sapien
tccgcctccttagttcaaactactc

SEQ ID NO: 3541793 - DNA, 25 bp, Homo sapien
catagatctagcttagccccagagc

SEQ ID NO: 3541794 - DNA, 25 bp, Homo sapien
tacgcctgatccataatagtttgag

SEQ ID NO: 3541795 - DNA, 25 bp, Homo sapien
tacgtttagggagatgaactgccac

SEQ ID NO: 3541796 - DNA, 25 bp, Homo sapien
tagtttgagccagaaaagtacctgg

SEQ ID NO: 3541797 - DNA, 25 bp, Homo sapien
caccacattcaacaaatttctgtta

SEQ ID NO: 3541798 - DNA, 25 bp, Homo sapien
cacacaccaccacattcaacaaatt

SEQ ID NO: 3541799 - DNA, 25 bp, Homo sapien
cacccgactcagtctcccaatgtgc

SEQ ID NO: 3541800 - DNA, 25 bp, Homo sapien
acaccaccacattcaacaaatttct

SEQ ID NO: 3541801 - DNA, 25 bp, Homo sapien
cccgatctagcatggtaagttagca

SEQ ID NO: 3541802 - DNA, 25 bp, Homo sapien
gagcactcaaaatcaggcaagcagg

SEQ ID NO: 3541803 - DNA, 25 bp, Homo sapien
caaagagccatgatccctgacaaga

SEQ ID NO: 3541804 - DNA, 25 bp, Homo sapien
tgaaggagtcaagacctccagcggc

SEQ ID NO: 3541805 - DNA, 25 bp, Homo sapien
tttgggctacatagcggacccgtgg

SEQ ID NO: 3541806 - DNA, 25 bp, Homo sapien
gaacaacgtcctgtttagcacagca

SEQ ID NO: 3541807 - DNA, 25 bp, Homo sapien
cattactgacccaagagactagtgg

SEQ ID NO: 3541808 - DNA, 25 bp, Homo sapien
tatgtatggcactcctaggcagttc

SEQ ID NO: 3541809 - DNA, 25 bp, Homo sapien
gataatatataaatggccaacaagc

SEQ ID NO: 3541810 - DNA, 25 bp, Homo sapien
tctccaaagataatatataaatggc

SEQ ID NO: 3541811 - DNA, 25 bp, Homo sapien
caaagataatatataaatggccaac

SEQ ID NO: 3541812 - DNA, 25 bp, Homo sapien
ctccaaagataatatataaatggcc

SEQ ID NO: 3541813 - DNA, 25 bp, Homo sapien
actggaacccttgtgtactactggc

SEQ ID NO: 3541814 - DNA, 25 bp, Homo sapien
tgtccaacaggcatagagtttcaga

SEQ ID NO: 3541815 - DNA, 25 bp, Homo sapien
tactggcaagactgtaaaatggtgc

SEQ ID NO: 3541816 - DNA, 25 bp, Homo sapien
ccggtcacacagtacaacatggatg

SEQ ID NO: 3541817 - DNA, 25 bp, Homo sapien
gcatatgaaaaggatgggcaagata

SEQ ID NO: 3541818 - DNA, 25 bp, Homo sapien
cacaaaactgtgactaagataagcc

SEQ ID NO: 3541819 - DNA, 25 bp, Homo sapien
cctattttgggaagataggcatttc

SEQ ID NO: 3541820 - DNA, 25 bp, Homo sapien
tggtggcactatgggtgagtttctt

SEQ ID NO: 3541821 - DNA, 25 bp, Homo sapien
cagctactaggccacgactgggtga

SEQ ID NO: 3541822 - DNA, 25 bp, Homo sapien
ccagaaagacgaggaaaacggagct

SEQ ID NO: 3541823 - DNA, 25 bp, Homo sapien
tggtccctagcgaagaaagcgcttt

SEQ ID NO: 3541824 - DNA, 25 bp, Homo sapien
tcgggaaaagcgctgccttctaggg

SEQ ID NO: 3541825 - DNA, 25 bp, Homo sapien
cagcggctgcacctgagcctgccgc

SEQ ID NO: 3541826 - DNA, 25 bp, Homo sapien
gagcctgccgctgcctcagttgctg

SEQ ID NO: 3541827 - DNA, 25 bp, Homo sapien
gcggctgcacctgagcctgccgctg

SEQ ID NO: 3541828 - DNA, 25 bp, Homo sapien
ctgagcctgccgctgcctcagttgc

SEQ ID NO: 3541829 - DNA, 25 bp, Homo sapien
ctgaggccgaatcccgggggagcct

SEQ ID NO: 3541830 - DNA, 25 bp, Homo sapien
tgaggccgaatcccgggggagcctc

SEQ ID NO: 3541831 - DNA, 25 bp, Homo sapien
actgcaagtgttctgcccgcctctg

SEQ ID NO: 3541832 - DNA, 25 bp, Homo sapien
aggcgcgtgccacgatgcctgacta

SEQ ID NO: 3541833 - DNA, 25 bp, Homo sapien
tcctgactgcaagtgttctgcccgc

SEQ ID NO: 3541834 - DNA, 25 bp, Homo sapien
ctgactgcaagtgttctgcccgcct

SEQ ID NO: 3541835 - DNA, 25 bp, Homo sapien
acctgattgacatactgcactatag

SEQ ID NO: 3541836 - DNA, 25 bp, Homo sapien
gattgacatactgcactatagccca

SEQ ID NO: 3541837 - DNA, 25 bp, Homo sapien
cctgattgacatactgcactatagc

SEQ ID NO: 3541838 - DNA, 25 bp, Homo sapien
tgattgacatactgcactatagccc

SEQ ID NO: 3541839 - DNA, 25 bp, Homo sapien
tgtacatgaatatacaaagaccaca

SEQ ID NO: 3541840 - DNA, 25 bp, Homo sapien
tccactgagacagaaagtcgattcg

SEQ ID NO: 3541841 - DNA, 25 bp, Homo sapien
ttaggagggtgacaaggcatatgca

SEQ ID NO: 3541842 - DNA, 25 bp, Homo sapien
tgtgcaaccctgtgagtatattaac

SEQ ID NO: 3541843 - DNA, 25 bp, Homo sapien
ctgcagcttgggtgacaatagtgaa

SEQ ID NO: 3541844 - DNA, 25 bp, Homo sapien
gcagcttgggtgacaatagtgaaac

SEQ ID NO: 3541845 - DNA, 25 bp, Homo sapien
gcactgcagcttgggtgacaatagt

SEQ ID NO: 3541846 - DNA, 25 bp, Homo sapien
actgcagcttgggtgacaatagtga

SEQ ID NO: 3541847 - DNA, 25 bp, Homo sapien
cgctacagggctcacacgtgtctgg

SEQ ID NO: 3541848 - DNA, 25 bp, Homo sapien
tgcgacgcgctctcccttcgccggg

SEQ ID NO: 3541849 - DNA, 25 bp, Homo sapien
agggaggtcaccggccacaggcggg

SEQ ID NO: 3541850 - DNA, 25 bp, Homo sapien
acgtgtctggcctgcgacgcgctct

SEQ ID NO: 3541851 - DNA, 25 bp, Homo sapien
tactgcacgggcaacaaaggatggg

SEQ ID NO: 3541852 - DNA, 25 bp, Homo sapien
taagcccagacttgacgtaacagaa

SEQ ID NO: 3541853 - DNA, 25 bp, Homo sapien
tggccagctggatgttcttaaagag

SEQ ID NO: 3541854 - DNA, 25 bp, Homo sapien
aagagcttaacaggaccaacagggc

SEQ ID NO: 3541855 - DNA, 25 bp, Homo sapien
tgagcagcagcagtctaaaaagccc

SEQ ID NO: 3541856 - DNA, 25 bp, Homo sapien
aacaggctggcctactgtcagttca

SEQ ID NO: 3541857 - DNA, 25 bp, Homo sapien
tgctctaagcaagctgtggtgaggc

SEQ ID NO: 3541858 - DNA, 25 bp, Homo sapien
cacaggatgactagggaatggcaga

SEQ ID NO: 3541859 - DNA, 25 bp, Homo sapien
tatcggtcccggaagacatagatgc

SEQ ID NO: 3541860 - DNA, 25 bp, Homo sapien
tatatggcatctttcccgggcacag

SEQ ID NO: 3541861 - DNA, 25 bp, Homo sapien
caagcttgtaggtgttggcatcccc

SEQ ID NO: 3541862 - DNA, 25 bp, Homo sapien
tagcaagggattgtagcacaccagg

SEQ ID NO: 3541863 - DNA, 25 bp, Homo sapien
taaagttgatccaggcttctattgc

SEQ ID NO: 3541864 - DNA, 25 bp, Homo sapien
gggttctgagaacacggaactccat

SEQ ID NO: 3541865 - DNA, 25 bp, Homo sapien
tgagtgactctgcaaaagcctctct

SEQ ID NO: 3541866 - DNA, 25 bp, Homo sapien
cttcaagcttgtcctgagtgactct

SEQ ID NO: 3541867 - DNA, 25 bp, Homo sapien
gaaaggcatggtcaatgacaatccg

SEQ ID NO: 3541868 - DNA, 25 bp, Homo sapien
caatgacaatccgaaagagaaattc

SEQ ID NO: 3541869 - DNA, 25 bp, Homo sapien
ggcatggtcaatgacaatccgaaag

SEQ ID NO: 3541870 - DNA, 25 bp, Homo sapien
agaggaaaggcatggtcaatgacaa

SEQ ID NO: 3541871 - DNA, 25 bp, Homo sapien
gtaaagactcataaccgttcctctc

SEQ ID NO: 3541872 - DNA, 25 bp, Homo sapien
tgtgcgggccaaaaaccgagagcat

SEQ ID NO: 3541873 - DNA, 25 bp, Homo sapien
tcgaagtttcacagtcccatggtag

SEQ ID NO: 3541874 - DNA, 25 bp, Homo sapien
tttcatgatgccttgagccacacgg

SEQ ID NO: 3541875 - DNA, 25 bp, Homo sapien
gaacatggatcggaagaagcagctc

SEQ ID NO: 3541876 - DNA, 25 bp, Homo sapien
gctagccaacttctctctctgccag

SEQ ID NO: 3541877 - DNA, 25 bp, Homo sapien
gcaaagcaacaccatcttgagtaac

SEQ ID NO: 3541878 - DNA, 25 bp, Homo sapien
tgcaaagcaacaccatcttgagtaa

SEQ ID NO: 3541879 - DNA, 25 bp, Homo sapien
ctgcaaagcaacaccatcttgagta

SEQ ID NO: 3541880 - DNA, 25 bp, Homo sapien
ggcataaaactagtgaagctcaggg

SEQ ID NO: 3541881 - DNA, 25 bp, Homo sapien
ttcccagcgcatggagttaagacgc

SEQ ID NO: 3541882 - DNA, 25 bp, Homo sapien
gcaaagtgggtccagattggcctta

SEQ ID NO: 3541883 - DNA, 25 bp, Homo sapien
ggcgcccctccgctaatgatataaa

SEQ ID NO: 3541884 - DNA, 25 bp, Homo sapien
agtcccttccctacgactgtggaaa

SEQ ID NO: 3541885 - DNA, 25 bp, Homo sapien
tttccacagtcgtagggaagggact

SEQ ID NO: 3541886 - DNA, 25 bp, Homo sapien
tcgctcgaaagactccctatggctg

SEQ ID NO: 3541887 - DNA, 25 bp, Homo sapien
acacttccccgctcgctcgaaagac

SEQ ID NO: 3541888 - DNA, 25 bp, Homo sapien
actccctatggctgcgtcccagaac

SEQ ID NO: 3541889 - DNA, 25 bp, Homo sapien
catcaccctgtgcaatgtccccgct

SEQ ID NO: 3541890 - DNA, 25 bp, Homo sapien
cccgcccgccctcgtcaaaagcttg

SEQ ID NO: 3541891 - DNA, 25 bp, Homo sapien
gcccgccctcgtcaaaagcttggct

SEQ ID NO: 3541892 - DNA, 25 bp, Homo sapien
gccctcgtcaaaagcttggctcaga

SEQ ID NO: 3541893 - DNA, 25 bp, Homo sapien
ccgccctcgtcaaaagcttggctca

SEQ ID NO: 3541894 - DNA, 25 bp, Homo sapien
ttcagcgtcctcgccttctctctag

SEQ ID NO: 3541895 - DNA, 25 bp, Homo sapien
aggagctaggaccacgctcacctca

SEQ ID NO: 3541896 - DNA, 25 bp, Homo sapien
taggaccacgctcacctcacgattt

SEQ ID NO: 3541897 - DNA, 25 bp, Homo sapien
acgatttccctacctgcctgtctcg

SEQ ID NO: 3541898 - DNA, 25 bp, Homo sapien
tgcacacttccgtttccggtccgtg

SEQ ID NO: 3541899 - DNA, 25 bp, Homo sapien
tgtcctgctgtctttccgtccgctg

SEQ ID NO: 3541900 - DNA, 25 bp, Homo sapien
ctagtctgcatctgagtaacatggc

SEQ ID NO: 3541901 - DNA, 25 bp, Homo sapien
tgcgttccctcctttcatcccggag

SEQ ID NO: 3541902 - DNA, 25 bp, Homo sapien
gcatgtggatcctagacagcgcctt

SEQ ID NO: 3541903 - DNA, 25 bp, Homo sapien
caaatttgacctgaacagcccctgg

SEQ ID NO: 3541904 - DNA, 25 bp, Homo sapien
gaagcctgatgccaagtagctccag

SEQ ID NO: 3541905 - DNA, 25 bp, Homo sapien
ggaggctttcccagtctatcgccaa

SEQ ID NO: 3541906 - DNA, 25 bp, Homo sapien
caccgcgccaggctggtgggggttt

SEQ ID NO: 3541907 - DNA, 25 bp, Homo sapien
acctaggctagagtgagtacagcag

SEQ ID NO: 3541908 - DNA, 25 bp, Homo sapien
acagcagtgtgatcgtggttcactg

SEQ ID NO: 3541909 - DNA, 25 bp, Homo sapien
tacagcagtgtgatcgtggttcact

SEQ ID NO: 3541910 - DNA, 25 bp, Homo sapien
ggacagcaccagcgtgggaggtggc

SEQ ID NO: 3541911 - DNA, 25 bp, Homo sapien
catggacagcaccagcgtgggaggt

SEQ ID NO: 3541912 - DNA, 25 bp, Homo sapien
tggacagcaccagcgtgggaggtgg

SEQ ID NO: 3541913 - DNA, 25 bp, Homo sapien
atggacagcaccagcgtgggaggtg

SEQ ID NO: 3541914 - DNA, 25 bp, Homo sapien
cagaggccccggaagtgatgtttga

SEQ ID NO: 3541915 - DNA, 25 bp, Homo sapien
ccccggaagtgatgtttgaggtctt

SEQ ID NO: 3541916 - DNA, 25 bp, Homo sapien
aggccccggaagtgatgtttgaggt

SEQ ID NO: 3541917 - DNA, 25 bp, Homo sapien
aagtgatgtttgaggtctttcctcc

SEQ ID NO: 3541918 - DNA, 25 bp, Homo sapien
cacgcagctagtgaggctgaggaac

SEQ ID NO: 3541919 - DNA, 25 bp, Homo sapien
tcacaggcctgtcctgcgtctaccg

SEQ ID NO: 3541920 - DNA, 25 bp, Homo sapien
cacttgggactttgaacatctgctc

SEQ ID NO: 3541921 - DNA, 25 bp, Homo sapien
gggcctcctcttagcacttgggact

SEQ ID NO: 3541922 - DNA, 25 bp, Homo sapien
taatggggtgctgttccttgtcaca

SEQ ID NO: 3541923 - DNA, 25 bp, Homo sapien
tcattcccacgccctgctggaagaa

SEQ ID NO: 3541924 - DNA, 25 bp, Homo sapien
gctaaggctgaggtcgtaggtcaat

SEQ ID NO: 3541925 - DNA, 25 bp, Homo sapien
gaatgcactgtttccttgaatccca

SEQ ID NO: 3541926 - DNA, 25 bp, Homo sapien
tgcgcgtgcccgctttccgctttat

SEQ ID NO: 3541927 - DNA, 25 bp, Homo sapien
ttccgctttattggcagagtccagg

SEQ ID NO: 3541928 - DNA, 25 bp, Homo sapien
aggcgcgcccggaggccgtggcgct

SEQ ID NO: 3541929 - DNA, 25 bp, Homo sapien
tcgcgcgggactttcgagcctccgg

SEQ ID NO: 3541930 - DNA, 25 bp, Homo sapien
acagtagctccgaggccccgaggcc

SEQ ID NO: 3541931 - DNA, 25 bp, Homo sapien
agctccgaggccccgaggcccggcg

SEQ ID NO: 3541932 - DNA, 25 bp, Homo sapien
cagtagctccgaggccccgaggccc

SEQ ID NO: 3541933 - DNA, 25 bp, Homo sapien
agtagctccgaggccccgaggcccg

SEQ ID NO: 3541934 - DNA, 25 bp, Homo sapien
cgaagtcgccgccaatgttgacgaa

SEQ ID NO: 3541935 - DNA, 25 bp, Homo sapien
tcgtcgcggttcttcatcagcttaa

SEQ ID NO: 3541936 - DNA, 25 bp, Homo sapien
tcgtcgtaaatcatggcctgcacct

SEQ ID NO: 3541937 - DNA, 25 bp, Homo sapien
taaccgacagcgtcttacgcggcag

SEQ ID NO: 3541938 - DNA, 25 bp, Homo sapien
gcgagtggttggtgccgcggcccgg

SEQ ID NO: 3541939 - DNA, 25 bp, Homo sapien
aaggcgagtggttggtgccgcggcc

SEQ ID NO: 3541940 - DNA, 25 bp, Homo sapien
tgtcgaaggcgagtggttggtgccg

SEQ ID NO: 3541941 - DNA, 25 bp, Homo sapien
ctcggtgtcgaaggcgagtggttgg

SEQ ID NO: 3541942 - DNA, 25 bp, Homo sapien
cgtagactaggtagccgctgaaggt

SEQ ID NO: 3541943 - DNA, 25 bp, Homo sapien
tcagcgtcggcgtcggcgtagacta

SEQ ID NO: 3541944 - DNA, 25 bp, Homo sapien
tgaaggtggcgccgggcgcgcctag

SEQ ID NO: 3541945 - DNA, 25 bp, Homo sapien
cgcgcaggcgcgtcagcgtcggcgt

SEQ ID NO: 3541946 - DNA, 25 bp, Homo sapien
cactgtgtcgccgtagtcgagctgc

SEQ ID NO: 3541947 - DNA, 25 bp, Homo sapien
cgtagtcgagctgcagcatggcgct

SEQ ID NO: 3541948 - DNA, 25 bp, Homo sapien
tcgccgtagtcgagctgcagcatgg

SEQ ID NO: 3541949 - DNA, 25 bp, Homo sapien
cagccacactgtgtcgccgtagtcg

SEQ ID NO: 3541950 - DNA, 25 bp, Homo sapien
gaaactggccggtggccacatcgaa

SEQ ID NO: 3541951 - DNA, 25 bp, Homo sapien
cgatgttcacgtacaccttgtcgaa

SEQ ID NO: 3541952 - DNA, 25 bp, Homo sapien
aaggccgagcgcagctcagaggatc

SEQ ID NO: 3541953 - DNA, 25 bp, Homo sapien
gcatcaccgacaggctcttgtgcgg

SEQ ID NO: 3541954 - DNA, 25 bp, Homo sapien
cggtcgagtcgggttcggtctgagc

SEQ ID NO: 3541955 - DNA, 25 bp, Homo sapien
gctgcgcgctgaccgcccgcgctgc

SEQ ID NO: 3541956 - DNA, 25 bp, Homo sapien
tgagcccgcgatctggctccgggct

SEQ ID NO: 3541957 - DNA, 25 bp, Homo sapien
tcgggttcggtctgagcccgcgatc

SEQ ID NO: 3541958 - DNA, 25 bp, Homo sapien
ctcatgaaaaggaggagttacgtta

SEQ ID NO: 3541959 - DNA, 25 bp, Homo sapien
aagctgggagtgcttgtgaagacca

SEQ ID NO: 3541960 - DNA, 25 bp, Homo sapien
gcattttcaaatgcgacagtgtcat

SEQ ID NO: 3541961 - DNA, 25 bp, Homo sapien
cctgctcatgacctgatgtgacaaa

SEQ ID NO: 3541962 - DNA, 25 bp, Homo sapien
attgctttgtctgtgttcaccccag

SEQ ID NO: 3541963 - DNA, 25 bp, Homo sapien
tgtagtgcctgccagagtgtaggtc

SEQ ID NO: 3541964 - DNA, 25 bp, Homo sapien
aaacataatctacaacccagttgag

SEQ ID NO: 3541965 - DNA, 25 bp, Homo sapien
cctgagtgactggtgagacaacttg

SEQ ID NO: 3541966 - DNA, 25 bp, Homo sapien
tgtttttcagatacatgcccacttg

SEQ ID NO: 3541967 - DNA, 25 bp, Homo sapien
tagtaggagggtaaaatgacacaat

SEQ ID NO: 3541968 - DNA, 25 bp, Homo sapien
tgacacaattggacagtatctacca

SEQ ID NO: 3541969 - DNA, 25 bp, Homo sapien
aatgtgcatgccctttaagtcagtg

SEQ ID NO: 3541970 - DNA, 25 bp, Homo sapien
aataatctacatgtccggcaaaagg

SEQ ID NO: 3541971 - DNA, 25 bp, Homo sapien
agcagttgctgttaatatgtctccc

SEQ ID NO: 3541972 - DNA, 25 bp, Homo sapien
tatacagtagaatacgatgcatccc

SEQ ID NO: 3541973 - DNA, 25 bp, Homo sapien
taaaaaacaaggtgcacaacatacc

SEQ ID NO: 3541974 - DNA, 25 bp, Homo sapien
tgaccagggtctaggagcacagaac

SEQ ID NO: 3541975 - DNA, 25 bp, Homo sapien
tgcagcaatcggataaccaactggg

SEQ ID NO: 3541976 - DNA, 25 bp, Homo sapien
aacaaggaacactatgtatggccca

SEQ ID NO: 3541977 - DNA, 25 bp, Homo sapien
ggtgttctcaagcaaggtgttctca

SEQ ID NO: 3541978 - DNA, 25 bp, Homo sapien
gcacagggattttcagcaaatgcga

SEQ ID NO: 3541979 - DNA, 25 bp, Homo sapien
aaggtccctggatcttatctgcaaa

SEQ ID NO: 3541980 - DNA, 25 bp, Homo sapien
ttttcgccgcagctttcatagccac

SEQ ID NO: 3541981 - DNA, 25 bp, Homo sapien
tcatccccagatggaaccctgtctt

SEQ ID NO: 3541982 - DNA, 25 bp, Homo sapien
tcctcctgcacaaggcttccgtgga

SEQ ID NO: 3541983 - DNA, 25 bp, Homo sapien
ctgccagtgcggcacaaatgtacag

SEQ ID NO: 3541984 - DNA, 25 bp, Homo sapien
gccagtgcggcacaaatgtacagag

SEQ ID NO: 3541985 - DNA, 25 bp, Homo sapien
aaggcttccgtggaagacaacagac

SEQ ID NO: 3541986 - DNA, 25 bp, Homo sapien
tagttgcaatactgctgcacttaga

SEQ ID NO: 3541987 - DNA, 25 bp, Homo sapien
tgcaatactgctgcacttagaccag

SEQ ID NO: 3541988 - DNA, 25 bp, Homo sapien
caactagttgcaatactgctgcact

SEQ ID NO: 3541989 - DNA, 25 bp, Homo sapien
caatactgctgcacttagaccagcc

SEQ ID NO: 3541990 - DNA, 25 bp, Homo sapien
caagtggcttactagagaaccccta

SEQ ID NO: 3541991 - DNA, 25 bp, Homo sapien
cagtttgtggcaacttagcttggta

SEQ ID NO: 3541992 - DNA, 25 bp, Homo sapien
tcaaggtttcaatggtcaccacata

SEQ ID NO: 3541993 - DNA, 25 bp, Homo sapien
tcaccacatactctagaggaacagt

SEQ ID NO: 3541994 - DNA, 25 bp, Homo sapien
caaagacattttaagccgagctcct

SEQ ID NO: 3541995 - DNA, 25 bp, Homo sapien
taacctgctttttagaaggcctgag

SEQ ID NO: 3541996 - DNA, 25 bp, Homo sapien
ggcaatgtcccagtgagttatataa

SEQ ID NO: 3541997 - DNA, 25 bp, Homo sapien
gtctcagaagcagcgaattaagtgc

SEQ ID NO: 3541998 - DNA, 25 bp, Homo sapien
tgaactagagtaggctcagaggctc

SEQ ID NO: 3541999 - DNA, 25 bp, Homo sapien
tactttgcaataacagactgaaggg

SEQ ID NO: 3542000 - DNA, 25 bp, Homo sapien
tcgacttgggttggcattaccagac

SEQ ID NO: 3542001 - DNA, 25 bp, Homo sapien
tgtcctaagacccatgtcgacttgg

SEQ ID NO: 3542002 - DNA, 25 bp, Homo sapien
gcgcgccacactgtatagaaatcaa

SEQ ID NO: 3542003 - DNA, 25 bp, Homo sapien
aaggcagacaccaaacacctgaatt

SEQ ID NO: 3542004 - DNA, 25 bp, Homo sapien
gacaaagtgcctgtagcttcaggaa

SEQ ID NO: 3542005 - DNA, 25 bp, Homo sapien
tatcagtggtaagttatgttgtgct

SEQ ID NO: 3542006 - DNA, 25 bp, Homo sapien
aggtcacaacaataagtcttcccaa

SEQ ID NO: 3542007 - DNA, 25 bp, Homo sapien
acattttcaggtcacaacaataagt

SEQ ID NO: 3542008 - DNA, 25 bp, Homo sapien
tttcaggtcacaacaataagtcttc

SEQ ID NO: 3542009 - DNA, 25 bp, Homo sapien
taagctatttcctcggctcatattc

SEQ ID NO: 3542010 - DNA, 25 bp, Homo sapien
gaaaggctgagctactatgaactaa

SEQ ID NO: 3542011 - DNA, 25 bp, Homo sapien
gactaaatctaggacaaaactggga

SEQ ID NO: 3542012 - DNA, 25 bp, Homo sapien
cagcagagaggtccaattgggagac

SEQ ID NO: 3542013 - DNA, 25 bp, Homo sapien
gggactatcactacagaacaaggat

SEQ ID NO: 3542014 - DNA, 25 bp, Homo sapien
tgcaccaacagtctatccaagacgt

SEQ ID NO: 3542015 - DNA, 25 bp, Homo sapien
tttttgtagcatgcaccaacagtct

SEQ ID NO: 3542016 - DNA, 25 bp, Homo sapien
gtctatccaagacgtatatattggg

SEQ ID NO: 3542017 - DNA, 25 bp, Homo sapien
tgtagcatgcaccaacagtctatcc

SEQ ID NO: 3542018 - DNA, 25 bp, Homo sapien
gaatttggaaatcaatggagtctac

SEQ ID NO: 3542019 - DNA, 25 bp, Homo sapien
catcaaactttccatagactaaata

SEQ ID NO: 3542020 - DNA, 25 bp, Homo sapien
gactaaatatcctaattctggttct

SEQ ID NO: 3542021 - DNA, 25 bp, Homo sapien
atcaatggagtctaccactatacca

SEQ ID NO: 3542022 - DNA, 25 bp, Homo sapien
gcacaaagggataggtcaacatact

SEQ ID NO: 3542023 - DNA, 25 bp, Homo sapien
gagtctgtggttccttcgaaaactg

SEQ ID NO: 3542024 - DNA, 25 bp, Homo sapien
gaaagctaagcagtaccaaaccatg

SEQ ID NO: 3542025 - DNA, 25 bp, Homo sapien
ggaggaaaggcacgccccttatgaa

SEQ ID NO: 3542026 - DNA, 25 bp, Homo sapien
gccttactctctttattttcacatg

SEQ ID NO: 3542027 - DNA, 25 bp, Homo sapien
gggagatgtcccagtgagacatctg

SEQ ID NO: 3542028 - DNA, 25 bp, Homo sapien
gatgtcccagtgagacatctggtta

SEQ ID NO: 3542029 - DNA, 25 bp, Homo sapien
tataacaaatttcagggagatgtcc

SEQ ID NO: 3542030 - DNA, 25 bp, Homo sapien
tcagggagatgtcccagtgagacat

SEQ ID NO: 3542031 - DNA, 25 bp, Homo sapien
ttaaagcagtgatgacacaagccag

SEQ ID NO: 3542032 - DNA, 25 bp, Homo sapien
tgacagcttgagaataactcttcat

SEQ ID NO: 3542033 - DNA, 25 bp, Homo sapien
tcctgtgacagcttgagaataactc

SEQ ID NO: 3542034 - DNA, 25 bp, Homo sapien
cctgtgacagcttgagaataactct

SEQ ID NO: 3542035 - DNA, 25 bp, Homo sapien
tgtgacagcttgagaataactcttc

SEQ ID NO: 3542036 - DNA, 25 bp, Homo sapien
gagctgtgatctcacaaccttgacc

SEQ ID NO: 3542037 - DNA, 25 bp, Homo sapien
tatatctaagggacaattcactacc

SEQ ID NO: 3542038 - DNA, 25 bp, Homo sapien
gctagctttctaccagatgcgttga

SEQ ID NO: 3542039 - DNA, 25 bp, Homo sapien
tattagaataataaggcagtggtca

SEQ ID NO: 3542040 - DNA, 25 bp, Homo sapien
ctttaaaagctaatctagctgccag

SEQ ID NO: 3542041 - DNA, 25 bp, Homo sapien
tgccagattaaagccaaggtgagca

SEQ ID NO: 3542042 - DNA, 25 bp, Homo sapien
caaggtgagcacatctcacgaaggt

SEQ ID NO: 3542043 - DNA, 25 bp, Homo sapien
gcacatctcacgaaggtcacaacct

SEQ ID NO: 3542044 - DNA, 25 bp, Homo sapien
taggccagtgagttacacagccaca

SEQ ID NO: 3542045 - DNA, 25 bp, Homo sapien
cataggtattgacgaggtaggccag

SEQ ID NO: 3542046 - DNA, 25 bp, Homo sapien
ccactgtccagtgcataggtattga

SEQ ID NO: 3542047 - DNA, 25 bp, Homo sapien
gtgagttacacagccacaaagaaag

SEQ ID NO: 3542048 - DNA, 25 bp, Homo sapien
aggtcacaaaacattctagggaagt

SEQ ID NO: 3542049 - DNA, 25 bp, Homo sapien
gaatcaaacaccagaatccagcccg

SEQ ID NO: 3542050 - DNA, 25 bp, Homo sapien
taacatgacaggctcttcagtacaa

SEQ ID NO: 3542051 - DNA, 25 bp, Homo sapien
tgacaggctcttcagtacaaatgtt

SEQ ID NO: 3542052 - DNA, 25 bp, Homo sapien
agttcattctcgttaacacagctgt

SEQ ID NO: 3542053 - DNA, 25 bp, Homo sapien
gttcattctcgttaacacagctgta

SEQ ID NO: 3542054 - DNA, 25 bp, Homo sapien
ttcattctcgttaacacagctgtac

SEQ ID NO: 3542055 - DNA, 25 bp, Homo sapien
cattctcgttaacacagctgtactt

SEQ ID NO: 3542056 - DNA, 25 bp, Homo sapien
ctcagcagcgatgtgacaggcagca

SEQ ID NO: 3542057 - DNA, 25 bp, Homo sapien
ttacaaagcaagaatggtcccaagt

SEQ ID NO: 3542058 - DNA, 25 bp, Homo sapien
taaaatgcaggtcggctataccctc

SEQ ID NO: 3542059 - DNA, 25 bp, Homo sapien
tttccccacggattgaagaccagct

SEQ ID NO: 3542060 - DNA, 25 bp, Homo sapien
tgccctcttcccgatagatggttat

SEQ ID NO: 3542061 - DNA, 25 bp, Homo sapien
gatagatggttattatggaatcaca

SEQ ID NO: 3542062 - DNA, 25 bp, Homo sapien
gaatgccctcttcccgatagatggt

SEQ ID NO: 3542063 - DNA, 25 bp, Homo sapien
tcttcccgatagatggttattatgg

SEQ ID NO: 3542064 - DNA, 25 bp, Homo sapien
tgttttttgtgcagatcaaatgaca

SEQ ID NO: 3542065 - DNA, 25 bp, Homo sapien
acctgcctgggtatattttctccca

SEQ ID NO: 3542066 - DNA, 25 bp, Homo sapien
catcagatacgaatttgttctacaa

SEQ ID NO: 3542067 - DNA, 25 bp, Homo sapien
attgtaagggtatcataaaaataca

SEQ ID NO: 3542068 - DNA, 25 bp, Homo sapien
cagtacttggattctctgccaatga

SEQ ID NO: 3542069 - DNA, 25 bp, Homo sapien
acttggattctctgccaatgaactg

SEQ ID NO: 3542070 - DNA, 25 bp, Homo sapien
tctctgccaatgaactgtaccatag

SEQ ID NO: 3542071 - DNA, 25 bp, Homo sapien
gaactgtaccatagatctcagagtg

SEQ ID NO: 3542072 - DNA, 25 bp, Homo sapien
tacaactatgttaaggccaggtgcg

SEQ ID NO: 3542073 - DNA, 25 bp, Homo sapien
aaagatgtttacaactatgttaagg

SEQ ID NO: 3542074 - DNA, 25 bp, Homo sapien
ctgtggaatatagagaaaagatgtt

SEQ ID NO: 3542075 - DNA, 25 bp, Homo sapien
gatgtttacaactatgttaaggcca

SEQ ID NO: 3542076 - DNA, 25 bp, Homo sapien
taagatagattttgatagccctggg

SEQ ID NO: 3542077 - DNA, 25 bp, Homo sapien
tgttaagatagattttgatagccct

SEQ ID NO: 3542078 - DNA, 25 bp, Homo sapien
tatgttaagatagattttgatagcc

SEQ ID NO: 3542079 - DNA, 25 bp, Homo sapien
agatagattttgatagccctgggaa

SEQ ID NO: 3542080 - DNA, 25 bp, Homo sapien
atgagggtagcagcagaacgagcga

SEQ ID NO: 3542081 - DNA, 25 bp, Homo sapien
tagcagcagaacgagcgatcatctc

SEQ ID NO: 3542082 - DNA, 25 bp, Homo sapien
gcagaacgagcgatcatctctcgag

SEQ ID NO: 3542083 - DNA, 25 bp, Homo sapien
gaacgagcgatcatctctcgagttg

SEQ ID NO: 3542084 - DNA, 25 bp, Homo sapien
tggatgggcaaactaaggaaaatac

SEQ ID NO: 3542085 - DNA, 25 bp, Homo sapien
ccggcctagtcactgagttttaaga

SEQ ID NO: 3542086 - DNA, 25 bp, Homo sapien
cttctccaagggcataagatcctat

SEQ ID NO: 3542087 - DNA, 25 bp, Homo sapien
gcatagtaatacatgtatccctgct

SEQ ID NO: 3542088 - DNA, 25 bp, Homo sapien
ctccttgataacgtggtcaaaggaa

SEQ ID NO: 3542089 - DNA, 25 bp, Homo sapien
ctggaaatcaaaatcaaagaaaata

SEQ ID NO: 3542090 - DNA, 25 bp, Homo sapien
aatcaaaatcaaagaaaatagagat

SEQ ID NO: 3542091 - DNA, 25 bp, Homo sapien
gaaatcaaaatcaaagaaaatagag

SEQ ID NO: 3542092 - DNA, 25 bp, Homo sapien
tggaaatcaaaatcaaagaaaatag

SEQ ID NO: 3542093 - DNA, 25 bp, Homo sapien
tcacccttgtcactctcctggtaat

SEQ ID NO: 3542094 - DNA, 25 bp, Homo sapien
ctcacccttgtcactctcctggtaa

SEQ ID NO: 3542095 - DNA, 25 bp, Homo sapien
cacccttgtcactctcctggtaatg

SEQ ID NO: 3542096 - DNA, 25 bp, Homo sapien
tattggtcagttggaagaaaagcaa

SEQ ID NO: 3542097 - DNA, 25 bp, Homo sapien
gctgcaaatcttcagttaacttcta

SEQ ID NO: 3542098 - DNA, 25 bp, Homo sapien
taatcaactggaaatatggatctcc

SEQ ID NO: 3542099 - DNA, 25 bp, Homo sapien
cattggggcgcacgcttttaatccc

SEQ ID NO: 3542100 - DNA, 25 bp, Homo sapien
agttaagcctgtgaacaacccgcgc

SEQ ID NO: 3542101 - DNA, 25 bp, Homo sapien
gttccaaggactcccgaacacagtc

SEQ ID NO: 3542102 - DNA, 25 bp, Homo sapien
tttaccatggaccacagttccaagg

SEQ ID NO: 3542103 - DNA, 25 bp, Homo sapien
tcccatcgatactggcaatgtgctg

SEQ ID NO: 3542104 - DNA, 25 bp, Homo sapien
gacacacttgccgcccaaaaatatt

SEQ ID NO: 3542105 - DNA, 25 bp, Homo sapien
tgacacacttgccgcccaaaaatat

SEQ ID NO: 3542106 - DNA, 25 bp, Homo sapien
cacacttgccgcccaaaaatatttc

SEQ ID NO: 3542107 - DNA, 25 bp, Homo sapien
cacttgccgcccaaaaatatttcgt

SEQ ID NO: 3542108 - DNA, 25 bp, Homo sapien
ttgttggaggaagaggctcatatcc

SEQ ID NO: 3542109 - DNA, 25 bp, Homo sapien
gttggaggaagaggctcatatccca

SEQ ID NO: 3542110 - DNA, 25 bp, Homo sapien
ctattgttggaggaagaggctcata

SEQ ID NO: 3542111 - DNA, 25 bp, Homo sapien
tattgttggaggaagaggctcatat

SEQ ID NO: 3542112 - DNA, 25 bp, Homo sapien
tatctggtgcgaaaacctcggaaca

SEQ ID NO: 3542113 - DNA, 25 bp, Homo sapien
tgctggaaagcgctcaatgcatcct

SEQ ID NO: 3542114 - DNA, 25 bp, Homo sapien
gaatgacctgcccattacagggata

SEQ ID NO: 3542115 - DNA, 25 bp, Homo sapien
acttacttggcctacctgcatgtga

SEQ ID NO: 3542116 - DNA, 25 bp, Homo sapien
cctcagtgacgaagaaccaaagttc

SEQ ID NO: 3542117 - DNA, 25 bp, Homo sapien
aaagttcagaggatccgccgggcag

SEQ ID NO: 3542118 - DNA, 25 bp, Homo sapien
tcaactgagtatttcgtgttttgcg

SEQ ID NO: 3542119 - DNA, 25 bp, Homo sapien
cctttggtggcgaccggccaggatc

SEQ ID NO: 3542120 - DNA, 25 bp, Homo sapien
caggagcacctgactggccgcgtcc

SEQ ID NO: 3542121 - DNA, 25 bp, Homo sapien
tggtgagaccggagcccaggagcac

SEQ ID NO: 3542122 - DNA, 25 bp, Homo sapien
gcacctgactggccgcgtccgccat

SEQ ID NO: 3542123 - DNA, 25 bp, Homo sapien
gagcacctgactggccgcgtccgcc

SEQ ID NO: 3542124 - DNA, 25 bp, Homo sapien
gacagacagacggagccaccaagcg

SEQ ID NO: 3542125 - DNA, 25 bp, Homo sapien
cacccgcgggcggacggacagacag

SEQ ID NO: 3542126 - DNA, 25 bp, Homo sapien
cggagccaccaagcgacccggtgag

SEQ ID NO: 3542127 - DNA, 25 bp, Homo sapien
gtgagccggtcctaggtcacgtgcc

SEQ ID NO: 3542128 - DNA, 25 bp, Homo sapien
ccacaatattttccaatggtgtgag

SEQ ID NO: 3542129 - DNA, 25 bp, Homo sapien
gtctgctccacaatattttccaatg

SEQ ID NO: 3542130 - DNA, 25 bp, Homo sapien
tcagtctgctccacaatattttcca

SEQ ID NO: 3542131 - DNA, 25 bp, Homo sapien
tattttccaatggtgtgaggcagaa

SEQ ID NO: 3542132 - DNA, 25 bp, Homo sapien
attactttcctatctttgttcgcta

SEQ ID NO: 3542133 - DNA, 25 bp, Homo sapien
ctttcctatctttgttcgctagaga

SEQ ID NO: 3542134 - DNA, 25 bp, Homo sapien
ttcaacattactttcctatctttgt

SEQ ID NO: 3542135 - DNA, 25 bp, Homo sapien
tcctatctttgttcgctagagaagt

SEQ ID NO: 3542136 - DNA, 25 bp, Homo sapien
ctggcctgcatgttctttctttaaa

SEQ ID NO: 3542137 - DNA, 25 bp, Homo sapien
acggtgcctggcctgcatgttcttt

SEQ ID NO: 3542138 - DNA, 25 bp, Homo sapien
tgcctggcctgcatgttctttcttt

SEQ ID NO: 3542139 - DNA, 25 bp, Homo sapien
cggtgcctggcctgcatgttctttc

SEQ ID NO: 3542140 - DNA, 25 bp, Homo sapien
taggactgaccgtcactagaaagct

SEQ ID NO: 3542141 - DNA, 25 bp, Homo sapien
taaaatgaggtatatctgtgctgcc

SEQ ID NO: 3542142 - DNA, 25 bp, Homo sapien
cacaagtaaatgcagttcccagtca

SEQ ID NO: 3542143 - DNA, 25 bp, Homo sapien
tcatgaggtatgcatcttgaccaca

SEQ ID NO: 3542144 - DNA, 25 bp, Homo sapien
caaggatgggtatgccgccatggca

SEQ ID NO: 3542145 - DNA, 25 bp, Homo sapien
catgatactgtaaagcctggcttct

SEQ ID NO: 3542146 - DNA, 25 bp, Homo sapien
ggttctctttggagagcatgatact

SEQ ID NO: 3542147 - DNA, 25 bp, Homo sapien
ctctctttgtggcaggatatctgct

SEQ ID NO: 3542148 - DNA, 25 bp, Homo sapien
aggatcttgtcttcatgtcttttaa

SEQ ID NO: 3542149 - DNA, 25 bp, Homo sapien
agaggatcttgtcttcatgtctttt

SEQ ID NO: 3542150 - DNA, 25 bp, Homo sapien
gaggatcttgtcttcatgtctttta

SEQ ID NO: 3542151 - DNA, 25 bp, Homo sapien
cctttattcttaggcagaatcaggg

SEQ ID NO: 3542152 - DNA, 25 bp, Homo sapien
atcagggtggccattgatgggtcca

SEQ ID NO: 3542153 - DNA, 25 bp, Homo sapien
attcttaggcagaatcagggtggcc

SEQ ID NO: 3542154 - DNA, 25 bp, Homo sapien
ctgcattctccctttattcttaggc

SEQ ID NO: 3542155 - DNA, 25 bp, Homo sapien
gacttcagtcatgtctaatccaaag

SEQ ID NO: 3542156 - DNA, 25 bp, Homo sapien
tgaatggatggtaagtaaggcagcc

SEQ ID NO: 3542157 - DNA, 25 bp, Homo sapien
cgagaggttagagaatctgtgtgac

SEQ ID NO: 3542158 - DNA, 25 bp, Homo sapien
cattgtgggagagaggtgctaattc

SEQ ID NO: 3542159 - DNA, 25 bp, Homo sapien
gcttttgcagagtagaagcaaatcc

SEQ ID NO: 3542160 - DNA, 25 bp, Homo sapien
tgcagagtagaagcaaatcctgcct

SEQ ID NO: 3542161 - DNA, 25 bp, Homo sapien
ggctgcttttgcagagtagaagcaa

SEQ ID NO: 3542162 - DNA, 25 bp, Homo sapien
gcagagtagaagcaaatcctgcctt

SEQ ID NO: 3542163 - DNA, 25 bp, Homo sapien
atccaatttacccaacagcaaaact

SEQ ID NO: 3542164 - DNA, 25 bp, Homo sapien
gatccaatttacccaacagcaaaac

SEQ ID NO: 3542165 - DNA, 25 bp, Homo sapien
caatttacccaacagcaaaacttgt

SEQ ID NO: 3542166 - DNA, 25 bp, Homo sapien
ccaatttacccaacagcaaaacttg

SEQ ID NO: 3542167 - DNA, 25 bp, Homo sapien
tactgctcatttcgctgtttcctag

SEQ ID NO: 3542168 - DNA, 25 bp, Homo sapien
gatactgctcatttcgctgtttcct

SEQ ID NO: 3542169 - DNA, 25 bp, Homo sapien
ctgatactgctcatttcgctgtttc

SEQ ID NO: 3542170 - DNA, 25 bp, Homo sapien
gctcatttcgctgtttcctagtctg

SEQ ID NO: 3542171 - DNA, 25 bp, Homo sapien
tcatctgctatgtttgctaggtgaa

SEQ ID NO: 3542172 - DNA, 25 bp, Homo sapien
catctgctatgtttgctaggtgaac

SEQ ID NO: 3542173 - DNA, 25 bp, Homo sapien
ctcatctgctatgtttgctaggtga

SEQ ID NO: 3542174 - DNA, 25 bp, Homo sapien
gaagaggaaataactgtcattgata

SEQ ID NO: 3542175 - DNA, 25 bp, Homo sapien
gaggaaataactgtcattgatatgt

SEQ ID NO: 3542176 - DNA, 25 bp, Homo sapien
aagaagaggaaataactgtcattga

SEQ ID NO: 3542177 - DNA, 25 bp, Homo sapien
agaggaaataactgtcattgatatg

SEQ ID NO: 3542178 - DNA, 25 bp, Homo sapien
aaagctccttaagctctgctagaca

SEQ ID NO: 3542179 - DNA, 25 bp, Homo sapien
tcttgtggatttcctgtcgtaaaag

SEQ ID NO: 3542180 - DNA, 25 bp, Homo sapien
taagctctgctagacactgagtgaa

SEQ ID NO: 3542181 - DNA, 25 bp, Homo sapien
ctggattcaatgtcagacaaagaga

SEQ ID NO: 3542182 - DNA, 25 bp, Homo sapien
tcttcgatggtaaagtgggtgtctc

SEQ ID NO: 3542183 - DNA, 25 bp, Homo sapien
gtgtcacagacatgataacctaagg

SEQ ID NO: 3542184 - DNA, 25 bp, Homo sapien
caaaagtccagaagggtgtcacaga

SEQ ID NO: 3542185 - DNA, 25 bp, Homo sapien
ttggtcaggatcacaaaagtccaga

SEQ ID NO: 3542186 - DNA, 25 bp, Homo sapien
ctgtttaggattcccatccgccaca

SEQ ID NO: 3542187 - DNA, 25 bp, Homo sapien
gtggacccgccaaaggtagactcca

SEQ ID NO: 3542188 - DNA, 25 bp, Homo sapien
tgtagctgtttaggattcccatccg

SEQ ID NO: 3542189 - DNA, 25 bp, Homo sapien
ccatggtgtagctgtttaggattcc

SEQ ID NO: 3542190 - DNA, 25 bp, Homo sapien
ctgttccttctttgcatttttggac

SEQ ID NO: 3542191 - DNA, 25 bp, Homo sapien
caactcgtcctgttccttctttgca

SEQ ID NO: 3542192 - DNA, 25 bp, Homo sapien
aacaactcgtcctgttccttctttg

SEQ ID NO: 3542193 - DNA, 25 bp, Homo sapien
actcgtcctgttccttctttgcatt

SEQ ID NO: 3542194 - DNA, 25 bp, Homo sapien
cttaaaattacaactgtgaaaagag

SEQ ID NO: 3542195 - DNA, 25 bp, Homo sapien
taaaattacaactgtgaaaagagaa

SEQ ID NO: 3542196 - DNA, 25 bp, Homo sapien
ttaaaattacaactgtgaaaagaga

SEQ ID NO: 3542197 - DNA, 25 bp, Homo sapien
gttgttattacagccatacaggaag

SEQ ID NO: 3542198 - DNA, 25 bp, Homo sapien
tgaagccagtatttgcgattgttgt

SEQ ID NO: 3542199 - DNA, 25 bp, Homo sapien
taaaggaaagactcgttcatgaagc

SEQ ID NO: 3542200 - DNA, 25 bp, Homo sapien
attattcttacgactgtggccatgg

SEQ ID NO: 3542201 - DNA, 25 bp, Homo sapien
tacaagagtggcttcatccctacag

SEQ ID NO: 3542202 - DNA, 25 bp, Homo sapien
cactgacaggaggtagcattgcaaa

SEQ ID NO: 3542203 - DNA, 25 bp, Homo sapien
caatattgcgggtgttggcatccaa

SEQ ID NO: 3542204 - DNA, 25 bp, Homo sapien
taaacggtatttcctgctaggctcc

SEQ ID NO: 3542205 - DNA, 25 bp, Homo sapien
cccactctggaactggtaaaatagg

SEQ ID NO: 3542206 - DNA, 25 bp, Homo sapien
gcaacgtgacagcaagttccttgac

SEQ ID NO: 3542207 - DNA, 25 bp, Homo sapien
gttccttgacaattcctcgtttgcc

SEQ ID NO: 3542208 - DNA, 25 bp, Homo sapien
tcaaacagtagagtattatcttctg

SEQ ID NO: 3542209 - DNA, 25 bp, Homo sapien
ccattcattgttcagtgtaatgaca

SEQ ID NO: 3542210 - DNA, 25 bp, Homo sapien
ttcattgttcagtgtaatgacaata

SEQ ID NO: 3542211 - DNA, 25 bp, Homo sapien
cattcattgttcagtgtaatgacaa

SEQ ID NO: 3542212 - DNA, 25 bp, Homo sapien
tcattgttcagtgtaatgacaatac

SEQ ID NO: 3542213 - DNA, 25 bp, Homo sapien
ttttcatttcctttaggctgataga

SEQ ID NO: 3542214 - DNA, 25 bp, Homo sapien
ctctcctacaatctctggtaccttt

SEQ ID NO: 3542215 - DNA, 25 bp, Homo sapien
tctaattgatagacaactgttcctt

SEQ ID NO: 3542216 - DNA, 25 bp, Homo sapien
tcctttaggctgatagaaatattct

SEQ ID NO: 3542217 - DNA, 25 bp, Homo sapien
gatggatgttttccttgatgacctc

SEQ ID NO: 3542218 - DNA, 25 bp, Homo sapien
caatatgatggatgttttccttgat

SEQ ID NO: 3542219 - DNA, 25 bp, Homo sapien
tggatgttttccttgatgacctcac

SEQ ID NO: 3542220 - DNA, 25 bp, Homo sapien
atgatggatgttttccttgatgacc

SEQ ID NO: 3542221 - DNA, 25 bp, Homo sapien
ctgtctgctcctaagatgtggtaaa

SEQ ID NO: 3542222 - DNA, 25 bp, Homo sapien
taagatgtggtaaactcagcatatg

SEQ ID NO: 3542223 - DNA, 25 bp, Homo sapien
gagcctgcagtggcctcttggtaga

SEQ ID NO: 3542224 - DNA, 25 bp, Homo sapien
gaagacgtgggtttacttcatccaa

SEQ ID NO: 3542225 - DNA, 25 bp, Homo sapien
atccagcccaggcaagagtgaaagt

SEQ ID NO: 3542226 - DNA, 25 bp, Homo sapien
ctgaggccgcgccactgcatccagc

SEQ ID NO: 3542227 - DNA, 25 bp, Homo sapien
actgcatccagcccaggcaagagtg

SEQ ID NO: 3542228 - DNA, 25 bp, Homo sapien
gagctgaggccgcgccactgcatcc

SEQ ID NO: 3542229 - DNA, 25 bp, Homo sapien
tagtccaaaaaaggagcttgaatct

SEQ ID NO: 3542230 - DNA, 25 bp, Homo sapien
gaatcccattcctgtctggtaattc

SEQ ID NO: 3542231 - DNA, 25 bp, Homo sapien
cttcagtgctcatcaggcatgaatc

SEQ ID NO: 3542232 - DNA, 25 bp, Homo sapien
tctggtctggaaggacatgaaatac

SEQ ID NO: 3542233 - DNA, 25 bp, Homo sapien
acagctgaagataaactgataggcc

SEQ ID NO: 3542234 - DNA, 25 bp, Homo sapien
ctctgttgatggcttctatctgtct

SEQ ID NO: 3542235 - DNA, 25 bp, Homo sapien
ctatctgtctgtgcacagctgaaga

SEQ ID NO: 3542236 - DNA, 25 bp, Homo sapien
ctgttgatggcttctatctgtctgt

SEQ ID NO: 3542237 - DNA, 25 bp, Homo sapien
tcagaggagttactaggcaatgagg

SEQ ID NO: 3542238 - DNA, 25 bp, Homo sapien
ggcaatgaggttctagaggtcacac

SEQ ID NO: 3542239 - DNA, 25 bp, Homo sapien
tgaatggtgttagaaacagaggcca

SEQ ID NO: 3542240 - DNA, 25 bp, Homo sapien
gagccacgatgccaggtgtattact

SEQ ID NO: 3542241 - DNA, 25 bp, Homo sapien
agagccattcaacaggcattgaggg

SEQ ID NO: 3542242 - DNA, 25 bp, Homo sapien
gctgatgcgtagcagagtttggtaa

SEQ ID NO: 3542243 - DNA, 25 bp, Homo sapien
gcagggtgtctggtatcaaatcatc

SEQ ID NO: 3542244 - DNA, 25 bp, Homo sapien
tattcttccgaacatgctgatgcgt

SEQ ID NO: 3542245 - DNA, 25 bp, Homo sapien
tgttggaactcagaaaatgatagcc

SEQ ID NO: 3542246 - DNA, 25 bp, Homo sapien
ttctgaagctacaagggctgtgttg

SEQ ID NO: 3542247 - DNA, 25 bp, Homo sapien
agcctggtgtagtggagtgagaaag

SEQ ID NO: 3542248 - DNA, 25 bp, Homo sapien
ctgtgttggaactcagaaaatgata

SEQ ID NO: 3542249 - DNA, 25 bp, Homo sapien
ctttaaagtagccataatattggag

SEQ ID NO: 3542250 - DNA, 25 bp, Homo sapien
ccataatattggaggtgacggtaca

SEQ ID NO: 3542251 - DNA, 25 bp, Homo sapien
gaggtgacggtacataaagtcttca

SEQ ID NO: 3542252 - DNA, 25 bp, Homo sapien
agtcttcataaggatcaggaatagt

SEQ ID NO: 3542253 - DNA, 25 bp, Homo sapien
aaggccacttcaatcaagataatgt

SEQ ID NO: 3542254 - DNA, 25 bp, Homo sapien
ggccacttcaatcaagataatgttt

SEQ ID NO: 3542255 - DNA, 25 bp, Homo sapien
ccacttcaatcaagataatgttttc

SEQ ID NO: 3542256 - DNA, 25 bp, Homo sapien
gaaaggccacttcaatcaagataat

SEQ ID NO: 3542257 - DNA, 25 bp, Homo sapien
tttaggtgcgtttccaaagctggga

SEQ ID NO: 3542258 - DNA, 25 bp, Homo sapien
taggtgcgtttccaaagctgggaac

SEQ ID NO: 3542259 - DNA, 25 bp, Homo sapien
ggtgcgtttccaaagctgggaacat

SEQ ID NO: 3542260 - DNA, 25 bp, Homo sapien
tgctttaggtgcgtttccaaagctg

SEQ ID NO: 3542261 - DNA, 25 bp, Homo sapien
gttacttctggatggtaggctgaaa

SEQ ID NO: 3542262 - DNA, 25 bp, Homo sapien
attagcatccagtcgcaaaccctgc

SEQ ID NO: 3542263 - DNA, 25 bp, Homo sapien
ggctgaaaactagtcagtgacatta

SEQ ID NO: 3542264 - DNA, 25 bp, Homo sapien
tacttctggatggtaggctgaaaac

SEQ ID NO: 3542265 - DNA, 25 bp, Homo sapien
aaagccacaagaggacaagtgaaaa

SEQ ID NO: 3542266 - DNA, 25 bp, Homo sapien
caaagccacaagaggacaagtgaaa

SEQ ID NO: 3542267 - DNA, 25 bp, Homo sapien
ctacaaagccacaagaggacaagtg

SEQ ID NO: 3542268 - DNA, 25 bp, Homo sapien
tacaaagccacaagaggacaagtga

SEQ ID NO: 3542269 - DNA, 25 bp, Homo sapien
agacagggagggcagcgtatcttcc

SEQ ID NO: 3542270 - DNA, 25 bp, Homo sapien
tgggagcacgcgacgaagtcgtctc

SEQ ID NO: 3542271 - DNA, 25 bp, Homo sapien
gatgctcgccacaggaaagtgaaag

SEQ ID NO: 3542272 - DNA, 25 bp, Homo sapien
ttccctgagaaaggagatgctcgcc

SEQ ID NO: 3542273 - DNA, 25 bp, Homo sapien
agcggggaaggagagcagaaacttc

SEQ ID NO: 3542274 - DNA, 25 bp, Homo sapien
ggtaggagcggggaaggagagcaga

SEQ ID NO: 3542275 - DNA, 25 bp, Homo sapien
agggtaggagcggggaaggagagca

SEQ ID NO: 3542276 - DNA, 25 bp, Homo sapien
ggagcggggaaggagagcagaaact

SEQ ID NO: 3542277 - DNA, 25 bp, Homo sapien
aagctccagcgaggcaggcggccac

SEQ ID NO: 3542278 - DNA, 25 bp, Homo sapien
aggcggccaccgcacttaagtacag

SEQ ID NO: 3542279 - DNA, 25 bp, Homo sapien
gcagagcgatggatgcgaccgcctt

SEQ ID NO: 3542280 - DNA, 25 bp, Homo sapien
gcacggatggctgcggcagagaagc

SEQ ID NO: 3542281 - DNA, 25 bp, Homo sapien
taaccatattacatcattgccagga

SEQ ID NO: 3542282 - DNA, 25 bp, Homo sapien
ctagaagcctgtttgtctaaactgg

SEQ ID NO: 3542283 - DNA, 25 bp, Homo sapien
ctttgatcacacagcaccatctggg

SEQ ID NO: 3542284 - DNA, 25 bp, Homo sapien
gagttgacgagcaaaaggataaccc

SEQ ID NO: 3542285 - DNA, 25 bp, Homo sapien
gctttattagtgcatatatacaaat

SEQ ID NO: 3542286 - DNA, 25 bp, Homo sapien
atatatacaaatttacaaggtcaga

SEQ ID NO: 3542287 - DNA, 25 bp, Homo sapien
aagctttattagtgcatatatacaa

SEQ ID NO: 3542288 - DNA, 25 bp, Homo sapien
aaaagctttattagtgcatatatac

SEQ ID NO: 3542289 - DNA, 25 bp, Homo sapien
taaaggcagcatggtcaaagcaatt

SEQ ID NO: 3542290 - DNA, 25 bp, Homo sapien
tatgccacctagtgtgcgaaacgac

SEQ ID NO: 3542291 - DNA, 25 bp, Homo sapien
gacaattccagtcaagcaaggtaga

SEQ ID NO: 3542292 - DNA, 25 bp, Homo sapien
agagtgtggccatctatcagcacga

SEQ ID NO: 3542293 - DNA, 25 bp, Homo sapien
tgctctccaatcctcaggaagggct

SEQ ID NO: 3542294 - DNA, 25 bp, Homo sapien
ttgctctccaatcctcaggaagggc

SEQ ID NO: 3542295 - DNA, 25 bp, Homo sapien
aaatctggcatcagtaatagacagc

SEQ ID NO: 3542296 - DNA, 25 bp, Homo sapien
taacagaatggatgcattagaacct

SEQ ID NO: 3542297 - DNA, 25 bp, Homo sapien
caattgatgaacagtgagttgcagt

SEQ ID NO: 3542298 - DNA, 25 bp, Homo sapien
cccggccggatctaatgtttttgag

SEQ ID NO: 3542299 - DNA, 25 bp, Homo sapien
caagcaaggtagtgaaggattttct

SEQ ID NO: 3542300 - DNA, 25 bp, Homo sapien
cctgcttgactgaaatatagggaca

SEQ ID NO: 3542301 - DNA, 25 bp, Homo sapien
gttcctagtgtggtgtgctctctca

SEQ ID NO: 3542302 - DNA, 25 bp, Homo sapien
ctagaataagtgcaattgagaaggc

SEQ ID NO: 3542303 - DNA, 25 bp, Homo sapien
tctgtgcagttgattcccgatcctc

SEQ ID NO: 3542304 - DNA, 25 bp, Homo sapien
cactcttcaattcgcttctgtgcag

SEQ ID NO: 3542305 - DNA, 25 bp, Homo sapien
taactcacgctggatactctgccac

SEQ ID NO: 3542306 - DNA, 25 bp, Homo sapien
tcttcactggaactagaattgtcct

SEQ ID NO: 3542307 - DNA, 25 bp, Homo sapien
tttaaaaatatcggctgggcacgat

SEQ ID NO: 3542308 - DNA, 25 bp, Homo sapien
taaaaatatcggctgggcacgatgg

SEQ ID NO: 3542309 - DNA, 25 bp, Homo sapien
taaatagccataattaaatatgaaa

SEQ ID NO: 3542310 - DNA, 25 bp, Homo sapien
aataaatagccataattaaatatga

SEQ ID NO: 3542311 - DNA, 25 bp, Homo sapien
gatacagttagttctaagagaaggt

SEQ ID NO: 3542312 - DNA, 25 bp, Homo sapien
atcaatgatacagttagttctaaga

SEQ ID NO: 3542313 - DNA, 25 bp, Homo sapien
ctaagagaaggtataatgatataat

SEQ ID NO: 3542314 - DNA, 25 bp, Homo sapien
tctaagagaaggtataatgatataa

SEQ ID NO: 3542315 - DNA, 25 bp, Homo sapien
ccctatgcaattcaaaatattgcct

SEQ ID NO: 3542316 - DNA, 25 bp, Homo sapien
gatgcagcattcctatcaaatgatt

SEQ ID NO: 3542317 - DNA, 25 bp, Homo sapien
aaaatcaggtcatataaatttcctt

SEQ ID NO: 3542318 - DNA, 25 bp, Homo sapien
tcctcagaattacagcgttcccatt

SEQ ID NO: 3542319 - DNA, 25 bp, Homo sapien
taatggtagcggtaggcacagcacc

SEQ ID NO: 3542320 - DNA, 25 bp, Homo sapien
tggtggttctataatggtagcggta

SEQ ID NO: 3542321 - DNA, 25 bp, Homo sapien
tgaactggctgcaatgagggagcag

SEQ ID NO: 3542322 - DNA, 25 bp, Homo sapien
cttttcaggtggtggcattttggga

SEQ ID NO: 3542323 - DNA, 25 bp, Homo sapien
gctgccgctagtccaaggtaatttg

SEQ ID NO: 3542324 - DNA, 25 bp, Homo sapien
tccaattgggacagaacattctgca

SEQ ID NO: 3542325 - DNA, 25 bp, Homo sapien
agtccaaggtaatttgactgcaggc

SEQ ID NO: 3542326 - DNA, 25 bp, Homo sapien
tcataattgcaggtgctgccgctag

SEQ ID NO: 3542327 - DNA, 25 bp, Homo sapien
tcattcctctggcctgatgacccat

SEQ ID NO: 3542328 - DNA, 25 bp, Homo sapien
ctggcctgatgacccattcctgctg

SEQ ID NO: 3542329 - DNA, 25 bp, Homo sapien
ctctggcctgatgacccattcctgc

SEQ ID NO: 3542330 - DNA, 25 bp, Homo sapien
attcctctggcctgatgacccattc

SEQ ID NO: 3542331 - DNA, 25 bp, Homo sapien
ggctaactggtattgtctgatgtcc

SEQ ID NO: 3542332 - DNA, 25 bp, Homo sapien
gttgcctggtttccaatccctgctg

SEQ ID NO: 3542333 - DNA, 25 bp, Homo sapien
cctgttgcctggtttccaatccctg

SEQ ID NO: 3542334 - DNA, 25 bp, Homo sapien
ctggaaggctaactggtattgtctg

SEQ ID NO: 3542335 - DNA, 25 bp, Homo sapien
acaatacattgaggaaaaaccacgc

SEQ ID NO: 3542336 - DNA, 25 bp, Homo sapien
gaaacaatacattgaggaaaaacca

SEQ ID NO: 3542337 - DNA, 25 bp, Homo sapien
caatacattgaggaaaaaccacgct

SEQ ID NO: 3542338 - DNA, 25 bp, Homo sapien
aacaatacattgaggaaaaaccacg

SEQ ID NO: 3542339 - DNA, 25 bp, Homo sapien
gaactagagatggtggaatcaactg

SEQ ID NO: 3542340 - DNA, 25 bp, Homo sapien
gctgactggctatagagaactggag

SEQ ID NO: 3542341 - DNA, 25 bp, Homo sapien
aactgccaatggtagctgacctctg

SEQ ID NO: 3542342 - DNA, 25 bp, Homo sapien
cctttagtggaagaagaactagaga

SEQ ID NO: 3542343 - DNA, 25 bp, Homo sapien
tgttatcagtggctgaaggccatgg

SEQ ID NO: 3542344 - DNA, 25 bp, Homo sapien
tgttgcacaagctgcagtggtgaga

SEQ ID NO: 3542345 - DNA, 25 bp, Homo sapien
atggttaaacatagcccgctcccac

SEQ ID NO: 3542346 - DNA, 25 bp, Homo sapien
caaacatttgttatcagtggctgaa

SEQ ID NO: 3542347 - DNA, 25 bp, Homo sapien
ctagttacaactgtggtttgtgctg

SEQ ID NO: 3542348 - DNA, 25 bp, Homo sapien
ggctagttacaactgtggtttgtgc

SEQ ID NO: 3542349 - DNA, 25 bp, Homo sapien
gctagttacaactgtggtttgtgct

SEQ ID NO: 3542350 - DNA, 25 bp, Homo sapien
ctggctagttacaactgtggtttgt

SEQ ID NO: 3542351 - DNA, 25 bp, Homo sapien
catttgactgaaggagggtccagaa

SEQ ID NO: 3542352 - DNA, 25 bp, Homo sapien
cttgaccagaaaaggattctttaca

SEQ ID NO: 3542353 - DNA, 25 bp, Homo sapien
taagtggcatgagtgatgaagaaga

SEQ ID NO: 3542354 - DNA, 25 bp, Homo sapien
tggaggttgaagcacaggaacattt

SEQ ID NO: 3542355 - DNA, 25 bp, Homo sapien
gaagtctacattacgaaattgcagc

SEQ ID NO: 3542356 - DNA, 25 bp, Homo sapien
tacagaatgtggtgtcaaacagcag

SEQ ID NO: 3542357 - DNA, 25 bp, Homo sapien
cagagacacaagttagggatggcaa

SEQ ID NO: 3542358 - DNA, 25 bp, Homo sapien
tataggaacctagcacagtgtacaa

SEQ ID NO: 3542359 - DNA, 25 bp, Homo sapien
aaagcaaccatgagccatttgggtc

SEQ ID NO: 3542360 - DNA, 25 bp, Homo sapien
caaaatcaagtatggccaagtagtc

SEQ ID NO: 3542361 - DNA, 25 bp, Homo sapien
gagtagatacccagaagaagtcacc

SEQ ID NO: 3542362 - DNA, 25 bp, Homo sapien
tgaaagactctagggcaagaaggcc

SEQ ID NO: 3542363 - DNA, 25 bp, Homo sapien
gaagcagcaggactggagaagaaac

SEQ ID NO: 3542364 - DNA, 25 bp, Homo sapien
gcagcaggactggagaagaaacaaa

SEQ ID NO: 3542365 - DNA, 25 bp, Homo sapien
caagtgaagcagcaggactggagaa

SEQ ID NO: 3542366 - DNA, 25 bp, Homo sapien
agtcaagtgaagcagcaggactgga

SEQ ID NO: 3542367 - DNA, 25 bp, Homo sapien
tgtctcctctagaagcataatgcaa

SEQ ID NO: 3542368 - DNA, 25 bp, Homo sapien
cacagagtcggttcaaggttaataa

SEQ ID NO: 3542369 - DNA, 25 bp, Homo sapien
ttcaaatattggtggatgtctcctc

SEQ ID NO: 3542370 - DNA, 25 bp, Homo sapien
taaaattagccacaaatgacgagca

SEQ ID NO: 3542371 - DNA, 25 bp, Homo sapien
cacacttggcctacgcagcttttat

SEQ ID NO: 3542372 - DNA, 25 bp, Homo sapien
tgaagcccaaggacagattaaagtg

SEQ ID NO: 3542373 - DNA, 25 bp, Homo sapien
tcaaactttgttatgaggtcagcac

SEQ ID NO: 3542374 - DNA, 25 bp, Homo sapien
acggagtctttaagcctgttgccca

SEQ ID NO: 3542375 - DNA, 25 bp, Homo sapien
taaccaccactgagctgattaagag

SEQ ID NO: 3542376 - DNA, 25 bp, Homo sapien
taagaaccttgcttctgtaggcgtc

SEQ ID NO: 3542377 - DNA, 25 bp, Homo sapien
catactcgtgctaccaagctaggct

SEQ ID NO: 3542378 - DNA, 25 bp, Homo sapien
tcaagtttatcctgcaattctaggg

SEQ ID NO: 3542379 - DNA, 25 bp, Homo sapien
ttaatactcatctaaagtgttcaca

SEQ ID NO: 3542380 - DNA, 25 bp, Homo sapien
tactcatctaaagtgttcacagaac

SEQ ID NO: 3542381 - DNA, 25 bp, Homo sapien
aatactcatctaaagtgttcacaga

SEQ ID NO: 3542382 - DNA, 25 bp, Homo sapien
catctaaagtgttcacagaacattc

SEQ ID NO: 3542383 - DNA, 25 bp, Homo sapien
ctttggaacatataagggatgttga

SEQ ID NO: 3542384 - DNA, 25 bp, Homo sapien
ggaacatataagggatgttgacagt

SEQ ID NO: 3542385 - DNA, 25 bp, Homo sapien
tttggaacatataagggatgttgac

SEQ ID NO: 3542386 - DNA, 25 bp, Homo sapien
tggaacatataagggatgttgacag

SEQ ID NO: 3542387 - DNA, 25 bp, Homo sapien
ctatccagaactacgatcaagcctc

SEQ ID NO: 3542388 - DNA, 25 bp, Homo sapien
cagaactacgatcaagcctcttcag

SEQ ID NO: 3542389 - DNA, 25 bp, Homo sapien
tatccagaactacgatcaagcctct

SEQ ID NO: 3542390 - DNA, 25 bp, Homo sapien
ttttggagacccacagcttagtcag

SEQ ID NO: 3542391 - DNA, 25 bp, Homo sapien
tctatcactgctaccaaaagagagg

SEQ ID NO: 3542392 - DNA, 25 bp, Homo sapien
ttttctactatcatcagggagccag

SEQ ID NO: 3542393 - DNA, 25 bp, Homo sapien
tatgtgacctgctgacgatttctag

SEQ ID NO: 3542394 - DNA, 25 bp, Homo sapien
ccgactgttcgtttacatagaaata

SEQ ID NO: 3542395 - DNA, 25 bp, Homo sapien
tcccactgagactcgcccgactgtt

SEQ ID NO: 3542396 - DNA, 25 bp, Homo sapien
cagaggattctgttgaatttgaatc

SEQ ID NO: 3542397 - DNA, 25 bp, Homo sapien
tcaccatctggaaactcccactgag

SEQ ID NO: 3542398 - DNA, 25 bp, Homo sapien
gctatttgcactgccagcaactctg

SEQ ID NO: 3542399 - DNA, 25 bp, Homo sapien
tgctttcacagggacgaacctctta

SEQ ID NO: 3542400 - DNA, 25 bp, Homo sapien
ctttgacaattgagaatggagaacc

SEQ ID NO: 3542401 - DNA, 25 bp, Homo sapien
taatggactgctattcacaaaggca

SEQ ID NO: 3542402 - DNA, 25 bp, Homo sapien
gaacaacgaagtttgtgaaaggtga

SEQ ID NO: 3542403 - DNA, 25 bp, Homo sapien
cattaatgaagggactcaatcgcct

SEQ ID NO: 3542404 - DNA, 25 bp, Homo sapien
tttgccaatgcataacagggtttca

SEQ ID NO: 3542405 - DNA, 25 bp, Homo sapien
aatcgcctagaacactaatttccct

SEQ ID NO: 3542406 - DNA, 25 bp, Homo sapien
ttcccctcttggaccgtggaattca

SEQ ID NO: 3542407 - DNA, 25 bp, Homo sapien
cccctcttggaccgtggaattcaca

SEQ ID NO: 3542408 - DNA, 25 bp, Homo sapien
catattcttgatatcaaacacagtg

SEQ ID NO: 3542409 - DNA, 25 bp, Homo sapien
tcatattcttgatatcaaacacagt

SEQ ID NO: 3542410 - DNA, 25 bp, Homo sapien
taaagagagggagaggatctgggag

SEQ ID NO: 3542411 - DNA, 25 bp, Homo sapien
ctaaagagagggagaggatctggga

SEQ ID NO: 3542412 - DNA, 25 bp, Homo sapien
tcaagaaaagccaaatatataaaga

SEQ ID NO: 3542413 - DNA, 25 bp, Homo sapien
aaagagcaaagatttcaaataacga

SEQ ID NO: 3542414 - DNA, 25 bp, Homo sapien
gagcaaagatttcaaataacgaaaa

SEQ ID NO: 3542415 - DNA, 25 bp, Homo sapien
caagaaaagccaaatatataaagaa

SEQ ID NO: 3542416 - DNA, 25 bp, Homo sapien
ctgctggcagaggatagtaatcttg

SEQ ID NO: 3542417 - DNA, 25 bp, Homo sapien
cacatcttcagccacgaagttttcc

SEQ ID NO: 3542418 - DNA, 25 bp, Homo sapien
tcaggagtagttgcttccagaggtc

SEQ ID NO: 3542419 - DNA, 25 bp, Homo sapien
taacttcaccgaggttaatcaggag

SEQ ID NO: 3542420 - DNA, 25 bp, Homo sapien
gtaaagcgcacagagctctcgcatg

SEQ ID NO: 3542421 - DNA, 25 bp, Homo sapien
acagagctctcgcatgcgcttaacc

SEQ ID NO: 3542422 - DNA, 25 bp, Homo sapien
ctgtaaagcgcacagagctctcgca

SEQ ID NO: 3542423 - DNA, 25 bp, Homo sapien
cgcacagagctctcgcatgcgctta

SEQ ID NO: 3542424 - DNA, 25 bp, Homo sapien
tccgtgcaacactctggagagtaaa

SEQ ID NO: 3542425 - DNA, 25 bp, Homo sapien
cagcaccgctaactgcagctgctct

SEQ ID NO: 3542426 - DNA, 25 bp, Homo sapien
ctgagatgtcaaaggtgaaaggtga

SEQ ID NO: 3542427 - DNA, 25 bp, Homo sapien
cgtcagatggtggtgatcacaaatc

SEQ ID NO: 3542428 - DNA, 25 bp, Homo sapien
ccagacaggctgtcatgtcgtcaga

SEQ ID NO: 3542429 - DNA, 25 bp, Homo sapien
gtcccagtggcaggaccagccttta

SEQ ID NO: 3542430 - DNA, 25 bp, Homo sapien
agttgttctgctgcatcctgaagtt

SEQ ID NO: 3542431 - DNA, 25 bp, Homo sapien
cttcccgccagtctgcaattcgagt

SEQ ID NO: 3542432 - DNA, 25 bp, Homo sapien
gcctttaggagtggcgtttatttca

SEQ ID NO: 3542433 - DNA, 25 bp, Homo sapien
ctcagtctgtaagagcagcacatga

SEQ ID NO: 3542434 - DNA, 25 bp, Homo sapien
agaaactcgaatttacttgtcaggg

SEQ ID NO: 3542435 - DNA, 25 bp, Homo sapien
tgtcagggtatttgccagttctcca

SEQ ID NO: 3542436 - DNA, 25 bp, Homo sapien
catgaaagttggagatggattgtct

SEQ ID NO: 3542437 - DNA, 25 bp, Homo sapien
tgtacttttattttctctggagatt

SEQ ID NO: 3542438 - DNA, 25 bp, Homo sapien
ttcttctacttttggtgttgtctgt

SEQ ID NO: 3542439 - DNA, 25 bp, Homo sapien
ttctctggagattcttctacttcca

SEQ ID NO: 3542440 - DNA, 25 bp, Homo sapien
ccatctctttatctgaattctcatc

SEQ ID NO: 3542441 - DNA, 25 bp, Homo sapien
agctattgcatccggcctaaaactt

SEQ ID NO: 3542442 - DNA, 25 bp, Homo sapien
atgtgaggcacggcgcctggctttt

SEQ ID NO: 3542443 - DNA, 25 bp, Homo sapien
gagctattgcatccggcctaaaact

SEQ ID NO: 3542444 - DNA, 25 bp, Homo sapien
gctattgcatccggcctaaaacttt

SEQ ID NO: 3542445 - DNA, 25 bp, Homo sapien
tgtcaactatattcggcctggatga

SEQ ID NO: 3542446 - DNA, 25 bp, Homo sapien
tttgacctggcaatataccactagg

SEQ ID NO: 3542447 - DNA, 25 bp, Homo sapien
tttggagggcaagtacacaggctct

SEQ ID NO: 3542448 - DNA, 25 bp, Homo sapien
gctcagtgaggtggcacaagcctat

SEQ ID NO: 3542449 - DNA, 25 bp, Homo sapien
ggcgtgagccaggccaacatcctct

SEQ ID NO: 3542450 - DNA, 25 bp, Homo sapien
aggcgtgagccaggccaacatcctc

SEQ ID NO: 3542451 - DNA, 25 bp, Homo sapien
gcgtgagccaggccaacatcctctc

SEQ ID NO: 3542452 - DNA, 25 bp, Homo sapien
taggcgtgagccaggccaacatcct

SEQ ID NO: 3542453 - DNA, 25 bp, Homo sapien
acgcccagcctattttgcagttttg

SEQ ID NO: 3542454 - DNA, 25 bp, Homo sapien
tctcccaagtagccgccacgcccag

SEQ ID NO: 3542455 - DNA, 25 bp, Homo sapien
agtctcccaagtagccgccacgccc

SEQ ID NO: 3542456 - DNA, 25 bp, Homo sapien
ccacgcccagcctattttgcagttt

SEQ ID NO: 3542457 - DNA, 25 bp, Homo sapien
tatctatgatacctctaatggacat

SEQ ID NO: 3542458 - DNA, 25 bp, Homo sapien
tttttttagtgaaacatggacacaa

SEQ ID NO: 3542459 - DNA, 25 bp, Homo sapien
aacagtgggcagagttaaatacgca

SEQ ID NO: 3542460 - DNA, 25 bp, Homo sapien
aatggacatttgagtgctctatagg

SEQ ID NO: 3542461 - DNA, 25 bp, Homo sapien
cctcagtttcctgtgaagcagcact

SEQ ID NO: 3542462 - DNA, 25 bp, Homo sapien
cccagctagcctggaactcctaggg

SEQ ID NO: 3542463 - DNA, 25 bp, Homo sapien
agctagcctggaactcctagggtcc

SEQ ID NO: 3542464 - DNA, 25 bp, Homo sapien
tttatcaagaaacaagggtcttgct

SEQ ID NO: 3542465 - DNA, 25 bp, Homo sapien
tgaatgaatgataaggtccttatta

SEQ ID NO: 3542466 - DNA, 25 bp, Homo sapien
gaatgaatgataaggtccttattac

SEQ ID NO: 3542467 - DNA, 25 bp, Homo sapien
caaagagtaaaagtacaatctcctg

SEQ ID NO: 3542468 - DNA, 25 bp, Homo sapien
aaagagtaaaagtacaatctcctgt

SEQ ID NO: 3542469 - DNA, 25 bp, Homo sapien
aagagtaaaagtacaatctcctgtt

SEQ ID NO: 3542470 - DNA, 25 bp, Homo sapien
tgaagtttaatgtgaagcacaaatt

SEQ ID NO: 3542471 - DNA, 25 bp, Homo sapien
actctgaagtttaatgtgaagcaca

SEQ ID NO: 3542472 - DNA, 25 bp, Homo sapien
tctgaagtttaatgtgaagcacaaa

SEQ ID NO: 3542473 - DNA, 25 bp, Homo sapien
ttcaactctgaagtttaatgtgaag

SEQ ID NO: 3542474 - DNA, 25 bp, Homo sapien
ggtagctcgaacaaacatcttccat

SEQ ID NO: 3542475 - DNA, 25 bp, Homo sapien
tgatatcagaacgtggactagaccc

SEQ ID NO: 3542476 - DNA, 25 bp, Homo sapien
ggtagattctggactggtagctcga

SEQ ID NO: 3542477 - DNA, 25 bp, Homo sapien
taagcctacgcattccatcttgaga

SEQ ID NO: 3542478 - DNA, 25 bp, Homo sapien
tgacaattaagttagtgtcattaac

SEQ ID NO: 3542479 - DNA, 25 bp, Homo sapien
caattaagttagtgtcattaactgc

SEQ ID NO: 3542480 - DNA, 25 bp, Homo sapien
aataataaacaagactatgttgttg

SEQ ID NO: 3542481 - DNA, 25 bp, Homo sapien
cagaataataaacaagactatgttg

SEQ ID NO: 3542482 - DNA, 25 bp, Homo sapien
cccggccctggtaagtctgtggtca

SEQ ID NO: 3542483 - DNA, 25 bp, Homo sapien
cacaatgatccctgtagagtagtac

SEQ ID NO: 3542484 - DNA, 25 bp, Homo sapien
ccaataatggttgtaagtcaagcac

SEQ ID NO: 3542485 - DNA, 25 bp, Homo sapien
gcttcaacatacctagatgatggga

SEQ ID NO: 3542486 - DNA, 25 bp, Homo sapien
ctagctccagttcaagggtatcttg

SEQ ID NO: 3542487 - DNA, 25 bp, Homo sapien
ccagttcaagggtatcttgttcctc

SEQ ID NO: 3542488 - DNA, 25 bp, Homo sapien
caaaactagctccagttcaagggta

SEQ ID NO: 3542489 - DNA, 25 bp, Homo sapien
tttccaaaactagctccagttcaag

SEQ ID NO: 3542490 - DNA, 25 bp, Homo sapien
tattccctcaggcaataaaggagca

SEQ ID NO: 3542491 - DNA, 25 bp, Homo sapien
taaaggagcaagcagcgatgctgcc

SEQ ID NO: 3542492 - DNA, 25 bp, Homo sapien
gattggacaacactgcaaagatcct

SEQ ID NO: 3542493 - DNA, 25 bp, Homo sapien
tattgtccaacataatttcctgtgg

SEQ ID NO: 3542494 - DNA, 25 bp, Homo sapien
tctcgcttggctatgactggtccac

SEQ ID NO: 3542495 - DNA, 25 bp, Homo sapien
taacttctcgcttggctatgactgg

SEQ ID NO: 3542496 - DNA, 25 bp, Homo sapien
cgcttggctatgactggtccacttt

SEQ ID NO: 3542497 - DNA, 25 bp, Homo sapien
tttttaacttctcgcttggctatga

SEQ ID NO: 3542498 - DNA, 25 bp, Homo sapien
tttaccacaaaactagtttcagcac

SEQ ID NO: 3542499 - DNA, 25 bp, Homo sapien
cccagacttcctgccaatcgcccat

SEQ ID NO: 3542500 - DNA, 25 bp, Homo sapien
tgtggcaagatattggggtaactcc

SEQ ID NO: 3542501 - DNA, 25 bp, Homo sapien
caataataataacatcccgtgttct

SEQ ID NO: 3542502 - DNA, 25 bp, Homo sapien
ctgggctggtaatgctgtaatccct

SEQ ID NO: 3542503 - DNA, 25 bp, Homo sapien
tagatacagtagcactcccatccac

SEQ ID NO: 3542504 - DNA, 25 bp, Homo sapien
gaaccactggcctaacaccaagaat

SEQ ID NO: 3542505 - DNA, 25 bp, Homo sapien
acagcactgttaacttttgggcaca

SEQ ID NO: 3542506 - DNA, 25 bp, Homo sapien
tatgtggaggttttagcagcacccc

SEQ ID NO: 3542507 - DNA, 25 bp, Homo sapien
tggagcagaagctcctacaggagct

SEQ ID NO: 3542508 - DNA, 25 bp, Homo sapien
gaacactgagtatcatattgccaac

SEQ ID NO: 3542509 - DNA, 25 bp, Homo sapien
tattgccaaccagatgtttgggtgg

SEQ ID NO: 3542510 - DNA, 25 bp, Homo sapien
gctgaggagctgttatggcatcgat

SEQ ID NO: 3542511 - DNA, 25 bp, Homo sapien
cgctaggaagttggccaatgtacta

SEQ ID NO: 3542512 - DNA, 25 bp, Homo sapien
ttttcggaaacatcattgtcatcgt

SEQ ID NO: 3542513 - DNA, 25 bp, Homo sapien
taagcaccaagcaagcatagaccgc

SEQ ID NO: 3542514 - DNA, 25 bp, Homo sapien
tatcaatatcagttgactggtttcc

SEQ ID NO: 3542515 - DNA, 25 bp, Homo sapien
tgttggcctagctgctcttggactc

SEQ ID NO: 3542516 - DNA, 25 bp, Homo sapien
tatgttggcctagctgctcttggac

SEQ ID NO: 3542517 - DNA, 25 bp, Homo sapien
ttcgctatgttggcctagctgctct

SEQ ID NO: 3542518 - DNA, 25 bp, Homo sapien
gctatgttggcctagctgctcttgg

SEQ ID NO: 3542519 - DNA, 25 bp, Homo sapien
taattgcgccaaagtctaagtgtga

SEQ ID NO: 3542520 - DNA, 25 bp, Homo sapien
tacagattaatgaggttcaacccaa

SEQ ID NO: 3542521 - DNA, 25 bp, Homo sapien
taggtaaccaatcaagccagagtgt

SEQ ID NO: 3542522 - DNA, 25 bp, Homo sapien
tgccagagtgatgaattgaacccag

SEQ ID NO: 3542523 - DNA, 25 bp, Homo sapien
ggaacctcctgcaccgcttcctgtt

SEQ ID NO: 3542524 - DNA, 25 bp, Homo sapien
gattctgaacaactctaggaacctc

SEQ ID NO: 3542525 - DNA, 25 bp, Homo sapien
gggtctagtggtcatgactggtttt

SEQ ID NO: 3542526 - DNA, 25 bp, Homo sapien
tcatgactggttttggaggattctg

SEQ ID NO: 3542527 - DNA, 25 bp, Homo sapien
tgaaggcgagtcgtccgaggccgcg

SEQ ID NO: 3542528 - DNA, 25 bp, Homo sapien
ttctgaaggcgagtcgtccgaggcc

SEQ ID NO: 3542529 - DNA, 25 bp, Homo sapien
ggcgagtcgtccgaggccgcggcgg

SEQ ID NO: 3542530 - DNA, 25 bp, Homo sapien
cttctgaaggcgagtcgtccgaggc

SEQ ID NO: 3542531 - DNA, 25 bp, Homo sapien
ctgccccgaggacccggcggagaga

SEQ ID NO: 3542532 - DNA, 25 bp, Homo sapien
gaggacccggcggagagagttgcag

SEQ ID NO: 3542533 - DNA, 25 bp, Homo sapien
gctggctggggaccgccgcggttga

SEQ ID NO: 3542534 - DNA, 25 bp, Homo sapien
ttgagtccggctcagtgtcgggttc

SEQ ID NO: 3542535 - DNA, 25 bp, Homo sapien
tgggcgctgcgacgcgtaatcaata

SEQ ID NO: 3542536 - DNA, 25 bp, Homo sapien
ggccctgggcgctgcgacgcgtaat

SEQ ID NO: 3542537 - DNA, 25 bp, Homo sapien
cctgggcgctgcgacgcgtaatcaa

SEQ ID NO: 3542538 - DNA, 25 bp, Homo sapien
agcagagagcgtcgggcggccgaga

SEQ ID NO: 3542539 - DNA, 25 bp, Homo sapien
gggattaccaactgcgctaggcgat

SEQ ID NO: 3542540 - DNA, 25 bp, Homo sapien
ggacccttcggctcttctggctcct

SEQ ID NO: 3542541 - DNA, 25 bp, Homo sapien
accagcggagcacgcgcttgcgcaa

SEQ ID NO: 3542542 - DNA, 25 bp, Homo sapien
ccggatccgctttcaaccagcggag

SEQ ID NO: 3542543 - DNA, 25 bp, Homo sapien
gaaactcacattgttaattaaagta

SEQ ID NO: 3542544 - DNA, 25 bp, Homo sapien
gctatacaagcaagtagtatacaga

SEQ ID NO: 3542545 - DNA, 25 bp, Homo sapien
tcaaaaggctatacaagcaagtagt

SEQ ID NO: 3542546 - DNA, 25 bp, Homo sapien
ctcaagaagggtcaaaaggctatac

SEQ ID NO: 3542547 - DNA, 25 bp, Homo sapien
taaaagataaattttaatatacaga

SEQ ID NO: 3542548 - DNA, 25 bp, Homo sapien
taagtcctaagaggcaccaagcggt

SEQ ID NO: 3542549 - DNA, 25 bp, Homo sapien
caaaaatcggccttgagtacagggt

SEQ ID NO: 3542550 - DNA, 25 bp, Homo sapien
tttggtggtcagctacaacaagcca

SEQ ID NO: 3542551 - DNA, 25 bp, Homo sapien
gaaattgtgttagcaccaccagcaa

SEQ ID NO: 3542552 - DNA, 25 bp, Homo sapien
tcacaaggtccgacgatataataaa

SEQ ID NO: 3542553 - DNA, 25 bp, Homo sapien
cccgtgttgccttatcaactttttg

SEQ ID NO: 3542554 - DNA, 25 bp, Homo sapien
cgatataataaatcccgtgttgcct

SEQ ID NO: 3542555 - DNA, 25 bp, Homo sapien
tccgacgatataataaatcccgtgt

SEQ ID NO: 3542556 - DNA, 25 bp, Homo sapien
ggtagtcctccaatttgtcaagtat

SEQ ID NO: 3542557 - DNA, 25 bp, Homo sapien
tagtcctccaatttgtcaagtattt

SEQ ID NO: 3542558 - DNA, 25 bp, Homo sapien
tggtagtcctccaatttgtcaagta

SEQ ID NO: 3542559 - DNA, 25 bp, Homo sapien
ctggtagtcctccaatttgtcaagt

SEQ ID NO: 3542560 - DNA, 25 bp, Homo sapien
ttttagataggctcaggaggcactc

SEQ ID NO: 3542561 - DNA, 25 bp, Homo sapien
caccttataaagatgttagccactc

SEQ ID NO: 3542562 - DNA, 25 bp, Homo sapien
tactgataaaactaggcctctctgt

SEQ ID NO: 3542563 - DNA, 25 bp, Homo sapien
gacttcaccaagtagattccacctt

SEQ ID NO: 3542564 - DNA, 25 bp, Homo sapien
ggagaagctgatcaatagaggagta

SEQ ID NO: 3542565 - DNA, 25 bp, Homo sapien
gaggagtatggaagccacaccattg

SEQ ID NO: 3542566 - DNA, 25 bp, Homo sapien
acaccattggggctgttgcggacag

SEQ ID NO: 3542567 - DNA, 25 bp, Homo sapien
tgcgatgttgtgactgttggcactg

SEQ ID NO: 3542568 - DNA, 25 bp, Homo sapien
atattctgacaccaaatccacagct

SEQ ID NO: 3542569 - DNA, 25 bp, Homo sapien
acatattctgacaccaaatccacag

SEQ ID NO: 3542570 - DNA, 25 bp, Homo sapien
ctcaattccgaagtattgatgtcct

SEQ ID NO: 3542571 - DNA, 25 bp, Homo sapien
ccacatattctgacaccaaatccac

SEQ ID NO: 3542572 - DNA, 25 bp, Homo sapien
gtttaagtataaacgaagcaattca

SEQ ID NO: 3542573 - DNA, 25 bp, Homo sapien
catagtttaagtataaacgaagcaa

SEQ ID NO: 3542574 - DNA, 25 bp, Homo sapien
gtcatagtttaagtataaacgaagc

SEQ ID NO: 3542575 - DNA, 25 bp, Homo sapien
taagtataaacgaagcaattcagca

SEQ ID NO: 3542576 - DNA, 25 bp, Homo sapien
aggaaccaatcggaaactggttgtg

SEQ ID NO: 3542577 - DNA, 25 bp, Homo sapien
gaaccaatcggaaactggttgtgct

SEQ ID NO: 3542578 - DNA, 25 bp, Homo sapien
ggaaccaatcggaaactggttgtgc

SEQ ID NO: 3542579 - DNA, 25 bp, Homo sapien
aatagtcgccatgcttcatctgtag

SEQ ID NO: 3542580 - DNA, 25 bp, Homo sapien
taggcagaggcactccatgagacaa

SEQ ID NO: 3542581 - DNA, 25 bp, Homo sapien
tccaggtaagtggataatagtcgcc

SEQ ID NO: 3542582 - DNA, 25 bp, Homo sapien
caagagcttgttgattacacagtgg

SEQ ID NO: 3542583 - DNA, 25 bp, Homo sapien
tgtgatgaaaccatgcagtgactgc

SEQ ID NO: 3542584 - DNA, 25 bp, Homo sapien
cagatttttgcctgtaagagtaccc

SEQ ID NO: 3542585 - DNA, 25 bp, Homo sapien
tggagacaagatataagaggacact

SEQ ID NO: 3542586 - DNA, 25 bp, Homo sapien
tttacgtggacacaaagtgggtgca

SEQ ID NO: 3542587 - DNA, 25 bp, Homo sapien
ctccttagtagtgatgacagatgag

SEQ ID NO: 3542588 - DNA, 25 bp, Homo sapien
gactccttagtagtgatgacagatg

SEQ ID NO: 3542589 - DNA, 25 bp, Homo sapien
agagctgattggctgctagccaggc

SEQ ID NO: 3542590 - DNA, 25 bp, Homo sapien
agactccttagtagtgatgacagat

SEQ ID NO: 3542591 - DNA, 25 bp, Homo sapien
gaaaactgaacgctgaaacgtacca

SEQ ID NO: 3542592 - DNA, 25 bp, Homo sapien
tgaacgctgaaacgtaccactttaa

SEQ ID NO: 3542593 - DNA, 25 bp, Homo sapien
gctgaaacgtaccactttaatttga

SEQ ID NO: 3542594 - DNA, 25 bp, Homo sapien
acacttgaaaactgaacgctgaaac

SEQ ID NO: 3542595 - DNA, 25 bp, Homo sapien
ctgagaggctgaaattactgttgtg

SEQ ID NO: 3542596 - DNA, 25 bp, Homo sapien
caacgtgatggcattacaggcgtaa

SEQ ID NO: 3542597 - DNA, 25 bp, Homo sapien
gctgaaattactgttgtgtgccaca

SEQ ID NO: 3542598 - DNA, 25 bp, Homo sapien
gttgtgtgccacaccctcatttttg

SEQ ID NO: 3542599 - DNA, 25 bp, Homo sapien
cgcctgaaccaagagagtgaccatt

SEQ ID NO: 3542600 - DNA, 25 bp, Homo sapien
cagtgtcaaagaggcccgcctgaac

SEQ ID NO: 3542601 - DNA, 25 bp, Homo sapien
acagagtgatatggcagtgtcaaag

SEQ ID NO: 3542602 - DNA, 25 bp, Homo sapien
agcttaaaagtctgacagagtgata

SEQ ID NO: 3542603 - DNA, 25 bp, Homo sapien
cgctgatggatcatgctgagccaaa

SEQ ID NO: 3542604 - DNA, 25 bp, Homo sapien
catgctgagccaaagtgaggcggat

SEQ ID NO: 3542605 - DNA, 25 bp, Homo sapien
gatggatcatgctgagccaaagtga

SEQ ID NO: 3542606 - DNA, 25 bp, Homo sapien
aaccgctgatggatcatgctgagcc

SEQ ID NO: 3542607 - DNA, 25 bp, Homo sapien
gctgccggcctcaatctacagtaga

SEQ ID NO: 3542608 - DNA, 25 bp, Homo sapien
tagcaaagaaccagtgtgagactcc

SEQ ID NO: 3542609 - DNA, 25 bp, Homo sapien
acctactggcgaagctgaagcaaca

SEQ ID NO: 3542610 - DNA, 25 bp, Homo sapien
tctaggctatgtggttcaactggga

SEQ ID NO: 3542611 - DNA, 25 bp, Homo sapien
gggcagctgtgcattctccatcatg

SEQ ID NO: 3542612 - DNA, 25 bp, Homo sapien
tgggggcagctgtgcattctccatc

SEQ ID NO: 3542613 - DNA, 25 bp, Homo sapien
gctgtgcattctccatcatgattcc

SEQ ID NO: 3542614 - DNA, 25 bp, Homo sapien
cagctgtgcattctccatcatgatt

SEQ ID NO: 3542615 - DNA, 25 bp, Homo sapien
aaacaaaacaagcaatttaactgtg

SEQ ID NO: 3542616 - DNA, 25 bp, Homo sapien
tgataaaacaaaacaagcaatttaa

SEQ ID NO: 3542617 - DNA, 25 bp, Homo sapien
ctgataaaacaaaacaagcaattta

SEQ ID NO: 3542618 - DNA, 25 bp, Homo sapien
gatttacttgttccaggatgaaccc

SEQ ID NO: 3542619 - DNA, 25 bp, Homo sapien
gagcagccagataacagttgccttg

SEQ ID NO: 3542620 - DNA, 25 bp, Homo sapien
ccttgtttctcaagtccccggagag

SEQ ID NO: 3542621 - DNA, 25 bp, Homo sapien
gtcgtaaacaattgagagcagccag

SEQ ID NO: 3542622 - DNA, 25 bp, Homo sapien
gagttcgaacttctctgccaagccg

SEQ ID NO: 3542623 - DNA, 25 bp, Homo sapien
tggaacccttttgtactgttgctgg

SEQ ID NO: 3542624 - DNA, 25 bp, Homo sapien
tctagagatacgcagggagaatgct

SEQ ID NO: 3542625 - DNA, 25 bp, Homo sapien
ggagaatgctatccctaatcaaatg

SEQ ID NO: 3542626 - DNA, 25 bp, Homo sapien
tctcgaatttgtggcctcgtgatcc

SEQ ID NO: 3542627 - DNA, 25 bp, Homo sapien
agaaaattctgacgccactacaagg

SEQ ID NO: 3542628 - DNA, 25 bp, Homo sapien
aagaagaaaattctgacgccactac

SEQ ID NO: 3542629 - DNA, 25 bp, Homo sapien
tctgacgccactacaaggatgaacc

SEQ ID NO: 3542630 - DNA, 25 bp, Homo sapien
gagatgggtggtaaaatggtggttg

SEQ ID NO: 3542631 - DNA, 25 bp, Homo sapien
aaaatggtcaagatagcgggcgcgg

SEQ ID NO: 3542632 - DNA, 25 bp, Homo sapien
aaaaatggtcaagatagcgggcgcg

SEQ ID NO: 3542633 - DNA, 25 bp, Homo sapien
aaatggtcaagatagcgggcgcggt

SEQ ID NO: 3542634 - DNA, 25 bp, Homo sapien
aatggtcaagatagcgggcgcggtg

SEQ ID NO: 3542635 - DNA, 25 bp, Homo sapien
tccacagctctagcacgtgactcaa

SEQ ID NO: 3542636 - DNA, 25 bp, Homo sapien
aattgtgagtcataaggtccacagc

SEQ ID NO: 3542637 - DNA, 25 bp, Homo sapien
gatgtgaaaggcatacagaagttca

SEQ ID NO: 3542638 - DNA, 25 bp, Homo sapien
ccttgcggtaattgtggcgatagat

SEQ ID NO: 3542639 - DNA, 25 bp, Homo sapien
catagggaaactctacaagatcctg

SEQ ID NO: 3542640 - DNA, 25 bp, Homo sapien
gctgtgagcgttcacaaagaactac

SEQ ID NO: 3542641 - DNA, 25 bp, Homo sapien
cattatgcagattcacatagggaaa

SEQ ID NO: 3542642 - DNA, 25 bp, Homo sapien
gaactaccaccaactgccgtaaaca

SEQ ID NO: 3542643 - DNA, 25 bp, Homo sapien
gaatttgggttaaggcttcatatgc

SEQ ID NO: 3542644 - DNA, 25 bp, Homo sapien
tcatatgcttggctattgtgaccca

SEQ ID NO: 3542645 - DNA, 25 bp, Homo sapien
gacccaaatccaaatgatgtttgaa

SEQ ID NO: 3542646 - DNA, 25 bp, Homo sapien
ctgctggaatcaggaatttgggtta

SEQ ID NO: 3542647 - DNA, 25 bp, Homo sapien
tgaataaccagttcaggcaaaccaa

SEQ ID NO: 3542648 - DNA, 25 bp, Homo sapien
tcacctgcttcagttatggctgatg

SEQ ID NO: 3542649 - DNA, 25 bp, Homo sapien
gctgatgtagccaactgaataacca

SEQ ID NO: 3542650 - DNA, 25 bp, Homo sapien
caatgacatctagtagtcgtaaaac

SEQ ID NO: 3542651 - DNA, 25 bp, Homo sapien
ttcagatgtgtttttacacagggtg

SEQ ID NO: 3542652 - DNA, 25 bp, Homo sapien
agcaaagcaatgtatttcagatgtg

SEQ ID NO: 3542653 - DNA, 25 bp, Homo sapien
tagcaaagcaatgtatttcagatgt

SEQ ID NO: 3542654 - DNA, 25 bp, Homo sapien
gcagcctgggggtagacacgatctc

SEQ ID NO: 3542655 - DNA, 25 bp, Homo sapien
tgagcgaatcaagcgatccaagaat

SEQ ID NO: 3542656 - DNA, 25 bp, Homo sapien
tcaagcgatccaagaattcctcttt

SEQ ID NO: 3542657 - DNA, 25 bp, Homo sapien
cccatcctctgagcgaatcaagcga

SEQ ID NO: 3542658 - DNA, 25 bp, Homo sapien
aatataaaatgacttgtaacagatc

SEQ ID NO: 3542659 - DNA, 25 bp, Homo sapien
aacaagattacttaacatggtctac

SEQ ID NO: 3542660 - DNA, 25 bp, Homo sapien
aaattctaggtgctatgaatcaggg

SEQ ID NO: 3542661 - DNA, 25 bp, Homo sapien
aagaaacaagattacttaacatggt

SEQ ID NO: 3542662 - DNA, 25 bp, Homo sapien
cataaatcgacaggaaccaacattg

SEQ ID NO: 3542663 - DNA, 25 bp, Homo sapien
caccagggatgtagcagttgaatat

SEQ ID NO: 3542664 - DNA, 25 bp, Homo sapien
tctcctgtaactaggtaacaccttc

SEQ ID NO: 3542665 - DNA, 25 bp, Homo sapien
accaacattgacttgacaccaggga

SEQ ID NO: 3542666 - DNA, 25 bp, Homo sapien
agaaccaggtattctctcagccaag

SEQ ID NO: 3542667 - DNA, 25 bp, Homo sapien
tatttagcttcgtagatcagacaaa

SEQ ID NO: 3542668 - DNA, 25 bp, Homo sapien
taaccatgcccaaccctatttagct

SEQ ID NO: 3542669 - DNA, 25 bp, Homo sapien
tcaagcaagttcaggatggtataga

SEQ ID NO: 3542670 - DNA, 25 bp, Homo sapien
tacaagaatgtgtagacatgaaatg

SEQ ID NO: 3542671 - DNA, 25 bp, Homo sapien
tgtgtagacatgaaatgttcaaagg

SEQ ID NO: 3542672 - DNA, 25 bp, Homo sapien
tatgtcttcacataatcaagtttaa

SEQ ID NO: 3542673 - DNA, 25 bp, Homo sapien
gcaatcccatgctttacaagaatgt

SEQ ID NO: 3542674 - DNA, 25 bp, Homo sapien
ctgcaattgtacatattggcaattt

SEQ ID NO: 3542675 - DNA, 25 bp, Homo sapien
attgtacatattggcaatttcccat

SEQ ID NO: 3542676 - DNA, 25 bp, Homo sapien
caattgtacatattggcaatttccc

SEQ ID NO: 3542677 - DNA, 25 bp, Homo sapien
gcaattgtacatattggcaatttcc

SEQ ID NO: 3542678 - DNA, 25 bp, Homo sapien
ctagaaagagacaaccaggattgct

SEQ ID NO: 3542679 - DNA, 25 bp, Homo sapien
gagacaaccaggattgctaggccat

SEQ ID NO: 3542680 - DNA, 25 bp, Homo sapien
aagagacaaccaggattgctaggcc

SEQ ID NO: 3542681 - DNA, 25 bp, Homo sapien
gaaagagacaaccaggattgctagg

SEQ ID NO: 3542682 - DNA, 25 bp, Homo sapien
acttcttggaagaataactccacaa

SEQ ID NO: 3542683 - DNA, 25 bp, Homo sapien
aattcaatccagtttggctcagagg

SEQ ID NO: 3542684 - DNA, 25 bp, Homo sapien
aagaggtgagatataatgtgttttc

SEQ ID NO: 3542685 - DNA, 25 bp, Homo sapien
actccacaatagtctgaggactaga

SEQ ID NO: 3542686 - DNA, 25 bp, Homo sapien
tgataagtgttggagattagactcc

SEQ ID NO: 3542687 - DNA, 25 bp, Homo sapien
tttgccattaaagcaccagagtctg

SEQ ID NO: 3542688 - DNA, 25 bp, Homo sapien
gcaccagagtctgttaattccagta

SEQ ID NO: 3542689 - DNA, 25 bp, Homo sapien
taattccagtactgataagtgttgg

SEQ ID NO: 3542690 - DNA, 25 bp, Homo sapien
tgtgtcaagtggaacatcagttgcc

SEQ ID NO: 3542691 - DNA, 25 bp, Homo sapien
taggtcttgctgagcttgaaagagc

SEQ ID NO: 3542692 - DNA, 25 bp, Homo sapien
ttgaaagagctgaccagttccccaa

SEQ ID NO: 3542693 - DNA, 25 bp, Homo sapien
agctgttcgatgtagtaggtcttgc

SEQ ID NO: 3542694 - DNA, 25 bp, Homo sapien
ctgcagatcaggaaacgagtactgg

SEQ ID NO: 3542695 - DNA, 25 bp, Homo sapien
cagctgctgtaagatcaaaagatct

SEQ ID NO: 3542696 - DNA, 25 bp, Homo sapien
gcgattttatgcacccctctgcaca

SEQ ID NO: 3542697 - DNA, 25 bp, Homo sapien
gggtaagattcattcgaatattcaa

SEQ ID NO: 3542698 - DNA, 25 bp, Homo sapien
cccgtataagtagtccaattgcatg

SEQ ID NO: 3542699 - DNA, 25 bp, Homo sapien
cataatccatttcccgtataagtag

SEQ ID NO: 3542700 - DNA, 25 bp, Homo sapien
tgcagtttactacaaatatcctcca

SEQ ID NO: 3542701 - DNA, 25 bp, Homo sapien
tgcatggattgggttcctaatctct

SEQ ID NO: 3542702 - DNA, 25 bp, Homo sapien
tcatggcgcatcagtttgactttaa

SEQ ID NO: 3542703 - DNA, 25 bp, Homo sapien
gactttaagctactattctgtacgc

SEQ ID NO: 3542704 - DNA, 25 bp, Homo sapien
ccaactttggcgctaaaaatgctga

SEQ ID NO: 3542705 - DNA, 25 bp, Homo sapien
tactattctgtacgctctggaacat

SEQ ID NO: 3542706 - DNA, 25 bp, Homo sapien
cagaatctgctctgcagccttttcc

SEQ ID NO: 3542707 - DNA, 25 bp, Homo sapien
tcagccggaggcattttataagaca

SEQ ID NO: 3542708 - DNA, 25 bp, Homo sapien
tccggagactgtaggttataacaac

SEQ ID NO: 3542709 - DNA, 25 bp, Homo sapien
tataagacatatgacatcccgagcg

SEQ ID NO: 3542710 - DNA, 25 bp, Homo sapien
gtcttaagccaatgacaatctattg

SEQ ID NO: 3542711 - DNA, 25 bp, Homo sapien
gaccaagacaggtgtggcaatcgat

SEQ ID NO: 3542712 - DNA, 25 bp, Homo sapien
gatgctttggtctcttaagtgttca

SEQ ID NO: 3542713 - DNA, 25 bp, Homo sapien
tatccatgtgaaacgaagcataggg

SEQ ID NO: 3542714 - DNA, 25 bp, Homo sapien
gttctcataaggcaggagatacaaa

SEQ ID NO: 3542715 - DNA, 25 bp, Homo sapien
aaaggttctcataaggcaggagata

SEQ ID NO: 3542716 - DNA, 25 bp, Homo sapien
aggttctcataaggcaggagataca

SEQ ID NO: 3542717 - DNA, 25 bp, Homo sapien
tctcataaggcaggagatacaaatg

SEQ ID NO: 3542718 - DNA, 25 bp, Homo sapien
tgctaaccgcaacattcaccagact

SEQ ID NO: 3542719 - DNA, 25 bp, Homo sapien
tcctaaatgctaaccgcaacattca

SEQ ID NO: 3542720 - DNA, 25 bp, Homo sapien
taacattcggcaagagccactgaac

SEQ ID NO: 3542721 - DNA, 25 bp, Homo sapien
aacattcaccagactaacattcggc

SEQ ID NO: 3542722 - DNA, 25 bp, Homo sapien
gacaacaggcatagaacttgcacca

SEQ ID NO: 3542723 - DNA, 25 bp, Homo sapien
tgagagagggcttcttgatactgaa

SEQ ID NO: 3542724 - DNA, 25 bp, Homo sapien
tcctcctgggagaattcatactctg

SEQ ID NO: 3542725 - DNA, 25 bp, Homo sapien
tgtggattcaaatgtagggcaagag

SEQ ID NO: 3542726 - DNA, 25 bp, Homo sapien
ttcagttcactccaggaaagatcca

SEQ ID NO: 3542727 - DNA, 25 bp, Homo sapien
cttcagttcactccaggaaagatcc

SEQ ID NO: 3542728 - DNA, 25 bp, Homo sapien
ttcttcagttcactccaggaaagat

SEQ ID NO: 3542729 - DNA, 25 bp, Homo sapien
tcctctcagttcctcggcagaaaat

SEQ ID NO: 3542730 - DNA, 25 bp, Homo sapien
gtcctggtgtaaaaagactttgcag

SEQ ID NO: 3542731 - DNA, 25 bp, Homo sapien
tgtgaattgtcctggtgtaaaaaga

SEQ ID NO: 3542732 - DNA, 25 bp, Homo sapien
cataaagcttcatttgtgaattgtc

SEQ ID NO: 3542733 - DNA, 25 bp, Homo sapien
tgtaaagccttacataaagcttcat

SEQ ID NO: 3542734 - DNA, 25 bp, Homo sapien
ggcagaggctgcataaaaactggat

SEQ ID NO: 3542735 - DNA, 25 bp, Homo sapien
ctggcagaggctgcataaaaactgg

SEQ ID NO: 3542736 - DNA, 25 bp, Homo sapien
gcagaggctgcataaaaactggatt

SEQ ID NO: 3542737 - DNA, 25 bp, Homo sapien
tgatcatctctgatgacaatctctt

SEQ ID NO: 3542738 - DNA, 25 bp, Homo sapien
tattatgctagatgcagttttagac

SEQ ID NO: 3542739 - DNA, 25 bp, Homo sapien
gtcattttaacactaaggcatcaaa

SEQ ID NO: 3542740 - DNA, 25 bp, Homo sapien
tatcacagctagtaagttgcacaac

SEQ ID NO: 3542741 - DNA, 25 bp, Homo sapien
tgtttcagatctcaagcccataatc

SEQ ID NO: 3542742 - DNA, 25 bp, Homo sapien
tgttaagttctgacaatccattatc

SEQ ID NO: 3542743 - DNA, 25 bp, Homo sapien
agttctgacaatccattatcatggg

SEQ ID NO: 3542744 - DNA, 25 bp, Homo sapien
acaatccattatcatgggaccagcc

SEQ ID NO: 3542745 - DNA, 25 bp, Homo sapien
tctgacaatccattatcatgggacc

SEQ ID NO: 3542746 - DNA, 25 bp, Homo sapien
gatgacagaattaagtgacccatac

SEQ ID NO: 3542747 - DNA, 25 bp, Homo sapien
gtgaggtaggatgacagaattaagt

SEQ ID NO: 3542748 - DNA, 25 bp, Homo sapien
ccggcctctcgtcttcttagcatga

SEQ ID NO: 3542749 - DNA, 25 bp, Homo sapien
ggcctctcgtcttcttagcatgaaa

SEQ ID NO: 3542750 - DNA, 25 bp, Homo sapien
tggttctcagcatcatgccacaggg

SEQ ID NO: 3542751 - DNA, 25 bp, Homo sapien
agggcccagatatccgtggaagtta

SEQ ID NO: 3542752 - DNA, 25 bp, Homo sapien
gatatccgtggaagttaaggcaaag

SEQ ID NO: 3542753 - DNA, 25 bp, Homo sapien
tcaaagttgatgtatttcactactg

SEQ ID NO: 3542754 - DNA, 25 bp, Homo sapien
tcacggtgacttactttttcatcag

SEQ ID NO: 3542755 - DNA, 25 bp, Homo sapien
gaaagaaagtagtagttcacggtga

SEQ ID NO: 3542756 - DNA, 25 bp, Homo sapien
tttcatcagtaggagaggtaaatgt

SEQ ID NO: 3542757 - DNA, 25 bp, Homo sapien
ccacatgaatttggtaaagtctaaa

SEQ ID NO: 3542758 - DNA, 25 bp, Homo sapien
tactctcagtgctcaccaactggaa

SEQ ID NO: 3542759 - DNA, 25 bp, Homo sapien
tgatcgagactatagcgattactct

SEQ ID NO: 3542760 - DNA, 25 bp, Homo sapien
agaaatatgatcgagactatagcga

SEQ ID NO: 3542761 - DNA, 25 bp, Homo sapien
tatagcgattactctcagtgctcac

SEQ ID NO: 3542762 - DNA, 25 bp, Homo sapien
acgacaggtgccagtgtgtgacgtt

SEQ ID NO: 3542763 - DNA, 25 bp, Homo sapien
cccctaccccacgacaggtgccagt

SEQ ID NO: 3542764 - DNA, 25 bp, Homo sapien
cccacgacaggtgccagtgtgtgac

SEQ ID NO: 3542765 - DNA, 25 bp, Homo sapien
cctaccccacgacaggtgccagtgt

SEQ ID NO: 3542766 - DNA, 25 bp, Homo sapien
gctactatgtatatggttgtacaaa

SEQ ID NO: 3542767 - DNA, 25 bp, Homo sapien
tacctatttgttgtggatggacact

SEQ ID NO: 3542768 - DNA, 25 bp, Homo sapien
gctttatcttattgcctattgtgag

SEQ ID NO: 3542769 - DNA, 25 bp, Homo sapien
tgtacgtacatgcaacaggttgttt

SEQ ID NO: 3542770 - DNA, 25 bp, Homo sapien
tcacatagtagcacgaaacccaacc

SEQ ID NO: 3542771 - DNA, 25 bp, Homo sapien
tacgtatctcatctacagacagcag

SEQ ID NO: 3542772 - DNA, 25 bp, Homo sapien
cctcagaaacacatctaggtcggtg

SEQ ID NO: 3542773 - DNA, 25 bp, Homo sapien
cagctactgtctggatgctaagcaa

SEQ ID NO: 3542774 - DNA, 25 bp, Homo sapien
tgtgtccagttccagcagtaagccg

SEQ ID NO: 3542775 - DNA, 25 bp, Homo sapien
ccgaaggtctttcttcacagggaca

SEQ ID NO: 3542776 - DNA, 25 bp, Homo sapien
catgcatgtatatccccaggtagag

SEQ ID NO: 3542777 - DNA, 25 bp, Homo sapien
taagcaagccgtaatttgtgtccag

SEQ ID NO: 3542778 - DNA, 25 bp, Homo sapien
cttgtaagaccacattcgtagttta

SEQ ID NO: 3542779 - DNA, 25 bp, Homo sapien
tgtaagaccacattcgtagtttatg

SEQ ID NO: 3542780 - DNA, 25 bp, Homo sapien
gtaagaccacattcgtagtttatga

SEQ ID NO: 3542781 - DNA, 25 bp, Homo sapien
aagaccacattcgtagtttatgatc

SEQ ID NO: 3542782 - DNA, 25 bp, Homo sapien
tgaaggcatcatgctccacacaatg

SEQ ID NO: 3542783 - DNA, 25 bp, Homo sapien
aaggcatcatgctccacacaatgaa

SEQ ID NO: 3542784 - DNA, 25 bp, Homo sapien
gaaggcatcatgctccacacaatga

SEQ ID NO: 3542785 - DNA, 25 bp, Homo sapien
ggcatcatgctccacacaatgaaca

SEQ ID NO: 3542786 - DNA, 25 bp, Homo sapien
ggacgatctgaaggcgactggtcac

SEQ ID NO: 3542787 - DNA, 25 bp, Homo sapien
aggggacgatctgaaggcgactggt

SEQ ID NO: 3542788 - DNA, 25 bp, Homo sapien
ctgaggggacgatctgaaggcgact

SEQ ID NO: 3542789 - DNA, 25 bp, Homo sapien
gggacgatctgaaggcgactggtca

SEQ ID NO: 3542790 - DNA, 25 bp, Homo sapien
ttcagttccacgactgacaccatac

SEQ ID NO: 3542791 - DNA, 25 bp, Homo sapien
tctgtttcagttccacgactgacac

SEQ ID NO: 3542792 - DNA, 25 bp, Homo sapien
gaactctgtttcagttccacgactg

SEQ ID NO: 3542793 - DNA, 25 bp, Homo sapien
ctgaactctgtttcagttccacgac

SEQ ID NO: 3542794 - DNA, 25 bp, Homo sapien
caatgatatccaaggcacctcttga

SEQ ID NO: 3542795 - DNA, 25 bp, Homo sapien
ctgcaatgatatccaaggcacctct

SEQ ID NO: 3542796 - DNA, 25 bp, Homo sapien
tgcaatgatatccaaggcacctctt

SEQ ID NO: 3542797 - DNA, 25 bp, Homo sapien
atgatatccaaggcacctcttgaac

SEQ ID NO: 3542798 - DNA, 25 bp, Homo sapien
cattagggactcattaggcaagcaa

SEQ ID NO: 3542799 - DNA, 25 bp, Homo sapien
gcaataatgaatgaccagttccggg

SEQ ID NO: 3542800 - DNA, 25 bp, Homo sapien
tctcagggcagacaattaggcaacc

SEQ ID NO: 3542801 - DNA, 25 bp, Homo sapien
ctgcattggatgacgaggttgaact

SEQ ID NO: 3542802 - DNA, 25 bp, Homo sapien
gaggtagcttaagaacaaagattcc

SEQ ID NO: 3542803 - DNA, 25 bp, Homo sapien
tgcaaggatctgtgaaatcaacttt

SEQ ID NO: 3542804 - DNA, 25 bp, Homo sapien
tccaatgtcagtgaatattgactgc

SEQ ID NO: 3542805 - DNA, 25 bp, Homo sapien
gaagcacatggtaaggcaaacaggg

SEQ ID NO: 3542806 - DNA, 25 bp, Homo sapien
caagtttaagaaagctattcttctt

SEQ ID NO: 3542807 - DNA, 25 bp, Homo sapien
cagttcctctctattgctaaaaaag

SEQ ID NO: 3542808 - DNA, 25 bp, Homo sapien
tcagttcctctctattgctaaaaaa

SEQ ID NO: 3542809 - DNA, 25 bp, Homo sapien
gcttggtgagggataacgagaatcc

SEQ ID NO: 3542810 - DNA, 25 bp, Homo sapien
ttccaaaagacatcgctccagcact

SEQ ID NO: 3542811 - DNA, 25 bp, Homo sapien
tacatttgtgacacccagagtaatt

SEQ ID NO: 3542812 - DNA, 25 bp, Homo sapien
taagcggtagctatcaaagtatgct

SEQ ID NO: 3542813 - DNA, 25 bp, Homo sapien
tggtaaaagtaacctgtgcactgtt

SEQ ID NO: 3542814 - DNA, 25 bp, Homo sapien
tcagctccaatgtatctccagaggt

SEQ ID NO: 3542815 - DNA, 25 bp, Homo sapien
tatcacacgattctgagtctcagag

SEQ ID NO: 3542816 - DNA, 25 bp, Homo sapien
tcagagacataaacccctccaggta

SEQ ID NO: 3542817 - DNA, 25 bp, Homo sapien
ggaggccgagaacggggcactgctt

SEQ ID NO: 3542818 - DNA, 25 bp, Homo sapien
aagatgaaaggcacacgctactccg

SEQ ID NO: 3542819 - DNA, 25 bp, Homo sapien
acgctactccgcctggcttatttta

SEQ ID NO: 3542820 - DNA, 25 bp, Homo sapien
cctgagtagttaagatgaaaggcac

SEQ ID NO: 3542821 - DNA, 25 bp, Homo sapien
tggttacggagaacaacttgccact

SEQ ID NO: 3542822 - DNA, 25 bp, Homo sapien
cactgtattttacggcgccagccac

SEQ ID NO: 3542823 - DNA, 25 bp, Homo sapien
gaatgaacctgtttctggttacgga

SEQ ID NO: 3542824 - DNA, 25 bp, Homo sapien
gccactctccacgtagtaaaagcct

SEQ ID NO: 3542825 - DNA, 25 bp, Homo sapien
tgcaaaatgaacgtggtcagcctgc

SEQ ID NO: 3542826 - DNA, 25 bp, Homo sapien
ctgcaaaatgaacgtggtcagcctg

SEQ ID NO: 3542827 - DNA, 25 bp, Homo sapien
tgcacacgcgtcttctgagaaatga

SEQ ID NO: 3542828 - DNA, 25 bp, Homo sapien
cctgcacacgcgtcttctgagaaat

SEQ ID NO: 3542829 - DNA, 25 bp, Homo sapien
gctcagctccgcttagctccacgaa

SEQ ID NO: 3542830 - DNA, 25 bp, Homo sapien
aagtgcctcggcctttcgcgctcag

SEQ ID NO: 3542831 - DNA, 25 bp, Homo sapien
agctccacgaagctccgttccaggg

SEQ ID NO: 3542832 - DNA, 25 bp, Homo sapien
agactgtgaattcccgaaagtgcct

SEQ ID NO: 3542833 - DNA, 25 bp, Homo sapien
aaaggcagggccgcgcggtcgccgt

SEQ ID NO: 3542834 - DNA, 25 bp, Homo sapien
agggccgcgcggtcgccgtcacttc

SEQ ID NO: 3542835 - DNA, 25 bp, Homo sapien
gccgtcgccgcgacgcccaacggaa

SEQ ID NO: 3542836 - DNA, 25 bp, Homo sapien
cgacgcccaacggaacaaaggcagg

SEQ ID NO: 3542837 - DNA, 25 bp, Homo sapien
tctatctgcgggaaccttccagtgg

SEQ ID NO: 3542838 - DNA, 25 bp, Homo sapien
gttgcgaggcttccaccgggagaat

SEQ ID NO: 3542839 - DNA, 25 bp, Homo sapien
gctccggcccttcgttgcgaggctt

SEQ ID NO: 3542840 - DNA, 25 bp, Homo sapien
tccggagggcggtgctcttttctca

SEQ ID NO: 3542841 - DNA, 25 bp, Homo sapien
cctctgccggatcccgggtttatgg

SEQ ID NO: 3542842 - DNA, 25 bp, Homo sapien
cggcctttcggcgtcctctgccgga

SEQ ID NO: 3542843 - DNA, 25 bp, Homo sapien
tcacctctccctcggttagggtgtc

SEQ ID NO: 3542844 - DNA, 25 bp, Homo sapien
ctccctcggttagggtgtccgtctg

SEQ ID NO: 3542845 - DNA, 25 bp, Homo sapien
tatatttctctcgcatcctccagga

SEQ ID NO: 3542846 - DNA, 25 bp, Homo sapien
ttatatttctctcgcatcctccagg

SEQ ID NO: 3542847 - DNA, 25 bp, Homo sapien
atatttctctcgcatcctccaggat

SEQ ID NO: 3542848 - DNA, 25 bp, Homo sapien
tgacgctggcctcgacaatgccagg

SEQ ID NO: 3542849 - DNA, 25 bp, Homo sapien
tccttgggctggtcctgacgctggc

SEQ ID NO: 3542850 - DNA, 25 bp, Homo sapien
ttccttactaatgccaagtctggga

SEQ ID NO: 3542851 - DNA, 25 bp, Homo sapien
gagtaacggtatgtggagccaagtc

SEQ ID NO: 3542852 - DNA, 25 bp, Homo sapien
ctacaggaaatagaaagatgcaggt

SEQ ID NO: 3542853 - DNA, 25 bp, Homo sapien
caggaaatagaaagatgcaggtctg

SEQ ID NO: 3542854 - DNA, 25 bp, Homo sapien
tacaggaaatagaaagatgcaggtc

SEQ ID NO: 3542855 - DNA, 25 bp, Homo sapien
acaggaaatagaaagatgcaggtct

SEQ ID NO: 3542856 - DNA, 25 bp, Homo sapien
aaattccaattacctcatacatgga

SEQ ID NO: 3542857 - DNA, 25 bp, Homo sapien
tccaattacctcatacatggaaact

SEQ ID NO: 3542858 - DNA, 25 bp, Homo sapien
ttccaattacctcatacatggaaac

SEQ ID NO: 3542859 - DNA, 25 bp, Homo sapien
aattccaattacctcatacatggaa

SEQ ID NO: 3542860 - DNA, 25 bp, Homo sapien
ccactggtctaggtccctggcccat

SEQ ID NO: 3542861 - DNA, 25 bp, Homo sapien
gcccatgaagccagctgatggagcc

SEQ ID NO: 3542862 - DNA, 25 bp, Homo sapien
ttcagcttccactggtctaggtccc

SEQ ID NO: 3542863 - DNA, 25 bp, Homo sapien
cagcttccactggtctaggtccctg

SEQ ID NO: 3542864 - DNA, 25 bp, Homo sapien
cactatacttttggtccaagaaatg

SEQ ID NO: 3542865 - DNA, 25 bp, Homo sapien
ataaatcccctgtaaaacagcaagc

SEQ ID NO: 3542866 - DNA, 25 bp, Homo sapien
attgataaatcccctgtaaaacagc

SEQ ID NO: 3542867 - DNA, 25 bp, Homo sapien
acatccgccatgtgcctgccgaggt

SEQ ID NO: 3542868 - DNA, 25 bp, Homo sapien
cgccatgtgcctgccgaggtcgtgc

SEQ ID NO: 3542869 - DNA, 25 bp, Homo sapien
agaatcgccacatccgccatgtgcc

SEQ ID NO: 3542870 - DNA, 25 bp, Homo sapien
gaatcgccacatccgccatgtgcct

SEQ ID NO: 3542871 - DNA, 25 bp, Homo sapien
gtggatcttgctgcccgggcggcca

SEQ ID NO: 3542872 - DNA, 25 bp, Homo sapien
gaggatcccacattagtgccactgg

SEQ ID NO: 3542873 - DNA, 25 bp, Homo sapien
gccggacagtggatcttgctgcccg

SEQ ID NO: 3542874 - DNA, 25 bp, Homo sapien
ggagagtgtcctgaggatcccacat

SEQ ID NO: 3542875 - DNA, 25 bp, Homo sapien
agatgagggtggcaaggagctgacg

SEQ ID NO: 3542876 - DNA, 25 bp, Homo sapien
ctggagatgagggtggcaaggagct

SEQ ID NO: 3542877 - DNA, 25 bp, Homo sapien
gctggagatgagggtggcaaggagc

SEQ ID NO: 3542878 - DNA, 25 bp, Homo sapien
ggagatgagggtggcaaggagctga

SEQ ID NO: 3542879 - DNA, 25 bp, Homo sapien
gaagactaaagatctccctgggaga

SEQ ID NO: 3542880 - DNA, 25 bp, Homo sapien
tgaagcttggaaaaagcgctgagaa

SEQ ID NO: 3542881 - DNA, 25 bp, Homo sapien
ggcttatggtctaaccctaggtcca

SEQ ID NO: 3542882 - DNA, 25 bp, Homo sapien
gtctaaccctaggtccagatctgaa

SEQ ID NO: 3542883 - DNA, 25 bp, Homo sapien
tgaatgatcagtccagaatcagaac

SEQ ID NO: 3542884 - DNA, 25 bp, Homo sapien
cttgaatgatcagtccagaatcaga

SEQ ID NO: 3542885 - DNA, 25 bp, Homo sapien
gaatgatcagtccagaatcagaact

SEQ ID NO: 3542886 - DNA, 25 bp, Homo sapien
ttgaatgatcagtccagaatcagaa

SEQ ID NO: 3542887 - DNA, 25 bp, Homo sapien
gggatgcttaaagacatacaaaccc

SEQ ID NO: 3542888 - DNA, 25 bp, Homo sapien
tccagaaattatgagtgatgggaag

SEQ ID NO: 3542889 - DNA, 25 bp, Homo sapien
acaaaatgttgggatgcttaaagac

SEQ ID NO: 3542890 - DNA, 25 bp, Homo sapien
cagctccagaaattatgagtgatgg

SEQ ID NO: 3542891 - DNA, 25 bp, Homo sapien
gagaaaccgccttagttcacttctc

SEQ ID NO: 3542892 - DNA, 25 bp, Homo sapien
cctcagtggatggagggttgatagg

SEQ ID NO: 3542893 - DNA, 25 bp, Homo sapien
gcctcagtggatggagggttgatag

SEQ ID NO: 3542894 - DNA, 25 bp, Homo sapien
agaaaccgccttagttcacttctct

SEQ ID NO: 3542895 - DNA, 25 bp, Homo sapien
gagggactgccactgggttgttcat

SEQ ID NO: 3542896 - DNA, 25 bp, Homo sapien
agggactgccactgggttgttcatt

SEQ ID NO: 3542897 - DNA, 25 bp, Homo sapien
ggagagggactgccactgggttgtt

SEQ ID NO: 3542898 - DNA, 25 bp, Homo sapien
agagggactgccactgggttgttca

SEQ ID NO: 3542899 - DNA, 25 bp, Homo sapien
aaaaggataattatggccgaacgcg

SEQ ID NO: 3542900 - DNA, 25 bp, Homo sapien
aaaggataattatggccgaacgcgg

SEQ ID NO: 3542901 - DNA, 25 bp, Homo sapien
aaggataattatggccgaacgcggt

SEQ ID NO: 3542902 - DNA, 25 bp, Homo sapien
ggataattatggccgaacgcggtgg

SEQ ID NO: 3542903 - DNA, 25 bp, Homo sapien
tggaatatcctctagataagaaatg

SEQ ID NO: 3542904 - DNA, 25 bp, Homo sapien
tatcctctagataagaaatgtatgt

SEQ ID NO: 3542905 - DNA, 25 bp, Homo sapien
atgttcccggaaatgttccaacagg

SEQ ID NO: 3542906 - DNA, 25 bp, Homo sapien
tgtatgttcccggaaatgttccaac

SEQ ID NO: 3542907 - DNA, 25 bp, Homo sapien
catcctcctcttggtcccacttctc

SEQ ID NO: 3542908 - DNA, 25 bp, Homo sapien
ctctctcttttaatttgagaaagag

SEQ ID NO: 3542909 - DNA, 25 bp, Homo sapien
tgtacccatcctcctcttggtccca

SEQ ID NO: 3542910 - DNA, 25 bp, Homo sapien
tcacctgtacccatcctcctcttgg

SEQ ID NO: 3542911 - DNA, 25 bp, Homo sapien
gtcagccccggcctttcagtgtggc

SEQ ID NO: 3542912 - DNA, 25 bp, Homo sapien
tgtggcagcctttggcgctgcccat

SEQ ID NO: 3542913 - DNA, 25 bp, Homo sapien
ttgtctttcagtgtcagccccggcc

SEQ ID NO: 3542914 - DNA, 25 bp, Homo sapien
agccccggcctttcagtgtggcagc

SEQ ID NO: 3542915 - DNA, 25 bp, Homo sapien
taaaatacactgagggttgccaggc

SEQ ID NO: 3542916 - DNA, 25 bp, Homo sapien
tgccaggctgaatgggatccctgcg

SEQ ID NO: 3542917 - DNA, 25 bp, Homo sapien
gaaacattccattccgcttaggagg

SEQ ID NO: 3542918 - DNA, 25 bp, Homo sapien
gctggtgacctggttctaggctggt

SEQ ID NO: 3542919 - DNA, 25 bp, Homo sapien
ccagccgcatgacgcgcggaggagg

SEQ ID NO: 3542920 - DNA, 25 bp, Homo sapien
agccccagccgcatgacgcgcggag

SEQ ID NO: 3542921 - DNA, 25 bp, Homo sapien
agccgggaccgggtagccgcgcgct

SEQ ID NO: 3542922 - DNA, 25 bp, Homo sapien
cgctcgccgcggctccctgcagcag

SEQ ID NO: 3542923 - DNA, 25 bp, Homo sapien
ccgattcgcgcgtccggggcacgtt

SEQ ID NO: 3542924 - DNA, 25 bp, Homo sapien
gctgcctccgcgctcgcccgggctg

SEQ ID NO: 3542925 - DNA, 25 bp, Homo sapien
ggacgaggcggaccggctggcggag

SEQ ID NO: 3542926 - DNA, 25 bp, Homo sapien
agggcgcgcggggcatgaagccggc

SEQ ID NO: 3542927 - DNA, 25 bp, Homo sapien
gctgcggtgaaccttgatagcgcca

SEQ ID NO: 3542928 - DNA, 25 bp, Homo sapien
gattttataggtcgaatgaggtgaa

SEQ ID NO: 3542929 - DNA, 25 bp, Homo sapien
aagtccatgattttataggtcgaat

SEQ ID NO: 3542930 - DNA, 25 bp, Homo sapien
tgtgagtatgatgtggttatgacca

SEQ ID NO: 3542931 - DNA, 25 bp, Homo sapien
ggacagccagtccctaagtggagat

SEQ ID NO: 3542932 - DNA, 25 bp, Homo sapien
agggacagccagtccctaagtggag

SEQ ID NO: 3542933 - DNA, 25 bp, Homo sapien
gggacagccagtccctaagtggaga

SEQ ID NO: 3542934 - DNA, 25 bp, Homo sapien
tggtgataatgagggacagccagtc

SEQ ID NO: 3542935 - DNA, 25 bp, Homo sapien
gaaagtggtgaatatcttagaccag

SEQ ID NO: 3542936 - DNA, 25 bp, Homo sapien
ctgaaagtggtgaatatcttagacc

SEQ ID NO: 3542937 - DNA, 25 bp, Homo sapien
aaagtggtgaatatcttagaccaga

SEQ ID NO: 3542938 - DNA, 25 bp, Homo sapien
aagtggtgaatatcttagaccagag

SEQ ID NO: 3542939 - DNA, 25 bp, Homo sapien
tggctttactggtgccccctcggag

SEQ ID NO: 3542940 - DNA, 25 bp, Homo sapien
tttccagtggctttactggtgcccc

SEQ ID NO: 3542941 - DNA, 25 bp, Homo sapien
agtggctttactggtgccccctcgg

SEQ ID NO: 3542942 - DNA, 25 bp, Homo sapien
tccagtggctttactggtgccccct

SEQ ID NO: 3542943 - DNA, 25 bp, Homo sapien
gctcttaggtcccaagtttgcctgc

SEQ ID NO: 3542944 - DNA, 25 bp, Homo sapien
cccacaaaactgcttcggagagctc

SEQ ID NO: 3542945 - DNA, 25 bp, Homo sapien
actgcttcggagagctcttaggtcc

SEQ ID NO: 3542946 - DNA, 25 bp, Homo sapien
gagctcttaggtcccaagtttgcct

SEQ ID NO: 3542947 - DNA, 25 bp, Homo sapien
gcaaacgcttcacttcctaaaaggc

SEQ ID NO: 3542948 - DNA, 25 bp, Homo sapien
tcttttgggattggattggattagc

SEQ ID NO: 3542949 - DNA, 25 bp, Homo sapien
tatagtaaccagctgactgttcagc

SEQ ID NO: 3542950 - DNA, 25 bp, Homo sapien
gattggattagcagatacagagcgt

SEQ ID NO: 3542951 - DNA, 25 bp, Homo sapien
aaagctgttaatcgacctgagcccc

SEQ ID NO: 3542952 - DNA, 25 bp, Homo sapien
agttgtgtcatgacaggacagtggc

SEQ ID NO: 3542953 - DNA, 25 bp, Homo sapien
ccatttctccgggcctgactgtgag

SEQ ID NO: 3542954 - DNA, 25 bp, Homo sapien
gcccatggcacccagttgtgtcatg

SEQ ID NO: 3542955 - DNA, 25 bp, Homo sapien
cgaagttcccagatagcacaggctt

SEQ ID NO: 3542956 - DNA, 25 bp, Homo sapien
gcaccaggaactccatcatagagac

SEQ ID NO: 3542957 - DNA, 25 bp, Homo sapien
caccgaagttcccagatagcacagg

SEQ ID NO: 3542958 - DNA, 25 bp, Homo sapien
cgcaggatgctgtgtgcgcgcacat

SEQ ID NO: 3542959 - DNA, 25 bp, Homo sapien
cagctttgacagggattccatatgt

SEQ ID NO: 3542960 - DNA, 25 bp, Homo sapien
tggctagtctccttatgtacacagc

SEQ ID NO: 3542961 - DNA, 25 bp, Homo sapien
agctttgacagggattccatatgtt

SEQ ID NO: 3542962 - DNA, 25 bp, Homo sapien
gctagtctccttatgtacacagctt

SEQ ID NO: 3542963 - DNA, 25 bp, Homo sapien
tctgctgctgtttcgaatccttttc

SEQ ID NO: 3542964 - DNA, 25 bp, Homo sapien
cagttgtcgttgtccatgttattaa

SEQ ID NO: 3542965 - DNA, 25 bp, Homo sapien
agtctgctgctgtttcgaatccttt

SEQ ID NO: 3542966 - DNA, 25 bp, Homo sapien
gtttgccttcctcccaccaaatgct

SEQ ID NO: 3542967 - DNA, 25 bp, Homo sapien
tcaggagatcctggacatcctctgg

SEQ ID NO: 3542968 - DNA, 25 bp, Homo sapien
gagatcctggacatcctctggagcc

SEQ ID NO: 3542969 - DNA, 25 bp, Homo sapien
ctctggagcccaggggtggcctcac

SEQ ID NO: 3542970 - DNA, 25 bp, Homo sapien
ggagatcctggacatcctctggagc

SEQ ID NO: 3542971 - DNA, 25 bp, Homo sapien
cttgacaaaggcttttgctctctgg

SEQ ID NO: 3542972 - DNA, 25 bp, Homo sapien
ctccttgctttagcctggaatgcag

SEQ ID NO: 3542973 - DNA, 25 bp, Homo sapien
ggcatttccaccttgcttgacaaag

SEQ ID NO: 3542974 - DNA, 25 bp, Homo sapien
ggttagtgccagagctgtgaaagca

SEQ ID NO: 3542975 - DNA, 25 bp, Homo sapien
tgctgaggaccctggtgtggagttg

SEQ ID NO: 3542976 - DNA, 25 bp, Homo sapien
cagccacagagatgagggaagcatg

SEQ ID NO: 3542977 - DNA, 25 bp, Homo sapien
ggccaccagccgctaggggcctggc

SEQ ID NO: 3542978 - DNA, 25 bp, Homo sapien
gtgggccaccagccgctaggggcct

SEQ ID NO: 3542979 - DNA, 25 bp, Homo sapien
tcctctgaaaggtggccaccactca

SEQ ID NO: 3542980 - DNA, 25 bp, Homo sapien
tcagctctgcgagtgctgggagcaa

SEQ ID NO: 3542981 - DNA, 25 bp, Homo sapien
taaggcaggctagcttccaaggcat

SEQ ID NO: 3542982 - DNA, 25 bp, Homo sapien
cagtgctgaaaacgcgatgcatttc

SEQ ID NO: 3542983 - DNA, 25 bp, Homo sapien
gctagcctgtctctcgttctggtca

SEQ ID NO: 3542984 - DNA, 25 bp, Homo sapien
cagaggccttctcacgtgggtcgag

SEQ ID NO: 3542985 - DNA, 25 bp, Homo sapien
aggccttctcacgtgggtcgaggca

SEQ ID NO: 3542986 - DNA, 25 bp, Homo sapien
gccttgggtacccagaggccttctc

SEQ ID NO: 3542987 - DNA, 25 bp, Homo sapien
acgggcagccttgggtacccagagg

SEQ ID NO: 3542988 - DNA, 25 bp, Homo sapien
tcccaggaccccatgccgaaatctg

SEQ ID NO: 3542989 - DNA, 25 bp, Homo sapien
tccctcctctaagcccgctcagtgt

SEQ ID NO: 3542990 - DNA, 25 bp, Homo sapien
tctaagcccgctcagtgtgtgtcat

SEQ ID NO: 3542991 - DNA, 25 bp, Homo sapien
tcctctaagcccgctcagtgtgtgt

SEQ ID NO: 3542992 - DNA, 25 bp, Homo sapien
gatgacttcctcaatgccagacttg

SEQ ID NO: 3542993 - DNA, 25 bp, Homo sapien
tcccctggtaggacctggagatagg

SEQ ID NO: 3542994 - DNA, 25 bp, Homo sapien
aagtttcagactttcttaggcaggg

SEQ ID NO: 3542995 - DNA, 25 bp, Homo sapien
aagcaatgccgctgccaatggtgcg

SEQ ID NO: 3542996 - DNA, 25 bp, Homo sapien
gggttccgaacagatataataagct

SEQ ID NO: 3542997 - DNA, 25 bp, Homo sapien
taatttagtgctgtatgataggacc

SEQ ID NO: 3542998 - DNA, 25 bp, Homo sapien
gggacttggttatcctgggattgca

SEQ ID NO: 3542999 - DNA, 25 bp, Homo sapien
ggttcactagaactacagatgagtg

SEQ ID NO: 3543000 - DNA, 25 bp, Homo sapien
cttcagtatgaactgatcaactgta

SEQ ID NO: 3543001 - DNA, 25 bp, Homo sapien
gacttaggacttttggactcatagt

SEQ ID NO: 3543002 - DNA, 25 bp, Homo sapien
tgatcaactgtaacttgaaaatttc

SEQ ID NO: 3543003 - DNA, 25 bp, Homo sapien
taggacttttggactcatagtgaaa

SEQ ID NO: 3543004 - DNA, 25 bp, Homo sapien
tccttcccagctaaagtcctggtca

SEQ ID NO: 3543005 - DNA, 25 bp, Homo sapien
gagcctcctgcatggagtgttcttc

SEQ ID NO: 3543006 - DNA, 25 bp, Homo sapien
gaaaggcccccttgttcatgaagcc

SEQ ID NO: 3543007 - DNA, 25 bp, Homo sapien
taccccagccaggtatactttctct

SEQ ID NO: 3543008 - DNA, 25 bp, Homo sapien
tctctaatggtgttttgcacattca

SEQ ID NO: 3543009 - DNA, 25 bp, Homo sapien
ttctctaatggtgttttgcacattc

SEQ ID NO: 3543010 - DNA, 25 bp, Homo sapien
cattcatttgcttgtgccgagccgc

SEQ ID NO: 3543011 - DNA, 25 bp, Homo sapien
aaccttggtggaaactgtgctggca

SEQ ID NO: 3543012 - DNA, 25 bp, Homo sapien
cagaatctgaatttcccggaagcgc

SEQ ID NO: 3543013 - DNA, 25 bp, Homo sapien
tctgatgcgggtggtctgcaaacca

SEQ ID NO: 3543014 - DNA, 25 bp, Homo sapien
taacataagagcttcttatggctct

SEQ ID NO: 3543015 - DNA, 25 bp, Homo sapien
ccctctatagaggtcatcacctggg

SEQ ID NO: 3543016 - DNA, 25 bp, Homo sapien
gttacttgagtaacataagagcttc

SEQ ID NO: 3543017 - DNA, 25 bp, Homo sapien
ctatgggccctctatagaggtcatc

SEQ ID NO: 3543018 - DNA, 25 bp, Homo sapien
tttccctttcctgagaagagcatgg

SEQ ID NO: 3543019 - DNA, 25 bp, Homo sapien
gagcatgggccactggcttttccat

SEQ ID NO: 3543020 - DNA, 25 bp, Homo sapien
gaagagcatgggccactggcttttc

SEQ ID NO: 3543021 - DNA, 25 bp, Homo sapien
tgagaagagcatgggccactggctt

SEQ ID NO: 3543022 - DNA, 25 bp, Homo sapien
ctctgatgggcacttggcttgtttc

SEQ ID NO: 3543023 - DNA, 25 bp, Homo sapien
gcgtgaactactgcgccgggcttga

SEQ ID NO: 3543024 - DNA, 25 bp, Homo sapien
taagtgaagttgtgcagtgtttgtc

SEQ ID NO: 3543025 - DNA, 25 bp, Homo sapien
gaaaatattccacctataagtgaag

SEQ ID NO: 3543026 - DNA, 25 bp, Homo sapien
ggatttccaagttcaccctcggctg

SEQ ID NO: 3543027 - DNA, 25 bp, Homo sapien
catttttgggacctggaattgtgaa

SEQ ID NO: 3543028 - DNA, 25 bp, Homo sapien
tccctaaggcggaagatgagccagc

SEQ ID NO: 3543029 - DNA, 25 bp, Homo sapien
tcggctgtgcgtctcaaagtccaca

SEQ ID NO: 3543030 - DNA, 25 bp, Homo sapien
acaattagcagcatggacaacagca

SEQ ID NO: 3543031 - DNA, 25 bp, Homo sapien
cagggccacaattagcagcatggac

SEQ ID NO: 3543032 - DNA, 25 bp, Homo sapien
tgcagggccacaattagcagcatgg

SEQ ID NO: 3543033 - DNA, 25 bp, Homo sapien
gccacaattagcagcatggacaaca

SEQ ID NO: 3543034 - DNA, 25 bp, Homo sapien
cattgcccttttgttgctacattgc

SEQ ID NO: 3543035 - DNA, 25 bp, Homo sapien
ggtggaagatcgtcataacctttgg

SEQ ID NO: 3543036 - DNA, 25 bp, Homo sapien
ctttggaaaatgagacctggactcc

SEQ ID NO: 3543037 - DNA, 25 bp, Homo sapien
tggactcccgcatgttttgctttca

SEQ ID NO: 3543038 - DNA, 25 bp, Homo sapien
gagccaggcagcatgagatccagtc

SEQ ID NO: 3543039 - DNA, 25 bp, Homo sapien
gaaattactcccagactaaggctgc

SEQ ID NO: 3543040 - DNA, 25 bp, Homo sapien
ccagggctgctgtaataagatcaag

SEQ ID NO: 3543041 - DNA, 25 bp, Homo sapien
cacagtgttggttctagagccaggc

SEQ ID NO: 3543042 - DNA, 25 bp, Homo sapien
aatggcataacgcagatcagcagta

SEQ ID NO: 3543043 - DNA, 25 bp, Homo sapien
ttcagtagcaactgttgccacaggg

SEQ ID NO: 3543044 - DNA, 25 bp, Homo sapien
gagccaacgatagtttaagaacacc

SEQ ID NO: 3543045 - DNA, 25 bp, Homo sapien
gaacacctgaacaaggatctaatgg

SEQ ID NO: 3543046 - DNA, 25 bp, Homo sapien
gaattatttctagggtaatatgaga

SEQ ID NO: 3543047 - DNA, 25 bp, Homo sapien
cagtgtttaagaattacttgtctaa

SEQ ID NO: 3543048 - DNA, 25 bp, Homo sapien
cctgttgttgggaaggtagattatt

SEQ ID NO: 3543049 - DNA, 25 bp, Homo sapien
catacacagttaaaataagtcattg

SEQ ID NO: 3543050 - DNA, 25 bp, Homo sapien
gccacaagcctgaccctgatctgga

SEQ ID NO: 3543051 - DNA, 25 bp, Homo sapien
tatacctacaagatacatgtggcgg

SEQ ID NO: 3543052 - DNA, 25 bp, Homo sapien
tgatctggaaagtcagcgataacga

SEQ ID NO: 3543053 - DNA, 25 bp, Homo sapien
taacgagtcgtcatctaactatacc

SEQ ID NO: 3543054 - DNA, 25 bp, Homo sapien
ggttttcagactactgtgtagcagc

SEQ ID NO: 3543055 - DNA, 25 bp, Homo sapien
ctatgcagcccatcacgtgtgtttt

SEQ ID NO: 3543056 - DNA, 25 bp, Homo sapien
catctgggatgaaaaagcctggttc

SEQ ID NO: 3543057 - DNA, 25 bp, Homo sapien
tattgagctaaacaagtcttggtga

SEQ ID NO: 3543058 - DNA, 25 bp, Homo sapien
attgcctgttattgttgaatctgat

SEQ ID NO: 3543059 - DNA, 25 bp, Homo sapien
gcattgcctgttattgttgaatctg

SEQ ID NO: 3543060 - DNA, 25 bp, Homo sapien
tgaatctgatggagatgaaattggt

SEQ ID NO: 3543061 - DNA, 25 bp, Homo sapien
gaatctgatggagatgaaattggtc

SEQ ID NO: 3543062 - DNA, 25 bp, Homo sapien
tctctggataagtaaagacagtttt

SEQ ID NO: 3543063 - DNA, 25 bp, Homo sapien
agggcctaccctccacataaaatat

SEQ ID NO: 3543064 - DNA, 25 bp, Homo sapien
catgagaggttcaaaaagtctattt

SEQ ID NO: 3543065 - DNA, 25 bp, Homo sapien
taacagctataaccaaactagaact

SEQ ID NO: 3543066 - DNA, 25 bp, Homo sapien
accagattatatgggaccaactgca

SEQ ID NO: 3543067 - DNA, 25 bp, Homo sapien
ccaccagattatatgggaccaactg

SEQ ID NO: 3543068 - DNA, 25 bp, Homo sapien
gcccaccagattatatgggaccaac

SEQ ID NO: 3543069 - DNA, 25 bp, Homo sapien
atcactgcagcagtgggcggaagac

SEQ ID NO: 3543070 - DNA, 25 bp, Homo sapien
tctgtgatgtccacccagtgctgga

SEQ ID NO: 3543071 - DNA, 25 bp, Homo sapien
gacaccttcttcattagcctgctga

SEQ ID NO: 3543072 - DNA, 25 bp, Homo sapien
aatggcggctccatctccgtagtca

SEQ ID NO: 3543073 - DNA, 25 bp, Homo sapien
tggccatcatgaaccagcgaatgtg

SEQ ID NO: 3543074 - DNA, 25 bp, Homo sapien
ccagccagctctgaaatggcctcac

SEQ ID NO: 3543075 - DNA, 25 bp, Homo sapien
gggtgatgccacacccaaattgcat

SEQ ID NO: 3543076 - DNA, 25 bp, Homo sapien
tggggtgatgccacacccaaattgc

SEQ ID NO: 3543077 - DNA, 25 bp, Homo sapien
ttggggtgatgccacacccaaattg

SEQ ID NO: 3543078 - DNA, 25 bp, Homo sapien
ggggtgatgccacacccaaattgca

SEQ ID NO: 3543079 - DNA, 25 bp, Homo sapien
ttctttgaatacttgaagcttaaaa

SEQ ID NO: 3543080 - DNA, 25 bp, Homo sapien
tctttgaatacttgaagcttaaaag

SEQ ID NO: 3543081 - DNA, 25 bp, Homo sapien
catgtaaatgagttctttgaatact

SEQ ID NO: 3543082 - DNA, 25 bp, Homo sapien
ttttcatgtaaatgagttctttgaa

SEQ ID NO: 3543083 - DNA, 25 bp, Homo sapien
tcagtggggaagttgtcaccagttc

SEQ ID NO: 3543084 - DNA, 25 bp, Homo sapien
agaaaggtcagtggggaagttgtca

SEQ ID NO: 3543085 - DNA, 25 bp, Homo sapien
aaggtcagtggggaagttgtcacca

SEQ ID NO: 3543086 - DNA, 25 bp, Homo sapien
tcaagaaaggtcagtggggaagttg

SEQ ID NO: 3543087 - DNA, 25 bp, Homo sapien
cagtttcatgatacaaacttatttc

SEQ ID NO: 3543088 - DNA, 25 bp, Homo sapien
tctggtaatttccttttcagctgtt

SEQ ID NO: 3543089 - DNA, 25 bp, Homo sapien
aacttatttctacatctctggtaat

SEQ ID NO: 3543090 - DNA, 25 bp, Homo sapien
catccagtttcatgatacaaactta

SEQ ID NO: 3543091 - DNA, 25 bp, Homo sapien
cttccagagcttcttaatgacattt

SEQ ID NO: 3543092 - DNA, 25 bp, Homo sapien
tgtaaatagggtgcaaaacacagtc

SEQ ID NO: 3543093 - DNA, 25 bp, Homo sapien
tcagttgtcattatttgcttccaga

SEQ ID NO: 3543094 - DNA, 25 bp, Homo sapien
caacataggtgtaaatagggtgcaa

SEQ ID NO: 3543095 - DNA, 25 bp, Homo sapien
agacagagctttgcgacgcccttca

SEQ ID NO: 3543096 - DNA, 25 bp, Homo sapien
ttcagagctatgagtcctcaggaag

SEQ ID NO: 3543097 - DNA, 25 bp, Homo sapien
caggatgatgacataggaagcaacc

SEQ ID NO: 3543098 - DNA, 25 bp, Homo sapien
agcaaccagcatggaaaaaatgagg

SEQ ID NO: 3543099 - DNA, 25 bp, Homo sapien
gccagctccagaagaggtactaaat

SEQ ID NO: 3543100 - DNA, 25 bp, Homo sapien
tccagaagaggtactaaatcacaca

SEQ ID NO: 3543101 - DNA, 25 bp, Homo sapien
gctccagaagaggtactaaatcaca

SEQ ID NO: 3543102 - DNA, 25 bp, Homo sapien
gaagaggtactaaatcacacataaa

SEQ ID NO: 3543103 - DNA, 25 bp, Homo sapien
aatgaacaaataggacggaaaagag

SEQ ID NO: 3543104 - DNA, 25 bp, Homo sapien
tataatgaacaaataggacggaaaa

SEQ ID NO: 3543105 - DNA, 25 bp, Homo sapien
taatgaacaaataggacggaaaaga

SEQ ID NO: 3543106 - DNA, 25 bp, Homo sapien
tgaacaaataggacggaaaagagta

SEQ ID NO: 3543107 - DNA, 25 bp, Homo sapien
ccagggctgggctgatgaagatgat

SEQ ID NO: 3543108 - DNA, 25 bp, Homo sapien
atgatgactgagatgaacaggttac

SEQ ID NO: 3543109 - DNA, 25 bp, Homo sapien
aagatgatgactgagatgaacaggt

SEQ ID NO: 3543110 - DNA, 25 bp, Homo sapien
gatgaagatgatgactgagatgaac

SEQ ID NO: 3543111 - DNA, 25 bp, Homo sapien
gagtgaggcccagcagtatgaattc

SEQ ID NO: 3543112 - DNA, 25 bp, Homo sapien
taacaaacaagaatttctgcagttc

SEQ ID NO: 3543113 - DNA, 25 bp, Homo sapien
tctgcagttctggattgtgagtgag

SEQ ID NO: 3543114 - DNA, 25 bp, Homo sapien
ctgccaatgtgatcaagtaggtgat

SEQ ID NO: 3543115 - DNA, 25 bp, Homo sapien
aatcacacaaattgttaccccagat

SEQ ID NO: 3543116 - DNA, 25 bp, Homo sapien
aattgttaccccagattatttggct

SEQ ID NO: 3543117 - DNA, 25 bp, Homo sapien
cacaaattgttaccccagattattt

SEQ ID NO: 3543118 - DNA, 25 bp, Homo sapien
cacacaaattgttaccccagattat

SEQ ID NO: 3543119 - DNA, 25 bp, Homo sapien
actacagtgatatggaaggcgcagg

SEQ ID NO: 3543120 - DNA, 25 bp, Homo sapien
tgtcaggccaagcaagatgaattcc

SEQ ID NO: 3543121 - DNA, 25 bp, Homo sapien
tgatcatgggtcgaaggtacaccaa

SEQ ID NO: 3543122 - DNA, 25 bp, Homo sapien
tagagagagccttccgctgtgagca

SEQ ID NO: 3543123 - DNA, 25 bp, Homo sapien
atccagtttggtatttggataattg

SEQ ID NO: 3543124 - DNA, 25 bp, Homo sapien
tccagtttggtatttggataattga

SEQ ID NO: 3543125 - DNA, 25 bp, Homo sapien
ctcgaaatccagtttggtatttgga

SEQ ID NO: 3543126 - DNA, 25 bp, Homo sapien
gaaatccagtttggtatttggataa

SEQ ID NO: 3543127 - DNA, 25 bp, Homo sapien
ctgtgaatagcacaaggattgcaat

SEQ ID NO: 3543128 - DNA, 25 bp, Homo sapien
aatagcacaaggattgcaatttgac

SEQ ID NO: 3543129 - DNA, 25 bp, Homo sapien
tgaatagcacaaggattgcaatttg

SEQ ID NO: 3543130 - DNA, 25 bp, Homo sapien
tgtgaatagcacaaggattgcaatt

SEQ ID NO: 3543131 - DNA, 25 bp, Homo sapien
attgcttcagtgctatcttggaaga

SEQ ID NO: 3543132 - DNA, 25 bp, Homo sapien
tgcttcagtgctatcttggaagatt

SEQ ID NO: 3543133 - DNA, 25 bp, Homo sapien
cttcagtgctatcttggaagatttg

SEQ ID NO: 3543134 - DNA, 25 bp, Homo sapien
aattgcttcagtgctatcttggaag

SEQ ID NO: 3543135 - DNA, 25 bp, Homo sapien
tggggaaataatatacaatagacat

SEQ ID NO: 3543136 - DNA, 25 bp, Homo sapien
ttggggaaataatatacaatagaca

SEQ ID NO: 3543137 - DNA, 25 bp, Homo sapien
cttggggaaataatatacaatagac

SEQ ID NO: 3543138 - DNA, 25 bp, Homo sapien
gaacttcaaaggcattggagttttg

SEQ ID NO: 3543139 - DNA, 25 bp, Homo sapien
cttgaacttcaaaggcattggagtt

SEQ ID NO: 3543140 - DNA, 25 bp, Homo sapien
tggagttttgaaaatccctgctgaa

SEQ ID NO: 3543141 - DNA, 25 bp, Homo sapien
gaaaatccctgctgaatgcatttga

SEQ ID NO: 3543142 - DNA, 25 bp, Homo sapien
gaaatgtcctttctactacacaatt

SEQ ID NO: 3543143 - DNA, 25 bp, Homo sapien
ctgaaatgtcctttctactacacaa

SEQ ID NO: 3543144 - DNA, 25 bp, Homo sapien
tgaaatgtcctttctactacacaat

SEQ ID NO: 3543145 - DNA, 25 bp, Homo sapien
aatgtcctttctactacacaatttc

SEQ ID NO: 3543146 - DNA, 25 bp, Homo sapien
gtcatgcatccattgaataggatgg

SEQ ID NO: 3543147 - DNA, 25 bp, Homo sapien
tctgcacctccgaagaaatgttctc

SEQ ID NO: 3543148 - DNA, 25 bp, Homo sapien
cgaggttgagcaaagggttcagatc

SEQ ID NO: 3543149 - DNA, 25 bp, Homo sapien
ccacaccactcccattagcagggca

SEQ ID NO: 3543150 - DNA, 25 bp, Homo sapien
agagataggccaggaaaaggtacat

SEQ ID NO: 3543151 - DNA, 25 bp, Homo sapien
tataaaggagagataggccaggaaa

SEQ ID NO: 3543152 - DNA, 25 bp, Homo sapien
ctataaaggagagataggccaggaa

SEQ ID NO: 3543153 - DNA, 25 bp, Homo sapien
aggagagataggccaggaaaaggta

SEQ ID NO: 3543154 - DNA, 25 bp, Homo sapien
tgaccacaatgagcgcatttcccac

SEQ ID NO: 3543155 - DNA, 25 bp, Homo sapien
acaatgagcgcatttcccaccacag

SEQ ID NO: 3543156 - DNA, 25 bp, Homo sapien
accacagtgatgatatagatgacaa

SEQ ID NO: 3543157 - DNA, 25 bp, Homo sapien
gatatagatgacaaaaaaacacaac

SEQ ID NO: 3543158 - DNA, 25 bp, Homo sapien
gttattcctattctccatgtatttc

SEQ ID NO: 3543159 - DNA, 25 bp, Homo sapien
atgtgatgattaattgcattacctg

SEQ ID NO: 3543160 - DNA, 25 bp, Homo sapien
ccatgtatttcatgtgatgattaat

SEQ ID NO: 3543161 - DNA, 25 bp, Homo sapien
gattaattgcattacctgaaaacat

SEQ ID NO: 3543162 - DNA, 25 bp, Homo sapien
caactgaagtctgcctcaattgagt

SEQ ID NO: 3543163 - DNA, 25 bp, Homo sapien
caattgagtctggagccgttgaagc

SEQ ID NO: 3543164 - DNA, 25 bp, Homo sapien
aagctaactgtggtagagggaagaa

SEQ ID NO: 3543165 - DNA, 25 bp, Homo sapien
ctggcttcagatatggtctcaactg

SEQ ID NO: 3543166 - DNA, 25 bp, Homo sapien
ttatttgacacttgaaatagctttc

SEQ ID NO: 3543167 - DNA, 25 bp, Homo sapien
tttgacacttgaaatagctttccta

SEQ ID NO: 3543168 - DNA, 25 bp, Homo sapien
gacacttgaaatagctttcctacta

SEQ ID NO: 3543169 - DNA, 25 bp, Homo sapien
tgacacttgaaatagctttcctact

SEQ ID NO: 3543170 - DNA, 25 bp, Homo sapien
tccttaaggagtacagtatgaccat

SEQ ID NO: 3543171 - DNA, 25 bp, Homo sapien
ggagagggctttgcaccttgcctct

SEQ ID NO: 3543172 - DNA, 25 bp, Homo sapien
cctctaagctgtgggtccttaagga

SEQ ID NO: 3543173 - DNA, 25 bp, Homo sapien
cagtatgaccatataggagaccagg

SEQ ID NO: 3543174 - DNA, 25 bp, Homo sapien
cattacagtaagtaggatgacctca

SEQ ID NO: 3543175 - DNA, 25 bp, Homo sapien
ctcccactagcaggctacaaacatg

SEQ ID NO: 3543176 - DNA, 25 bp, Homo sapien
tgacactcccactagcaggctacaa

SEQ ID NO: 3543177 - DNA, 25 bp, Homo sapien
gtaagtaggatgacctcaacacctc

SEQ ID NO: 3543178 - DNA, 25 bp, Homo sapien
gacctcaatgatgggctggcagtga

SEQ ID NO: 3543179 - DNA, 25 bp, Homo sapien
tcaatgatgggctggcagtgacggt

SEQ ID NO: 3543180 - DNA, 25 bp, Homo sapien
ggcagtgacggtgaccacaatgagc

SEQ ID NO: 3543181 - DNA, 25 bp, Homo sapien
ccacaatgagcacatttcctatcat

SEQ ID NO: 3543182 - DNA, 25 bp, Homo sapien
ggtggtgatgtagatgacaaaacac

SEQ ID NO: 3543183 - DNA, 25 bp, Homo sapien
ctataagccccagtagaataaactc

SEQ ID NO: 3543184 - DNA, 25 bp, Homo sapien
ataaactctgtcacattgtttctat

SEQ ID NO: 3543185 - DNA, 25 bp, Homo sapien
aagccccagtagaataaactctgtc

SEQ ID NO: 3543186 - DNA, 25 bp, Homo sapien
tataagccccagtagaataaactct

SEQ ID NO: 3543187 - DNA, 25 bp, Homo sapien
catgtatttcaaatggtggttaatt

SEQ ID NO: 3543188 - DNA, 25 bp, Homo sapien
tgtatttcaaatggtggttaattac

SEQ ID NO: 3543189 - DNA, 25 bp, Homo sapien
ttcaaatggtggttaattacaatac

SEQ ID NO: 3543190 - DNA, 25 bp, Homo sapien
tatttcaaatggtggttaattacaa

SEQ ID NO: 3543191 - DNA, 25 bp, Homo sapien
agaaccacttcgcttttgttgacat

SEQ ID NO: 3543192 - DNA, 25 bp, Homo sapien
gcagaaccacttcgcttttgttgac

SEQ ID NO: 3543193 - DNA, 25 bp, Homo sapien
cgcagaaccacttcgcttttgttga

SEQ ID NO: 3543194 - DNA, 25 bp, Homo sapien
cagaaccacttcgcttttgttgaca

SEQ ID NO: 3543195 - DNA, 25 bp, Homo sapien
cctcttacttttagagtacttagct

SEQ ID NO: 3543196 - DNA, 25 bp, Homo sapien
ctttacatccacaagttcggaatga

SEQ ID NO: 3543197 - DNA, 25 bp, Homo sapien
tttagagtacttagctctttgcaga

SEQ ID NO: 3543198 - DNA, 25 bp, Homo sapien
ttttcatctttgacacccacaagtt

SEQ ID NO: 3543199 - DNA, 25 bp, Homo sapien
cttaggctccccagtgtacttcttc

SEQ ID NO: 3543200 - DNA, 25 bp, Homo sapien
gtaagtggaatcatcttgtctacat

SEQ ID NO: 3543201 - DNA, 25 bp, Homo sapien
tccactgccagatctatgtaagtgg

SEQ ID NO: 3543202 - DNA, 25 bp, Homo sapien
atcttccactgccagatctatgtaa

SEQ ID NO: 3543203 - DNA, 25 bp, Homo sapien
aactctctgcacatgtcatcttcca

SEQ ID NO: 3543204 - DNA, 25 bp, Homo sapien
cgtggagagcgtactggaggagggc

SEQ ID NO: 3543205 - DNA, 25 bp, Homo sapien
agcatcacctgggacgactctttct

SEQ ID NO: 3543206 - DNA, 25 bp, Homo sapien
gggacgactctttctacactttcca

SEQ ID NO: 3543207 - DNA, 25 bp, Homo sapien
agtctgcccgacacccgcagcatca

SEQ ID NO: 3543208 - DNA, 25 bp, Homo sapien
cttgtcaagtaatgctcctggtgtc

SEQ ID NO: 3543209 - DNA, 25 bp, Homo sapien
ccccagtggaaagactggattttga

SEQ ID NO: 3543210 - DNA, 25 bp, Homo sapien
tgaaaacccaccagagccaactgaa

SEQ ID NO: 3543211 - DNA, 25 bp, Homo sapien
atgacaatttcacgggggggttctg

SEQ ID NO: 3543212 - DNA, 25 bp, Homo sapien
tgggactgggaagcctgaccttccc

SEQ ID NO: 3543213 - DNA, 25 bp, Homo sapien
cgcgagttcttgatgttcgttggaa

SEQ ID NO: 3543214 - DNA, 25 bp, Homo sapien
gaccgcgagttcttgatgttcgttg

SEQ ID NO: 3543215 - DNA, 25 bp, Homo sapien
aggagaccgcgagttcttgatgttc

SEQ ID NO: 3543216 - DNA, 25 bp, Homo sapien
gagaccgcgagttcttgatgttcgt

SEQ ID NO: 3543217 - DNA, 25 bp, Homo sapien
gaaaaggatgcaaagcctgctgttt

SEQ ID NO: 3543218 - DNA, 25 bp, Homo sapien
aggatgcaaagcctgctgtttcagg

SEQ ID NO: 3543219 - DNA, 25 bp, Homo sapien
ctgaaaaggatgcaaagcctgctgt

SEQ ID NO: 3543220 - DNA, 25 bp, Homo sapien
aaaggatgcaaagcctgctgtttca

SEQ ID NO: 3543221 - DNA, 25 bp, Homo sapien
gcctagaaccgcctggagggccatg

SEQ ID NO: 3543222 - DNA, 25 bp, Homo sapien
ttgctgggacctgcctagaaccgcc

SEQ ID NO: 3543223 - DNA, 25 bp, Homo sapien
ccttgcaagcccctggggtccctgt

SEQ ID NO: 3543224 - DNA, 25 bp, Homo sapien
ccagtacttttttgctgggacctgc

SEQ ID NO: 3543225 - DNA, 25 bp, Homo sapien
tgttctttagtcgagtgatgggttg

SEQ ID NO: 3543226 - DNA, 25 bp, Homo sapien
tctttagtcgagtgatgggttgagc

SEQ ID NO: 3543227 - DNA, 25 bp, Homo sapien
atctgttctttagtcgagtgatggg

SEQ ID NO: 3543228 - DNA, 25 bp, Homo sapien
tctgttctttagtcgagtgatgggt

SEQ ID NO: 3543229 - DNA, 25 bp, Homo sapien
aacagactcgcgtccacactggaga

SEQ ID NO: 3543230 - DNA, 25 bp, Homo sapien
cacccacaacagactcgcgtccaca

SEQ ID NO: 3543231 - DNA, 25 bp, Homo sapien
ccacaacagactcgcgtccacactg

SEQ ID NO: 3543232 - DNA, 25 bp, Homo sapien
acaacagactcgcgtccacactgga

SEQ ID NO: 3543233 - DNA, 25 bp, Homo sapien
gctccggggaaggtcaggcttccca

SEQ ID NO: 3543234 - DNA, 25 bp, Homo sapien
caagttgcatacactggccaggtaa

SEQ ID NO: 3543235 - DNA, 25 bp, Homo sapien
cactggccaggtaaaggcagcttct

SEQ ID NO: 3543236 - DNA, 25 bp, Homo sapien
catacactggccaggtaaaggcagc

SEQ ID NO: 3543237 - DNA, 25 bp, Homo sapien
tctctcaagttgcatacactggcca

SEQ ID NO: 3543238 - DNA, 25 bp, Homo sapien
ggacaccaggagcattacttgacaa

SEQ ID NO: 3543239 - DNA, 25 bp, Homo sapien
gacaccaggagcattacttgacaag

SEQ ID NO: 3543240 - DNA, 25 bp, Homo sapien
acagggacccaacacgcccactccg

SEQ ID NO: 3543241 - DNA, 25 bp, Homo sapien
aacacgcccactccggaacagcgtg

SEQ ID NO: 3543242 - DNA, 25 bp, Homo sapien
acccaacacgcccactccggaacag

SEQ ID NO: 3543243 - DNA, 25 bp, Homo sapien
cagggacccaacacgcccactccgg

SEQ ID NO: 3543244 - DNA, 25 bp, Homo sapien
gaaatatccatttgtgacctggaag

SEQ ID NO: 3543245 - DNA, 25 bp, Homo sapien
ccagaaatatccatttgtgacctgg

SEQ ID NO: 3543246 - DNA, 25 bp, Homo sapien
gaagcagcagacacccaaggcttag

SEQ ID NO: 3543247 - DNA, 25 bp, Homo sapien
ggtcaggaccagaaatatccatttg

SEQ ID NO: 3543248 - DNA, 25 bp, Homo sapien
ctcttcttccagggcggcgggccct

SEQ ID NO: 3543249 - DNA, 25 bp, Homo sapien
tcctcttcttccagggcggcgggcc

SEQ ID NO: 3543250 - DNA, 25 bp, Homo sapien
agggcggcgggcccttctcctgcac

SEQ ID NO: 3543251 - DNA, 25 bp, Homo sapien
tcttccagggcggcgggcccttctc

SEQ ID NO: 3543252 - DNA, 25 bp, Homo sapien
cctcagcctccggtttcttctccgt

SEQ ID NO: 3543253 - DNA, 25 bp, Homo sapien
cagcctccggtttcttctccgtggc

SEQ ID NO: 3543254 - DNA, 25 bp, Homo sapien
tgtaaggccacttgggtatccgcag

SEQ ID NO: 3543255 - DNA, 25 bp, Homo sapien
ttctccgtggccaccttgtaaggcc

SEQ ID NO: 3543256 - DNA, 25 bp, Homo sapien
gggccataagctgctccgccgcagg

SEQ ID NO: 3543257 - DNA, 25 bp, Homo sapien
acgccgggccataagctgctccgcc

SEQ ID NO: 3543258 - DNA, 25 bp, Homo sapien
cgcgggcgccttgcagaggcggatc

SEQ ID NO: 3543259 - DNA, 25 bp, Homo sapien
accacgccgggccataagctgctcc

SEQ ID NO: 3543260 - DNA, 25 bp, Homo sapien
tgggtagggccgcttgtgctactct

SEQ ID NO: 3543261 - DNA, 25 bp, Homo sapien
tactctgcgccctccgcttctcctg

SEQ ID NO: 3543262 - DNA, 25 bp, Homo sapien
cctctgggtagggccgcttgtgcta

SEQ ID NO: 3543263 - DNA, 25 bp, Homo sapien
gtagggccgcttgtgctactctgcg

SEQ ID NO: 3543264 - DNA, 25 bp, Homo sapien
gcgtcgccagaatttcctgagccgt

SEQ ID NO: 3543265 - DNA, 25 bp, Homo sapien
tcgccagaatttcctgagccgtctg

SEQ ID NO: 3543266 - DNA, 25 bp, Homo sapien
cagaatttcctgagccgtctggatt

SEQ ID NO: 3543267 - DNA, 25 bp, Homo sapien
ttcctgagccgtctggatttcctgc

SEQ ID NO: 3543268 - DNA, 25 bp, Homo sapien
ccagggagctctgggggcacacagt

SEQ ID NO: 3543269 - DNA, 25 bp, Homo sapien
cgccagtcgcctcttccccacgccc

SEQ ID NO: 3543270 - DNA, 25 bp, Homo sapien
gccagtcgcctcttccccacgccca

SEQ ID NO: 3543271 - DNA, 25 bp, Homo sapien
cccacgcccagggagctctgggggc

SEQ ID NO: 3543272 - DNA, 25 bp, Homo sapien
ctggcacgcgagggccacggcgggg

SEQ ID NO: 3543273 - DNA, 25 bp, Homo sapien
tgttagaggctggtggtcatcctga

SEQ ID NO: 3543274 - DNA, 25 bp, Homo sapien
ctgttagaggctggtggtcatcctg

SEQ ID NO: 3543275 - DNA, 25 bp, Homo sapien
gttagaggctggtggtcatcctgac

SEQ ID NO: 3543276 - DNA, 25 bp, Homo sapien
ggccacaggtggagcgccgcgtcag

SEQ ID NO: 3543277 - DNA, 25 bp, Homo sapien
ccctcgatcattggcgccctctcgt

SEQ ID NO: 3543278 - DNA, 25 bp, Homo sapien
gccacaggtggagcgccgcgtcagc

SEQ ID NO: 3543279 - DNA, 25 bp, Homo sapien
ttcttcgagccctcgatcattggcg

SEQ ID NO: 3543280 - DNA, 25 bp, Homo sapien
gaatgaggcggacgtgtaagtggct

SEQ ID NO: 3543281 - DNA, 25 bp, Homo sapien
ctgaatgaggcggacgtgtaagtgg

SEQ ID NO: 3543282 - DNA, 25 bp, Homo sapien
atgaggcggacgtgtaagtggctac

SEQ ID NO: 3543283 - DNA, 25 bp, Homo sapien
tgaatgaggcggacgtgtaagtggc

SEQ ID NO: 3543284 - DNA, 25 bp, Homo sapien
agcatcccacggcgggggccctcgc

SEQ ID NO: 3543285 - DNA, 25 bp, Homo sapien
gcagcatcccacggcgggggccctc

SEQ ID NO: 3543286 - DNA, 25 bp, Homo sapien
ctggcagcatcccacggcgggggcc

SEQ ID NO: 3543287 - DNA, 25 bp, Homo sapien
tggcagcatcccacggcgggggccc

SEQ ID NO: 3543288 - DNA, 25 bp, Homo sapien
gctcagggctcggatgccactggtt

SEQ ID NO: 3543289 - DNA, 25 bp, Homo sapien
gctcggatgccactggttccaccct

SEQ ID NO: 3543290 - DNA, 25 bp, Homo sapien
cagctcagggctcggatgccactgg

SEQ ID NO: 3543291 - DNA, 25 bp, Homo sapien
cagggctcggatgccactggttcca

SEQ ID NO: 3543292 - DNA, 25 bp, Homo sapien
aggtcaagacccaggacgtagttca

SEQ ID NO: 3543293 - DNA, 25 bp, Homo sapien
caacaagtagttggtgatgatagca

SEQ ID NO: 3543294 - DNA, 25 bp, Homo sapien
cttcaaggtcaagacccaggacgta

SEQ ID NO: 3543295 - DNA, 25 bp, Homo sapien
gacccaggacgtagttcaacaagta

SEQ ID NO: 3543296 - DNA, 25 bp, Homo sapien
agttgacttcgatgtggtggcactc

SEQ ID NO: 3543297 - DNA, 25 bp, Homo sapien
caccagggtatattcacaaagccgt

SEQ ID NO: 3543298 - DNA, 25 bp, Homo sapien
tggcactcagctaaggccaccaggg

SEQ ID NO: 3543299 - DNA, 25 bp, Homo sapien
tcctgccagttgacttcgatgtggt

SEQ ID NO: 3543300 - DNA, 25 bp, Homo sapien
cattgtggtcagtctcctgcgtctt

SEQ ID NO: 3543301 - DNA, 25 bp, Homo sapien
ggtcagtctcctgcgtcttctcaac

SEQ ID NO: 3543302 - DNA, 25 bp, Homo sapien
tctcctgcgtcttctcaacgctcac

SEQ ID NO: 3543303 - DNA, 25 bp, Homo sapien
ctagccattgtggtcagtctcctgc

SEQ ID NO: 3543304 - DNA, 25 bp, Homo sapien
gcagcagccccacgcctccaatacg

SEQ ID NO: 3543305 - DNA, 25 bp, Homo sapien
ctgcagcagccccacgcctccaata

SEQ ID NO: 3543306 - DNA, 25 bp, Homo sapien
caacgtctgcagcagccccacgcct

SEQ ID NO: 3543307 - DNA, 25 bp, Homo sapien
gtctgcagcagccccacgcctccaa

SEQ ID NO: 3543308 - DNA, 25 bp, Homo sapien
cctccaggacgccctcctccaggac

SEQ ID NO: 3543309 - DNA, 25 bp, Homo sapien
ctcctccaggacgccctcctccagg

SEQ ID NO: 3543310 - DNA, 25 bp, Homo sapien
tcctccaggacgccctcctccagga

SEQ ID NO: 3543311 - DNA, 25 bp, Homo sapien
ctctccaagccctcaacaccatgct

SEQ ID NO: 3543312 - DNA, 25 bp, Homo sapien
tctccaagccctcaacaccatgctc

SEQ ID NO: 3543313 - DNA, 25 bp, Homo sapien
gctctccaagccctcaacaccatgc

SEQ ID NO: 3543314 - DNA, 25 bp, Homo sapien
tccaagccctcaacaccatgctcct

SEQ ID NO: 3543315 - DNA, 25 bp, Homo sapien
ggtggcggggtcatgcagcgcaccc

SEQ ID NO: 3543316 - DNA, 25 bp, Homo sapien
cggggtcatgcagcgcaccccgcca

SEQ ID NO: 3543317 - DNA, 25 bp, Homo sapien
caccccgccaccctgtggctgggtc

SEQ ID NO: 3543318 - DNA, 25 bp, Homo sapien
agcgcaccccgccaccctgtggctg

SEQ ID NO: 3543319 - DNA, 25 bp, Homo sapien
aaataagtgggatgcacggagagac

SEQ ID NO: 3543320 - DNA, 25 bp, Homo sapien
gctcagcgctctatatgcaagaaga

SEQ ID NO: 3543321 - DNA, 25 bp, Homo sapien
caagaagacaacacggcagagaaac

SEQ ID NO: 3543322 - DNA, 25 bp, Homo sapien
gcctctggcaattccttagatctga

SEQ ID NO: 3543323 - DNA, 25 bp, Homo sapien
aagaatccagtgtgcattgccagaa

SEQ ID NO: 3543324 - DNA, 25 bp, Homo sapien
aatccagtgtgcattgccagaaaag

SEQ ID NO: 3543325 - DNA, 25 bp, Homo sapien
gaagaatccagtgtgcattgccaga

SEQ ID NO: 3543326 - DNA, 25 bp, Homo sapien
gaatccagtgtgcattgccagaaaa

SEQ ID NO: 3543327 - DNA, 25 bp, Homo sapien
gaaatcatcttggttaggatttgag

SEQ ID NO: 3543328 - DNA, 25 bp, Homo sapien
aatcatcttggttaggatttgagga

SEQ ID NO: 3543329 - DNA, 25 bp, Homo sapien
atcatcttggttaggatttgaggaa

SEQ ID NO: 3543330 - DNA, 25 bp, Homo sapien
tggaaatcatcttggttaggatttg

SEQ ID NO: 3543331 - DNA, 25 bp, Homo sapien
tgagggtacaatgcagcattgattt

SEQ ID NO: 3543332 - DNA, 25 bp, Homo sapien
ctgagggtacaatgcagcattgatt

SEQ ID NO: 3543333 - DNA, 25 bp, Homo sapien
ggtcccaccatgataacaccacatt

SEQ ID NO: 3543334 - DNA, 25 bp, Homo sapien
aggtcccaccatgataacaccacat

SEQ ID NO: 3543335 - DNA, 25 bp, Homo sapien
gtcccaccatgataacaccacattg

SEQ ID NO: 3543336 - DNA, 25 bp, Homo sapien
agagagaccagggagagtctgggat

SEQ ID NO: 3543337 - DNA, 25 bp, Homo sapien
ttcagttgggtctggtgggttttca

SEQ ID NO: 3543338 - DNA, 25 bp, Homo sapien
ccacaggcaagccacgtctagagtg

SEQ ID NO: 3543339 - DNA, 25 bp, Homo sapien
cacgtctagagtgagtccagagaga

SEQ ID NO: 3543340 - DNA, 25 bp, Homo sapien
gacaccaggagcattacttgacaag

SEQ ID NO: 3543341 - DNA, 25 bp, Homo sapien
ggacaccaggagcattacttgacaa

SEQ ID NO: 3543342 - DNA, 25 bp, Homo sapien
cttcttccagggcggcaggcgcttt

SEQ ID NO: 3543343 - DNA, 25 bp, Homo sapien
tccagggcggcaggcgcttttcctg

SEQ ID NO: 3543344 - DNA, 25 bp, Homo sapien
agggcggcaggcgcttttcctgcac

SEQ ID NO: 3543345 - DNA, 25 bp, Homo sapien
cttccagggcggcaggcgcttttcc

SEQ ID NO: 3543346 - DNA, 25 bp, Homo sapien
cctccttggccaccttgtaaggcca

SEQ ID NO: 3543347 - DNA, 25 bp, Homo sapien
ctcctccttggccaccttgtaaggc

SEQ ID NO: 3543348 - DNA, 25 bp, Homo sapien
ttggcctggcgcttcttctcggcct

SEQ ID NO: 3543349 - DNA, 25 bp, Homo sapien
ctccgcctccggtttctcctccttg

SEQ ID NO: 3543350 - DNA, 25 bp, Homo sapien
ggtgtccgcaggtggccggtgtccg

SEQ ID NO: 3543351 - DNA, 25 bp, Homo sapien
gtgtccgcaggtggccggtgtccgc

SEQ ID NO: 3543352 - DNA, 25 bp, Homo sapien
cgcaggtggccggtgtccgcaggtg

SEQ ID NO: 3543353 - DNA, 25 bp, Homo sapien
ggtggccggtgtccgcaggtggcca

SEQ ID NO: 3543354 - DNA, 25 bp, Homo sapien
ttggcgcattacaaactgtagccca

SEQ ID NO: 3543355 - DNA, 25 bp, Homo sapien
tggcgcattacaaactgtagcccaa

SEQ ID NO: 3543356 - DNA, 25 bp, Homo sapien
ggcgcattacaaactgtagcccaaa

SEQ ID NO: 3543357 - DNA, 25 bp, Homo sapien
tatcagggaacttctatccacatca

SEQ ID NO: 3543358 - DNA, 25 bp, Homo sapien
ggaacttctatccacatcaacaaag

SEQ ID NO: 3543359 - DNA, 25 bp, Homo sapien
cagggaacttctatccacatcaaca

SEQ ID NO: 3543360 - DNA, 25 bp, Homo sapien
tatatcagggaacttctatccacat

SEQ ID NO: 3543361 - DNA, 25 bp, Homo sapien
cccaattccaagagtgccccatgtt

SEQ ID NO: 3543362 - DNA, 25 bp, Homo sapien
gtgccccatgttaaactcccaataa

SEQ ID NO: 3543363 - DNA, 25 bp, Homo sapien
agatatgactactggctcttgcatg

SEQ ID NO: 3543364 - DNA, 25 bp, Homo sapien
ttgccagatatgaaaaaatcagccc

SEQ ID NO: 3543365 - DNA, 25 bp, Homo sapien
ggctcagacacttgcagcagcaggg

SEQ ID NO: 3543366 - DNA, 25 bp, Homo sapien
aatcccttgagcctgtccatcagtc

SEQ ID NO: 3543367 - DNA, 25 bp, Homo sapien
gccctgcactgaactctggattcac

SEQ ID NO: 3543368 - DNA, 25 bp, Homo sapien
ctctgaatcccttgagcctgtccat

SEQ ID NO: 3543369 - DNA, 25 bp, Homo sapien
catggaaaaatgcaaccatcttatg

SEQ ID NO: 3543370 - DNA, 25 bp, Homo sapien
tcatggaaaaatgcaaccatcttat

SEQ ID NO: 3543371 - DNA, 25 bp, Homo sapien
aaaatgcaaccatcttatgatattc

SEQ ID NO: 3543372 - DNA, 25 bp, Homo sapien
ttcatggaaaaatgcaaccatctta

SEQ ID NO: 3543373 - DNA, 25 bp, Homo sapien
attctgttggttgccatattcaggt

SEQ ID NO: 3543374 - DNA, 25 bp, Homo sapien
tgattctgttggttgccatattcag

SEQ ID NO: 3543375 - DNA, 25 bp, Homo sapien
gattctgttggttgccatattcagg

SEQ ID NO: 3543376 - DNA, 25 bp, Homo sapien
ctgcaaaagagccatgaattgaagc

SEQ ID NO: 3543377 - DNA, 25 bp, Homo sapien
aaagagccatgaattgaagcacaag

SEQ ID NO: 3543378 - DNA, 25 bp, Homo sapien
gaagacaataaagtatcattcacac

SEQ ID NO: 3543379 - DNA, 25 bp, Homo sapien
catgaattgaagcacaagtgaagac

SEQ ID NO: 3543380 - DNA, 25 bp, Homo sapien
ttgtctctctgtgcgtcccacatat

SEQ ID NO: 3543381 - DNA, 25 bp, Homo sapien
ctcctttgtctctctgtgcgtccca

SEQ ID NO: 3543382 - DNA, 25 bp, Homo sapien
cgtcccacatatttgctcctcagag

SEQ ID NO: 3543383 - DNA, 25 bp, Homo sapien
tctgtgcgtcccacatatttgctcc

SEQ ID NO: 3543384 - DNA, 25 bp, Homo sapien
aaagatacgactgttggctcatcat

SEQ ID NO: 3543385 - DNA, 25 bp, Homo sapien
catcaaaagatacgactgttggctc

SEQ ID NO: 3543386 - DNA, 25 bp, Homo sapien
tcaaaagatacgactgttggctcat

SEQ ID NO: 3543387 - DNA, 25 bp, Homo sapien
caaaagatacgactgttggctcatc

SEQ ID NO: 3543388 - DNA, 25 bp, Homo sapien
cacggactcactcctgcaaggaaaa

SEQ ID NO: 3543389 - DNA, 25 bp, Homo sapien
tacctcagaattagatgagcctgtc

SEQ ID NO: 3543390 - DNA, 25 bp, Homo sapien
cggactcactcctgcaaggaaaaac

SEQ ID NO: 3543391 - DNA, 25 bp, Homo sapien
cactgagctctagattcagaggctg

SEQ ID NO: 3543392 - DNA, 25 bp, Homo sapien
acatgtgaatagtgaaaaacctgaa

SEQ ID NO: 3543393 - DNA, 25 bp, Homo sapien
tggctttacttaaatgaagttgatg

SEQ ID NO: 3543394 - DNA, 25 bp, Homo sapien
tcagcatgtgcaaattatgtttttc

SEQ ID NO: 3543395 - DNA, 25 bp, Homo sapien
gcttctagccttaaattcacgtaat

SEQ ID NO: 3543396 - DNA, 25 bp, Homo sapien
tcttctcatactcagctctaattgc

SEQ ID NO: 3543397 - DNA, 25 bp, Homo sapien
cagtggctgattctggcggtttcca

SEQ ID NO: 3543398 - DNA, 25 bp, Homo sapien
gctgattctggcggtttccatgttc

SEQ ID NO: 3543399 - DNA, 25 bp, Homo sapien
tgattctggcggtttccatgttcag

SEQ ID NO: 3543400 - DNA, 25 bp, Homo sapien
cttccagtggctgattctggcggtt

SEQ ID NO: 3543401 - DNA, 25 bp, Homo sapien
tgccatgttgtcttcatgcattcaa

SEQ ID NO: 3543402 - DNA, 25 bp, Homo sapien
gccatgttgtcttcatgcattcaaa

SEQ ID NO: 3543403 - DNA, 25 bp, Homo sapien
caccagtagatagagccatccaaaa

SEQ ID NO: 3543404 - DNA, 25 bp, Homo sapien
tcctcaagtcgcagaaatctcctaa

SEQ ID NO: 3543405 - DNA, 25 bp, Homo sapien
tctcctaattcttcaacaccagtag

SEQ ID NO: 3543406 - DNA, 25 bp, Homo sapien
tcaagtcgcagaaatctcctaattc

SEQ ID NO: 3543407 - DNA, 25 bp, Homo sapien
gaggtagggaaaaagctgtatatga

SEQ ID NO: 3543408 - DNA, 25 bp, Homo sapien
gagggaaccttttgaagcatcataa

SEQ ID NO: 3543409 - DNA, 25 bp, Homo sapien
cataaaagctcgcaactgtgttgtc

SEQ ID NO: 3543410 - DNA, 25 bp, Homo sapien
tctctgcacatagtgagttaaggga

SEQ ID NO: 3543411 - DNA, 25 bp, Homo sapien
gtttgctgtcctggaatctttacag

SEQ ID NO: 3543412 - DNA, 25 bp, Homo sapien
ttgctgtcctggaatctttacagac

SEQ ID NO: 3543413 - DNA, 25 bp, Homo sapien
gtgatttgtgtttgctgtcctggaa

SEQ ID NO: 3543414 - DNA, 25 bp, Homo sapien
gtgtttgctgtcctggaatctttac

SEQ ID NO: 3543415 - DNA, 25 bp, Homo sapien
cagaatccagttgggggagtgggtt

SEQ ID NO: 3543416 - DNA, 25 bp, Homo sapien
tcccagaatccagttgggggagtgg

SEQ ID NO: 3543417 - DNA, 25 bp, Homo sapien
cccagaatccagttgggggagtggg

SEQ ID NO: 3543418 - DNA, 25 bp, Homo sapien
ccagaatccagttgggggagtgggt

SEQ ID NO: 3543419 - DNA, 25 bp, Homo sapien
gagaaggcctgagctccccatgctg

SEQ ID NO: 3543420 - DNA, 25 bp, Homo sapien
catgctgcaaagttctctgctctct

SEQ ID NO: 3543421 - DNA, 25 bp, Homo sapien
tccccgggtgcaccatcatggtcat

SEQ ID NO: 3543422 - DNA, 25 bp, Homo sapien
gggactccccgggtgcaccatcatg

SEQ ID NO: 3543423 - DNA, 25 bp, Homo sapien
gagcttatctaacactccagtgatg

SEQ ID NO: 3543424 - DNA, 25 bp, Homo sapien
gttgagcttatctaacactccagtg

SEQ ID NO: 3543425 - DNA, 25 bp, Homo sapien
tttgttgagcttatctaacactcca

SEQ ID NO: 3543426 - DNA, 25 bp, Homo sapien
ttatctaacactccagtgatgtgcc

SEQ ID NO: 3543427 - DNA, 25 bp, Homo sapien
gactctggatgatggaccctccctc

SEQ ID NO: 3543428 - DNA, 25 bp, Homo sapien
ctggtgcagcttcacatcgggcatg

SEQ ID NO: 3543429 - DNA, 25 bp, Homo sapien
catcgggcatgtggcacatctccca

SEQ ID NO: 3543430 - DNA, 25 bp, Homo sapien
tacttcactgttttggagttgtcga

SEQ ID NO: 3543431 - DNA, 25 bp, Homo sapien
tgttttggagttgtcgaaaaatctc

SEQ ID NO: 3543432 - DNA, 25 bp, Homo sapien
atattgggctgtggccataagcctc

SEQ ID NO: 3543433 - DNA, 25 bp, Homo sapien
tcatattgggctgtggccataagcc

SEQ ID NO: 3543434 - DNA, 25 bp, Homo sapien
agcccatcatattgggctgtggcca

SEQ ID NO: 3543435 - DNA, 25 bp, Homo sapien
tcctcagcagcccatcatattgggc

SEQ ID NO: 3543436 - DNA, 25 bp, Homo sapien
ttgatgttgtgaggtctgcgctgcc

SEQ ID NO: 3543437 - DNA, 25 bp, Homo sapien
ctgttgatgttgtgaggtctgcgct

SEQ ID NO: 3543438 - DNA, 25 bp, Homo sapien
gttgtgaggtctgcgctgccttgca

SEQ ID NO: 3543439 - DNA, 25 bp, Homo sapien
gaggtctgcgctgccttgcaagaga

SEQ ID NO: 3543440 - DNA, 25 bp, Homo sapien
cagataaagcaacagagctccctct

SEQ ID NO: 3543441 - DNA, 25 bp, Homo sapien
agataaagcaacagagctccctctg

SEQ ID NO: 3543442 - DNA, 25 bp, Homo sapien
gctccctctggaaggtttgcagtgt

SEQ ID NO: 3543443 - DNA, 25 bp, Homo sapien
gaaggtttgcagtgtgtctgaatcc

SEQ ID NO: 3543444 - DNA, 25 bp, Homo sapien
ctgcatgaactacttcatagacccg

SEQ ID NO: 3543445 - DNA, 25 bp, Homo sapien
catgaactacttcatagacccggtc

SEQ ID NO: 3543446 - DNA, 25 bp, Homo sapien
tgaactacttcatagacccggtcac

SEQ ID NO: 3543447 - DNA, 25 bp, Homo sapien
aactacttcatagacccggtcacca

SEQ ID NO: 3543448 - DNA, 25 bp, Homo sapien
tccttggccaccttgttaggccact

SEQ ID NO: 3543449 - DNA, 25 bp, Homo sapien
ttcttccaaagcagcgggcgcttct

SEQ ID NO: 3543450 - DNA, 25 bp, Homo sapien
tgttaggccacttgggtatccgcag

SEQ ID NO: 3543451 - DNA, 25 bp, Homo sapien
tccgcgctggcctcttgggctggaa

SEQ ID NO: 3543452 - DNA, 25 bp, Homo sapien
tgcctggccacaagctgctccgccg

SEQ ID NO: 3543453 - DNA, 25 bp, Homo sapien
ctcttggggattcctcacgggagcc

SEQ ID NO: 3543454 - DNA, 25 bp, Homo sapien
gattcctcacgggagcccgccgcct

SEQ ID NO: 3543455 - DNA, 25 bp, Homo sapien
ccggctcttggggattcctcacggg

SEQ ID NO: 3543456 - DNA, 25 bp, Homo sapien
ttggggattcctcacgggagcccgc

SEQ ID NO: 3543457 - DNA, 25 bp, Homo sapien
cgccctccgtttcgcccgccacctg

SEQ ID NO: 3543458 - DNA, 25 bp, Homo sapien
tgcgccctccgtttcgcccgccacc

SEQ ID NO: 3543459 - DNA, 25 bp, Homo sapien
ctgcgccctccgtttcgcccgccac

SEQ ID NO: 3543460 - DNA, 25 bp, Homo sapien
gccgccagaatttcctgagtcgcca

SEQ ID NO: 3543461 - DNA, 25 bp, Homo sapien
cgccgccagaatttcctgagtcgcc

SEQ ID NO: 3543462 - DNA, 25 bp, Homo sapien
ccgccagaatttcctgagtcgccag

SEQ ID NO: 3543463 - DNA, 25 bp, Homo sapien
tctggcacgcgaaggccacggcggt

SEQ ID NO: 3543464 - DNA, 25 bp, Homo sapien
cgcacagggtgctctcggggcacac

SEQ ID NO: 3543465 - DNA, 25 bp, Homo sapien
tcttccccacgcacagggtgctctc

SEQ ID NO: 3543466 - DNA, 25 bp, Homo sapien
tccccacgcacagggtgctctcggg

SEQ ID NO: 3543467 - DNA, 25 bp, Homo sapien
tgttagaggctggtggtcatcctga

SEQ ID NO: 3543468 - DNA, 25 bp, Homo sapien
ctgttagaggctggtggtcatcctg

SEQ ID NO: 3543469 - DNA, 25 bp, Homo sapien
gttagaggctggtggtcatcctgac

SEQ ID NO: 3543470 - DNA, 25 bp, Homo sapien
cagggcgccccggtcctctgggcca

SEQ ID NO: 3543471 - DNA, 25 bp, Homo sapien
tggtccagggcgccccggtcctctg

SEQ ID NO: 3543472 - DNA, 25 bp, Homo sapien
cgccccggtcctctgggccacgcac

SEQ ID NO: 3543473 - DNA, 25 bp, Homo sapien
tatgtggtccagggcgccccggtcc

SEQ ID NO: 3543474 - DNA, 25 bp, Homo sapien
ggcgtcagcgcggacagctcgcagt

SEQ ID NO: 3543475 - DNA, 25 bp, Homo sapien
agcgcggacagctcgcagtccctga

SEQ ID NO: 3543476 - DNA, 25 bp, Homo sapien
gcgcggacagctcgcagtccctgac

SEQ ID NO: 3543477 - DNA, 25 bp, Homo sapien
ggcgcgcggcgtcagcgcggacagc

SEQ ID NO: 3543478 - DNA, 25 bp, Homo sapien
tgcaggcagtttttggagccctcgg

SEQ ID NO: 3543479 - DNA, 25 bp, Homo sapien
tcgggcttctgcgccctctcgtgga

SEQ ID NO: 3543480 - DNA, 25 bp, Homo sapien
ttttggagccctcgggcttctgcgc

SEQ ID NO: 3543481 - DNA, 25 bp, Homo sapien
tcctggcaggggtgctccaagagcc

SEQ ID NO: 3543482 - DNA, 25 bp, Homo sapien
gcagggaccctcgtgtggacacccg

SEQ ID NO: 3543483 - DNA, 25 bp, Homo sapien
gggctccgatgtgatcggttcgacc

SEQ ID NO: 3543484 - DNA, 25 bp, Homo sapien
tagctcagggctccgatgtgatcgg

SEQ ID NO: 3543485 - DNA, 25 bp, Homo sapien
tcccacggcagggaccctcgtgtgg

SEQ ID NO: 3543486 - DNA, 25 bp, Homo sapien
ttcaaggtcaagacccaggacatag

SEQ ID NO: 3543487 - DNA, 25 bp, Homo sapien
ccttcaaggtcaagacccaggacat

SEQ ID NO: 3543488 - DNA, 25 bp, Homo sapien
cttcaaggtcaagacccaggacata

SEQ ID NO: 3543489 - DNA, 25 bp, Homo sapien
tcaaggtcaagacccaggacatagt

SEQ ID NO: 3543490 - DNA, 25 bp, Homo sapien
ccagttgacatcaatgtgggggtac

SEQ ID NO: 3543491 - DNA, 25 bp, Homo sapien
tcctgccagttgacatcaatgtggg

SEQ ID NO: 3543492 - DNA, 25 bp, Homo sapien
tgacatcaatgtgggggtactcagc

SEQ ID NO: 3543493 - DNA, 25 bp, Homo sapien
ctgcctgtgcagctatgattagggc

SEQ ID NO: 3543494 - DNA, 25 bp, Homo sapien
gcgtccgcagctgccccacgcctcc

SEQ ID NO: 3543495 - DNA, 25 bp, Homo sapien
cagcgtccgcagctgccccacgcct

SEQ ID NO: 3543496 - DNA, 25 bp, Homo sapien
cctccaggatgccctcctccggtac

SEQ ID NO: 3543497 - DNA, 25 bp, Homo sapien
ccacgcctccaggatgccctcctcc

SEQ ID NO: 3543498 - DNA, 25 bp, Homo sapien
tttgaattcagtgcggtcctcctcg

SEQ ID NO: 3543499 - DNA, 25 bp, Homo sapien
cctggaactctttgaattcagtgcg

SEQ ID NO: 3543500 - DNA, 25 bp, Homo sapien
cgacgctgcgagtgtcgggcagact

SEQ ID NO: 3543501 - DNA, 25 bp, Homo sapien
agagtcgtcagaggcgacgctgcga

SEQ ID NO: 3543502 - DNA, 25 bp, Homo sapien
tcgccaccctgcggccgagtcccag

SEQ ID NO: 3543503 - DNA, 25 bp, Homo sapien
tggcgggatcatgcagcgcgcctcg

SEQ ID NO: 3543504 - DNA, 25 bp, Homo sapien
ggtggcgggatcatgcagcgcgcct

SEQ ID NO: 3543505 - DNA, 25 bp, Homo sapien
cgggatcatgcagcgcgcctcgcca

SEQ ID NO: 3543506 - DNA, 25 bp, Homo sapien
ctgctgcatgggacatggcaataaa

SEQ ID NO: 3543507 - DNA, 25 bp, Homo sapien
tgggacatggcaataaatgggagtt

SEQ ID NO: 3543508 - DNA, 25 bp, Homo sapien
ctggctttcctgctgcatgggacat

SEQ ID NO: 3543509 - DNA, 25 bp, Homo sapien
ggacatggcaataaatgggagtttc

SEQ ID NO: 3543510 - DNA, 25 bp, Homo sapien
ggaggaaaaccatagataagagaac

SEQ ID NO: 3543511 - DNA, 25 bp, Homo sapien
gattgctcgtctttgaagaaattga

SEQ ID NO: 3543512 - DNA, 25 bp, Homo sapien
tgattgctcgtctttgaagaaattg

SEQ ID NO: 3543513 - DNA, 25 bp, Homo sapien
ataaggaaataatttgaggctggac

SEQ ID NO: 3543514 - DNA, 25 bp, Homo sapien
caataaggaaataatttgaggctgg

SEQ ID NO: 3543515 - DNA, 25 bp, Homo sapien
ccaataaggaaataatttgaggctg

SEQ ID NO: 3543516 - DNA, 25 bp, Homo sapien
cccaataaggaaataatttgaggct

SEQ ID NO: 3543517 - DNA, 25 bp, Homo sapien
tgttgagcatgtctaggactccagt

SEQ ID NO: 3543518 - DNA, 25 bp, Homo sapien
taggactccagttatgcaccatgaa

SEQ ID NO: 3543519 - DNA, 25 bp, Homo sapien
gttgagcatgtctaggactccagtt

SEQ ID NO: 3543520 - DNA, 25 bp, Homo sapien
ctaggactccagttatgcaccatga

SEQ ID NO: 3543521 - DNA, 25 bp, Homo sapien
atgcagtaataaatgactggaaaaa

SEQ ID NO: 3543522 - DNA, 25 bp, Homo sapien
tagagcagtgacatatgctgatgac

SEQ ID NO: 3543523 - DNA, 25 bp, Homo sapien
ctccacgtcaggcatgtggtatgtc

SEQ ID NO: 3543524 - DNA, 25 bp, Homo sapien
cgtcaggcatgtggtatgtctccca

SEQ ID NO: 3543525 - DNA, 25 bp, Homo sapien
agcagctccacgtcaggcatgtggt

SEQ ID NO: 3543526 - DNA, 25 bp, Homo sapien
cacgtcaggcatgtggtatgtctcc

SEQ ID NO: 3543527 - DNA, 25 bp, Homo sapien
acttgactgtcttgtagttgttgga

SEQ ID NO: 3543528 - DNA, 25 bp, Homo sapien
cttgactgtcttgtagttgttggaa

SEQ ID NO: 3543529 - DNA, 25 bp, Homo sapien
ctcacttgactgtcttgtagttgtt

SEQ ID NO: 3543530 - DNA, 25 bp, Homo sapien
cacttgactgtcttgtagttgttgg

SEQ ID NO: 3543531 - DNA, 25 bp, Homo sapien
tcctcatcgagaaatatatgcatct

SEQ ID NO: 3543532 - DNA, 25 bp, Homo sapien
tgcatcttttgatactgaatagtga

SEQ ID NO: 3543533 - DNA, 25 bp, Homo sapien
atactgaatagtgattatcaccttc

SEQ ID NO: 3543534 - DNA, 25 bp, Homo sapien
gccgttgctcctcctcatcgagaaa

SEQ ID NO: 3543535 - DNA, 25 bp, Homo sapien
tggttaaaaggattacatgttctca

SEQ ID NO: 3543536 - DNA, 25 bp, Homo sapien
ctcaatagaaaacttcaaataatta

SEQ ID NO: 3543537 - DNA, 25 bp, Homo sapien
caatagaaaacttcaaataattata

SEQ ID NO: 3543538 - DNA, 25 bp, Homo sapien
atagaaaacttcaaataattatatg

SEQ ID NO: 3543539 - DNA, 25 bp, Homo sapien
ctctcaatagaaaacttcaaataat

SEQ ID NO: 3543540 - DNA, 25 bp, Homo sapien
tgtttatttgcataaaaacaaagga

SEQ ID NO: 3543541 - DNA, 25 bp, Homo sapien
cattcttaaccactaatgaacaaaa

SEQ ID NO: 3543542 - DNA, 25 bp, Homo sapien
ttttcattcttaaccactaatgaac

SEQ ID NO: 3543543 - DNA, 25 bp, Homo sapien
tgaacaaaatttgctagtttcctga

SEQ ID NO: 3543544 - DNA, 25 bp, Homo sapien
cctcatcattcttatttgatattct

SEQ ID NO: 3543545 - DNA, 25 bp, Homo sapien
catcattcttatttgatattctgta

SEQ ID NO: 3543546 - DNA, 25 bp, Homo sapien
atattctgtataattcaaactgcct

SEQ ID NO: 3543547 - DNA, 25 bp, Homo sapien
ggaagactcgcagggtgtctgaatc

SEQ ID NO: 3543548 - DNA, 25 bp, Homo sapien
gtgcacacagtcagtggtgaccggg

SEQ ID NO: 3543549 - DNA, 25 bp, Homo sapien
ttataaaattatacaccagaaactg

SEQ ID NO: 3543550 - DNA, 25 bp, Homo sapien
tcaatttataaaattatacaccaga

SEQ ID NO: 3543551 - DNA, 25 bp, Homo sapien
caatttataaaattatacaccagaa

SEQ ID NO: 3543552 - DNA, 25 bp, Homo sapien
ataaaattatacaccagaaactgac

SEQ ID NO: 3543553 - DNA, 25 bp, Homo sapien
tcaatcatgcgagaagcaattttct

SEQ ID NO: 3543554 - DNA, 25 bp, Homo sapien
cttaggcattcaatcatgcgagaag

SEQ ID NO: 3543555 - DNA, 25 bp, Homo sapien
tttccatcaggagtgggatctgaga

SEQ ID NO: 3543556 - DNA, 25 bp, Homo sapien
tgaatacccatattcgactgatccc

SEQ ID NO: 3543557 - DNA, 25 bp, Homo sapien
gaattaaaggcacgcgctaagatgc

SEQ ID NO: 3543558 - DNA, 25 bp, Homo sapien
cggccccagatactctatttctata

SEQ ID NO: 3543559 - DNA, 25 bp, Homo sapien
actgggtccggccccagatactcta

SEQ ID NO: 3543560 - DNA, 25 bp, Homo sapien
ggaattaaaggcacgcgctaagatg

SEQ ID NO: 3543561 - DNA, 25 bp, Homo sapien
tctgtgtattagagctgacattgtt

SEQ ID NO: 3543562 - DNA, 25 bp, Homo sapien
tgaagtcagaacgtgactggttttt

SEQ ID NO: 3543563 - DNA, 25 bp, Homo sapien
aattttgacagttaacacattccag

SEQ ID NO: 3543564 - DNA, 25 bp, Homo sapien
caggaaaagggctactgctgaaagt

SEQ ID NO: 3543565 - DNA, 25 bp, Homo sapien
gccgttggttttgatgaaacagcta

SEQ ID NO: 3543566 - DNA, 25 bp, Homo sapien
agtgccgttggttttgatgaaacag

SEQ ID NO: 3543567 - DNA, 25 bp, Homo sapien
gatccctggtagagataacccagtg

SEQ ID NO: 3543568 - DNA, 25 bp, Homo sapien
atctgatccctggtagagataaccc

SEQ ID NO: 3543569 - DNA, 25 bp, Homo sapien
attaatatctgatccctggtagaga

SEQ ID NO: 3543570 - DNA, 25 bp, Homo sapien
cctggtagagataacccagtgggtc

SEQ ID NO: 3543571 - DNA, 25 bp, Homo sapien
ctgcgggtgattcttccacaggcac

SEQ ID NO: 3543572 - DNA, 25 bp, Homo sapien
tccacaggcacattgcaataaaaag

SEQ ID NO: 3543573 - DNA, 25 bp, Homo sapien
acattgcaataaaaagccacaaaaa

SEQ ID NO: 3543574 - DNA, 25 bp, Homo sapien
tgattcttccacaggcacattgcaa

SEQ ID NO: 3543575 - DNA, 25 bp, Homo sapien
gatataacatgtcactgcttctggc

SEQ ID NO: 3543576 - DNA, 25 bp, Homo sapien
tataacatgtcactgcttctggcag

SEQ ID NO: 3543577 - DNA, 25 bp, Homo sapien
agatataacatgtcactgcttctgg

SEQ ID NO: 3543578 - DNA, 25 bp, Homo sapien
atataacatgtcactgcttctggca

SEQ ID NO: 3543579 - DNA, 25 bp, Homo sapien
tcagagggatactcaagcctttagg

SEQ ID NO: 3543580 - DNA, 25 bp, Homo sapien
gatactcaagcctttaggatactca

SEQ ID NO: 3543581 - DNA, 25 bp, Homo sapien
tactttactctcgcagatcaccaca

SEQ ID NO: 3543582 - DNA, 25 bp, Homo sapien
ctgaagaattcagagggatactcaa

SEQ ID NO: 3543583 - DNA, 25 bp, Homo sapien
gaaccttctactacatccctcttgt

SEQ ID NO: 3543584 - DNA, 25 bp, Homo sapien
tgaaccttctactacatccctcttg

SEQ ID NO: 3543585 - DNA, 25 bp, Homo sapien
accttctactacatccctcttgtaa

SEQ ID NO: 3543586 - DNA, 25 bp, Homo sapien
ttgaaccttctactacatccctctt

SEQ ID NO: 3543587 - DNA, 25 bp, Homo sapien
ccagaagaatctgagtgacatagac

SEQ ID NO: 3543588 - DNA, 25 bp, Homo sapien
tgaaagcagcgattggagaaaccca

SEQ ID NO: 3543589 - DNA, 25 bp, Homo sapien
ctgatgcattggagatagtagggcc

SEQ ID NO: 3543590 - DNA, 25 bp, Homo sapien
tagggccatttggtgcctctggaac

SEQ ID NO: 3543591 - DNA, 25 bp, Homo sapien
ttgctactatcaagactttgtaaag

SEQ ID NO: 3543592 - DNA, 25 bp, Homo sapien
tgctactatcaagactttgtaaaga

SEQ ID NO: 3543593 - DNA, 25 bp, Homo sapien
ttcttgctactatcaagactttgta

SEQ ID NO: 3543594 - DNA, 25 bp, Homo sapien
tcttgctactatcaagactttgtaa

SEQ ID NO: 3543595 - DNA, 25 bp, Homo sapien
cattaatggatagcccaccattcct

SEQ ID NO: 3543596 - DNA, 25 bp, Homo sapien
acacattaatggatagcccaccatt

SEQ ID NO: 3543597 - DNA, 25 bp, Homo sapien
acattaatggatagcccaccattcc

SEQ ID NO: 3543598 - DNA, 25 bp, Homo sapien
cacattaatggatagcccaccattc

SEQ ID NO: 3543599 - DNA, 25 bp, Homo sapien
aactggacatgagctcaatccagtt

SEQ ID NO: 3543600 - DNA, 25 bp, Homo sapien
cttaactggacatgagctcaatcca

SEQ ID NO: 3543601 - DNA, 25 bp, Homo sapien
ttaactggacatgagctcaatccag

SEQ ID NO: 3543602 - DNA, 25 bp, Homo sapien
taactggacatgagctcaatccagt

SEQ ID NO: 3543603 - DNA, 25 bp, Homo sapien
gggtcaatgctatctgtcgcaacat

SEQ ID NO: 3543604 - DNA, 25 bp, Homo sapien
atctgtcgcaacatgagaatataac

SEQ ID NO: 3543605 - DNA, 25 bp, Homo sapien
tcaatgctatctgtcgcaacatgag

SEQ ID NO: 3543606 - DNA, 25 bp, Homo sapien
aatgctatctgtcgcaacatgagaa

SEQ ID NO: 3543607 - DNA, 25 bp, Homo sapien
ctggagcaatattccctgtccttta

SEQ ID NO: 3543608 - DNA, 25 bp, Homo sapien
tggagcaatattccctgtcctttag

SEQ ID NO: 3543609 - DNA, 25 bp, Homo sapien
agaagaatgtcaaaatcatctgaag

SEQ ID NO: 3543610 - DNA, 25 bp, Homo sapien
aacttttaattcatgtatgacagga

SEQ ID NO: 3543611 - DNA, 25 bp, Homo sapien
tataaggagcttttggccaatgggt

SEQ ID NO: 3543612 - DNA, 25 bp, Homo sapien
tgaagaaaggtgacttataaggagc

SEQ ID NO: 3543613 - DNA, 25 bp, Homo sapien
tttgtggaatgtttcagccacttcc

SEQ ID NO: 3543614 - DNA, 25 bp, Homo sapien
cattcaaaatgtaaagttgtcctga

SEQ ID NO: 3543615 - DNA, 25 bp, Homo sapien
gttgtcctgatggaaggattaagta

SEQ ID NO: 3543616 - DNA, 25 bp, Homo sapien
acttcccctggattttagcacacac

SEQ ID NO: 3543617 - DNA, 25 bp, Homo sapien
ctgctgtaataacatgctttgtgga

SEQ ID NO: 3543618 - DNA, 25 bp, Homo sapien
cttctgctgtaataacatgctttgt

SEQ ID NO: 3543619 - DNA, 25 bp, Homo sapien
gctgtaataacatgctttgtggatg

SEQ ID NO: 3543620 - DNA, 25 bp, Homo sapien
tctgctgtaataacatgctttgtgg

SEQ ID NO: 3543621 - DNA, 25 bp, Homo sapien
ctcacttttggcagacattacttgg

SEQ ID NO: 3543622 - DNA, 25 bp, Homo sapien
agatctaccatgtacagctccaaga

SEQ ID NO: 3543623 - DNA, 25 bp, Homo sapien
cagctccaagatctaagtgttttct

SEQ ID NO: 3543624 - DNA, 25 bp, Homo sapien
tcaagatctaccatgtacagctcca

SEQ ID NO: 3543625 - DNA, 25 bp, Homo sapien
ggcttctctgcaaagtcctgtaacc

SEQ ID NO: 3543626 - DNA, 25 bp, Homo sapien
cacatgtcattcctctttgtccagg

SEQ ID NO: 3543627 - DNA, 25 bp, Homo sapien
aattacaagagtctctcacatccac

SEQ ID NO: 3543628 - DNA, 25 bp, Homo sapien
tcctgtaacccaattacaagagtct

SEQ ID NO: 3543629 - DNA, 25 bp, Homo sapien
ctgcatatcttacgatccaaggtga

SEQ ID NO: 3543630 - DNA, 25 bp, Homo sapien
aagaagtatactgtgtacttgttgg

SEQ ID NO: 3543631 - DNA, 25 bp, Homo sapien
atctgagctccccatgaagaagtat

SEQ ID NO: 3543632 - DNA, 25 bp, Homo sapien
acaggacatgtctgtatcatcaagg

SEQ ID NO: 3543633 - DNA, 25 bp, Homo sapien
catggccagcctcagaaactcattc

SEQ ID NO: 3543634 - DNA, 25 bp, Homo sapien
aggagtacacccatctttgccattt

SEQ ID NO: 3543635 - DNA, 25 bp, Homo sapien
tctcttgtaggaataacttgtttct

SEQ ID NO: 3543636 - DNA, 25 bp, Homo sapien
ttgtgagtagcatgccttggggatt

SEQ ID NO: 3543637 - DNA, 25 bp, Homo sapien
taatgcgtttgaagtacatttgctg

SEQ ID NO: 3543638 - DNA, 25 bp, Homo sapien
tgtcatatagtgtttgtgagtagca

SEQ ID NO: 3543639 - DNA, 25 bp, Homo sapien
gtgcagatcgagcaggtgagctcac

SEQ ID NO: 3543640 - DNA, 25 bp, Homo sapien
tgtgcagatcgagcaggtgagctca

SEQ ID NO: 3543641 - DNA, 25 bp, Homo sapien
ctgtgcagatcgagcaggtgagctc

SEQ ID NO: 3543642 - DNA, 25 bp, Homo sapien
gaacactgtgtgatagcagaagcca

SEQ ID NO: 3543643 - DNA, 25 bp, Homo sapien
aacactgtgtgatagcagaagccat

SEQ ID NO: 3543644 - DNA, 25 bp, Homo sapien
ggtagaacactgtgtgatagcagaa

SEQ ID NO: 3543645 - DNA, 25 bp, Homo sapien
tagaacactgtgtgatagcagaagc

SEQ ID NO: 3543646 - DNA, 25 bp, Homo sapien
ccctgtgaggaattatacttgaccc

SEQ ID NO: 3543647 - DNA, 25 bp, Homo sapien
gggatggcagatctttctatcaaac

SEQ ID NO: 3543648 - DNA, 25 bp, Homo sapien
ggagcagttactactttcatcctct

SEQ ID NO: 3543649 - DNA, 25 bp, Homo sapien
actcccactgctagagtcggagcag

SEQ ID NO: 3543650 - DNA, 25 bp, Homo sapien
tgcagtatttcagcaactcctcagc

SEQ ID NO: 3543651 - DNA, 25 bp, Homo sapien
gtatttcagcaactcctcagcatga

SEQ ID NO: 3543652 - DNA, 25 bp, Homo sapien
aggctcttcagagtatactgatggt

SEQ ID NO: 3543653 - DNA, 25 bp, Homo sapien
gatggtatctgccagtctctatcat

SEQ ID NO: 3543654 - DNA, 25 bp, Homo sapien
tgtaaattgaaataccactgcaaaa

SEQ ID NO: 3543655 - DNA, 25 bp, Homo sapien
tgaggagaaccaacaagggcaaagc

SEQ ID NO: 3543656 - DNA, 25 bp, Homo sapien
caaagtctaattcaggtggttcaac

SEQ ID NO: 3543657 - DNA, 25 bp, Homo sapien
taacactattatcaaaaaggtgagg

SEQ ID NO: 3543658 - DNA, 25 bp, Homo sapien
agaaaagttcttgccacctatggac

SEQ ID NO: 3543659 - DNA, 25 bp, Homo sapien
aatgccattctggagaaacgtgcac

SEQ ID NO: 3543660 - DNA, 25 bp, Homo sapien
cgtgcacatgctatatgagctgaca

SEQ ID NO: 3543661 - DNA, 25 bp, Homo sapien
tctgcacgtgtgcatagaaaagttc

SEQ ID NO: 3543662 - DNA, 25 bp, Homo sapien
ttaaagttccaaacatcatagcact

SEQ ID NO: 3543663 - DNA, 25 bp, Homo sapien
tattcagtgtggtcaccaatgtcac

SEQ ID NO: 3543664 - DNA, 25 bp, Homo sapien
tgagcactttaatgaccaaggctac

SEQ ID NO: 3543665 - DNA, 25 bp, Homo sapien
gacctgcttggaaagctcataagcc

SEQ ID NO: 3543666 - DNA, 25 bp, Homo sapien
acagagtttaaactaacaagatcaa

SEQ ID NO: 3543667 - DNA, 25 bp, Homo sapien
ttggataacaagtcaagactcattg

SEQ ID NO: 3543668 - DNA, 25 bp, Homo sapien
agtgcaaagacgcacataggctcca

SEQ ID NO: 3543669 - DNA, 25 bp, Homo sapien
aacaagtcaagactcattggtgtgc

SEQ ID NO: 3543670 - DNA, 25 bp, Homo sapien
caaatttgtagtagagcccctctgg

SEQ ID NO: 3543671 - DNA, 25 bp, Homo sapien
cagcatctgacacggagggcataca

SEQ ID NO: 3543672 - DNA, 25 bp, Homo sapien
gacttcttaactttgagcgaggcca

SEQ ID NO: 3543673 - DNA, 25 bp, Homo sapien
tcttcaagggcaacactacagcgac

SEQ ID NO: 3543674 - DNA, 25 bp, Homo sapien
cacatggtatgattgtctttacaaa

SEQ ID NO: 3543675 - DNA, 25 bp, Homo sapien
tgaatcctaccctcatgtgaatgaa

SEQ ID NO: 3543676 - DNA, 25 bp, Homo sapien
ctctgtcttgatggaccctgaatcc

SEQ ID NO: 3543677 - DNA, 25 bp, Homo sapien
tatttcattgttccaatgctgtaac

SEQ ID NO: 3543678 - DNA, 25 bp, Homo sapien
aatatacccattacgattctttctg

SEQ ID NO: 3543679 - DNA, 25 bp, Homo sapien
tcaatatacccattacgattctttc

SEQ ID NO: 3543680 - DNA, 25 bp, Homo sapien
caatatacccattacgattctttct

SEQ ID NO: 3543681 - DNA, 25 bp, Homo sapien
atatacccattacgattctttctga

SEQ ID NO: 3543682 - DNA, 25 bp, Homo sapien
gggaatgactcccctgcatacttgt

SEQ ID NO: 3543683 - DNA, 25 bp, Homo sapien
gaatgactcccctgcatacttgttg

SEQ ID NO: 3543684 - DNA, 25 bp, Homo sapien
ttaggctacttcactcaaagtctct

SEQ ID NO: 3543685 - DNA, 25 bp, Homo sapien
ggctacttcactcaaagtctctgca

SEQ ID NO: 3543686 - DNA, 25 bp, Homo sapien
gtaatgttccatgtgaccaaggcag

SEQ ID NO: 3543687 - DNA, 25 bp, Homo sapien
tctcaaggcacacgacaagtaactg

SEQ ID NO: 3543688 - DNA, 25 bp, Homo sapien
tagtaaccacagcaatcattcttgg

SEQ ID NO: 3543689 - DNA, 25 bp, Homo sapien
tgcttgtgatcagccaaccctctat

SEQ ID NO: 3543690 - DNA, 25 bp, Homo sapien
aaaagtgatattacagaaaggagtc

SEQ ID NO: 3543691 - DNA, 25 bp, Homo sapien
agaaacaatacaactatcacttact

SEQ ID NO: 3543692 - DNA, 25 bp, Homo sapien
gcttgcaagaaatcaactacaatat

SEQ ID NO: 3543693 - DNA, 25 bp, Homo sapien
acaatacaactatcacttactacat

SEQ ID NO: 3543694 - DNA, 25 bp, Homo sapien
tccagaaacatgagttgatcattca

SEQ ID NO: 3543695 - DNA, 25 bp, Homo sapien
tgtctggtaaccctaatggatcaat

SEQ ID NO: 3543696 - DNA, 25 bp, Homo sapien
tggtaaccctaatggatcaataaat

SEQ ID NO: 3543697 - DNA, 25 bp, Homo sapien
catgagttgatcattcatcattctt

SEQ ID NO: 3543698 - DNA, 25 bp, Homo sapien
tctacaccaaaatttgtgcatactc

SEQ ID NO: 3543699 - DNA, 25 bp, Homo sapien
actgaatttagttatctccggggat

SEQ ID NO: 3543700 - DNA, 25 bp, Homo sapien
cagaacaaaactgaatttagttatc

SEQ ID NO: 3543701 - DNA, 25 bp, Homo sapien
tgcaaggaggacacatgtatgtgaa

SEQ ID NO: 3543702 - DNA, 25 bp, Homo sapien
cagttgagacaatcgaatgaaggat

SEQ ID NO: 3543703 - DNA, 25 bp, Homo sapien
ggtttcggaatcaaattcacaaaga

SEQ ID NO: 3543704 - DNA, 25 bp, Homo sapien
aactccgataaacagttgagacaat

SEQ ID NO: 3543705 - DNA, 25 bp, Homo sapien
ttcaataagatgcaatgggtttcgg

SEQ ID NO: 3543706 - DNA, 25 bp, Homo sapien
tggaagcaatttctgtaaaattctt

SEQ ID NO: 3543707 - DNA, 25 bp, Homo sapien
gcaatttctgtaaaattctttactg

SEQ ID NO: 3543708 - DNA, 25 bp, Homo sapien
tttgtcaaagtcctggagtctctca

SEQ ID NO: 3543709 - DNA, 25 bp, Homo sapien
gagtctctcactgaacttggaagca

SEQ ID NO: 3543710 - DNA, 25 bp, Homo sapien
gaacataatttctaatggcactgct

SEQ ID NO: 3543711 - DNA, 25 bp, Homo sapien
ctgaaatagaaattgggatcatcaa

SEQ ID NO: 3543712 - DNA, 25 bp, Homo sapien
taaagaacataatttctaatggcac

SEQ ID NO: 3543713 - DNA, 25 bp, Homo sapien
ggatcatcaaatgcttaaagaacat

SEQ ID NO: 3543714 - DNA, 25 bp, Homo sapien
gagattaatagaaccatacagatga

SEQ ID NO: 3543715 - DNA, 25 bp, Homo sapien
taatagaaccatacagatgaggaat

SEQ ID NO: 3543716 - DNA, 25 bp, Homo sapien
gattaatagaaccatacagatgagg

SEQ ID NO: 3543717 - DNA, 25 bp, Homo sapien
aggagattaatagaaccatacagat

SEQ ID NO: 3543718 - DNA, 25 bp, Homo sapien
tgtgatacagtggatagccgctgaa

SEQ ID NO: 3543719 - DNA, 25 bp, Homo sapien
tccaccaactcatatgtttcataga

SEQ ID NO: 3543720 - DNA, 25 bp, Homo sapien
tatggaattggctagctcaaacacc

SEQ ID NO: 3543721 - DNA, 25 bp, Homo sapien
tcgacaatcaaaagggagcactatg

SEQ ID NO: 3543722 - DNA, 25 bp, Homo sapien
gtcgttggaagaacacctcaaaatc

SEQ ID NO: 3543723 - DNA, 25 bp, Homo sapien
tagtataccgtgctctgcctgaagc

SEQ ID NO: 3543724 - DNA, 25 bp, Homo sapien
caatttttagtataccgtgctctgc

SEQ ID NO: 3543725 - DNA, 25 bp, Homo sapien
caattccaagtcgttggaagaacac

SEQ ID NO: 3543726 - DNA, 25 bp, Homo sapien
tccaactttcataaagagatttgcc

SEQ ID NO: 3543727 - DNA, 25 bp, Homo sapien
caactttcataaagagatttgcctt

SEQ ID NO: 3543728 - DNA, 25 bp, Homo sapien
ttttagtccaactttcataaagaga

SEQ ID NO: 3543729 - DNA, 25 bp, Homo sapien
tagtccaactttcataaagagattt

SEQ ID NO: 3543730 - DNA, 25 bp, Homo sapien
gggtcagtgagaatattccccctta

SEQ ID NO: 3543731 - DNA, 25 bp, Homo sapien
cagtgagaatattcccccttatcat

SEQ ID NO: 3543732 - DNA, 25 bp, Homo sapien
tcactgcaacctcgttcacgcaatt

SEQ ID NO: 3543733 - DNA, 25 bp, Homo sapien
ggtcagtgagaatattcccccttat

SEQ ID NO: 3543734 - DNA, 25 bp, Homo sapien
tgtgtcattgcatatgagaagggtc

SEQ ID NO: 3543735 - DNA, 25 bp, Homo sapien
taactcttgttaagacaggtctggt

SEQ ID NO: 3543736 - DNA, 25 bp, Homo sapien
tgtcgtggatggtgatagtctttcc

SEQ ID NO: 3543737 - DNA, 25 bp, Homo sapien
gacaggataccaataggtcctggtt

SEQ ID NO: 3543738 - DNA, 25 bp, Homo sapien
gcctatctagctatgttgggaaagt

SEQ ID NO: 3543739 - DNA, 25 bp, Homo sapien
cttcctatctctttcaagtacacca

SEQ ID NO: 3543740 - DNA, 25 bp, Homo sapien
ctatctagctatgttgggaaagttc

SEQ ID NO: 3543741 - DNA, 25 bp, Homo sapien
gttggcctatctagctatgttggga

SEQ ID NO: 3543742 - DNA, 25 bp, Homo sapien
tgctggggggtcgactccaatcgct

SEQ ID NO: 3543743 - DNA, 25 bp, Homo sapien
gactccaatcgctagttgcctcaga

SEQ ID NO: 3543744 - DNA, 25 bp, Homo sapien
gggtcgactccaatcgctagttgcc

SEQ ID NO: 3543745 - DNA, 25 bp, Homo sapien
gtcgactccaatcgctagttgcctc

SEQ ID NO: 3543746 - DNA, 25 bp, Homo sapien
caactgtgctgtggtgagggtccac

SEQ ID NO: 3543747 - DNA, 25 bp, Homo sapien
ttgccagcctgaacagacctgtagg

SEQ ID NO: 3543748 - DNA, 25 bp, Homo sapien
ggagttatagacatgttgccagcct

SEQ ID NO: 3543749 - DNA, 25 bp, Homo sapien
tactgtaggacctccgtccaaggga

SEQ ID NO: 3543750 - DNA, 25 bp, Homo sapien
tacaatcaactctcagagtgtagtt

SEQ ID NO: 3543751 - DNA, 25 bp, Homo sapien
caatcaactctcagagtgtagtttc

SEQ ID NO: 3543752 - DNA, 25 bp, Homo sapien
tgtacaatcaactctcagagtgtag

SEQ ID NO: 3543753 - DNA, 25 bp, Homo sapien
ggtgtacaatcaactctcagagtgt

SEQ ID NO: 3543754 - DNA, 25 bp, Homo sapien
agccacgccacgctcttgaaggagt

SEQ ID NO: 3543755 - DNA, 25 bp, Homo sapien
gtcagcattaatataagccacgcca

SEQ ID NO: 3543756 - DNA, 25 bp, Homo sapien
taatataagccacgccacgctcttg

SEQ ID NO: 3543757 - DNA, 25 bp, Homo sapien
gccacgctcttgaaggagtcttgaa

SEQ ID NO: 3543758 - DNA, 25 bp, Homo sapien
tgcccactcagtagaaccaagaaga

SEQ ID NO: 3543759 - DNA, 25 bp, Homo sapien
ccactcagtagaaccaagaagacca

SEQ ID NO: 3543760 - DNA, 25 bp, Homo sapien
ctgcccactcagtagaaccaagaag

SEQ ID NO: 3543761 - DNA, 25 bp, Homo sapien
gcccactcagtagaaccaagaagac

SEQ ID NO: 3543762 - DNA, 25 bp, Homo sapien
ttgtacacgtaatctgaggtctggg

SEQ ID NO: 3543763 - DNA, 25 bp, Homo sapien
gaggaacgtctgcttacagtctctg

SEQ ID NO: 3543764 - DNA, 25 bp, Homo sapien
gacagaatcccattagacctaagac

SEQ ID NO: 3543765 - DNA, 25 bp, Homo sapien
cagtctctgactaggaagctttggc

SEQ ID NO: 3543766 - DNA, 25 bp, Homo sapien
ttttcagtgttccaaagctcctcac

SEQ ID NO: 3543767 - DNA, 25 bp, Homo sapien
acaacagctgctccactctgagggt

SEQ ID NO: 3543768 - DNA, 25 bp, Homo sapien
accaaacacccatgagtcccggtga

SEQ ID NO: 3543769 - DNA, 25 bp, Homo sapien
tccactctgagggtcaataccacca

SEQ ID NO: 3543770 - DNA, 25 bp, Homo sapien
caagattatttgtcatttcaggtca

SEQ ID NO: 3543771 - DNA, 25 bp, Homo sapien
gcatagatacaagattatttgtcat

SEQ ID NO: 3543772 - DNA, 25 bp, Homo sapien
gattatttgtcatttcaggtcaata

SEQ ID NO: 3543773 - DNA, 25 bp, Homo sapien
ctagaaagcatagatacaagattat

SEQ ID NO: 3543774 - DNA, 25 bp, Homo sapien
cttcattggtagagtggatgtgcat

SEQ ID NO: 3543775 - DNA, 25 bp, Homo sapien
ctgctcctctgagagtacctatcac

SEQ ID NO: 3543776 - DNA, 25 bp, Homo sapien
gtcacttcattggtagagtggatgt

SEQ ID NO: 3543777 - DNA, 25 bp, Homo sapien
tgagagtacctatcacattgtaaat

SEQ ID NO: 3543778 - DNA, 25 bp, Homo sapien
caggtccaacattgtagggcacttt

SEQ ID NO: 3543779 - DNA, 25 bp, Homo sapien
tgtagaaaagtttccagtaaagcca

SEQ ID NO: 3543780 - DNA, 25 bp, Homo sapien
agggcactttgagacttcctctcca

SEQ ID NO: 3543781 - DNA, 25 bp, Homo sapien
tccagtaaagccaggtccaacattg

SEQ ID NO: 3543782 - DNA, 25 bp, Homo sapien
aatagtaaagggctacctggagccg

SEQ ID NO: 3543783 - DNA, 25 bp, Homo sapien
atagtaaagggctacctggagccgg

SEQ ID NO: 3543784 - DNA, 25 bp, Homo sapien
tagattagcaagctgaaagtgcggg

SEQ ID NO: 3543785 - DNA, 25 bp, Homo sapien
caagctgaaagtgcgggagaatgct

SEQ ID NO: 3543786 - DNA, 25 bp, Homo sapien
ggaatacttggaagaccaacagcct

SEQ ID NO: 3543787 - DNA, 25 bp, Homo sapien
gaatacttggaagaccaacagcctc

SEQ ID NO: 3543788 - DNA, 25 bp, Homo sapien
acaggaatacttggaagaccaacag

SEQ ID NO: 3543789 - DNA, 25 bp, Homo sapien
atacttggaagaccaacagcctctg

SEQ ID NO: 3543790 - DNA, 25 bp, Homo sapien
tggagcaaatgaagttcaggtagat

SEQ ID NO: 3543791 - DNA, 25 bp, Homo sapien
ttttactatagggtaatatgtgtca

SEQ ID NO: 3543792 - DNA, 25 bp, Homo sapien
gcataactaataaagcttaggctaa

SEQ ID NO: 3543793 - DNA, 25 bp, Homo sapien
tacatactctttacaggagtctaca

SEQ ID NO: 3543794 - DNA, 25 bp, Homo sapien
taagtttcctatgatattcaaggat

SEQ ID NO: 3543795 - DNA, 25 bp, Homo sapien
tctctttcaaatgttaagtttccta

SEQ ID NO: 3543796 - DNA, 25 bp, Homo sapien
aaatgttaagtttcctatgatattc

SEQ ID NO: 3543797 - DNA, 25 bp, Homo sapien
tgttaagtttcctatgatattcaag

SEQ ID NO: 3543798 - DNA, 25 bp, Homo sapien
tctggataggacttcaccccaggag

SEQ ID NO: 3543799 - DNA, 25 bp, Homo sapien
tgtgagagggtctcctgcaccattc

SEQ ID NO: 3543800 - DNA, 25 bp, Homo sapien
gaatgactcctttggcccctgccag

SEQ ID NO: 3543801 - DNA, 25 bp, Homo sapien
caccattcagatttaggatatttcc

SEQ ID NO: 3543802 - DNA, 25 bp, Homo sapien
taaagaagtcttcagttcgtgcata

SEQ ID NO: 3543803 - DNA, 25 bp, Homo sapien
catgtcccgttccaatttaaagaag

SEQ ID NO: 3543804 - DNA, 25 bp, Homo sapien
gtcttcagttcgtgcatagttaaca

SEQ ID NO: 3543805 - DNA, 25 bp, Homo sapien
tcccagagcaattgattttcatgtc

SEQ ID NO: 3543806 - DNA, 25 bp, Homo sapien
ttcagtgggtgaacaaattattgct

SEQ ID NO: 3543807 - DNA, 25 bp, Homo sapien
tacagtaagttctgagaaaacttgg

SEQ ID NO: 3543808 - DNA, 25 bp, Homo sapien
aatgcaatgagtgggacagtgaagc

SEQ ID NO: 3543809 - DNA, 25 bp, Homo sapien
ctagaatgagactgggatcagcaac

SEQ ID NO: 3543810 - DNA, 25 bp, Homo sapien
tacaaatggtgaactagagcttaag

SEQ ID NO: 3543811 - DNA, 25 bp, Homo sapien
ggtttatccagacataacctcatgg

SEQ ID NO: 3543812 - DNA, 25 bp, Homo sapien
aatgagtatggctattgcaccatca

SEQ ID NO: 3543813 - DNA, 25 bp, Homo sapien
tggatgggataatacaataatgagc

SEQ ID NO: 3543814 - DNA, 25 bp, Homo sapien
tttatttgttgcactgtgtttttac

SEQ ID NO: 3543815 - DNA, 25 bp, Homo sapien
ttttatttgttgcactgtgttttta

SEQ ID NO: 3543816 - DNA, 25 bp, Homo sapien
ggcattccttgaggagagaaagcac

SEQ ID NO: 3543817 - DNA, 25 bp, Homo sapien
tggtacaatatccgaaacattttca

SEQ ID NO: 3543818 - DNA, 25 bp, Homo sapien
ttgcctccaaacttgtcctctccaa

SEQ ID NO: 3543819 - DNA, 25 bp, Homo sapien
ccacacacaaattcttcgcacagag

SEQ ID NO: 3543820 - DNA, 25 bp, Homo sapien
cttgcctccaaacttgtcctctcca

SEQ ID NO: 3543821 - DNA, 25 bp, Homo sapien
tgcctccaaacttgtcctctccaaa

SEQ ID NO: 3543822 - DNA, 25 bp, Homo sapien
caaactgcatactggatccgtgcat

SEQ ID NO: 3543823 - DNA, 25 bp, Homo sapien
gtcaaactgcatactggatccgtgc

SEQ ID NO: 3543824 - DNA, 25 bp, Homo sapien
ggtcaaactgcatactggatccgtg

SEQ ID NO: 3543825 - DNA, 25 bp, Homo sapien
tgggtcaaactgcatactggatccg

SEQ ID NO: 3543826 - DNA, 25 bp, Homo sapien
ttaattattgagatgtagttgggat

SEQ ID NO: 3543827 - DNA, 25 bp, Homo sapien
taattattgagatgtagttgggatg

SEQ ID NO: 3543828 - DNA, 25 bp, Homo sapien
tcctgctaaatgtggtatctgtgta

SEQ ID NO: 3543829 - DNA, 25 bp, Homo sapien
tttgcaagctgaaagttttgttctg

SEQ ID NO: 3543830 - DNA, 25 bp, Homo sapien
ctttgcaagctgaaagttttgttct

SEQ ID NO: 3543831 - DNA, 25 bp, Homo sapien
ttctgttcctgctaaatgtggtatc

SEQ ID NO: 3543832 - DNA, 25 bp, Homo sapien
ggtagtattattgcatgaaatagat

SEQ ID NO: 3543833 - DNA, 25 bp, Homo sapien
gtgtaatcctattactataacctcg

SEQ ID NO: 3543834 - DNA, 25 bp, Homo sapien
caaaagtactttgaagtgtgatacg

SEQ ID NO: 3543835 - DNA, 25 bp, Homo sapien
cctcgtatggtagattatcatattc

SEQ ID NO: 3543836 - DNA, 25 bp, Homo sapien
gaatctcttgcactccatctatcat

SEQ ID NO: 3543837 - DNA, 25 bp, Homo sapien
tcagaatgaatctcttgcactccat

SEQ ID NO: 3543838 - DNA, 25 bp, Homo sapien
cgatacaagttcagaatgaatctct

SEQ ID NO: 3543839 - DNA, 25 bp, Homo sapien
cttgcactccatctatcatacagag

SEQ ID NO: 3543840 - DNA, 25 bp, Homo sapien
ctcagctttcaattcatccaaaaat

SEQ ID NO: 3543841 - DNA, 25 bp, Homo sapien
tataagaacttcttgatgttctcag

SEQ ID NO: 3543842 - DNA, 25 bp, Homo sapien
taagaacttcttgatgttctcagct

SEQ ID NO: 3543843 - DNA, 25 bp, Homo sapien
gttctcagctttcaattcatccaaa

SEQ ID NO: 3543844 - DNA, 25 bp, Homo sapien
ggagtaatgttagtagcttcattgg

SEQ ID NO: 3543845 - DNA, 25 bp, Homo sapien
gctttggagtaatgttagtagcttc

SEQ ID NO: 3543846 - DNA, 25 bp, Homo sapien
tttggagtaatgttagtagcttcat

SEQ ID NO: 3543847 - DNA, 25 bp, Homo sapien
tggagtaatgttagtagcttcattg

SEQ ID NO: 3543848 - DNA, 25 bp, Homo sapien
ttagaccttgcagttggcttttaac

SEQ ID NO: 3543849 - DNA, 25 bp, Homo sapien
acccagtgcacgcataggcggccag

SEQ ID NO: 3543850 - DNA, 25 bp, Homo sapien
taggcggccagaaacaatggatagc

SEQ ID NO: 3543851 - DNA, 25 bp, Homo sapien
tagatcctgcagtcattagaccttg

SEQ ID NO: 3543852 - DNA, 25 bp, Homo sapien
gcaccgcggcaccacggggaagact

SEQ ID NO: 3543853 - DNA, 25 bp, Homo sapien
actccgaggtttgctccgcgaggcg

SEQ ID NO: 3543854 - DNA, 25 bp, Homo sapien
tccgaggtttgctccgcgaggcgcc

SEQ ID NO: 3543855 - DNA, 25 bp, Homo sapien
aagactccgaggtttgctccgcgag

SEQ ID NO: 3543856 - DNA, 25 bp, Homo sapien
aagaggaagccgaggagaaagaagc

SEQ ID NO: 3543857 - DNA, 25 bp, Homo sapien
gaggaagccgaggagaaagaagcca

SEQ ID NO: 3543858 - DNA, 25 bp, Homo sapien
aggaagccgaggagaaagaagccac

SEQ ID NO: 3543859 - DNA, 25 bp, Homo sapien
cgaagaggaagccgaggagaaagaa

SEQ ID NO: 3543860 - DNA, 25 bp, Homo sapien
gtcggtttcgtgaaggagattccac

SEQ ID NO: 3543861 - DNA, 25 bp, Homo sapien
tggccacagccgagtcggtttcgtg

SEQ ID NO: 3543862 - DNA, 25 bp, Homo sapien
acagccgagtcggtttcgtgaagga

SEQ ID NO: 3543863 - DNA, 25 bp, Homo sapien
ccgagtcggtttcgtgaaggagatt

SEQ ID NO: 3543864 - DNA, 25 bp, Homo sapien
agccctgcaggctggaattcgctcc

SEQ ID NO: 3543865 - DNA, 25 bp, Homo sapien
gtctctctcaatctcactaatgcct

SEQ ID NO: 3543866 - DNA, 25 bp, Homo sapien
gtgctgctgctctactgcgcgccct

SEQ ID NO: 3543867 - DNA, 25 bp, Homo sapien
aatgcctcgcttatcagccctgcag

SEQ ID NO: 3543868 - DNA, 25 bp, Homo sapien
tctagagtgcactgaaccaatccga

SEQ ID NO: 3543869 - DNA, 25 bp, Homo sapien
agtgtttctagagtgcactgaacca

SEQ ID NO: 3543870 - DNA, 25 bp, Homo sapien
tgtttctagagtgcactgaaccaat

SEQ ID NO: 3543871 - DNA, 25 bp, Homo sapien
tttctagagtgcactgaaccaatcc

SEQ ID NO: 3543872 - DNA, 25 bp, Homo sapien
aatacttggccctagggatatattt

SEQ ID NO: 3543873 - DNA, 25 bp, Homo sapien
taaatacttggccctagggatatat

SEQ ID NO: 3543874 - DNA, 25 bp, Homo sapien
cttaaatacttggccctagggatat

SEQ ID NO: 3543875 - DNA, 25 bp, Homo sapien
tacttggccctagggatatatttgt

SEQ ID NO: 3543876 - DNA, 25 bp, Homo sapien
tcttcccttggctttgtgggcacct

SEQ ID NO: 3543877 - DNA, 25 bp, Homo sapien
gtgggcacctctatgccctggtagt

SEQ ID NO: 3543878 - DNA, 25 bp, Homo sapien
tctatgccctggtagttttcctccc

SEQ ID NO: 3543879 - DNA, 25 bp, Homo sapien
ctctgattgtgttcatctggatcat

SEQ ID NO: 3543880 - DNA, 25 bp, Homo sapien
gcaggtagctcactggattgcaggc

SEQ ID NO: 3543881 - DNA, 25 bp, Homo sapien
tgaaggacacctgtcagcaggtagc

SEQ ID NO: 3543882 - DNA, 25 bp, Homo sapien
acctgtcagcaggtagctcactgga

SEQ ID NO: 3543883 - DNA, 25 bp, Homo sapien
tcagcaggtagctcactggattgca

SEQ ID NO: 3543884 - DNA, 25 bp, Homo sapien
gactttgatccaaagactgaactaa

SEQ ID NO: 3543885 - DNA, 25 bp, Homo sapien
gaactaaatccaatgaactcaagag

SEQ ID NO: 3543886 - DNA, 25 bp, Homo sapien
gatggaatgtctagattctgcagac

SEQ ID NO: 3543887 - DNA, 25 bp, Homo sapien
tattaagccgatattctgtgttcag

SEQ ID NO: 3543888 - DNA, 25 bp, Homo sapien
ctctttgatctagatgataacttac

SEQ ID NO: 3543889 - DNA, 25 bp, Homo sapien
tctctttgatctagatgataactta

SEQ ID NO: 3543890 - DNA, 25 bp, Homo sapien
accaaactaaatgttcttggagtat

SEQ ID NO: 3543891 - DNA, 25 bp, Homo sapien
ccaaactaaatgttcttggagtatg

SEQ ID NO: 3543892 - DNA, 25 bp, Homo sapien
ctgtgcccttggcttaaactggttt

SEQ ID NO: 3543893 - DNA, 25 bp, Homo sapien
tcattcttgttgtatattttagcgg

SEQ ID NO: 3543894 - DNA, 25 bp, Homo sapien
ttgcaatcggtattatttaggaccc

SEQ ID NO: 3543895 - DNA, 25 bp, Homo sapien
gttgtatattttagcggttctcttc

SEQ ID NO: 3543896 - DNA, 25 bp, Homo sapien
gctgtttggtccttaatgaactccg

SEQ ID NO: 3543897 - DNA, 25 bp, Homo sapien
aaagacttgaggattctccgctacg

SEQ ID NO: 3543898 - DNA, 25 bp, Homo sapien
tattctgctccacaagttccagctg

SEQ ID NO: 3543899 - DNA, 25 bp, Homo sapien
caaagagggtgactgtgcttagctt

SEQ ID NO: 3543900 - DNA, 25 bp, Homo sapien
taataacccagctacagactttaag

SEQ ID NO: 3543901 - DNA, 25 bp, Homo sapien
tccctgttggttaataacccagcta

SEQ ID NO: 3543902 - DNA, 25 bp, Homo sapien
gactttaagacccaaagttcgctgc

SEQ ID NO: 3543903 - DNA, 25 bp, Homo sapien
ccaaagttcgctgccacaattggca

SEQ ID NO: 3543904 - DNA, 25 bp, Homo sapien
tcatttattctttcgatgtccttta

SEQ ID NO: 3543905 - DNA, 25 bp, Homo sapien
tattctttcgatgtcctttatttta

SEQ ID NO: 3543906 - DNA, 25 bp, Homo sapien
tctcatttattctttcgatgtcctt

SEQ ID NO: 3543907 - DNA, 25 bp, Homo sapien
atttattctttcgatgtcctttatt

SEQ ID NO: 3543908 - DNA, 25 bp, Homo sapien
tttccttagacatatgggcttaggg

SEQ ID NO: 3543909 - DNA, 25 bp, Homo sapien
ttggccctactctattgcctaagcc

SEQ ID NO: 3543910 - DNA, 25 bp, Homo sapien
tagagtgaggtcaggctttttggcc

SEQ ID NO: 3543911 - DNA, 25 bp, Homo sapien
ggacattactttgagttagagtgag

SEQ ID NO: 3543912 - DNA, 25 bp, Homo sapien
taaatggctctgatacaagctgtgg

SEQ ID NO: 3543913 - DNA, 25 bp, Homo sapien
caaggagccatgaccagatccgact

SEQ ID NO: 3543914 - DNA, 25 bp, Homo sapien
tacaagctgtggtaatcctctttct

SEQ ID NO: 3543915 - DNA, 25 bp, Homo sapien
gttccaaataggacttaatgtagtc

SEQ ID NO: 3543916 - DNA, 25 bp, Homo sapien
gggcctggcctttataggcctcagg

SEQ ID NO: 3543917 - DNA, 25 bp, Homo sapien
cagtggcataggagcgggccctgtg

SEQ ID NO: 3543918 - DNA, 25 bp, Homo sapien
ctgtgccgcggtaccctggagcgcc

SEQ ID NO: 3543919 - DNA, 25 bp, Homo sapien
ctcggaggtgcactccctgctggag

SEQ ID NO: 3543920 - DNA, 25 bp, Homo sapien
taaaagaatgaattagactctgagc

SEQ ID NO: 3543921 - DNA, 25 bp, Homo sapien
ggcaggtaaacaactcatttcgaga

SEQ ID NO: 3543922 - DNA, 25 bp, Homo sapien
tcctacatctctgtgaagttaggga

SEQ ID NO: 3543923 - DNA, 25 bp, Homo sapien
tctgatgaagatacaaagggatcat

SEQ ID NO: 3543924 - DNA, 25 bp, Homo sapien
atgaaactatggcagtcatgtatca

SEQ ID NO: 3543925 - DNA, 25 bp, Homo sapien
ttcaggtatgaaactatggcagtca

SEQ ID NO: 3543926 - DNA, 25 bp, Homo sapien
cttcttcaggtatgaaactatggca

SEQ ID NO: 3543927 - DNA, 25 bp, Homo sapien
ggtatgaaactatggcagtcatgta

SEQ ID NO: 3543928 - DNA, 25 bp, Homo sapien
aacattgtcgaagcataaagttttg

SEQ ID NO: 3543929 - DNA, 25 bp, Homo sapien
tcaggaataacattgtcgaagcata

SEQ ID NO: 3543930 - DNA, 25 bp, Homo sapien
aataaattggtaacactagattcag

SEQ ID NO: 3543931 - DNA, 25 bp, Homo sapien
taaattggtaacactagattcagca

SEQ ID NO: 3543932 - DNA, 25 bp, Homo sapien
tatgtccaatgggtgcattggcttc

SEQ ID NO: 3543933 - DNA, 25 bp, Homo sapien
gaaccatgtaggattcccggttatg

SEQ ID NO: 3543934 - DNA, 25 bp, Homo sapien
catagcccagatctttggatgaaat

SEQ ID NO: 3543935 - DNA, 25 bp, Homo sapien
gaatcttgtagatagctatagtcat

SEQ ID NO: 3543936 - DNA, 25 bp, Homo sapien
cagaggaaagggttattcagactaa

SEQ ID NO: 3543937 - DNA, 25 bp, Homo sapien
ctgcagaggaaagggttattcagac

SEQ ID NO: 3543938 - DNA, 25 bp, Homo sapien
gcagaggaaagggttattcagacta

SEQ ID NO: 3543939 - DNA, 25 bp, Homo sapien
gaggaaagggttattcagactaaga

SEQ ID NO: 3543940 - DNA, 25 bp, Homo sapien
tgtggtcaaagttggttttcagttg

SEQ ID NO: 3543941 - DNA, 25 bp, Homo sapien
ttttcagttgtgaatttagtgaaga

SEQ ID NO: 3543942 - DNA, 25 bp, Homo sapien
ccactgataaacactaaaaatctgg

SEQ ID NO: 3543943 - DNA, 25 bp, Homo sapien
tgaagaattggcagtccactgataa

SEQ ID NO: 3543944 - DNA, 25 bp, Homo sapien
catggtagcagtagtgagagttagc

SEQ ID NO: 3543945 - DNA, 25 bp, Homo sapien
tacacagccggtaagtgtgaagtgg

SEQ ID NO: 3543946 - DNA, 25 bp, Homo sapien
tgtgaagtggcagaatcaacatttg

SEQ ID NO: 3543947 - DNA, 25 bp, Homo sapien
gagagttagctcatataccactgta

SEQ ID NO: 3543948 - DNA, 25 bp, Homo sapien
ggtttccaacctcctcactgaaata

SEQ ID NO: 3543949 - DNA, 25 bp, Homo sapien
gaccaagaacctgtatctgatggag

SEQ ID NO: 3543950 - DNA, 25 bp, Homo sapien
tacccaacactcttgtcatagcaga

SEQ ID NO: 3543951 - DNA, 25 bp, Homo sapien
gtactatatccctaagccctaagca

SEQ ID NO: 3543952 - DNA, 25 bp, Homo sapien
tcttctagagcacaattttccggcc

SEQ ID NO: 3543953 - DNA, 25 bp, Homo sapien
tattcttctagagcacaattttccg

SEQ ID NO: 3543954 - DNA, 25 bp, Homo sapien
ttctagagcacaattttccggcctg

SEQ ID NO: 3543955 - DNA, 25 bp, Homo sapien
gttttattcttctagagcacaattt

SEQ ID NO: 3543956 - DNA, 25 bp, Homo sapien
gccggataagctgggcaaacagtcc

SEQ ID NO: 3543957 - DNA, 25 bp, Homo sapien
ggtacacaattaactcataagtaga

SEQ ID NO: 3543958 - DNA, 25 bp, Homo sapien
tacggtcttctaacaggtacacaat

SEQ ID NO: 3543959 - DNA, 25 bp, Homo sapien
cataagtagacaacacaatggcagt

SEQ ID NO: 3543960 - DNA, 25 bp, Homo sapien
agcctcgtccttataacttcgtgtg

SEQ ID NO: 3543961 - DNA, 25 bp, Homo sapien
gcctcgtccttataacttcgtgtgg

SEQ ID NO: 3543962 - DNA, 25 bp, Homo sapien
gagcctcgtccttataacttcgtgt

SEQ ID NO: 3543963 - DNA, 25 bp, Homo sapien
gaatgccttcggtctggtaaacgta

SEQ ID NO: 3543964 - DNA, 25 bp, Homo sapien
tcctctatagaagccacgaatgcct

SEQ ID NO: 3543965 - DNA, 25 bp, Homo sapien
ggaaattccagcatacgaggcagtt

SEQ ID NO: 3543966 - DNA, 25 bp, Homo sapien
taaacgtaacgagcacactggagtg

SEQ ID NO: 3543967 - DNA, 25 bp, Homo sapien
cttgatggtgcaactccaaccaaat

SEQ ID NO: 3543968 - DNA, 25 bp, Homo sapien
gatggtgcaactccaaccaaatttg

SEQ ID NO: 3543969 - DNA, 25 bp, Homo sapien
ggtgcaactccaaccaaatttggac

SEQ ID NO: 3543970 - DNA, 25 bp, Homo sapien
caaccaaatttggacccaagcctct

SEQ ID NO: 3543971 - DNA, 25 bp, Homo sapien
tggtccctctttctccaagatcgac

SEQ ID NO: 3543972 - DNA, 25 bp, Homo sapien
tttggtccctctttctccaagatcg

SEQ ID NO: 3543973 - DNA, 25 bp, Homo sapien
ttggtccctctttctccaagatcga

SEQ ID NO: 3543974 - DNA, 25 bp, Homo sapien
tgaacctgaggatagtagactgtcc

SEQ ID NO: 3543975 - DNA, 25 bp, Homo sapien
ttcagaacctgaaagagtccaggtg

SEQ ID NO: 3543976 - DNA, 25 bp, Homo sapien
gactgcaaccgtgtcttaatgactt

SEQ ID NO: 3543977 - DNA, 25 bp, Homo sapien
agtccaggtgtcacggatgttggtc

SEQ ID NO: 3543978 - DNA, 25 bp, Homo sapien
aagaggtgaagcagcgtgttctcct

SEQ ID NO: 3543979 - DNA, 25 bp, Homo sapien
ccgccggcgaagaggtgaagcagcg

SEQ ID NO: 3543980 - DNA, 25 bp, Homo sapien
ccggcgaagaggtgaagcagcgtgt

SEQ ID NO: 3543981 - DNA, 25 bp, Homo sapien
ccttctgctggccgcccgtcgccat

SEQ ID NO: 3543982 - DNA, 25 bp, Homo sapien
tcgccgcccggtggcgagagcgcgt

SEQ ID NO: 3543983 - DNA, 25 bp, Homo sapien
gcgcgggctccaacgcccggctctg

SEQ ID NO: 3543984 - DNA, 25 bp, Homo sapien
tggcgagagcgcgtggcggctcgag

SEQ ID NO: 3543985 - DNA, 25 bp, Homo sapien
gggctgccggcaacgcctccatgcg

SEQ ID NO: 3543986 - DNA, 25 bp, Homo sapien
ctggttggactgtttctgggctgcc

SEQ ID NO: 3543987 - DNA, 25 bp, Homo sapien
agggaagcaatctgctgttcattcc

SEQ ID NO: 3543988 - DNA, 25 bp, Homo sapien
cagggaagcaatctgctgttcattc

SEQ ID NO: 3543989 - DNA, 25 bp, Homo sapien
ttctggttggactgtttctgggctg

SEQ ID NO: 3543990 - DNA, 25 bp, Homo sapien
gaaactcatcaggtctctccatgat

SEQ ID NO: 3543991 - DNA, 25 bp, Homo sapien
actcatcaggtctctccatgataaa

SEQ ID NO: 3543992 - DNA, 25 bp, Homo sapien
ccagaaactcatcaggtctctccat

SEQ ID NO: 3543993 - DNA, 25 bp, Homo sapien
cttcccagaaactcatcaggtctct

SEQ ID NO: 3543994 - DNA, 25 bp, Homo sapien
catgcatacaccacctctccatttc

SEQ ID NO: 3543995 - DNA, 25 bp, Homo sapien
ttctccttctctatcaattccagtc

SEQ ID NO: 3543996 - DNA, 25 bp, Homo sapien
tatcaattccagtcacacaaccatt

SEQ ID NO: 3543997 - DNA, 25 bp, Homo sapien
tcacacaaccattttctgactgaat

SEQ ID NO: 3543998 - DNA, 25 bp, Homo sapien
aggacggtagcagccattttgtggt

SEQ ID NO: 3543999 - DNA, 25 bp, Homo sapien
aaaaaggacggtagcagccattttg

SEQ ID NO: 3544000 - DNA, 25 bp, Homo sapien
ggttgcagagtattgggaaaaagga

SEQ ID NO: 3544001 - DNA, 25 bp, Homo sapien
gatctccagcatattggtgtgttgg

SEQ ID NO: 3544002 - DNA, 25 bp, Homo sapien
tggactggtgagaacttgtcaatag

SEQ ID NO: 3544003 - DNA, 25 bp, Homo sapien
taattggactggtgagaacttgtca

SEQ ID NO: 3544004 - DNA, 25 bp, Homo sapien
aaataattggactggtgagaacttg

SEQ ID NO: 3544005 - DNA, 25 bp, Homo sapien
actggtgagaacttgtcaataggcc

SEQ ID NO: 3544006 - DNA, 25 bp, Homo sapien
cacacttttttgctagagtgccaag

SEQ ID NO: 3544007 - DNA, 25 bp, Homo sapien
atatattccacacttttttgctaga

SEQ ID NO: 3544008 - DNA, 25 bp, Homo sapien
caaatataatatattccacactttt

SEQ ID NO: 3544009 - DNA, 25 bp, Homo sapien
tttttgctagagtgccaaggaccat

SEQ ID NO: 3544010 - DNA, 25 bp, Homo sapien
tggccaaagccgacaagattcaagt

SEQ ID NO: 3544011 - DNA, 25 bp, Homo sapien
gagttcccgctctctaaggccaggt

SEQ ID NO: 3544012 - DNA, 25 bp, Homo sapien
ccaggtgcgcgtggtttcgaatgca

SEQ ID NO: 3544013 - DNA, 25 bp, Homo sapien
gattctgcatgccttcgcatccgag

SEQ ID NO: 3544014 - DNA, 25 bp, Homo sapien
ctggtactcgaatttacagctgccc

SEQ ID NO: 3544015 - DNA, 25 bp, Homo sapien
tggtactcgaatttacagctgccct

SEQ ID NO: 3544016 - DNA, 25 bp, Homo sapien
ggtactcgaatttacagctgccctc

SEQ ID NO: 3544017 - DNA, 25 bp, Homo sapien
tactcgaatttacagctgccctcat

SEQ ID NO: 3544018 - DNA, 25 bp, Homo sapien
caggcaaacgtcctggtgcagactc

SEQ ID NO: 3544019 - DNA, 25 bp, Homo sapien
gaagggccatcaggcaaacgtcctg

SEQ ID NO: 3544020 - DNA, 25 bp, Homo sapien
gggccatcaggcaaacgtcctggtg

SEQ ID NO: 3544021 - DNA, 25 bp, Homo sapien
catcaggcaaacgtcctggtgcaga

SEQ ID NO: 3544022 - DNA, 25 bp, Homo sapien
cttgattctcttagtggatttgatc

SEQ ID NO: 3544023 - DNA, 25 bp, Homo sapien
ggacattggctatcaaaggtttctg

SEQ ID NO: 3544024 - DNA, 25 bp, Homo sapien
acttcttcttcgtattaggacattg

SEQ ID NO: 3544025 - DNA, 25 bp, Homo sapien
tgtgcagcagttcttgattctctta

SEQ ID NO: 3544026 - DNA, 25 bp, Homo sapien
tgtttggccctttataactatccat

SEQ ID NO: 3544027 - DNA, 25 bp, Homo sapien
ttgtttggccctttataactatcca

SEQ ID NO: 3544028 - DNA, 25 bp, Homo sapien
tctagcctcagacaaatggcccata

SEQ ID NO: 3544029 - DNA, 25 bp, Homo sapien
ttttgctcttaggtgtagtcttcac

SEQ ID NO: 3544030 - DNA, 25 bp, Homo sapien
tgcctctagcctcagacaaatggcc

SEQ ID NO: 3544031 - DNA, 25 bp, Homo sapien
ccaatggatgaccttggtaggttag

SEQ ID NO: 3544032 - DNA, 25 bp, Homo sapien
tttttctttctccattaaatgacat

SEQ ID NO: 3544033 - DNA, 25 bp, Homo sapien
ctttctccattaaatgacattttga

SEQ ID NO: 3544034 - DNA, 25 bp, Homo sapien
tctttctccattaaatgacattttg

SEQ ID NO: 3544035 - DNA, 25 bp, Homo sapien
tttctttctccattaaatgacattt

SEQ ID NO: 3544036 - DNA, 25 bp, Homo sapien
agatgtgcttttctgatagcgactg

SEQ ID NO: 3544037 - DNA, 25 bp, Homo sapien
taagtatccaacataggcaatgttg

SEQ ID NO: 3544038 - DNA, 25 bp, Homo sapien
attaagtatccaacataggcaatgt

SEQ ID NO: 3544039 - DNA, 25 bp, Homo sapien
tttctgatagcgactggccacagcg

SEQ ID NO: 3544040 - DNA, 25 bp, Homo sapien
tcttttgcttctttgaagatacagt

SEQ ID NO: 3544041 - DNA, 25 bp, Homo sapien
cttcttttgcttctttgaagataca

SEQ ID NO: 3544042 - DNA, 25 bp, Homo sapien
ttcttttgcttctttgaagatacag

SEQ ID NO: 3544043 - DNA, 25 bp, Homo sapien
atgcatcatgtaaattttgaatagc

SEQ ID NO: 3544044 - DNA, 25 bp, Homo sapien
aatgcatcatgtaaattttgaatag

SEQ ID NO: 3544045 - DNA, 25 bp, Homo sapien
ctggtgcaaatgcatcatgtaaatt

SEQ ID NO: 3544046 - DNA, 25 bp, Homo sapien
tggtgcaaatgcatcatgtaaattt

SEQ ID NO: 3544047 - DNA, 25 bp, Homo sapien
ggtcagcaattaagttgctaatggg

SEQ ID NO: 3544048 - DNA, 25 bp, Homo sapien
tacaaagtaaaggtggaggatgagg

SEQ ID NO: 3544049 - DNA, 25 bp, Homo sapien
agagaactacaggacgggtcagcaa

SEQ ID NO: 3544050 - DNA, 25 bp, Homo sapien
gggccaagcacagtacaaagtaaag

SEQ ID NO: 3544051 - DNA, 25 bp, Homo sapien
cttgtcaagtaatgctcctggtgtc

SEQ ID NO: 3544052 - DNA, 25 bp, Homo sapien
ctgccaagccaacaagtatgggtca

SEQ ID NO: 3544053 - DNA, 25 bp, Homo sapien
gccaacaagtatgggtcaagaccca

SEQ ID NO: 3544054 - DNA, 25 bp, Homo sapien
tcaagacccagattgctttggcaaa

SEQ ID NO: 3544055 - DNA, 25 bp, Homo sapien
gggtcaagacccagattgctttggc

SEQ ID NO: 3544056 - DNA, 25 bp, Homo sapien
ccccagtggaaagactggattttga

SEQ ID NO: 3544057 - DNA, 25 bp, Homo sapien
gtgggactgggaagcctgacctccc

SEQ ID NO: 3544058 - DNA, 25 bp, Homo sapien
ccggagctttggtatggccccagtg

SEQ ID NO: 3544059 - DNA, 25 bp, Homo sapien
gagagaaaatgacaacttcacgggg

SEQ ID NO: 3544060 - DNA, 25 bp, Homo sapien
cagacccaactgaaagaagggtcat

SEQ ID NO: 3544061 - DNA, 25 bp, Homo sapien
tctctggagtcactctagatgtggc

SEQ ID NO: 3544062 - DNA, 25 bp, Homo sapien
ctctctggagtcactctagatgtgg

SEQ ID NO: 3544063 - DNA, 25 bp, Homo sapien
ttggttaagttctttatcatccctg

SEQ ID NO: 3544064 - DNA, 25 bp, Homo sapien
ggttaagttctttatcatccctggc

SEQ ID NO: 3544065 - DNA, 25 bp, Homo sapien
taagttctttatcatccctggcacc

SEQ ID NO: 3544066 - DNA, 25 bp, Homo sapien
gttaagttctttatcatccctggca

SEQ ID NO: 3544067 - DNA, 25 bp, Homo sapien
aaagtattctacagtcagccagcac

SEQ ID NO: 3544068 - DNA, 25 bp, Homo sapien
tcactcctggtctgacattggagca

SEQ ID NO: 3544069 - DNA, 25 bp, Homo sapien
cattggagcatgtgaattaagagtg

SEQ ID NO: 3544070 - DNA, 25 bp, Homo sapien
tctacttgcttctgcgaataaagta

SEQ ID NO: 3544071 - DNA, 25 bp, Homo sapien
catctcagcattgaccactcctgag

SEQ ID NO: 3544072 - DNA, 25 bp, Homo sapien
tctcagcattgaccactcctgagac

SEQ ID NO: 3544073 - DNA, 25 bp, Homo sapien
atctcagcattgaccactcctgaga

SEQ ID NO: 3544074 - DNA, 25 bp, Homo sapien
agggagttcgtgatgttcgttggaa

SEQ ID NO: 3544075 - DNA, 25 bp, Homo sapien
cagggagttcgtgatgttcgttgga

SEQ ID NO: 3544076 - DNA, 25 bp, Homo sapien
ctgttgtgggtgaaacagaagcccc

SEQ ID NO: 3544077 - DNA, 25 bp, Homo sapien
cagaagcccctggggtaaggccaga

SEQ ID NO: 3544078 - DNA, 25 bp, Homo sapien
acagaagcccctggggtaaggccag

SEQ ID NO: 3544079 - DNA, 25 bp, Homo sapien
ttgtgggtgaaacagaagcccctgg

SEQ ID NO: 3544080 - DNA, 25 bp, Homo sapien
ctggaacctgcctagaactgcctgg

SEQ ID NO: 3544081 - DNA, 25 bp, Homo sapien
tccctgtttctgtgggcctggtcct

SEQ ID NO: 3544082 - DNA, 25 bp, Homo sapien
cccagtacctttttgctggaacctg

SEQ ID NO: 3544083 - DNA, 25 bp, Homo sapien
ggcagtcagcactcccccttggaag

SEQ ID NO: 3544084 - DNA, 25 bp, Homo sapien
caccaagggcttcccgcaaaagaag

SEQ ID NO: 3544085 - DNA, 25 bp, Homo sapien
gggtgaatgccatcgcagcgggcat

SEQ ID NO: 3544086 - DNA, 25 bp, Homo sapien
aatgccatcgcagcgggcatgctgg

SEQ ID NO: 3544087 - DNA, 25 bp, Homo sapien
atgacgatgactgcaatggggtgaa

SEQ ID NO: 3544088 - DNA, 25 bp, Homo sapien
ctcacctctcagtgcatttggaact

SEQ ID NO: 3544089 - DNA, 25 bp, Homo sapien
tcacctctcagtgcatttggaactt

SEQ ID NO: 3544090 - DNA, 25 bp, Homo sapien
tcctcacctctcagtgcatttggaa

SEQ ID NO: 3544091 - DNA, 25 bp, Homo sapien
cctcctcacctctcagtgcatttgg

SEQ ID NO: 3544092 - DNA, 25 bp, Homo sapien
gtccattagtccagtgatgggttga

SEQ ID NO: 3544093 - DNA, 25 bp, Homo sapien
ccattagtccagtgatgggttgagc

SEQ ID NO: 3544094 - DNA, 25 bp, Homo sapien
ctggaagtcatgaaatctgtccatt

SEQ ID NO: 3544095 - DNA, 25 bp, Homo sapien
gaagtcatgaaatctgtccattagt

SEQ ID NO: 3544096 - DNA, 25 bp, Homo sapien
tacaatccactggttggttttcctg

SEQ ID NO: 3544097 - DNA, 25 bp, Homo sapien
tttcccaaaaagatctcatttgctt

SEQ ID NO: 3544098 - DNA, 25 bp, Homo sapien
tttttcccaaaaagatctcatttgc

SEQ ID NO: 3544099 - DNA, 25 bp, Homo sapien
cccaaaaagatctcatttgcttcat

SEQ ID NO: 3544100 - DNA, 25 bp, Homo sapien
acagcaaatgaagcaggctcttatc

SEQ ID NO: 3544101 - DNA, 25 bp, Homo sapien
gttcccgagtgttccagaacagcaa

SEQ ID NO: 3544102 - DNA, 25 bp, Homo sapien
aggctcttatccaccgctccaatat

SEQ ID NO: 3544103 - DNA, 25 bp, Homo sapien
tatccaccgctccaatatctttttt

SEQ ID NO: 3544104 - DNA, 25 bp, Homo sapien
tccagaagaatattagttttgacgt

SEQ ID NO: 3544105 - DNA, 25 bp, Homo sapien
ccagaagaatattagttttgacgtc

SEQ ID NO: 3544106 - DNA, 25 bp, Homo sapien
ttttatggcaatgaacactggaatc

SEQ ID NO: 3544107 - DNA, 25 bp, Homo sapien
ggcaatgaacactggaatctccaga

SEQ ID NO: 3544108 - DNA, 25 bp, Homo sapien
aagaggcagatgggttctttctgga

SEQ ID NO: 3544109 - DNA, 25 bp, Homo sapien
gaagaggcagatgggttctttctgg

SEQ ID NO: 3544110 - DNA, 25 bp, Homo sapien
tctggaaggcttgtgtgatgtctga

SEQ ID NO: 3544111 - DNA, 25 bp, Homo sapien
ttgtgtgatgtctgagaccattttc

SEQ ID NO: 3544112 - DNA, 25 bp, Homo sapien
ttagctaaacaggttcccagagcat

SEQ ID NO: 3544113 - DNA, 25 bp, Homo sapien
ttcccagagcatatagacccatttc

SEQ ID NO: 3544114 - DNA, 25 bp, Homo sapien
ggttcccagagcatatagacccatt

SEQ ID NO: 3544115 - DNA, 25 bp, Homo sapien
agagcatatagacccatttctgact

SEQ ID NO: 3544116 - DNA, 25 bp, Homo sapien
gaagtgactacagcaaaagataggc

SEQ ID NO: 3544117 - DNA, 25 bp, Homo sapien
agaagtgactacagcaaaagatagg

SEQ ID NO: 3544118 - DNA, 25 bp, Homo sapien
tcagaagtgactacagcaaaagata

SEQ ID NO: 3544119 - DNA, 25 bp, Homo sapien
cagaagtgactacagcaaaagatag

SEQ ID NO: 3544120 - DNA, 25 bp, Homo sapien
caggaaactttgatcaacatcaaca

SEQ ID NO: 3544121 - DNA, 25 bp, Homo sapien
caattagggatgatgtatatcagga

SEQ ID NO: 3544122 - DNA, 25 bp, Homo sapien
acatcaacaaagctcatgattctac

SEQ ID NO: 3544123 - DNA, 25 bp, Homo sapien
tatcaggaaactttgatcaacatca

SEQ ID NO: 3544124 - DNA, 25 bp, Homo sapien
tatgactattagctctttcaagccg

SEQ ID NO: 3544125 - DNA, 25 bp, Homo sapien
actattagctctttcaagccgcaga

SEQ ID NO: 3544126 - DNA, 25 bp, Homo sapien
tgactattagctctttcaagccgca

SEQ ID NO: 3544127 - DNA, 25 bp, Homo sapien
atatgactattagctctttcaagcc

SEQ ID NO: 3544128 - DNA, 25 bp, Homo sapien
tccactgagcctgtccagaagtcca

SEQ ID NO: 3544129 - DNA, 25 bp, Homo sapien
aatccactgagcctgtccagaagtc

SEQ ID NO: 3544130 - DNA, 25 bp, Homo sapien
ctgagcctgtccagaagtccagtga

SEQ ID NO: 3544131 - DNA, 25 bp, Homo sapien
tgaatccactgagcctgtccagaag

SEQ ID NO: 3544132 - DNA, 25 bp, Homo sapien
tgcacgtgaatcttcaacatcatga

SEQ ID NO: 3544133 - DNA, 25 bp, Homo sapien
gaaaaacatccatgcacgtgaatct

SEQ ID NO: 3544134 - DNA, 25 bp, Homo sapien
aaaacatccatgcacgtgaatcttc

SEQ ID NO: 3544135 - DNA, 25 bp, Homo sapien
catccatgcacgtgaatcttcaaca

SEQ ID NO: 3544136 - DNA, 25 bp, Homo sapien
gatgttgctcttcttcacggagaaa

SEQ ID NO: 3544137 - DNA, 25 bp, Homo sapien
ttcattgagttgctgaaaaatatcc

SEQ ID NO: 3544138 - DNA, 25 bp, Homo sapien
cttcttcacggagaaatgcaagcat

SEQ ID NO: 3544139 - DNA, 25 bp, Homo sapien
gctgaaaaatatcctcgccctcctt

SEQ ID NO: 3544140 - DNA, 25 bp, Homo sapien
gttctggtggtttccatgttctggt

SEQ ID NO: 3544141 - DNA, 25 bp, Homo sapien
ggtttccatgttctggtttctgaga

SEQ ID NO: 3544142 - DNA, 25 bp, Homo sapien
ttttcccataagcactgcatttttt

SEQ ID NO: 3544143 - DNA, 25 bp, Homo sapien
ggtactaaacttccagcatctggtt

SEQ ID NO: 3544144 - DNA, 25 bp, Homo sapien
acagagatggcatcatccaatctcc

SEQ ID NO: 3544145 - DNA, 25 bp, Homo sapien
catccaatctccaaggaaagagact

SEQ ID NO: 3544146 - DNA, 25 bp, Homo sapien
gatggcatcatccaatctccaagga

SEQ ID NO: 3544147 - DNA, 25 bp, Homo sapien
ccaatctccaaggaaagagacttac

SEQ ID NO: 3544148 - DNA, 25 bp, Homo sapien
gaaatagatcttcagaggcatcgct

SEQ ID NO: 3544149 - DNA, 25 bp, Homo sapien
atagatcttcagaggcatcgcttac

SEQ ID NO: 3544150 - DNA, 25 bp, Homo sapien
gaatttcatgtgtcctgtatagaaa

SEQ ID NO: 3544151 - DNA, 25 bp, Homo sapien
catgtgtcctgtatagaaatagatc

SEQ ID NO: 3544152 - DNA, 25 bp, Homo sapien
cacagaacaccttctttttgtgtct

SEQ ID NO: 3544153 - DNA, 25 bp, Homo sapien
cttcacagaacaccttctttttgtg

SEQ ID NO: 3544154 - DNA, 25 bp, Homo sapien
ttaagtactccccaagatcaggacc

SEQ ID NO: 3544155 - DNA, 25 bp, Homo sapien
ctcgttccctgcagagttgactttc

SEQ ID NO: 3544156 - DNA, 25 bp, Homo sapien
gatcaggacctcgttccctgcagag

SEQ ID NO: 3544157 - DNA, 25 bp, Homo sapien
cccaaggttctatgaatgtttctgg

SEQ ID NO: 3544158 - DNA, 25 bp, Homo sapien
tcctcctctggagaaatatgagctt

SEQ ID NO: 3544159 - DNA, 25 bp, Homo sapien
cagttaactctaagtgctgtcctcc

SEQ ID NO: 3544160 - DNA, 25 bp, Homo sapien
ctcttctacatccttttatgtgaac

SEQ ID NO: 3544161 - DNA, 25 bp, Homo sapien
tatgagcttgtctcttctacatcct

SEQ ID NO: 3544162 - DNA, 25 bp, Homo sapien
cacccgccacctgcggacacccaag

SEQ ID NO: 3544163 - DNA, 25 bp, Homo sapien
acagtggccacctgcggacacccgc

SEQ ID NO: 3544164 - DNA, 25 bp, Homo sapien
gaggccggtgccgaagggcagcacc

SEQ ID NO: 3544165 - DNA, 25 bp, Homo sapien
gccggtgccgaagggcagcaccaag

SEQ ID NO: 3544166 - DNA, 25 bp, Homo sapien
tgagctctcacgaatggctccacct

SEQ ID NO: 3544167 - DNA, 25 bp, Homo sapien
gcaaaagttctgaaggcactggtcc

SEQ ID NO: 3544168 - DNA, 25 bp, Homo sapien
tgtctggcagcttcgctcgggctga

SEQ ID NO: 3544169 - DNA, 25 bp, Homo sapien
ggcctcagtcgcctttaagtggcac

SEQ ID NO: 3544170 - DNA, 25 bp, Homo sapien
aacctgaaaccacattgtgagtttg

SEQ ID NO: 3544171 - DNA, 25 bp, Homo sapien
caaaaacctgaaaccacattgtgag

SEQ ID NO: 3544172 - DNA, 25 bp, Homo sapien
tcaaaaacctgaaaccacattgtga

SEQ ID NO: 3544173 - DNA, 25 bp, Homo sapien
aaaacctgaaaccacattgtgagtt

SEQ ID NO: 3544174 - DNA, 25 bp, Homo sapien
tcatcagctcctcatacgttcctct

SEQ ID NO: 3544175 - DNA, 25 bp, Homo sapien
attttcatcagctcctcatacgttc

SEQ ID NO: 3544176 - DNA, 25 bp, Homo sapien
gcttctagccttacattcacataac

SEQ ID NO: 3544177 - DNA, 25 bp, Homo sapien
gatactcagctctaatagcttctag

SEQ ID NO: 3544178 - DNA, 25 bp, Homo sapien
caagttgcatacactggccaggtaa

SEQ ID NO: 3544179 - DNA, 25 bp, Homo sapien
cactggccaggtaaaggcagcttct

SEQ ID NO: 3544180 - DNA, 25 bp, Homo sapien
tctctcaagttgcatacactggcca

SEQ ID NO: 3544181 - DNA, 25 bp, Homo sapien
catacactggccaggtaaaggcagc

SEQ ID NO: 3544182 - DNA, 25 bp, Homo sapien
gacaccaggagcattacttgacaag

SEQ ID NO: 3544183 - DNA, 25 bp, Homo sapien
ggacaccaggagcattacttgacaa

SEQ ID NO: 3544184 - DNA, 25 bp, Homo sapien
acagggacctaacatgcccactcca

SEQ ID NO: 3544185 - DNA, 25 bp, Homo sapien
atggctggtcaggactagaaatgtc

SEQ ID NO: 3544186 - DNA, 25 bp, Homo sapien
aatggctggtcaggactagaaatgt

SEQ ID NO: 3544187 - DNA, 25 bp, Homo sapien
taatggctggtcaggactagaaatg

SEQ ID NO: 3544188 - DNA, 25 bp, Homo sapien
tgcatcttggcctggcgcttcttct

SEQ ID NO: 3544189 - DNA, 25 bp, Homo sapien
tcttcttccagggcggcgggcgctt

SEQ ID NO: 3544190 - DNA, 25 bp, Homo sapien
gcatcttggcctggcgcttcttctc

SEQ ID NO: 3544191 - DNA, 25 bp, Homo sapien
gggcggcgggcgcttctcctgcatc

SEQ ID NO: 3544192 - DNA, 25 bp, Homo sapien
tggcctctggcgctgcaagttgggc

SEQ ID NO: 3544193 - DNA, 25 bp, Homo sapien
tggcgctgcaagttgggcgcgggcg

SEQ ID NO: 3544194 - DNA, 25 bp, Homo sapien
ccgcgctggcctctggcgctgcaag

SEQ ID NO: 3544195 - DNA, 25 bp, Homo sapien
tctggcgctgcaagttgggcgcggg

SEQ ID NO: 3544196 - DNA, 25 bp, Homo sapien
gggccgcaagctgctccgccacagg

SEQ ID NO: 3544197 - DNA, 25 bp, Homo sapien
ccgggccgcaagctgctccgccaca

SEQ ID NO: 3544198 - DNA, 25 bp, Homo sapien
ctgaggcggatccggggcaccacca

SEQ ID NO: 3544199 - DNA, 25 bp, Homo sapien
cacgccgggccgcaagctgctccgc

SEQ ID NO: 3544200 - DNA, 25 bp, Homo sapien
gcggggcggggtcggcagagcccca

SEQ ID NO: 3544201 - DNA, 25 bp, Homo sapien
cttccgcggggcggggtcggcagag

SEQ ID NO: 3544202 - DNA, 25 bp, Homo sapien
ggcggggtcggcagagccccaggac

SEQ ID NO: 3544203 - DNA, 25 bp, Homo sapien
gcggggtcggcagagccccaggacc

SEQ ID NO: 3544204 - DNA, 25 bp, Homo sapien
gctctgcgccctccacttcgcccgc

SEQ ID NO: 3544205 - DNA, 25 bp, Homo sapien
gaggccggctcttggggagccctcc

SEQ ID NO: 3544206 - DNA, 25 bp, Homo sapien
agggccgcttgtgctgctctgcgcc

SEQ ID NO: 3544207 - DNA, 25 bp, Homo sapien
gggcagggccgcttgtgctgctctg

SEQ ID NO: 3544208 - DNA, 25 bp, Homo sapien
tcgctagaatttcctgagcccccag

SEQ ID NO: 3544209 - DNA, 25 bp, Homo sapien
cacgccgcgtcgctagaatttcctg

SEQ ID NO: 3544210 - DNA, 25 bp, Homo sapien
acgccgcgtcgctagaatttcctga

SEQ ID NO: 3544211 - DNA, 25 bp, Homo sapien
cgcgtcgctagaatttcctgagccc

SEQ ID NO: 3544212 - DNA, 25 bp, Homo sapien
cttccccaggcacagggagctctgg

SEQ ID NO: 3544213 - DNA, 25 bp, Homo sapien
gccagccgcctcttccccaggcaca

SEQ ID NO: 3544214 - DNA, 25 bp, Homo sapien
cctcttccccaggcacagggagctc

SEQ ID NO: 3544215 - DNA, 25 bp, Homo sapien
cgccagccgcctcttccccaggcac

SEQ ID NO: 3544216 - DNA, 25 bp, Homo sapien
ctggcacgcgagggccacagcgggg

SEQ ID NO: 3544217 - DNA, 25 bp, Homo sapien
tgttagaggctggtggtcatcctga

SEQ ID NO: 3544218 - DNA, 25 bp, Homo sapien
ctgttagaggctggtggtcatcctg

SEQ ID NO: 3544219 - DNA, 25 bp, Homo sapien
gttagaggctggtggtcatcctgac

SEQ ID NO: 3544220 - DNA, 25 bp, Homo sapien
cagggcgccccggtcctccaggcca

SEQ ID NO: 3544221 - DNA, 25 bp, Homo sapien
ggcgccccggtcctccaggccacac

SEQ ID NO: 3544222 - DNA, 25 bp, Homo sapien
tggtccagggcgccccggtcctcca

SEQ ID NO: 3544223 - DNA, 25 bp, Homo sapien
catgtggtccagggcgccccggtcc

SEQ ID NO: 3544224 - DNA, 25 bp, Homo sapien
tcagcgcggaaggcttgcagtccct

SEQ ID NO: 3544225 - DNA, 25 bp, Homo sapien
cagcgcggaaggcttgcagtccctg

SEQ ID NO: 3544226 - DNA, 25 bp, Homo sapien
gtcagcgcggaaggcttgcagtccc

SEQ ID NO: 3544227 - DNA, 25 bp, Homo sapien
agcgcggaaggcttgcagtccctga

SEQ ID NO: 3544228 - DNA, 25 bp, Homo sapien
tcttccagccctcgggcttccccgc

SEQ ID NO: 3544229 - DNA, 25 bp, Homo sapien
cgggcttccccgccctctggtggag

SEQ ID NO: 3544230 - DNA, 25 bp, Homo sapien
ttccccgccctctggtggagcggag

SEQ ID NO: 3544231 - DNA, 25 bp, Homo sapien
ctcgggcttccccgccctctggtgg

SEQ ID NO: 3544232 - DNA, 25 bp, Homo sapien
tcagggctcggatgcgatcggttcc

SEQ ID NO: 3544233 - DNA, 25 bp, Homo sapien
gctcggatgcgatcggttccaccct

SEQ ID NO: 3544234 - DNA, 25 bp, Homo sapien
tgcatggctgctttcaacccgaacg

SEQ ID NO: 3544235 - DNA, 25 bp, Homo sapien
ggatgcgatcggttccaccctgcat

SEQ ID NO: 3544236 - DNA, 25 bp, Homo sapien
cttcaagatcaagacccattccata

SEQ ID NO: 3544237 - DNA, 25 bp, Homo sapien
aagatcaagacccattccatagttc

SEQ ID NO: 3544238 - DNA, 25 bp, Homo sapien
atcaagacccattccatagttcaac

SEQ ID NO: 3544239 - DNA, 25 bp, Homo sapien
ttcaagatcaagacccattccatag

SEQ ID NO: 3544240 - DNA, 25 bp, Homo sapien
tatgattagggttgcgttcccctcc

SEQ ID NO: 3544241 - DNA, 25 bp, Homo sapien
ctcagctaaggccaccacggtatat

SEQ ID NO: 3544242 - DNA, 25 bp, Homo sapien
ctcctgcctgtgcagctatgattag

SEQ ID NO: 3544243 - DNA, 25 bp, Homo sapien
cacggtatatccacaaagccgtggt

SEQ ID NO: 3544244 - DNA, 25 bp, Homo sapien
aggacgctctccacaccctcgaggc

SEQ ID NO: 3544245 - DNA, 25 bp, Homo sapien
gacgctctccacaccctcgaggccg

SEQ ID NO: 3544246 - DNA, 25 bp, Homo sapien
tcccaggcgatgctgcgggtgtcag

SEQ ID NO: 3544247 - DNA, 25 bp, Homo sapien
ccaggacgctctccacaccctcgag

SEQ ID NO: 3544248 - DNA, 25 bp, Homo sapien
ggcggtggccgggtcatgcagcgcg

SEQ ID NO: 3544249 - DNA, 25 bp, Homo sapien
gcggtggccgggtcatgcagcgcgc

SEQ ID NO: 3544250 - DNA, 25 bp, Homo sapien
tggccgggtcatgcagcgcgccccg

SEQ ID NO: 3544251 - DNA, 25 bp, Homo sapien
ggtggccgggtcatgcagcgcgccc

SEQ ID NO: 3544252 - DNA, 25 bp, Homo sapien
ggtggcaccgtagtcttcattctga

SEQ ID NO: 3544253 - DNA, 25 bp, Homo sapien
attctgcgctgcacatgtggaagaa

SEQ ID NO: 3544254 - DNA, 25 bp, Homo sapien
ataaattacactaaaggtggcaccg

SEQ ID NO: 3544255 - DNA, 25 bp, Homo sapien
gaagaagaccacactgggaagacct

SEQ ID NO: 3544256 - DNA, 25 bp, Homo sapien
atttatcaaaaggatgtttgaaaca

SEQ ID NO: 3544257 - DNA, 25 bp, Homo sapien
atcaaaaggatgtttgaaacaggtc

SEQ ID NO: 3544258 - DNA, 25 bp, Homo sapien
ttatcaaaaggatgtttgaaacagg

SEQ ID NO: 3544259 - DNA, 25 bp, Homo sapien
tcaaaaggatgtttgaaacaggtct

SEQ ID NO: 3544260 - DNA, 25 bp, Homo sapien
aaaaagagggcaaagacgataatgt

SEQ ID NO: 3544261 - DNA, 25 bp, Homo sapien
caaaaaagagggcaaagacgataat

SEQ ID NO: 3544262 - DNA, 25 bp, Homo sapien
gcaaagacgataatgtgggagctgc

SEQ ID NO: 3544263 - DNA, 25 bp, Homo sapien
aaagagggcaaagacgataatgtgg

SEQ ID NO: 3544264 - DNA, 25 bp, Homo sapien
gacgactatacagattgttccacca

SEQ ID NO: 3544265 - DNA, 25 bp, Homo sapien
cgactatacagattgttccaccatt

SEQ ID NO: 3544266 - DNA, 25 bp, Homo sapien
gtgaagacgactatacagattgttc

SEQ ID NO: 3544267 - DNA, 25 bp, Homo sapien
tatacagattgttccaccattgaca

SEQ ID NO: 3544268 - DNA, 25 bp, Homo sapien
tcgattcatgatggtcaaatagtgc

SEQ ID NO: 3544269 - DNA, 25 bp, Homo sapien
ctgtcgattcatgatggtcaaatag

SEQ ID NO: 3544270 - DNA, 25 bp, Homo sapien
gatggtcaaatagtgcagtggctta

SEQ ID NO: 3544271 - DNA, 25 bp, Homo sapien
tgatggtcaaatagtgcagtggctt

SEQ ID NO: 3544272 - DNA, 25 bp, Homo sapien
aagtggtatataaataactggccca

SEQ ID NO: 3544273 - DNA, 25 bp, Homo sapien
agtggtatataaataactggcccat

SEQ ID NO: 3544274 - DNA, 25 bp, Homo sapien
ctgtaatattattattctgtctcat

SEQ ID NO: 3544275 - DNA, 25 bp, Homo sapien
gtcattgctgaagttatagactaac

SEQ ID NO: 3544276 - DNA, 25 bp, Homo sapien
aaacgttccacatgcctcattcaca

SEQ ID NO: 3544277 - DNA, 25 bp, Homo sapien
gaagttatagactaacaaaggcaca

SEQ ID NO: 3544278 - DNA, 25 bp, Homo sapien
aagccatttgtgataaacgttccac

SEQ ID NO: 3544279 - DNA, 25 bp, Homo sapien
agttacaacaatgagtatgtcacct

SEQ ID NO: 3544280 - DNA, 25 bp, Homo sapien
gagtatgtcacctaccattgtcaca

SEQ ID NO: 3544281 - DNA, 25 bp, Homo sapien
aatgagtatgtcacctaccattgtc

SEQ ID NO: 3544282 - DNA, 25 bp, Homo sapien
caacaatgagtatgtcacctaccat

SEQ ID NO: 3544283 - DNA, 25 bp, Homo sapien
caaatctgttgagtgtgtagtcaca

SEQ ID NO: 3544284 - DNA, 25 bp, Homo sapien
ttaaggggtccatgtcacaaataaa

SEQ ID NO: 3544285 - DNA, 25 bp, Homo sapien
ccaagttgaattactatgtgcaaaa

SEQ ID NO: 3544286 - DNA, 25 bp, Homo sapien
ggtccatgtcacaaataaaatgacc

SEQ ID NO: 3544287 - DNA, 25 bp, Homo sapien
aggacttgcagatggccctatagtg

SEQ ID NO: 3544288 - DNA, 25 bp, Homo sapien
tactgcaaggacttgcagatggccc

SEQ ID NO: 3544289 - DNA, 25 bp, Homo sapien
tggccctatagtggcctaggccatc

SEQ ID NO: 3544290 - DNA, 25 bp, Homo sapien
accaaatactgcaaggacttgcaga

SEQ ID NO: 3544291 - DNA, 25 bp, Homo sapien
cctgtaaagagctaggtgctgcatc

SEQ ID NO: 3544292 - DNA, 25 bp, Homo sapien
aaaaaatgtcctgtaaagagctagg

SEQ ID NO: 3544293 - DNA, 25 bp, Homo sapien
gtcctgtaaagagctaggtgctgca

SEQ ID NO: 3544294 - DNA, 25 bp, Homo sapien
tgtaaagagctaggtgctgcatcat

SEQ ID NO: 3544295 - DNA, 25 bp, Homo sapien
tatgtactacttgatatgaagtctc

SEQ ID NO: 3544296 - DNA, 25 bp, Homo sapien
tgtactacttgatatgaagtctctt

SEQ ID NO: 3544297 - DNA, 25 bp, Homo sapien
tactacttgatatgaagtctcttct

SEQ ID NO: 3544298 - DNA, 25 bp, Homo sapien
ttatgtactacttgatatgaagtct

SEQ ID NO: 3544299 - DNA, 25 bp, Homo sapien
ttcttcatagcacttgtcatctcag

SEQ ID NO: 3544300 - DNA, 25 bp, Homo sapien
agggttcagcattggagttatgact

SEQ ID NO: 3544301 - DNA, 25 bp, Homo sapien
cagaatttctcagagtgtagattaa

SEQ ID NO: 3544302 - DNA, 25 bp, Homo sapien
cagcattggagttatgactgtataa

SEQ ID NO: 3544303 - DNA, 25 bp, Homo sapien
agaagaaaacaaccacagttatgtg

SEQ ID NO: 3544304 - DNA, 25 bp, Homo sapien
cagttatgtgggaactgcaggttga

SEQ ID NO: 3544305 - DNA, 25 bp, Homo sapien
tcaatggggaaggtcctagcaggtc

SEQ ID NO: 3544306 - DNA, 25 bp, Homo sapien
ctagcaggtctagcatacataaaaa

SEQ ID NO: 3544307 - DNA, 25 bp, Homo sapien
ataaagggtgcatatcacagaaaaa

SEQ ID NO: 3544308 - DNA, 25 bp, Homo sapien
ataacatgggtatcagtacagacca

SEQ ID NO: 3544309 - DNA, 25 bp, Homo sapien
taaagggtgcatatcacagaaaaaa

SEQ ID NO: 3544310 - DNA, 25 bp, Homo sapien
taaccaagtaatgcaaggtcatagg

SEQ ID NO: 3544311 - DNA, 25 bp, Homo sapien
caagtaatgcaaggtcataggccat

SEQ ID NO: 3544312 - DNA, 25 bp, Homo sapien
gataaccaagtaatgcaaggtcata

SEQ ID NO: 3544313 - DNA, 25 bp, Homo sapien
accaagtaatgcaaggtcataggcc

SEQ ID NO: 3544314 - DNA, 25 bp, Homo sapien
aacagaagaaagacctctgacccac

SEQ ID NO: 3544315 - DNA, 25 bp, Homo sapien
caacagaagaaagacctctgaccca

SEQ ID NO: 3544316 - DNA, 25 bp, Homo sapien
gactacaattagcaggtttcccacc

SEQ ID NO: 3544317 - DNA, 25 bp, Homo sapien
tggattctgcgtgaagcacaagagt

SEQ ID NO: 3544318 - DNA, 25 bp, Homo sapien
gctctgtaaagagctgggccaagca

SEQ ID NO: 3544319 - DNA, 25 bp, Homo sapien
cgtgaagcacaagagtacaaagtca

SEQ ID NO: 3544320 - DNA, 25 bp, Homo sapien
cttctgtggcaaagtttttccatca

SEQ ID NO: 3544321 - DNA, 25 bp, Homo sapien
tacttctgtggcaaagtttttccat

SEQ ID NO: 3544322 - DNA, 25 bp, Homo sapien
ttctgtggcaaagtttttccatcaa

SEQ ID NO: 3544323 - DNA, 25 bp, Homo sapien
acttctgtggcaaagtttttccatc

SEQ ID NO: 3544324 - DNA, 25 bp, Homo sapien
tgcagggagattccaataagtcaca

SEQ ID NO: 3544325 - DNA, 25 bp, Homo sapien
taagtcacacagatactccaacaat

SEQ ID NO: 3544326 - DNA, 25 bp, Homo sapien
ccatcgagtttcagtggtgcaggga

SEQ ID NO: 3544327 - DNA, 25 bp, Homo sapien
caacttcatggacaatttcccatcg

SEQ ID NO: 3544328 - DNA, 25 bp, Homo sapien
tcattatctgaagtcactttttttc

SEQ ID NO: 3544329 - DNA, 25 bp, Homo sapien
ttaatcattatctgaagtcactttt

SEQ ID NO: 3544330 - DNA, 25 bp, Homo sapien
cattatctgaagtcactttttttct

SEQ ID NO: 3544331 - DNA, 25 bp, Homo sapien
aatcattatctgaagtcactttttt

SEQ ID NO: 3544332 - DNA, 25 bp, Homo sapien
ccaaagcttccttattgcacttttt

SEQ ID NO: 3544333 - DNA, 25 bp, Homo sapien
caaagcttccttattgcacttttta

SEQ ID NO: 3544334 - DNA, 25 bp, Homo sapien
ggcagagtggtcactgagcgcagat

SEQ ID NO: 3544335 - DNA, 25 bp, Homo sapien
gagtgtgtagaccacgggatttaac

SEQ ID NO: 3544336 - DNA, 25 bp, Homo sapien
acacctcccctccaagctattgttc

SEQ ID NO: 3544337 - DNA, 25 bp, Homo sapien
tgtagaccacgggatttaacattgg

SEQ ID NO: 3544338 - DNA, 25 bp, Homo sapien
catacacccattaaaggagatgatt

SEQ ID NO: 3544339 - DNA, 25 bp, Homo sapien
gcaggttgcctgaaagtgttatcat

SEQ ID NO: 3544340 - DNA, 25 bp, Homo sapien
tgatctcagtagcaccaaaaatgtg

SEQ ID NO: 3544341 - DNA, 25 bp, Homo sapien
aagaataaactgtgtctatcaaaga

SEQ ID NO: 3544342 - DNA, 25 bp, Homo sapien
gttctgtgtaagacctattaaaatg

SEQ ID NO: 3544343 - DNA, 25 bp, Homo sapien
ctgtgtaagacctattaaaatgaat

SEQ ID NO: 3544344 - DNA, 25 bp, Homo sapien
aatgaattcagtcacattctttttc

SEQ ID NO: 3544345 - DNA, 25 bp, Homo sapien
tatggggttctgtgtaagacctatt

SEQ ID NO: 3544346 - DNA, 25 bp, Homo sapien
tcctttcagggacaagaactcttga

SEQ ID NO: 3544347 - DNA, 25 bp, Homo sapien
ggtctcccttctggatagcccggtg

SEQ ID NO: 3544348 - DNA, 25 bp, Homo sapien
cggtgctccagagaatcctttcagg

SEQ ID NO: 3544349 - DNA, 25 bp, Homo sapien
caacttttccctagaggagatggcc

SEQ ID NO: 3544350 - DNA, 25 bp, Homo sapien
tctgatgaatgacagatcccatcct

SEQ ID NO: 3544351 - DNA, 25 bp, Homo sapien
gaaaatactcttcaatgtctctgta

SEQ ID NO: 3544352 - DNA, 25 bp, Homo sapien
tactcttcaatgtctctgtagttaa

SEQ ID NO: 3544353 - DNA, 25 bp, Homo sapien
gcctgagcagaactaagtttaaaag

SEQ ID NO: 3544354 - DNA, 25 bp, Homo sapien
catgtaaagagctttctcatggcat

SEQ ID NO: 3544355 - DNA, 25 bp, Homo sapien
ccatgtaaagagctttctcatggca

SEQ ID NO: 3544356 - DNA, 25 bp, Homo sapien
agagctttctcatggcattttttac

SEQ ID NO: 3544357 - DNA, 25 bp, Homo sapien
ttaccatgtaaagagctttctcatg

SEQ ID NO: 3544358 - DNA, 25 bp, Homo sapien
gcagaccaatgacatgcatgttggt

SEQ ID NO: 3544359 - DNA, 25 bp, Homo sapien
tgacatgcatgttggtgcagccaac

SEQ ID NO: 3544360 - DNA, 25 bp, Homo sapien
accaatgacatgcatgttggtgcag

SEQ ID NO: 3544361 - DNA, 25 bp, Homo sapien
tgcatgttggtgcagccaactccca

SEQ ID NO: 3544362 - DNA, 25 bp, Homo sapien
tgtcaataaaggataggttggccag

SEQ ID NO: 3544363 - DNA, 25 bp, Homo sapien
gagtcagcaatgagtttaggagcca

SEQ ID NO: 3544364 - DNA, 25 bp, Homo sapien
ggctggaggtgatagtgaccacaat

SEQ ID NO: 3544365 - DNA, 25 bp, Homo sapien
gagatgcctggtcatgatggtagta

SEQ ID NO: 3544366 - DNA, 25 bp, Homo sapien
gtgaccacataaaagaccacaaaga

SEQ ID NO: 3544367 - DNA, 25 bp, Homo sapien
cagaattgcgtataaagacaaagag

SEQ ID NO: 3544368 - DNA, 25 bp, Homo sapien
gcagaattgcgtataaagacaaaga

SEQ ID NO: 3544369 - DNA, 25 bp, Homo sapien
agaattgcgtataaagacaaagaga

SEQ ID NO: 3544370 - DNA, 25 bp, Homo sapien
tgcagaattgcgtataaagacaaag

SEQ ID NO: 3544371 - DNA, 25 bp, Homo sapien
ctggcaagccttctacacataggaa

SEQ ID NO: 3544372 - DNA, 25 bp, Homo sapien
ggcaagccttctacacataggaact

SEQ ID NO: 3544373 - DNA, 25 bp, Homo sapien
caagccttctacacataggaactcg

SEQ ID NO: 3544374 - DNA, 25 bp, Homo sapien
agccttctacacataggaactcggg

SEQ ID NO: 3544375 - DNA, 25 bp, Homo sapien
tggtatcttcactaccactagtcat

SEQ ID NO: 3544376 - DNA, 25 bp, Homo sapien
ctgtgtactgggctatggcactcag

SEQ ID NO: 3544377 - DNA, 25 bp, Homo sapien
tgtgtactgggctatggcactcaga

SEQ ID NO: 3544378 - DNA, 25 bp, Homo sapien
agcctgtgtactgggctatggcact

SEQ ID NO: 3544379 - DNA, 25 bp, Homo sapien
cctgtgtactgggctatggcactca

SEQ ID NO: 3544380 - DNA, 25 bp, Homo sapien
ttccttgctgactccatatgtccct

SEQ ID NO: 3544381 - DNA, 25 bp, Homo sapien
gcttccagcttccttgctgactcca

SEQ ID NO: 3544382 - DNA, 25 bp, Homo sapien
gaaaagggccgcccggttctgctgc

SEQ ID NO: 3544383 - DNA, 25 bp, Homo sapien
tgggtgtgttcttgaaaagggccgc

SEQ ID NO: 3544384 - DNA, 25 bp, Homo sapien
ccctccttggccagggagaggagca

SEQ ID NO: 3544385 - DNA, 25 bp, Homo sapien
cagggagaggagcacggccttgggt

SEQ ID NO: 3544386 - DNA, 25 bp, Homo sapien
taggcatcgatgagctggcacggaa

SEQ ID NO: 3544387 - DNA, 25 bp, Homo sapien
aggcatcgatgagctggcacggaag

SEQ ID NO: 3544388 - DNA, 25 bp, Homo sapien
gtctcggatgacgatctcccaggtc

SEQ ID NO: 3544389 - DNA, 25 bp, Homo sapien
aggtcaccggcttcacctggcggta

SEQ ID NO: 3544390 - DNA, 25 bp, Homo sapien
atctcccaggtcaccggcttcacct

SEQ ID NO: 3544391 - DNA, 25 bp, Homo sapien
gagtagcggtgggtctcggatgacg

SEQ ID NO: 3544392 - DNA, 25 bp, Homo sapien
tgaagccagcacggtcagggcgatc

SEQ ID NO: 3544393 - DNA, 25 bp, Homo sapien
aagccagcacggtcagggcgatcac

SEQ ID NO: 3544394 - DNA, 25 bp, Homo sapien
gaagccagcacggtcagggcgatca

SEQ ID NO: 3544395 - DNA, 25 bp, Homo sapien
ttgccacgaagtcttgggtggcttc

SEQ ID NO: 3544396 - DNA, 25 bp, Homo sapien
cctccagcaagggactctctgggct

SEQ ID NO: 3544397 - DNA, 25 bp, Homo sapien
ccagcatccgcagggtcggagtcag

SEQ ID NO: 3544398 - DNA, 25 bp, Homo sapien
acttggccagcatccgcagggtcgg

SEQ ID NO: 3544399 - DNA, 25 bp, Homo sapien
gggcttgggtcaggacactttgtac

SEQ ID NO: 3544400 - DNA, 25 bp, Homo sapien
tggtgacaactgccacagggcttgg

SEQ ID NO: 3544401 - DNA, 25 bp, Homo sapien
agctggtgacaactgccacagggct

SEQ ID NO: 3544402 - DNA, 25 bp, Homo sapien
ctggtgacaactgccacagggcttg

SEQ ID NO: 3544403 - DNA, 25 bp, Homo sapien
tttgaacttcccgcgtgggctgaag

SEQ ID NO: 3544404 - DNA, 25 bp, Homo sapien
aagtaatcgtcccactcgggcgatc

SEQ ID NO: 3544405 - DNA, 25 bp, Homo sapien
tcctcattcatgcagctctcgatga

SEQ ID NO: 3544406 - DNA, 25 bp, Homo sapien
ctcattcatgcagctctcgatgatc

SEQ ID NO: 3544407 - DNA, 25 bp, Homo sapien
cattcatgcagctctcgatgatctc

SEQ ID NO: 3544408 - DNA, 25 bp, Homo sapien
tcattcatgcagctctcgatgatct

SEQ ID NO: 3544409 - DNA, 25 bp, Homo sapien
ctttgatatgagaggttactctttc

SEQ ID NO: 3544410 - DNA, 25 bp, Homo sapien
ttttctttgatatgagaggttactc

SEQ ID NO: 3544411 - DNA, 25 bp, Homo sapien
gtggctttcaaccactcactaccct

SEQ ID NO: 3544412 - DNA, 25 bp, Homo sapien
tatgagaggttactctttctgtggc

SEQ ID NO: 3544413 - DNA, 25 bp, Homo sapien
tacttcctatcctccagtacattct

SEQ ID NO: 3544414 - DNA, 25 bp, Homo sapien
gattattaggacttcgatggactgg

SEQ ID NO: 3544415 - DNA, 25 bp, Homo sapien
gaaggttctcctagatacttcctat

SEQ ID NO: 3544416 - DNA, 25 bp, Homo sapien
gagtgagtctaagcgccacatccct

SEQ ID NO: 3544417 - DNA, 25 bp, Homo sapien
atttcggccaggctgtcacggcttc

SEQ ID NO: 3544418 - DNA, 25 bp, Homo sapien
tttcggccaggctgtcacggcttcc

SEQ ID NO: 3544419 - DNA, 25 bp, Homo sapien
cagggatttcccgatttcctgcgtg

SEQ ID NO: 3544420 - DNA, 25 bp, Homo sapien
agggatttcccgatttcctgcgtgc

SEQ ID NO: 3544421 - DNA, 25 bp, Homo sapien
tgcagggatttcccgatttcctgcg

SEQ ID NO: 3544422 - DNA, 25 bp, Homo sapien
ctgcagggatttcccgatttcctgc

SEQ ID NO: 3544423 - DNA, 25 bp, Homo sapien
taaaagttagaagcgggatctgctg

SEQ ID NO: 3544424 - DNA, 25 bp, Homo sapien
ttagaagcgggatctgctggcagct

SEQ ID NO: 3544425 - DNA, 25 bp, Homo sapien
ctgtgttaaaagttagaagcgggat

SEQ ID NO: 3544426 - DNA, 25 bp, Homo sapien
tagaagcgggatctgctggcagctt

SEQ ID NO: 3544427 - DNA, 25 bp, Homo sapien
ctgagcatgacggtggaaacatcta

SEQ ID NO: 3544428 - DNA, 25 bp, Homo sapien
gcatgacggtggaaacatctaattt

SEQ ID NO: 3544429 - DNA, 25 bp, Homo sapien
catgacggtggaaacatctaatttt

SEQ ID NO: 3544430 - DNA, 25 bp, Homo sapien
gagcatgacggtggaaacatctaat

SEQ ID NO: 3544431 - DNA, 25 bp, Homo sapien
gcatacttccgttctatcatttgag

SEQ ID NO: 3544432 - DNA, 25 bp, Homo sapien
acttcctggagcatacttccgttct

SEQ ID NO: 3544433 - DNA, 25 bp, Homo sapien
atcatttgagtgtgtcccggtatac

SEQ ID NO: 3544434 - DNA, 25 bp, Homo sapien
catttgagtgtgtcccggtatacga

SEQ ID NO: 3544435 - DNA, 25 bp, Homo sapien
tctaatgtagcatgtggatccaccg

SEQ ID NO: 3544436 - DNA, 25 bp, Homo sapien
gatccaccggcattagggatgtaca

SEQ ID NO: 3544437 - DNA, 25 bp, Homo sapien
gatcaaagatggcaagaaatcctct

SEQ ID NO: 3544438 - DNA, 25 bp, Homo sapien
tattgctatcacagcagaggaagaa

SEQ ID NO: 3544439 - DNA, 25 bp, Homo sapien
tttttggccgaagagggaacttgca

SEQ ID NO: 3544440 - DNA, 25 bp, Homo sapien
gaggtggtgcctacaagtttgaaaa

SEQ ID NO: 3544441 - DNA, 25 bp, Homo sapien
caaacggtgctatgtgctacaggag

SEQ ID NO: 3544442 - DNA, 25 bp, Homo sapien
caggacctgcctacttttatccaaa

SEQ ID NO: 3544443 - DNA, 25 bp, Homo sapien
gaaatggcattccaaaggtgacagc

SEQ ID NO: 3544444 - DNA, 25 bp, Homo sapien
tgcagtttattgactggctgtgaaa

SEQ ID NO: 3544445 - DNA, 25 bp, Homo sapien
gctgtgaaagttttgaagaggctct

SEQ ID NO: 3544446 - DNA, 25 bp, Homo sapien
tgacagcacataagctgacaagctg

SEQ ID NO: 3544447 - DNA, 25 bp, Homo sapien
catatggggcctccgtttgctgtta

SEQ ID NO: 3544448 - DNA, 25 bp, Homo sapien
gctgttaccagaagttcccaggcaa

SEQ ID NO: 3544449 - DNA, 25 bp, Homo sapien
tccgtttgctgttaccagaagttcc

SEQ ID NO: 3544450 - DNA, 25 bp, Homo sapien
gggcctccgtttgctgttaccagaa

SEQ ID NO: 3544451 - DNA, 25 bp, Homo sapien
gaatgttgatccgtattggtttctg

SEQ ID NO: 3544452 - DNA, 25 bp, Homo sapien
gtagggaatgttgatccgtattggt

SEQ ID NO: 3544453 - DNA, 25 bp, Homo sapien
gggaatgttgatccgtattggtttc

SEQ ID NO: 3544454 - DNA, 25 bp, Homo sapien
aatgttgatccgtattggtttctgc

SEQ ID NO: 3544455 - DNA, 25 bp, Homo sapien
ccttgtctcagtattggattgcact

SEQ ID NO: 3544456 - DNA, 25 bp, Homo sapien
cagtagtccttgtctcagtattgga

SEQ ID NO: 3544457 - DNA, 25 bp, Homo sapien
ctagagagccacagtagtccttgtc

SEQ ID NO: 3544458 - DNA, 25 bp, Homo sapien
tcagtattggattgcacttgtgtcc

SEQ ID NO: 3544459 - DNA, 25 bp, Homo sapien
tggagaaatcagcagacagatgctt

SEQ ID NO: 3544460 - DNA, 25 bp, Homo sapien
caggtcgacagggagagactggtgg

SEQ ID NO: 3544461 - DNA, 25 bp, Homo sapien
ctgtgcaggtcgacagggagagact

SEQ ID NO: 3544462 - DNA, 25 bp, Homo sapien
agacagatgctttcactctgctctt

SEQ ID NO: 3544463 - DNA, 25 bp, Homo sapien
ggaggtgctggggatccaacccaaa

SEQ ID NO: 3544464 - DNA, 25 bp, Homo sapien
tgctggggatccaacccaaagtctc

SEQ ID NO: 3544465 - DNA, 25 bp, Homo sapien
gctggggatccaacccaaagtctca

SEQ ID NO: 3544466 - DNA, 25 bp, Homo sapien
ggtgctggggatccaacccaaagtc

SEQ ID NO: 3544467 - DNA, 25 bp, Homo sapien
ctcaagaaacgacagacggagagaa

SEQ ID NO: 3544468 - DNA, 25 bp, Homo sapien
gtgcacctgctgtagcggcggcaaa

SEQ ID NO: 3544469 - DNA, 25 bp, Homo sapien
acactcaagaaacgacagacggaga

SEQ ID NO: 3544470 - DNA, 25 bp, Homo sapien
gggtgtgcacctgctgtagcggcgg

SEQ ID NO: 3544471 - DNA, 25 bp, Homo sapien
gtgtctgcgataaacgagagggctc

SEQ ID NO: 3544472 - DNA, 25 bp, Homo sapien
tttcctcggtgtctgcgataaacga

SEQ ID NO: 3544473 - DNA, 25 bp, Homo sapien
ctcggtgtctgcgataaacgagagg

SEQ ID NO: 3544474 - DNA, 25 bp, Homo sapien
cgtttcctcggtgtctgcgataaac

SEQ ID NO: 3544475 - DNA, 25 bp, Homo sapien
cgttgagaacgcgtcacagctcctt

SEQ ID NO: 3544476 - DNA, 25 bp, Homo sapien
tggtggcttccgagaaactacagag

SEQ ID NO: 3544477 - DNA, 25 bp, Homo sapien
tcaaggcagtcgtggcgttgagaac

SEQ ID NO: 3544478 - DNA, 25 bp, Homo sapien
ggagcacaggtacccttgagttttg

SEQ ID NO: 3544479 - DNA, 25 bp, Homo sapien
gagcttagaatcatccaaacctggg

SEQ ID NO: 3544480 - DNA, 25 bp, Homo sapien
cctggttcaagagaactcctgtgag

SEQ ID NO: 3544481 - DNA, 25 bp, Homo sapien
tgttgtgtgtgaccggaaaagttac

SEQ ID NO: 3544482 - DNA, 25 bp, Homo sapien
aaaatcagtctgttgtgtgtgaccg

SEQ ID NO: 3544483 - DNA, 25 bp, Homo sapien
taaggcgaatacaaacctcactggc

SEQ ID NO: 3544484 - DNA, 25 bp, Homo sapien
cccctgatgtaaggcgaatacaaac

SEQ ID NO: 3544485 - DNA, 25 bp, Homo sapien
acccacccctgatgtaaggcgaata

SEQ ID NO: 3544486 - DNA, 25 bp, Homo sapien
tgatgtaaggcgaatacaaacctca

SEQ ID NO: 3544487 - DNA, 25 bp, Homo sapien
gagtgtatctatcatgccagcctga

SEQ ID NO: 3544488 - DNA, 25 bp, Homo sapien
tcggctaagcaggtttcaccaacag

SEQ ID NO: 3544489 - DNA, 25 bp, Homo sapien
agaatcaagtaagggcatgtcagcc

SEQ ID NO: 3544490 - DNA, 25 bp, Homo sapien
aaacatatgattggtctggaggcac

SEQ ID NO: 3544491 - DNA, 25 bp, Homo sapien
tttttcagcagatgtgcaagacaca

SEQ ID NO: 3544492 - DNA, 25 bp, Homo sapien
gaagtcacaccttaagaatggaaga

SEQ ID NO: 3544493 - DNA, 25 bp, Homo sapien
cataatagagcctgaagtgttggat

SEQ ID NO: 3544494 - DNA, 25 bp, Homo sapien
aagtgaggcctggtaaccccaactg

SEQ ID NO: 3544495 - DNA, 25 bp, Homo sapien
taaaataacaatgttcaccattttc

SEQ ID NO: 3544496 - DNA, 25 bp, Homo sapien
ttagaattgtaaaataacaatgttc

SEQ ID NO: 3544497 - DNA, 25 bp, Homo sapien
aaataacaatgttcaccattttcaa

SEQ ID NO: 3544498 - DNA, 25 bp, Homo sapien
agaattgtaaaataacaatgttcac

SEQ ID NO: 3544499 - DNA, 25 bp, Homo sapien
tacttgagagtagaagggtaaacta

SEQ ID NO: 3544500 - DNA, 25 bp, Homo sapien
gaaaatcaatttctccgttgcctat

SEQ ID NO: 3544501 - DNA, 25 bp, Homo sapien
tttaaagcctcagctcagcaactga

SEQ ID NO: 3544502 - DNA, 25 bp, Homo sapien
cctatagtgacgtgatatgggagga

SEQ ID NO: 3544503 - DNA, 25 bp, Homo sapien
ttggcaataagtggggtgatactca

SEQ ID NO: 3544504 - DNA, 25 bp, Homo sapien
gttggcattcctctggtgtgagtgt

SEQ ID NO: 3544505 - DNA, 25 bp, Homo sapien
caataagtggggtgatactcacttt

SEQ ID NO: 3544506 - DNA, 25 bp, Homo sapien
gatactcactttttcatgcaaacgc

SEQ ID NO: 3544507 - DNA, 25 bp, Homo sapien
aaactcaatatccaatggtttaagt

SEQ ID NO: 3544508 - DNA, 25 bp, Homo sapien
gaacaacactgcaccctgttatcag

SEQ ID NO: 3544509 - DNA, 25 bp, Homo sapien
gaagtatgaacaacactgcaccctg

SEQ ID NO: 3544510 - DNA, 25 bp, Homo sapien
gagcaatgaagtatgaacaacactg

SEQ ID NO: 3544511 - DNA, 25 bp, Homo sapien
caatgaagtatgaacaacactgcac

SEQ ID NO: 3544512 - DNA, 25 bp, Homo sapien
tgtctgttcacgcatgattctgcat

SEQ ID NO: 3544513 - DNA, 25 bp, Homo sapien
tgatgtctgttcacgcatgattctg

SEQ ID NO: 3544514 - DNA, 25 bp, Homo sapien
ctgatgtctgttcacgcatgattct

SEQ ID NO: 3544515 - DNA, 25 bp, Homo sapien
gatgtctgttcacgcatgattctgc

SEQ ID NO: 3544516 - DNA, 25 bp, Homo sapien
aaacaattaagttgcaattctacat

SEQ ID NO: 3544517 - DNA, 25 bp, Homo sapien
ttaagttgcaattctacatatgaat

SEQ ID NO: 3544518 - DNA, 25 bp, Homo sapien
gcaattctacatatgaattaactga

SEQ ID NO: 3544519 - DNA, 25 bp, Homo sapien
gttgcaattctacatatgaattaac

SEQ ID NO: 3544520 - DNA, 25 bp, Homo sapien
aatgtcgactttcccaatccacatt

SEQ ID NO: 3544521 - DNA, 25 bp, Homo sapien
tgtcgactttcccaatccacattcg

SEQ ID NO: 3544522 - DNA, 25 bp, Homo sapien
attaatgtcgactttcccaatccac

SEQ ID NO: 3544523 - DNA, 25 bp, Homo sapien
ttaatgtcgactttcccaatccaca

SEQ ID NO: 3544524 - DNA, 25 bp, Homo sapien
gggcttctgcgccaccgtgcgatgg

SEQ ID NO: 3544525 - DNA, 25 bp, Homo sapien
tcaggtgggacgactgcgcggccgc

SEQ ID NO: 3544526 - DNA, 25 bp, Homo sapien
caccgtgcgatggtgcccgccaggt

SEQ ID NO: 3544527 - DNA, 25 bp, Homo sapien
ttctgcgccaccgtgcgatggtgcc

SEQ ID NO: 3544528 - DNA, 25 bp, Homo sapien
tcctcgtagcttacaggcgacggcg

SEQ ID NO: 3544529 - DNA, 25 bp, Homo sapien
tcgtagcttacaggcgacggcggcc

SEQ ID NO: 3544530 - DNA, 25 bp, Homo sapien
ctcctcgtagcttacaggcgacggc

SEQ ID NO: 3544531 - DNA, 25 bp, Homo sapien
tagcttacaggcgacggcggccagg

SEQ ID NO: 3544532 - DNA, 25 bp, Homo sapien
ctggacacagaagcgctagttcagc

SEQ ID NO: 3544533 - DNA, 25 bp, Homo sapien
cacagaagcgctagttcagcggcgg

SEQ ID NO: 3544534 - DNA, 25 bp, Homo sapien
gttcagcggcgggttacagcccgcc

SEQ ID NO: 3544535 - DNA, 25 bp, Homo sapien
agcgctagttcagcggcgggttaca

SEQ ID NO: 3544536 - DNA, 25 bp, Homo sapien
tgcaggggatcagagtaacatggca

SEQ ID NO: 3544537 - DNA, 25 bp, Homo sapien
gatcagagtaacatggcaggaaggg

SEQ ID NO: 3544538 - DNA, 25 bp, Homo sapien
ggggatcagagtaacatggcaggaa

SEQ ID NO: 3544539 - DNA, 25 bp, Homo sapien
ctgcaggggatcagagtaacatggc

SEQ ID NO: 3544540 - DNA, 25 bp, Homo sapien
ggaaaaagcctgccatcaaaggcca

SEQ ID NO: 3544541 - DNA, 25 bp, Homo sapien
ctggaaaaagcctgccatcaaaggc

SEQ ID NO: 3544542 - DNA, 25 bp, Homo sapien
tggaaaaagcctgccatcaaaggcc

SEQ ID NO: 3544543 - DNA, 25 bp, Homo sapien
gaaaaagcctgccatcaaaggccat

SEQ ID NO: 3544544 - DNA, 25 bp, Homo sapien
tccagtaactccagttagcctccat

SEQ ID NO: 3544545 - DNA, 25 bp, Homo sapien
tcatccagtaactccagttagcctc

SEQ ID NO: 3544546 - DNA, 25 bp, Homo sapien
cttcatccagtaactccagttagcc

SEQ ID NO: 3544547 - DNA, 25 bp, Homo sapien
ctctcttcatccagtaactccagtt

SEQ ID NO: 3544548 - DNA, 25 bp, Homo sapien
ggacattcaagagttcattgaaacc

SEQ ID NO: 3544549 - DNA, 25 bp, Homo sapien
cattgaaaccaatggtgaaaaagtg

SEQ ID NO: 3544550 - DNA, 25 bp, Homo sapien
tgatgtggacattcatctcacaagg

SEQ ID NO: 3544551 - DNA, 25 bp, Homo sapien
tgaaaaagtgaatatcccaatatac

SEQ ID NO: 3544552 - DNA, 25 bp, Homo sapien
tctgtgagatgaatagacacataac

SEQ ID NO: 3544553 - DNA, 25 bp, Homo sapien
gtgctaccagatttcacttctcaaa

SEQ ID NO: 3544554 - DNA, 25 bp, Homo sapien
cctttttcaccatagtcctcagtgt

SEQ ID NO: 3544555 - DNA, 25 bp, Homo sapien
tacaaaacaatgattcaaactgctg

SEQ ID NO: 3544556 - DNA, 25 bp, Homo sapien
tgactatacttttggttcttctggt

SEQ ID NO: 3544557 - DNA, 25 bp, Homo sapien
ccatgtaaaacacctgactatactt

SEQ ID NO: 3544558 - DNA, 25 bp, Homo sapien
tgggatctctgaccaccatgtaaaa

SEQ ID NO: 3544559 - DNA, 25 bp, Homo sapien
cactgggatctctgaccaccatgta

SEQ ID NO: 3544560 - DNA, 25 bp, Homo sapien
ttaatgccagagtttttttacattg

SEQ ID NO: 3544561 - DNA, 25 bp, Homo sapien
aatgccagagtttttttacattgga

SEQ ID NO: 3544562 - DNA, 25 bp, Homo sapien
ttttttacattggattttacagcaa

SEQ ID NO: 3544563 - DNA, 25 bp, Homo sapien
ttttacattggattttacagcaatt

SEQ ID NO: 3544564 - DNA, 25 bp, Homo sapien
gactgttatgtaggagatgcaggca

SEQ ID NO: 3544565 - DNA, 25 bp, Homo sapien
ccatacagattgctagaccattggc

SEQ ID NO: 3544566 - DNA, 25 bp, Homo sapien
acagattgctagaccattggcaaca

SEQ ID NO: 3544567 - DNA, 25 bp, Homo sapien
agattgctagaccattggcaacaac

SEQ ID NO: 3544568 - DNA, 25 bp, Homo sapien
tcacagccaccaccaacagaaggat

SEQ ID NO: 3544569 - DNA, 25 bp, Homo sapien
aaaacctccagtcacagccaccacc

SEQ ID NO: 3544570 - DNA, 25 bp, Homo sapien
agccaccaccaacagaaggatacaa

SEQ ID NO: 3544571 - DNA, 25 bp, Homo sapien
acagccaccaccaacagaaggatac

SEQ ID NO: 3544572 - DNA, 25 bp, Homo sapien
aatcgtaggacatccccacaagtag

SEQ ID NO: 3544573 - DNA, 25 bp, Homo sapien
cgtaggacatccccacaagtaggaa

SEQ ID NO: 3544574 - DNA, 25 bp, Homo sapien
atcgtaggacatccccacaagtagg

SEQ ID NO: 3544575 - DNA, 25 bp, Homo sapien
taggacatccccacaagtaggaaga

SEQ ID NO: 3544576 - DNA, 25 bp, Homo sapien
gggctggaaataatagccaccacag

SEQ ID NO: 3544577 - DNA, 25 bp, Homo sapien
gctggaaataatagccaccacagca

SEQ ID NO: 3544578 - DNA, 25 bp, Homo sapien
ataatagccaccacagcaagcaagt

SEQ ID NO: 3544579 - DNA, 25 bp, Homo sapien
tagccaccacagcaagcaagtttcc

SEQ ID NO: 3544580 - DNA, 25 bp, Homo sapien
tcactgttgaagctgtagactgata

SEQ ID NO: 3544581 - DNA, 25 bp, Homo sapien
tctgtcactgttgaagctgtagact

SEQ ID NO: 3544582 - DNA, 25 bp, Homo sapien
tccagagttctgtcactgttgaagc

SEQ ID NO: 3544583 - DNA, 25 bp, Homo sapien
tgaagctgtagactgatagagacat

SEQ ID NO: 3544584 - DNA, 25 bp, Homo sapien
cattggctccatggaacaccttcat

SEQ ID NO: 3544585 - DNA, 25 bp, Homo sapien
gacggacactcctcctataataaat

SEQ ID NO: 3544586 - DNA, 25 bp, Homo sapien
catgaggacggacactcctcctata

SEQ ID NO: 3544587 - DNA, 25 bp, Homo sapien
gaggacggacactcctcctataata

SEQ ID NO: 3544588 - DNA, 25 bp, Homo sapien
tacatgaggacggacactcctccta

SEQ ID NO: 3544589 - DNA, 25 bp, Homo sapien
aacacagtcatgaacttatcagtag

SEQ ID NO: 3544590 - DNA, 25 bp, Homo sapien
acgtatatattaaaggactcagcat

SEQ ID NO: 3544591 - DNA, 25 bp, Homo sapien
actcagcatgtgtgtgataatggta

SEQ ID NO: 3544592 - DNA, 25 bp, Homo sapien
tcaacgtatatattaaaggactcag

SEQ ID NO: 3544593 - DNA, 25 bp, Homo sapien
aaagaggacaacaacggtactgccg

SEQ ID NO: 3544594 - DNA, 25 bp, Homo sapien
aacaacggtactgccggagctgcag

SEQ ID NO: 3544595 - DNA, 25 bp, Homo sapien
aggacaacaacggtactgccggagc

SEQ ID NO: 3544596 - DNA, 25 bp, Homo sapien
gacaacaacggtactgccggagctg

SEQ ID NO: 3544597 - DNA, 25 bp, Homo sapien
tgaaacgcagaatgtacaaaacctc

SEQ ID NO: 3544598 - DNA, 25 bp, Homo sapien
gaaatgaacaatgacattgggacca

SEQ ID NO: 3544599 - DNA, 25 bp, Homo sapien
cgcagaatgtacaaaacctccaatc

SEQ ID NO: 3544600 - DNA, 25 bp, Homo sapien
caacaatttgaaacgcagaatgtac

SEQ ID NO: 3544601 - DNA, 25 bp, Homo sapien
tcaaatagtgcagtggcttacagat

SEQ ID NO: 3544602 - DNA, 25 bp, Homo sapien
gatggtcaaatagtgcagtggctta

SEQ ID NO: 3544603 - DNA, 25 bp, Homo sapien
ggtcaaatagtgcagtggcttacag

SEQ ID NO: 3544604 - DNA, 25 bp, Homo sapien
tggtcaaatagtgcagtggcttaca

SEQ ID NO: 3544605 - DNA, 25 bp, Homo sapien
aagacctcagccccaccaaagaaat

SEQ ID NO: 3544606 - DNA, 25 bp, Homo sapien
accagaaggaagacctcagccccac

SEQ ID NO: 3544607 - DNA, 25 bp, Homo sapien
agccccaccaaagaaatggtctata

SEQ ID NO: 3544608 - DNA, 25 bp, Homo sapien
tctataaatagctggcccatgcaac

SEQ ID NO: 3544609 - DNA, 25 bp, Homo sapien
gaataagcctacaattaacttggga

SEQ ID NO: 3544610 - DNA, 25 bp, Homo sapien
cacagaataagcctacaattaactt

SEQ ID NO: 3544611 - DNA, 25 bp, Homo sapien
ataagcctacaattaacttgggaga

SEQ ID NO: 3544612 - DNA, 25 bp, Homo sapien
tttatcacagaataagcctacaatt

SEQ ID NO: 3544613 - DNA, 25 bp, Homo sapien
ctgtaatattgttattctgtctcat

SEQ ID NO: 3544614 - DNA, 25 bp, Homo sapien
acagattcctccaccattggcaaca

SEQ ID NO: 3544615 - DNA, 25 bp, Homo sapien
gagattagtagaaggatgaacaaga

SEQ ID NO: 3544616 - DNA, 25 bp, Homo sapien
gaacaagaccatacagattcctcca

SEQ ID NO: 3544617 - DNA, 25 bp, Homo sapien
aaggatgaacaagaccatacagatt

SEQ ID NO: 3544618 - DNA, 25 bp, Homo sapien
catcaccaacagaatgaaggcctca

SEQ ID NO: 3544619 - DNA, 25 bp, Homo sapien
tgaaggcctcagcaccaccaactaa

SEQ ID NO: 3544620 - DNA, 25 bp, Homo sapien
caccaactaagtggtctataaaagg

SEQ ID NO: 3544621 - DNA, 25 bp, Homo sapien
taagtggtctataaaagggctgacc

SEQ ID NO: 3544622 - DNA, 25 bp, Homo sapien
tgagcttggagcatctaaatcctgt

SEQ ID NO: 3544623 - DNA, 25 bp, Homo sapien
cagataaacggagctttatgcctcc

SEQ ID NO: 3544624 - DNA, 25 bp, Homo sapien
aaaccacagcgaggcctacgaagta

SEQ ID NO: 3544625 - DNA, 25 bp, Homo sapien
tgcattccaggtccaataaagggta

SEQ ID NO: 3544626 - DNA, 25 bp, Homo sapien
tcatgatggtcaaatagcgcagtgg

SEQ ID NO: 3544627 - DNA, 25 bp, Homo sapien
tcaattcatgatggtcaaatagcgc

SEQ ID NO: 3544628 - DNA, 25 bp, Homo sapien
aattcatgatggtcaaatagcgcag

SEQ ID NO: 3544629 - DNA, 25 bp, Homo sapien
ttcatgatggtcaaatagcgcagtg

SEQ ID NO: 3544630 - DNA, 25 bp, Homo sapien
cgtcagtatcaccaaacaagtgctc

SEQ ID NO: 3544631 - DNA, 25 bp, Homo sapien
gacgtcagtatcaccaaacaagtgc

SEQ ID NO: 3544632 - DNA, 25 bp, Homo sapien
gtcagtatcaccaaacaagtgctct

SEQ ID NO: 3544633 - DNA, 25 bp, Homo sapien
acgtcagtatcaccaaacaagtgct

SEQ ID NO: 3544634 - DNA, 25 bp, Homo sapien
cactggggagcccaaaaagggactg

SEQ ID NO: 3544635 - DNA, 25 bp, Homo sapien
aagtctacaatcaatacaggagaaa

SEQ ID NO: 3544636 - DNA, 25 bp, Homo sapien
caaaaagggactggcaataatagac

SEQ ID NO: 3544637 - DNA, 25 bp, Homo sapien
gggactggcaataatagacaccaca

SEQ ID NO: 3544638 - DNA, 25 bp, Homo sapien
tttgcacatcaggatactgagagaa

SEQ ID NO: 3544639 - DNA, 25 bp, Homo sapien
agtcacaatatatatgagtaaaaac

SEQ ID NO: 3544640 - DNA, 25 bp, Homo sapien
cattttgcacatcaggatactgaga

SEQ ID NO: 3544641 - DNA, 25 bp, Homo sapien
gcattttgcacatcaggatactgag

SEQ ID NO: 3544642 - DNA, 25 bp, Homo sapien
ctgtaatattgttattctgcctcat

SEQ ID NO: 3544643 - DNA, 25 bp, Homo sapien
cttctttcactgagggttactgaag

SEQ ID NO: 3544644 - DNA, 25 bp, Homo sapien
ctttcactgagggttactgaagata

SEQ ID NO: 3544645 - DNA, 25 bp, Homo sapien
ttcactgagggttactgaagatatc

SEQ ID NO: 3544646 - DNA, 25 bp, Homo sapien
tgtccttggtccagaaaagcaatgc

SEQ ID NO: 3544647 - DNA, 25 bp, Homo sapien
tcttaaagtatagattagagggttc

SEQ ID NO: 3544648 - DNA, 25 bp, Homo sapien
gcagtagaatgcacacccgttggtt

SEQ ID NO: 3544649 - DNA, 25 bp, Homo sapien
ttcttcagggagtgcagaatgaccc

SEQ ID NO: 3544650 - DNA, 25 bp, Homo sapien
caaggatttatcaatgggtaaggtc

SEQ ID NO: 3544651 - DNA, 25 bp, Homo sapien
gacaacaaggagtaaaatctcagca

SEQ ID NO: 3544652 - DNA, 25 bp, Homo sapien
acaaggagtaaaatctcagcacccc

SEQ ID NO: 3544653 - DNA, 25 bp, Homo sapien
aaaatctcagcacccccaaataggt

SEQ ID NO: 3544654 - DNA, 25 bp, Homo sapien
agtaaaatctcagcacccccaaata

SEQ ID NO: 3544655 - DNA, 25 bp, Homo sapien
atcaagcttggaacgaaatggtttt

SEQ ID NO: 3544656 - DNA, 25 bp, Homo sapien
gggtaatcaagcttggaacgaaatg

SEQ ID NO: 3544657 - DNA, 25 bp, Homo sapien
taatcaagcttggaacgaaatggtt

SEQ ID NO: 3544658 - DNA, 25 bp, Homo sapien
ctgggtaatcaagcttggaacgaaa

SEQ ID NO: 3544659 - DNA, 25 bp, Homo sapien
tataatcatatttggggtaactgta

SEQ ID NO: 3544660 - DNA, 25 bp, Homo sapien
taactgtagtagaatgaacagcatc

SEQ ID NO: 3544661 - DNA, 25 bp, Homo sapien
tagtagaatgaacagcatccataaa

SEQ ID NO: 3544662 - DNA, 25 bp, Homo sapien
gggtaactgtagtagaatgaacagc

SEQ ID NO: 3544663 - DNA, 25 bp, Homo sapien
tgtcacagacaaaacgaccaatgac

SEQ ID NO: 3544664 - DNA, 25 bp, Homo sapien
gagtgtatagtcacagacaagcttc

SEQ ID NO: 3544665 - DNA, 25 bp, Homo sapien
tgaataaggccaagttgaattactg

SEQ ID NO: 3544666 - DNA, 25 bp, Homo sapien
gaattactgtgtgcaaaaatcctcc

SEQ ID NO: 3544667 - DNA, 25 bp, Homo sapien
cacacacccattgtctcatgataac

SEQ ID NO: 3544668 - DNA, 25 bp, Homo sapien
cattggccaccactaagaggccaat

SEQ ID NO: 3544669 - DNA, 25 bp, Homo sapien
acacacccattgtctcatgataacc

SEQ ID NO: 3544670 - DNA, 25 bp, Homo sapien
ctccattggccaccactaagaggcc

SEQ ID NO: 3544671 - DNA, 25 bp, Homo sapien
aaggtgctcgataaagagctgggcc

SEQ ID NO: 3544672 - DNA, 25 bp, Homo sapien
aaaaggtgctcgataaagagctggg

SEQ ID NO: 3544673 - DNA, 25 bp, Homo sapien
ggtgctcgataaagagctgggccat

SEQ ID NO: 3544674 - DNA, 25 bp, Homo sapien
caaaaaggtgctcgataaagagctg

SEQ ID NO: 3544675 - DNA, 25 bp, Homo sapien
tacggtcactacaatgagcaggttg

SEQ ID NO: 3544676 - DNA, 25 bp, Homo sapien
acaaaaagtactttctgctcctttg

SEQ ID NO: 3544677 - DNA, 25 bp, Homo sapien
gtagaagagcaagaacataacaaaa

SEQ ID NO: 3544678 - DNA, 25 bp, Homo sapien
gttctgcggtcagagaagcagcagc

SEQ ID NO: 3544679 - DNA, 25 bp, Homo sapien
aagtggttctgcggtcagagaagca

SEQ ID NO: 3544680 - DNA, 25 bp, Homo sapien
caacaaaggcgaagtggttctgcgg

SEQ ID NO: 3544681 - DNA, 25 bp, Homo sapien
tcaacaaaggcgaagtggttctgcg

SEQ ID NO: 3544682 - DNA, 25 bp, Homo sapien
gctataccaccatcatgaagcagca

SEQ ID NO: 3544683 - DNA, 25 bp, Homo sapien
ccttgcgctataccaccatcatgaa

SEQ ID NO: 3544684 - DNA, 25 bp, Homo sapien
ttgcgctataccaccatcatgaagc

SEQ ID NO: 3544685 - DNA, 25 bp, Homo sapien
tctgcaagcccttgcgctataccac

SEQ ID NO: 3544686 - DNA, 25 bp, Homo sapien
ttattatctgaaatcactttttttc

SEQ ID NO: 3544687 - DNA, 25 bp, Homo sapien
tattatctgaaatcactttttttct

SEQ ID NO: 3544688 - DNA, 25 bp, Homo sapien
ttaattattatctgaaatcactttt

SEQ ID NO: 3544689 - DNA, 25 bp, Homo sapien
aattattatctgaaatcactttttt

SEQ ID NO: 3544690 - DNA, 25 bp, Homo sapien
tccttatcacactttttaactcagc

SEQ ID NO: 3544691 - DNA, 25 bp, Homo sapien
agcagctttttcaatgtgcagagtg

SEQ ID NO: 3544692 - DNA, 25 bp, Homo sapien
gcagctttttcaatgtgcagagtgg

SEQ ID NO: 3544693 - DNA, 25 bp, Homo sapien
ccttatcacactttttaactcagca

SEQ ID NO: 3544694 - DNA, 25 bp, Homo sapien
tcaagatgatcacacaggataccat

SEQ ID NO: 3544695 - DNA, 25 bp, Homo sapien
ttactatgatgtgagaaatacaggt

SEQ ID NO: 3544696 - DNA, 25 bp, Homo sapien
acagatacacaaatatacagggcac

SEQ ID NO: 3544697 - DNA, 25 bp, Homo sapien
ccctccaagctatagttctttaaag

SEQ ID NO: 3544698 - DNA, 25 bp, Homo sapien
ctagagaaggaagtttaataggcag

SEQ ID NO: 3544699 - DNA, 25 bp, Homo sapien
gagaaggaagtttaataggcagatg

SEQ ID NO: 3544700 - DNA, 25 bp, Homo sapien
gaagtttaataggcagatgaaccca

SEQ ID NO: 3544701 - DNA, 25 bp, Homo sapien
gaaggaagtttaataggcagatgaa

SEQ ID NO: 3544702 - DNA, 25 bp, Homo sapien
gtcagcaggatgatctcagtagcac

SEQ ID NO: 3544703 - DNA, 25 bp, Homo sapien
tgtcagcaggatgatctcagtagca

SEQ ID NO: 3544704 - DNA, 25 bp, Homo sapien
aggttgcctgaaagtgttatcatgt

SEQ ID NO: 3544705 - DNA, 25 bp, Homo sapien
catacacccattaaaggagatgatt

SEQ ID NO: 3544706 - DNA, 25 bp, Homo sapien
gcaggttgcctgaaagtgttatcat

SEQ ID NO: 3544707 - DNA, 25 bp, Homo sapien
aagaataaactgtgtctatcaaaga

SEQ ID NO: 3544708 - DNA, 25 bp, Homo sapien
gttctgtgtaagacctgttaaaatg

SEQ ID NO: 3544709 - DNA, 25 bp, Homo sapien
ctgtgtaagacctgttaaaatgaat

SEQ ID NO: 3544710 - DNA, 25 bp, Homo sapien
ttagggttctgtgtaagacctgtta

SEQ ID NO: 3544711 - DNA, 25 bp, Homo sapien
gtgtaagacctgttaaaatgaattc

SEQ ID NO: 3544712 - DNA, 25 bp, Homo sapien
aagctgagtatcagaagatgcctgc

SEQ ID NO: 3544713 - DNA, 25 bp, Homo sapien
tggcactggtaacggtatggagccc

SEQ ID NO: 3544714 - DNA, 25 bp, Homo sapien
taacggtatggagcccccacttcta

SEQ ID NO: 3544715 - DNA, 25 bp, Homo sapien
ccacttctaccctaagccttgggtg

SEQ ID NO: 3544716 - DNA, 25 bp, Homo sapien
cgccatgggaagttggcactggtaa

SEQ ID NO: 3544717 - DNA, 25 bp, Homo sapien
tctagacgtggcttgcctgtgggca

SEQ ID NO: 3544718 - DNA, 25 bp, Homo sapien
ctgtgggcagccgttccctttggcc

SEQ ID NO: 3544719 - DNA, 25 bp, Homo sapien
ctgcagctatgtgcctggctactgg

SEQ ID NO: 3544720 - DNA, 25 bp, Homo sapien
tcatttttgccatgtggaagcagat

SEQ ID NO: 3544721 - DNA, 25 bp, Homo sapien
agatgagtggagctcgtcccttggt

SEQ ID NO: 3544722 - DNA, 25 bp, Homo sapien
gtgtgtgaagtctgtccctcggaga

SEQ ID NO: 3544723 - DNA, 25 bp, Homo sapien
ctttgcggtgtgtgtgaagtctgtc

SEQ ID NO: 3544724 - DNA, 25 bp, Homo sapien
tactggttacaagtgagatgagtgg

SEQ ID NO: 3544725 - DNA, 25 bp, Homo sapien
aaccgggcactcctggtctgacgtt

SEQ ID NO: 3544726 - DNA, 25 bp, Homo sapien
agaaccgggcactcctggtctgacg

SEQ ID NO: 3544727 - DNA, 25 bp, Homo sapien
tccagaaccgggcactcctggtctg

SEQ ID NO: 3544728 - DNA, 25 bp, Homo sapien
ccgggcactcctggtctgacgttgg

SEQ ID NO: 3544729 - DNA, 25 bp, Homo sapien
caggtgtgcccagagactcaagctt

SEQ ID NO: 3544730 - DNA, 25 bp, Homo sapien
tctgtcctgacacatctcgctggtc

SEQ ID NO: 3544731 - DNA, 25 bp, Homo sapien
gtgccttgcattactctttccccag

SEQ ID NO: 3544732 - DNA, 25 bp, Homo sapien
cagccctgatgtgtgccttgcatta

SEQ ID NO: 3544733 - DNA, 25 bp, Homo sapien
gggtaattctatggattctgtacct

SEQ ID NO: 3544734 - DNA, 25 bp, Homo sapien
tcatggtgggtaattctatggattc

SEQ ID NO: 3544735 - DNA, 25 bp, Homo sapien
tggtgggtaattctatggattctgt

SEQ ID NO: 3544736 - DNA, 25 bp, Homo sapien
ctctcatggtgggtaattctatgga

SEQ ID NO: 3544737 - DNA, 25 bp, Homo sapien
cccatttggccaggtctggaccatc

SEQ ID NO: 3544738 - DNA, 25 bp, Homo sapien
tggtggagaacacgactggagtcat

SEQ ID NO: 3544739 - DNA, 25 bp, Homo sapien
tggagaacacgactggagtcatcac

SEQ ID NO: 3544740 - DNA, 25 bp, Homo sapien
gtgttgacccagaaggctcgtgtag

SEQ ID NO: 3544741 - DNA, 25 bp, Homo sapien
gctcttctcgtttagctttctttgg

SEQ ID NO: 3544742 - DNA, 25 bp, Homo sapien
ttcctgctcttctcgtttagctttc

SEQ ID NO: 3544743 - DNA, 25 bp, Homo sapien
gcccccaaagatctcatttgcttca

SEQ ID NO: 3544744 - DNA, 25 bp, Homo sapien
tcttgaatttttgcccccaaagatc

SEQ ID NO: 3544745 - DNA, 25 bp, Homo sapien
catcaacaaagctcatggttctacc

SEQ ID NO: 3544746 - DNA, 25 bp, Homo sapien
tatatcagggaactttgatcaacat

SEQ ID NO: 3544747 - DNA, 25 bp, Homo sapien
gaagatatgactattgtccctttca

SEQ ID NO: 3544748 - DNA, 25 bp, Homo sapien
ggaataatcccactgtgctggtagg

SEQ ID NO: 3544749 - DNA, 25 bp, Homo sapien
ctgaatctcttgagcctgtccatca

SEQ ID NO: 3544750 - DNA, 25 bp, Homo sapien
tgaatctcttgagcctgtccatcag

SEQ ID NO: 3544751 - DNA, 25 bp, Homo sapien
atctcttgagcctgtccatcagtcc

SEQ ID NO: 3544752 - DNA, 25 bp, Homo sapien
aggctcagacacttgcagcagcaga

SEQ ID NO: 3544753 - DNA, 25 bp, Homo sapien
ccaatctccaaggaaatagacttac

SEQ ID NO: 3544754 - DNA, 25 bp, Homo sapien
catccaatctccaaggaaatagact

SEQ ID NO: 3544755 - DNA, 25 bp, Homo sapien
gatggcatcatccaatctccaagga

SEQ ID NO: 3544756 - DNA, 25 bp, Homo sapien
ggacacagagatggcatcatccaat

SEQ ID NO: 3544757 - DNA, 25 bp, Homo sapien
aagaatttcatgtgtcctgtataga

SEQ ID NO: 3544758 - DNA, 25 bp, Homo sapien
ttcatgtgtcctgtatagaaataga

SEQ ID NO: 3544759 - DNA, 25 bp, Homo sapien
agaaatagatcttcagaggcatcac

SEQ ID NO: 3544760 - DNA, 25 bp, Homo sapien
catgtgtcctgtatagaaatagatc

SEQ ID NO: 3544761 - DNA, 25 bp, Homo sapien
cctgagagttggaatacagcaaaca

SEQ ID NO: 3544762 - DNA, 25 bp, Homo sapien
tgccatgttgtctccttgcatttag

SEQ ID NO: 3544763 - DNA, 25 bp, Homo sapien
ttagagcactgagcaacaactgcca

SEQ ID NO: 3544764 - DNA, 25 bp, Homo sapien
ctcctgagagttggaatacagcaaa

SEQ ID NO: 3544765 - DNA, 25 bp, Homo sapien
tcctcctctggagaaatatgagctt

SEQ ID NO: 3544766 - DNA, 25 bp, Homo sapien
ctgaacgcagttaactctaagtgct

SEQ ID NO: 3544767 - DNA, 25 bp, Homo sapien
tatgagcttgtctcttctacatcca

SEQ ID NO: 3544768 - DNA, 25 bp, Homo sapien
agttaactctaagtgctgtcctcct

SEQ ID NO: 3544769 - DNA, 25 bp, Homo sapien
cagaattgcatgagcctgtccctca

SEQ ID NO: 3544770 - DNA, 25 bp, Homo sapien
ccctgccctgagctctagattcaga

SEQ ID NO: 3544771 - DNA, 25 bp, Homo sapien
ctcagaattgcatgagcctgtccct

SEQ ID NO: 3544772 - DNA, 25 bp, Homo sapien
ctgccctgagctctagattcagagg

SEQ ID NO: 3544773 - DNA, 25 bp, Homo sapien
atgaaaaacccagtgagtcgttttg

SEQ ID NO: 3544774 - DNA, 25 bp, Homo sapien
tctcctgtattgattgtagacttac

SEQ ID NO: 3544775 - DNA, 25 bp, Homo sapien
atttatagatgctgtgtattccacc

SEQ ID NO: 3544776 - DNA, 25 bp, Homo sapien
catttctcctgtattgattgtagac

SEQ ID NO: 3544777 - DNA, 25 bp, Homo sapien
gatgctgtgtattccaccaccattt

SEQ ID NO: 3544778 - DNA, 25 bp, Homo sapien
cacttatttggtggttctgaggtct

SEQ ID NO: 3544779 - DNA, 25 bp, Homo sapien
ccttctgagcttgcatgggacaact

SEQ ID NO: 3544780 - DNA, 25 bp, Homo sapien
gacaaaaagacgatttccttctgag

SEQ ID NO: 3544781 - DNA, 25 bp, Homo sapien
ggtggtgatggcctgtgatcgctgt

SEQ ID NO: 3544782 - DNA, 25 bp, Homo sapien
gtcaggaagggaggcataaagccct

SEQ ID NO: 3544783 - DNA, 25 bp, Homo sapien
tctaagctgtcgaagtaattaaact

SEQ ID NO: 3544784 - DNA, 25 bp, Homo sapien
gaaagttctgattggtgcttttaaa

SEQ ID NO: 3544785 - DNA, 25 bp, Homo sapien
tacttagagggatagaggagctttt

SEQ ID NO: 3544786 - DNA, 25 bp, Homo sapien
caacttgccggcttgttacacagat

SEQ ID NO: 3544787 - DNA, 25 bp, Homo sapien
ttattattccttccacatacagtgg

SEQ ID NO: 3544788 - DNA, 25 bp, Homo sapien
tgactgatcaaaatactgcccttgg

SEQ ID NO: 3544789 - DNA, 25 bp, Homo sapien
cagtatcccttttcagcgtagatcc

SEQ ID NO: 3544790 - DNA, 25 bp, Homo sapien
catgcagattggttactccttttgt

SEQ ID NO: 3544791 - DNA, 25 bp, Homo sapien
gagcctcaggacttcttgggcatgg

SEQ ID NO: 3544792 - DNA, 25 bp, Homo sapien
catggactttctaacaggagggata

SEQ ID NO: 3544793 - DNA, 25 bp, Homo sapien
tgttcttggtgagacccacatgttt

SEQ ID NO: 3544794 - DNA, 25 bp, Homo sapien
ggataaggcccttcttgctgggaat

SEQ ID NO: 3544795 - DNA, 25 bp, Homo sapien
ctgttctcctgagctctcatctctg

SEQ ID NO: 3544796 - DNA, 25 bp, Homo sapien
tgttctcctgagctctcatctctga

SEQ ID NO: 3544797 - DNA, 25 bp, Homo sapien
ctgagctctcatctctgatacaagc

SEQ ID NO: 3544798 - DNA, 25 bp, Homo sapien
tctcctgagctctcatctctgatac

SEQ ID NO: 3544799 - DNA, 25 bp, Homo sapien
tatagatgctgcatattccactacc

SEQ ID NO: 3544800 - DNA, 25 bp, Homo sapien
gaacctgctcattgtggtgactatt

SEQ ID NO: 3544801 - DNA, 25 bp, Homo sapien
ggtgactattattgccagcccttcc

SEQ ID NO: 3544802 - DNA, 25 bp, Homo sapien
acttgcctgtctgtcatgtatagat

SEQ ID NO: 3544803 - DNA, 25 bp, Homo sapien
cccaaactgattgtagagttactca

SEQ ID NO: 3544804 - DNA, 25 bp, Homo sapien
ttccttccgagcttgcatgggccag

SEQ ID NO: 3544805 - DNA, 25 bp, Homo sapien
tgtttggtggtactgagatcttcat

SEQ ID NO: 3544806 - DNA, 25 bp, Homo sapien
ttatagaacacttgtttggtggtac

SEQ ID NO: 3544807 - DNA, 25 bp, Homo sapien
ccaccttctggtggtgatagcctgg

SEQ ID NO: 3544808 - DNA, 25 bp, Homo sapien
tgatagcctggattggaggcatcct

SEQ ID NO: 3544809 - DNA, 25 bp, Homo sapien
cctgcatgccactgtgcagattctt

SEQ ID NO: 3544810 - DNA, 25 bp, Homo sapien
ccattatgcaacaagggatctgcca

SEQ ID NO: 3544811 - DNA, 25 bp, Homo sapien
gatctcttcccattgttgaaacttg

SEQ ID NO: 3544812 - DNA, 25 bp, Homo sapien
gtcattgaccactttatgtgtgatc

SEQ ID NO: 3544813 - DNA, 25 bp, Homo sapien
tcattgaccactttatgtgtgatct

SEQ ID NO: 3544814 - DNA, 25 bp, Homo sapien
tgtgtgatctcttcccattgttgaa

SEQ ID NO: 3544815 - DNA, 25 bp, Homo sapien
gtggctcccactttactgtcgttgt

SEQ ID NO: 3544816 - DNA, 25 bp, Homo sapien
tgctcgtcatctcctacatagtcat

SEQ ID NO: 3544817 - DNA, 25 bp, Homo sapien
aaatcctatagctctgaaggacagc

SEQ ID NO: 3544818 - DNA, 25 bp, Homo sapien
gcagccaacagtggagccatgtgct

SEQ ID NO: 3544819 - DNA, 25 bp, Homo sapien
ctagaagctgttttctgtagcaaca

SEQ ID NO: 3544820 - DNA, 25 bp, Homo sapien
gctgctgcaaggttttaattcctag

SEQ ID NO: 3544821 - DNA, 25 bp, Homo sapien
cagaatgcaagagagttgcaccagt

SEQ ID NO: 3544822 - DNA, 25 bp, Homo sapien
gagttgcaccagtgaaaggaggcat

SEQ ID NO: 3544823 - DNA, 25 bp, Homo sapien
tgactgtggactctttgagaacact

SEQ ID NO: 3544824 - DNA, 25 bp, Homo sapien
tgagaacactaccatttcccttgaa

SEQ ID NO: 3544825 - DNA, 25 bp, Homo sapien
tctcactgtgatggtctgtgactgc

SEQ ID NO: 3544826 - DNA, 25 bp, Homo sapien
ttctctgatggtgtagcgatcatcc

SEQ ID NO: 3544827 - DNA, 25 bp, Homo sapien
ccatcatgagtccacgggtgtgctg

SEQ ID NO: 3544828 - DNA, 25 bp, Homo sapien
cacaaccatcatgagtccacgggtg

SEQ ID NO: 3544829 - DNA, 25 bp, Homo sapien
tgacacaaccatcatgagtccacgg

SEQ ID NO: 3544830 - DNA, 25 bp, Homo sapien
ctgcatgacacaaccatcatgagtc

SEQ ID NO: 3544831 - DNA, 25 bp, Homo sapien
gacgcaacacactttccacctgtgg

SEQ ID NO: 3544832 - DNA, 25 bp, Homo sapien
tgaagtcttgcagctcggtaggttg

SEQ ID NO: 3544833 - DNA, 25 bp, Homo sapien
gcagctcggtaggttgacgcaacac

SEQ ID NO: 3544834 - DNA, 25 bp, Homo sapien
taggttgacgcaacacactttccac

SEQ ID NO: 3544835 - DNA, 25 bp, Homo sapien
gacaaggatatggctatttccttta

SEQ ID NO: 3544836 - DNA, 25 bp, Homo sapien
tatttcctttactattgttgcaccc

SEQ ID NO: 3544837 - DNA, 25 bp, Homo sapien
caaggatatggctatttcctttact

SEQ ID NO: 3544838 - DNA, 25 bp, Homo sapien
tttcctttactattgttgcacccat

SEQ ID NO: 3544839 - DNA, 25 bp, Homo sapien
tttgttttctgaaataattttgcca

SEQ ID NO: 3544840 - DNA, 25 bp, Homo sapien
tgttttctgaaataattttgccatg

SEQ ID NO: 3544841 - DNA, 25 bp, Homo sapien
ttgttttctgaaataattttgccat

SEQ ID NO: 3544842 - DNA, 25 bp, Homo sapien
gagtgtattaaagaccctatccagg

SEQ ID NO: 3544843 - DNA, 25 bp, Homo sapien
gagagcatccacaattaatctaggg

SEQ ID NO: 3544844 - DNA, 25 bp, Homo sapien
caattatgtgagacgtgcaagcgga

SEQ ID NO: 3544845 - DNA, 25 bp, Homo sapien
tgcagacctgctggctcatgatggt

SEQ ID NO: 3544846 - DNA, 25 bp, Homo sapien
tacatggggcttcctagtgtccggc

SEQ ID NO: 3544847 - DNA, 25 bp, Homo sapien
gggcttcctagtgtccggctggact

SEQ ID NO: 3544848 - DNA, 25 bp, Homo sapien
ccggctggacttgatggtcacaata

SEQ ID NO: 3544849 - DNA, 25 bp, Homo sapien
tagtgtccggctggacttgatggtc

SEQ ID NO: 3544850 - DNA, 25 bp, Homo sapien
gaattcaggcacactgttattttgc

SEQ ID NO: 3544851 - DNA, 25 bp, Homo sapien
gcctcaagggatcctgtgttaatcc

SEQ ID NO: 3544852 - DNA, 25 bp, Homo sapien
caccacagttcccatatagaaaatt

SEQ ID NO: 3544853 - DNA, 25 bp, Homo sapien
tcctaacagtatgaattcaggcaca

SEQ ID NO: 3544854 - DNA, 25 bp, Homo sapien
tctgctaacagtagtgaccatttgt

SEQ ID NO: 3544855 - DNA, 25 bp, Homo sapien
taacagtagtgaccatttgtagcat

SEQ ID NO: 3544856 - DNA, 25 bp, Homo sapien
ctctgctaacagtagtgaccatttg

SEQ ID NO: 3544857 - DNA, 25 bp, Homo sapien
ctgctaacagtagtgaccatttgta

SEQ ID NO: 3544858 - DNA, 25 bp, Homo sapien
aattctccagtctgattatcttgga

SEQ ID NO: 3544859 - DNA, 25 bp, Homo sapien
ctcacaattctccagtctgattatc

SEQ ID NO: 3544860 - DNA, 25 bp, Homo sapien
attctccagtctgattatcttggat

SEQ ID NO: 3544861 - DNA, 25 bp, Homo sapien
tcacaattctccagtctgattatct

SEQ ID NO: 3544862 - DNA, 25 bp, Homo sapien
ccattattatgagcaggcaaaagtg

SEQ ID NO: 3544863 - DNA, 25 bp, Homo sapien
aatcatcatagtttgttgtactggg

SEQ ID NO: 3544864 - DNA, 25 bp, Homo sapien
gcaaaagtgtaacacaatcatcata

SEQ ID NO: 3544865 - DNA, 25 bp, Homo sapien
cctgcactacaccattattatgagc

SEQ ID NO: 3544866 - DNA, 25 bp, Homo sapien
gctaatgattgacctactaacagaa

SEQ ID NO: 3544867 - DNA, 25 bp, Homo sapien
ttccttggagacattgagatcttca

SEQ ID NO: 3544868 - DNA, 25 bp, Homo sapien
tttagctaattgaccaacccatgta

SEQ ID NO: 3544869 - DNA, 25 bp, Homo sapien
gaagatcgtttcctataataactgc

SEQ ID NO: 3544870 - DNA, 25 bp, Homo sapien
tgttcagtcttcttatctacatgct

SEQ ID NO: 3544871 - DNA, 25 bp, Homo sapien
cagtcttcttatctacatgctgaga

SEQ ID NO: 3544872 - DNA, 25 bp, Homo sapien
gctcccatgttcagtcttcttatct

SEQ ID NO: 3544873 - DNA, 25 bp, Homo sapien
cccatgttcagtcttcttatctaca

SEQ ID NO: 3544874 - DNA, 25 bp, Homo sapien
ggatcagagggtcctacccccatgg

SEQ ID NO: 3544875 - DNA, 25 bp, Homo sapien
tggaatctcactgactgctagcaca

SEQ ID NO: 3544876 - DNA, 25 bp, Homo sapien
tacccccatggaatctcactgactg

SEQ ID NO: 3544877 - DNA, 25 bp, Homo sapien
ccccatggaatctcactgactgcta

SEQ ID NO: 3544878 - DNA, 25 bp, Homo sapien
tatggtatggattcaaatgcaattg

SEQ ID NO: 3544879 - DNA, 25 bp, Homo sapien
caaatgcaattgatctttgctagaa

SEQ ID NO: 3544880 - DNA, 25 bp, Homo sapien
tcaaatgcaattgatctttgctaga

SEQ ID NO: 3544881 - DNA, 25 bp, Homo sapien
aaatatggtatggattcaaatgcaa

SEQ ID NO: 3544882 - DNA, 25 bp, Homo sapien
gaatcttgggatgatagtgatcatc

SEQ ID NO: 3544883 - DNA, 25 bp, Homo sapien
tatttctggcagtctacggcttcag

SEQ ID NO: 3544884 - DNA, 25 bp, Homo sapien
cggcttcagtgtggtagggaatctt

SEQ ID NO: 3544885 - DNA, 25 bp, Homo sapien
taacccaaaattgcatacccccatg

SEQ ID NO: 3544886 - DNA, 25 bp, Homo sapien
tctgtgttttacaccgtggtgatcc

SEQ ID NO: 3544887 - DNA, 25 bp, Homo sapien
cccttgttgaatcccctgatctaca

SEQ ID NO: 3544888 - DNA, 25 bp, Homo sapien
aactccaggcacacagtcaaagtgg

SEQ ID NO: 3544889 - DNA, 25 bp, Homo sapien
gtggtgatccccttgttgaatcccc

SEQ ID NO: 3544890 - DNA, 25 bp, Homo sapien
tctccacgtgagaaatatagagctt

SEQ ID NO: 3544891 - DNA, 25 bp, Homo sapien
tccacgtgagaaatatagagcttct

SEQ ID NO: 3544892 - DNA, 25 bp, Homo sapien
catctccacgtgagaaatatagagc

SEQ ID NO: 3544893 - DNA, 25 bp, Homo sapien
acatctccacgtgagaaatatagag

SEQ ID NO: 3544894 - DNA, 25 bp, Homo sapien
aatgttgccagtgtccaggttatca

SEQ ID NO: 3544895 - DNA, 25 bp, Homo sapien
tgttgccagtgtccaggttatcatt

SEQ ID NO: 3544896 - DNA, 25 bp, Homo sapien
gttgccagtgtccaggttatcatta

SEQ ID NO: 3544897 - DNA, 25 bp, Homo sapien
tgccagtgtccaggttatcattaac

SEQ ID NO: 3544898 - DNA, 25 bp, Homo sapien
aatggctgtgttgcacagttatatt

SEQ ID NO: 3544899 - DNA, 25 bp, Homo sapien
tctgctctttagttgacacagaatc

SEQ ID NO: 3544900 - DNA, 25 bp, Homo sapien
ttgacacagaatctttcctcttggc

SEQ ID NO: 3544901 - DNA, 25 bp, Homo sapien
tttagttgacacagaatctttcctc

SEQ ID NO: 3544902 - DNA, 25 bp, Homo sapien
caccttcggatttgccaaagaaatc

SEQ ID NO: 3544903 - DNA, 25 bp, Homo sapien
gaaatctgggtcctgccccatactt

SEQ ID NO: 3544904 - DNA, 25 bp, Homo sapien
tacttgttggcttggcaggcttttc

SEQ ID NO: 3544905 - DNA, 25 bp, Homo sapien
ggcaagtggccagctcaccttcgga

SEQ ID NO: 3544906 - DNA, 25 bp, Homo sapien
gtgtcaagcacccgcggattctcac

SEQ ID NO: 3544907 - DNA, 25 bp, Homo sapien
tctagaaagacagcgtggaaacgcg

SEQ ID NO: 3544908 - DNA, 25 bp, Homo sapien
gcgcccggcctaataaattgatctt

SEQ ID NO: 3544909 - DNA, 25 bp, Homo sapien
gtcaggcgaatcgatgtggctcccc

SEQ ID NO: 3544910 - DNA, 25 bp, Homo sapien
gcggcgggcgcttctcctgcacctt

SEQ ID NO: 3544911 - DNA, 25 bp, Homo sapien
ttggcctggcgcttcttctcggcct

SEQ ID NO: 3544912 - DNA, 25 bp, Homo sapien
tgcaccttggcctggcgcttcttct

SEQ ID NO: 3544913 - DNA, 25 bp, Homo sapien
tcttcttccagggcggcgggcgctt

SEQ ID NO: 3544914 - DNA, 25 bp, Homo sapien
tagttgggtattcgcaggtggccac

SEQ ID NO: 3544915 - DNA, 25 bp, Homo sapien
tccgcgccggcctctgggtctggaa

SEQ ID NO: 3544916 - DNA, 25 bp, Homo sapien
gggcaccaccacgtcaggccgcaag

SEQ ID NO: 3544917 - DNA, 25 bp, Homo sapien
caggccgcaagctgctccgcagcag

SEQ ID NO: 3544918 - DNA, 25 bp, Homo sapien
tcctcagccgccaggatttcctgct

SEQ ID NO: 3544919 - DNA, 25 bp, Homo sapien
tgcgccctccgcttcgtccgcctcc

SEQ ID NO: 3544920 - DNA, 25 bp, Homo sapien
ccgccgcgtcgccagaatttcctca

SEQ ID NO: 3544921 - DNA, 25 bp, Homo sapien
cgcttcgtccgcctcctgcgcctgc

SEQ ID NO: 3544922 - DNA, 25 bp, Homo sapien
gctgttagaggctggtgatcatcct

SEQ ID NO: 3544923 - DNA, 25 bp, Homo sapien
ggggctgttagaggctggtgatcat

SEQ ID NO: 3544924 - DNA, 25 bp, Homo sapien
tgttagaggctggtgatcatcctga

SEQ ID NO: 3544925 - DNA, 25 bp, Homo sapien
gttagaggctggtgatcatcctgac

SEQ ID NO: 3544926 - DNA, 25 bp, Homo sapien
ccacgcacggaacgccgcgtcagca

SEQ ID NO: 3544927 - DNA, 25 bp, Homo sapien
cacgcacggaacgccgcgtcagcac

SEQ ID NO: 3544928 - DNA, 25 bp, Homo sapien
acgcacggaacgccgcgtcagcacg

SEQ ID NO: 3544929 - DNA, 25 bp, Homo sapien
tcagggctcggatgcgatcggttcc

SEQ ID NO: 3544930 - DNA, 25 bp, Homo sapien
gctcggatgcgatcggttccaccct

SEQ ID NO: 3544931 - DNA, 25 bp, Homo sapien
ggatgcgatcggttccaccctgcat

SEQ ID NO: 3544932 - DNA, 25 bp, Homo sapien
atggaggctttcaacccgaacgcgt

SEQ ID NO: 3544933 - DNA, 25 bp, Homo sapien
aagtagttggtgatgatagagtgcc

SEQ ID NO: 3544934 - DNA, 25 bp, Homo sapien
tcaacaagtagttggtgatgataga

SEQ ID NO: 3544935 - DNA, 25 bp, Homo sapien
agttcaacaagtagttggtgatgat

SEQ ID NO: 3544936 - DNA, 25 bp, Homo sapien
acaagtagttggtgatgatagagtg

SEQ ID NO: 3544937 - DNA, 25 bp, Homo sapien
gatagcaggcgacatcaaggtcggt

SEQ ID NO: 3544938 - DNA, 25 bp, Homo sapien
ccagggtatatccacaaagtcgtga

SEQ ID NO: 3544939 - DNA, 25 bp, Homo sapien
caaagtcgtgatagcaggcgacatc

SEQ ID NO: 3544940 - DNA, 25 bp, Homo sapien
cagggtatatccacaaagtcgtgat

SEQ ID NO: 3544941 - DNA, 25 bp, Homo sapien
cctccaggacgccctcctccaggac

SEQ ID NO: 3544942 - DNA, 25 bp, Homo sapien
gcctccaggacgccctcctccagga

SEQ ID NO: 3544943 - DNA, 25 bp, Homo sapien
cgccctcgacgccgtgctcctcctc

SEQ ID NO: 3544944 - DNA, 25 bp, Homo sapien
cctcgacgccgtgctcctcctcctc

SEQ ID NO: 3544945 - DNA, 25 bp, Homo sapien
ttctccacgccctcgacgccgtgct

SEQ ID NO: 3544946 - DNA, 25 bp, Homo sapien
gttctccacgccctcgacgccgtgc

SEQ ID NO: 3544947 - DNA, 25 bp, Homo sapien
agggtagaaagagtcgtcccaggtg

SEQ ID NO: 3544948 - DNA, 25 bp, Homo sapien
ggtagaaagagtcgtcccaggtgat

SEQ ID NO: 3544949 - DNA, 25 bp, Homo sapien
gggtagaaagagtcgtcccaggtga

SEQ ID NO: 3544950 - DNA, 25 bp, Homo sapien
gtagaaagagtcgtcccaggtgatg

SEQ ID NO: 3544951 - DNA, 25 bp, Homo sapien
gttgggcagactggagaagtcctgg

SEQ ID NO: 3544952 - DNA, 25 bp, Homo sapien
agtcctggaactctttgtagtcagc

SEQ ID NO: 3544953 - DNA, 25 bp, Homo sapien
actctttgtagtcagcgcggtcctc

SEQ ID NO: 3544954 - DNA, 25 bp, Homo sapien
ctgcgggtgttgggcagactggaga

SEQ ID NO: 3544955 - DNA, 25 bp, Homo sapien
gagtggggactgcggtggcggggtc

SEQ ID NO: 3544956 - DNA, 25 bp, Homo sapien
gtggggactgcggtggcggggtcat

SEQ ID NO: 3544957 - DNA, 25 bp, Homo sapien
taggagtggggactgcggtggcggg

SEQ ID NO: 3544958 - DNA, 25 bp, Homo sapien
ctaggagtggggactgcggtggcgg

SEQ ID NO: 3544959 - DNA, 25 bp, Homo sapien
gcggctgggtcccagccagcagtac

SEQ ID NO: 3544960 - DNA, 25 bp, Homo sapien
cctgcggctgggtcccagccagcag

SEQ ID NO: 3544961 - DNA, 25 bp, Homo sapien
ctgcggctgggtcccagccagcagt

SEQ ID NO: 3544962 - DNA, 25 bp, Homo sapien
gctgggtcccagccagcagtaccat

SEQ ID NO: 3544963 - DNA, 25 bp, Homo sapien
tatctatttggttgaggttcagctt

SEQ ID NO: 3544964 - DNA, 25 bp, Homo sapien
cttatctatttggttgaggttcagc

SEQ ID NO: 3544965 - DNA, 25 bp, Homo sapien
agcagcttatctatttggttgaggt

SEQ ID NO: 3544966 - DNA, 25 bp, Homo sapien
cttagacagcagcttatctatttgg

SEQ ID NO: 3544967 - DNA, 25 bp, Homo sapien
catggggtgctcagactttcacctc

SEQ ID NO: 3544968 - DNA, 25 bp, Homo sapien
aagttttcttgcatggggtgctcag

SEQ ID NO: 3544969 - DNA, 25 bp, Homo sapien
agactttcacctccggcaaatatta

SEQ ID NO: 3544970 - DNA, 25 bp, Homo sapien
tcacctccggcaaatattactggga

SEQ ID NO: 3544971 - DNA, 25 bp, Homo sapien
agaatataatttagtgcttattgct

SEQ ID NO: 3544972 - DNA, 25 bp, Homo sapien
aatataatttagtgcttattgcttt

SEQ ID NO: 3544973 - DNA, 25 bp, Homo sapien
gaatataatttagtgcttattgctt

SEQ ID NO: 3544974 - DNA, 25 bp, Homo sapien
aatacatgaacaggagtgtgccatg

SEQ ID NO: 3544975 - DNA, 25 bp, Homo sapien
cattgagtaacttgaactgggtcgg

SEQ ID NO: 3544976 - DNA, 25 bp, Homo sapien
gccatgaaatacagccacggccatc

SEQ ID NO: 3544977 - DNA, 25 bp, Homo sapien
taagctgtagatcagtggatttaac

SEQ ID NO: 3544978 - DNA, 25 bp, Homo sapien
ttttaaggatggtaattatgatgta

SEQ ID NO: 3544979 - DNA, 25 bp, Homo sapien
gctcattttaaggatggtaattatg

SEQ ID NO: 3544980 - DNA, 25 bp, Homo sapien
ctgagctcattttaaggatggtaat

SEQ ID NO: 3544981 - DNA, 25 bp, Homo sapien
tttaaggatggtaattatgatgtag

SEQ ID NO: 3544982 - DNA, 25 bp, Homo sapien
aacgaatgtgaacatcactatctca

SEQ ID NO: 3544983 - DNA, 25 bp, Homo sapien
agtgacaatgctgcaccccgcaaca

SEQ ID NO: 3544984 - DNA, 25 bp, Homo sapien
cagccaacgaatgtgaacatcacta

SEQ ID NO: 3544985 - DNA, 25 bp, Homo sapien
ccgcaacacagccaacgaatgtgaa

SEQ ID NO: 3544986 - DNA, 25 bp, Homo sapien
tagcaattaatagtaggattgaggg

SEQ ID NO: 3544987 - DNA, 25 bp, Homo sapien
atagcaattaatagtaggattgagg

SEQ ID NO: 3544988 - DNA, 25 bp, Homo sapien
gatgacattagaattgcagaatgac

SEQ ID NO: 3544989 - DNA, 25 bp, Homo sapien
ttagaattgcagaatgacaatctga

SEQ ID NO: 3544990 - DNA, 25 bp, Homo sapien
tgcagaatgacaatctgaatgtgca

SEQ ID NO: 3544991 - DNA, 25 bp, Homo sapien
aatgacaatctgaatgtgcagcagg

SEQ ID NO: 3544992 - DNA, 25 bp, Homo sapien
taggcaagagccactagctgggtgc

SEQ ID NO: 3544993 - DNA, 25 bp, Homo sapien
cacttttggtccgataagaaatcag

SEQ ID NO: 3544994 - DNA, 25 bp, Homo sapien
cctcctgggcatagtgatcgtataa

SEQ ID NO: 3544995 - DNA, 25 bp, Homo sapien
tatacggaatccacttttggtccga

SEQ ID NO: 3544996 - DNA, 25 bp, Homo sapien
agagacgtggaagagtagcagacat

SEQ ID NO: 3544997 - DNA, 25 bp, Homo sapien
ggagagacgtggaagagtagcagac

SEQ ID NO: 3544998 - DNA, 25 bp, Homo sapien
gagagacgtggaagagtagcagaca

SEQ ID NO: 3544999 - DNA, 25 bp, Homo sapien
ctagattgacaatcacagttatgcc

SEQ ID NO: 3545000 - DNA, 25 bp, Homo sapien
cttgatcagtaggatcatccctaga

SEQ ID NO: 3545001 - DNA, 25 bp, Homo sapien
gagcccctgctgtatatcctgtgta

SEQ ID NO: 3545002 - DNA, 25 bp, Homo sapien
cacgggtgtgtgaagtctgagatcc

SEQ ID NO: 3545003 - DNA, 25 bp, Homo sapien
gtcagtaaacacagtgcagttctta

SEQ ID NO: 3545004 - DNA, 25 bp, Homo sapien
aaagtcctaagaatataaagtcagt

SEQ ID NO: 3545005 - DNA, 25 bp, Homo sapien
gagtcatcattcagatctggaaatc

SEQ ID NO: 3545006 - DNA, 25 bp, Homo sapien
gtaaacacagtgcagttcttaagag

SEQ ID NO: 3545007 - DNA, 25 bp, Homo sapien
ttgaagaaaacaccagtatgaatat

SEQ ID NO: 3545008 - DNA, 25 bp, Homo sapien
gaaaacaccagtatgaatatgcatt

SEQ ID NO: 3545009 - DNA, 25 bp, Homo sapien
gaagaaaacaccagtatgaatatgc

SEQ ID NO: 3545010 - DNA, 25 bp, Homo sapien
tatataatttgaagaaaacaccagt

SEQ ID NO: 3545011 - DNA, 25 bp, Homo sapien
tgcaaccgcagataagtgggaagtg

SEQ ID NO: 3545012 - DNA, 25 bp, Homo sapien
aatacataaagagcagagttccctg

SEQ ID NO: 3545013 - DNA, 25 bp, Homo sapien
gagagagctttgaacctcccctcag

SEQ ID NO: 3545014 - DNA, 25 bp, Homo sapien
tctagagaataggaagaacttggcc

SEQ ID NO: 3545015 - DNA, 25 bp, Homo sapien
tctgagcgagagagtaataagagag

SEQ ID NO: 3545016 - DNA, 25 bp, Homo sapien
ctgtgtatctgagcgagagagtaat

SEQ ID NO: 3545017 - DNA, 25 bp, Homo sapien
atctgagcgagagagtaataagaga

SEQ ID NO: 3545018 - DNA, 25 bp, Homo sapien
ggccagtgtcatatgtatcaaagca

SEQ ID NO: 3545019 - DNA, 25 bp, Homo sapien
taggcggaaggccagtgtcatatgt

SEQ ID NO: 3545020 - DNA, 25 bp, Homo sapien
aagcataggcggaaggccagtgtca

SEQ ID NO: 3545021 - DNA, 25 bp, Homo sapien
tgtatcaaagcatctgctattccca

SEQ ID NO: 3545022 - DNA, 25 bp, Homo sapien
taaaccccagtcaagagtagatagc

SEQ ID NO: 3545023 - DNA, 25 bp, Homo sapien
cagataaaccccagtcaagagtaga

SEQ ID NO: 3545024 - DNA, 25 bp, Homo sapien
aaccccagtcaagagtagatagcac

SEQ ID NO: 3545025 - DNA, 25 bp, Homo sapien
gataaaccccagtcaagagtagata

SEQ ID NO: 3545026 - DNA, 25 bp, Homo sapien
tcactgacagcagtagacactcaga

SEQ ID NO: 3545027 - DNA, 25 bp, Homo sapien
ttgcagagcacagccatagaagggt

SEQ ID NO: 3545028 - DNA, 25 bp, Homo sapien
tacagaagaccaagaattgcagagc

SEQ ID NO: 3545029 - DNA, 25 bp, Homo sapien
gatgatggccttgtaccgatcaaag

SEQ ID NO: 3545030 - DNA, 25 bp, Homo sapien
ttgggcccagttgcagtagaatagc

SEQ ID NO: 3545031 - DNA, 25 bp, Homo sapien
cttgggcccagttgcagtagaatag

SEQ ID NO: 3545032 - DNA, 25 bp, Homo sapien
cattggtgtgtgaagttggtaatcc

SEQ ID NO: 3545033 - DNA, 25 bp, Homo sapien
attggtgtgtgaagttggtaatcca

SEQ ID NO: 3545034 - DNA, 25 bp, Homo sapien
cactttcatctctgggttattggta

SEQ ID NO: 3545035 - DNA, 25 bp, Homo sapien
cagtctagaacttgactttccaaga

SEQ ID NO: 3545036 - DNA, 25 bp, Homo sapien
actgctacagaaatcattacgagaa

SEQ ID NO: 3545037 - DNA, 25 bp, Homo sapien
cagttaatgaggagcaattttccca

SEQ ID NO: 3545038 - DNA, 25 bp, Homo sapien
cctttgatcttagaactttctcagc

SEQ ID NO: 3545039 - DNA, 25 bp, Homo sapien
gagataattttatcagtgtttggag

SEQ ID NO: 3545040 - DNA, 25 bp, Homo sapien
caaactataaatcaacggattcagc

SEQ ID NO: 3545041 - DNA, 25 bp, Homo sapien
tttgatcttagaactttctcagctg

SEQ ID NO: 3545042 - DNA, 25 bp, Homo sapien
gagaggcgcatgtagaaaaggtctt

SEQ ID NO: 3545043 - DNA, 25 bp, Homo sapien
gagtcccttggtagatcgtcactga

SEQ ID NO: 3545044 - DNA, 25 bp, Homo sapien
cactgaagtcaggtgagaggcgcat

SEQ ID NO: 3545045 - DNA, 25 bp, Homo sapien
ctgggccgtgagtaaataaagagga

SEQ ID NO: 3545046 - DNA, 25 bp, Homo sapien
gacaagacaatcaaccgcatacaga

SEQ ID NO: 3545047 - DNA, 25 bp, Homo sapien
tgtgaaccagggaactcatgttgcc

SEQ ID NO: 3545048 - DNA, 25 bp, Homo sapien
gatgcccctagacatcacaactgtg

SEQ ID NO: 3545049 - DNA, 25 bp, Homo sapien
catgttgcctccaaggtatgacaag

SEQ ID NO: 3545050 - DNA, 25 bp, Homo sapien
gcggccaggatgaaggattctgtat

SEQ ID NO: 3545051 - DNA, 25 bp, Homo sapien
ggcggccaggatgaaggattctgta

SEQ ID NO: 3545052 - DNA, 25 bp, Homo sapien
tctccgagaggaaattgaccagcat

SEQ ID NO: 3545053 - DNA, 25 bp, Homo sapien
cagttcagggcgagttggaaaacct

SEQ ID NO: 3545054 - DNA, 25 bp, Homo sapien
actgcagggcacacccataatagga

SEQ ID NO: 3545055 - DNA, 25 bp, Homo sapien
gaggatcaatcctgatcaacagcat

SEQ ID NO: 3545056 - DNA, 25 bp, Homo sapien
ttctgtgttgttttccttttatgag

SEQ ID NO: 3545057 - DNA, 25 bp, Homo sapien
ctgtgttgttttccttttatgagaa

SEQ ID NO: 3545058 - DNA, 25 bp, Homo sapien
tgttttccttttatgagaatttcta

SEQ ID NO: 3545059 - DNA, 25 bp, Homo sapien
tccttttatgagaatttctaatacc

SEQ ID NO: 3545060 - DNA, 25 bp, Homo sapien
gcagacaattttgccgccagggata

SEQ ID NO: 3545061 - DNA, 25 bp, Homo sapien
gagccaggacatgaaacacagtacc

SEQ ID NO: 3545062 - DNA, 25 bp, Homo sapien
gaatgtctgcactatccagacagga

SEQ ID NO: 3545063 - DNA, 25 bp, Homo sapien
tcaaaaacatgttcccacaggacag

SEQ ID NO: 3545064 - DNA, 25 bp, Homo sapien
gaataaagccacaactatgacatga

SEQ ID NO: 3545065 - DNA, 25 bp, Homo sapien
aagagttcatagcaaacagcacaac

SEQ ID NO: 3545066 - DNA, 25 bp, Homo sapien
gatgattttcctgtagtagccaagt

SEQ ID NO: 3545067 - DNA, 25 bp, Homo sapien
caactatgacatgagatgagcaggt

SEQ ID NO: 3545068 - DNA, 25 bp, Homo sapien
ctgatgtggtttgggctgtaaataa

SEQ ID NO: 3545069 - DNA, 25 bp, Homo sapien
aatgccaccatgatatctttgttcc

SEQ ID NO: 3545070 - DNA, 25 bp, Homo sapien
aatcagaatggtgtagaaaagagaa

SEQ ID NO: 3545071 - DNA, 25 bp, Homo sapien
gctagtaattttctcaatgccacca

SEQ ID NO: 3545072 - DNA, 25 bp, Homo sapien
caagcaagcttgagtattggcggga

SEQ ID NO: 3545073 - DNA, 25 bp, Homo sapien
ggttcatcactagaggatactgcaa

SEQ ID NO: 3545074 - DNA, 25 bp, Homo sapien
aatggcaccgtgataaacaccaccg

SEQ ID NO: 3545075 - DNA, 25 bp, Homo sapien
tgcaaaggcttacaaatagccacgt

SEQ ID NO: 3545076 - DNA, 25 bp, Homo sapien
caaatgtccatgagcattcttggga

SEQ ID NO: 3545077 - DNA, 25 bp, Homo sapien
tccgtgcctccaagcataagaaaaa

SEQ ID NO: 3545078 - DNA, 25 bp, Homo sapien
tttgtgtagcacaagcaaacaaaga

SEQ ID NO: 3545079 - DNA, 25 bp, Homo sapien
aatgattgttacataacagatttcc

SEQ ID NO: 3545080 - DNA, 25 bp, Homo sapien
ccattattgtagtcacatttgattt

SEQ ID NO: 3545081 - DNA, 25 bp, Homo sapien
ctggagagcggggtgaatttttatt

SEQ ID NO: 3545082 - DNA, 25 bp, Homo sapien
tatactaaaaagcatccagtggaga

SEQ ID NO: 3545083 - DNA, 25 bp, Homo sapien
agtagtattatgatgccattgcaca

SEQ ID NO: 3545084 - DNA, 25 bp, Homo sapien
tgatgtttacgctaaacaaaggatc

SEQ ID NO: 3545085 - DNA, 25 bp, Homo sapien
tgaagtcaggacttcctgtatatga

SEQ ID NO: 3545086 - DNA, 25 bp, Homo sapien
cataaagtcaattttcaggcaaaca

SEQ ID NO: 3545087 - DNA, 25 bp, Homo sapien
taggtagagaggattcagtcgtgat

SEQ ID NO: 3545088 - DNA, 25 bp, Homo sapien
gatgatgacacagcggaagtcaggt

SEQ ID NO: 3545089 - DNA, 25 bp, Homo sapien
tgaccaccacagcgtacattactga

SEQ ID NO: 3545090 - DNA, 25 bp, Homo sapien
cacatcattcctgggggatgatgac

SEQ ID NO: 3545091 - DNA, 25 bp, Homo sapien
accaccacagcgtacattactgacg

SEQ ID NO: 3545092 - DNA, 25 bp, Homo sapien
gagacgttgaaacgggtcacagaaa

SEQ ID NO: 3545093 - DNA, 25 bp, Homo sapien
aactgtatagtaacacaaaaggatc

SEQ ID NO: 3545094 - DNA, 25 bp, Homo sapien
gaattcttagaatggggaaggcaac

SEQ ID NO: 3545095 - DNA, 25 bp, Homo sapien
caggcaaggttgagacgttgaaacg

SEQ ID NO: 3545096 - DNA, 25 bp, Homo sapien
tctgctatgcgattgcatctcctca

SEQ ID NO: 3545097 - DNA, 25 bp, Homo sapien
acagtcaggatcatgtcatccttac

SEQ ID NO: 3545098 - DNA, 25 bp, Homo sapien
ttcatgatgcctgggtagttcaggg

SEQ ID NO: 3545099 - DNA, 25 bp, Homo sapien
tgtgtcaggcagtccccatggtaga

SEQ ID NO: 3545100 - DNA, 25 bp, Homo sapien
ggacaggaagagcccagcgaggatg

SEQ ID NO: 3545101 - DNA, 25 bp, Homo sapien
acaggaagagcccagcgaggatggg

SEQ ID NO: 3545102 - DNA, 25 bp, Homo sapien
gaagagcccagcgaggatgggctgc

SEQ ID NO: 3545103 - DNA, 25 bp, Homo sapien
aggaagagcccagcgaggatgggct

SEQ ID NO: 3545104 - DNA, 25 bp, Homo sapien
tgagacagctgtgagattctgtggc

SEQ ID NO: 3545105 - DNA, 25 bp, Homo sapien
agacagctgtgagattctgtggctc

SEQ ID NO: 3545106 - DNA, 25 bp, Homo sapien
ctgagacagctgtgagattctgtgg

SEQ ID NO: 3545107 - DNA, 25 bp, Homo sapien
gacagctgtgagattctgtggctct

SEQ ID NO: 3545108 - DNA, 25 bp, Homo sapien
cgaggtggctggatcacgacgtcag

SEQ ID NO: 3545109 - DNA, 25 bp, Homo sapien
ggccgaggtggctggatcacgacgt

SEQ ID NO: 3545110 - DNA, 25 bp, Homo sapien
gagatcgagaccatcctggctaaca

SEQ ID NO: 3545111 - DNA, 25 bp, Homo sapien
catcctggctaacacggtgaaaccc

SEQ ID NO: 3545112 - DNA, 25 bp, Homo sapien
tcccggcacggtggcgggagcctat

SEQ ID NO: 3545113 - DNA, 25 bp, Homo sapien
tatcccggcacggtggcgggagcct

SEQ ID NO: 3545114 - DNA, 25 bp, Homo sapien
aattatcccggcacggtggcgggag

SEQ ID NO: 3545115 - DNA, 25 bp, Homo sapien
caggaattgtttgaaccagggaggc

SEQ ID NO: 3545116 - DNA, 25 bp, Homo sapien
gactatatcccgcacctggctccga

SEQ ID NO: 3545117 - DNA, 25 bp, Homo sapien
aattgggtcactcccacacgaatac

SEQ ID NO: 3545118 - DNA, 25 bp, Homo sapien
actgcgcttttctgacgggcttgaa

SEQ ID NO: 3545119 - DNA, 25 bp, Homo sapien
ttctgacgggcttgaaaaacggcgc

SEQ ID NO: 3545120 - DNA, 25 bp, Homo sapien
tccttttcctgctaattacattcgc

SEQ ID NO: 3545121 - DNA, 25 bp, Homo sapien
tacattcgctaaagccttctttact

SEQ ID NO: 3545122 - DNA, 25 bp, Homo sapien
gctaattacattcgctaaagccttc

SEQ ID NO: 3545123 - DNA, 25 bp, Homo sapien
ttcctgctaattacattcgctaaag

SEQ ID NO: 3545124 - DNA, 25 bp, Homo sapien
gaagccactttgtcctgattcaggg

SEQ ID NO: 3545125 - DNA, 25 bp, Homo sapien
tagctggaactaggtctcaggtaag

SEQ ID NO: 3545126 - DNA, 25 bp, Homo sapien
gcaggtggcatagaacagaattatg

SEQ ID NO: 3545127 - DNA, 25 bp, Homo sapien
ggatgacaagcagagtccccacaat

SEQ ID NO: 3545128 - DNA, 25 bp, Homo sapien
gccccggctgccatttttaggtaga

SEQ ID NO: 3545129 - DNA, 25 bp, Homo sapien
atggcttgtgttgaccatgaagttc

SEQ ID NO: 3545130 - DNA, 25 bp, Homo sapien
ctgacatggcttgtgttgaccatga

SEQ ID NO: 3545131 - DNA, 25 bp, Homo sapien
tgaaaagtgggggactgtcacagaa

SEQ ID NO: 3545132 - DNA, 25 bp, Homo sapien
cgggcgacatatggccgcatacctg

SEQ ID NO: 3545133 - DNA, 25 bp, Homo sapien
agtaaagcagcgggcgacatatggc

SEQ ID NO: 3545134 - DNA, 25 bp, Homo sapien
atgcattcggttgtcgccagggaga

SEQ ID NO: 3545135 - DNA, 25 bp, Homo sapien
ttcggttgtcgccagggagataaag

SEQ ID NO: 3545136 - DNA, 25 bp, Homo sapien
ctgtaggaagcagccagcaaaagag

SEQ ID NO: 3545137 - DNA, 25 bp, Homo sapien
tctctgataataaatctgccagcat

SEQ ID NO: 3545138 - DNA, 25 bp, Homo sapien
ttcttctctgataataaatctgcca

SEQ ID NO: 3545139 - DNA, 25 bp, Homo sapien
cttctctgataataaatctgccagc

SEQ ID NO: 3545140 - DNA, 25 bp, Homo sapien
gatggtagttgagttacaaacgtcc

SEQ ID NO: 3545141 - DNA, 25 bp, Homo sapien
agttgagttacaaacgtccacaaag

SEQ ID NO: 3545142 - DNA, 25 bp, Homo sapien
gggtgatggtagttgagttacaaac

SEQ ID NO: 3545143 - DNA, 25 bp, Homo sapien
ggtagttgagttacaaacgtccaca

SEQ ID NO: 3545144 - DNA, 25 bp, Homo sapien
aatcgatcctgattaagaggatcat

SEQ ID NO: 3545145 - DNA, 25 bp, Homo sapien
gaatcgatcctgattaagaggatca

SEQ ID NO: 3545146 - DNA, 25 bp, Homo sapien
tgctaatcccaataggacgaactca

SEQ ID NO: 3545147 - DNA, 25 bp, Homo sapien
gagatttcccagtactgtaagtgta

SEQ ID NO: 3545148 - DNA, 25 bp, Homo sapien
gatttcccagtactgtaagtgtata

SEQ ID NO: 3545149 - DNA, 25 bp, Homo sapien
tgtaagtgtataaatcacaagaaaa

SEQ ID NO: 3545150 - DNA, 25 bp, Homo sapien
aaatgaagggatccttttcctgcta

SEQ ID NO: 3545151 - DNA, 25 bp, Homo sapien
aatgaagggatccttttcctgctaa

SEQ ID NO: 3545152 - DNA, 25 bp, Homo sapien
agaaatgaagggatccttttcctgc

SEQ ID NO: 3545153 - DNA, 25 bp, Homo sapien
gaaaccactttgtcctgatcaggga

SEQ ID NO: 3545154 - DNA, 25 bp, Homo sapien
gagaagagaacgtaggaataggagg

SEQ ID NO: 3545155 - DNA, 25 bp, Homo sapien
gtagctggaactaggtctcaggtag

SEQ ID NO: 3545156 - DNA, 25 bp, Homo sapien
gtggtgtagaagaggattatggctg

SEQ ID NO: 3545157 - DNA, 25 bp, Homo sapien
tatgctttccttcaagtgtgtgtca

SEQ ID NO: 3545158 - DNA, 25 bp, Homo sapien
gacatagctagtgttgaccatggag

SEQ ID NO: 3545159 - DNA, 25 bp, Homo sapien
cgggcgacatatggtcacataccgg

SEQ ID NO: 3545160 - DNA, 25 bp, Homo sapien
tgcattcggttgtcgccagggcgat

SEQ ID NO: 3545161 - DNA, 25 bp, Homo sapien
tgctaatcccaataggatgaactca

SEQ ID NO: 3545162 - DNA, 25 bp, Homo sapien
ggtaagtgtgtaaatcacaagaaat

SEQ ID NO: 3545163 - DNA, 25 bp, Homo sapien
gatatttcccagtacggtaagtgtg

SEQ ID NO: 3545164 - DNA, 25 bp, Homo sapien
ttctggtcatttgtgacaaatatat

SEQ ID NO: 3545165 - DNA, 25 bp, Homo sapien
catgatacagtttaagctggaaaaa

SEQ ID NO: 3545166 - DNA, 25 bp, Homo sapien
ccaaaatccctcatgatacagttta

SEQ ID NO: 3545167 - DNA, 25 bp, Homo sapien
tattgactccatcaggggacacctg

SEQ ID NO: 3545168 - DNA, 25 bp, Homo sapien
ttatgtagccacatatgtaagagaa

SEQ ID NO: 3545169 - DNA, 25 bp, Homo sapien
ccatcccacccttttggaagattca

SEQ ID NO: 3545170 - DNA, 25 bp, Homo sapien
ttcaaagaggcccagagccaatgta

SEQ ID NO: 3545171 - DNA, 25 bp, Homo sapien
gaggcccagagccaatgtactccat

SEQ ID NO: 3545172 - DNA, 25 bp, Homo sapien
catcccacccttttggaagattcac

SEQ ID NO: 3545173 - DNA, 25 bp, Homo sapien
tgttcgttttatgcagattcctgtg

SEQ ID NO: 3545174 - DNA, 25 bp, Homo sapien
gagacaaagtttccgatagtgttcg

SEQ ID NO: 3545175 - DNA, 25 bp, Homo sapien
tcttcttccaggcagaaaatcctcc

SEQ ID NO: 3545176 - DNA, 25 bp, Homo sapien
ttagcagaacaaataggagacaaag

SEQ ID NO: 3545177 - DNA, 25 bp, Homo sapien
atgacaatcgtatagaatacagatg

SEQ ID NO: 3545178 - DNA, 25 bp, Homo sapien
gttttctatgtatgactctcagaag

SEQ ID NO: 3545179 - DNA, 25 bp, Homo sapien
tttctatgtatgactctcagaagag

SEQ ID NO: 3545180 - DNA, 25 bp, Homo sapien
agttttctatgtatgactctcagaa

SEQ ID NO: 3545181 - DNA, 25 bp, Homo sapien
taatgcttcccattatcattagaag

SEQ ID NO: 3545182 - DNA, 25 bp, Homo sapien
atattgagttttgtgcatgttcttc

SEQ ID NO: 3545183 - DNA, 25 bp, Homo sapien
gaagacctacattactgcacaaagc

SEQ ID NO: 3545184 - DNA, 25 bp, Homo sapien
tcagcagctcacaattttggatttc

SEQ ID NO: 3545185 - DNA, 25 bp, Homo sapien
tagttttcattcaagcaatactttt

SEQ ID NO: 3545186 - DNA, 25 bp, Homo sapien
gaaatttgttatcttcgtacaatta

SEQ ID NO: 3545187 - DNA, 25 bp, Homo sapien
taatggatattttagaagctagttt

SEQ ID NO: 3545188 - DNA, 25 bp, Homo sapien
tgtttaaaatggactgtaacctcta

SEQ ID NO: 3545189 - DNA, 25 bp, Homo sapien
gtttctgttgacaatgactttcctc

SEQ ID NO: 3545190 - DNA, 25 bp, Homo sapien
agatcaaagggctcaacatgggaat

SEQ ID NO: 3545191 - DNA, 25 bp, Homo sapien
gttcctgaggctccagatcaaaggg

SEQ ID NO: 3545192 - DNA, 25 bp, Homo sapien
ttgttcctgaggctccagatcaaag

SEQ ID NO: 3545193 - DNA, 25 bp, Homo sapien
atcaaagggctcaacatgggaatga

SEQ ID NO: 3545194 - DNA, 25 bp, Homo sapien
tgtgtagaagacagaggccatcctg

SEQ ID NO: 3545195 - DNA, 25 bp, Homo sapien
gtgtagaagacagaggccatcctgt

SEQ ID NO: 3545196 - DNA, 25 bp, Homo sapien
actgtgtagaagacagaggccatcc

SEQ ID NO: 3545197 - DNA, 25 bp, Homo sapien
ctactgtgtagaagacagaggccat

SEQ ID NO: 3545198 - DNA, 25 bp, Homo sapien
tgaaagctagagcaagcactcggtg

SEQ ID NO: 3545199 - DNA, 25 bp, Homo sapien
caaaggaggattacaaatgaccagg

SEQ ID NO: 3545200 - DNA, 25 bp, Homo sapien
gaccaggtattgatcacaggccatg

SEQ ID NO: 3545201 - DNA, 25 bp, Homo sapien
gctataggaggcaggcataagctga

SEQ ID NO: 3545202 - DNA, 25 bp, Homo sapien
taaagcatcccactcctactgcaat

SEQ ID NO: 3545203 - DNA, 25 bp, Homo sapien
gaaaaaagacaattgacgtacaatc

SEQ ID NO: 3545204 - DNA, 25 bp, Homo sapien
gacaattgacgtacaatccacaagc

SEQ ID NO: 3545205 - DNA, 25 bp, Homo sapien
caagctgaatccacatgggaagtcc

SEQ ID NO: 3545206 - DNA, 25 bp, Homo sapien
ggagtaacatggattttccatgaat

SEQ ID NO: 3545207 - DNA, 25 bp, Homo sapien
aaggagtaacatggattttccatga

SEQ ID NO: 3545208 - DNA, 25 bp, Homo sapien
ttaaaggagtaacatggattttcca

SEQ ID NO: 3545209 - DNA, 25 bp, Homo sapien
taaaggagtaacatggattttccat

SEQ ID NO: 3545210 - DNA, 25 bp, Homo sapien
cagtatccagtgagtggttggtttg

SEQ ID NO: 3545211 - DNA, 25 bp, Homo sapien
ccatagaaaaccgtgactgctatca

SEQ ID NO: 3545212 - DNA, 25 bp, Homo sapien
tagcattgtcccatagaaaaccgtg

SEQ ID NO: 3545213 - DNA, 25 bp, Homo sapien
ctgctatcatatgcgaagcgcaggt

SEQ ID NO: 3545214 - DNA, 25 bp, Homo sapien
atatacaaggtgaaaccacaatagc

SEQ ID NO: 3545215 - DNA, 25 bp, Homo sapien
tgatgatagctagatgtctcaggaa

SEQ ID NO: 3545216 - DNA, 25 bp, Homo sapien
catggtcagcacatagagcactagg

SEQ ID NO: 3545217 - DNA, 25 bp, Homo sapien
ctagaactgtaatcatggaaaaaac

SEQ ID NO: 3545218 - DNA, 25 bp, Homo sapien
ctggacagctagagacacctgtgag

SEQ ID NO: 3545219 - DNA, 25 bp, Homo sapien
gaccctggtgaaattttcaggagcc

SEQ ID NO: 3545220 - DNA, 25 bp, Homo sapien
taaactcagtgaccctggtgaaatt

SEQ ID NO: 3545221 - DNA, 25 bp, Homo sapien
gacagctagagacacctgtgagaat

SEQ ID NO: 3545222 - DNA, 25 bp, Homo sapien
tggttatagacgttaaggaatcatt

SEQ ID NO: 3545223 - DNA, 25 bp, Homo sapien
agtggttatagacgttaaggaatca

SEQ ID NO: 3545224 - DNA, 25 bp, Homo sapien
gtggttatagacgttaaggaatcat

SEQ ID NO: 3545225 - DNA, 25 bp, Homo sapien
tatagacgttaaggaatcattttct

SEQ ID NO: 3545226 - DNA, 25 bp, Homo sapien
cagggcctgctatcatagggtttat

SEQ ID NO: 3545227 - DNA, 25 bp, Homo sapien
tctgtttctccgtagagcctcactc

SEQ ID NO: 3545228 - DNA, 25 bp, Homo sapien
aaccttcttcccagatgaagccatc

SEQ ID NO: 3545229 - DNA, 25 bp, Homo sapien
tcttcctgtcttacaagcaataact

SEQ ID NO: 3545230 - DNA, 25 bp, Homo sapien
agagcttatagaaggcatttttcac

SEQ ID NO: 3545231 - DNA, 25 bp, Homo sapien
ctcaaagagcttatagaaggcattt

SEQ ID NO: 3545232 - DNA, 25 bp, Homo sapien
caaagagcttatagaaggcattttt

SEQ ID NO: 3545233 - DNA, 25 bp, Homo sapien
aagagcttatagaaggcatttttca

SEQ ID NO: 3545234 - DNA, 25 bp, Homo sapien
catgtacatgaagagtagagaccca

SEQ ID NO: 3545235 - DNA, 25 bp, Homo sapien
tcctgtgcatttgagcaaagcatag

SEQ ID NO: 3545236 - DNA, 25 bp, Homo sapien
ttaatagtgaacatcagagcctgaa

SEQ ID NO: 3545237 - DNA, 25 bp, Homo sapien
cataggtagcaaaggaacatcatca

SEQ ID NO: 3545238 - DNA, 25 bp, Homo sapien
cagtacatgacacagtcgctgagac

SEQ ID NO: 3545239 - DNA, 25 bp, Homo sapien
acatgacacagtcgctgagacataa

SEQ ID NO: 3545240 - DNA, 25 bp, Homo sapien
gctgagacataataacataatagag

SEQ ID NO: 3545241 - DNA, 25 bp, Homo sapien
tacatgacacagtcgctgagacata

SEQ ID NO: 3545242 - DNA, 25 bp, Homo sapien
gcagcacatgcataataggaaatag

SEQ ID NO: 3545243 - DNA, 25 bp, Homo sapien
ggctgacaggatgaaaaattcactg

SEQ ID NO: 3545244 - DNA, 25 bp, Homo sapien
ataggaaatagtatttcgatccaca

SEQ ID NO: 3545245 - DNA, 25 bp, Homo sapien
ttagcactgttagattgtgttggcc

SEQ ID NO: 3545246 - DNA, 25 bp, Homo sapien
gatcatagttaggttgcccaccact

SEQ ID NO: 3545247 - DNA, 25 bp, Homo sapien
ttaggtagatgacgaggaagactcc

SEQ ID NO: 3545248 - DNA, 25 bp, Homo sapien
ggccgccttgtgagttccatcagaa

SEQ ID NO: 3545249 - DNA, 25 bp, Homo sapien
ttggcaacacttctaggtatctgct

SEQ ID NO: 3545250 - DNA, 25 bp, Homo sapien
tctaggtatctgctcattagtggga

SEQ ID NO: 3545251 - DNA, 25 bp, Homo sapien
gccacactgtggcatttggcaacac

SEQ ID NO: 3545252 - DNA, 25 bp, Homo sapien
ttagtgggagacattttgccaactt

SEQ ID NO: 3545253 - DNA, 25 bp, Homo sapien
ccatgaatgagttgttgctgttaac

SEQ ID NO: 3545254 - DNA, 25 bp, Homo sapien
cggccaccttcttgattgtgatcat

SEQ ID NO: 3545255 - DNA, 25 bp, Homo sapien
acggccaccttcttgattgtgatca

SEQ ID NO: 3545256 - DNA, 25 bp, Homo sapien
tattttccaggttctacgtagagca

SEQ ID NO: 3545257 - DNA, 25 bp, Homo sapien
ttttccaggttctacgtagagcatt

SEQ ID NO: 3545258 - DNA, 25 bp, Homo sapien
tttccaggttctacgtagagcattt

SEQ ID NO: 3545259 - DNA, 25 bp, Homo sapien
ccaggttctacgtagagcatttttt

SEQ ID NO: 3545260 - DNA, 25 bp, Homo sapien
caacataggtgttatcaaagtataa

SEQ ID NO: 3545261 - DNA, 25 bp, Homo sapien
tatcactgtcaggtgagttccacag

SEQ ID NO: 3545262 - DNA, 25 bp, Homo sapien
gacggcgacaaggatcagaatgtaa

SEQ ID NO: 3545263 - DNA, 25 bp, Homo sapien
gatcagaatgtaagacacaaggact

SEQ ID NO: 3545264 - DNA, 25 bp, Homo sapien
gaattcatcctgaggacggcgacaa

SEQ ID NO: 3545265 - DNA, 25 bp, Homo sapien
tcttctgtgtctgaacagagcaaag

SEQ ID NO: 3545266 - DNA, 25 bp, Homo sapien
tatcaatggcagactatcacagtag

SEQ ID NO: 3545267 - DNA, 25 bp, Homo sapien
catgccctttgtgacatgatgatca

SEQ ID NO: 3545268 - DNA, 25 bp, Homo sapien
aatgcttgatgatgttatagccaca

SEQ ID NO: 3545269 - DNA, 25 bp, Homo sapien
tgaagaaagtgagttgggtagcaca

SEQ ID NO: 3545270 - DNA, 25 bp, Homo sapien
ctgaagaaagtgagttgggtagcac

SEQ ID NO: 3545271 - DNA, 25 bp, Homo sapien
tatgttgatctacaacaaagtttac

SEQ ID NO: 3545272 - DNA, 25 bp, Homo sapien
atatgttgatctacaacaaagttta

SEQ ID NO: 3545273 - DNA, 25 bp, Homo sapien
gagggagaacccaaataatggagcc

SEQ ID NO: 3545274 - DNA, 25 bp, Homo sapien
gacaacatgtatacaatgagggaga

SEQ ID NO: 3545275 - DNA, 25 bp, Homo sapien
gatcaagcctaagttacccaccact

SEQ ID NO: 3545276 - DNA, 25 bp, Homo sapien
agctcagagatgtccgtgattccca

SEQ ID NO: 3545277 - DNA, 25 bp, Homo sapien
gtcttttccacatctgcattctgac

SEQ ID NO: 3545278 - DNA, 25 bp, Homo sapien
tctgtcttttccacatctgcattct

SEQ ID NO: 3545279 - DNA, 25 bp, Homo sapien
tcagttgtctgtcttttccacatct

SEQ ID NO: 3545280 - DNA, 25 bp, Homo sapien
cagttgtctgtcttttccacatctg

SEQ ID NO: 3545281 - DNA, 25 bp, Homo sapien
catctgcaggctttgcggttttata

SEQ ID NO: 3545282 - DNA, 25 bp, Homo sapien
tgcaggctttgcggttttatagtag

SEQ ID NO: 3545283 - DNA, 25 bp, Homo sapien
tctgcaggctttgcggttttatagt

SEQ ID NO: 3545284 - DNA, 25 bp, Homo sapien
caggctttgcggttttatagtagtt

SEQ ID NO: 3545285 - DNA, 25 bp, Homo sapien
agtcaattgccgactcaccgctgat

SEQ ID NO: 3545286 - DNA, 25 bp, Homo sapien
tagaagtcaattgccgactcaccgc

SEQ ID NO: 3545287 - DNA, 25 bp, Homo sapien
ctgtagaagtcaattgccgactcac

SEQ ID NO: 3545288 - DNA, 25 bp, Homo sapien
aagtcaattgccgactcaccgctga

SEQ ID NO: 3545289 - DNA, 25 bp, Homo sapien
ctggacatgcagatagatgtcaaaa

SEQ ID NO: 3545290 - DNA, 25 bp, Homo sapien
catgcagatagatgtcaaaagtgcc

SEQ ID NO: 3545291 - DNA, 25 bp, Homo sapien
tgcagatagatgtcaaaagtgccat

SEQ ID NO: 3545292 - DNA, 25 bp, Homo sapien
gacatgcagatagatgtcaaaagtg

SEQ ID NO: 3545293 - DNA, 25 bp, Homo sapien
ctgtgaatgagccaccctagagtac

SEQ ID NO: 3545294 - DNA, 25 bp, Homo sapien
gacatgaattaacattgtagttcct

SEQ ID NO: 3545295 - DNA, 25 bp, Homo sapien
tggtaaggtgccagatatccaagtg

SEQ ID NO: 3545296 - DNA, 25 bp, Homo sapien
atgagccaccctagagtacactgca

SEQ ID NO: 3545297 - DNA, 25 bp, Homo sapien
cctccatcacatccttgtagaactt

SEQ ID NO: 3545298 - DNA, 25 bp, Homo sapien
tccatcacatccttgtagaacttac

SEQ ID NO: 3545299 - DNA, 25 bp, Homo sapien
cacctccatcacatccttgtagaac

SEQ ID NO: 3545300 - DNA, 25 bp, Homo sapien
ctccatcacatccttgtagaactta

SEQ ID NO: 3545301 - DNA, 25 bp, Homo sapien
tgaaaagataacccgattccttctc

SEQ ID NO: 3545302 - DNA, 25 bp, Homo sapien
ctgaaaagataacccgattccttct

SEQ ID NO: 3545303 - DNA, 25 bp, Homo sapien
attagtttgagtgatcggcatgggt

SEQ ID NO: 3545304 - DNA, 25 bp, Homo sapien
tcggcatgggttatctaggaacctc

SEQ ID NO: 3545305 - DNA, 25 bp, Homo sapien
tctaggaacctctttagtgcatcct

SEQ ID NO: 3545306 - DNA, 25 bp, Homo sapien
tgagtgatcggcatgggttatctag

SEQ ID NO: 3545307 - DNA, 25 bp, Homo sapien
tcaccagggtgtagaagaccgaagc

SEQ ID NO: 3545308 - DNA, 25 bp, Homo sapien
tttggagacaccactacggcgtaga

SEQ ID NO: 3545309 - DNA, 25 bp, Homo sapien
caatgctagcaaagggacatcatca

SEQ ID NO: 3545310 - DNA, 25 bp, Homo sapien
cagcagacgacacacctttggagac

SEQ ID NO: 3545311 - DNA, 25 bp, Homo sapien
cacatccatagtatgatatggtttt

SEQ ID NO: 3545312 - DNA, 25 bp, Homo sapien
gcacatccatagtatgatatggttt

SEQ ID NO: 3545313 - DNA, 25 bp, Homo sapien
tgcacatccatagtatgatatggtt

SEQ ID NO: 3545314 - DNA, 25 bp, Homo sapien
ctgcacatccatagtatgatatggt

SEQ ID NO: 3545315 - DNA, 25 bp, Homo sapien
ttggtaaccaggaagttaaccagca

SEQ ID NO: 3545316 - DNA, 25 bp, Homo sapien
tggtaaccaggaagttaaccagcat

SEQ ID NO: 3545317 - DNA, 25 bp, Homo sapien
tgagggtcaacactggtgagggtga

SEQ ID NO: 3545318 - DNA, 25 bp, Homo sapien
ggtttgaagttgagggtcaacactg

SEQ ID NO: 3545319 - DNA, 25 bp, Homo sapien
acactggtgagggtgatgatgccca

SEQ ID NO: 3545320 - DNA, 25 bp, Homo sapien
tgaagttgagggtcaacactggtga

SEQ ID NO: 3545321 - DNA, 25 bp, Homo sapien
gagctccggatcatctgagactccc

SEQ ID NO: 3545322 - DNA, 25 bp, Homo sapien
gagactcccacaagaatgaactccg

SEQ ID NO: 3545323 - DNA, 25 bp, Homo sapien
gaatgaactccgtcacccatgtgag

SEQ ID NO: 3545324 - DNA, 25 bp, Homo sapien
ggatcatctgagactcccacaagaa

SEQ ID NO: 3545325 - DNA, 25 bp, Homo sapien
aagccatttgtattgttggcttcat

SEQ ID NO: 3545326 - DNA, 25 bp, Homo sapien
tgaagccatttgtattgttggcttc

SEQ ID NO: 3545327 - DNA, 25 bp, Homo sapien
ctgaagccatttgtattgttggctt

SEQ ID NO: 3545328 - DNA, 25 bp, Homo sapien
gaagccatttgtattgttggcttca

SEQ ID NO: 3545329 - DNA, 25 bp, Homo sapien
tctgaagacctgcacactgaatatg

SEQ ID NO: 3545330 - DNA, 25 bp, Homo sapien
ccagtccccaagcttgacaacaaga

SEQ ID NO: 3545331 - DNA, 25 bp, Homo sapien
ccgaagcatgctagagtttttcaag

SEQ ID NO: 3545332 - DNA, 25 bp, Homo sapien
agacccaaggttcctgcccgaagca

SEQ ID NO: 3545333 - DNA, 25 bp, Homo sapien
tgataacctgatttttcccaaacat

SEQ ID NO: 3545334 - DNA, 25 bp, Homo sapien
cccaaacatttttttcattgagtct

SEQ ID NO: 3545335 - DNA, 25 bp, Homo sapien
tttattgataacctgatttttccca

SEQ ID NO: 3545336 - DNA, 25 bp, Homo sapien
caaacatttttttcattgagtcttt

SEQ ID NO: 3545337 - DNA, 25 bp, Homo sapien
gtccgaagcatagctggaacttggt

SEQ ID NO: 3545338 - DNA, 25 bp, Homo sapien
tattgacactatcatgtcatggtcc

SEQ ID NO: 3545339 - DNA, 25 bp, Homo sapien
tagatgacgggattcagcaagggaa

SEQ ID NO: 3545340 - DNA, 25 bp, Homo sapien
tcagcaagggaatcacaatggtgta

SEQ ID NO: 3545341 - DNA, 25 bp, Homo sapien
actccagttaggtgagctccacatg

SEQ ID NO: 3545342 - DNA, 25 bp, Homo sapien
ctccagttaggtgagctccacatgt

SEQ ID NO: 3545343 - DNA, 25 bp, Homo sapien
cactccagttaggtgagctccacat

SEQ ID NO: 3545344 - DNA, 25 bp, Homo sapien
tagtgaccagctcgatagagcccac

SEQ ID NO: 3545345 - DNA, 25 bp, Homo sapien
gcattgatgagtggcatgtagactc

SEQ ID NO: 3545346 - DNA, 25 bp, Homo sapien
aatcaggatagtgaccagctcgata

SEQ ID NO: 3545347 - DNA, 25 bp, Homo sapien
gaccagctcgatagagcccacaaag

SEQ ID NO: 3545348 - DNA, 25 bp, Homo sapien
gcgatcataagccattgcagccaag

SEQ ID NO: 3545349 - DNA, 25 bp, Homo sapien
ataagccattgcagccaagagaaag

SEQ ID NO: 3545350 - DNA, 25 bp, Homo sapien
tacaggagagggttgtagatggcta

SEQ ID NO: 3545351 - DNA, 25 bp, Homo sapien
tacatagcgatcataagccattgca

SEQ ID NO: 3545352 - DNA, 25 bp, Homo sapien
gaaacacctgtgctacacatccaag

SEQ ID NO: 3545353 - DNA, 25 bp, Homo sapien
tggagctgggaatccctaatgacca

SEQ ID NO: 3545354 - DNA, 25 bp, Homo sapien
gatagtctgcagttcaagattgtct

SEQ ID NO: 3545355 - DNA, 25 bp, Homo sapien
gaatgaacaacaccatgactcaagg

SEQ ID NO: 3545356 - DNA, 25 bp, Homo sapien
catgtaatgcatgttccagatcagt

SEQ ID NO: 3545357 - DNA, 25 bp, Homo sapien
tgtggaattctagagctcaagggcc

SEQ ID NO: 3545358 - DNA, 25 bp, Homo sapien
gaagctctcaccttgaatttaagac

SEQ ID NO: 3545359 - DNA, 25 bp, Homo sapien
gacctaggtagaaagtacacttatg

SEQ ID NO: 3545360 - DNA, 25 bp, Homo sapien
ctgttggccattctgaagatgcagt

SEQ ID NO: 3545361 - DNA, 25 bp, Homo sapien
agtcactatcctgattgtcctgatc

SEQ ID NO: 3545362 - DNA, 25 bp, Homo sapien
cctgatctcctatggttttattctg

SEQ ID NO: 3545363 - DNA, 25 bp, Homo sapien
gtgggctctattgagatagtcacta

SEQ ID NO: 3545364 - DNA, 25 bp, Homo sapien
cctgtcttctctgcatgactctaat

SEQ ID NO: 3545365 - DNA, 25 bp, Homo sapien
tgtttctaagactataaatgagtgg

SEQ ID NO: 3545366 - DNA, 25 bp, Homo sapien
gatggtgactcccaagagatgagag

SEQ ID NO: 3545367 - DNA, 25 bp, Homo sapien
ataaaagatggtgactcccaagaga

SEQ ID NO: 3545368 - DNA, 25 bp, Homo sapien
ggaatcacaatagtataaaaaacag

SEQ ID NO: 3545369 - DNA, 25 bp, Homo sapien
gaggactgcagatagctacgtagcg

SEQ ID NO: 3545370 - DNA, 25 bp, Homo sapien
taactgggtaacgtagaggactgca

SEQ ID NO: 3545371 - DNA, 25 bp, Homo sapien
gacaagagcgcaacacagccttttg

SEQ ID NO: 3545372 - DNA, 25 bp, Homo sapien
gataaagctaatcacatagggccca

SEQ ID NO: 3545373 - DNA, 25 bp, Homo sapien
caggagaaatagtataaagagggcc

SEQ ID NO: 3545374 - DNA, 25 bp, Homo sapien
aggagaaatagtataaagagggcca

SEQ ID NO: 3545375 - DNA, 25 bp, Homo sapien
tcaggagaaatagtataaagagggc

SEQ ID NO: 3545376 - DNA, 25 bp, Homo sapien
tatcaggagaaatagtataaagagg

SEQ ID NO: 3545377 - DNA, 25 bp, Homo sapien
gaagatagttaacccatgaggtgga

SEQ ID NO: 3545378 - DNA, 25 bp, Homo sapien
ccaactgtgcgtggatcagggatga

SEQ ID NO: 3545379 - DNA, 25 bp, Homo sapien
tcagggacccatagaagatagttaa

SEQ ID NO: 3545380 - DNA, 25 bp, Homo sapien
tgttttatccagttgcaaataggtg

SEQ ID NO: 3545381 - DNA, 25 bp, Homo sapien
tgctgcccactggttcttcaggatg

SEQ ID NO: 3545382 - DNA, 25 bp, Homo sapien
gctgcccactggttcttcaggatgg

SEQ ID NO: 3545383 - DNA, 25 bp, Homo sapien
cctgctgcccactggttcttcagga

SEQ ID NO: 3545384 - DNA, 25 bp, Homo sapien
ctgctgcccactggttcttcaggat

SEQ ID NO: 3545385 - DNA, 25 bp, Homo sapien
caagaagagtgaatccagctaaggc

SEQ ID NO: 3545386 - DNA, 25 bp, Homo sapien
gccaagaagagtgaatccagctaag

SEQ ID NO: 3545387 - DNA, 25 bp, Homo sapien
gaagagtgaatccagctaaggcaaa

SEQ ID NO: 3545388 - DNA, 25 bp, Homo sapien
gatgataaggatagagccaagaaga

SEQ ID NO: 3545389 - DNA, 25 bp, Homo sapien
tatcgtgtatgacattactcccagc

SEQ ID NO: 3545390 - DNA, 25 bp, Homo sapien
cagccagttgcacgctttctaagaa

SEQ ID NO: 3545391 - DNA, 25 bp, Homo sapien
tgaatgagggattccagattgctac

SEQ ID NO: 3545392 - DNA, 25 bp, Homo sapien
gaacaaaaccacttatcacacagac

SEQ ID NO: 3545393 - DNA, 25 bp, Homo sapien
caatgtcttaggtgttacggaagag

SEQ ID NO: 3545394 - DNA, 25 bp, Homo sapien
gccaatgtcttaggtgttacggaag

SEQ ID NO: 3545395 - DNA, 25 bp, Homo sapien
attcgccaatgtcttaggtgttacg

SEQ ID NO: 3545396 - DNA, 25 bp, Homo sapien
tcgccaatgtcttaggtgttacgga

SEQ ID NO: 3545397 - DNA, 25 bp, Homo sapien
agtcacctcagtgaaattgctgcca

SEQ ID NO: 3545398 - DNA, 25 bp, Homo sapien
gagaggatgaagacagtcacctcag

SEQ ID NO: 3545399 - DNA, 25 bp, Homo sapien
tgatttgcatatccagagaggatga

SEQ ID NO: 3545400 - DNA, 25 bp, Homo sapien
taattcagggtgatttgcatatcca

SEQ ID NO: 3545401 - DNA, 25 bp, Homo sapien
aattctgctggcagacaaaaggctt

SEQ ID NO: 3545402 - DNA, 25 bp, Homo sapien
ttgcttttcatgtacgtgcagccca

SEQ ID NO: 3545403 - DNA, 25 bp, Homo sapien
gggactttgcttttcatgtacgtgc

SEQ ID NO: 3545404 - DNA, 25 bp, Homo sapien
gactttgcttttcatgtacgtgcag

SEQ ID NO: 3545405 - DNA, 25 bp, Homo sapien
catagtgttctatgggactttgctt

SEQ ID NO: 3545406 - DNA, 25 bp, Homo sapien
tccatattttacaccctggttatcc

SEQ ID NO: 3545407 - DNA, 25 bp, Homo sapien
caccctggttatccccatgttgaat

SEQ ID NO: 3545408 - DNA, 25 bp, Homo sapien
agtggcttccatattttacaccctg

SEQ ID NO: 3545409 - DNA, 25 bp, Homo sapien
attttacaccctggttatccccatg

SEQ ID NO: 3545410 - DNA, 25 bp, Homo sapien
ctgccacaatatcataggctgatcg

SEQ ID NO: 3545411 - DNA, 25 bp, Homo sapien
gccacaatatcataggctgatcgat

SEQ ID NO: 3545412 - DNA, 25 bp, Homo sapien
cacaatatcataggctgatcgatta

SEQ ID NO: 3545413 - DNA, 25 bp, Homo sapien
tgccacaatatcataggctgatcga

SEQ ID NO: 3545414 - DNA, 25 bp, Homo sapien
ccacagcaggactgatacagccact

SEQ ID NO: 3545415 - DNA, 25 bp, Homo sapien
tgtgccttgggcacttcggcagccc

SEQ ID NO: 3545416 - DNA, 25 bp, Homo sapien
acttgccgggagcactcggtctctc

SEQ ID NO: 3545417 - DNA, 25 bp, Homo sapien
aggccagttactggagcctgggtgc

SEQ ID NO: 3545418 - DNA, 25 bp, Homo sapien
gtcaggcacagccatgaggcccggg

SEQ ID NO: 3545419 - DNA, 25 bp, Homo sapien
cggggcggctctgatttgtcaggca

SEQ ID NO: 3545420 - DNA, 25 bp, Homo sapien
ggcacagccatgaggcccgggctgt

SEQ ID NO: 3545421 - DNA, 25 bp, Homo sapien
ggggcggctctgatttgtcaggcac

SEQ ID NO: 3545422 - DNA, 25 bp, Homo sapien
gggcttcctcgggcccctctgccat

SEQ ID NO: 3545423 - DNA, 25 bp, Homo sapien
ccttgggcttcctcgggcccctctg

SEQ ID NO: 3545424 - DNA, 25 bp, Homo sapien
cctcgtcgtgcccaggagggcggcc

SEQ ID NO: 3545425 - DNA, 25 bp, Homo sapien
tcgtcgtgcccaggagggcggcctt

SEQ ID NO: 3545426 - DNA, 25 bp, Homo sapien
tcaccatgggactcatacaagcagt

SEQ ID NO: 3545427 - DNA, 25 bp, Homo sapien
tgttctgatacacaagtcaaggaat

SEQ ID NO: 3545428 - DNA, 25 bp, Homo sapien
gactctaatgtggtcaaccagttct

SEQ ID NO: 3545429 - DNA, 25 bp, Homo sapien
tattcatcgtctttgctatctaagg

SEQ ID NO: 3545430 - DNA, 25 bp, Homo sapien
cacaacctttatccaaggctttctt

SEQ ID NO: 3545431 - DNA, 25 bp, Homo sapien
ttcacaacctttatccaaggctttc

SEQ ID NO: 3545432 - DNA, 25 bp, Homo sapien
tttatccaaggctttctttgaggca

SEQ ID NO: 3545433 - DNA, 25 bp, Homo sapien
tccaaggctttctttgaggcatctt

SEQ ID NO: 3545434 - DNA, 25 bp, Homo sapien
gacagtcaccatatgggagccacag

SEQ ID NO: 3545435 - DNA, 25 bp, Homo sapien
aagctctggccggttggtaattcct

SEQ ID NO: 3545436 - DNA, 25 bp, Homo sapien
tgttgcccctgagtagagcggatcc

SEQ ID NO: 3545437 - DNA, 25 bp, Homo sapien
tttgggccacagtaagtcagacgga

SEQ ID NO: 3545438 - DNA, 25 bp, Homo sapien
cacatatgtcttggtgattgctttg

SEQ ID NO: 3545439 - DNA, 25 bp, Homo sapien
ctcacatatgtcttggtgattgctt

SEQ ID NO: 3545440 - DNA, 25 bp, Homo sapien
cctcacatatgtcttggtgattgct

SEQ ID NO: 3545441 - DNA, 25 bp, Homo sapien
tcacatatgtcttggtgattgcttt

SEQ ID NO: 3545442 - DNA, 25 bp, Homo sapien
taacgttggaggagaagcacacgtc

SEQ ID NO: 3545443 - DNA, 25 bp, Homo sapien
tagaaacagccgtcaagtgggaccc

SEQ ID NO: 3545444 - DNA, 25 bp, Homo sapien
cagagtgatcatgtaaaccgctagg

SEQ ID NO: 3545445 - DNA, 25 bp, Homo sapien
gcagccggccatgtacctgtcaaag

SEQ ID NO: 3545446 - DNA, 25 bp, Homo sapien
tgccttagtataggccaagtctgtg

SEQ ID NO: 3545447 - DNA, 25 bp, Homo sapien
ttagtataggccaagtctgtgttgc

SEQ ID NO: 3545448 - DNA, 25 bp, Homo sapien
cttagtataggccaagtctgtgttg

SEQ ID NO: 3545449 - DNA, 25 bp, Homo sapien
ccttagtataggccaagtctgtgtt

SEQ ID NO: 3545450 - DNA, 25 bp, Homo sapien
cttttatttacatattgacaattat

SEQ ID NO: 3545451 - DNA, 25 bp, Homo sapien
ttctttctggttggacaattgttct

SEQ ID NO: 3545452 - DNA, 25 bp, Homo sapien
ttatttacatattgacaattatgca

SEQ ID NO: 3545453 - DNA, 25 bp, Homo sapien
atattgacaattatgcatttcagca

SEQ ID NO: 3545454 - DNA, 25 bp, Homo sapien
ggactgaccttgattaacaccatca

SEQ ID NO: 3545455 - DNA, 25 bp, Homo sapien
gaccttgattaacaccatcatgccg

SEQ ID NO: 3545456 - DNA, 25 bp, Homo sapien
ttgttaagctgaggactgaccttga

SEQ ID NO: 3545457 - DNA, 25 bp, Homo sapien
gggttgttaagctgaggactgacct

SEQ ID NO: 3545458 - DNA, 25 bp, Homo sapien
ttgcttttttcaacgcctctttcac

SEQ ID NO: 3545459 - DNA, 25 bp, Homo sapien
tcctattgcttttttcaacgcctct

SEQ ID NO: 3545460 - DNA, 25 bp, Homo sapien
ctattgcttttttcaacgcctcttt

SEQ ID NO: 3545461 - DNA, 25 bp, Homo sapien
ttcctattgcttttttcaacgcctc

SEQ ID NO: 3545462 - DNA, 25 bp, Homo sapien
gaagattgtgacaactgtcaggtgg

SEQ ID NO: 3545463 - DNA, 25 bp, Homo sapien
gaggccatagatcatggagttcagc

SEQ ID NO: 3545464 - DNA, 25 bp, Homo sapien
gtctgtgggacgtctcaaatgcatg

SEQ ID NO: 3545465 - DNA, 25 bp, Homo sapien
cagaagagggttccatagaagattg

SEQ ID NO: 3545466 - DNA, 25 bp, Homo sapien
tctgaggatagcgacaaggatgaac

SEQ ID NO: 3545467 - DNA, 25 bp, Homo sapien
tgtacgtgtcagagcatgccagttt

SEQ ID NO: 3545468 - DNA, 25 bp, Homo sapien
cataagggacaatgaccaggtggac

SEQ ID NO: 3545469 - DNA, 25 bp, Homo sapien
gactggacgttgctgtagccggcta

SEQ ID NO: 3545470 - DNA, 25 bp, Homo sapien
gcatcaaacaacctgcataggaaat

SEQ ID NO: 3545471 - DNA, 25 bp, Homo sapien
tctctgataagaaattttctagcat

SEQ ID NO: 3545472 - DNA, 25 bp, Homo sapien
ctgcatcaaacaacctgcataggaa

SEQ ID NO: 3545473 - DNA, 25 bp, Homo sapien
tcaaacaacctgcataggaaatggt

SEQ ID NO: 3545474 - DNA, 25 bp, Homo sapien
gggagtgaaatttgtggagaaacac

SEQ ID NO: 3545475 - DNA, 25 bp, Homo sapien
ttgggagtgaaatttgtggagaaac

SEQ ID NO: 3545476 - DNA, 25 bp, Homo sapien
gagtgaaatttgtggagaaacacag

SEQ ID NO: 3545477 - DNA, 25 bp, Homo sapien
tgggagtgaaatttgtggagaaaca

SEQ ID NO: 3545478 - DNA, 25 bp, Homo sapien
ctagaatggacaaactggagagaaa

SEQ ID NO: 3545479 - DNA, 25 bp, Homo sapien
agtgtgaagtcgagaatcaactttg

SEQ ID NO: 3545480 - DNA, 25 bp, Homo sapien
gagtgtgaagtcgagaatcaacttt

SEQ ID NO: 3545481 - DNA, 25 bp, Homo sapien
tgccaagaaagcaactcgcagctct

SEQ ID NO: 3545482 - DNA, 25 bp, Homo sapien
tctggacggcttgttagacccaaga

SEQ ID NO: 3545483 - DNA, 25 bp, Homo sapien
agctctggacggcttgttagaccca

SEQ ID NO: 3545484 - DNA, 25 bp, Homo sapien
cacagtggctatgtagacaaaaagg

SEQ ID NO: 3545485 - DNA, 25 bp, Homo sapien
gtgggccatttatgataaagaactt

SEQ ID NO: 3545486 - DNA, 25 bp, Homo sapien
tgggctttcagtgggccatttatga

SEQ ID NO: 3545487 - DNA, 25 bp, Homo sapien
ccatttatgataaagaacttgaaca

SEQ ID NO: 3545488 - DNA, 25 bp, Homo sapien
ctttcagtgggccatttatgataaa

SEQ ID NO: 3545489 - DNA, 25 bp, Homo sapien
tcttcattgacagctctttgattaa

SEQ ID NO: 3545490 - DNA, 25 bp, Homo sapien
tcattgacagctctttgattaatgc

SEQ ID NO: 3545491 - DNA, 25 bp, Homo sapien
ttgacagctctttgattaatgcttc

SEQ ID NO: 3545492 - DNA, 25 bp, Homo sapien
cattgacagctctttgattaatgct

SEQ ID NO: 3545493 - DNA, 25 bp, Homo sapien
tataaattataaggttcagcatagg

SEQ ID NO: 3545494 - DNA, 25 bp, Homo sapien
taaattataaggttcagcataggga

SEQ ID NO: 3545495 - DNA, 25 bp, Homo sapien
tcagcatagggattactgtggtata

SEQ ID NO: 3545496 - DNA, 25 bp, Homo sapien
gcatagggattactgtggtataaaa

SEQ ID NO: 3545497 - DNA, 25 bp, Homo sapien
ataaggcaccgtgatgaggaaggag

SEQ ID NO: 3545498 - DNA, 25 bp, Homo sapien
tgccctctgtagagcgaatctttaa

SEQ ID NO: 3545499 - DNA, 25 bp, Homo sapien
ggttgcatagaatatagtgacagct

SEQ ID NO: 3545500 - DNA, 25 bp, Homo sapien
gcttaatcagtggtgggtccgcaca

SEQ ID NO: 3545501 - DNA, 25 bp, Homo sapien
gcgttggcctggatgaggacaatca

SEQ ID NO: 3545502 - DNA, 25 bp, Homo sapien
atcatgccaaggttccctgccaccg

SEQ ID NO: 3545503 - DNA, 25 bp, Homo sapien
tgggcatgtggagccaggcgttggc

SEQ ID NO: 3545504 - DNA, 25 bp, Homo sapien
gaagcacagatccacgaaggataag

SEQ ID NO: 3545505 - DNA, 25 bp, Homo sapien
gtaattcccggcgactggtcagtcc

SEQ ID NO: 3545506 - DNA, 25 bp, Homo sapien
tttgtaattcccggcgactggtcag

SEQ ID NO: 3545507 - DNA, 25 bp, Homo sapien
tcccggcgactggtcagtcccagga

SEQ ID NO: 3545508 - DNA, 25 bp, Homo sapien
gtgaagaggagaatttgtaattccc

SEQ ID NO: 3545509 - DNA, 25 bp, Homo sapien
tgaacagttctttggataaagcctt

SEQ ID NO: 3545510 - DNA, 25 bp, Homo sapien
gggatcacagtggtataaagtacag

SEQ ID NO: 3545511 - DNA, 25 bp, Homo sapien
gatcacagtggtataaagtacagct

SEQ ID NO: 3545512 - DNA, 25 bp, Homo sapien
tggggatcacagtggtataaagtac

SEQ ID NO: 3545513 - DNA, 25 bp, Homo sapien
tcacagtggtataaagtacagctac

SEQ ID NO: 3545514 - DNA, 25 bp, Homo sapien
ataaggcaccgtgatgaggaaggaa

SEQ ID NO: 3545515 - DNA, 25 bp, Homo sapien
ccatggactcttctgatggaggtct

SEQ ID NO: 3545516 - DNA, 25 bp, Homo sapien
tgccctctgtagagcgaatccttaa

SEQ ID NO: 3545517 - DNA, 25 bp, Homo sapien
agccagcttaatcagtggtgggtct

SEQ ID NO: 3545518 - DNA, 25 bp, Homo sapien
ccataaagcagagggtttcagatgg

SEQ ID NO: 3545519 - DNA, 25 bp, Homo sapien
ctgccataaagcagagggtttcaga

SEQ ID NO: 3545520 - DNA, 25 bp, Homo sapien
gcagagggtttcagatggccatgta

SEQ ID NO: 3545521 - DNA, 25 bp, Homo sapien
agcagagggtttcagatggccatgt

SEQ ID NO: 3545522 - DNA, 25 bp, Homo sapien
catcacagccaggatgtagatctca

SEQ ID NO: 3545523 - DNA, 25 bp, Homo sapien
gccatcacagccaggatgtagatct

SEQ ID NO: 3545524 - DNA, 25 bp, Homo sapien
tcacagccaggatgtagatctcaac

SEQ ID NO: 3545525 - DNA, 25 bp, Homo sapien
cacagccaggatgtagatctcaacg

SEQ ID NO: 3545526 - DNA, 25 bp, Homo sapien
tttcttctctgaaaggaaaatctcc

SEQ ID NO: 3545527 - DNA, 25 bp, Homo sapien
aaggaaaatctccagcatctttggg

SEQ ID NO: 3545528 - DNA, 25 bp, Homo sapien
caagacaggcaggataggaaatgct

SEQ ID NO: 3545529 - DNA, 25 bp, Homo sapien
gaacaagacaggcaggataggaaat

SEQ ID NO: 3545530 - DNA, 25 bp, Homo sapien
aattcctggtgattcgtcagtccca

SEQ ID NO: 3545531 - DNA, 25 bp, Homo sapien
tgaactcagtcaccaacgtgaagtt

SEQ ID NO: 3545532 - DNA, 25 bp, Homo sapien
gaatctgtaattcctggtgattcgt

SEQ ID NO: 3545533 - DNA, 25 bp, Homo sapien
catgctaagattccctgccactgtg

SEQ ID NO: 3545534 - DNA, 25 bp, Homo sapien
gctgttttccctgtactctgtgttg

SEQ ID NO: 3545535 - DNA, 25 bp, Homo sapien
tccctgtactctgtgttgtggtttc

SEQ ID NO: 3545536 - DNA, 25 bp, Homo sapien
agcccatggaggttaacctgtagat

SEQ ID NO: 3545537 - DNA, 25 bp, Homo sapien
cttgtgatttgtgaaggtgcagctc

SEQ ID NO: 3545538 - DNA, 25 bp, Homo sapien
tgaacagttctttgcataatgcctc

SEQ ID NO: 3545539 - DNA, 25 bp, Homo sapien
gggattacagtggtataaaatacag

SEQ ID NO: 3545540 - DNA, 25 bp, Homo sapien
catggggattacagtggtataaaat

SEQ ID NO: 3545541 - DNA, 25 bp, Homo sapien
gattacagtggtataaaatacagct

SEQ ID NO: 3545542 - DNA, 25 bp, Homo sapien
ttacagtggtataaaatacagctac

SEQ ID NO: 3545543 - DNA, 25 bp, Homo sapien
tgtagagctcaacgtggaccaaggt

SEQ ID NO: 3545544 - DNA, 25 bp, Homo sapien
ctgtagagcagatccttagggtggc

SEQ ID NO: 3545545 - DNA, 25 bp, Homo sapien
taagtgaagttgaaaccagccacaa

SEQ ID NO: 3545546 - DNA, 25 bp, Homo sapien
gaaggctaggttgtaggtccacata

SEQ ID NO: 3545547 - DNA, 25 bp, Homo sapien
tggagtcacattggaagagaagcac

SEQ ID NO: 3545548 - DNA, 25 bp, Homo sapien
agaagcacagatccacaaaggataa

SEQ ID NO: 3545549 - DNA, 25 bp, Homo sapien
ccacaaaggataagttgctcaggaa

SEQ ID NO: 3545550 - DNA, 25 bp, Homo sapien
aggataagttgctcaggaaaaagta

SEQ ID NO: 3545551 - DNA, 25 bp, Homo sapien
gggcgtgtggagccggggcgttggc

SEQ ID NO: 3545552 - DNA, 25 bp, Homo sapien
agcaatgactttggactgttccact

SEQ ID NO: 3545553 - DNA, 25 bp, Homo sapien
tcaaaagcacgtttcttctgatcag

SEQ ID NO: 3545554 - DNA, 25 bp, Homo sapien
aacagcaatgactttggactgttcc

SEQ ID NO: 3545555 - DNA, 25 bp, Homo sapien
ttcaaaagcacgtttcttctgatca

SEQ ID NO: 3545556 - DNA, 25 bp, Homo sapien
ggaggtctaacgtacatgcagaaca

SEQ ID NO: 3545557 - DNA, 25 bp, Homo sapien
ctgtccgtgggaggtctaacgtaca

SEQ ID NO: 3545558 - DNA, 25 bp, Homo sapien
ggtggagaacgctttgtgcctactt

SEQ ID NO: 3545559 - DNA, 25 bp, Homo sapien
tctaacgtacatgcagaacagggtt

SEQ ID NO: 3545560 - DNA, 25 bp, Homo sapien
gaagatgtaggagatgagggttatg

SEQ ID NO: 3545561 - DNA, 25 bp, Homo sapien
atgtaggagatgagggttatgatga

SEQ ID NO: 3545562 - DNA, 25 bp, Homo sapien
tcaggatggcaatgagaatgaagat

SEQ ID NO: 3545563 - DNA, 25 bp, Homo sapien
aagatgtaggagatgagggttatga

SEQ ID NO: 3545564 - DNA, 25 bp, Homo sapien
cagagccctttggacatcttgctgc

SEQ ID NO: 3545565 - DNA, 25 bp, Homo sapien
tagacatatggaccagcaatcaggc

SEQ ID NO: 3545566 - DNA, 25 bp, Homo sapien
acagaaggtcaagtggtatgtccac

SEQ ID NO: 3545567 - DNA, 25 bp, Homo sapien
gcaatcaggcgaatacagagccctt

SEQ ID NO: 3545568 - DNA, 25 bp, Homo sapien
tcatctcaggacattcttcaaggcc

SEQ ID NO: 3545569 - DNA, 25 bp, Homo sapien
catctcaggacattcttcaaggcct

SEQ ID NO: 3545570 - DNA, 25 bp, Homo sapien
tcaggacattcttcaaggcctgctt

SEQ ID NO: 3545571 - DNA, 25 bp, Homo sapien
tctcaggacattcttcaaggcctgc

SEQ ID NO: 3545572 - DNA, 25 bp, Homo sapien
tgaaggcataggacaccaagacgat

SEQ ID NO: 3545573 - DNA, 25 bp, Homo sapien
taagtaccggactcacaaaggtgta

SEQ ID NO: 3545574 - DNA, 25 bp, Homo sapien
tctacagaaggtcaggcggaaggtc

SEQ ID NO: 3545575 - DNA, 25 bp, Homo sapien
caagaaagcttaatgagcggcgggt

SEQ ID NO: 3545576 - DNA, 25 bp, Homo sapien
ttttcacactgtagcgcagagggtc

SEQ ID NO: 3545577 - DNA, 25 bp, Homo sapien
tgccagcatgtaaaactcagtgagt

SEQ ID NO: 3545578 - DNA, 25 bp, Homo sapien
tacgatattagtcgacatctgcggg

SEQ ID NO: 3545579 - DNA, 25 bp, Homo sapien
tgtggccaagcagatgcaaactctc

SEQ ID NO: 3545580 - DNA, 25 bp, Homo sapien
gagactggagttccgggcaatctgt

SEQ ID NO: 3545581 - DNA, 25 bp, Homo sapien
ctagcagggtgacgaggtaaacaac

SEQ ID NO: 3545582 - DNA, 25 bp, Homo sapien
gttccgggcaatctgtgagcccaag

SEQ ID NO: 3545583 - DNA, 25 bp, Homo sapien
gacgaggtaaacaaccagaaacagc

SEQ ID NO: 3545584 - DNA, 25 bp, Homo sapien
attgcactgccatttgtgttggaca

SEQ ID NO: 3545585 - DNA, 25 bp, Homo sapien
ctgtgattgcactgccatttgtgtt

SEQ ID NO: 3545586 - DNA, 25 bp, Homo sapien
tgtgattgcactgccatttgtgttg

SEQ ID NO: 3545587 - DNA, 25 bp, Homo sapien
tgattgcactgccatttgtgttgga

SEQ ID NO: 3545588 - DNA, 25 bp, Homo sapien
ttccgctcgcgcagggtgtgcgcac

SEQ ID NO: 3545589 - DNA, 25 bp, Homo sapien
tgcttccgctcgcgcagggtgtgcg

SEQ ID NO: 3545590 - DNA, 25 bp, Homo sapien
gtgggatataatctggcacgccgtt

SEQ ID NO: 3545591 - DNA, 25 bp, Homo sapien
tgtgggatataatctggcacgccgt

SEQ ID NO: 3545592 - DNA, 25 bp, Homo sapien
caaagggtggaaagaggttagctgg

SEQ ID NO: 3545593 - DNA, 25 bp, Homo sapien
gggagagagagacaattcaaagggt

SEQ ID NO: 3545594 - DNA, 25 bp, Homo sapien
agagagagacaattcaaagggtgga

SEQ ID NO: 3545595 - DNA, 25 bp, Homo sapien
gagagagagacaattcaaagggtgg

SEQ ID NO: 3545596 - DNA, 25 bp, Homo sapien
gggtgttcaaggttcgtctggactc

SEQ ID NO: 3545597 - DNA, 25 bp, Homo sapien
gaattttcaatccaagccctgctcg

SEQ ID NO: 3545598 - DNA, 25 bp, Homo sapien
tgctcgaaagccaactgtactgcgc

SEQ ID NO: 3545599 - DNA, 25 bp, Homo sapien
actcagtggatcctggtccctgctc

SEQ ID NO: 3545600 - DNA, 25 bp, Homo sapien
ttcccctaatcatttgttgtatggc

SEQ ID NO: 3545601 - DNA, 25 bp, Homo sapien
tcccctaatcatttgttgtatggca

SEQ ID NO: 3545602 - DNA, 25 bp, Homo sapien
tcagcattgggctcaaaaaagtata

SEQ ID NO: 3545603 - DNA, 25 bp, Homo sapien
ttcagcattgggctcaaaaaagtat

SEQ ID NO: 3545604 - DNA, 25 bp, Homo sapien
tgttccgtaggctatagatcaatgg
